United States Patent Application Publication US 2015/0232836 A1 - sequence listing, part 14

SEQ ID NO: 447159 - DNA, 15 bp, Homo sapiens
accatgcagctgcaa

SEQ ID NO: 447160 - DNA, 15 bp, Homo sapiens
caccatgcagctgca

SEQ ID NO: 447161 - DNA, 15 bp, Homo sapiens
acaccatgcagctgc

SEQ ID NO: 447162 - DNA, 15 bp, Homo sapiens
cacaccatgcagctg

SEQ ID NO: 447163 - DNA, 15 bp, Homo sapiens
gcacaccatgcagct

SEQ ID NO: 447164 - DNA, 15 bp, Homo sapiens
ggcacaccatgcagc

SEQ ID NO: 447165 - DNA, 15 bp, Homo sapiens
tggcacaccatgcag

SEQ ID NO: 447166 - DNA, 15 bp, Homo sapiens
atggcacaccatgca

SEQ ID NO: 447167 - DNA, 15 bp, Homo sapiens
gatggcacaccatgc

SEQ ID NO: 447168 - DNA, 15 bp, Homo sapiens
tgatggcacaccatg

SEQ ID NO: 447169 - DNA, 15 bp, Homo sapiens
gtgatggcacaccat

SEQ ID NO: 447170 - DNA, 15 bp, Homo sapiens
tgtgatggcacacca

SEQ ID NO: 447171 - DNA, 15 bp, Homo sapiens
ctgtgatggcacacc

SEQ ID NO: 447172 - DNA, 15 bp, Homo sapiens
gctgtgatggcacac

SEQ ID NO: 447173 - DNA, 15 bp, Homo sapiens
agctgtgatggcaca

SEQ ID NO: 447174 - DNA, 15 bp, Homo sapiens
cagctgtgatggcac

SEQ ID NO: 447175 - DNA, 15 bp, Homo sapiens
acagctgtgatggca

SEQ ID NO: 447176 - DNA, 15 bp, Homo sapiens
aacagctgtgatggc

SEQ ID NO: 447177 - DNA, 15 bp, Homo sapiens
gaacagctgtgatgg

SEQ ID NO: 447178 - DNA, 15 bp, Homo sapiens
tgaacagctgtgatg

SEQ ID NO: 447179 - DNA, 15 bp, Homo sapiens
ctgaacagctgtgat

SEQ ID NO: 447180 - DNA, 15 bp, Homo sapiens
cctgaacagctgtga

SEQ ID NO: 447181 - DNA, 15 bp, Homo sapiens
acctgaacagctgtg

SEQ ID NO: 447182 - DNA, 15 bp, Homo sapiens
cacctgaacagctgt

SEQ ID NO: 447183 - DNA, 15 bp, Homo sapiens
ccacctgaacagctg

SEQ ID NO: 447184 - DNA, 15 bp, Homo sapiens
tccacctgaacagct

SEQ ID NO: 447185 - DNA, 15 bp, Homo sapiens
ttccacctgaacagc

SEQ ID NO: 447186 - DNA, 15 bp, Homo sapiens
cttccacctgaacag

SEQ ID NO: 447187 - DNA, 15 bp, Homo sapiens
gcttccacctgaaca

SEQ ID NO: 447188 - DNA, 15 bp, Homo sapiens
agcttccacctgaac

SEQ ID NO: 447189 - DNA, 15 bp, Homo sapiens
aagcttccacctgaa

SEQ ID NO: 447190 - DNA, 15 bp, Homo sapiens
aaagcttccacctga

SEQ ID NO: 447191 - DNA, 15 bp, Homo sapiens
aaaagcttccacctg

SEQ ID NO: 447192 - DNA, 15 bp, Homo sapiens
gaaaagcttccacct

SEQ ID NO: 447193 - DNA, 15 bp, Homo sapiens
tgaaaagcttccacc

SEQ ID NO: 447194 - DNA, 15 bp, Homo sapiens
ctgaaaagcttccac

SEQ ID NO: 447195 - DNA, 15 bp, Homo sapiens
cctgaaaagcttcca

SEQ ID NO: 447196 - DNA, 15 bp, Homo sapiens
tcctgaaaagcttcc

SEQ ID NO: 447197 - DNA, 15 bp, Homo sapiens
ttcctgaaaagcttc

SEQ ID NO: 447198 - DNA, 15 bp, Homo sapiens
attcctgaaaagctt

SEQ ID NO: 447199 - DNA, 15 bp, Homo sapiens
gattcctgaaaagct

SEQ ID NO: 447200 - DNA, 15 bp, Homo sapiens
tgattcctgaaaagc

SEQ ID NO: 447201 - DNA, 15 bp, Homo sapiens
ctgattcctgaaaag

SEQ ID NO: 447202 - DNA, 15 bp, Homo sapiens
actgattcctgaaaa

SEQ ID NO: 447203 - DNA, 15 bp, Homo sapiens
cactgattcctgaaa

SEQ ID NO: 447204 - DNA, 15 bp, Homo sapiens
ccactgattcctgaa

SEQ ID NO: 447205 - DNA, 15 bp, Homo sapiens
accactgattcctga

SEQ ID NO: 447206 - DNA, 15 bp, Homo sapiens
aaccactgattcctg

SEQ ID NO: 447207 - DNA, 15 bp, Homo sapiens
aaaccactgattcct

SEQ ID NO: 447208 - DNA, 15 bp, Homo sapiens
gaaaccactgattcc

SEQ ID NO: 447209 - DNA, 15 bp, Homo sapiens
ggaaaccactgattc

SEQ ID NO: 447210 - DNA, 15 bp, Homo sapiens
gggaaaccactgatt

SEQ ID NO: 447211 - DNA, 15 bp, Homo sapiens
agggaaaccactgat

SEQ ID NO: 447212 - DNA, 15 bp, Homo sapiens
cagggaaaccactga

SEQ ID NO: 447213 - DNA, 15 bp, Homo sapiens
ccagggaaaccactg

SEQ ID NO: 447214 - DNA, 15 bp, Homo sapiens
gccagggaaaccact

SEQ ID NO: 447215 - DNA, 15 bp, Homo sapiens
agccagggaaaccac

SEQ ID NO: 447216 - DNA, 15 bp, Homo sapiens
gagccagggaaacca

SEQ ID NO: 447217 - DNA, 15 bp, Homo sapiens
agagccagggaaacc

SEQ ID NO: 447218 - DNA, 15 bp, Homo sapiens
tagagccagggaaac

SEQ ID NO: 447219 - DNA, 15 bp, Homo sapiens
gtagagccagggaaa

SEQ ID NO: 447220 - DNA, 15 bp, Homo sapiens
ggtagagccagggaa

SEQ ID NO: 447221 - DNA, 15 bp, Homo sapiens
aggtagagccaggga

SEQ ID NO: 447222 - DNA, 15 bp, Homo sapiens
aaggtagagccaggg

SEQ ID NO: 447223 - DNA, 15 bp, Homo sapiens
caaggtagagccagg

SEQ ID NO: 447224 - DNA, 15 bp, Homo sapiens
ccaaggtagagccag

SEQ ID NO: 447225 - DNA, 15 bp, Homo sapiens
tccaaggtagagcca

SEQ ID NO: 447226 - DNA, 15 bp, Homo sapiens
ttccaaggtagagcc

SEQ ID NO: 447227 - DNA, 15 bp, Homo sapiens
attccaaggtagagc

SEQ ID NO: 447228 - DNA, 15 bp, Homo sapiens
gattccaaggtagag

SEQ ID NO: 447229 - DNA, 15 bp, Homo sapiens
tgattccaaggtaga

SEQ ID NO: 447230 - DNA, 15 bp, Homo sapiens
atgattccaaggtag

SEQ ID NO: 447231 - DNA, 15 bp, Homo sapiens
gatgattccaaggta

SEQ ID NO: 447232 - DNA, 15 bp, Homo sapiens
cgatgattccaaggt

SEQ ID NO: 447233 - DNA, 15 bp, Homo sapiens
tcgatgattccaagg

SEQ ID NO: 447234 - DNA, 15 bp, Homo sapiens
ttcgatgattccaag

SEQ ID NO: 447235 - DNA, 15 bp, Homo sapiens
tttcgatgattccaa

SEQ ID NO: 447236 - DNA, 15 bp, Homo sapiens
ttttcgatgattcca

SEQ ID NO: 447237 - DNA, 15 bp, Homo sapiens
tttttcgatgattcc

SEQ ID NO: 447238 - DNA, 15 bp, Homo sapiens
gtttttcgatgattc

SEQ ID NO: 447239 - DNA, 15 bp, Homo sapiens
agtttttcgatgatt

SEQ ID NO: 447240 - DNA, 15 bp, Homo sapiens
aagtttttcgatgat

SEQ ID NO: 447241 - DNA, 15 bp, Homo sapiens
taagtttttcgatga

SEQ ID NO: 447242 - DNA, 15 bp, Homo sapiens
ttaagtttttcgatg

SEQ ID NO: 447243 - DNA, 15 bp, Homo sapiens
tttaagtttttcgat

SEQ ID NO: 447244 - DNA, 15 bp, Homo sapiens
ttttaagtttttcga

SEQ ID NO: 447245 - DNA, 15 bp, Homo sapiens
cttttaagtttttcg

SEQ ID NO: 447246 - DNA, 15 bp, Homo sapiens
acttttaagtttttc

SEQ ID NO: 447247 - DNA, 15 bp, Homo sapiens
aacttttaagttttt

SEQ ID NO: 447248 - DNA, 15 bp, Homo sapiens
taacttttaagtttt

SEQ ID NO: 447249 - DNA, 15 bp, Homo sapiens
gtaacttttaagttt

SEQ ID NO: 447250 - DNA, 15 bp, Homo sapiens
agtaacttttaagtt

SEQ ID NO: 447251 - DNA, 15 bp, Homo sapiens
cagtaacttttaagt

SEQ ID NO: 447252 - DNA, 15 bp, Homo sapiens
tcagtaacttttaag

SEQ ID NO: 447253 - DNA, 15 bp, Homo sapiens
ctcagtaacttttaa

SEQ ID NO: 447254 - DNA, 15 bp, Homo sapiens
cctcagtaactttta

SEQ ID NO: 447255 - DNA, 15 bp, Homo sapiens
gcctcagtaactttt

SEQ ID NO: 447256 - DNA, 15 bp, Homo sapiens
ggcctcagtaacttt

SEQ ID NO: 447257 - DNA, 15 bp, Homo sapiens
aggcctcagtaactt

SEQ ID NO: 447258 - DNA, 15 bp, Homo sapiens
caggcctcagtaact

SEQ ID NO: 447259 - DNA, 15 bp, Homo sapiens
acaggcctcagtaac

SEQ ID NO: 447260 - DNA, 15 bp, Homo sapiens
gacaggcctcagtaa

SEQ ID NO: 447261 - DNA, 15 bp, Homo sapiens
ggacaggcctcagta

SEQ ID NO: 447262 - DNA, 15 bp, Homo sapiens
gggacaggcctcagt

SEQ ID NO: 447263 - DNA, 15 bp, Homo sapiens
ggggacaggcctcag

SEQ ID NO: 447264 - DNA, 15 bp, Homo sapiens
tggggacaggcctca

SEQ ID NO: 447265 - DNA, 15 bp, Homo sapiens
gtggggacaggcctc

SEQ ID NO: 447266 - DNA, 15 bp, Homo sapiens
tgtggggacaggcct

SEQ ID NO: 447267 - DNA, 15 bp, Homo sapiens
ttgtggggacaggcc

SEQ ID NO: 447268 - DNA, 15 bp, Homo sapiens
gttgtggggacaggc

SEQ ID NO: 447269 - DNA, 15 bp, Homo sapiens
ggttgtggggacagg

SEQ ID NO: 447270 - DNA, 15 bp, Homo sapiens
cggttgtggggacag

SEQ ID NO: 447271 - DNA, 15 bp, Homo sapiens
ccggttgtggggaca

SEQ ID NO: 447272 - DNA, 15 bp, Homo sapiens
tccggttgtggggac

SEQ ID NO: 447273 - DNA, 15 bp, Homo sapiens
ttccggttgtgggga

SEQ ID NO: 447274 - DNA, 15 bp, Homo sapiens
gttccggttgtgggg

SEQ ID NO: 447275 - DNA, 15 bp, Homo sapiens
agttccggttgtggg

SEQ ID NO: 447276 - DNA, 15 bp, Homo sapiens
aagttccggttgtgg

SEQ ID NO: 447277 - DNA, 15 bp, Homo sapiens
aaagttccggttgtg

SEQ ID NO: 447278 - DNA, 15 bp, Homo sapiens
gaaagttccggttgt

SEQ ID NO: 447279 - DNA, 15 bp, Homo sapiens
agaaagttccggttg

SEQ ID NO: 447280 - DNA, 15 bp, Homo sapiens
aagaaagttccggtt

SEQ ID NO: 447281 - DNA, 15 bp, Homo sapiens
caagaaagttccggt

SEQ ID NO: 447282 - DNA, 15 bp, Homo sapiens
ccaagaaagttccgg

SEQ ID NO: 447283 - DNA, 15 bp, Homo sapiens
accaagaaagttccg

SEQ ID NO: 447284 - DNA, 15 bp, Homo sapiens
gaccaagaaagttcc

SEQ ID NO: 447285 - DNA, 15 bp, Homo sapiens
agaccaagaaagttc

SEQ ID NO: 447286 - DNA, 15 bp, Homo sapiens
cagaccaagaaagtt

SEQ ID NO: 447287 - DNA, 15 bp, Homo sapiens
ccagaccaagaaagt

SEQ ID NO: 447288 - DNA, 15 bp, Homo sapiens
cccagaccaagaaag

SEQ ID NO: 447289 - DNA, 15 bp, Homo sapiens
ccccagaccaagaaa

SEQ ID NO: 447290 - DNA, 15 bp, Homo sapiens
accccagaccaagaa

SEQ ID NO: 447291 - DNA, 15 bp, Homo sapiens
gaccccagaccaaga

SEQ ID NO: 447292 - DNA, 15 bp, Homo sapiens
ggaccccagaccaag

SEQ ID NO: 447293 - DNA, 15 bp, Homo sapiens
cggaccccagaccaa

SEQ ID NO: 447294 - DNA, 15 bp, Homo sapiens
gcggaccccagacca

SEQ ID NO: 447295 - DNA, 15 bp, Homo sapiens
tgcggaccccagacc

SEQ ID NO: 447296 - DNA, 15 bp, Homo sapiens
atgcggaccccagac

SEQ ID NO: 447297 - DNA, 15 bp, Homo sapiens
catgcggaccccaga

SEQ ID NO: 447298 - DNA, 15 bp, Homo sapiens
ccatgcggaccccag

SEQ ID NO: 447299 - DNA, 15 bp, Homo sapiens
cccatgcggacccca

SEQ ID NO: 447300 - DNA, 15 bp, Homo sapiens
gcccatgcggacccc

SEQ ID NO: 447301 - DNA, 15 bp, Homo sapiens
tgcccatgcggaccc

SEQ ID NO: 447302 - DNA, 15 bp, Homo sapiens
ttgcccatgcggacc

SEQ ID NO: 447303 - DNA, 15 bp, Homo sapiens
gttgcccatgcggac

SEQ ID NO: 447304 - DNA, 15 bp, Homo sapiens
agttgcccatgcgga

SEQ ID NO: 447305 - DNA, 15 bp, Homo sapiens
gagttgcccatgcgg

SEQ ID NO: 447306 - DNA, 15 bp, Homo sapiens
tgagttgcccatgcg

SEQ ID NO: 447307 - DNA, 15 bp, Homo sapiens
ctgagttgcccatgc

SEQ ID NO: 447308 - DNA, 15 bp, Homo sapiens
actgagttgcccatg

SEQ ID NO: 447309 - DNA, 15 bp, Homo sapiens
aactgagttgcccat

SEQ ID NO: 447310 - DNA, 15 bp, Homo sapiens
caactgagttgccca

SEQ ID NO: 447311 - DNA, 15 bp, Homo sapiens
acaactgagttgccc

SEQ ID NO: 447312 - DNA, 15 bp, Homo sapiens
gacaactgagttgcc

SEQ ID NO: 447313 - DNA, 15 bp, Homo sapiens
tgacaactgagttgc

SEQ ID NO: 447314 - DNA, 15 bp, Homo sapiens
ttgacaactgagttg

SEQ ID NO: 447315 - DNA, 15 bp, Homo sapiens
cttgacaactgagtt

SEQ ID NO: 447316 - DNA, 15 bp, Homo sapiens
gcttgacaactgagt

SEQ ID NO: 447317 - DNA, 15 bp, Homo sapiens
tgcttgacaactgag

SEQ ID NO: 447318 - DNA, 15 bp, Homo sapiens
gtgcttgacaactga

SEQ ID NO: 447319 - DNA, 15 bp, Homo sapiens
agtgcttgacaactg

SEQ ID NO: 447320 - DNA, 15 bp, Homo sapiens
gagtgcttgacaact

SEQ ID NO: 447321 - DNA, 15 bp, Homo sapiens
ggagtgcttgacaac

SEQ ID NO: 447322 - DNA, 15 bp, Homo sapiens
gggagtgcttgacaa

SEQ ID NO: 447323 - DNA, 15 bp, Homo sapiens
ggggagtgcttgaca

SEQ ID NO: 447324 - DNA, 15 bp, Homo sapiens
aggggagtgcttgac

SEQ ID NO: 447325 - DNA, 15 bp, Homo sapiens
caggggagtgcttga

SEQ ID NO: 447326 - DNA, 15 bp, Homo sapiens
ccaggggagtgcttg

SEQ ID NO: 447327 - DNA, 15 bp, Homo sapiens
accaggggagtgctt

SEQ ID NO: 447328 - DNA, 15 bp, Homo sapiens
caccaggggagtgct

SEQ ID NO: 447329 - DNA, 15 bp, Homo sapiens
tcaccaggggagtgc

SEQ ID NO: 447330 - DNA, 15 bp, Homo sapiens
atcaccaggggagtg

SEQ ID NO: 447331 - DNA, 15 bp, Homo sapiens
catcaccaggggagt

SEQ ID NO: 447332 - DNA, 15 bp, Homo sapiens
gcatcaccaggggag

SEQ ID NO: 447333 - DNA, 15 bp, Homo sapiens
cgcatcaccagggga

SEQ ID NO: 447334 - DNA, 15 bp, Homo sapiens
ccgcatcaccagggg

SEQ ID NO: 447335 - DNA, 15 bp, Homo sapiens
tccgcatcaccaggg

SEQ ID NO: 447336 - DNA, 15 bp, Homo sapiens
atccgcatcaccagg

SEQ ID NO: 447337 - DNA, 15 bp, Homo sapiens
catccgcatcaccag

SEQ ID NO: 447338 - DNA, 15 bp, Homo sapiens
acatccgcatcacca

SEQ ID NO: 447339 - DNA, 15 bp, Homo sapiens
tacatccgcatcacc

SEQ ID NO: 447340 - DNA, 15 bp, Homo sapiens
gtacatccgcatcac

SEQ ID NO: 447341 - DNA, 15 bp, Homo sapiens
tgtacatccgcatca

SEQ ID NO: 447342 - DNA, 15 bp, Homo sapiens
ttgtacatccgcatc

SEQ ID NO: 447343 - DNA, 15 bp, Homo sapiens
gttgtacatccgcat

SEQ ID NO: 447344 - DNA, 15 bp, Homo sapiens
ggttgtacatccgca

SEQ ID NO: 447345 - DNA, 15 bp, Homo sapiens
tggttgtacatccgc

SEQ ID NO: 447346 - DNA, 15 bp, Homo sapiens
ctggttgtacatccg

SEQ ID NO: 447347 - DNA, 15 bp, Homo sapiens
actggttgtacatcc

SEQ ID NO: 447348 - DNA, 15 bp, Homo sapiens
cactggttgtacatc

SEQ ID NO: 447349 - DNA, 15 bp, Homo sapiens
acactggttgtacat

SEQ ID NO: 447350 - DNA, 15 bp, Homo sapiens
tacactggttgtaca

SEQ ID NO: 447351 - DNA, 15 bp, Homo sapiens
atacactggttgtac

SEQ ID NO: 447352 - DNA, 15 bp, Homo sapiens
aatacactggttgta

SEQ ID NO: 447353 - DNA, 15 bp, Homo sapiens
caatacactggttgt

SEQ ID NO: 447354 - DNA, 15 bp, Homo sapiens
tcaatacactggttg

SEQ ID NO: 447355 - DNA, 15 bp, Homo sapiens
ttcaatacactggtt

SEQ ID NO: 447356 - DNA, 15 bp, Homo sapiens
attcaatacactggt

SEQ ID NO: 447357 - DNA, 15 bp, Homo sapiens
tattcaatacactgg

SEQ ID NO: 447358 - DNA, 15 bp, Homo sapiens
ctattcaatacactg

SEQ ID NO: 447359 - DNA, 15 bp, Homo sapiens
tctattcaatacact

SEQ ID NO: 447360 - DNA, 15 bp, Homo sapiens
ttctattcaatacac

SEQ ID NO: 447361 - DNA, 15 bp, Homo sapiens
attctattcaataca

SEQ ID NO: 447362 - DNA, 15 bp, Homo sapiens
cattctattcaatac

SEQ ID NO: 447363 - DNA, 15 bp, Homo sapiens
tcattctattcaata

SEQ ID NO: 447364 - DNA, 15 bp, Homo sapiens
ttcattctattcaat

SEQ ID NO: 447365 - DNA, 15 bp, Homo sapiens
attcattctattcaa

SEQ ID NO: 447366 - DNA, 15 bp, Homo sapiens
tattcattctattca

SEQ ID NO: 447367 - DNA, 15 bp, Homo sapiens
ttattcattctattc

SEQ ID NO: 447368 - DNA, 15 bp, Homo sapiens
attattcattctatt

SEQ ID NO: 447369 - DNA, 15 bp, Homo sapiens
aattattcattctat

SEQ ID NO: 447370 - DNA, 15 bp, Homo sapiens
caattattcattcta

SEQ ID NO: 447371 - DNA, 15 bp, Homo sapiens
gcaattattcattct

SEQ ID NO: 447372 - DNA, 15 bp, Homo sapiens
ggcaattattcattc

SEQ ID NO: 447373 - DNA, 15 bp, Homo sapiens
aggcaattattcatt

SEQ ID NO: 447374 - DNA, 15 bp, Homo sapiens
caggcaattattcat

SEQ ID NO: 447375 - DNA, 15 bp, Homo sapiens
tcaggcaattattca

SEQ ID NO: 447376 - DNA, 15 bp, Homo sapiens
ctcaggcaattattc

SEQ ID NO: 447377 - DNA, 15 bp, Homo sapiens
gctcaggcaattatt

SEQ ID NO: 447378 - DNA, 15 bp, Homo sapiens
ggctcaggcaattat

SEQ ID NO: 447379 - DNA, 15 bp, Homo sapiens
aggctcaggcaatta

SEQ ID NO: 447380 - DNA, 15 bp, Homo sapiens
caggctcaggcaatt

SEQ ID NO: 447381 - DNA, 15 bp, Homo sapiens
gcaggctcaggcaat

SEQ ID NO: 447382 - DNA, 15 bp, Homo sapiens
agcaggctcaggcaa

SEQ ID NO: 447383 - DNA, 15 bp, Homo sapiens
aagcaggctcaggca

SEQ ID NO: 447384 - DNA, 15 bp, Homo sapiens
aaagcaggctcaggc

SEQ ID NO: 447385 - DNA, 15 bp, Homo sapiens
taaagcaggctcagg

SEQ ID NO: 447386 - DNA, 15 bp, Homo sapiens
ttaaagcaggctcag

SEQ ID NO: 447387 - DNA, 15 bp, Homo sapiens
gttaaagcaggctca

SEQ ID NO: 447388 - DNA, 15 bp, Homo sapiens
ggttaaagcaggctc

SEQ ID NO: 447389 - DNA, 15 bp, Homo sapiens
tggttaaagcaggct

SEQ ID NO: 447390 - DNA, 15 bp, Homo sapiens
ctggttaaagcaggc

SEQ ID NO: 447391 - DNA, 15 bp, Homo sapiens
gctggttaaagcagg

SEQ ID NO: 447392 - DNA, 15 bp, Homo sapiens
tgctggttaaagcag

SEQ ID NO: 447393 - DNA, 15 bp, Homo sapiens
ttgctggttaaagca

SEQ ID NO: 447394 - DNA, 15 bp, Homo sapiens
cttgctggttaaagc

SEQ ID NO: 447395 - DNA, 15 bp, Homo sapiens
ccttgctggttaaag

SEQ ID NO: 447396 - DNA, 15 bp, Homo sapiens
cccttgctggttaaa

SEQ ID NO: 447397 - DNA, 15 bp, Homo sapiens
ccccttgctggttaa

SEQ ID NO: 447398 - DNA, 15 bp, Homo sapiens
tccccttgctggtta

SEQ ID NO: 447399 - DNA, 15 bp, Homo sapiens
atccccttgctggtt

SEQ ID NO: 447400 - DNA, 15 bp, Homo sapiens
aatccccttgctggt

SEQ ID NO: 447401 - DNA, 15 bp, Homo sapiens
caatccccttgctgg

SEQ ID NO: 447402 - DNA, 15 bp, Homo sapiens
ccaatccccttgctg

SEQ ID NO: 447403 - DNA, 15 bp, Homo sapiens
gccaatccccttgct

SEQ ID NO: 447404 - DNA, 15 bp, Homo sapiens
tgccaatccccttgc

SEQ ID NO: 447405 - DNA, 15 bp, Homo sapiens
ttgccaatccccttg

SEQ ID NO: 447406 - DNA, 15 bp, Homo sapiens
attgccaatcccctt

SEQ ID NO: 447407 - DNA, 15 bp, Homo sapiens
cattgccaatcccct

SEQ ID NO: 447408 - DNA, 15 bp, Homo sapiens
gcattgccaatcccc

SEQ ID NO: 447409 - DNA, 15 bp, Homo sapiens
tgcattgccaatccc

SEQ ID NO: 447410 - DNA, 15 bp, Homo sapiens
ctgcattgccaatcc

SEQ ID NO: 447411 - DNA, 15 bp, Homo sapiens
tctgcattgccaatc

SEQ ID NO: 447412 - DNA, 15 bp, Homo sapiens
ctctgcattgccaat

SEQ ID NO: 447413 - DNA, 15 bp, Homo sapiens
cctctgcattgccaa

SEQ ID NO: 447414 - DNA, 15 bp, Homo sapiens
ccctctgcattgcca

SEQ ID NO: 447415 - DNA, 15 bp, Homo sapiens
tccctctgcattgcc

SEQ ID NO: 447416 - DNA, 15 bp, Homo sapiens
ttccctctgcattgc

SEQ ID NO: 447417 - DNA, 15 bp, Homo sapiens
cttccctctgcattg

SEQ ID NO: 447418 - DNA, 15 bp, Homo sapiens
ccttccctctgcatt

SEQ ID NO: 447419 - DNA, 15 bp, Homo sapiens
tccttccctctgcat

SEQ ID NO: 447420 - DNA, 15 bp, Homo sapiens
atccttccctctgca

SEQ ID NO: 447421 - DNA, 15 bp, Homo sapiens
tatccttccctctgc

SEQ ID NO: 447422 - DNA, 15 bp, Homo sapiens
ctatccttccctctg

SEQ ID NO: 447423 - DNA, 15 bp, Homo sapiens
actatccttccctct

SEQ ID NO: 447424 - DNA, 15 bp, Homo sapiens
cactatccttccctc

SEQ ID NO: 447425 - DNA, 15 bp, Homo sapiens
tcactatccttccct

SEQ ID NO: 447426 - DNA, 15 bp, Homo sapiens
gtcactatccttccc

SEQ ID NO: 447427 - DNA, 15 bp, Homo sapiens
agtcactatccttcc

SEQ ID NO: 447428 - DNA, 15 bp, Homo sapiens
tagtcactatccttc

SEQ ID NO: 447429 - DNA, 15 bp, Homo sapiens
ctagtcactatcctt

SEQ ID NO: 447430 - DNA, 15 bp, Homo sapiens
tctagtcactatcct

SEQ ID NO: 447431 - DNA, 15 bp, Homo sapiens
ttctagtcactatcc

SEQ ID NO: 447432 - DNA, 15 bp, Homo sapiens
attctagtcactatc

SEQ ID NO: 447433 - DNA, 15 bp, Homo sapiens
tattctagtcactat

SEQ ID NO: 447434 - DNA, 15 bp, Homo sapiens
gtattctagtcacta

SEQ ID NO: 447435 - DNA, 15 bp, Homo sapiens
tgtattctagtcact

SEQ ID NO: 447436 - DNA, 15 bp, Homo sapiens
gtgtattctagtcac

SEQ ID NO: 447437 - DNA, 15 bp, Homo sapiens
ggtgtattctagtca

SEQ ID NO: 447438 - DNA, 15 bp, Homo sapiens
aggtgtattctagtc

SEQ ID NO: 447439 - DNA, 15 bp, Homo sapiens
caggtgtattctagt

SEQ ID NO: 447440 - DNA, 15 bp, Homo sapiens
ccaggtgtattctag

SEQ ID NO: 447441 - DNA, 15 bp, Homo sapiens
cccaggtgtattcta

SEQ ID NO: 447442 - DNA, 15 bp, Homo sapiens
acccaggtgtattct

SEQ ID NO: 447443 - DNA, 15 bp, Homo sapiens
cacccaggtgtattc

SEQ ID NO: 447444 - DNA, 15 bp, Homo sapiens
acacccaggtgtatt

SEQ ID NO: 447445 - DNA, 15 bp, Homo sapiens
aacacccaggtgtat

SEQ ID NO: 447446 - DNA, 15 bp, Homo sapiens
gaacacccaggtgta

SEQ ID NO: 447447 - DNA, 15 bp, Homo sapiens
agaacacccaggtgt

SEQ ID NO: 447448 - DNA, 15 bp, Homo sapiens
gagaacacccaggtg

SEQ ID NO: 447449 - DNA, 15 bp, Homo sapiens
agagaacacccaggt

SEQ ID NO: 447450 - DNA, 15 bp, Homo sapiens
tagagaacacccagg

SEQ ID NO: 447451 - DNA, 15 bp, Homo sapiens
ctagagaacacccag

SEQ ID NO: 447452 - DNA, 15 bp, Homo sapiens
cctagagaacaccca

SEQ ID NO: 447453 - DNA, 15 bp, Homo sapiens
tcctagagaacaccc

SEQ ID NO: 447454 - DNA, 15 bp, Homo sapiens
gtcctagagaacacc

SEQ ID NO: 447455 - DNA, 15 bp, Homo sapiens
agtcctagagaacac

SEQ ID NO: 447456 - DNA, 15 bp, Homo sapiens
cagtcctagagaaca

SEQ ID NO: 447457 - DNA, 15 bp, Homo sapiens
ccagtcctagagaac

SEQ ID NO: 447458 - DNA, 15 bp, Homo sapiens
gccagtcctagagaa

SEQ ID NO: 447459 - DNA, 15 bp, Homo sapiens
ggccagtcctagaga

SEQ ID NO: 447460 - DNA, 15 bp, Homo sapiens
cggccagtcctagag

SEQ ID NO: 447461 - DNA, 15 bp, Homo sapiens
acggccagtcctaga

SEQ ID NO: 447462 - DNA, 15 bp, Homo sapiens
tacggccagtcctag

SEQ ID NO: 447463 - DNA, 15 bp, Homo sapiens
gtacggccagtccta

SEQ ID NO: 447464 - DNA, 15 bp, Homo sapiens
tgtacggccagtcct

SEQ ID NO: 447465 - DNA, 15 bp, Homo sapiens
ctgtacggccagtcc

SEQ ID NO: 447466 - DNA, 15 bp, Homo sapiens
gctgtacggccagtc

SEQ ID NO: 447467 - DNA, 15 bp, Homo sapiens
agctgtacggccagt

SEQ ID NO: 447468 - DNA, 15 bp, Homo sapiens
cagctgtacggccag

SEQ ID NO: 447469 - DNA, 15 bp, Homo sapiens
acagctgtacggcca

SEQ ID NO: 447470 - DNA, 15 bp, Homo sapiens
cacagctgtacggcc

SEQ ID NO: 447471 - DNA, 15 bp, Homo sapiens
gcacagctgtacggc

SEQ ID NO: 447472 - DNA, 15 bp, Homo sapiens
agcacagctgtacgg

SEQ ID NO: 447473 - DNA, 15 bp, Homo sapiens
aagcacagctgtacg

SEQ ID NO: 447474 - DNA, 15 bp, Homo sapiens
gaagcacagctgtac

SEQ ID NO: 447475 - DNA, 15 bp, Homo sapiens
ggaagcacagctgta

SEQ ID NO: 447476 - DNA, 15 bp, Homo sapiens
tggaagcacagctgt

SEQ ID NO: 447477 - DNA, 15 bp, Homo sapiens
ctggaagcacagctg

SEQ ID NO: 447478 - DNA, 15 bp, Homo sapiens
tctggaagcacagct

SEQ ID NO: 447479 - DNA, 15 bp, Homo sapiens
ctctggaagcacagc

SEQ ID NO: 447480 - DNA, 15 bp, Homo sapiens
actctggaagcacag

SEQ ID NO: 447481 - DNA, 15 bp, Homo sapiens
tactctggaagcaca

SEQ ID NO: 447482 - DNA, 15 bp, Homo sapiens
atactctggaagcac

SEQ ID NO: 447483 - DNA, 15 bp, Homo sapiens
gatactctggaagca

SEQ ID NO: 447484 - DNA, 15 bp, Homo sapiens
cgatactctggaagc

SEQ ID NO: 447485 - DNA, 15 bp, Homo sapiens
ccgatactctggaag

SEQ ID NO: 447486 - DNA, 15 bp, Homo sapiens
tccgatactctggaa

SEQ ID NO: 447487 - DNA, 15 bp, Homo sapiens
ctccgatactctgga

SEQ ID NO: 447488 - DNA, 15 bp, Homo sapiens
tctccgatactctgg

SEQ ID NO: 447489 - DNA, 15 bp, Homo sapiens
ctctccgatactctg

SEQ ID NO: 447490 - DNA, 15 bp, Homo sapiens
cctctccgatactct

SEQ ID NO: 447491 - DNA, 15 bp, Homo sapiens
ccctctccgatactc

SEQ ID NO: 447492 - DNA, 15 bp, Homo sapiens
cccctctccgatact

SEQ ID NO: 447493 - DNA, 15 bp, Homo sapiens
acccctctccgatac

SEQ ID NO: 447494 - DNA, 15 bp, Homo sapiens
cacccctctccgata

SEQ ID NO: 447495 - DNA, 15 bp, Homo sapiens
acacccctctccgat

SEQ ID NO: 447496 - DNA, 15 bp, Homo sapiens
aacacccctctccga

SEQ ID NO: 447497 - DNA, 15 bp, Homo sapiens
gaacacccctctccg

SEQ ID NO: 447498 - DNA, 15 bp, Homo sapiens
tgaacacccctctcc

SEQ ID NO: 447499 - DNA, 15 bp, Homo sapiens
atgaacacccctctc

SEQ ID NO: 447500 - DNA, 15 bp, Homo sapiens
aatgaacacccctct

SEQ ID NO: 447501 - DNA, 15 bp, Homo sapiens
taatgaacacccctc

SEQ ID NO: 447502 - DNA, 15 bp, Homo sapiens
ttaatgaacacccct

SEQ ID NO: 447503 - DNA, 15 bp, Homo sapiens
cttaatgaacacccc

SEQ ID NO: 447504 - DNA, 15 bp, Homo sapiens
ccttaatgaacaccc

SEQ ID NO: 447505 - DNA, 15 bp, Homo sapiens
tccttaatgaacacc

SEQ ID NO: 447506 - DNA, 15 bp, Homo sapiens
atccttaatgaacac

SEQ ID NO: 447507 - DNA, 15 bp, Homo sapiens
catccttaatgaaca

SEQ ID NO: 447508 - DNA, 15 bp, Homo sapiens
acatccttaatgaac

SEQ ID NO: 447509 - DNA, 15 bp, Homo sapiens
cacatccttaatgaa

SEQ ID NO: 447510 - DNA, 15 bp, Homo sapiens
ccacatccttaatga

SEQ ID NO: 447511 - DNA, 15 bp, Homo sapiens
cccacatccttaatg

SEQ ID NO: 447512 - DNA, 15 bp, Homo sapiens
tcccacatccttaat

SEQ ID NO: 447513 - DNA, 15 bp, Homo sapiens
gtcccacatccttaa

SEQ ID NO: 447514 - DNA, 15 bp, Homo sapiens
tgtcccacatcctta

SEQ ID NO: 447515 - DNA, 15 bp, Homo sapiens
ctgtcccacatcctt

SEQ ID NO: 447516 - DNA, 15 bp, Homo sapiens
cctgtcccacatcct

SEQ ID NO: 447517 - DNA, 15 bp, Homo sapiens
tcctgtcccacatcc

SEQ ID NO: 447518 - DNA, 15 bp, Homo sapiens
gtcctgtcccacatc

SEQ ID NO: 447519 - DNA, 15 bp, Homo sapiens
agtcctgtcccacat

SEQ ID NO: 447520 - DNA, 15 bp, Homo sapiens
gagtcctgtcccaca

SEQ ID NO: 447521 - DNA, 15 bp, Homo sapiens
tgagtcctgtcccac

SEQ ID NO: 447522 - DNA, 15 bp, Homo sapiens
ttgagtcctgtccca

SEQ ID NO: 447523 - DNA, 15 bp, Homo sapiens
gttgagtcctgtccc

SEQ ID NO: 447524 - DNA, 15 bp, Homo sapiens
agttgagtcctgtcc

SEQ ID NO: 447525 - DNA, 15 bp, Homo sapiens
gagttgagtcctgtc

SEQ ID NO: 447526 - DNA, 15 bp, Homo sapiens
cgagttgagtcctgt

SEQ ID NO: 447527 - DNA, 15 bp, Homo sapiens
gcgagttgagtcctg

SEQ ID NO: 447528 - DNA, 15 bp, Homo sapiens
ggcgagttgagtcct

SEQ ID NO: 447529 - DNA, 15 bp, Homo sapiens
aggcgagttgagtcc

SEQ ID NO: 447530 - DNA, 15 bp, Homo sapiens
gaggcgagttgagtc

SEQ ID NO: 447531 - DNA, 15 bp, Homo sapiens
tgaggcgagttgagt

SEQ ID NO: 447532 - DNA, 15 bp, Homo sapiens
atgaggcgagttgag

SEQ ID NO: 447533 - DNA, 15 bp, Homo sapiens
aatgaggcgagttga

SEQ ID NO: 447534 - DNA, 15 bp, Homo sapiens
aaatgaggcgagttg

SEQ ID NO: 447535 - DNA, 15 bp, Homo sapiens
gaaatgaggcgagtt

SEQ ID NO: 447536 - DNA, 15 bp, Homo sapiens
tgaaatgaggcgagt

SEQ ID NO: 447537 - DNA, 15 bp, Homo sapiens
atgaaatgaggcgag

SEQ ID NO: 447538 - DNA, 15 bp, Homo sapiens
catgaaatgaggcga

SEQ ID NO: 447539 - DNA, 15 bp, Homo sapiens
acatgaaatgaggcg

SEQ ID NO: 447540 - DNA, 15 bp, Homo sapiens
aacatgaaatgaggc

SEQ ID NO: 447541 - DNA, 15 bp, Homo sapiens
aaacatgaaatgagg

SEQ ID NO: 447542 - DNA, 15 bp, Homo sapiens
aaaacatgaaatgag

SEQ ID NO: 447543 - DNA, 15 bp, Homo sapiens
gaaaacatgaaatga

SEQ ID NO: 447544 - DNA, 15 bp, Homo sapiens
tgaaaacatgaaatg

SEQ ID NO: 447545 - DNA, 15 bp, Homo sapiens
ttgaaaacatgaaat

SEQ ID NO: 447546 - DNA, 15 bp, Homo sapiens
tttgaaaacatgaaa

SEQ ID NO: 447547 - DNA, 15 bp, Homo sapiens
ctttgaaaacatgaa

SEQ ID NO: 447548 - DNA, 15 bp, Homo sapiens
gctttgaaaacatga

SEQ ID NO: 447549 - DNA, 15 bp, Homo sapiens
agctttgaaaacatg

SEQ ID NO: 447550 - DNA, 15 bp, Homo sapiens
aagctttgaaaacat

SEQ ID NO: 447551 - DNA, 15 bp, Homo sapiens
aaagctttgaaaaca

SEQ ID NO: 447552 - DNA, 15 bp, Homo sapiens
caaagctttgaaaac

SEQ ID NO: 447553 - DNA, 15 bp, Homo sapiens
ccaaagctttgaaaa

SEQ ID NO: 447554 - DNA, 15 bp, Homo sapiens
accaaagctttgaaa

SEQ ID NO: 447555 - DNA, 15 bp, Homo sapiens
aaccaaagctttgaa

SEQ ID NO: 447556 - DNA, 15 bp, Homo sapiens
aaaccaaagctttga

SEQ ID NO: 447557 - DNA, 15 bp, Homo sapiens
aaaaccaaagctttg

SEQ ID NO: 447558 - DNA, 15 bp, Homo sapiens
caaaaccaaagcttt

SEQ ID NO: 447559 - DNA, 15 bp, Homo sapiens
tcaaaaccaaagctt

SEQ ID NO: 447560 - DNA, 15 bp, Homo sapiens
ctcaaaaccaaagct

SEQ ID NO: 447561 - DNA, 15 bp, Homo sapiens
actcaaaaccaaagc

SEQ ID NO: 447562 - DNA, 15 bp, Homo sapiens
tactcaaaaccaaag

SEQ ID NO: 447563 - DNA, 15 bp, Homo sapiens
atactcaaaaccaaa

SEQ ID NO: 447564 - DNA, 15 bp, Homo sapiens
tatactcaaaaccaa

SEQ ID NO: 447565 - DNA, 15 bp, Homo sapiens
ctatactcaaaacca

SEQ ID NO: 447566 - DNA, 15 bp, Homo sapiens
gctatactcaaaacc

SEQ ID NO: 447567 - DNA, 15 bp, Homo sapiens
tgctatactcaaaac

SEQ ID NO: 447568 - DNA, 15 bp, Homo sapiens
atgctatactcaaaa

SEQ ID NO: 447569 - DNA, 15 bp, Homo sapiens
gatgctatactcaaa

SEQ ID NO: 447570 - DNA, 15 bp, Homo sapiens
tgatgctatactcaa

SEQ ID NO: 447571 - DNA, 15 bp, Homo sapiens
ttgatgctatactca

SEQ ID NO: 447572 - DNA, 15 bp, Homo sapiens
tttgatgctatactc

SEQ ID NO: 447573 - DNA, 15 bp, Homo sapiens
atttgatgctatact

SEQ ID NO: 447574 - DNA, 15 bp, Homo sapiens
catttgatgctatac

SEQ ID NO: 447575 - DNA, 15 bp, Homo sapiens
tcatttgatgctata

SEQ ID NO: 447576 - DNA, 15 bp, Homo sapiens
atcatttgatgctat

SEQ ID NO: 447577 - DNA, 15 bp, Homo sapiens
aatcatttgatgcta

SEQ ID NO: 447578 - DNA, 15 bp, Homo sapiens
caatcatttgatgct

SEQ ID NO: 447579 - DNA, 15 bp, Homo sapiens
tcaatcatttgatgc

SEQ ID NO: 447580 - DNA, 15 bp, Homo sapiens
ttcaatcatttgatg

SEQ ID NO: 447581 - DNA, 15 bp, Homo sapiens
attcaatcatttgat

SEQ ID NO: 447582 - DNA, 15 bp, Homo sapiens
tattcaatcatttga

SEQ ID NO: 447583 - DNA, 15 bp, Homo sapiens
ttattcaatcatttg

SEQ ID NO: 447584 - DNA, 15 bp, Homo sapiens
tttattcaatcattt

SEQ ID NO: 447585 - DNA, 15 bp, Homo sapiens
ttttattcaatcatt

SEQ ID NO: 447586 - DNA, 15 bp, Homo sapiens
attttattcaatcat

SEQ ID NO: 447587 - DNA, 15 bp, Homo sapiens
tattttattcaatca

SEQ ID NO: 447588 - DNA, 15 bp, Homo sapiens
ctattttattcaatc

SEQ ID NO: 447589 - DNA, 15 bp, Homo sapiens
tctattttattcaat

SEQ ID NO: 447590 - DNA, 15 bp, Homo sapiens
ttctattttattcaa

SEQ ID NO: 447591 - DNA, 15 bp, Homo sapiens
tttctattttattca

SEQ ID NO: 447592 - DNA, 15 bp, Homo sapiens
atttctattttattc

SEQ ID NO: 447593 - DNA, 15 bp, Homo sapiens
gatttctattttatt

SEQ ID NO: 447594 - DNA, 15 bp, Homo sapiens
agatttctattttat

SEQ ID NO: 447595 - DNA, 15 bp, Homo sapiens
cagatttctatttta

SEQ ID NO: 447596 - DNA, 15 bp, Homo sapiens
gcagatttctatttt

SEQ ID NO: 447597 - DNA, 15 bp, Homo sapiens
ggcagatttctattt

SEQ ID NO: 447598 - DNA, 15 bp, Homo sapiens
aggcagatttctatt

SEQ ID NO: 447599 - DNA, 15 bp, Homo sapiens
aaggcagatttctat

SEQ ID NO: 447600 - DNA, 15 bp, Homo sapiens
aaaggcagatttcta

SEQ ID NO: 447601 - DNA, 15 bp, Homo sapiens
taaaggcagatttct

SEQ ID NO: 447602 - DNA, 15 bp, Homo sapiens
ctaaaggcagatttc

SEQ ID NO: 447603 - DNA, 15 bp, Homo sapiens
cctaaaggcagattt

SEQ ID NO: 447604 - DNA, 15 bp, Homo sapiens
ccctaaaggcagatt

SEQ ID NO: 447605 - DNA, 15 bp, Homo sapiens
accctaaaggcagat

SEQ ID NO: 447606 - DNA, 15 bp, Homo sapiens
gaccctaaaggcaga

SEQ ID NO: 447607 - DNA, 15 bp, Homo sapiens
ggaccctaaaggcag

SEQ ID NO: 447608 - DNA, 15 bp, Homo sapiens
aggaccctaaaggca

SEQ ID NO: 447609 - DNA, 15 bp, Homo sapiens
gaggaccctaaaggc

SEQ ID NO: 447610 - DNA, 15 bp, Homo sapiens
tgaggaccctaaagg

SEQ ID NO: 447611 - DNA, 15 bp, Homo sapiens
atgaggaccctaaag

SEQ ID NO: 447612 - DNA, 15 bp, Homo sapiens
tatgaggaccctaaa

SEQ ID NO: 447613 - DNA, 15 bp, Homo sapiens
atatgaggaccctaa

SEQ ID NO: 447614 - DNA, 15 bp, Homo sapiens
aatatgaggacccta

SEQ ID NO: 447615 - DNA, 15 bp, Homo sapiens
aaatatgaggaccct

SEQ ID NO: 447616 - DNA, 15 bp, Homo sapiens
aaaatatgaggaccc

SEQ ID NO: 447617 - DNA, 15 bp, Homo sapiens
gaaaatatgaggacc

SEQ ID NO: 447618 - DNA, 15 bp, Homo sapiens
agaaaatatgaggac

SEQ ID NO: 447619 - DNA, 15 bp, Homo sapiens
cagaaaatatgagga

SEQ ID NO: 447620 - DNA, 15 bp, Homo sapiens
gcagaaaatatgagg

SEQ ID NO: 447621 - DNA, 15 bp, Homo sapiens
agcagaaaatatgag

SEQ ID NO: 447622 - DNA, 15 bp, Homo sapiens
gagcagaaaatatga

SEQ ID NO: 447623 - DNA, 15 bp, Homo sapiens
agagcagaaaatatg

SEQ ID NO: 447624 - DNA, 15 bp, Homo sapiens
tagagcagaaaatat

SEQ ID NO: 447625 - DNA, 15 bp, Homo sapiens
gtagagcagaaaata

SEQ ID NO: 447626 - DNA, 15 bp, Homo sapiens
ggtagagcagaaaat

SEQ ID NO: 447627 - DNA, 15 bp, Homo sapiens
tggtagagcagaaaa

SEQ ID NO: 447628 - DNA, 15 bp, Homo sapiens
ttggtagagcagaaa

SEQ ID NO: 447629 - DNA, 15 bp, Homo sapiens
cttggtagagcagaa

SEQ ID NO: 447630 - DNA, 15 bp, Homo sapiens
ccttggtagagcaga

SEQ ID NO: 447631 - DNA, 15 bp, Homo sapiens
accttggtagagcag

SEQ ID NO: 447632 - DNA, 15 bp, Homo sapiens
caccttggtagagca

SEQ ID NO: 447633 - DNA, 15 bp, Homo sapiens
acaccttggtagagc

SEQ ID NO: 447634 - DNA, 15 bp, Homo sapiens
cacaccttggtagag

SEQ ID NO: 447635 - DNA, 15 bp, Homo sapiens
ccacaccttggtaga

SEQ ID NO: 447636 - DNA, 15 bp, Homo sapiens
accacaccttggtag

SEQ ID NO: 447637 - DNA, 15 bp, Homo sapiens
taccacaccttggta

SEQ ID NO: 447638 - DNA, 15 bp, Homo sapiens
ctaccacaccttggt

SEQ ID NO: 447639 - DNA, 15 bp, Homo sapiens
actaccacaccttgg

SEQ ID NO: 447640 - DNA, 15 bp, Homo sapiens
aactaccacaccttg

SEQ ID NO: 447641 - DNA, 15 bp, Homo sapiens
aaactaccacacctt

SEQ ID NO: 447642 - DNA, 15 bp, Homo sapiens
caaactaccacacct

SEQ ID NO: 447643 - DNA, 15 bp, Homo sapiens
ccaaactaccacacc

SEQ ID NO: 447644 - DNA, 15 bp, Homo sapiens
accaaactaccacac

SEQ ID NO: 447645 - DNA, 15 bp, Homo sapiens
gaccaaactaccaca

SEQ ID NO: 447646 - DNA, 15 bp, Homo sapiens
tgaccaaactaccac

SEQ ID NO: 447647 - DNA, 15 bp, Homo sapiens
ctgaccaaactacca

SEQ ID NO: 447648 - DNA, 15 bp, Homo sapiens
gctgaccaaactacc

SEQ ID NO: 447649 - DNA, 15 bp, Homo sapiens
agctgaccaaactac

SEQ ID NO: 447650 - DNA, 15 bp, Homo sapiens
gagctgaccaaacta

SEQ ID NO: 447651 - DNA, 15 bp, Homo sapiens
ggagctgaccaaact

SEQ ID NO: 447652 - DNA, 15 bp, Homo sapiens
gggagctgaccaaac

SEQ ID NO: 447653 - DNA, 15 bp, Homo sapiens
ggggagctgaccaaa

SEQ ID NO: 447654 - DNA, 15 bp, Homo sapiens
tggggagctgaccaa

SEQ ID NO: 447655 - DNA, 15 bp, Homo sapiens
atggggagctgacca

SEQ ID NO: 447656 - DNA, 15 bp, Homo sapiens
tatggggagctgacc

SEQ ID NO: 447657 - DNA, 15 bp, Homo sapiens
ctatggggagctgac

SEQ ID NO: 447658 - DNA, 15 bp, Homo sapiens
actatggggagctga

SEQ ID NO: 447659 - DNA, 15 bp, Homo sapiens
aactatggggagctg

SEQ ID NO: 447660 - DNA, 15 bp, Homo sapiens
aaactatggggagct

SEQ ID NO: 447661 - DNA, 15 bp, Homo sapiens
aaaactatggggagc

SEQ ID NO: 447662 - DNA, 15 bp, Homo sapiens
gaaaactatggggag

SEQ ID NO: 447663 - DNA, 15 bp, Homo sapiens
tgaaaactatgggga

SEQ ID NO: 447664 - DNA, 15 bp, Homo sapiens
ttgaaaactatgggg

SEQ ID NO: 447665 - DNA, 15 bp, Homo sapiens
tttgaaaactatggg

SEQ ID NO: 447666 - DNA, 15 bp, Homo sapiens
atttgaaaactatgg

SEQ ID NO: 447667 - DNA, 15 bp, Homo sapiens
catttgaaaactatg

SEQ ID NO: 447668 - DNA, 15 bp, Homo sapiens
acatttgaaaactat

SEQ ID NO: 447669 - DNA, 15 bp, Homo sapiens
tacatttgaaaacta

SEQ ID NO: 447670 - DNA, 15 bp, Homo sapiens
gtacatttgaaaact

SEQ ID NO: 447671 - DNA, 15 bp, Homo sapiens
agtacatttgaaaac

SEQ ID NO: 447672 - DNA, 15 bp, Homo sapiens
aagtacatttgaaaa

SEQ ID NO: 447673 - DNA, 15 bp, Homo sapiens
aaagtacatttgaaa

SEQ ID NO: 447674 - DNA, 15 bp, Homo sapiens
taaagtacatttgaa

SEQ ID NO: 447675 - DNA, 15 bp, Homo sapiens
ctaaagtacatttga

SEQ ID NO: 447676 - DNA, 15 bp, Homo sapiens
tctaaagtacatttg

SEQ ID NO: 447677 - DNA, 15 bp, Homo sapiens
atctaaagtacattt

SEQ ID NO: 447678 - DNA, 15 bp, Homo sapiens
tatctaaagtacatt

SEQ ID NO: 447679 - DNA, 15 bp, Homo sapiens
ttatctaaagtacat

SEQ ID NO: 447680 - DNA, 15 bp, Homo sapiens
cttatctaaagtaca

SEQ ID NO: 447681 - DNA, 15 bp, Homo sapiens
acttatctaaagtac

SEQ ID NO: 447682 - DNA, 15 bp, Homo sapiens
aacttatctaaagta

SEQ ID NO: 447683 - DNA, 15 bp, Homo sapiens
aaacttatctaaagt

SEQ ID NO: 447684 - DNA, 15 bp, Homo sapiens
caaacttatctaaag

SEQ ID NO: 447685 - DNA, 15 bp, Homo sapiens
gcaaacttatctaaa

SEQ ID NO: 447686 - DNA, 15 bp, Homo sapiens
tgcaaacttatctaa

SEQ ID NO: 447687 - DNA, 15 bp, Homo sapiens
atgcaaacttatcta

SEQ ID NO: 447688 - DNA, 15 bp, Homo sapiens
aatgcaaacttatct

SEQ ID NO: 447689 - DNA, 15 bp, Homo sapiens
aaatgcaaacttatc

SEQ ID NO: 447690 - DNA, 15 bp, Homo sapiens
gaaatgcaaacttat

SEQ ID NO: 447691 - DNA, 15 bp, Homo sapiens
tgaaatgcaaactta

SEQ ID NO: 447692 - DNA, 15 bp, Homo sapiens
ttgaaatgcaaactt

SEQ ID NO: 447693 - DNA, 15 bp, Homo sapiens
gttgaaatgcaaact

SEQ ID NO: 447694 - DNA, 15 bp, Homo sapiens
ggttgaaatgcaaac

SEQ ID NO: 447695 - DNA, 15 bp, Homo sapiens
aggttgaaatgcaaa

SEQ ID NO: 447696 - DNA, 15 bp, Homo sapiens
gaggttgaaatgcaa

SEQ ID NO: 447697 - DNA, 15 bp, Homo sapiens
agaggttgaaatgca

SEQ ID NO: 447698 - DNA, 15 bp, Homo sapiens
tagaggttgaaatgc

SEQ ID NO: 447699 - DNA, 15 bp, Homo sapiens
atagaggttgaaatg

SEQ ID NO: 447700 - DNA, 15 bp, Homo sapiens
gatagaggttgaaat

SEQ ID NO: 447701 - DNA, 15 bp, Homo sapiens
agatagaggttgaaa

SEQ ID NO: 447702 - DNA, 15 bp, Homo sapiens
cagatagaggttgaa

SEQ ID NO: 447703 - DNA, 15 bp, Homo sapiens
ccagatagaggttga

SEQ ID NO: 447704 - DNA, 15 bp, Homo sapiens
tccagatagaggttg

SEQ ID NO: 447705 - DNA, 15 bp, Homo sapiens
ctccagatagaggtt

SEQ ID NO: 447706 - DNA, 15 bp, Homo sapiens
tctccagatagaggt

SEQ ID NO: 447707 - DNA, 15 bp, Homo sapiens
ttctccagatagagg

SEQ ID NO: 447708 - DNA, 15 bp, Homo sapiens
attctccagatagag

SEQ ID NO: 447709 - DNA, 15 bp, Homo sapiens
gattctccagataga

SEQ ID NO: 447710 - DNA, 15 bp, Homo sapiens
tgattctccagatag

SEQ ID NO: 447711 - DNA, 15 bp, Homo sapiens
gtgattctccagata

SEQ ID NO: 447712 - DNA, 15 bp, Homo sapiens
tgtgattctccagat

SEQ ID NO: 447713 - DNA, 15 bp, Homo sapiens
atgtgattctccaga

SEQ ID NO: 447714 - DNA, 15 bp, Homo sapiens
aatgtgattctccag

SEQ ID NO: 447715 - DNA, 15 bp, Homo sapiens
aaatgtgattctcca

SEQ ID NO: 447716 - DNA, 15 bp, Homo sapiens
taaatgtgattctcc

SEQ ID NO: 447717 - DNA, 15 bp, Homo sapiens
ataaatgtgattctc

SEQ ID NO: 447718 - DNA, 15 bp, Homo sapiens
gataaatgtgattct

SEQ ID NO: 447719 - DNA, 15 bp, Homo sapiens
agataaatgtgattc

SEQ ID NO: 447720 - DNA, 15 bp, Homo sapiens
aagataaatgtgatt

SEQ ID NO: 447721 - DNA, 15 bp, Homo sapiens
caagataaatgtgat

SEQ ID NO: 447722 - DNA, 15 bp, Homo sapiens
gcaagataaatgtga

SEQ ID NO: 447723 - DNA, 15 bp, Homo sapiens
ggcaagataaatgtg

SEQ ID NO: 447724 - DNA, 15 bp, Homo sapiens
gggcaagataaatgt

SEQ ID NO: 447725 - DNA, 15 bp, Homo sapiens
agggcaagataaatg

SEQ ID NO: 447726 - DNA, 15 bp, Homo sapiens
aagggcaagataaat

SEQ ID NO: 447727 - DNA, 15 bp, Homo sapiens
gaagggcaagataaa

SEQ ID NO: 447728 - DNA, 15 bp, Homo sapiens
tgaagggcaagataa

SEQ ID NO: 447729 - DNA, 15 bp, Homo sapiens
atgaagggcaagata

SEQ ID NO: 447730 - DNA, 15 bp, Homo sapiens
aatgaagggcaagat

SEQ ID NO: 447731 - DNA, 15 bp, Homo sapiens
taatgaagggcaaga

SEQ ID NO: 447732 - DNA, 15 bp, Homo sapiens
ttaatgaagggcaag

SEQ ID NO: 447733 - DNA, 15 bp, Homo sapiens
cttaatgaagggcaa

SEQ ID NO: 447734 - DNA, 15 bp, Homo sapiens
ccttaatgaagggca

SEQ ID NO: 447735 - DNA, 15 bp, Homo sapiens
accttaatgaagggc

SEQ ID NO: 447736 - DNA, 15 bp, Homo sapiens
gaccttaatgaaggg

SEQ ID NO: 447737 - DNA, 15 bp, Homo sapiens
agaccttaatgaagg

SEQ ID NO: 447738 - DNA, 15 bp, Homo sapiens
tagaccttaatgaag

SEQ ID NO: 447739 - DNA, 15 bp, Homo sapiens
ctagaccttaatgaa

SEQ ID NO: 447740 - DNA, 15 bp, Homo sapiens
gctagaccttaatga

SEQ ID NO: 447741 - DNA, 15 bp, Homo sapiens
tgctagaccttaatg

SEQ ID NO: 447742 - DNA, 15 bp, Homo sapiens
ctgctagaccttaat

SEQ ID NO: 447743 - DNA, 15 bp, Homo sapiens
actgctagaccttaa

SEQ ID NO: 447744 - DNA, 15 bp, Homo sapiens
aactgctagacctta

SEQ ID NO: 447745 - DNA, 15 bp, Homo sapiens
aaactgctagacctt

SEQ ID NO: 447746 - DNA, 15 bp, Homo sapiens
gaaactgctagacct

SEQ ID NO: 447747 - DNA, 15 bp, Homo sapiens
ggaaactgctagacc

SEQ ID NO: 447748 - DNA, 15 bp, Homo sapiens
tggaaactgctagac

SEQ ID NO: 447749 - DNA, 15 bp, Homo sapiens
ttggaaactgctaga

SEQ ID NO: 447750 - DNA, 15 bp, Homo sapiens
tttggaaactgctag

SEQ ID NO: 447751 - DNA, 15 bp, Homo sapiens
attttggaaactgct

SEQ ID NO: 447752 - DNA, 15 bp, Homo sapiens
cattttggaaactgc

SEQ ID NO: 447753 - DNA, 15 bp, Homo sapiens
acattttggaaactg

SEQ ID NO: 447754 - DNA, 15 bp, Homo sapiens
gacattttggaaact

SEQ ID NO: 447755 - DNA, 15 bp, Homo sapiens
agacattttggaaac

SEQ ID NO: 447756 - DNA, 15 bp, Homo sapiens
cagacattttggaaa

SEQ ID NO: 447757 - DNA, 15 bp, Homo sapiens
acagacattttggaa

SEQ ID NO: 447758 - DNA, 15 bp, Homo sapiens
tacagacattttgga

SEQ ID NO: 447759 - DNA, 15 bp, Homo sapiens
ctacagacattttgg

SEQ ID NO: 447760 - DNA, 15 bp, Homo sapiens
tctacagacattttg

SEQ ID NO: 447761 - DNA, 15 bp, Homo sapiens
ctctacagacatttt

SEQ ID NO: 447762 - DNA, 15 bp, Homo sapiens
tctctacagacattt

SEQ ID NO: 447763 - DNA, 15 bp, Homo sapiens
gtctctacagacatt

SEQ ID NO: 447764 - DNA, 15 bp, Homo sapiens
agtctctacagacat

SEQ ID NO: 447765 - DNA, 15 bp, Homo sapiens
cagtctctacagaca

SEQ ID NO: 447766 - DNA, 15 bp, Homo sapiens
acagtctctacagac

SEQ ID NO: 447767 - DNA, 15 bp, Homo sapiens
cacagtctctacaga

SEQ ID NO: 447768 - DNA, 15 bp, Homo sapiens
acacagtctctacag

SEQ ID NO: 447769 - DNA, 15 bp, Homo sapiens
cacacagtctctaca

SEQ ID NO: 447770 - DNA, 15 bp, Homo sapiens
ccacacagtctctac

SEQ ID NO: 447771 - DNA, 15 bp, Homo sapiens
cccacacagtctcta

SEQ ID NO: 447772 - DNA, 15 bp, Homo sapiens
ccccacacagtctct

SEQ ID NO: 447773 - DNA, 15 bp, Homo sapiens
tccccacacagtctc

SEQ ID NO: 447774 - DNA, 15 bp, Homo sapiens
ttccccacacagtct

SEQ ID NO: 447775 - DNA, 15 bp, Homo sapiens
cttccccacacagtc

SEQ ID NO: 447776 - DNA, 15 bp, Homo sapiens
ccttccccacacagt

SEQ ID NO: 447777 - DNA, 15 bp, Homo sapiens
tccttccccacacag

SEQ ID NO: 447778 - DNA, 15 bp, Homo sapiens
ttccttccccacaca

SEQ ID NO: 447779 - DNA, 15 bp, Homo sapiens
cttccttccccacac

SEQ ID NO: 447780 - DNA, 15 bp, Homo sapiens
tcttccttccccaca

SEQ ID NO: 447781 - DNA, 15 bp, Homo sapiens
atcttccttccccac

SEQ ID NO: 447782 - DNA, 15 bp, Homo sapiens
catcttccttcccca

SEQ ID NO: 447783 - DNA, 15 bp, Homo sapiens
ccatcttccttcccc

SEQ ID NO: 447784 - DNA, 15 bp, Homo sapiens
tccatcttccttccc

SEQ ID NO: 447785 - DNA, 15 bp, Homo sapiens
atccatcttccttcc

SEQ ID NO: 447786 - DNA, 15 bp, Homo sapiens
catccatcttccttc

SEQ ID NO: 447787 - DNA, 15 bp, Homo sapiens
ccatccatcttcctt

SEQ ID NO: 447788 - DNA, 15 bp, Homo sapiens
gccatccatcttcct

SEQ ID NO: 447789 - DNA, 15 bp, Homo sapiens
ggccatccatcttcc

SEQ ID NO: 447790 - DNA, 15 bp, Homo sapiens
aggccatccatcttc

SEQ ID NO: 447791 - DNA, 15 bp, Homo sapiens
caggccatccatctt

SEQ ID NO: 447792 - DNA, 15 bp, Homo sapiens
tcaggccatccatct

SEQ ID NO: 447793 - DNA, 15 bp, Homo sapiens
ttcaggccatccatc

SEQ ID NO: 447794 - DNA, 15 bp, Homo sapiens
attcaggccatccat

SEQ ID NO: 447795 - DNA, 15 bp, Homo sapiens
cattcaggccatcca

SEQ ID NO: 447796 - DNA, 15 bp, Homo sapiens
tcattcaggccatcc

SEQ ID NO: 447797 - DNA, 15 bp, Homo sapiens
ctcattcaggccatc

SEQ ID NO: 447798 - DNA, 15 bp, Homo sapiens
tctcattcaggccat

SEQ ID NO: 447799 - DNA, 15 bp, Homo sapiens
gtctcattcaggcca

SEQ ID NO: 447800 - DNA, 15 bp, Homo sapiens
tgtctcattcaggcc

SEQ ID NO: 447801 - DNA, 15 bp, Homo sapiens
ttgtctcattcaggc

SEQ ID NO: 447802 - DNA, 15 bp, Homo sapiens
cttgtctcattcagg

SEQ ID NO: 447803 - DNA, 15 bp, Homo sapiens
gcttgtctcattcag

SEQ ID NO: 447804 - DNA, 15 bp, Homo sapiens
ggcttgtctcattca

SEQ ID NO: 447805 - DNA, 15 bp, Homo sapiens
gggcttgtctcattc

SEQ ID NO: 447806 - DNA, 15 bp, Homo sapiens
ggggcttgtctcatt

SEQ ID NO: 447807 - DNA, 15 bp, Homo sapiens
aggggcttgtctcat

SEQ ID NO: 447808 - DNA, 15 bp, Homo sapiens
aaggggcttgtctca

SEQ ID NO: 447809 - DNA, 15 bp, Homo sapiens
gaaggggcttgtctc

SEQ ID NO: 447810 - DNA, 15 bp, Homo sapiens
agaaggggcttgtct

SEQ ID NO: 447811 - DNA, 15 bp, Homo sapiens
gagaaggggcttgtc

SEQ ID NO: 447812 - DNA, 15 bp, Homo sapiens
ggagaaggggcttgt

SEQ ID NO: 447813 - DNA, 15 bp, Homo sapiens
gggagaaggggcttg

SEQ ID NO: 447814 - DNA, 15 bp, Homo sapiens
cgggagaaggggctt

SEQ ID NO: 447815 - DNA, 15 bp, Homo sapiens
gcgggagaaggggct

SEQ ID NO: 447816 - DNA, 15 bp, Homo sapiens
ggcgggagaaggggc

SEQ ID NO: 447817 - DNA, 15 bp, Homo sapiens
cggcgggagaagggg

SEQ ID NO: 447818 - DNA, 15 bp, Homo sapiens
gcggcgggagaaggg

SEQ ID NO: 447819 - DNA, 15 bp, Homo sapiens
ggcggcgggagaagg

SEQ ID NO: 447820 - DNA, 15 bp, Homo sapiens
aggcggcgggagaag

SEQ ID NO: 447821 - DNA, 15 bp, Homo sapiens
gaggcggcgggagaa

SEQ ID NO: 447822 - DNA, 15 bp, Homo sapiens
ggaggcggcgggaga

SEQ ID NO: 447823 - DNA, 15 bp, Homo sapiens
aggaggcggcgggag

SEQ ID NO: 447824 - DNA, 15 bp, Homo sapiens
gaggaggcggcggga

SEQ ID NO: 447825 - DNA, 15 bp, Homo sapiens
cgaggaggcggcggg

SEQ ID NO: 447826 - DNA, 15 bp, Homo sapiens
tcgaggaggcggcgg

SEQ ID NO: 447827 - DNA, 15 bp, Homo sapiens
gtcgaggaggcggcg

SEQ ID NO: 447828 - DNA, 15 bp, Homo sapiens
ggtcgaggaggcggc

SEQ ID NO: 447829 - DNA, 15 bp, Homo sapiens
aggtcgaggaggcgg

SEQ ID NO: 447830 - DNA, 15 bp, Homo sapiens
caggtcgaggaggcg

SEQ ID NO: 447831 - DNA, 15 bp, Homo sapiens
gcaggtcgaggaggc

SEQ ID NO: 447832 - DNA, 15 bp, Homo sapiens
ggcaggtcgaggagg

SEQ ID NO: 447833 - DNA, 15 bp, Homo sapiens
gggcaggtcgaggag

SEQ ID NO: 447834 - DNA, 15 bp, Homo sapiens
ggggcaggtcgagga

SEQ ID NO: 447835 - DNA, 15 bp, Homo sapiens
gggggcaggtcgagg

SEQ ID NO: 447836 - DNA, 15 bp, Homo sapiens
tgggggcaggtcgag

SEQ ID NO: 447837 - DNA, 15 bp, Homo sapiens
ctgggggcaggtcga

SEQ ID NO: 447838 - DNA, 15 bp, Homo sapiens
tctgggggcaggtcg

SEQ ID NO: 447839 - DNA, 15 bp, Homo sapiens
ctctgggggcaggtc

SEQ ID NO: 447840 - DNA, 15 bp, Homo sapiens
actctgggggcaggt

SEQ ID NO: 447841 - DNA, 15 bp, Homo sapiens
gactctgggggcagg

SEQ ID NO: 447842 - DNA, 15 bp, Homo sapiens
agactctgggggcag

SEQ ID NO: 447843 - DNA, 15 bp, Homo sapiens
aagactctgggggca

SEQ ID NO: 447844 - DNA, 15 bp, Homo sapiens
gaagactctgggggc

SEQ ID NO: 447845 - DNA, 15 bp, Homo sapiens
agaagactctggggg

SEQ ID NO: 447846 - DNA, 15 bp, Homo sapiens
gagaagactctgggg

SEQ ID NO: 447847 - DNA, 15 bp, Homo sapiens
agagaagactctggg

SEQ ID NO: 447848 - DNA, 15 bp, Homo sapiens
cagagaagactctgg

SEQ ID NO: 447849 - DNA, 15 bp, Homo sapiens
gcagagaagactctg

SEQ ID NO: 447850 - DNA, 15 bp, Homo sapiens
tgcagagaagactct

SEQ ID NO: 447851 - DNA, 15 bp, Homo sapiens
atgcagagaagactc

SEQ ID NO: 447852 - DNA, 15 bp, Homo sapiens
gatgcagagaagact

SEQ ID NO: 447853 - DNA, 15 bp, Homo sapiens
agatgcagagaagac

SEQ ID NO: 447854 - DNA, 15 bp, Homo sapiens
aagatgcagagaaga

SEQ ID NO: 447855 - DNA, 15 bp, Homo sapiens
gaagatgcagagaag

SEQ ID NO: 447856 - DNA, 15 bp, Homo sapiens
tgaagatgcagagaa

SEQ ID NO: 447857 - DNA, 15 bp, Homo sapiens
gtgaagatgcagaga

SEQ ID NO: 447858 - DNA, 15 bp, Homo sapiens
ggtgaagatgcagag

SEQ ID NO: 447859 - DNA, 15 bp, Homo sapiens
gggtgaagatgcaga

SEQ ID NO: 447860 - DNA, 15 bp, Homo sapiens
agggtgaagatgcag

SEQ ID NO: 447861 - DNA, 15 bp, Homo sapiens
cagggtgaagatgca

SEQ ID NO: 447862 - DNA, 15 bp, Homo sapiens
ccagggtgaagatgc

SEQ ID NO: 447863 - DNA, 15 bp, Homo sapiens
accagggtgaagatg

SEQ ID NO: 447864 - DNA, 15 bp, Homo sapiens
gaccagggtgaagat

SEQ ID NO: 447865 - DNA, 15 bp, Homo sapiens
tgaccagggtgaaga

SEQ ID NO: 447866 - DNA, 15 bp, Homo sapiens
gtgaccagggtgaag

SEQ ID NO: 447867 - DNA, 15 bp, Homo sapiens
agtgaccagggtgaa

SEQ ID NO: 447868 - DNA, 15 bp, Homo sapiens
aagtgaccagggtga

SEQ ID NO: 447869 - DNA, 15 bp, Homo sapiens
gaagtgaccagggtg

SEQ ID NO: 447870 - DNA, 15 bp, Homo sapiens
tgaagtgaccagggt

SEQ ID NO: 447871 - DNA, 15 bp, Homo sapiens
atgaagtgaccaggg

SEQ ID NO: 447872 - DNA, 15 bp, Homo sapiens
gatgaagtgaccagg

SEQ ID NO: 447873 - DNA, 15 bp, Homo sapiens
tgatgaagtgaccag

SEQ ID NO: 447874 - DNA, 15 bp, Homo sapiens
ctgatgaagtgacca

SEQ ID NO: 447875 - DNA, 15 bp, Homo sapiens
cctgatgaagtgacc

SEQ ID NO: 447876 - DNA, 15 bp, Homo sapiens
gcctgatgaagtgac

SEQ ID NO: 447877 - DNA, 15 bp, Homo sapiens
ggcctgatgaagtga

SEQ ID NO: 447878 - DNA, 15 bp, Homo sapiens
gggcctgatgaagtg

SEQ ID NO: 447879 - DNA, 15 bp, Homo sapiens
ggggcctgatgaagt

SEQ ID NO: 447880 - DNA, 15 bp, Homo sapiens
aggggcctgatgaag

SEQ ID NO: 447881 - DNA, 15 bp, Homo sapiens
gaggggcctgatgaa

SEQ ID NO: 447882 - DNA, 15 bp, Homo sapiens
ggaggggcctgatga

SEQ ID NO: 447883 - DNA, 15 bp, Homo sapiens
gggaggggcctgatg

SEQ ID NO: 447884 - DNA, 15 bp, Homo sapiens
cgggaggggcctgat

SEQ ID NO: 447885 - DNA, 15 bp, Homo sapiens
tcgggaggggcctga

SEQ ID NO: 447886 - DNA, 15 bp, Homo sapiens
ttcgggaggggcctg

SEQ ID NO: 447887 - DNA, 15 bp, Homo sapiens
cttcgggaggggcct

SEQ ID NO: 447888 - DNA, 15 bp, Homo sapiens
gcttcgggaggggcc

SEQ ID NO: 447889 - DNA, 15 bp, Homo sapiens
agcttcgggaggggc

SEQ ID NO: 447890 - DNA, 15 bp, Homo sapiens
gagcttcgggagggg

SEQ ID NO: 447891 - DNA, 15 bp, Homo sapiens
ggagcttcgggaggg

SEQ ID NO: 447892 - DNA, 15 bp, Homo sapiens
gggagcttcgggagg

SEQ ID NO: 447893 - DNA, 15 bp, Homo sapiens
tgggagcttcgggag

SEQ ID NO: 447894 - DNA, 15 bp, Homo sapiens
gtgggagcttcggga

SEQ ID NO: 447895 - DNA, 15 bp, Homo sapiens
cgtgggagcttcggg

SEQ ID NO: 447896 - DNA, 15 bp, Homo sapiens
gcgtgggagcttcgg

SEQ ID NO: 447897 - DNA, 15 bp, Homo sapiens
ggcgtgggagcttcg

SEQ ID NO: 447898 - DNA, 15 bp, Homo sapiens
tggcgtgggagcttc

SEQ ID NO: 447899 - DNA, 15 bp, Homo sapiens
gtggcgtgggagctt

SEQ ID NO: 447900 - DNA, 15 bp, Homo sapiens
tgtggcgtgggagct

SEQ ID NO: 447901 - DNA, 15 bp, Homo sapiens
gtgtggcgtgggagc

SEQ ID NO: 447902 - DNA, 15 bp, Homo sapiens
ggtgtggcgtgggag

SEQ ID NO: 447903 - DNA, 15 bp, Homo sapiens
gggtgtggcgtggga

SEQ ID NO: 447904 - DNA, 15 bp, Homo sapiens
ggggtgtggcgtggg

SEQ ID NO: 447905 - DNA, 15 bp, Homo sapiens
tggggtgtggcgtgg

SEQ ID NO: 447906 - DNA, 15 bp, Homo sapiens
gtggggtgtggcgtg

SEQ ID NO: 447907 - DNA, 15 bp, Homo sapiens
tgtggggtgtggcgt

SEQ ID NO: 447908 - DNA, 15 bp, Homo sapiens
gtgtggggtgtggcg

SEQ ID NO: 447909 - DNA, 15 bp, Homo sapiens
ggtgtggggtgtggc

SEQ ID NO: 447910 - DNA, 15 bp, Homo sapiens
gggtgtggggtgtgg

SEQ ID NO: 447911 - DNA, 15 bp, Homo sapiens
ggggtgtggggtgtg

SEQ ID NO: 447912 - DNA, 15 bp, Homo sapiens
cggggtgtggggtgt

SEQ ID NO: 447913 - DNA, 15 bp, Homo sapiens
gcggggtgtggggtg

SEQ ID NO: 447914 - DNA, 15 bp, Homo sapiens
tgcggggtgtggggt

SEQ ID NO: 447915 - DNA, 15 bp, Homo sapiens
ctgcggggtgtgggg

SEQ ID NO: 447916 - DNA, 15 bp, Homo sapiens
cctgcggggtgtggg

SEQ ID NO: 447917 - DNA, 15 bp, Homo sapiens
acctgcggggtgtgg

SEQ ID NO: 447918 - DNA, 15 bp, Homo sapiens
aacctgcggggtgtg

SEQ ID NO: 447919 - DNA, 15 bp, Homo sapiens
taacctgcggggtgt

SEQ ID NO: 447920 - DNA, 15 bp, Homo sapiens
ataacctgcggggtg

SEQ ID NO: 447921 - DNA, 15 bp, Homo sapiens
gataacctgcggggt

SEQ ID NO: 447922 - DNA, 15 bp, Homo sapiens
cgataacctgcgggg

SEQ ID NO: 447923 - DNA, 15 bp, Homo sapiens
gcgataacctgcggg

SEQ ID NO: 447924 - DNA, 15 bp, Homo sapiens
tgcgataacctgcgg

SEQ ID NO: 447925 - DNA, 15 bp, Homo sapiens
ttgcgataacctgcg

SEQ ID NO: 447926 - DNA, 15 bp, Homo sapiens
gttgcgataacctgc

SEQ ID NO: 447927 - DNA, 15 bp, Homo sapiens
agttgcgataacctg

SEQ ID NO: 447928 - DNA, 15 bp, Homo sapiens
cagttgcgataacct

SEQ ID NO: 447929 - DNA, 15 bp, Homo sapiens
gcagttgcgataacc

SEQ ID NO: 447930 - DNA, 15 bp, Homo sapiens
ggcagttgcgataac

SEQ ID NO: 447931 - DNA, 15 bp, Homo sapiens
gggcagttgcgataa

SEQ ID NO: 447932 - DNA, 15 bp, Homo sapiens
agggcagttgcgata

SEQ ID NO: 447933 - DNA, 15 bp, Homo sapiens
tagggcagttgcgat

SEQ ID NO: 447934 - DNA, 15 bp, Homo sapiens
ctagggcagttgcga

SEQ ID NO: 447935 - DNA, 15 bp, Homo sapiens
tctagggcagttgcg

SEQ ID NO: 447936 - DNA, 15 bp, Homo sapiens
ctctagggcagttgc

SEQ ID NO: 447937 - DNA, 15 bp, Homo sapiens
cctctagggcagttg

SEQ ID NO: 447938 - DNA, 15 bp, Homo sapiens
gcctctagggcagtt

SEQ ID NO: 447939 - DNA, 15 bp, Homo sapiens
agcctctagggcagt

SEQ ID NO: 447940 - DNA, 15 bp, Homo sapiens
cagcctctagggcag

SEQ ID NO: 447941 - DNA, 15 bp, Homo sapiens
gcagcctctagggca

SEQ ID NO: 447942 - DNA, 15 bp, Homo sapiens
ggcagcctctagggc

SEQ ID NO: 447943 - DNA, 15 bp, Homo sapiens
aggcagcctctaggg

SEQ ID NO: 447944 - DNA, 15 bp, Homo sapiens
caggcagcctctagg

SEQ ID NO: 447945 - DNA, 15 bp, Homo sapiens
gcaggcagcctctag

SEQ ID NO: 447946 - DNA, 15 bp, Homo sapiens
cgcaggcagcctcta

SEQ ID NO: 447947 - DNA, 15 bp, Homo sapiens
tcgcaggcagcctct

SEQ ID NO: 447948 - DNA, 15 bp, Homo sapiens
gtcgcaggcagcctc

SEQ ID NO: 447949 - DNA, 15 bp, Homo sapiens
ggtcgcaggcagcct

SEQ ID NO: 447950 - DNA, 15 bp, Homo sapiens
tggtcgcaggcagcc

SEQ ID NO: 447951 - DNA, 15 bp, Homo sapiens
atggtcgcaggcagc

SEQ ID NO: 447952 - DNA, 15 bp, Homo sapiens
aatggtcgcaggcag

SEQ ID NO: 447953 - DNA, 15 bp, Homo sapiens
aaatggtcgcaggca

SEQ ID NO: 447954 - DNA, 15 bp, Homo sapiens
caaatggtcgcaggc

SEQ ID NO: 447955 - DNA, 15 bp, Homo sapiens
gcaaatggtcgcagg

SEQ ID NO: 447956 - DNA, 15 bp, Homo sapiens
tgcaaatggtcgcag

SEQ ID NO: 447957 - DNA, 15 bp, Homo sapiens
ctgcaaatggtcgca

SEQ ID NO: 447958 - DNA, 15 bp, Homo sapiens
gctgcaaatggtcgc

SEQ ID NO: 447959 - DNA, 15 bp, Homo sapiens
agctgcaaatggtcg

SEQ ID NO: 447960 - DNA, 15 bp, Homo sapiens
aagctgcaaatggtc

SEQ ID NO: 447961 - DNA, 15 bp, Homo sapiens
caagctgcaaatggt

SEQ ID NO: 447962 - DNA, 15 bp, Homo sapiens
acaagctgcaaatgg

SEQ ID NO: 447963 - DNA, 15 bp, Homo sapiens
cacaagctgcaaatg

SEQ ID NO: 447964 - DNA, 15 bp, Homo sapiens
tcacaagctgcaaat

SEQ ID NO: 447965 - DNA, 15 bp, Homo sapiens
ttcacaagctgcaaa

SEQ ID NO: 447966 - DNA, 15 bp, Homo sapiens
tttcacaagctgcaa

SEQ ID NO: 447967 - DNA, 15 bp, Homo sapiens
ctttcacaagctgca

SEQ ID NO: 447968 - DNA, 15 bp, Homo sapiens
actttcacaagctgc

SEQ ID NO: 447969 - DNA, 15 bp, Homo sapiens
cactttcacaagctg

SEQ ID NO: 447970 - DNA, 15 bp, Homo sapiens
tcactttcacaagct

SEQ ID NO: 447971 - DNA, 15 bp, Homo sapiens
atcactttcacaagc

SEQ ID NO: 447972 - DNA, 15 bp, Homo sapiens
aatcactttcacaag

SEQ ID NO: 447973 - DNA, 15 bp, Homo sapiens
aaatcactttcacaa

SEQ ID NO: 447974 - DNA, 15 bp, Homo sapiens
aaaatcactttcaca

SEQ ID NO: 447975 - DNA, 15 bp, Homo sapiens
gaaaatcactttcac

SEQ ID NO: 447976 - DNA, 15 bp, Homo sapiens
agaaaatcactttca

SEQ ID NO: 447977 - DNA, 15 bp, Homo sapiens
gagaaaatcactttc

SEQ ID NO: 447978 - DNA, 15 bp, Homo sapiens
tgagaaaatcacttt

SEQ ID NO: 447979 - DNA, 15 bp, Homo sapiens
ctgagaaaatcactt

SEQ ID NO: 447980 - DNA, 15 bp, Homo sapiens
gctgagaaaatcact

SEQ ID NO: 447981 - DNA, 15 bp, Homo sapiens
ggctgagaaaatcac

SEQ ID NO: 447982 - DNA, 15 bp, Homo sapiens
gggctgagaaaatca

SEQ ID NO: 447983 - DNA, 15 bp, Homo sapiens
agggctgagaaaatc

SEQ ID NO: 447984 - DNA, 15 bp, Homo sapiens
aagggctgagaaaat

SEQ ID NO: 447985 - DNA, 15 bp, Homo sapiens
aaagggctgagaaaa

SEQ ID NO: 447986 - DNA, 15 bp, Homo sapiens
caaagggctgagaaa

SEQ ID NO: 447987 - DNA, 15 bp, Homo sapiens
gcaaagggctgagaa

SEQ ID NO: 447988 - DNA, 15 bp, Homo sapiens
agcaaagggctgaga

SEQ ID NO: 447989 - DNA, 15 bp, Homo sapiens
cagcaaagggctgag

SEQ ID NO: 447990 - DNA, 15 bp, Homo sapiens
tcagcaaagggctga

SEQ ID NO: 447991 - DNA, 15 bp, Homo sapiens
ctcagcaaagggctg

SEQ ID NO: 447992 - DNA, 15 bp, Homo sapiens
tctcagcaaagggct

SEQ ID NO: 447993 - DNA, 15 bp, Homo sapiens
atctcagcaaagggc

SEQ ID NO: 447994 - DNA, 15 bp, Homo sapiens
tatctcagcaaaggg

SEQ ID NO: 447995 - DNA, 15 bp, Homo sapiens
ttatctcagcaaagg

SEQ ID NO: 447996 - DNA, 15 bp, Homo sapiens
attatctcagcaaag

SEQ ID NO: 447997 - DNA, 15 bp, Homo sapiens
cattatctcagcaaa

SEQ ID NO: 447998 - DNA, 15 bp, Homo sapiens
acattatctcagcaa

SEQ ID NO: 447999 - DNA, 15 bp, Homo sapiens
gacattatctcagca

SEQ ID NO: 448000 - DNA, 15 bp, Homo sapiens
ggacattatctcagc

SEQ ID NO: 448001 - DNA, 15 bp, Homo sapiens
gggacattatctcag

SEQ ID NO: 448002 - DNA, 15 bp, Homo sapiens
agggacattatctca

SEQ ID NO: 448003 - DNA, 15 bp, Homo sapiens
cagggacattatctc

SEQ ID NO: 448004 - DNA, 15 bp, Homo sapiens
ccagggacattatct

SEQ ID NO: 448005 - DNA, 15 bp, Homo sapiens
cccagggacattatc

SEQ ID NO: 448006 - DNA, 15 bp, Homo sapiens
tcccagggacattat

SEQ ID NO: 448007 - DNA, 15 bp, Homo sapiens
gtcccagggacatta

SEQ ID NO: 448008 - DNA, 15 bp, Homo sapiens
tgtcccagggacatt

SEQ ID NO: 448009 - DNA, 15 bp, Homo sapiens
ttgtcccagggacat

SEQ ID NO: 448010 - DNA, 15 bp, Homo sapiens
attgtcccagggaca

SEQ ID NO: 448011 - DNA, 15 bp, Homo sapiens
cattgtcccagggac

SEQ ID NO: 448012 - DNA, 15 bp, Homo sapiens
tcattgtcccaggga

SEQ ID NO: 448013 - DNA, 15 bp, Homo sapiens
gtcattgtcccaggg

SEQ ID NO: 448014 - DNA, 15 bp, Homo sapiens
ggtcattgtcccagg

SEQ ID NO: 448015 - DNA, 15 bp, Homo sapiens
aggtcattgtcccag

SEQ ID NO: 448016 - DNA, 15 bp, Homo sapiens
aaggtcattgtccca

SEQ ID NO: 448017 - DNA, 15 bp, Homo sapiens
aaaggtcattgtccc

SEQ ID NO: 448018 - DNA, 15 bp, Homo sapiens
taaaggtcattgtcc

SEQ ID NO: 448019 - DNA, 15 bp, Homo sapiens
ctaaaggtcattgtc

SEQ ID NO: 448020 - DNA, 15 bp, Homo sapiens
actaaaggtcattgt

SEQ ID NO: 448021 - DNA, 15 bp, Homo sapiens
tactaaaggtcattg

SEQ ID NO: 448022 - DNA, 15 bp, Homo sapiens
ctactaaaggtcatt

SEQ ID NO: 448023 - DNA, 15 bp, Homo sapiens
tctactaaaggtcat

SEQ ID NO: 448024 - DNA, 15 bp, Homo sapiens
atctactaaaggtca

SEQ ID NO: 448025 - DNA, 15 bp, Homo sapiens
catctactaaaggtc

SEQ ID NO: 448026 - DNA, 15 bp, Homo sapiens
gcatctactaaaggt

SEQ ID NO: 448027 - DNA, 15 bp, Homo sapiens
tgcatctactaaagg

SEQ ID NO: 448028 - DNA, 15 bp, Homo sapiens
ctgcatctactaaag

SEQ ID NO: 448029 - DNA, 15 bp, Homo sapiens
tctgcatctactaaa

SEQ ID NO: 448030 - DNA, 15 bp, Homo sapiens
ctctgcatctactaa

SEQ ID NO: 448031 - DNA, 15 bp, Homo sapiens
tctctgcatctacta

SEQ ID NO: 448032 - DNA, 15 bp, Homo sapiens
ctctctgcatctact

SEQ ID NO: 448033 - DNA, 15 bp, Homo sapiens
tctctctgcatctac

SEQ ID NO: 448034 - DNA, 15 bp, Homo sapiens
atctctctgcatcta

SEQ ID NO: 448035 - DNA, 15 bp, Homo sapiens
aatctctctgcatct

SEQ ID NO: 448036 - DNA, 15 bp, Homo sapiens
caatctctctgcatc

SEQ ID NO: 448037 - DNA, 15 bp, Homo sapiens
gcaatctctctgcat

SEQ ID NO: 448038 - DNA, 15 bp, Homo sapiens
tgcaatctctctgca

SEQ ID NO: 448039 - DNA, 15 bp, Homo sapiens
gtgcaatctctctgc

SEQ ID NO: 448040 - DNA, 15 bp, Homo sapiens
agtgcaatctctctg

SEQ ID NO: 448041 - DNA, 15 bp, Homo sapiens
cagtgcaatctctct

SEQ ID NO: 448042 - DNA, 15 bp, Homo sapiens
gcagtgcaatctctc

SEQ ID NO: 448043 - DNA, 15 bp, Homo sapiens
ggcagtgcaatctct

SEQ ID NO: 448044 - DNA, 15 bp, Homo sapiens
tggcagtgcaatctc

SEQ ID NO: 448045 - DNA, 15 bp, Homo sapiens
gtggcagtgcaatct

SEQ ID NO: 448046 - DNA, 15 bp, Homo sapiens
ggtggcagtgcaatc

SEQ ID NO: 448047 - DNA, 15 bp, Homo sapiens
gggtggcagtgcaat

SEQ ID NO: 448048 - DNA, 15 bp, Homo sapiens
ggggtggcagtgcaa

SEQ ID NO: 448049 - DNA, 15 bp, Homo sapiens
gggggtggcagtgca

SEQ ID NO: 448050 - DNA, 15 bp, Homo sapiens
tgggggtggcagtgc

SEQ ID NO: 448051 - DNA, 15 bp, Homo sapiens
ctgggggtggcagtg

SEQ ID NO: 448052 - DNA, 15 bp, Homo sapiens
gctgggggtggcagt

SEQ ID NO: 448053 - DNA, 15 bp, Homo sapiens
agctgggggtggcag

SEQ ID NO: 448054 - DNA, 15 bp, Homo sapiens
cagctgggggtggca

SEQ ID NO: 448055 - DNA, 15 bp, Homo sapiens
gcagctgggggtggc

SEQ ID NO: 448056 - DNA, 15 bp, Homo sapiens
agcagctgggggtgg

SEQ ID NO: 448057 - DNA, 15 bp, Homo sapiens
cagcagctgggggtg

SEQ ID NO: 448058 - DNA, 15 bp, Homo sapiens
ccagcagctgggggt

SEQ ID NO: 448059 - DNA, 15 bp, Homo sapiens
gccagcagctggggg

SEQ ID NO: 448060 - DNA, 15 bp, Homo sapiens
agccagcagctgggg

SEQ ID NO: 448061 - DNA, 15 bp, Homo sapiens
aagccagcagctggg

SEQ ID NO: 448062 - DNA, 15 bp, Homo sapiens
caagccagcagctgg

SEQ ID NO: 448063 - DNA, 15 bp, Homo sapiens
ccaagccagcagctg

SEQ ID NO: 448064 - DNA, 15 bp, Homo sapiens
cccaagccagcagct

SEQ ID NO: 448065 - DNA, 15 bp, Homo sapiens
tcccaagccagcagc

SEQ ID NO: 448066 - DNA, 15 bp, Homo sapiens
ttcccaagccagcag

SEQ ID NO: 448067 - DNA, 15 bp, Homo sapiens
gttcccaagccagca

SEQ ID NO: 448068 - DNA, 15 bp, Homo sapiens
agttcccaagccagc

SEQ ID NO: 448069 - DNA, 15 bp, Homo sapiens
gagttcccaagccag

SEQ ID NO: 448070 - DNA, 15 bp, Homo sapiens
agagttcccaagcca

SEQ ID NO: 448071 - DNA, 15 bp, Homo sapiens
gagagttcccaagcc

SEQ ID NO: 448072 - DNA, 15 bp, Homo sapiens
ggagagttcccaagc

SEQ ID NO: 448073 - DNA, 15 bp, Homo sapiens
tggagagttcccaag

SEQ ID NO: 448074 - DNA, 15 bp, Homo sapiens
ctggagagttcccaa

SEQ ID NO: 448075 - DNA, 15 bp, Homo sapiens
gctggagagttccca

SEQ ID NO: 448076 - DNA, 15 bp, Homo sapiens
tgctggagagttccc

SEQ ID NO: 448077 - DNA, 15 bp, Homo sapiens
atgctggagagttcc

SEQ ID NO: 448078 - DNA, 15 bp, Homo sapiens
catgctggagagttc

SEQ ID NO: 448079 - DNA, 15 bp, Homo sapiens
acatgctggagagtt

SEQ ID NO: 448080 - DNA, 15 bp, Homo sapiens
aacatgctggagagt

SEQ ID NO: 448081 - DNA, 15 bp, Homo sapiens
aaacatgctggagag

SEQ ID NO: 448082 - DNA, 15 bp, Homo sapiens
taaacatgctggaga

SEQ ID NO: 448083 - DNA, 15 bp, Homo sapiens
gtaaacatgctggag

SEQ ID NO: 448084 - DNA, 15 bp, Homo sapiens
agtaaacatgctgga

SEQ ID NO: 448085 - DNA, 15 bp, Homo sapiens
ctgcctggtttcttt

SEQ ID NO: 448086 - DNA, 15 bp, Homo sapiens
cctgcctggtttctt

SEQ ID NO: 448087 - DNA, 15 bp, Homo sapiens
ccctgcctggtttct

SEQ ID NO: 448088 - DNA, 15 bp, Homo sapiens
tccctgcctggtttc

SEQ ID NO: 448089 - DNA, 15 bp, Homo sapiens
ctccctgcctggttt

SEQ ID NO: 448090 - DNA, 15 bp, Homo sapiens
actccctgcctggtt

SEQ ID NO: 448091 - DNA, 15 bp, Homo sapiens
cactccctgcctggt

SEQ ID NO: 448092 - DNA, 15 bp, Homo sapiens
acactccctgcctgg

SEQ ID NO: 448093 - DNA, 15 bp, Homo sapiens
tacactccctgcctg

SEQ ID NO: 448094 - DNA, 15 bp, Homo sapiens
atacactccctgcct

SEQ ID NO: 448095 - DNA, 15 bp, Homo sapiens
tatacactccctgcc

SEQ ID NO: 448096 - DNA, 15 bp, Homo sapiens
ttatacactccctgc

SEQ ID NO: 448097 - DNA, 15 bp, Homo sapiens
cttatacactccctg

SEQ ID NO: 448098 - DNA, 15 bp, Homo sapiens
ccttatacactccct

SEQ ID NO: 448099 - DNA, 15 bp, Homo sapiens
accttatacactccc

SEQ ID NO: 448100 - DNA, 15 bp, Homo sapiens
caccttatacactcc

SEQ ID NO: 448101 - DNA, 15 bp, Homo sapiens
acaccttatacactc

SEQ ID NO: 448102 - DNA, 15 bp, Homo sapiens
cacaccttatacact

SEQ ID NO: 448103 - DNA, 15 bp, Homo sapiens
acacaccttatacac

SEQ ID NO: 448104 - DNA, 15 bp, Homo sapiens
tacacaccttataca

SEQ ID NO: 448105 - DNA, 15 bp, Homo sapiens
ttacacaccttatac

SEQ ID NO: 448106 - DNA, 15 bp, Homo sapiens
cttacacaccttata

SEQ ID NO: 448107 - DNA, 15 bp, Homo sapiens
acttacacaccttat

SEQ ID NO: 448108 - DNA, 15 bp, Homo sapiens
gacttacacacctta

SEQ ID NO: 448109 - DNA, 15 bp, Homo sapiens
ggacttacacacctt

SEQ ID NO: 448110 - DNA, 15 bp, Homo sapiens
aggacttacacacct

SEQ ID NO: 448111 - DNA, 15 bp, Homo sapiens
aaggacttacacacc

SEQ ID NO: 448112 - DNA, 15 bp, Homo sapiens
aaaggacttacacac

SEQ ID NO: 448113 - DNA, 15 bp, Homo sapiens
caaaggacttacaca

SEQ ID NO: 448114 - DNA, 15 bp, Homo sapiens
acaaaggacttacac

SEQ ID NO: 448115 - DNA, 15 bp, Homo sapiens
tacaaaggacttaca

SEQ ID NO: 448116 - DNA, 15 bp, Homo sapiens
ttacaaaggacttac

SEQ ID NO: 448117 - DNA, 15 bp, Homo sapiens
cttacaaaggactta

SEQ ID NO: 448118 - DNA, 15 bp, Homo sapiens
gcttacaaaggactt

SEQ ID NO: 448119 - DNA, 15 bp, Homo sapiens
tgcttacaaaggact

SEQ ID NO: 448120 - DNA, 15 bp, Homo sapiens
ctgcttacaaaggac

SEQ ID NO: 448121 - DNA, 15 bp, Homo sapiens
actgcttacaaagga

SEQ ID NO: 448122 - DNA, 15 bp, Homo sapiens
tactgcttacaaagg

SEQ ID NO: 448123 - DNA, 15 bp, Homo sapiens
ttactgcttacaaag

SEQ ID NO: 448124 - DNA, 15 bp, Homo sapiens
tttactgcttacaaa

SEQ ID NO: 448125 - DNA, 15 bp, Homo sapiens
atttactgcttacaa

SEQ ID NO: 448126 - DNA, 15 bp, Homo sapiens
gatttactgcttaca

SEQ ID NO: 448127 - DNA, 15 bp, Homo sapiens
tgatttactgcttac

SEQ ID NO: 448128 - DNA, 15 bp, Homo sapiens
gtgatttactgctta

SEQ ID NO: 448129 - DNA, 15 bp, Homo sapiens
agtgatttactgctt

SEQ ID NO: 448130 - DNA, 15 bp, Homo sapiens
tagtgatttactgct

SEQ ID NO: 448131 - DNA, 15 bp, Homo sapiens
ttagtgatttactgc

SEQ ID NO: 448132 - DNA, 15 bp, Homo sapiens
tttagtgatttactg

SEQ ID NO: 448133 - DNA, 15 bp, Homo sapiens
gtttagtgatttact

SEQ ID NO: 448134 - DNA, 15 bp, Homo sapiens
tgtttagtgatttac

SEQ ID NO: 448135 - DNA, 15 bp, Homo sapiens
ttgtttagtgattta

SEQ ID NO: 448136 - DNA, 15 bp, Homo sapiens
tttgtttagtgattt

SEQ ID NO: 448137 - DNA, 15 bp, Homo sapiens
atttgtttagtgatt

SEQ ID NO: 448138 - DNA, 15 bp, Homo sapiens
gatttgtttagtgat

SEQ ID NO: 448139 - DNA, 15 bp, Homo sapiens
ggatttgtttagtga

SEQ ID NO: 448140 - DNA, 15 bp, Homo sapiens
aggatttgtttagtg

SEQ ID NO: 448141 - DNA, 15 bp, Homo sapiens
taggatttgtttagt

SEQ ID NO: 448142 - DNA, 15 bp, Homo sapiens
ctaggatttgtttag

SEQ ID NO: 448143 - DNA, 15 bp, Homo sapiens
tctaggatttgttta

SEQ ID NO: 448144 - DNA, 15 bp, Homo sapiens
gtctaggatttgttt

SEQ ID NO: 448145 - DNA, 15 bp, Homo sapiens
ggtctaggatttgtt

SEQ ID NO: 448146 - DNA, 15 bp, Homo sapiens
gggtctaggatttgt

SEQ ID NO: 448147 - DNA, 15 bp, Homo sapiens
agggtctaggatttg

SEQ ID NO: 448148 - DNA, 15 bp, Homo sapiens
tagggtctaggattt

SEQ ID NO: 448149 - DNA, 15 bp, Homo sapiens
atagggtctaggatt

SEQ ID NO: 448150 - DNA, 15 bp, Homo sapiens
catagggtctaggat

SEQ ID NO: 448151 - DNA, 15 bp, Homo sapiens
acatagggtctagga

SEQ ID NO: 448152 - DNA, 15 bp, Homo sapiens
aacatagggtctagg

SEQ ID NO: 448153 - DNA, 15 bp, Homo sapiens
taacatagggtctag

SEQ ID NO: 448154 - DNA, 15 bp, Homo sapiens
ataacatagggtcta

SEQ ID NO: 448155 - DNA, 15 bp, Homo sapiens
gataacatagggtct

SEQ ID NO: 448156 - DNA, 15 bp, Homo sapiens
tgataacatagggtc

SEQ ID NO: 448157 - DNA, 15 bp, Homo sapiens
ctgataacatagggt

SEQ ID NO: 448158 - DNA, 15 bp, Homo sapiens
cctgataacataggg

SEQ ID NO: 448159 - DNA, 15 bp, Homo sapiens
ccctgataacatagg

SEQ ID NO: 448160 - DNA, 15 bp, Homo sapiens
tccctgataacatag

SEQ ID NO: 448161 - DNA, 15 bp, Homo sapiens
ctccctgataacata

SEQ ID NO: 448162 - DNA, 15 bp, Homo sapiens
cctccctgataacat

SEQ ID NO: 448163 - DNA, 15 bp, Homo sapiens
gcctccctgataaca

SEQ ID NO: 448164 - DNA, 15 bp, Homo sapiens
tgcctccctgataac

SEQ ID NO: 448165 - DNA, 15 bp, Homo sapiens
ctgcctccctgataa

SEQ ID NO: 448166 - DNA, 15 bp, Homo sapiens
actgcctccctgata

SEQ ID NO: 448167 - DNA, 15 bp, Homo sapiens
aactgcctccctgat

SEQ ID NO: 448168 - DNA, 15 bp, Homo sapiens
caactgcctccctga

SEQ ID NO: 448169 - DNA, 15 bp, Homo sapiens
ccaactgcctccctg

SEQ ID NO: 448170 - DNA, 15 bp, Homo sapiens
gccaactgcctccct

SEQ ID NO: 448171 - DNA, 15 bp, Homo sapiens
ggccaactgcctccc

SEQ ID NO: 448172 - DNA, 15 bp, Homo sapiens
cggccaactgcctcc

SEQ ID NO: 448173 - DNA, 15 bp, Homo sapiens
gcggccaactgcctc

SEQ ID NO: 448174 - DNA, 15 bp, Homo sapiens
tgcggccaactgcct

SEQ ID NO: 448175 - DNA, 15 bp, Homo sapiens
gtgcggccaactgcc

SEQ ID NO: 448176 - DNA, 15 bp, Homo sapiens
cgtgcggccaactgc

SEQ ID NO: 448177 - DNA, 15 bp, Homo sapiens
ccgtgcggccaactg

SEQ ID NO: 448178 - DNA, 15 bp, Homo sapiens
cccgtgcggccaact

SEQ ID NO: 448179 - DNA, 15 bp, Homo sapiens
tcccgtgcggccaac

SEQ ID NO: 448180 - DNA, 15 bp, Homo sapiens
atcccgtgcggccaa

SEQ ID NO: 448181 - DNA, 15 bp, Homo sapiens
tatcccgtgcggcca

SEQ ID NO: 448182 - DNA, 15 bp, Homo sapiens
ctatcccgtgcggcc

SEQ ID NO: 448183 - DNA, 15 bp, Homo sapiens
gctatcccgtgcggc

SEQ ID NO: 448184 - DNA, 15 bp, Homo sapiens
cgctatcccgtgcgg

SEQ ID NO: 448185 - DNA, 15 bp, Homo sapiens
acgctatcccgtgcg

SEQ ID NO: 448186 - DNA, 15 bp, Homo sapiens
tacgctatcccgtgc

SEQ ID NO: 448187 - DNA, 15 bp, Homo sapiens
ctacgctatcccgtg

SEQ ID NO: 448188 - DNA, 15 bp, Homo sapiens
actacgctatcccgt

SEQ ID NO: 448189 - DNA, 15 bp, Homo sapiens
aactacgctatcccg

SEQ ID NO: 448190 - DNA, 15 bp, Homo sapiens
taactacgctatccc

SEQ ID NO: 448191 - DNA, 15 bp, Homo sapiens
gtaactacgctatcc

SEQ ID NO: 448192 - DNA, 15 bp, Homo sapiens
tgtaactacgctatc

SEQ ID NO: 448193 - DNA, 15 bp, Homo sapiens
ttgtaactacgctat

SEQ ID NO: 448194 - DNA, 15 bp, Homo sapiens
cttgtaactacgcta

SEQ ID NO: 448195 - DNA, 15 bp, Homo sapiens
tcttgtaactacgct

SEQ ID NO: 448196 - DNA, 15 bp, Homo sapiens
ctcttgtaactacgc

SEQ ID NO: 448197 - DNA, 15 bp, Homo sapiens
tctcttgtaactacg

SEQ ID NO: 448198 - DNA, 15 bp, Homo sapiens
gtctcttgtaactac

SEQ ID NO: 448199 - DNA, 15 bp, Homo sapiens
agtctcttgtaacta

SEQ ID NO: 448200 - DNA, 15 bp, Homo sapiens
tagtctcttgtaact

SEQ ID NO: 448201 - DNA, 15 bp, Homo sapiens
atagtctcttgtaac

SEQ ID NO: 448202 - DNA, 15 bp, Homo sapiens
tatagtctcttgtaa

SEQ ID NO: 448203 - DNA, 15 bp, Homo sapiens
ctatagtctcttgta

SEQ ID NO: 448204 - DNA, 15 bp, Homo sapiens
cctatagtctcttgt

SEQ ID NO: 448205 - DNA, 15 bp, Homo sapiens
gcctatagtctcttg

SEQ ID NO: 448206 - DNA, 15 bp, Homo sapiens
cgcctatagtctctt

SEQ ID NO: 448207 - DNA, 15 bp, Homo sapiens
ccgcctatagtctct

SEQ ID NO: 448208 - DNA, 15 bp, Homo sapiens
tccgcctatagtctc

SEQ ID NO: 448209 - DNA, 15 bp, Homo sapiens
ctccgcctatagtct

SEQ ID NO: 448210 - DNA, 15 bp, Homo sapiens
tctccgcctatagtc

SEQ ID NO: 448211 - DNA, 15 bp, Homo sapiens
atctccgcctatagt

SEQ ID NO: 448212 - DNA, 15 bp, Homo sapiens
catctccgcctatag

SEQ ID NO: 448213 - DNA, 15 bp, Homo sapiens
ccatctccgcctata

SEQ ID NO: 448214 - DNA, 15 bp, Homo sapiens
cccatctccgcctat

SEQ ID NO: 448215 - DNA, 15 bp, Homo sapiens
ccccatctccgccta

SEQ ID NO: 448216 - DNA, 15 bp, Homo sapiens
cccccatctccgcct

SEQ ID NO: 448217 - DNA, 15 bp, Homo sapiens
tcccccatctccgcc

SEQ ID NO: 448218 - DNA, 15 bp, Homo sapiens
atcccccatctccgc

SEQ ID NO: 448219 - DNA, 15 bp, Homo sapiens
tatcccccatctccg

SEQ ID NO: 448220 - DNA, 15 bp, Homo sapiens
atatcccccatctcc

SEQ ID NO: 448221 - DNA, 15 bp, Homo sapiens
gatatcccccatctc

SEQ ID NO: 448222 - DNA, 15 bp, Homo sapiens
agatatcccccatct

SEQ ID NO: 448223 - DNA, 15 bp, Homo sapiens
cagatatcccccatc

SEQ ID NO: 448224 - DNA, 15 bp, Homo sapiens
acagatatcccccat

SEQ ID NO: 448225 - DNA, 15 bp, Homo sapiens
gacagatatccccca

SEQ ID NO: 448226 - DNA, 15 bp, Homo sapiens
ggacagatatccccc

SEQ ID NO: 448227 - DNA, 15 bp, Homo sapiens
aggacagatatcccc

SEQ ID NO: 448228 - DNA, 15 bp, Homo sapiens
caggacagatatccc

SEQ ID NO: 448229 - DNA, 15 bp, Homo sapiens
acaggacagatatcc

SEQ ID NO: 448230 - DNA, 15 bp, Homo sapiens
cacaggacagatatc

SEQ ID NO: 448231 - DNA, 15 bp, Homo sapiens
ccacaggacagatat

SEQ ID NO: 448232 - DNA, 15 bp, Homo sapiens
accacaggacagata

SEQ ID NO: 448233 - DNA, 15 bp, Homo sapiens
caccacaggacagat

SEQ ID NO: 448234 - DNA, 15 bp, Homo sapiens
acaccacaggacaga

SEQ ID NO: 448235 - DNA, 15 bp, Homo sapiens
tacaccacaggacag

SEQ ID NO: 448236 - DNA, 15 bp, Homo sapiens
ctacaccacaggaca

SEQ ID NO: 448237 - DNA, 15 bp, Homo sapiens
tctacaccacaggac

SEQ ID NO: 448238 - DNA, 15 bp, Homo sapiens
atctacaccacagga

SEQ ID NO: 448239 - DNA, 15 bp, Homo sapiens
tatctacaccacagg

SEQ ID NO: 448240 - DNA, 15 bp, Homo sapiens
ttatctacaccacag

SEQ ID NO: 448241 - DNA, 15 bp, Homo sapiens
tttatctacaccaca

SEQ ID NO: 448242 - DNA, 15 bp, Homo sapiens
gtttatctacaccac

SEQ ID NO: 448243 - DNA, 15 bp, Homo sapiens
tgtttatctacacca

SEQ ID NO: 448244 - DNA, 15 bp, Homo sapiens
ctgtttatctacacc

SEQ ID NO: 448245 - DNA, 15 bp, Homo sapiens
gctgtttatctacac

SEQ ID NO: 448246 - DNA, 15 bp, Homo sapiens
ggctgtttatctaca

SEQ ID NO: 448247 - DNA, 15 bp, Homo sapiens
aggctgtttatctac

SEQ ID NO: 448248 - DNA, 15 bp, Homo sapiens
taggctgtttatcta

SEQ ID NO: 448249 - DNA, 15 bp, Homo sapiens
ttaggctgtttatct

SEQ ID NO: 448250 - DNA, 15 bp, Homo sapiens
attaggctgtttatc

SEQ ID NO: 448251 - DNA, 15 bp, Homo sapiens
gattaggctgtttat

SEQ ID NO: 448252 - DNA, 15 bp, Homo sapiens
tgattaggctgttta

SEQ ID NO: 448253 - DNA, 15 bp, Homo sapiens
ttgattaggctgttt

SEQ ID NO: 448254 - DNA, 15 bp, Homo sapiens
attgattaggctgtt

SEQ ID NO: 448255 - DNA, 15 bp, Homo sapiens
tattgattaggctgt

SEQ ID NO: 448256 - DNA, 15 bp, Homo sapiens
gtattgattaggctg

SEQ ID NO: 448257 - DNA, 15 bp, Homo sapiens
tgtattgattaggct

SEQ ID NO: 448258 - DNA, 15 bp, Homo sapiens
gtgtattgattaggc

SEQ ID NO: 448259 - DNA, 15 bp, Homo sapiens
tgtgtattgattagg

SEQ ID NO: 448260 - DNA, 15 bp, Homo sapiens
gtgtgtattgattag

SEQ ID NO: 448261 - DNA, 15 bp, Homo sapiens
tgtgtgtattgatta

SEQ ID NO: 448262 - DNA, 15 bp, Homo sapiens
gtgtgtgtattgatt

SEQ ID NO: 448263 - DNA, 15 bp, Homo sapiens
tgtgtgtgtattgat

SEQ ID NO: 448264 - DNA, 15 bp, Homo sapiens
gtgtgtgtgtattga

SEQ ID NO: 448265 - DNA, 15 bp, Homo sapiens
agtgtgtgtgtattg

SEQ ID NO: 448266 - DNA, 15 bp, Homo sapiens
gagtgtgtgtgtatt

SEQ ID NO: 448267 - DNA, 15 bp, Homo sapiens
agagtgtgtgtgtat

SEQ ID NO: 448268 - DNA, 15 bp, Homo sapiens
tagagtgtgtgtgta

SEQ ID NO: 448269 - DNA, 15 bp, Homo sapiens
gtagagtgtgtgtgt

SEQ ID NO: 448270 - DNA, 15 bp, Homo sapiens
tgtagagtgtgtgtg

SEQ ID NO: 448271 - DNA, 15 bp, Homo sapiens
ctgtagagtgtgtgt

SEQ ID NO: 448272 - DNA, 15 bp, Homo sapiens
cctgtagagtgtgtg

SEQ ID NO: 448273 - DNA, 15 bp, Homo sapiens
acctgtagagtgtgt

SEQ ID NO: 448274 - DNA, 15 bp, Homo sapiens
tacctgtagagtgtg

SEQ ID NO: 448275 - DNA, 15 bp, Homo sapiens
ttacctgtagagtgt

SEQ ID NO: 448276 - DNA, 15 bp, Homo sapiens
tttacctgtagagtg

SEQ ID NO: 448277 - DNA, 15 bp, Homo sapiens
atttacctgtagagt

SEQ ID NO: 448278 - DNA, 15 bp, Homo sapiens
tatttacctgtagag

SEQ ID NO: 448279 - DNA, 15 bp, Homo sapiens
gtatttacctgtaga

SEQ ID NO: 448280 - DNA, 15 bp, Homo sapiens
tgtatttacctgtag

SEQ ID NO: 448281 - DNA, 15 bp, Homo sapiens
ctgtatttacctgta

SEQ ID NO: 448282 - DNA, 15 bp, Homo sapiens
gctgtatttacctgt

SEQ ID NO: 448283 - DNA, 15 bp, Homo sapiens
tgctgtatttacctg

SEQ ID NO: 448284 - DNA, 15 bp, Homo sapiens
ttgctgtatttacct

SEQ ID NO: 448285 - DNA, 15 bp, Homo sapiens
attgctgtatttacc

SEQ ID NO: 448286 - DNA, 15 bp, Homo sapiens
aattgctgtatttac

SEQ ID NO: 448287 - DNA, 15 bp, Homo sapiens
aaattgctgtattta

SEQ ID NO: 448288 - DNA, 15 bp, Homo sapiens
gaaattgctgtattt

SEQ ID NO: 448289 - DNA, 15 bp, Homo sapiens
ggaaattgctgtatt

SEQ ID NO: 448290 - DNA, 15 bp, Homo sapiens
tggaaattgctgtat

SEQ ID NO: 448291 - DNA, 15 bp, Homo sapiens
atggaaattgctgta

SEQ ID NO: 448292 - DNA, 15 bp, Homo sapiens
tatggaaattgctgt

SEQ ID NO: 448293 - DNA, 15 bp, Homo sapiens
gtatggaaattgctg

SEQ ID NO: 448294 - DNA, 15 bp, Homo sapiens
agtatggaaattgct

SEQ ID NO: 448295 - DNA, 15 bp, Homo sapiens
cagtatggaaattgc

SEQ ID NO: 448296 - DNA, 15 bp, Homo sapiens
tcagtatggaaattg

SEQ ID NO: 448297 - DNA, 15 bp, Homo sapiens
ctcagtatggaaatt

SEQ ID NO: 448298 - DNA, 15 bp, Homo sapiens
gctcagtatggaaat

SEQ ID NO: 448299 - DNA, 15 bp, Homo sapiens
agctcagtatggaaa

SEQ ID NO: 448300 - DNA, 15 bp, Homo sapiens
cagctcagtatggaa

SEQ ID NO: 448301 - DNA, 15 bp, Homo sapiens
acagctcagtatgga

SEQ ID NO: 448302 - DNA, 15 bp, Homo sapiens
cacagctcagtatgg

SEQ ID NO: 448303 - DNA, 15 bp, Homo sapiens
acacagctcagtatg

SEQ ID NO: 448304 - DNA, 15 bp, Homo sapiens
gacacagctcagtat

SEQ ID NO: 448305 - DNA, 15 bp, Homo sapiens
agacacagctcagta

SEQ ID NO: 448306 - DNA, 15 bp, Homo sapiens
tagacacagctcagt

SEQ ID NO: 448307 - DNA, 15 bp, Homo sapiens
gtagacacagctcag

SEQ ID NO: 448308 - DNA, 15 bp, Homo sapiens
ggtagacacagctca

SEQ ID NO: 448309 - DNA, 15 bp, Homo sapiens
tggtagacacagctc

SEQ ID NO: 448310 - DNA, 15 bp, Homo sapiens
ctggtagacacagct

SEQ ID NO: 448311 - DNA, 15 bp, Homo sapiens
tctggtagacacagc

SEQ ID NO: 448312 - DNA, 15 bp, Homo sapiens
ctctggtagacacag

SEQ ID NO: 448313 - DNA, 15 bp, Homo sapiens
cctctggtagacaca

SEQ ID NO: 448314 - DNA, 15 bp, Homo sapiens
ccctctggtagacac

SEQ ID NO: 448315 - DNA, 15 bp, Homo sapiens
gccctctggtagaca

SEQ ID NO: 448316 - DNA, 15 bp, Homo sapiens
tgccctctggtagac

SEQ ID NO: 448317 - DNA, 15 bp, Homo sapiens
ttgccctctggtaga

SEQ ID NO: 448318 - DNA, 15 bp, Homo sapiens
attgccctctggtag

SEQ ID NO: 448319 - DNA, 15 bp, Homo sapiens
tattgccctctggta

SEQ ID NO: 448320 - DNA, 15 bp, Homo sapiens
ctattgccctctggt

SEQ ID NO: 448321 - DNA, 15 bp, Homo sapiens
cctattgccctctgg

SEQ ID NO: 448322 - DNA, 15 bp, Homo sapiens
tcctattgccctctg

SEQ ID NO: 448323 - DNA, 15 bp, Homo sapiens
ctcctattgccctct

SEQ ID NO: 448324 - DNA, 15 bp, Homo sapiens
cctcctattgccctc

SEQ ID NO: 448325 - DNA, 15 bp, Homo sapiens
acctcctattgccct

SEQ ID NO: 448326 - DNA, 15 bp, Homo sapiens
aacctcctattgccc

SEQ ID NO: 448327 - DNA, 15 bp, Homo sapiens
gaacctcctattgcc

SEQ ID NO: 448328 - DNA, 15 bp, Homo sapiens
agaacctcctattgc

SEQ ID NO: 448329 - DNA, 15 bp, Homo sapiens
gagaacctcctattg

SEQ ID NO: 448330 - DNA, 15 bp, Homo sapiens
tgagaacctcctatt

SEQ ID NO: 448331 - DNA, 15 bp, Homo sapiens
ttgagaacctcctat

SEQ ID NO: 448332 - DNA, 15 bp, Homo sapiens
attgagaacctccta

SEQ ID NO: 448333 - DNA, 15 bp, Homo sapiens
aattgagaacctcct

SEQ ID NO: 448334 - DNA, 15 bp, Homo sapiens
gaattgagaacctcc

SEQ ID NO: 448335 - DNA, 15 bp, Homo sapiens
agaattgagaacctc

SEQ ID NO: 448336 - DNA, 15 bp, Homo sapiens
gagaattgagaacct

SEQ ID NO: 448337 - DNA, 15 bp, Homo sapiens
tgagaattgagaacc

SEQ ID NO: 448338 - DNA, 15 bp, Homo sapiens
gtgagaattgagaac

SEQ ID NO: 448339 - DNA, 15 bp, Homo sapiens
ggtgagaattgagaa

SEQ ID NO: 448340 - DNA, 15 bp, Homo sapiens
tggtgagaattgaga

SEQ ID NO: 448341 - DNA, 15 bp, Homo sapiens
gtggtgagaattgag

SEQ ID NO: 448342 - DNA, 15 bp, Homo sapiens
ggtggtgagaattga

SEQ ID NO: 448343 - DNA, 15 bp, Homo sapiens
tggtggtgagaattg

SEQ ID NO: 448344 - DNA, 15 bp, Homo sapiens
ctggtggtgagaatt

SEQ ID NO: 448345 - DNA, 15 bp, Homo sapiens
actggtggtgagaat

SEQ ID NO: 448346 - DNA, 15 bp, Homo sapiens
cactggtggtgagaa

SEQ ID NO: 448347 - DNA, 15 bp, Homo sapiens
tcactggtggtgaga

SEQ ID NO: 448348 - DNA, 15 bp, Homo sapiens
gtcactggtggtgag

SEQ ID NO: 448349 - DNA, 15 bp, Homo sapiens
ggtcactggtggtga

SEQ ID NO: 448350 - DNA, 15 bp, Homo sapiens
gggtcactggtggtg

SEQ ID NO: 448351 - DNA, 15 bp, Homo sapiens
agggtcactggtggt

SEQ ID NO: 448352 - DNA, 15 bp, Homo sapiens
tagggtcactggtgg

SEQ ID NO: 448353 - DNA, 15 bp, Homo sapiens
atagggtcactggtg

SEQ ID NO: 448354 - DNA, 15 bp, Homo sapiens
catagggtcactggt

SEQ ID NO: 448355 - DNA, 15 bp, Homo sapiens
tcatagggtcactgg

SEQ ID NO: 448356 - DNA, 15 bp, Homo sapiens
ttcatagggtcactg

SEQ ID NO: 448357 - DNA, 15 bp, Homo sapiens
attcatagggtcact

SEQ ID NO: 448358 - DNA, 15 bp, Homo sapiens
aattcatagggtcac

SEQ ID NO: 448359 - DNA, 15 bp, Homo sapiens
caattcatagggtca

SEQ ID NO: 448360 - DNA, 15 bp, Homo sapiens
gcaattcatagggtc

SEQ ID NO: 448361 - DNA, 15 bp, Homo sapiens
ggcaattcatagggt

SEQ ID NO: 448362 - DNA, 15 bp, Homo sapiens
gggcaattcataggg

SEQ ID NO: 448363 - DNA, 15 bp, Homo sapiens
agggcaattcatagg

SEQ ID NO: 448364 - DNA, 15 bp, Homo sapiens
cagggcaattcatag

SEQ ID NO: 448365 - DNA, 15 bp, Homo sapiens
acagggcaattcata

SEQ ID NO: 448366 - DNA, 15 bp, Homo sapiens
tacagggcaattcat

SEQ ID NO: 448367 - DNA, 15 bp, Homo sapiens
ctacagggcaattca

SEQ ID NO: 448368 - DNA, 15 bp, Homo sapiens
tctacagggcaattc

SEQ ID NO: 448369 - DNA, 15 bp, Homo sapiens
atctacagggcaatt

SEQ ID NO: 448370 - DNA, 15 bp, Homo sapiens
catctacagggcaat

SEQ ID NO: 448371 - DNA, 15 bp, Homo sapiens
gcatctacagggcaa

SEQ ID NO: 448372 - DNA, 15 bp, Homo sapiens
ggcatctacagggca

SEQ ID NO: 448373 - DNA, 15 bp, Homo sapiens
aggcatctacagggc

SEQ ID NO: 448374 - DNA, 15 bp, Homo sapiens
gaggcatctacaggg

SEQ ID NO: 448375 - DNA, 15 bp, Homo sapiens
agaggcatctacagg

SEQ ID NO: 448376 - DNA, 15 bp, Homo sapiens
cagaggcatctacag

SEQ ID NO: 448377 - DNA, 15 bp, Homo sapiens
acagaggcatctaca

SEQ ID NO: 448378 - DNA, 15 bp, Homo sapiens
gacagaggcatctac

SEQ ID NO: 448379 - DNA, 15 bp, Homo sapiens
ggacagaggcatcta

SEQ ID NO: 448380 - DNA, 15 bp, Homo sapiens
gggacagaggcatct

SEQ ID NO: 448381 - DNA, 15 bp, Homo sapiens
agggacagaggcatc

SEQ ID NO: 448382 - DNA, 15 bp, Homo sapiens
gagggacagaggcat

SEQ ID NO: 448383 - DNA, 15 bp, Homo sapiens
tgagggacagaggca

SEQ ID NO: 448384 - DNA, 15 bp, Homo sapiens
atgagggacagaggc

SEQ ID NO: 448385 - DNA, 15 bp, Homo sapiens
aatgagggacagagg

SEQ ID NO: 448386 - DNA, 15 bp, Homo sapiens
caatgagggacagag

SEQ ID NO: 448387 - DNA, 15 bp, Homo sapiens
ccaatgagggacaga

SEQ ID NO: 448388 - DNA, 15 bp, Homo sapiens
tccaatgagggacag

SEQ ID NO: 448389 - DNA, 15 bp, Homo sapiens
atccaatgagggaca

SEQ ID NO: 448390 - DNA, 15 bp, Homo sapiens
tatccaatgagggac

SEQ ID NO: 448391 - DNA, 15 bp, Homo sapiens
atatccaatgaggga

SEQ ID NO: 448392 - DNA, 15 bp, Homo sapiens
catatccaatgaggg

SEQ ID NO: 448393 - DNA, 15 bp, Homo sapiens
tcatatccaatgagg

SEQ ID NO: 448394 - DNA, 15 bp, Homo sapiens
ctcatatccaatgag

SEQ ID NO: 448395 - DNA, 15 bp, Homo sapiens
cctcatatccaatga

SEQ ID NO: 448396 - DNA, 15 bp, Homo sapiens
acctcatatccaatg

SEQ ID NO: 448397 - DNA, 15 bp, Homo sapiens
cacctcatatccaat

SEQ ID NO: 448398 - DNA, 15 bp, Homo sapiens
ccacctcatatccaa

SEQ ID NO: 448399 - DNA, 15 bp, Homo sapiens
accacctcatatcca

SEQ ID NO: 448400 - DNA, 15 bp, Homo sapiens
taccacctcatatcc

SEQ ID NO: 448401 - DNA, 15 bp, Homo sapiens
gtaccacctcatatc

SEQ ID NO: 448402 - DNA, 15 bp, Homo sapiens
cgtaccacctcatat

SEQ ID NO: 448403 - DNA, 15 bp, Homo sapiens
tcgtaccacctcata

SEQ ID NO: 448404 - DNA, 15 bp, Homo sapiens
ctcgtaccacctcat

SEQ ID NO: 448405 - DNA, 15 bp, Homo sapiens
gctcgtaccacctca

SEQ ID NO: 448406 - DNA, 15 bp, Homo sapiens
cgctcgtaccacctc

SEQ ID NO: 448407 - DNA, 15 bp, Homo sapiens
ccgctcgtaccacct

SEQ ID NO: 448408 - DNA, 15 bp, Homo sapiens
accgctcgtaccacc

SEQ ID NO: 448409 - DNA, 15 bp, Homo sapiens
gaccgctcgtaccac

SEQ ID NO: 448410 - DNA, 15 bp, Homo sapiens
agaccgctcgtacca

SEQ ID NO: 448411 - DNA, 15 bp, Homo sapiens
cagaccgctcgtacc

SEQ ID NO: 448412 - DNA, 15 bp, Homo sapiens
tcagaccgctcgtac

SEQ ID NO: 448413 - DNA, 15 bp, Homo sapiens
ttcagaccgctcgta

SEQ ID NO: 448414 - DNA, 15 bp, Homo sapiens
attcagaccgctcgt

SEQ ID NO: 448415 - DNA, 15 bp, Homo sapiens
gattcagaccgctcg

SEQ ID NO: 448416 - DNA, 15 bp, Homo sapiens
agattcagaccgctc

SEQ ID NO: 448417 - DNA, 15 bp, Homo sapiens
cagattcagaccgct

SEQ ID NO: 448418 - DNA, 15 bp, Homo sapiens
acagattcagaccgc

SEQ ID NO: 448419 - DNA, 15 bp, Homo sapiens
tacagattcagaccg

SEQ ID NO: 448420 - DNA, 15 bp, Homo sapiens
ctacagattcagacc

SEQ ID NO: 448421 - DNA, 15 bp, Homo sapiens
tctacagattcagac

SEQ ID NO: 448422 - DNA, 15 bp, Homo sapiens
gtctacagattcaga

SEQ ID NO: 448423 - DNA, 15 bp, Homo sapiens
agtctacagattcag

SEQ ID NO: 448424 - DNA, 15 bp, Homo sapiens
aagtctacagattca

SEQ ID NO: 448425 - DNA, 15 bp, Homo sapiens
taagtctacagattc

SEQ ID NO: 448426 - DNA, 15 bp, Homo sapiens
ctaagtctacagatt

SEQ ID NO: 448427 - DNA, 15 bp, Homo sapiens
tctaagtctacagat

SEQ ID NO: 448428 - DNA, 15 bp, Homo sapiens
gtctaagtctacaga

SEQ ID NO: 448429 - DNA, 15 bp, Homo sapiens
tgtctaagtctacag

SEQ ID NO: 448430 - DNA, 15 bp, Homo sapiens
ctgtctaagtctaca

SEQ ID NO: 448431 - DNA, 15 bp, Homo sapiens
cctgtctaagtctac

SEQ ID NO: 448432 - DNA, 15 bp, Homo sapiens
gcctgtctaagtcta

SEQ ID NO: 448433 - DNA, 15 bp, Homo sapiens
agcctgtctaagtct

SEQ ID NO: 448434 - DNA, 15 bp, Homo sapiens
aagcctgtctaagtc

SEQ ID NO: 448435 - DNA, 15 bp, Homo sapiens
gaagcctgtctaagt

SEQ ID NO: 448436 - DNA, 15 bp, Homo sapiens
tgaagcctgtctaag

SEQ ID NO: 448437 - DNA, 15 bp, Homo sapiens
ctgaagcctgtctaa

SEQ ID NO: 448438 - DNA, 15 bp, Homo sapiens
cctgaagcctgtcta

SEQ ID NO: 448439 - DNA, 15 bp, Homo sapiens
acctgaagcctgtct

SEQ ID NO: 448440 - DNA, 15 bp, Homo sapiens
tacctgaagcctgtc

SEQ ID NO: 448441 - DNA, 15 bp, Homo sapiens
atacctgaagcctgt

SEQ ID NO: 448442 - DNA, 15 bp, Homo sapiens
gatacctgaagcctg

SEQ ID NO: 448443 - DNA, 15 bp, Homo sapiens
agatacctgaagcct

SEQ ID NO: 448444 - DNA, 15 bp, Homo sapiens
cagatacctgaagcc

SEQ ID NO: 448445 - DNA, 15 bp, Homo sapiens
ccagatacctgaagc

SEQ ID NO: 448446 - DNA, 15 bp, Homo sapiens
cccagatacctgaag

SEQ ID NO: 448447 - DNA, 15 bp, Homo sapiens
ccccagatacctgaa

SEQ ID NO: 448448 - DNA, 15 bp, Homo sapiens
tccccagatacctga

SEQ ID NO: 448449 - DNA, 15 bp, Homo sapiens
ttccccagatacctg

SEQ ID NO: 448450 - DNA, 15 bp, Homo sapiens
gttccccagatacct

SEQ ID NO: 448451 - DNA, 15 bp, Homo sapiens
ggttccccagatacc

SEQ ID NO: 448452 - DNA, 15 bp, Homo sapiens
tggttccccagatac

SEQ ID NO: 448453 - DNA, 15 bp, Homo sapiens
atggttccccagata

SEQ ID NO: 448454 - DNA, 15 bp, Homo sapiens
catggttccccagat

SEQ ID NO: 448455 - DNA, 15 bp, Homo sapiens
acatggttccccaga

SEQ ID NO: 448456 - DNA, 15 bp, Homo sapiens
cacatggttccccag

SEQ ID NO: 448457 - DNA, 15 bp, Homo sapiens
tcacatggttcccca

SEQ ID NO: 448458 - DNA, 15 bp, Homo sapiens
ctcacatggttcccc

SEQ ID NO: 448459 - DNA, 15 bp, Homo sapiens
actcacatggttccc

SEQ ID NO: 448460 - DNA, 15 bp, Homo sapiens
tactcacatggttcc

SEQ ID NO: 448461 - DNA, 15 bp, Homo sapiens
ttactcacatggttc

SEQ ID NO: 448462 - DNA, 15 bp, Homo sapiens
tttactcacatggtt

SEQ ID NO: 448463 - DNA, 15 bp, Homo sapiens
ttttactcacatggt

SEQ ID NO: 448464 - DNA, 15 bp, Homo sapiens
gttttactcacatgg

SEQ ID NO: 448465 - DNA, 15 bp, Homo sapiens
ggttttactcacatg

SEQ ID NO: 448466 - DNA, 15 bp, Homo sapiens
aggttttactcacat

SEQ ID NO: 448467 - DNA, 15 bp, Homo sapiens
aaggttttactcaca

SEQ ID NO: 448468 - DNA, 15 bp, Homo sapiens
caaggttttactcac

SEQ ID NO: 448469 - DNA, 15 bp, Homo sapiens
acaaggttttactca

SEQ ID NO: 448470 - DNA, 15 bp, Homo sapiens
tacaaggttttactc

SEQ ID NO: 448471 - DNA, 15 bp, Homo sapiens
atacaaggttttact

SEQ ID NO: 448472 - DNA, 15 bp, Homo sapiens
aatacaaggttttac

SEQ ID NO: 448473 - DNA, 15 bp, Homo sapiens
caatacaaggtttta

SEQ ID NO: 448474 - DNA, 15 bp, Homo sapiens
acaatacaaggtttt

SEQ ID NO: 448475 - DNA, 15 bp, Homo sapiens
aacaatacaaggttt

SEQ ID NO: 448476 - DNA, 15 bp, Homo sapiens
aaacaatacaaggtt

SEQ ID NO: 448477 - DNA, 15 bp, Homo sapiens
gaaacaatacaaggt

SEQ ID NO: 448478 - DNA, 15 bp, Homo sapiens
agaaacaatacaagg

SEQ ID NO: 448479 - DNA, 15 bp, Homo sapiens
cagaaacaatacaag

SEQ ID NO: 448480 - DNA, 15 bp, Homo sapiens
ccagaaacaatacaa

SEQ ID NO: 448481 - DNA, 15 bp, Homo sapiens
cccagaaacaataca

SEQ ID NO: 448482 - DNA, 15 bp, Homo sapiens
ccccagaaacaatac

SEQ ID NO: 448483 - DNA, 15 bp, Homo sapiens
gccccagaaacaata

SEQ ID NO: 448484 - DNA, 15 bp, Homo sapiens
agccccagaaacaat

SEQ ID NO: 448485 - DNA, 15 bp, Homo sapiens
tagccccagaaacaa

SEQ ID NO: 448486 - DNA, 15 bp, Homo sapiens
ctagccccagaaaca

SEQ ID NO: 448487 - DNA, 15 bp, Homo sapiens
tctagccccagaaac

SEQ ID NO: 448488 - DNA, 15 bp, Homo sapiens
ttctagccccagaaa

SEQ ID NO: 448489 - DNA, 15 bp, Homo sapiens
attctagccccagaa

SEQ ID NO: 448490 - DNA, 15 bp, Homo sapiens
gattctagccccaga

SEQ ID NO: 448491 - DNA, 15 bp, Homo sapiens
agattctagccccag

SEQ ID NO: 448492 - DNA, 15 bp, Homo sapiens
tagattctagcccca

SEQ ID NO: 448493 - DNA, 15 bp, Homo sapiens
ctagattctagcccc

SEQ ID NO: 448494 - DNA, 15 bp, Homo sapiens
actagattctagccc

SEQ ID NO: 448495 - DNA, 15 bp, Homo sapiens
gactagattctagcc

SEQ ID NO: 448496 - DNA, 15 bp, Homo sapiens
agactagattctagc

SEQ ID NO: 448497 - DNA, 15 bp, Homo sapiens
gagactagattctag

SEQ ID NO: 448498 - DNA, 15 bp, Homo sapiens
ggagactagattcta

SEQ ID NO: 448499 - DNA, 15 bp, Homo sapiens
aggagactagattct

SEQ ID NO: 448500 - DNA, 15 bp, Homo sapiens
aaggagactagattc

SEQ ID NO: 448501 - DNA, 15 bp, Homo sapiens
gaaggagactagatt

SEQ ID NO: 448502 - DNA, 15 bp, Homo sapiens
tgaaggagactagat

SEQ ID NO: 448503 - DNA, 15 bp, Homo sapiens
ttgaaggagactaga

SEQ ID NO: 448504 - DNA, 15 bp, Homo sapiens
tttgaaggagactag

SEQ ID NO: 448505 - DNA, 15 bp, Homo sapiens
gtttgaaggagacta

SEQ ID NO: 448506 - DNA, 15 bp, Homo sapiens
tgtttgaaggagact

SEQ ID NO: 448507 - DNA, 15 bp, Homo sapiens
gtgtttgaaggagac

SEQ ID NO: 448508 - DNA, 15 bp, Homo sapiens
agtgtttgaaggaga

SEQ ID NO: 448509 - DNA, 15 bp, Homo sapiens
gagtgtttgaaggag

SEQ ID NO: 448510 - DNA, 15 bp, Homo sapiens
tgagtgtttgaagga

SEQ ID NO: 448511 - DNA, 15 bp, Homo sapiens
ctgagtgtttgaagg

SEQ ID NO: 448512 - DNA, 15 bp, Homo sapiens
tctgagtgtttgaag

SEQ ID NO: 448513 - DNA, 15 bp, Homo sapiens
ttctgagtgtttgaa

SEQ ID NO: 448514 - DNA, 15 bp, Homo sapiens
cttctgagtgtttga

SEQ ID NO: 448515 - DNA, 15 bp, Homo sapiens
ccttctgagtgtttg

SEQ ID NO: 448516 - DNA, 15 bp, Homo sapiens
tccttctgagtgttt

SEQ ID NO: 448517 - DNA, 15 bp, Homo sapiens
atccttctgagtgtt

SEQ ID NO: 448518 - DNA, 15 bp, Homo sapiens
gatccttctgagtgt

SEQ ID NO: 448519 - DNA, 15 bp, Homo sapiens
agatccttctgagtg

SEQ ID NO: 448520 - DNA, 15 bp, Homo sapiens
cagatccttctgagt

SEQ ID NO: 448521 - DNA, 15 bp, Homo sapiens
acagatccttctgag

SEQ ID NO: 448522 - DNA, 15 bp, Homo sapiens
cacagatccttctga

SEQ ID NO: 448523 - DNA, 15 bp, Homo sapiens
tcacagatccttctg

SEQ ID NO: 448524 - DNA, 15 bp, Homo sapiens
gtcacagatccttct

SEQ ID NO: 448525 - DNA, 15 bp, Homo sapiens
agtcacagatccttc

SEQ ID NO: 448526 - DNA, 15 bp, Homo sapiens
cagtcacagatcctt

SEQ ID NO: 448527 - DNA, 15 bp, Homo sapiens
gcagtcacagatcct

SEQ ID NO: 448528 - DNA, 15 bp, Homo sapiens
ggcagtcacagatcc

SEQ ID NO: 448529 - DNA, 15 bp, Homo sapiens
aggcagtcacagatc

SEQ ID NO: 448530 - DNA, 15 bp, Homo sapiens
aaggcagtcacagat

SEQ ID NO: 448531 - DNA, 15 bp, Homo sapiens
gaaggcagtcacaga

SEQ ID NO: 448532 - DNA, 15 bp, Homo sapiens
tgaaggcagtcacag

SEQ ID NO: 448533 - DNA, 15 bp, Homo sapiens
ttgaaggcagtcaca

SEQ ID NO: 448534 - DNA, 15 bp, Homo sapiens
tttgaaggcagtcac

SEQ ID NO: 448535 - DNA, 15 bp, Homo sapiens
ctttgaaggcagtca

SEQ ID NO: 448536 - DNA, 15 bp, Homo sapiens
cctttgaaggcagtc

SEQ ID NO: 448537 - DNA, 15 bp, Homo sapiens
acctttgaaggcagt

SEQ ID NO: 448538 - DNA, 15 bp, Homo sapiens
aacctttgaaggcag

SEQ ID NO: 448539 - DNA, 15 bp, Homo sapiens
taacctttgaaggca

SEQ ID NO: 448540 - DNA, 15 bp, Homo sapiens
ttaacctttgaaggc

SEQ ID NO: 448541 - DNA, 15 bp, Homo sapiens
cttaacctttgaagg

SEQ ID NO: 448542 - DNA, 15 bp, Homo sapiens
tcttaacctttgaag

SEQ ID NO: 448543 - DNA, 15 bp, Homo sapiens
ctcttaacctttgaa

SEQ ID NO: 448544 - DNA, 15 bp, Homo sapiens
actcttaacctttga

SEQ ID NO: 448545 - DNA, 15 bp, Homo sapiens
gactcttaacctttg

SEQ ID NO: 448546 - DNA, 15 bp, Homo sapiens
tgactcttaaccttt

SEQ ID NO: 448547 - DNA, 15 bp, Homo sapiens
atgactcttaacctt

SEQ ID NO: 448548 - DNA, 15 bp, Homo sapiens
aatgactcttaacct

SEQ ID NO: 448549 - DNA, 15 bp, Homo sapiens
caatgactcttaacc

SEQ ID NO: 448550 - DNA, 15 bp, Homo sapiens
tcaatgactcttaac

SEQ ID NO: 448551 - DNA, 15 bp, Homo sapiens
atcaatgactcttaa

SEQ ID NO: 448552 - DNA, 15 bp, Homo sapiens
aatcaatgactctta

SEQ ID NO: 448553 - DNA, 15 bp, Homo sapiens
aaatcaatgactctt

SEQ ID NO: 448554 - DNA, 15 bp, Homo sapiens
aaaatcaatgactct

SEQ ID NO: 448555 - DNA, 15 bp, Homo sapiens
aaaaatcaatgactc

SEQ ID NO: 448556 - DNA, 15 bp, Homo sapiens
gaaaaatcaatgact

SEQ ID NO: 448557 - DNA, 15 bp, Homo sapiens
agaaaaatcaatgac

SEQ ID NO: 448558 - DNA, 15 bp, Homo sapiens
gagaaaaatcaatga

SEQ ID NO: 448559 - DNA, 15 bp, Homo sapiens
tgagaaaaatcaatg

SEQ ID NO: 448560 - DNA, 15 bp, Homo sapiens
gtgagaaaaatcaat

SEQ ID NO: 448561 - DNA, 15 bp, Homo sapiens
agtgagaaaaatcaa

SEQ ID NO: 448562 - DNA, 15 bp, Homo sapiens
tagtgagaaaaatca

SEQ ID NO: 448563 - DNA, 15 bp, Homo sapiens
ctagtgagaaaaatc

SEQ ID NO: 448564 - DNA, 15 bp, Homo sapiens
tctagtgagaaaaat

SEQ ID NO: 448565 - DNA, 15 bp, Homo sapiens
ttctagtgagaaaaa

SEQ ID NO: 448566 - DNA, 15 bp, Homo sapiens
tttctagtgagaaaa

SEQ ID NO: 448567 - DNA, 15 bp, Homo sapiens
atttctagtgagaaa

SEQ ID NO: 448568 - DNA, 15 bp, Homo sapiens
aatttctagtgagaa

SEQ ID NO: 448569 - DNA, 15 bp, Homo sapiens
taatttctagtgaga

SEQ ID NO: 448570 - DNA, 15 bp, Homo sapiens
ttaatttctagtgag

SEQ ID NO: 448571 - DNA, 15 bp, Homo sapiens
attaatttctagtga

SEQ ID NO: 448572 - DNA, 15 bp, Homo sapiens
tattaatttctagtg

SEQ ID NO: 448573 - DNA, 15 bp, Homo sapiens
ttattaatttctagt

SEQ ID NO: 448574 - DNA, 15 bp, Homo sapiens
cttattaatttctag

SEQ ID NO: 448575 - DNA, 15 bp, Homo sapiens
tcttattaatttcta

SEQ ID NO: 448576 - DNA, 15 bp, Homo sapiens
ttcttattaatttct

SEQ ID NO: 448577 - DNA, 15 bp, Homo sapiens
gttcttattaatttc

SEQ ID NO: 448578 - DNA, 15 bp, Homo sapiens
tgttcttattaattt

SEQ ID NO: 448579 - DNA, 15 bp, Homo sapiens
ctgttcttattaatt

SEQ ID NO: 448580 - DNA, 15 bp, Homo sapiens
gctgttcttattaat

SEQ ID NO: 448581 - DNA, 15 bp, Homo sapiens
agctgttcttattaa

SEQ ID NO: 448582 - DNA, 15 bp, Homo sapiens
tagctgttcttatta

SEQ ID NO: 448583 - DNA, 15 bp, Homo sapiens
atagctgttcttatt

SEQ ID NO: 448584 - DNA, 15 bp, Homo sapiens
gatagctgttcttat

SEQ ID NO: 448585 - DNA, 15 bp, Homo sapiens
ggatagctgttctta

SEQ ID NO: 448586 - DNA, 15 bp, Homo sapiens
aggatagctgttctt

SEQ ID NO: 448587 - DNA, 15 bp, Homo sapiens
aaggatagctgttct

SEQ ID NO: 448588 - DNA, 15 bp, Homo sapiens
caaggatagctgttc

SEQ ID NO: 448589 - DNA, 15 bp, Homo sapiens
ccaaggatagctgtt

SEQ ID NO: 448590 - DNA, 15 bp, Homo sapiens
cccaaggatagctgt

SEQ ID NO: 448591 - DNA, 15 bp, Homo sapiens
ccccaaggatagctg

SEQ ID NO: 448592 - DNA, 15 bp, Homo sapiens
tccccaaggatagct

SEQ ID NO: 448593 - DNA, 15 bp, Homo sapiens
ctccccaaggatagc

SEQ ID NO: 448594 - DNA, 15 bp, Homo sapiens
tctccccaaggatag

SEQ ID NO: 448595 - DNA, 15 bp, Homo sapiens
ttctccccaaggata

SEQ ID NO: 448596 - DNA, 15 bp, Homo sapiens
cttctccccaaggat

SEQ ID NO: 448597 - DNA, 15 bp, Homo sapiens
ccttctccccaagga

SEQ ID NO: 448598 - DNA, 15 bp, Homo sapiens
tccttctccccaagg

SEQ ID NO: 448599 - DNA, 15 bp, Homo sapiens
ttccttctccccaag

SEQ ID NO: 448600 - DNA, 15 bp, Homo sapiens
attccttctccccaa

SEQ ID NO: 448601 - DNA, 15 bp, Homo sapiens
cattccttctcccca

SEQ ID NO: 448602 - DNA, 15 bp, Homo sapiens
tcattccttctcccc

SEQ ID NO: 448603 - DNA, 15 bp, Homo sapiens
atcattccttctccc

SEQ ID NO: 448604 - DNA, 15 bp, Homo sapiens
catcattccttctcc

SEQ ID NO: 448605 - DNA, 15 bp, Homo sapiens
ccatcattccttctc

SEQ ID NO: 448606 - DNA, 15 bp, Homo sapiens
cccatcattccttct

SEQ ID NO: 448607 - DNA, 15 bp, Homo sapiens
ccccatcattccttc

SEQ ID NO: 448608 - DNA, 15 bp, Homo sapiens
cccccatcattcctt

SEQ ID NO: 448609 - DNA, 15 bp, Homo sapiens
acccccatcattcct

SEQ ID NO: 448610 - DNA, 15 bp, Homo sapiens
tacccccatcattcc

SEQ ID NO: 448611 - DNA, 15 bp, Homo sapiens
ctacccccatcattc

SEQ ID NO: 448612 - DNA, 15 bp, Homo sapiens
cctacccccatcatt

SEQ ID NO: 448613 - DNA, 15 bp, Homo sapiens
ccctacccccatcat

SEQ ID NO: 448614 - DNA, 15 bp, Homo sapiens
tccctacccccatca

SEQ ID NO: 448615 - DNA, 15 bp, Homo sapiens
ttccctacccccatc

SEQ ID NO: 448616 - DNA, 15 bp, Homo sapiens
tttccctacccccat

SEQ ID NO: 448617 - DNA, 15 bp, Homo sapiens
ctttccctaccccca

SEQ ID NO: 448618 - DNA, 15 bp, Homo sapiens
tctttccctaccccc

SEQ ID NO: 448619 - DNA, 15 bp, Homo sapiens
atctttccctacccc

SEQ ID NO: 448620 - DNA, 15 bp, Homo sapiens
aatctttccctaccc

SEQ ID NO: 448621 - DNA, 15 bp, Homo sapiens
aaatctttccctacc

SEQ ID NO: 448622 - DNA, 15 bp, Homo sapiens
aaaatctttccctac

SEQ ID NO: 448623 - DNA, 15 bp, Homo sapiens
gaaaatctttcccta

SEQ ID NO: 448624 - DNA, 15 bp, Homo sapiens
tgaaaatctttccct

SEQ ID NO: 448625 - DNA, 15 bp, Homo sapiens
atgaaaatctttccc

SEQ ID NO: 448626 - DNA, 15 bp, Homo sapiens
aatgaaaatctttcc

SEQ ID NO: 448627 - DNA, 15 bp, Homo sapiens
aaatgaaaatctttc

SEQ ID NO: 448628 - DNA, 15 bp, Homo sapiens
taaatgaaaatcttt

SEQ ID NO: 448629 - DNA, 15 bp, Homo sapiens
ttaaatgaaaatctt

SEQ ID NO: 448630 - DNA, 15 bp, Homo sapiens
attaaatgaaaatct

SEQ ID NO: 448631 - DNA, 15 bp, Homo sapiens
tattaaatgaaaatc

SEQ ID NO: 448632 - DNA, 15 bp, Homo sapiens
atattaaatgaaaat

SEQ ID NO: 448633 - DNA, 15 bp, Homo sapiens
aatattaaatgaaaa

SEQ ID NO: 448634 - DNA, 15 bp, Homo sapiens
aaatattaaatgaaa

SEQ ID NO: 448635 - DNA, 15 bp, Homo sapiens
aaaatattaaatgaa

SEQ ID NO: 448636 - DNA, 15 bp, Homo sapiens
aaaaatattaaatga

SEQ ID NO: 448637 - DNA, 15 bp, Homo sapiens
caaaaatattaaatg

SEQ ID NO: 448638 - DNA, 15 bp, Homo sapiens
tcaaaaatattaaat

SEQ ID NO: 448639 - DNA, 15 bp, Homo sapiens
gtcaaaaatattaaa

SEQ ID NO: 448640 - DNA, 15 bp, Homo sapiens
ggtcaaaaatattaa

SEQ ID NO: 448641 - DNA, 15 bp, Homo sapiens
aggtcaaaaatatta

SEQ ID NO: 448642 - DNA, 15 bp, Homo sapiens
aaggtcaaaaatatt

SEQ ID NO: 448643 - DNA, 15 bp, Homo sapiens
aaaggtcaaaaatat

SEQ ID NO: 448644 - DNA, 15 bp, Homo sapiens
gaaaggtcaaaaata

SEQ ID NO: 448645 - DNA, 15 bp, Homo sapiens
agaaaggtcaaaaat

SEQ ID NO: 448646 - DNA, 15 bp, Homo sapiens
cagaaaggtcaaaaa

SEQ ID NO: 448647 - DNA, 15 bp, Homo sapiens
tcagaaaggtcaaaa

SEQ ID NO: 448648 - DNA, 15 bp, Homo sapiens
ttcagaaaggtcaaa

SEQ ID NO: 448649 - DNA, 15 bp, Homo sapiens
gttcagaaaggtcaa

SEQ ID NO: 448650 - DNA, 15 bp, Homo sapiens
cgttcagaaaggtca

SEQ ID NO: 448651 - DNA, 15 bp, Homo sapiens
ccgttcagaaaggtc

SEQ ID NO: 448652 - DNA, 15 bp, Homo sapiens
accgttcagaaaggt

SEQ ID NO: 448653 - DNA, 15 bp, Homo sapiens
gaccgttcagaaagg

SEQ ID NO: 448654 - DNA, 15 bp, Homo sapiens
agaccgttcagaaag

SEQ ID NO: 448655 - DNA, 15 bp, Homo sapiens
cagaccgttcagaaa

SEQ ID NO: 448656 - DNA, 15 bp, Homo sapiens
gcagaccgttcagaa

SEQ ID NO: 448657 - DNA, 15 bp, Homo sapiens
tgcagaccgttcaga

SEQ ID NO: 448658 - DNA, 15 bp, Homo sapiens
atgcagaccgttcag

SEQ ID NO: 448659 - DNA, 15 bp, Homo sapiens
aatgcagaccgttca

SEQ ID NO: 448660 - DNA, 15 bp, Homo sapiens
aaatgcagaccgttc

SEQ ID NO: 448661 - DNA, 15 bp, Homo sapiens
aaaatgcagaccgtt

SEQ ID NO: 448662 - DNA, 15 bp, Homo sapiens
gaaaatgcagaccgt

SEQ ID NO: 448663 - DNA, 15 bp, Homo sapiens
agaaaatgcagaccg

SEQ ID NO: 448664 - DNA, 15 bp, Homo sapiens
tagaaaatgcagacc

SEQ ID NO: 448665 - DNA, 15 bp, Homo sapiens
ttagaaaatgcagac

SEQ ID NO: 448666 - DNA, 15 bp, Homo sapiens
tttagaaaatgcaga

SEQ ID NO: 448667 - DNA, 15 bp, Homo sapiens
gtttagaaaatgcag

SEQ ID NO: 448668 - DNA, 15 bp, Homo sapiens
tgtttagaaaatgca

SEQ ID NO: 448669 - DNA, 15 bp, Homo sapiens
ctgtttagaaaatgc

SEQ ID NO: 448670 - DNA, 15 bp, Homo sapiens
cctgtttagaaaatg

SEQ ID NO: 448671 - DNA, 15 bp, Homo sapiens
tcctgtttagaaaat

SEQ ID NO: 448672 - DNA, 15 bp, Homo sapiens
ttcctgtttagaaaa

SEQ ID NO: 448673 - DNA, 15 bp, Homo sapiens
gttcctgtttagaaa

SEQ ID NO: 448674 - DNA, 15 bp, Homo sapiens
tgttcctgtttagaa

SEQ ID NO: 448675 - DNA, 15 bp, Homo sapiens
atgttcctgtttaga

SEQ ID NO: 448676 - DNA, 15 bp, Homo sapiens
catgttcctgtttag

SEQ ID NO: 448677 - DNA, 15 bp, Homo sapiens
acatgttcctgttta

SEQ ID NO: 448678 - DNA, 15 bp, Homo sapiens
tacatgttcctgttt

SEQ ID NO: 448679 - DNA, 15 bp, Homo sapiens
atacatgttcctgtt

SEQ ID NO: 448680 - DNA, 15 bp, Homo sapiens
aatacatgttcctgt

SEQ ID NO: 448681 - DNA, 15 bp, Homo sapiens
taatacatgttcctg

SEQ ID NO: 448682 - DNA, 15 bp, Homo sapiens
ctaatacatgttcct

SEQ ID NO: 448683 - DNA, 15 bp, Homo sapiens
cctaatacatgttcc

SEQ ID NO: 448684 - DNA, 15 bp, Homo sapiens
acctaatacatgttc

SEQ ID NO: 448685 - DNA, 15 bp, Homo sapiens
aacctaatacatgtt

SEQ ID NO: 448686 - DNA, 15 bp, Homo sapiens
gaacctaatacatgt

SEQ ID NO: 448687 - DNA, 15 bp, Homo sapiens
tgaacctaatacatg

SEQ ID NO: 448688 - DNA, 15 bp, Homo sapiens
atgaacctaatacat

SEQ ID NO: 448689 - DNA, 15 bp, Homo sapiens
aatgaacctaataca

SEQ ID NO: 448690 - DNA, 15 bp, Homo sapiens
caatgaacctaatac

SEQ ID NO: 448691 - DNA, 15 bp, Homo sapiens
tcaatgaacctaata

SEQ ID NO: 448692 - DNA, 15 bp, Homo sapiens
ttcaatgaacctaat

SEQ ID NO: 448693 - DNA, 15 bp, Homo sapiens
tttcaatgaacctaa

SEQ ID NO: 448694 - DNA, 15 bp, Homo sapiens
ttttcaatgaaccta

SEQ ID NO: 448695 - DNA, 15 bp, Homo sapiens
tttttcaatgaacct

SEQ ID NO: 448696 - DNA, 15 bp, Homo sapiens
ttttttcaatgaacc

SEQ ID NO: 448697 - DNA, 15 bp, Homo sapiens
tttttttcaatgaac

SEQ ID NO: 448698 - DNA, 15 bp, Homo sapiens
ttttttttcaatgaa

SEQ ID NO: 448699 - DNA, 15 bp, Homo sapiens
attttttttcaatga

SEQ ID NO: 448700 - DNA, 15 bp, Homo sapiens
tattttttttcaatg

SEQ ID NO: 448701 - DNA, 15 bp, Homo sapiens
atattttttttcaat

SEQ ID NO: 448702 - DNA, 15 bp, Homo sapiens
catattttttttcaa

SEQ ID NO: 448703 - DNA, 15 bp, Homo sapiens
acatattttttttca

SEQ ID NO: 448704 - DNA, 15 bp, Homo sapiens
gacatattttttttc

SEQ ID NO: 448705 - DNA, 15 bp, Homo sapiens
tgacatatttttttt

SEQ ID NO: 448706 - DNA, 15 bp, Homo sapiens
ctgacatattttttt

SEQ ID NO: 448707 - DNA, 15 bp, Homo sapiens
cctgacatatttttt

SEQ ID NO: 448708 - DNA, 15 bp, Homo sapiens
ccctgacatattttt

SEQ ID NO: 448709 - DNA, 15 bp, Homo sapiens
cccctgacatatttt

SEQ ID NO: 448710 - DNA, 15 bp, Homo sapiens
acccctgacatattt

SEQ ID NO: 448711 - DNA, 15 bp, Homo sapiens
aacccctgacatatt

SEQ ID NO: 448712 - DNA, 15 bp, Homo sapiens
taacccctgacatat

SEQ ID NO: 448713 - DNA, 15 bp, Homo sapiens
ctaacccctgacata

SEQ ID NO: 448714 - DNA, 15 bp, Homo sapiens
gctaacccctgacat

SEQ ID NO: 448715 - DNA, 15 bp, Homo sapiens
agctaacccctgaca

SEQ ID NO: 448716 - DNA, 15 bp, Homo sapiens
cagctaacccctgac

SEQ ID NO: 448717 - DNA, 15 bp, Homo sapiens
tcagctaacccctga

SEQ ID NO: 448718 - DNA, 15 bp, Homo sapiens
ctcagctaacccctg

SEQ ID NO: 448719 - DNA, 15 bp, Homo sapiens
gctcagctaacccct

SEQ ID NO: 448720 - DNA, 15 bp, Homo sapiens
tgctcagctaacccc

SEQ ID NO: 448721 - DNA, 15 bp, Homo sapiens
ctgctcagctaaccc

SEQ ID NO: 448722 - DNA, 15 bp, Homo sapiens
actgctcagctaacc

SEQ ID NO: 448723 - DNA, 15 bp, Homo sapiens
cactgctcagctaac

SEQ ID NO: 448724 - DNA, 15 bp, Homo sapiens
tcactgctcagctaa

SEQ ID NO: 448725 - DNA, 15 bp, Homo sapiens
ctcactgctcagcta

SEQ ID NO: 448726 - DNA, 15 bp, Homo sapiens
tctcactgctcagct

SEQ ID NO: 448727 - DNA, 15 bp, Homo sapiens
atctcactgctcagc

SEQ ID NO: 448728 - DNA, 15 bp, Homo sapiens
tatctcactgctcag

SEQ ID NO: 448729 - DNA, 15 bp, Homo sapiens
ttatctcactgctca

SEQ ID NO: 448730 - DNA, 15 bp, Homo sapiens
attatctcactgctc

SEQ ID NO: 448731 - DNA, 15 bp, Homo sapiens
cattatctcactgct

SEQ ID NO: 448732 - DNA, 15 bp, Homo sapiens
ccattatctcactgc

SEQ ID NO: 448733 - DNA, 15 bp, Homo sapiens
cccattatctcactg

SEQ ID NO: 448734 - DNA, 15 bp, Homo sapiens
acccattatctcact

SEQ ID NO: 448735 - DNA, 15 bp, Homo sapiens
gacccattatctcac

SEQ ID NO: 448736 - DNA, 15 bp, Homo sapiens
ggacccattatctca

SEQ ID NO: 448737 - DNA, 15 bp, Homo sapiens
aggacccattatctc

SEQ ID NO: 448738 - DNA, 15 bp, Homo sapiens
aaggacccattatct

SEQ ID NO: 448739 - DNA, 15 bp, Homo sapiens
aaaggacccattatc

SEQ ID NO: 448740 - DNA, 15 bp, Homo sapiens
aaaaggacccattat

SEQ ID NO: 448741 - DNA, 15 bp, Homo sapiens
aaaaaggacccatta

SEQ ID NO: 448742 - DNA, 15 bp, Homo sapiens
taaaaaggacccatt

SEQ ID NO: 448743 - DNA, 15 bp, Homo sapiens
ctaaaaaggacccat

SEQ ID NO: 448744 - DNA, 15 bp, Homo sapiens
tctaaaaaggaccca

SEQ ID NO: 448745 - DNA, 15 bp, Homo sapiens
atctaaaaaggaccc

SEQ ID NO: 448746 - DNA, 15 bp, Homo sapiens
aatctaaaaaggacc

SEQ ID NO: 448747 - DNA, 15 bp, Homo sapiens
aaatctaaaaaggac

SEQ ID NO: 448748 - DNA, 15 bp, Homo sapiens
aaaatctaaaaagga

SEQ ID NO: 448749 - DNA, 15 bp, Homo sapiens
aaaaatctaaaaagg

SEQ ID NO: 448750 - DNA, 15 bp, Homo sapiens
caaaaatctaaaaag

SEQ ID NO: 448751 - DNA, 15 bp, Homo sapiens
acaaaaatctaaaaa

SEQ ID NO: 448752 - DNA, 15 bp, Homo sapiens
gacaaaaatctaaaa

SEQ ID NO: 448753 - DNA, 15 bp, Homo sapiens
agacaaaaatctaaa

SEQ ID NO: 448754 - DNA, 15 bp, Homo sapiens
aagacaaaaatctaa

SEQ ID NO: 448755 - DNA, 15 bp, Homo sapiens
aaagacaaaaatcta

SEQ ID NO: 448756 - DNA, 15 bp, Homo sapiens
taaagacaaaaatct

SEQ ID NO: 448757 - DNA, 15 bp, Homo sapiens
ataaagacaaaaatc

SEQ ID NO: 448758 - DNA, 15 bp, Homo sapiens
tataaagacaaaaat

SEQ ID NO: 448759 - DNA, 15 bp, Homo sapiens
gtataaagacaaaaa

SEQ ID NO: 448760 - DNA, 15 bp, Homo sapiens
ggtataaagacaaaa

SEQ ID NO: 448761 - DNA, 15 bp, Homo sapiens
aggtataaagacaaa

SEQ ID NO: 448762 - DNA, 15 bp, Homo sapiens
caggtataaagacaa

SEQ ID NO: 448763 - DNA, 15 bp, Homo sapiens
acaggtataaagaca

SEQ ID NO: 448764 - DNA, 15 bp, Homo sapiens
aacaggtataaagac

SEQ ID NO: 448765 - DNA, 15 bp, Homo sapiens
gaacaggtataaaga

SEQ ID NO: 448766 - DNA, 15 bp, Homo sapiens
cgaacaggtataaag

SEQ ID NO: 448767 - DNA, 15 bp, Homo sapiens
acgaacaggtataaa

SEQ ID NO: 448768 - DNA, 15 bp, Homo sapiens
tacgaacaggtataa

SEQ ID NO: 448769 - DNA, 15 bp, Homo sapiens
atacgaacaggtata

SEQ ID NO: 448770 - DNA, 15 bp, Homo sapiens
aatacgaacaggtat

SEQ ID NO: 448771 - DNA, 15 bp, Homo sapiens
taatacgaacaggta

SEQ ID NO: 448772 - DNA, 15 bp, Homo sapiens
ttaatacgaacaggt

SEQ ID NO: 448773 - DNA, 15 bp, Homo sapiens
tttaatacgaacagg

SEQ ID NO: 448774 - DNA, 15 bp, Homo sapiens
gtttaatacgaacag

SEQ ID NO: 448775 - DNA, 15 bp, Homo sapiens
tgtttaatacgaaca

SEQ ID NO: 448776 - DNA, 15 bp, Homo sapiens
ttgtttaatacgaac

SEQ ID NO: 448777 - DNA, 15 bp, Homo sapiens
tttgtttaatacgaa

SEQ ID NO: 448778 - DNA, 15 bp, Homo sapiens
gtttgtttaatacga

SEQ ID NO: 448779 - DNA, 15 bp, Homo sapiens
tgtttgtttaatacg

SEQ ID NO: 448780 - DNA, 15 bp, Homo sapiens
gtgtttgtttaatac

SEQ ID NO: 448781 - DNA, 15 bp, Homo sapiens
tgtgtttgtttaata

SEQ ID NO: 448782 - DNA, 15 bp, Homo sapiens
ttgtgtttgtttaat

SEQ ID NO: 448783 - DNA, 15 bp, Homo sapiens
tttgtgtttgtttaa

SEQ ID NO: 448784 - DNA, 15 bp, Homo sapiens
atttgtgtttgttta

SEQ ID NO: 448785 - DNA, 15 bp, Homo sapiens
tatttgtgtttgttt

SEQ ID NO: 448786 - DNA, 15 bp, Homo sapiens
atatttgtgtttgtt

SEQ ID NO: 448787 - DNA, 15 bp, Homo sapiens
aatatttgtgtttgt

SEQ ID NO: 448788 - DNA, 15 bp, Homo sapiens
taatatttgtgtttg

SEQ ID NO: 448789 - DNA, 15 bp, Homo sapiens
ttaatatttgtgttt

SEQ ID NO: 448790 - DNA, 15 bp, Homo sapiens
attaatatttgtgtt

SEQ ID NO: 448791 - DNA, 15 bp, Homo sapiens
tattaatatttgtgt

SEQ ID NO: 448792 - DNA, 15 bp, Homo sapiens
ttattaatatttgtg

SEQ ID NO: 448793 - DNA, 15 bp, Homo sapiens
gttattaatatttgt

SEQ ID NO: 448794 - DNA, 15 bp, Homo sapiens
tgttattaatatttg

SEQ ID NO: 448795 - DNA, 15 bp, Homo sapiens
atgttattaatattt

SEQ ID NO: 448796 - DNA, 15 bp, Homo sapiens
tatgttattaatatt

SEQ ID NO: 448797 - DNA, 15 bp, Homo sapiens
atatgttattaatat

SEQ ID NO: 448798 - DNA, 15 bp, Homo sapiens
aatatgttattaata

SEQ ID NO: 448799 - DNA, 15 bp, Homo sapiens
aaatatgttattaat

SEQ ID NO: 448800 - DNA, 15 bp, Homo sapiens
aaaatatgttattaa

SEQ ID NO: 448801 - DNA, 15 bp, Homo sapiens
aaaaatatgttatta

SEQ ID NO: 448802 - DNA, 15 bp, Homo sapiens
taaaaatatgttatt

SEQ ID NO: 448803 - DNA, 15 bp, Homo sapiens
ttaaaaatatgttat

SEQ ID NO: 448804 - DNA, 15 bp, Homo sapiens
tttaaaaatatgtta

SEQ ID NO: 448805 - DNA, 15 bp, Homo sapiens
ctttaaaaatatgtt

SEQ ID NO: 448806 - DNA, 15 bp, Homo sapiens
tctttaaaaatatgt

SEQ ID NO: 448807 - DNA, 15 bp, Homo sapiens
gtctttaaaaatatg

SEQ ID NO: 448808 - DNA, 15 bp, Homo sapiens
ggtctttaaaaatat

SEQ ID NO: 448809 - DNA, 15 bp, Homo sapiens
gggtctttaaaaata

SEQ ID NO: 448810 - DNA, 15 bp, Homo sapiens
tgggtctttaaaaat

SEQ ID NO: 448811 - DNA, 15 bp, Homo sapiens
ttgggtctttaaaaa

SEQ ID NO: 448812 - DNA, 15 bp, Homo sapiens
tttgggtctttaaaa

SEQ ID NO: 448813 - DNA, 15 bp, Homo sapiens
ttttgggtctttaaa

SEQ ID NO: 448814 - DNA, 15 bp, Homo sapiens
tttttgggtctttaa

SEQ ID NO: 448815 - DNA, 15 bp, Homo sapiens
ttttttgggtcttta

SEQ ID NO: 448816 - DNA, 15 bp, Homo sapiens
tttttttgggtcttt

SEQ ID NO: 448817 - DNA, 15 bp, Homo sapiens
atttttttgggtctt

SEQ ID NO: 448818 - DNA, 15 bp, Homo sapiens
tatttttttgggtct

SEQ ID NO: 448819 - DNA, 15 bp, Homo sapiens
ttatttttttgggtc

SEQ ID NO: 448820 - DNA, 15 bp, Homo sapiens
tttatttttttgggt

SEQ ID NO: 448821 - DNA, 15 bp, Homo sapiens
ttttatttttttggg

SEQ ID NO: 448822 - DNA, 15 bp, Homo sapiens
tttttatttttttgg

SEQ ID NO: 448823 - DNA, 15 bp, Homo sapiens
atttttatttttttg

SEQ ID NO: 448824 - DNA, 15 bp, Homo sapiens
aatttttattttttt

SEQ ID NO: 448825 - DNA, 15 bp, Homo sapiens
taatttttatttttt

SEQ ID NO: 448826 - DNA, 15 bp, Homo sapiens
ttaatttttattttt

SEQ ID NO: 448827 - DNA, 15 bp, Homo sapiens
tttaatttttatttt

SEQ ID NO: 448828 - DNA, 15 bp, Homo sapiens
ttttaatttttattt

SEQ ID NO: 448829 - DNA, 15 bp, Homo sapiens
tttttaatttttatt

SEQ ID NO: 448830 - DNA, 15 bp, Homo sapiens
gtttttaatttttat

SEQ ID NO: 448831 - DNA, 15 bp, Homo sapiens
ggtttttaattttta

SEQ ID NO: 448832 - DNA, 15 bp, Homo sapiens
gggtttttaattttt

SEQ ID NO: 448833 - DNA, 15 bp, Homo sapiens
agggtttttaatttt

SEQ ID NO: 448834 - DNA, 15 bp, Homo sapiens
cagggtttttaattt

SEQ ID NO: 448835 - DNA, 15 bp, Homo sapiens
tcagggtttttaatt

SEQ ID NO: 448836 - DNA, 15 bp, Homo sapiens
atcagggtttttaat

SEQ ID NO: 448837 - DNA, 15 bp, Homo sapiens
tatcagggtttttaa

SEQ ID NO: 448838 - DNA, 15 bp, Homo sapiens
ctatcagggttttta

SEQ ID NO: 448839 - DNA, 15 bp, Homo sapiens
actatcagggttttt

SEQ ID NO: 448840 - DNA, 15 bp, Homo sapiens
tactatcagggtttt

SEQ ID NO: 448841 - DNA, 15 bp, Homo sapiens
atactatcagggttt

SEQ ID NO: 448842 - DNA, 15 bp, Homo sapiens
gatactatcagggtt

SEQ ID NO: 448843 - DNA, 15 bp, Homo sapiens
tgatactatcagggt

SEQ ID NO: 448844 - DNA, 15 bp, Homo sapiens
ctgatactatcaggg

SEQ ID NO: 448845 - DNA, 15 bp, Homo sapiens
gctgatactatcagg

SEQ ID NO: 448846 - DNA, 15 bp, Homo sapiens
tgctgatactatcag

SEQ ID NO: 448847 - DNA, 15 bp, Homo sapiens
gtgctgatactatca

SEQ ID NO: 448848 - DNA, 15 bp, Homo sapiens
tgtgctgatactatc

SEQ ID NO: 448849 - DNA, 15 bp, Homo sapiens
atgtgctgatactat

SEQ ID NO: 448850 - DNA, 15 bp, Homo sapiens
tatgtgctgatacta

SEQ ID NO: 448851 - DNA, 15 bp, Homo sapiens
gtatgtgctgatact

SEQ ID NO: 448852 - DNA, 15 bp, Homo sapiens
tgtatgtgctgatac

SEQ ID NO: 448853 - DNA, 15 bp, Homo sapiens
gtgtatgtgctgata

SEQ ID NO: 448854 - DNA, 15 bp, Homo sapiens
tgtgtatgtgctgat

SEQ ID NO: 448855 - DNA, 15 bp, Homo sapiens
ctgtgtatgtgctga

SEQ ID NO: 448856 - DNA, 15 bp, Homo sapiens
tctgtgtatgtgctg

SEQ ID NO: 448857 - DNA, 15 bp, Homo sapiens
ttctgtgtatgtgct

SEQ ID NO: 448858 - DNA, 15 bp, Homo sapiens
tttctgtgtatgtgc

SEQ ID NO: 448859 - DNA, 15 bp, Homo sapiens
atttctgtgtatgtg

SEQ ID NO: 448860 - DNA, 15 bp, Homo sapiens
gatttctgtgtatgt

SEQ ID NO: 448861 - DNA, 15 bp, Homo sapiens
tgatttctgtgtatg

SEQ ID NO: 448862 - DNA, 15 bp, Homo sapiens
gtgatttctgtgtat

SEQ ID NO: 448863 - DNA, 15 bp, Homo sapiens
agtgatttctgtgta

SEQ ID NO: 448864 - DNA, 15 bp, Homo sapiens
gagtgatttctgtgt

SEQ ID NO: 448865 - DNA, 15 bp, Homo sapiens
ggagtgatttctgtg

SEQ ID NO: 448866 - DNA, 15 bp, Homo sapiens
tggagtgatttctgt

SEQ ID NO: 448867 - DNA, 15 bp, Homo sapiens
atggagtgatttctg

SEQ ID NO: 448868 - DNA, 15 bp, Homo sapiens
aatggagtgatttct

SEQ ID NO: 448869 - DNA, 15 bp, Homo sapiens
taatggagtgatttc

SEQ ID NO: 448870 - DNA, 15 bp, Homo sapiens
ataatggagtgattt

SEQ ID NO: 448871 - DNA, 15 bp, Homo sapiens
cataatggagtgatt

SEQ ID NO: 448872 - DNA, 15 bp, Homo sapiens
gcataatggagtgat

SEQ ID NO: 448873 - DNA, 15 bp, Homo sapiens
tgcataatggagtga

SEQ ID NO: 448874 - DNA, 15 bp, Homo sapiens
ttgcataatggagtg

SEQ ID NO: 448875 - DNA, 15 bp, Homo sapiens
tttgcataatggagt

SEQ ID NO: 448876 - DNA, 15 bp, Homo sapiens
ctttgcataatggag

SEQ ID NO: 448877 - DNA, 15 bp, Homo sapiens
actttgcataatgga

SEQ ID NO: 448878 - DNA, 15 bp, Homo sapiens
aactttgcataatgg

SEQ ID NO: 448879 - DNA, 15 bp, Homo sapiens
gaactttgcataatg

SEQ ID NO: 448880 - DNA, 15 bp, Homo sapiens
tgaactttgcataat

SEQ ID NO: 448881 - DNA, 15 bp, Homo sapiens
atgaactttgcataa

SEQ ID NO: 448882 - DNA, 15 bp, Homo sapiens
gatgaactttgcata

SEQ ID NO: 448883 - DNA, 15 bp, Homo sapiens
ggatgaactttgcat

SEQ ID NO: 448884 - DNA, 15 bp, Homo sapiens
aggatgaactttgca

SEQ ID NO: 448885 - DNA, 15 bp, Homo sapiens
gaggatgaactttgc

SEQ ID NO: 448886 - DNA, 15 bp, Homo sapiens
agaggatgaactttg

SEQ ID NO: 448887 - DNA, 15 bp, Homo sapiens
tagaggatgaacttt

SEQ ID NO: 448888 - DNA, 15 bp, Homo sapiens
atagaggatgaactt

SEQ ID NO: 448889 - DNA, 15 bp, Homo sapiens
aatagaggatgaact

SEQ ID NO: 448890 - DNA, 15 bp, Homo sapiens
taatagaggatgaac

SEQ ID NO: 448891 - DNA, 15 bp, Homo sapiens
ataatagaggatgaa

SEQ ID NO: 448892 - DNA, 15 bp, Homo sapiens
cataatagaggatga

SEQ ID NO: 448893 - DNA, 15 bp, Homo sapiens
tcataatagaggatg

SEQ ID NO: 448894 - DNA, 15 bp, Homo sapiens
ttcataatagaggat

SEQ ID NO: 448895 - DNA, 15 bp, Homo sapiens
tttcataatagagga

SEQ ID NO: 448896 - DNA, 15 bp, Homo sapiens
ctttcataatagagg

SEQ ID NO: 448897 - DNA, 15 bp, Homo sapiens
cctttcataatagag

SEQ ID NO: 448898 - DNA, 15 bp, Homo sapiens
gcctttcataataga

SEQ ID NO: 448899 - DNA, 15 bp, Homo sapiens
tgcctttcataatag

SEQ ID NO: 448900 - DNA, 15 bp, Homo sapiens
ttgcctttcataata

SEQ ID NO: 448901 - DNA, 15 bp, Homo sapiens
tttgcctttcataat

SEQ ID NO: 448902 - DNA, 15 bp, Homo sapiens
ttttgcctttcataa

SEQ ID NO: 448903 - DNA, 15 bp, Homo sapiens
attttgcctttcata

SEQ ID NO: 448904 - DNA, 15 bp, Homo sapiens
cattttgcctttcat

SEQ ID NO: 448905 - DNA, 15 bp, Homo sapiens
acattttgcctttca

SEQ ID NO: 448906 - DNA, 15 bp, Homo sapiens
gacattttgcctttc

SEQ ID NO: 448907 - DNA, 15 bp, Homo sapiens
agacattttgccttt

SEQ ID NO: 448908 - DNA, 15 bp, Homo sapiens
tagacattttgcctt

SEQ ID NO: 448909 - DNA, 15 bp, Homo sapiens
gtagacattttgcct

SEQ ID NO: 448910 - DNA, 15 bp, Homo sapiens
tgtagacattttgcc

SEQ ID NO: 448911 - DNA, 15 bp, Homo sapiens
atgtagacattttgc

SEQ ID NO: 448912 - DNA, 15 bp, Homo sapiens
aatgtagacattttg

SEQ ID NO: 448913 - DNA, 15 bp, Homo sapiens
aaatgtagacatttt

SEQ ID NO: 448914 - DNA, 15 bp, Homo sapiens
gaaatgtagacattt

SEQ ID NO: 448915 - DNA, 15 bp, Homo sapiens
ggaaatgtagacatt

SEQ ID NO: 448916 - DNA, 15 bp, Homo sapiens
aggaaatgtagacat

SEQ ID NO: 448917 - DNA, 15 bp, Homo sapiens
taggaaatgtagaca

SEQ ID NO: 448918 - DNA, 15 bp, Homo sapiens
ataggaaatgtagac

SEQ ID NO: 448919 - DNA, 15 bp, Homo sapiens
gataggaaatgtaga

SEQ ID NO: 448920 - DNA, 15 bp, Homo sapiens
tgataggaaatgtag

SEQ ID NO: 448921 - DNA, 15 bp, Homo sapiens
ttgataggaaatgta

SEQ ID NO: 448922 - DNA, 15 bp, Homo sapiens
gttgataggaaatgt

SEQ ID NO: 448923 - DNA, 15 bp, Homo sapiens
ggttgataggaaatg

SEQ ID NO: 448924 - DNA, 15 bp, Homo sapiens
tggttgataggaaat

SEQ ID NO: 448925 - DNA, 15 bp, Homo sapiens
gtggttgataggaaa

SEQ ID NO: 448926 - DNA, 15 bp, Homo sapiens
agtggttgataggaa

SEQ ID NO: 448927 - DNA, 15 bp, Homo sapiens
cagtggttgatagga

SEQ ID NO: 448928 - DNA, 15 bp, Homo sapiens
ccagtggttgatagg

SEQ ID NO: 448929 - DNA, 15 bp, Homo sapiens
gccagtggttgatag

SEQ ID NO: 448930 - DNA, 15 bp, Homo sapiens
agccagtggttgata

SEQ ID NO: 448931 - DNA, 15 bp, Homo sapiens
aagccagtggttgat

SEQ ID NO: 448932 - DNA, 15 bp, Homo sapiens
gaagccagtggttga

SEQ ID NO: 448933 - DNA, 15 bp, Homo sapiens
tgaagccagtggttg

SEQ ID NO: 448934 - DNA, 15 bp, Homo sapiens
ttgaagccagtggtt

SEQ ID NO: 448935 - DNA, 15 bp, Homo sapiens
attgaagccagtggt

SEQ ID NO: 448936 - DNA, 15 bp, Homo sapiens
aattgaagccagtgg

SEQ ID NO: 448937 - DNA, 15 bp, Homo sapiens
gaattgaagccagtg

SEQ ID NO: 448938 - DNA, 15 bp, Homo sapiens
tgaattgaagccagt

SEQ ID NO: 448939 - DNA, 15 bp, Homo sapiens
ctgaattgaagccag

SEQ ID NO: 448940 - DNA, 15 bp, Homo sapiens
actgaattgaagcca

SEQ ID NO: 448941 - DNA, 15 bp, Homo sapiens
tactgaattgaagcc

SEQ ID NO: 448942 - DNA, 15 bp, Homo sapiens
ttactgaattgaagc

SEQ ID NO: 448943 - DNA, 15 bp, Homo sapiens
tttactgaattgaag

SEQ ID NO: 448944 - DNA, 15 bp, Homo sapiens
ttttactgaattgaa

SEQ ID NO: 448945 - DNA, 15 bp, Homo sapiens
gttttactgaattga

SEQ ID NO: 448946 - DNA, 15 bp, Homo sapiens
agttttactgaattg

SEQ ID NO: 448947 - DNA, 15 bp, Homo sapiens
aagttttactgaatt

SEQ ID NO: 448948 - DNA, 15 bp, Homo sapiens
caagttttactgaat

SEQ ID NO: 448949 - DNA, 15 bp, Homo sapiens
gcaagttttactgaa

SEQ ID NO: 448950 - DNA, 15 bp, Homo sapiens
tgcaagttttactga

SEQ ID NO: 448951 - DNA, 15 bp, Homo sapiens
atgcaagttttactg

SEQ ID NO: 448952 - DNA, 15 bp, Homo sapiens
tatgcaagttttact

SEQ ID NO: 448953 - DNA, 15 bp, Homo sapiens
gtatgcaagttttac

SEQ ID NO: 448954 - DNA, 15 bp, Homo sapiens
ggtatgcaagtttta

SEQ ID NO: 448955 - DNA, 15 bp, Homo sapiens
tggtatgcaagtttt

SEQ ID NO: 448956 - DNA, 15 bp, Homo sapiens
ttggtatgcaagttt

SEQ ID NO: 448957 - DNA, 15 bp, Homo sapiens
cttggtatgcaagtt

SEQ ID NO: 448958 - DNA, 15 bp, Homo sapiens
acttggtatgcaagt

SEQ ID NO: 448959 - DNA, 15 bp, Homo sapiens
tacttggtatgcaag

SEQ ID NO: 448960 - DNA, 15 bp, Homo sapiens
ctacttggtatgcaa

SEQ ID NO: 448961 - DNA, 15 bp, Homo sapiens
cctacttggtatgca

SEQ ID NO: 448962 - DNA, 15 bp, Homo sapiens
gcctacttggtatgc

SEQ ID NO: 448963 - DNA, 15 bp, Homo sapiens
tgcctacttggtatg

SEQ ID NO: 448964 - DNA, 15 bp, Homo sapiens
ttgcctacttggtat

SEQ ID NO: 448965 - DNA, 15 bp, Homo sapiens
cttgcctacttggta

SEQ ID NO: 448966 - DNA, 15 bp, Homo sapiens
ccttgcctacttggt

SEQ ID NO: 448967 - DNA, 15 bp, Homo sapiens
accttgcctacttgg

SEQ ID NO: 448968 - DNA, 15 bp, Homo sapiens
caccttgcctacttg

SEQ ID NO: 448969 - DNA, 15 bp, Homo sapiens
ccaccttgcctactt

SEQ ID NO: 448970 - DNA, 15 bp, Homo sapiens
tccaccttgcctact

SEQ ID NO: 448971 - DNA, 15 bp, Homo sapiens
ttccaccttgcctac

SEQ ID NO: 448972 - DNA, 15 bp, Homo sapiens
tttccaccttgccta

SEQ ID NO: 448973 - DNA, 15 bp, Homo sapiens
ttttccaccttgcct

SEQ ID NO: 448974 - DNA, 15 bp, Homo sapiens
cttttccaccttgcc

SEQ ID NO: 448975 - DNA, 15 bp, Homo sapiens
tcttttccaccttgc

SEQ ID NO: 448976 - DNA, 15 bp, Homo sapiens
ttcttttccaccttg

SEQ ID NO: 448977 - DNA, 15 bp, Homo sapiens
tttcttttccacctt

SEQ ID NO: 448978 - DNA, 15 bp, Homo sapiens
ttttcttttccacct

SEQ ID NO: 448979 - DNA, 15 bp, Homo sapiens
tttttcttttccacc

SEQ ID NO: 448980 - DNA, 15 bp, Homo sapiens
ctttttcttttccac

SEQ ID NO: 448981 - DNA, 15 bp, Homo sapiens
cctttttcttttcca

SEQ ID NO: 448982 - DNA, 15 bp, Homo sapiens
gcctttttcttttcc

SEQ ID NO: 448983 - DNA, 15 bp, Homo sapiens
tgcctttttcttttc

SEQ ID NO: 448984 - DNA, 15 bp, Homo sapiens
ctgcctttttctttt

SEQ ID NO: 448985 - DNA, 15 bp, Homo sapiens
tctgcctttttcttt

SEQ ID NO: 448986 - DNA, 15 bp, Homo sapiens
ttctgcctttttctt

SEQ ID NO: 448987 - DNA, 15 bp, Homo sapiens
gttctgcctttttct

SEQ ID NO: 448988 - DNA, 15 bp, Homo sapiens
tgttctgcctttttc

SEQ ID NO: 448989 - DNA, 15 bp, Homo sapiens
atgttctgccttttt

SEQ ID NO: 448990 - DNA, 15 bp, Homo sapiens
aatgttctgcctttt

SEQ ID NO: 448991 - DNA, 15 bp, Homo sapiens
aaatgttctgccttt

SEQ ID NO: 448992 - DNA, 15 bp, Homo sapiens
gaaatgttctgcctt

SEQ ID NO: 448993 - DNA, 15 bp, Homo sapiens
tgaaatgttctgcct

SEQ ID NO: 448994 - DNA, 15 bp, Homo sapiens
atgaaatgttctgcc

SEQ ID NO: 448995 - DNA, 15 bp, Homo sapiens
catgaaatgttctgc

SEQ ID NO: 448996 - DNA, 15 bp, Homo sapiens
acatgaaatgttctg

SEQ ID NO: 448997 - DNA, 15 bp, Homo sapiens
tacatgaaatgttct

SEQ ID NO: 448998 - DNA, 15 bp, Homo sapiens
atacatgaaatgttc

SEQ ID NO: 448999 - DNA, 15 bp, Homo sapiens
aatacatgaaatgtt

SEQ ID NO: 449000 - DNA, 15 bp, Homo sapiens
aaatacatgaaatgt

SEQ ID NO: 449001 - DNA, 15 bp, Homo sapiens
gaaatacatgaaatg

SEQ ID NO: 449002 - DNA, 15 bp, Homo sapiens
tgaaatacatgaaat

SEQ ID NO: 449003 - DNA, 15 bp, Homo sapiens
ttgaaatacatgaaa

SEQ ID NO: 449004 - DNA, 15 bp, Homo sapiens
attgaaatacatgaa

SEQ ID NO: 449005 - DNA, 15 bp, Homo sapiens
aattgaaatacatga

SEQ ID NO: 449006 - DNA, 15 bp, Homo sapiens
gaattgaaatacatg

SEQ ID NO: 449007 - DNA, 15 bp, Homo sapiens
tgaattgaaatacat

SEQ ID NO: 449008 - DNA, 15 bp, Homo sapiens
ctgaattgaaataca

SEQ ID NO: 449009 - DNA, 15 bp, Homo sapiens
tctgaattgaaatac

SEQ ID NO: 449010 - DNA, 15 bp, Homo sapiens
gtctgaattgaaata

SEQ ID NO: 449011 - DNA, 15 bp, Homo sapiens
cgtctgaattgaaat

SEQ ID NO: 449012 - DNA, 15 bp, Homo sapiens
gcgtctgaattgaaa

SEQ ID NO: 449013 - DNA, 15 bp, Homo sapiens
tgcgtctgaattgaa

SEQ ID NO: 449014 - DNA, 15 bp, Homo sapiens
atgcgtctgaattga

SEQ ID NO: 449015 - DNA, 15 bp, Homo sapiens
tatgcgtctgaattg

SEQ ID NO: 449016 - DNA, 15 bp, Homo sapiens
ttatgcgtctgaatt

SEQ ID NO: 449017 - DNA, 15 bp, Homo sapiens
tttatgcgtctgaat

SEQ ID NO: 449018 - DNA, 15 bp, Homo sapiens
ttttatgcgtctgaa

SEQ ID NO: 449019 - DNA, 15 bp, Homo sapiens
tttttatgcgtctga

SEQ ID NO: 449020 - DNA, 15 bp, Homo sapiens
atttttatgcgtctg

SEQ ID NO: 449021 - DNA, 15 bp, Homo sapiens
catttttatgcgtct

SEQ ID NO: 449022 - DNA, 15 bp, Homo sapiens
acatttttatgcgtc

SEQ ID NO: 449023 - DNA, 15 bp, Homo sapiens
gacatttttatgcgt

SEQ ID NO: 449024 - DNA, 15 bp, Homo sapiens
tgacatttttatgcg

SEQ ID NO: 449025 - DNA, 15 bp, Homo sapiens
ttgacatttttatgc

SEQ ID NO: 449026 - DNA, 15 bp, Homo sapiens
cttgacatttttatg

SEQ ID NO: 449027 - DNA, 15 bp, Homo sapiens
gcttgacatttttat

SEQ ID NO: 449028 - DNA, 15 bp, Homo sapiens
ggcttgacattttta

SEQ ID NO: 449029 - DNA, 15 bp, Homo sapiens
gggcttgacattttt

SEQ ID NO: 449030 - DNA, 15 bp, Homo sapiens
agggcttgacatttt

SEQ ID NO: 449031 - DNA, 15 bp, Homo sapiens
tagggcttgacattt

SEQ ID NO: 449032 - DNA, 15 bp, Homo sapiens
gtagggcttgacatt

SEQ ID NO: 449033 - DNA, 15 bp, Homo sapiens
tgtagggcttgacat

SEQ ID NO: 449034 - DNA, 15 bp, Homo sapiens
gtgtagggcttgaca

SEQ ID NO: 449035 - DNA, 15 bp, Homo sapiens
cgtgtagggcttgac

SEQ ID NO: 449036 - DNA, 15 bp, Homo sapiens
acgtgtagggcttga

SEQ ID NO: 449037 - DNA, 15 bp, Homo sapiens
aacgtgtagggcttg

SEQ ID NO: 449038 - DNA, 15 bp, Homo sapiens
taacgtgtagggctt

SEQ ID NO: 449039 - DNA, 15 bp, Homo sapiens
ataacgtgtagggct

SEQ ID NO: 449040 - DNA, 15 bp, Homo sapiens
gataacgtgtagggc

SEQ ID NO: 449041 - DNA, 15 bp, Homo sapiens
tgataacgtgtaggg

SEQ ID NO: 449042 - DNA, 15 bp, Homo sapiens
ctgataacgtgtagg

SEQ ID NO: 449043 - DNA, 15 bp, Homo sapiens
gctgataacgtgtag

SEQ ID NO: 449044 - DNA, 15 bp, Homo sapiens
agctgataacgtgta

SEQ ID NO: 449045 - DNA, 15 bp, Homo sapiens
aagctgataacgtgt

SEQ ID NO: 449046 - DNA, 15 bp, Homo sapiens
aaagctgataacgtg

SEQ ID NO: 449047 - DNA, 15 bp, Homo sapiens
gaaagctgataacgt

SEQ ID NO: 449048 - DNA, 15 bp, Homo sapiens
cgaaagctgataacg

SEQ ID NO: 449049 - DNA, 15 bp, Homo sapiens
acgaaagctgataac

SEQ ID NO: 449050 - DNA, 15 bp, Homo sapiens
tacgaaagctgataa

SEQ ID NO: 449051 - DNA, 15 bp, Homo sapiens
atacgaaagctgata

SEQ ID NO: 449052 - DNA, 15 bp, Homo sapiens
tatacgaaagctgat

SEQ ID NO: 449053 - DNA, 15 bp, Homo sapiens
gtatacgaaagctga

SEQ ID NO: 449054 - DNA, 15 bp, Homo sapiens
tgtatacgaaagctg

SEQ ID NO: 449055 - DNA, 15 bp, Homo sapiens
gtgtatacgaaagct

SEQ ID NO: 449056 - DNA, 15 bp, Homo sapiens
ggtgtatacgaaagc

SEQ ID NO: 449057 - DNA, 15 bp, Homo sapiens
cggtgtatacgaaag

SEQ ID NO: 449058 - DNA, 15 bp, Homo sapiens
acggtgtatacgaaa

SEQ ID NO: 449059 - DNA, 15 bp, Homo sapiens
gacggtgtatacgaa

SEQ ID NO: 449060 - DNA, 15 bp, Homo sapiens
agacggtgtatacga

SEQ ID NO: 449061 - DNA, 15 bp, Homo sapiens
aagacggtgtatacg

SEQ ID NO: 449062 - DNA, 15 bp, Homo sapiens
gaagacggtgtatac

SEQ ID NO: 449063 - DNA, 15 bp, Homo sapiens
agaagacggtgtata

SEQ ID NO: 449064 - DNA, 15 bp, Homo sapiens
cagaagacggtgtat

SEQ ID NO: 449065 - DNA, 15 bp, Homo sapiens
gcagaagacggtgta

SEQ ID NO: 449066 - DNA, 15 bp, Homo sapiens
tgcagaagacggtgt

SEQ ID NO: 449067 - DNA, 15 bp, Homo sapiens
atgcagaagacggtg

SEQ ID NO: 449068 - DNA, 15 bp, Homo sapiens
aatgcagaagacggt

SEQ ID NO: 449069 - DNA, 15 bp, Homo sapiens
gaatgcagaagacgg

SEQ ID NO: 449070 - DNA, 15 bp, Homo sapiens
cgaatgcagaagacg

SEQ ID NO: 449071 - DNA, 15 bp, Homo sapiens
gcgaatgcagaagac

SEQ ID NO: 449072 - DNA, 15 bp, Homo sapiens
ggcgaatgcagaaga

SEQ ID NO: 449073 - DNA, 15 bp, Homo sapiens
aggcgaatgcagaag

SEQ ID NO: 449074 - DNA, 15 bp, Homo sapiens
caggcgaatgcagaa

SEQ ID NO: 449075 - DNA, 15 bp, Homo sapiens
acaggcgaatgcaga

SEQ ID NO: 449076 - DNA, 15 bp, Homo sapiens
tacaggcgaatgcag

SEQ ID NO: 449077 - DNA, 15 bp, Homo sapiens
gtacaggcgaatgca

SEQ ID NO: 449078 - DNA, 15 bp, Homo sapiens
cgtacaggcgaatgc

SEQ ID NO: 449079 - DNA, 15 bp, Homo sapiens
ccgtacaggcgaatg

SEQ ID NO: 449080 - DNA, 15 bp, Homo sapiens
cccgtacaggcgaat

SEQ ID NO: 449081 - DNA, 15 bp, Homo sapiens
gcccgtacaggcgaa

SEQ ID NO: 449082 - DNA, 15 bp, Homo sapiens
ggcccgtacaggcga

SEQ ID NO: 449083 - DNA, 15 bp, Homo sapiens
tggcccgtacaggcg

SEQ ID NO: 449084 - DNA, 15 bp, Homo sapiens
ttggcccgtacaggc

SEQ ID NO: 449085 - DNA, 15 bp, Homo sapiens
attggcccgtacagg

SEQ ID NO: 449086 - DNA, 15 bp, Homo sapiens
cattggcccgtacag

SEQ ID NO: 449087 - DNA, 15 bp, Homo sapiens
ccattggcccgtaca

SEQ ID NO: 449088 - DNA, 15 bp, Homo sapiens
cccattggcccgtac

SEQ ID NO: 449089 - DNA, 15 bp, Homo sapiens
gcccattggcccgta

SEQ ID NO: 449090 - DNA, 15 bp, Homo sapiens
agcccattggcccgt

SEQ ID NO: 449091 - DNA, 15 bp, Homo sapiens
tagcccattggcccg

SEQ ID NO: 449092 - DNA, 15 bp, Homo sapiens
ctagcccattggccc

SEQ ID NO: 449093 - DNA, 15 bp, Homo sapiens
gctagcccattggcc

SEQ ID NO: 449094 - DNA, 15 bp, Homo sapiens
agctagcccattggc

SEQ ID NO: 449095 - DNA, 15 bp, Homo sapiens
cagctagcccattgg

SEQ ID NO: 449096 - DNA, 15 bp, Homo sapiens
ccagctagcccattg

SEQ ID NO: 449097 - DNA, 15 bp, Homo sapiens
accagctagcccatt

SEQ ID NO: 449098 - DNA, 15 bp, Homo sapiens
gaccagctagcccat

SEQ ID NO: 449099 - DNA, 15 bp, Homo sapiens
cgaccagctagccca

SEQ ID NO: 449100 - DNA, 15 bp, Homo sapiens
ccgaccagctagccc

SEQ ID NO: 449101 - DNA, 15 bp, Homo sapiens
gccgaccagctagcc

SEQ ID NO: 449102 - DNA, 15 bp, Homo sapiens
cgccgaccagctagc

SEQ ID NO: 449103 - DNA, 15 bp, Homo sapiens
acgccgaccagctag

SEQ ID NO: 449104 - DNA, 15 bp, Homo sapiens
aacgccgaccagcta

SEQ ID NO: 449105 - DNA, 15 bp, Homo sapiens
aaacgccgaccagct

SEQ ID NO: 449106 - DNA, 15 bp, Homo sapiens
caaacgccgaccagc

SEQ ID NO: 449107 - DNA, 15 bp, Homo sapiens
tcaaacgccgaccag

SEQ ID NO: 449108 - DNA, 15 bp, Homo sapiens
atcaaacgccgacca

SEQ ID NO: 449109 - DNA, 15 bp, Homo sapiens
catcaaacgccgacc

SEQ ID NO: 449110 - DNA, 15 bp, Homo sapiens
gcatcaaacgccgac

SEQ ID NO: 449111 - DNA, 15 bp, Homo sapiens
agcatcaaacgccga

SEQ ID NO: 449112 - DNA, 15 bp, Homo sapiens
aagcatcaaacgccg

SEQ ID NO: 449113 - DNA, 15 bp, Homo sapiens
caagcatcaaacgcc

SEQ ID NO: 449114 - DNA, 15 bp, Homo sapiens
tcaagcatcaaacgc

SEQ ID NO: 449115 - DNA, 15 bp, Homo sapiens
ttcaagcatcaaacg

SEQ ID NO: 449116 - DNA, 15 bp, Homo sapiens
cttcaagcatcaaac

SEQ ID NO: 449117 - DNA, 15 bp, Homo sapiens
acttcaagcatcaaa

SEQ ID NO: 449118 - DNA, 15 bp, Homo sapiens
cacttcaagcatcaa

SEQ ID NO: 449119 - DNA, 15 bp, Homo sapiens
tcacttcaagcatca

SEQ ID NO: 449120 - DNA, 15 bp, Homo sapiens
atcacttcaagcatc

SEQ ID NO: 449121 - DNA, 15 bp, Homo sapiens
catcacttcaagcat

SEQ ID NO: 449122 - DNA, 15 bp, Homo sapiens
ccatcacttcaagca

SEQ ID NO: 449123 - DNA, 15 bp, Homo sapiens
tccatcacttcaagc

SEQ ID NO: 449124 - DNA, 15 bp, Homo sapiens
ttccatcacttcaag

SEQ ID NO: 449125 - DNA, 15 bp, Homo sapiens
gttccatcacttcaa

SEQ ID NO: 449126 - DNA, 15 bp, Homo sapiens
cgttccatcacttca

SEQ ID NO: 449127 - DNA, 15 bp, Homo sapiens
ccgttccatcacttc

SEQ ID NO: 449128 - DNA, 15 bp, Homo sapiens
tccgttccatcactt

SEQ ID NO: 449129 - DNA, 15 bp, Homo sapiens
ctccgttccatcact

SEQ ID NO: 449130 - DNA, 15 bp, Homo sapiens
actccgttccatcac

SEQ ID NO: 449131 - DNA, 15 bp, Homo sapiens
tactccgttccatca

SEQ ID NO: 449132 - DNA, 15 bp, Homo sapiens
gtactccgttccatc

SEQ ID NO: 449133 - DNA, 15 bp, Homo sapiens
cgtactccgttccat

SEQ ID NO: 449134 - DNA, 15 bp, Homo sapiens
ccgtactccgttcca

SEQ ID NO: 449135 - DNA, 15 bp, Homo sapiens
cccgtactccgttcc

SEQ ID NO: 449136 - DNA, 15 bp, Homo sapiens
ccccgtactccgttc

SEQ ID NO: 449137 - DNA, 15 bp, Homo sapiens
accccgtactccgtt

SEQ ID NO: 449138 - DNA, 15 bp, Homo sapiens
aaccccgtactccgt

SEQ ID NO: 449139 - DNA, 15 bp, Homo sapiens
taaccccgtactccg

SEQ ID NO: 449140 - DNA, 15 bp, Homo sapiens
ttaaccccgtactcc

SEQ ID NO: 449141 - DNA, 15 bp, Homo sapiens
tttaaccccgtactc

SEQ ID NO: 449142 - DNA, 15 bp, Homo sapiens
atttaaccccgtact

SEQ ID NO: 449143 - DNA, 15 bp, Homo sapiens
gatttaaccccgtac

SEQ ID NO: 449144 - DNA, 15 bp, Homo sapiens
ggatttaaccccgta

SEQ ID NO: 449145 - DNA, 15 bp, Homo sapiens
tggatttaaccccgt

SEQ ID NO: 449146 - DNA, 15 bp, Homo sapiens
gtggatttaaccccg

SEQ ID NO: 449147 - DNA, 15 bp, Homo sapiens
agtggatttaacccc

SEQ ID NO: 449148 - DNA, 15 bp, Homo sapiens
tagtggatttaaccc

SEQ ID NO: 449149 - DNA, 15 bp, Homo sapiens
gtagtggatttaacc

SEQ ID NO: 449150 - DNA, 15 bp, Homo sapiens
ggtagtggatttaac

SEQ ID NO: 449151 - DNA, 15 bp, Homo sapiens
gggtagtggatttaa

SEQ ID NO: 449152 - DNA, 15 bp, Homo sapiens
agggtagtggattta

SEQ ID NO: 449153 - DNA, 15 bp, Homo sapiens
gagggtagtggattt

SEQ ID NO: 449154 - DNA, 15 bp, Homo sapiens
agagggtagtggatt

SEQ ID NO: 449155 - DNA, 15 bp, Homo sapiens
gagagggtagtggat

SEQ ID NO: 449156 - DNA, 15 bp, Homo sapiens
ggagagggtagtgga

SEQ ID NO: 449157 - DNA, 15 bp, Homo sapiens
gggagagggtagtgg

SEQ ID NO: 449158 - DNA, 15 bp, Homo sapiens
ggggagagggtagtg

SEQ ID NO: 449159 - DNA, 15 bp, Homo sapiens
tggggagagggtagt

SEQ ID NO: 449160 - DNA, 15 bp, Homo sapiens
gtggggagagggtag

SEQ ID NO: 449161 - DNA, 15 bp, Homo sapiens
cgtggggagagggta

SEQ ID NO: 449162 - DNA, 15 bp, Homo sapiens
gcgtggggagagggt

SEQ ID NO: 449163 - DNA, 15 bp, Homo sapiens
tgcgtggggagaggg

SEQ ID NO: 449164 - DNA, 15 bp, Homo sapiens
gtgcgtggggagagg

SEQ ID NO: 449165 - DNA, 15 bp, Homo sapiens
agtgcgtggggagag

SEQ ID NO: 449166 - DNA, 15 bp, Homo sapiens
gagtgcgtggggaga

SEQ ID NO: 449167 - DNA, 15 bp, Homo sapiens
agagtgcgtggggag

SEQ ID NO: 449168 - DNA, 15 bp, Homo sapiens
tagagtgcgtgggga

SEQ ID NO: 449169 - DNA, 15 bp, Homo sapiens
ctagagtgcgtgggg

SEQ ID NO: 449170 - DNA, 15 bp, Homo sapiens
actagagtgcgtggg

SEQ ID NO: 449171 - DNA, 15 bp, Homo sapiens
tactagagtgcgtgg

SEQ ID NO: 449172 - DNA, 15 bp, Homo sapiens
ttactagagtgcgtg

SEQ ID NO: 449173 - DNA, 15 bp, Homo sapiens
attactagagtgcgt

SEQ ID NO: 449174 - DNA, 15 bp, Homo sapiens
aattactagagtgcg

SEQ ID NO: 449175 - DNA, 15 bp, Homo sapiens
taattactagagtgc

SEQ ID NO: 449176 - DNA, 15 bp, Homo sapiens
gtaattactagagtg

SEQ ID NO: 449177 - DNA, 15 bp, Homo sapiens
agtaattactagagt

SEQ ID NO: 449178 - DNA, 15 bp, Homo sapiens
gagtaattactagag

SEQ ID NO: 449179 - DNA, 15 bp, Homo sapiens
agagtaattactaga

SEQ ID NO: 449180 - DNA, 15 bp, Homo sapiens
tagagtaattactag

SEQ ID NO: 449181 - DNA, 15 bp, Homo sapiens
atagagtaattacta

SEQ ID NO: 449182 - DNA, 15 bp, Homo sapiens
aatagagtaattact

SEQ ID NO: 449183 - DNA, 15 bp, Homo sapiens
aaatagagtaattac

SEQ ID NO: 449184 - DNA, 15 bp, Homo sapiens
gaaatagagtaatta

SEQ ID NO: 449185 - DNA, 15 bp, Homo sapiens
ggaaatagagtaatt

SEQ ID NO: 449186 - DNA, 15 bp, Homo sapiens
tggaaatagagtaat

SEQ ID NO: 449187 - DNA, 15 bp, Homo sapiens
gtggaaatagagtaa

SEQ ID NO: 449188 - DNA, 15 bp, Homo sapiens
cgtggaaatagagta

SEQ ID NO: 449189 - DNA, 15 bp, Homo sapiens
acgtggaaatagagt

SEQ ID NO: 449190 - DNA, 15 bp, Homo sapiens
gacgtggaaatagag

SEQ ID NO: 449191 - DNA, 15 bp, Homo sapiens
tgacgtggaaataga

SEQ ID NO: 449192 - DNA, 15 bp, Homo sapiens
atgacgtggaaatag

SEQ ID NO: 449193 - DNA, 15 bp, Homo sapiens
catgacgtggaaata

SEQ ID NO: 449194 - DNA, 15 bp, Homo sapiens
acatgacgtggaaat

SEQ ID NO: 449195 - DNA, 15 bp, Homo sapiens
aacatgacgtggaaa

SEQ ID NO: 449196 - DNA, 15 bp, Homo sapiens
aaacatgacgtggaa

SEQ ID NO: 449197 - DNA, 15 bp, Homo sapiens
gaaacatgacgtgga

SEQ ID NO: 449198 - DNA, 15 bp, Homo sapiens
ggaaacatgacgtgg

SEQ ID NO: 449199 - DNA, 15 bp, Homo sapiens
cggaaacatgacgtg

SEQ ID NO: 449200 - DNA, 15 bp, Homo sapiens
ccggaaacatgacgt

SEQ ID NO: 449201 - DNA, 15 bp, Homo sapiens
cccggaaacatgacg

SEQ ID NO: 449202 - DNA, 15 bp, Homo sapiens
acccggaaacatgac

SEQ ID NO: 449203 - DNA, 15 bp, Homo sapiens
cacccggaaacatga

SEQ ID NO: 449204 - DNA, 15 bp, Homo sapiens
acacccggaaacatg

SEQ ID NO: 449205 - DNA, 15 bp, Homo sapiens
cacacccggaaacat

SEQ ID NO: 449206 - DNA, 15 bp, Homo sapiens
acacacccggaaaca

SEQ ID NO: 449207 - DNA, 15 bp, Homo sapiens
cacacacccggaaac

SEQ ID NO: 449208 - DNA, 15 bp, Homo sapiens
acacacacccggaaa

SEQ ID NO: 449209 - DNA, 15 bp, Homo sapiens
cacacacacccggaa

SEQ ID NO: 449210 - DNA, 15 bp, Homo sapiens
acacacacacccgga

SEQ ID NO: 449211 - DNA, 15 bp, Homo sapiens
gacacacacacccgg

SEQ ID NO: 449212 - DNA, 15 bp, Homo sapiens
ggacacacacacccg

SEQ ID NO: 449213 - DNA, 15 bp, Homo sapiens
gggacacacacaccc

SEQ ID NO: 449214 - DNA, 15 bp, Homo sapiens
agggacacacacacc

SEQ ID NO: 449215 - DNA, 15 bp, Homo sapiens
cagggacacacacac

SEQ ID NO: 449216 - DNA, 15 bp, Homo sapiens
gcagggacacacaca

SEQ ID NO: 449217 - DNA, 15 bp, Homo sapiens
agcagggacacacac

SEQ ID NO: 449218 - DNA, 15 bp, Homo sapiens
gagcagggacacaca

SEQ ID NO: 449219 - DNA, 15 bp, Homo sapiens
tgagcagggacacac

SEQ ID NO: 449220 - DNA, 15 bp, Homo sapiens
gtgagcagggacaca

SEQ ID NO: 449221 - DNA, 15 bp, Homo sapiens
cgtgagcagggacac

SEQ ID NO: 449222 - DNA, 15 bp, Homo sapiens
gcgtgagcagggaca

SEQ ID NO: 449223 - DNA, 15 bp, Homo sapiens
tgcgtgagcagggac

SEQ ID NO: 449224 - DNA, 15 bp, Homo sapiens
ctgcgtgagcaggga

SEQ ID NO: 449225 - DNA, 15 bp, Homo sapiens
tctgcgtgagcaggg

SEQ ID NO: 449226 - DNA, 15 bp, Homo sapiens
ttctgcgtgagcagg

SEQ ID NO: 449227 - DNA, 15 bp, Homo sapiens
tttctgcgtgagcag

SEQ ID NO: 449228 - DNA, 15 bp, Homo sapiens
gtttctgcgtgagca

SEQ ID NO: 449229 - DNA, 15 bp, Homo sapiens
agtttctgcgtgagc

SEQ ID NO: 449230 - DNA, 15 bp, Homo sapiens
cagtttctgcgtgag

SEQ ID NO: 449231 - DNA, 15 bp, Homo sapiens
tcagtttctgcgtga

SEQ ID NO: 449232 - DNA, 15 bp, Homo sapiens
ttcagtttctgcgtg

SEQ ID NO: 449233 - DNA, 15 bp, Homo sapiens
cttcagtttctgcgt

SEQ ID NO: 449234 - DNA, 15 bp, Homo sapiens
acttcagtttctgcg

SEQ ID NO: 449235 - DNA, 15 bp, Homo sapiens
aacttcagtttctgc

SEQ ID NO: 449236 - DNA, 15 bp, Homo sapiens
gaacttcagtttctg

SEQ ID NO: 449237 - DNA, 15 bp, Homo sapiens
tgaacttcagtttct

SEQ ID NO: 449238 - DNA, 15 bp, Homo sapiens
ttgaacttcagtttc

SEQ ID NO: 449239 - DNA, 15 bp, Homo sapiens
tttgaacttcagttt

SEQ ID NO: 449240 - DNA, 15 bp, Homo sapiens
ctttgaacttcagtt

SEQ ID NO: 449241 - DNA, 15 bp, Homo sapiens
gctttgaacttcagt

SEQ ID NO: 449242 - DNA, 15 bp, Homo sapiens
tgctttgaacttcag

SEQ ID NO: 449243 - DNA, 15 bp, Homo sapiens
ctgctttgaacttca

SEQ ID NO: 449244 - DNA, 15 bp, Homo sapiens
cctgctttgaacttc

SEQ ID NO: 449245 - DNA, 15 bp, Homo sapiens
gcctgctttgaactt

SEQ ID NO: 449246 - DNA, 15 bp, Homo sapiens
cgcctgctttgaact

SEQ ID NO: 449247 - DNA, 15 bp, Homo sapiens
ccgcctgctttgaac

SEQ ID NO: 449248 - DNA, 15 bp, Homo sapiens
tccgcctgctttgaa

SEQ ID NO: 449249 - DNA, 15 bp, Homo sapiens
ctccgcctgctttga

SEQ ID NO: 449250 - DNA, 15 bp, Homo sapiens
actccgcctgctttg

SEQ ID NO: 449251 - DNA, 15 bp, Homo sapiens
gactccgcctgcttt

SEQ ID NO: 449252 - DNA, 15 bp, Homo sapiens
tgactccgcctgctt

SEQ ID NO: 449253 - DNA, 15 bp, Homo sapiens
gtgactccgcctgct

SEQ ID NO: 449254 - DNA, 15 bp, Homo sapiens
ggtgactccgcctgc

SEQ ID NO: 449255 - DNA, 15 bp, Homo sapiens
gggtgactccgcctg

SEQ ID NO: 449256 - DNA, 15 bp, Homo sapiens
tgggtgactccgcct

SEQ ID NO: 449257 - DNA, 15 bp, Homo sapiens
atgggtgactccgcc

SEQ ID NO: 449258 - DNA, 15 bp, Homo sapiens
catgggtgactccgc

SEQ ID NO: 449259 - DNA, 15 bp, Homo sapiens
acatgggtgactccg

SEQ ID NO: 449260 - DNA, 15 bp, Homo sapiens
aacatgggtgactcc

SEQ ID NO: 449261 - DNA, 15 bp, Homo sapiens
gaacatgggtgactc

SEQ ID NO: 449262 - DNA, 15 bp, Homo sapiens
agaacatgggtgact

SEQ ID NO: 449263 - DNA, 15 bp, Homo sapiens
aagaacatgggtgac

SEQ ID NO: 449264 - DNA, 15 bp, Homo sapiens
aaagaacatgggtga

SEQ ID NO: 449265 - DNA, 15 bp, Homo sapiens
aaaagaacatgggtg

SEQ ID NO: 449266 - DNA, 15 bp, Homo sapiens
aaaaagaacatgggt

SEQ ID NO: 449267 - DNA, 15 bp, Homo sapiens
caaaaagaacatggg

SEQ ID NO: 449268 - DNA, 15 bp, Homo sapiens
acaaaaagaacatgg

SEQ ID NO: 449269 - DNA, 15 bp, Homo sapiens
aacaaaaagaacatg

SEQ ID NO: 449270 - DNA, 15 bp, Homo sapiens
caacaaaaagaacat

SEQ ID NO: 449271 - DNA, 15 bp, Homo sapiens
acaacaaaaagaaca

SEQ ID NO: 449272 - DNA, 15 bp, Homo sapiens
gacaacaaaaagaac

SEQ ID NO: 449273 - DNA, 15 bp, Homo sapiens
ggacaacaaaaagaa

SEQ ID NO: 449274 - DNA, 15 bp, Homo sapiens
gggacaacaaaaaga

SEQ ID NO: 449275 - DNA, 15 bp, Homo sapiens
ggggacaacaaaaag

SEQ ID NO: 449276 - DNA, 15 bp, Homo sapiens
tggggacaacaaaaa

SEQ ID NO: 449277 - DNA, 15 bp, Homo sapiens
ctggggacaacaaaa

SEQ ID NO: 449278 - DNA, 15 bp, Homo sapiens
tctggggacaacaaa

SEQ ID NO: 449279 - DNA, 15 bp, Homo sapiens
ttctggggacaacaa

SEQ ID NO: 449280 - DNA, 15 bp, Homo sapiens
gttctggggacaaca

SEQ ID NO: 449281 - DNA, 15 bp, Homo sapiens
ggttctggggacaac

SEQ ID NO: 449282 - DNA, 15 bp, Homo sapiens
gggttctggggacaa

SEQ ID NO: 449283 - DNA, 15 bp, Homo sapiens
tgggttctggggaca

SEQ ID NO: 449284 - DNA, 15 bp, Homo sapiens
ttgggttctggggac

SEQ ID NO: 449285 - DNA, 15 bp, Homo sapiens
attgggttctgggga

SEQ ID NO: 449286 - DNA, 15 bp, Homo sapiens
aattgggttctgggg

SEQ ID NO: 449287 - DNA, 15 bp, Homo sapiens
gaattgggttctggg

SEQ ID NO: 449288 - DNA, 15 bp, Homo sapiens
tgaattgggttctgg

SEQ ID NO: 449289 - DNA, 15 bp, Homo sapiens
ctgaattgggttctg

SEQ ID NO: 449290 - DNA, 15 bp, Homo sapiens
cctgaattgggttct

SEQ ID NO: 449291 - DNA, 15 bp, Homo sapiens
tcctgaattgggttc

SEQ ID NO: 449292 - DNA, 15 bp, Homo sapiens
ctcctgaattgggtt

SEQ ID NO: 449293 - DNA, 15 bp, Homo sapiens
actcctgaattgggt

SEQ ID NO: 449294 - DNA, 15 bp, Homo sapiens
aactcctgaattggg

SEQ ID NO: 449295 - DNA, 15 bp, Homo sapiens
caactcctgaattgg

SEQ ID NO: 449296 - DNA, 15 bp, Homo sapiens
ccaactcctgaattg

SEQ ID NO: 449297 - DNA, 15 bp, Homo sapiens
cccaactcctgaatt

SEQ ID NO: 449298 - DNA, 15 bp, Homo sapiens
acccaactcctgaat

SEQ ID NO: 449299 - DNA, 15 bp, Homo sapiens
gacccaactcctgaa

SEQ ID NO: 449300 - DNA, 15 bp, Homo sapiens
ggacccaactcctga

SEQ ID NO: 449301 - DNA, 15 bp, Homo sapiens
gggacccaactcctg

SEQ ID NO: 449302 - DNA, 15 bp, Homo sapiens
ggggacccaactcct

SEQ ID NO: 449303 - DNA, 15 bp, Homo sapiens
tggggacccaactcc

SEQ ID NO: 449304 - DNA, 15 bp, Homo sapiens
ctggggacccaactc

SEQ ID NO: 449305 - DNA, 15 bp, Homo sapiens
tctggggacccaact

SEQ ID NO: 449306 - DNA, 15 bp, Homo sapiens
ctctggggacccaac

SEQ ID NO: 449307 - DNA, 15 bp, Homo sapiens
cctctggggacccaa

SEQ ID NO: 449308 - DNA, 15 bp, Homo sapiens
tcctctggggaccca

SEQ ID NO: 449309 - DNA, 15 bp, Homo sapiens
atcctctggggaccc

SEQ ID NO: 449310 - DNA, 15 bp, Homo sapiens
gatcctctggggacc

SEQ ID NO: 449311 - DNA, 15 bp, Homo sapiens
agatcctctggggac

SEQ ID NO: 449312 - DNA, 15 bp, Homo sapiens
cagatcctctgggga

SEQ ID NO: 449313 - DNA, 15 bp, Homo sapiens
ccagatcctctgggg

SEQ ID NO: 449314 - DNA, 15 bp, Homo sapiens
tccagatcctctggg

SEQ ID NO: 449315 - DNA, 15 bp, Homo sapiens
ctccagatcctctgg

SEQ ID NO: 449316 - DNA, 15 bp, Homo sapiens
tctccagatcctctg

SEQ ID NO: 449317 - DNA, 15 bp, Homo sapiens
atctccagatcctct

SEQ ID NO: 449318 - DNA, 15 bp, Homo sapiens
tatctccagatcctc

SEQ ID NO: 449319 - DNA, 15 bp, Homo sapiens
gtatctccagatcct

SEQ ID NO: 449320 - DNA, 15 bp, Homo sapiens
ggtatctccagatcc

SEQ ID NO: 449321 - DNA, 15 bp, Homo sapiens
aggtatctccagatc

SEQ ID NO: 449322 - DNA, 15 bp, Homo sapiens
caggtatctccagat

SEQ ID NO: 449323 - DNA, 15 bp, Homo sapiens
ccaggtatctccaga

SEQ ID NO: 449324 - DNA, 15 bp, Homo sapiens
cccaggtatctccag

SEQ ID NO: 449325 - DNA, 15 bp, Homo sapiens
ccccaggtatctcca

SEQ ID NO: 449326 - DNA, 15 bp, Homo sapiens
tccccaggtatctcc

SEQ ID NO: 449327 - DNA, 15 bp, Homo sapiens
gtccccaggtatctc

SEQ ID NO: 449328 - DNA, 15 bp, Homo sapiens
agtccccaggtatct

SEQ ID NO: 449329 - DNA, 15 bp, Homo sapiens
tagtccccaggtatc

SEQ ID NO: 449330 - DNA, 15 bp, Homo sapiens
atagtccccaggtat

SEQ ID NO: 449331 - DNA, 15 bp, Homo sapiens
gatagtccccaggta

SEQ ID NO: 449332 - DNA, 15 bp, Homo sapiens
agatagtccccaggt

SEQ ID NO: 449333 - DNA, 15 bp, Homo sapiens
tagatagtccccagg

SEQ ID NO: 449334 - DNA, 15 bp, Homo sapiens
ttagatagtccccag

SEQ ID NO: 449335 - DNA, 15 bp, Homo sapiens
gttagatagtcccca

SEQ ID NO: 449336 - DNA, 15 bp, Homo sapiens
agttagatagtcccc

SEQ ID NO: 449337 - DNA, 15 bp, Homo sapiens
tagttagatagtccc

SEQ ID NO: 449338 - DNA, 15 bp, Homo sapiens
ctagttagatagtcc

SEQ ID NO: 449339 - DNA, 15 bp, Homo sapiens
gctagttagatagtc

SEQ ID NO: 449340 - DNA, 15 bp, Homo sapiens
agctagttagatagt

SEQ ID NO: 449341 - DNA, 15 bp, Homo sapiens
cagctagttagatag

SEQ ID NO: 449342 - DNA, 15 bp, Homo sapiens
tcagctagttagata

SEQ ID NO: 449343 - DNA, 15 bp, Homo sapiens
atcagctagttagat

SEQ ID NO: 449344 - DNA, 15 bp, Homo sapiens
aatcagctagttaga

SEQ ID NO: 449345 - DNA, 15 bp, Homo sapiens
gaatcagctagttag

SEQ ID NO: 449346 - DNA, 15 bp, Homo sapiens
ggaatcagctagtta

SEQ ID NO: 449347 - DNA, 15 bp, Homo sapiens
gggaatcagctagtt

SEQ ID NO: 449348 - DNA, 15 bp, Homo sapiens
cgggaatcagctagt

SEQ ID NO: 449349 - DNA, 15 bp, Homo sapiens
gcgggaatcagctag

SEQ ID NO: 449350 - DNA, 15 bp, Homo sapiens
cgcgggaatcagcta

SEQ ID NO: 449351 - DNA, 15 bp, Homo sapiens
acgcgggaatcagct

SEQ ID NO: 449352 - DNA, 15 bp, Homo sapiens
cacgcgggaatcagc

SEQ ID NO: 449353 - DNA, 15 bp, Homo sapiens
ccacgcgggaatcag

SEQ ID NO: 449354 - DNA, 15 bp, Homo sapiens
accacgcgggaatca

SEQ ID NO: 449355 - DNA, 15 bp, Homo sapiens
taccacgcgggaatc

SEQ ID NO: 449356 - DNA, 15 bp, Homo sapiens
ttaccacgcgggaat

SEQ ID NO: 449357 - DNA, 15 bp, Homo sapiens
cttaccacgcgggaa

SEQ ID NO: 449358 - DNA, 15 bp, Homo sapiens
tcttaccacgcggga

SEQ ID NO: 449359 - DNA, 15 bp, Homo sapiens
ctcttaccacgcggg

SEQ ID NO: 449360 - DNA, 15 bp, Homo sapiens
cctcttaccacgcgg

SEQ ID NO: 449361 - DNA, 15 bp, Homo sapiens
gcctcttaccacgcg

SEQ ID NO: 449362 - DNA, 15 bp, Homo sapiens
agcctcttaccacgc

SEQ ID NO: 449363 - DNA, 15 bp, Homo sapiens
gagcctcttaccacg

SEQ ID NO: 449364 - DNA, 15 bp, Homo sapiens
agagcctcttaccac

SEQ ID NO: 449365 - DNA, 15 bp, Homo sapiens
gagagcctcttacca

SEQ ID NO: 449366 - DNA, 15 bp, Homo sapiens
tgagagcctcttacc

SEQ ID NO: 449367 - DNA, 15 bp, Homo sapiens
ttgagagcctcttac

SEQ ID NO: 449368 - DNA, 15 bp, Homo sapiens
gttgagagcctctta

SEQ ID NO: 449369 - DNA, 15 bp, Homo sapiens
ggttgagagcctctt

SEQ ID NO: 449370 - DNA, 15 bp, Homo sapiens
aggttgagagcctct

SEQ ID NO: 449371 - DNA, 15 bp, Homo sapiens
gaggttgagagcctc

SEQ ID NO: 449372 - DNA, 15 bp, Homo sapiens
cgaggttgagagcct

SEQ ID NO: 449373 - DNA, 15 bp, Homo sapiens
gcgaggttgagagcc

SEQ ID NO: 449374 - DNA, 15 bp, Homo sapiens
ggcgaggttgagagc

SEQ ID NO: 449375 - DNA, 15 bp, Homo sapiens
tggcgaggttgagag

SEQ ID NO: 449376 - DNA, 15 bp, Homo sapiens
gtggcgaggttgaga

SEQ ID NO: 449377 - DNA, 15 bp, Homo sapiens
ggtggcgaggttgag

SEQ ID NO: 449378 - DNA, 15 bp, Homo sapiens
tggtggcgaggttga

SEQ ID NO: 449379 - DNA, 15 bp, Homo sapiens
gtggtggcgaggttg

SEQ ID NO: 449380 - DNA, 15 bp, Homo sapiens
cgtggtggcgaggtt

SEQ ID NO: 449381 - DNA, 15 bp, Homo sapiens
acgtggtggcgaggt

SEQ ID NO: 449382 - DNA, 15 bp, Homo sapiens
cacgtggtggcgagg

SEQ ID NO: 449383 - DNA, 15 bp, Homo sapiens
ccacgtggtggcgag

SEQ ID NO: 449384 - DNA, 15 bp, Homo sapiens
accacgtggtggcga

SEQ ID NO: 449385 - DNA, 15 bp, Homo sapiens
caccacgtggtggcg

SEQ ID NO: 449386 - DNA, 15 bp, Homo sapiens
gcaccacgtggtggc

SEQ ID NO: 449387 - DNA, 15 bp, Homo sapiens
ggcaccacgtggtgg

SEQ ID NO: 449388 - DNA, 15 bp, Homo sapiens
tggcaccacgtggtg

SEQ ID NO: 449389 - DNA, 15 bp, Homo sapiens
ttggcaccacgtggt

SEQ ID NO: 449390 - DNA, 15 bp, Homo sapiens
cttggcaccacgtgg

SEQ ID NO: 449391 - DNA, 15 bp, Homo sapiens
ccttggcaccacgtg

SEQ ID NO: 449392 - DNA, 15 bp, Homo sapiens
cccttggcaccacgt

SEQ ID NO: 449393 - DNA, 15 bp, Homo sapiens
gcccttggcaccacg

SEQ ID NO: 449394 - DNA, 15 bp, Homo sapiens
ggcccttggcaccac

SEQ ID NO: 449395 - DNA, 15 bp, Homo sapiens
cggcccttggcacca

SEQ ID NO: 449396 - DNA, 15 bp, Homo sapiens
ccggcccttggcacc

SEQ ID NO: 449397 - DNA, 15 bp, Homo sapiens
cccggcccttggcac

SEQ ID NO: 449398 - DNA, 15 bp, Homo sapiens
tcccggcccttggca

SEQ ID NO: 449399 - DNA, 15 bp, Homo sapiens
ttcccggcccttggc

SEQ ID NO: 449400 - DNA, 15 bp, Homo sapiens
tttcccggcccttgg

SEQ ID NO: 449401 - DNA, 15 bp, Homo sapiens
ttttcccggcccttg

SEQ ID NO: 449402 - DNA, 15 bp, Homo sapiens
cttttcccggccctt

SEQ ID NO: 449403 - DNA, 15 bp, Homo sapiens
ccttttcccggccct

SEQ ID NO: 449404 - DNA, 15 bp, Homo sapiens
cccttttcccggccc

SEQ ID NO: 449405 - DNA, 15 bp, Homo sapiens
tcccttttcccggcc

SEQ ID NO: 449406 - DNA, 15 bp, Homo sapiens
ctcccttttcccggc

SEQ ID NO: 449407 - DNA, 15 bp, Homo sapiens
tctcccttttcccgg

SEQ ID NO: 449408 - DNA, 15 bp, Homo sapiens
ctctcccttttcccg

SEQ ID NO: 449409 - DNA, 15 bp, Homo sapiens
gctctcccttttccc

SEQ ID NO: 449410 - DNA, 15 bp, Homo sapiens
cgctctcccttttcc

SEQ ID NO: 449411 - DNA, 15 bp, Homo sapiens
ccgctctcccttttc

SEQ ID NO: 449412 - DNA, 15 bp, Homo sapiens
cccgctctccctttt

SEQ ID NO: 449413 - DNA, 15 bp, Homo sapiens
gcccgctctcccttt

SEQ ID NO: 449414 - DNA, 15 bp, Homo sapiens
tgcccgctctccctt

SEQ ID NO: 449415 - DNA, 15 bp, Homo sapiens
ctgcccgctctccct

SEQ ID NO: 449416 - DNA, 15 bp, Homo sapiens
cctgcccgctctccc

SEQ ID NO: 449417 - DNA, 15 bp, Homo sapiens
tcctgcccgctctcc

SEQ ID NO: 449418 - DNA, 15 bp, Homo sapiens
ctcctgcccgctctc

SEQ ID NO: 449419 - DNA, 15 bp, Homo sapiens
cctcctgcccgctct

SEQ ID NO: 449420 - DNA, 15 bp, Homo sapiens
ccctcctgcccgctc

SEQ ID NO: 449421 - DNA, 15 bp, Homo sapiens
tccctcctgcccgct

SEQ ID NO: 449422 - DNA, 15 bp, Homo sapiens
ctccctcctgcccgc

SEQ ID NO: 449423 - DNA, 15 bp, Homo sapiens
gctccctcctgcccg

SEQ ID NO: 449424 - DNA, 15 bp, Homo sapiens
agctccctcctgccc

SEQ ID NO: 449425 - DNA, 15 bp, Homo sapiens
cagctccctcctgcc

SEQ ID NO: 449426 - DNA, 15 bp, Homo sapiens
acagctccctcctgc

SEQ ID NO: 449427 - DNA, 15 bp, Homo sapiens
tacagctccctcctg

SEQ ID NO: 449428 - DNA, 15 bp, Homo sapiens
atacagctccctcct

SEQ ID NO: 449429 - DNA, 15 bp, Homo sapiens
gatacagctccctcc

SEQ ID NO: 449430 - DNA, 15 bp, Homo sapiens
tgatacagctccctc

SEQ ID NO: 449431 - DNA, 15 bp, Homo sapiens
ctgatacagctccct

SEQ ID NO: 449432 - DNA, 15 bp, Homo sapiens
cctgatacagctccc

SEQ ID NO: 449433 - DNA, 15 bp, Homo sapiens
ccctgatacagctcc

SEQ ID NO: 449434 - DNA, 15 bp, Homo sapiens
cccctgatacagctc

SEQ ID NO: 449435 - DNA, 15 bp, Homo sapiens
gcccctgatacagct

SEQ ID NO: 449436 - DNA, 15 bp, Homo sapiens
tgcccctgatacagc

SEQ ID NO: 449437 - DNA, 15 bp, Homo sapiens
atgcccctgatacag

SEQ ID NO: 449438 - DNA, 15 bp, Homo sapiens
aatgcccctgataca

SEQ ID NO: 449439 - DNA, 15 bp, Homo sapiens
aaatgcccctgatac

SEQ ID NO: 449440 - DNA, 15 bp, Homo sapiens
taaatgcccctgata

SEQ ID NO: 449441 - DNA, 15 bp, Homo sapiens
ttaaatgcccctgat

SEQ ID NO: 449442 - DNA, 15 bp, Homo sapiens
tttaaatgcccctga

SEQ ID NO: 449443 - DNA, 15 bp, Homo sapiens
ctttaaatgcccctg

SEQ ID NO: 449444 - DNA, 15 bp, Homo sapiens
actttaaatgcccct

SEQ ID NO: 449445 - DNA, 15 bp, Homo sapiens
cactttaaatgcccc

SEQ ID NO: 449446 - DNA, 15 bp, Homo sapiens
gcactttaaatgccc

SEQ ID NO: 449447 - DNA, 15 bp, Homo sapiens
ggcactttaaatgcc

SEQ ID NO: 449448 - DNA, 15 bp, Homo sapiens
aggcactttaaatgc

SEQ ID NO: 449449 - DNA, 15 bp, Homo sapiens
aaggcactttaaatg

SEQ ID NO: 449450 - DNA, 15 bp, Homo sapiens
caaggcactttaaat

SEQ ID NO: 449451 - DNA, 15 bp, Homo sapiens
tcaaggcactttaaa

SEQ ID NO: 449452 - DNA, 15 bp, Homo sapiens
gtcaaggcactttaa

SEQ ID NO: 449453 - DNA, 15 bp, Homo sapiens
cgtcaaggcacttta

SEQ ID NO: 449454 - DNA, 15 bp, Homo sapiens
acgtcaaggcacttt

SEQ ID NO: 449455 - DNA, 15 bp, Homo sapiens
gacgtcaaggcactt

SEQ ID NO: 449456 - DNA, 15 bp, Homo sapiens
tgacgtcaaggcact

SEQ ID NO: 449457 - DNA, 15 bp, Homo sapiens
gtgacgtcaaggcac

SEQ ID NO: 449458 - DNA, 15 bp, Homo sapiens
cgtgacgtcaaggca

SEQ ID NO: 449459 - DNA, 15 bp, Homo sapiens
gcgtgacgtcaaggc

SEQ ID NO: 449460 - DNA, 15 bp, Homo sapiens
tgcgtgacgtcaagg

SEQ ID NO: 449461 - DNA, 15 bp, Homo sapiens
gtgcgtgacgtcaag

SEQ ID NO: 449462 - DNA, 15 bp, Homo sapiens
agtgcgtgacgtcaa

SEQ ID NO: 449463 - DNA, 15 bp, Homo sapiens
cagtgcgtgacgtca

SEQ ID NO: 449464 - DNA, 15 bp, Homo sapiens
gcagtgcgtgacgtc

SEQ ID NO: 449465 - DNA, 15 bp, Homo sapiens
ggcagtgcgtgacgt

SEQ ID NO: 449466 - DNA, 15 bp, Homo sapiens
tggcagtgcgtgacg

SEQ ID NO: 449467 - DNA, 15 bp, Homo sapiens
ctggcagtgcgtgac

SEQ ID NO: 449468 - DNA, 15 bp, Homo sapiens
cctggcagtgcgtga

SEQ ID NO: 449469 - DNA, 15 bp, Homo sapiens
tcctggcagtgcgtg

SEQ ID NO: 449470 - DNA, 15 bp, Homo sapiens
ttcctggcagtgcgt

SEQ ID NO: 449471 - DNA, 15 bp, Homo sapiens
gttcctggcagtgcg

SEQ ID NO: 449472 - DNA, 15 bp, Homo sapiens
agttcctggcagtgc

SEQ ID NO: 449473 - DNA, 15 bp, Homo sapiens
gagttcctggcagtg

SEQ ID NO: 449474 - DNA, 15 bp, Homo sapiens
tgagttcctggcagt

SEQ ID NO: 449475 - DNA, 15 bp, Homo sapiens
ctgagttcctggcag

SEQ ID NO: 449476 - DNA, 15 bp, Homo sapiens
gctgagttcctggca

SEQ ID NO: 449477 - DNA, 15 bp, Homo sapiens
agctgagttcctggc

SEQ ID NO: 449478 - DNA, 15 bp, Homo sapiens
cagctgagttcctgg

SEQ ID NO: 449479 - DNA, 15 bp, Homo sapiens
tcagctgagttcctg

SEQ ID NO: 449480 - DNA, 15 bp, Homo sapiens
ctcagctgagttcct

SEQ ID NO: 449481 - DNA, 15 bp, Homo sapiens
actcagctgagttcc

SEQ ID NO: 449482 - DNA, 15 bp, Homo sapiens
aactcagctgagttc

SEQ ID NO: 449483 - DNA, 15 bp, Homo sapiens
aaactcagctgagtt

SEQ ID NO: 449484 - DNA, 15 bp, Homo sapiens
aaaactcagctgagt

SEQ ID NO: 449485 - DNA, 15 bp, Homo sapiens
gaaaactcagctgag

SEQ ID NO: 449486 - DNA, 15 bp, Homo sapiens
tgaaaactcagctga

SEQ ID NO: 449487 - DNA, 15 bp, Homo sapiens
ctgaaaactcagctg

SEQ ID NO: 449488 - DNA, 15 bp, Homo sapiens
gctgaaaactcagct

SEQ ID NO: 449489 - DNA, 15 bp, Homo sapiens
tgctgaaaactcagc

SEQ ID NO: 449490 - DNA, 15 bp, Homo sapiens
ctgctgaaaactcag

SEQ ID NO: 449491 - DNA, 15 bp, Homo sapiens
cctgctgaaaactca

SEQ ID NO: 449492 - DNA, 15 bp, Homo sapiens
tcctgctgaaaactc

SEQ ID NO: 449493 - DNA, 15 bp, Homo sapiens
gtcctgctgaaaact

SEQ ID NO: 449494 - DNA, 15 bp, Homo sapiens
tgtcctgctgaaaac

SEQ ID NO: 449495 - DNA, 15 bp, Homo sapiens
atgtcctgctgaaaa

SEQ ID NO: 449496 - DNA, 15 bp, Homo sapiens
aatgtcctgctgaaa

SEQ ID NO: 449497 - DNA, 15 bp, Homo sapiens
gaatgtcctgctgaa

SEQ ID NO: 449498 - DNA, 15 bp, Homo sapiens
ggaatgtcctgctga

SEQ ID NO: 449499 - DNA, 15 bp, Homo sapiens
cggaatgtcctgctg

SEQ ID NO: 449500 - DNA, 15 bp, Homo sapiens
ccggaatgtcctgct

SEQ ID NO: 449501 - DNA, 15 bp, Homo sapiens
accggaatgtcctgc

SEQ ID NO: 449502 - DNA, 15 bp, Homo sapiens
gaccggaatgtcctg

SEQ ID NO: 449503 - DNA, 15 bp, Homo sapiens
tgaccggaatgtcct

SEQ ID NO: 449504 - DNA, 15 bp, Homo sapiens
atgaccggaatgtcc

SEQ ID NO: 449505 - DNA, 15 bp, Homo sapiens
gatgaccggaatgtc

SEQ ID NO: 449506 - DNA, 15 bp, Homo sapiens
agatgaccggaatgt

SEQ ID NO: 449507 - DNA, 15 bp, Homo sapiens
aagatgaccggaatg

SEQ ID NO: 449508 - DNA, 15 bp, Homo sapiens
gaagatgaccggaat

SEQ ID NO: 449509 - DNA, 15 bp, Homo sapiens
ggaagatgaccggaa

SEQ ID NO: 449510 - DNA, 15 bp, Homo sapiens
gggaagatgaccgga

SEQ ID NO: 449511 - DNA, 15 bp, Homo sapiens
agggaagatgaccgg

SEQ ID NO: 449512 - DNA, 15 bp, Homo sapiens
gagggaagatgaccg

SEQ ID NO: 449513 - DNA, 15 bp, Homo sapiens
ggagggaagatgacc

SEQ ID NO: 449514 - DNA, 15 bp, Homo sapiens
gggagggaagatgac

SEQ ID NO: 449515 - DNA, 15 bp, Homo sapiens
agggagggaagatga

SEQ ID NO: 449516 - DNA, 15 bp, Homo sapiens
gagggagggaagatg

SEQ ID NO: 449517 - DNA, 15 bp, Homo sapiens
ggagggagggaagat

SEQ ID NO: 449518 - DNA, 15 bp, Homo sapiens
gggagggagggaaga

SEQ ID NO: 449519 - DNA, 15 bp, Homo sapiens
ggggagggagggaag

SEQ ID NO: 449520 - DNA, 15 bp, Homo sapiens
gggggagggagggaa

SEQ ID NO: 449521 - DNA, 15 bp, Homo sapiens
ggggggagggaggga

SEQ ID NO: 449522 - DNA, 15 bp, Homo sapiens
cggggggagggaggg

SEQ ID NO: 449523 - DNA, 15 bp, Homo sapiens
ccggggggagggagg

SEQ ID NO: 449524 - DNA, 15 bp, Homo sapiens
cccggggggagggag

SEQ ID NO: 449525 - DNA, 15 bp, Homo sapiens
gcccggggggaggga

SEQ ID NO: 449526 - DNA, 15 bp, Homo sapiens
agcccggggggaggg

SEQ ID NO: 449527 - DNA, 15 bp, Homo sapiens
aagcccggggggagg

SEQ ID NO: 449528 - DNA, 15 bp, Homo sapiens
gaagcccggggggag

SEQ ID NO: 449529 - DNA, 15 bp, Homo sapiens
agaagcccgggggga

SEQ ID NO: 449530 - DNA, 15 bp, Homo sapiens
cagaagcccgggggg

SEQ ID NO: 449531 - DNA, 15 bp, Homo sapiens
acagaagcccggggg

SEQ ID NO: 449532 - DNA, 15 bp, Homo sapiens
cacagaagcccgggg

SEQ ID NO: 449533 - DNA, 15 bp, Homo sapiens
gcacagaagcccggg

SEQ ID NO: 449534 - DNA, 15 bp, Homo sapiens
ggcacagaagcccgg

SEQ ID NO: 449535 - DNA, 15 bp, Homo sapiens
gggcacagaagcccg

SEQ ID NO: 449536 - DNA, 15 bp, Homo sapiens
tgggcacagaagccc

SEQ ID NO: 449537 - DNA, 15 bp, Homo sapiens
ttgggcacagaagcc

SEQ ID NO: 449538 - DNA, 15 bp, Homo sapiens
cttgggcacagaagc

SEQ ID NO: 449539 - DNA, 15 bp, Homo sapiens
acttgggcacagaag

SEQ ID NO: 449540 - DNA, 15 bp, Homo sapiens
gacttgggcacagaa

SEQ ID NO: 449541 - DNA, 15 bp, Homo sapiens
ggacttgggcacaga

SEQ ID NO: 449542 - DNA, 15 bp, Homo sapiens
aggacttgggcacag

SEQ ID NO: 449543 - DNA, 15 bp, Homo sapiens
gaggacttgggcaca

SEQ ID NO: 449544 - DNA, 15 bp, Homo sapiens
cgaggacttgggcac

SEQ ID NO: 449545 - DNA, 15 bp, Homo sapiens
ccgaggacttgggca

SEQ ID NO: 449546 - DNA, 15 bp, Homo sapiens
gccgaggacttgggc

SEQ ID NO: 449547 - DNA, 15 bp, Homo sapiens
agccgaggacttggg

SEQ ID NO: 449548 - DNA, 15 bp, Homo sapiens
gagccgaggacttgg

SEQ ID NO: 449549 - DNA, 15 bp, Homo sapiens
agagccgaggacttg

SEQ ID NO: 449550 - DNA, 15 bp, Homo sapiens
aagagccgaggactt

SEQ ID NO: 449551 - DNA, 15 bp, Homo sapiens
gaagagccgaggact

SEQ ID NO: 449552 - DNA, 15 bp, Homo sapiens
ggaagagccgaggac

SEQ ID NO: 449553 - DNA, 15 bp, Homo sapiens
gggaagagccgagga

SEQ ID NO: 449554 - DNA, 15 bp, Homo sapiens
agggaagagccgagg

SEQ ID NO: 449555 - DNA, 15 bp, Homo sapiens
gagggaagagccgag

SEQ ID NO: 449556 - DNA, 15 bp, Homo sapiens
cgagggaagagccga

SEQ ID NO: 449557 - DNA, 15 bp, Homo sapiens
gcgagggaagagccg

SEQ ID NO: 449558 - DNA, 15 bp, Homo sapiens
agcgagggaagagcc

SEQ ID NO: 449559 - DNA, 15 bp, Homo sapiens
cagcgagggaagagc

SEQ ID NO: 449560 - DNA, 15 bp, Homo sapiens
acagcgagggaagag

SEQ ID NO: 449561 - DNA, 15 bp, Homo sapiens
cacagcgagggaaga

SEQ ID NO: 449562 - DNA, 15 bp, Homo sapiens
ccacagcgagggaag

SEQ ID NO: 449563 - DNA, 15 bp, Homo sapiens
gccacagcgagggaa

SEQ ID NO: 449564 - DNA, 15 bp, Homo sapiens
cgccacagcgaggga

SEQ ID NO: 449565 - DNA, 15 bp, Homo sapiens
ccgccacagcgaggg

SEQ ID NO: 449566 - DNA, 15 bp, Homo sapiens
tccgccacagcgagg

SEQ ID NO: 449567 - DNA, 15 bp, Homo sapiens
ctccgccacagcgag

SEQ ID NO: 449568 - DNA, 15 bp, Homo sapiens
cctccgccacagcga

SEQ ID NO: 449569 - DNA, 15 bp, Homo sapiens
ccctccgccacagcg

SEQ ID NO: 449570 - DNA, 15 bp, Homo sapiens
tccctccgccacagc

SEQ ID NO: 449571 - DNA, 15 bp, Homo sapiens
ctccctccgccacag

SEQ ID NO: 449572 - DNA, 15 bp, Homo sapiens
cctccctccgccaca

SEQ ID NO: 449573 - DNA, 15 bp, Homo sapiens
tcctccctccgccac

SEQ ID NO: 449574 - DNA, 15 bp, Homo sapiens
ctcctccctccgcca

SEQ ID NO: 449575 - DNA, 15 bp, Homo sapiens
gctcctccctccgcc

SEQ ID NO: 449576 - DNA, 15 bp, Homo sapiens
tgctcctccctccgc

SEQ ID NO: 449577 - DNA, 15 bp, Homo sapiens
gtgctcctccctccg

SEQ ID NO: 449578 - DNA, 15 bp, Homo sapiens
ggtgctcctccctcc

SEQ ID NO: 449579 - DNA, 15 bp, Homo sapiens
cggtgctcctccctc

SEQ ID NO: 449580 - DNA, 15 bp, Homo sapiens
tcggtgctcctccct

SEQ ID NO: 449581 - DNA, 15 bp, Homo sapiens
ttcggtgctcctccc

SEQ ID NO: 449582 - DNA, 15 bp, Homo sapiens
gttcggtgctcctcc

SEQ ID NO: 449583 - DNA, 15 bp, Homo sapiens
agttcggtgctcctc

SEQ ID NO: 449584 - DNA, 15 bp, Homo sapiens
cagttcggtgctcct

SEQ ID NO: 449585 - DNA, 15 bp, Homo sapiens
acagttcggtgctcc

SEQ ID NO: 449586 - DNA, 15 bp, Homo sapiens
gacagttcggtgctc

SEQ ID NO: 449587 - DNA, 15 bp, Homo sapiens
cgacagttcggtgct

SEQ ID NO: 449588 - DNA, 15 bp, Homo sapiens
ccgacagttcggtgc

SEQ ID NO: 449589 - DNA, 15 bp, Homo sapiens
tccgacagttcggtg

SEQ ID NO: 449590 - DNA, 15 bp, Homo sapiens
ttccgacagttcggt

SEQ ID NO: 449591 - DNA, 15 bp, Homo sapiens
gttccgacagttcgg

SEQ ID NO: 449592 - DNA, 15 bp, Homo sapiens
tgttccgacagttcg

SEQ ID NO: 449593 - DNA, 15 bp, Homo sapiens
ctgttccgacagttc

SEQ ID NO: 449594 - DNA, 15 bp, Homo sapiens
gctgttccgacagtt

SEQ ID NO: 449595 - DNA, 15 bp, Homo sapiens
ggctgttccgacagt

SEQ ID NO: 449596 - DNA, 15 bp, Homo sapiens
tggctgttccgacag

SEQ ID NO: 449597 - DNA, 15 bp, Homo sapiens
ctggctgttccgaca

SEQ ID NO: 449598 - DNA, 15 bp, Homo sapiens
gctggctgttccgac

SEQ ID NO: 449599 - DNA, 15 bp, Homo sapiens
tgctggctgttccga

SEQ ID NO: 449600 - DNA, 15 bp, Homo sapiens
gtgctggctgttccg

SEQ ID NO: 449601 - DNA, 15 bp, Homo sapiens
tgtgctggctgttcc

SEQ ID NO: 449602 - DNA, 15 bp, Homo sapiens
ctgtgctggctgttc

SEQ ID NO: 449603 - DNA, 15 bp, Homo sapiens
cctgtgctggctgtt

SEQ ID NO: 449604 - DNA, 15 bp, Homo sapiens
ccctgtgctggctgt

SEQ ID NO: 449605 - DNA, 15 bp, Homo sapiens
cccctgtgctggctg

SEQ ID NO: 449606 - DNA, 15 bp, Homo sapiens
gcccctgtgctggct

SEQ ID NO: 449607 - DNA, 15 bp, Homo sapiens
cgcccctgtgctggc

SEQ ID NO: 449608 - DNA, 15 bp, Homo sapiens
acgcccctgtgctgg

SEQ ID NO: 449609 - DNA, 15 bp, Homo sapiens
tacgcccctgtgctg

SEQ ID NO: 449610 - DNA, 15 bp, Homo sapiens
atacgcccctgtgct

SEQ ID NO: 449611 - DNA, 15 bp, Homo sapiens
gatacgcccctgtgc

SEQ ID NO: 449612 - DNA, 15 bp, Homo sapiens
tgatacgcccctgtg

SEQ ID NO: 449613 - DNA, 15 bp, Homo sapiens
ctgatacgcccctgt

SEQ ID NO: 449614 - DNA, 15 bp, Homo sapiens
actgatacgcccctg

SEQ ID NO: 449615 - DNA, 15 bp, Homo sapiens
gactgatacgcccct

SEQ ID NO: 449616 - DNA, 15 bp, Homo sapiens
agactgatacgcccc

SEQ ID NO: 449617 - DNA, 15 bp, Homo sapiens
gagactgatacgccc

SEQ ID NO: 449618 - DNA, 15 bp, Homo sapiens
ggagactgatacgcc

SEQ ID NO: 449619 - DNA, 15 bp, Homo sapiens
aggagactgatacgc

SEQ ID NO: 449620 - DNA, 15 bp, Homo sapiens
gaggagactgatacg

SEQ ID NO: 449621 - DNA, 15 bp, Homo sapiens
agaggagactgatac

SEQ ID NO: 449622 - DNA, 15 bp, Homo sapiens
aagaggagactgata

SEQ ID NO: 449623 - DNA, 15 bp, Homo sapiens
caagaggagactgat

SEQ ID NO: 449624 - DNA, 15 bp, Homo sapiens
ccaagaggagactga

SEQ ID NO: 449625 - DNA, 15 bp, Homo sapiens
gccaagaggagactg

SEQ ID NO: 449626 - DNA, 15 bp, Homo sapiens
agccaagaggagact

SEQ ID NO: 449627 - DNA, 15 bp, Homo sapiens
gagccaagaggagac

SEQ ID NO: 449628 - DNA, 15 bp, Homo sapiens
ggagccaagaggaga

SEQ ID NO: 449629 - DNA, 15 bp, Homo sapiens
cggagccaagaggag

SEQ ID NO: 449630 - DNA, 15 bp, Homo sapiens
gcggagccaagagga

SEQ ID NO: 449631 - DNA, 15 bp, Homo sapiens
ggcggagccaagagg

SEQ ID NO: 449632 - DNA, 15 bp, Homo sapiens
gggcggagccaagag

SEQ ID NO: 449633 - DNA, 15 bp, Homo sapiens
agggcggagccaaga

SEQ ID NO: 449634 - DNA, 15 bp, Homo sapiens
aagggcggagccaag

SEQ ID NO: 449635 - DNA, 15 bp, Homo sapiens
aaagggcggagccaa

SEQ ID NO: 449636 - DNA, 15 bp, Homo sapiens
gaaagggcggagcca

SEQ ID NO: 449637 - DNA, 15 bp, Homo sapiens
agaaagggcggagcc

SEQ ID NO: 449638 - DNA, 15 bp, Homo sapiens
gagaaagggcggagc

SEQ ID NO: 449639 - DNA, 15 bp, Homo sapiens
ggagaaagggcggag

SEQ ID NO: 449640 - DNA, 15 bp, Homo sapiens
aggagaaagggcgga

SEQ ID NO: 449641 - DNA, 15 bp, Homo sapiens
taggagaaagggcgg

SEQ ID NO: 449642 - DNA, 15 bp, Homo sapiens
ctaggagaaagggcg

SEQ ID NO: 449643 - DNA, 15 bp, Homo sapiens
gctaggagaaagggc

SEQ ID NO: 449644 - DNA, 15 bp, Homo sapiens
agctaggagaaaggg

SEQ ID NO: 449645 - DNA, 15 bp, Homo sapiens
cagctaggagaaagg

SEQ ID NO: 449646 - DNA, 15 bp, Homo sapiens
gcagctaggagaaag

SEQ ID NO: 449647 - DNA, 15 bp, Homo sapiens
agcagctaggagaaa

SEQ ID NO: 449648 - DNA, 15 bp, Homo sapiens
gagcagctaggagaa

SEQ ID NO: 449649 - DNA, 15 bp, Homo sapiens
agagcagctaggaga

SEQ ID NO: 449650 - DNA, 15 bp, Homo sapiens
gagagcagctaggag

SEQ ID NO: 449651 - DNA, 15 bp, Homo sapiens
ggagagcagctagga

SEQ ID NO: 449652 - DNA, 15 bp, Homo sapiens
aggagagcagctagg

SEQ ID NO: 449653 - DNA, 15 bp, Homo sapiens
gaggagagcagctag

SEQ ID NO: 449654 - DNA, 15 bp, Homo sapiens
tgaggagagcagcta

SEQ ID NO: 449655 - DNA, 15 bp, Homo sapiens
atgaggagagcagct

SEQ ID NO: 449656 - DNA, 15 bp, Homo sapiens
aatgaggagagcagc

SEQ ID NO: 449657 - DNA, 15 bp, Homo sapiens
caatgaggagagcag

SEQ ID NO: 449658 - DNA, 15 bp, Homo sapiens
ccaatgaggagagca

SEQ ID NO: 449659 - DNA, 15 bp, Homo sapiens
accaatgaggagagc

SEQ ID NO: 449660 - DNA, 15 bp, Homo sapiens
gaccaatgaggagag

SEQ ID NO: 449661 - DNA, 15 bp, Homo sapiens
tgaccaatgaggaga

SEQ ID NO: 449662 - DNA, 15 bp, Homo sapiens
ctgaccaatgaggag

SEQ ID NO: 449663 - DNA, 15 bp, Homo sapiens
actgaccaatgagga

SEQ ID NO: 449664 - DNA, 15 bp, Homo sapiens
cactgaccaatgagg

SEQ ID NO: 449665 - DNA, 15 bp, Homo sapiens
ccactgaccaatgag

SEQ ID NO: 449666 - DNA, 15 bp, Homo sapiens
cccactgaccaatga

SEQ ID NO: 449667 - DNA, 15 bp, Homo sapiens
gcccactgaccaatg

SEQ ID NO: 449668 - DNA, 15 bp, Homo sapiens
cgcccactgaccaat

SEQ ID NO: 449669 - DNA, 15 bp, Homo sapiens
ccgcccactgaccaa

SEQ ID NO: 449670 - DNA, 15 bp, Homo sapiens
cccgcccactgacca

SEQ ID NO: 449671 - DNA, 15 bp, Homo sapiens
ccccgcccactgacc

SEQ ID NO: 449672 - DNA, 15 bp, Homo sapiens
gccccgcccactgac

SEQ ID NO: 449673 - DNA, 15 bp, Homo sapiens
agccccgcccactga

SEQ ID NO: 449674 - DNA, 15 bp, Homo sapiens
aagccccgcccactg

SEQ ID NO: 449675 - DNA, 15 bp, Homo sapiens
gaagccccgcccact

SEQ ID NO: 449676 - DNA, 15 bp, Homo sapiens
cgaagccccgcccac

SEQ ID NO: 449677 - DNA, 15 bp, Homo sapiens
ccgaagccccgccca

SEQ ID NO: 449678 - DNA, 15 bp, Homo sapiens
gccgaagccccgccc

SEQ ID NO: 449679 - DNA, 15 bp, Homo sapiens
agccgaagccccgcc

SEQ ID NO: 449680 - DNA, 15 bp, Homo sapiens
cagccgaagccccgc

SEQ ID NO: 449681 - DNA, 15 bp, Homo sapiens
acagccgaagccccg

SEQ ID NO: 449682 - DNA, 15 bp, Homo sapiens
tacagccgaagcccc

SEQ ID NO: 449683 - DNA, 15 bp, Homo sapiens
gtacagccgaagccc

SEQ ID NO: 449684 - DNA, 15 bp, Homo sapiens
ggtacagccgaagcc

SEQ ID NO: 449685 - DNA, 15 bp, Homo sapiens
cggtacagccgaagc

SEQ ID NO: 449686 - DNA, 15 bp, Homo sapiens
gcggtacagccgaag

SEQ ID NO: 449687 - DNA, 15 bp, Homo sapiens
tgcggtacagccgaa

SEQ ID NO: 449688 - DNA, 15 bp, Homo sapiens
gtgcggtacagccga

SEQ ID NO: 449689 - DNA, 15 bp, Homo sapiens
tgtgcggtacagccg

SEQ ID NO: 449690 - DNA, 15 bp, Homo sapiens
gtgtgcggtacagcc

SEQ ID NO: 449691 - DNA, 15 bp, Homo sapiens
cgtgtgcggtacagc

SEQ ID NO: 449692 - DNA, 15 bp, Homo sapiens
gcgtgtgcggtacag

SEQ ID NO: 449693 - DNA, 15 bp, Homo sapiens
tgcgtgtgcggtaca

SEQ ID NO: 449694 - DNA, 15 bp, Homo sapiens
gtgcgtgtgcggtac

SEQ ID NO: 449695 - DNA, 15 bp, Homo sapiens
agtgcgtgtgcggta

SEQ ID NO: 449696 - DNA, 15 bp, Homo sapiens
cagtgcgtgtgcggt

SEQ ID NO: 449697 - DNA, 15 bp, Homo sapiens
ccagtgcgtgtgcgg

SEQ ID NO: 449698 - DNA, 15 bp, Homo sapiens
cccagtgcgtgtgcg

SEQ ID NO: 449699 - DNA, 15 bp, Homo sapiens
tcccagtgcgtgtgc

SEQ ID NO: 449700 - DNA, 15 bp, Homo sapiens
gtcccagtgcgtgtg

SEQ ID NO: 449701 - DNA, 15 bp, Homo sapiens
ggtcccagtgcgtgt

SEQ ID NO: 449702 - DNA, 15 bp, Homo sapiens
aggtcccagtgcgtg

SEQ ID NO: 449703 - DNA, 15 bp, Homo sapiens
gaggtcccagtgcgt

SEQ ID NO: 449704 - DNA, 15 bp, Homo sapiens
agaggtcccagtgcg

SEQ ID NO: 449705 - DNA, 15 bp, Homo sapiens
cagaggtcccagtgc

SEQ ID NO: 449706 - DNA, 15 bp, Homo sapiens
ccagaggtcccagtg

SEQ ID NO: 449707 - DNA, 15 bp, Homo sapiens
cccagaggtcccagt

SEQ ID NO: 449708 - DNA, 15 bp, Homo sapiens
acccagaggtcccag

SEQ ID NO: 449709 - DNA, 15 bp, Homo sapiens
cacccagaggtccca

SEQ ID NO: 449710 - DNA, 15 bp, Homo sapiens
ccacccagaggtccc

SEQ ID NO: 449711 - DNA, 15 bp, Homo sapiens
gccacccagaggtcc

SEQ ID NO: 449712 - DNA, 15 bp, Homo sapiens
ggccacccagaggtc

SEQ ID NO: 449713 - DNA, 15 bp, Homo sapiens
cggccacccagaggt

SEQ ID NO: 449714 - DNA, 15 bp, Homo sapiens
tcggccacccagagg

SEQ ID NO: 449715 - DNA, 15 bp, Homo sapiens
ttcggccacccagag

SEQ ID NO: 449716 - DNA, 15 bp, Homo sapiens
gttcggccacccaga

SEQ ID NO: 449717 - DNA, 15 bp, Homo sapiens
cgttcggccacccag

SEQ ID NO: 449718 - DNA, 15 bp, Homo sapiens
tcgttcggccaccca

SEQ ID NO: 449719 - DNA, 15 bp, Homo sapiens
ctcgttcggccaccc

SEQ ID NO: 449720 - DNA, 15 bp, Homo sapiens
gctcgttcggccacc

SEQ ID NO: 449721 - DNA, 15 bp, Homo sapiens
agctcgttcggccac

SEQ ID NO: 449722 - DNA, 15 bp, Homo sapiens
cagctcgttcggcca

SEQ ID NO: 449723 - DNA, 15 bp, Homo sapiens
ccagctcgttcggcc

SEQ ID NO: 449724 - DNA, 15 bp, Homo sapiens
gccagctcgttcggc

SEQ ID NO: 449725 - DNA, 15 bp, Homo sapiens
ggccagctcgttcgg

SEQ ID NO: 449726 - DNA, 15 bp, Homo sapiens
aggccagctcgttcg

SEQ ID NO: 449727 - DNA, 15 bp, Homo sapiens
aaggccagctcgttc

SEQ ID NO: 449728 - DNA, 15 bp, Homo sapiens
aaaggccagctcgtt

SEQ ID NO: 449729 - DNA, 15 bp, Homo sapiens
gaaaggccagctcgt

SEQ ID NO: 449730 - DNA, 15 bp, Homo sapiens
tgaaaggccagctcg

SEQ ID NO: 449731 - DNA, 15 bp, Homo sapiens
atgaaaggccagctc

SEQ ID NO: 449732 - DNA, 15 bp, Homo sapiens
catgaaaggccagct

SEQ ID NO: 449733 - DNA, 15 bp, Homo sapiens
tcatgaaaggccagc

SEQ ID NO: 449734 - DNA, 15 bp, Homo sapiens
ttcatgaaaggccag

SEQ ID NO: 449735 - DNA, 15 bp, Homo sapiens
attcatgaaaggcca

SEQ ID NO: 449736 - DNA, 15 bp, Homo sapiens
aattcatgaaaggcc

SEQ ID NO: 449737 - DNA, 15 bp, Homo sapiens
taattcatgaaaggc

SEQ ID NO: 449738 - DNA, 15 bp, Homo sapiens
ataattcatgaaagg

SEQ ID NO: 449739 - DNA, 15 bp, Homo sapiens
cataattcatgaaag

SEQ ID NO: 449740 - DNA, 15 bp, Homo sapiens
gcataattcatgaaa

SEQ ID NO: 449741 - DNA, 15 bp, Homo sapiens
tgcataattcatgaa

SEQ ID NO: 449742 - DNA, 15 bp, Homo sapiens
atgcataattcatga

SEQ ID NO: 449743 - DNA, 15 bp, Homo sapiens
catgcataattcatg

SEQ ID NO: 449744 - DNA, 15 bp, Homo sapiens
tcatgcataattcat

SEQ ID NO: 449745 - DNA, 15 bp, Homo sapiens
gtcatgcataattca

SEQ ID NO: 449746 - DNA, 15 bp, Homo sapiens
cgtcatgcataattc

SEQ ID NO: 449747 - DNA, 15 bp, Homo sapiens
ccgtcatgcataatt

SEQ ID NO: 449748 - DNA, 15 bp, Homo sapiens
gccgtcatgcataat

SEQ ID NO: 449749 - DNA, 15 bp, Homo sapiens
cgccgtcatgcataa

SEQ ID NO: 449750 - DNA, 15 bp, Homo sapiens
acgccgtcatgcata

SEQ ID NO: 449751 - DNA, 15 bp, Homo sapiens
cacgccgtcatgcat

SEQ ID NO: 449752 - DNA, 15 bp, Homo sapiens
gcacgccgtcatgca

SEQ ID NO: 449753 - DNA, 15 bp, Homo sapiens
ggcacgccgtcatgc

SEQ ID NO: 449754 - DNA, 15 bp, Homo sapiens
aggcacgccgtcatg

SEQ ID NO: 449755 - DNA, 15 bp, Homo sapiens
gaggcacgccgtcat

SEQ ID NO: 449756 - DNA, 15 bp, Homo sapiens
cgaggcacgccgtca

SEQ ID NO: 449757 - DNA, 15 bp, Homo sapiens
ccgaggcacgccgtc

SEQ ID NO: 449758 - DNA, 15 bp, Homo sapiens
gccgaggcacgccgt

SEQ ID NO: 449759 - DNA, 15 bp, Homo sapiens
ggccgaggcacgccg

SEQ ID NO: 449760 - DNA, 15 bp, Homo sapiens
tggccgaggcacgcc

SEQ ID NO: 449761 - DNA, 15 bp, Homo sapiens
ctggccgaggcacgc

SEQ ID NO: 449762 - DNA, 15 bp, Homo sapiens
cctggccgaggcacg

SEQ ID NO: 449763 - DNA, 15 bp, Homo sapiens
gcctggccgaggcac

SEQ ID NO: 449764 - DNA, 15 bp, Homo sapiens
agcctggccgaggca

SEQ ID NO: 449765 - DNA, 15 bp, Homo sapiens
cagcctggccgaggc

SEQ ID NO: 449766 - DNA, 15 bp, Homo sapiens
ccagcctggccgagg

SEQ ID NO: 449767 - DNA, 15 bp, Homo sapiens
cccagcctggccgag

SEQ ID NO: 449768 - DNA, 15 bp, Homo sapiens
ccccagcctggccga

SEQ ID NO: 449769 - DNA, 15 bp, Homo sapiens
gccccagcctggccg

SEQ ID NO: 449770 - DNA, 15 bp, Homo sapiens
agccccagcctggcc

SEQ ID NO: 449771 - DNA, 15 bp, Homo sapiens
cagccccagcctggc

SEQ ID NO: 449772 - DNA, 15 bp, Homo sapiens
ccagccccagcctgg

SEQ ID NO: 449773 - DNA, 15 bp, Homo sapiens
cccagccccagcctg

SEQ ID NO: 449774 - DNA, 15 bp, Homo sapiens
gcccagccccagcct

SEQ ID NO: 449775 - DNA, 15 bp, Homo sapiens
cgcccagccccagcc

SEQ ID NO: 449776 - DNA, 15 bp, Homo sapiens
tcgcccagccccagc

SEQ ID NO: 449777 - DNA, 15 bp, Homo sapiens
ctcgcccagccccag

SEQ ID NO: 449778 - DNA, 15 bp, Homo sapiens
cctcgcccagcccca

SEQ ID NO: 449779 - DNA, 15 bp, Homo sapiens
tcctcgcccagcccc

SEQ ID NO: 449780 - DNA, 15 bp, Homo sapiens
atcctcgcccagccc

SEQ ID NO: 449781 - DNA, 15 bp, Homo sapiens
aatcctcgcccagcc

SEQ ID NO: 449782 - DNA, 15 bp, Homo sapiens
caatcctcgcccagc

SEQ ID NO: 449783 - DNA, 15 bp, Homo sapiens
ccaatcctcgcccag

SEQ ID NO: 449784 - DNA, 15 bp, Homo sapiens
gccaatcctcgccca

SEQ ID NO: 449785 - DNA, 15 bp, Homo sapiens
agccaatcctcgccc

SEQ ID NO: 449786 - DNA, 15 bp, Homo sapiens
cagccaatcctcgcc

SEQ ID NO: 449787 - DNA, 15 bp, Homo sapiens
tcagccaatcctcgc

SEQ ID NO: 449788 - DNA, 15 bp, Homo sapiens
ttcagccaatcctcg

SEQ ID NO: 449789 - DNA, 15 bp, Homo sapiens
cttcagccaatcctc

SEQ ID NO: 449790 - DNA, 15 bp, Homo sapiens
ccttcagccaatcct

SEQ ID NO: 449791 - DNA, 15 bp, Homo sapiens
cccttcagccaatcc

SEQ ID NO: 449792 - DNA, 15 bp, Homo sapiens
ccccttcagccaatc

SEQ ID NO: 449793 - DNA, 15 bp, Homo sapiens
gccccttcagccaat

SEQ ID NO: 449794 - DNA, 15 bp, Homo sapiens
agccccttcagccaa

SEQ ID NO: 449795 - DNA, 15 bp, Homo sapiens
cagccccttcagcca

SEQ ID NO: 449796 - DNA, 15 bp, Homo sapiens
acagccccttcagcc

SEQ ID NO: 449797 - DNA, 15 bp, Homo sapiens
tacagccccttcagc

SEQ ID NO: 449798 - DNA, 15 bp, Homo sapiens
ttacagccccttcag

SEQ ID NO: 449799 - DNA, 15 bp, Homo sapiens
attacagccccttca

SEQ ID NO: 449800 - DNA, 15 bp, Homo sapiens
aattacagccccttc

SEQ ID NO: 449801 - DNA, 15 bp, Homo sapiens
gaattacagcccctt

SEQ ID NO: 449802 - DNA, 15 bp, Homo sapiens
tgaattacagcccct

SEQ ID NO: 449803 - DNA, 15 bp, Homo sapiens
ctgaattacagcccc

SEQ ID NO: 449804 - DNA, 15 bp, Homo sapiens
gctgaattacagccc

SEQ ID NO: 449805 - DNA, 15 bp, Homo sapiens
cgctgaattacagcc

SEQ ID NO: 449806 - DNA, 15 bp, Homo sapiens
ccgctgaattacagc

SEQ ID NO: 449807 - DNA, 15 bp, Homo sapiens
accgctgaattacag

SEQ ID NO: 449808 - DNA, 15 bp, Homo sapiens
aaccgctgaattaca

SEQ ID NO: 449809 - DNA, 15 bp, Homo sapiens
aaaccgctgaattac

SEQ ID NO: 449810 - DNA, 15 bp, Homo sapiens
gaaaccgctgaatta

SEQ ID NO: 449811 - DNA, 15 bp, Homo sapiens
ggaaaccgctgaatt

SEQ ID NO: 449812 - DNA, 15 bp, Homo sapiens
cggaaaccgctgaat

SEQ ID NO: 449813 - DNA, 15 bp, Homo sapiens
ccggaaaccgctgaa

SEQ ID NO: 449814 - DNA, 15 bp, Homo sapiens
tccggaaaccgctga

SEQ ID NO: 449815 - DNA, 15 bp, Homo sapiens
ctccggaaaccgctg

SEQ ID NO: 449816 - DNA, 15 bp, Homo sapiens
gctccggaaaccgct

SEQ ID NO: 449817 - DNA, 15 bp, Homo sapiens
agctccggaaaccgc

SEQ ID NO: 449818 - DNA, 15 bp, Homo sapiens
cagctccggaaaccg

SEQ ID NO: 449819 - DNA, 15 bp, Homo sapiens
gcagctccggaaacc

SEQ ID NO: 449820 - DNA, 15 bp, Homo sapiens
cgcagctccggaaac

SEQ ID NO: 449821 - DNA, 15 bp, Homo sapiens
ccgcagctccggaaa

SEQ ID NO: 449822 - DNA, 15 bp, Homo sapiens
gccgcagctccggaa

SEQ ID NO: 449823 - DNA, 15 bp, Homo sapiens
cgccgcagctccgga

SEQ ID NO: 449824 - DNA, 15 bp, Homo sapiens
ccgccgcagctccgg

SEQ ID NO: 449825 - DNA, 15 bp, Homo sapiens
gccgccgcagctccg

SEQ ID NO: 449826 - DNA, 15 bp, Homo sapiens
cgccgccgcagctcc

SEQ ID NO: 449827 - DNA, 15 bp, Homo sapiens
gcgccgccgcagctc

SEQ ID NO: 449828 - DNA, 15 bp, Homo sapiens
tgcgccgccgcagct

SEQ ID NO: 449829 - DNA, 15 bp, Homo sapiens
ctgcgccgccgcagc

SEQ ID NO: 449830 - DNA, 15 bp, Homo sapiens
tctgcgccgccgcag

SEQ ID NO: 449831 - DNA, 15 bp, Homo sapiens
gtctgcgccgccgca

SEQ ID NO: 449832 - DNA, 15 bp, Homo sapiens
agtctgcgccgccgc

SEQ ID NO: 449833 - DNA, 15 bp, Homo sapiens
cagtctgcgccgccg

SEQ ID NO: 449834 - DNA, 15 bp, Homo sapiens
ccagtctgcgccgcc

SEQ ID NO: 449835 - DNA, 15 bp, Homo sapiens
cccagtctgcgccgc

SEQ ID NO: 449836 - DNA, 15 bp, Homo sapiens
tcccagtctgcgccg

SEQ ID NO: 449837 - DNA, 15 bp, Homo sapiens
ctcccagtctgcgcc

SEQ ID NO: 449838 - DNA, 15 bp, Homo sapiens
cctcccagtctgcgc

SEQ ID NO: 449839 - DNA, 15 bp, Homo sapiens
ccctcccagtctgcg

SEQ ID NO: 449840 - DNA, 15 bp, Homo sapiens
cccctcccagtctgc

SEQ ID NO: 449841 - DNA, 15 bp, Homo sapiens
ccccctcccagtctg

SEQ ID NO: 449842 - DNA, 15 bp, Homo sapiens
tccccctcccagtct

SEQ ID NO: 449843 - DNA, 15 bp, Homo sapiens
ctccccctcccagtc

SEQ ID NO: 449844 - DNA, 15 bp, Homo sapiens
gctccccctcccagt

SEQ ID NO: 449845 - DNA, 15 bp, Homo sapiens
ggctccccctcccag

SEQ ID NO: 449846 - DNA, 15 bp, Homo sapiens
cggctccccctccca

SEQ ID NO: 449847 - DNA, 15 bp, Homo sapiens
ccggctccccctccc

SEQ ID NO: 449848 - DNA, 15 bp, Homo sapiens
cccggctccccctcc

SEQ ID NO: 449849 - DNA, 15 bp, Homo sapiens
ccccggctccccctc

SEQ ID NO: 449850 - DNA, 15 bp, Homo sapiens
cccccggctccccct

SEQ ID NO: 449851 - DNA, 15 bp, Homo sapiens
acccccggctccccc

SEQ ID NO: 449852 - DNA, 15 bp, Homo sapiens
aacccccggctcccc

SEQ ID NO: 449853 - DNA, 15 bp, Homo sapiens
gaacccccggctccc

SEQ ID NO: 449854 - DNA, 15 bp, Homo sapiens
ggaacccccggctcc

SEQ ID NO: 449855 - DNA, 15 bp, Homo sapiens
cggaacccccggctc

SEQ ID NO: 449856 - DNA, 15 bp, Homo sapiens
tcggaacccccggct

SEQ ID NO: 449857 - DNA, 15 bp, Homo sapiens
gtcggaacccccggc

SEQ ID NO: 449858 - DNA, 15 bp, Homo sapiens
cgtcggaacccccgg

SEQ ID NO: 449859 - DNA, 15 bp, Homo sapiens
acgtcggaacccccg

SEQ ID NO: 449860 - DNA, 15 bp, Homo sapiens
gacgtcggaaccccc

SEQ ID NO: 449861 - DNA, 15 bp, Homo sapiens
cgacgtcggaacccc

SEQ ID NO: 449862 - DNA, 15 bp, Homo sapiens
gcgacgtcggaaccc

SEQ ID NO: 449863 - DNA, 15 bp, Homo sapiens
tgcgacgtcggaacc

SEQ ID NO: 449864 - DNA, 15 bp, Homo sapiens
ctgcgacgtcggaac

SEQ ID NO: 449865 - DNA, 15 bp, Homo sapiens
gctgcgacgtcggaa

SEQ ID NO: 449866 - DNA, 15 bp, Homo sapiens
ggctgcgacgtcgga

SEQ ID NO: 449867 - DNA, 15 bp, Homo sapiens
cggctgcgacgtcgg

SEQ ID NO: 449868 - DNA, 15 bp, Homo sapiens
tcggctgcgacgtcg

SEQ ID NO: 449869 - DNA, 15 bp, Homo sapiens
ctcggctgcgacgtc

SEQ ID NO: 449870 - DNA, 15 bp, Homo sapiens
cctcggctgcgacgt

SEQ ID NO: 449871 - DNA, 15 bp, Homo sapiens
ccctcggctgcgacg

SEQ ID NO: 449872 - DNA, 15 bp, Homo sapiens
tccctcggctgcgac

SEQ ID NO: 449873 - DNA, 15 bp, Homo sapiens
ttccctcggctgcga

SEQ ID NO: 449874 - DNA, 15 bp, Homo sapiens
gttccctcggctgcg

SEQ ID NO: 449875 - DNA, 15 bp, Homo sapiens
tgttccctcggctgc

SEQ ID NO: 449876 - DNA, 15 bp, Homo sapiens
ttgttccctcggctg

SEQ ID NO: 449877 - DNA, 15 bp, Homo sapiens
cttgttccctcggct

SEQ ID NO: 449878 - DNA, 15 bp, Homo sapiens
gcttgttccctcggc

SEQ ID NO: 449879 - DNA, 15 bp, Homo sapiens
ggcttgttccctcgg

SEQ ID NO: 449880 - DNA, 15 bp, Homo sapiens
gggcttgttccctcg

SEQ ID NO: 449881 - DNA, 15 bp, Homo sapiens
ggggcttgttccctc

SEQ ID NO: 449882 - DNA, 15 bp, Homo sapiens
tggggcttgttccct

SEQ ID NO: 449883 - DNA, 15 bp, Homo sapiens
ttggggcttgttccc

SEQ ID NO: 449884 - DNA, 15 bp, Homo sapiens
gttggggcttgttcc

SEQ ID NO: 449885 - DNA, 15 bp, Homo sapiens
ggttggggcttgttc

SEQ ID NO: 449886 - DNA, 15 bp, Homo sapiens
cggttggggcttgtt

SEQ ID NO: 449887 - DNA, 15 bp, Homo sapiens
ccggttggggcttgt

SEQ ID NO: 449888 - DNA, 15 bp, Homo sapiens
tccggttggggcttg

SEQ ID NO: 449889 - DNA, 15 bp, Homo sapiens
atccggttggggctt

SEQ ID NO: 449890 - DNA, 15 bp, Homo sapiens
gatccggttggggct

SEQ ID NO: 449891 - DNA, 15 bp, Homo sapiens
ggatccggttggggc

SEQ ID NO: 449892 - DNA, 15 bp, Homo sapiens
aggatccggttgggg

SEQ ID NO: 449893 - DNA, 15 bp, Homo sapiens
caggatccggttggg

SEQ ID NO: 449894 - DNA, 15 bp, Homo sapiens
ccaggatccggttgg

SEQ ID NO: 449895 - DNA, 15 bp, Homo sapiens
tccaggatccggttg

SEQ ID NO: 449896 - DNA, 15 bp, Homo sapiens
gtccaggatccggtt

SEQ ID NO: 449897 - DNA, 15 bp, Homo sapiens
tgtccaggatccggt

SEQ ID NO: 449898 - DNA, 15 bp, Homo sapiens
ctgtccaggatccgg

SEQ ID NO: 449899 - DNA, 15 bp, Homo sapiens
cctgtccaggatccg

SEQ ID NO: 449900 - DNA, 15 bp, Homo sapiens
gcctgtccaggatcc

SEQ ID NO: 449901 - DNA, 15 bp, Homo sapiens
tgcctgtccaggatc

SEQ ID NO: 449902 - DNA, 15 bp, Homo sapiens
gtgcctgtccaggat

SEQ ID NO: 449903 - DNA, 15 bp, Homo sapiens
ggtgcctgtccagga

SEQ ID NO: 449904 - DNA, 15 bp, Homo sapiens
gggtgcctgtccagg

SEQ ID NO: 449905 - DNA, 15 bp, Homo sapiens
ggggtgcctgtccag

SEQ ID NO: 449906 - DNA, 15 bp, Homo sapiens
cggggtgcctgtcca

SEQ ID NO: 449907 - DNA, 15 bp, Homo sapiens
ccggggtgcctgtcc

SEQ ID NO: 449908 - DNA, 15 bp, Homo sapiens
gccggggtgcctgtc

SEQ ID NO: 449909 - DNA, 15 bp, Homo sapiens
agccggggtgcctgt

SEQ ID NO: 449910 - DNA, 15 bp, Homo sapiens
aagccggggtgcctg

SEQ ID NO: 449911 - DNA, 15 bp, Homo sapiens
caagccggggtgcct

SEQ ID NO: 449912 - DNA, 15 bp, Homo sapiens
ccaagccggggtgcc

SEQ ID NO: 449913 - DNA, 15 bp, Homo sapiens
gccaagccggggtgc

SEQ ID NO: 449914 - DNA, 15 bp, Homo sapiens
cgccaagccggggtg

SEQ ID NO: 449915 - DNA, 15 bp, Homo sapiens
gcgccaagccggggt

SEQ ID NO: 449916 - DNA, 15 bp, Homo sapiens
agcgccaagccgggg

SEQ ID NO: 449917 - DNA, 15 bp, Homo sapiens
cagcgccaagccggg

SEQ ID NO: 449918 - DNA, 15 bp, Homo sapiens
acagcgccaagccgg

SEQ ID NO: 449919 - DNA, 15 bp, Homo sapiens
gacagcgccaagccg

SEQ ID NO: 449920 - DNA, 15 bp, Homo sapiens
agacagcgccaagcc

SEQ ID NO: 449921 - DNA, 15 bp, Homo sapiens
gagacagcgccaagc

SEQ ID NO: 449922 - DNA, 15 bp, Homo sapiens
agagacagcgccaag

SEQ ID NO: 449923 - DNA, 15 bp, Homo sapiens
gagagacagcgccaa

SEQ ID NO: 449924 - DNA, 15 bp, Homo sapiens
ggagagacagcgcca

SEQ ID NO: 449925 - DNA, 15 bp, Homo sapiens
gggagagacagcgcc

SEQ ID NO: 449926 - DNA, 15 bp, Homo sapiens
ggggagagacagcgc

SEQ ID NO: 449927 - DNA, 15 bp, Homo sapiens
gggggagagacagcg

SEQ ID NO: 449928 - DNA, 15 bp, Homo sapiens
agggggagagacagc

SEQ ID NO: 449929 - DNA, 15 bp, Homo sapiens
gagggggagagacag

SEQ ID NO: 449930 - DNA, 15 bp, Homo sapiens
cgagggggagagaca

SEQ ID NO: 449931 - DNA, 15 bp, Homo sapiens
ccgagggggagagac

SEQ ID NO: 449932 - DNA, 15 bp, Homo sapiens
gccgagggggagaga

SEQ ID NO: 449933 - DNA, 15 bp, Homo sapiens
agccgagggggagag

SEQ ID NO: 449934 - DNA, 15 bp, Homo sapiens
gagccgagggggaga

SEQ ID NO: 449935 - DNA, 15 bp, Homo sapiens
cgagccgagggggag

SEQ ID NO: 449936 - DNA, 15 bp, Homo sapiens
ccgagccgaggggga

SEQ ID NO: 449937 - DNA, 15 bp, Homo sapiens
tccgagccgaggggg

SEQ ID NO: 449938 - DNA, 15 bp, Homo sapiens
ctccgagccgagggg

SEQ ID NO: 449939 - DNA, 15 bp, Homo sapiens
tctccgagccgaggg

SEQ ID NO: 449940 - DNA, 15 bp, Homo sapiens
ctctccgagccgagg

SEQ ID NO: 449941 - DNA, 15 bp, Homo sapiens
cctctccgagccgag

SEQ ID NO: 449942 - DNA, 15 bp, Homo sapiens
gcctctccgagccga

SEQ ID NO: 449943 - DNA, 15 bp, Homo sapiens
ggcctctccgagccg

SEQ ID NO: 449944 - DNA, 15 bp, Homo sapiens
gggcctctccgagcc

SEQ ID NO: 449945 - DNA, 15 bp, Homo sapiens
agggcctctccgagc

SEQ ID NO: 449946 - DNA, 15 bp, Homo sapiens
aagggcctctccgag

SEQ ID NO: 449947 - DNA, 15 bp, Homo sapiens
gaagggcctctccga

SEQ ID NO: 449948 - DNA, 15 bp, Homo sapiens
cgaagggcctctccg

SEQ ID NO: 449949 - DNA, 15 bp, Homo sapiens
ccgaagggcctctcc

SEQ ID NO: 449950 - DNA, 15 bp, Homo sapiens
gccgaagggcctctc

SEQ ID NO: 449951 - DNA, 15 bp, Homo sapiens
ggccgaagggcctct

SEQ ID NO: 449952 - DNA, 15 bp, Homo sapiens
aggccgaagggcctc

SEQ ID NO: 449953 - DNA, 15 bp, Homo sapiens
caggccgaagggcct

SEQ ID NO: 449954 - DNA, 15 bp, Homo sapiens
tcaggccgaagggcc

SEQ ID NO: 449955 - DNA, 15 bp, Homo sapiens
ctcaggccgaagggc

SEQ ID NO: 449956 - DNA, 15 bp, Homo sapiens
cctcaggccgaaggg

SEQ ID NO: 449957 - DNA, 15 bp, Homo sapiens
ccctcaggccgaagg

SEQ ID NO: 449958 - DNA, 15 bp, Homo sapiens
tccctcaggccgaag

SEQ ID NO: 449959 - DNA, 15 bp, Homo sapiens
ctccctcaggccgaa

SEQ ID NO: 449960 - DNA, 15 bp, Homo sapiens
gctccctcaggccga

SEQ ID NO: 449961 - DNA, 15 bp, Homo sapiens
ggctccctcaggccg

SEQ ID NO: 449962 - DNA, 15 bp, Homo sapiens
aggctccctcaggcc

SEQ ID NO: 449963 - DNA, 15 bp, Homo sapiens
gaggctccctcaggc

SEQ ID NO: 449964 - DNA, 15 bp, Homo sapiens
cgaggctccctcagg

SEQ ID NO: 449965 - DNA, 15 bp, Homo sapiens
gcgaggctccctcag

SEQ ID NO: 449966 - DNA, 15 bp, Homo sapiens
ggcgaggctccctca

SEQ ID NO: 449967 - DNA, 15 bp, Homo sapiens
cggcgaggctccctc

SEQ ID NO: 449968 - DNA, 15 bp, Homo sapiens
gcggcgaggctccct

SEQ ID NO: 449969 - DNA, 15 bp, Homo sapiens
ggcggcgaggctccc

SEQ ID NO: 449970 - DNA, 15 bp, Homo sapiens
gggcggcgaggctcc

SEQ ID NO: 449971 - DNA, 15 bp, Homo sapiens
cgggcggcgaggctc

SEQ ID NO: 449972 - DNA, 15 bp, Homo sapiens
acgggcggcgaggct

SEQ ID NO: 449973 - DNA, 15 bp, Homo sapiens
gacgggcggcgaggc

SEQ ID NO: 449974 - DNA, 15 bp, Homo sapiens
ggacgggcggcgagg

SEQ ID NO: 449975 - DNA, 15 bp, Homo sapiens
gggacgggcggcgag

SEQ ID NO: 449976 - DNA, 15 bp, Homo sapiens
ggggacgggcggcga

SEQ ID NO: 449977 - DNA, 15 bp, Homo sapiens
cggggacgggcggcg

SEQ ID NO: 449978 - DNA, 15 bp, Homo sapiens
ccggggacgggcggc

SEQ ID NO: 449979 - DNA, 15 bp, Homo sapiens
gccggggacgggcgg

SEQ ID NO: 449980 - DNA, 15 bp, Homo sapiens
tgccggggacgggcg

SEQ ID NO: 449981 - DNA, 15 bp, Homo sapiens
gtgccggggacgggc

SEQ ID NO: 449982 - DNA, 15 bp, Homo sapiens
tgtgccggggacggg

SEQ ID NO: 449983 - DNA, 15 bp, Homo sapiens
gtgtgccggggacgg

SEQ ID NO: 449984 - DNA, 15 bp, Homo sapiens
cgtgtgccggggacg

SEQ ID NO: 449985 - DNA, 15 bp, Homo sapiens
gcgtgtgccggggac

SEQ ID NO: 449986 - DNA, 15 bp, Homo sapiens
cgcgtgtgccgggga

SEQ ID NO: 449987 - DNA, 15 bp, Homo sapiens
gcgcgtgtgccgggg

SEQ ID NO: 449988 - DNA, 15 bp, Homo sapiens
tgcgcgtgtgccggg

SEQ ID NO: 449989 - DNA, 15 bp, Homo sapiens
ctgcgcgtgtgccgg

SEQ ID NO: 449990 - DNA, 15 bp, Homo sapiens
gctgcgcgtgtgccg

SEQ ID NO: 449991 - DNA, 15 bp, Homo sapiens
ggctgcgcgtgtgcc

SEQ ID NO: 449992 - DNA, 15 bp, Homo sapiens
gggctgcgcgtgtgc

SEQ ID NO: 449993 - DNA, 15 bp, Homo sapiens
ggggctgcgcgtgtg

SEQ ID NO: 449994 - DNA, 15 bp, Homo sapiens
cggggctgcgcgtgt

SEQ ID NO: 449995 - DNA, 15 bp, Homo sapiens
ccggggctgcgcgtg

SEQ ID NO: 449996 - DNA, 15 bp, Homo sapiens
gccggggctgcgcgt

SEQ ID NO: 449997 - DNA, 15 bp, Homo sapiens
ggccggggctgcgcg

SEQ ID NO: 449998 - DNA, 15 bp, Homo sapiens
aggccggggctgcgc

SEQ ID NO: 449999 - DNA, 15 bp, Homo sapiens
gaggccggggctgcg

SEQ ID NO: 450000 - DNA, 15 bp, Homo sapiens
agaggccggggctgc

SEQ ID NO: 450001 - DNA, 15 bp, Homo sapiens
gagaggccggggctg

SEQ ID NO: 450002 - DNA, 15 bp, Homo sapiens
cgagaggccggggct

SEQ ID NO: 450003 - DNA, 15 bp, Homo sapiens
ccgagaggccggggc

SEQ ID NO: 450004 - DNA, 15 bp, Homo sapiens
gccgagaggccgggg

SEQ ID NO: 450005 - DNA, 15 bp, Homo sapiens
ggccgagaggccggg

SEQ ID NO: 450006 - DNA, 15 bp, Homo sapiens
aggccgagaggccgg

SEQ ID NO: 450007 - DNA, 15 bp, Homo sapiens
gaggccgagaggccg

SEQ ID NO: 450008 - DNA, 15 bp, Homo sapiens
agaggccgagaggcc

SEQ ID NO: 450009 - DNA, 15 bp, Homo sapiens
cagaggccgagaggc

SEQ ID NO: 450010 - DNA, 15 bp, Homo sapiens
gcagaggccgagagg

SEQ ID NO: 450011 - DNA, 15 bp, Homo sapiens
ggcagaggccgagag

SEQ ID NO: 450012 - DNA, 15 bp, Homo sapiens
cggcagaggccgaga

SEQ ID NO: 450013 - DNA, 15 bp, Homo sapiens
ccggcagaggccgag

SEQ ID NO: 450014 - DNA, 15 bp, Homo sapiens
tccggcagaggccga

SEQ ID NO: 450015 - DNA, 15 bp, Homo sapiens
ctccggcagaggccg

SEQ ID NO: 450016 - DNA, 15 bp, Homo sapiens
tctccggcagaggcc

SEQ ID NO: 450017 - DNA, 15 bp, Homo sapiens
ttctccggcagaggc

SEQ ID NO: 450018 - DNA, 15 bp, Homo sapiens
tttctccggcagagg

SEQ ID NO: 450019 - DNA, 15 bp, Homo sapiens
gtttctccggcagag

SEQ ID NO: 450020 - DNA, 15 bp, Homo sapiens
tgtttctccggcaga

SEQ ID NO: 450021 - DNA, 15 bp, Homo sapiens
ctgtttctccggcag

SEQ ID NO: 450022 - DNA, 15 bp, Homo sapiens
cctgtttctccggca

SEQ ID NO: 450023 - DNA, 15 bp, Homo sapiens
acctgtttctccggc

SEQ ID NO: 450024 - DNA, 15 bp, Homo sapiens
cacctgtttctccgg

SEQ ID NO: 450025 - DNA, 15 bp, Homo sapiens
tcacctgtttctccg

SEQ ID NO: 450026 - DNA, 15 bp, Homo sapiens
ttcacctgtttctcc

SEQ ID NO: 450027 - DNA, 15 bp, Homo sapiens
cttcacctgtttctc

SEQ ID NO: 450028 - DNA, 15 bp, Homo sapiens
ccttcacctgtttct

SEQ ID NO: 450029 - DNA, 15 bp, Homo sapiens
cccttcacctgtttc

SEQ ID NO: 450030 - DNA, 15 bp, Homo sapiens
ccccttcacctgttt

SEQ ID NO: 450031 - DNA, 15 bp, Homo sapiens
cccccttcacctgtt

SEQ ID NO: 450032 - DNA, 15 bp, Homo sapiens
acccccttcacctgt

SEQ ID NO: 450033 - DNA, 15 bp, Homo sapiens
cacccccttcacctg

SEQ ID NO: 450034 - DNA, 15 bp, Homo sapiens
gcacccccttcacct

SEQ ID NO: 450035 - DNA, 15 bp, Homo sapiens
tgcacccccttcacc

SEQ ID NO: 450036 - DNA, 15 bp, Homo sapiens
ctgcacccccttcac

SEQ ID NO: 450037 - DNA, 15 bp, Homo sapiens
cctgcacccccttca

SEQ ID NO: 450038 - DNA, 15 bp, Homo sapiens
ccctgcacccccttc

SEQ ID NO: 450039 - DNA, 15 bp, Homo sapiens
accctgcaccccctt

SEQ ID NO: 450040 - DNA, 15 bp, Homo sapiens
caccctgcaccccct

SEQ ID NO: 450041 - DNA, 15 bp, Homo sapiens
ccaccctgcaccccc

SEQ ID NO: 450042 - DNA, 15 bp, Homo sapiens
cccaccctgcacccc

SEQ ID NO: 450043 - DNA, 15 bp, Homo sapiens
ccccaccctgcaccc

SEQ ID NO: 450044 - DNA, 15 bp, Homo sapiens
gccccaccctgcacc

SEQ ID NO: 450045 - DNA, 15 bp, Homo sapiens
ggccccaccctgcac

SEQ ID NO: 450046 - DNA, 15 bp, Homo sapiens
cggccccaccctgca

SEQ ID NO: 450047 - DNA, 15 bp, Homo sapiens
acggccccaccctgc

SEQ ID NO: 450048 - DNA, 15 bp, Homo sapiens
aacggccccaccctg

SEQ ID NO: 450049 - DNA, 15 bp, Homo sapiens
caacggccccaccct

SEQ ID NO: 450050 - DNA, 15 bp, Homo sapiens
ccaacggccccaccc

SEQ ID NO: 450051 - DNA, 15 bp, Homo sapiens
cccaacggccccacc

SEQ ID NO: 450052 - DNA, 15 bp, Homo sapiens
ccccaacggccccac

SEQ ID NO: 450053 - DNA, 15 bp, Homo sapiens
tccccaacggcccca

SEQ ID NO: 450054 - DNA, 15 bp, Homo sapiens
ctccccaacggcccc

SEQ ID NO: 450055 - DNA, 15 bp, Homo sapiens
cctccccaacggccc

SEQ ID NO: 450056 - DNA, 15 bp, Homo sapiens
gcctccccaacggcc

SEQ ID NO: 450057 - DNA, 15 bp, Homo sapiens
ggcctccccaacggc

SEQ ID NO: 450058 - DNA, 15 bp, Homo sapiens
aggcctccccaacgg

SEQ ID NO: 450059 - DNA, 15 bp, Homo sapiens
caggcctccccaacg

SEQ ID NO: 450060 - DNA, 15 bp, Homo sapiens
ccaggcctccccaac

SEQ ID NO: 450061 - DNA, 15 bp, Homo sapiens
cccaggcctccccaa

SEQ ID NO: 450062 - DNA, 15 bp, Homo sapiens
ccccaggcctcccca

SEQ ID NO: 450063 - DNA, 15 bp, Homo sapiens
tccccaggcctcccc

SEQ ID NO: 450064 - DNA, 15 bp, Homo sapiens
gtccccaggcctccc

SEQ ID NO: 450065 - DNA, 15 bp, Homo sapiens
ggtccccaggcctcc

SEQ ID NO: 450066 - DNA, 15 bp, Homo sapiens
gggtccccaggcctc

SEQ ID NO: 450067 - DNA, 15 bp, Homo sapiens
cgggtccccaggcct

SEQ ID NO: 450068 - DNA, 15 bp, Homo sapiens
ccgggtccccaggcc

SEQ ID NO: 450069 - DNA, 15 bp, Homo sapiens
cccgggtccccaggc

SEQ ID NO: 450070 - DNA, 15 bp, Homo sapiens
ccccgggtccccagg

SEQ ID NO: 450071 - DNA, 15 bp, Homo sapiens
cccccgggtccccag

SEQ ID NO: 450072 - DNA, 15 bp, Homo sapiens
gcccccgggtcccca

SEQ ID NO: 450073 - DNA, 15 bp, Homo sapiens
agcccccgggtcccc

SEQ ID NO: 450074 - DNA, 15 bp, Homo sapiens
gagcccccgggtccc

SEQ ID NO: 450075 - DNA, 15 bp, Homo sapiens
ggagcccccgggtcc

SEQ ID NO: 450076 - DNA, 15 bp, Homo sapiens
cggagcccccgggtc

SEQ ID NO: 450077 - DNA, 15 bp, Homo sapiens
gcggagcccccgggt

SEQ ID NO: 450078 - DNA, 15 bp, Homo sapiens
tgcggagcccccggg

SEQ ID NO: 450079 - DNA, 15 bp, Homo sapiens
ctgcggagcccccgg

SEQ ID NO: 450080 - DNA, 15 bp, Homo sapiens
gctgcggagcccccg

SEQ ID NO: 450081 - DNA, 15 bp, Homo sapiens
cgctgcggagccccc

SEQ ID NO: 450082 - DNA, 15 bp, Homo sapiens
ccgctgcggagcccc

SEQ ID NO: 450083 - DNA, 15 bp, Homo sapiens
gccgctgcggagccc

SEQ ID NO: 450084 - DNA, 15 bp, Homo sapiens
tgccgctgcggagcc

SEQ ID NO: 450085 - DNA, 15 bp, Homo sapiens
ctgccgctgcggagc

SEQ ID NO: 450086 - DNA, 15 bp, Homo sapiens
cctgccgctgcggag

SEQ ID NO: 450087 - DNA, 15 bp, Homo sapiens
ccctgccgctgcgga

SEQ ID NO: 450088 - DNA, 15 bp, Homo sapiens
cccctgccgctgcgg

SEQ ID NO: 450089 - DNA, 15 bp, Homo sapiens
ccccctgccgctgcg

SEQ ID NO: 450090 - DNA, 15 bp, Homo sapiens
gccccctgccgctgc

SEQ ID NO: 450091 - DNA, 15 bp, Homo sapiens
ggccccctgccgctg

SEQ ID NO: 450092 - DNA, 15 bp, Homo sapiens
aggccccctgccgct

SEQ ID NO: 450093 - DNA, 15 bp, Homo sapiens
gaggccccctgccgc

SEQ ID NO: 450094 - DNA, 15 bp, Homo sapiens
agaggccccctgccg

SEQ ID NO: 450095 - DNA, 15 bp, Homo sapiens
cagaggccccctgcc

SEQ ID NO: 450096 - DNA, 15 bp, Homo sapiens
ccagaggccccctgc

SEQ ID NO: 450097 - DNA, 15 bp, Homo sapiens
cccagaggccccctg

SEQ ID NO: 450098 - DNA, 15 bp, Homo sapiens
tcccagaggccccct

SEQ ID NO: 450099 - DNA, 15 bp, Homo sapiens
gtcccagaggccccc

SEQ ID NO: 450100 - DNA, 15 bp, Homo sapiens
ggtcccagaggcccc

SEQ ID NO: 450101 - DNA, 15 bp, Homo sapiens
aggtcccagaggccc

SEQ ID NO: 450102 - DNA, 15 bp, Homo sapiens
aaggtcccagaggcc

SEQ ID NO: 450103 - DNA, 15 bp, Homo sapiens
caaggtcccagaggc

SEQ ID NO: 450104 - DNA, 15 bp, Homo sapiens
ccaaggtcccagagg

SEQ ID NO: 450105 - DNA, 15 bp, Homo sapiens
cccaaggtcccagag

SEQ ID NO: 450106 - DNA, 15 bp, Homo sapiens
ccccaaggtcccaga

SEQ ID NO: 450107 - DNA, 15 bp, Homo sapiens
tccccaaggtcccag

SEQ ID NO: 450108 - DNA, 15 bp, Homo sapiens
atccccaaggtccca

SEQ ID NO: 450109 - DNA, 15 bp, Homo sapiens
catccccaaggtccc

SEQ ID NO: 450110 - DNA, 15 bp, Homo sapiens
acatccccaaggtcc

SEQ ID NO: 450111 - DNA, 15 bp, Homo sapiens
aacatccccaaggtc

SEQ ID NO: 450112 - DNA, 15 bp, Homo sapiens
caacatccccaaggt

SEQ ID NO: 450113 - DNA, 15 bp, Homo sapiens
acaacatccccaagg

SEQ ID NO: 450114 - DNA, 15 bp, Homo sapiens
cacaacatccccaag

SEQ ID NO: 450115 - DNA, 15 bp, Homo sapiens
tcacaacatccccaa

SEQ ID NO: 450116 - DNA, 15 bp, Homo sapiens
atcacaacatcccca

SEQ ID NO: 450117 - DNA, 15 bp, Homo sapiens
catcacaacatcccc

SEQ ID NO: 450118 - DNA, 15 bp, Homo sapiens
ccatcacaacatccc

SEQ ID NO: 450119 - DNA, 15 bp, Homo sapiens
tccatcacaacatcc

SEQ ID NO: 450120 - DNA, 15 bp, Homo sapiens
gtccatcacaacatc

SEQ ID NO: 450121 - DNA, 15 bp, Homo sapiens
cgtccatcacaacat

SEQ ID NO: 450122 - DNA, 15 bp, Homo sapiens
gcgtccatcacaaca

SEQ ID NO: 450123 - DNA, 15 bp, Homo sapiens
agcgtccatcacaac

SEQ ID NO: 450124 - DNA, 15 bp, Homo sapiens
cagcgtccatcacaa

SEQ ID NO: 450125 - DNA, 15 bp, Homo sapiens
gcagcgtccatcaca

SEQ ID NO: 450126 - DNA, 15 bp, Homo sapiens
tgcagcgtccatcac

SEQ ID NO: 450127 - DNA, 15 bp, Homo sapiens
ctgcagcgtccatca

SEQ ID NO: 450128 - DNA, 15 bp, Homo sapiens
actgcagcgtccatc

SEQ ID NO: 450129 - DNA, 15 bp, Homo sapiens
cactgcagcgtccat

SEQ ID NO: 450130 - DNA, 15 bp, Homo sapiens
ccactgcagcgtcca

SEQ ID NO: 450131 - DNA, 15 bp, Homo sapiens
cccactgcagcgtcc

SEQ ID NO: 450132 - DNA, 15 bp, Homo sapiens
ccccactgcagcgtc

SEQ ID NO: 450133 - DNA, 15 bp, Homo sapiens
gccccactgcagcgt

SEQ ID NO: 450134 - DNA, 15 bp, Homo sapiens
ggccccactgcagcg

SEQ ID NO: 450135 - DNA, 15 bp, Homo sapiens
cggccccactgcagc

SEQ ID NO: 450136 - DNA, 15 bp, Homo sapiens
ccggccccactgcag

SEQ ID NO: 450137 - DNA, 15 bp, Homo sapiens
cccggccccactgca

SEQ ID NO: 450138 - DNA, 15 bp, Homo sapiens
tcccggccccactgc

SEQ ID NO: 450139 - DNA, 15 bp, Homo sapiens
ctcccggccccactg

SEQ ID NO: 450140 - DNA, 15 bp, Homo sapiens
tctcccggccccact

SEQ ID NO: 450141 - DNA, 15 bp, Homo sapiens
ctctcccggccccac

SEQ ID NO: 450142 - DNA, 15 bp, Homo sapiens
tctctcccggcccca

SEQ ID NO: 450143 - DNA, 15 bp, Homo sapiens
atctctcccggcccc

SEQ ID NO: 450144 - DNA, 15 bp, Homo sapiens
catctctcccggccc

SEQ ID NO: 450145 - DNA, 15 bp, Homo sapiens
tcatctctcccggcc

SEQ ID NO: 450146 - DNA, 15 bp, Homo sapiens
ttcatctctcccggc

SEQ ID NO: 450147 - DNA, 15 bp, Homo sapiens
cttcatctctcccgg

SEQ ID NO: 450148 - DNA, 15 bp, Homo sapiens
tcttcatctctcccg

SEQ ID NO: 450149 - DNA, 15 bp, Homo sapiens
ctcttcatctctccc

SEQ ID NO: 450150 - DNA, 15 bp, Homo sapiens
tctcttcatctctcc

SEQ ID NO: 450151 - DNA, 15 bp, Homo sapiens
gtctcttcatctctc

SEQ ID NO: 450152 - DNA, 15 bp, Homo sapiens
cgtctcttcatctct

SEQ ID NO: 450153 - DNA, 15 bp, Homo sapiens
gcgtctcttcatctc

SEQ ID NO: 450154 - DNA, 15 bp, Homo sapiens
cgcgtctcttcatct

SEQ ID NO: 450155 - DNA, 15 bp, Homo sapiens
ccgcgtctcttcatc

SEQ ID NO: 450156 - DNA, 15 bp, Homo sapiens
tccgcgtctcttcat

SEQ ID NO: 450157 - DNA, 15 bp, Homo sapiens
ctccgcgtctcttca

SEQ ID NO: 450158 - DNA, 15 bp, Homo sapiens
cctccgcgtctcttc

SEQ ID NO: 450159 - DNA, 15 bp, Homo sapiens
ccctccgcgtctctt

SEQ ID NO: 450160 - DNA, 15 bp, Homo sapiens
accctccgcgtctct

SEQ ID NO: 450161 - DNA, 15 bp, Homo sapiens
gaccctccgcgtctc

SEQ ID NO: 450162 - DNA, 15 bp, Homo sapiens
cgaccctccgcgtct

SEQ ID NO: 450163 - DNA, 15 bp, Homo sapiens
gcgaccctccgcgtc

SEQ ID NO: 450164 - DNA, 15 bp, Homo sapiens
ggcgaccctccgcgt

SEQ ID NO: 450165 - DNA, 15 bp, Homo sapiens
gggcgaccctccgcg

SEQ ID NO: 450166 - DNA, 15 bp, Homo sapiens
agggcgaccctccgc

SEQ ID NO: 450167 - DNA, 15 bp, Homo sapiens
cagggcgaccctccg

SEQ ID NO: 450168 - DNA, 15 bp, Homo sapiens
tcagggcgaccctcc

SEQ ID NO: 450169 - DNA, 15 bp, Homo sapiens
ctcagggcgaccctc

SEQ ID NO: 450170 - DNA, 15 bp, Homo sapiens
cctcagggcgaccct

SEQ ID NO: 450171 - DNA, 15 bp, Homo sapiens
ccctcagggcgaccc

SEQ ID NO: 450172 - DNA, 15 bp, Homo sapiens
tccctcagggcgacc

SEQ ID NO: 450173 - DNA, 15 bp, Homo sapiens
ttccctcagggcgac

SEQ ID NO: 450174 - DNA, 15 bp, Homo sapiens
cttccctcagggcga

SEQ ID NO: 450175 - DNA, 15 bp, Homo sapiens
tcttccctcagggcg

SEQ ID NO: 450176 - DNA, 15 bp, Homo sapiens
gtcttccctcagggc

SEQ ID NO: 450177 - DNA, 15 bp, Homo sapiens
agtcttccctcaggg

SEQ ID NO: 450178 - DNA, 15 bp, Homo sapiens
gagtcttccctcagg

SEQ ID NO: 450179 - DNA, 15 bp, Homo sapiens
agagtcttccctcag

SEQ ID NO: 450180 - DNA, 15 bp, Homo sapiens
aagagtcttccctca

SEQ ID NO: 450181 - DNA, 15 bp, Homo sapiens
gaagagtcttccctc

SEQ ID NO: 450182 - DNA, 15 bp, Homo sapiens
cgaagagtcttccct

SEQ ID NO: 450183 - DNA, 15 bp, Homo sapiens
ccgaagagtcttccc

SEQ ID NO: 450184 - DNA, 15 bp, Homo sapiens
cccgaagagtcttcc

SEQ ID NO: 450185 - DNA, 15 bp, Homo sapiens
tcccgaagagtcttc

SEQ ID NO: 450186 - DNA, 15 bp, Homo sapiens
atcccgaagagtctt

SEQ ID NO: 450187 - DNA, 15 bp, Homo sapiens
catcccgaagagtct

SEQ ID NO: 450188 - DNA, 15 bp, Homo sapiens
tcatcccgaagagtc

SEQ ID NO: 450189 - DNA, 15 bp, Homo sapiens
gtcatcccgaagagt

SEQ ID NO: 450190 - DNA, 15 bp, Homo sapiens
tgtcatcccgaagag

SEQ ID NO: 450191 - DNA, 15 bp, Homo sapiens
ctgtcatcccgaaga

SEQ ID NO: 450192 - DNA, 15 bp, Homo sapiens
cctgtcatcccgaag

SEQ ID NO: 450193 - DNA, 15 bp, Homo sapiens
tcctgtcatcccgaa

SEQ ID NO: 450194 - DNA, 15 bp, Homo sapiens
ctcctgtcatcccga

SEQ ID NO: 450195 - DNA, 15 bp, Homo sapiens
gctcctgtcatcccg

SEQ ID NO: 450196 - DNA, 15 bp, Homo sapiens
cgctcctgtcatccc

SEQ ID NO: 450197 - DNA, 15 bp, Homo sapiens
ccgctcctgtcatcc

SEQ ID NO: 450198 - DNA, 15 bp, Homo sapiens
cccgctcctgtcatc

SEQ ID NO: 450199 - DNA, 15 bp, Homo sapiens
gcccgctcctgtcat

SEQ ID NO: 450200 - DNA, 15 bp, Homo sapiens
ggcccgctcctgtca

SEQ ID NO: 450201 - DNA, 15 bp, Homo sapiens
aggcccgctcctgtc

SEQ ID NO: 450202 - DNA, 15 bp, Homo sapiens
gaggcccgctcctgt

SEQ ID NO: 450203 - DNA, 15 bp, Homo sapiens
cgaggcccgctcctg

SEQ ID NO: 450204 - DNA, 15 bp, Homo sapiens
ccgaggcccgctcct

SEQ ID NO: 450205 - DNA, 15 bp, Homo sapiens
tccgaggcccgctcc

SEQ ID NO: 450206 - DNA, 15 bp, Homo sapiens
ttccgaggcccgctc

SEQ ID NO: 450207 - DNA, 15 bp, Homo sapiens
cttccgaggcccgct

SEQ ID NO: 450208 - DNA, 15 bp, Homo sapiens
ccttccgaggcccgc

SEQ ID NO: 450209 - DNA, 15 bp, Homo sapiens
cccttccgaggcccg

SEQ ID NO: 450210 - DNA, 15 bp, Homo sapiens
tcccttccgaggccc

SEQ ID NO: 450211 - DNA, 15 bp, Homo sapiens
gtcccttccgaggcc

SEQ ID NO: 450212 - DNA, 15 bp, Homo sapiens
agtcccttccgaggc

SEQ ID NO: 450213 - DNA, 15 bp, Homo sapiens
gagtcccttccgagg

SEQ ID NO: 450214 - DNA, 15 bp, Homo sapiens
cgagtcccttccgag

SEQ ID NO: 450215 - DNA, 15 bp, Homo sapiens
ccgagtcccttccga

SEQ ID NO: 450216 - DNA, 15 bp, Homo sapiens
cccgagtcccttccg

SEQ ID NO: 450217 - DNA, 15 bp, Homo sapiens
ccccgagtcccttcc

SEQ ID NO: 450218 - DNA, 15 bp, Homo sapiens
gccccgagtcccttc

SEQ ID NO: 450219 - DNA, 15 bp, Homo sapiens
cgccccgagtccctt

SEQ ID NO: 450220 - DNA, 15 bp, Homo sapiens
gcgccccgagtccct

SEQ ID NO: 450221 - DNA, 15 bp, Homo sapiens
agcgccccgagtccc

SEQ ID NO: 450222 - DNA, 15 bp, Homo sapiens
cagcgccccgagtcc

SEQ ID NO: 450223 - DNA, 15 bp, Homo sapiens
ccagcgccccgagtc

SEQ ID NO: 450224 - DNA, 15 bp, Homo sapiens
tccagcgccccgagt

SEQ ID NO: 450225 - DNA, 15 bp, Homo sapiens
ctccagcgccccgag

SEQ ID NO: 450226 - DNA, 15 bp, Homo sapiens
cctccagcgccccga

SEQ ID NO: 450227 - DNA, 15 bp, Homo sapiens
ccctccagcgccccg

SEQ ID NO: 450228 - DNA, 15 bp, Homo sapiens
tccctccagcgcccc

SEQ ID NO: 450229 - DNA, 15 bp, Homo sapiens
ttccctccagcgccc

SEQ ID NO: 450230 - DNA, 15 bp, Homo sapiens
cttccctccagcgcc

SEQ ID NO: 450231 - DNA, 15 bp, Homo sapiens
acttccctccagcgc

SEQ ID NO: 450232 - DNA, 15 bp, Homo sapiens
aacttccctccagcg

SEQ ID NO: 450233 - DNA, 15 bp, Homo sapiens
aaacttccctccagc

SEQ ID NO: 450234 - DNA, 15 bp, Homo sapiens
gaaacttccctccag

SEQ ID NO: 450235 - DNA, 15 bp, Homo sapiens
cgaaacttccctcca

SEQ ID NO: 450236 - DNA, 15 bp, Homo sapiens
acgaaacttccctcc

SEQ ID NO: 450237 - DNA, 15 bp, Homo sapiens
aacgaaacttccctc

SEQ ID NO: 450238 - DNA, 15 bp, Homo sapiens
gaacgaaacttccct

SEQ ID NO: 450239 - DNA, 15 bp, Homo sapiens
agaacgaaacttccc

SEQ ID NO: 450240 - DNA, 15 bp, Homo sapiens
aagaacgaaacttcc

SEQ ID NO: 450241 - DNA, 15 bp, Homo sapiens
gaagaacgaaacttc

SEQ ID NO: 450242 - DNA, 15 bp, Homo sapiens
cgaagaacgaaactt

SEQ ID NO: 450243 - DNA, 15 bp, Homo sapiens
ccgaagaacgaaact

SEQ ID NO: 450244 - DNA, 15 bp, Homo sapiens
tccgaagaacgaaac

SEQ ID NO: 450245 - DNA, 15 bp, Homo sapiens
ctccgaagaacgaaa

SEQ ID NO: 450246 - DNA, 15 bp, Homo sapiens
tctccgaagaacgaa

SEQ ID NO: 450247 - DNA, 15 bp, Homo sapiens
ttctccgaagaacga

SEQ ID NO: 450248 - DNA, 15 bp, Homo sapiens
tttctccgaagaacg

SEQ ID NO: 450249 - DNA, 15 bp, Homo sapiens
gtttctccgaagaac

SEQ ID NO: 450250 - DNA, 15 bp, Homo sapiens
tgtttctccgaagaa

SEQ ID NO: 450251 - DNA, 15 bp, Homo sapiens
ctgtttctccgaaga

SEQ ID NO: 450252 - DNA, 15 bp, Homo sapiens
tctgtttctccgaag

SEQ ID NO: 450253 - DNA, 15 bp, Homo sapiens
ttctgtttctccgaa

SEQ ID NO: 450254 - DNA, 15 bp, Homo sapiens
gttctgtttctccga

SEQ ID NO: 450255 - DNA, 15 bp, Homo sapiens
cgttctgtttctccg

SEQ ID NO: 450256 - DNA, 15 bp, Homo sapiens
gcgttctgtttctcc

SEQ ID NO: 450257 - DNA, 15 bp, Homo sapiens
cgcgttctgtttctc

SEQ ID NO: 450258 - DNA, 15 bp, Homo sapiens
gcgcgttctgtttct

SEQ ID NO: 450259 - DNA, 15 bp, Homo sapiens
agcgcgttctgtttc

SEQ ID NO: 450260 - DNA, 15 bp, Homo sapiens
gagcgcgttctgttt

SEQ ID NO: 450261 - DNA, 15 bp, Homo sapiens
cgagcgcgttctgtt

SEQ ID NO: 450262 - DNA, 15 bp, Homo sapiens
tcgagcgcgttctgt

SEQ ID NO: 450263 - DNA, 15 bp, Homo sapiens
ctcgagcgcgttctg

SEQ ID NO: 450264 - DNA, 15 bp, Homo sapiens
cctcgagcgcgttct

SEQ ID NO: 450265 - DNA, 15 bp, Homo sapiens
ccctcgagcgcgttc

SEQ ID NO: 450266 - DNA, 15 bp, Homo sapiens
cccctcgagcgcgtt

SEQ ID NO: 450267 - DNA, 15 bp, Homo sapiens
ccccctcgagcgcgt

SEQ ID NO: 450268 - DNA, 15 bp, Homo sapiens
gccccctcgagcgcg

SEQ ID NO: 450269 - DNA, 15 bp, Homo sapiens
tgccccctcgagcgc

SEQ ID NO: 450270 - DNA, 15 bp, Homo sapiens
gtgccccctcgagcg

SEQ ID NO: 450271 - DNA, 15 bp, Homo sapiens
ggtgccccctcgagc

SEQ ID NO: 450272 - DNA, 15 bp, Homo sapiens
cggtgccccctcgag

SEQ ID NO: 450273 - DNA, 15 bp, Homo sapiens
acggtgccccctcga

SEQ ID NO: 450274 - DNA, 15 bp, Homo sapiens
cacggtgccccctcg

SEQ ID NO: 450275 - DNA, 15 bp, Homo sapiens
ccacggtgccccctc

SEQ ID NO: 450276 - DNA, 15 bp, Homo sapiens
cccacggtgccccct

SEQ ID NO: 450277 - DNA, 15 bp, Homo sapiens
ccccacggtgccccc

SEQ ID NO: 450278 - DNA, 15 bp, Homo sapiens
gccccacggtgcccc

SEQ ID NO: 450279 - DNA, 15 bp, Homo sapiens
cgccccacggtgccc

SEQ ID NO: 450280 - DNA, 15 bp, Homo sapiens
tcgccccacggtgcc

SEQ ID NO: 450281 - DNA, 15 bp, Homo sapiens
ctcgccccacggtgc

SEQ ID NO: 450282 - DNA, 15 bp, Homo sapiens
cctcgccccacggtg

SEQ ID NO: 450283 - DNA, 15 bp, Homo sapiens
ccctcgccccacggt

SEQ ID NO: 450284 - DNA, 15 bp, Homo sapiens
gccctcgccccacgg

SEQ ID NO: 450285 - DNA, 15 bp, Homo sapiens
cgccctcgccccacg

SEQ ID NO: 450286 - DNA, 15 bp, Homo sapiens
gcgccctcgccccac

SEQ ID NO: 450287 - DNA, 15 bp, Homo sapiens
tgcgccctcgcccca

SEQ ID NO: 450288 - DNA, 15 bp, Homo sapiens
gtgcgccctcgcccc

SEQ ID NO: 450289 - DNA, 15 bp, Homo sapiens
agtgcgccctcgccc

SEQ ID NO: 450290 - DNA, 15 bp, Homo sapiens
gagtgcgccctcgcc

SEQ ID NO: 450291 - DNA, 15 bp, Homo sapiens
cgagtgcgccctcgc

SEQ ID NO: 450292 - DNA, 15 bp, Homo sapiens
ccgagtgcgccctcg

SEQ ID NO: 450293 - DNA, 15 bp, Homo sapiens
accgagtgcgccctc

SEQ ID NO: 450294 - DNA, 15 bp, Homo sapiens
aaccgagtgcgccct

SEQ ID NO: 450295 - DNA, 15 bp, Homo sapiens
caaccgagtgcgccc

SEQ ID NO: 450296 - DNA, 15 bp, Homo sapiens
gcaaccgagtgcgcc

SEQ ID NO: 450297 - DNA, 15 bp, Homo sapiens
cgcaaccgagtgcgc

SEQ ID NO: 450298 - DNA, 15 bp, Homo sapiens
ccgcaaccgagtgcg

SEQ ID NO: 450299 - DNA, 15 bp, Homo sapiens
gccgcaaccgagtgc

SEQ ID NO: 450300 - DNA, 15 bp, Homo sapiens
cgccgcaaccgagtg

SEQ ID NO: 450301 - DNA, 15 bp, Homo sapiens
ccgccgcaaccgagt

SEQ ID NO: 450302 - DNA, 15 bp, Homo sapiens
gccgccgcaaccgag

SEQ ID NO: 450303 - DNA, 15 bp, Homo sapiens
tgccgccgcaaccga

SEQ ID NO: 450304 - DNA, 15 bp, Homo sapiens
ctgccgccgcaaccg

SEQ ID NO: 450305 - DNA, 15 bp, Homo sapiens
cctgccgccgcaacc

SEQ ID NO: 450306 - DNA, 15 bp, Homo sapiens
tcctgccgccgcaac

SEQ ID NO: 450307 - DNA, 15 bp, Homo sapiens
ctcctgccgccgcaa

SEQ ID NO: 450308 - DNA, 15 bp, Homo sapiens
actcctgccgccgca

SEQ ID NO: 450309 - DNA, 15 bp, Homo sapiens
cactcctgccgccgc

SEQ ID NO: 450310 - DNA, 15 bp, Homo sapiens
tcactcctgccgccg

SEQ ID NO: 450311 - DNA, 15 bp, Homo sapiens
ctcactcctgccgcc

SEQ ID NO: 450312 - DNA, 15 bp, Homo sapiens
cctcactcctgccgc

SEQ ID NO: 450313 - DNA, 15 bp, Homo sapiens
ccctcactcctgccg

SEQ ID NO: 450314 - DNA, 15 bp, Homo sapiens
tccctcactcctgcc

SEQ ID NO: 450315 - DNA, 15 bp, Homo sapiens
gtccctcactcctgc

SEQ ID NO: 450316 - DNA, 15 bp, Homo sapiens
tgtccctcactcctg

SEQ ID NO: 450317 - DNA, 15 bp, Homo sapiens
ctgtccctcactcct

SEQ ID NO: 450318 - DNA, 15 bp, Homo sapiens
actgtccctcactcc

SEQ ID NO: 450319 - DNA, 15 bp, Homo sapiens
gactgtccctcactc

SEQ ID NO: 450320 - DNA, 15 bp, Homo sapiens
ggactgtccctcact

SEQ ID NO: 450321 - DNA, 15 bp, Homo sapiens
gggactgtccctcac

SEQ ID NO: 450322 - DNA, 15 bp, Homo sapiens
ggggactgtccctca

SEQ ID NO: 450323 - DNA, 15 bp, Homo sapiens
gggggactgtccctc

SEQ ID NO: 450324 - DNA, 15 bp, Homo sapiens
cgggggactgtccct

SEQ ID NO: 450325 - DNA, 15 bp, Homo sapiens
tcgggggactgtccc

SEQ ID NO: 450326 - DNA, 15 bp, Homo sapiens
atcgggggactgtcc

SEQ ID NO: 450327 - DNA, 15 bp, Homo sapiens
aatcgggggactgtc

SEQ ID NO: 450328 - DNA, 15 bp, Homo sapiens
aaatcgggggactgt

SEQ ID NO: 450329 - DNA, 15 bp, Homo sapiens
gaaatcgggggactg

SEQ ID NO: 450330 - DNA, 15 bp, Homo sapiens
ggaaatcgggggact

SEQ ID NO: 450331 - DNA, 15 bp, Homo sapiens
aggaaatcgggggac

SEQ ID NO: 450332 - DNA, 15 bp, Homo sapiens
caggaaatcggggga

SEQ ID NO: 450333 - DNA, 15 bp, Homo sapiens
gcaggaaatcggggg

SEQ ID NO: 450334 - DNA, 15 bp, Homo sapiens
agcaggaaatcgggg

SEQ ID NO: 450335 - DNA, 15 bp, Homo sapiens
gagcaggaaatcggg

SEQ ID NO: 450336 - DNA, 15 bp, Homo sapiens
ggagcaggaaatcgg

SEQ ID NO: 450337 - DNA, 15 bp, Homo sapiens
gggagcaggaaatcg

SEQ ID NO: 450338 - DNA, 15 bp, Homo sapiens
agggagcaggaaatc

SEQ ID NO: 450339 - DNA, 15 bp, Homo sapiens
cagggagcaggaaat

SEQ ID NO: 450340 - DNA, 15 bp, Homo sapiens
ccagggagcaggaaa

SEQ ID NO: 450341 - DNA, 15 bp, Homo sapiens
cccagggagcaggaa

SEQ ID NO: 450342 - DNA, 15 bp, Homo sapiens
ccccagggagcagga

SEQ ID NO: 450343 - DNA, 15 bp, Homo sapiens
gccccagggagcagg

SEQ ID NO: 450344 - DNA, 15 bp, Homo sapiens
ggccccagggagcag

SEQ ID NO: 450345 - DNA, 15 bp, Homo sapiens
gggccccagggagca

SEQ ID NO: 450346 - DNA, 15 bp, Homo sapiens
agggccccagggagc

SEQ ID NO: 450347 - DNA, 15 bp, Homo sapiens
cagggccccagggag

SEQ ID NO: 450348 - DNA, 15 bp, Homo sapiens
ccagggccccaggga

SEQ ID NO: 450349 - DNA, 15 bp, Homo sapiens
cccagggccccaggg

SEQ ID NO: 450350 - DNA, 15 bp, Homo sapiens
ccccagggccccagg

SEQ ID NO: 450351 - DNA, 15 bp, Homo sapiens
tccccagggccccag

SEQ ID NO: 450352 - DNA, 15 bp, Homo sapiens
gtccccagggcccca

SEQ ID NO: 450353 - DNA, 15 bp, Homo sapiens
cgtccccagggcccc

SEQ ID NO: 450354 - DNA, 15 bp, Homo sapiens
acgtccccagggccc

SEQ ID NO: 450355 - DNA, 15 bp, Homo sapiens
aacgtccccagggcc

SEQ ID NO: 450356 - DNA, 15 bp, Homo sapiens
gaacgtccccagggc

SEQ ID NO: 450357 - DNA, 15 bp, Homo sapiens
ggaacgtccccaggg

SEQ ID NO: 450358 - DNA, 15 bp, Homo sapiens
cggaacgtccccagg

SEQ ID NO: 450359 - DNA, 15 bp, Homo sapiens
ccggaacgtccccag

SEQ ID NO: 450360 - DNA, 15 bp, Homo sapiens
gccggaacgtcccca

SEQ ID NO: 450361 - DNA, 15 bp, Homo sapiens
ggccggaacgtcccc

SEQ ID NO: 450362 - DNA, 15 bp, Homo sapiens
tggccggaacgtccc

SEQ ID NO: 450363 - DNA, 15 bp, Homo sapiens
gtggccggaacgtcc

SEQ ID NO: 450364 - DNA, 15 bp, Homo sapiens
ggtggccggaacgtc

SEQ ID NO: 450365 - DNA, 15 bp, Homo sapiens
cggtggccggaacgt

SEQ ID NO: 450366 - DNA, 15 bp, Homo sapiens
ccggtggccggaacg

SEQ ID NO: 450367 - DNA, 15 bp, Homo sapiens
tccggtggccggaac

SEQ ID NO: 450368 - DNA, 15 bp, Homo sapiens
ctccggtggccggaa

SEQ ID NO: 450369 - DNA, 15 bp, Homo sapiens
gctccggtggccgga

SEQ ID NO: 450370 - DNA, 15 bp, Homo sapiens
cgctccggtggccgg

SEQ ID NO: 450371 - DNA, 15 bp, Homo sapiens
tcgctccggtggccg

SEQ ID NO: 450372 - DNA, 15 bp, Homo sapiens
gtcgctccggtggcc

SEQ ID NO: 450373 - DNA, 15 bp, Homo sapiens
agtcgctccggtggc

SEQ ID NO: 450374 - DNA, 15 bp, Homo sapiens
cagtcgctccggtgg

SEQ ID NO: 450375 - DNA, 15 bp, Homo sapiens
acagtcgctccggtg

SEQ ID NO: 450376 - DNA, 15 bp, Homo sapiens
gacagtcgctccggt

SEQ ID NO: 450377 - DNA, 15 bp, Homo sapiens
tgacagtcgctccgg

SEQ ID NO: 450378 - DNA, 15 bp, Homo sapiens
gtgacagtcgctccg

SEQ ID NO: 450379 - DNA, 15 bp, Homo sapiens
cgtgacagtcgctcc

SEQ ID NO: 450380 - DNA, 15 bp, Homo sapiens
gcgtgacagtcgctc

SEQ ID NO: 450381 - DNA, 15 bp, Homo sapiens
ggcgtgacagtcgct

SEQ ID NO: 450382 - DNA, 15 bp, Homo sapiens
cggcgtgacagtcgc

SEQ ID NO: 450383 - DNA, 15 bp, Homo sapiens
tcggcgtgacagtcg

SEQ ID NO: 450384 - DNA, 15 bp, Homo sapiens
gtcggcgtgacagtc

SEQ ID NO: 450385 - DNA, 15 bp, Homo sapiens
cgtcggcgtgacagt

SEQ ID NO: 450386 - DNA, 15 bp, Homo sapiens
ccgtcggcgtgacag

SEQ ID NO: 450387 - DNA, 15 bp, Homo sapiens
cccgtcggcgtgaca

SEQ ID NO: 450388 - DNA, 15 bp, Homo sapiens
ccccgtcggcgtgac

SEQ ID NO: 450389 - DNA, 15 bp, Homo sapiens
tccccgtcggcgtga

SEQ ID NO: 450390 - DNA, 15 bp, Homo sapiens
atccccgtcggcgtg

SEQ ID NO: 450391 - DNA, 15 bp, Homo sapiens
gatccccgtcggcgt

SEQ ID NO: 450392 - DNA, 15 bp, Homo sapiens
tgatccccgtcggcg

SEQ ID NO: 450393 - DNA, 15 bp, Homo sapiens
gtgatccccgtcggc

SEQ ID NO: 450394 - DNA, 15 bp, Homo sapiens
ggtgatccccgtcgg

SEQ ID NO: 450395 - DNA, 15 bp, Homo sapiens
cggtgatccccgtcg

SEQ ID NO: 450396 - DNA, 15 bp, Homo sapiens
ccggtgatccccgtc

SEQ ID NO: 450397 - DNA, 15 bp, Homo sapiens
gccggtgatccccgt

SEQ ID NO: 450398 - DNA, 15 bp, Homo sapiens
cgccggtgatccccg

SEQ ID NO: 450399 - DNA, 15 bp, Homo sapiens
gcgccggtgatcccc

SEQ ID NO: 450400 - DNA, 15 bp, Homo sapiens
cgcgccggtgatccc

SEQ ID NO: 450401 - DNA, 15 bp, Homo sapiens
tcgcgccggtgatcc

SEQ ID NO: 450402 - DNA, 15 bp, Homo sapiens
ctcgcgccggtgatc

SEQ ID NO: 450403 - DNA, 15 bp, Homo sapiens
actcgcgccggtgat

SEQ ID NO: 450404 - DNA, 15 bp, Homo sapiens
cactcgcgccggtga

SEQ ID NO: 450405 - DNA, 15 bp, Homo sapiens
ccactcgcgccggtg

SEQ ID NO: 450406 - DNA, 15 bp, Homo sapiens
cccactcgcgccggt

SEQ ID NO: 450407 - DNA, 15 bp, Homo sapiens
ccccactcgcgccgg

SEQ ID NO: 450408 - DNA, 15 bp, Homo sapiens
cccccactcgcgccg

SEQ ID NO: 450409 - DNA, 15 bp, Homo sapiens
ccccccactcgcgcc

SEQ ID NO: 450410 - DNA, 15 bp, Homo sapiens
accccccactcgcgc

SEQ ID NO: 450411 - DNA, 15 bp, Homo sapiens
gaccccccactcgcg

SEQ ID NO: 450412 - DNA, 15 bp, Homo sapiens
cgaccccccactcgc

SEQ ID NO: 450413 - DNA, 15 bp, Homo sapiens
ccgaccccccactcg

SEQ ID NO: 450414 - DNA, 15 bp, Homo sapiens
tccgaccccccactc

SEQ ID NO: 450415 - DNA, 15 bp, Homo sapiens
ttccgaccccccact

SEQ ID NO: 450416 - DNA, 15 bp, Homo sapiens
tttccgaccccccac

SEQ ID NO: 450417 - DNA, 15 bp, Homo sapiens
ctttccgacccccca

SEQ ID NO: 450418 - DNA, 15 bp, Homo sapiens
gctttccgacccccc

SEQ ID NO: 450419 - DNA, 15 bp, Homo sapiens
cgctttccgaccccc

SEQ ID NO: 450420 - DNA, 15 bp, Homo sapiens
gcgctttccgacccc

SEQ ID NO: 450421 - DNA, 15 bp, Homo sapiens
ggcgctttccgaccc

SEQ ID NO: 450422 - DNA, 15 bp, Homo sapiens
aggcgctttccgacc

SEQ ID NO: 450423 - DNA, 15 bp, Homo sapiens
gaggcgctttccgac

SEQ ID NO: 450424 - DNA, 15 bp, Homo sapiens
ggaggcgctttccga

SEQ ID NO: 450425 - DNA, 15 bp, Homo sapiens
aggaggcgctttccg

SEQ ID NO: 450426 - DNA, 15 bp, Homo sapiens
gaggaggcgctttcc

SEQ ID NO: 450427 - DNA, 15 bp, Homo sapiens
ggaggaggcgctttc

SEQ ID NO: 450428 - DNA, 15 bp, Homo sapiens
gggaggaggcgcttt

SEQ ID NO: 450429 - DNA, 15 bp, Homo sapiens
ggggaggaggcgctt

SEQ ID NO: 450430 - DNA, 15 bp, Homo sapiens
cggggaggaggcgct

SEQ ID NO: 450431 - DNA, 15 bp, Homo sapiens
gcggggaggaggcgc

SEQ ID NO: 450432 - DNA, 15 bp, Homo sapiens
ggcggggaggaggcg

SEQ ID NO: 450433 - DNA, 15 bp, Homo sapiens
gggcggggaggaggc

SEQ ID NO: 450434 - DNA, 15 bp, Homo sapiens
cgggcggggaggagg

SEQ ID NO: 450435 - DNA, 15 bp, Homo sapiens
ccgggcggggaggag

SEQ ID NO: 450436 - DNA, 15 bp, Homo sapiens
accgggcggggagga

SEQ ID NO: 450437 - DNA, 15 bp, Homo sapiens
gaccgggcggggagg

SEQ ID NO: 450438 - DNA, 15 bp, Homo sapiens
cgaccgggcggggag

SEQ ID NO: 450439 - DNA, 15 bp, Homo sapiens
ccgaccgggcgggga

SEQ ID NO: 450440 - DNA, 15 bp, Homo sapiens
gccgaccgggcgggg

SEQ ID NO: 450441 - DNA, 15 bp, Homo sapiens
cgccgaccgggcggg

SEQ ID NO: 450442 - DNA, 15 bp, Homo sapiens
ccgccgaccgggcgg

SEQ ID NO: 450443 - DNA, 15 bp, Homo sapiens
gccgccgaccgggcg

SEQ ID NO: 450444 - DNA, 15 bp, Homo sapiens
agccgccgaccgggc

SEQ ID NO: 450445 - DNA, 15 bp, Homo sapiens
gagccgccgaccggg

SEQ ID NO: 450446 - DNA, 15 bp, Homo sapiens
ggagccgccgaccgg

SEQ ID NO: 450447 - DNA, 15 bp, Homo sapiens
gggagccgccgaccg

SEQ ID NO: 450448 - DNA, 15 bp, Homo sapiens
cgggagccgccgacc

SEQ ID NO: 450449 - DNA, 15 bp, Homo sapiens
gcgggagccgccgac

SEQ ID NO: 450450 - DNA, 15 bp, Homo sapiens
agcgggagccgccga

SEQ ID NO: 450451 - DNA, 15 bp, Homo sapiens
cagcgggagccgccg

SEQ ID NO: 450452 - DNA, 15 bp, Homo sapiens
tcagcgggagccgcc

SEQ ID NO: 450453 - DNA, 15 bp, Homo sapiens
ctcagcgggagccgc

SEQ ID NO: 450454 - DNA, 15 bp, Homo sapiens
gctcagcgggagccg

SEQ ID NO: 450455 - DNA, 15 bp, Homo sapiens
ggctcagcgggagcc

SEQ ID NO: 450456 - DNA, 15 bp, Homo sapiens
tggctcagcgggagc

SEQ ID NO: 450457 - DNA, 15 bp, Homo sapiens
gtggctcagcgggag

SEQ ID NO: 450458 - DNA, 15 bp, Homo sapiens
agtggctcagcggga

SEQ ID NO: 450459 - DNA, 15 bp, Homo sapiens
aagtggctcagcggg

SEQ ID NO: 450460 - DNA, 15 bp, Homo sapiens
gaagtggctcagcgg

SEQ ID NO: 450461 - DNA, 15 bp, Homo sapiens
ggaagtggctcagcg

SEQ ID NO: 450462 - DNA, 15 bp, Homo sapiens
aggaagtggctcagc

SEQ ID NO: 450463 - DNA, 15 bp, Homo sapiens
gaggaagtggctcag

SEQ ID NO: 450464 - DNA, 15 bp, Homo sapiens
ggaggaagtggctca

SEQ ID NO: 450465 - DNA, 15 bp, Homo sapiens
cggaggaagtggctc

SEQ ID NO: 450466 - DNA, 15 bp, Homo sapiens
gcggaggaagtggct

SEQ ID NO: 450467 - DNA, 15 bp, Homo sapiens
agcggaggaagtggc

SEQ ID NO: 450468 - DNA, 15 bp, Homo sapiens
aagcggaggaagtgg

SEQ ID NO: 450469 - DNA, 15 bp, Homo sapiens
caagcggaggaagtg

SEQ ID NO: 450470 - DNA, 15 bp, Homo sapiens
gcaagcggaggaagt

SEQ ID NO: 450471 - DNA, 15 bp, Homo sapiens
ggcaagcggaggaag

SEQ ID NO: 450472 - DNA, 15 bp, Homo sapiens
gggcaagcggaggaa

SEQ ID NO: 450473 - DNA, 15 bp, Homo sapiens
agggcaagcggagga

SEQ ID NO: 450474 - DNA, 15 bp, Homo sapiens
cagggcaagcggagg

SEQ ID NO: 450475 - DNA, 15 bp, Homo sapiens
acagggcaagcggag

SEQ ID NO: 450476 - DNA, 15 bp, Homo sapiens
aacagggcaagcgga

SEQ ID NO: 450477 - DNA, 15 bp, Homo sapiens
gaacagggcaagcgg

SEQ ID NO: 450478 - DNA, 15 bp, Homo sapiens
ggaacagggcaagcg

SEQ ID NO: 450479 - DNA, 15 bp, Homo sapiens
gggaacagggcaagc

SEQ ID NO: 450480 - DNA, 15 bp, Homo sapiens
cgggaacagggcaag

SEQ ID NO: 450481 - DNA, 15 bp, Homo sapiens
gcgggaacagggcaa

SEQ ID NO: 450482 - DNA, 15 bp, Homo sapiens
agcgggaacagggca

SEQ ID NO: 450483 - DNA, 15 bp, Homo sapiens
gagcgggaacagggc

SEQ ID NO: 450484 - DNA, 15 bp, Homo sapiens
ggagcgggaacaggg

SEQ ID NO: 450485 - DNA, 15 bp, Homo sapiens
aggagcgggaacagg

SEQ ID NO: 450486 - DNA, 15 bp, Homo sapiens
aaggagcgggaacag

SEQ ID NO: 450487 - DNA, 15 bp, Homo sapiens
gaaggagcgggaaca

SEQ ID NO: 450488 - DNA, 15 bp, Homo sapiens
tgaaggagcgggaac

SEQ ID NO: 450489 - DNA, 15 bp, Homo sapiens
ctgaaggagcgggaa

SEQ ID NO: 450490 - DNA, 15 bp, Homo sapiens
cctgaaggagcggga

SEQ ID NO: 450491 - DNA, 15 bp, Homo sapiens
tcctgaaggagcggg

SEQ ID NO: 450492 - DNA, 15 bp, Homo sapiens
ctcctgaaggagcgg

SEQ ID NO: 450493 - DNA, 15 bp, Homo sapiens
tctcctgaaggagcg

SEQ ID NO: 450494 - DNA, 15 bp, Homo sapiens
gtctcctgaaggagc

SEQ ID NO: 450495 - DNA, 15 bp, Homo sapiens
tgtctcctgaaggag

SEQ ID NO: 450496 - DNA, 15 bp, Homo sapiens
ctgtctcctgaagga

SEQ ID NO: 450497 - DNA, 15 bp, Homo sapiens
gctgtctcctgaagg

SEQ ID NO: 450498 - DNA, 15 bp, Homo sapiens
agctgtctcctgaag

SEQ ID NO: 450499 - DNA, 15 bp, Homo sapiens
cagctgtctcctgaa

SEQ ID NO: 450500 - DNA, 15 bp, Homo sapiens
acagctgtctcctga

SEQ ID NO: 450501 - DNA, 15 bp, Homo sapiens
cacagctgtctcctg

SEQ ID NO: 450502 - DNA, 15 bp, Homo sapiens
gcacagctgtctcct

SEQ ID NO: 450503 - DNA, 15 bp, Homo sapiens
ggcacagctgtctcc

SEQ ID NO: 450504 - DNA, 15 bp, Homo sapiens
gggcacagctgtctc

SEQ ID NO: 450505 - DNA, 15 bp, Homo sapiens
agggcacagctgtct

SEQ ID NO: 450506 - DNA, 15 bp, Homo sapiens
aagggcacagctgtc

SEQ ID NO: 450507 - DNA, 15 bp, Homo sapiens
aaagggcacagctgt

SEQ ID NO: 450508 - DNA, 15 bp, Homo sapiens
aaaagggcacagctg

SEQ ID NO: 450509 - DNA, 15 bp, Homo sapiens
caaaagggcacagct

SEQ ID NO: 450510 - DNA, 15 bp, Homo sapiens
ccaaaagggcacagc

SEQ ID NO: 450511 - DNA, 15 bp, Homo sapiens
tccaaaagggcacag

SEQ ID NO: 450512 - DNA, 15 bp, Homo sapiens
ctccaaaagggcaca

SEQ ID NO: 450513 - DNA, 15 bp, Homo sapiens
cctccaaaagggcac

SEQ ID NO: 450514 - DNA, 15 bp, Homo sapiens
gcctccaaaagggca

SEQ ID NO: 450515 - DNA, 15 bp, Homo sapiens
tgcctccaaaagggc

SEQ ID NO: 450516 - DNA, 15 bp, Homo sapiens
ctgcctccaaaaggg

SEQ ID NO: 450517 - DNA, 15 bp, Homo sapiens
cctgcctccaaaagg

SEQ ID NO: 450518 - DNA, 15 bp, Homo sapiens
tcctgcctccaaaag

SEQ ID NO: 450519 - DNA, 15 bp, Homo sapiens
ttcctgcctccaaaa

SEQ ID NO: 450520 - DNA, 15 bp, Homo sapiens
attcctgcctccaaa

SEQ ID NO: 450521 - DNA, 15 bp, Homo sapiens
tattcctgcctccaa

SEQ ID NO: 450522 - DNA, 15 bp, Homo sapiens
ctattcctgcctcca

SEQ ID NO: 450523 - DNA, 15 bp, Homo sapiens
cctattcctgcctcc

SEQ ID NO: 450524 - DNA, 15 bp, Homo sapiens
acctattcctgcctc

SEQ ID NO: 450525 - DNA, 15 bp, Homo sapiens
cacctattcctgcct

SEQ ID NO: 450526 - DNA, 15 bp, Homo sapiens
acacctattcctgcc

SEQ ID NO: 450527 - DNA, 15 bp, Homo sapiens
cacacctattcctgc

SEQ ID NO: 450528 - DNA, 15 bp, Homo sapiens
acacacctattcctg

SEQ ID NO: 450529 - DNA, 15 bp, Homo sapiens
gacacacctattcct

SEQ ID NO: 450530 - DNA, 15 bp, Homo sapiens
agacacacctattcc

SEQ ID NO: 450531 - DNA, 15 bp, Homo sapiens
cagacacacctattc

SEQ ID NO: 450532 - DNA, 15 bp, Homo sapiens
acagacacacctatt

SEQ ID NO: 450533 - DNA, 15 bp, Homo sapiens
gacagacacacctat

SEQ ID NO: 450534 - DNA, 15 bp, Homo sapiens
cgacagacacaccta

SEQ ID NO: 450535 - DNA, 15 bp, Homo sapiens
gcgacagacacacct

SEQ ID NO: 450536 - DNA, 15 bp, Homo sapiens
ggcgacagacacacc

SEQ ID NO: 450537 - DNA, 15 bp, Homo sapiens
aggcgacagacacac

SEQ ID NO: 450538 - DNA, 15 bp, Homo sapiens
caggcgacagacaca

SEQ ID NO: 450539 - DNA, 15 bp, Homo sapiens
gcaggcgacagacac

SEQ ID NO: 450540 - DNA, 15 bp, Homo sapiens
tgcaggcgacagaca

SEQ ID NO: 450541 - DNA, 15 bp, Homo sapiens
ctgcaggcgacagac

SEQ ID NO: 450542 - DNA, 15 bp, Homo sapiens
gctgcaggcgacaga

SEQ ID NO: 450543 - DNA, 15 bp, Homo sapiens
ggctgcaggcgacag

SEQ ID NO: 450544 - DNA, 15 bp, Homo sapiens
aggctgcaggcgaca

SEQ ID NO: 450545 - DNA, 15 bp, Homo sapiens
aaggctgcaggcgac

SEQ ID NO: 450546 - DNA, 15 bp, Homo sapiens
taaggctgcaggcga

SEQ ID NO: 450547 - DNA, 15 bp, Homo sapiens
gtaaggctgcaggcg

SEQ ID NO: 450548 - DNA, 15 bp, Homo sapiens
cgtaaggctgcaggc

SEQ ID NO: 450549 - DNA, 15 bp, Homo sapiens
ccgtaaggctgcagg

SEQ ID NO: 450550 - DNA, 15 bp, Homo sapiens
cccgtaaggctgcag

SEQ ID NO: 450551 - DNA, 15 bp, Homo sapiens
gcccgtaaggctgca

SEQ ID NO: 450552 - DNA, 15 bp, Homo sapiens
agcccgtaaggctgc

SEQ ID NO: 450553 - DNA, 15 bp, Homo sapiens
cagcccgtaaggctg

SEQ ID NO: 450554 - DNA, 15 bp, Homo sapiens
ccagcccgtaaggct

SEQ ID NO: 450555 - DNA, 15 bp, Homo sapiens
gccagcccgtaaggc

SEQ ID NO: 450556 - DNA, 15 bp, Homo sapiens
agccagcccgtaagg

SEQ ID NO: 450557 - DNA, 15 bp, Homo sapiens
cagccagcccgtaag

SEQ ID NO: 450558 - DNA, 15 bp, Homo sapiens
ccagccagcccgtaa

SEQ ID NO: 450559 - DNA, 15 bp, Homo sapiens
accagccagcccgta

SEQ ID NO: 450560 - DNA, 15 bp, Homo sapiens
gaccagccagcccgt

SEQ ID NO: 450561 - DNA, 15 bp, Homo sapiens
cgaccagccagcccg

SEQ ID NO: 450562 - DNA, 15 bp, Homo sapiens
acgaccagccagccc

SEQ ID NO: 450563 - DNA, 15 bp, Homo sapiens
cacgaccagccagcc

SEQ ID NO: 450564 - DNA, 15 bp, Homo sapiens
ccacgaccagccagc

SEQ ID NO: 450565 - DNA, 15 bp, Homo sapiens
cccacgaccagccag

SEQ ID NO: 450566 - DNA, 15 bp, Homo sapiens
acccacgaccagcca

SEQ ID NO: 450567 - DNA, 15 bp, Homo sapiens
tacccacgaccagcc

SEQ ID NO: 450568 - DNA, 15 bp, Homo sapiens
ctacccacgaccagc

SEQ ID NO: 450569 - DNA, 15 bp, Homo sapiens
cctacccacgaccag

SEQ ID NO: 450570 - DNA, 15 bp, Homo sapiens
gcctacccacgacca

SEQ ID NO: 450571 - DNA, 15 bp, Homo sapiens
agcctacccacgacc

SEQ ID NO: 450572 - DNA, 15 bp, Homo sapiens
aagcctacccacgac

SEQ ID NO: 450573 - DNA, 15 bp, Homo sapiens
aaagcctacccacga

SEQ ID NO: 450574 - DNA, 15 bp, Homo sapiens
taaagcctacccacg

SEQ ID NO: 450575 - DNA, 15 bp, Homo sapiens
ataaagcctacccac

SEQ ID NO: 450576 - DNA, 15 bp, Homo sapiens
aataaagcctaccca

SEQ ID NO: 450577 - DNA, 15 bp, Homo sapiens
caataaagcctaccc

SEQ ID NO: 450578 - DNA, 15 bp, Homo sapiens
gcaataaagcctacc

SEQ ID NO: 450579 - DNA, 15 bp, Homo sapiens
tgcaataaagcctac

SEQ ID NO: 450580 - DNA, 15 bp, Homo sapiens
atgcaataaagccta

SEQ ID NO: 450581 - DNA, 15 bp, Homo sapiens
tatgcaataaagcct

SEQ ID NO: 450582 - DNA, 15 bp, Homo sapiens
ttatgcaataaagcc

SEQ ID NO: 450583 - DNA, 15 bp, Homo sapiens
cttatgcaataaagc

SEQ ID NO: 450584 - DNA, 15 bp, Homo sapiens
tcttatgcaataaag

SEQ ID NO: 450585 - DNA, 15 bp, Homo sapiens
ttcttatgcaataaa

SEQ ID NO: 450586 - DNA, 15 bp, Homo sapiens
attcttatgcaataa

SEQ ID NO: 450587 - DNA, 15 bp, Homo sapiens
gattcttatgcaata

SEQ ID NO: 450588 - DNA, 15 bp, Homo sapiens
tgattcttatgcaat

SEQ ID NO: 450589 - DNA, 15 bp, Homo sapiens
ttgattcttatgcaa

SEQ ID NO: 450590 - DNA, 15 bp, Homo sapiens
cttgattcttatgca

SEQ ID NO: 450591 - DNA, 15 bp, Homo sapiens
acttgattcttatgc

SEQ ID NO: 450592 - DNA, 15 bp, Homo sapiens
aacttgattcttatg

SEQ ID NO: 450593 - DNA, 15 bp, Homo sapiens
aaacttgattcttat

SEQ ID NO: 450594 - DNA, 15 bp, Homo sapiens
gaaacttgattctta

SEQ ID NO: 450595 - DNA, 15 bp, Homo sapiens
ggaaacttgattctt

SEQ ID NO: 450596 - DNA, 15 bp, Homo sapiens
aggaaacttgattct

SEQ ID NO: 450597 - DNA, 15 bp, Homo sapiens
caggaaacttgattc

SEQ ID NO: 450598 - DNA, 15 bp, Homo sapiens
acaggaaacttgatt

SEQ ID NO: 450599 - DNA, 15 bp, Homo sapiens
tacaggaaacttgat

SEQ ID NO: 450600 - DNA, 15 bp, Homo sapiens
ctacaggaaacttga

SEQ ID NO: 450601 - DNA, 15 bp, Homo sapiens
cctacaggaaacttg

SEQ ID NO: 450602 - DNA, 15 bp, Homo sapiens
ccctacaggaaactt

SEQ ID NO: 450603 - DNA, 15 bp, Homo sapiens
tccctacaggaaact

SEQ ID NO: 450604 - DNA, 15 bp, Homo sapiens
ttccctacaggaaac

SEQ ID NO: 450605 - DNA, 15 bp, Homo sapiens
tttccctacaggaaa

SEQ ID NO: 450606 - DNA, 15 bp, Homo sapiens
atttccctacaggaa

SEQ ID NO: 450607 - DNA, 15 bp, Homo sapiens
aatttccctacagga

SEQ ID NO: 450608 - DNA, 15 bp, Homo sapiens
caatttccctacagg

SEQ ID NO: 450609 - DNA, 15 bp, Homo sapiens
tcaatttccctacag

SEQ ID NO: 450610 - DNA, 15 bp, Homo sapiens
gtcaatttccctaca

SEQ ID NO: 450611 - DNA, 15 bp, Homo sapiens
tgtcaatttccctac

SEQ ID NO: 450612 - DNA, 15 bp, Homo sapiens
ctgtcaatttcccta

SEQ ID NO: 450613 - DNA, 15 bp, Homo sapiens
tctgtcaatttccct

SEQ ID NO: 450614 - DNA, 15 bp, Homo sapiens
gtctgtcaatttccc

SEQ ID NO: 450615 - DNA, 15 bp, Homo sapiens
ggtctgtcaatttcc

SEQ ID NO: 450616 - DNA, 15 bp, Homo sapiens
cggtctgtcaatttc

SEQ ID NO: 450617 - DNA, 15 bp, Homo sapiens
ccggtctgtcaattt

SEQ ID NO: 450618 - DNA, 15 bp, Homo sapiens
accggtctgtcaatt

SEQ ID NO: 450619 - DNA, 15 bp, Homo sapiens
taccggtctgtcaat

SEQ ID NO: 450620 - DNA, 15 bp, Homo sapiens
gtaccggtctgtcaa

SEQ ID NO: 450621 - DNA, 15 bp, Homo sapiens
agtaccggtctgtca

SEQ ID NO: 450622 - DNA, 15 bp, Homo sapiens
gagtaccggtctgtc

SEQ ID NO: 450623 - DNA, 15 bp, Homo sapiens
agagtaccggtctgt

SEQ ID NO: 450624 - DNA, 15 bp, Homo sapiens
aagagtaccggtctg

SEQ ID NO: 450625 - DNA, 15 bp, Homo sapiens
aaagagtaccggtct

SEQ ID NO: 450626 - DNA, 15 bp, Homo sapiens
gaaagagtaccggtc

SEQ ID NO: 450627 - DNA, 15 bp, Homo sapiens
agaaagagtaccggt

SEQ ID NO: 450628 - DNA, 15 bp, Homo sapiens
tagaaagagtaccgg

SEQ ID NO: 450629 - DNA, 15 bp, Homo sapiens
ttagaaagagtaccg

SEQ ID NO: 450630 - DNA, 15 bp, Homo sapiens
tttagaaagagtacc

SEQ ID NO: 450631 - DNA, 15 bp, Homo sapiens
atttagaaagagtac

SEQ ID NO: 450632 - DNA, 15 bp, Homo sapiens
aatttagaaagagta

SEQ ID NO: 450633 - DNA, 15 bp, Homo sapiens
gaatttagaaagagt

SEQ ID NO: 450634 - DNA, 15 bp, Homo sapiens
ggaatttagaaagag

SEQ ID NO: 450635 - DNA, 15 bp, Homo sapiens
gggaatttagaaaga

SEQ ID NO: 450636 - DNA, 15 bp, Homo sapiens
agggaatttagaaag

SEQ ID NO: 450637 - DNA, 15 bp, Homo sapiens
gagggaatttagaaa

SEQ ID NO: 450638 - DNA, 15 bp, Homo sapiens
cgagggaatttagaa

SEQ ID NO: 450639 - DNA, 15 bp, Homo sapiens
gcgagggaatttaga

SEQ ID NO: 450640 - DNA, 15 bp, Homo sapiens
tgcgagggaatttag

SEQ ID NO: 450641 - DNA, 15 bp, Homo sapiens
atgcgagggaattta

SEQ ID NO: 450642 - DNA, 15 bp, Homo sapiens
gatgcgagggaattt

SEQ ID NO: 450643 - DNA, 15 bp, Homo sapiens
agatgcgagggaatt

SEQ ID NO: 450644 - DNA, 15 bp, Homo sapiens
aagatgcgagggaat

SEQ ID NO: 450645 - DNA, 15 bp, Homo sapiens
aaagatgcgagggaa

SEQ ID NO: 450646 - DNA, 15 bp, Homo sapiens
aaaagatgcgaggga

SEQ ID NO: 450647 - DNA, 15 bp, Homo sapiens
aaaaagatgcgaggg

SEQ ID NO: 450648 - DNA, 15 bp, Homo sapiens
gaaaaagatgcgagg

SEQ ID NO: 450649 - DNA, 15 bp, Homo sapiens
agaaaaagatgcgag

SEQ ID NO: 450650 - DNA, 15 bp, Homo sapiens
tagaaaaagatgcga

SEQ ID NO: 450651 - DNA, 15 bp, Homo sapiens
ctagaaaaagatgcg

SEQ ID NO: 450652 - DNA, 15 bp, Homo sapiens
cctagaaaaagatgc

SEQ ID NO: 450653 - DNA, 15 bp, Homo sapiens
acctagaaaaagatg

SEQ ID NO: 450654 - DNA, 15 bp, Homo sapiens
aacctagaaaaagat

SEQ ID NO: 450655 - DNA, 15 bp, Homo sapiens
taacctagaaaaaga

SEQ ID NO: 450656 - DNA, 15 bp, Homo sapiens
ttaacctagaaaaag

SEQ ID NO: 450657 - DNA, 15 bp, Homo sapiens
tttaacctagaaaaa

SEQ ID NO: 450658 - DNA, 15 bp, Homo sapiens
atttaacctagaaaa

SEQ ID NO: 450659 - DNA, 15 bp, Homo sapiens
aatttaacctagaaa

SEQ ID NO: 450660 - DNA, 15 bp, Homo sapiens
taatttaacctagaa

SEQ ID NO: 450661 - DNA, 15 bp, Homo sapiens
ataatttaacctaga

SEQ ID NO: 450662 - DNA, 15 bp, Homo sapiens
cataatttaacctag

SEQ ID NO: 450663 - DNA, 15 bp, Homo sapiens
gcataatttaaccta

SEQ ID NO: 450664 - DNA, 15 bp, Homo sapiens
agcataatttaacct

SEQ ID NO: 450665 - DNA, 15 bp, Homo sapiens
gagcataatttaacc

SEQ ID NO: 450666 - DNA, 15 bp, Homo sapiens
ggagcataatttaac

SEQ ID NO: 450667 - DNA, 15 bp, Homo sapiens
gggagcataatttaa

SEQ ID NO: 450668 - DNA, 15 bp, Homo sapiens
ggggagcataattta

SEQ ID NO: 450669 - DNA, 15 bp, Homo sapiens
gggggagcataattt

SEQ ID NO: 450670 - DNA, 15 bp, Homo sapiens
ggggggagcataatt

SEQ ID NO: 450671 - DNA, 15 bp, Homo sapiens
tggggggagcataat

SEQ ID NO: 450672 - DNA, 15 bp, Homo sapiens
gtggggggagcataa

SEQ ID NO: 450673 - DNA, 15 bp, Homo sapiens
cgtggggggagcata

SEQ ID NO: 450674 - DNA, 15 bp, Homo sapiens
acgtggggggagcat

SEQ ID NO: 450675 - DNA, 15 bp, Homo sapiens
gacgtggggggagca

SEQ ID NO: 450676 - DNA, 15 bp, Homo sapiens
ggacgtggggggagc

SEQ ID NO: 450677 - DNA, 15 bp, Homo sapiens
gggacgtggggggag

SEQ ID NO: 450678 - DNA, 15 bp, Homo sapiens
ggggacgtgggggga

SEQ ID NO: 450679 - DNA, 15 bp, Homo sapiens
cggggacgtgggggg

SEQ ID NO: 450680 - DNA, 15 bp, Homo sapiens
gcggggacgtggggg

SEQ ID NO: 450681 - DNA, 15 bp, Homo sapiens
ggcggggacgtgggg

SEQ ID NO: 450682 - DNA, 15 bp, Homo sapiens
aggcggggacgtggg

SEQ ID NO: 450683 - DNA, 15 bp, Homo sapiens
aaggcggggacgtgg

SEQ ID NO: 450684 - DNA, 15 bp, Homo sapiens
caaggcggggacgtg

SEQ ID NO: 450685 - DNA, 15 bp, Homo sapiens
acaaggcggggacgt

SEQ ID NO: 450686 - DNA, 15 bp, Homo sapiens
tacaaggcggggacg

SEQ ID NO: 450687 - DNA, 15 bp, Homo sapiens
ttacaaggcggggac

SEQ ID NO: 450688 - DNA, 15 bp, Homo sapiens
tttacaaggcgggga

SEQ ID NO: 450689 - DNA, 15 bp, Homo sapiens
ttttacaaggcgggg

SEQ ID NO: 450690 - DNA, 15 bp, Homo sapiens
tttttacaaggcggg

SEQ ID NO: 450691 - DNA, 15 bp, Homo sapiens
ttttttacaaggcgg

SEQ ID NO: 450692 - DNA, 15 bp, Homo sapiens
cttttttacaaggcg

SEQ ID NO: 450693 - DNA, 15 bp, Homo sapiens
tcttttttacaaggc

SEQ ID NO: 450694 - DNA, 15 bp, Homo sapiens
ctcttttttacaagg

SEQ ID NO: 450695 - DNA, 15 bp, Homo sapiens
tctcttttttacaag

SEQ ID NO: 450696 - DNA, 15 bp, Homo sapiens
ttctcttttttacaa

SEQ ID NO: 450697 - DNA, 15 bp, Homo sapiens
tttctcttttttaca

SEQ ID NO: 450698 - DNA, 15 bp, Homo sapiens
ttttctcttttttac

SEQ ID NO: 450699 - DNA, 15 bp, Homo sapiens
tttttctctttttta

SEQ ID NO: 450700 - DNA, 15 bp, Homo sapiens
ttttttctctttttt

SEQ ID NO: 450701 - DNA, 15 bp, Homo sapiens
tttttttctcttttt

SEQ ID NO: 450702 - DNA, 15 bp, Homo sapiens
ctttttttctctttt

SEQ ID NO: 450703 - DNA, 15 bp, Homo sapiens
tctttttttctcttt

SEQ ID NO: 450704 - DNA, 15 bp, Homo sapiens
gtctttttttctctt

SEQ ID NO: 450705 - DNA, 15 bp, Homo sapiens
tgtctttttttctct

SEQ ID NO: 450706 - DNA, 15 bp, Homo sapiens
ttgtctttttttctc

SEQ ID NO: 450707 - DNA, 15 bp, Homo sapiens
tttgtctttttttct

SEQ ID NO: 450708 - DNA, 15 bp, Homo sapiens
ttttgtctttttttc

SEQ ID NO: 450709 - DNA, 15 bp, Homo sapiens
attttgtcttttttt

SEQ ID NO: 450710 - DNA, 15 bp, Homo sapiens
tattttgtctttttt

SEQ ID NO: 450711 - DNA, 15 bp, Homo sapiens
ttattttgtcttttt

SEQ ID NO: 450712 - DNA, 15 bp, Homo sapiens
tttattttgtctttt

SEQ ID NO: 450713 - DNA, 15 bp, Homo sapiens
ttttattttgtcttt

SEQ ID NO: 450714 - DNA, 15 bp, Homo sapiens
attttattttgtctt

SEQ ID NO: 450715 - DNA, 15 bp, Homo sapiens
gattttattttgtct

SEQ ID NO: 450716 - DNA, 15 bp, Homo sapiens
ggattttattttgtc

SEQ ID NO: 450717 - DNA, 15 bp, Homo sapiens
gggattttattttgt

SEQ ID NO: 450718 - DNA, 15 bp, Homo sapiens
ggggattttattttg

SEQ ID NO: 450719 - DNA, 15 bp, Homo sapiens
tggggattttatttt

SEQ ID NO: 450720 - DNA, 15 bp, Homo sapiens
atggggattttattt

SEQ ID NO: 450721 - DNA, 15 bp, Homo sapiens
gatggggattttatt

SEQ ID NO: 450722 - DNA, 15 bp, Homo sapiens
tgatggggattttat

SEQ ID NO: 450723 - DNA, 15 bp, Homo sapiens
ttgatggggatttta

SEQ ID NO: 450724 - DNA, 15 bp, Homo sapiens
gttgatggggatttt

SEQ ID NO: 450725 - DNA, 15 bp, Homo sapiens
ggttgatggggattt

SEQ ID NO: 450726 - DNA, 15 bp, Homo sapiens
gggttgatggggatt

SEQ ID NO: 450727 - DNA, 15 bp, Homo sapiens
cgggttgatggggat

SEQ ID NO: 450728 - DNA, 15 bp, Homo sapiens
acgggttgatgggga

SEQ ID NO: 450729 - DNA, 15 bp, Homo sapiens
gacgggttgatgggg

SEQ ID NO: 450730 - DNA, 15 bp, Homo sapiens
tgacgggttgatggg

SEQ ID NO: 450731 - DNA, 15 bp, Homo sapiens
ttgacgggttgatgg

SEQ ID NO: 450732 - DNA, 15 bp, Homo sapiens
cttgacgggttgatg

SEQ ID NO: 450733 - DNA, 15 bp, Homo sapiens
gcttgacgggttgat

SEQ ID NO: 450734 - DNA, 15 bp, Homo sapiens
ggcttgacgggttga

SEQ ID NO: 450735 - DNA, 15 bp, Homo sapiens
tggcttgacgggttg

SEQ ID NO: 450736 - DNA, 15 bp, Homo sapiens
ctggcttgacgggtt

SEQ ID NO: 450737 - DNA, 15 bp, Homo sapiens
gctggcttgacgggt

SEQ ID NO: 450738 - DNA, 15 bp, Homo sapiens
agctggcttgacggg

SEQ ID NO: 450739 - DNA, 15 bp, Homo sapiens
gagctggcttgacgg

SEQ ID NO: 450740 - DNA, 15 bp, Homo sapiens
agagctggcttgacg

SEQ ID NO: 450741 - DNA, 15 bp, Homo sapiens
tagagctggcttgac

SEQ ID NO: 450742 - DNA, 15 bp, Homo sapiens
ctagagctggcttga

SEQ ID NO: 450743 - DNA, 15 bp, Homo sapiens
tctagagctggcttg

SEQ ID NO: 450744 - DNA, 15 bp, Homo sapiens
ctctagagctggctt

SEQ ID NO: 450745 - DNA, 15 bp, Homo sapiens
tctctagagctggct

SEQ ID NO: 450746 - DNA, 15 bp, Homo sapiens
ctctctagagctggc

SEQ ID NO: 450747 - DNA, 15 bp, Homo sapiens
tctctctagagctgg

SEQ ID NO: 450748 - DNA, 15 bp, Homo sapiens
ctctctctagagctg

SEQ ID NO: 450749 - DNA, 15 bp, Homo sapiens
tctctctctagagct

SEQ ID NO: 450750 - DNA, 15 bp, Homo sapiens
ttctctctctagagc

SEQ ID NO: 450751 - DNA, 15 bp, Homo sapiens
tttctctctctagag

SEQ ID NO: 450752 - DNA, 15 bp, Homo sapiens
atttctctctctaga

SEQ ID NO: 450753 - DNA, 15 bp, Homo sapiens
tatttctctctctag

SEQ ID NO: 450754 - DNA, 15 bp, Homo sapiens
ttatttctctctcta

SEQ ID NO: 450755 - DNA, 15 bp, Homo sapiens
tttatttctctctct

SEQ ID NO: 450756 - DNA, 15 bp, Homo sapiens
gtttatttctctctc

SEQ ID NO: 450757 - DNA, 15 bp, Homo sapiens
ggtttatttctctct

SEQ ID NO: 450758 - DNA, 15 bp, Homo sapiens
aggtttatttctctc

SEQ ID NO: 450759 - DNA, 15 bp, Homo sapiens
gaggtttatttctct

SEQ ID NO: 450760 - DNA, 15 bp, Homo sapiens
agaggtttatttctc

SEQ ID NO: 450761 - DNA, 15 bp, Homo sapiens
aagaggtttatttct

SEQ ID NO: 450762 - DNA, 15 bp, Homo sapiens
caagaggtttatttc

SEQ ID NO: 450763 - DNA, 15 bp, Homo sapiens
tcaagaggtttattt

SEQ ID NO: 450764 - DNA, 15 bp, Homo sapiens
gtcaagaggtttatt

SEQ ID NO: 450765 - DNA, 15 bp, Homo sapiens
tgtcaagaggtttat

SEQ ID NO: 450766 - DNA, 15 bp, Homo sapiens
atgtcaagaggttta

SEQ ID NO: 450767 - DNA, 15 bp, Homo sapiens
aatgtcaagaggttt

SEQ ID NO: 450768 - DNA, 15 bp, Homo sapiens
caatgtcaagaggtt

SEQ ID NO: 450769 - DNA, 15 bp, Homo sapiens
acaatgtcaagaggt

SEQ ID NO: 450770 - DNA, 15 bp, Homo sapiens
gacaatgtcaagagg

SEQ ID NO: 450771 - DNA, 15 bp, Homo sapiens
ggacaatgtcaagag

SEQ ID NO: 450772 - DNA, 15 bp, Homo sapiens
aggacaatgtcaaga

SEQ ID NO: 450773 - DNA, 15 bp, Homo sapiens
aaggacaatgtcaag

SEQ ID NO: 450774 - DNA, 15 bp, Homo sapiens
aaaggacaatgtcaa

SEQ ID NO: 450775 - DNA, 15 bp, Homo sapiens
aaaaggacaatgtca

SEQ ID NO: 450776 - DNA, 15 bp, Homo sapiens
gaaaaggacaatgtc

SEQ ID NO: 450777 - DNA, 15 bp, Homo sapiens
ggaaaaggacaatgt

SEQ ID NO: 450778 - DNA, 15 bp, Homo sapiens
tggaaaaggacaatg

SEQ ID NO: 450779 - DNA, 15 bp, Homo sapiens
ttggaaaaggacaat

SEQ ID NO: 450780 - DNA, 15 bp, Homo sapiens
tttggaaaaggacaa

SEQ ID NO: 450781 - DNA, 15 bp, Homo sapiens
atttggaaaaggaca

SEQ ID NO: 450782 - DNA, 15 bp, Homo sapiens
tatttggaaaaggac

SEQ ID NO: 450783 - DNA, 15 bp, Homo sapiens
gtatttggaaaagga

SEQ ID NO: 450784 - DNA, 15 bp, Homo sapiens
ggtatttggaaaagg

SEQ ID NO: 450785 - DNA, 15 bp, Homo sapiens
aggtatttggaaaag

SEQ ID NO: 450786 - DNA, 15 bp, Homo sapiens
caggtatttggaaaa

SEQ ID NO: 450787 - DNA, 15 bp, Homo sapiens
ccaggtatttggaaa

SEQ ID NO: 450788 - DNA, 15 bp, Homo sapiens
accaggtatttggaa

SEQ ID NO: 450789 - DNA, 15 bp, Homo sapiens
taccaggtatttgga

SEQ ID NO: 450790 - DNA, 15 bp, Homo sapiens
ttaccaggtatttgg

SEQ ID NO: 450791 - DNA, 15 bp, Homo sapiens
tttaccaggtatttg

SEQ ID NO: 450792 - DNA, 15 bp, Homo sapiens
ctttaccaggtattt

SEQ ID NO: 450793 - DNA, 15 bp, Homo sapiens
actttaccaggtatt

SEQ ID NO: 450794 - DNA, 15 bp, Homo sapiens
gactttaccaggtat

SEQ ID NO: 450795 - DNA, 15 bp, Homo sapiens
cgactttaccaggta

SEQ ID NO: 450796 - DNA, 15 bp, Homo sapiens
ccgactttaccaggt

SEQ ID NO: 450797 - DNA, 15 bp, Homo sapiens
gccgactttaccagg

SEQ ID NO: 450798 - DNA, 15 bp, Homo sapiens
ggccgactttaccag

SEQ ID NO: 450799 - DNA, 15 bp, Homo sapiens
tggccgactttacca

SEQ ID NO: 450800 - DNA, 15 bp, Homo sapiens
ctggccgactttacc

SEQ ID NO: 450801 - DNA, 15 bp, Homo sapiens
tctggccgactttac

SEQ ID NO: 450802 - DNA, 15 bp, Homo sapiens
ttctggccgacttta

SEQ ID NO: 450803 - DNA, 15 bp, Homo sapiens
cttctggccgacttt

SEQ ID NO: 450804 - DNA, 15 bp, Homo sapiens
tcttctggccgactt

SEQ ID NO: 450805 - DNA, 15 bp, Homo sapiens
atcttctggccgact

SEQ ID NO: 450806 - DNA, 15 bp, Homo sapiens
tatcttctggccgac

SEQ ID NO: 450807 - DNA, 15 bp, Homo sapiens
ttatcttctggccga

SEQ ID NO: 450808 - DNA, 15 bp, Homo sapiens
tttatcttctggccg

SEQ ID NO: 450809 - DNA, 15 bp, Homo sapiens
atttatcttctggcc

SEQ ID NO: 450810 - DNA, 15 bp, Homo sapiens
tatttatcttctggc

SEQ ID NO: 450811 - DNA, 15 bp, Homo sapiens
ttatttatcttctgg

SEQ ID NO: 450812 - DNA, 15 bp, Homo sapiens
attatttatcttctg

SEQ ID NO: 450813 - DNA, 15 bp, Homo sapiens
aattatttatcttct

SEQ ID NO: 450814 - DNA, 15 bp, Homo sapiens
caattatttatcttc

SEQ ID NO: 450815 - DNA, 15 bp, Homo sapiens
tcaattatttatctt

SEQ ID NO: 450816 - DNA, 15 bp, Homo sapiens
ctcaattatttatct

SEQ ID NO: 450817 - DNA, 15 bp, Homo sapiens
gctcaattatttatc

SEQ ID NO: 450818 - DNA, 15 bp, Homo sapiens
ggctcaattatttat

SEQ ID NO: 450819 - DNA, 15 bp, Homo sapiens
tggctcaattattta

SEQ ID NO: 450820 - DNA, 15 bp, Homo sapiens
atggctcaattattt

SEQ ID NO: 450821 - DNA, 15 bp, Homo sapiens
aatggctcaattatt

SEQ ID NO: 450822 - DNA, 15 bp, Homo sapiens
caatggctcaattat

SEQ ID NO: 450823 - DNA, 15 bp, Homo sapiens
gcaatggctcaatta

SEQ ID NO: 450824 - DNA, 15 bp, Homo sapiens
tgcaatggctcaatt

SEQ ID NO: 450825 - DNA, 15 bp, Homo sapiens
atgcaatggctcaat

SEQ ID NO: 450826 - DNA, 15 bp, Homo sapiens
aatgcaatggctcaa

SEQ ID NO: 450827 - DNA, 15 bp, Homo sapiens
aaatgcaatggctca

SEQ ID NO: 450828 - DNA, 15 bp, Homo sapiens
taaatgcaatggctc

SEQ ID NO: 450829 - DNA, 15 bp, Homo sapiens
gtaaatgcaatggct

SEQ ID NO: 450830 - DNA, 15 bp, Homo sapiens
agtaaatgcaatggc

SEQ ID NO: 450831 - DNA, 15 bp, Homo sapiens
cagtaaatgcaatgg

SEQ ID NO: 450832 - DNA, 15 bp, Homo sapiens
ccagtaaatgcaatg

SEQ ID NO: 450833 - DNA, 15 bp, Homo sapiens
tccagtaaatgcaat

SEQ ID NO: 450834 - DNA, 15 bp, Homo sapiens
atccagtaaatgcaa

SEQ ID NO: 450835 - DNA, 15 bp, Homo sapiens
aatccagtaaatgca

SEQ ID NO: 450836 - DNA, 15 bp, Homo sapiens
caatccagtaaatgc

SEQ ID NO: 450837 - DNA, 15 bp, Homo sapiens
acaatccagtaaatg

SEQ ID NO: 450838 - DNA, 15 bp, Homo sapiens
cacaatccagtaaat

SEQ ID NO: 450839 - DNA, 15 bp, Homo sapiens
ccacaatccagtaaa

SEQ ID NO: 450840 - DNA, 15 bp, Homo sapiens
accacaatccagtaa

SEQ ID NO: 450841 - DNA, 15 bp, Homo sapiens
caccacaatccagta

SEQ ID NO: 450842 - DNA, 15 bp, Homo sapiens
acaccacaatccagt

SEQ ID NO: 450843 - DNA, 15 bp, Homo sapiens
aacaccacaatccag

SEQ ID NO: 450844 - DNA, 15 bp, Homo sapiens
caacaccacaatcca

SEQ ID NO: 450845 - DNA, 15 bp, Homo sapiens
gcaacaccacaatcc

SEQ ID NO: 450846 - DNA, 15 bp, Homo sapiens
agcaacaccacaatc

SEQ ID NO: 450847 - DNA, 15 bp, Homo sapiens
aagcaacaccacaat

SEQ ID NO: 450848 - DNA, 15 bp, Homo sapiens
taagcaacaccacaa

SEQ ID NO: 450849 - DNA, 15 bp, Homo sapiens
ttaagcaacaccaca

SEQ ID NO: 450850 - DNA, 15 bp, Homo sapiens
attaagcaacaccac

SEQ ID NO: 450851 - DNA, 15 bp, Homo sapiens
aattaagcaacacca

SEQ ID NO: 450852 - DNA, 15 bp, Homo sapiens
caattaagcaacacc

SEQ ID NO: 450853 - DNA, 15 bp, Homo sapiens
gcaattaagcaacac

SEQ ID NO: 450854 - DNA, 15 bp, Homo sapiens
tgcaattaagcaaca

SEQ ID NO: 450855 - DNA, 15 bp, Homo sapiens
atgcaattaagcaac

SEQ ID NO: 450856 - DNA, 15 bp, Homo sapiens
tatgcaattaagcaa

SEQ ID NO: 450857 - DNA, 15 bp, Homo sapiens
ctatgcaattaagca

SEQ ID NO: 450858 - DNA, 15 bp, Homo sapiens
cctatgcaattaagc

SEQ ID NO: 450859 - DNA, 15 bp, Homo sapiens
tcctatgcaattaag

SEQ ID NO: 450860 - DNA, 15 bp, Homo sapiens
gtcctatgcaattaa

SEQ ID NO: 450861 - DNA, 15 bp, Homo sapiens
cgtcctatgcaatta

SEQ ID NO: 450862 - DNA, 15 bp, Homo sapiens
ccgtcctatgcaatt

SEQ ID NO: 450863 - DNA, 15 bp, Homo sapiens
tccgtcctatgcaat

SEQ ID NO: 450864 - DNA, 15 bp, Homo sapiens
ttccgtcctatgcaa

SEQ ID NO: 450865 - DNA, 15 bp, Homo sapiens
attccgtcctatgca

SEQ ID NO: 450866 - DNA, 15 bp, Homo sapiens
cattccgtcctatgc

SEQ ID NO: 450867 - DNA, 15 bp, Homo sapiens
tcattccgtcctatg

SEQ ID NO: 450868 - DNA, 15 bp, Homo sapiens
ttcattccgtcctat

SEQ ID NO: 450869 - DNA, 15 bp, Homo sapiens
gttcattccgtccta

SEQ ID NO: 450870 - DNA, 15 bp, Homo sapiens
ggttcattccgtcct

SEQ ID NO: 450871 - DNA, 15 bp, Homo sapiens
tggttcattccgtcc

SEQ ID NO: 450872 - DNA, 15 bp, Homo sapiens
ttggttcattccgtc

SEQ ID NO: 450873 - DNA, 15 bp, Homo sapiens
attggttcattccgt

SEQ ID NO: 450874 - DNA, 15 bp, Homo sapiens
aattggttcattccg

SEQ ID NO: 450875 - DNA, 15 bp, Homo sapiens
caattggttcattcc

SEQ ID NO: 450876 - DNA, 15 bp, Homo sapiens
tcaattggttcattc

SEQ ID NO: 450877 - DNA, 15 bp, Homo sapiens
ctcaattggttcatt

SEQ ID NO: 450878 - DNA, 15 bp, Homo sapiens
tctcaattggttcat

SEQ ID NO: 450879 - DNA, 15 bp, Homo sapiens
ctctcaattggttca

SEQ ID NO: 450880 - DNA, 15 bp, Homo sapiens
actctcaattggttc

SEQ ID NO: 450881 - DNA, 15 bp, Homo sapiens
cactctcaattggtt

SEQ ID NO: 450882 - DNA, 15 bp, Homo sapiens
ccactctcaattggt

SEQ ID NO: 450883 - DNA, 15 bp, Homo sapiens
cccactctcaattgg

SEQ ID NO: 450884 - DNA, 15 bp, Homo sapiens
tcccactctcaattg

SEQ ID NO: 450885 - DNA, 15 bp, Homo sapiens
ctcccactctcaatt

SEQ ID NO: 450886 - DNA, 15 bp, Homo sapiens
actcccactctcaat

SEQ ID NO: 450887 - DNA, 15 bp, Homo sapiens
aactcccactctcaa

SEQ ID NO: 450888 - DNA, 15 bp, Homo sapiens
aaactcccactctca

SEQ ID NO: 450889 - DNA, 15 bp, Homo sapiens
aaaactcccactctc

SEQ ID NO: 450890 - DNA, 15 bp, Homo sapiens
gaaaactcccactct

SEQ ID NO: 450891 - DNA, 15 bp, Homo sapiens
agaaaactcccactc

SEQ ID NO: 450892 - DNA, 15 bp, Homo sapiens
cagaaaactcccact

SEQ ID NO: 450893 - DNA, 15 bp, Homo sapiens
acagaaaactcccac

SEQ ID NO: 450894 - DNA, 15 bp, Homo sapiens
gacagaaaactccca

SEQ ID NO: 450895 - DNA, 15 bp, Homo sapiens
agacagaaaactccc

SEQ ID NO: 450896 - DNA, 15 bp, Homo sapiens
gagacagaaaactcc

SEQ ID NO: 450897 - DNA, 15 bp, Homo sapiens
tgagacagaaaactc

SEQ ID NO: 450898 - DNA, 15 bp, Homo sapiens
ctgagacagaaaact

SEQ ID NO: 450899 - DNA, 15 bp, Homo sapiens
tctgagacagaaaac

SEQ ID NO: 450900 - DNA, 15 bp, Homo sapiens
ctctgagacagaaaa

SEQ ID NO: 450901 - DNA, 15 bp, Homo sapiens
gctctgagacagaaa

SEQ ID NO: 450902 - DNA, 15 bp, Homo sapiens
ggctctgagacagaa

SEQ ID NO: 450903 - DNA, 15 bp, Homo sapiens
tggctctgagacaga

SEQ ID NO: 450904 - DNA, 15 bp, Homo sapiens
ttggctctgagacag

SEQ ID NO: 450905 - DNA, 15 bp, Homo sapiens
cttggctctgagaca

SEQ ID NO: 450906 - DNA, 15 bp, Homo sapiens
tcttggctctgagac

SEQ ID NO: 450907 - DNA, 15 bp, Homo sapiens
atcttggctctgaga

SEQ ID NO: 450908 - DNA, 15 bp, Homo sapiens
gatcttggctctgag

SEQ ID NO: 450909 - DNA, 15 bp, Homo sapiens
agatcttggctctga

SEQ ID NO: 450910 - DNA, 15 bp, Homo sapiens
aagatcttggctctg

SEQ ID NO: 450911 - DNA, 15 bp, Homo sapiens
caagatcttggctct

SEQ ID NO: 450912 - DNA, 15 bp, Homo sapiens
ccaagatcttggctc

SEQ ID NO: 450913 - DNA, 15 bp, Homo sapiens
cccaagatcttggct

SEQ ID NO: 450914 - DNA, 15 bp, Homo sapiens
acccaagatcttggc

SEQ ID NO: 450915 - DNA, 15 bp, Homo sapiens
tacccaagatcttgg

SEQ ID NO: 450916 - DNA, 15 bp, Homo sapiens
ttacccaagatcttg

SEQ ID NO: 450917 - DNA, 15 bp, Homo sapiens
tttacccaagatctt

SEQ ID NO: 450918 - DNA, 15 bp, Homo sapiens
atttacccaagatct

SEQ ID NO: 450919 - DNA, 15 bp, Homo sapiens
catttacccaagatc

SEQ ID NO: 450920 - DNA, 15 bp, Homo sapiens
gcatttacccaagat

SEQ ID NO: 450921 - DNA, 15 bp, Homo sapiens
tgcatttacccaaga

SEQ ID NO: 450922 - DNA, 15 bp, Homo sapiens
ctgcatttacccaag

SEQ ID NO: 450923 - DNA, 15 bp, Homo sapiens
tctgcatttacccaa

SEQ ID NO: 450924 - DNA, 15 bp, Homo sapiens
ctctgcatttaccca

SEQ ID NO: 450925 - DNA, 15 bp, Homo sapiens
cctctgcatttaccc

SEQ ID NO: 450926 - DNA, 15 bp, Homo sapiens
tcctctgcatttacc

SEQ ID NO: 450927 - DNA, 15 bp, Homo sapiens
ctcctctgcatttac

SEQ ID NO: 450928 - DNA, 15 bp, Homo sapiens
tctcctctgcattta

SEQ ID NO: 450929 - DNA, 15 bp, Homo sapiens
ctctcctctgcattt

SEQ ID NO: 450930 - DNA, 15 bp, Homo sapiens
cctctcctctgcatt

SEQ ID NO: 450931 - DNA, 15 bp, Homo sapiens
ccctctcctctgcat

SEQ ID NO: 450932 - DNA, 15 bp, Homo sapiens
tccctctcctctgca

SEQ ID NO: 450933 - DNA, 15 bp, Homo sapiens
ttccctctcctctgc

SEQ ID NO: 450934 - DNA, 15 bp, Homo sapiens
tttccctctcctctg

SEQ ID NO: 450935 - DNA, 15 bp, Homo sapiens
gtttccctctcctct

SEQ ID NO: 450936 - DNA, 15 bp, Homo sapiens
tgtttccctctcctc

SEQ ID NO: 450937 - DNA, 15 bp, Homo sapiens
ttgtttccctctcct

SEQ ID NO: 450938 - DNA, 15 bp, Homo sapiens
tttgtttccctctcc

SEQ ID NO: 450939 - DNA, 15 bp, Homo sapiens
ctttgtttccctctc

SEQ ID NO: 450940 - DNA, 15 bp, Homo sapiens
tctttgtttccctct

SEQ ID NO: 450941 - DNA, 15 bp, Homo sapiens
gtctttgtttccctc

SEQ ID NO: 450942 - DNA, 15 bp, Homo sapiens
tgtctttgtttccct

SEQ ID NO: 450943 - DNA, 15 bp, Homo sapiens
ctgtctttgtttccc

SEQ ID NO: 450944 - DNA, 15 bp, Homo sapiens
cctgtctttgtttcc

SEQ ID NO: 450945 - DNA, 15 bp, Homo sapiens
gcctgtctttgtttc

SEQ ID NO: 450946 - DNA, 15 bp, Homo sapiens
agcctgtctttgttt

SEQ ID NO: 450947 - DNA, 15 bp, Homo sapiens
cagcctgtctttgtt

SEQ ID NO: 450948 - DNA, 15 bp, Homo sapiens
ccagcctgtctttgt

SEQ ID NO: 450949 - DNA, 15 bp, Homo sapiens
gccagcctgtctttg

SEQ ID NO: 450950 - DNA, 15 bp, Homo sapiens
ggccagcctgtcttt

SEQ ID NO: 450951 - DNA, 15 bp, Homo sapiens
aggccagcctgtctt

SEQ ID NO: 450952 - DNA, 15 bp, Homo sapiens
aaggccagcctgtct

SEQ ID NO: 450953 - DNA, 15 bp, Homo sapiens
caaggccagcctgtc

SEQ ID NO: 450954 - DNA, 15 bp, Homo sapiens
tcaaggccagcctgt

SEQ ID NO: 450955 - DNA, 15 bp, Homo sapiens
ttcaaggccagcctg

SEQ ID NO: 450956 - DNA, 15 bp, Homo sapiens
tttcaaggccagcct

SEQ ID NO: 450957 - DNA, 15 bp, Homo sapiens
ttttcaaggccagcc

SEQ ID NO: 450958 - DNA, 15 bp, Homo sapiens
tttttcaaggccagc

SEQ ID NO: 450959 - DNA, 15 bp, Homo sapiens
ttttttcaaggccag

SEQ ID NO: 450960 - DNA, 15 bp, Homo sapiens
gttttttcaaggcca

SEQ ID NO: 450961 - DNA, 15 bp, Homo sapiens
ggttttttcaaggcc

SEQ ID NO: 450962 - DNA, 15 bp, Homo sapiens
tggttttttcaaggc

SEQ ID NO: 450963 - DNA, 15 bp, Homo sapiens
atggttttttcaagg

SEQ ID NO: 450964 - DNA, 15 bp, Homo sapiens
catggttttttcaag

SEQ ID NO: 450965 - DNA, 15 bp, Homo sapiens
acatggttttttcaa

SEQ ID NO: 450966 - DNA, 15 bp, Homo sapiens
cacatggttttttca

SEQ ID NO: 450967 - DNA, 15 bp, Homo sapiens
acacatggttttttc

SEQ ID NO: 450968 - DNA, 15 bp, Homo sapiens
cacacatggtttttt

SEQ ID NO: 450969 - DNA, 15 bp, Homo sapiens
gcacacatggttttt

SEQ ID NO: 450970 - DNA, 15 bp, Homo sapiens
tgcacacatggtttt

SEQ ID NO: 450971 - DNA, 15 bp, Homo sapiens
ttgcacacatggttt

SEQ ID NO: 450972 - DNA, 15 bp, Homo sapiens
tttgcacacatggtt

SEQ ID NO: 450973 - DNA, 15 bp, Homo sapiens
gtttgcacacatggt

SEQ ID NO: 450974 - DNA, 15 bp, Homo sapiens
agtttgcacacatgg

SEQ ID NO: 450975 - DNA, 15 bp, Homo sapiens
aagtttgcacacatg

SEQ ID NO: 450976 - DNA, 15 bp, Homo sapiens
aaagtttgcacacat

SEQ ID NO: 450977 - DNA, 15 bp, Homo sapiens
taaagtttgcacaca

SEQ ID NO: 450978 - DNA, 15 bp, Homo sapiens
gtaaagtttgcacac

SEQ ID NO: 450979 - DNA, 15 bp, Homo sapiens
tgtaaagtttgcaca

SEQ ID NO: 450980 - DNA, 15 bp, Homo sapiens
atgtaaagtttgcac

SEQ ID NO: 450981 - DNA, 15 bp, Homo sapiens
catgtaaagtttgca

SEQ ID NO: 450982 - DNA, 15 bp, Homo sapiens
gcatgtaaagtttgc

SEQ ID NO: 450983 - DNA, 15 bp, Homo sapiens
tgcatgtaaagtttg

SEQ ID NO: 450984 - DNA, 15 bp, Homo sapiens
atgcatgtaaagttt

SEQ ID NO: 450985 - DNA, 15 bp, Homo sapiens
aatgcatgtaaagtt

SEQ ID NO: 450986 - DNA, 15 bp, Homo sapiens
aaatgcatgtaaagt

SEQ ID NO: 450987 - DNA, 15 bp, Homo sapiens
caaatgcatgtaaag

SEQ ID NO: 450988 - DNA, 15 bp, Homo sapiens
ccaaatgcatgtaaa

SEQ ID NO: 450989 - DNA, 15 bp, Homo sapiens
cccaaatgcatgtaa

SEQ ID NO: 450990 - DNA, 15 bp, Homo sapiens
ccccaaatgcatgta

SEQ ID NO: 450991 - DNA, 15 bp, Homo sapiens
cccccaaatgcatgt

SEQ ID NO: 450992 - DNA, 15 bp, Homo sapiens
ccccccaaatgcatg

SEQ ID NO: 450993 - DNA, 15 bp, Homo sapiens
accccccaaatgcat

SEQ ID NO: 450994 - DNA, 15 bp, Homo sapiens
caccccccaaatgca

SEQ ID NO: 450995 - DNA, 15 bp, Homo sapiens
acaccccccaaatgc

SEQ ID NO: 450996 - DNA, 15 bp, Homo sapiens
cacaccccccaaatg

SEQ ID NO: 450997 - DNA, 15 bp, Homo sapiens
ccacaccccccaaat

SEQ ID NO: 450998 - DNA, 15 bp, Homo sapiens
accacaccccccaaa

SEQ ID NO: 450999 - DNA, 15 bp, Homo sapiens
aaccacaccccccaa

SEQ ID NO: 451000 - DNA, 15 bp, Homo sapiens
caaccacacccccca

SEQ ID NO: 451001 - DNA, 15 bp, Homo sapiens
gcaaccacacccccc

SEQ ID NO: 451002 - DNA, 15 bp, Homo sapiens
tgcaaccacaccccc

SEQ ID NO: 451003 - DNA, 15 bp, Homo sapiens
gtgcaaccacacccc

SEQ ID NO: 451004 - DNA, 15 bp, Homo sapiens
agtgcaaccacaccc

SEQ ID NO: 451005 - DNA, 15 bp, Homo sapiens
cagtgcaaccacacc

SEQ ID NO: 451006 - DNA, 15 bp, Homo sapiens
tcagtgcaaccacac

SEQ ID NO: 451007 - DNA, 15 bp, Homo sapiens
ttcagtgcaaccaca

SEQ ID NO: 451008 - DNA, 15 bp, Homo sapiens
cttcagtgcaaccac

SEQ ID NO: 451009 - DNA, 15 bp, Homo sapiens
acttcagtgcaacca

SEQ ID NO: 451010 - DNA, 15 bp, Homo sapiens
aacttcagtgcaacc

SEQ ID NO: 451011 - DNA, 15 bp, Homo sapiens
taacttcagtgcaac

SEQ ID NO: 451012 - DNA, 15 bp, Homo sapiens
ttaacttcagtgcaa

SEQ ID NO: 451013 - DNA, 15 bp, Homo sapiens
gttaacttcagtgca

SEQ ID NO: 451014 - DNA, 15 bp, Homo sapiens
tgttaacttcagtgc

SEQ ID NO: 451015 - DNA, 15 bp, Homo sapiens
ttgttaacttcagtg

SEQ ID NO: 451016 - DNA, 15 bp, Homo sapiens
cttgttaacttcagt

SEQ ID NO: 451017 - DNA, 15 bp, Homo sapiens
tcttgttaacttcag

SEQ ID NO: 451018 - DNA, 15 bp, Homo sapiens
atcttgttaacttca

SEQ ID NO: 451019 - DNA, 15 bp, Homo sapiens
aatcttgttaacttc

SEQ ID NO: 451020 - DNA, 15 bp, Homo sapiens
gaatcttgttaactt

SEQ ID NO: 451021 - DNA, 15 bp, Homo sapiens
tgaatcttgttaact

SEQ ID NO: 451022 - DNA, 15 bp, Homo sapiens
ttgaatcttgttaac

SEQ ID NO: 451023 - DNA, 15 bp, Homo sapiens
tttgaatcttgttaa

SEQ ID NO: 451024 - DNA, 15 bp, Homo sapiens
gtttgaatcttgtta

SEQ ID NO: 451025 - DNA, 15 bp, Homo sapiens
ggtttgaatcttgtt

SEQ ID NO: 451026 - DNA, 15 bp, Homo sapiens
cggtttgaatcttgt

SEQ ID NO: 451027 - DNA, 15 bp, Homo sapiens
acggtttgaatcttg

SEQ ID NO: 451028 - DNA, 15 bp, Homo sapiens
gacggtttgaatctt

SEQ ID NO: 451029 - DNA, 15 bp, Homo sapiens
cgacggtttgaatct

SEQ ID NO: 451030 - DNA, 15 bp, Homo sapiens
gcgacggtttgaatc

SEQ ID NO: 451031 - DNA, 15 bp, Homo sapiens
ggcgacggtttgaat

SEQ ID NO: 451032 - DNA, 15 bp, Homo sapiens
gggcgacggtttgaa

SEQ ID NO: 451033 - DNA, 15 bp, Homo sapiens
tgggcgacggtttga

SEQ ID NO: 451034 - DNA, 15 bp, Homo sapiens
ttgggcgacggtttg

SEQ ID NO: 451035 - DNA, 15 bp, Homo sapiens
cttgggcgacggttt

SEQ ID NO: 451036 - DNA, 15 bp, Homo sapiens
acttgggcgacggtt

SEQ ID NO: 451037 - DNA, 15 bp, Homo sapiens
aacttgggcgacggt

SEQ ID NO: 451038 - DNA, 15 bp, Homo sapiens
caacttgggcgacgg

SEQ ID NO: 451039 - DNA, 15 bp, Homo sapiens
ccaacttgggcgacg

SEQ ID NO: 451040 - DNA, 15 bp, Homo sapiens
accaacttgggcgac

SEQ ID NO: 451041 - DNA, 15 bp, Homo sapiens
taccaacttgggcga

SEQ ID NO: 451042 - DNA, 15 bp, Homo sapiens
ataccaacttgggcg

SEQ ID NO: 451043 - DNA, 15 bp, Homo sapiens
aataccaacttgggc

SEQ ID NO: 451044 - DNA, 15 bp, Homo sapiens
aaataccaacttggg

SEQ ID NO: 451045 - DNA, 15 bp, Homo sapiens
gaaataccaacttgg

SEQ ID NO: 451046 - DNA, 15 bp, Homo sapiens
ggaaataccaacttg

SEQ ID NO: 451047 - DNA, 15 bp, Homo sapiens
tggaaataccaactt

SEQ ID NO: 451048 - DNA, 15 bp, Homo sapiens
atggaaataccaact

SEQ ID NO: 451049 - DNA, 15 bp, Homo sapiens
catggaaataccaac

SEQ ID NO: 451050 - DNA, 15 bp, Homo sapiens
acatggaaataccaa

SEQ ID NO: 451051 - DNA, 15 bp, Homo sapiens
aacatggaaatacca

SEQ ID NO: 451052 - DNA, 15 bp, Homo sapiens
aaacatggaaatacc

SEQ ID NO: 451053 - DNA, 15 bp, Homo sapiens
caaacatggaaatac

SEQ ID NO: 451054 - DNA, 15 bp, Homo sapiens
ccaaacatggaaata

SEQ ID NO: 451055 - DNA, 15 bp, Homo sapiens
accaaacatggaaat

SEQ ID NO: 451056 - DNA, 15 bp, Homo sapiens
taccaaacatggaaa

SEQ ID NO: 451057 - DNA, 15 bp, Homo sapiens
gtaccaaacatggaa

SEQ ID NO: 451058 - DNA, 15 bp, Homo sapiens
tgtaccaaacatgga

SEQ ID NO: 451059 - DNA, 15 bp, Homo sapiens
gtgtaccaaacatgg

SEQ ID NO: 451060 - DNA, 15 bp, Homo sapiens
tgtgtaccaaacatg

SEQ ID NO: 451061 - DNA, 15 bp, Homo sapiens
atgtgtaccaaacat

SEQ ID NO: 451062 - DNA, 15 bp, Homo sapiens
gatgtgtaccaaaca

SEQ ID NO: 451063 - DNA, 15 bp, Homo sapiens
tgatgtgtaccaaac

SEQ ID NO: 451064 - DNA, 15 bp, Homo sapiens
gtgatgtgtaccaaa

SEQ ID NO: 451065 - DNA, 15 bp, Homo sapiens
agtgatgtgtaccaa

SEQ ID NO: 451066 - DNA, 15 bp, Homo sapiens
gagtgatgtgtacca

SEQ ID NO: 451067 - DNA, 15 bp, Homo sapiens
agagtgatgtgtacc

SEQ ID NO: 451068 - DNA, 15 bp, Homo sapiens
cagagtgatgtgtac

SEQ ID NO: 451069 - DNA, 15 bp, Homo sapiens
acagagtgatgtgta

SEQ ID NO: 451070 - DNA, 15 bp, Homo sapiens
cacagagtgatgtgt

SEQ ID NO: 451071 - DNA, 15 bp, Homo sapiens
gcacagagtgatgtg

SEQ ID NO: 451072 - DNA, 15 bp, Homo sapiens
ggcacagagtgatgt

SEQ ID NO: 451073 - DNA, 15 bp, Homo sapiens
tggcacagagtgatg

SEQ ID NO: 451074 - DNA, 15 bp, Homo sapiens
atggcacagagtgat

SEQ ID NO: 451075 - DNA, 15 bp, Homo sapiens
tatggcacagagtga

SEQ ID NO: 451076 - DNA, 15 bp, Homo sapiens
atatggcacagagtg

SEQ ID NO: 451077 - DNA, 15 bp, Homo sapiens
gatatggcacagagt

SEQ ID NO: 451078 - DNA, 15 bp, Homo sapiens
tgatatggcacagag

SEQ ID NO: 451079 - DNA, 15 bp, Homo sapiens
ctgatatggcacaga

SEQ ID NO: 451080 - DNA, 15 bp, Homo sapiens
cctgatatggcacag

SEQ ID NO: 451081 - DNA, 15 bp, Homo sapiens
acctgatatggcaca

SEQ ID NO: 451082 - DNA, 15 bp, Homo sapiens
gacctgatatggcac

SEQ ID NO: 451083 - DNA, 15 bp, Homo sapiens
cgacctgatatggca

SEQ ID NO: 451084 - DNA, 15 bp, Homo sapiens
acgacctgatatggc

SEQ ID NO: 451085 - DNA, 15 bp, Homo sapiens
aacgacctgatatgg

SEQ ID NO: 451086 - DNA, 15 bp, Homo sapiens
caacgacctgatatg

SEQ ID NO: 451087 - DNA, 15 bp, Homo sapiens
acaacgacctgatat

SEQ ID NO: 451088 - DNA, 15 bp, Homo sapiens
aacaacgacctgata

SEQ ID NO: 451089 - DNA, 15 bp, Homo sapiens
taacaacgacctgat

SEQ ID NO: 451090 - DNA, 15 bp, Homo sapiens
ttaacaacgacctga

SEQ ID NO: 451091 - DNA, 15 bp, Homo sapiens
cttaacaacgacctg

SEQ ID NO: 451092 - DNA, 15 bp, Homo sapiens
acttaacaacgacct

SEQ ID NO: 451093 - DNA, 15 bp, Homo sapiens
cacttaacaacgacc

SEQ ID NO: 451094 - DNA, 15 bp, Homo sapiens
acacttaacaacgac

SEQ ID NO: 451095 - DNA, 15 bp, Homo sapiens
cacacttaacaacga

SEQ ID NO: 451096 - DNA, 15 bp, Homo sapiens
ccacacttaacaacg

SEQ ID NO: 451097 - DNA, 15 bp, Homo sapiens
accacacttaacaac

SEQ ID NO: 451098 - DNA, 15 bp, Homo sapiens
caccacacttaacaa

SEQ ID NO: 451099 - DNA, 15 bp, Homo sapiens
tcaccacacttaaca

SEQ ID NO: 451100 - DNA, 15 bp, Homo sapiens
gtcaccacacttaac

SEQ ID NO: 451101 - DNA, 15 bp, Homo sapiens
tgtcaccacacttaa

SEQ ID NO: 451102 - DNA, 15 bp, Homo sapiens
ttgtcaccacactta

SEQ ID NO: 451103 - DNA, 15 bp, Homo sapiens
tttgtcaccacactt

SEQ ID NO: 451104 - DNA, 15 bp, Homo sapiens
ttttgtcaccacact

SEQ ID NO: 451105 - DNA, 15 bp, Homo sapiens
attttgtcaccacac

SEQ ID NO: 451106 - DNA, 15 bp, Homo sapiens
gattttgtcaccaca

SEQ ID NO: 451107 - DNA, 15 bp, Homo sapiens
tgattttgtcaccac

SEQ ID NO: 451108 - DNA, 15 bp, Homo sapiens
ctgattttgtcacca

SEQ ID NO: 451109 - DNA, 15 bp, Homo sapiens
actgattttgtcacc

SEQ ID NO: 451110 - DNA, 15 bp, Homo sapiens
cactgattttgtcac

SEQ ID NO: 451111 - DNA, 15 bp, Homo sapiens
ccactgattttgtca

SEQ ID NO: 451112 - DNA, 15 bp, Homo sapiens
accactgattttgtc

SEQ ID NO: 451113 - DNA, 15 bp, Homo sapiens
aaccactgattttgt

SEQ ID NO: 451114 - DNA, 15 bp, Homo sapiens
taaccactgattttg

SEQ ID NO: 451115 - DNA, 15 bp, Homo sapiens
ctaaccactgatttt

SEQ ID NO: 451116 - DNA, 15 bp, Homo sapiens
actaaccactgattt

SEQ ID NO: 451117 - DNA, 15 bp, Homo sapiens
gactaaccactgatt

SEQ ID NO: 451118 - DNA, 15 bp, Homo sapiens
tgactaaccactgat

SEQ ID NO: 451119 - DNA, 15 bp, Homo sapiens
atgactaaccactga

SEQ ID NO: 451120 - DNA, 15 bp, Homo sapiens
aatgactaaccactg

SEQ ID NO: 451121 - DNA, 15 bp, Homo sapiens
aaatgactaaccact

SEQ ID NO: 451122 - DNA, 15 bp, Homo sapiens
aaaatgactaaccac

SEQ ID NO: 451123 - DNA, 15 bp, Homo sapiens
aaaaatgactaacca

SEQ ID NO: 451124 - DNA, 15 bp, Homo sapiens
aaaaaatgactaacc

SEQ ID NO: 451125 - DNA, 15 bp, Homo sapiens
aaaaaaatgactaac

SEQ ID NO: 451126 - DNA, 15 bp, Homo sapiens
taaaaaaatgactaa

SEQ ID NO: 451127 - DNA, 15 bp, Homo sapiens
ttaaaaaaatgacta

SEQ ID NO: 451128 - DNA, 15 bp, Homo sapiens
attaaaaaaatgact

SEQ ID NO: 451129 - DNA, 15 bp, Homo sapiens
aattaaaaaaatgac

SEQ ID NO: 451130 - DNA, 15 bp, Homo sapiens
taattaaaaaaatga

SEQ ID NO: 451131 - DNA, 15 bp, Homo sapiens
ttaattaaaaaaatg

SEQ ID NO: 451132 - DNA, 15 bp, Homo sapiens
tttaattaaaaaaat

SEQ ID NO: 451133 - DNA, 15 bp, Homo sapiens
ttttaattaaaaaaa

SEQ ID NO: 451134 - DNA, 15 bp, Homo sapiens
tttttaattaaaaaa

SEQ ID NO: 451135 - DNA, 15 bp, Homo sapiens
atttttaattaaaaa

SEQ ID NO: 451136 - DNA, 15 bp, Homo sapiens
catttttaattaaaa

SEQ ID NO: 451137 - DNA, 15 bp, Homo sapiens
acatttttaattaaa

SEQ ID NO: 451138 - DNA, 15 bp, Homo sapiens
cacatttttaattaa

SEQ ID NO: 451139 - DNA, 15 bp, Homo sapiens
acacatttttaatta

SEQ ID NO: 451140 - DNA, 15 bp, Homo sapiens
tacacatttttaatt

SEQ ID NO: 451141 - DNA, 15 bp, Homo sapiens
atacacatttttaat

SEQ ID NO: 451142 - DNA, 15 bp, Homo sapiens
tatacacatttttaa

SEQ ID NO: 451143 - DNA, 15 bp, Homo sapiens
ctatacacattttta

SEQ ID NO: 451144 - DNA, 15 bp, Homo sapiens
actatacacattttt

SEQ ID NO: 451145 - DNA, 15 bp, Homo sapiens
cactatacacatttt

SEQ ID NO: 451146 - DNA, 15 bp, Homo sapiens
acactatacacattt

SEQ ID NO: 451147 - DNA, 15 bp, Homo sapiens
cacactatacacatt

SEQ ID NO: 451148 - DNA, 15 bp, Homo sapiens
acacactatacacat

SEQ ID NO: 451149 - DNA, 15 bp, Homo sapiens
tacacactatacaca

SEQ ID NO: 451150 - DNA, 15 bp, Homo sapiens
gtacacactatacac

SEQ ID NO: 451151 - DNA, 15 bp, Homo sapiens
ggtacacactataca

SEQ ID NO: 451152 - DNA, 15 bp, Homo sapiens
aggtacacactatac

SEQ ID NO: 451153 - DNA, 15 bp, Homo sapiens
caggtacacactata

SEQ ID NO: 451154 - DNA, 15 bp, Homo sapiens
gcaggtacacactat

SEQ ID NO: 451155 - DNA, 15 bp, Homo sapiens
agcaggtacacacta

SEQ ID NO: 451156 - DNA, 15 bp, Homo sapiens
cagcaggtacacact

SEQ ID NO: 451157 - DNA, 15 bp, Homo sapiens
ccagcaggtacacac

SEQ ID NO: 451158 - DNA, 15 bp, Homo sapiens
accagcaggtacaca

SEQ ID NO: 451159 - DNA, 15 bp, Homo sapiens
gaccagcaggtacac

SEQ ID NO: 451160 - DNA, 15 bp, Homo sapiens
agaccagcaggtaca

SEQ ID NO: 451161 - DNA, 15 bp, Homo sapiens
aagaccagcaggtac

SEQ ID NO: 451162 - DNA, 15 bp, Homo sapiens
taagaccagcaggta

SEQ ID NO: 451163 - DNA, 15 bp, Homo sapiens
gtaagaccagcaggt

SEQ ID NO: 451164 - DNA, 15 bp, Homo sapiens
agtaagaccagcagg

SEQ ID NO: 451165 - DNA, 15 bp, Homo sapiens
cagtaagaccagcag

SEQ ID NO: 451166 - DNA, 15 bp, Homo sapiens
acagtaagaccagca

SEQ ID NO: 451167 - DNA, 15 bp, Homo sapiens
tacagtaagaccagc

SEQ ID NO: 451168 - DNA, 15 bp, Homo sapiens
atacagtaagaccag

SEQ ID NO: 451169 - DNA, 15 bp, Homo sapiens
catacagtaagacca

SEQ ID NO: 451170 - DNA, 15 bp, Homo sapiens
acatacagtaagacc

SEQ ID NO: 451171 - DNA, 15 bp, Homo sapiens
cacatacagtaagac

SEQ ID NO: 451172 - DNA, 15 bp, Homo sapiens
gcacatacagtaaga

SEQ ID NO: 451173 - DNA, 15 bp, Homo sapiens
tgcacatacagtaag

SEQ ID NO: 451174 - DNA, 15 bp, Homo sapiens
ttgcacatacagtaa

SEQ ID NO: 451175 - DNA, 15 bp, Homo sapiens
gttgcacatacagta

SEQ ID NO: 451176 - DNA, 15 bp, Homo sapiens
agttgcacatacagt

SEQ ID NO: 451177 - DNA, 15 bp, Homo sapiens
tagttgcacatacag

SEQ ID NO: 451178 - DNA, 15 bp, Homo sapiens
ttagttgcacataca

SEQ ID NO: 451179 - DNA, 15 bp, Homo sapiens
tttagttgcacatac

SEQ ID NO: 451180 - DNA, 15 bp, Homo sapiens
ctttagttgcacata

SEQ ID NO: 451181 - DNA, 15 bp, Homo sapiens
cctttagttgcacat

SEQ ID NO: 451182 - DNA, 15 bp, Homo sapiens
acctttagttgcaca

SEQ ID NO: 451183 - DNA, 15 bp, Homo sapiens
aacctttagttgcac

SEQ ID NO: 451184 - DNA, 15 bp, Homo sapiens
aaacctttagttgca

SEQ ID NO: 451185 - DNA, 15 bp, Homo sapiens
taaacctttagttgc

SEQ ID NO: 451186 - DNA, 15 bp, Homo sapiens
gtaaacctttagttg

SEQ ID NO: 451187 - DNA, 15 bp, Homo sapiens
tgtaaacctttagtt

SEQ ID NO: 451188 - DNA, 15 bp, Homo sapiens
atgtaaacctttagt

SEQ ID NO: 451189 - DNA, 15 bp, Homo sapiens
tatgtaaacctttag

SEQ ID NO: 451190 - DNA, 15 bp, Homo sapiens
ctatgtaaaccttta

SEQ ID NO: 451191 - DNA, 15 bp, Homo sapiens
actatgtaaaccttt

SEQ ID NO: 451192 - DNA, 15 bp, Homo sapiens
gactatgtaaacctt

SEQ ID NO: 451193 - DNA, 15 bp, Homo sapiens
agactatgtaaacct

SEQ ID NO: 451194 - DNA, 15 bp, Homo sapiens
cagactatgtaaacc

SEQ ID NO: 451195 - DNA, 15 bp, Homo sapiens
acagactatgtaaac

SEQ ID NO: 451196 - DNA, 15 bp, Homo sapiens
cacagactatgtaaa

SEQ ID NO: 451197 - DNA, 15 bp, Homo sapiens
acacagactatgtaa

SEQ ID NO: 451198 - DNA, 15 bp, Homo sapiens
tacacagactatgta

SEQ ID NO: 451199 - DNA, 15 bp, Homo sapiens
atacacagactatgt

SEQ ID NO: 451200 - DNA, 15 bp, Homo sapiens
catacacagactatg

SEQ ID NO: 451201 - DNA, 15 bp, Homo sapiens
ccatacacagactat

SEQ ID NO: 451202 - DNA, 15 bp, Homo sapiens
cccatacacagacta

SEQ ID NO: 451203 - DNA, 15 bp, Homo sapiens
acccatacacagact

SEQ ID NO: 451204 - DNA, 15 bp, Homo sapiens
aacccatacacagac

SEQ ID NO: 451205 - DNA, 15 bp, Homo sapiens
caacccatacacaga

SEQ ID NO: 451206 - DNA, 15 bp, Homo sapiens
acaacccatacacag

SEQ ID NO: 451207 - DNA, 15 bp, Homo sapiens
tacaacccatacaca

SEQ ID NO: 451208 - DNA, 15 bp, Homo sapiens
ttacaacccatacac

SEQ ID NO: 451209 - DNA, 15 bp, Homo sapiens
tttacaacccataca

SEQ ID NO: 451210 - DNA, 15 bp, Homo sapiens
atttacaacccatac

SEQ ID NO: 451211 - DNA, 15 bp, Homo sapiens
aatttacaacccata

SEQ ID NO: 451212 - DNA, 15 bp, Homo sapiens
aaatttacaacccat

SEQ ID NO: 451213 - DNA, 15 bp, Homo sapiens
aaaatttacaaccca

SEQ ID NO: 451214 - DNA, 15 bp, Homo sapiens
aaaaatttacaaccc

SEQ ID NO: 451215 - DNA, 15 bp, Homo sapiens
caaaaatttacaacc

SEQ ID NO: 451216 - DNA, 15 bp, Homo sapiens
ccaaaaatttacaac

SEQ ID NO: 451217 - DNA, 15 bp, Homo sapiens
gccaaaaatttacaa

SEQ ID NO: 451218 - DNA, 15 bp, Homo sapiens
agccaaaaatttaca

SEQ ID NO: 451219 - DNA, 15 bp, Homo sapiens
cagccaaaaatttac

SEQ ID NO: 451220 - DNA, 15 bp, Homo sapiens
ccagccaaaaattta

SEQ ID NO: 451221 - DNA, 15 bp, Homo sapiens
gccagccaaaaattt

SEQ ID NO: 451222 - DNA, 15 bp, Homo sapiens
agccagccaaaaatt

SEQ ID NO: 451223 - DNA, 15 bp, Homo sapiens
cagccagccaaaaat

SEQ ID NO: 451224 - DNA, 15 bp, Homo sapiens
acagccagccaaaaa

SEQ ID NO: 451225 - DNA, 15 bp, Homo sapiens
cacagccagccaaaa

SEQ ID NO: 451226 - DNA, 15 bp, Homo sapiens
gcacagccagccaaa

SEQ ID NO: 451227 - DNA, 15 bp, Homo sapiens
agcacagccagccaa

SEQ ID NO: 451228 - DNA, 15 bp, Homo sapiens
cagcacagccagcca

SEQ ID NO: 451229 - DNA, 15 bp, Homo sapiens
tcagcacagccagcc

SEQ ID NO: 451230 - DNA, 15 bp, Homo sapiens
atcagcacagccagc

SEQ ID NO: 451231 - DNA, 15 bp, Homo sapiens
tatcagcacagccag

SEQ ID NO: 451232 - DNA, 15 bp, Homo sapiens
ttatcagcacagcca

SEQ ID NO: 451233 - DNA, 15 bp, Homo sapiens
tttatcagcacagcc

SEQ ID NO: 451234 - DNA, 15 bp, Homo sapiens
ctttatcagcacagc

SEQ ID NO: 451235 - DNA, 15 bp, Homo sapiens
gctttatcagcacag

SEQ ID NO: 451236 - DNA, 15 bp, Homo sapiens
tgctttatcagcaca

SEQ ID NO: 451237 - DNA, 15 bp, Homo sapiens
atgctttatcagcac

SEQ ID NO: 451238 - DNA, 15 bp, Homo sapiens
aatgctttatcagca

SEQ ID NO: 451239 - DNA, 15 bp, Homo sapiens
caatgctttatcagc

SEQ ID NO: 451240 - DNA, 15 bp, Homo sapiens
ccaatgctttatcag

SEQ ID NO: 451241 - DNA, 15 bp, Homo sapiens
cccaatgctttatca

SEQ ID NO: 451242 - DNA, 15 bp, Homo sapiens
gcccaatgctttatc

SEQ ID NO: 451243 - DNA, 15 bp, Homo sapiens
agcccaatgctttat

SEQ ID NO: 451244 - DNA, 15 bp, Homo sapiens
aagcccaatgcttta

SEQ ID NO: 451245 - DNA, 15 bp, Homo sapiens
caagcccaatgcttt

SEQ ID NO: 451246 - DNA, 15 bp, Homo sapiens
tcaagcccaatgctt

SEQ ID NO: 451247 - DNA, 15 bp, Homo sapiens
ttcaagcccaatgct

SEQ ID NO: 451248 - DNA, 15 bp, Homo sapiens
attcaagcccaatgc

SEQ ID NO: 451249 - DNA, 15 bp, Homo sapiens
tattcaagcccaatg

SEQ ID NO: 451250 - DNA, 15 bp, Homo sapiens
ttattcaagcccaat

SEQ ID NO: 451251 - DNA, 15 bp, Homo sapiens
tttattcaagcccaa

SEQ ID NO: 451252 - DNA, 15 bp, Homo sapiens
ctttattcaagccca

SEQ ID NO: 451253 - DNA, 15 bp, Homo sapiens
gctttattcaagccc

SEQ ID NO: 451254 - DNA, 15 bp, Homo sapiens
tgctttattcaagcc

SEQ ID NO: 451255 - DNA, 15 bp, Homo sapiens
ttgctttattcaagc

SEQ ID NO: 451256 - DNA, 15 bp, Homo sapiens
tttgctttattcaag

SEQ ID NO: 451257 - DNA, 15 bp, Homo sapiens
ctttgctttattcaa

SEQ ID NO: 451258 - DNA, 15 bp, Homo sapiens
gctttgctttattca

SEQ ID NO: 451259 - DNA, 15 bp, Homo sapiens
tgctttgctttattc

SEQ ID NO: 451260 - DNA, 15 bp, Homo sapiens
ctgctttgctttatt

SEQ ID NO: 451261 - DNA, 15 bp, Homo sapiens
tctgctttgctttat

SEQ ID NO: 451262 - DNA, 15 bp, Homo sapiens
ttctgctttgcttta

SEQ ID NO: 451263 - DNA, 15 bp, Homo sapiens
tttctgctttgcttt

SEQ ID NO: 451264 - DNA, 15 bp, Homo sapiens
ttttctgctttgctt

SEQ ID NO: 451265 - DNA, 15 bp, Homo sapiens
attttctgctttgct

SEQ ID NO: 451266 - DNA, 15 bp, Homo sapiens
gattttctgctttgc

SEQ ID NO: 451267 - DNA, 15 bp, Homo sapiens
tgattttctgctttg

SEQ ID NO: 451268 - DNA, 15 bp, Homo sapiens
atgattttctgcttt

SEQ ID NO: 451269 - DNA, 15 bp, Homo sapiens
gatgattttctgctt

SEQ ID NO: 451270 - DNA, 15 bp, Homo sapiens
agatgattttctgct

SEQ ID NO: 451271 - DNA, 15 bp, Homo sapiens
gagatgattttctgc

SEQ ID NO: 451272 - DNA, 15 bp, Homo sapiens
tgagatgattttctg

SEQ ID NO: 451273 - DNA, 15 bp, Homo sapiens
ttgagatgattttct

SEQ ID NO: 451274 - DNA, 15 bp, Homo sapiens
attgagatgattttc

SEQ ID NO: 451275 - DNA, 15 bp, Homo sapiens
gattgagatgatttt

SEQ ID NO: 451276 - DNA, 15 bp, Homo sapiens
agattgagatgattt

SEQ ID NO: 451277 - DNA, 15 bp, Homo sapiens
aagattgagatgatt

SEQ ID NO: 451278 - DNA, 15 bp, Homo sapiens
aaagattgagatgat

SEQ ID NO: 451279 - DNA, 15 bp, Homo sapiens
aaaagattgagatga

SEQ ID NO: 451280 - DNA, 15 bp, Homo sapiens
taaaagattgagatg

SEQ ID NO: 451281 - DNA, 15 bp, Homo sapiens
ataaaagattgagat

SEQ ID NO: 451282 - DNA, 15 bp, Homo sapiens
tataaaagattgaga

SEQ ID NO: 451283 - DNA, 15 bp, Homo sapiens
atataaaagattgag

SEQ ID NO: 451284 - DNA, 15 bp, Homo sapiens
catataaaagattga

SEQ ID NO: 451285 - DNA, 15 bp, Homo sapiens
acatataaaagattg

SEQ ID NO: 451286 - DNA, 15 bp, Homo sapiens
cacatataaaagatt

SEQ ID NO: 451287 - DNA, 15 bp, Homo sapiens
ccacatataaaagat

SEQ ID NO: 451288 - DNA, 15 bp, Homo sapiens
tccacatataaaaga

SEQ ID NO: 451289 - DNA, 15 bp, Homo sapiens
atccacatataaaag

SEQ ID NO: 451290 - DNA, 15 bp, Homo sapiens
aatccacatataaaa

SEQ ID NO: 451291 - DNA, 15 bp, Homo sapiens
aaatccacatataaa

SEQ ID NO: 451292 - DNA, 15 bp, Homo sapiens
taaatccacatataa

SEQ ID NO: 451293 - DNA, 15 bp, Homo sapiens
ctaaatccacatata

SEQ ID NO: 451294 - DNA, 15 bp, Homo sapiens
tctaaatccacatat

SEQ ID NO: 451295 - DNA, 15 bp, Homo sapiens
gtctaaatccacata

SEQ ID NO: 451296 - DNA, 15 bp, Homo sapiens
agtctaaatccacat

SEQ ID NO: 451297 - DNA, 15 bp, Homo sapiens
cagtctaaatccaca

SEQ ID NO: 451298 - DNA, 15 bp, Homo sapiens
acagtctaaatccac

SEQ ID NO: 451299 - DNA, 15 bp, Homo sapiens
cacagtctaaatcca

SEQ ID NO: 451300 - DNA, 15 bp, Homo sapiens
acacagtctaaatcc

SEQ ID NO: 451301 - DNA, 15 bp, Homo sapiens
aacacagtctaaatc

SEQ ID NO: 451302 - DNA, 15 bp, Homo sapiens
taacacagtctaaat

SEQ ID NO: 451303 - DNA, 15 bp, Homo sapiens
ataacacagtctaaa

SEQ ID NO: 451304 - DNA, 15 bp, Homo sapiens
cataacacagtctaa

SEQ ID NO: 451305 - DNA, 15 bp, Homo sapiens
tcataacacagtcta

SEQ ID NO: 451306 - DNA, 15 bp, Homo sapiens
gtcataacacagtct

SEQ ID NO: 451307 - DNA, 15 bp, Homo sapiens
agtcataacacagtc

SEQ ID NO: 451308 - DNA, 15 bp, Homo sapiens
aagtcataacacagt

SEQ ID NO: 451309 - DNA, 15 bp, Homo sapiens
caagtcataacacag

SEQ ID NO: 451310 - DNA, 15 bp, Homo sapiens
ccaagtcataacaca

SEQ ID NO: 451311 - DNA, 15 bp, Homo sapiens
accaagtcataacac

SEQ ID NO: 451312 - DNA, 15 bp, Homo sapiens
aaccaagtcataaca

SEQ ID NO: 451313 - DNA, 15 bp, Homo sapiens
gaaccaagtcataac

SEQ ID NO: 451314 - DNA, 15 bp, Homo sapiens
tgaaccaagtcataa

SEQ ID NO: 451315 - DNA, 15 bp, Homo sapiens
ctgaaccaagtcata

SEQ ID NO: 451316 - DNA, 15 bp, Homo sapiens
gctgaaccaagtcat

SEQ ID NO: 451317 - DNA, 15 bp, Homo sapiens
ggctgaaccaagtca

SEQ ID NO: 451318 - DNA, 15 bp, Homo sapiens
tggctgaaccaagtc

SEQ ID NO: 451319 - DNA, 15 bp, Homo sapiens
ctggctgaaccaagt

SEQ ID NO: 451320 - DNA, 15 bp, Homo sapiens
actggctgaaccaag

SEQ ID NO: 451321 - DNA, 15 bp, Homo sapiens
aactggctgaaccaa

SEQ ID NO: 451322 - DNA, 15 bp, Homo sapiens
aaactggctgaacca

SEQ ID NO: 451323 - DNA, 15 bp, Homo sapiens
aaaactggctgaacc

SEQ ID NO: 451324 - DNA, 15 bp, Homo sapiens
gaaaactggctgaac

SEQ ID NO: 451325 - DNA, 15 bp, Homo sapiens
agaaaactggctgaa

SEQ ID NO: 451326 - DNA, 15 bp, Homo sapiens
tagaaaactggctga

SEQ ID NO: 451327 - DNA, 15 bp, Homo sapiens
atagaaaactggctg

SEQ ID NO: 451328 - DNA, 15 bp, Homo sapiens
gatagaaaactggct

SEQ ID NO: 451329 - DNA, 15 bp, Homo sapiens
agatagaaaactggc

SEQ ID NO: 451330 - DNA, 15 bp, Homo sapiens
aagatagaaaactgg

SEQ ID NO: 451331 - DNA, 15 bp, Homo sapiens
taagatagaaaactg

SEQ ID NO: 451332 - DNA, 15 bp, Homo sapiens
ataagatagaaaact

SEQ ID NO: 451333 - DNA, 15 bp, Homo sapiens
aataagatagaaaac

SEQ ID NO: 451334 - DNA, 15 bp, Homo sapiens
aaataagatagaaaa

SEQ ID NO: 451335 - DNA, 15 bp, Homo sapiens
aaaataagatagaaa

SEQ ID NO: 451336 - DNA, 15 bp, Homo sapiens
taaaataagatagaa

SEQ ID NO: 451337 - DNA, 15 bp, Homo sapiens
ataaaataagataga

SEQ ID NO: 451338 - DNA, 15 bp, Homo sapiens
tataaaataagatag

SEQ ID NO: 451339 - DNA, 15 bp, Homo sapiens
atataaaataagata

SEQ ID NO: 451340 - DNA, 15 bp, Homo sapiens
aatataaaataagat

SEQ ID NO: 451341 - DNA, 15 bp, Homo sapiens
taatataaaataaga

SEQ ID NO: 451342 - DNA, 15 bp, Homo sapiens
ttaatataaaataag

SEQ ID NO: 451343 - DNA, 15 bp, Homo sapiens
tttaatataaaataa

SEQ ID NO: 451344 - DNA, 15 bp, Homo sapiens
atttaatataaaata

SEQ ID NO: 451345 - DNA, 15 bp, Homo sapiens
tatttaatataaaat

SEQ ID NO: 451346 - DNA, 15 bp, Homo sapiens
atatttaatataaaa

SEQ ID NO: 451347 - DNA, 15 bp, Homo sapiens
catatttaatataaa

SEQ ID NO: 451348 - DNA, 15 bp, Homo sapiens
acatatttaatataa

SEQ ID NO: 451349 - DNA, 15 bp, Homo sapiens
gacatatttaatata

SEQ ID NO: 451350 - DNA, 15 bp, Homo sapiens
agacatatttaatat

SEQ ID NO: 451351 - DNA, 15 bp, Homo sapiens
cagacatatttaata

SEQ ID NO: 451352 - DNA, 15 bp, Homo sapiens
acagacatatttaat

SEQ ID NO: 451353 - DNA, 15 bp, Homo sapiens
cacagacatatttaa

SEQ ID NO: 451354 - DNA, 15 bp, Homo sapiens
acacagacatattta

SEQ ID NO: 451355 - DNA, 15 bp, Homo sapiens
aacacagacatattt

SEQ ID NO: 451356 - DNA, 15 bp, Homo sapiens
gaacacagacatatt

SEQ ID NO: 451357 - DNA, 15 bp, Homo sapiens
agaacacagacatat

SEQ ID NO: 451358 - DNA, 15 bp, Homo sapiens
gagaacacagacata

SEQ ID NO: 451359 - DNA, 15 bp, Homo sapiens
agagaacacagacat

SEQ ID NO: 451360 - DNA, 15 bp, Homo sapiens
cagagaacacagaca

SEQ ID NO: 451361 - DNA, 15 bp, Homo sapiens
tcagagaacacagac

SEQ ID NO: 451362 - DNA, 15 bp, Homo sapiens
ctcagagaacacaga

SEQ ID NO: 451363 - DNA, 15 bp, Homo sapiens
actcagagaacacag

SEQ ID NO: 451364 - DNA, 15 bp, Homo sapiens
gactcagagaacaca

SEQ ID NO: 451365 - DNA, 15 bp, Homo sapiens
tgactcagagaacac

SEQ ID NO: 451366 - DNA, 15 bp, Homo sapiens
ctgactcagagaaca

SEQ ID NO: 451367 - DNA, 15 bp, Homo sapiens
gctgactcagagaac

SEQ ID NO: 451368 - DNA, 15 bp, Homo sapiens
tgctgactcagagaa

SEQ ID NO: 451369 - DNA, 15 bp, Homo sapiens
gtgctgactcagaga

SEQ ID NO: 451370 - DNA, 15 bp, Homo sapiens
tgtgctgactcagag

SEQ ID NO: 451371 - DNA, 15 bp, Homo sapiens
atgtgctgactcaga

SEQ ID NO: 451372 - DNA, 15 bp, Homo sapiens
aatgtgctgactcag

SEQ ID NO: 451373 - DNA, 15 bp, Homo sapiens
aaatgtgctgactca

SEQ ID NO: 451374 - DNA, 15 bp, Homo sapiens
taaatgtgctgactc

SEQ ID NO: 451375 - DNA, 15 bp, Homo sapiens
ataaatgtgctgact

SEQ ID NO: 451376 - DNA, 15 bp, Homo sapiens
aataaatgtgctgac

SEQ ID NO: 451377 - DNA, 15 bp, Homo sapiens
aaataaatgtgctga

SEQ ID NO: 451378 - DNA, 15 bp, Homo sapiens
gaaataaatgtgctg

SEQ ID NO: 451379 - DNA, 15 bp, Homo sapiens
ggaaataaatgtgct

SEQ ID NO: 451380 - DNA, 15 bp, Homo sapiens
aggaaataaatgtgc

SEQ ID NO: 451381 - DNA, 15 bp, Homo sapiens
aaggaaataaatgtg

SEQ ID NO: 451382 - DNA, 15 bp, Homo sapiens
taaggaaataaatgt

SEQ ID NO: 451383 - DNA, 15 bp, Homo sapiens
ataaggaaataaatg

SEQ ID NO: 451384 - DNA, 15 bp, Homo sapiens
aataaggaaataaat

SEQ ID NO: 451385 - DNA, 15 bp, Homo sapiens
taataaggaaataaa

SEQ ID NO: 451386 - DNA, 15 bp, Homo sapiens
gtaataaggaaataa

SEQ ID NO: 451387 - DNA, 15 bp, Homo sapiens
tgtaataaggaaata

SEQ ID NO: 451388 - DNA, 15 bp, Homo sapiens
atgtaataaggaaat

SEQ ID NO: 451389 - DNA, 15 bp, Homo sapiens
catgtaataaggaaa

SEQ ID NO: 451390 - DNA, 15 bp, Homo sapiens
acatgtaataaggaa

SEQ ID NO: 451391 - DNA, 15 bp, Homo sapiens
aacatgtaataagga

SEQ ID NO: 451392 - DNA, 15 bp, Homo sapiens
gaacatgtaataagg

SEQ ID NO: 451393 - DNA, 15 bp, Homo sapiens
ggaacatgtaataag

SEQ ID NO: 451394 - DNA, 15 bp, Homo sapiens
tggaacatgtaataa

SEQ ID NO: 451395 - DNA, 15 bp, Homo sapiens
ctggaacatgtaata

SEQ ID NO: 451396 - DNA, 15 bp, Homo sapiens
tctggaacatgtaat

SEQ ID NO: 451397 - DNA, 15 bp, Homo sapiens
gtctggaacatgtaa

SEQ ID NO: 451398 - DNA, 15 bp, Homo sapiens
tgtctggaacatgta

SEQ ID NO: 451399 - DNA, 15 bp, Homo sapiens
ctgtctggaacatgt

SEQ ID NO: 451400 - DNA, 15 bp, Homo sapiens
cctgtctggaacatg

SEQ ID NO: 451401 - DNA, 15 bp, Homo sapiens
tcctgtctggaacat

SEQ ID NO: 451402 - DNA, 15 bp, Homo sapiens
ctcctgtctggaaca

SEQ ID NO: 451403 - DNA, 15 bp, Homo sapiens
actcctgtctggaac

SEQ ID NO: 451404 - DNA, 15 bp, Homo sapiens
cactcctgtctggaa

SEQ ID NO: 451405 - DNA, 15 bp, Homo sapiens
gcactcctgtctgga

SEQ ID NO: 451406 - DNA, 15 bp, Homo sapiens
agcactcctgtctgg

SEQ ID NO: 451407 - DNA, 15 bp, Homo sapiens
tagcactcctgtctg

SEQ ID NO: 451408 - DNA, 15 bp, Homo sapiens
ctagcactcctgtct

SEQ ID NO: 451409 - DNA, 15 bp, Homo sapiens
gctagcactcctgtc

SEQ ID NO: 451410 - DNA, 15 bp, Homo sapiens
ggctagcactcctgt

SEQ ID NO: 451411 - DNA, 15 bp, Homo sapiens
gggctagcactcctg

SEQ ID NO: 451412 - DNA, 15 bp, Homo sapiens
tgggctagcactcct

SEQ ID NO: 451413 - DNA, 15 bp, Homo sapiens
ctgggctagcactcc

SEQ ID NO: 451414 - DNA, 15 bp, Homo sapiens
actgggctagcactc

SEQ ID NO: 451415 - DNA, 15 bp, Homo sapiens
aactgggctagcact

SEQ ID NO: 451416 - DNA, 15 bp, Homo sapiens
aaactgggctagcac

SEQ ID NO: 451417 - DNA, 15 bp, Homo sapiens
aaaactgggctagca

SEQ ID NO: 451418 - DNA, 15 bp, Homo sapiens
aaaaactgggctagc

SEQ ID NO: 451419 - DNA, 15 bp, Homo sapiens
caaaaactgggctag

SEQ ID NO: 451420 - DNA, 15 bp, Homo sapiens
acaaaaactgggcta

SEQ ID NO: 451421 - DNA, 15 bp, Homo sapiens
aacaaaaactgggct

SEQ ID NO: 451422 - DNA, 15 bp, Homo sapiens
gaacaaaaactgggc

SEQ ID NO: 451423 - DNA, 15 bp, Homo sapiens
tgaacaaaaactggg

SEQ ID NO: 451424 - DNA, 15 bp, Homo sapiens
ctgaacaaaaactgg

SEQ ID NO: 451425 - DNA, 15 bp, Homo sapiens
actgaacaaaaactg

SEQ ID NO: 451426 - DNA, 15 bp, Homo sapiens
aactgaacaaaaact

SEQ ID NO: 451427 - DNA, 15 bp, Homo sapiens
aaactgaacaaaaac

SEQ ID NO: 451428 - DNA, 15 bp, Homo sapiens
caaactgaacaaaaa

SEQ ID NO: 451429 - DNA, 15 bp, Homo sapiens
gcaaactgaacaaaa

SEQ ID NO: 451430 - DNA, 15 bp, Homo sapiens
tgcaaactgaacaaa

SEQ ID NO: 451431 - DNA, 15 bp, Homo sapiens
gtgcaaactgaacaa

SEQ ID NO: 451432 - DNA, 15 bp, Homo sapiens
tgtgcaaactgaaca

SEQ ID NO: 451433 - DNA, 15 bp, Homo sapiens
ctgtgcaaactgaac

SEQ ID NO: 451434 - DNA, 15 bp, Homo sapiens
actgtgcaaactgaa

SEQ ID NO: 451435 - DNA, 15 bp, Homo sapiens
cactgtgcaaactga

SEQ ID NO: 451436 - DNA, 15 bp, Homo sapiens
ccactgtgcaaactg

SEQ ID NO: 451437 - DNA, 15 bp, Homo sapiens
cccactgtgcaaact

SEQ ID NO: 451438 - DNA, 15 bp, Homo sapiens
tcccactgtgcaaac

SEQ ID NO: 451439 - DNA, 15 bp, Homo sapiens
atcccactgtgcaaa

SEQ ID NO: 451440 - DNA, 15 bp, Homo sapiens
catcccactgtgcaa

SEQ ID NO: 451441 - DNA, 15 bp, Homo sapiens
ccatcccactgtgca

SEQ ID NO: 451442 - DNA, 15 bp, Homo sapiens
cccatcccactgtgc

SEQ ID NO: 451443 - DNA, 15 bp, Homo sapiens
ccccatcccactgtg

SEQ ID NO: 451444 - DNA, 15 bp, Homo sapiens
tccccatcccactgt

SEQ ID NO: 451445 - DNA, 15 bp, Homo sapiens
ttccccatcccactg

SEQ ID NO: 451446 - DNA, 15 bp, Homo sapiens
tttccccatcccact

SEQ ID NO: 451447 - DNA, 15 bp, Homo sapiens
gtttccccatcccac

SEQ ID NO: 451448 - DNA, 15 bp, Homo sapiens
tgtttccccatccca

SEQ ID NO: 451449 - DNA, 15 bp, Homo sapiens
ttgtttccccatccc

SEQ ID NO: 451450 - DNA, 15 bp, Homo sapiens
cttgtttccccatcc

SEQ ID NO: 451451 - DNA, 15 bp, Homo sapiens
acttgtttccccatc

SEQ ID NO: 451452 - DNA, 15 bp, Homo sapiens
gacttgtttccccat

SEQ ID NO: 451453 - DNA, 15 bp, Homo sapiens
agacttgtttcccca

SEQ ID NO: 451454 - DNA, 15 bp, Homo sapiens
cagacttgtttcccc

SEQ ID NO: 451455 - DNA, 15 bp, Homo sapiens
ccagacttgtttccc

SEQ ID NO: 451456 - DNA, 15 bp, Homo sapiens
tccagacttgtttcc

SEQ ID NO: 451457 - DNA, 15 bp, Homo sapiens
ttccagacttgtttc

SEQ ID NO: 451458 - DNA, 15 bp, Homo sapiens
attccagacttgttt

SEQ ID NO: 451459 - DNA, 15 bp, Homo sapiens
aattccagacttgtt

SEQ ID NO: 451460 - DNA, 15 bp, Homo sapiens
aaattccagacttgt

SEQ ID NO: 451461 - DNA, 15 bp, Homo sapiens
taaattccagacttg

SEQ ID NO: 451462 - DNA, 15 bp, Homo sapiens
ttaaattccagactt

SEQ ID NO: 451463 - DNA, 15 bp, Homo sapiens
tttaaattccagact

SEQ ID NO: 451464 - DNA, 15 bp, Homo sapiens
ttttaaattccagac

SEQ ID NO: 451465 - DNA, 15 bp, Homo sapiens
tttttaaattccaga

SEQ ID NO: 451466 - DNA, 15 bp, Homo sapiens
ttttttaaattccag

SEQ ID NO: 451467 - DNA, 15 bp, Homo sapiens
tttttttaaattcca

SEQ ID NO: 451468 - DNA, 15 bp, Homo sapiens
ttttttttaaattcc

SEQ ID NO: 451469 - DNA, 15 bp, Homo sapiens
tttttttttaaattc

SEQ ID NO: 451470 - DNA, 15 bp, Homo sapiens
atttttttttaaatt

SEQ ID NO: 451471 - DNA, 15 bp, Homo sapiens
catttttttttaaat

SEQ ID NO: 451472 - DNA, 15 bp, Homo sapiens
acatttttttttaaa

SEQ ID NO: 451473 - DNA, 15 bp, Homo sapiens
aacatttttttttaa

SEQ ID NO: 451474 - DNA, 15 bp, Homo sapiens
aaacattttttttta

SEQ ID NO: 451475 - DNA, 15 bp, Homo sapiens
aaaacattttttttt

SEQ ID NO: 451476 - DNA, 15 bp, Homo sapiens
taaaacatttttttt

SEQ ID NO: 451477 - DNA, 15 bp, Homo sapiens
ctaaaacattttttt

SEQ ID NO: 451478 - DNA, 15 bp, Homo sapiens
tctaaaacatttttt

SEQ ID NO: 451479 - DNA, 15 bp, Homo sapiens
ctctaaaacattttt

SEQ ID NO: 451480 - DNA, 15 bp, Homo sapiens
cctctaaaacatttt

SEQ ID NO: 451481 - DNA, 15 bp, Homo sapiens
acctctaaaacattt

SEQ ID NO: 451482 - DNA, 15 bp, Homo sapiens
aacctctaaaacatt

SEQ ID NO: 451483 - DNA, 15 bp, Homo sapiens
caacctctaaaacat

SEQ ID NO: 451484 - DNA, 15 bp, Homo sapiens
ccaacctctaaaaca

SEQ ID NO: 451485 - DNA, 15 bp, Homo sapiens
tccaacctctaaaac

SEQ ID NO: 451486 - DNA, 15 bp, Homo sapiens
ctccaacctctaaaa

SEQ ID NO: 451487 - DNA, 15 bp, Homo sapiens
gctccaacctctaaa

SEQ ID NO: 451488 - DNA, 15 bp, Homo sapiens
ggctccaacctctaa

SEQ ID NO: 451489 - DNA, 15 bp, Homo sapiens
aggctccaacctcta

SEQ ID NO: 451490 - DNA, 15 bp, Homo sapiens
aaggctccaacctct

SEQ ID NO: 451491 - DNA, 15 bp, Homo sapiens
caaggctccaacctc

SEQ ID NO: 451492 - DNA, 15 bp, Homo sapiens
tcaaggctccaacct

SEQ ID NO: 451493 - DNA, 15 bp, Homo sapiens
atcaaggctccaacc

SEQ ID NO: 451494 - DNA, 15 bp, Homo sapiens
aatcaaggctccaac

SEQ ID NO: 451495 - DNA, 15 bp, Homo sapiens
aaatcaaggctccaa

SEQ ID NO: 451496 - DNA, 15 bp, Homo sapiens
aaaatcaaggctcca

SEQ ID NO: 451497 - DNA, 15 bp, Homo sapiens
taaaatcaaggctcc

SEQ ID NO: 451498 - DNA, 15 bp, Homo sapiens
ctaaaatcaaggctc

SEQ ID NO: 451499 - DNA, 15 bp, Homo sapiens
actaaaatcaaggct

SEQ ID NO: 451500 - DNA, 15 bp, Homo sapiens
gactaaaatcaaggc

SEQ ID NO: 451501 - DNA, 15 bp, Homo sapiens
agactaaaatcaagg

SEQ ID NO: 451502 - DNA, 15 bp, Homo sapiens
gagactaaaatcaag

SEQ ID NO: 451503 - DNA, 15 bp, Homo sapiens
agagactaaaatcaa

SEQ ID NO: 451504 - DNA, 15 bp, Homo sapiens
tagagactaaaatca

SEQ ID NO: 451505 - DNA, 15 bp, Homo sapiens
atagagactaaaatc

SEQ ID NO: 451506 - DNA, 15 bp, Homo sapiens
tatagagactaaaat

SEQ ID NO: 451507 - DNA, 15 bp, Homo sapiens
atatagagactaaaa

SEQ ID NO: 451508 - DNA, 15 bp, Homo sapiens
aatatagagactaaa

SEQ ID NO: 451509 - DNA, 15 bp, Homo sapiens
taatatagagactaa

SEQ ID NO: 451510 - DNA, 15 bp, Homo sapiens
ctaatatagagacta

SEQ ID NO: 451511 - DNA, 15 bp, Homo sapiens
gctaatatagagact

SEQ ID NO: 451512 - DNA, 15 bp, Homo sapiens
tgctaatatagagac

SEQ ID NO: 451513 - DNA, 15 bp, Homo sapiens
gtgctaatatagaga

SEQ ID NO: 451514 - DNA, 15 bp, Homo sapiens
tgtgctaatatagag

SEQ ID NO: 451515 - DNA, 15 bp, Homo sapiens
atgtgctaatataga

SEQ ID NO: 451516 - DNA, 15 bp, Homo sapiens
gatgtgctaatatag

SEQ ID NO: 451517 - DNA, 15 bp, Homo sapiens
ggatgtgctaatata

SEQ ID NO: 451518 - DNA, 15 bp, Homo sapiens
tggatgtgctaatat

SEQ ID NO: 451519 - DNA, 15 bp, Homo sapiens
atggatgtgctaata

SEQ ID NO: 451520 - DNA, 15 bp, Homo sapiens
gatggatgtgctaat

SEQ ID NO: 451521 - DNA, 15 bp, Homo sapiens
tgatggatgtgctaa

SEQ ID NO: 451522 - DNA, 15 bp, Homo sapiens
gtgatggatgtgcta

SEQ ID NO: 451523 - DNA, 15 bp, Homo sapiens
tgtgatggatgtgct

SEQ ID NO: 451524 - DNA, 15 bp, Homo sapiens
ttgtgatggatgtgc

SEQ ID NO: 451525 - DNA, 15 bp, Homo sapiens
tttgtgatggatgtg

SEQ ID NO: 451526 - DNA, 15 bp, Homo sapiens
ctttgtgatggatgt

SEQ ID NO: 451527 - DNA, 15 bp, Homo sapiens
tctttgtgatggatg

SEQ ID NO: 451528 - DNA, 15 bp, Homo sapiens
ttctttgtgatggat

SEQ ID NO: 451529 - DNA, 15 bp, Homo sapiens
gttctttgtgatgga

SEQ ID NO: 451530 - DNA, 15 bp, Homo sapiens
ggttctttgtgatgg

SEQ ID NO: 451531 - DNA, 15 bp, Homo sapiens
tggttctttgtgatg

SEQ ID NO: 451532 - DNA, 15 bp, Homo sapiens
atggttctttgtgat

SEQ ID NO: 451533 - DNA, 15 bp, Homo sapiens
aatggttctttgtga

SEQ ID NO: 451534 - DNA, 15 bp, Homo sapiens
taatggttctttgtg

SEQ ID NO: 451535 - DNA, 15 bp, Homo sapiens
ctaatggttctttgt

SEQ ID NO: 451536 - DNA, 15 bp, Homo sapiens
actaatggttctttg

SEQ ID NO: 451537 - DNA, 15 bp, Homo sapiens
tactaatggttcttt

SEQ ID NO: 451538 - DNA, 15 bp, Homo sapiens
ttactaatggttctt

SEQ ID NO: 451539 - DNA, 15 bp, Homo sapiens
tttactaatggttct

SEQ ID NO: 451540 - DNA, 15 bp, Homo sapiens
atttactaatggttc

SEQ ID NO: 451541 - DNA, 15 bp, Homo sapiens
aatttactaatggtt

SEQ ID NO: 451542 - DNA, 15 bp, Homo sapiens
gaatttactaatggt

SEQ ID NO: 451543 - DNA, 15 bp, Homo sapiens
tgaatttactaatgg

SEQ ID NO: 451544 - DNA, 15 bp, Homo sapiens
atgaatttactaatg

SEQ ID NO: 451545 - DNA, 15 bp, Homo sapiens
catgaatttactaat

SEQ ID NO: 451546 - DNA, 15 bp, Homo sapiens
tcatgaatttactaa

SEQ ID NO: 451547 - DNA, 15 bp, Homo sapiens
ttcatgaatttacta

SEQ ID NO: 451548 - DNA, 15 bp, Homo sapiens
attcatgaatttact

SEQ ID NO: 451549 - DNA, 15 bp, Homo sapiens
gattcatgaatttac

SEQ ID NO: 451550 - DNA, 15 bp, Homo sapiens
agattcatgaattta

SEQ ID NO: 451551 - DNA, 15 bp, Homo sapiens
aagattcatgaattt

SEQ ID NO: 451552 - DNA, 15 bp, Homo sapiens
aaagattcatgaatt

SEQ ID NO: 451553 - DNA, 15 bp, Homo sapiens
aaaagattcatgaat

SEQ ID NO: 451554 - DNA, 15 bp, Homo sapiens
caaaagattcatgaa

SEQ ID NO: 451555 - DNA, 15 bp, Homo sapiens
acaaaagattcatga

SEQ ID NO: 451556 - DNA, 15 bp, Homo sapiens
aacaaaagattcatg

SEQ ID NO: 451557 - DNA, 15 bp, Homo sapiens
aaacaaaagattcat

SEQ ID NO: 451558 - DNA, 15 bp, Homo sapiens
aaaacaaaagattca

SEQ ID NO: 451559 - DNA, 15 bp, Homo sapiens
aaaaacaaaagattc

SEQ ID NO: 451560 - DNA, 15 bp, Homo sapiens
aaaaaacaaaagatt

SEQ ID NO: 451561 - DNA, 15 bp, Homo sapiens
taaaaaacaaaagat

SEQ ID NO: 451562 - DNA, 15 bp, Homo sapiens
ataaaaaacaaaaga

SEQ ID NO: 451563 - DNA, 15 bp, Homo sapiens
cataaaaaacaaaag

SEQ ID NO: 451564 - DNA, 15 bp, Homo sapiens
acataaaaaacaaaa

SEQ ID NO: 451565 - DNA, 15 bp, Homo sapiens
tacataaaaaacaaa

SEQ ID NO: 451566 - DNA, 15 bp, Homo sapiens
ctacataaaaaacaa

SEQ ID NO: 451567 - DNA, 15 bp, Homo sapiens
actacataaaaaaca

SEQ ID NO: 451568 - DNA, 15 bp, Homo sapiens
aactacataaaaaac

SEQ ID NO: 451569 - DNA, 15 bp, Homo sapiens
gaactacataaaaaa

SEQ ID NO: 451570 - DNA, 15 bp, Homo sapiens
tgaactacataaaaa

SEQ ID NO: 451571 - DNA, 15 bp, Homo sapiens
atgaactacataaaa

SEQ ID NO: 451572 - DNA, 15 bp, Homo sapiens
aatgaactacataaa

SEQ ID NO: 451573 - DNA, 15 bp, Homo sapiens
aaatgaactacataa

SEQ ID NO: 451574 - DNA, 15 bp, Homo sapiens
caaatgaactacata

SEQ ID NO: 451575 - DNA, 15 bp, Homo sapiens
tcaaatgaactacat

SEQ ID NO: 451576 - DNA, 15 bp, Homo sapiens
ctcaaatgaactaca

SEQ ID NO: 451577 - DNA, 15 bp, Homo sapiens
tctcaaatgaactac

SEQ ID NO: 451578 - DNA, 15 bp, Homo sapiens
ttctcaaatgaacta

SEQ ID NO: 451579 - DNA, 15 bp, Homo sapiens
cttctcaaatgaact

SEQ ID NO: 451580 - DNA, 15 bp, Homo sapiens
tcttctcaaatgaac

SEQ ID NO: 451581 - DNA, 15 bp, Homo sapiens
ttcttctcaaatgaa

SEQ ID NO: 451582 - DNA, 15 bp, Homo sapiens
attcttctcaaatga

SEQ ID NO: 451583 - DNA, 15 bp, Homo sapiens
tattcttctcaaatg

SEQ ID NO: 451584 - DNA, 15 bp, Homo sapiens
ttattcttctcaaat

SEQ ID NO: 451585 - DNA, 15 bp, Homo sapiens
attattcttctcaaa

SEQ ID NO: 451586 - DNA, 15 bp, Homo sapiens
gattattcttctcaa

SEQ ID NO: 451587 - DNA, 15 bp, Homo sapiens
tgattattcttctca

SEQ ID NO: 451588 - DNA, 15 bp, Homo sapiens
gtgattattcttctc

SEQ ID NO: 451589 - DNA, 15 bp, Homo sapiens
agtgattattcttct

SEQ ID NO: 451590 - DNA, 15 bp, Homo sapiens
aagtgattattcttc

SEQ ID NO: 451591 - DNA, 15 bp, Homo sapiens
taagtgattattctt

SEQ ID NO: 451592 - DNA, 15 bp, Homo sapiens
ctaagtgattattct

SEQ ID NO: 451593 - DNA, 15 bp, Homo sapiens
tctaagtgattattc

SEQ ID NO: 451594 - DNA, 15 bp, Homo sapiens
ttctaagtgattatt

SEQ ID NO: 451595 - DNA, 15 bp, Homo sapiens
tttctaagtgattat

SEQ ID NO: 451596 - DNA, 15 bp, Homo sapiens
atttctaagtgatta

SEQ ID NO: 451597 - DNA, 15 bp, Homo sapiens
tatttctaagtgatt

SEQ ID NO: 451598 - DNA, 15 bp, Homo sapiens
atatttctaagtgat

SEQ ID NO: 451599 - DNA, 15 bp, Homo sapiens
gatatttctaagtga

SEQ ID NO: 451600 - DNA, 15 bp, Homo sapiens
ggatatttctaagtg

SEQ ID NO: 451601 - DNA, 15 bp, Homo sapiens
tggatatttctaagt

SEQ ID NO: 451602 - DNA, 15 bp, Homo sapiens
gtggatatttctaag

SEQ ID NO: 451603 - DNA, 15 bp, Homo sapiens
tgtggatatttctaa

SEQ ID NO: 451604 - DNA, 15 bp, Homo sapiens
ctgtggatatttcta

SEQ ID NO: 451605 - DNA, 15 bp, Homo sapiens
actgtggatatttct

SEQ ID NO: 451606 - DNA, 15 bp, Homo sapiens
cactgtggatatttc

SEQ ID NO: 451607 - DNA, 15 bp, Homo sapiens
gcactgtggatattt

SEQ ID NO: 451608 - DNA, 15 bp, Homo sapiens
ggcactgtggatatt

SEQ ID NO: 451609 - DNA, 15 bp, Homo sapiens
tggcactgtggatat

SEQ ID NO: 451610 - DNA, 15 bp, Homo sapiens
ctggcactgtggata

SEQ ID NO: 451611 - DNA, 15 bp, Homo sapiens
cctggcactgtggat

SEQ ID NO: 451612 - DNA, 15 bp, Homo sapiens
gcctggcactgtgga

SEQ ID NO: 451613 - DNA, 15 bp, Homo sapiens
tgcctggcactgtgg

SEQ ID NO: 451614 - DNA, 15 bp, Homo sapiens
atgcctggcactgtg

SEQ ID NO: 451615 - DNA, 15 bp, Homo sapiens
catgcctggcactgt

SEQ ID NO: 451616 - DNA, 15 bp, Homo sapiens
ccatgcctggcactg

SEQ ID NO: 451617 - DNA, 15 bp, Homo sapiens
accatgcctggcact

SEQ ID NO: 451618 - DNA, 15 bp, Homo sapiens
caccatgcctggcac

SEQ ID NO: 451619 - DNA, 15 bp, Homo sapiens
ccaccatgcctggca

SEQ ID NO: 451620 - DNA, 15 bp, Homo sapiens
accaccatgcctggc

SEQ ID NO: 451621 - DNA, 15 bp, Homo sapiens
caccaccatgcctgg

SEQ ID NO: 451622 - DNA, 15 bp, Homo sapiens
gcaccaccatgcctg

SEQ ID NO: 451623 - DNA, 15 bp, Homo sapiens
tgcaccaccatgcct

SEQ ID NO: 451624 - DNA, 15 bp, Homo sapiens
gtgcaccaccatgcc

SEQ ID NO: 451625 - DNA, 15 bp, Homo sapiens
tgtgcaccaccatgc

SEQ ID NO: 451626 - DNA, 15 bp, Homo sapiens
gtgtgcaccaccatg

SEQ ID NO: 451627 - DNA, 15 bp, Homo sapiens
ggtgtgcaccaccat

SEQ ID NO: 451628 - DNA, 15 bp, Homo sapiens
aggtgtgcaccacca

SEQ ID NO: 451629 - DNA, 15 bp, Homo sapiens
gaggtgtgcaccacc

SEQ ID NO: 451630 - DNA, 15 bp, Homo sapiens
agaggtgtgcaccac

SEQ ID NO: 451631 - DNA, 15 bp, Homo sapiens
cagaggtgtgcacca

SEQ ID NO: 451632 - DNA, 15 bp, Homo sapiens
tcagaggtgtgcacc

SEQ ID NO: 451633 - DNA, 15 bp, Homo sapiens
atcagaggtgtgcac

SEQ ID NO: 451634 - DNA, 15 bp, Homo sapiens
gatcagaggtgtgca

SEQ ID NO: 451635 - DNA, 15 bp, Homo sapiens
ggatcagaggtgtgc

SEQ ID NO: 451636 - DNA, 15 bp, Homo sapiens
gggatcagaggtgtg

SEQ ID NO: 451637 - DNA, 15 bp, Homo sapiens
tgggatcagaggtgt

SEQ ID NO: 451638 - DNA, 15 bp, Homo sapiens
ctgggatcagaggtg

SEQ ID NO: 451639 - DNA, 15 bp, Homo sapiens
gctgggatcagaggt

SEQ ID NO: 451640 - DNA, 15 bp, Homo sapiens
agctgggatcagagg

SEQ ID NO: 451641 - DNA, 15 bp, Homo sapiens
tagctgggatcagag

SEQ ID NO: 451642 - DNA, 15 bp, Homo sapiens
ttagctgggatcaga

SEQ ID NO: 451643 - DNA, 15 bp, Homo sapiens
attagctgggatcag

SEQ ID NO: 451644 - DNA, 15 bp, Homo sapiens
aattagctgggatca

SEQ ID NO: 451645 - DNA, 15 bp, Homo sapiens
caattagctgggatc

SEQ ID NO: 451646 - DNA, 15 bp, Homo sapiens
tcaattagctgggat

SEQ ID NO: 451647 - DNA, 15 bp, Homo sapiens
ttcaattagctggga

SEQ ID NO: 451648 - DNA, 15 bp, Homo sapiens
cttcaattagctggg

SEQ ID NO: 451649 - DNA, 15 bp, Homo sapiens
ccttcaattagctgg

SEQ ID NO: 451650 - DNA, 15 bp, Homo sapiens
gccttcaattagctg

SEQ ID NO: 451651 - DNA, 15 bp, Homo sapiens
agccttcaattagct

SEQ ID NO: 451652 - DNA, 15 bp, Homo sapiens
cagccttcaattagc

SEQ ID NO: 451653 - DNA, 15 bp, Homo sapiens
tcagccttcaattag

SEQ ID NO: 451654 - DNA, 15 bp, Homo sapiens
ctcagccttcaatta

SEQ ID NO: 451655 - DNA, 15 bp, Homo sapiens
cctcagccttcaatt

SEQ ID NO: 451656 - DNA, 15 bp, Homo sapiens
acctcagccttcaat

SEQ ID NO: 451657 - DNA, 15 bp, Homo sapiens
cacctcagccttcaa

SEQ ID NO: 451658 - DNA, 15 bp, Homo sapiens
ccacctcagccttca

SEQ ID NO: 451659 - DNA, 15 bp, Homo sapiens
cccacctcagccttc

SEQ ID NO: 451660 - DNA, 15 bp, Homo sapiens
tcccacctcagcctt

SEQ ID NO: 451661 - DNA, 15 bp, Homo sapiens
ctcccacctcagcct

SEQ ID NO: 451662 - DNA, 15 bp, Homo sapiens
cctcccacctcagcc

SEQ ID NO: 451663 - DNA, 15 bp, Homo sapiens
tcctcccacctcagc

SEQ ID NO: 451664 - DNA, 15 bp, Homo sapiens
atcctcccacctcag

SEQ ID NO: 451665 - DNA, 15 bp, Homo sapiens
aatcctcccacctca

SEQ ID NO: 451666 - DNA, 15 bp, Homo sapiens
gaatcctcccacctc

SEQ ID NO: 451667 - DNA, 15 bp, Homo sapiens
ggaatcctcccacct

SEQ ID NO: 451668 - DNA, 15 bp, Homo sapiens
aggaatcctcccacc

SEQ ID NO: 451669 - DNA, 15 bp, Homo sapiens
aaggaatcctcccac

SEQ ID NO: 451670 - DNA, 15 bp, Homo sapiens
caaggaatcctccca

SEQ ID NO: 451671 - DNA, 15 bp, Homo sapiens
tcaaggaatcctccc

SEQ ID NO: 451672 - DNA, 15 bp, Homo sapiens
ctcaaggaatcctcc

SEQ ID NO: 451673 - DNA, 15 bp, Homo sapiens
actcaaggaatcctc

SEQ ID NO: 451674 - DNA, 15 bp, Homo sapiens
gactcaaggaatcct

SEQ ID NO: 451675 - DNA, 15 bp, Homo sapiens
ggactcaaggaatcc

SEQ ID NO: 451676 - DNA, 15 bp, Homo sapiens
tggactcaaggaatc

SEQ ID NO: 451677 - DNA, 15 bp, Homo sapiens
ctggactcaaggaat

SEQ ID NO: 451678 - DNA, 15 bp, Homo sapiens
cctggactcaaggaa

SEQ ID NO: 451679 - DNA, 15 bp, Homo sapiens
tcctggactcaagga

SEQ ID NO: 451680 - DNA, 15 bp, Homo sapiens
ctcctggactcaagg

SEQ ID NO: 451681 - DNA, 15 bp, Homo sapiens
actcctggactcaag

SEQ ID NO: 451682 - DNA, 15 bp, Homo sapiens
aactcctggactcaa

SEQ ID NO: 451683 - DNA, 15 bp, Homo sapiens
caactcctggactca

SEQ ID NO: 451684 - DNA, 15 bp, Homo sapiens
tcaactcctggactc

SEQ ID NO: 451685 - DNA, 15 bp, Homo sapiens
ctcaactcctggact

SEQ ID NO: 451686 - DNA, 15 bp, Homo sapiens
actcaactcctggac

SEQ ID NO: 451687 - DNA, 15 bp, Homo sapiens
gactcaactcctgga

SEQ ID NO: 451688 - DNA, 15 bp, Homo sapiens
agactcaactcctgg

SEQ ID NO: 451689 - DNA, 15 bp, Homo sapiens
cagactcaactcctg

SEQ ID NO: 451690 - DNA, 15 bp, Homo sapiens
ccagactcaactcct

SEQ ID NO: 451691 - DNA, 15 bp, Homo sapiens
accagactcaactcc

SEQ ID NO: 451692 - DNA, 15 bp, Homo sapiens
gaccagactcaactc

SEQ ID NO: 451693 - DNA, 15 bp, Homo sapiens
agaccagactcaact

SEQ ID NO: 451694 - DNA, 15 bp, Homo sapiens
cagaccagactcaac

SEQ ID NO: 451695 - DNA, 15 bp, Homo sapiens
ccagaccagactcaa

SEQ ID NO: 451696 - DNA, 15 bp, Homo sapiens
cccagaccagactca

SEQ ID NO: 451697 - DNA, 15 bp, Homo sapiens
gcccagaccagactc

SEQ ID NO: 451698 - DNA, 15 bp, Homo sapiens
tgcccagaccagact

SEQ ID NO: 451699 - DNA, 15 bp, Homo sapiens
ttgcccagaccagac

SEQ ID NO: 451700 - DNA, 15 bp, Homo sapiens
gttgcccagaccaga

SEQ ID NO: 451701 - DNA, 15 bp, Homo sapiens
tgttgcccagaccag

SEQ ID NO: 451702 - DNA, 15 bp, Homo sapiens
atgttgcccagacca

SEQ ID NO: 451703 - DNA, 15 bp, Homo sapiens
catgttgcccagacc

SEQ ID NO: 451704 - DNA, 15 bp, Homo sapiens
ccatgttgcccagac

SEQ ID NO: 451705 - DNA, 15 bp, Homo sapiens
accatgttgcccaga

SEQ ID NO: 451706 - DNA, 15 bp, Homo sapiens
caccatgttgcccag

SEQ ID NO: 451707 - DNA, 15 bp, Homo sapiens
tcaccatgttgccca

SEQ ID NO: 451708 - DNA, 15 bp, Homo sapiens
ctcaccatgttgccc

SEQ ID NO: 451709 - DNA, 15 bp, Homo sapiens
tctcaccatgttgcc

SEQ ID NO: 451710 - DNA, 15 bp, Homo sapiens
ctctcaccatgttgc

SEQ ID NO: 451711 - DNA, 15 bp, Homo sapiens
cctctcaccatgttg

SEQ ID NO: 451712 - DNA, 15 bp, Homo sapiens
gcctctcaccatgtt

SEQ ID NO: 451713 - DNA, 15 bp, Homo sapiens
ggcctctcaccatgt

SEQ ID NO: 451714 - DNA, 15 bp, Homo sapiens
tggcctctcaccatg

SEQ ID NO: 451715 - DNA, 15 bp, Homo sapiens
ctggcctctcaccat

SEQ ID NO: 451716 - DNA, 15 bp, Homo sapiens
cctggcctctcacca

SEQ ID NO: 451717 - DNA, 15 bp, Homo sapiens
tcctggcctctcacc

SEQ ID NO: 451718 - DNA, 15 bp, Homo sapiens
ttcctggcctctcac

SEQ ID NO: 451719 - DNA, 15 bp, Homo sapiens
attcctggcctctca

SEQ ID NO: 451720 - DNA, 15 bp, Homo sapiens
aattcctggcctctc

SEQ ID NO: 451721 - DNA, 15 bp, Homo sapiens
caattcctggcctct

SEQ ID NO: 451722 - DNA, 15 bp, Homo sapiens
ccaattcctggcctc

SEQ ID NO: 451723 - DNA, 15 bp, Homo sapiens
cccaattcctggcct

SEQ ID NO: 451724 - DNA, 15 bp, Homo sapiens
acccaattcctggcc

SEQ ID NO: 451725 - DNA, 15 bp, Homo sapiens
gacccaattcctggc

SEQ ID NO: 451726 - DNA, 15 bp, Homo sapiens
agacccaattcctgg

SEQ ID NO: 451727 - DNA, 15 bp, Homo sapiens
tagacccaattcctg

SEQ ID NO: 451728 - DNA, 15 bp, Homo sapiens
ctagacccaattcct

SEQ ID NO: 451729 - DNA, 15 bp, Homo sapiens
tctagacccaattcc

SEQ ID NO: 451730 - DNA, 15 bp, Homo sapiens
ctctagacccaattc

SEQ ID NO: 451731 - DNA, 15 bp, Homo sapiens
actctagacccaatt

SEQ ID NO: 451732 - DNA, 15 bp, Homo sapiens
gactctagacccaat

SEQ ID NO: 451733 - DNA, 15 bp, Homo sapiens
agactctagacccaa

SEQ ID NO: 451734 - DNA, 15 bp, Homo sapiens
tagactctagaccca

SEQ ID NO: 451735 - DNA, 15 bp, Homo sapiens
ctagactctagaccc

SEQ ID NO: 451736 - DNA, 15 bp, Homo sapiens
actagactctagacc

SEQ ID NO: 451737 - DNA, 15 bp, Homo sapiens
gactagactctagac

SEQ ID NO: 451738 - DNA, 15 bp, Homo sapiens
agactagactctaga

SEQ ID NO: 451739 - DNA, 15 bp, Homo sapiens
tagactagactctag

SEQ ID NO: 451740 - DNA, 15 bp, Homo sapiens
ttagactagactcta

SEQ ID NO: 451741 - DNA, 15 bp, Homo sapiens
cttagactagactct

SEQ ID NO: 451742 - DNA, 15 bp, Homo sapiens
gcttagactagactc

SEQ ID NO: 451743 - DNA, 15 bp, Homo sapiens
tgcttagactagact

SEQ ID NO: 451744 - DNA, 15 bp, Homo sapiens
gtgcttagactagac

SEQ ID NO: 451745 - DNA, 15 bp, Homo sapiens
ggtgcttagactaga

SEQ ID NO: 451746 - DNA, 15 bp, Homo sapiens
tggtgcttagactag

SEQ ID NO: 451747 - DNA, 15 bp, Homo sapiens
atggtgcttagacta

SEQ ID NO: 451748 - DNA, 15 bp, Homo sapiens
tatggtgcttagact

SEQ ID NO: 451749 - DNA, 15 bp, Homo sapiens
ttatggtgcttagac

SEQ ID NO: 451750 - DNA, 15 bp, Homo sapiens
attatggtgcttaga

SEQ ID NO: 451751 - DNA, 15 bp, Homo sapiens
cattatggtgcttag

SEQ ID NO: 451752 - DNA, 15 bp, Homo sapiens
tcattatggtgctta

SEQ ID NO: 451753 - DNA, 15 bp, Homo sapiens
ctcattatggtgctt

SEQ ID NO: 451754 - DNA, 15 bp, Homo sapiens
tctcattatggtgct

SEQ ID NO: 451755 - DNA, 15 bp, Homo sapiens
ttctcattatggtgc

SEQ ID NO: 451756 - DNA, 15 bp, Homo sapiens
gttctcattatggtg

SEQ ID NO: 451757 - DNA, 15 bp, Homo sapiens
ggttctcattatggt

SEQ ID NO: 451758 - DNA, 15 bp, Homo sapiens
gggttctcattatgg

SEQ ID NO: 451759 - DNA, 15 bp, Homo sapiens
tgggttctcattatg

SEQ ID NO: 451760 - DNA, 15 bp, Homo sapiens
atgggttctcattat

SEQ ID NO: 451761 - DNA, 15 bp, Homo sapiens
gatgggttctcatta

SEQ ID NO: 451762 - DNA, 15 bp, Homo sapiens
agatgggttctcatt

SEQ ID NO: 451763 - DNA, 15 bp, Homo sapiens
aagatgggttctcat

SEQ ID NO: 451764 - DNA, 15 bp, Homo sapiens
aaagatgggttctca

SEQ ID NO: 451765 - DNA, 15 bp, Homo sapiens
taaagatgggttctc

SEQ ID NO: 451766 - DNA, 15 bp, Homo sapiens
ttaaagatgggttct

SEQ ID NO: 451767 - DNA, 15 bp, Homo sapiens
cttaaagatgggttc

SEQ ID NO: 451768 - DNA, 15 bp, Homo sapiens
tcttaaagatgggtt

SEQ ID NO: 451769 - DNA, 15 bp, Homo sapiens
ttcttaaagatgggt

SEQ ID NO: 451770 - DNA, 15 bp, Homo sapiens
tttcttaaagatggg

SEQ ID NO: 451771 - DNA, 15 bp, Homo sapiens
ctttcttaaagatgg

SEQ ID NO: 451772 - DNA, 15 bp, Homo sapiens
tctttcttaaagatg

SEQ ID NO: 451773 - DNA, 15 bp, Homo sapiens
ttctttcttaaagat

SEQ ID NO: 451774 - DNA, 15 bp, Homo sapiens
tttctttcttaaaga

SEQ ID NO: 451775 - DNA, 15 bp, Homo sapiens
ctttctttcttaaag

SEQ ID NO: 451776 - DNA, 15 bp, Homo sapiens
tctttctttcttaaa

SEQ ID NO: 451777 - DNA, 15 bp, Homo sapiens
ttctttctttcttaa

SEQ ID NO: 451778 - DNA, 15 bp, Homo sapiens
tttctttctttctta

SEQ ID NO: 451779 - DNA, 15 bp, Homo sapiens
ctttctttctttctt

SEQ ID NO: 451780 - DNA, 15 bp, Homo sapiens
cctttctttctttct

SEQ ID NO: 451781 - DNA, 15 bp, Homo sapiens
tcctttctttctttc

SEQ ID NO: 451782 - DNA, 15 bp, Homo sapiens
ttcctttctttcttt

SEQ ID NO: 451783 - DNA, 15 bp, Homo sapiens
tttcctttctttctt

SEQ ID NO: 451784 - DNA, 15 bp, Homo sapiens
ctttcctttctttct

SEQ ID NO: 451785 - DNA, 15 bp, Homo sapiens
cctttcctttctttc

SEQ ID NO: 451786 - DNA, 15 bp, Homo sapiens
tcctttcctttcttt

SEQ ID NO: 451787 - DNA, 15 bp, Homo sapiens
ctcctttcctttctt

SEQ ID NO: 451788 - DNA, 15 bp, Homo sapiens
cctcctttcctttct

SEQ ID NO: 451789 - DNA, 15 bp, Homo sapiens
tcctcctttcctttc

SEQ ID NO: 451790 - DNA, 15 bp, Homo sapiens
ttcctcctttccttt

SEQ ID NO: 451791 - DNA, 15 bp, Homo sapiens
cttcctcctttcctt

SEQ ID NO: 451792 - DNA, 15 bp, Homo sapiens
tcttcctcctttcct

SEQ ID NO: 451793 - DNA, 15 bp, Homo sapiens
ttcttcctcctttcc

SEQ ID NO: 451794 - DNA, 15 bp, Homo sapiens
tttcttcctcctttc

SEQ ID NO: 451795 - DNA, 15 bp, Homo sapiens
ctttcttcctccttt

SEQ ID NO: 451796 - DNA, 15 bp, Homo sapiens
cctttcttcctcctt

SEQ ID NO: 451797 - DNA, 15 bp, Homo sapiens
tcctttcttcctcct

SEQ ID NO: 451798 - DNA, 15 bp, Homo sapiens
ttcctttcttcctcc

SEQ ID NO: 451799 - DNA, 15 bp, Homo sapiens
tttcctttcttcctc

SEQ ID NO: 451800 - DNA, 15 bp, Homo sapiens
ctttcctttcttcct

SEQ ID NO: 451801 - DNA, 15 bp, Homo sapiens
tctttcctttcttcc

SEQ ID NO: 451802 - DNA, 15 bp, Homo sapiens
ttctttcctttcttc

SEQ ID NO: 451803 - DNA, 15 bp, Homo sapiens
tttctttcctttctt

SEQ ID NO: 451804 - DNA, 15 bp, Homo sapiens
ttttctttcctttct

SEQ ID NO: 451805 - DNA, 15 bp, Homo sapiens
tttttctttcctttc

SEQ ID NO: 451806 - DNA, 15 bp, Homo sapiens
ctttttctttccttt

SEQ ID NO: 451807 - DNA, 15 bp, Homo sapiens
tctttttctttcctt

SEQ ID NO: 451808 - DNA, 15 bp, Homo sapiens
ttctttttctttcct

SEQ ID NO: 451809 - DNA, 15 bp, Homo sapiens
tttctttttctttcc

SEQ ID NO: 451810 - DNA, 15 bp, Homo sapiens
atttctttttctttc

SEQ ID NO: 451811 - DNA, 15 bp, Homo sapiens
tatttctttttcttt

SEQ ID NO: 451812 - DNA, 15 bp, Homo sapiens
gtatttctttttctt

SEQ ID NO: 451813 - DNA, 15 bp, Homo sapiens
ggtatttctttttct

SEQ ID NO: 451814 - DNA, 15 bp, Homo sapiens
gggtatttctttttc

SEQ ID NO: 451815 - DNA, 15 bp, Homo sapiens
tgggtatttcttttt

SEQ ID NO: 451816 - DNA, 15 bp, Homo sapiens
gtgggtatttctttt

SEQ ID NO: 451817 - DNA, 15 bp, Homo sapiens
tgtgggtatttcttt

SEQ ID NO: 451818 - DNA, 15 bp, Homo sapiens
ctgtgggtatttctt

SEQ ID NO: 451819 - DNA, 15 bp, Homo sapiens
gctgtgggtatttct

SEQ ID NO: 451820 - DNA, 15 bp, Homo sapiens
tgctgtgggtatttc

SEQ ID NO: 451821 - DNA, 15 bp, Homo sapiens
gtgctgtgggtattt

SEQ ID NO: 451822 - DNA, 15 bp, Homo sapiens
tgtgctgtgggtatt

SEQ ID NO: 451823 - DNA, 15 bp, Homo sapiens
ctgtgctgtgggtat

SEQ ID NO: 451824 - DNA, 15 bp, Homo sapiens
actgtgctgtgggta

SEQ ID NO: 451825 - DNA, 15 bp, Homo sapiens
aactgtgctgtgggt

SEQ ID NO: 451826 - DNA, 15 bp, Homo sapiens
taactgtgctgtggg

SEQ ID NO: 451827 - DNA, 15 bp, Homo sapiens
ataactgtgctgtgg

SEQ ID NO: 451828 - DNA, 15 bp, Homo sapiens
cataactgtgctgtg

SEQ ID NO: 451829 - DNA, 15 bp, Homo sapiens
tcataactgtgctgt

SEQ ID NO: 451830 - DNA, 15 bp, Homo sapiens
ttcataactgtgctg

SEQ ID NO: 451831 - DNA, 15 bp, Homo sapiens
attcataactgtgct

SEQ ID NO: 451832 - DNA, 15 bp, Homo sapiens
aattcataactgtgc

SEQ ID NO: 451833 - DNA, 15 bp, Homo sapiens
taattcataactgtg

SEQ ID NO: 451834 - DNA, 15 bp, Homo sapiens
ttaattcataactgt

SEQ ID NO: 451835 - DNA, 15 bp, Homo sapiens
gttaattcataactg

SEQ ID NO: 451836 - DNA, 15 bp, Homo sapiens
ggttaattcataact

SEQ ID NO: 451837 - DNA, 15 bp, Homo sapiens
gggttaattcataac

SEQ ID NO: 451838 - DNA, 15 bp, Homo sapiens
tgggttaattcataa

SEQ ID NO: 451839 - DNA, 15 bp, Homo sapiens
gtgggttaattcata

SEQ ID NO: 451840 - DNA, 15 bp, Homo sapiens
tgtgggttaattcat

SEQ ID NO: 451841 - DNA, 15 bp, Homo sapiens
ttgtgggttaattca

SEQ ID NO: 451842 - DNA, 15 bp, Homo sapiens
tttgtgggttaattc

SEQ ID NO: 451843 - DNA, 15 bp, Homo sapiens
ctttgtgggttaatt

SEQ ID NO: 451844 - DNA, 15 bp, Homo sapiens
cctttgtgggttaat

SEQ ID NO: 451845 - DNA, 15 bp, Homo sapiens
tcctttgtgggttaa

SEQ ID NO: 451846 - DNA, 15 bp, Homo sapiens
gtcctttgtgggtta

SEQ ID NO: 451847 - DNA, 15 bp, Homo sapiens
agtcctttgtgggtt

SEQ ID NO: 451848 - DNA, 15 bp, Homo sapiens
aagtcctttgtgggt

SEQ ID NO: 451849 - DNA, 15 bp, Homo sapiens
caagtcctttgtggg

SEQ ID NO: 451850 - DNA, 15 bp, Homo sapiens
acaagtcctttgtgg

SEQ ID NO: 451851 - DNA, 15 bp, Homo sapiens
cacaagtcctttgtg

SEQ ID NO: 451852 - DNA, 15 bp, Homo sapiens
tcacaagtcctttgt

SEQ ID NO: 451853 - DNA, 15 bp, Homo sapiens
ctcacaagtcctttg

SEQ ID NO: 451854 - DNA, 15 bp, Homo sapiens
cctcacaagtccttt

SEQ ID NO: 451855 - DNA, 15 bp, Homo sapiens
acctcacaagtcctt

SEQ ID NO: 451856 - DNA, 15 bp, Homo sapiens
cacctcacaagtcct

SEQ ID NO: 451857 - DNA, 15 bp, Homo sapiens
ccacctcacaagtcc

SEQ ID NO: 451858 - DNA, 15 bp, Homo sapiens
cccacctcacaagtc

SEQ ID NO: 451859 - DNA, 15 bp, Homo sapiens
acccacctcacaagt

SEQ ID NO: 451860 - DNA, 15 bp, Homo sapiens
tacccacctcacaag

SEQ ID NO: 451861 - DNA, 15 bp, Homo sapiens
ctacccacctcacaa

SEQ ID NO: 451862 - DNA, 15 bp, Homo sapiens
actacccacctcaca

SEQ ID NO: 451863 - DNA, 15 bp, Homo sapiens
aactacccacctcac

SEQ ID NO: 451864 - DNA, 15 bp, Homo sapiens
gaactacccacctca

SEQ ID NO: 451865 - DNA, 15 bp, Homo sapiens
tgaactacccacctc

SEQ ID NO: 451866 - DNA, 15 bp, Homo sapiens
gtgaactacccacct

SEQ ID NO: 451867 - DNA, 15 bp, Homo sapiens
tgtgaactacccacc

SEQ ID NO: 451868 - DNA, 15 bp, Homo sapiens
atgtgaactacccac

SEQ ID NO: 451869 - DNA, 15 bp, Homo sapiens
tatgtgaactaccca

SEQ ID NO: 451870 - DNA, 15 bp, Homo sapiens
ttatgtgaactaccc

SEQ ID NO: 451871 - DNA, 15 bp, Homo sapiens
gttatgtgaactacc

SEQ ID NO: 451872 - DNA, 15 bp, Homo sapiens
tgttatgtgaactac

SEQ ID NO: 451873 - DNA, 15 bp, Homo sapiens
ttgttatgtgaacta

SEQ ID NO: 451874 - DNA, 15 bp, Homo sapiens
attgttatgtgaact

SEQ ID NO: 451875 - DNA, 15 bp, Homo sapiens
aattgttatgtgaac

SEQ ID NO: 451876 - DNA, 15 bp, Homo sapiens
taattgttatgtgaa

SEQ ID NO: 451877 - DNA, 15 bp, Homo sapiens
gtaattgttatgtga

SEQ ID NO: 451878 - DNA, 15 bp, Homo sapiens
ggtaattgttatgtg

SEQ ID NO: 451879 - DNA, 15 bp, Homo sapiens
gggtaattgttatgt

SEQ ID NO: 451880 - DNA, 15 bp, Homo sapiens
agggtaattgttatg

SEQ ID NO: 451881 - DNA, 15 bp, Homo sapiens
tagggtaattgttat

SEQ ID NO: 451882 - DNA, 15 bp, Homo sapiens
ttagggtaattgtta

SEQ ID NO: 451883 - DNA, 15 bp, Homo sapiens
attagggtaattgtt

SEQ ID NO: 451884 - DNA, 15 bp, Homo sapiens
tattagggtaattgt

SEQ ID NO: 451885 - DNA, 15 bp, Homo sapiens
atattagggtaattg

SEQ ID NO: 451886 - DNA, 15 bp, Homo sapiens
gatattagggtaatt

SEQ ID NO: 451887 - DNA, 15 bp, Homo sapiens
cgatattagggtaat

SEQ ID NO: 451888 - DNA, 15 bp, Homo sapiens
acgatattagggtaa

SEQ ID NO: 451889 - DNA, 15 bp, Homo sapiens
tacgatattagggta

SEQ ID NO: 451890 - DNA, 15 bp, Homo sapiens
ctacgatattagggt

SEQ ID NO: 451891 - DNA, 15 bp, Homo sapiens
tctacgatattaggg

SEQ ID NO: 451892 - DNA, 15 bp, Homo sapiens
atctacgatattagg

SEQ ID NO: 451893 - DNA, 15 bp, Homo sapiens
tatctacgatattag

SEQ ID NO: 451894 - DNA, 15 bp, Homo sapiens
ttatctacgatatta

SEQ ID NO: 451895 - DNA, 15 bp, Homo sapiens
cttatctacgatatt

SEQ ID NO: 451896 - DNA, 15 bp, Homo sapiens
tcttatctacgatat

SEQ ID NO: 451897 - DNA, 15 bp, Homo sapiens
ttcttatctacgata

SEQ ID NO: 451898 - DNA, 15 bp, Homo sapiens
tttcttatctacgat

SEQ ID NO: 451899 - DNA, 15 bp, Homo sapiens
ttttcttatctacga

SEQ ID NO: 451900 - DNA, 15 bp, Homo sapiens
attttcttatctacg

SEQ ID NO: 451901 - DNA, 15 bp, Homo sapiens
aattttcttatctac

SEQ ID NO: 451902 - DNA, 15 bp, Homo sapiens
caattttcttatcta

SEQ ID NO: 451903 - DNA, 15 bp, Homo sapiens
tctagagacagaaat

SEQ ID NO: 451904 - DNA, 15 bp, Homo sapiens
ttctagagacagaaa

SEQ ID NO: 451905 - DNA, 15 bp, Homo sapiens
tttctagagacagaa

SEQ ID NO: 451906 - DNA, 15 bp, Homo sapiens
ctttctagagacaga

SEQ ID NO: 451907 - DNA, 15 bp, Homo sapiens
actttctagagacag

SEQ ID NO: 451908 - DNA, 15 bp, Homo sapiens
aactttctagagaca

SEQ ID NO: 451909 - DNA, 15 bp, Homo sapiens
caactttctagagac

SEQ ID NO: 451910 - DNA, 15 bp, Homo sapiens
gcaactttctagaga

SEQ ID NO: 451911 - DNA, 15 bp, Homo sapiens
agcaactttctagag

SEQ ID NO: 451912 - DNA, 15 bp, Homo sapiens
aagcaactttctaga

SEQ ID NO: 451913 - DNA, 15 bp, Homo sapiens
aaagcaactttctag

SEQ ID NO: 451914 - DNA, 15 bp, Homo sapiens
taaagcaactttcta

SEQ ID NO: 451915 - DNA, 15 bp, Homo sapiens
ttaaagcaactttct

SEQ ID NO: 451916 - DNA, 15 bp, Homo sapiens
gttaaagcaactttc

SEQ ID NO: 451917 - DNA, 15 bp, Homo sapiens
agttaaagcaacttt

SEQ ID NO: 451918 - DNA, 15 bp, Homo sapiens
aagttaaagcaactt

SEQ ID NO: 451919 - DNA, 15 bp, Homo sapiens
gaagttaaagcaact

SEQ ID NO: 451920 - DNA, 15 bp, Homo sapiens
agaagttaaagcaac

SEQ ID NO: 451921 - DNA, 15 bp, Homo sapiens
gagaagttaaagcaa

SEQ ID NO: 451922 - DNA, 15 bp, Homo sapiens
agagaagttaaagca

SEQ ID NO: 451923 - DNA, 15 bp, Homo sapiens
cagagaagttaaagc

SEQ ID NO: 451924 - DNA, 15 bp, Homo sapiens
gcagagaagttaaag

SEQ ID NO: 451925 - DNA, 15 bp, Homo sapiens
ggcagagaagttaaa

SEQ ID NO: 451926 - DNA, 15 bp, Homo sapiens
aggcagagaagttaa

SEQ ID NO: 451927 - DNA, 15 bp, Homo sapiens
gaggcagagaagtta

SEQ ID NO: 451928 - DNA, 15 bp, Homo sapiens
agaggcagagaagtt

SEQ ID NO: 451929 - DNA, 15 bp, Homo sapiens
tagaggcagagaagt

SEQ ID NO: 451930 - DNA, 15 bp, Homo sapiens
gtagaggcagagaag

SEQ ID NO: 451931 - DNA, 15 bp, Homo sapiens
cgtagaggcagagaa

SEQ ID NO: 451932 - DNA, 15 bp, Homo sapiens
acgtagaggcagaga

SEQ ID NO: 451933 - DNA, 15 bp, Homo sapiens
cacgtagaggcagag

SEQ ID NO: 451934 - DNA, 15 bp, Homo sapiens
acacgtagaggcaga

SEQ ID NO: 451935 - DNA, 15 bp, Homo sapiens
gacacgtagaggcag

SEQ ID NO: 451936 - DNA, 15 bp, Homo sapiens
agacacgtagaggca

SEQ ID NO: 451937 - DNA, 15 bp, Homo sapiens
gagacacgtagaggc

SEQ ID NO: 451938 - DNA, 15 bp, Homo sapiens
agagacacgtagagg

SEQ ID NO: 451939 - DNA, 15 bp, Homo sapiens
aagagacacgtagag

SEQ ID NO: 451940 - DNA, 15 bp, Homo sapiens
caagagacacgtaga

SEQ ID NO: 451941 - DNA, 15 bp, Homo sapiens
tcaagagacacgtag

SEQ ID NO: 451942 - DNA, 15 bp, Homo sapiens
gtcaagagacacgta

SEQ ID NO: 451943 - DNA, 15 bp, Homo sapiens
tgtcaagagacacgt

SEQ ID NO: 451944 - DNA, 15 bp, Homo sapiens
atgtcaagagacacg

SEQ ID NO: 451945 - DNA, 15 bp, Homo sapiens
aatgtcaagagacac

SEQ ID NO: 451946 - DNA, 15 bp, Homo sapiens
gaatgtcaagagaca

SEQ ID NO: 451947 - DNA, 15 bp, Homo sapiens
tgaatgtcaagagac

SEQ ID NO: 451948 - DNA, 15 bp, Homo sapiens
ctgaatgtcaagaga

SEQ ID NO: 451949 - DNA, 15 bp, Homo sapiens
tctgaatgtcaagag

SEQ ID NO: 451950 - DNA, 15 bp, Homo sapiens
atctgaatgtcaaga

SEQ ID NO: 451951 - DNA, 15 bp, Homo sapiens
tatctgaatgtcaag

SEQ ID NO: 451952 - DNA, 15 bp, Homo sapiens
atatctgaatgtcaa

SEQ ID NO: 451953 - DNA, 15 bp, Homo sapiens
catatctgaatgtca

SEQ ID NO: 451954 - DNA, 15 bp, Homo sapiens
tcatatctgaatgtc

SEQ ID NO: 451955 - DNA, 15 bp, Homo sapiens
ctcatatctgaatgt

SEQ ID NO: 451956 - DNA, 15 bp, Homo sapiens
cctcatatctgaatg

SEQ ID NO: 451957 - DNA, 15 bp, Homo sapiens
acctcatatctgaat

SEQ ID NO: 451958 - DNA, 15 bp, Homo sapiens
cacctcatatctgaa

SEQ ID NO: 451959 - DNA, 15 bp, Homo sapiens
ccacctcatatctga

SEQ ID NO: 451960 - DNA, 15 bp, Homo sapiens
cccacctcatatctg

SEQ ID NO: 451961 - DNA, 15 bp, Homo sapiens
ccccacctcatatct

SEQ ID NO: 451962 - DNA, 15 bp, Homo sapiens
accccacctcatatc

SEQ ID NO: 451963 - DNA, 15 bp, Homo sapiens
taccccacctcatat

SEQ ID NO: 451964 - DNA, 15 bp, Homo sapiens
ctaccccacctcata

SEQ ID NO: 451965 - DNA, 15 bp, Homo sapiens
tctaccccacctcat

SEQ ID NO: 451966 - DNA, 15 bp, Homo sapiens
ctctaccccacctca

SEQ ID NO: 451967 - DNA, 15 bp, Homo sapiens
cctctaccccacctc

SEQ ID NO: 451968 - DNA, 15 bp, Homo sapiens
acctctaccccacct

SEQ ID NO: 451969 - DNA, 15 bp, Homo sapiens
cacctctaccccacc

SEQ ID NO: 451970 - DNA, 15 bp, Homo sapiens
ccacctctaccccac

SEQ ID NO: 451971 - DNA, 15 bp, Homo sapiens
accacctctacccca

SEQ ID NO: 451972 - DNA, 15 bp, Homo sapiens
caccacctctacccc

SEQ ID NO: 451973 - DNA, 15 bp, Homo sapiens
tcaccacctctaccc

SEQ ID NO: 451974 - DNA, 15 bp, Homo sapiens
gtcaccacctctacc

SEQ ID NO: 451975 - DNA, 15 bp, Homo sapiens
ggtcaccacctctac

SEQ ID NO: 451976 - DNA, 15 bp, Homo sapiens
tggtcaccacctcta

SEQ ID NO: 451977 - DNA, 15 bp, Homo sapiens
ttggtcaccacctct

SEQ ID NO: 451978 - DNA, 15 bp, Homo sapiens
gttggtcaccacctc

SEQ ID NO: 451979 - DNA, 15 bp, Homo sapiens
agttggtcaccacct

SEQ ID NO: 451980 - DNA, 15 bp, Homo sapiens
aagttggtcaccacc

SEQ ID NO: 451981 - DNA, 15 bp, Homo sapiens
aaagttggtcaccac

SEQ ID NO: 451982 - DNA, 15 bp, Homo sapiens
gaaagttggtcacca

SEQ ID NO: 451983 - DNA, 15 bp, Homo sapiens
ggaaagttggtcacc

SEQ ID NO: 451984 - DNA, 15 bp, Homo sapiens
tggaaagttggtcac

SEQ ID NO: 451985 - DNA, 15 bp, Homo sapiens
ctggaaagttggtca

SEQ ID NO: 451986 - DNA, 15 bp, Homo sapiens
tctggaaagttggtc

SEQ ID NO: 451987 - DNA, 15 bp, Homo sapiens
gtctggaaagttggt

SEQ ID NO: 451988 - DNA, 15 bp, Homo sapiens
cgtctggaaagttgg

SEQ ID NO: 451989 - DNA, 15 bp, Homo sapiens
gcgtctggaaagttg

SEQ ID NO: 451990 - DNA, 15 bp, Homo sapiens
ggcgtctggaaagtt

SEQ ID NO: 451991 - DNA, 15 bp, Homo sapiens
aggcgtctggaaagt

SEQ ID NO: 451992 - DNA, 15 bp, Homo sapiens
caggcgtctggaaag

SEQ ID NO: 451993 - DNA, 15 bp, Homo sapiens
tcaggcgtctggaaa

SEQ ID NO: 451994 - DNA, 15 bp, Homo sapiens
ctcaggcgtctggaa

SEQ ID NO: 451995 - DNA, 15 bp, Homo sapiens
actcaggcgtctgga

SEQ ID NO: 451996 - DNA, 15 bp, Homo sapiens
gactcaggcgtctgg

SEQ ID NO: 451997 - DNA, 15 bp, Homo sapiens
ggactcaggcgtctg

SEQ ID NO: 451998 - DNA, 15 bp, Homo sapiens
tggactcaggcgtct

SEQ ID NO: 451999 - DNA, 15 bp, Homo sapiens
ttggactcaggcgtc

SEQ ID NO: 452000 - DNA, 15 bp, Homo sapiens
tttggactcaggcgt

SEQ ID NO: 452001 - DNA, 15 bp, Homo sapiens
gtttggactcaggcg

SEQ ID NO: 452002 - DNA, 15 bp, Homo sapiens
ggtttggactcaggc

SEQ ID NO: 452003 - DNA, 15 bp, Homo sapiens
aggtttggactcagg

SEQ ID NO: 452004 - DNA, 15 bp, Homo sapiens
aaggtttggactcag

SEQ ID NO: 452005 - DNA, 15 bp, Homo sapiens
gaaggtttggactca

SEQ ID NO: 452006 - DNA, 15 bp, Homo sapiens
agaaggtttggactc

SEQ ID NO: 452007 - DNA, 15 bp, Homo sapiens
aagaaggtttggact

SEQ ID NO: 452008 - DNA, 15 bp, Homo sapiens
taagaaggtttggac

SEQ ID NO: 452009 - DNA, 15 bp, Homo sapiens
ctaagaaggtttgga

SEQ ID NO: 452010 - DNA, 15 bp, Homo sapiens
gctaagaaggtttgg

SEQ ID NO: 452011 - DNA, 15 bp, Homo sapiens
agctaagaaggtttg

SEQ ID NO: 452012 - DNA, 15 bp, Homo sapiens
aagctaagaaggttt

SEQ ID NO: 452013 - DNA, 15 bp, Homo sapiens
taagctaagaaggtt

SEQ ID NO: 452014 - DNA, 15 bp, Homo sapiens
ataagctaagaaggt

SEQ ID NO: 452015 - DNA, 15 bp, Homo sapiens
cataagctaagaagg

SEQ ID NO: 452016 - DNA, 15 bp, Homo sapiens
ccataagctaagaag

SEQ ID NO: 452017 - DNA, 15 bp, Homo sapiens
accataagctaagaa

SEQ ID NO: 452018 - DNA, 15 bp, Homo sapiens
aaccataagctaaga

SEQ ID NO: 452019 - DNA, 15 bp, Homo sapiens
aaaccataagctaag

SEQ ID NO: 452020 - DNA, 15 bp, Homo sapiens
aaaaccataagctaa

SEQ ID NO: 452021 - DNA, 15 bp, Homo sapiens
gaaaaccataagcta

SEQ ID NO: 452022 - DNA, 15 bp, Homo sapiens
agaaaaccataagct

SEQ ID NO: 452023 - DNA, 15 bp, Homo sapiens
aagaaaaccataagc

SEQ ID NO: 452024 - DNA, 15 bp, Homo sapiens
taagaaaaccataag

SEQ ID NO: 452025 - DNA, 15 bp, Homo sapiens
ctaagaaaaccataa

SEQ ID NO: 452026 - DNA, 15 bp, Homo sapiens
cctaagaaaaccata

SEQ ID NO: 452027 - DNA, 15 bp, Homo sapiens
acctaagaaaaccat

SEQ ID NO: 452028 - DNA, 15 bp, Homo sapiens
cacctaagaaaacca

SEQ ID NO: 452029 - DNA, 15 bp, Homo sapiens
tcacctaagaaaacc

SEQ ID NO: 452030 - DNA, 15 bp, Homo sapiens
atcacctaagaaaac

SEQ ID NO: 452031 - DNA, 15 bp, Homo sapiens
catcacctaagaaaa

SEQ ID NO: 452032 - DNA, 15 bp, Homo sapiens
acatcacctaagaaa

SEQ ID NO: 452033 - DNA, 15 bp, Homo sapiens
cacatcacctaagaa

SEQ ID NO: 452034 - DNA, 15 bp, Homo sapiens
gcacatcacctaaga

SEQ ID NO: 452035 - DNA, 15 bp, Homo sapiens
tgcacatcacctaag

SEQ ID NO: 452036 - DNA, 15 bp, Homo sapiens
ttgcacatcacctaa

SEQ ID NO: 452037 - DNA, 15 bp, Homo sapiens
tttgcacatcaccta

SEQ ID NO: 452038 - DNA, 15 bp, Homo sapiens
atttgcacatcacct

SEQ ID NO: 452039 - DNA, 15 bp, Homo sapiens
gatttgcacatcacc

SEQ ID NO: 452040 - DNA, 15 bp, Homo sapiens
tgatttgcacatcac

SEQ ID NO: 452041 - DNA, 15 bp, Homo sapiens
ttgatttgcacatca

SEQ ID NO: 452042 - DNA, 15 bp, Homo sapiens
gttgatttgcacatc

SEQ ID NO: 452043 - DNA, 15 bp, Homo sapiens
tgttgatttgcacat

SEQ ID NO: 452044 - DNA, 15 bp, Homo sapiens
ttgttgatttgcaca

SEQ ID NO: 452045 - DNA, 15 bp, Homo sapiens
tttgttgatttgcac

SEQ ID NO: 452046 - DNA, 15 bp, Homo sapiens
atttgttgatttgca

SEQ ID NO: 452047 - DNA, 15 bp, Homo sapiens
tatttgttgatttgc

SEQ ID NO: 452048 - DNA, 15 bp, Homo sapiens
atatttgttgatttg

SEQ ID NO: 452049 - DNA, 15 bp, Homo sapiens
tatatttgttgattt

SEQ ID NO: 452050 - DNA, 15 bp, Homo sapiens
atatatttgttgatt

SEQ ID NO: 452051 - DNA, 15 bp, Homo sapiens
tatatatttgttgat

SEQ ID NO: 452052 - DNA, 15 bp, Homo sapiens
gtatatatttgttga

SEQ ID NO: 452053 - DNA, 15 bp, Homo sapiens
agtatatatttgttg

SEQ ID NO: 452054 - DNA, 15 bp, Homo sapiens
aagtatatatttgtt

SEQ ID NO: 452055 - DNA, 15 bp, Homo sapiens
aaagtatatatttgt

SEQ ID NO: 452056 - DNA, 15 bp, Homo sapiens
aaaagtatatatttg

SEQ ID NO: 452057 - DNA, 15 bp, Homo sapiens
aaaaagtatatattt

SEQ ID NO: 452058 - DNA, 15 bp, Homo sapiens
aaaaaagtatatatt

SEQ ID NO: 452059 - DNA, 15 bp, Homo sapiens
aaaaaaagtatatat

SEQ ID NO: 452060 - DNA, 15 bp, Homo sapiens
aaaaaaaagtatata

SEQ ID NO: 452061 - DNA, 15 bp, Homo sapiens
aaaaaaaaagtatat

SEQ ID NO: 452062 - DNA, 15 bp, Homo sapiens
aaaaaaaaaagtata

SEQ ID NO: 452063 - DNA, 15 bp, Homo sapiens
aaaaaaaaaaagtat

SEQ ID NO: 452064 - DNA, 15 bp, Homo sapiens
aaaaaaaaaaaagta

SEQ ID NO: 452065 - DNA, 15 bp, Homo sapiens
aaaaaaaaaaaaagt

SEQ ID NO: 452066 - DNA, 15 bp, Homo sapiens
aactcaaaaaaaaaa

SEQ ID NO: 452067 - DNA, 15 bp, Homo sapiens
caactcaaaaaaaaa

SEQ ID NO: 452068 - DNA, 15 bp, Homo sapiens
ccaactcaaaaaaaa

SEQ ID NO: 452069 - DNA, 15 bp, Homo sapiens
tccaactcaaaaaaa

SEQ ID NO: 452070 - DNA, 15 bp, Homo sapiens
ctccaactcaaaaaa

SEQ ID NO: 452071 - DNA, 15 bp, Homo sapiens
actccaactcaaaaa

SEQ ID NO: 452072 - DNA, 15 bp, Homo sapiens
aactccaactcaaaa

SEQ ID NO: 452073 - DNA, 15 bp, Homo sapiens
caactccaactcaaa

SEQ ID NO: 452074 - DNA, 15 bp, Homo sapiens
gcaactccaactcaa

SEQ ID NO: 452075 - DNA, 15 bp, Homo sapiens
tgcaactccaactca

SEQ ID NO: 452076 - DNA, 15 bp, Homo sapiens
gtgcaactccaactc

SEQ ID NO: 452077 - DNA, 15 bp, Homo sapiens
agtgcaactccaact

SEQ ID NO: 452078 - DNA, 15 bp, Homo sapiens
gagtgcaactccaac

SEQ ID NO: 452079 - DNA, 15 bp, Homo sapiens
agagtgcaactccaa

SEQ ID NO: 452080 - DNA, 15 bp, Homo sapiens
tagagtgcaactcca

SEQ ID NO: 452081 - DNA, 15 bp, Homo sapiens
atagagtgcaactcc

SEQ ID NO: 452082 - DNA, 15 bp, Homo sapiens
gatagagtgcaactc

SEQ ID NO: 452083 - DNA, 15 bp, Homo sapiens
tgatagagtgcaact

SEQ ID NO: 452084 - DNA, 15 bp, Homo sapiens
gtgatagagtgcaac

SEQ ID NO: 452085 - DNA, 15 bp, Homo sapiens
ggtgatagagtgcaa

SEQ ID NO: 452086 - DNA, 15 bp, Homo sapiens
gggtgatagagtgca

SEQ ID NO: 452087 - DNA, 15 bp, Homo sapiens
tgggtgatagagtgc

SEQ ID NO: 452088 - DNA, 15 bp, Homo sapiens
ctgggtgatagagtg

SEQ ID NO: 452089 - DNA, 15 bp, Homo sapiens
cctgggtgatagagt

SEQ ID NO: 452090 - DNA, 15 bp, Homo sapiens
gcctgggtgatagag

SEQ ID NO: 452091 - DNA, 15 bp, Homo sapiens
agcctgggtgataga

SEQ ID NO: 452092 - DNA, 15 bp, Homo sapiens
cagcctgggtgatag

SEQ ID NO: 452093 - DNA, 15 bp, Homo sapiens
ccagcctgggtgata

SEQ ID NO: 452094 - DNA, 15 bp, Homo sapiens
tccagcctgggtgat

SEQ ID NO: 452095 - DNA, 15 bp, Homo sapiens
ctccagcctgggtga

SEQ ID NO: 452096 - DNA, 15 bp, Homo sapiens
actccagcctgggtg

SEQ ID NO: 452097 - DNA, 15 bp, Homo sapiens
cactccagcctgggt

SEQ ID NO: 452098 - DNA, 15 bp, Homo sapiens
cgatcatgccactgc

SEQ ID NO: 452099 - DNA, 15 bp, Homo sapiens
acgatcatgccactg

SEQ ID NO: 452100 - DNA, 15 bp, Homo sapiens
cacgatcatgccact

SEQ ID NO: 452101 - DNA, 15 bp, Homo sapiens
ccacgatcatgccac

SEQ ID NO: 452102 - DNA, 15 bp, Homo sapiens
gccacgatcatgcca

SEQ ID NO: 452103 - DNA, 15 bp, Homo sapiens
agccacgatcatgcc

SEQ ID NO: 452104 - DNA, 15 bp, Homo sapiens
gagccacgatcatgc

SEQ ID NO: 452105 - DNA, 15 bp, Homo sapiens
tgagccacgatcatg

SEQ ID NO: 452106 - DNA, 15 bp, Homo sapiens
gtgagccacgatcat

SEQ ID NO: 452107 - DNA, 15 bp, Homo sapiens
agtgagccacgatca

SEQ ID NO: 452108 - DNA, 15 bp, Homo sapiens
cagtgagccacgatc

SEQ ID NO: 452109 - DNA, 15 bp, Homo sapiens
gcagtgagccacgat

SEQ ID NO: 452110 - DNA, 15 bp, Homo sapiens
tgcagtgagccacga

SEQ ID NO: 452111 - DNA, 15 bp, Homo sapiens
ttgcagtgagccacg

SEQ ID NO: 452112 - DNA, 15 bp, Homo sapiens
gttgcagtgagccac

SEQ ID NO: 452113 - DNA, 15 bp, Homo sapiens
aggaggttgcagtga

SEQ ID NO: 452114 - DNA, 15 bp, Homo sapiens
gaggaggttgcagtg

SEQ ID NO: 452115 - DNA, 15 bp, Homo sapiens
ggaggaggttgcagt

SEQ ID NO: 452116 - DNA, 15 bp, Homo sapiens
aggaggaggttgcag

SEQ ID NO: 452117 - DNA, 15 bp, Homo sapiens
gaggaggaggttgca

SEQ ID NO: 452118 - DNA, 15 bp, Homo sapiens
ggaggaggaggttgc

SEQ ID NO: 452119 - DNA, 15 bp, Homo sapiens
gggaggaggaggttg

SEQ ID NO: 452120 - DNA, 15 bp, Homo sapiens
cgggaggaggaggtt

SEQ ID NO: 452121 - DNA, 15 bp, Homo sapiens
ccgggaggaggaggt

SEQ ID NO: 452122 - DNA, 15 bp, Homo sapiens
cccgggaggaggagg

SEQ ID NO: 452123 - DNA, 15 bp, Homo sapiens
acccgggaggaggag

SEQ ID NO: 452124 - DNA, 15 bp, Homo sapiens
aacccgggaggagga

SEQ ID NO: 452125 - DNA, 15 bp, Homo sapiens
gaacccgggaggagg

SEQ ID NO: 452126 - DNA, 15 bp, Homo sapiens
tgaacccgggaggag

SEQ ID NO: 452127 - DNA, 15 bp, Homo sapiens
ttgaacccgggagga

SEQ ID NO: 452128 - DNA, 15 bp, Homo sapiens
acttgaacccgggag

SEQ ID NO: 452129 - DNA, 15 bp, Homo sapiens
cacttgaacccggga

SEQ ID NO: 452130 - DNA, 15 bp, Homo sapiens
tcacttgaacccggg

SEQ ID NO: 452131 - DNA, 15 bp, Homo sapiens
atcacttgaacccgg

SEQ ID NO: 452132 - DNA, 15 bp, Homo sapiens
aatcacttgaacccg

SEQ ID NO: 452133 - DNA, 15 bp, Homo sapiens
gaatcacttgaaccc

SEQ ID NO: 452134 - DNA, 15 bp, Homo sapiens
agaatcacttgaacc

SEQ ID NO: 452135 - DNA, 15 bp, Homo sapiens
gagaatcacttgaac

SEQ ID NO: 452136 - DNA, 15 bp, Homo sapiens
cgagaatcacttgaa

SEQ ID NO: 452137 - DNA, 15 bp, Homo sapiens
gcgagaatcacttga

SEQ ID NO: 452138 - DNA, 15 bp, Homo sapiens
tgcgagaatcacttg

SEQ ID NO: 452139 - DNA, 15 bp, Homo sapiens
gtgcgagaatcactt

SEQ ID NO: 452140 - DNA, 15 bp, Homo sapiens
ggtgcgagaatcact

SEQ ID NO: 452141 - DNA, 15 bp, Homo sapiens
aggtgcgagaatcac

SEQ ID NO: 452142 - DNA, 15 bp, Homo sapiens
gaggtgcgagaatca

SEQ ID NO: 452143 - DNA, 15 bp, Homo sapiens
tgaggtgcgagaatc

SEQ ID NO: 452144 - DNA, 15 bp, Homo sapiens
ctgaggtgcgagaat

SEQ ID NO: 452145 - DNA, 15 bp, Homo sapiens
gctgaggtgcgagaa

SEQ ID NO: 452146 - DNA, 15 bp, Homo sapiens
ggctgaggtgcgaga

SEQ ID NO: 452147 - DNA, 15 bp, Homo sapiens
aggctgaggtgcgag

SEQ ID NO: 452148 - DNA, 15 bp, Homo sapiens
gaggctgaggtgcga

SEQ ID NO: 452149 - DNA, 15 bp, Homo sapiens
ggaggctgaggtgcg

SEQ ID NO: 452150 - DNA, 15 bp, Homo sapiens
aggaggctgaggtgc

SEQ ID NO: 452151 - DNA, 15 bp, Homo sapiens
caggaggctgaggtg

SEQ ID NO: 452152 - DNA, 15 bp, Homo sapiens
tcaggaggctgaggt

SEQ ID NO: 452153 - DNA, 15 bp, Homo sapiens
ctcaggaggctgagg

SEQ ID NO: 452154 - DNA, 15 bp, Homo sapiens
actcaggaggctgag

SEQ ID NO: 452155 - DNA, 15 bp, Homo sapiens
tactcaggaggctga

SEQ ID NO: 452156 - DNA, 15 bp, Homo sapiens
ctactcaggaggctg

SEQ ID NO: 452157 - DNA, 15 bp, Homo sapiens
gctactcaggaggct

SEQ ID NO: 452158 - DNA, 15 bp, Homo sapiens
agctactcaggaggc

SEQ ID NO: 452159 - DNA, 15 bp, Homo sapiens
cagctactcaggagg

SEQ ID NO: 452160 - DNA, 15 bp, Homo sapiens
ccagctactcaggag

SEQ ID NO: 452161 - DNA, 15 bp, Homo sapiens
cccagctactcagga

SEQ ID NO: 452162 - DNA, 15 bp, Homo sapiens
tcccagctactcagg

SEQ ID NO: 452163 - DNA, 15 bp, Homo sapiens
atcccagctactcag

SEQ ID NO: 452164 - DNA, 15 bp, Homo sapiens
aatcccagctactca

SEQ ID NO: 452165 - DNA, 15 bp, Homo sapiens
taatcccagctactc

SEQ ID NO: 452166 - DNA, 15 bp, Homo sapiens
gtggcgggcacctgt

SEQ ID NO: 452167 - DNA, 15 bp, Homo sapiens
agtggcgggcacctg

SEQ ID NO: 452168 - DNA, 15 bp, Homo sapiens
tagtggcgggcacct

SEQ ID NO: 452169 - DNA, 15 bp, Homo sapiens
gtagtggcgggcacc

SEQ ID NO: 452170 - DNA, 15 bp, Homo sapiens
cgtagtggcgggcac

SEQ ID NO: 452171 - DNA, 15 bp, Homo sapiens
gcgtagtggcgggca

SEQ ID NO: 452172 - DNA, 15 bp, Homo sapiens
ggcgtagtggcgggc

SEQ ID NO: 452173 - DNA, 15 bp, Homo sapiens
gggcgtagtggcggg

SEQ ID NO: 452174 - DNA, 15 bp, Homo sapiens
cgggcgtagtggcgg

SEQ ID NO: 452175 - DNA, 15 bp, Homo sapiens
ccgggcgtagtggcg

SEQ ID NO: 452176 - DNA, 15 bp, Homo sapiens
gccgggcgtagtggc

SEQ ID NO: 452177 - DNA, 15 bp, Homo sapiens
agccgggcgtagtgg

SEQ ID NO: 452178 - DNA, 15 bp, Homo sapiens
tagccgggcgtagtg

SEQ ID NO: 452179 - DNA, 15 bp, Homo sapiens
ttagccgggcgtagt

SEQ ID NO: 452180 - DNA, 15 bp, Homo sapiens
attagccgggcgtag

SEQ ID NO: 452181 - DNA, 15 bp, Homo sapiens
aattagccgggcgta

SEQ ID NO: 452182 - DNA, 15 bp, Homo sapiens
caaaaattagccggg

SEQ ID NO: 452183 - DNA, 15 bp, Homo sapiens
acaaaaattagccgg

SEQ ID NO: 452184 - DNA, 15 bp, Homo sapiens
tacaaaaattagccg

SEQ ID NO: 452185 - DNA, 15 bp, Homo sapiens
atctctactaaaaat

SEQ ID NO: 452186 - DNA, 15 bp, Homo sapiens
tatctctactaaaaa

SEQ ID NO: 452187 - DNA, 15 bp, Homo sapiens
ttatctctactaaaa

SEQ ID NO: 452188 - DNA, 15 bp, Homo sapiens
cttatctctactaaa

SEQ ID NO: 452189 - DNA, 15 bp, Homo sapiens
ccttatctctactaa

SEQ ID NO: 452190 - DNA, 15 bp, Homo sapiens
accttatctctacta

SEQ ID NO: 452191 - DNA, 15 bp, Homo sapiens
aaccttatctctact

SEQ ID NO: 452192 - DNA, 15 bp, Homo sapiens
aaaccttatctctac

SEQ ID NO: 452193 - DNA, 15 bp, Homo sapiens
gaaaccttatctcta

SEQ ID NO: 452194 - DNA, 15 bp, Homo sapiens
tgaaaccttatctct

SEQ ID NO: 452195 - DNA, 15 bp, Homo sapiens
gtgaaaccttatctc

SEQ ID NO: 452196 - DNA, 15 bp, Homo sapiens
agtgaaaccttatct

SEQ ID NO: 452197 - DNA, 15 bp, Homo sapiens
tagtgaaaccttatc

SEQ ID NO: 452198 - DNA, 15 bp, Homo sapiens
atagtgaaaccttat

SEQ ID NO: 452199 - DNA, 15 bp, Homo sapiens
tatagtgaaacctta

SEQ ID NO: 452200 - DNA, 15 bp, Homo sapiens
atatagtgaaacctt

SEQ ID NO: 452201 - DNA, 15 bp, Homo sapiens
aatatagtgaaacct

SEQ ID NO: 452202 - DNA, 15 bp, Homo sapiens
caatatagtgaaacc

SEQ ID NO: 452203 - DNA, 15 bp, Homo sapiens
tcaatatagtgaaac

SEQ ID NO: 452204 - DNA, 15 bp, Homo sapiens
gtcaatatagtgaaa

SEQ ID NO: 452205 - DNA, 15 bp, Homo sapiens
ggtcaatatagtgaa

SEQ ID NO: 452206 - DNA, 15 bp, Homo sapiens
tggtcaatatagtga

SEQ ID NO: 452207 - DNA, 15 bp, Homo sapiens
ctggtcaatatagtg

SEQ ID NO: 452208 - DNA, 15 bp, Homo sapiens
cctggtcaatatagt

SEQ ID NO: 452209 - DNA, 15 bp, Homo sapiens
gcctggtcaatatag

SEQ ID NO: 452210 - DNA, 15 bp, Homo sapiens
agcctggtcaatata

SEQ ID NO: 452211 - DNA, 15 bp, Homo sapiens
cagcctggtcaatat

SEQ ID NO: 452212 - DNA, 15 bp, Homo sapiens
ccagcctggtcaata

SEQ ID NO: 452213 - DNA, 15 bp, Homo sapiens
accagcctggtcaat

SEQ ID NO: 452214 - DNA, 15 bp, Homo sapiens
gaccagcctggtcaa

SEQ ID NO: 452215 - DNA, 15 bp, Homo sapiens
agaccagcctggtca

SEQ ID NO: 452216 - DNA, 15 bp, Homo sapiens
gagaccagcctggtc

SEQ ID NO: 452217 - DNA, 15 bp, Homo sapiens
tgagaccagcctggt

SEQ ID NO: 452218 - DNA, 15 bp, Homo sapiens
ttgagaccagcctgg

SEQ ID NO: 452219 - DNA, 15 bp, Homo sapiens
tttgagaccagcctg

SEQ ID NO: 452220 - DNA, 15 bp, Homo sapiens
gtttgagaccagcct

SEQ ID NO: 452221 - DNA, 15 bp, Homo sapiens
agtttgagaccagcc

SEQ ID NO: 452222 - DNA, 15 bp, Homo sapiens
aggagtttgagacca

SEQ ID NO: 452223 - DNA, 15 bp, Homo sapiens
caggagtttgagacc

SEQ ID NO: 452224 - DNA, 15 bp, Homo sapiens
tcaggagtttgagac

SEQ ID NO: 452225 - DNA, 15 bp, Homo sapiens
gtcaggagtttgaga

SEQ ID NO: 452226 - DNA, 15 bp, Homo sapiens
ggtcaggagtttgag

SEQ ID NO: 452227 - DNA, 15 bp, Homo sapiens
tcttgaggtcaggag

SEQ ID NO: 452228 - DNA, 15 bp, Homo sapiens
ctcttgaggtcagga

SEQ ID NO: 452229 - DNA, 15 bp, Homo sapiens
tctcttgaggtcagg

SEQ ID NO: 452230 - DNA, 15 bp, Homo sapiens
atctcttgaggtcag

SEQ ID NO: 452231 - DNA, 15 bp, Homo sapiens
gatctcttgaggtca

SEQ ID NO: 452232 - DNA, 15 bp, Homo sapiens
agatctcttgaggtc

SEQ ID NO: 452233 - DNA, 15 bp, Homo sapiens
cagatctcttgaggt

SEQ ID NO: 452234 - DNA, 15 bp, Homo sapiens
gcagatctcttgagg

SEQ ID NO: 452235 - DNA, 15 bp, Homo sapiens
ggcagatctcttgag

SEQ ID NO: 452236 - DNA, 15 bp, Homo sapiens
gggcagatctcttga

SEQ ID NO: 452237 - DNA, 15 bp, Homo sapiens
tgggcagatctcttg

SEQ ID NO: 452238 - DNA, 15 bp, Homo sapiens
gtgggcagatctctt

SEQ ID NO: 452239 - DNA, 15 bp, Homo sapiens
ggtgggcagatctct

SEQ ID NO: 452240 - DNA, 15 bp, Homo sapiens
aggtgggcagatctc

SEQ ID NO: 452241 - DNA, 15 bp, Homo sapiens
gaggtgggcagatct

SEQ ID NO: 452242 - DNA, 15 bp, Homo sapiens
tgaggtgggcagatc

SEQ ID NO: 452243 - DNA, 15 bp, Homo sapiens
ctgaggtgggcagat

SEQ ID NO: 452244 - DNA, 15 bp, Homo sapiens
gctgaggtgggcaga

SEQ ID NO: 452245 - DNA, 15 bp, Homo sapiens
ggctgaggtgggcag

SEQ ID NO: 452246 - DNA, 15 bp, Homo sapiens
aggctgaggtgggca

SEQ ID NO: 452247 - DNA, 15 bp, Homo sapiens
gaggctgaggtgggc

SEQ ID NO: 452248 - DNA, 15 bp, Homo sapiens
ggaggctgaggtggg

SEQ ID NO: 452249 - DNA, 15 bp, Homo sapiens
gggaggctgaggtgg

SEQ ID NO: 452250 - DNA, 15 bp, Homo sapiens
tgggaggctgaggtg

SEQ ID NO: 452251 - DNA, 15 bp, Homo sapiens
ttgggaggctgaggt

SEQ ID NO: 452252 - DNA, 15 bp, Homo sapiens
ttcacgcctgtaatc

SEQ ID NO: 452253 - DNA, 15 bp, Homo sapiens
gttcacgcctgtaat

SEQ ID NO: 452254 - DNA, 15 bp, Homo sapiens
ggttcacgcctgtaa

SEQ ID NO: 452255 - DNA, 15 bp, Homo sapiens
tggttcacgcctgta

SEQ ID NO: 452256 - DNA, 15 bp, Homo sapiens
gtggttcacgcctgt

SEQ ID NO: 452257 - DNA, 15 bp, Homo sapiens
ggtggttcacgcctg

SEQ ID NO: 452258 - DNA, 15 bp, Homo sapiens
aggtggttcacgcct

SEQ ID NO: 452259 - DNA, 15 bp, Homo sapiens
aaggtggttcacgcc

SEQ ID NO: 452260 - DNA, 15 bp, Homo sapiens
caaggtggttcacgc

SEQ ID NO: 452261 - DNA, 15 bp, Homo sapiens
gcaaggtggttcacg

SEQ ID NO: 452262 - DNA, 15 bp, Homo sapiens
ggcaaggtggttcac

SEQ ID NO: 452263 - DNA, 15 bp, Homo sapiens
aggcaaggtggttca

SEQ ID NO: 452264 - DNA, 15 bp, Homo sapiens
caggcaaggtggttc

SEQ ID NO: 452265 - DNA, 15 bp, Homo sapiens
ccaggcaaggtggtt

SEQ ID NO: 452266 - DNA, 15 bp, Homo sapiens
gccaggcaaggtggt

SEQ ID NO: 452267 - DNA, 15 bp, Homo sapiens
ggccaggcaaggtgg

SEQ ID NO: 452268 - DNA, 15 bp, Homo sapiens
tggccaggcaaggtg

SEQ ID NO: 452269 - DNA, 15 bp, Homo sapiens
ttggccaggcaaggt

SEQ ID NO: 452270 - DNA, 15 bp, Homo sapiens
gttggccaggcaagg

SEQ ID NO: 452271 - DNA, 15 bp, Homo sapiens
tgttggccaggcaag

SEQ ID NO: 452272 - DNA, 15 bp, Homo sapiens
atgttggccaggcaa

SEQ ID NO: 452273 - DNA, 15 bp, Homo sapiens
tatgttggccaggca

SEQ ID NO: 452274 - DNA, 15 bp, Homo sapiens
atatgttggccaggc

SEQ ID NO: 452275 - DNA, 15 bp, Homo sapiens
tatatgttggccagg

SEQ ID NO: 452276 - DNA, 15 bp, Homo sapiens
atatatgttggccag

SEQ ID NO: 452277 - DNA, 15 bp, Homo sapiens
tatatatgttggcca

SEQ ID NO: 452278 - DNA, 15 bp, Homo sapiens
atatatatgttggcc

SEQ ID NO: 452279 - DNA, 15 bp, Homo sapiens
tatatatatgttggc

SEQ ID NO: 452280 - DNA, 15 bp, Homo sapiens
gtatatatatgttgg

SEQ ID NO: 452281 - DNA, 15 bp, Homo sapiens
ggtatatatatgttg

SEQ ID NO: 452282 - DNA, 15 bp, Homo sapiens
aggtatatatatgtt

SEQ ID NO: 452283 - DNA, 15 bp, Homo sapiens
aaggtatatatatgt

SEQ ID NO: 452284 - DNA, 15 bp, Homo sapiens
aaaggtatatatatg

SEQ ID NO: 452285 - DNA, 15 bp, Homo sapiens
aaaaggtatatatat

SEQ ID NO: 452286 - DNA, 15 bp, Homo sapiens
caaaaggtatatata

SEQ ID NO: 452287 - DNA, 15 bp, Homo sapiens
gcaaaaggtatatat

SEQ ID NO: 452288 - DNA, 15 bp, Homo sapiens
tgcaaaaggtatata

SEQ ID NO: 452289 - DNA, 15 bp, Homo sapiens
ttgcaaaaggtatat

SEQ ID NO: 452290 - DNA, 15 bp, Homo sapiens
gttgcaaaaggtata

SEQ ID NO: 452291 - DNA, 15 bp, Homo sapiens
agttgcaaaaggtat

SEQ ID NO: 452292 - DNA, 15 bp, Homo sapiens
aagttgcaaaaggta

SEQ ID NO: 452293 - DNA, 15 bp, Homo sapiens
aaagttgcaaaaggt

SEQ ID NO: 452294 - DNA, 15 bp, Homo sapiens
caaagttgcaaaagg

SEQ ID NO: 452295 - DNA, 15 bp, Homo sapiens
acaaagttgcaaaag

SEQ ID NO: 452296 - DNA, 15 bp, Homo sapiens
gacaaagttgcaaaa

SEQ ID NO: 452297 - DNA, 15 bp, Homo sapiens
tgacaaagttgcaaa

SEQ ID NO: 452298 - DNA, 15 bp, Homo sapiens
ctgacaaagttgcaa

SEQ ID NO: 452299 - DNA, 15 bp, Homo sapiens
tctgacaaagttgca

SEQ ID NO: 452300 - DNA, 15 bp, Homo sapiens
ctctgacaaagttgc

SEQ ID NO: 452301 - DNA, 15 bp, Homo sapiens
actctgacaaagttg

SEQ ID NO: 452302 - DNA, 15 bp, Homo sapiens
aactctgacaaagtt

SEQ ID NO: 452303 - DNA, 15 bp, Homo sapiens
caactctgacaaagt

SEQ ID NO: 452304 - DNA, 15 bp, Homo sapiens
gcaactctgacaaag

SEQ ID NO: 452305 - DNA, 15 bp, Homo sapiens
agcaactctgacaaa

SEQ ID NO: 452306 - DNA, 15 bp, Homo sapiens
tagcaactctgacaa

SEQ ID NO: 452307 - DNA, 15 bp, Homo sapiens
atagcaactctgaca

SEQ ID NO: 452308 - DNA, 15 bp, Homo sapiens
catagcaactctgac

SEQ ID NO: 452309 - DNA, 15 bp, Homo sapiens
tcatagcaactctga

SEQ ID NO: 452310 - DNA, 15 bp, Homo sapiens
ttcatagcaactctg

SEQ ID NO: 452311 - DNA, 15 bp, Homo sapiens
cttcatagcaactct

SEQ ID NO: 452312 - DNA, 15 bp, Homo sapiens
tcttcatagcaactc

SEQ ID NO: 452313 - DNA, 15 bp, Homo sapiens
ttcttcatagcaact

SEQ ID NO: 452314 - DNA, 15 bp, Homo sapiens
attcttcatagcaac

SEQ ID NO: 452315 - DNA, 15 bp, Homo sapiens
tattcttcatagcaa

SEQ ID NO: 452316 - DNA, 15 bp, Homo sapiens
ttattcttcatagca

SEQ ID NO: 452317 - DNA, 15 bp, Homo sapiens
cttattcttcatagc

SEQ ID NO: 452318 - DNA, 15 bp, Homo sapiens
acttattcttcatag

SEQ ID NO: 452319 - DNA, 15 bp, Homo sapiens
aacttattcttcata

SEQ ID NO: 452320 - DNA, 15 bp, Homo sapiens
caacttattcttcat

SEQ ID NO: 452321 - DNA, 15 bp, Homo sapiens
acaacttattcttca

SEQ ID NO: 452322 - DNA, 15 bp, Homo sapiens
tacaacttattcttc

SEQ ID NO: 452323 - DNA, 15 bp, Homo sapiens
atacaacttattctt

SEQ ID NO: 452324 - DNA, 15 bp, Homo sapiens
gatacaacttattct

SEQ ID NO: 452325 - DNA, 15 bp, Homo sapiens
agatacaacttattc

SEQ ID NO: 452326 - DNA, 15 bp, Homo sapiens
aagatacaacttatt

SEQ ID NO: 452327 - DNA, 15 bp, Homo sapiens
caagatacaacttat

SEQ ID NO: 452328 - DNA, 15 bp, Homo sapiens
acaagatacaactta

SEQ ID NO: 452329 - DNA, 15 bp, Homo sapiens
aacaagatacaactt

SEQ ID NO: 452330 - DNA, 15 bp, Homo sapiens
gaacaagatacaact

SEQ ID NO: 452331 - DNA, 15 bp, Homo sapiens
tgaacaagatacaac

SEQ ID NO: 452332 - DNA, 15 bp, Homo sapiens
gtgaacaagatacaa

SEQ ID NO: 452333 - DNA, 15 bp, Homo sapiens
tgtgaacaagataca

SEQ ID NO: 452334 - DNA, 15 bp, Homo sapiens
ctgtgaacaagatac

SEQ ID NO: 452335 - DNA, 15 bp, Homo sapiens
tctgtgaacaagata

SEQ ID NO: 452336 - DNA, 15 bp, Homo sapiens
ttctgtgaacaagat

SEQ ID NO: 452337 - DNA, 15 bp, Homo sapiens
tttctgtgaacaaga

SEQ ID NO: 452338 - DNA, 15 bp, Homo sapiens
atttctgtgaacaag

SEQ ID NO: 452339 - DNA, 15 bp, Homo sapiens
aatttctgtgaacaa

SEQ ID NO: 452340 - DNA, 15 bp, Homo sapiens
caatttctgtgaaca

SEQ ID NO: 452341 - DNA, 15 bp, Homo sapiens
gcaatttctgtgaac

SEQ ID NO: 452342 - DNA, 15 bp, Homo sapiens
tgcaatttctgtgaa

SEQ ID NO: 452343 - DNA, 15 bp, Homo sapiens
ctgcaatttctgtga

SEQ ID NO: 452344 - DNA, 15 bp, Homo sapiens
actgcaatttctgtg

SEQ ID NO: 452345 - DNA, 15 bp, Homo sapiens
gactgcaatttctgt

SEQ ID NO: 452346 - DNA, 15 bp, Homo sapiens
agactgcaatttctg

SEQ ID NO: 452347 - DNA, 15 bp, Homo sapiens
tagactgcaatttct

SEQ ID NO: 452348 - DNA, 15 bp, Homo sapiens
gtagactgcaatttc

SEQ ID NO: 452349 - DNA, 15 bp, Homo sapiens
agtagactgcaattt

SEQ ID NO: 452350 - DNA, 15 bp, Homo sapiens
cagtagactgcaatt

SEQ ID NO: 452351 - DNA, 15 bp, Homo sapiens
ccagtagactgcaat

SEQ ID NO: 452352 - DNA, 15 bp, Homo sapiens
cccagtagactgcaa

SEQ ID NO: 452353 - DNA, 15 bp, Homo sapiens
ccccagtagactgca

SEQ ID NO: 452354 - DNA, 15 bp, Homo sapiens
cccccagtagactgc

SEQ ID NO: 452355 - DNA, 15 bp, Homo sapiens
tcccccagtagactg

SEQ ID NO: 452356 - DNA, 15 bp, Homo sapiens
ctcccccagtagact

SEQ ID NO: 452357 - DNA, 15 bp, Homo sapiens
gctcccccagtagac

SEQ ID NO: 452358 - DNA, 15 bp, Homo sapiens
agctcccccagtaga

SEQ ID NO: 452359 - DNA, 15 bp, Homo sapiens
cagctcccccagtag

SEQ ID NO: 452360 - DNA, 15 bp, Homo sapiens
tcagctcccccagta

SEQ ID NO: 452361 - DNA, 15 bp, Homo sapiens
atcagctcccccagt

SEQ ID NO: 452362 - DNA, 15 bp, Homo sapiens
tatcagctcccccag

SEQ ID NO: 452363 - DNA, 15 bp, Homo sapiens
ttatcagctccccca

SEQ ID NO: 452364 - DNA, 15 bp, Homo sapiens
tttatcagctccccc

SEQ ID NO: 452365 - DNA, 15 bp, Homo sapiens
atttatcagctcccc

SEQ ID NO: 452366 - DNA, 15 bp, Homo sapiens
catttatcagctccc

SEQ ID NO: 452367 - DNA, 15 bp, Homo sapiens
acatttatcagctcc

SEQ ID NO: 452368 - DNA, 15 bp, Homo sapiens
aacatttatcagctc

SEQ ID NO: 452369 - DNA, 15 bp, Homo sapiens
aaacatttatcagct

SEQ ID NO: 452370 - DNA, 15 bp, Homo sapiens
aaaacatttatcagc

SEQ ID NO: 452371 - DNA, 15 bp, Homo sapiens
taaaacatttatcag

SEQ ID NO: 452372 - DNA, 15 bp, Homo sapiens
ttaaaacatttatca

SEQ ID NO: 452373 - DNA, 15 bp, Homo sapiens
gttaaaacatttatc

SEQ ID NO: 452374 - DNA, 15 bp, Homo sapiens
ggttaaaacatttat

SEQ ID NO: 452375 - DNA, 15 bp, Homo sapiens
tggttaaaacattta

SEQ ID NO: 452376 - DNA, 15 bp, Homo sapiens
atggttaaaacattt

SEQ ID NO: 452377 - DNA, 15 bp, Homo sapiens
gatggttaaaacatt

SEQ ID NO: 452378 - DNA, 15 bp, Homo sapiens
ggatggttaaaacat

SEQ ID NO: 452379 - DNA, 15 bp, Homo sapiens
tggatggttaaaaca

SEQ ID NO: 452380 - DNA, 15 bp, Homo sapiens
ttggatggttaaaac

SEQ ID NO: 452381 - DNA, 15 bp, Homo sapiens
attggatggttaaaa

SEQ ID NO: 452382 - DNA, 15 bp, Homo sapiens
cattggatggttaaa

SEQ ID NO: 452383 - DNA, 15 bp, Homo sapiens
acattggatggttaa

SEQ ID NO: 452384 - DNA, 15 bp, Homo sapiens
tacattggatggtta

SEQ ID NO: 452385 - DNA, 15 bp, Homo sapiens
ttacattggatggtt

SEQ ID NO: 452386 - DNA, 15 bp, Homo sapiens
gttacattggatggt

SEQ ID NO: 452387 - DNA, 15 bp, Homo sapiens
tgttacattggatgg

SEQ ID NO: 452388 - DNA, 15 bp, Homo sapiens
atgttacattggatg

SEQ ID NO: 452389 - DNA, 15 bp, Homo sapiens
catgttacattggat

SEQ ID NO: 452390 - DNA, 15 bp, Homo sapiens
acatgttacattgga

SEQ ID NO: 452391 - DNA, 15 bp, Homo sapiens
aacatgttacattgg

SEQ ID NO: 452392 - DNA, 15 bp, Homo sapiens
caacatgttacattg

SEQ ID NO: 452393 - DNA, 15 bp, Homo sapiens
acaacatgttacatt

SEQ ID NO: 452394 - DNA, 15 bp, Homo sapiens
gacaacatgttacat

SEQ ID NO: 452395 - DNA, 15 bp, Homo sapiens
tgacaacatgttaca

SEQ ID NO: 452396 - DNA, 15 bp, Homo sapiens
atgacaacatgttac

SEQ ID NO: 452397 - DNA, 15 bp, Homo sapiens
gatgacaacatgtta

SEQ ID NO: 452398 - DNA, 15 bp, Homo sapiens
tgatgacaacatgtt

SEQ ID NO: 452399 - DNA, 15 bp, Homo sapiens
ttgatgacaacatgt

SEQ ID NO: 452400 - DNA, 15 bp, Homo sapiens
tttgatgacaacatg

SEQ ID NO: 452401 - DNA, 15 bp, Homo sapiens
ctttgatgacaacat

SEQ ID NO: 452402 - DNA, 15 bp, Homo sapiens
tctttgatgacaaca

SEQ ID NO: 452403 - DNA, 15 bp, Homo sapiens
ctctttgatgacaac

SEQ ID NO: 452404 - DNA, 15 bp, Homo sapiens
tctctttgatgacaa

SEQ ID NO: 452405 - DNA, 15 bp, Homo sapiens
atctctttgatgaca

SEQ ID NO: 452406 - DNA, 15 bp, Homo sapiens
catctctttgatgac

SEQ ID NO: 452407 - DNA, 15 bp, Homo sapiens
ccatctctttgatga

SEQ ID NO: 452408 - DNA, 15 bp, Homo sapiens
accatctctttgatg

SEQ ID NO: 452409 - DNA, 15 bp, Homo sapiens
caccatctctttgat

SEQ ID NO: 452410 - DNA, 15 bp, Homo sapiens
tcaccatctctttga

SEQ ID NO: 452411 - DNA, 15 bp, Homo sapiens
ctcaccatctctttg

SEQ ID NO: 452412 - DNA, 15 bp, Homo sapiens
tctcaccatctcttt

SEQ ID NO: 452413 - DNA, 15 bp, Homo sapiens
gtctcaccatctctt

SEQ ID NO: 452414 - DNA, 15 bp, Homo sapiens
agtctcaccatctct

SEQ ID NO: 452415 - DNA, 15 bp, Homo sapiens
aagtctcaccatctc

SEQ ID NO: 452416 - DNA, 15 bp, Homo sapiens
aaagtctcaccatct

SEQ ID NO: 452417 - DNA, 15 bp, Homo sapiens
taaagtctcaccatc

SEQ ID NO: 452418 - DNA, 15 bp, Homo sapiens
gtaaagtctcaccat

SEQ ID NO: 452419 - DNA, 15 bp, Homo sapiens
tgtaaagtctcacca

SEQ ID NO: 452420 - DNA, 15 bp, Homo sapiens
gtgtaaagtctcacc

SEQ ID NO: 452421 - DNA, 15 bp, Homo sapiens
agtgtaaagtctcac

SEQ ID NO: 452422 - DNA, 15 bp, Homo sapiens
aagtgtaaagtctca

SEQ ID NO: 452423 - DNA, 15 bp, Homo sapiens
caagtgtaaagtctc

SEQ ID NO: 452424 - DNA, 15 bp, Homo sapiens
acaagtgtaaagtct

SEQ ID NO: 452425 - DNA, 15 bp, Homo sapiens
cacaagtgtaaagtc

SEQ ID NO: 452426 - DNA, 15 bp, Homo sapiens
gcacaagtgtaaagt

SEQ ID NO: 452427 - DNA, 15 bp, Homo sapiens
agcacaagtgtaaag

SEQ ID NO: 452428 - DNA, 15 bp, Homo sapiens
tagcacaagtgtaaa

SEQ ID NO: 452429 - DNA, 15 bp, Homo sapiens
ttagcacaagtgtaa

SEQ ID NO: 452430 - DNA, 15 bp, Homo sapiens
gttagcacaagtgta

SEQ ID NO: 452431 - DNA, 15 bp, Homo sapiens
tgttagcacaagtgt

SEQ ID NO: 452432 - DNA, 15 bp, Homo sapiens
ttgttagcacaagtg

SEQ ID NO: 452433 - DNA, 15 bp, Homo sapiens
cttgttagcacaagt

SEQ ID NO: 452434 - DNA, 15 bp, Homo sapiens
ccttgttagcacaag

SEQ ID NO: 452435 - DNA, 15 bp, Homo sapiens
accttgttagcacaa

SEQ ID NO: 452436 - DNA, 15 bp, Homo sapiens
taccttgttagcaca

SEQ ID NO: 452437 - DNA, 15 bp, Homo sapiens
ctaccttgttagcac

SEQ ID NO: 452438 - DNA, 15 bp, Homo sapiens
gctaccttgttagca

SEQ ID NO: 452439 - DNA, 15 bp, Homo sapiens
agctaccttgttagc

SEQ ID NO: 452440 - DNA, 15 bp, Homo sapiens
cagctaccttgttag

SEQ ID NO: 452441 - DNA, 15 bp, Homo sapiens
acagctaccttgtta

SEQ ID NO: 452442 - DNA, 15 bp, Homo sapiens
aacagctaccttgtt

SEQ ID NO: 452443 - DNA, 15 bp, Homo sapiens
gaacagctaccttgt

SEQ ID NO: 452444 - DNA, 15 bp, Homo sapiens
agaacagctaccttg

SEQ ID NO: 452445 - DNA, 15 bp, Homo sapiens
tagaacagctacctt

SEQ ID NO: 452446 - DNA, 15 bp, Homo sapiens
gtagaacagctacct

SEQ ID NO: 452447 - DNA, 15 bp, Homo sapiens
tgtagaacagctacc

SEQ ID NO: 452448 - DNA, 15 bp, Homo sapiens
atgtagaacagctac

SEQ ID NO: 452449 - DNA, 15 bp, Homo sapiens
tatgtagaacagcta

SEQ ID NO: 452450 - DNA, 15 bp, Homo sapiens
ttatgtagaacagct

SEQ ID NO: 452451 - DNA, 15 bp, Homo sapiens
tttatgtagaacagc

SEQ ID NO: 452452 - DNA, 15 bp, Homo sapiens
ttttatgtagaacag

SEQ ID NO: 452453 - DNA, 15 bp, Homo sapiens
cttttatgtagaaca

SEQ ID NO: 452454 - DNA, 15 bp, Homo sapiens
tcttttatgtagaac

SEQ ID NO: 452455 - DNA, 15 bp, Homo sapiens
ttcttttatgtagaa

SEQ ID NO: 452456 - DNA, 15 bp, Homo sapiens
gttcttttatgtaga

SEQ ID NO: 452457 - DNA, 15 bp, Homo sapiens
tgttcttttatgtag

SEQ ID NO: 452458 - DNA, 15 bp, Homo sapiens
atgttcttttatgta

SEQ ID NO: 452459 - DNA, 15 bp, Homo sapiens
tatgttcttttatgt

SEQ ID NO: 452460 - DNA, 15 bp, Homo sapiens
gtatgttcttttatg

SEQ ID NO: 452461 - DNA, 15 bp, Homo sapiens
tgtatgttcttttat

SEQ ID NO: 452462 - DNA, 15 bp, Homo sapiens
ctgtatgttctttta

SEQ ID NO: 452463 - DNA, 15 bp, Homo sapiens
actgtatgttctttt

SEQ ID NO: 452464 - DNA, 15 bp, Homo sapiens
tactgtatgttcttt

SEQ ID NO: 452465 - DNA, 15 bp, Homo sapiens
gtactgtatgttctt

SEQ ID NO: 452466 - DNA, 15 bp, Homo sapiens
tgtactgtatgttct

SEQ ID NO: 452467 - DNA, 15 bp, Homo sapiens
ctgtactgtatgttc

SEQ ID NO: 452468 - DNA, 15 bp, Homo sapiens
tctgtactgtatgtt

SEQ ID NO: 452469 - DNA, 15 bp, Homo sapiens
atctgtactgtatgt

SEQ ID NO: 452470 - DNA, 15 bp, Homo sapiens
catctgtactgtatg

SEQ ID NO: 452471 - DNA, 15 bp, Homo sapiens
acatctgtactgtat

SEQ ID NO: 452472 - DNA, 15 bp, Homo sapiens
tacatctgtactgta

SEQ ID NO: 452473 - DNA, 15 bp, Homo sapiens
ctacatctgtactgt

SEQ ID NO: 452474 - DNA, 15 bp, Homo sapiens
tctacatctgtactg

SEQ ID NO: 452475 - DNA, 15 bp, Homo sapiens
ttctacatctgtact

SEQ ID NO: 452476 - DNA, 15 bp, Homo sapiens
gttctacatctgtac

SEQ ID NO: 452477 - DNA, 15 bp, Homo sapiens
agttctacatctgta

SEQ ID NO: 452478 - DNA, 15 bp, Homo sapiens
aagttctacatctgt

SEQ ID NO: 452479 - DNA, 15 bp, Homo sapiens
aaagttctacatctg

SEQ ID NO: 452480 - DNA, 15 bp, Homo sapiens
aaaagttctacatct

SEQ ID NO: 452481 - DNA, 15 bp, Homo sapiens
gaaaagttctacatc

SEQ ID NO: 452482 - DNA, 15 bp, Homo sapiens
agaaaagttctacat

SEQ ID NO: 452483 - DNA, 15 bp, Homo sapiens
cagaaaagttctaca

SEQ ID NO: 452484 - DNA, 15 bp, Homo sapiens
acagaaaagttctac

SEQ ID NO: 452485 - DNA, 15 bp, Homo sapiens
aacagaaaagttcta

SEQ ID NO: 452486 - DNA, 15 bp, Homo sapiens
taacagaaaagttct

SEQ ID NO: 452487 - DNA, 15 bp, Homo sapiens
ataacagaaaagttc

SEQ ID NO: 452488 - DNA, 15 bp, Homo sapiens
gataacagaaaagtt

SEQ ID NO: 452489 - DNA, 15 bp, Homo sapiens
tgataacagaaaagt

SEQ ID NO: 452490 - DNA, 15 bp, Homo sapiens
atgataacagaaaag

SEQ ID NO: 452491 - DNA, 15 bp, Homo sapiens
tatgataacagaaaa

SEQ ID NO: 452492 - DNA, 15 bp, Homo sapiens
ctatgataacagaaa

SEQ ID NO: 452493 - DNA, 15 bp, Homo sapiens
tctatgataacagaa

SEQ ID NO: 452494 - DNA, 15 bp, Homo sapiens
ttctatgataacaga

SEQ ID NO: 452495 - DNA, 15 bp, Homo sapiens
gttctatgataacag

SEQ ID NO: 452496 - DNA, 15 bp, Homo sapiens
cgttctatgataaca

SEQ ID NO: 452497 - DNA, 15 bp, Homo sapiens
acgttctatgataac

SEQ ID NO: 452498 - DNA, 15 bp, Homo sapiens
aacgttctatgataa

SEQ ID NO: 452499 - DNA, 15 bp, Homo sapiens
gaacgttctatgata

SEQ ID NO: 452500 - DNA, 15 bp, Homo sapiens
agaacgttctatgat

SEQ ID NO: 452501 - DNA, 15 bp, Homo sapiens
tagaacgttctatga

SEQ ID NO: 452502 - DNA, 15 bp, Homo sapiens
atagaacgttctatg

SEQ ID NO: 452503 - DNA, 15 bp, Homo sapiens
aatagaacgttctat

SEQ ID NO: 452504 - DNA, 15 bp, Homo sapiens
caatagaacgttcta

SEQ ID NO: 452505 - DNA, 15 bp, Homo sapiens
ccaatagaacgttct

SEQ ID NO: 452506 - DNA, 15 bp, Homo sapiens
tccaatagaacgttc

SEQ ID NO: 452507 - DNA, 15 bp, Homo sapiens
gtccaatagaacgtt

SEQ ID NO: 452508 - DNA, 15 bp, Homo sapiens
tgtccaatagaacgt

SEQ ID NO: 452509 - DNA, 15 bp, Homo sapiens
ctgtccaatagaacg

SEQ ID NO: 452510 - DNA, 15 bp, Homo sapiens
actgtccaatagaac

SEQ ID NO: 452511 - DNA, 15 bp, Homo sapiens
cactgtccaatagaa

SEQ ID NO: 452512 - DNA, 15 bp, Homo sapiens
gcactgtccaataga

SEQ ID NO: 452513 - DNA, 15 bp, Homo sapiens
agcactgtccaatag

SEQ ID NO: 452514 - DNA, 15 bp, Homo sapiens
tagcactgtccaata

SEQ ID NO: 452515 - DNA, 15 bp, Homo sapiens
ctagcactgtccaat

SEQ ID NO: 452516 - DNA, 15 bp, Homo sapiens
cctagcactgtccaa

SEQ ID NO: 452517 - DNA, 15 bp, Homo sapiens
gcctagcactgtcca

SEQ ID NO: 452518 - DNA, 15 bp, Homo sapiens
agcctagcactgtcc

SEQ ID NO: 452519 - DNA, 15 bp, Homo sapiens
cagcctagcactgtc

SEQ ID NO: 452520 - DNA, 15 bp, Homo sapiens
tcagcctagcactgt

SEQ ID NO: 452521 - DNA, 15 bp, Homo sapiens
ttcagcctagcactg

SEQ ID NO: 452522 - DNA, 15 bp, Homo sapiens
attcagcctagcact

SEQ ID NO: 452523 - DNA, 15 bp, Homo sapiens
cattcagcctagcac

SEQ ID NO: 452524 - DNA, 15 bp, Homo sapiens
gcattcagcctagca

SEQ ID NO: 452525 - DNA, 15 bp, Homo sapiens
agcattcagcctagc

SEQ ID NO: 452526 - DNA, 15 bp, Homo sapiens
tagcattcagcctag

SEQ ID NO: 452527 - DNA, 15 bp, Homo sapiens
gtagcattcagccta

SEQ ID NO: 452528 - DNA, 15 bp, Homo sapiens
tgtagcattcagcct

SEQ ID NO: 452529 - DNA, 15 bp, Homo sapiens
ctgtagcattcagcc

SEQ ID NO: 452530 - DNA, 15 bp, Homo sapiens
tctgtagcattcagc

SEQ ID NO: 452531 - DNA, 15 bp, Homo sapiens
atctgtagcattcag

SEQ ID NO: 452532 - DNA, 15 bp, Homo sapiens
gatctgtagcattca

SEQ ID NO: 452533 - DNA, 15 bp, Homo sapiens
agatctgtagcattc

SEQ ID NO: 452534 - DNA, 15 bp, Homo sapiens
aagatctgtagcatt

SEQ ID NO: 452535 - DNA, 15 bp, Homo sapiens
gaagatctgtagcat

SEQ ID NO: 452536 - DNA, 15 bp, Homo sapiens
tgaagatctgtagca

SEQ ID NO: 452537 - DNA, 15 bp, Homo sapiens
ctgaagatctgtagc

SEQ ID NO: 452538 - DNA, 15 bp, Homo sapiens
tctgaagatctgtag

SEQ ID NO: 452539 - DNA, 15 bp, Homo sapiens
ctctgaagatctgta

SEQ ID NO: 452540 - DNA, 15 bp, Homo sapiens
tctctgaagatctgt

SEQ ID NO: 452541 - DNA, 15 bp, Homo sapiens
ttctctgaagatctg

SEQ ID NO: 452542 - DNA, 15 bp, Homo sapiens
tttctctgaagatct

SEQ ID NO: 452543 - DNA, 15 bp, Homo sapiens
ctttctctgaagatc

SEQ ID NO: 452544 - DNA, 15 bp, Homo sapiens
cctttctctgaagat

SEQ ID NO: 452545 - DNA, 15 bp, Homo sapiens
tcctttctctgaaga

SEQ ID NO: 452546 - DNA, 15 bp, Homo sapiens
ctcctttctctgaag

SEQ ID NO: 452547 - DNA, 15 bp, Homo sapiens
tctcctttctctgaa

SEQ ID NO: 452548 - DNA, 15 bp, Homo sapiens
ctctcctttctctga

SEQ ID NO: 452549 - DNA, 15 bp, Homo sapiens
cctctcctttctctg

SEQ ID NO: 452550 - DNA, 15 bp, Homo sapiens
acctctcctttctct

SEQ ID NO: 452551 - DNA, 15 bp, Homo sapiens
aacctctcctttctc

SEQ ID NO: 452552 - DNA, 15 bp, Homo sapiens
taacctctcctttct

SEQ ID NO: 452553 - DNA, 15 bp, Homo sapiens
ataacctctcctttc

SEQ ID NO: 452554 - DNA, 15 bp, Homo sapiens
cataacctctccttt

SEQ ID NO: 452555 - DNA, 15 bp, Homo sapiens
tcataacctctcctt

SEQ ID NO: 452556 - DNA, 15 bp, Homo sapiens
ctcataacctctcct

SEQ ID NO: 452557 - DNA, 15 bp, Homo sapiens
cctcataacctctcc

SEQ ID NO: 452558 - DNA, 15 bp, Homo sapiens
gcctcataacctctc

SEQ ID NO: 452559 - DNA, 15 bp, Homo sapiens
ggcctcataacctct

SEQ ID NO: 452560 - DNA, 15 bp, Homo sapiens
aggcctcataacctc

SEQ ID NO: 452561 - DNA, 15 bp, Homo sapiens
caggcctcataacct

SEQ ID NO: 452562 - DNA, 15 bp, Homo sapiens
ccaggcctcataacc

SEQ ID NO: 452563 - DNA, 15 bp, Homo sapiens
tccaggcctcataac

SEQ ID NO: 452564 - DNA, 15 bp, Homo sapiens
ctccaggcctcataa

SEQ ID NO: 452565 - DNA, 15 bp, Homo sapiens
actccaggcctcata

SEQ ID NO: 452566 - DNA, 15 bp, Homo sapiens
aactccaggcctcat

SEQ ID NO: 452567 - DNA, 15 bp, Homo sapiens
caactccaggcctca

SEQ ID NO: 452568 - DNA, 15 bp, Homo sapiens
acaactccaggcctc

SEQ ID NO: 452569 - DNA, 15 bp, Homo sapiens
gacaactccaggcct

SEQ ID NO: 452570 - DNA, 15 bp, Homo sapiens
agacaactccaggcc

SEQ ID NO: 452571 - DNA, 15 bp, Homo sapiens
tagacaactccaggc

SEQ ID NO: 452572 - DNA, 15 bp, Homo sapiens
ctagacaactccagg

SEQ ID NO: 452573 - DNA, 15 bp, Homo sapiens
tctagacaactccag

SEQ ID NO: 452574 - DNA, 15 bp, Homo sapiens
ttctagacaactcca

SEQ ID NO: 452575 - DNA, 15 bp, Homo sapiens
tttctagacaactcc

SEQ ID NO: 452576 - DNA, 15 bp, Homo sapiens
ctttctagacaactc

SEQ ID NO: 452577 - DNA, 15 bp, Homo sapiens
actttctagacaact

SEQ ID NO: 452578 - DNA, 15 bp, Homo sapiens
gactttctagacaac

SEQ ID NO: 452579 - DNA, 15 bp, Homo sapiens
agactttctagacaa

SEQ ID NO: 452580 - DNA, 15 bp, Homo sapiens
aagactttctagaca

SEQ ID NO: 452581 - DNA, 15 bp, Homo sapiens
aaagactttctagac

SEQ ID NO: 452582 - DNA, 15 bp, Homo sapiens
aaaagactttctaga

SEQ ID NO: 452583 - DNA, 15 bp, Homo sapiens
aaaaagactttctag

SEQ ID NO: 452584 - DNA, 15 bp, Homo sapiens
caaaaagactttcta

SEQ ID NO: 452585 - DNA, 15 bp, Homo sapiens
gcaaaaagactttct

SEQ ID NO: 452586 - DNA, 15 bp, Homo sapiens
ggcaaaaagactttc

SEQ ID NO: 452587 - DNA, 15 bp, Homo sapiens
tggcaaaaagacttt

SEQ ID NO: 452588 - DNA, 15 bp, Homo sapiens
ttggcaaaaagactt

SEQ ID NO: 452589 - DNA, 15 bp, Homo sapiens
tttggcaaaaagact

SEQ ID NO: 452590 - DNA, 15 bp, Homo sapiens
ctttggcaaaaagac

SEQ ID NO: 452591 - DNA, 15 bp, Homo sapiens
tctttggcaaaaaga

SEQ ID NO: 452592 - DNA, 15 bp, Homo sapiens
ctctttggcaaaaag

SEQ ID NO: 452593 - DNA, 15 bp, Homo sapiens
cctctttggcaaaaa

SEQ ID NO: 452594 - DNA, 15 bp, Homo sapiens
ccctctttggcaaaa

SEQ ID NO: 452595 - DNA, 15 bp, Homo sapiens
tccctctttggcaaa

SEQ ID NO: 452596 - DNA, 15 bp, Homo sapiens
atccctctttggcaa

SEQ ID NO: 452597 - DNA, 15 bp, Homo sapiens
aatccctctttggca

SEQ ID NO: 452598 - DNA, 15 bp, Homo sapiens
aaatccctctttggc

SEQ ID NO: 452599 - DNA, 15 bp, Homo sapiens
gaaatccctctttgg

SEQ ID NO: 452600 - DNA, 15 bp, Homo sapiens
tgaaatccctctttg

SEQ ID NO: 452601 - DNA, 15 bp, Homo sapiens
ttgaaatccctcttt

SEQ ID NO: 452602 - DNA, 15 bp, Homo sapiens
gttgaaatccctctt

SEQ ID NO: 452603 - DNA, 15 bp, Homo sapiens
agttgaaatccctct

SEQ ID NO: 452604 - DNA, 15 bp, Homo sapiens
cagttgaaatccctc

SEQ ID NO: 452605 - DNA, 15 bp, Homo sapiens
ccagttgaaatccct

SEQ ID NO: 452606 - DNA, 15 bp, Homo sapiens
cccagttgaaatccc

SEQ ID NO: 452607 - DNA, 15 bp, Homo sapiens
acccagttgaaatcc

SEQ ID NO: 452608 - DNA, 15 bp, Homo sapiens
gacccagttgaaatc

SEQ ID NO: 452609 - DNA, 15 bp, Homo sapiens
ggacccagttgaaat

SEQ ID NO: 452610 - DNA, 15 bp, Homo sapiens
gggacccagttgaaa

SEQ ID NO: 452611 - DNA, 15 bp, Homo sapiens
tgggacccagttgaa

SEQ ID NO: 452612 - DNA, 15 bp, Homo sapiens
ttgggacccagttga

SEQ ID NO: 452613 - DNA, 15 bp, Homo sapiens
tttgggacccagttg

SEQ ID NO: 452614 - DNA, 15 bp, Homo sapiens
atttgggacccagtt

SEQ ID NO: 452615 - DNA, 15 bp, Homo sapiens
tatttgggacccagt

SEQ ID NO: 452616 - DNA, 15 bp, Homo sapiens
ttatttgggacccag

SEQ ID NO: 452617 - DNA, 15 bp, Homo sapiens
attatttgggaccca

SEQ ID NO: 452618 - DNA, 15 bp, Homo sapiens
cattatttgggaccc

SEQ ID NO: 452619 - DNA, 15 bp, Homo sapiens
ccattatttgggacc

SEQ ID NO: 452620 - DNA, 15 bp, Homo sapiens
cccattatttgggac

SEQ ID NO: 452621 - DNA, 15 bp, Homo sapiens
acccattatttggga

SEQ ID NO: 452622 - DNA, 15 bp, Homo sapiens
cacccattatttggg

SEQ ID NO: 452623 - DNA, 15 bp, Homo sapiens
ccacccattatttgg

SEQ ID NO: 452624 - DNA, 15 bp, Homo sapiens
tccacccattatttg

SEQ ID NO: 452625 - DNA, 15 bp, Homo sapiens
ttccacccattattt

SEQ ID NO: 452626 - DNA, 15 bp, Homo sapiens
attccacccattatt

SEQ ID NO: 452627 - DNA, 15 bp, Homo sapiens
aattccacccattat

SEQ ID NO: 452628 - DNA, 15 bp, Homo sapiens
aaattccacccatta

SEQ ID NO: 452629 - DNA, 15 bp, Homo sapiens
caaattccacccatt

SEQ ID NO: 452630 - DNA, 15 bp, Homo sapiens
tcaaattccacccat

SEQ ID NO: 452631 - DNA, 15 bp, Homo sapiens
atcaaattccaccca

SEQ ID NO: 452632 - DNA, 15 bp, Homo sapiens
tatcaaattccaccc

SEQ ID NO: 452633 - DNA, 15 bp, Homo sapiens
ctatcaaattccacc

SEQ ID NO: 452634 - DNA, 15 bp, Homo sapiens
cctatcaaattccac

SEQ ID NO: 452635 - DNA, 15 bp, Homo sapiens
acctatcaaattcca

SEQ ID NO: 452636 - DNA, 15 bp, Homo sapiens
cacctatcaaattcc

SEQ ID NO: 452637 - DNA, 15 bp, Homo sapiens
acacctatcaaattc

SEQ ID NO: 452638 - DNA, 15 bp, Homo sapiens
tacacctatcaaatt

SEQ ID NO: 452639 - DNA, 15 bp, Homo sapiens
ttacacctatcaaat

SEQ ID NO: 452640 - DNA, 15 bp, Homo sapiens
tttacacctatcaaa

SEQ ID NO: 452641 - DNA, 15 bp, Homo sapiens
ctttacacctatcaa

SEQ ID NO: 452642 - DNA, 15 bp, Homo sapiens
tctttacacctatca

SEQ ID NO: 452643 - DNA, 15 bp, Homo sapiens
ttctttacacctatc

SEQ ID NO: 452644 - DNA, 15 bp, Homo sapiens
attctttacacctat

SEQ ID NO: 452645 - DNA, 15 bp, Homo sapiens
aattctttacaccta

SEQ ID NO: 452646 - DNA, 15 bp, Homo sapiens
aaattctttacacct

SEQ ID NO: 452647 - DNA, 15 bp, Homo sapiens
caaattctttacacc

SEQ ID NO: 452648 - DNA, 15 bp, Homo sapiens
gcaaattctttacac

SEQ ID NO: 452649 - DNA, 15 bp, Homo sapiens
cgcaaattctttaca

SEQ ID NO: 452650 - DNA, 15 bp, Homo sapiens
ccgcaaattctttac

SEQ ID NO: 452651 - DNA, 15 bp, Homo sapiens
accgcaaattcttta

SEQ ID NO: 452652 - DNA, 15 bp, Homo sapiens
caccgcaaattcttt

SEQ ID NO: 452653 - DNA, 15 bp, Homo sapiens
ccaccgcaaattctt

SEQ ID NO: 452654 - DNA, 15 bp, Homo sapiens
accaccgcaaattct

SEQ ID NO: 452655 - DNA, 15 bp, Homo sapiens
aaccaccgcaaattc

SEQ ID NO: 452656 - DNA, 15 bp, Homo sapiens
aaaccaccgcaaatt

SEQ ID NO: 452657 - DNA, 15 bp, Homo sapiens
taaaccaccgcaaat

SEQ ID NO: 452658 - DNA, 15 bp, Homo sapiens
ataaaccaccgcaaa

SEQ ID NO: 452659 - DNA, 15 bp, Homo sapiens
cataaaccaccgcaa

SEQ ID NO: 452660 - DNA, 15 bp, Homo sapiens
gcataaaccaccgca

SEQ ID NO: 452661 - DNA, 15 bp, Homo sapiens
ggcataaaccaccgc

SEQ ID NO: 452662 - DNA, 15 bp, Homo sapiens
aggcataaaccaccg

SEQ ID NO: 452663 - DNA, 15 bp, Homo sapiens
caggcataaaccacc

SEQ ID NO: 452664 - DNA, 15 bp, Homo sapiens
acaggcataaaccac

SEQ ID NO: 452665 - DNA, 15 bp, Homo sapiens
tacaggcataaacca

SEQ ID NO: 452666 - DNA, 15 bp, Homo sapiens
ttacaggcataaacc

SEQ ID NO: 452667 - DNA, 15 bp, Homo sapiens
attacaggcataaac

SEQ ID NO: 452668 - DNA, 15 bp, Homo sapiens
gattacaggcataaa

SEQ ID NO: 452669 - DNA, 15 bp, Homo sapiens
ggattacaggcataa

SEQ ID NO: 452670 - DNA, 15 bp, Homo sapiens
gggattacaggcata

SEQ ID NO: 452671 - DNA, 15 bp, Homo sapiens
tgggattacaggcat

SEQ ID NO: 452672 - DNA, 15 bp, Homo sapiens
cctcctgcctcagcc

SEQ ID NO: 452673 - DNA, 15 bp, Homo sapiens
tcctcctgcctcagc

SEQ ID NO: 452674 - DNA, 15 bp, Homo sapiens
atcctcctgcctcag

SEQ ID NO: 452675 - DNA, 15 bp, Homo sapiens
aatcctcctgcctca

SEQ ID NO: 452676 - DNA, 15 bp, Homo sapiens
caatcctcctgcctc

SEQ ID NO: 452677 - DNA, 15 bp, Homo sapiens
gcaatcctcctgcct

SEQ ID NO: 452678 - DNA, 15 bp, Homo sapiens
agcaatcctcctgcc

SEQ ID NO: 452679 - DNA, 15 bp, Homo sapiens
aagcaatcctcctgc

SEQ ID NO: 452680 - DNA, 15 bp, Homo sapiens
caagcaatcctcctg

SEQ ID NO: 452681 - DNA, 15 bp, Homo sapiens
cctgggctcaagcaa

SEQ ID NO: 452682 - DNA, 15 bp, Homo sapiens
tcctgggctcaagca

SEQ ID NO: 452683 - DNA, 15 bp, Homo sapiens
ctcctgggctcaagc

SEQ ID NO: 452684 - DNA, 15 bp, Homo sapiens
actcctgggctcaag

SEQ ID NO: 452685 - DNA, 15 bp, Homo sapiens
aactcctgggctcaa

SEQ ID NO: 452686 - DNA, 15 bp, Homo sapiens
aaactcctgggctca

SEQ ID NO: 452687 - DNA, 15 bp, Homo sapiens
caaactcctgggctc

SEQ ID NO: 452688 - DNA, 15 bp, Homo sapiens
tcaaactcctgggct

SEQ ID NO: 452689 - DNA, 15 bp, Homo sapiens
ctcaaactcctgggc

SEQ ID NO: 452690 - DNA, 15 bp, Homo sapiens
tctcaaactcctggg

SEQ ID NO: 452691 - DNA, 15 bp, Homo sapiens
gtctcaaactcctgg

SEQ ID NO: 452692 - DNA, 15 bp, Homo sapiens
agctggtctcaaact

SEQ ID NO: 452693 - DNA, 15 bp, Homo sapiens
aagctggtctcaaac

SEQ ID NO: 452694 - DNA, 15 bp, Homo sapiens
caagctggtctcaaa

SEQ ID NO: 452695 - DNA, 15 bp, Homo sapiens
ccaagctggtctcaa

SEQ ID NO: 452696 - DNA, 15 bp, Homo sapiens
cccaagctggtctca

SEQ ID NO: 452697 - DNA, 15 bp, Homo sapiens
gcccaagctggtctc

SEQ ID NO: 452698 - DNA, 15 bp, Homo sapiens
tgcccaagctggtct

SEQ ID NO: 452699 - DNA, 15 bp, Homo sapiens
ttgcccaagctggtc

SEQ ID NO: 452700 - DNA, 15 bp, Homo sapiens
gttgcccaagctggt

SEQ ID NO: 452701 - DNA, 15 bp, Homo sapiens
cgttgcccaagctgg

SEQ ID NO: 452702 - DNA, 15 bp, Homo sapiens
acgttgcccaagctg

SEQ ID NO: 452703 - DNA, 15 bp, Homo sapiens
cacgttgcccaagct

SEQ ID NO: 452704 - DNA, 15 bp, Homo sapiens
ccacgttgcccaagc

SEQ ID NO: 452705 - DNA, 15 bp, Homo sapiens
accacgttgcccaag

SEQ ID NO: 452706 - DNA, 15 bp, Homo sapiens
taccacgttgcccaa

SEQ ID NO: 452707 - DNA, 15 bp, Homo sapiens
ttaccacgttgccca

SEQ ID NO: 452708 - DNA, 15 bp, Homo sapiens
tttaccacgttgccc

SEQ ID NO: 452709 - DNA, 15 bp, Homo sapiens
ttttaccacgttgcc

SEQ ID NO: 452710 - DNA, 15 bp, Homo sapiens
gttttaccacgttgc

SEQ ID NO: 452711 - DNA, 15 bp, Homo sapiens
agttttaccacgttg

SEQ ID NO: 452712 - DNA, 15 bp, Homo sapiens
gagttttaccacgtt

SEQ ID NO: 452713 - DNA, 15 bp, Homo sapiens
ggagttttaccacgt

SEQ ID NO: 452714 - DNA, 15 bp, Homo sapiens
gggagttttaccacg

SEQ ID NO: 452715 - DNA, 15 bp, Homo sapiens
agggagttttaccac

SEQ ID NO: 452716 - DNA, 15 bp, Homo sapiens
gagggagttttacca

SEQ ID NO: 452717 - DNA, 15 bp, Homo sapiens
agagggagttttacc

SEQ ID NO: 452718 - DNA, 15 bp, Homo sapiens
gagagggagttttac

SEQ ID NO: 452719 - DNA, 15 bp, Homo sapiens
ggagagggagtttta

SEQ ID NO: 452720 - DNA, 15 bp, Homo sapiens
gggagagggagtttt

SEQ ID NO: 452721 - DNA, 15 bp, Homo sapiens
ggggagagggagttt

SEQ ID NO: 452722 - DNA, 15 bp, Homo sapiens
aggggagagggagtt

SEQ ID NO: 452723 - DNA, 15 bp, Homo sapiens
taggggagagggagt

SEQ ID NO: 452724 - DNA, 15 bp, Homo sapiens
ttaggggagagggag

SEQ ID NO: 452725 - DNA, 15 bp, Homo sapiens
tttaggggagaggga

SEQ ID NO: 452726 - DNA, 15 bp, Homo sapiens
ttttaggggagaggg

SEQ ID NO: 452727 - DNA, 15 bp, Homo sapiens
tttttaggggagagg

SEQ ID NO: 452728 - DNA, 15 bp, Homo sapiens
atttttaggggagag

SEQ ID NO: 452729 - DNA, 15 bp, Homo sapiens
tatttttaggggaga

SEQ ID NO: 452730 - DNA, 15 bp, Homo sapiens
ttatttttaggggag

SEQ ID NO: 452731 - DNA, 15 bp, Homo sapiens
tttatttttagggga

SEQ ID NO: 452732 - DNA, 15 bp, Homo sapiens
ttttatttttagggg

SEQ ID NO: 452733 - DNA, 15 bp, Homo sapiens
tttttatttttaggg

SEQ ID NO: 452734 - DNA, 15 bp, Homo sapiens
ttttttatttttagg

SEQ ID NO: 452735 - DNA, 15 bp, Homo sapiens
tttttttatttttag

SEQ ID NO: 452736 - DNA, 15 bp, Homo sapiens
ttttttttattttta

SEQ ID NO: 452737 - DNA, 15 bp, Homo sapiens
attttttttattttt

SEQ ID NO: 452738 - DNA, 15 bp, Homo sapiens
aattttttttatttt

SEQ ID NO: 452739 - DNA, 15 bp, Homo sapiens
taattttttttattt

SEQ ID NO: 452740 - DNA, 15 bp, Homo sapiens
ctaattttttttatt

SEQ ID NO: 452741 - DNA, 15 bp, Homo sapiens
gctaattttttttat

SEQ ID NO: 452742 - DNA, 15 bp, Homo sapiens
ggctaatttttttta

SEQ ID NO: 452743 - DNA, 15 bp, Homo sapiens
tggctaatttttttt

SEQ ID NO: 452744 - DNA, 15 bp, Homo sapiens
ctggctaattttttt

SEQ ID NO: 452745 - DNA, 15 bp, Homo sapiens
cctggctaatttttt

SEQ ID NO: 452746 - DNA, 15 bp, Homo sapiens
ggcctggctaatttt

SEQ ID NO: 452747 - DNA, 15 bp, Homo sapiens
aggcctggctaattt

SEQ ID NO: 452748 - DNA, 15 bp, Homo sapiens
caggcctggctaatt

SEQ ID NO: 452749 - DNA, 15 bp, Homo sapiens
ccaggcctggctaat

SEQ ID NO: 452750 - DNA, 15 bp, Homo sapiens
accaggcctggctaa

SEQ ID NO: 452751 - DNA, 15 bp, Homo sapiens
caccaggcctggcta

SEQ ID NO: 452752 - DNA, 15 bp, Homo sapiens
ccaccaggcctggct

SEQ ID NO: 452753 - DNA, 15 bp, Homo sapiens
gccaccaggcctggc

SEQ ID NO: 452754 - DNA, 15 bp, Homo sapiens
cgccaccaggcctgg

SEQ ID NO: 452755 - DNA, 15 bp, Homo sapiens
acgccaccaggcctg

SEQ ID NO: 452756 - DNA, 15 bp, Homo sapiens
cacgccaccaggcct

SEQ ID NO: 452757 - DNA, 15 bp, Homo sapiens
ccacgccaccaggcc

SEQ ID NO: 452758 - DNA, 15 bp, Homo sapiens
tccacgccaccaggc

SEQ ID NO: 452759 - DNA, 15 bp, Homo sapiens
gtccacgccaccagg

SEQ ID NO: 452760 - DNA, 15 bp, Homo sapiens
ggtccacgccaccag

SEQ ID NO: 452761 - DNA, 15 bp, Homo sapiens
aggtccacgccacca

SEQ ID NO: 452762 - DNA, 15 bp, Homo sapiens
caggtccacgccacc

SEQ ID NO: 452763 - DNA, 15 bp, Homo sapiens
acaggtccacgccac

SEQ ID NO: 452764 - DNA, 15 bp, Homo sapiens
tacaggtccacgcca

SEQ ID NO: 452765 - DNA, 15 bp, Homo sapiens
ctacaggtccacgcc

SEQ ID NO: 452766 - DNA, 15 bp, Homo sapiens
actacaggtccacgc

SEQ ID NO: 452767 - DNA, 15 bp, Homo sapiens
gactacaggtccacg

SEQ ID NO: 452768 - DNA, 15 bp, Homo sapiens
ggactacaggtccac

SEQ ID NO: 452769 - DNA, 15 bp, Homo sapiens
gggactacaggtcca

SEQ ID NO: 452770 - DNA, 15 bp, Homo sapiens
tgggactacaggtcc

SEQ ID NO: 452771 - DNA, 15 bp, Homo sapiens
ctgggactacaggtc

SEQ ID NO: 452772 - DNA, 15 bp, Homo sapiens
cagtagctgggacta

SEQ ID NO: 452773 - DNA, 15 bp, Homo sapiens
ccagtagctgggact

SEQ ID NO: 452774 - DNA, 15 bp, Homo sapiens
accagtagctgggac

SEQ ID NO: 452775 - DNA, 15 bp, Homo sapiens
caccagtagctggga

SEQ ID NO: 452776 - DNA, 15 bp, Homo sapiens
tcaccagtagctggg

SEQ ID NO: 452777 - DNA, 15 bp, Homo sapiens
ctcaccagtagctgg

SEQ ID NO: 452778 - DNA, 15 bp, Homo sapiens
tctcaccagtagctg

SEQ ID NO: 452779 - DNA, 15 bp, Homo sapiens
gtctcaccagtagct

SEQ ID NO: 452780 - DNA, 15 bp, Homo sapiens
agtctcaccagtagc

SEQ ID NO: 452781 - DNA, 15 bp, Homo sapiens
tagtctcaccagtag

SEQ ID NO: 452782 - DNA, 15 bp, Homo sapiens
ttagtctcaccagta

SEQ ID NO: 452783 - DNA, 15 bp, Homo sapiens
cttagtctcaccagt

SEQ ID NO: 452784 - DNA, 15 bp, Homo sapiens
ccttagtctcaccag

SEQ ID NO: 452785 - DNA, 15 bp, Homo sapiens
accttagtctcacca

SEQ ID NO: 452786 - DNA, 15 bp, Homo sapiens
caccttagtctcacc

SEQ ID NO: 452787 - DNA, 15 bp, Homo sapiens
ccaccttagtctcac

SEQ ID NO: 452788 - DNA, 15 bp, Homo sapiens
cccaccttagtctca

SEQ ID NO: 452789 - DNA, 15 bp, Homo sapiens
tcccaccttagtctc

SEQ ID NO: 452790 - DNA, 15 bp, Homo sapiens
ctcccaccttagtct

SEQ ID NO: 452791 - DNA, 15 bp, Homo sapiens
cctcccaccttagtc

SEQ ID NO: 452792 - DNA, 15 bp, Homo sapiens
tcctcccaccttagt

SEQ ID NO: 452793 - DNA, 15 bp, Homo sapiens
atcctcccaccttag

SEQ ID NO: 452794 - DNA, 15 bp, Homo sapiens
gatcctcccacctta

SEQ ID NO: 452795 - DNA, 15 bp, Homo sapiens
tgatcctcccacctt

SEQ ID NO: 452796 - DNA, 15 bp, Homo sapiens
gtgatcctcccacct

SEQ ID NO: 452797 - DNA, 15 bp, Homo sapiens
ggtgatcctcccacc

SEQ ID NO: 452798 - DNA, 15 bp, Homo sapiens
gggtgatcctcccac

SEQ ID NO: 452799 - DNA, 15 bp, Homo sapiens
tgggtgatcctccca

SEQ ID NO: 452800 - DNA, 15 bp, Homo sapiens
ttgggtgatcctccc

SEQ ID NO: 452801 - DNA, 15 bp, Homo sapiens
cttgggtgatcctcc

SEQ ID NO: 452802 - DNA, 15 bp, Homo sapiens
gcttgggtgatcctc

SEQ ID NO: 452803 - DNA, 15 bp, Homo sapiens
ggcttgggtgatcct

SEQ ID NO: 452804 - DNA, 15 bp, Homo sapiens
gggcttgggtgatcc

SEQ ID NO: 452805 - DNA, 15 bp, Homo sapiens
ggggcttgggtgatc

SEQ ID NO: 452806 - DNA, 15 bp, Homo sapiens
cggggcttgggtgat

SEQ ID NO: 452807 - DNA, 15 bp, Homo sapiens
ccggggcttgggtga

SEQ ID NO: 452808 - DNA, 15 bp, Homo sapiens
cccggggcttgggtg

SEQ ID NO: 452809 - DNA, 15 bp, Homo sapiens
ccccggggcttgggt

SEQ ID NO: 452810 - DNA, 15 bp, Homo sapiens
cccccggggcttggg

SEQ ID NO: 452811 - DNA, 15 bp, Homo sapiens
acccccggggcttgg

SEQ ID NO: 452812 - DNA, 15 bp, Homo sapiens
aacccccggggcttg

SEQ ID NO: 452813 - DNA, 15 bp, Homo sapiens
taacccccggggctt

SEQ ID NO: 452814 - DNA, 15 bp, Homo sapiens
ttaacccccggggct

SEQ ID NO: 452815 - DNA, 15 bp, Homo sapiens
cttaacccccggggc

SEQ ID NO: 452816 - DNA, 15 bp, Homo sapiens
ccttaacccccgggg

SEQ ID NO: 452817 - DNA, 15 bp, Homo sapiens
gccttaacccccggg

SEQ ID NO: 452818 - DNA, 15 bp, Homo sapiens
agccttaacccccgg

SEQ ID NO: 452819 - DNA, 15 bp, Homo sapiens
cagccttaacccccg

SEQ ID NO: 452820 - DNA, 15 bp, Homo sapiens
gcagccttaaccccc

SEQ ID NO: 452821 - DNA, 15 bp, Homo sapiens
tgcagccttaacccc

SEQ ID NO: 452822 - DNA, 15 bp, Homo sapiens
ctgcagccttaaccc

SEQ ID NO: 452823 - DNA, 15 bp, Homo sapiens
actgcagccttaacc

SEQ ID NO: 452824 - DNA, 15 bp, Homo sapiens
cactgcagccttaac

SEQ ID NO: 452825 - DNA, 15 bp, Homo sapiens
tcactgcagccttaa

SEQ ID NO: 452826 - DNA, 15 bp, Homo sapiens
ctcactgcagcctta

SEQ ID NO: 452827 - DNA, 15 bp, Homo sapiens
gctcactgcagcctt

SEQ ID NO: 452828 - DNA, 15 bp, Homo sapiens
ggctcactgcagcct

SEQ ID NO: 452829 - DNA, 15 bp, Homo sapiens
cggctcactgcagcc

SEQ ID NO: 452830 - DNA, 15 bp, Homo sapiens
acggctcactgcagc

SEQ ID NO: 452831 - DNA, 15 bp, Homo sapiens
cacggctcactgcag

SEQ ID NO: 452832 - DNA, 15 bp, Homo sapiens
tcacggctcactgca

SEQ ID NO: 452833 - DNA, 15 bp, Homo sapiens
atcacggctcactgc

SEQ ID NO: 452834 - DNA, 15 bp, Homo sapiens
gatcacggctcactg

SEQ ID NO: 452835 - DNA, 15 bp, Homo sapiens
ggatcacggctcact

SEQ ID NO: 452836 - DNA, 15 bp, Homo sapiens
gggatcacggctcac

SEQ ID NO: 452837 - DNA, 15 bp, Homo sapiens
cgggatcacggctca

SEQ ID NO: 452838 - DNA, 15 bp, Homo sapiens
gcgggatcacggctc

SEQ ID NO: 452839 - DNA, 15 bp, Homo sapiens
ggcgggatcacggct

SEQ ID NO: 452840 - DNA, 15 bp, Homo sapiens
tggcgggatcacggc

SEQ ID NO: 452841 - DNA, 15 bp, Homo sapiens
gtggcgggatcacgg

SEQ ID NO: 452842 - DNA, 15 bp, Homo sapiens
ggtggcgggatcacg

SEQ ID NO: 452843 - DNA, 15 bp, Homo sapiens
cggtggcgggatcac

SEQ ID NO: 452844 - DNA, 15 bp, Homo sapiens
gcggtggcgggatca

SEQ ID NO: 452845 - DNA, 15 bp, Homo sapiens
tgcggtggcgggatc

SEQ ID NO: 452846 - DNA, 15 bp, Homo sapiens
gtgcggtggcgggat

SEQ ID NO: 452847 - DNA, 15 bp, Homo sapiens
agtgcggtggcggga

SEQ ID NO: 452848 - DNA, 15 bp, Homo sapiens
gagtgcggtggcggg

SEQ ID NO: 452849 - DNA, 15 bp, Homo sapiens
ggagtgcggtggcgg

SEQ ID NO: 452850 - DNA, 15 bp, Homo sapiens
tggagtgcggtggcg

SEQ ID NO: 452851 - DNA, 15 bp, Homo sapiens
ctggagtgcggtggc

SEQ ID NO: 452852 - DNA, 15 bp, Homo sapiens
gctggagtgcggtgg

SEQ ID NO: 452853 - DNA, 15 bp, Homo sapiens
ggctggagtgcggtg

SEQ ID NO: 452854 - DNA, 15 bp, Homo sapiens
aggctggagtgcggt

SEQ ID NO: 452855 - DNA, 15 bp, Homo sapiens
caggctggagtgcgg

SEQ ID NO: 452856 - DNA, 15 bp, Homo sapiens
ccaggctggagtgcg

SEQ ID NO: 452857 - DNA, 15 bp, Homo sapiens
acccaggctggagtg

SEQ ID NO: 452858 - DNA, 15 bp, Homo sapiens
cacccaggctggagt

SEQ ID NO: 452859 - DNA, 15 bp, Homo sapiens
tcacccaggctggag

SEQ ID NO: 452860 - DNA, 15 bp, Homo sapiens
ggagacagggtctca

SEQ ID NO: 452861 - DNA, 15 bp, Homo sapiens
tggagacagggtctc

SEQ ID NO: 452862 - DNA, 15 bp, Homo sapiens
ttggagacagggtct

SEQ ID NO: 452863 - DNA, 15 bp, Homo sapiens
tttggagacagggtc

SEQ ID NO: 452864 - DNA, 15 bp, Homo sapiens
ttttggagacagggt

SEQ ID NO: 452865 - DNA, 15 bp, Homo sapiens
tttttggagacaggg

SEQ ID NO: 452866 - DNA, 15 bp, Homo sapiens
ttttttggagacagg

SEQ ID NO: 452867 - DNA, 15 bp, Homo sapiens
tttttttggagacag

SEQ ID NO: 452868 - DNA, 15 bp, Homo sapiens
ttttttttggagaca

SEQ ID NO: 452869 - DNA, 15 bp, Homo sapiens
tttttttttggagac

SEQ ID NO: 452870 - DNA, 15 bp, Homo sapiens
ttttttttttggaga

SEQ ID NO: 452871 - DNA, 15 bp, Homo sapiens
tttttttttttggag

SEQ ID NO: 452872 - DNA, 15 bp, Homo sapiens
ttttttttttttgga

SEQ ID NO: 452873 - DNA, 15 bp, Homo sapiens
tttttttttttttgg

SEQ ID NO: 452874 - DNA, 15 bp, Homo sapiens
gaatttttttttttt

SEQ ID NO: 452875 - DNA, 15 bp, Homo sapiens
ggaattttttttttt

SEQ ID NO: 452876 - DNA, 15 bp, Homo sapiens
aggaatttttttttt

SEQ ID NO: 452877 - DNA, 15 bp, Homo sapiens
caggaattttttttt

SEQ ID NO: 452878 - DNA, 15 bp, Homo sapiens
ccaggaatttttttt

SEQ ID NO: 452879 - DNA, 15 bp, Homo sapiens
accaggaattttttt

SEQ ID NO: 452880 - DNA, 15 bp, Homo sapiens
taccaggaatttttt

SEQ ID NO: 452881 - DNA, 15 bp, Homo sapiens
ctaccaggaattttt

SEQ ID NO: 452882 - DNA, 15 bp, Homo sapiens
gctaccaggaatttt

SEQ ID NO: 452883 - DNA, 15 bp, Homo sapiens
ggctaccaggaattt

SEQ ID NO: 452884 - DNA, 15 bp, Homo sapiens
gggctaccaggaatt

SEQ ID NO: 452885 - DNA, 15 bp, Homo sapiens
cgggctaccaggaat

SEQ ID NO: 452886 - DNA, 15 bp, Homo sapiens
ccgggctaccaggaa

SEQ ID NO: 452887 - DNA, 15 bp, Homo sapiens
accgggctaccagga

SEQ ID NO: 452888 - DNA, 15 bp, Homo sapiens
taccgggctaccagg

SEQ ID NO: 452889 - DNA, 15 bp, Homo sapiens
ctaccgggctaccag

SEQ ID NO: 452890 - DNA, 15 bp, Homo sapiens
tctaccgggctacca

SEQ ID NO: 452891 - DNA, 15 bp, Homo sapiens
gtctaccgggctacc

SEQ ID NO: 452892 - DNA, 15 bp, Homo sapiens
agtctaccgggctac

SEQ ID NO: 452893 - DNA, 15 bp, Homo sapiens
tagtctaccgggcta

SEQ ID NO: 452894 - DNA, 15 bp, Homo sapiens
ctagtctaccgggct

SEQ ID NO: 452895 - DNA, 15 bp, Homo sapiens
cctagtctaccgggc

SEQ ID NO: 452896 - DNA, 15 bp, Homo sapiens
tcctagtctaccggg

SEQ ID NO: 452897 - DNA, 15 bp, Homo sapiens
ctcctagtctaccgg

SEQ ID NO: 452898 - DNA, 15 bp, Homo sapiens
cctcctagtctaccg

SEQ ID NO: 452899 - DNA, 15 bp, Homo sapiens
ccctcctagtctacc

SEQ ID NO: 452900 - DNA, 15 bp, Homo sapiens
accctcctagtctac

SEQ ID NO: 452901 - DNA, 15 bp, Homo sapiens
taccctcctagtcta

SEQ ID NO: 452902 - DNA, 15 bp, Homo sapiens
ttaccctcctagtct

SEQ ID NO: 452903 - DNA, 15 bp, Homo sapiens
cttaccctcctagtc

SEQ ID NO: 452904 - DNA, 15 bp, Homo sapiens
acttaccctcctagt

SEQ ID NO: 452905 - DNA, 15 bp, Homo sapiens
tacttaccctcctag

SEQ ID NO: 452906 - DNA, 15 bp, Homo sapiens
ctacttaccctccta

SEQ ID NO: 452907 - DNA, 15 bp, Homo sapiens
cctacttaccctcct

SEQ ID NO: 452908 - DNA, 15 bp, Homo sapiens
ccctacttaccctcc

SEQ ID NO: 452909 - DNA, 15 bp, Homo sapiens
cccctacttaccctc

SEQ ID NO: 452910 - DNA, 15 bp, Homo sapiens
tcccctacttaccct

SEQ ID NO: 452911 - DNA, 15 bp, Homo sapiens
ctcccctacttaccc

SEQ ID NO: 452912 - DNA, 15 bp, Homo sapiens
tctcccctacttacc

SEQ ID NO: 452913 - DNA, 15 bp, Homo sapiens
ttctcccctacttac

SEQ ID NO: 452914 - DNA, 15 bp, Homo sapiens
cttctcccctactta

SEQ ID NO: 452915 - DNA, 15 bp, Homo sapiens
acttctcccctactt

SEQ ID NO: 452916 - DNA, 15 bp, Homo sapiens
cacttctcccctact

SEQ ID NO: 452917 - DNA, 15 bp, Homo sapiens
tcacttctcccctac

SEQ ID NO: 452918 - DNA, 15 bp, Homo sapiens
atcacttctccccta

SEQ ID NO: 452919 - DNA, 15 bp, Homo sapiens
aatcacttctcccct

SEQ ID NO: 452920 - DNA, 15 bp, Homo sapiens
taatcacttctcccc

SEQ ID NO: 452921 - DNA, 15 bp, Homo sapiens
gtaatcacttctccc

SEQ ID NO: 452922 - DNA, 15 bp, Homo sapiens
agtaatcacttctcc

SEQ ID NO: 452923 - DNA, 15 bp, Homo sapiens
aagtaatcacttctc

SEQ ID NO: 452924 - DNA, 15 bp, Homo sapiens
taagtaatcacttct

SEQ ID NO: 452925 - DNA, 15 bp, Homo sapiens
gtaagtaatcacttc

SEQ ID NO: 452926 - DNA, 15 bp, Homo sapiens
tgtaagtaatcactt

SEQ ID NO: 452927 - DNA, 15 bp, Homo sapiens
ttgtaagtaatcact

SEQ ID NO: 452928 - DNA, 15 bp, Homo sapiens
tttgtaagtaatcac

SEQ ID NO: 452929 - DNA, 15 bp, Homo sapiens
ttttgtaagtaatca

SEQ ID NO: 452930 - DNA, 15 bp, Homo sapiens
cttttgtaagtaatc

SEQ ID NO: 452931 - DNA, 15 bp, Homo sapiens
tcttttgtaagtaat

SEQ ID NO: 452932 - DNA, 15 bp, Homo sapiens
gtcttttgtaagtaa

SEQ ID NO: 452933 - DNA, 15 bp, Homo sapiens
tgtcttttgtaagta

SEQ ID NO: 452934 - DNA, 15 bp, Homo sapiens
atgtcttttgtaagt

SEQ ID NO: 452935 - DNA, 15 bp, Homo sapiens
aatgtcttttgtaag

SEQ ID NO: 452936 - DNA, 15 bp, Homo sapiens
caatgtcttttgtaa

SEQ ID NO: 452937 - DNA, 15 bp, Homo sapiens
tcaatgtcttttgta

SEQ ID NO: 452938 - DNA, 15 bp, Homo sapiens
ttcaatgtcttttgt

SEQ ID NO: 452939 - DNA, 15 bp, Homo sapiens
attcaatgtcttttg

SEQ ID NO: 452940 - DNA, 15 bp, Homo sapiens
tattcaatgtctttt

SEQ ID NO: 452941 - DNA, 15 bp, Homo sapiens
gtattcaatgtcttt

SEQ ID NO: 452942 - DNA, 15 bp, Homo sapiens
tgtattcaatgtctt

SEQ ID NO: 452943 - DNA, 15 bp, Homo sapiens
ctgtattcaatgtct

SEQ ID NO: 452944 - DNA, 15 bp, Homo sapiens
cctgtattcaatgtc

SEQ ID NO: 452945 - DNA, 15 bp, Homo sapiens
tcctgtattcaatgt

SEQ ID NO: 452946 - DNA, 15 bp, Homo sapiens
gtcctgtattcaatg

SEQ ID NO: 452947 - DNA, 15 bp, Homo sapiens
ggtcctgtattcaat

SEQ ID NO: 452948 - DNA, 15 bp, Homo sapiens
tggtcctgtattcaa

SEQ ID NO: 452949 - DNA, 15 bp, Homo sapiens
ttggtcctgtattca

SEQ ID NO: 452950 - DNA, 15 bp, Homo sapiens
cttggtcctgtattc

SEQ ID NO: 452951 - DNA, 15 bp, Homo sapiens
ccttggtcctgtatt

SEQ ID NO: 452952 - DNA, 15 bp, Homo sapiens
tccttggtcctgtat

SEQ ID NO: 452953 - DNA, 15 bp, Homo sapiens
ttccttggtcctgta

SEQ ID NO: 452954 - DNA, 15 bp, Homo sapiens
attccttggtcctgt

SEQ ID NO: 452955 - DNA, 15 bp, Homo sapiens
aattccttggtcctg

SEQ ID NO: 452956 - DNA, 15 bp, Homo sapiens
aaattccttggtcct

SEQ ID NO: 452957 - DNA, 15 bp, Homo sapiens
gaaattccttggtcc

SEQ ID NO: 452958 - DNA, 15 bp, Homo sapiens
tgaaattccttggtc

SEQ ID NO: 452959 - DNA, 15 bp, Homo sapiens
ctgaaattccttggt

SEQ ID NO: 452960 - DNA, 15 bp, Homo sapiens
actgaaattccttgg

SEQ ID NO: 452961 - DNA, 15 bp, Homo sapiens
aactgaaattccttg

SEQ ID NO: 452962 - DNA, 15 bp, Homo sapiens
gaactgaaattcctt

SEQ ID NO: 452963 - DNA, 15 bp, Homo sapiens
agaactgaaattcct

SEQ ID NO: 452964 - DNA, 15 bp, Homo sapiens
cagaactgaaattcc

SEQ ID NO: 452965 - DNA, 15 bp, Homo sapiens
acagaactgaaattc

SEQ ID NO: 452966 - DNA, 15 bp, Homo sapiens
aacagaactgaaatt

SEQ ID NO: 452967 - DNA, 15 bp, Homo sapiens
gaacagaactgaaat

SEQ ID NO: 452968 - DNA, 15 bp, Homo sapiens
agaacagaactgaaa

SEQ ID NO: 452969 - DNA, 15 bp, Homo sapiens
aagaacagaactgaa

SEQ ID NO: 452970 - DNA, 15 bp, Homo sapiens
aaagaacagaactga

SEQ ID NO: 452971 - DNA, 15 bp, Homo sapiens
aaaagaacagaactg

SEQ ID NO: 452972 - DNA, 15 bp, Homo sapiens
caaaagaacagaact

SEQ ID NO: 452973 - DNA, 15 bp, Homo sapiens
acaaaagaacagaac

SEQ ID NO: 452974 - DNA, 15 bp, Homo sapiens
tacaaaagaacagaa

SEQ ID NO: 452975 - DNA, 15 bp, Homo sapiens
ctacaaaagaacaga

SEQ ID NO: 452976 - DNA, 15 bp, Homo sapiens
cctacaaaagaacag

SEQ ID NO: 452977 - DNA, 15 bp, Homo sapiens
ccctacaaaagaaca

SEQ ID NO: 452978 - DNA, 15 bp, Homo sapiens
cccctacaaaagaac

SEQ ID NO: 452979 - DNA, 15 bp, Homo sapiens
tcccctacaaaagaa

SEQ ID NO: 452980 - DNA, 15 bp, Homo sapiens
ttcccctacaaaaga

SEQ ID NO: 452981 - DNA, 15 bp, Homo sapiens
cttcccctacaaaag

SEQ ID NO: 452982 - DNA, 15 bp, Homo sapiens
gcttcccctacaaaa

SEQ ID NO: 452983 - DNA, 15 bp, Homo sapiens
agcttcccctacaaa

SEQ ID NO: 452984 - DNA, 15 bp, Homo sapiens
aagcttcccctacaa

SEQ ID NO: 452985 - DNA, 15 bp, Homo sapiens
aaagcttcccctaca

SEQ ID NO: 452986 - DNA, 15 bp, Homo sapiens
aaaagcttcccctac

SEQ ID NO: 452987 - DNA, 15 bp, Homo sapiens
taaaagcttccccta

SEQ ID NO: 452988 - DNA, 15 bp, Homo sapiens
ttaaaagcttcccct

SEQ ID NO: 452989 - DNA, 15 bp, Homo sapiens
tttaaaagcttcccc

SEQ ID NO: 452990 - DNA, 15 bp, Homo sapiens
ttttaaaagcttccc

SEQ ID NO: 452991 - DNA, 15 bp, Homo sapiens
gttttaaaagcttcc

SEQ ID NO: 452992 - DNA, 15 bp, Homo sapiens
agttttaaaagcttc

SEQ ID NO: 452993 - DNA, 15 bp, Homo sapiens
aagttttaaaagctt

SEQ ID NO: 452994 - DNA, 15 bp, Homo sapiens
aaagttttaaaagct

SEQ ID NO: 452995 - DNA, 15 bp, Homo sapiens
gaaagttttaaaagc

SEQ ID NO: 452996 - DNA, 15 bp, Homo sapiens
cgaaagttttaaaag

SEQ ID NO: 452997 - DNA, 15 bp, Homo sapiens
ccgaaagttttaaaa

SEQ ID NO: 452998 - DNA, 15 bp, Homo sapiens
cccgaaagttttaaa

SEQ ID NO: 452999 - DNA, 15 bp, Homo sapiens
ccccgaaagttttaa

SEQ ID NO: 453000 - DNA, 15 bp, Homo sapiens
gccccgaaagtttta

SEQ ID NO: 453001 - DNA, 15 bp, Homo sapiens
cgccccgaaagtttt

SEQ ID NO: 453002 - DNA, 15 bp, Homo sapiens
gcgccccgaaagttt

SEQ ID NO: 453003 - DNA, 15 bp, Homo sapiens
ggcgccccgaaagtt

SEQ ID NO: 453004 - DNA, 15 bp, Homo sapiens
cggcgccccgaaagt

SEQ ID NO: 453005 - DNA, 15 bp, Homo sapiens
ccggcgccccgaaag

SEQ ID NO: 453006 - DNA, 15 bp, Homo sapiens
cccggcgccccgaaa

SEQ ID NO: 453007 - DNA, 15 bp, Homo sapiens
gcccggcgccccgaa

SEQ ID NO: 453008 - DNA, 15 bp, Homo sapiens
cgcccggcgccccga

SEQ ID NO: 453009 - DNA, 15 bp, Homo sapiens
gcgcccggcgccccg

SEQ ID NO: 453010 - DNA, 15 bp, Homo sapiens
cgcgcccggcgcccc

SEQ ID NO: 453011 - DNA, 15 bp, Homo sapiens
ccgcgcccggcgccc

SEQ ID NO: 453012 - DNA, 15 bp, Homo sapiens
accgcgcccggcgcc

SEQ ID NO: 453013 - DNA, 15 bp, Homo sapiens
caccgcgcccggcgc

SEQ ID NO: 453014 - DNA, 15 bp, Homo sapiens
ccaccgcgcccggcg

SEQ ID NO: 453015 - DNA, 15 bp, Homo sapiens
gggcctcccaaagtg

SEQ ID NO: 453016 - DNA, 15 bp, Homo sapiens
tgggcctcccaaagt

SEQ ID NO: 453017 - DNA, 15 bp, Homo sapiens
ctgggcctcccaaag

SEQ ID NO: 453018 - DNA, 15 bp, Homo sapiens
tctgggcctcccaaa

SEQ ID NO: 453019 - DNA, 15 bp, Homo sapiens
gtctgggcctcccaa

SEQ ID NO: 453020 - DNA, 15 bp, Homo sapiens
cgtctgggcctccca

SEQ ID NO: 453021 - DNA, 15 bp, Homo sapiens
gcgtctgggcctccc

SEQ ID NO: 453022 - DNA, 15 bp, Homo sapiens
cgcgtctgggcctcc

SEQ ID NO: 453023 - DNA, 15 bp, Homo sapiens
gcgcgtctgggcctc

SEQ ID NO: 453024 - DNA, 15 bp, Homo sapiens
cgcgcgtctgggcct

SEQ ID NO: 453025 - DNA, 15 bp, Homo sapiens
ccgcgcgtctgggcc

SEQ ID NO: 453026 - DNA, 15 bp, Homo sapiens
tccgcgcgtctgggc

SEQ ID NO: 453027 - DNA, 15 bp, Homo sapiens
atccgcgcgtctggg

SEQ ID NO: 453028 - DNA, 15 bp, Homo sapiens
gatccgcgcgtctgg

SEQ ID NO: 453029 - DNA, 15 bp, Homo sapiens
tgatccgcgcgtctg

SEQ ID NO: 453030 - DNA, 15 bp, Homo sapiens
gtgatccgcgcgtct

SEQ ID NO: 453031 - DNA, 15 bp, Homo sapiens
cgtgatccgcgcgtc

SEQ ID NO: 453032 - DNA, 15 bp, Homo sapiens
tcgtgatccgcgcgt

SEQ ID NO: 453033 - DNA, 15 bp, Homo sapiens
ctcgtgatccgcgcg

SEQ ID NO: 453034 - DNA, 15 bp, Homo sapiens
cctcgtgatccgcgc

SEQ ID NO: 453035 - DNA, 15 bp, Homo sapiens
gcctcgtgatccgcg

SEQ ID NO: 453036 - DNA, 15 bp, Homo sapiens
ggcctcgtgatccgc

SEQ ID NO: 453037 - DNA, 15 bp, Homo sapiens
tggcctcgtgatccg

SEQ ID NO: 453038 - DNA, 15 bp, Homo sapiens
ctggcctcgtgatcc

SEQ ID NO: 453039 - DNA, 15 bp, Homo sapiens
cctggcctcgtgatc

SEQ ID NO: 453040 - DNA, 15 bp, Homo sapiens
tcctggcctcgtgat

SEQ ID NO: 453041 - DNA, 15 bp, Homo sapiens
ctcctggcctcgtga

SEQ ID NO: 453042 - DNA, 15 bp, Homo sapiens
tctcctggcctcgtg

SEQ ID NO: 453043 - DNA, 15 bp, Homo sapiens
atctcctggcctcgt

SEQ ID NO: 453044 - DNA, 15 bp, Homo sapiens
gatctcctggcctcg

SEQ ID NO: 453045 - DNA, 15 bp, Homo sapiens
cgatctcctggcctc

SEQ ID NO: 453046 - DNA, 15 bp, Homo sapiens
tcgatctcctggcct

SEQ ID NO: 453047 - DNA, 15 bp, Homo sapiens
ctcgatctcctggcc

SEQ ID NO: 453048 - DNA, 15 bp, Homo sapiens
tctcgatctcctggc

SEQ ID NO: 453049 - DNA, 15 bp, Homo sapiens
gtctcgatctcctgg

SEQ ID NO: 453050 - DNA, 15 bp, Homo sapiens
tggtctcgatctcct

SEQ ID NO: 453051 - DNA, 15 bp, Homo sapiens
atggtctcgatctcc

SEQ ID NO: 453052 - DNA, 15 bp, Homo sapiens
gatggtctcgatctc

SEQ ID NO: 453053 - DNA, 15 bp, Homo sapiens
ggatggtctcgatct

SEQ ID NO: 453054 - DNA, 15 bp, Homo sapiens
aggatggtctcgatc

SEQ ID NO: 453055 - DNA, 15 bp, Homo sapiens
caggatggtctcgat

SEQ ID NO: 453056 - DNA, 15 bp, Homo sapiens
ccaggatggtctcga

SEQ ID NO: 453057 - DNA, 15 bp, Homo sapiens
gccaggatggtctcg

SEQ ID NO: 453058 - DNA, 15 bp, Homo sapiens
ttttttgtattttta

SEQ ID NO: 453059 - DNA, 15 bp, Homo sapiens
tttttttgtattttt

SEQ ID NO: 453060 - DNA, 15 bp, Homo sapiens
ttttttttgtatttt

SEQ ID NO: 453061 - DNA, 15 bp, Homo sapiens
cttttttttgtattt

SEQ ID NO: 453062 - DNA, 15 bp, Homo sapiens
acttttttttgtatt

SEQ ID NO: 453063 - DNA, 15 bp, Homo sapiens
tacttttttttgtat

SEQ ID NO: 453064 - DNA, 15 bp, Homo sapiens
ctacttttttttgta

SEQ ID NO: 453065 - DNA, 15 bp, Homo sapiens
gctacttttttttgt

SEQ ID NO: 453066 - DNA, 15 bp, Homo sapiens
ggctacttttttttg

SEQ ID NO: 453067 - DNA, 15 bp, Homo sapiens
cggctactttttttt

SEQ ID NO: 453068 - DNA, 15 bp, Homo sapiens
ccggctacttttttt

SEQ ID NO: 453069 - DNA, 15 bp, Homo sapiens
cccggctactttttt

SEQ ID NO: 453070 - DNA, 15 bp, Homo sapiens
gcccggctacttttt

SEQ ID NO: 453071 - DNA, 15 bp, Homo sapiens
cgcccggctactttt

SEQ ID NO: 453072 - DNA, 15 bp, Homo sapiens
acgcccggctacttt

SEQ ID NO: 453073 - DNA, 15 bp, Homo sapiens
aacgcccggctactt

SEQ ID NO: 453074 - DNA, 15 bp, Homo sapiens
caacgcccggctact

SEQ ID NO: 453075 - DNA, 15 bp, Homo sapiens
acaacgcccggctac

SEQ ID NO: 453076 - DNA, 15 bp, Homo sapiens
cacaacgcccggcta

SEQ ID NO: 453077 - DNA, 15 bp, Homo sapiens
ccacaacgcccggct

SEQ ID NO: 453078 - DNA, 15 bp, Homo sapiens
gccacaacgcccggc

SEQ ID NO: 453079 - DNA, 15 bp, Homo sapiens
cgccacaacgcccgg

SEQ ID NO: 453080 - DNA, 15 bp, Homo sapiens
ccgccacaacgcccg

SEQ ID NO: 453081 - DNA, 15 bp, Homo sapiens
cccgccacaacgccc

SEQ ID NO: 453082 - DNA, 15 bp, Homo sapiens
gcccgccacaacgcc

SEQ ID NO: 453083 - DNA, 15 bp, Homo sapiens
cgcccgccacaacgc

SEQ ID NO: 453084 - DNA, 15 bp, Homo sapiens
acgcccgccacaacg

SEQ ID NO: 453085 - DNA, 15 bp, Homo sapiens
gacgcccgccacaac

SEQ ID NO: 453086 - DNA, 15 bp, Homo sapiens
agacgcccgccacaa

SEQ ID NO: 453087 - DNA, 15 bp, Homo sapiens
cagacgcccgccaca

SEQ ID NO: 453088 - DNA, 15 bp, Homo sapiens
acagacgcccgccac

SEQ ID NO: 453089 - DNA, 15 bp, Homo sapiens
tacagacgcccgcca

SEQ ID NO: 453090 - DNA, 15 bp, Homo sapiens
ctacagacgcccgcc

SEQ ID NO: 453091 - DNA, 15 bp, Homo sapiens
actacagacgcccgc

SEQ ID NO: 453092 - DNA, 15 bp, Homo sapiens
gactacagacgcccg

SEQ ID NO: 453093 - DNA, 15 bp, Homo sapiens
ggactacagacgccc

SEQ ID NO: 453094 - DNA, 15 bp, Homo sapiens
gggactacagacgcc

SEQ ID NO: 453095 - DNA, 15 bp, Homo sapiens
tgggactacagacgc

SEQ ID NO: 453096 - DNA, 15 bp, Homo sapiens
ctgggactacagacg

SEQ ID NO: 453097 - DNA, 15 bp, Homo sapiens
gctgggactacagac

SEQ ID NO: 453098 - DNA, 15 bp, Homo sapiens
agctgggactacaga

SEQ ID NO: 453099 - DNA, 15 bp, Homo sapiens
gagtagctgggacta

SEQ ID NO: 453100 - DNA, 15 bp, Homo sapiens
cgagtagctgggact

SEQ ID NO: 453101 - DNA, 15 bp, Homo sapiens
ccgagtagctgggac

SEQ ID NO: 453102 - DNA, 15 bp, Homo sapiens
cttctcctgcctcag

SEQ ID NO: 453103 - DNA, 15 bp, Homo sapiens
tcttctcctgcctca

SEQ ID NO: 453104 - DNA, 15 bp, Homo sapiens
ctcttctcctgcctc

SEQ ID NO: 453105 - DNA, 15 bp, Homo sapiens
gctcttctcctgcct

SEQ ID NO: 453106 - DNA, 15 bp, Homo sapiens
cgctcttctcctgcc

SEQ ID NO: 453107 - DNA, 15 bp, Homo sapiens
acgctcttctcctgc

SEQ ID NO: 453108 - DNA, 15 bp, Homo sapiens
cacgctcttctcctg

SEQ ID NO: 453109 - DNA, 15 bp, Homo sapiens
tcacgctcttctcct

SEQ ID NO: 453110 - DNA, 15 bp, Homo sapiens
ttcacgctcttctcc

SEQ ID NO: 453111 - DNA, 15 bp, Homo sapiens
gttcacgctcttctc

SEQ ID NO: 453112 - DNA, 15 bp, Homo sapiens
agttcacgctcttct

SEQ ID NO: 453113 - DNA, 15 bp, Homo sapiens
gagttcacgctcttc

SEQ ID NO: 453114 - DNA, 15 bp, Homo sapiens
cgagttcacgctctt

SEQ ID NO: 453115 - DNA, 15 bp, Homo sapiens
ccgagttcacgctct

SEQ ID NO: 453116 - DNA, 15 bp, Homo sapiens
cccgagttcacgctc

SEQ ID NO: 453117 - DNA, 15 bp, Homo sapiens
tcccgagttcacgct

SEQ ID NO: 453118 - DNA, 15 bp, Homo sapiens
ctcccgagttcacgc

SEQ ID NO: 453119 - DNA, 15 bp, Homo sapiens
cctcccgagttcacg

SEQ ID NO: 453120 - DNA, 15 bp, Homo sapiens
gcctcccgagttcac

SEQ ID NO: 453121 - DNA, 15 bp, Homo sapiens
cgcctcccgagttca

SEQ ID NO: 453122 - DNA, 15 bp, Homo sapiens
ccgcctcccgagttc

SEQ ID NO: 453123 - DNA, 15 bp, Homo sapiens
tccgcctcccgagtt

SEQ ID NO: 453124 - DNA, 15 bp, Homo sapiens
ctccgcctcccgagt

SEQ ID NO: 453125 - DNA, 15 bp, Homo sapiens
gctccgcctcccgag

SEQ ID NO: 453126 - DNA, 15 bp, Homo sapiens
agctccgcctcccga

SEQ ID NO: 453127 - DNA, 15 bp, Homo sapiens
aagctccgcctcccg

SEQ ID NO: 453128 - DNA, 15 bp, Homo sapiens
cggctcactgcaagc

SEQ ID NO: 453129 - DNA, 15 bp, Homo sapiens
tcggctcactgcaag

SEQ ID NO: 453130 - DNA, 15 bp, Homo sapiens
atcggctcactgcaa

SEQ ID NO: 453131 - DNA, 15 bp, Homo sapiens
tatcggctcactgca

SEQ ID NO: 453132 - DNA, 15 bp, Homo sapiens
atatcggctcactgc

SEQ ID NO: 453133 - DNA, 15 bp, Homo sapiens
gatatcggctcactg

SEQ ID NO: 453134 - DNA, 15 bp, Homo sapiens
cgatatcggctcact

SEQ ID NO: 453135 - DNA, 15 bp, Homo sapiens
gcgatatcggctcac

SEQ ID NO: 453136 - DNA, 15 bp, Homo sapiens
tgcgatatcggctca

SEQ ID NO: 453137 - DNA, 15 bp, Homo sapiens
gtgcgatatcggctc

SEQ ID NO: 453138 - DNA, 15 bp, Homo sapiens
ggtgcgatatcggct

SEQ ID NO: 453139 - DNA, 15 bp, Homo sapiens
tggtgcgatatcggc

SEQ ID NO: 453140 - DNA, 15 bp, Homo sapiens
gtggtgcgatatcgg

SEQ ID NO: 453141 - DNA, 15 bp, Homo sapiens
agtggtgcgatatcg

SEQ ID NO: 453142 - DNA, 15 bp, Homo sapiens
cagtggtgcgatatc

SEQ ID NO: 453143 - DNA, 15 bp, Homo sapiens
gcagtggtgcgatat

SEQ ID NO: 453144 - DNA, 15 bp, Homo sapiens
tgcagtggtgcgata

SEQ ID NO: 453145 - DNA, 15 bp, Homo sapiens
gtgcagtggtgcgat

SEQ ID NO: 453146 - DNA, 15 bp, Homo sapiens
agtgcagtggtgcga

SEQ ID NO: 453147 - DNA, 15 bp, Homo sapiens
gagtgcagtggtgcg

SEQ ID NO: 453148 - DNA, 15 bp, Homo sapiens
ggagtgcagtggtgc

SEQ ID NO: 453149 - DNA, 15 bp, Homo sapiens
tggagtgcagtggtg

SEQ ID NO: 453150 - DNA, 15 bp, Homo sapiens
ctggagtgcagtggt

SEQ ID NO: 453151 - DNA, 15 bp, Homo sapiens
tttttgagacggagt

SEQ ID NO: 453152 - DNA, 15 bp, Homo sapiens
ttttttgagacggag

SEQ ID NO: 453153 - DNA, 15 bp, Homo sapiens
tttttttgagacgga

SEQ ID NO: 453154 - DNA, 15 bp, Homo sapiens
ttttttttgagacgg

SEQ ID NO: 453155 - DNA, 15 bp, Homo sapiens
tttttttttgagacg

SEQ ID NO: 453156 - DNA, 15 bp, Homo sapiens
tattttttttttttt

SEQ ID NO: 453157 - DNA, 15 bp, Homo sapiens
ttatttttttttttt

SEQ ID NO: 453158 - DNA, 15 bp, Homo sapiens
tttattttttttttt

SEQ ID NO: 453159 - DNA, 15 bp, Homo sapiens
atttatttttttttt

SEQ ID NO: 453160 - DNA, 15 bp, Homo sapiens
tatttattttttttt

SEQ ID NO: 453161 - DNA, 15 bp, Homo sapiens
ttatttatttttttt

SEQ ID NO: 453162 - DNA, 15 bp, Homo sapiens
tttatttattttttt

SEQ ID NO: 453163 - DNA, 15 bp, Homo sapiens
atttatttatttttt

SEQ ID NO: 453164 - DNA, 15 bp, Homo sapiens
tatttatttattttt

SEQ ID NO: 453165 - DNA, 15 bp, Homo sapiens
ttttatttatttatt

SEQ ID NO: 453166 - DNA, 15 bp, Homo sapiens
gttttatttatttat

SEQ ID NO: 453167 - DNA, 15 bp, Homo sapiens
agttttatttattta

SEQ ID NO: 453168 - DNA, 15 bp, Homo sapiens
aagttttatttattt

SEQ ID NO: 453169 - DNA, 15 bp, Homo sapiens
aaagttttatttatt

SEQ ID NO: 453170 - DNA, 15 bp, Homo sapiens
caaagttttatttat

SEQ ID NO: 453171 - DNA, 15 bp, Homo sapiens
ccaaagttttattta

SEQ ID NO: 453172 - DNA, 15 bp, Homo sapiens
tccaaagttttattt

SEQ ID NO: 453173 - DNA, 15 bp, Homo sapiens
ctccaaagttttatt

SEQ ID NO: 453174 - DNA, 15 bp, Homo sapiens
gctccaaagttttat

SEQ ID NO: 453175 - DNA, 15 bp, Homo sapiens
ggctccaaagtttta

SEQ ID NO: 453176 - DNA, 15 bp, Homo sapiens
cggctccaaagtttt

SEQ ID NO: 453177 - DNA, 15 bp, Homo sapiens
tcggctccaaagttt

SEQ ID NO: 453178 - DNA, 15 bp, Homo sapiens
ttcggctccaaagtt

SEQ ID NO: 453179 - DNA, 15 bp, Homo sapiens
cttcggctccaaagt

SEQ ID NO: 453180 - DNA, 15 bp, Homo sapiens
gcttcggctccaaag

SEQ ID NO: 453181 - DNA, 15 bp, Homo sapiens
tgcttcggctccaaa

SEQ ID NO: 453182 - DNA, 15 bp, Homo sapiens
gtgcttcggctccaa

SEQ ID NO: 453183 - DNA, 15 bp, Homo sapiens
agtgcttcggctcca

SEQ ID NO: 453184 - DNA, 15 bp, Homo sapiens
cagtgcttcggctcc

SEQ ID NO: 453185 - DNA, 15 bp, Homo sapiens
tcagtgcttcggctc

SEQ ID NO: 453186 - DNA, 15 bp, Homo sapiens
atcagtgcttcggct

SEQ ID NO: 453187 - DNA, 15 bp, Homo sapiens
catcagtgcttcggc

SEQ ID NO: 453188 - DNA, 15 bp, Homo sapiens
acatcagtgcttcgg

SEQ ID NO: 453189 - DNA, 15 bp, Homo sapiens
aacatcagtgcttcg

SEQ ID NO: 453190 - DNA, 15 bp, Homo sapiens
aaacatcagtgcttc

SEQ ID NO: 453191 - DNA, 15 bp, Homo sapiens
taaacatcagtgctt

SEQ ID NO: 453192 - DNA, 15 bp, Homo sapiens
ttaaacatcagtgct

SEQ ID NO: 453193 - DNA, 15 bp, Homo sapiens
attaaacatcagtgc

SEQ ID NO: 453194 - DNA, 15 bp, Homo sapiens
gattaaacatcagtg

SEQ ID NO: 453195 - DNA, 15 bp, Homo sapiens
tgattaaacatcagt

SEQ ID NO: 453196 - DNA, 15 bp, Homo sapiens
atgattaaacatcag

SEQ ID NO: 453197 - DNA, 15 bp, Homo sapiens
tatgattaaacatca

SEQ ID NO: 453198 - DNA, 15 bp, Homo sapiens
ctatgattaaacatc

SEQ ID NO: 453199 - DNA, 15 bp, Homo sapiens
tctatgattaaacat

SEQ ID NO: 453200 - DNA, 15 bp, Homo sapiens
ctctatgattaaaca

SEQ ID NO: 453201 - DNA, 15 bp, Homo sapiens
actctatgattaaac

SEQ ID NO: 453202 - DNA, 15 bp, Homo sapiens
cactctatgattaaa

SEQ ID NO: 453203 - DNA, 15 bp, Homo sapiens
gcactctatgattaa

SEQ ID NO: 453204 - DNA, 15 bp, Homo sapiens
agcactctatgatta

SEQ ID NO: 453205 - DNA, 15 bp, Homo sapiens
aagcactctatgatt

SEQ ID NO: 453206 - DNA, 15 bp, Homo sapiens
taagcactctatgat

SEQ ID NO: 453207 - DNA, 15 bp, Homo sapiens
gtaagcactctatga

SEQ ID NO: 453208 - DNA, 15 bp, Homo sapiens
agtaagcactctatg

SEQ ID NO: 453209 - DNA, 15 bp, Homo sapiens
tagtaagcactctat

SEQ ID NO: 453210 - DNA, 15 bp, Homo sapiens
atagtaagcactcta

SEQ ID NO: 453211 - DNA, 15 bp, Homo sapiens
catagtaagcactct

SEQ ID NO: 453212 - DNA, 15 bp, Homo sapiens
acatagtaagcactc

SEQ ID NO: 453213 - DNA, 15 bp, Homo sapiens
cacatagtaagcact

SEQ ID NO: 453214 - DNA, 15 bp, Homo sapiens
acacatagtaagcac

SEQ ID NO: 453215 - DNA, 15 bp, Homo sapiens
aacacatagtaagca

SEQ ID NO: 453216 - DNA, 15 bp, Homo sapiens
taacacatagtaagc

SEQ ID NO: 453217 - DNA, 15 bp, Homo sapiens
ctaacacatagtaag

SEQ ID NO: 453218 - DNA, 15 bp, Homo sapiens
cctaacacatagtaa

SEQ ID NO: 453219 - DNA, 15 bp, Homo sapiens
gcctaacacatagta

SEQ ID NO: 453220 - DNA, 15 bp, Homo sapiens
tgcctaacacatagt

SEQ ID NO: 453221 - DNA, 15 bp, Homo sapiens
gtgcctaacacatag

SEQ ID NO: 453222 - DNA, 15 bp, Homo sapiens
tgtgcctaacacata

SEQ ID NO: 453223 - DNA, 15 bp, Homo sapiens
ctgtgcctaacacat

SEQ ID NO: 453224 - DNA, 15 bp, Homo sapiens
cctgtgcctaacaca

SEQ ID NO: 453225 - DNA, 15 bp, Homo sapiens
gcctgtgcctaacac

SEQ ID NO: 453226 - DNA, 15 bp, Homo sapiens
ggcctgtgcctaaca

SEQ ID NO: 453227 - DNA, 15 bp, Homo sapiens
aggcctgtgcctaac

SEQ ID NO: 453228 - DNA, 15 bp, Homo sapiens
caggcctgtgcctaa

SEQ ID NO: 453229 - DNA, 15 bp, Homo sapiens
tcaggcctgtgccta

SEQ ID NO: 453230 - DNA, 15 bp, Homo sapiens
atcaggcctgtgcct

SEQ ID NO: 453231 - DNA, 15 bp, Homo sapiens
aatcaggcctgtgcc

SEQ ID NO: 453232 - DNA, 15 bp, Homo sapiens
caatcaggcctgtgc

SEQ ID NO: 453233 - DNA, 15 bp, Homo sapiens
gcaatcaggcctgtg

SEQ ID NO: 453234 - DNA, 15 bp, Homo sapiens
ggcaatcaggcctgt

SEQ ID NO: 453235 - DNA, 15 bp, Homo sapiens
aggcaatcaggcctg

SEQ ID NO: 453236 - DNA, 15 bp, Homo sapiens
caggcaatcaggcct

SEQ ID NO: 453237 - DNA, 15 bp, Homo sapiens
tcaggcaatcaggcc

SEQ ID NO: 453238 - DNA, 15 bp, Homo sapiens
atcaggcaatcaggc

SEQ ID NO: 453239 - DNA, 15 bp, Homo sapiens
catcaggcaatcagg

SEQ ID NO: 453240 - DNA, 15 bp, Homo sapiens
gcatcaggcaatcag

SEQ ID NO: 453241 - DNA, 15 bp, Homo sapiens
agcatcaggcaatca

SEQ ID NO: 453242 - DNA, 15 bp, Homo sapiens
cagcatcaggcaatc

SEQ ID NO: 453243 - DNA, 15 bp, Homo sapiens
ccagcatcaggcaat

SEQ ID NO: 453244 - DNA, 15 bp, Homo sapiens
accagcatcaggcaa

SEQ ID NO: 453245 - DNA, 15 bp, Homo sapiens
aaccagcatcaggca

SEQ ID NO: 453246 - DNA, 15 bp, Homo sapiens
taaccagcatcaggc

SEQ ID NO: 453247 - DNA, 15 bp, Homo sapiens
ttaaccagcatcagg

SEQ ID NO: 453248 - DNA, 15 bp, Homo sapiens
attaaccagcatcag

SEQ ID NO: 453249 - DNA, 15 bp, Homo sapiens
aattaaccagcatca

SEQ ID NO: 453250 - DNA, 15 bp, Homo sapiens
aaattaaccagcatc

SEQ ID NO: 453251 - DNA, 15 bp, Homo sapiens
caaattaaccagcat

SEQ ID NO: 453252 - DNA, 15 bp, Homo sapiens
acaaattaaccagca

SEQ ID NO: 453253 - DNA, 15 bp, Homo sapiens
tacaaattaaccagc

SEQ ID NO: 453254 - DNA, 15 bp, Homo sapiens
gtacaaattaaccag

SEQ ID NO: 453255 - DNA, 15 bp, Homo sapiens
tgtacaaattaacca

SEQ ID NO: 453256 - DNA, 15 bp, Homo sapiens
ttgtacaaattaacc

SEQ ID NO: 453257 - DNA, 15 bp, Homo sapiens
tttgtacaaattaac

SEQ ID NO: 453258 - DNA, 15 bp, Homo sapiens
ctttgtacaaattaa

SEQ ID NO: 453259 - DNA, 15 bp, Homo sapiens
actttgtacaaatta

SEQ ID NO: 453260 - DNA, 15 bp, Homo sapiens
tactttgtacaaatt

SEQ ID NO: 453261 - DNA, 15 bp, Homo sapiens
ttactttgtacaaat

SEQ ID NO: 453262 - DNA, 15 bp, Homo sapiens
tttactttgtacaaa

SEQ ID NO: 453263 - DNA, 15 bp, Homo sapiens
atttactttgtacaa

SEQ ID NO: 453264 - DNA, 15 bp, Homo sapiens
gatttactttgtaca

SEQ ID NO: 453265 - DNA, 15 bp, Homo sapiens
tgatttactttgtac

SEQ ID NO: 453266 - DNA, 15 bp, Homo sapiens
ctgatttactttgta

SEQ ID NO: 453267 - DNA, 15 bp, Homo sapiens
actgatttactttgt

SEQ ID NO: 453268 - DNA, 15 bp, Homo sapiens
cactgatttactttg

SEQ ID NO: 453269 - DNA, 15 bp, Homo sapiens
gcactgatttacttt

SEQ ID NO: 453270 - DNA, 15 bp, Homo sapiens
tgcactgatttactt

SEQ ID NO: 453271 - DNA, 15 bp, Homo sapiens
atgcactgatttact

SEQ ID NO: 453272 - DNA, 15 bp, Homo sapiens
tatgcactgatttac

SEQ ID NO: 453273 - DNA, 15 bp, Homo sapiens
atatgcactgattta

SEQ ID NO: 453274 - DNA, 15 bp, Homo sapiens
catatgcactgattt

SEQ ID NO: 453275 - DNA, 15 bp, Homo sapiens
gcatatgcactgatt

SEQ ID NO: 453276 - DNA, 15 bp, Homo sapiens
ggcatatgcactgat

SEQ ID NO: 453277 - DNA, 15 bp, Homo sapiens
gggcatatgcactga

SEQ ID NO: 453278 - DNA, 15 bp, Homo sapiens
agggcatatgcactg

SEQ ID NO: 453279 - DNA, 15 bp, Homo sapiens
gagggcatatgcact

SEQ ID NO: 453280 - DNA, 15 bp, Homo sapiens
agagggcatatgcac

SEQ ID NO: 453281 - DNA, 15 bp, Homo sapiens
cagagggcatatgca

SEQ ID NO: 453282 - DNA, 15 bp, Homo sapiens
gcagagggcatatgc

SEQ ID NO: 453283 - DNA, 15 bp, Homo sapiens
ggcagagggcatatg

SEQ ID NO: 453284 - DNA, 15 bp, Homo sapiens
gggcagagggcatat

SEQ ID NO: 453285 - DNA, 15 bp, Homo sapiens
agggcagagggcata

SEQ ID NO: 453286 - DNA, 15 bp, Homo sapiens
tagggcagagggcat

SEQ ID NO: 453287 - DNA, 15 bp, Homo sapiens
ctagggcagagggca

SEQ ID NO: 453288 - DNA, 15 bp, Homo sapiens
cctagggcagagggc

SEQ ID NO: 453289 - DNA, 15 bp, Homo sapiens
ccctagggcagaggg

SEQ ID NO: 453290 - DNA, 15 bp, Homo sapiens
cccctagggcagagg

SEQ ID NO: 453291 - DNA, 15 bp, Homo sapiens
tcccctagggcagag

SEQ ID NO: 453292 - DNA, 15 bp, Homo sapiens
ctcccctagggcaga

SEQ ID NO: 453293 - DNA, 15 bp, Homo sapiens
actcccctagggcag

SEQ ID NO: 453294 - DNA, 15 bp, Homo sapiens
aactcccctagggca

SEQ ID NO: 453295 - DNA, 15 bp, Homo sapiens
taactcccctagggc

SEQ ID NO: 453296 - DNA, 15 bp, Homo sapiens
ataactcccctaggg

SEQ ID NO: 453297 - DNA, 15 bp, Homo sapiens
aataactcccctagg

SEQ ID NO: 453298 - DNA, 15 bp, Homo sapiens
taataactcccctag

SEQ ID NO: 453299 - DNA, 15 bp, Homo sapiens
ttaataactccccta

SEQ ID NO: 453300 - DNA, 15 bp, Homo sapiens
gttaataactcccct

SEQ ID NO: 453301 - DNA, 15 bp, Homo sapiens
agttaataactcccc

SEQ ID NO: 453302 - DNA, 15 bp, Homo sapiens
cagttaataactccc

SEQ ID NO: 453303 - DNA, 15 bp, Homo sapiens
ccagttaataactcc

SEQ ID NO: 453304 - DNA, 15 bp, Homo sapiens
tccagttaataactc

SEQ ID NO: 453305 - DNA, 15 bp, Homo sapiens
ctccagttaataact

SEQ ID NO: 453306 - DNA, 15 bp, Homo sapiens
actccagttaataac

SEQ ID NO: 453307 - DNA, 15 bp, Homo sapiens
gactccagttaataa

SEQ ID NO: 453308 - DNA, 15 bp, Homo sapiens
agactccagttaata

SEQ ID NO: 453309 - DNA, 15 bp, Homo sapiens
cagactccagttaat

SEQ ID NO: 453310 - DNA, 15 bp, Homo sapiens
tcagactccagttaa

SEQ ID NO: 453311 - DNA, 15 bp, Homo sapiens
gtcagactccagtta

SEQ ID NO: 453312 - DNA, 15 bp, Homo sapiens
tgtcagactccagtt

SEQ ID NO: 453313 - DNA, 15 bp, Homo sapiens
atgtcagactccagt

SEQ ID NO: 453314 - DNA, 15 bp, Homo sapiens
aatgtcagactccag

SEQ ID NO: 453315 - DNA, 15 bp, Homo sapiens
caatgtcagactcca

SEQ ID NO: 453316 - DNA, 15 bp, Homo sapiens
acaatgtcagactcc

SEQ ID NO: 453317 - DNA, 15 bp, Homo sapiens
tacaatgtcagactc

SEQ ID NO: 453318 - DNA, 15 bp, Homo sapiens
gtacaatgtcagact

SEQ ID NO: 453319 - DNA, 15 bp, Homo sapiens
tgtacaatgtcagac

SEQ ID NO: 453320 - DNA, 15 bp, Homo sapiens
ttgtacaatgtcaga

SEQ ID NO: 453321 - DNA, 15 bp, Homo sapiens
tttgtacaatgtcag

SEQ ID NO: 453322 - DNA, 15 bp, Homo sapiens
ctttgtacaatgtca

SEQ ID NO: 453323 - DNA, 15 bp, Homo sapiens
cctttgtacaatgtc

SEQ ID NO: 453324 - DNA, 15 bp, Homo sapiens
acctttgtacaatgt

SEQ ID NO: 453325 - DNA, 15 bp, Homo sapiens
tacctttgtacaatg

SEQ ID NO: 453326 - DNA, 15 bp, Homo sapiens
ctacctttgtacaat

SEQ ID NO: 453327 - DNA, 15 bp, Homo sapiens
cctacctttgtacaa

SEQ ID NO: 453328 - DNA, 15 bp, Homo sapiens
acctacctttgtaca

SEQ ID NO: 453329 - DNA, 15 bp, Homo sapiens
tacctacctttgtac

SEQ ID NO: 453330 - DNA, 15 bp, Homo sapiens
atacctacctttgta

SEQ ID NO: 453331 - DNA, 15 bp, Homo sapiens
gatacctacctttgt

SEQ ID NO: 453332 - DNA, 15 bp, Homo sapiens
ggatacctacctttg

SEQ ID NO: 453333 - DNA, 15 bp, Homo sapiens
aggatacctaccttt

SEQ ID NO: 453334 - DNA, 15 bp, Homo sapiens
caggatacctacctt

SEQ ID NO: 453335 - DNA, 15 bp, Homo sapiens
tcaggatacctacct

SEQ ID NO: 453336 - DNA, 15 bp, Homo sapiens
gtcaggatacctacc

SEQ ID NO: 453337 - DNA, 15 bp, Homo sapiens
agtcaggatacctac

SEQ ID NO: 453338 - DNA, 15 bp, Homo sapiens
tagtcaggataccta

SEQ ID NO: 453339 - DNA, 15 bp, Homo sapiens
ctagtcaggatacct

SEQ ID NO: 453340 - DNA, 15 bp, Homo sapiens
actagtcaggatacc

SEQ ID NO: 453341 - DNA, 15 bp, Homo sapiens
aactagtcaggatac

SEQ ID NO: 453342 - DNA, 15 bp, Homo sapiens
aaactagtcaggata

SEQ ID NO: 453343 - DNA, 15 bp, Homo sapiens
caaactagtcaggat

SEQ ID NO: 453344 - DNA, 15 bp, Homo sapiens
tcaaactagtcagga

SEQ ID NO: 453345 - DNA, 15 bp, Homo sapiens
atcaaactagtcagg

SEQ ID NO: 453346 - DNA, 15 bp, Homo sapiens
aatcaaactagtcag

SEQ ID NO: 453347 - DNA, 15 bp, Homo sapiens
aaatcaaactagtca

SEQ ID NO: 453348 - DNA, 15 bp, Homo sapiens
caaatcaaactagtc

SEQ ID NO: 453349 - DNA, 15 bp, Homo sapiens
ccaaatcaaactagt

SEQ ID NO: 453350 - DNA, 15 bp, Homo sapiens
accaaatcaaactag

SEQ ID NO: 453351 - DNA, 15 bp, Homo sapiens
taccaaatcaaacta

SEQ ID NO: 453352 - DNA, 15 bp, Homo sapiens
gtaccaaatcaaact

SEQ ID NO: 453353 - DNA, 15 bp, Homo sapiens
agtaccaaatcaaac

SEQ ID NO: 453354 - DNA, 15 bp, Homo sapiens
aagtaccaaatcaaa

SEQ ID NO: 453355 - DNA, 15 bp, Homo sapiens
aaagtaccaaatcaa

SEQ ID NO: 453356 - DNA, 15 bp, Homo sapiens
caaagtaccaaatca

SEQ ID NO: 453357 - DNA, 15 bp, Homo sapiens
ccaaagtaccaaatc

SEQ ID NO: 453358 - DNA, 15 bp, Homo sapiens
cccaaagtaccaaat

SEQ ID NO: 453359 - DNA, 15 bp, Homo sapiens
acccaaagtaccaaa

SEQ ID NO: 453360 - DNA, 15 bp, Homo sapiens
cacccaaagtaccaa

SEQ ID NO: 453361 - DNA, 15 bp, Homo sapiens
tcacccaaagtacca

SEQ ID NO: 453362 - DNA, 15 bp, Homo sapiens
ttcacccaaagtacc

SEQ ID NO: 453363 - DNA, 15 bp, Homo sapiens
tttcacccaaagtac

SEQ ID NO: 453364 - DNA, 15 bp, Homo sapiens
ttttcacccaaagta

SEQ ID NO: 453365 - DNA, 15 bp, Homo sapiens
tttttcacccaaagt

SEQ ID NO: 453366 - DNA, 15 bp, Homo sapiens
ttttttcacccaaag

SEQ ID NO: 453367 - DNA, 15 bp, Homo sapiens
cttttttcacccaaa

SEQ ID NO: 453368 - DNA, 15 bp, Homo sapiens
acttttttcacccaa

SEQ ID NO: 453369 - DNA, 15 bp, Homo sapiens
tacttttttcaccca

SEQ ID NO: 453370 - DNA, 15 bp, Homo sapiens
atacttttttcaccc

SEQ ID NO: 453371 - DNA, 15 bp, Homo sapiens
tatacttttttcacc

SEQ ID NO: 453372 - DNA, 15 bp, Homo sapiens
ctatacttttttcac

SEQ ID NO: 453373 - DNA, 15 bp, Homo sapiens
actatacttttttca

SEQ ID NO: 453374 - DNA, 15 bp, Homo sapiens
cactatacttttttc

SEQ ID NO: 453375 - DNA, 15 bp, Homo sapiens
acactatactttttt

SEQ ID NO: 453376 - DNA, 15 bp, Homo sapiens
cacactatacttttt

SEQ ID NO: 453377 - DNA, 15 bp, Homo sapiens
gcacactatactttt

SEQ ID NO: 453378 - DNA, 15 bp, Homo sapiens
agcacactatacttt

SEQ ID NO: 453379 - DNA, 15 bp, Homo sapiens
aagcacactatactt

SEQ ID NO: 453380 - DNA, 15 bp, Homo sapiens
taagcacactatact

SEQ ID NO: 453381 - DNA, 15 bp, Homo sapiens
ttaagcacactatac

SEQ ID NO: 453382 - DNA, 15 bp, Homo sapiens
cttaagcacactata

SEQ ID NO: 453383 - DNA, 15 bp, Homo sapiens
acttaagcacactat

SEQ ID NO: 453384 - DNA, 15 bp, Homo sapiens
cacttaagcacacta

SEQ ID NO: 453385 - DNA, 15 bp, Homo sapiens
gcacttaagcacact

SEQ ID NO: 453386 - DNA, 15 bp, Homo sapiens
tgcacttaagcacac

SEQ ID NO: 453387 - DNA, 15 bp, Homo sapiens
ctgcacttaagcaca

SEQ ID NO: 453388 - DNA, 15 bp, Homo sapiens
tctgcacttaagcac

SEQ ID NO: 453389 - DNA, 15 bp, Homo sapiens
ttctgcacttaagca

SEQ ID NO: 453390 - DNA, 15 bp, Homo sapiens
cttctgcacttaagc

SEQ ID NO: 453391 - DNA, 15 bp, Homo sapiens
acttctgcacttaag

SEQ ID NO: 453392 - DNA, 15 bp, Homo sapiens
cacttctgcacttaa

SEQ ID NO: 453393 - DNA, 15 bp, Homo sapiens
acacttctgcactta

SEQ ID NO: 453394 - DNA, 15 bp, Homo sapiens
aacacttctgcactt

SEQ ID NO: 453395 - DNA, 15 bp, Homo sapiens
aaacacttctgcact

SEQ ID NO: 453396 - DNA, 15 bp, Homo sapiens
aaaacacttctgcac

SEQ ID NO: 453397 - DNA, 15 bp, Homo sapiens
aaaaacacttctgca

SEQ ID NO: 453398 - DNA, 15 bp, Homo sapiens
aaaaaacacttctgc

SEQ ID NO: 453399 - DNA, 15 bp, Homo sapiens
caaaaaacacttctg

SEQ ID NO: 453400 - DNA, 15 bp, Homo sapiens
tcaaaaaacacttct

SEQ ID NO: 453401 - DNA, 15 bp, Homo sapiens
ctcaaaaaacacttc

SEQ ID NO: 453402 - DNA, 15 bp, Homo sapiens
cctcaaaaaacactt

SEQ ID NO: 453403 - DNA, 15 bp, Homo sapiens
tcctcaaaaaacact

SEQ ID NO: 453404 - DNA, 15 bp, Homo sapiens
atcctcaaaaaacac

SEQ ID NO: 453405 - DNA, 15 bp, Homo sapiens
aatcctcaaaaaaca

SEQ ID NO: 453406 - DNA, 15 bp, Homo sapiens
aaatcctcaaaaaac

SEQ ID NO: 453407 - DNA, 15 bp, Homo sapiens
aaaatcctcaaaaaa

SEQ ID NO: 453408 - DNA, 15 bp, Homo sapiens
aaaaatcctcaaaaa

SEQ ID NO: 453409 - DNA, 15 bp, Homo sapiens
caaaaatcctcaaaa

SEQ ID NO: 453410 - DNA, 15 bp, Homo sapiens
tcaaaaatcctcaaa

SEQ ID NO: 453411 - DNA, 15 bp, Homo sapiens
atcaaaaatcctcaa

SEQ ID NO: 453412 - DNA, 15 bp, Homo sapiens
aatcaaaaatcctca

SEQ ID NO: 453413 - DNA, 15 bp, Homo sapiens
caatcaaaaatcctc

SEQ ID NO: 453414 - DNA, 15 bp, Homo sapiens
ccaatcaaaaatcct

SEQ ID NO: 453415 - DNA, 15 bp, Homo sapiens
tccaatcaaaaatcc

SEQ ID NO: 453416 - DNA, 15 bp, Homo sapiens
atccaatcaaaaatc

SEQ ID NO: 453417 - DNA, 15 bp, Homo sapiens
tatccaatcaaaaat

SEQ ID NO: 453418 - DNA, 15 bp, Homo sapiens
gtatccaatcaaaaa

SEQ ID NO: 453419 - DNA, 15 bp, Homo sapiens
tgtatccaatcaaaa

SEQ ID NO: 453420 - DNA, 15 bp, Homo sapiens
ttgtatccaatcaaa

SEQ ID NO: 453421 - DNA, 15 bp, Homo sapiens
tttgtatccaatcaa

SEQ ID NO: 453422 - DNA, 15 bp, Homo sapiens
gtttgtatccaatca

SEQ ID NO: 453423 - DNA, 15 bp, Homo sapiens
ggtttgtatccaatc

SEQ ID NO: 453424 - DNA, 15 bp, Homo sapiens
tggtttgtatccaat

SEQ ID NO: 453425 - DNA, 15 bp, Homo sapiens
gtggtttgtatccaa

SEQ ID NO: 453426 - DNA, 15 bp, Homo sapiens
ggtggtttgtatcca

SEQ ID NO: 453427 - DNA, 15 bp, Homo sapiens
tggtggtttgtatcc

SEQ ID NO: 453428 - DNA, 15 bp, Homo sapiens
gtggtggtttgtatc

SEQ ID NO: 453429 - DNA, 15 bp, Homo sapiens
agtggtggtttgtat

SEQ ID NO: 453430 - DNA, 15 bp, Homo sapiens
gagtggtggtttgta

SEQ ID NO: 453431 - DNA, 15 bp, Homo sapiens
tgagtggtggtttgt

SEQ ID NO: 453432 - DNA, 15 bp, Homo sapiens
atgagtggtggtttg

SEQ ID NO: 453433 - DNA, 15 bp, Homo sapiens
tatgagtggtggttt

SEQ ID NO: 453434 - DNA, 15 bp, Homo sapiens
atatgagtggtggtt

SEQ ID NO: 453435 - DNA, 15 bp, Homo sapiens
aatatgagtggtggt

SEQ ID NO: 453436 - DNA, 15 bp, Homo sapiens
aaatatgagtggtgg

SEQ ID NO: 453437 - DNA, 15 bp, Homo sapiens
aaaatatgagtggtg

SEQ ID NO: 453438 - DNA, 15 bp, Homo sapiens
taaaatatgagtggt

SEQ ID NO: 453439 - DNA, 15 bp, Homo sapiens
ataaaatatgagtgg

SEQ ID NO: 453440 - DNA, 15 bp, Homo sapiens
cataaaatatgagtg

SEQ ID NO: 453441 - DNA, 15 bp, Homo sapiens
acataaaatatgagt

SEQ ID NO: 453442 - DNA, 15 bp, Homo sapiens
gacataaaatatgag

SEQ ID NO: 453443 - DNA, 15 bp, Homo sapiens
agacataaaatatga

SEQ ID NO: 453444 - DNA, 15 bp, Homo sapiens
aagacataaaatatg

SEQ ID NO: 453445 - DNA, 15 bp, Homo sapiens
aaagacataaaatat

SEQ ID NO: 453446 - DNA, 15 bp, Homo sapiens
caaagacataaaata

SEQ ID NO: 453447 - DNA, 15 bp, Homo sapiens
ccaaagacataaaat

SEQ ID NO: 453448 - DNA, 15 bp, Homo sapiens
gccaaagacataaaa

SEQ ID NO: 453449 - DNA, 15 bp, Homo sapiens
tgccaaagacataaa

SEQ ID NO: 453450 - DNA, 15 bp, Homo sapiens
gtgccaaagacataa

SEQ ID NO: 453451 - DNA, 15 bp, Homo sapiens
agtgccaaagacata

SEQ ID NO: 453452 - DNA, 15 bp, Homo sapiens
aagtgccaaagacat

SEQ ID NO: 453453 - DNA, 15 bp, Homo sapiens
taagtgccaaagaca

SEQ ID NO: 453454 - DNA, 15 bp, Homo sapiens
ttaagtgccaaagac

SEQ ID NO: 453455 - DNA, 15 bp, Homo sapiens
tttaagtgccaaaga

SEQ ID NO: 453456 - DNA, 15 bp, Homo sapiens
ttttaagtgccaaag

SEQ ID NO: 453457 - DNA, 15 bp, Homo sapiens
tttttaagtgccaaa

SEQ ID NO: 453458 - DNA, 15 bp, Homo sapiens
atttttaagtgccaa

SEQ ID NO: 453459 - DNA, 15 bp, Homo sapiens
aatttttaagtgcca

SEQ ID NO: 453460 - DNA, 15 bp, Homo sapiens
aaatttttaagtgcc

SEQ ID NO: 453461 - DNA, 15 bp, Homo sapiens
gaaatttttaagtgc

SEQ ID NO: 453462 - DNA, 15 bp, Homo sapiens
tgaaatttttaagtg

SEQ ID NO: 453463 - DNA, 15 bp, Homo sapiens
gtgaaatttttaagt

SEQ ID NO: 453464 - DNA, 15 bp, Homo sapiens
ggtgaaatttttaag

SEQ ID NO: 453465 - DNA, 15 bp, Homo sapiens
tggtgaaatttttaa

SEQ ID NO: 453466 - DNA, 15 bp, Homo sapiens
atggtgaaattttta

SEQ ID NO: 453467 - DNA, 15 bp, Homo sapiens
tatggtgaaattttt

SEQ ID NO: 453468 - DNA, 15 bp, Homo sapiens
ttatggtgaaatttt

SEQ ID NO: 453469 - DNA, 15 bp, Homo sapiens
gttatggtgaaattt

SEQ ID NO: 453470 - DNA, 15 bp, Homo sapiens
agttatggtgaaatt

SEQ ID NO: 453471 - DNA, 15 bp, Homo sapiens
aagttatggtgaaat

SEQ ID NO: 453472 - DNA, 15 bp, Homo sapiens
aaagttatggtgaaa

SEQ ID NO: 453473 - DNA, 15 bp, Homo sapiens
aaaagttatggtgaa

SEQ ID NO: 453474 - DNA, 15 bp, Homo sapiens
caaaagttatggtga

SEQ ID NO: 453475 - DNA, 15 bp, Homo sapiens
tcaaaagttatggtg

SEQ ID NO: 453476 - DNA, 15 bp, Homo sapiens
ctcaaaagttatggt

SEQ ID NO: 453477 - DNA, 15 bp, Homo sapiens
actcaaaagttatgg

SEQ ID NO: 453478 - DNA, 15 bp, Homo sapiens
gactcaaaagttatg

SEQ ID NO: 453479 - DNA, 15 bp, Homo sapiens
tgactcaaaagttat

SEQ ID NO: 453480 - DNA, 15 bp, Homo sapiens
atgactcaaaagtta

SEQ ID NO: 453481 - DNA, 15 bp, Homo sapiens
aatgactcaaaagtt

SEQ ID NO: 453482 - DNA, 15 bp, Homo sapiens
aaatgactcaaaagt

SEQ ID NO: 453483 - DNA, 15 bp, Homo sapiens
taaatgactcaaaag

SEQ ID NO: 453484 - DNA, 15 bp, Homo sapiens
ataaatgactcaaaa

SEQ ID NO: 453485 - DNA, 15 bp, Homo sapiens
tataaatgactcaaa

SEQ ID NO: 453486 - DNA, 15 bp, Homo sapiens
ttataaatgactcaa

SEQ ID NO: 453487 - DNA, 15 bp, Homo sapiens
tttataaatgactca

SEQ ID NO: 453488 - DNA, 15 bp, Homo sapiens
ttttataaatgactc

SEQ ID NO: 453489 - DNA, 15 bp, Homo sapiens
tttttataaatgact

SEQ ID NO: 453490 - DNA, 15 bp, Homo sapiens
gtttttataaatgac

SEQ ID NO: 453491 - DNA, 15 bp, Homo sapiens
ggtttttataaatga

SEQ ID NO: 453492 - DNA, 15 bp, Homo sapiens
tggtttttataaatg

SEQ ID NO: 453493 - DNA, 15 bp, Homo sapiens
gtggtttttataaat

SEQ ID NO: 453494 - DNA, 15 bp, Homo sapiens
agtggtttttataaa

SEQ ID NO: 453495 - DNA, 15 bp, Homo sapiens
cagtggtttttataa

SEQ ID NO: 453496 - DNA, 15 bp, Homo sapiens
tcagtggtttttata

SEQ ID NO: 453497 - DNA, 15 bp, Homo sapiens
ttcagtggtttttat

SEQ ID NO: 453498 - DNA, 15 bp, Homo sapiens
tttcagtggttttta

SEQ ID NO: 453499 - DNA, 15 bp, Homo sapiens
ctttcagtggttttt

SEQ ID NO: 453500 - DNA, 15 bp, Homo sapiens
tctttcagtggtttt

SEQ ID NO: 453501 - DNA, 15 bp, Homo sapiens
ctctttcagtggttt

SEQ ID NO: 453502 - DNA, 15 bp, Homo sapiens
actctttcagtggtt

SEQ ID NO: 453503 - DNA, 15 bp, Homo sapiens
tactctttcagtggt

SEQ ID NO: 453504 - DNA, 15 bp, Homo sapiens
gtactctttcagtgg

SEQ ID NO: 453505 - DNA, 15 bp, Homo sapiens
agtactctttcagtg

SEQ ID NO: 453506 - DNA, 15 bp, Homo sapiens
aagtactctttcagt

SEQ ID NO: 453507 - DNA, 15 bp, Homo sapiens
caagtactctttcag

SEQ ID NO: 453508 - DNA, 15 bp, Homo sapiens
tcaagtactctttca

SEQ ID NO: 453509 - DNA, 15 bp, Homo sapiens
ctcaagtactctttc

SEQ ID NO: 453510 - DNA, 15 bp, Homo sapiens
cctcaagtactcttt

SEQ ID NO: 453511 - DNA, 15 bp, Homo sapiens
ccctcaagtactctt

SEQ ID NO: 453512 - DNA, 15 bp, Homo sapiens
tccctcaagtactct

SEQ ID NO: 453513 - DNA, 15 bp, Homo sapiens
gtccctcaagtactc

SEQ ID NO: 453514 - DNA, 15 bp, Homo sapiens
tgtccctcaagtact

SEQ ID NO: 453515 - DNA, 15 bp, Homo sapiens
atgtccctcaagtac

SEQ ID NO: 453516 - DNA, 15 bp, Homo sapiens
gatgtccctcaagta

SEQ ID NO: 453517 - DNA, 15 bp, Homo sapiens
ggatgtccctcaagt

SEQ ID NO: 453518 - DNA, 15 bp, Homo sapiens
gggatgtccctcaag

SEQ ID NO: 453519 - DNA, 15 bp, Homo sapiens
ggggatgtccctcaa

SEQ ID NO: 453520 - DNA, 15 bp, Homo sapiens
cggggatgtccctca

SEQ ID NO: 453521 - DNA, 15 bp, Homo sapiens
tcggggatgtccctc

SEQ ID NO: 453522 - DNA, 15 bp, Homo sapiens
ttcggggatgtccct

SEQ ID NO: 453523 - DNA, 15 bp, Homo sapiens
attcggggatgtccc

SEQ ID NO: 453524 - DNA, 15 bp, Homo sapiens
gattcggggatgtcc

SEQ ID NO: 453525 - DNA, 15 bp, Homo sapiens
ggattcggggatgtc

SEQ ID NO: 453526 - DNA, 15 bp, Homo sapiens
aggattcggggatgt

SEQ ID NO: 453527 - DNA, 15 bp, Homo sapiens
caggattcggggatg

SEQ ID NO: 453528 - DNA, 15 bp, Homo sapiens
tcaggattcggggat

SEQ ID NO: 453529 - DNA, 15 bp, Homo sapiens
ttcaggattcgggga

SEQ ID NO: 453530 - DNA, 15 bp, Homo sapiens
cttcaggattcgggg

SEQ ID NO: 453531 - DNA, 15 bp, Homo sapiens
tcttcaggattcggg

SEQ ID NO: 453532 - DNA, 15 bp, Homo sapiens
ttcttcaggattcgg

SEQ ID NO: 453533 - DNA, 15 bp, Homo sapiens
gttcttcaggattcg

SEQ ID NO: 453534 - DNA, 15 bp, Homo sapiens
agttcttcaggattc

SEQ ID NO: 453535 - DNA, 15 bp, Homo sapiens
aagttcttcaggatt

SEQ ID NO: 453536 - DNA, 15 bp, Homo sapiens
gaagttcttcaggat

SEQ ID NO: 453537 - DNA, 15 bp, Homo sapiens
agaagttcttcagga

SEQ ID NO: 453538 - DNA, 15 bp, Homo sapiens
cagaagttcttcagg

SEQ ID NO: 453539 - DNA, 15 bp, Homo sapiens
ccagaagttcttcag

SEQ ID NO: 453540 - DNA, 15 bp, Homo sapiens
accagaagttcttca

SEQ ID NO: 453541 - DNA, 15 bp, Homo sapiens
caccagaagttcttc

SEQ ID NO: 453542 - DNA, 15 bp, Homo sapiens
acaccagaagttctt

SEQ ID NO: 453543 - DNA, 15 bp, Homo sapiens
aacaccagaagttct

SEQ ID NO: 453544 - DNA, 15 bp, Homo sapiens
gaacaccagaagttc

SEQ ID NO: 453545 - DNA, 15 bp, Homo sapiens
agaacaccagaagtt

SEQ ID NO: 453546 - DNA, 15 bp, Homo sapiens
cagaacaccagaagt

SEQ ID NO: 453547 - DNA, 15 bp, Homo sapiens
ccagaacaccagaag

SEQ ID NO: 453548 - DNA, 15 bp, Homo sapiens
tccagaacaccagaa

SEQ ID NO: 453549 - DNA, 15 bp, Homo sapiens
ctccagaacaccaga

SEQ ID NO: 453550 - DNA, 15 bp, Homo sapiens
gctccagaacaccag

SEQ ID NO: 453551 - DNA, 15 bp, Homo sapiens
tgctccagaacacca

SEQ ID NO: 453552 - DNA, 15 bp, Homo sapiens
ctgctccagaacacc

SEQ ID NO: 453553 - DNA, 15 bp, Homo sapiens
gctgctccagaacac

SEQ ID NO: 453554 - DNA, 15 bp, Homo sapiens
ggctgctccagaaca

SEQ ID NO: 453555 - DNA, 15 bp, Homo sapiens
aggctgctccagaac

SEQ ID NO: 453556 - DNA, 15 bp, Homo sapiens
gaggctgctccagaa

SEQ ID NO: 453557 - DNA, 15 bp, Homo sapiens
tgaggctgctccaga

SEQ ID NO: 453558 - DNA, 15 bp, Homo sapiens
ctgaggctgctccag

SEQ ID NO: 453559 - DNA, 15 bp, Homo sapiens
actgaggctgctcca

SEQ ID NO: 453560 - DNA, 15 bp, Homo sapiens
cactgaggctgctcc

SEQ ID NO: 453561 - DNA, 15 bp, Homo sapiens
tcactgaggctgctc

SEQ ID NO: 453562 - DNA, 15 bp, Homo sapiens
ctcactgaggctgct

SEQ ID NO: 453563 - DNA, 15 bp, Homo sapiens
tctcactgaggctgc

SEQ ID NO: 453564 - DNA, 15 bp, Homo sapiens
atctcactgaggctg

SEQ ID NO: 453565 - DNA, 15 bp, Homo sapiens
gatctcactgaggct

SEQ ID NO: 453566 - DNA, 15 bp, Homo sapiens
ggatctcactgaggc

SEQ ID NO: 453567 - DNA, 15 bp, Homo sapiens
tggatctcactgagg

SEQ ID NO: 453568 - DNA, 15 bp, Homo sapiens
ctggatctcactgag

SEQ ID NO: 453569 - DNA, 15 bp, Homo sapiens
cctggatctcactga

SEQ ID NO: 453570 - DNA, 15 bp, Homo sapiens
tcctggatctcactg

SEQ ID NO: 453571 - DNA, 15 bp, Homo sapiens
ctcctggatctcact

SEQ ID NO: 453572 - DNA, 15 bp, Homo sapiens
cctcctggatctcac

SEQ ID NO: 453573 - DNA, 15 bp, Homo sapiens
tcctcctggatctca

SEQ ID NO: 453574 - DNA, 15 bp, Homo sapiens
atcctcctggatctc

SEQ ID NO: 453575 - DNA, 15 bp, Homo sapiens
catcctcctggatct

SEQ ID NO: 453576 - DNA, 15 bp, Homo sapiens
ccatcctcctggatc

SEQ ID NO: 453577 - DNA, 15 bp, Homo sapiens
gccatcctcctggat

SEQ ID NO: 453578 - DNA, 15 bp, Homo sapiens
tgccatcctcctgga

SEQ ID NO: 453579 - DNA, 15 bp, Homo sapiens
atgccatcctcctgg

SEQ ID NO: 453580 - DNA, 15 bp, Homo sapiens
aatgccatcctcctg

SEQ ID NO: 453581 - DNA, 15 bp, Homo sapiens
caatgccatcctcct

SEQ ID NO: 453582 - DNA, 15 bp, Homo sapiens
gcaatgccatcctcc

SEQ ID NO: 453583 - DNA, 15 bp, Homo sapiens
agcaatgccatcctc

SEQ ID NO: 453584 - DNA, 15 bp, Homo sapiens
cagcaatgccatcct

SEQ ID NO: 453585 - DNA, 15 bp, Homo sapiens
ccagcaatgccatcc

SEQ ID NO: 453586 - DNA, 15 bp, Homo sapiens
cccagcaatgccatc

SEQ ID NO: 453587 - DNA, 15 bp, Homo sapiens
gcccagcaatgccat

SEQ ID NO: 453588 - DNA, 15 bp, Homo sapiens
agcccagcaatgcca

SEQ ID NO: 453589 - DNA, 15 bp, Homo sapiens
cagcccagcaatgcc

SEQ ID NO: 453590 - DNA, 15 bp, Homo sapiens
ccagcccagcaatgc

SEQ ID NO: 453591 - DNA, 15 bp, Homo sapiens
gccagcccagcaatg

SEQ ID NO: 453592 - DNA, 15 bp, Homo sapiens
ggccagcccagcaat

SEQ ID NO: 453593 - DNA, 15 bp, Homo sapiens
gggccagcccagcaa

SEQ ID NO: 453594 - DNA, 15 bp, Homo sapiens
tgggccagcccagca

SEQ ID NO: 453595 - DNA, 15 bp, Homo sapiens
ctgggccagcccagc

SEQ ID NO: 453596 - DNA, 15 bp, Homo sapiens
gctgggccagcccag

SEQ ID NO: 453597 - DNA, 15 bp, Homo sapiens
ggctgggccagccca

SEQ ID NO: 453598 - DNA, 15 bp, Homo sapiens
gggctgggccagccc

SEQ ID NO: 453599 - DNA, 15 bp, Homo sapiens
agggctgggccagcc

SEQ ID NO: 453600 - DNA, 15 bp, Homo sapiens
aagggctgggccagc

SEQ ID NO: 453601 - DNA, 15 bp, Homo sapiens
taagggctgggccag

SEQ ID NO: 453602 - DNA, 15 bp, Homo sapiens
ataagggctgggcca

SEQ ID NO: 453603 - DNA, 15 bp, Homo sapiens
aataagggctgggcc

SEQ ID NO: 453604 - DNA, 15 bp, Homo sapiens
caataagggctgggc

SEQ ID NO: 453605 - DNA, 15 bp, Homo sapiens
tcaataagggctggg

SEQ ID NO: 453606 - DNA, 15 bp, Homo sapiens
atcaataagggctgg

SEQ ID NO: 453607 - DNA, 15 bp, Homo sapiens
aatcaataagggctg

SEQ ID NO: 453608 - DNA, 15 bp, Homo sapiens
taatcaataagggct

SEQ ID NO: 453609 - DNA, 15 bp, Homo sapiens
ataatcaataagggc

SEQ ID NO: 453610 - DNA, 15 bp, Homo sapiens
cataatcaataaggg

SEQ ID NO: 453611 - DNA, 15 bp, Homo sapiens
ccataatcaataagg

SEQ ID NO: 453612 - DNA, 15 bp, Homo sapiens
accataatcaataag

SEQ ID NO: 453613 - DNA, 15 bp, Homo sapiens
caccataatcaataa

SEQ ID NO: 453614 - DNA, 15 bp, Homo sapiens
acaccataatcaata

SEQ ID NO: 453615 - DNA, 15 bp, Homo sapiens
tacaccataatcaat

SEQ ID NO: 453616 - DNA, 15 bp, Homo sapiens
ttacaccataatcaa

SEQ ID NO: 453617 - DNA, 15 bp, Homo sapiens
tttacaccataatca

SEQ ID NO: 453618 - DNA, 15 bp, Homo sapiens
ctttacaccataatc

SEQ ID NO: 453619 - DNA, 15 bp, Homo sapiens
tctttacaccataat

SEQ ID NO: 453620 - DNA, 15 bp, Homo sapiens
ttctttacaccataa

SEQ ID NO: 453621 - DNA, 15 bp, Homo sapiens
attctttacaccata

SEQ ID NO: 453622 - DNA, 15 bp, Homo sapiens
aattctttacaccat

SEQ ID NO: 453623 - DNA, 15 bp, Homo sapiens
taattctttacacca

SEQ ID NO: 453624 - DNA, 15 bp, Homo sapiens
ttaattctttacacc

SEQ ID NO: 453625 - DNA, 15 bp, Homo sapiens
attaattctttacac

SEQ ID NO: 453626 - DNA, 15 bp, Homo sapiens
tattaattctttaca

SEQ ID NO: 453627 - DNA, 15 bp, Homo sapiens
atattaattctttac

SEQ ID NO: 453628 - DNA, 15 bp, Homo sapiens
catattaattcttta

SEQ ID NO: 453629 - DNA, 15 bp, Homo sapiens
ccatattaattcttt

SEQ ID NO: 453630 - DNA, 15 bp, Homo sapiens
accatattaattctt

SEQ ID NO: 453631 - DNA, 15 bp, Homo sapiens
caccatattaattct

SEQ ID NO: 453632 - DNA, 15 bp, Homo sapiens
ccaccatattaattc

SEQ ID NO: 453633 - DNA, 15 bp, Homo sapiens
accaccatattaatt

SEQ ID NO: 453634 - DNA, 15 bp, Homo sapiens
aaccaccatattaat

SEQ ID NO: 453635 - DNA, 15 bp, Homo sapiens
taaccaccatattaa

SEQ ID NO: 453636 - DNA, 15 bp, Homo sapiens
ataaccaccatatta

SEQ ID NO: 453637 - DNA, 15 bp, Homo sapiens
tataaccaccatatt

SEQ ID NO: 453638 - DNA, 15 bp, Homo sapiens
atataaccaccatat

SEQ ID NO: 453639 - DNA, 15 bp, Homo sapiens
tatataaccaccata

SEQ ID NO: 453640 - DNA, 15 bp, Homo sapiens
gtatataaccaccat

SEQ ID NO: 453641 - DNA, 15 bp, Homo sapiens
agtatataaccacca

SEQ ID NO: 453642 - DNA, 15 bp, Homo sapiens
gagtatataaccacc

SEQ ID NO: 453643 - DNA, 15 bp, Homo sapiens
agagtatataaccac

SEQ ID NO: 453644 - DNA, 15 bp, Homo sapiens
aagagtatataacca

SEQ ID NO: 453645 - DNA, 15 bp, Homo sapiens
aaagagtatataacc

SEQ ID NO: 453646 - DNA, 15 bp, Homo sapiens
caaagagtatataac

SEQ ID NO: 453647 - DNA, 15 bp, Homo sapiens
acaaagagtatataa

SEQ ID NO: 453648 - DNA, 15 bp, Homo sapiens
aacaaagagtatata

SEQ ID NO: 453649 - DNA, 15 bp, Homo sapiens
taacaaagagtatat

SEQ ID NO: 453650 - DNA, 15 bp, Homo sapiens
ctaacaaagagtata

SEQ ID NO: 453651 - DNA, 15 bp, Homo sapiens
tctaacaaagagtat

SEQ ID NO: 453652 - DNA, 15 bp, Homo sapiens
gtctaacaaagagta

SEQ ID NO: 453653 - DNA, 15 bp, Homo sapiens
tgtctaacaaagagt

SEQ ID NO: 453654 - DNA, 15 bp, Homo sapiens
gtgtctaacaaagag

SEQ ID NO: 453655 - DNA, 15 bp, Homo sapiens
ggtgtctaacaaaga

SEQ ID NO: 453656 - DNA, 15 bp, Homo sapiens
aggtgtctaacaaag

SEQ ID NO: 453657 - DNA, 15 bp, Homo sapiens
aaggtgtctaacaaa

SEQ ID NO: 453658 - DNA, 15 bp, Homo sapiens
caaggtgtctaacaa

SEQ ID NO: 453659 - DNA, 15 bp, Homo sapiens
ccaaggtgtctaaca

SEQ ID NO: 453660 - DNA, 15 bp, Homo sapiens
gccaaggtgtctaac

SEQ ID NO: 453661 - DNA, 15 bp, Homo sapiens
agccaaggtgtctaa

SEQ ID NO: 453662 - DNA, 15 bp, Homo sapiens
aagccaaggtgtcta

SEQ ID NO: 453663 - DNA, 15 bp, Homo sapiens
taagccaaggtgtct

SEQ ID NO: 453664 - DNA, 15 bp, Homo sapiens
gtaagccaaggtgtc

SEQ ID NO: 453665 - DNA, 15 bp, Homo sapiens
tgtaagccaaggtgt

SEQ ID NO: 453666 - DNA, 15 bp, Homo sapiens
ttgtaagccaaggtg

SEQ ID NO: 453667 - DNA, 15 bp, Homo sapiens
cttgtaagccaaggt

SEQ ID NO: 453668 - DNA, 15 bp, Homo sapiens
tcttgtaagccaagg

SEQ ID NO: 453669 - DNA, 15 bp, Homo sapiens
gtcttgtaagccaag

SEQ ID NO: 453670 - DNA, 15 bp, Homo sapiens
cgtcttgtaagccaa

SEQ ID NO: 453671 - DNA, 15 bp, Homo sapiens
acgtcttgtaagcca

SEQ ID NO: 453672 - DNA, 15 bp, Homo sapiens
tacgtcttgtaagcc

SEQ ID NO: 453673 - DNA, 15 bp, Homo sapiens
ttacgtcttgtaagc

SEQ ID NO: 453674 - DNA, 15 bp, Homo sapiens
cttacgtcttgtaag

SEQ ID NO: 453675 - DNA, 15 bp, Homo sapiens
gcttacgtcttgtaa

SEQ ID NO: 453676 - DNA, 15 bp, Homo sapiens
cgcttacgtcttgta

SEQ ID NO: 453677 - DNA, 15 bp, Homo sapiens
acgcttacgtcttgt

SEQ ID NO: 453678 - DNA, 15 bp, Homo sapiens
tacgcttacgtcttg

SEQ ID NO: 453679 - DNA, 15 bp, Homo sapiens
ttacgcttacgtctt

SEQ ID NO: 453680 - DNA, 15 bp, Homo sapiens
tttacgcttacgtct

SEQ ID NO: 453681 - DNA, 15 bp, Homo sapiens
ctttacgcttacgtc

SEQ ID NO: 453682 - DNA, 15 bp, Homo sapiens
actttacgcttacgt

SEQ ID NO: 453683 - DNA, 15 bp, Homo sapiens
cactttacgcttacg

SEQ ID NO: 453684 - DNA, 15 bp, Homo sapiens
acactttacgcttac

SEQ ID NO: 453685 - DNA, 15 bp, Homo sapiens
tacactttacgctta

SEQ ID NO: 453686 - DNA, 15 bp, Homo sapiens
ctacactttacgctt

SEQ ID NO: 453687 - DNA, 15 bp, Homo sapiens
actacactttacgct

SEQ ID NO: 453688 - DNA, 15 bp, Homo sapiens
cactacactttacgc

SEQ ID NO: 453689 - DNA, 15 bp, Homo sapiens
gcactacactttacg

SEQ ID NO: 453690 - DNA, 15 bp, Homo sapiens
cgcactacactttac

SEQ ID NO: 453691 - DNA, 15 bp, Homo sapiens
gcgcactacacttta

SEQ ID NO: 453692 - DNA, 15 bp, Homo sapiens
agcgcactacacttt

SEQ ID NO: 453693 - DNA, 15 bp, Homo sapiens
aagcgcactacactt

SEQ ID NO: 453694 - DNA, 15 bp, Homo sapiens
aaagcgcactacact

SEQ ID NO: 453695 - DNA, 15 bp, Homo sapiens
taaagcgcactacac

SEQ ID NO: 453696 - DNA, 15 bp, Homo sapiens
ctaaagcgcactaca

SEQ ID NO: 453697 - DNA, 15 bp, Homo sapiens
actaaagcgcactac

SEQ ID NO: 453698 - DNA, 15 bp, Homo sapiens
gactaaagcgcacta

SEQ ID NO: 453699 - DNA, 15 bp, Homo sapiens
tgactaaagcgcact

SEQ ID NO: 453700 - DNA, 15 bp, Homo sapiens
ctgactaaagcgcac

SEQ ID NO: 453701 - DNA, 15 bp, Homo sapiens
actgactaaagcgca

SEQ ID NO: 453702 - DNA, 15 bp, Homo sapiens
tactgactaaagcgc

SEQ ID NO: 453703 - DNA, 15 bp, Homo sapiens
atactgactaaagcg

SEQ ID NO: 453704 - DNA, 15 bp, Homo sapiens
catactgactaaagc

SEQ ID NO: 453705 - DNA, 15 bp, Homo sapiens
ccatactgactaaag

SEQ ID NO: 453706 - DNA, 15 bp, Homo sapiens
gccatactgactaaa

SEQ ID NO: 453707 - DNA, 15 bp, Homo sapiens
ggccatactgactaa

SEQ ID NO: 453708 - DNA, 15 bp, Homo sapiens
tggccatactgacta

SEQ ID NO: 453709 - DNA, 15 bp, Homo sapiens
gtggccatactgact

SEQ ID NO: 453710 - DNA, 15 bp, Homo sapiens
tgtggccatactgac

SEQ ID NO: 453711 - DNA, 15 bp, Homo sapiens
atgtggccatactga

SEQ ID NO: 453712 - DNA, 15 bp, Homo sapiens
catgtggccatactg

SEQ ID NO: 453713 - DNA, 15 bp, Homo sapiens
ccatgtggccatact

SEQ ID NO: 453714 - DNA, 15 bp, Homo sapiens
accatgtggccatac

SEQ ID NO: 453715 - DNA, 15 bp, Homo sapiens
gaccatgtggccata

SEQ ID NO: 453716 - DNA, 15 bp, Homo sapiens
ggaccatgtggccat

SEQ ID NO: 453717 - DNA, 15 bp, Homo sapiens
aggaccatgtggcca

SEQ ID NO: 453718 - DNA, 15 bp, Homo sapiens
aaggaccatgtggcc

SEQ ID NO: 453719 - DNA, 15 bp, Homo sapiens
aaaggaccatgtggc

SEQ ID NO: 453720 - DNA, 15 bp, Homo sapiens
caaaggaccatgtgg

SEQ ID NO: 453721 - DNA, 15 bp, Homo sapiens
ccaaaggaccatgtg

SEQ ID NO: 453722 - DNA, 15 bp, Homo sapiens
accaaaggaccatgt

SEQ ID NO: 453723 - DNA, 15 bp, Homo sapiens
caccaaaggaccatg

SEQ ID NO: 453724 - DNA, 15 bp, Homo sapiens
ccaccaaaggaccat

SEQ ID NO: 453725 - DNA, 15 bp, Homo sapiens
accaccaaaggacca

SEQ ID NO: 453726 - DNA, 15 bp, Homo sapiens
taccaccaaaggacc

SEQ ID NO: 453727 - DNA, 15 bp, Homo sapiens
ttaccaccaaaggac

SEQ ID NO: 453728 - DNA, 15 bp, Homo sapiens
tttaccaccaaagga

SEQ ID NO: 453729 - DNA, 15 bp, Homo sapiens
atttaccaccaaagg

SEQ ID NO: 453730 - DNA, 15 bp, Homo sapiens
aatttaccaccaaag

SEQ ID NO: 453731 - DNA, 15 bp, Homo sapiens
caatttaccaccaaa

SEQ ID NO: 453732 - DNA, 15 bp, Homo sapiens
acaatttaccaccaa

SEQ ID NO: 453733 - DNA, 15 bp, Homo sapiens
aacaatttaccacca

SEQ ID NO: 453734 - DNA, 15 bp, Homo sapiens
aaacaatttaccacc

SEQ ID NO: 453735 - DNA, 15 bp, Homo sapiens
caaacaatttaccac

SEQ ID NO: 453736 - DNA, 15 bp, Homo sapiens
tcaaacaatttacca

SEQ ID NO: 453737 - DNA, 15 bp, Homo sapiens
ctcaaacaatttacc

SEQ ID NO: 453738 - DNA, 15 bp, Homo sapiens
tctcaaacaatttac

SEQ ID NO: 453739 - DNA, 15 bp, Homo sapiens
atctcaaacaattta

SEQ ID NO: 453740 - DNA, 15 bp, Homo sapiens
catctcaaacaattt

SEQ ID NO: 453741 - DNA, 15 bp, Homo sapiens
gcatctcaaacaatt

SEQ ID NO: 453742 - DNA, 15 bp, Homo sapiens
ggcatctcaaacaat

SEQ ID NO: 453743 - DNA, 15 bp, Homo sapiens
aggcatctcaaacaa

SEQ ID NO: 453744 - DNA, 15 bp, Homo sapiens
gaggcatctcaaaca

SEQ ID NO: 453745 - DNA, 15 bp, Homo sapiens
ggaggcatctcaaac

SEQ ID NO: 453746 - DNA, 15 bp, Homo sapiens
tggaggcatctcaaa

SEQ ID NO: 453747 - DNA, 15 bp, Homo sapiens
ctggaggcatctcaa

SEQ ID NO: 453748 - DNA, 15 bp, Homo sapiens
actggaggcatctca

SEQ ID NO: 453749 - DNA, 15 bp, Homo sapiens
aactggaggcatctc

SEQ ID NO: 453750 - DNA, 15 bp, Homo sapiens
aaactggaggcatct

SEQ ID NO: 453751 - DNA, 15 bp, Homo sapiens
aaaactggaggcatc

SEQ ID NO: 453752 - DNA, 15 bp, Homo sapiens
aaaaactggaggcat

SEQ ID NO: 453753 - DNA, 15 bp, Homo sapiens
taaaaactggaggca

SEQ ID NO: 453754 - DNA, 15 bp, Homo sapiens
ttaaaaactggaggc

SEQ ID NO: 453755 - DNA, 15 bp, Homo sapiens
tttaaaaactggagg

SEQ ID NO: 453756 - DNA, 15 bp, Homo sapiens
ttttaaaaactggag

SEQ ID NO: 453757 - DNA, 15 bp, Homo sapiens
cttttaaaaactgga

SEQ ID NO: 453758 - DNA, 15 bp, Homo sapiens
ccttttaaaaactgg

SEQ ID NO: 453759 - DNA, 15 bp, Homo sapiens
tccttttaaaaactg

SEQ ID NO: 453760 - DNA, 15 bp, Homo sapiens
ctccttttaaaaact

SEQ ID NO: 453761 - DNA, 15 bp, Homo sapiens
actccttttaaaaac

SEQ ID NO: 453762 - DNA, 15 bp, Homo sapiens
tactccttttaaaaa

SEQ ID NO: 453763 - DNA, 15 bp, Homo sapiens
ctactccttttaaaa

SEQ ID NO: 453764 - DNA, 15 bp, Homo sapiens
gctactccttttaaa

SEQ ID NO: 453765 - DNA, 15 bp, Homo sapiens
tgctactccttttaa

SEQ ID NO: 453766 - DNA, 15 bp, Homo sapiens
atgctactcctttta

SEQ ID NO: 453767 - DNA, 15 bp, Homo sapiens
tatgctactcctttt

SEQ ID NO: 453768 - DNA, 15 bp, Homo sapiens
atatgctactccttt

SEQ ID NO: 453769 - DNA, 15 bp, Homo sapiens
gatatgctactcctt

SEQ ID NO: 453770 - DNA, 15 bp, Homo sapiens
cgatatgctactcct

SEQ ID NO: 453771 - DNA, 15 bp, Homo sapiens
ccgatatgctactcc

SEQ ID NO: 453772 - DNA, 15 bp, Homo sapiens
cccgatatgctactc

SEQ ID NO: 453773 - DNA, 15 bp, Homo sapiens
gcccgatatgctact

SEQ ID NO: 453774 - DNA, 15 bp, Homo sapiens
ggcccgatatgctac

SEQ ID NO: 453775 - DNA, 15 bp, Homo sapiens
tggcccgatatgcta

SEQ ID NO: 453776 - DNA, 15 bp, Homo sapiens
ctggcccgatatgct

SEQ ID NO: 453777 - DNA, 15 bp, Homo sapiens
cctggcccgatatgc

SEQ ID NO: 453778 - DNA, 15 bp, Homo sapiens
tcctggcccgatatg

SEQ ID NO: 453779 - DNA, 15 bp, Homo sapiens
ctcctggcccgatat

SEQ ID NO: 453780 - DNA, 15 bp, Homo sapiens
gctcctggcccgata

SEQ ID NO: 453781 - DNA, 15 bp, Homo sapiens
tgctcctggcccgat

SEQ ID NO: 453782 - DNA, 15 bp, Homo sapiens
ctgctcctggcccga

SEQ ID NO: 453783 - DNA, 15 bp, Homo sapiens
actgctcctggcccg

SEQ ID NO: 453784 - DNA, 15 bp, Homo sapiens
cactgctcctggccc

SEQ ID NO: 453785 - DNA, 15 bp, Homo sapiens
ccactgctcctggcc

SEQ ID NO: 453786 - DNA, 15 bp, Homo sapiens
gccactgctcctggc

SEQ ID NO: 453787 - DNA, 15 bp, Homo sapiens
agccactgctcctgg

SEQ ID NO: 453788 - DNA, 15 bp, Homo sapiens
gagccactgctcctg

SEQ ID NO: 453789 - DNA, 15 bp, Homo sapiens
tgagccactgctcct

SEQ ID NO: 453790 - DNA, 15 bp, Homo sapiens
atgagccactgctcc

SEQ ID NO: 453791 - DNA, 15 bp, Homo sapiens
catgagccactgctc

SEQ ID NO: 453792 - DNA, 15 bp, Homo sapiens
gcatgagccactgct

SEQ ID NO: 453793 - DNA, 15 bp, Homo sapiens
ggcatgagccactgc

SEQ ID NO: 453794 - DNA, 15 bp, Homo sapiens
aggcatgagccactg

SEQ ID NO: 453795 - DNA, 15 bp, Homo sapiens
taggcatgagccact

SEQ ID NO: 453796 - DNA, 15 bp, Homo sapiens
ataggcatgagccac

SEQ ID NO: 453797 - DNA, 15 bp, Homo sapiens
ggattataggcatga

SEQ ID NO: 453798 - DNA, 15 bp, Homo sapiens
gggattataggcatg

SEQ ID NO: 453799 - DNA, 15 bp, Homo sapiens
tgggattataggcat

SEQ ID NO: 453800 - DNA, 15 bp, Homo sapiens
ctgggattataggca

SEQ ID NO: 453801 - DNA, 15 bp, Homo sapiens
gctgggattataggc

SEQ ID NO: 453802 - DNA, 15 bp, Homo sapiens
tgctgggattatagg

SEQ ID NO: 453803 - DNA, 15 bp, Homo sapiens
gtgctgggattatag

SEQ ID NO: 453804 - DNA, 15 bp, Homo sapiens
agtgctgggattata

SEQ ID NO: 453805 - DNA, 15 bp, Homo sapiens
aagtgctgggattat

SEQ ID NO: 453806 - DNA, 15 bp, Homo sapiens
tccaaagtgctggga

SEQ ID NO: 453807 - DNA, 15 bp, Homo sapiens
ttccaaagtgctggg

SEQ ID NO: 453808 - DNA, 15 bp, Homo sapiens
cttccaaagtgctgg

SEQ ID NO: 453809 - DNA, 15 bp, Homo sapiens
ccttccaaagtgctg

SEQ ID NO: 453810 - DNA, 15 bp, Homo sapiens
gccttccaaagtgct

SEQ ID NO: 453811 - DNA, 15 bp, Homo sapiens
ggccttccaaagtgc

SEQ ID NO: 453812 - DNA, 15 bp, Homo sapiens
cggccttccaaagtg

SEQ ID NO: 453813 - DNA, 15 bp, Homo sapiens
tcggccttccaaagt

SEQ ID NO: 453814 - DNA, 15 bp, Homo sapiens
ctcggccttccaaag

SEQ ID NO: 453815 - DNA, 15 bp, Homo sapiens
cctcggccttccaaa

SEQ ID NO: 453816 - DNA, 15 bp, Homo sapiens
gcctcggccttccaa

SEQ ID NO: 453817 - DNA, 15 bp, Homo sapiens
tgcctcggccttcca

SEQ ID NO: 453818 - DNA, 15 bp, Homo sapiens
ttgcctcggccttcc

SEQ ID NO: 453819 - DNA, 15 bp, Homo sapiens
cttgcctcggccttc

SEQ ID NO: 453820 - DNA, 15 bp, Homo sapiens
tcttgcctcggcctt

SEQ ID NO: 453821 - DNA, 15 bp, Homo sapiens
ctcttgcctcggcct

SEQ ID NO: 453822 - DNA, 15 bp, Homo sapiens
cctcttgcctcggcc

SEQ ID NO: 453823 - DNA, 15 bp, Homo sapiens
tcctcttgcctcggc

SEQ ID NO: 453824 - DNA, 15 bp, Homo sapiens
atcctcttgcctcgg

SEQ ID NO: 453825 - DNA, 15 bp, Homo sapiens
aatcctcttgcctcg

SEQ ID NO: 453826 - DNA, 15 bp, Homo sapiens
caatcctcttgcctc

SEQ ID NO: 453827 - DNA, 15 bp, Homo sapiens
gcaatcctcttgcct

SEQ ID NO: 453828 - DNA, 15 bp, Homo sapiens
agcaatcctcttgcc

SEQ ID NO: 453829 - DNA, 15 bp, Homo sapiens
aagcaatcctcttgc

SEQ ID NO: 453830 - DNA, 15 bp, Homo sapiens
caagcaatcctcttg

SEQ ID NO: 453831 - DNA, 15 bp, Homo sapiens
tcaagcaatcctctt

SEQ ID NO: 453832 - DNA, 15 bp, Homo sapiens
ctcaagcaatcctct

SEQ ID NO: 453833 - DNA, 15 bp, Homo sapiens
gaactcctgggctca

SEQ ID NO: 453834 - DNA, 15 bp, Homo sapiens
tgaactcctgggctc

SEQ ID NO: 453835 - DNA, 15 bp, Homo sapiens
ttgaactcctgggct

SEQ ID NO: 453836 - DNA, 15 bp, Homo sapiens
cttgaactcctgggc

SEQ ID NO: 453837 - DNA, 15 bp, Homo sapiens
tcttgaactcctggg

SEQ ID NO: 453838 - DNA, 15 bp, Homo sapiens
gtcttgaactcctgg

SEQ ID NO: 453839 - DNA, 15 bp, Homo sapiens
ccaggctggtcttga

SEQ ID NO: 453840 - DNA, 15 bp, Homo sapiens
cccaggctggtcttg

SEQ ID NO: 453841 - DNA, 15 bp, Homo sapiens
gcccaggctggtctt

SEQ ID NO: 453842 - DNA, 15 bp, Homo sapiens
tgcccaggctggtct

SEQ ID NO: 453843 - DNA, 15 bp, Homo sapiens
ttgcccaggctggtc

SEQ ID NO: 453844 - DNA, 15 bp, Homo sapiens
gttgcccaggctggt

SEQ ID NO: 453845 - DNA, 15 bp, Homo sapiens
tgttgcccaggctgg

SEQ ID NO: 453846 - DNA, 15 bp, Homo sapiens
atgttgcccaggctg

SEQ ID NO: 453847 - DNA, 15 bp, Homo sapiens
tatgttgcccaggct

SEQ ID NO: 453848 - DNA, 15 bp, Homo sapiens
ctatgttgcccaggc

SEQ ID NO: 453849 - DNA, 15 bp, Homo sapiens
actatgttgcccagg

SEQ ID NO: 453850 - DNA, 15 bp, Homo sapiens
cactatgttgcccag

SEQ ID NO: 453851 - DNA, 15 bp, Homo sapiens
tcactatgttgccca

SEQ ID NO: 453852 - DNA, 15 bp, Homo sapiens
ctcactatgttgccc

SEQ ID NO: 453853 - DNA, 15 bp, Homo sapiens
tctcactatgttgcc

SEQ ID NO: 453854 - DNA, 15 bp, Homo sapiens
gtctcactatgttgc

SEQ ID NO: 453855 - DNA, 15 bp, Homo sapiens
ggtctcactatgttg

SEQ ID NO: 453856 - DNA, 15 bp, Homo sapiens
tggtctcactatgtt

SEQ ID NO: 453857 - DNA, 15 bp, Homo sapiens
gtggtctcactatgt

SEQ ID NO: 453858 - DNA, 15 bp, Homo sapiens
agtggtctcactatg

SEQ ID NO: 453859 - DNA, 15 bp, Homo sapiens
aagtggtctcactat

SEQ ID NO: 453860 - DNA, 15 bp, Homo sapiens
aaagtggtctcacta

SEQ ID NO: 453861 - DNA, 15 bp, Homo sapiens
caaagtggtctcact

SEQ ID NO: 453862 - DNA, 15 bp, Homo sapiens
acaaagtggtctcac

SEQ ID NO: 453863 - DNA, 15 bp, Homo sapiens
aacaaagtggtctca

SEQ ID NO: 453864 - DNA, 15 bp, Homo sapiens
aaacaaagtggtctc

SEQ ID NO: 453865 - DNA, 15 bp, Homo sapiens
gaaacaaagtggtct

SEQ ID NO: 453866 - DNA, 15 bp, Homo sapiens
agaaacaaagtggtc

SEQ ID NO: 453867 - DNA, 15 bp, Homo sapiens
aagaaacaaagtggt

SEQ ID NO: 453868 - DNA, 15 bp, Homo sapiens
aaagaaacaaagtgg

SEQ ID NO: 453869 - DNA, 15 bp, Homo sapiens
taaagaaacaaagtg

SEQ ID NO: 453870 - DNA, 15 bp, Homo sapiens
ttaaagaaacaaagt

SEQ ID NO: 453871 - DNA, 15 bp, Homo sapiens
tttaaagaaacaaag

SEQ ID NO: 453872 - DNA, 15 bp, Homo sapiens
ttttaaagaaacaaa

SEQ ID NO: 453873 - DNA, 15 bp, Homo sapiens
tttttaaagaaacaa

SEQ ID NO: 453874 - DNA, 15 bp, Homo sapiens
ttttttaaagaaaca

SEQ ID NO: 453875 - DNA, 15 bp, Homo sapiens
tttttttaaagaaac

SEQ ID NO: 453876 - DNA, 15 bp, Homo sapiens
ttttttttaaagaaa

SEQ ID NO: 453877 - DNA, 15 bp, Homo sapiens
tttttttttaaagaa

SEQ ID NO: 453878 - DNA, 15 bp, Homo sapiens
ttttttttttaaaga

SEQ ID NO: 453879 - DNA, 15 bp, Homo sapiens
tttttttttttaaag

SEQ ID NO: 453880 - DNA, 15 bp, Homo sapiens
ttttttttttttaaa

SEQ ID NO: 453881 - DNA, 15 bp, Homo sapiens
tttttttttttttaa

SEQ ID NO: 453882 - DNA, 15 bp, Homo sapiens
ccttttttttttttt

SEQ ID NO: 453883 - DNA, 15 bp, Homo sapiens
gcctttttttttttt

SEQ ID NO: 453884 - DNA, 15 bp, Homo sapiens
tgccttttttttttt

SEQ ID NO: 453885 - DNA, 15 bp, Homo sapiens
ttgcctttttttttt

SEQ ID NO: 453886 - DNA, 15 bp, Homo sapiens
tttgccttttttttt

SEQ ID NO: 453887 - DNA, 15 bp, Homo sapiens
ttttgcctttttttt

SEQ ID NO: 453888 - DNA, 15 bp, Homo sapiens
tttttgccttttttt

SEQ ID NO: 453889 - DNA, 15 bp, Homo sapiens
gtttttgcctttttt

SEQ ID NO: 453890 - DNA, 15 bp, Homo sapiens
tgtttttgccttttt

SEQ ID NO: 453891 - DNA, 15 bp, Homo sapiens
ctgtttttgcctttt

SEQ ID NO: 453892 - DNA, 15 bp, Homo sapiens
cctgtttttgccttt

SEQ ID NO: 453893 - DNA, 15 bp, Homo sapiens
gcctgtttttgcctt

SEQ ID NO: 453894 - DNA, 15 bp, Homo sapiens
agcctgtttttgcct

SEQ ID NO: 453895 - DNA, 15 bp, Homo sapiens
cagcctgtttttgcc

SEQ ID NO: 453896 - DNA, 15 bp, Homo sapiens
ccagcctgtttttgc

SEQ ID NO: 453897 - DNA, 15 bp, Homo sapiens
cccagcctgtttttg

SEQ ID NO: 453898 - DNA, 15 bp, Homo sapiens
gcccagcctgttttt

SEQ ID NO: 453899 - DNA, 15 bp, Homo sapiens
tgcccagcctgtttt

SEQ ID NO: 453900 - DNA, 15 bp, Homo sapiens
atgcccagcctgttt

SEQ ID NO: 453901 - DNA, 15 bp, Homo sapiens
catgcccagcctgtt

SEQ ID NO: 453902 - DNA, 15 bp, Homo sapiens
ccatgcccagcctgt

SEQ ID NO: 453903 - DNA, 15 bp, Homo sapiens
accatgcccagcctg

SEQ ID NO: 453904 - DNA, 15 bp, Homo sapiens
caccatgcccagcct

SEQ ID NO: 453905 - DNA, 15 bp, Homo sapiens
ccaccatgcccagcc

SEQ ID NO: 453906 - DNA, 15 bp, Homo sapiens
gccaccatgcccagc

SEQ ID NO: 453907 - DNA, 15 bp, Homo sapiens
agccaccatgcccag

SEQ ID NO: 453908 - DNA, 15 bp, Homo sapiens
cagccaccatgccca

SEQ ID NO: 453909 - DNA, 15 bp, Homo sapiens
tcagccaccatgccc

SEQ ID NO: 453910 - DNA, 15 bp, Homo sapiens
atcagccaccatgcc

SEQ ID NO: 453911 - DNA, 15 bp, Homo sapiens
catcagccaccatgc

SEQ ID NO: 453912 - DNA, 15 bp, Homo sapiens
gcatcagccaccatg

SEQ ID NO: 453913 - DNA, 15 bp, Homo sapiens
ggcatcagccaccat

SEQ ID NO: 453914 - DNA, 15 bp, Homo sapiens
aggcatcagccacca

SEQ ID NO: 453915 - DNA, 15 bp, Homo sapiens
caggcatcagccacc

SEQ ID NO: 453916 - DNA, 15 bp, Homo sapiens
acaggcatcagccac

SEQ ID NO: 453917 - DNA, 15 bp, Homo sapiens
tacaggcatcagcca

SEQ ID NO: 453918 - DNA, 15 bp, Homo sapiens
ttacaggcatcagcc

SEQ ID NO: 453919 - DNA, 15 bp, Homo sapiens
attacaggcatcagc

SEQ ID NO: 453920 - DNA, 15 bp, Homo sapiens
gattacaggcatcag

SEQ ID NO: 453921 - DNA, 15 bp, Homo sapiens
ggattacaggcatca

SEQ ID NO: 453922 - DNA, 15 bp, Homo sapiens
gggattacaggcatc

SEQ ID NO: 453923 - DNA, 15 bp, Homo sapiens
cgctgggattacagg

SEQ ID NO: 453924 - DNA, 15 bp, Homo sapiens
gcgctgggattacag

SEQ ID NO: 453925 - DNA, 15 bp, Homo sapiens
agcgctgggattaca

SEQ ID NO: 453926 - DNA, 15 bp, Homo sapiens
aagcgctgggattac

SEQ ID NO: 453927 - DNA, 15 bp, Homo sapiens
aaagcgctgggatta

SEQ ID NO: 453928 - DNA, 15 bp, Homo sapiens
caaagcgctgggatt

SEQ ID NO: 453929 - DNA, 15 bp, Homo sapiens
acaaagcgctgggat

SEQ ID NO: 453930 - DNA, 15 bp, Homo sapiens
cacaaagcgctggga

SEQ ID NO: 453931 - DNA, 15 bp, Homo sapiens
tcacaaagcgctggg

SEQ ID NO: 453932 - DNA, 15 bp, Homo sapiens
ctcacaaagcgctgg

SEQ ID NO: 453933 - DNA, 15 bp, Homo sapiens
cctcacaaagcgctg

SEQ ID NO: 453934 - DNA, 15 bp, Homo sapiens
gcctcacaaagcgct

SEQ ID NO: 453935 - DNA, 15 bp, Homo sapiens
tgcctcacaaagcgc

SEQ ID NO: 453936 - DNA, 15 bp, Homo sapiens
ctgcctcacaaagcg

SEQ ID NO: 453937 - DNA, 15 bp, Homo sapiens
tctgcctcacaaagc

SEQ ID NO: 453938 - DNA, 15 bp, Homo sapiens
ctctgcctcacaaag

SEQ ID NO: 453939 - DNA, 15 bp, Homo sapiens
cctctgcctcacaaa

SEQ ID NO: 453940 - DNA, 15 bp, Homo sapiens
acctctgcctcacaa

SEQ ID NO: 453941 - DNA, 15 bp, Homo sapiens
cacctctgcctcaca

SEQ ID NO: 453942 - DNA, 15 bp, Homo sapiens
tcacctctgcctcac

SEQ ID NO: 453943 - DNA, 15 bp, Homo sapiens
ctcacctctgcctca

SEQ ID NO: 453944 - DNA, 15 bp, Homo sapiens
gctcacctctgcctc

SEQ ID NO: 453945 - DNA, 15 bp, Homo sapiens
cgctcacctctgcct

SEQ ID NO: 453946 - DNA, 15 bp, Homo sapiens
ccgctcacctctgcc

SEQ ID NO: 453947 - DNA, 15 bp, Homo sapiens
tccgctcacctctgc

SEQ ID NO: 453948 - DNA, 15 bp, Homo sapiens
atccgctcacctctg

SEQ ID NO: 453949 - DNA, 15 bp, Homo sapiens
gatccgctcacctct

SEQ ID NO: 453950 - DNA, 15 bp, Homo sapiens
tgatccgctcacctc

SEQ ID NO: 453951 - DNA, 15 bp, Homo sapiens
gtgatccgctcacct

SEQ ID NO: 453952 - DNA, 15 bp, Homo sapiens
agtgatccgctcacc

SEQ ID NO: 453953 - DNA, 15 bp, Homo sapiens
aagtgatccgctcac

SEQ ID NO: 453954 - DNA, 15 bp, Homo sapiens
caagtgatccgctca

SEQ ID NO: 453955 - DNA, 15 bp, Homo sapiens
tcaagtgatccgctc

SEQ ID NO: 453956 - DNA, 15 bp, Homo sapiens
ctcaagtgatccgct

SEQ ID NO: 453957 - DNA, 15 bp, Homo sapiens
taccatgttggccag

SEQ ID NO: 453958 - DNA, 15 bp, Homo sapiens
ttaccatgttggcca

SEQ ID NO: 453959 - DNA, 15 bp, Homo sapiens
tttaccatgttggcc

SEQ ID NO: 453960 - DNA, 15 bp, Homo sapiens
ttttaccatgttggc

SEQ ID NO: 453961 - DNA, 15 bp, Homo sapiens
gttttaccatgttgg

SEQ ID NO: 453962 - DNA, 15 bp, Homo sapiens
ggttttaccatgttg

SEQ ID NO: 453963 - DNA, 15 bp, Homo sapiens
gggttttaccatgtt

SEQ ID NO: 453964 - DNA, 15 bp, Homo sapiens
ggggttttaccatgt

SEQ ID NO: 453965 - DNA, 15 bp, Homo sapiens
cggggttttaccatg

SEQ ID NO: 453966 - DNA, 15 bp, Homo sapiens
acggggttttaccat

SEQ ID NO: 453967 - DNA, 15 bp, Homo sapiens
gacggggttttacca

SEQ ID NO: 453968 - DNA, 15 bp, Homo sapiens
agacggggttttacc

SEQ ID NO: 453969 - DNA, 15 bp, Homo sapiens
acctggctaattttt

SEQ ID NO: 453970 - DNA, 15 bp, Homo sapiens
cacctggctaatttt

SEQ ID NO: 453971 - DNA, 15 bp, Homo sapiens
acacctggctaattt

SEQ ID NO: 453972 - DNA, 15 bp, Homo sapiens
cacacctggctaatt

SEQ ID NO: 453973 - DNA, 15 bp, Homo sapiens
ccacacctggctaat

SEQ ID NO: 453974 - DNA, 15 bp, Homo sapiens
accacacctggctaa

SEQ ID NO: 453975 - DNA, 15 bp, Homo sapiens
caccacacctggcta

SEQ ID NO: 453976 - DNA, 15 bp, Homo sapiens
ccaccacacctggct

SEQ ID NO: 453977 - DNA, 15 bp, Homo sapiens
gccaccacacctggc

SEQ ID NO: 453978 - DNA, 15 bp, Homo sapiens
tgccaccacacctgg

SEQ ID NO: 453979 - DNA, 15 bp, Homo sapiens
gtgccaccacacctg

SEQ ID NO: 453980 - DNA, 15 bp, Homo sapiens
tgtgccaccacacct

SEQ ID NO: 453981 - DNA, 15 bp, Homo sapiens
gtgtgccaccacacc

SEQ ID NO: 453982 - DNA, 15 bp, Homo sapiens
cgtgtgccaccacac

SEQ ID NO: 453983 - DNA, 15 bp, Homo sapiens
gcgtgtgccaccaca

SEQ ID NO: 453984 - DNA, 15 bp, Homo sapiens
ggcgtgtgccaccac

SEQ ID NO: 453985 - DNA, 15 bp, Homo sapiens
aggcgtgtgccacca

SEQ ID NO: 453986 - DNA, 15 bp, Homo sapiens
caggcgtgtgccacc

SEQ ID NO: 453987 - DNA, 15 bp, Homo sapiens
acaggcgtgtgccac

SEQ ID NO: 453988 - DNA, 15 bp, Homo sapiens
tacaggcgtgtgcca

SEQ ID NO: 453989 - DNA, 15 bp, Homo sapiens
ctacaggcgtgtgcc

SEQ ID NO: 453990 - DNA, 15 bp, Homo sapiens
actacaggcgtgtgc

SEQ ID NO: 453991 - DNA, 15 bp, Homo sapiens
aactacaggcgtgtg

SEQ ID NO: 453992 - DNA, 15 bp, Homo sapiens
gaactacaggcgtgt

SEQ ID NO: 453993 - DNA, 15 bp, Homo sapiens
ggaactacaggcgtg

SEQ ID NO: 453994 - DNA, 15 bp, Homo sapiens
tggaactacaggcgt

SEQ ID NO: 453995 - DNA, 15 bp, Homo sapiens
ctggaactacaggcg

SEQ ID NO: 453996 - DNA, 15 bp, Homo sapiens
gctggaactacaggc

SEQ ID NO: 453997 - DNA, 15 bp, Homo sapiens
agctggaactacagg

SEQ ID NO: 453998 - DNA, 15 bp, Homo sapiens
tagctggaactacag

SEQ ID NO: 453999 - DNA, 15 bp, Homo sapiens
gtagctggaactaca

SEQ ID NO: 454000 - DNA, 15 bp, Homo sapiens
agtagctggaactac

SEQ ID NO: 454001 - DNA, 15 bp, Homo sapiens
gagtagctggaacta

SEQ ID NO: 454002 - DNA, 15 bp, Homo sapiens
agagtagctggaact

SEQ ID NO: 454003 - DNA, 15 bp, Homo sapiens
cagagtagctggaac

SEQ ID NO: 454004 - DNA, 15 bp, Homo sapiens
ccagagtagctggaa

SEQ ID NO: 454005 - DNA, 15 bp, Homo sapiens
tccagagtagctgga

SEQ ID NO: 454006 - DNA, 15 bp, Homo sapiens
ctccagagtagctgg

SEQ ID NO: 454007 - DNA, 15 bp, Homo sapiens
cctccagagtagctg

SEQ ID NO: 454008 - DNA, 15 bp, Homo sapiens
gcctccagagtagct

SEQ ID NO: 454009 - DNA, 15 bp, Homo sapiens
agcctccagagtagc

SEQ ID NO: 454010 - DNA, 15 bp, Homo sapiens
cagcctccagagtag

SEQ ID NO: 454011 - DNA, 15 bp, Homo sapiens
tcagcctccagagta

SEQ ID NO: 454012 - DNA, 15 bp, Homo sapiens
ctcagcctccagagt

SEQ ID NO: 454013 - DNA, 15 bp, Homo sapiens
gctcagcctccagag

SEQ ID NO: 454014 - DNA, 15 bp, Homo sapiens
ggctcagcctccaga

SEQ ID NO: 454015 - DNA, 15 bp, Homo sapiens
tggctcagcctccag

SEQ ID NO: 454016 - DNA, 15 bp, Homo sapiens
ctggctcagcctcca

SEQ ID NO: 454017 - DNA, 15 bp, Homo sapiens
cctggctcagcctcc

SEQ ID NO: 454018 - DNA, 15 bp, Homo sapiens
tcctggctcagcctc

SEQ ID NO: 454019 - DNA, 15 bp, Homo sapiens
ctcctggctcagcct

SEQ ID NO: 454020 - DNA, 15 bp, Homo sapiens
tctcctggctcagcc

SEQ ID NO: 454021 - DNA, 15 bp, Homo sapiens
ttctcctggctcagc

SEQ ID NO: 454022 - DNA, 15 bp, Homo sapiens
attctcctggctcag

SEQ ID NO: 454023 - DNA, 15 bp, Homo sapiens
aattctcctggctca

SEQ ID NO: 454024 - DNA, 15 bp, Homo sapiens
caattctcctggctc

SEQ ID NO: 454025 - DNA, 15 bp, Homo sapiens
gcaattctcctggct

SEQ ID NO: 454026 - DNA, 15 bp, Homo sapiens
agcaattctcctggc

SEQ ID NO: 454027 - DNA, 15 bp, Homo sapiens
aagcaattctcctgg

SEQ ID NO: 454028 - DNA, 15 bp, Homo sapiens
acctcccaggttcaa

SEQ ID NO: 454029 - DNA, 15 bp, Homo sapiens
cacctcccaggttca

SEQ ID NO: 454030 - DNA, 15 bp, Homo sapiens
ccacctcccaggttc

SEQ ID NO: 454031 - DNA, 15 bp, Homo sapiens
tccacctcccaggtt

SEQ ID NO: 454032 - DNA, 15 bp, Homo sapiens
ctccacctcccaggt

SEQ ID NO: 454033 - DNA, 15 bp, Homo sapiens
cctccacctcccagg

SEQ ID NO: 454034 - DNA, 15 bp, Homo sapiens
gcctccacctcccag

SEQ ID NO: 454035 - DNA, 15 bp, Homo sapiens
agcctccacctccca

SEQ ID NO: 454036 - DNA, 15 bp, Homo sapiens
cagcctccacctccc

SEQ ID NO: 454037 - DNA, 15 bp, Homo sapiens
gcagcctccacctcc

SEQ ID NO: 454038 - DNA, 15 bp, Homo sapiens
tgcagcctccacctc

SEQ ID NO: 454039 - DNA, 15 bp, Homo sapiens
ctgcagcctccacct

SEQ ID NO: 454040 - DNA, 15 bp, Homo sapiens
actgcagcctccacc

SEQ ID NO: 454041 - DNA, 15 bp, Homo sapiens
cactgcagcctccac

SEQ ID NO: 454042 - DNA, 15 bp, Homo sapiens
tcactgcagcctcca

SEQ ID NO: 454043 - DNA, 15 bp, Homo sapiens
ctcactgcagcctcc

SEQ ID NO: 454044 - DNA, 15 bp, Homo sapiens
gctcactgcagcctc

SEQ ID NO: 454045 - DNA, 15 bp, Homo sapiens
tggctcactgcagcc

SEQ ID NO: 454046 - DNA, 15 bp, Homo sapiens
ttggctcactgcagc

SEQ ID NO: 454047 - DNA, 15 bp, Homo sapiens
cttggctcactgcag

SEQ ID NO: 454048 - DNA, 15 bp, Homo sapiens
ggatcttggctcact

SEQ ID NO: 454049 - DNA, 15 bp, Homo sapiens
aggatcttggctcac

SEQ ID NO: 454050 - DNA, 15 bp, Homo sapiens
caggatcttggctca

SEQ ID NO: 454051 - DNA, 15 bp, Homo sapiens
gcaggatcttggctc

SEQ ID NO: 454052 - DNA, 15 bp, Homo sapiens
ggcaggatcttggct

SEQ ID NO: 454053 - DNA, 15 bp, Homo sapiens
tggcaggatcttggc

SEQ ID NO: 454054 - DNA, 15 bp, Homo sapiens
gtggcaggatcttgg

SEQ ID NO: 454055 - DNA, 15 bp, Homo sapiens
agtggcaggatcttg

SEQ ID NO: 454056 - DNA, 15 bp, Homo sapiens
cagtggcaggatctt

SEQ ID NO: 454057 - DNA, 15 bp, Homo sapiens
gcagtggcaggatct

SEQ ID NO: 454058 - DNA, 15 bp, Homo sapiens
tgcagtggcaggatc

SEQ ID NO: 454059 - DNA, 15 bp, Homo sapiens
gtgcagtggcaggat

SEQ ID NO: 454060 - DNA, 15 bp, Homo sapiens
agtgcagtggcagga

SEQ ID NO: 454061 - DNA, 15 bp, Homo sapiens
gagtgcagtggcagg

SEQ ID NO: 454062 - DNA, 15 bp, Homo sapiens
ggagtgcagtggcag

SEQ ID NO: 454063 - DNA, 15 bp, Homo sapiens
tctggagtgcagtgg

SEQ ID NO: 454064 - DNA, 15 bp, Homo sapiens
gtctggagtgcagtg

SEQ ID NO: 454065 - DNA, 15 bp, Homo sapiens
agtctggagtgcagt

SEQ ID NO: 454066 - DNA, 15 bp, Homo sapiens
cagtctggagtgcag

SEQ ID NO: 454067 - DNA, 15 bp, Homo sapiens
ccccagtctggagtg

SEQ ID NO: 454068 - DNA, 15 bp, Homo sapiens
cccccagtctggagt

SEQ ID NO: 454069 - DNA, 15 bp, Homo sapiens
tcccccagtctggag

SEQ ID NO: 454070 - DNA, 15 bp, Homo sapiens
gtcccccagtctgga

SEQ ID NO: 454071 - DNA, 15 bp, Homo sapiens
tgtcccccagtctgg

SEQ ID NO: 454072 - DNA, 15 bp, Homo sapiens
ctgtcccccagtctg

SEQ ID NO: 454073 - DNA, 15 bp, Homo sapiens
tctgtcccccagtct

SEQ ID NO: 454074 - DNA, 15 bp, Homo sapiens
ctctgtcccccagtc

SEQ ID NO: 454075 - DNA, 15 bp, Homo sapiens
actctgtcccccagt

SEQ ID NO: 454076 - DNA, 15 bp, Homo sapiens
cactctgtcccccag

SEQ ID NO: 454077 - DNA, 15 bp, Homo sapiens
tcactctgtccccca

SEQ ID NO: 454078 - DNA, 15 bp, Homo sapiens
ctcactctgtccccc

SEQ ID NO: 454079 - DNA, 15 bp, Homo sapiens
tctcactctgtcccc

SEQ ID NO: 454080 - DNA, 15 bp, Homo sapiens
gtctcactctgtccc

SEQ ID NO: 454081 - DNA, 15 bp, Homo sapiens
tgtctcactctgtcc

SEQ ID NO: 454082 - DNA, 15 bp, Homo sapiens
atgtctcactctgtc

SEQ ID NO: 454083 - DNA, 15 bp, Homo sapiens
aatgtctcactctgt

SEQ ID NO: 454084 - DNA, 15 bp, Homo sapiens
gaatgtctcactctg

SEQ ID NO: 454085 - DNA, 15 bp, Homo sapiens
agaatgtctcactct

SEQ ID NO: 454086 - DNA, 15 bp, Homo sapiens
cagaatgtctcactc

SEQ ID NO: 454087 - DNA, 15 bp, Homo sapiens
tcagaatgtctcact

SEQ ID NO: 454088 - DNA, 15 bp, Homo sapiens
gtcagaatgtctcac

SEQ ID NO: 454089 - DNA, 15 bp, Homo sapiens
tgtcagaatgtctca

SEQ ID NO: 454090 - DNA, 15 bp, Homo sapiens
ctgtcagaatgtctc

SEQ ID NO: 454091 - DNA, 15 bp, Homo sapiens
actgtcagaatgtct

SEQ ID NO: 454092 - DNA, 15 bp, Homo sapiens
cactgtcagaatgtc

SEQ ID NO: 454093 - DNA, 15 bp, Homo sapiens
gcactgtcagaatgt

SEQ ID NO: 454094 - DNA, 15 bp, Homo sapiens
agcactgtcagaatg

SEQ ID NO: 454095 - DNA, 15 bp, Homo sapiens
tagcactgtcagaat

SEQ ID NO: 454096 - DNA, 15 bp, Homo sapiens
gtagcactgtcagaa

SEQ ID NO: 454097 - DNA, 15 bp, Homo sapiens
tgtagcactgtcaga

SEQ ID NO: 454098 - DNA, 15 bp, Homo sapiens
gtgtagcactgtcag

SEQ ID NO: 454099 - DNA, 15 bp, Homo sapiens
agtgtagcactgtca

SEQ ID NO: 454100 - DNA, 15 bp, Homo sapiens
cagtgtagcactgtc

SEQ ID NO: 454101 - DNA, 15 bp, Homo sapiens
tcagtgtagcactgt

SEQ ID NO: 454102 - DNA, 15 bp, Homo sapiens
ttcagtgtagcactg

SEQ ID NO: 454103 - DNA, 15 bp, Homo sapiens
attcagtgtagcact

SEQ ID NO: 454104 - DNA, 15 bp, Homo sapiens
cattcagtgtagcac

SEQ ID NO: 454105 - DNA, 15 bp, Homo sapiens
gcattcagtgtagca

SEQ ID NO: 454106 - DNA, 15 bp, Homo sapiens
agcattcagtgtagc

SEQ ID NO: 454107 - DNA, 15 bp, Homo sapiens
tagcattcagtgtag

SEQ ID NO: 454108 - DNA, 15 bp, Homo sapiens
gtagcattcagtgta

SEQ ID NO: 454109 - DNA, 15 bp, Homo sapiens
tgtagcattcagtgt

SEQ ID NO: 454110 - DNA, 15 bp, Homo sapiens
atgtagcattcagtg

SEQ ID NO: 454111 - DNA, 15 bp, Homo sapiens
catgtagcattcagt

SEQ ID NO: 454112 - DNA, 15 bp, Homo sapiens
acatgtagcattcag

SEQ ID NO: 454113 - DNA, 15 bp, Homo sapiens
gacatgtagcattca

SEQ ID NO: 454114 - DNA, 15 bp, Homo sapiens
agacatgtagcattc

SEQ ID NO: 454115 - DNA, 15 bp, Homo sapiens
aagacatgtagcatt

SEQ ID NO: 454116 - DNA, 15 bp, Homo sapiens
gaagacatgtagcat

SEQ ID NO: 454117 - DNA, 15 bp, Homo sapiens
tgaagacatgtagca

SEQ ID NO: 454118 - DNA, 15 bp, Homo sapiens
ctgaagacatgtagc

SEQ ID NO: 454119 - DNA, 15 bp, Homo sapiens
tctgaagacatgtag

SEQ ID NO: 454120 - DNA, 15 bp, Homo sapiens
ctctgaagacatgta

SEQ ID NO: 454121 - DNA, 15 bp, Homo sapiens
cctctgaagacatgt

SEQ ID NO: 454122 - DNA, 15 bp, Homo sapiens
tcctctgaagacatg

SEQ ID NO: 454123 - DNA, 15 bp, Homo sapiens
ttcctctgaagacat

SEQ ID NO: 454124 - DNA, 15 bp, Homo sapiens
cttcctctgaagaca

SEQ ID NO: 454125 - DNA, 15 bp, Homo sapiens
ccttcctctgaagac

SEQ ID NO: 454126 - DNA, 15 bp, Homo sapiens
tccttcctctgaaga

SEQ ID NO: 454127 - DNA, 15 bp, Homo sapiens
ctccttcctctgaag

SEQ ID NO: 454128 - DNA, 15 bp, Homo sapiens
tctccttcctctgaa

SEQ ID NO: 454129 - DNA, 15 bp, Homo sapiens
ctctccttcctctga

SEQ ID NO: 454130 - DNA, 15 bp, Homo sapiens
cctctccttcctctg

SEQ ID NO: 454131 - DNA, 15 bp, Homo sapiens
acctctccttcctct

SEQ ID NO: 454132 - DNA, 15 bp, Homo sapiens
aacctctccttcctc

SEQ ID NO: 454133 - DNA, 15 bp, Homo sapiens
taacctctccttcct

SEQ ID NO: 454134 - DNA, 15 bp, Homo sapiens
ataacctctccttcc

SEQ ID NO: 454135 - DNA, 15 bp, Homo sapiens
cataacctctccttc

SEQ ID NO: 454136 - DNA, 15 bp, Homo sapiens
cccaggcctcataac

SEQ ID NO: 454137 - DNA, 15 bp, Homo sapiens
tcccaggcctcataa

SEQ ID NO: 454138 - DNA, 15 bp, Homo sapiens
ttcccaggcctcata

SEQ ID NO: 454139 - DNA, 15 bp, Homo sapiens
attcccaggcctcat

SEQ ID NO: 454140 - DNA, 15 bp, Homo sapiens
tattcccaggcctca

SEQ ID NO: 454141 - DNA, 15 bp, Homo sapiens
ttattcccaggcctc

SEQ ID NO: 454142 - DNA, 15 bp, Homo sapiens
gttattcccaggcct

SEQ ID NO: 454143 - DNA, 15 bp, Homo sapiens
tgttattcccaggcc

SEQ ID NO: 454144 - DNA, 15 bp, Homo sapiens
atgttattcccaggc

SEQ ID NO: 454145 - DNA, 15 bp, Homo sapiens
tatgttattcccagg

SEQ ID NO: 454146 - DNA, 15 bp, Homo sapiens
atatgttattcccag

SEQ ID NO: 454147 - DNA, 15 bp, Homo sapiens
catatgttattccca

SEQ ID NO: 454148 - DNA, 15 bp, Homo sapiens
ccatatgttattccc

SEQ ID NO: 454149 - DNA, 15 bp, Homo sapiens
tccatatgttattcc

SEQ ID NO: 454150 - DNA, 15 bp, Homo sapiens
ttccatatgttattc

SEQ ID NO: 454151 - DNA, 15 bp, Homo sapiens
cttccatatgttatt

SEQ ID NO: 454152 - DNA, 15 bp, Homo sapiens
tcttccatatgttat

SEQ ID NO: 454153 - DNA, 15 bp, Homo sapiens
ttcttccatatgtta

SEQ ID NO: 454154 - DNA, 15 bp, Homo sapiens
attcttccatatgtt

SEQ ID NO: 454155 - DNA, 15 bp, Homo sapiens
cattcttccatatgt

SEQ ID NO: 454156 - DNA, 15 bp, Homo sapiens
tcattcttccatatg

SEQ ID NO: 454157 - DNA, 15 bp, Homo sapiens
ttcattcttccatat

SEQ ID NO: 454158 - DNA, 15 bp, Homo sapiens
attcattcttccata

SEQ ID NO: 454159 - DNA, 15 bp, Homo sapiens
aattcattcttccat

SEQ ID NO: 454160 - DNA, 15 bp, Homo sapiens
aaattcattcttcca

SEQ ID NO: 454161 - DNA, 15 bp, Homo sapiens
gaaattcattcttcc

SEQ ID NO: 454162 - DNA, 15 bp, Homo sapiens
agaaattcattcttc

SEQ ID NO: 454163 - DNA, 15 bp, Homo sapiens
cagaaattcattctt

SEQ ID NO: 454164 - DNA, 15 bp, Homo sapiens
acagaaattcattct

SEQ ID NO: 454165 - DNA, 15 bp, Homo sapiens
aacagaaattcattc

SEQ ID NO: 454166 - DNA, 15 bp, Homo sapiens
taacagaaattcatt

SEQ ID NO: 454167 - DNA, 15 bp, Homo sapiens
ataacagaaattcat

SEQ ID NO: 454168 - DNA, 15 bp, Homo sapiens
cataacagaaattca

SEQ ID NO: 454169 - DNA, 15 bp, Homo sapiens
ccataacagaaattc

SEQ ID NO: 454170 - DNA, 15 bp, Homo sapiens
accataacagaaatt

SEQ ID NO: 454171 - DNA, 15 bp, Homo sapiens
gaccataacagaaat

SEQ ID NO: 454172 - DNA, 15 bp, Homo sapiens
tgaccataacagaaa

SEQ ID NO: 454173 - DNA, 15 bp, Homo sapiens
ctgaccataacagaa

SEQ ID NO: 454174 - DNA, 15 bp, Homo sapiens
actgaccataacaga

SEQ ID NO: 454175 - DNA, 15 bp, Homo sapiens
aactgaccataacag

SEQ ID NO: 454176 - DNA, 15 bp, Homo sapiens
gaactgaccataaca

SEQ ID NO: 454177 - DNA, 15 bp, Homo sapiens
agaactgaccataac

SEQ ID NO: 454178 - DNA, 15 bp, Homo sapiens
gagaactgaccataa

SEQ ID NO: 454179 - DNA, 15 bp, Homo sapiens
tgagaactgaccata

SEQ ID NO: 454180 - DNA, 15 bp, Homo sapiens
atgagaactgaccat

SEQ ID NO: 454181 - DNA, 15 bp, Homo sapiens
aatgagaactgacca

SEQ ID NO: 454182 - DNA, 15 bp, Homo sapiens
aaatgagaactgacc

SEQ ID NO: 454183 - DNA, 15 bp, Homo sapiens
caaatgagaactgac

SEQ ID NO: 454184 - DNA, 15 bp, Homo sapiens
acaaatgagaactga

SEQ ID NO: 454185 - DNA, 15 bp, Homo sapiens
gacaaatgagaactg

SEQ ID NO: 454186 - DNA, 15 bp, Homo sapiens
tgacaaatgagaact

SEQ ID NO: 454187 - DNA, 15 bp, Homo sapiens
atgacaaatgagaac

SEQ ID NO: 454188 - DNA, 15 bp, Homo sapiens
catgacaaatgagaa

SEQ ID NO: 454189 - DNA, 15 bp, Homo sapiens
acatgacaaatgaga

SEQ ID NO: 454190 - DNA, 15 bp, Homo sapiens
aacatgacaaatgag

SEQ ID NO: 454191 - DNA, 15 bp, Homo sapiens
taacatgacaaatga

SEQ ID NO: 454192 - DNA, 15 bp, Homo sapiens
ctaacatgacaaatg

SEQ ID NO: 454193 - DNA, 15 bp, Homo sapiens
cctaacatgacaaat

SEQ ID NO: 454194 - DNA, 15 bp, Homo sapiens
tcctaacatgacaaa

SEQ ID NO: 454195 - DNA, 15 bp, Homo sapiens
atcctaacatgacaa

SEQ ID NO: 454196 - DNA, 15 bp, Homo sapiens
aatcctaacatgaca

SEQ ID NO: 454197 - DNA, 15 bp, Homo sapiens
taatcctaacatgac

SEQ ID NO: 454198 - DNA, 15 bp, Homo sapiens
gtaatcctaacatga

SEQ ID NO: 454199 - DNA, 15 bp, Homo sapiens
agtaatcctaacatg

SEQ ID NO: 454200 - DNA, 15 bp, Homo sapiens
cagtaatcctaacat

SEQ ID NO: 454201 - DNA, 15 bp, Homo sapiens
gcagtaatcctaaca

SEQ ID NO: 454202 - DNA, 15 bp, Homo sapiens
tgcagtaatcctaac

SEQ ID NO: 454203 - DNA, 15 bp, Homo sapiens
ttgcagtaatcctaa

SEQ ID NO: 454204 - DNA, 15 bp, Homo sapiens
gttgcagtaatccta

SEQ ID NO: 454205 - DNA, 15 bp, Homo sapiens
agttgcagtaatcct

SEQ ID NO: 454206 - DNA, 15 bp, Homo sapiens
gagttgcagtaatcc

SEQ ID NO: 454207 - DNA, 15 bp, Homo sapiens
agagttgcagtaatc

SEQ ID NO: 454208 - DNA, 15 bp, Homo sapiens
aagagttgcagtaat

SEQ ID NO: 454209 - DNA, 15 bp, Homo sapiens
taagagttgcagtaa

SEQ ID NO: 454210 - DNA, 15 bp, Homo sapiens
gtaagagttgcagta

SEQ ID NO: 454211 - DNA, 15 bp, Homo sapiens
ggtaagagttgcagt

SEQ ID NO: 454212 - DNA, 15 bp, Homo sapiens
gggtaagagttgcag

SEQ ID NO: 454213 - DNA, 15 bp, Homo sapiens
tgggtaagagttgca

SEQ ID NO: 454214 - DNA, 15 bp, Homo sapiens
ctgggtaagagttgc

SEQ ID NO: 454215 - DNA, 15 bp, Homo sapiens
gctgggtaagagttg

SEQ ID NO: 454216 - DNA, 15 bp, Homo sapiens
ggctgggtaagagtt

SEQ ID NO: 454217 - DNA, 15 bp, Homo sapiens
cggctgggtaagagt

SEQ ID NO: 454218 - DNA, 15 bp, Homo sapiens
ccggctgggtaagag

SEQ ID NO: 454219 - DNA, 15 bp, Homo sapiens
cccggctgggtaaga

SEQ ID NO: 454220 - DNA, 15 bp, Homo sapiens
acccggctgggtaag

SEQ ID NO: 454221 - DNA, 15 bp, Homo sapiens
cacccggctgggtaa

SEQ ID NO: 454222 - DNA, 15 bp, Homo sapiens
acacccggctgggta

SEQ ID NO: 454223 - DNA, 15 bp, Homo sapiens
cacacccggctgggt

SEQ ID NO: 454224 - DNA, 15 bp, Homo sapiens
ccacacccggctggg

SEQ ID NO: 454225 - DNA, 15 bp, Homo sapiens
accacacccggctgg

SEQ ID NO: 454226 - DNA, 15 bp, Homo sapiens
caccacacccggctg

SEQ ID NO: 454227 - DNA, 15 bp, Homo sapiens
ccaccacacccggct

SEQ ID NO: 454228 - DNA, 15 bp, Homo sapiens
gccaccacacccggc

SEQ ID NO: 454229 - DNA, 15 bp, Homo sapiens
agccaccacacccgg

SEQ ID NO: 454230 - DNA, 15 bp, Homo sapiens
gagccaccacacccg

SEQ ID NO: 454231 - DNA, 15 bp, Homo sapiens
tgagccaccacaccc

SEQ ID NO: 454232 - DNA, 15 bp, Homo sapiens
atgagccaccacacc

SEQ ID NO: 454233 - DNA, 15 bp, Homo sapiens
catgagccaccacac

SEQ ID NO: 454234 - DNA, 15 bp, Homo sapiens
gcatgagccaccaca

SEQ ID NO: 454235 - DNA, 15 bp, Homo sapiens
ggcatgagccaccac

SEQ ID NO: 454236 - DNA, 15 bp, Homo sapiens
aggcatgagccacca

SEQ ID NO: 454237 - DNA, 15 bp, Homo sapiens
caggcatgagccacc

SEQ ID NO: 454238 - DNA, 15 bp, Homo sapiens
acaggcatgagccac

SEQ ID NO: 454239 - DNA, 15 bp, Homo sapiens
tacaggcatgagcca

SEQ ID NO: 454240 - DNA, 15 bp, Homo sapiens
ttacaggcatgagcc

SEQ ID NO: 454241 - DNA, 15 bp, Homo sapiens
attacaggcatgagc

SEQ ID NO: 454242 - DNA, 15 bp, Homo sapiens
aattacaggcatgag

SEQ ID NO: 454243 - DNA, 15 bp, Homo sapiens
gaattacaggcatga

SEQ ID NO: 454244 - DNA, 15 bp, Homo sapiens
ggaattacaggcatg

SEQ ID NO: 454245 - DNA, 15 bp, Homo sapiens
tggaattacaggcat

SEQ ID NO: 454246 - DNA, 15 bp, Homo sapiens
ctggaattacaggca

SEQ ID NO: 454247 - DNA, 15 bp, Homo sapiens
gctggaattacaggc

SEQ ID NO: 454248 - DNA, 15 bp, Homo sapiens
tgctggaattacagg

SEQ ID NO: 454249 - DNA, 15 bp, Homo sapiens
gtgctggaattacag

SEQ ID NO: 454250 - DNA, 15 bp, Homo sapiens
agtgctggaattaca

SEQ ID NO: 454251 - DNA, 15 bp, Homo sapiens
aagtgctggaattac

SEQ ID NO: 454252 - DNA, 15 bp, Homo sapiens
aaagtgctggaatta

SEQ ID NO: 454253 - DNA, 15 bp, Homo sapiens
caaagtgctggaatt

SEQ ID NO: 454254 - DNA, 15 bp, Homo sapiens
ccaaagtgctggaat

SEQ ID NO: 454255 - DNA, 15 bp, Homo sapiens
cccaaagtgctggaa

SEQ ID NO: 454256 - DNA, 15 bp, Homo sapiens
tcccaaagtgctgga

SEQ ID NO: 454257 - DNA, 15 bp, Homo sapiens
acagcctcccaaagt

SEQ ID NO: 454258 - DNA, 15 bp, Homo sapiens
cacagcctcccaaag

SEQ ID NO: 454259 - DNA, 15 bp, Homo sapiens
ccacagcctcccaaa

SEQ ID NO: 454260 - DNA, 15 bp, Homo sapiens
cccacagcctcccaa

SEQ ID NO: 454261 - DNA, 15 bp, Homo sapiens
gcccacagcctccca

SEQ ID NO: 454262 - DNA, 15 bp, Homo sapiens
cgcccacagcctccc

SEQ ID NO: 454263 - DNA, 15 bp, Homo sapiens
ccgcccacagcctcc

SEQ ID NO: 454264 - DNA, 15 bp, Homo sapiens
tccgcccacagcctc

SEQ ID NO: 454265 - DNA, 15 bp, Homo sapiens
atccgcccacagcct

SEQ ID NO: 454266 - DNA, 15 bp, Homo sapiens
gatccgcccacagcc

SEQ ID NO: 454267 - DNA, 15 bp, Homo sapiens
tgatccgcccacagc

SEQ ID NO: 454268 - DNA, 15 bp, Homo sapiens
gtgatccgcccacag

SEQ ID NO: 454269 - DNA, 15 bp, Homo sapiens
cgtgatccgcccaca

SEQ ID NO: 454270 - DNA, 15 bp, Homo sapiens
tcgtgatccgcccac

SEQ ID NO: 454271 - DNA, 15 bp, Homo sapiens
ctcgtgatccgccca

SEQ ID NO: 454272 - DNA, 15 bp, Homo sapiens
cctcgtgatccgccc

SEQ ID NO: 454273 - DNA, 15 bp, Homo sapiens
acctcgtgatccgcc

SEQ ID NO: 454274 - DNA, 15 bp, Homo sapiens
gacctcgtgatccgc

SEQ ID NO: 454275 - DNA, 15 bp, Homo sapiens
tgacctcgtgatccg

SEQ ID NO: 454276 - DNA, 15 bp, Homo sapiens
agtttcaccgtgtta

SEQ ID NO: 454277 - DNA, 15 bp, Homo sapiens
gagtttcaccgtgtt

SEQ ID NO: 454278 - DNA, 15 bp, Homo sapiens
ggagtttcaccgtgt

SEQ ID NO: 454279 - DNA, 15 bp, Homo sapiens
cggagtttcaccgtg

SEQ ID NO: 454280 - DNA, 15 bp, Homo sapiens
gcggagtttcaccgt

SEQ ID NO: 454281 - DNA, 15 bp, Homo sapiens
ggcggagtttcaccg

SEQ ID NO: 454282 - DNA, 15 bp, Homo sapiens
aggcggagtttcacc

SEQ ID NO: 454283 - DNA, 15 bp, Homo sapiens
gaggcggagtttcac

SEQ ID NO: 454284 - DNA, 15 bp, Homo sapiens
agaggcggagtttca

SEQ ID NO: 454285 - DNA, 15 bp, Homo sapiens
tagaggcggagtttc

SEQ ID NO: 454286 - DNA, 15 bp, Homo sapiens
gtagaggcggagttt

SEQ ID NO: 454287 - DNA, 15 bp, Homo sapiens
agtagaggcggagtt

SEQ ID NO: 454288 - DNA, 15 bp, Homo sapiens
tagtagaggcggagt

SEQ ID NO: 454289 - DNA, 15 bp, Homo sapiens
ttagtagaggcggag

SEQ ID NO: 454290 - DNA, 15 bp, Homo sapiens
tttagtagaggcgga

SEQ ID NO: 454291 - DNA, 15 bp, Homo sapiens
ttttagtagaggcgg

SEQ ID NO: 454292 - DNA, 15 bp, Homo sapiens
tttttagtagaggcg

SEQ ID NO: 454293 - DNA, 15 bp, Homo sapiens
atttttagtagaggc

SEQ ID NO: 454294 - DNA, 15 bp, Homo sapiens
tatttttagtagagg

SEQ ID NO: 454295 - DNA, 15 bp, Homo sapiens
attttttgtattttt

SEQ ID NO: 454296 - DNA, 15 bp, Homo sapiens
aattttttgtatttt

SEQ ID NO: 454297 - DNA, 15 bp, Homo sapiens
taattttttgtattt

SEQ ID NO: 454298 - DNA, 15 bp, Homo sapiens
ctaattttttgtatt

SEQ ID NO: 454299 - DNA, 15 bp, Homo sapiens
gctaattttttgtat

SEQ ID NO: 454300 - DNA, 15 bp, Homo sapiens
ggctaattttttgta

SEQ ID NO: 454301 - DNA, 15 bp, Homo sapiens
gggctaattttttgt

SEQ ID NO: 454302 - DNA, 15 bp, Homo sapiens
tgggctaattttttg

SEQ ID NO: 454303 - DNA, 15 bp, Homo sapiens
ctgggctaatttttt

SEQ ID NO: 454304 - DNA, 15 bp, Homo sapiens
gctgggctaattttt

SEQ ID NO: 454305 - DNA, 15 bp, Homo sapiens
cgctgggctaatttt

SEQ ID NO: 454306 - DNA, 15 bp, Homo sapiens
acgctgggctaattt

SEQ ID NO: 454307 - DNA, 15 bp, Homo sapiens
cacgctgggctaatt

SEQ ID NO: 454308 - DNA, 15 bp, Homo sapiens
ccacgctgggctaat

SEQ ID NO: 454309 - DNA, 15 bp, Homo sapiens
accacgctgggctaa

SEQ ID NO: 454310 - DNA, 15 bp, Homo sapiens
caccacgctgggcta

SEQ ID NO: 454311 - DNA, 15 bp, Homo sapiens
ccaccacgctgggct

SEQ ID NO: 454312 - DNA, 15 bp, Homo sapiens
gccaccacgctgggc

SEQ ID NO: 454313 - DNA, 15 bp, Homo sapiens
tgccaccacgctggg

SEQ ID NO: 454314 - DNA, 15 bp, Homo sapiens
ctgccaccacgctgg

SEQ ID NO: 454315 - DNA, 15 bp, Homo sapiens
tctgccaccacgctg

SEQ ID NO: 454316 - DNA, 15 bp, Homo sapiens
gtctgccaccacgct

SEQ ID NO: 454317 - DNA, 15 bp, Homo sapiens
cgtctgccaccacgc

SEQ ID NO: 454318 - DNA, 15 bp, Homo sapiens
gcgtctgccaccacg

SEQ ID NO: 454319 - DNA, 15 bp, Homo sapiens
ggcgtctgccaccac

SEQ ID NO: 454320 - DNA, 15 bp, Homo sapiens
aggcgtctgccacca

SEQ ID NO: 454321 - DNA, 15 bp, Homo sapiens
caggcgtctgccacc

SEQ ID NO: 454322 - DNA, 15 bp, Homo sapiens
acaggcgtctgccac

SEQ ID NO: 454323 - DNA, 15 bp, Homo sapiens
tacaggcgtctgcca

SEQ ID NO: 454324 - DNA, 15 bp, Homo sapiens
ctacaggcgtctgcc

SEQ ID NO: 454325 - DNA, 15 bp, Homo sapiens
actacaggcgtctgc

SEQ ID NO: 454326 - DNA, 15 bp, Homo sapiens
gactacaggcgtctg

SEQ ID NO: 454327 - DNA, 15 bp, Homo sapiens
ggactacaggcgtct

SEQ ID NO: 454328 - DNA, 15 bp, Homo sapiens
gggactacaggcgtc

SEQ ID NO: 454329 - DNA, 15 bp, Homo sapiens
tgggactacaggcgt

SEQ ID NO: 454330 - DNA, 15 bp, Homo sapiens
ctgggactacaggcg

SEQ ID NO: 454331 - DNA, 15 bp, Homo sapiens
tgagtagctgggact

SEQ ID NO: 454332 - DNA, 15 bp, Homo sapiens
ctgagtagctgggac

SEQ ID NO: 454333 - DNA, 15 bp, Homo sapiens
cctgagtagctggga

SEQ ID NO: 454334 - DNA, 15 bp, Homo sapiens
tcctgagtagctggg

SEQ ID NO: 454335 - DNA, 15 bp, Homo sapiens
ctcctgagtagctgg

SEQ ID NO: 454336 - DNA, 15 bp, Homo sapiens
cctcctgagtagctg

SEQ ID NO: 454337 - DNA, 15 bp, Homo sapiens
gcctcctgagtagct

SEQ ID NO: 454338 - DNA, 15 bp, Homo sapiens
agcctcctgagtagc

SEQ ID NO: 454339 - DNA, 15 bp, Homo sapiens
cagcctcctgagtag

SEQ ID NO: 454340 - DNA, 15 bp, Homo sapiens
tcagcctcctgagta

SEQ ID NO: 454341 - DNA, 15 bp, Homo sapiens
ctcagcctcctgagt

SEQ ID NO: 454342 - DNA, 15 bp, Homo sapiens
cctcagcctcctgag

SEQ ID NO: 454343 - DNA, 15 bp, Homo sapiens
gcctcagcctcctga

SEQ ID NO: 454344 - DNA, 15 bp, Homo sapiens
tgcctcagcctcctg

SEQ ID NO: 454345 - DNA, 15 bp, Homo sapiens
ctgcctcagcctcct

SEQ ID NO: 454346 - DNA, 15 bp, Homo sapiens
cattctcctgcctca

SEQ ID NO: 454347 - DNA, 15 bp, Homo sapiens
ccattctcctgcctc

SEQ ID NO: 454348 - DNA, 15 bp, Homo sapiens
gccattctcctgcct

SEQ ID NO: 454349 - DNA, 15 bp, Homo sapiens
tgccattctcctgcc

SEQ ID NO: 454350 - DNA, 15 bp, Homo sapiens
atgccattctcctgc

SEQ ID NO: 454351 - DNA, 15 bp, Homo sapiens
catgccattctcctg

SEQ ID NO: 454352 - DNA, 15 bp, Homo sapiens
tcatgccattctcct

SEQ ID NO: 454353 - DNA, 15 bp, Homo sapiens
ctcatgccattctcc

SEQ ID NO: 454354 - DNA, 15 bp, Homo sapiens
actcatgccattctc

SEQ ID NO: 454355 - DNA, 15 bp, Homo sapiens
gactcatgccattct

SEQ ID NO: 454356 - DNA, 15 bp, Homo sapiens
ggactcatgccattc

SEQ ID NO: 454357 - DNA, 15 bp, Homo sapiens
aggactcatgccatt

SEQ ID NO: 454358 - DNA, 15 bp, Homo sapiens
caggactcatgccat

SEQ ID NO: 454359 - DNA, 15 bp, Homo sapiens
ccaggactcatgcca

SEQ ID NO: 454360 - DNA, 15 bp, Homo sapiens
tccaggactcatgcc

SEQ ID NO: 454361 - DNA, 15 bp, Homo sapiens
ctccaggactcatgc

SEQ ID NO: 454362 - DNA, 15 bp, Homo sapiens
cctccaggactcatg

SEQ ID NO: 454363 - DNA, 15 bp, Homo sapiens
gcctccaggactcat

SEQ ID NO: 454364 - DNA, 15 bp, Homo sapiens
cgcctccaggactca

SEQ ID NO: 454365 - DNA, 15 bp, Homo sapiens
ccgcctccaggactc

SEQ ID NO: 454366 - DNA, 15 bp, Homo sapiens
tccgcctccaggact

SEQ ID NO: 454367 - DNA, 15 bp, Homo sapiens
ctccgcctccaggac

SEQ ID NO: 454368 - DNA, 15 bp, Homo sapiens
gctccgcctccagga

SEQ ID NO: 454369 - DNA, 15 bp, Homo sapiens
agctccgcctccagg

SEQ ID NO: 454370 - DNA, 15 bp, Homo sapiens
aagctccgcctccag

SEQ ID NO: 454371 - DNA, 15 bp, Homo sapiens
caagctccgcctcca

SEQ ID NO: 454372 - DNA, 15 bp, Homo sapiens
agctcactgcaagct

SEQ ID NO: 454373 - DNA, 15 bp, Homo sapiens
cagctcactgcaagc

SEQ ID NO: 454374 - DNA, 15 bp, Homo sapiens
tcagctcactgcaag

SEQ ID NO: 454375 - DNA, 15 bp, Homo sapiens
cgatctcagctcact

SEQ ID NO: 454376 - DNA, 15 bp, Homo sapiens
acgatctcagctcac

SEQ ID NO: 454377 - DNA, 15 bp, Homo sapiens
cacgatctcagctca

SEQ ID NO: 454378 - DNA, 15 bp, Homo sapiens
gcacgatctcagctc

SEQ ID NO: 454379 - DNA, 15 bp, Homo sapiens
ggcacgatctcagct

SEQ ID NO: 454380 - DNA, 15 bp, Homo sapiens
tggcacgatctcagc

SEQ ID NO: 454381 - DNA, 15 bp, Homo sapiens
gtggcacgatctcag

SEQ ID NO: 454382 - DNA, 15 bp, Homo sapiens
agtggcacgatctca

SEQ ID NO: 454383 - DNA, 15 bp, Homo sapiens
cagtggcacgatctc

SEQ ID NO: 454384 - DNA, 15 bp, Homo sapiens
gcagtggcacgatct

SEQ ID NO: 454385 - DNA, 15 bp, Homo sapiens
tgcagtggcacgatc

SEQ ID NO: 454386 - DNA, 15 bp, Homo sapiens
gtgcagtggcacgat

SEQ ID NO: 454387 - DNA, 15 bp, Homo sapiens
agtgcagtggcacga

SEQ ID NO: 454388 - DNA, 15 bp, Homo sapiens
gagtgcagtggcacg

SEQ ID NO: 454389 - DNA, 15 bp, Homo sapiens
ggagtgcagtggcac

SEQ ID NO: 454390 - DNA, 15 bp, Homo sapiens
gttgcccaggctgga

SEQ ID NO: 454391 - DNA, 15 bp, Homo sapiens
ctgttgcccaggctg

SEQ ID NO: 454392 - DNA, 15 bp, Homo sapiens
tctgttgcccaggct

SEQ ID NO: 454393 - DNA, 15 bp, Homo sapiens
ctctgttgcccaggc

SEQ ID NO: 454394 - DNA, 15 bp, Homo sapiens
actctgttgcccagg

SEQ ID NO: 454395 - DNA, 15 bp, Homo sapiens
cactctgttgcccag

SEQ ID NO: 454396 - DNA, 15 bp, Homo sapiens
ccactctgttgccca

SEQ ID NO: 454397 - DNA, 15 bp, Homo sapiens
cccactctgttgccc

SEQ ID NO: 454398 - DNA, 15 bp, Homo sapiens
tcccactctgttgcc

SEQ ID NO: 454399 - DNA, 15 bp, Homo sapiens
gtcccactctgttgc

SEQ ID NO: 454400 - DNA, 15 bp, Homo sapiens
agtcccactctgttg

SEQ ID NO: 454401 - DNA, 15 bp, Homo sapiens
gagtcccactctgtt

SEQ ID NO: 454402 - DNA, 15 bp, Homo sapiens
ggagtcccactctgt

SEQ ID NO: 454403 - DNA, 15 bp, Homo sapiens
tggagtcccactctg

SEQ ID NO: 454404 - DNA, 15 bp, Homo sapiens
atggagtcccactct

SEQ ID NO: 454405 - DNA, 15 bp, Homo sapiens
gatggagtcccactc

SEQ ID NO: 454406 - DNA, 15 bp, Homo sapiens
agatggagtcccact

SEQ ID NO: 454407 - DNA, 15 bp, Homo sapiens
gagatggagtcccac

SEQ ID NO: 454408 - DNA, 15 bp, Homo sapiens
tgagatggagtccca

SEQ ID NO: 454409 - DNA, 15 bp, Homo sapiens
ttgagatggagtccc

SEQ ID NO: 454410 - DNA, 15 bp, Homo sapiens
tttgagatggagtcc

SEQ ID NO: 454411 - DNA, 15 bp, Homo sapiens
cttttttttttgaga

SEQ ID NO: 454412 - DNA, 15 bp, Homo sapiens
tcttttttttttgag

SEQ ID NO: 454413 - DNA, 15 bp, Homo sapiens
ttcttttttttttga

SEQ ID NO: 454414 - DNA, 15 bp, Homo sapiens
tttcttttttttttg

SEQ ID NO: 454415 - DNA, 15 bp, Homo sapiens
tttttcttttttttt

SEQ ID NO: 454416 - DNA, 15 bp, Homo sapiens
ttttttctttttttt

SEQ ID NO: 454417 - DNA, 15 bp, Homo sapiens
tttttttcttttttt

SEQ ID NO: 454418 - DNA, 15 bp, Homo sapiens
ttttttttctttttt

SEQ ID NO: 454419 - DNA, 15 bp, Homo sapiens
ccttttttttttctt

SEQ ID NO: 454420 - DNA, 15 bp, Homo sapiens
tccttttttttttct

SEQ ID NO: 454421 - DNA, 15 bp, Homo sapiens
atccttttttttttc

SEQ ID NO: 454422 - DNA, 15 bp, Homo sapiens
aatcctttttttttt

SEQ ID NO: 454423 - DNA, 15 bp, Homo sapiens
taatccttttttttt

SEQ ID NO: 454424 - DNA, 15 bp, Homo sapiens
gtaatcctttttttt

SEQ ID NO: 454425 - DNA, 15 bp, Homo sapiens
ggtaatccttttttt

SEQ ID NO: 454426 - DNA, 15 bp, Homo sapiens
cggtaatcctttttt

SEQ ID NO: 454427 - DNA, 15 bp, Homo sapiens
gcggtaatccttttt

SEQ ID NO: 454428 - DNA, 15 bp, Homo sapiens
tgcggtaatcctttt

SEQ ID NO: 454429 - DNA, 15 bp, Homo sapiens
ttgcggtaatccttt

SEQ ID NO: 454430 - DNA, 15 bp, Homo sapiens
gttgcggtaatcctt

SEQ ID NO: 454431 - DNA, 15 bp, Homo sapiens
agttgcggtaatcct

SEQ ID NO: 454432 - DNA, 15 bp, Homo sapiens
gagttgcggtaatcc

SEQ ID NO: 454433 - DNA, 15 bp, Homo sapiens
agagttgcggtaatc

SEQ ID NO: 454434 - DNA, 15 bp, Homo sapiens
aagagttgcggtaat

SEQ ID NO: 454435 - DNA, 15 bp, Homo sapiens
aaagagttgcggtaa

SEQ ID NO: 454436 - DNA, 15 bp, Homo sapiens
taaagagttgcggta

SEQ ID NO: 454437 - DNA, 15 bp, Homo sapiens
ttaaagagttgcggt

SEQ ID NO: 454438 - DNA, 15 bp, Homo sapiens
attaaagagttgcgg

SEQ ID NO: 454439 - DNA, 15 bp, Homo sapiens
aattaaagagttgcg

SEQ ID NO: 454440 - DNA, 15 bp, Homo sapiens
gaattaaagagttgc

SEQ ID NO: 454441 - DNA, 15 bp, Homo sapiens
tgaattaaagagttg

SEQ ID NO: 454442 - DNA, 15 bp, Homo sapiens
ctgaattaaagagtt

SEQ ID NO: 454443 - DNA, 15 bp, Homo sapiens
tctgaattaaagagt

SEQ ID NO: 454444 - DNA, 15 bp, Homo sapiens
atctgaattaaagag

SEQ ID NO: 454445 - DNA, 15 bp, Homo sapiens
gatctgaattaaaga

SEQ ID NO: 454446 - DNA, 15 bp, Homo sapiens
tgatctgaattaaag

SEQ ID NO: 454447 - DNA, 15 bp, Homo sapiens
ctgatctgaattaaa

SEQ ID NO: 454448 - DNA, 15 bp, Homo sapiens
gctgatctgaattaa

SEQ ID NO: 454449 - DNA, 15 bp, Homo sapiens
tgctgatctgaatta

SEQ ID NO: 454450 - DNA, 15 bp, Homo sapiens
ttgctgatctgaatt

SEQ ID NO: 454451 - DNA, 15 bp, Homo sapiens
tttgctgatctgaat

SEQ ID NO: 454452 - DNA, 15 bp, Homo sapiens
gtttgctgatctgaa

SEQ ID NO: 454453 - DNA, 15 bp, Homo sapiens
tgtttgctgatctga

SEQ ID NO: 454454 - DNA, 15 bp, Homo sapiens
atgtttgctgatctg

SEQ ID NO: 454455 - DNA, 15 bp, Homo sapiens
catgtttgctgatct

SEQ ID NO: 454456 - DNA, 15 bp, Homo sapiens
acatgtttgctgatc

SEQ ID NO: 454457 - DNA, 15 bp, Homo sapiens
aacatgtttgctgat

SEQ ID NO: 454458 - DNA, 15 bp, Homo sapiens
caacatgtttgctga

SEQ ID NO: 454459 - DNA, 15 bp, Homo sapiens
tcaacatgtttgctg

SEQ ID NO: 454460 - DNA, 15 bp, Homo sapiens
ctcaacatgtttgct

SEQ ID NO: 454461 - DNA, 15 bp, Homo sapiens
tctcaacatgtttgc

SEQ ID NO: 454462 - DNA, 15 bp, Homo sapiens
ctctcaacatgtttg

SEQ ID NO: 454463 - DNA, 15 bp, Homo sapiens
gctctcaacatgttt

SEQ ID NO: 454464 - DNA, 15 bp, Homo sapiens
ggctctcaacatgtt

SEQ ID NO: 454465 - DNA, 15 bp, Homo sapiens
tggctctcaacatgt

SEQ ID NO: 454466 - DNA, 15 bp, Homo sapiens
ctggctctcaacatg

SEQ ID NO: 454467 - DNA, 15 bp, Homo sapiens
cctggctctcaacat

SEQ ID NO: 454468 - DNA, 15 bp, Homo sapiens
acctggctctcaaca

SEQ ID NO: 454469 - DNA, 15 bp, Homo sapiens
tacctggctctcaac

SEQ ID NO: 454470 - DNA, 15 bp, Homo sapiens
atacctggctctcaa

SEQ ID NO: 454471 - DNA, 15 bp, Homo sapiens
aatacctggctctca

SEQ ID NO: 454472 - DNA, 15 bp, Homo sapiens
caatacctggctctc

SEQ ID NO: 454473 - DNA, 15 bp, Homo sapiens
gcaatacctggctct

SEQ ID NO: 454474 - DNA, 15 bp, Homo sapiens
cgcaatacctggctc

SEQ ID NO: 454475 - DNA, 15 bp, Homo sapiens
acgcaatacctggct

SEQ ID NO: 454476 - DNA, 15 bp, Homo sapiens
gacgcaatacctggc

SEQ ID NO: 454477 - DNA, 15 bp, Homo sapiens
tgacgcaatacctgg

SEQ ID NO: 454478 - DNA, 15 bp, Homo sapiens
ctgacgcaatacctg

SEQ ID NO: 454479 - DNA, 15 bp, Homo sapiens
cctgacgcaatacct

SEQ ID NO: 454480 - DNA, 15 bp, Homo sapiens
gcctgacgcaatacc

SEQ ID NO: 454481 - DNA, 15 bp, Homo sapiens
tgcctgacgcaatac

SEQ ID NO: 454482 - DNA, 15 bp, Homo sapiens
ctgcctgacgcaata

SEQ ID NO: 454483 - DNA, 15 bp, Homo sapiens
cctgcctgacgcaat

SEQ ID NO: 454484 - DNA, 15 bp, Homo sapiens
tcctgcctgacgcaa

SEQ ID NO: 454485 - DNA, 15 bp, Homo sapiens
atcctgcctgacgca

SEQ ID NO: 454486 - DNA, 15 bp, Homo sapiens
gatcctgcctgacgc

SEQ ID NO: 454487 - DNA, 15 bp, Homo sapiens
ggatcctgcctgacg

SEQ ID NO: 454488 - DNA, 15 bp, Homo sapiens
tggatcctgcctgac

SEQ ID NO: 454489 - DNA, 15 bp, Homo sapiens
ttggatcctgcctga

SEQ ID NO: 454490 - DNA, 15 bp, Homo sapiens
cttggatcctgcctg

SEQ ID NO: 454491 - DNA, 15 bp, Homo sapiens
ccttggatcctgcct

SEQ ID NO: 454492 - DNA, 15 bp, Homo sapiens
tccttggatcctgcc

SEQ ID NO: 454493 - DNA, 15 bp, Homo sapiens
atccttggatcctgc

SEQ ID NO: 454494 - DNA, 15 bp, Homo sapiens
tatccttggatcctg

SEQ ID NO: 454495 - DNA, 15 bp, Homo sapiens
ttatccttggatcct

SEQ ID NO: 454496 - DNA, 15 bp, Homo sapiens
attatccttggatcc

SEQ ID NO: 454497 - DNA, 15 bp, Homo sapiens
cattatccttggatc

SEQ ID NO: 454498 - DNA, 15 bp, Homo sapiens
tcattatccttggat

SEQ ID NO: 454499 - DNA, 15 bp, Homo sapiens
ttcattatccttgga

SEQ ID NO: 454500 - DNA, 15 bp, Homo sapiens
tttcattatccttgg

SEQ ID NO: 454501 - DNA, 15 bp, Homo sapiens
atttcattatccttg

SEQ ID NO: 454502 - DNA, 15 bp, Homo sapiens
tatttcattatcctt

SEQ ID NO: 454503 - DNA, 15 bp, Homo sapiens
atatttcattatcct

SEQ ID NO: 454504 - DNA, 15 bp, Homo sapiens
aatatttcattatcc

SEQ ID NO: 454505 - DNA, 15 bp, Homo sapiens
caatatttcattatc

SEQ ID NO: 454506 - DNA, 15 bp, Homo sapiens
acaatatttcattat

SEQ ID NO: 454507 - DNA, 15 bp, Homo sapiens
gacaatatttcatta

SEQ ID NO: 454508 - DNA, 15 bp, Homo sapiens
ggacaatatttcatt

SEQ ID NO: 454509 - DNA, 15 bp, Homo sapiens
cggacaatatttcat

SEQ ID NO: 454510 - DNA, 15 bp, Homo sapiens
acggacaatatttca

SEQ ID NO: 454511 - DNA, 15 bp, Homo sapiens
aacggacaatatttc

SEQ ID NO: 454512 - DNA, 15 bp, Homo sapiens
aaacggacaatattt

SEQ ID NO: 454513 - DNA, 15 bp, Homo sapiens
aaaacggacaatatt

SEQ ID NO: 454514 - DNA, 15 bp, Homo sapiens
gaaaacggacaatat

SEQ ID NO: 454515 - DNA, 15 bp, Homo sapiens
tgaaaacggacaata

SEQ ID NO: 454516 - DNA, 15 bp, Homo sapiens
atgaaaacggacaat

SEQ ID NO: 454517 - DNA, 15 bp, Homo sapiens
catgaaaacggacaa

SEQ ID NO: 454518 - DNA, 15 bp, Homo sapiens
tcatgaaaacggaca

SEQ ID NO: 454519 - DNA, 15 bp, Homo sapiens
ttcatgaaaacggac

SEQ ID NO: 454520 - DNA, 15 bp, Homo sapiens
tttcatgaaaacgga

SEQ ID NO: 454521 - DNA, 15 bp, Homo sapiens
gtttcatgaaaacgg

SEQ ID NO: 454522 - DNA, 15 bp, Homo sapiens
agtttcatgaaaacg

SEQ ID NO: 454523 - DNA, 15 bp, Homo sapiens
cagtttcatgaaaac

SEQ ID NO: 454524 - DNA, 15 bp, Homo sapiens
ccagtttcatgaaaa

SEQ ID NO: 454525 - DNA, 15 bp, Homo sapiens
tccagtttcatgaaa

SEQ ID NO: 454526 - DNA, 15 bp, Homo sapiens
ctccagtttcatgaa

SEQ ID NO: 454527 - DNA, 15 bp, Homo sapiens
tctccagtttcatga

SEQ ID NO: 454528 - DNA, 15 bp, Homo sapiens
atctccagtttcatg

SEQ ID NO: 454529 - DNA, 15 bp, Homo sapiens
catctccagtttcat

SEQ ID NO: 454530 - DNA, 15 bp, Homo sapiens
acatctccagtttca

SEQ ID NO: 454531 - DNA, 15 bp, Homo sapiens
aacatctccagtttc

SEQ ID NO: 454532 - DNA, 15 bp, Homo sapiens
caacatctccagttt

SEQ ID NO: 454533 - DNA, 15 bp, Homo sapiens
gcaacatctccagtt

SEQ ID NO: 454534 - DNA, 15 bp, Homo sapiens
tgcaacatctccagt

SEQ ID NO: 454535 - DNA, 15 bp, Homo sapiens
ctgcaacatctccag

SEQ ID NO: 454536 - DNA, 15 bp, Homo sapiens
cctgcaacatctcca

SEQ ID NO: 454537 - DNA, 15 bp, Homo sapiens
ccctgcaacatctcc

SEQ ID NO: 454538 - DNA, 15 bp, Homo sapiens
tccctgcaacatctc

SEQ ID NO: 454539 - DNA, 15 bp, Homo sapiens
gtccctgcaacatct

SEQ ID NO: 454540 - DNA, 15 bp, Homo sapiens
ggtccctgcaacatc

SEQ ID NO: 454541 - DNA, 15 bp, Homo sapiens
cggtccctgcaacat

SEQ ID NO: 454542 - DNA, 15 bp, Homo sapiens
tcggtccctgcaaca

SEQ ID NO: 454543 - DNA, 15 bp, Homo sapiens
ctcggtccctgcaac

SEQ ID NO: 454544 - DNA, 15 bp, Homo sapiens
cctcggtccctgcaa

SEQ ID NO: 454545 - DNA, 15 bp, Homo sapiens
acctcggtccctgca

SEQ ID NO: 454546 - DNA, 15 bp, Homo sapiens
cacctcggtccctgc

SEQ ID NO: 454547 - DNA, 15 bp, Homo sapiens
acacctcggtccctg

SEQ ID NO: 454548 - DNA, 15 bp, Homo sapiens
cacacctcggtccct

SEQ ID NO: 454549 - DNA, 15 bp, Homo sapiens
acacacctcggtccc

SEQ ID NO: 454550 - DNA, 15 bp, Homo sapiens
cacacacctcggtcc

SEQ ID NO: 454551 - DNA, 15 bp, Homo sapiens
gcacacacctcggtc

SEQ ID NO: 454552 - DNA, 15 bp, Homo sapiens
agcacacacctcggt

SEQ ID NO: 454553 - DNA, 15 bp, Homo sapiens
tagcacacacctcgg

SEQ ID NO: 454554 - DNA, 15 bp, Homo sapiens
atagcacacacctcg

SEQ ID NO: 454555 - DNA, 15 bp, Homo sapiens
catagcacacacctc

SEQ ID NO: 454556 - DNA, 15 bp, Homo sapiens
gcatagcacacacct

SEQ ID NO: 454557 - DNA, 15 bp, Homo sapiens
ggcatagcacacacc

SEQ ID NO: 454558 - DNA, 15 bp, Homo sapiens
tggcatagcacacac

SEQ ID NO: 454559 - DNA, 15 bp, Homo sapiens
ctggcatagcacaca

SEQ ID NO: 454560 - DNA, 15 bp, Homo sapiens
actggcatagcacac

SEQ ID NO: 454561 - DNA, 15 bp, Homo sapiens
tactggcatagcaca

SEQ ID NO: 454562 - DNA, 15 bp, Homo sapiens
atactggcatagcac

SEQ ID NO: 454563 - DNA, 15 bp, Homo sapiens
catactggcatagca

SEQ ID NO: 454564 - DNA, 15 bp, Homo sapiens
ccatactggcatagc

SEQ ID NO: 454565 - DNA, 15 bp, Homo sapiens
tccatactggcatag

SEQ ID NO: 454566 - DNA, 15 bp, Homo sapiens
ttccatactggcata

SEQ ID NO: 454567 - DNA, 15 bp, Homo sapiens
cttccatactggcat

SEQ ID NO: 454568 - DNA, 15 bp, Homo sapiens
acttccatactggca

SEQ ID NO: 454569 - DNA, 15 bp, Homo sapiens
tacttccatactggc

SEQ ID NO: 454570 - DNA, 15 bp, Homo sapiens
ctacttccatactgg

SEQ ID NO: 454571 - DNA, 15 bp, Homo sapiens
cctacttccatactg

SEQ ID NO: 454572 - DNA, 15 bp, Homo sapiens
tcctacttccatact

SEQ ID NO: 454573 - DNA, 15 bp, Homo sapiens
gtcctacttccatac

SEQ ID NO: 454574 - DNA, 15 bp, Homo sapiens
tgtcctacttccata

SEQ ID NO: 454575 - DNA, 15 bp, Homo sapiens
ctgtcctacttccat

SEQ ID NO: 454576 - DNA, 15 bp, Homo sapiens
cctgtcctacttcca

SEQ ID NO: 454577 - DNA, 15 bp, Homo sapiens
ccctgtcctacttcc

SEQ ID NO: 454578 - DNA, 15 bp, Homo sapiens
cccctgtcctacttc

SEQ ID NO: 454579 - DNA, 15 bp, Homo sapiens
tcccctgtcctactt

SEQ ID NO: 454580 - DNA, 15 bp, Homo sapiens
ctcccctgtcctact

SEQ ID NO: 454581 - DNA, 15 bp, Homo sapiens
tctcccctgtcctac

SEQ ID NO: 454582 - DNA, 15 bp, Homo sapiens
gtctcccctgtccta

SEQ ID NO: 454583 - DNA, 15 bp, Homo sapiens
cgtctcccctgtcct

SEQ ID NO: 454584 - DNA, 15 bp, Homo sapiens
tcgtctcccctgtcc

SEQ ID NO: 454585 - DNA, 15 bp, Homo sapiens
gtcgtctcccctgtc

SEQ ID NO: 454586 - DNA, 15 bp, Homo sapiens
tgtcgtctcccctgt

SEQ ID NO: 454587 - DNA, 15 bp, Homo sapiens
ctgtcgtctcccctg

SEQ ID NO: 454588 - DNA, 15 bp, Homo sapiens
cctgtcgtctcccct

SEQ ID NO: 454589 - DNA, 15 bp, Homo sapiens
ccctgtcgtctcccc

SEQ ID NO: 454590 - DNA, 15 bp, Homo sapiens
gccctgtcgtctccc

SEQ ID NO: 454591 - DNA, 15 bp, Homo sapiens
tgccctgtcgtctcc

SEQ ID NO: 454592 - DNA, 15 bp, Homo sapiens
ctgccctgtcgtctc

SEQ ID NO: 454593 - DNA, 15 bp, Homo sapiens
actgccctgtcgtct

SEQ ID NO: 454594 - DNA, 15 bp, Homo sapiens
cactgccctgtcgtc

SEQ ID NO: 454595 - DNA, 15 bp, Homo sapiens
tcactgccctgtcgt

SEQ ID NO: 454596 - DNA, 15 bp, Homo sapiens
ctcactgccctgtcg

SEQ ID NO: 454597 - DNA, 15 bp, Homo sapiens
actcactgccctgtc

SEQ ID NO: 454598 - DNA, 15 bp, Homo sapiens
cactcactgccctgt

SEQ ID NO: 454599 - DNA, 15 bp, Homo sapiens
ccactcactgccctg

SEQ ID NO: 454600 - DNA, 15 bp, Homo sapiens
accactcactgccct

SEQ ID NO: 454601 - DNA, 15 bp, Homo sapiens
aaccactcactgccc

SEQ ID NO: 454602 - DNA, 15 bp, Homo sapiens
gaaccactcactgcc

SEQ ID NO: 454603 - DNA, 15 bp, Homo sapiens
tgaaccactcactgc

SEQ ID NO: 454604 - DNA, 15 bp, Homo sapiens
ttgaaccactcactg

SEQ ID NO: 454605 - DNA, 15 bp, Homo sapiens
cttgaaccactcact

SEQ ID NO: 454606 - DNA, 15 bp, Homo sapiens
tcttgaaccactcac

SEQ ID NO: 454607 - DNA, 15 bp, Homo sapiens
gtcttgaaccactca

SEQ ID NO: 454608 - DNA, 15 bp, Homo sapiens
agtcttgaaccactc

SEQ ID NO: 454609 - DNA, 15 bp, Homo sapiens
gagtcttgaaccact

SEQ ID NO: 454610 - DNA, 15 bp, Homo sapiens
agagtcttgaaccac

SEQ ID NO: 454611 - DNA, 15 bp, Homo sapiens
cagagtcttgaacca

SEQ ID NO: 454612 - DNA, 15 bp, Homo sapiens
ccagagtcttgaacc

SEQ ID NO: 454613 - DNA, 15 bp, Homo sapiens
gccagagtcttgaac

SEQ ID NO: 454614 - DNA, 15 bp, Homo sapiens
agccagagtcttgaa

SEQ ID NO: 454615 - DNA, 15 bp, Homo sapiens
gagccagagtcttga

SEQ ID NO: 454616 - DNA, 15 bp, Homo sapiens
agagccagagtcttg

SEQ ID NO: 454617 - DNA, 15 bp, Homo sapiens
cagagccagagtctt

SEQ ID NO: 454618 - DNA, 15 bp, Homo sapiens
tcagagccagagtct

SEQ ID NO: 454619 - DNA, 15 bp, Homo sapiens
ttcagagccagagtc

SEQ ID NO: 454620 - DNA, 15 bp, Homo sapiens
cttcagagccagagt

SEQ ID NO: 454621 - DNA, 15 bp, Homo sapiens
acttcagagccagag

SEQ ID NO: 454622 - DNA, 15 bp, Homo sapiens
gacttcagagccaga

SEQ ID NO: 454623 - DNA, 15 bp, Homo sapiens
tgacttcagagccag

SEQ ID NO: 454624 - DNA, 15 bp, Homo sapiens
ttgacttcagagcca

SEQ ID NO: 454625 - DNA, 15 bp, Homo sapiens
tttgacttcagagcc

SEQ ID NO: 454626 - DNA, 15 bp, Homo sapiens
gtttgacttcagagc

SEQ ID NO: 454627 - DNA, 15 bp, Homo sapiens
tgtttgacttcagag

SEQ ID NO: 454628 - DNA, 15 bp, Homo sapiens
ctgtttgacttcaga

SEQ ID NO: 454629 - DNA, 15 bp, Homo sapiens
tctgtttgacttcag

SEQ ID NO: 454630 - DNA, 15 bp, Homo sapiens
atctgtttgacttca

SEQ ID NO: 454631 - DNA, 15 bp, Homo sapiens
gatctgtttgacttc

SEQ ID NO: 454632 - DNA, 15 bp, Homo sapiens
agatctgtttgactt

SEQ ID NO: 454633 - DNA, 15 bp, Homo sapiens
cagatctgtttgact

SEQ ID NO: 454634 - DNA, 15 bp, Homo sapiens
ccagatctgtttgac

SEQ ID NO: 454635 - DNA, 15 bp, Homo sapiens
cccagatctgtttga

SEQ ID NO: 454636 - DNA, 15 bp, Homo sapiens
tcccagatctgtttg

SEQ ID NO: 454637 - DNA, 15 bp, Homo sapiens
gtcccagatctgttt

SEQ ID NO: 454638 - DNA, 15 bp, Homo sapiens
agtcccagatctgtt

SEQ ID NO: 454639 - DNA, 15 bp, Homo sapiens
cagtcccagatctgt

SEQ ID NO: 454640 - DNA, 15 bp, Homo sapiens
tcagtcccagatctg

SEQ ID NO: 454641 - DNA, 15 bp, Homo sapiens
ttcagtcccagatct

SEQ ID NO: 454642 - DNA, 15 bp, Homo sapiens
attcagtcccagatc

SEQ ID NO: 454643 - DNA, 15 bp, Homo sapiens
gattcagtcccagat

SEQ ID NO: 454644 - DNA, 15 bp, Homo sapiens
ggattcagtcccaga

SEQ ID NO: 454645 - DNA, 15 bp, Homo sapiens
aggattcagtcccag

SEQ ID NO: 454646 - DNA, 15 bp, Homo sapiens
caggattcagtccca

SEQ ID NO: 454647 - DNA, 15 bp, Homo sapiens
ccaggattcagtccc

SEQ ID NO: 454648 - DNA, 15 bp, Homo sapiens
tccaggattcagtcc

SEQ ID NO: 454649 - DNA, 15 bp, Homo sapiens
atccaggattcagtc

SEQ ID NO: 454650 - DNA, 15 bp, Homo sapiens
gatccaggattcagt

SEQ ID NO: 454651 - DNA, 15 bp, Homo sapiens
agatccaggattcag

SEQ ID NO: 454652 - DNA, 15 bp, Homo sapiens
cagatccaggattca

SEQ ID NO: 454653 - DNA, 15 bp, Homo sapiens
gcagatccaggattc

SEQ ID NO: 454654 - DNA, 15 bp, Homo sapiens
ggcagatccaggatt

SEQ ID NO: 454655 - DNA, 15 bp, Homo sapiens
tggcagatccaggat

SEQ ID NO: 454656 - DNA, 15 bp, Homo sapiens
gtggcagatccagga

SEQ ID NO: 454657 - DNA, 15 bp, Homo sapiens
agtggcagatccagg

SEQ ID NO: 454658 - DNA, 15 bp, Homo sapiens
aagtggcagatccag

SEQ ID NO: 454659 - DNA, 15 bp, Homo sapiens
gaagtggcagatcca

SEQ ID NO: 454660 - DNA, 15 bp, Homo sapiens
ggaagtggcagatcc

SEQ ID NO: 454661 - DNA, 15 bp, Homo sapiens
aggaagtggcagatc

SEQ ID NO: 454662 - DNA, 15 bp, Homo sapiens
taggaagtggcagat

SEQ ID NO: 454663 - DNA, 15 bp, Homo sapiens
ctaggaagtggcaga

SEQ ID NO: 454664 - DNA, 15 bp, Homo sapiens
actaggaagtggcag

SEQ ID NO: 454665 - DNA, 15 bp, Homo sapiens
gactaggaagtggca

SEQ ID NO: 454666 - DNA, 15 bp, Homo sapiens
tgactaggaagtggc

SEQ ID NO: 454667 - DNA, 15 bp, Homo sapiens
ctgactaggaagtgg

SEQ ID NO: 454668 - DNA, 15 bp, Homo sapiens
tctgactaggaagtg

SEQ ID NO: 454669 - DNA, 15 bp, Homo sapiens
ttctgactaggaagt

SEQ ID NO: 454670 - DNA, 15 bp, Homo sapiens
attctgactaggaag

SEQ ID NO: 454671 - DNA, 15 bp, Homo sapiens
gattctgactaggaa

SEQ ID NO: 454672 - DNA, 15 bp, Homo sapiens
agattctgactagga

SEQ ID NO: 454673 - DNA, 15 bp, Homo sapiens
cagattctgactagg

SEQ ID NO: 454674 - DNA, 15 bp, Homo sapiens
tcagattctgactag

SEQ ID NO: 454675 - DNA, 15 bp, Homo sapiens
ctcagattctgacta

SEQ ID NO: 454676 - DNA, 15 bp, Homo sapiens
gctcagattctgact

SEQ ID NO: 454677 - DNA, 15 bp, Homo sapiens
ggctcagattctgac

SEQ ID NO: 454678 - DNA, 15 bp, Homo sapiens
aggctcagattctga

SEQ ID NO: 454679 - DNA, 15 bp, Homo sapiens
gaggctcagattctg

SEQ ID NO: 454680 - DNA, 15 bp, Homo sapiens
agaggctcagattct

SEQ ID NO: 454681 - DNA, 15 bp, Homo sapiens
tagaggctcagattc

SEQ ID NO: 454682 - DNA, 15 bp, Homo sapiens
atagaggctcagatt

SEQ ID NO: 454683 - DNA, 15 bp, Homo sapiens
aatagaggctcagat

SEQ ID NO: 454684 - DNA, 15 bp, Homo sapiens
aaatagaggctcaga

SEQ ID NO: 454685 - DNA, 15 bp, Homo sapiens
aaaatagaggctcag

SEQ ID NO: 454686 - DNA, 15 bp, Homo sapiens
gaaaatagaggctca

SEQ ID NO: 454687 - DNA, 15 bp, Homo sapiens
agaaaatagaggctc

SEQ ID NO: 454688 - DNA, 15 bp, Homo sapiens
aagaaaatagaggct

SEQ ID NO: 454689 - DNA, 15 bp, Homo sapiens
taagaaaatagaggc

SEQ ID NO: 454690 - DNA, 15 bp, Homo sapiens
ataagaaaatagagg

SEQ ID NO: 454691 - DNA, 15 bp, Homo sapiens
gataagaaaatagag

SEQ ID NO: 454692 - DNA, 15 bp, Homo sapiens
agataagaaaataga

SEQ ID NO: 454693 - DNA, 15 bp, Homo sapiens
cagataagaaaatag

SEQ ID NO: 454694 - DNA, 15 bp, Homo sapiens
acagataagaaaata

SEQ ID NO: 454695 - DNA, 15 bp, Homo sapiens
tacagataagaaaat

SEQ ID NO: 454696 - DNA, 15 bp, Homo sapiens
ttacagataagaaaa

SEQ ID NO: 454697 - DNA, 15 bp, Homo sapiens
tttacagataagaaa

SEQ ID NO: 454698 - DNA, 15 bp, Homo sapiens
ttttacagataagaa

SEQ ID NO: 454699 - DNA, 15 bp, Homo sapiens
cttttacagataaga

SEQ ID NO: 454700 - DNA, 15 bp, Homo sapiens
tcttttacagataag

SEQ ID NO: 454701 - DNA, 15 bp, Homo sapiens
ttcttttacagataa

SEQ ID NO: 454702 - DNA, 15 bp, Homo sapiens
cttcttttacagata

SEQ ID NO: 454703 - DNA, 15 bp, Homo sapiens
tcttcttttacagat

SEQ ID NO: 454704 - DNA, 15 bp, Homo sapiens
atcttcttttacaga

SEQ ID NO: 454705 - DNA, 15 bp, Homo sapiens
aatcttcttttacag

SEQ ID NO: 454706 - DNA, 15 bp, Homo sapiens
taatcttcttttaca

SEQ ID NO: 454707 - DNA, 15 bp, Homo sapiens
ataatcttcttttac

SEQ ID NO: 454708 - DNA, 15 bp, Homo sapiens
tataatcttctttta

SEQ ID NO: 454709 - DNA, 15 bp, Homo sapiens
ttataatcttctttt

SEQ ID NO: 454710 - DNA, 15 bp, Homo sapiens
gttataatcttcttt

SEQ ID NO: 454711 - DNA, 15 bp, Homo sapiens
tgttataatcttctt

SEQ ID NO: 454712 - DNA, 15 bp, Homo sapiens
ctgttataatcttct

SEQ ID NO: 454713 - DNA, 15 bp, Homo sapiens
actgttataatcttc

SEQ ID NO: 454714 - DNA, 15 bp, Homo sapiens
cactgttataatctt

SEQ ID NO: 454715 - DNA, 15 bp, Homo sapiens
gcactgttataatct

SEQ ID NO: 454716 - DNA, 15 bp, Homo sapiens
agcactgttataatc

SEQ ID NO: 454717 - DNA, 15 bp, Homo sapiens
aagcactgttataat

SEQ ID NO: 454718 - DNA, 15 bp, Homo sapiens
taagcactgttataa

SEQ ID NO: 454719 - DNA, 15 bp, Homo sapiens
ataagcactgttata

SEQ ID NO: 454720 - DNA, 15 bp, Homo sapiens
gataagcactgttat

SEQ ID NO: 454721 - DNA, 15 bp, Homo sapiens
agataagcactgtta

SEQ ID NO: 454722 - DNA, 15 bp, Homo sapiens
aagataagcactgtt

SEQ ID NO: 454723 - DNA, 15 bp, Homo sapiens
caagataagcactgt

SEQ ID NO: 454724 - DNA, 15 bp, Homo sapiens
acaagataagcactg

SEQ ID NO: 454725 - DNA, 15 bp, Homo sapiens
tacaagataagcact

SEQ ID NO: 454726 - DNA, 15 bp, Homo sapiens
ctacaagataagcac

SEQ ID NO: 454727 - DNA, 15 bp, Homo sapiens
cctacaagataagca

SEQ ID NO: 454728 - DNA, 15 bp, Homo sapiens
acctacaagataagc

SEQ ID NO: 454729 - DNA, 15 bp, Homo sapiens
tacctacaagataag

SEQ ID NO: 454730 - DNA, 15 bp, Homo sapiens
gtacctacaagataa

SEQ ID NO: 454731 - DNA, 15 bp, Homo sapiens
agtacctacaagata

SEQ ID NO: 454732 - DNA, 15 bp, Homo sapiens
cagtacctacaagat

SEQ ID NO: 454733 - DNA, 15 bp, Homo sapiens
acagtacctacaaga

SEQ ID NO: 454734 - DNA, 15 bp, Homo sapiens
aacagtacctacaag

SEQ ID NO: 454735 - DNA, 15 bp, Homo sapiens
caacagtacctacaa

SEQ ID NO: 454736 - DNA, 15 bp, Homo sapiens
tcaacagtacctaca

SEQ ID NO: 454737 - DNA, 15 bp, Homo sapiens
gtcaacagtacctac

SEQ ID NO: 454738 - DNA, 15 bp, Homo sapiens
cgtcaacagtaccta

SEQ ID NO: 454739 - DNA, 15 bp, Homo sapiens
tcgtcaacagtacct

SEQ ID NO: 454740 - DNA, 15 bp, Homo sapiens
atcgtcaacagtacc

SEQ ID NO: 454741 - DNA, 15 bp, Homo sapiens
aatcgtcaacagtac

SEQ ID NO: 454742 - DNA, 15 bp, Homo sapiens
gaatcgtcaacagta

SEQ ID NO: 454743 - DNA, 15 bp, Homo sapiens
tgaatcgtcaacagt

SEQ ID NO: 454744 - DNA, 15 bp, Homo sapiens
ttgaatcgtcaacag

SEQ ID NO: 454745 - DNA, 15 bp, Homo sapiens
attgaatcgtcaaca

SEQ ID NO: 454746 - DNA, 15 bp, Homo sapiens
tattgaatcgtcaac

SEQ ID NO: 454747 - DNA, 15 bp, Homo sapiens
ttattgaatcgtcaa

SEQ ID NO: 454748 - DNA, 15 bp, Homo sapiens
cttattgaatcgtca

SEQ ID NO: 454749 - DNA, 15 bp, Homo sapiens
tcttattgaatcgtc

SEQ ID NO: 454750 - DNA, 15 bp, Homo sapiens
atcttattgaatcgt

SEQ ID NO: 454751 - DNA, 15 bp, Homo sapiens
tatcttattgaatcg

SEQ ID NO: 454752 - DNA, 15 bp, Homo sapiens
ttatcttattgaatc

SEQ ID NO: 454753 - DNA, 15 bp, Homo sapiens
attatcttattgaat

SEQ ID NO: 454754 - DNA, 15 bp, Homo sapiens
cattatcttattgaa

SEQ ID NO: 454755 - DNA, 15 bp, Homo sapiens
acattatcttattga

SEQ ID NO: 454756 - DNA, 15 bp, Homo sapiens
cacattatcttattg

SEQ ID NO: 454757 - DNA, 15 bp, Homo sapiens
ccacattatcttatt

SEQ ID NO: 454758 - DNA, 15 bp, Homo sapiens
tccacattatcttat

SEQ ID NO: 454759 - DNA, 15 bp, Homo sapiens
atccacattatctta

SEQ ID NO: 454760 - DNA, 15 bp, Homo sapiens
tatccacattatctt

SEQ ID NO: 454761 - DNA, 15 bp, Homo sapiens
ttatccacattatct

SEQ ID NO: 454762 - DNA, 15 bp, Homo sapiens
tttatccacattatc

SEQ ID NO: 454763 - DNA, 15 bp, Homo sapiens
ttttatccacattat

SEQ ID NO: 454764 - DNA, 15 bp, Homo sapiens
attttatccacatta

SEQ ID NO: 454765 - DNA, 15 bp, Homo sapiens
cattttatccacatt

SEQ ID NO: 454766 - DNA, 15 bp, Homo sapiens
gcattttatccacat

SEQ ID NO: 454767 - DNA, 15 bp, Homo sapiens
agcattttatccaca

SEQ ID NO: 454768 - DNA, 15 bp, Homo sapiens
aagcattttatccac

SEQ ID NO: 454769 - DNA, 15 bp, Homo sapiens
taagcattttatcca

SEQ ID NO: 454770 - DNA, 15 bp, Homo sapiens
ctaagcattttatcc

SEQ ID NO: 454771 - DNA, 15 bp, Homo sapiens
gctaagcattttatc

SEQ ID NO: 454772 - DNA, 15 bp, Homo sapiens
tgctaagcattttat

SEQ ID NO: 454773 - DNA, 15 bp, Homo sapiens
atgctaagcatttta

SEQ ID NO: 454774 - DNA, 15 bp, Homo sapiens
tatgctaagcatttt

SEQ ID NO: 454775 - DNA, 15 bp, Homo sapiens
ctatgctaagcattt

SEQ ID NO: 454776 - DNA, 15 bp, Homo sapiens
actatgctaagcatt

SEQ ID NO: 454777 - DNA, 15 bp, Homo sapiens
cactatgctaagcat

SEQ ID NO: 454778 - DNA, 15 bp, Homo sapiens
gcactatgctaagca

SEQ ID NO: 454779 - DNA, 15 bp, Homo sapiens
ggcactatgctaagc

SEQ ID NO: 454780 - DNA, 15 bp, Homo sapiens
aggcactatgctaag

SEQ ID NO: 454781 - DNA, 15 bp, Homo sapiens
caggcactatgctaa

SEQ ID NO: 454782 - DNA, 15 bp, Homo sapiens
ccaggcactatgcta

SEQ ID NO: 454783 - DNA, 15 bp, Homo sapiens
gccaggcactatgct

SEQ ID NO: 454784 - DNA, 15 bp, Homo sapiens
tgccaggcactatgc

SEQ ID NO: 454785 - DNA, 15 bp, Homo sapiens
gtgccaggcactatg

SEQ ID NO: 454786 - DNA, 15 bp, Homo sapiens
tgtgccaggcactat

SEQ ID NO: 454787 - DNA, 15 bp, Homo sapiens
atgtgccaggcacta

SEQ ID NO: 454788 - DNA, 15 bp, Homo sapiens
tatgtgccaggcact

SEQ ID NO: 454789 - DNA, 15 bp, Homo sapiens
ctatgtgccaggcac

SEQ ID NO: 454790 - DNA, 15 bp, Homo sapiens
actatgtgccaggca

SEQ ID NO: 454791 - DNA, 15 bp, Homo sapiens
tactatgtgccaggc

SEQ ID NO: 454792 - DNA, 15 bp, Homo sapiens
ttactatgtgccagg

SEQ ID NO: 454793 - DNA, 15 bp, Homo sapiens
cttactatgtgccag

SEQ ID NO: 454794 - DNA, 15 bp, Homo sapiens
tcttactatgtgcca

SEQ ID NO: 454795 - DNA, 15 bp, Homo sapiens
ctcttactatgtgcc

SEQ ID NO: 454796 - DNA, 15 bp, Homo sapiens
gctcttactatgtgc

SEQ ID NO: 454797 - DNA, 15 bp, Homo sapiens
agctcttactatgtg

SEQ ID NO: 454798 - DNA, 15 bp, Homo sapiens
gagctcttactatgt

SEQ ID NO: 454799 - DNA, 15 bp, Homo sapiens
cgagctcttactatg

SEQ ID NO: 454800 - DNA, 15 bp, Homo sapiens
ccgagctcttactat

SEQ ID NO: 454801 - DNA, 15 bp, Homo sapiens
accgagctcttacta

SEQ ID NO: 454802 - DNA, 15 bp, Homo sapiens
taccgagctcttact

SEQ ID NO: 454803 - DNA, 15 bp, Homo sapiens
ttaccgagctcttac

SEQ ID NO: 454804 - DNA, 15 bp, Homo sapiens
tttaccgagctctta

SEQ ID NO: 454805 - DNA, 15 bp, Homo sapiens
atttaccgagctctt

SEQ ID NO: 454806 - DNA, 15 bp, Homo sapiens
gatttaccgagctct

SEQ ID NO: 454807 - DNA, 15 bp, Homo sapiens
agatttaccgagctc

SEQ ID NO: 454808 - DNA, 15 bp, Homo sapiens
tagatttaccgagct

SEQ ID NO: 454809 - DNA, 15 bp, Homo sapiens
ttagatttaccgagc

SEQ ID NO: 454810 - DNA, 15 bp, Homo sapiens
cttagatttaccgag

SEQ ID NO: 454811 - DNA, 15 bp, Homo sapiens
acttagatttaccga

SEQ ID NO: 454812 - DNA, 15 bp, Homo sapiens
aacttagatttaccg

SEQ ID NO: 454813 - DNA, 15 bp, Homo sapiens
gaacttagatttacc

SEQ ID NO: 454814 - DNA, 15 bp, Homo sapiens
agaacttagatttac

SEQ ID NO: 454815 - DNA, 15 bp, Homo sapiens
aagaacttagattta

SEQ ID NO: 454816 - DNA, 15 bp, Homo sapiens
taagaacttagattt

SEQ ID NO: 454817 - DNA, 15 bp, Homo sapiens
gtaagaacttagatt

SEQ ID NO: 454818 - DNA, 15 bp, Homo sapiens
agtaagaacttagat

SEQ ID NO: 454819 - DNA, 15 bp, Homo sapiens
tagtaagaacttaga

SEQ ID NO: 454820 - DNA, 15 bp, Homo sapiens
ttagtaagaacttag

SEQ ID NO: 454821 - DNA, 15 bp, Homo sapiens
tttagtaagaactta

SEQ ID NO: 454822 - DNA, 15 bp, Homo sapiens
atttagtaagaactt

SEQ ID NO: 454823 - DNA, 15 bp, Homo sapiens
tatttagtaagaact

SEQ ID NO: 454824 - DNA, 15 bp, Homo sapiens
atatttagtaagaac

SEQ ID NO: 454825 - DNA, 15 bp, Homo sapiens
gatatttagtaagaa

SEQ ID NO: 454826 - DNA, 15 bp, Homo sapiens
ggatatttagtaaga

SEQ ID NO: 454827 - DNA, 15 bp, Homo sapiens
tggatatttagtaag

SEQ ID NO: 454828 - DNA, 15 bp, Homo sapiens
ttggatatttagtaa

SEQ ID NO: 454829 - DNA, 15 bp, Homo sapiens
cttggatatttagta

SEQ ID NO: 454830 - DNA, 15 bp, Homo sapiens
tcttggatatttagt

SEQ ID NO: 454831 - DNA, 15 bp, Homo sapiens
ttcttggatatttag

SEQ ID NO: 454832 - DNA, 15 bp, Homo sapiens
tttcttggatattta

SEQ ID NO: 454833 - DNA, 15 bp, Homo sapiens
ttttcttggatattt

SEQ ID NO: 454834 - DNA, 15 bp, Homo sapiens
cttttcttggatatt

SEQ ID NO: 454835 - DNA, 15 bp, Homo sapiens
tcttttcttggatat

SEQ ID NO: 454836 - DNA, 15 bp, Homo sapiens
ctcttttcttggata

SEQ ID NO: 454837 - DNA, 15 bp, Homo sapiens
tctcttttcttggat

SEQ ID NO: 454838 - DNA, 15 bp, Homo sapiens
atctcttttcttgga

SEQ ID NO: 454839 - DNA, 15 bp, Homo sapiens
aatctcttttcttgg

SEQ ID NO: 454840 - DNA, 15 bp, Homo sapiens
taatctcttttcttg

SEQ ID NO: 454841 - DNA, 15 bp, Homo sapiens
ttaatctcttttctt

SEQ ID NO: 454842 - DNA, 15 bp, Homo sapiens
attaatctcttttct

SEQ ID NO: 454843 - DNA, 15 bp, Homo sapiens
aattaatctcttttc

SEQ ID NO: 454844 - DNA, 15 bp, Homo sapiens
gaattaatctctttt

SEQ ID NO: 454845 - DNA, 15 bp, Homo sapiens
agaattaatctcttt

SEQ ID NO: 454846 - DNA, 15 bp, Homo sapiens
aagaattaatctctt

SEQ ID NO: 454847 - DNA, 15 bp, Homo sapiens
aaagaattaatctct

SEQ ID NO: 454848 - DNA, 15 bp, Homo sapiens
aaaagaattaatctc

SEQ ID NO: 454849 - DNA, 15 bp, Homo sapiens
gaaaagaattaatct

SEQ ID NO: 454850 - DNA, 15 bp, Homo sapiens
tgaaaagaattaatc

SEQ ID NO: 454851 - DNA, 15 bp, Homo sapiens
ctgaaaagaattaat

SEQ ID NO: 454852 - DNA, 15 bp, Homo sapiens
cctgaaaagaattaa

SEQ ID NO: 454853 - DNA, 15 bp, Homo sapiens
tcctgaaaagaatta

SEQ ID NO: 454854 - DNA, 15 bp, Homo sapiens
ctcctgaaaagaatt

SEQ ID NO: 454855 - DNA, 15 bp, Homo sapiens
actcctgaaaagaat

SEQ ID NO: 454856 - DNA, 15 bp, Homo sapiens
cactcctgaaaagaa

SEQ ID NO: 454857 - DNA, 15 bp, Homo sapiens
tcactcctgaaaaga

SEQ ID NO: 454858 - DNA, 15 bp, Homo sapiens
ctcactcctgaaaag

SEQ ID NO: 454859 - DNA, 15 bp, Homo sapiens
tctcactcctgaaaa

SEQ ID NO: 454860 - DNA, 15 bp, Homo sapiens
ctctcactcctgaaa

SEQ ID NO: 454861 - DNA, 15 bp, Homo sapiens
tctctcactcctgaa

SEQ ID NO: 454862 - DNA, 15 bp, Homo sapiens
ttctctcactcctga

SEQ ID NO: 454863 - DNA, 15 bp, Homo sapiens
tttctctcactcctg

SEQ ID NO: 454864 - DNA, 15 bp, Homo sapiens
ctttctctcactcct

SEQ ID NO: 454865 - DNA, 15 bp, Homo sapiens
actttctctcactcc

SEQ ID NO: 454866 - DNA, 15 bp, Homo sapiens
gactttctctcactc

SEQ ID NO: 454867 - DNA, 15 bp, Homo sapiens
tgactttctctcact

SEQ ID NO: 454868 - DNA, 15 bp, Homo sapiens
atgactttctctcac

SEQ ID NO: 454869 - DNA, 15 bp, Homo sapiens
gatgactttctctca

SEQ ID NO: 454870 - DNA, 15 bp, Homo sapiens
tgatgactttctctc

SEQ ID NO: 454871 - DNA, 15 bp, Homo sapiens
atgatgactttctct

SEQ ID NO: 454872 - DNA, 15 bp, Homo sapiens
aatgatgactttctc

SEQ ID NO: 454873 - DNA, 15 bp, Homo sapiens
taatgatgactttct

SEQ ID NO: 454874 - DNA, 15 bp, Homo sapiens
ataatgatgactttc

SEQ ID NO: 454875 - DNA, 15 bp, Homo sapiens
aataatgatgacttt

SEQ ID NO: 454876 - DNA, 15 bp, Homo sapiens
caataatgatgactt

SEQ ID NO: 454877 - DNA, 15 bp, Homo sapiens
tcaataatgatgact

SEQ ID NO: 454878 - DNA, 15 bp, Homo sapiens
ctcaataatgatgac

SEQ ID NO: 454879 - DNA, 15 bp, Homo sapiens
cctcaataatgatga

SEQ ID NO: 454880 - DNA, 15 bp, Homo sapiens
ccctcaataatgatg

SEQ ID NO: 454881 - DNA, 15 bp, Homo sapiens
cccctcaataatgat

SEQ ID NO: 454882 - DNA, 15 bp, Homo sapiens
gcccctcaataatga

SEQ ID NO: 454883 - DNA, 15 bp, Homo sapiens
agcccctcaataatg

SEQ ID NO: 454884 - DNA, 15 bp, Homo sapiens
aagcccctcaataat

SEQ ID NO: 454885 - DNA, 15 bp, Homo sapiens
aaagcccctcaataa

SEQ ID NO: 454886 - DNA, 15 bp, Homo sapiens
taaagcccctcaata

SEQ ID NO: 454887 - DNA, 15 bp, Homo sapiens
ataaagcccctcaat

SEQ ID NO: 454888 - DNA, 15 bp, Homo sapiens
gataaagcccctcaa

SEQ ID NO: 454889 - DNA, 15 bp, Homo sapiens
tgataaagcccctca

SEQ ID NO: 454890 - DNA, 15 bp, Homo sapiens
ctgataaagcccctc

SEQ ID NO: 454891 - DNA, 15 bp, Homo sapiens
tctgataaagcccct

SEQ ID NO: 454892 - DNA, 15 bp, Homo sapiens
atctgataaagcccc

SEQ ID NO: 454893 - DNA, 15 bp, Homo sapiens
catctgataaagccc

SEQ ID NO: 454894 - DNA, 15 bp, Homo sapiens
ccatctgataaagcc

SEQ ID NO: 454895 - DNA, 15 bp, Homo sapiens
cccatctgataaagc

SEQ ID NO: 454896 - DNA, 15 bp, Homo sapiens
tcccatctgataaag

SEQ ID NO: 454897 - DNA, 15 bp, Homo sapiens
ttcccatctgataaa

SEQ ID NO: 454898 - DNA, 15 bp, Homo sapiens
gttcccatctgataa

SEQ ID NO: 454899 - DNA, 15 bp, Homo sapiens
tgttcccatctgata

SEQ ID NO: 454900 - DNA, 15 bp, Homo sapiens
gtgttcccatctgat

SEQ ID NO: 454901 - DNA, 15 bp, Homo sapiens
ggtgttcccatctga

SEQ ID NO: 454902 - DNA, 15 bp, Homo sapiens
aggtgttcccatctg

SEQ ID NO: 454903 - DNA, 15 bp, Homo sapiens
caggtgttcccatct

SEQ ID NO: 454904 - DNA, 15 bp, Homo sapiens
tcaggtgttcccatc

SEQ ID NO: 454905 - DNA, 15 bp, Homo sapiens
ttcaggtgttcccat

SEQ ID NO: 454906 - DNA, 15 bp, Homo sapiens
attcaggtgttccca

SEQ ID NO: 454907 - DNA, 15 bp, Homo sapiens
tattcaggtgttccc

SEQ ID NO: 454908 - DNA, 15 bp, Homo sapiens
ctattcaggtgttcc

SEQ ID NO: 454909 - DNA, 15 bp, Homo sapiens
cctattcaggtgttc

SEQ ID NO: 454910 - DNA, 15 bp, Homo sapiens
ccctattcaggtgtt

SEQ ID NO: 454911 - DNA, 15 bp, Homo sapiens
accctattcaggtgt

SEQ ID NO: 454912 - DNA, 15 bp, Homo sapiens
aaccctattcaggtg

SEQ ID NO: 454913 - DNA, 15 bp, Homo sapiens
aaaccctattcaggt

SEQ ID NO: 454914 - DNA, 15 bp, Homo sapiens
aaaaccctattcagg

SEQ ID NO: 454915 - DNA, 15 bp, Homo sapiens
taaaaccctattcag

SEQ ID NO: 454916 - DNA, 15 bp, Homo sapiens
ataaaaccctattca

SEQ ID NO: 454917 - DNA, 15 bp, Homo sapiens
tataaaaccctattc

SEQ ID NO: 454918 - DNA, 15 bp, Homo sapiens
ctataaaaccctatt

SEQ ID NO: 454919 - DNA, 15 bp, Homo sapiens
cctataaaaccctat

SEQ ID NO: 454920 - DNA, 15 bp, Homo sapiens
tcctataaaacccta

SEQ ID NO: 454921 - DNA, 15 bp, Homo sapiens
atcctataaaaccct

SEQ ID NO: 454922 - DNA, 15 bp, Homo sapiens
catcctataaaaccc

SEQ ID NO: 454923 - DNA, 15 bp, Homo sapiens
tcatcctataaaacc

SEQ ID NO: 454924 - DNA, 15 bp, Homo sapiens
ttcatcctataaaac

SEQ ID NO: 454925 - DNA, 15 bp, Homo sapiens
attcatcctataaaa

SEQ ID NO: 454926 - DNA, 15 bp, Homo sapiens
tattcatcctataaa

SEQ ID NO: 454927 - DNA, 15 bp, Homo sapiens
ctattcatcctataa

SEQ ID NO: 454928 - DNA, 15 bp, Homo sapiens
cctattcatcctata

SEQ ID NO: 454929 - DNA, 15 bp, Homo sapiens
tcctattcatcctat

SEQ ID NO: 454930 - DNA, 15 bp, Homo sapiens
ttcctattcatccta

SEQ ID NO: 454931 - DNA, 15 bp, Homo sapiens
attcctattcatcct

SEQ ID NO: 454932 - DNA, 15 bp, Homo sapiens
aattcctattcatcc

SEQ ID NO: 454933 - DNA, 15 bp, Homo sapiens
gaattcctattcatc

SEQ ID NO: 454934 - DNA, 15 bp, Homo sapiens
agaattcctattcat

SEQ ID NO: 454935 - DNA, 15 bp, Homo sapiens
aagaattcctattca

SEQ ID NO: 454936 - DNA, 15 bp, Homo sapiens
aaagaattcctattc

SEQ ID NO: 454937 - DNA, 15 bp, Homo sapiens
gaaagaattcctatt

SEQ ID NO: 454938 - DNA, 15 bp, Homo sapiens
ggaaagaattcctat

SEQ ID NO: 454939 - DNA, 15 bp, Homo sapiens
tggaaagaattccta

SEQ ID NO: 454940 - DNA, 15 bp, Homo sapiens
gtggaaagaattcct

SEQ ID NO: 454941 - DNA, 15 bp, Homo sapiens
cgtggaaagaattcc

SEQ ID NO: 454942 - DNA, 15 bp, Homo sapiens
tcgtggaaagaattc

SEQ ID NO: 454943 - DNA, 15 bp, Homo sapiens
ttcgtggaaagaatt

SEQ ID NO: 454944 - DNA, 15 bp, Homo sapiens
cttcgtggaaagaat

SEQ ID NO: 454945 - DNA, 15 bp, Homo sapiens
acttcgtggaaagaa

SEQ ID NO: 454946 - DNA, 15 bp, Homo sapiens
aacttcgtggaaaga

SEQ ID NO: 454947 - DNA, 15 bp, Homo sapiens
caacttcgtggaaag

SEQ ID NO: 454948 - DNA, 15 bp, Homo sapiens
gcaacttcgtggaaa

SEQ ID NO: 454949 - DNA, 15 bp, Homo sapiens
cgcaacttcgtggaa

SEQ ID NO: 454950 - DNA, 15 bp, Homo sapiens
acgcaacttcgtgga

SEQ ID NO: 454951 - DNA, 15 bp, Homo sapiens
aacgcaacttcgtgg

SEQ ID NO: 454952 - DNA, 15 bp, Homo sapiens
taacgcaacttcgtg

SEQ ID NO: 454953 - DNA, 15 bp, Homo sapiens
gtaacgcaacttcgt

SEQ ID NO: 454954 - DNA, 15 bp, Homo sapiens
tgtaacgcaacttcg

SEQ ID NO: 454955 - DNA, 15 bp, Homo sapiens
ttgtaacgcaacttc

SEQ ID NO: 454956 - DNA, 15 bp, Homo sapiens
tttgtaacgcaactt

SEQ ID NO: 454957 - DNA, 15 bp, Homo sapiens
ttttgtaacgcaact

SEQ ID NO: 454958 - DNA, 15 bp, Homo sapiens
tttttgtaacgcaac

SEQ ID NO: 454959 - DNA, 15 bp, Homo sapiens
ctttttgtaacgcaa

SEQ ID NO: 454960 - DNA, 15 bp, Homo sapiens
actttttgtaacgca

SEQ ID NO: 454961 - DNA, 15 bp, Homo sapiens
aactttttgtaacgc

SEQ ID NO: 454962 - DNA, 15 bp, Homo sapiens
caactttttgtaacg

SEQ ID NO: 454963 - DNA, 15 bp, Homo sapiens
gcaactttttgtaac

SEQ ID NO: 454964 - DNA, 15 bp, Homo sapiens
tgcaactttttgtaa

SEQ ID NO: 454965 - DNA, 15 bp, Homo sapiens
atgcaactttttgta

SEQ ID NO: 454966 - DNA, 15 bp, Homo sapiens
aatgcaactttttgt

SEQ ID NO: 454967 - DNA, 15 bp, Homo sapiens
gaatgcaactttttg

SEQ ID NO: 454968 - DNA, 15 bp, Homo sapiens
tgaatgcaacttttt

SEQ ID NO: 454969 - DNA, 15 bp, Homo sapiens
ttgaatgcaactttt

SEQ ID NO: 454970 - DNA, 15 bp, Homo sapiens
cttgaatgcaacttt

SEQ ID NO: 454971 - DNA, 15 bp, Homo sapiens
ccttgaatgcaactt

SEQ ID NO: 454972 - DNA, 15 bp, Homo sapiens
gccttgaatgcaact

SEQ ID NO: 454973 - DNA, 15 bp, Homo sapiens
agccttgaatgcaac

SEQ ID NO: 454974 - DNA, 15 bp, Homo sapiens
cagccttgaatgcaa

SEQ ID NO: 454975 - DNA, 15 bp, Homo sapiens
tcagccttgaatgca

SEQ ID NO: 454976 - DNA, 15 bp, Homo sapiens
ttcagccttgaatgc

SEQ ID NO: 454977 - DNA, 15 bp, Homo sapiens
cttcagccttgaatg

SEQ ID NO: 454978 - DNA, 15 bp, Homo sapiens
ccttcagccttgaat

SEQ ID NO: 454979 - DNA, 15 bp, Homo sapiens
tccttcagccttgaa

SEQ ID NO: 454980 - DNA, 15 bp, Homo sapiens
ttccttcagccttga

SEQ ID NO: 454981 - DNA, 15 bp, Homo sapiens
gttccttcagccttg

SEQ ID NO: 454982 - DNA, 15 bp, Homo sapiens
tgttccttcagcctt

SEQ ID NO: 454983 - DNA, 15 bp, Homo sapiens
atgttccttcagcct

SEQ ID NO: 454984 - DNA, 15 bp, Homo sapiens
catgttccttcagcc

SEQ ID NO: 454985 - DNA, 15 bp, Homo sapiens
tcatgttccttcagc

SEQ ID NO: 454986 - DNA, 15 bp, Homo sapiens
ctcatgttccttcag

SEQ ID NO: 454987 - DNA, 15 bp, Homo sapiens
cctcatgttccttca

SEQ ID NO: 454988 - DNA, 15 bp, Homo sapiens
ccctcatgttccttc

SEQ ID NO: 454989 - DNA, 15 bp, Homo sapiens
accctcatgttcctt

SEQ ID NO: 454990 - DNA, 15 bp, Homo sapiens
caccctcatgttcct

SEQ ID NO: 454991 - DNA, 15 bp, Homo sapiens
gcaccctcatgttcc

SEQ ID NO: 454992 - DNA, 15 bp, Homo sapiens
tgcaccctcatgttc

SEQ ID NO: 454993 - DNA, 15 bp, Homo sapiens
ctgcaccctcatgtt

SEQ ID NO: 454994 - DNA, 15 bp, Homo sapiens
tctgcaccctcatgt

SEQ ID NO: 454995 - DNA, 15 bp, Homo sapiens
ctctgcaccctcatg

SEQ ID NO: 454996 - DNA, 15 bp, Homo sapiens
cctctgcaccctcat

SEQ ID NO: 454997 - DNA, 15 bp, Homo sapiens
gcctctgcaccctca

SEQ ID NO: 454998 - DNA, 15 bp, Homo sapiens
agcctctgcaccctc

SEQ ID NO: 454999 - DNA, 15 bp, Homo sapiens
aagcctctgcaccct

SEQ ID NO: 455000 - DNA, 15 bp, Homo sapiens
taagcctctgcaccc

SEQ ID NO: 455001 - DNA, 15 bp, Homo sapiens
ttaagcctctgcacc

SEQ ID NO: 455002 - DNA, 15 bp, Homo sapiens
tttaagcctctgcac

SEQ ID NO: 455003 - DNA, 15 bp, Homo sapiens
ttttaagcctctgca

SEQ ID NO: 455004 - DNA, 15 bp, Homo sapiens
gttttaagcctctgc

SEQ ID NO: 455005 - DNA, 15 bp, Homo sapiens
tgttttaagcctctg

SEQ ID NO: 455006 - DNA, 15 bp, Homo sapiens
ctgttttaagcctct

SEQ ID NO: 455007 - DNA, 15 bp, Homo sapiens
gctgttttaagcctc

SEQ ID NO: 455008 - DNA, 15 bp, Homo sapiens
ggctgttttaagcct

SEQ ID NO: 455009 - DNA, 15 bp, Homo sapiens
aggctgttttaagcc

SEQ ID NO: 455010 - DNA, 15 bp, Homo sapiens
aaggctgttttaagc

SEQ ID NO: 455011 - DNA, 15 bp, Homo sapiens
caaggctgttttaag

SEQ ID NO: 455012 - DNA, 15 bp, Homo sapiens
acaaggctgttttaa

SEQ ID NO: 455013 - DNA, 15 bp, Homo sapiens
cacaaggctgtttta

SEQ ID NO: 455014 - DNA, 15 bp, Homo sapiens
acacaaggctgtttt

SEQ ID NO: 455015 - DNA, 15 bp, Homo sapiens
cacacaaggctgttt

SEQ ID NO: 455016 - DNA, 15 bp, Homo sapiens
acacacaaggctgtt

SEQ ID NO: 455017 - DNA, 15 bp, Homo sapiens
aacacacaaggctgt

SEQ ID NO: 455018 - DNA, 15 bp, Homo sapiens
gaacacacaaggctg

SEQ ID NO: 455019 - DNA, 15 bp, Homo sapiens
tgaacacacaaggct

SEQ ID NO: 455020 - DNA, 15 bp, Homo sapiens
ctgaacacacaaggc

SEQ ID NO: 455021 - DNA, 15 bp, Homo sapiens
cctgaacacacaagg

SEQ ID NO: 455022 - DNA, 15 bp, Homo sapiens
ccctgaacacacaag

SEQ ID NO: 455023 - DNA, 15 bp, Homo sapiens
tccctgaacacacaa

SEQ ID NO: 455024 - DNA, 15 bp, Homo sapiens
ctccctgaacacaca

SEQ ID NO: 455025 - DNA, 15 bp, Homo sapiens
gctccctgaacacac

SEQ ID NO: 455026 - DNA, 15 bp, Homo sapiens
agctccctgaacaca

SEQ ID NO: 455027 - DNA, 15 bp, Homo sapiens
tagctccctgaacac

SEQ ID NO: 455028 - DNA, 15 bp, Homo sapiens
atagctccctgaaca

SEQ ID NO: 455029 - DNA, 15 bp, Homo sapiens
tatagctccctgaac

SEQ ID NO: 455030 - DNA, 15 bp, Homo sapiens
ttatagctccctgaa

SEQ ID NO: 455031 - DNA, 15 bp, Homo sapiens
cttatagctccctga

SEQ ID NO: 455032 - DNA, 15 bp, Homo sapiens
acttatagctccctg

SEQ ID NO: 455033 - DNA, 15 bp, Homo sapiens
tacttatagctccct

SEQ ID NO: 455034 - DNA, 15 bp, Homo sapiens
ctacttatagctccc

SEQ ID NO: 455035 - DNA, 15 bp, Homo sapiens
tctacttatagctcc

SEQ ID NO: 455036 - DNA, 15 bp, Homo sapiens
ttctacttatagctc

SEQ ID NO: 455037 - DNA, 15 bp, Homo sapiens
cttctacttatagct

SEQ ID NO: 455038 - DNA, 15 bp, Homo sapiens
acttctacttatagc

SEQ ID NO: 455039 - DNA, 15 bp, Homo sapiens
aacttctacttatag

SEQ ID NO: 455040 - DNA, 15 bp, Homo sapiens
gaacttctacttata

SEQ ID NO: 455041 - DNA, 15 bp, Homo sapiens
agaacttctacttat

SEQ ID NO: 455042 - DNA, 15 bp, Homo sapiens
aagaacttctactta

SEQ ID NO: 455043 - DNA, 15 bp, Homo sapiens
taagaacttctactt

SEQ ID NO: 455044 - DNA, 15 bp, Homo sapiens
ttaagaacttctact

SEQ ID NO: 455045 - DNA, 15 bp, Homo sapiens
attaagaacttctac

SEQ ID NO: 455046 - DNA, 15 bp, Homo sapiens
aattaagaacttcta

SEQ ID NO: 455047 - DNA, 15 bp, Homo sapiens
aaattaagaacttct

SEQ ID NO: 455048 - DNA, 15 bp, Homo sapiens
taaattaagaacttc

SEQ ID NO: 455049 - DNA, 15 bp, Homo sapiens
ctaaattaagaactt

SEQ ID NO: 455050 - DNA, 15 bp, Homo sapiens
cctaaattaagaact

SEQ ID NO: 455051 - DNA, 15 bp, Homo sapiens
tcctaaattaagaac

SEQ ID NO: 455052 - DNA, 15 bp, Homo sapiens
ctcctaaattaagaa

SEQ ID NO: 455053 - DNA, 15 bp, Homo sapiens
tctcctaaattaaga

SEQ ID NO: 455054 - DNA, 15 bp, Homo sapiens
ttctcctaaattaag

SEQ ID NO: 455055 - DNA, 15 bp, Homo sapiens
gttctcctaaattaa

SEQ ID NO: 455056 - DNA, 15 bp, Homo sapiens
agttctcctaaatta

SEQ ID NO: 455057 - DNA, 15 bp, Homo sapiens
tagttctcctaaatt

SEQ ID NO: 455058 - DNA, 15 bp, Homo sapiens
ttagttctcctaaat

SEQ ID NO: 455059 - DNA, 15 bp, Homo sapiens
tttagttctcctaaa

SEQ ID NO: 455060 - DNA, 15 bp, Homo sapiens
gtttagttctcctaa

SEQ ID NO: 455061 - DNA, 15 bp, Homo sapiens
ggtttagttctccta

SEQ ID NO: 455062 - DNA, 15 bp, Homo sapiens
tggtttagttctcct

SEQ ID NO: 455063 - DNA, 15 bp, Homo sapiens
ttggtttagttctcc

SEQ ID NO: 455064 - DNA, 15 bp, Homo sapiens
cttggtttagttctc

SEQ ID NO: 455065 - DNA, 15 bp, Homo sapiens
ccttggtttagttct

SEQ ID NO: 455066 - DNA, 15 bp, Homo sapiens
cccttggtttagttc

SEQ ID NO: 455067 - DNA, 15 bp, Homo sapiens
ccccttggtttagtt

SEQ ID NO: 455068 - DNA, 15 bp, Homo sapiens
tccccttggtttagt

SEQ ID NO: 455069 - DNA, 15 bp, Homo sapiens
ttccccttggtttag

SEQ ID NO: 455070 - DNA, 15 bp, Homo sapiens
tttccccttggttta

SEQ ID NO: 455071 - DNA, 15 bp, Homo sapiens
ctttccccttggttt

SEQ ID NO: 455072 - DNA, 15 bp, Homo sapiens
cctttccccttggtt

SEQ ID NO: 455073 - DNA, 15 bp, Homo sapiens
tcctttccccttggt

SEQ ID NO: 455074 - DNA, 15 bp, Homo sapiens
ctcctttccccttgg

SEQ ID NO: 455075 - DNA, 15 bp, Homo sapiens
cctcctttccccttg

SEQ ID NO: 455076 - DNA, 15 bp, Homo sapiens
gcctcctttcccctt

SEQ ID NO: 455077 - DNA, 15 bp, Homo sapiens
ggcctcctttcccct

SEQ ID NO: 455078 - DNA, 15 bp, Homo sapiens
tggcctcctttcccc

SEQ ID NO: 455079 - DNA, 15 bp, Homo sapiens
ttggcctcctttccc

SEQ ID NO: 455080 - DNA, 15 bp, Homo sapiens
cttggcctcctttcc

SEQ ID NO: 455081 - DNA, 15 bp, Homo sapiens
ccttggcctcctttc

SEQ ID NO: 455082 - DNA, 15 bp, Homo sapiens
tccttggcctccttt

SEQ ID NO: 455083 - DNA, 15 bp, Homo sapiens
ttccttggcctcctt

SEQ ID NO: 455084 - DNA, 15 bp, Homo sapiens
gttccttggcctcct

SEQ ID NO: 455085 - DNA, 15 bp, Homo sapiens
ggttccttggcctcc

SEQ ID NO: 455086 - DNA, 15 bp, Homo sapiens
tggttccttggcctc

SEQ ID NO: 455087 - DNA, 15 bp, Homo sapiens
gtggttccttggcct

SEQ ID NO: 455088 - DNA, 15 bp, Homo sapiens
tgtggttccttggcc

SEQ ID NO: 455089 - DNA, 15 bp, Homo sapiens
ctgtggttccttggc

SEQ ID NO: 455090 - DNA, 15 bp, Homo sapiens
actgtggttccttgg

SEQ ID NO: 455091 - DNA, 15 bp, Homo sapiens
aactgtggttccttg

SEQ ID NO: 455092 - DNA, 15 bp, Homo sapiens
gaactgtggttcctt

SEQ ID NO: 455093 - DNA, 15 bp, Homo sapiens
agaactgtggttcct

SEQ ID NO: 455094 - DNA, 15 bp, Homo sapiens
aagaactgtggttcc

SEQ ID NO: 455095 - DNA, 15 bp, Homo sapiens
taagaactgtggttc

SEQ ID NO: 455096 - DNA, 15 bp, Homo sapiens
ataagaactgtggtt

SEQ ID NO: 455097 - DNA, 15 bp, Homo sapiens
gataagaactgtggt

SEQ ID NO: 455098 - DNA, 15 bp, Homo sapiens
ggataagaactgtgg

SEQ ID NO: 455099 - DNA, 15 bp, Homo sapiens
gggataagaactgtg

SEQ ID NO: 455100 - DNA, 15 bp, Homo sapiens
agggataagaactgt

SEQ ID NO: 455101 - DNA, 15 bp, Homo sapiens
aagggataagaactg

SEQ ID NO: 455102 - DNA, 15 bp, Homo sapiens
aaagggataagaact

SEQ ID NO: 455103 - DNA, 15 bp, Homo sapiens
aaaagggataagaac

SEQ ID NO: 455104 - DNA, 15 bp, Homo sapiens
gaaaagggataagaa

SEQ ID NO: 455105 - DNA, 15 bp, Homo sapiens
agaaaagggataaga

SEQ ID NO: 455106 - DNA, 15 bp, Homo sapiens
cagaaaagggataag

SEQ ID NO: 455107 - DNA, 15 bp, Homo sapiens
acagaaaagggataa

SEQ ID NO: 455108 - DNA, 15 bp, Homo sapiens
aacagaaaagggata

SEQ ID NO: 455109 - DNA, 15 bp, Homo sapiens
taacagaaaagggat

SEQ ID NO: 455110 - DNA, 15 bp, Homo sapiens
ttaacagaaaaggga

SEQ ID NO: 455111 - DNA, 15 bp, Homo sapiens
attaacagaaaaggg

SEQ ID NO: 455112 - DNA, 15 bp, Homo sapiens
tattaacagaaaagg

SEQ ID NO: 455113 - DNA, 15 bp, Homo sapiens
ttattaacagaaaag

SEQ ID NO: 455114 - DNA, 15 bp, Homo sapiens
attattaacagaaaa

SEQ ID NO: 455115 - DNA, 15 bp, Homo sapiens
aattattaacagaaa

SEQ ID NO: 455116 - DNA, 15 bp, Homo sapiens
caattattaacagaa

SEQ ID NO: 455117 - DNA, 15 bp, Homo sapiens
ccaattattaacaga

SEQ ID NO: 455118 - DNA, 15 bp, Homo sapiens
cccaattattaacag

SEQ ID NO: 455119 - DNA, 15 bp, Homo sapiens
acccaattattaaca

SEQ ID NO: 455120 - DNA, 15 bp, Homo sapiens
aacccaattattaac

SEQ ID NO: 455121 - DNA, 15 bp, Homo sapiens
aaacccaattattaa

SEQ ID NO: 455122 - DNA, 15 bp, Homo sapiens
taaacccaattatta

SEQ ID NO: 455123 - DNA, 15 bp, Homo sapiens
ttaaacccaattatt

SEQ ID NO: 455124 - DNA, 15 bp, Homo sapiens
tttaaacccaattat

SEQ ID NO: 455125 - DNA, 15 bp, Homo sapiens
atttaaacccaatta

SEQ ID NO: 455126 - DNA, 15 bp, Homo sapiens
catttaaacccaatt

SEQ ID NO: 455127 - DNA, 15 bp, Homo sapiens
acatttaaacccaat

SEQ ID NO: 455128 - DNA, 15 bp, Homo sapiens
gacatttaaacccaa

SEQ ID NO: 455129 - DNA, 15 bp, Homo sapiens
tgacatttaaaccca

SEQ ID NO: 455130 - DNA, 15 bp, Homo sapiens
atgacatttaaaccc

SEQ ID NO: 455131 - DNA, 15 bp, Homo sapiens
aatgacatttaaacc

SEQ ID NO: 455132 - DNA, 15 bp, Homo sapiens
taatgacatttaaac

SEQ ID NO: 455133 - DNA, 15 bp, Homo sapiens
ttaatgacatttaaa

SEQ ID NO: 455134 - DNA, 15 bp, Homo sapiens
tttaatgacatttaa

SEQ ID NO: 455135 - DNA, 15 bp, Homo sapiens
ttttaatgacattta

SEQ ID NO: 455136 - DNA, 15 bp, Homo sapiens
attttaatgacattt

SEQ ID NO: 455137 - DNA, 15 bp, Homo sapiens
tattttaatgacatt

SEQ ID NO: 455138 - DNA, 15 bp, Homo sapiens
ttattttaatgacat

SEQ ID NO: 455139 - DNA, 15 bp, Homo sapiens
cttattttaatgaca

SEQ ID NO: 455140 - DNA, 15 bp, Homo sapiens
acttattttaatgac

SEQ ID NO: 455141 - DNA, 15 bp, Homo sapiens
aacttattttaatga

SEQ ID NO: 455142 - DNA, 15 bp, Homo sapiens
taacttattttaatg

SEQ ID NO: 455143 - DNA, 15 bp, Homo sapiens
ataacttattttaat

SEQ ID NO: 455144 - DNA, 15 bp, Homo sapiens
aataacttattttaa

SEQ ID NO: 455145 - DNA, 15 bp, Homo sapiens
aaataacttatttta

SEQ ID NO: 455146 - DNA, 15 bp, Homo sapiens
aaaataacttatttt

SEQ ID NO: 455147 - DNA, 15 bp, Homo sapiens
caaaataacttattt

SEQ ID NO: 455148 - DNA, 15 bp, Homo sapiens
acaaaataacttatt

SEQ ID NO: 455149 - DNA, 15 bp, Homo sapiens
gacaaaataacttat

SEQ ID NO: 455150 - DNA, 15 bp, Homo sapiens
ggacaaaataactta

SEQ ID NO: 455151 - DNA, 15 bp, Homo sapiens
aggacaaaataactt

SEQ ID NO: 455152 - DNA, 15 bp, Homo sapiens
aaggacaaaataact

SEQ ID NO: 455153 - DNA, 15 bp, Homo sapiens
aaaggacaaaataac

SEQ ID NO: 455154 - DNA, 15 bp, Homo sapiens
aaaaggacaaaataa

SEQ ID NO: 455155 - DNA, 15 bp, Homo sapiens
aaaaaggacaaaata

SEQ ID NO: 455156 - DNA, 15 bp, Homo sapiens
taaaaaggacaaaat

SEQ ID NO: 455157 - DNA, 15 bp, Homo sapiens
ctaaaaaggacaaaa

SEQ ID NO: 455158 - DNA, 15 bp, Homo sapiens
tctaaaaaggacaaa

SEQ ID NO: 455159 - DNA, 15 bp, Homo sapiens
ttctaaaaaggacaa

SEQ ID NO: 455160 - DNA, 15 bp, Homo sapiens
tttctaaaaaggaca

SEQ ID NO: 455161 - DNA, 15 bp, Homo sapiens
ttttctaaaaaggac

SEQ ID NO: 455162 - DNA, 15 bp, Homo sapiens
cttttctaaaaagga

SEQ ID NO: 455163 - DNA, 15 bp, Homo sapiens
acttttctaaaaagg

SEQ ID NO: 455164 - DNA, 15 bp, Homo sapiens
tacttttctaaaaag

SEQ ID NO: 455165 - DNA, 15 bp, Homo sapiens
ttacttttctaaaaa

SEQ ID NO: 455166 - DNA, 15 bp, Homo sapiens
attacttttctaaaa

SEQ ID NO: 455167 - DNA, 15 bp, Homo sapiens
tattacttttctaaa

SEQ ID NO: 455168 - DNA, 15 bp, Homo sapiens
ttattacttttctaa

SEQ ID NO: 455169 - DNA, 15 bp, Homo sapiens
gttattacttttcta

SEQ ID NO: 455170 - DNA, 15 bp, Homo sapiens
tgttattacttttct

SEQ ID NO: 455171 - DNA, 15 bp, Homo sapiens
atgttattacttttc

SEQ ID NO: 455172 - DNA, 15 bp, Homo sapiens
catgttattactttt

SEQ ID NO: 455173 - DNA, 15 bp, Homo sapiens
gcatgttattacttt

SEQ ID NO: 455174 - DNA, 15 bp, Homo sapiens
agcatgttattactt

SEQ ID NO: 455175 - DNA, 15 bp, Homo sapiens
tagcatgttattact

SEQ ID NO: 455176 - DNA, 15 bp, Homo sapiens
atagcatgttattac

SEQ ID NO: 455177 - DNA, 15 bp, Homo sapiens
aatagcatgttatta

SEQ ID NO: 455178 - DNA, 15 bp, Homo sapiens
taatagcatgttatt

SEQ ID NO: 455179 - DNA, 15 bp, Homo sapiens
ataatagcatgttat

SEQ ID NO: 455180 - DNA, 15 bp, Homo sapiens
tataatagcatgtta

SEQ ID NO: 455181 - DNA, 15 bp, Homo sapiens
ttataatagcatgtt

SEQ ID NO: 455182 - DNA, 15 bp, Homo sapiens
tttataatagcatgt

SEQ ID NO: 455183 - DNA, 15 bp, Homo sapiens
ttttataatagcatg

SEQ ID NO: 455184 - DNA, 15 bp, Homo sapiens
tttttataatagcat

SEQ ID NO: 455185 - DNA, 15 bp, Homo sapiens
ttttttataatagca

SEQ ID NO: 455186 - DNA, 15 bp, Homo sapiens
tttttttataatagc

SEQ ID NO: 455187 - DNA, 15 bp, Homo sapiens
ttttttttataatag

SEQ ID NO: 455188 - DNA, 15 bp, Homo sapiens
tttttttttataata

SEQ ID NO: 455189 - DNA, 15 bp, Homo sapiens
ctttttttttataat

SEQ ID NO: 455190 - DNA, 15 bp, Homo sapiens
tctttttttttataa

SEQ ID NO: 455191 - DNA, 15 bp, Homo sapiens
gtctttttttttata

SEQ ID NO: 455192 - DNA, 15 bp, Homo sapiens
agtctttttttttat

SEQ ID NO: 455193 - DNA, 15 bp, Homo sapiens
aagtcttttttttta

SEQ ID NO: 455194 - DNA, 15 bp, Homo sapiens
caagtcttttttttt

SEQ ID NO: 455195 - DNA, 15 bp, Homo sapiens
acaagtctttttttt

SEQ ID NO: 455196 - DNA, 15 bp, Homo sapiens
tacaagtcttttttt

SEQ ID NO: 455197 - DNA, 15 bp, Homo sapiens
ctacaagtctttttt

SEQ ID NO: 455198 - DNA, 15 bp, Homo sapiens
cctacaagtcttttt

SEQ ID NO: 455199 - DNA, 15 bp, Homo sapiens
tcctacaagtctttt

SEQ ID NO: 455200 - DNA, 15 bp, Homo sapiens
ttcctacaagtcttt

SEQ ID NO: 455201 - DNA, 15 bp, Homo sapiens
attcctacaagtctt

SEQ ID NO: 455202 - DNA, 15 bp, Homo sapiens
tattcctacaagtct

SEQ ID NO: 455203 - DNA, 15 bp, Homo sapiens
atattcctacaagtc

SEQ ID NO: 455204 - DNA, 15 bp, Homo sapiens
tatattcctacaagt

SEQ ID NO: 455205 - DNA, 15 bp, Homo sapiens
ttatattcctacaag

SEQ ID NO: 455206 - DNA, 15 bp, Homo sapiens
tttatattcctacaa

SEQ ID NO: 455207 - DNA, 15 bp, Homo sapiens
ttttatattcctaca

SEQ ID NO: 455208 - DNA, 15 bp, Homo sapiens
attttatattcctac

SEQ ID NO: 455209 - DNA, 15 bp, Homo sapiens
cattttatattccta

SEQ ID NO: 455210 - DNA, 15 bp, Homo sapiens
acattttatattcct

SEQ ID NO: 455211 - DNA, 15 bp, Homo sapiens
cacattttatattcc

SEQ ID NO: 455212 - DNA, 15 bp, Homo sapiens
acacattttatattc

SEQ ID NO: 455213 - DNA, 15 bp, Homo sapiens
cacacattttatatt

SEQ ID NO: 455214 - DNA, 15 bp, Homo sapiens
acacacattttatat

SEQ ID NO: 455215 - DNA, 15 bp, Homo sapiens
aacacacattttata

SEQ ID NO: 455216 - DNA, 15 bp, Homo sapiens
aaacacacattttat

SEQ ID NO: 455217 - DNA, 15 bp, Homo sapiens
aaaacacacatttta

SEQ ID NO: 455218 - DNA, 15 bp, Homo sapiens
taaaacacacatttt

SEQ ID NO: 455219 - DNA, 15 bp, Homo sapiens
gtaaaacacacattt

SEQ ID NO: 455220 - DNA, 15 bp, Homo sapiens
tgtaaaacacacatt

SEQ ID NO: 455221 - DNA, 15 bp, Homo sapiens
atgtaaaacacacat

SEQ ID NO: 455222 - DNA, 15 bp, Homo sapiens
catgtaaaacacaca

SEQ ID NO: 455223 - DNA, 15 bp, Homo sapiens
acatgtaaaacacac

SEQ ID NO: 455224 - DNA, 15 bp, Homo sapiens
tacatgtaaaacaca

SEQ ID NO: 455225 - DNA, 15 bp, Homo sapiens
atacatgtaaaacac

SEQ ID NO: 455226 - DNA, 15 bp, Homo sapiens
gatacatgtaaaaca

SEQ ID NO: 455227 - DNA, 15 bp, Homo sapiens
ggatacatgtaaaac

SEQ ID NO: 455228 - DNA, 15 bp, Homo sapiens
aggatacatgtaaaa

SEQ ID NO: 455229 - DNA, 15 bp, Homo sapiens
caggatacatgtaaa

SEQ ID NO: 455230 - DNA, 15 bp, Homo sapiens
acaggatacatgtaa

SEQ ID NO: 455231 - DNA, 15 bp, Homo sapiens
aacaggatacatgta

SEQ ID NO: 455232 - DNA, 15 bp, Homo sapiens
taacaggatacatgt

SEQ ID NO: 455233 - DNA, 15 bp, Homo sapiens
ttaacaggatacatg

SEQ ID NO: 455234 - DNA, 15 bp, Homo sapiens
attaacaggatacat

SEQ ID NO: 455235 - DNA, 15 bp, Homo sapiens
aattaacaggataca

SEQ ID NO: 455236 - DNA, 15 bp, Homo sapiens
caattaacaggatac

SEQ ID NO: 455237 - DNA, 15 bp, Homo sapiens
tcaattaacaggata

SEQ ID NO: 455238 - DNA, 15 bp, Homo sapiens
gtcaattaacaggat

SEQ ID NO: 455239 - DNA, 15 bp, Homo sapiens
agtcaattaacagga

SEQ ID NO: 455240 - DNA, 15 bp, Homo sapiens
aagtcaattaacagg

SEQ ID NO: 455241 - DNA, 15 bp, Homo sapiens
caagtcaattaacag

SEQ ID NO: 455242 - DNA, 15 bp, Homo sapiens
gcaagtcaattaaca

SEQ ID NO: 455243 - DNA, 15 bp, Homo sapiens
agcaagtcaattaac

SEQ ID NO: 455244 - DNA, 15 bp, Homo sapiens
aagcaagtcaattaa

SEQ ID NO: 455245 - DNA, 15 bp, Homo sapiens
aaagcaagtcaatta

SEQ ID NO: 455246 - DNA, 15 bp, Homo sapiens
aaaagcaagtcaatt

SEQ ID NO: 455247 - DNA, 15 bp, Homo sapiens
taaaagcaagtcaat

SEQ ID NO: 455248 - DNA, 15 bp, Homo sapiens
ataaaagcaagtcaa

SEQ ID NO: 455249 - DNA, 15 bp, Homo sapiens
aataaaagcaagtca

SEQ ID NO: 455250 - DNA, 15 bp, Homo sapiens
gaataaaagcaagtc

SEQ ID NO: 455251 - DNA, 15 bp, Homo sapiens
tgaataaaagcaagt

SEQ ID NO: 455252 - DNA, 15 bp, Homo sapiens
ctgaataaaagcaag

SEQ ID NO: 455253 - DNA, 15 bp, Homo sapiens
tctgaataaaagcaa

SEQ ID NO: 455254 - DNA, 15 bp, Homo sapiens
atctgaataaaagca

SEQ ID NO: 455255 - DNA, 15 bp, Homo sapiens
aatctgaataaaagc

SEQ ID NO: 455256 - DNA, 15 bp, Homo sapiens
aaatctgaataaaag

SEQ ID NO: 455257 - DNA, 15 bp, Homo sapiens
aaaatctgaataaaa

SEQ ID NO: 455258 - DNA, 15 bp, Homo sapiens
aaaaatctgaataaa

SEQ ID NO: 455259 - DNA, 15 bp, Homo sapiens
aaaaaatctgaataa

SEQ ID NO: 455260 - DNA, 15 bp, Homo sapiens
caaaaaatctgaata

SEQ ID NO: 455261 - DNA, 15 bp, Homo sapiens
gcaaaaaatctgaat

SEQ ID NO: 455262 - DNA, 15 bp, Homo sapiens
tgcaaaaaatctgaa

SEQ ID NO: 455263 - DNA, 15 bp, Homo sapiens
ctgcaaaaaatctga

SEQ ID NO: 455264 - DNA, 15 bp, Homo sapiens
gctgcaaaaaatctg

SEQ ID NO: 455265 - DNA, 15 bp, Homo sapiens
ggctgcaaaaaatct

SEQ ID NO: 455266 - DNA, 15 bp, Homo sapiens
gggctgcaaaaaatc

SEQ ID NO: 455267 - DNA, 15 bp, Homo sapiens
agggctgcaaaaaat

SEQ ID NO: 455268 - DNA, 15 bp, Homo sapiens
aagggctgcaaaaaa

SEQ ID NO: 455269 - DNA, 15 bp, Homo sapiens
aaagggctgcaaaaa

SEQ ID NO: 455270 - DNA, 15 bp, Homo sapiens
gaaagggctgcaaaa

SEQ ID NO: 455271 - DNA, 15 bp, Homo sapiens
agaaagggctgcaaa

SEQ ID NO: 455272 - DNA, 15 bp, Homo sapiens
cagaaagggctgcaa

SEQ ID NO: 455273 - DNA, 15 bp, Homo sapiens
acagaaagggctgca

SEQ ID NO: 455274 - DNA, 15 bp, Homo sapiens
aacagaaagggctgc

SEQ ID NO: 455275 - DNA, 15 bp, Homo sapiens
aaacagaaagggctg

SEQ ID NO: 455276 - DNA, 15 bp, Homo sapiens
taaacagaaagggct

SEQ ID NO: 455277 - DNA, 15 bp, Homo sapiens
gtaaacagaaagggc

SEQ ID NO: 455278 - DNA, 15 bp, Homo sapiens
ggtaaacagaaaggg

SEQ ID NO: 455279 - DNA, 15 bp, Homo sapiens
tggtaaacagaaagg

SEQ ID NO: 455280 - DNA, 15 bp, Homo sapiens
ctggtaaacagaaag

SEQ ID NO: 455281 - DNA, 15 bp, Homo sapiens
cctggtaaacagaaa

SEQ ID NO: 455282 - DNA, 15 bp, Homo sapiens
acctggtaaacagaa

SEQ ID NO: 455283 - DNA, 15 bp, Homo sapiens
aacctggtaaacaga

SEQ ID NO: 455284 - DNA, 15 bp, Homo sapiens
taacctggtaaacag

SEQ ID NO: 455285 - DNA, 15 bp, Homo sapiens
ataacctggtaaaca

SEQ ID NO: 455286 - DNA, 15 bp, Homo sapiens
gataacctggtaaac

SEQ ID NO: 455287 - DNA, 15 bp, Homo sapiens
agataacctggtaaa

SEQ ID NO: 455288 - DNA, 15 bp, Homo sapiens
aagataacctggtaa

SEQ ID NO: 455289 - DNA, 15 bp, Homo sapiens
caagataacctggta

SEQ ID NO: 455290 - DNA, 15 bp, Homo sapiens
ccaagataacctggt

SEQ ID NO: 455291 - DNA, 15 bp, Homo sapiens
tccaagataacctgg

SEQ ID NO: 455292 - DNA, 15 bp, Homo sapiens
ctccaagataacctg

SEQ ID NO: 455293 - DNA, 15 bp, Homo sapiens
tctccaagataacct

SEQ ID NO: 455294 - DNA, 15 bp, Homo sapiens
gtctccaagataacc

SEQ ID NO: 455295 - DNA, 15 bp, Homo sapiens
tgtctccaagataac

SEQ ID NO: 455296 - DNA, 15 bp, Homo sapiens
atgtctccaagataa

SEQ ID NO: 455297 - DNA, 15 bp, Homo sapiens
tatgtctccaagata

SEQ ID NO: 455298 - DNA, 15 bp, Homo sapiens
atatgtctccaagat

SEQ ID NO: 455299 - DNA, 15 bp, Homo sapiens
aatatgtctccaaga

SEQ ID NO: 455300 - DNA, 15 bp, Homo sapiens
aaatatgtctccaag

SEQ ID NO: 455301 - DNA, 15 bp, Homo sapiens
taaatatgtctccaa

SEQ ID NO: 455302 - DNA, 15 bp, Homo sapiens
ataaatatgtctcca

SEQ ID NO: 455303 - DNA, 15 bp, Homo sapiens
aataaatatgtctcc

SEQ ID NO: 455304 - DNA, 15 bp, Homo sapiens
gaataaatatgtctc

SEQ ID NO: 455305 - DNA, 15 bp, Homo sapiens
ggaataaatatgtct

SEQ ID NO: 455306 - DNA, 15 bp, Homo sapiens
tggaataaatatgtc

SEQ ID NO: 455307 - DNA, 15 bp, Homo sapiens
ttggaataaatatgt

SEQ ID NO: 455308 - DNA, 15 bp, Homo sapiens
tttggaataaatatg

SEQ ID NO: 455309 - DNA, 15 bp, Homo sapiens
atttggaataaatat

SEQ ID NO: 455310 - DNA, 15 bp, Homo sapiens
aatttggaataaata

SEQ ID NO: 455311 - DNA, 15 bp, Homo sapiens
gaatttggaataaat

SEQ ID NO: 455312 - DNA, 15 bp, Homo sapiens
ggaatttggaataaa

SEQ ID NO: 455313 - DNA, 15 bp, Homo sapiens
aggaatttggaataa

SEQ ID NO: 455314 - DNA, 15 bp, Homo sapiens
aaggaatttggaata

SEQ ID NO: 455315 - DNA, 15 bp, Homo sapiens
aaaggaatttggaat

SEQ ID NO: 455316 - DNA, 15 bp, Homo sapiens
aaaaggaatttggaa

SEQ ID NO: 455317 - DNA, 15 bp, Homo sapiens
aaaaaggaatttgga

SEQ ID NO: 455318 - DNA, 15 bp, Homo sapiens
aaaaaaggaatttgg

SEQ ID NO: 455319 - DNA, 15 bp, Homo sapiens
aaaaaaaggaatttg

SEQ ID NO: 455320 - DNA, 15 bp, Homo sapiens
aaaaaaaaggaattt

SEQ ID NO: 455321 - DNA, 15 bp, Homo sapiens
aaaaaaaaaggaatt

SEQ ID NO: 455322 - DNA, 15 bp, Homo sapiens
aaaaaaaaaaggaat

SEQ ID NO: 455323 - DNA, 15 bp, Homo sapiens
aaaaaaaaaaaggaa

SEQ ID NO: 455324 - DNA, 15 bp, Homo sapiens
aaaaaaaaaaaagga

SEQ ID NO: 455325 - DNA, 15 bp, Homo sapiens
aaaaaaaaaaaaagg

SEQ ID NO: 455326 - DNA, 15 bp, Homo sapiens
atctcaaaaaaaaaa

SEQ ID NO: 455327 - DNA, 15 bp, Homo sapiens
catctcaaaaaaaaa

SEQ ID NO: 455328 - DNA, 15 bp, Homo sapiens
ccatctcaaaaaaaa

SEQ ID NO: 455329 - DNA, 15 bp, Homo sapiens
tccatctcaaaaaaa

SEQ ID NO: 455330 - DNA, 15 bp, Homo sapiens
ctccatctcaaaaaa

SEQ ID NO: 455331 - DNA, 15 bp, Homo sapiens
actccatctcaaaaa

SEQ ID NO: 455332 - DNA, 15 bp, Homo sapiens
gactccatctcaaaa

SEQ ID NO: 455333 - DNA, 15 bp, Homo sapiens
agactccatctcaaa

SEQ ID NO: 455334 - DNA, 15 bp, Homo sapiens
gagactccatctcaa

SEQ ID NO: 455335 - DNA, 15 bp, Homo sapiens
cgagactccatctca

SEQ ID NO: 455336 - DNA, 15 bp, Homo sapiens
gcgagactccatctc

SEQ ID NO: 455337 - DNA, 15 bp, Homo sapiens
agcgagactccatct

SEQ ID NO: 455338 - DNA, 15 bp, Homo sapiens
gagcgagactccatc

SEQ ID NO: 455339 - DNA, 15 bp, Homo sapiens
agagcgagactccat

SEQ ID NO: 455340 - DNA, 15 bp, Homo sapiens
cagagcgagactcca

SEQ ID NO: 455341 - DNA, 15 bp, Homo sapiens
acagagcgagactcc

SEQ ID NO: 455342 - DNA, 15 bp, Homo sapiens
cgccactgcactcca

SEQ ID NO: 455343 - DNA, 15 bp, Homo sapiens
gcgccactgcactcc

SEQ ID NO: 455344 - DNA, 15 bp, Homo sapiens
agcgccactgcactc

SEQ ID NO: 455345 - DNA, 15 bp, Homo sapiens
tagcgccactgcact

SEQ ID NO: 455346 - DNA, 15 bp, Homo sapiens
atagcgccactgcac

SEQ ID NO: 455347 - DNA, 15 bp, Homo sapiens
gatagcgccactgca

SEQ ID NO: 455348 - DNA, 15 bp, Homo sapiens
agatagcgccactgc

SEQ ID NO: 455349 - DNA, 15 bp, Homo sapiens
aagatagcgccactg

SEQ ID NO: 455350 - DNA, 15 bp, Homo sapiens
caagatagcgccact

SEQ ID NO: 455351 - DNA, 15 bp, Homo sapiens
ccaagatagcgccac

SEQ ID NO: 455352 - DNA, 15 bp, Homo sapiens
gccaagatagcgcca

SEQ ID NO: 455353 - DNA, 15 bp, Homo sapiens
agccaagatagcgcc

SEQ ID NO: 455354 - DNA, 15 bp, Homo sapiens
gagccaagatagcgc

SEQ ID NO: 455355 - DNA, 15 bp, Homo sapiens
tgagccaagatagcg

SEQ ID NO: 455356 - DNA, 15 bp, Homo sapiens
atgagccaagatagc

SEQ ID NO: 455357 - DNA, 15 bp, Homo sapiens
aatgagccaagatag

SEQ ID NO: 455358 - DNA, 15 bp, Homo sapiens
caatgagccaagata

SEQ ID NO: 455359 - DNA, 15 bp, Homo sapiens
gcaatgagccaagat

SEQ ID NO: 455360 - DNA, 15 bp, Homo sapiens
tgcaatgagccaaga

SEQ ID NO: 455361 - DNA, 15 bp, Homo sapiens
ttgcaatgagccaag

SEQ ID NO: 455362 - DNA, 15 bp, Homo sapiens
cttgcaatgagccaa

SEQ ID NO: 455363 - DNA, 15 bp, Homo sapiens
gcttgcaatgagcca

SEQ ID NO: 455364 - DNA, 15 bp, Homo sapiens
agcttgcaatgagcc

SEQ ID NO: 455365 - DNA, 15 bp, Homo sapiens
gagcttgcaatgagc

SEQ ID NO: 455366 - DNA, 15 bp, Homo sapiens
ggagcttgcaatgag

SEQ ID NO: 455367 - DNA, 15 bp, Homo sapiens
cggagcttgcaatga

SEQ ID NO: 455368 - DNA, 15 bp, Homo sapiens
gcggagcttgcaatg

SEQ ID NO: 455369 - DNA, 15 bp, Homo sapiens
ggcggagcttgcaat

SEQ ID NO: 455370 - DNA, 15 bp, Homo sapiens
aggcggagcttgcaa

SEQ ID NO: 455371 - DNA, 15 bp, Homo sapiens
gaggcggagcttgca

SEQ ID NO: 455372 - DNA, 15 bp, Homo sapiens
ggaggcggagcttgc

SEQ ID NO: 455373 - DNA, 15 bp, Homo sapiens
gggaggcggagcttg

SEQ ID NO: 455374 - DNA, 15 bp, Homo sapiens
cgggaggcggagctt

SEQ ID NO: 455375 - DNA, 15 bp, Homo sapiens
ccgggaggcggagct

SEQ ID NO: 455376 - DNA, 15 bp, Homo sapiens
cccgggaggcggagc

SEQ ID NO: 455377 - DNA, 15 bp, Homo sapiens
acccgggaggcggag

SEQ ID NO: 455378 - DNA, 15 bp, Homo sapiens
aacccgggaggcgga

SEQ ID NO: 455379 - DNA, 15 bp, Homo sapiens
gaacccgggaggcgg

SEQ ID NO: 455380 - DNA, 15 bp, Homo sapiens
tgaacccgggaggcg

SEQ ID NO: 455381 - DNA, 15 bp, Homo sapiens
gtgaacccgggaggc

SEQ ID NO: 455382 - DNA, 15 bp, Homo sapiens
cgtgaacccgggagg

SEQ ID NO: 455383 - DNA, 15 bp, Homo sapiens
gcgtgaacccgggag

SEQ ID NO: 455384 - DNA, 15 bp, Homo sapiens
ggcgtgaacccggga

SEQ ID NO: 455385 - DNA, 15 bp, Homo sapiens
tggcgtgaacccggg

SEQ ID NO: 455386 - DNA, 15 bp, Homo sapiens
gtggcgtgaacccgg

SEQ ID NO: 455387 - DNA, 15 bp, Homo sapiens
agtggcgtgaacccg

SEQ ID NO: 455388 - DNA, 15 bp, Homo sapiens
gagtggcgtgaaccc

SEQ ID NO: 455389 - DNA, 15 bp, Homo sapiens
agagtggcgtgaacc

SEQ ID NO: 455390 - DNA, 15 bp, Homo sapiens
gagagtggcgtgaac

SEQ ID NO: 455391 - DNA, 15 bp, Homo sapiens
ggagagtggcgtgaa

SEQ ID NO: 455392 - DNA, 15 bp, Homo sapiens
aggagagtggcgtga

SEQ ID NO: 455393 - DNA, 15 bp, Homo sapiens
caggagagtggcgtg

SEQ ID NO: 455394 - DNA, 15 bp, Homo sapiens
gcaggagagtggcgt

SEQ ID NO: 455395 - DNA, 15 bp, Homo sapiens
ggcaggagagtggcg

SEQ ID NO: 455396 - DNA, 15 bp, Homo sapiens
aggcaggagagtggc

SEQ ID NO: 455397 - DNA, 15 bp, Homo sapiens
gaggcaggagagtgg

SEQ ID NO: 455398 - DNA, 15 bp, Homo sapiens
tgaggcaggagagtg

SEQ ID NO: 455399 - DNA, 15 bp, Homo sapiens
ctgaggcaggagagt

SEQ ID NO: 455400 - DNA, 15 bp, Homo sapiens
gctgaggcaggagag

SEQ ID NO: 455401 - DNA, 15 bp, Homo sapiens
cgggaggctgaggca

SEQ ID NO: 455402 - DNA, 15 bp, Homo sapiens
tcgggaggctgaggc

SEQ ID NO: 455403 - DNA, 15 bp, Homo sapiens
agctactcgggaggc

SEQ ID NO: 455404 - DNA, 15 bp, Homo sapiens
cagctactcgggagg

SEQ ID NO: 455405 - DNA, 15 bp, Homo sapiens
ccagctactcgggag

SEQ ID NO: 455406 - DNA, 15 bp, Homo sapiens
cccagctactcggga

SEQ ID NO: 455407 - DNA, 15 bp, Homo sapiens
tcccagctactcggg

SEQ ID NO: 455408 - DNA, 15 bp, Homo sapiens
gtcccagctactcgg

SEQ ID NO: 455409 - DNA, 15 bp, Homo sapiens
agtcccagctactcg

SEQ ID NO: 455410 - DNA, 15 bp, Homo sapiens
tagtcccagctactc

SEQ ID NO: 455411 - DNA, 15 bp, Homo sapiens
gcgcctgtagtccca

SEQ ID NO: 455412 - DNA, 15 bp, Homo sapiens
ggcgcctgtagtccc

SEQ ID NO: 455413 - DNA, 15 bp, Homo sapiens
gggcgcctgtagtcc

SEQ ID NO: 455414 - DNA, 15 bp, Homo sapiens
cgggcgcctgtagtc

SEQ ID NO: 455415 - DNA, 15 bp, Homo sapiens
gcgggcgcctgtagt

SEQ ID NO: 455416 - DNA, 15 bp, Homo sapiens
ggcgggcgcctgtag

SEQ ID NO: 455417 - DNA, 15 bp, Homo sapiens
tggcgggcgcctgta

SEQ ID NO: 455418 - DNA, 15 bp, Homo sapiens
gtggcgggcgcctgt

SEQ ID NO: 455419 - DNA, 15 bp, Homo sapiens
ggtggcgggcgcctg

SEQ ID NO: 455420 - DNA, 15 bp, Homo sapiens
tggtggcgggcgcct

SEQ ID NO: 455421 - DNA, 15 bp, Homo sapiens
gtggtggcgggcgcc

SEQ ID NO: 455422 - DNA, 15 bp, Homo sapiens
cgtggtggcgggcgc

SEQ ID NO: 455423 - DNA, 15 bp, Homo sapiens
gcgtggtggcgggcg

SEQ ID NO: 455424 - DNA, 15 bp, Homo sapiens
ggcgtggtggcgggc

SEQ ID NO: 455425 - DNA, 15 bp, Homo sapiens
gggcgtggtggcggg

SEQ ID NO: 455426 - DNA, 15 bp, Homo sapiens
tgggcgtggtggcgg

SEQ ID NO: 455427 - DNA, 15 bp, Homo sapiens
cattagctgggcgtg

SEQ ID NO: 455428 - DNA, 15 bp, Homo sapiens
acattagctgggcgt

SEQ ID NO: 455429 - DNA, 15 bp, Homo sapiens
aacattagctgggcg

SEQ ID NO: 455430 - DNA, 15 bp, Homo sapiens
aaacattagctgggc

SEQ ID NO: 455431 - DNA, 15 bp, Homo sapiens
aaaacattagctggg

SEQ ID NO: 455432 - DNA, 15 bp, Homo sapiens
aaaaacattagctgg

SEQ ID NO: 455433 - DNA, 15 bp, Homo sapiens
aaaaaacattagctg

SEQ ID NO: 455434 - DNA, 15 bp, Homo sapiens
aaaaaaacattagct

SEQ ID NO: 455435 - DNA, 15 bp, Homo sapiens
aaaaaaaacattagc

SEQ ID NO: 455436 - DNA, 15 bp, Homo sapiens
aaaaaaaaacattag

SEQ ID NO: 455437 - DNA, 15 bp, Homo sapiens
aaaaaaaaaacatta

SEQ ID NO: 455438 - DNA, 15 bp, Homo sapiens
aaaaaaaaaaacatt

SEQ ID NO: 455439 - DNA, 15 bp, Homo sapiens
taaaaaaaaaaacat

SEQ ID NO: 455440 - DNA, 15 bp, Homo sapiens
ataaaaaaaaaaaca

SEQ ID NO: 455441 - DNA, 15 bp, Homo sapiens
tataaaaaaaaaaac

SEQ ID NO: 455442 - DNA, 15 bp, Homo sapiens
atataaaaaaaaaaa

SEQ ID NO: 455443 - DNA, 15 bp, Homo sapiens
aatataaaaaaaaaa

SEQ ID NO: 455444 - DNA, 15 bp, Homo sapiens
aaatataaaaaaaaa

SEQ ID NO: 455445 - DNA, 15 bp, Homo sapiens
aaaatataaaaaaaa

SEQ ID NO: 455446 - DNA, 15 bp, Homo sapiens
aaaaatataaaaaaa

SEQ ID NO: 455447 - DNA, 15 bp, Homo sapiens
taaaaatataaaaaa

SEQ ID NO: 455448 - DNA, 15 bp, Homo sapiens
ctaaaaatataaaaa

SEQ ID NO: 455449 - DNA, 15 bp, Homo sapiens
actaaaaatataaaa

SEQ ID NO: 455450 - DNA, 15 bp, Homo sapiens
tactaaaaatataaa

SEQ ID NO: 455451 - DNA, 15 bp, Homo sapiens
ctactaaaaatataa

SEQ ID NO: 455452 - DNA, 15 bp, Homo sapiens
gctactaaaaatata

SEQ ID NO: 455453 - DNA, 15 bp, Homo sapiens
cgctactaaaaatat

SEQ ID NO: 455454 - DNA, 15 bp, Homo sapiens
tcgctactaaaaata

SEQ ID NO: 455455 - DNA, 15 bp, Homo sapiens
gtcgctactaaaaat

SEQ ID NO: 455456 - DNA, 15 bp, Homo sapiens
tgtcgctactaaaaa

SEQ ID NO: 455457 - DNA, 15 bp, Homo sapiens
ctgtcgctactaaaa

SEQ ID NO: 455458 - DNA, 15 bp, Homo sapiens
cctgtcgctactaaa

SEQ ID NO: 455459 - DNA, 15 bp, Homo sapiens
ccctgtcgctactaa

SEQ ID NO: 455460 - DNA, 15 bp, Homo sapiens
accctgtcgctacta

SEQ ID NO: 455461 - DNA, 15 bp, Homo sapiens
aaccctgtcgctact

SEQ ID NO: 455462 - DNA, 15 bp, Homo sapiens
aaaccctgtcgctac

SEQ ID NO: 455463 - DNA, 15 bp, Homo sapiens
gaaaccctgtcgcta

SEQ ID NO: 455464 - DNA, 15 bp, Homo sapiens
tgaaaccctgtcgct

SEQ ID NO: 455465 - DNA, 15 bp, Homo sapiens
gtgaaaccctgtcgc

SEQ ID NO: 455466 - DNA, 15 bp, Homo sapiens
ggtgaaaccctgtcg

SEQ ID NO: 455467 - DNA, 15 bp, Homo sapiens
cggtgaaaccctgtc

SEQ ID NO: 455468 - DNA, 15 bp, Homo sapiens
acggtgaaaccctgt

SEQ ID NO: 455469 - DNA, 15 bp, Homo sapiens
cacggtgaaaccctg

SEQ ID NO: 455470 - DNA, 15 bp, Homo sapiens
acacggtgaaaccct

SEQ ID NO: 455471 - DNA, 15 bp, Homo sapiens
aacacggtgaaaccc

SEQ ID NO: 455472 - DNA, 15 bp, Homo sapiens
taacacggtgaaacc

SEQ ID NO: 455473 - DNA, 15 bp, Homo sapiens
ctaacacggtgaaac

SEQ ID NO: 455474 - DNA, 15 bp, Homo sapiens
gctaacacggtgaaa

SEQ ID NO: 455475 - DNA, 15 bp, Homo sapiens
ggctaacacggtgaa

SEQ ID NO: 455476 - DNA, 15 bp, Homo sapiens
tggctaacacggtga

SEQ ID NO: 455477 - DNA, 15 bp, Homo sapiens
ctggctaacacggtg

SEQ ID NO: 455478 - DNA, 15 bp, Homo sapiens
cctggctaacacggt

SEQ ID NO: 455479 - DNA, 15 bp, Homo sapiens
tcctggctaacacgg

SEQ ID NO: 455480 - DNA, 15 bp, Homo sapiens
atcctggctaacacg

SEQ ID NO: 455481 - DNA, 15 bp, Homo sapiens
catcctggctaacac

SEQ ID NO: 455482 - DNA, 15 bp, Homo sapiens
ccatcctggctaaca

SEQ ID NO: 455483 - DNA, 15 bp, Homo sapiens
accatcctggctaac

SEQ ID NO: 455484 - DNA, 15 bp, Homo sapiens
gaccatcctggctaa

SEQ ID NO: 455485 - DNA, 15 bp, Homo sapiens
agaccatcctggcta

SEQ ID NO: 455486 - DNA, 15 bp, Homo sapiens
gagaccatcctggct

SEQ ID NO: 455487 - DNA, 15 bp, Homo sapiens
tgagaccatcctggc

SEQ ID NO: 455488 - DNA, 15 bp, Homo sapiens
ttgagaccatcctgg

SEQ ID NO: 455489 - DNA, 15 bp, Homo sapiens
attgagaccatcctg

SEQ ID NO: 455490 - DNA, 15 bp, Homo sapiens
gattgagaccatcct

SEQ ID NO: 455491 - DNA, 15 bp, Homo sapiens
agattgagaccatcc

SEQ ID NO: 455492 - DNA, 15 bp, Homo sapiens
gagattgagaccatc

SEQ ID NO: 455493 - DNA, 15 bp, Homo sapiens
ggagattgagaccat

SEQ ID NO: 455494 - DNA, 15 bp, Homo sapiens
aggagattgagacca

SEQ ID NO: 455495 - DNA, 15 bp, Homo sapiens
gaggagattgagacc

SEQ ID NO: 455496 - DNA, 15 bp, Homo sapiens
tgaggagattgagac

SEQ ID NO: 455497 - DNA, 15 bp, Homo sapiens
gtgaggagattgaga

SEQ ID NO: 455498 - DNA, 15 bp, Homo sapiens
tgtgaggagattgag

SEQ ID NO: 455499 - DNA, 15 bp, Homo sapiens
atgtgaggagattga

SEQ ID NO: 455500 - DNA, 15 bp, Homo sapiens
aatgtgaggagattg

SEQ ID NO: 455501 - DNA, 15 bp, Homo sapiens
caatgtgaggagatt

SEQ ID NO: 455502 - DNA, 15 bp, Homo sapiens
acaatgtgaggagat

SEQ ID NO: 455503 - DNA, 15 bp, Homo sapiens
cacaatgtgaggaga

SEQ ID NO: 455504 - DNA, 15 bp, Homo sapiens
tcacaatgtgaggag

SEQ ID NO: 455505 - DNA, 15 bp, Homo sapiens
atcacaatgtgagga

SEQ ID NO: 455506 - DNA, 15 bp, Homo sapiens
gatcacaatgtgagg

SEQ ID NO: 455507 - DNA, 15 bp, Homo sapiens
ggatcacaatgtgag

SEQ ID NO: 455508 - DNA, 15 bp, Homo sapiens
cggatcacaatgtga

SEQ ID NO: 455509 - DNA, 15 bp, Homo sapiens
gcggatcacaatgtg

SEQ ID NO: 455510 - DNA, 15 bp, Homo sapiens
ggcggatcacaatgt

SEQ ID NO: 455511 - DNA, 15 bp, Homo sapiens
aggcggatcacaatg

SEQ ID NO: 455512 - DNA, 15 bp, Homo sapiens
caggcggatcacaat

SEQ ID NO: 455513 - DNA, 15 bp, Homo sapiens
gcaggcggatcacaa

SEQ ID NO: 455514 - DNA, 15 bp, Homo sapiens
ggcaggcggatcaca

SEQ ID NO: 455515 - DNA, 15 bp, Homo sapiens
cgaggcaggcggatc

SEQ ID NO: 455516 - DNA, 15 bp, Homo sapiens
ccgaggcaggcggat

SEQ ID NO: 455517 - DNA, 15 bp, Homo sapiens
gccgaggcaggcgga

SEQ ID NO: 455518 - DNA, 15 bp, Homo sapiens
ggccgaggcaggcgg

SEQ ID NO: 455519 - DNA, 15 bp, Homo sapiens
aggccgaggcaggcg

SEQ ID NO: 455520 - DNA, 15 bp, Homo sapiens
gaggccgaggcaggc

SEQ ID NO: 455521 - DNA, 15 bp, Homo sapiens
ggaggccgaggcagg

SEQ ID NO: 455522 - DNA, 15 bp, Homo sapiens
gggaggccgaggcag

SEQ ID NO: 455523 - DNA, 15 bp, Homo sapiens
tgggaggccgaggca

SEQ ID NO: 455524 - DNA, 15 bp, Homo sapiens
ctttgggaggccgag

SEQ ID NO: 455525 - DNA, 15 bp, Homo sapiens
actttgggaggccga

SEQ ID NO: 455526 - DNA, 15 bp, Homo sapiens
cactttgggaggccg

SEQ ID NO: 455527 - DNA, 15 bp, Homo sapiens
ctggctcacgcctgt

SEQ ID NO: 455528 - DNA, 15 bp, Homo sapiens
gctggctcacgcctg

SEQ ID NO: 455529 - DNA, 15 bp, Homo sapiens
tgctggctcacgcct

SEQ ID NO: 455530 - DNA, 15 bp, Homo sapiens
gtgctggctcacgcc

SEQ ID NO: 455531 - DNA, 15 bp, Homo sapiens
cgtgctggctcacgc

SEQ ID NO: 455532 - DNA, 15 bp, Homo sapiens
gcgtgctggctcacg

SEQ ID NO: 455533 - DNA, 15 bp, Homo sapiens
ggcgtgctggctcac

SEQ ID NO: 455534 - DNA, 15 bp, Homo sapiens
aggcgtgctggctca

SEQ ID NO: 455535 - DNA, 15 bp, Homo sapiens
caggcgtgctggctc

SEQ ID NO: 455536 - DNA, 15 bp, Homo sapiens
ccaggcgtgctggct

SEQ ID NO: 455537 - DNA, 15 bp, Homo sapiens
gccaggcgtgctggc

SEQ ID NO: 455538 - DNA, 15 bp, Homo sapiens
ggccaggcgtgctgg

SEQ ID NO: 455539 - DNA, 15 bp, Homo sapiens
aggccaggcgtgctg

SEQ ID NO: 455540 - DNA, 15 bp, Homo sapiens
aaggccaggcgtgct

SEQ ID NO: 455541 - DNA, 15 bp, Homo sapiens
gaaggccaggcgtgc

SEQ ID NO: 455542 - DNA, 15 bp, Homo sapiens
ggaaggccaggcgtg

SEQ ID NO: 455543 - DNA, 15 bp, Homo sapiens
tggaaggccaggcgt

SEQ ID NO: 455544 - DNA, 15 bp, Homo sapiens
ttggaaggccaggcg

SEQ ID NO: 455545 - DNA, 15 bp, Homo sapiens
tttggaaggccaggc

SEQ ID NO: 455546 - DNA, 15 bp, Homo sapiens
atttggaaggccagg

SEQ ID NO: 455547 - DNA, 15 bp, Homo sapiens
aatttggaaggccag

SEQ ID NO: 455548 - DNA, 15 bp, Homo sapiens
gaatttggaaggcca

SEQ ID NO: 455549 - DNA, 15 bp, Homo sapiens
ggaatttggaaggcc

SEQ ID NO: 455550 - DNA, 15 bp, Homo sapiens
aggaatttggaaggc

SEQ ID NO: 455551 - DNA, 15 bp, Homo sapiens
aaggaatttggaagg

SEQ ID NO: 455552 - DNA, 15 bp, Homo sapiens
aaaggaatttggaag

SEQ ID NO: 455553 - DNA, 15 bp, Homo sapiens
taaaaggaatttgga

SEQ ID NO: 455554 - DNA, 15 bp, Homo sapiens
ttaaaaggaatttgg

SEQ ID NO: 455555 - DNA, 15 bp, Homo sapiens
gttaaaaggaatttg

SEQ ID NO: 455556 - DNA, 15 bp, Homo sapiens
tgttaaaaggaattt

SEQ ID NO: 455557 - DNA, 15 bp, Homo sapiens
ctgttaaaaggaatt

SEQ ID NO: 455558 - DNA, 15 bp, Homo sapiens
gctgttaaaaggaat

SEQ ID NO: 455559 - DNA, 15 bp, Homo sapiens
ggctgttaaaaggaa

SEQ ID NO: 455560 - DNA, 15 bp, Homo sapiens
aggctgttaaaagga

SEQ ID NO: 455561 - DNA, 15 bp, Homo sapiens
taggctgttaaaagg

SEQ ID NO: 455562 - DNA, 15 bp, Homo sapiens
ctaggctgttaaaag

SEQ ID NO: 455563 - DNA, 15 bp, Homo sapiens
gctaggctgttaaaa

SEQ ID NO: 455564 - DNA, 15 bp, Homo sapiens
tgctaggctgttaaa

SEQ ID NO: 455565 - DNA, 15 bp, Homo sapiens
ttgctaggctgttaa

SEQ ID NO: 455566 - DNA, 15 bp, Homo sapiens
tttgctaggctgtta

SEQ ID NO: 455567 - DNA, 15 bp, Homo sapiens
ttttgctaggctgtt

SEQ ID NO: 455568 - DNA, 15 bp, Homo sapiens
cttttgctaggctgt

SEQ ID NO: 455569 - DNA, 15 bp, Homo sapiens
tcttttgctaggctg

SEQ ID NO: 455570 - DNA, 15 bp, Homo sapiens
ttcttttgctaggct

SEQ ID NO: 455571 - DNA, 15 bp, Homo sapiens
attcttttgctaggc

SEQ ID NO: 455572 - DNA, 15 bp, Homo sapiens
tattcttttgctagg

SEQ ID NO: 455573 - DNA, 15 bp, Homo sapiens
ttattcttttgctag

SEQ ID NO: 455574 - DNA, 15 bp, Homo sapiens
attattcttttgcta

SEQ ID NO: 455575 - DNA, 15 bp, Homo sapiens
tattattcttttgct

SEQ ID NO: 455576 - DNA, 15 bp, Homo sapiens
ttattattcttttgc

SEQ ID NO: 455577 - DNA, 15 bp, Homo sapiens
cttattattcttttg

SEQ ID NO: 455578 - DNA, 15 bp, Homo sapiens
ccttattattctttt

SEQ ID NO: 455579 - DNA, 15 bp, Homo sapiens
tccttattattcttt

SEQ ID NO: 455580 - DNA, 15 bp, Homo sapiens
ttccttattattctt

SEQ ID NO: 455581 - DNA, 15 bp, Homo sapiens
cttccttattattct

SEQ ID NO: 455582 - DNA, 15 bp, Homo sapiens
ccttccttattattc

SEQ ID NO: 455583 - DNA, 15 bp, Homo sapiens
accttccttattatt

SEQ ID NO: 455584 - DNA, 15 bp, Homo sapiens
taccttccttattat

SEQ ID NO: 455585 - DNA, 15 bp, Homo sapiens
ttaccttccttatta

SEQ ID NO: 455586 - DNA, 15 bp, Homo sapiens
tttaccttccttatt

SEQ ID NO: 455587 - DNA, 15 bp, Homo sapiens
atttaccttccttat

SEQ ID NO: 455588 - DNA, 15 bp, Homo sapiens
gatttaccttcctta

SEQ ID NO: 455589 - DNA, 15 bp, Homo sapiens
agatttaccttcctt

SEQ ID NO: 455590 - DNA, 15 bp, Homo sapiens
cagatttaccttcct

SEQ ID NO: 455591 - DNA, 15 bp, Homo sapiens
gcagatttaccttcc

SEQ ID NO: 455592 - DNA, 15 bp, Homo sapiens
ggcagatttaccttc

SEQ ID NO: 455593 - DNA, 15 bp, Homo sapiens
gggcagatttacctt

SEQ ID NO: 455594 - DNA, 15 bp, Homo sapiens
ggggcagatttacct

SEQ ID NO: 455595 - DNA, 15 bp, Homo sapiens
aggggcagatttacc

SEQ ID NO: 455596 - DNA, 15 bp, Homo sapiens
taggggcagatttac

SEQ ID NO: 455597 - DNA, 15 bp, Homo sapiens
gtaggggcagattta

SEQ ID NO: 455598 - DNA, 15 bp, Homo sapiens
tgtaggggcagattt

SEQ ID NO: 455599 - DNA, 15 bp, Homo sapiens
ttgtaggggcagatt

SEQ ID NO: 455600 - DNA, 15 bp, Homo sapiens
cttgtaggggcagat

SEQ ID NO: 455601 - DNA, 15 bp, Homo sapiens
tcttgtaggggcaga

SEQ ID NO: 455602 - DNA, 15 bp, Homo sapiens
ttcttgtaggggcag

SEQ ID NO: 455603 - DNA, 15 bp, Homo sapiens
tttcttgtaggggca

SEQ ID NO: 455604 - DNA, 15 bp, Homo sapiens
ttttcttgtaggggc

SEQ ID NO: 455605 - DNA, 15 bp, Homo sapiens
attttcttgtagggg

SEQ ID NO: 455606 - DNA, 15 bp, Homo sapiens
tattttcttgtaggg

SEQ ID NO: 455607 - DNA, 15 bp, Homo sapiens
ttattttcttgtagg

SEQ ID NO: 455608 - DNA, 15 bp, Homo sapiens
attattttcttgtag

SEQ ID NO: 455609 - DNA, 15 bp, Homo sapiens
cattattttcttgta

SEQ ID NO: 455610 - DNA, 15 bp, Homo sapiens
gcattattttcttgt

SEQ ID NO: 455611 - DNA, 15 bp, Homo sapiens
agcattattttcttg

SEQ ID NO: 455612 - DNA, 15 bp, Homo sapiens
aagcattattttctt

SEQ ID NO: 455613 - DNA, 15 bp, Homo sapiens
gaagcattattttct

SEQ ID NO: 455614 - DNA, 15 bp, Homo sapiens
cgaagcattattttc

SEQ ID NO: 455615 - DNA, 15 bp, Homo sapiens
tcgaagcattatttt

SEQ ID NO: 455616 - DNA, 15 bp, Homo sapiens
gtcgaagcattattt

SEQ ID NO: 455617 - DNA, 15 bp, Homo sapiens
cgtcgaagcattatt

SEQ ID NO: 455618 - DNA, 15 bp, Homo sapiens
tcgtcgaagcattat

SEQ ID NO: 455619 - DNA, 15 bp, Homo sapiens
atcgtcgaagcatta

SEQ ID NO: 455620 - DNA, 15 bp, Homo sapiens
gatcgtcgaagcatt

SEQ ID NO: 455621 - DNA, 15 bp, Homo sapiens
ggatcgtcgaagcat

SEQ ID NO: 455622 - DNA, 15 bp, Homo sapiens
cggatcgtcgaagca

SEQ ID NO: 455623 - DNA, 15 bp, Homo sapiens
ccggatcgtcgaagc

SEQ ID NO: 455624 - DNA, 15 bp, Homo sapiens
gccggatcgtcgaag

SEQ ID NO: 455625 - DNA, 15 bp, Homo sapiens
agccggatcgtcgaa

SEQ ID NO: 455626 - DNA, 15 bp, Homo sapiens
aagccggatcgtcga

SEQ ID NO: 455627 - DNA, 15 bp, Homo sapiens
aaagccggatcgtcg

SEQ ID NO: 455628 - DNA, 15 bp, Homo sapiens
gaaagccggatcgtc

SEQ ID NO: 455629 - DNA, 15 bp, Homo sapiens
ggaaagccggatcgt

SEQ ID NO: 455630 - DNA, 15 bp, Homo sapiens
aggaaagccggatcg

SEQ ID NO: 455631 - DNA, 15 bp, Homo sapiens
aaggaaagccggatc

SEQ ID NO: 455632 - DNA, 15 bp, Homo sapiens
gaaggaaagccggat

SEQ ID NO: 455633 - DNA, 15 bp, Homo sapiens
ggaaggaaagccgga

SEQ ID NO: 455634 - DNA, 15 bp, Homo sapiens
aggaaggaaagccgg

SEQ ID NO: 455635 - DNA, 15 bp, Homo sapiens
caggaaggaaagccg

SEQ ID NO: 455636 - DNA, 15 bp, Homo sapiens
gcaggaaggaaagcc

SEQ ID NO: 455637 - DNA, 15 bp, Homo sapiens
agcaggaaggaaagc

SEQ ID NO: 455638 - DNA, 15 bp, Homo sapiens
tagcaggaaggaaag

SEQ ID NO: 455639 - DNA, 15 bp, Homo sapiens
gtagcaggaaggaaa

SEQ ID NO: 455640 - DNA, 15 bp, Homo sapiens
ggtagcaggaaggaa

SEQ ID NO: 455641 - DNA, 15 bp, Homo sapiens
gggtagcaggaagga

SEQ ID NO: 455642 - DNA, 15 bp, Homo sapiens
ggggtagcaggaagg

SEQ ID NO: 455643 - DNA, 15 bp, Homo sapiens
gggggtagcaggaag

SEQ ID NO: 455644 - DNA, 15 bp, Homo sapiens
tgggggtagcaggaa

SEQ ID NO: 455645 - DNA, 15 bp, Homo sapiens
ctgggggtagcagga

SEQ ID NO: 455646 - DNA, 15 bp, Homo sapiens
gctgggggtagcagg

SEQ ID NO: 455647 - DNA, 15 bp, Homo sapiens
ggctgggggtagcag

SEQ ID NO: 455648 - DNA, 15 bp, Homo sapiens
tggctgggggtagca

SEQ ID NO: 455649 - DNA, 15 bp, Homo sapiens
atggctgggggtagc

SEQ ID NO: 455650 - DNA, 15 bp, Homo sapiens
tatggctgggggtag

SEQ ID NO: 455651 - DNA, 15 bp, Homo sapiens
ttatggctgggggta

SEQ ID NO: 455652 - DNA, 15 bp, Homo sapiens
cttatggctgggggt

SEQ ID NO: 455653 - DNA, 15 bp, Homo sapiens
tcttatggctggggg

SEQ ID NO: 455654 - DNA, 15 bp, Homo sapiens
ttcttatggctgggg

SEQ ID NO: 455655 - DNA, 15 bp, Homo sapiens
attcttatggctggg

SEQ ID NO: 455656 - DNA, 15 bp, Homo sapiens
tattcttatggctgg

SEQ ID NO: 455657 - DNA, 15 bp, Homo sapiens
ttattcttatggctg

SEQ ID NO: 455658 - DNA, 15 bp, Homo sapiens
tttattcttatggct

SEQ ID NO: 455659 - DNA, 15 bp, Homo sapiens
atttattcttatggc

SEQ ID NO: 455660 - DNA, 15 bp, Homo sapiens
catttattcttatgg

SEQ ID NO: 455661 - DNA, 15 bp, Homo sapiens
tcatttattcttatg

SEQ ID NO: 455662 - DNA, 15 bp, Homo sapiens
gtcatttattcttat

SEQ ID NO: 455663 - DNA, 15 bp, Homo sapiens
ggtcatttattctta

SEQ ID NO: 455664 - DNA, 15 bp, Homo sapiens
aggtcatttattctt

SEQ ID NO: 455665 - DNA, 15 bp, Homo sapiens
aaggtcatttattct

SEQ ID NO: 455666 - DNA, 15 bp, Homo sapiens
caaggtcatttattc

SEQ ID NO: 455667 - DNA, 15 bp, Homo sapiens
gcaaggtcatttatt

SEQ ID NO: 455668 - DNA, 15 bp, Homo sapiens
agcaaggtcatttat

SEQ ID NO: 455669 - DNA, 15 bp, Homo sapiens
gagcaaggtcattta

SEQ ID NO: 455670 - DNA, 15 bp, Homo sapiens
tgagcaaggtcattt

SEQ ID NO: 455671 - DNA, 15 bp, Homo sapiens
atgagcaaggtcatt

SEQ ID NO: 455672 - DNA, 15 bp, Homo sapiens
gatgagcaaggtcat

SEQ ID NO: 455673 - DNA, 15 bp, Homo sapiens
tgatgagcaaggtca

SEQ ID NO: 455674 - DNA, 15 bp, Homo sapiens
gtgatgagcaaggtc

SEQ ID NO: 455675 - DNA, 15 bp, Homo sapiens
agtgatgagcaaggt

SEQ ID NO: 455676 - DNA, 15 bp, Homo sapiens
cagtgatgagcaagg

SEQ ID NO: 455677 - DNA, 15 bp, Homo sapiens
tcagtgatgagcaag

SEQ ID NO: 455678 - DNA, 15 bp, Homo sapiens
ttcagtgatgagcaa

SEQ ID NO: 455679 - DNA, 15 bp, Homo sapiens
tttcagtgatgagca

SEQ ID NO: 455680 - DNA, 15 bp, Homo sapiens
atttcagtgatgagc

SEQ ID NO: 455681 - DNA, 15 bp, Homo sapiens
aatttcagtgatgag

SEQ ID NO: 455682 - DNA, 15 bp, Homo sapiens
aaatttcagtgatga

SEQ ID NO: 455683 - DNA, 15 bp, Homo sapiens
aaaatttcagtgatg

SEQ ID NO: 455684 - DNA, 15 bp, Homo sapiens
taaaatttcagtgat

SEQ ID NO: 455685 - DNA, 15 bp, Homo sapiens
gtaaaatttcagtga

SEQ ID NO: 455686 - DNA, 15 bp, Homo sapiens
ggtaaaatttcagtg

SEQ ID NO: 455687 - DNA, 15 bp, Homo sapiens
aggtaaaatttcagt

SEQ ID NO: 455688 - DNA, 15 bp, Homo sapiens
caggtaaaatttcag

SEQ ID NO: 455689 - DNA, 15 bp, Homo sapiens
tcaggtaaaatttca

SEQ ID NO: 455690 - DNA, 15 bp, Homo sapiens
gtcaggtaaaatttc

SEQ ID NO: 455691 - DNA, 15 bp, Homo sapiens
ggtcaggtaaaattt

SEQ ID NO: 455692 - DNA, 15 bp, Homo sapiens
aggtcaggtaaaatt

SEQ ID NO: 455693 - DNA, 15 bp, Homo sapiens
aaggtcaggtaaaat

SEQ ID NO: 455694 - DNA, 15 bp, Homo sapiens
aaaggtcaggtaaaa

SEQ ID NO: 455695 - DNA, 15 bp, Homo sapiens
caaaggtcaggtaaa

SEQ ID NO: 455696 - DNA, 15 bp, Homo sapiens
tcaaaggtcaggtaa

SEQ ID NO: 455697 - DNA, 15 bp, Homo sapiens
ttcaaaggtcaggta

SEQ ID NO: 455698 - DNA, 15 bp, Homo sapiens
attcaaaggtcaggt

SEQ ID NO: 455699 - DNA, 15 bp, Homo sapiens
aattcaaaggtcagg

SEQ ID NO: 455700 - DNA, 15 bp, Homo sapiens
aaattcaaaggtcag

SEQ ID NO: 455701 - DNA, 15 bp, Homo sapiens
aaaattcaaaggtca

SEQ ID NO: 455702 - DNA, 15 bp, Homo sapiens
aaaaattcaaaggtc

SEQ ID NO: 455703 - DNA, 15 bp, Homo sapiens
taaaaattcaaaggt

SEQ ID NO: 455704 - DNA, 15 bp, Homo sapiens
ttaaaaattcaaagg

SEQ ID NO: 455705 - DNA, 15 bp, Homo sapiens
gttaaaaattcaaag

SEQ ID NO: 455706 - DNA, 15 bp, Homo sapiens
agttaaaaattcaaa

SEQ ID NO: 455707 - DNA, 15 bp, Homo sapiens
cagttaaaaattcaa

SEQ ID NO: 455708 - DNA, 15 bp, Homo sapiens
gcagttaaaaattca

SEQ ID NO: 455709 - DNA, 15 bp, Homo sapiens
cgcagttaaaaattc

SEQ ID NO: 455710 - DNA, 15 bp, Homo sapiens
acgcagttaaaaatt

SEQ ID NO: 455711 - DNA, 15 bp, Homo sapiens
gacgcagttaaaaat

SEQ ID NO: 455712 - DNA, 15 bp, Homo sapiens
tgacgcagttaaaaa

SEQ ID NO: 455713 - DNA, 15 bp, Homo sapiens
ctgacgcagttaaaa

SEQ ID NO: 455714 - DNA, 15 bp, Homo sapiens
gctgacgcagttaaa

SEQ ID NO: 455715 - DNA, 15 bp, Homo sapiens
ggctgacgcagttaa

SEQ ID NO: 455716 - DNA, 15 bp, Homo sapiens
tggctgacgcagtta

SEQ ID NO: 455717 - DNA, 15 bp, Homo sapiens
ttggctgacgcagtt

SEQ ID NO: 455718 - DNA, 15 bp, Homo sapiens
tttggctgacgcagt

SEQ ID NO: 455719 - DNA, 15 bp, Homo sapiens
ctttggctgacgcag

SEQ ID NO: 455720 - DNA, 15 bp, Homo sapiens
tctttggctgacgca

SEQ ID NO: 455721 - DNA, 15 bp, Homo sapiens
ttctttggctgacgc

SEQ ID NO: 455722 - DNA, 15 bp, Homo sapiens
gttctttggctgacg

SEQ ID NO: 455723 - DNA, 15 bp, Homo sapiens
agttctttggctgac

SEQ ID NO: 455724 - DNA, 15 bp, Homo sapiens
aagttctttggctga

SEQ ID NO: 455725 - DNA, 15 bp, Homo sapiens
taagttctttggctg

SEQ ID NO: 455726 - DNA, 15 bp, Homo sapiens
ataagttctttggct

SEQ ID NO: 455727 - DNA, 15 bp, Homo sapiens
tataagttctttggc

SEQ ID NO: 455728 - DNA, 15 bp, Homo sapiens
atataagttctttgg

SEQ ID NO: 455729 - DNA, 15 bp, Homo sapiens
aatataagttctttg

SEQ ID NO: 455730 - DNA, 15 bp, Homo sapiens
aaatataagttcttt

SEQ ID NO: 455731 - DNA, 15 bp, Homo sapiens
aaaatataagttctt

SEQ ID NO: 455732 - DNA, 15 bp, Homo sapiens
caaaatataagttct

SEQ ID NO: 455733 - DNA, 15 bp, Homo sapiens
tcaaaatataagttc

SEQ ID NO: 455734 - DNA, 15 bp, Homo sapiens
ctcaaaatataagtt

SEQ ID NO: 455735 - DNA, 15 bp, Homo sapiens
actcaaaatataagt

SEQ ID NO: 455736 - DNA, 15 bp, Homo sapiens
tactcaaaatataag

SEQ ID NO: 455737 - DNA, 15 bp, Homo sapiens
atactcaaaatataa

SEQ ID NO: 455738 - DNA, 15 bp, Homo sapiens
aatactcaaaatata

SEQ ID NO: 455739 - DNA, 15 bp, Homo sapiens
gaatactcaaaatat

SEQ ID NO: 455740 - DNA, 15 bp, Homo sapiens
ggaatactcaaaata

SEQ ID NO: 455741 - DNA, 15 bp, Homo sapiens
aggaatactcaaaat

SEQ ID NO: 455742 - DNA, 15 bp, Homo sapiens
taggaatactcaaaa

SEQ ID NO: 455743 - DNA, 15 bp, Homo sapiens
ttaggaatactcaaa

SEQ ID NO: 455744 - DNA, 15 bp, Homo sapiens
cttaggaatactcaa

SEQ ID NO: 455745 - DNA, 15 bp, Homo sapiens
ccttaggaatactca

SEQ ID NO: 455746 - DNA, 15 bp, Homo sapiens
accttaggaatactc

SEQ ID NO: 455747 - DNA, 15 bp, Homo sapiens
caccttaggaatact

SEQ ID NO: 455748 - DNA, 15 bp, Homo sapiens
tcaccttaggaatac

SEQ ID NO: 455749 - DNA, 15 bp, Homo sapiens
atcaccttaggaata

SEQ ID NO: 455750 - DNA, 15 bp, Homo sapiens
aatcaccttaggaat

SEQ ID NO: 455751 - DNA, 15 bp, Homo sapiens
caatcaccttaggaa

SEQ ID NO: 455752 - DNA, 15 bp, Homo sapiens
gcaatcaccttagga

SEQ ID NO: 455753 - DNA, 15 bp, Homo sapiens
agcaatcaccttagg

SEQ ID NO: 455754 - DNA, 15 bp, Homo sapiens
tagcaatcaccttag

SEQ ID NO: 455755 - DNA, 15 bp, Homo sapiens
atagcaatcacctta

SEQ ID NO: 455756 - DNA, 15 bp, Homo sapiens
aatagcaatcacctt

SEQ ID NO: 455757 - DNA, 15 bp, Homo sapiens
caatagcaatcacct

SEQ ID NO: 455758 - DNA, 15 bp, Homo sapiens
acaatagcaatcacc

SEQ ID NO: 455759 - DNA, 15 bp, Homo sapiens
tacaatagcaatcac

SEQ ID NO: 455760 - DNA, 15 bp, Homo sapiens
ctacaatagcaatca

SEQ ID NO: 455761 - DNA, 15 bp, Homo sapiens
actacaatagcaatc

SEQ ID NO: 455762 - DNA, 15 bp, Homo sapiens
aactacaatagcaat

SEQ ID NO: 455763 - DNA, 15 bp, Homo sapiens
aaactacaatagcaa

SEQ ID NO: 455764 - DNA, 15 bp, Homo sapiens
aaaactacaatagca

SEQ ID NO: 455765 - DNA, 15 bp, Homo sapiens
caaaactacaatagc

SEQ ID NO: 455766 - DNA, 15 bp, Homo sapiens
tcaaaactacaatag

SEQ ID NO: 455767 - DNA, 15 bp, Homo sapiens
ttcaaaactacaata

SEQ ID NO: 455768 - DNA, 15 bp, Homo sapiens
tttcaaaactacaat

SEQ ID NO: 455769 - DNA, 15 bp, Homo sapiens
gtttcaaaactacaa

SEQ ID NO: 455770 - DNA, 15 bp, Homo sapiens
tgtttcaaaactaca

SEQ ID NO: 455771 - DNA, 15 bp, Homo sapiens
gtgtttcaaaactac

SEQ ID NO: 455772 - DNA, 15 bp, Homo sapiens
agtgtttcaaaacta

SEQ ID NO: 455773 - DNA, 15 bp, Homo sapiens
aagtgtttcaaaact

SEQ ID NO: 455774 - DNA, 15 bp, Homo sapiens
caagtgtttcaaaac

SEQ ID NO: 455775 - DNA, 15 bp, Homo sapiens
ccaagtgtttcaaaa

SEQ ID NO: 455776 - DNA, 15 bp, Homo sapiens
accaagtgtttcaaa

SEQ ID NO: 455777 - DNA, 15 bp, Homo sapiens
aaccaagtgtttcaa

SEQ ID NO: 455778 - DNA, 15 bp, Homo sapiens
caaccaagtgtttca

SEQ ID NO: 455779 - DNA, 15 bp, Homo sapiens
ccaaccaagtgtttc

SEQ ID NO: 455780 - DNA, 15 bp, Homo sapiens
accaaccaagtgttt

SEQ ID NO: 455781 - DNA, 15 bp, Homo sapiens
taccaaccaagtgtt

SEQ ID NO: 455782 - DNA, 15 bp, Homo sapiens
ataccaaccaagtgt

SEQ ID NO: 455783 - DNA, 15 bp, Homo sapiens
cataccaaccaagtg

SEQ ID NO: 455784 - DNA, 15 bp, Homo sapiens
acataccaaccaagt

SEQ ID NO: 455785 - DNA, 15 bp, Homo sapiens
aacataccaaccaag

SEQ ID NO: 455786 - DNA, 15 bp, Homo sapiens
aaacataccaaccaa

SEQ ID NO: 455787 - DNA, 15 bp, Homo sapiens
caaacataccaacca

SEQ ID NO: 455788 - DNA, 15 bp, Homo sapiens
tcaaacataccaacc

SEQ ID NO: 455789 - DNA, 15 bp, Homo sapiens
ctcaaacataccaac

SEQ ID NO: 455790 - DNA, 15 bp, Homo sapiens
cctcaaacataccaa

SEQ ID NO: 455791 - DNA, 15 bp, Homo sapiens
ccctcaaacatacca

SEQ ID NO: 455792 - DNA, 15 bp, Homo sapiens
accctcaaacatacc

SEQ ID NO: 455793 - DNA, 15 bp, Homo sapiens
aaccctcaaacatac

SEQ ID NO: 455794 - DNA, 15 bp, Homo sapiens
aaaccctcaaacata

SEQ ID NO: 455795 - DNA, 15 bp, Homo sapiens
gaaaccctcaaacat

SEQ ID NO: 455796 - DNA, 15 bp, Homo sapiens
tgaaaccctcaaaca

SEQ ID NO: 455797 - DNA, 15 bp, Homo sapiens
atgaaaccctcaaac

SEQ ID NO: 455798 - DNA, 15 bp, Homo sapiens
catgaaaccctcaaa

SEQ ID NO: 455799 - DNA, 15 bp, Homo sapiens
ccatgaaaccctcaa

SEQ ID NO: 455800 - DNA, 15 bp, Homo sapiens
accatgaaaccctca

SEQ ID NO: 455801 - DNA, 15 bp, Homo sapiens
gaccatgaaaccctc

SEQ ID NO: 455802 - DNA, 15 bp, Homo sapiens
ggaccatgaaaccct

SEQ ID NO: 455803 - DNA, 15 bp, Homo sapiens
tggaccatgaaaccc

SEQ ID NO: 455804 - DNA, 15 bp, Homo sapiens
ttggaccatgaaacc

SEQ ID NO: 455805 - DNA, 15 bp, Homo sapiens
tttggaccatgaaac

SEQ ID NO: 455806 - DNA, 15 bp, Homo sapiens
ctttggaccatgaaa

SEQ ID NO: 455807 - DNA, 15 bp, Homo sapiens
actttggaccatgaa

SEQ ID NO: 455808 - DNA, 15 bp, Homo sapiens
aactttggaccatga

SEQ ID NO: 455809 - DNA, 15 bp, Homo sapiens
taactttggaccatg

SEQ ID NO: 455810 - DNA, 15 bp, Homo sapiens
gtaactttggaccat

SEQ ID NO: 455811 - DNA, 15 bp, Homo sapiens
agtaactttggacca

SEQ ID NO: 455812 - DNA, 15 bp, Homo sapiens
tagtaactttggacc

SEQ ID NO: 455813 - DNA, 15 bp, Homo sapiens
atagtaactttggac

SEQ ID NO: 455814 - DNA, 15 bp, Homo sapiens
tatagtaactttgga

SEQ ID NO: 455815 - DNA, 15 bp, Homo sapiens
ctatagtaactttgg

SEQ ID NO: 455816 - DNA, 15 bp, Homo sapiens
gctatagtaactttg

SEQ ID NO: 455817 - DNA, 15 bp, Homo sapiens
tgctatagtaacttt

SEQ ID NO: 455818 - DNA, 15 bp, Homo sapiens
ctgctatagtaactt

SEQ ID NO: 455819 - DNA, 15 bp, Homo sapiens
actgctatagtaact

SEQ ID NO: 455820 - DNA, 15 bp, Homo sapiens
aactgctatagtaac

SEQ ID NO: 455821 - DNA, 15 bp, Homo sapiens
taactgctatagtaa

SEQ ID NO: 455822 - DNA, 15 bp, Homo sapiens
ttaactgctatagta

SEQ ID NO: 455823 - DNA, 15 bp, Homo sapiens
tttaactgctatagt

SEQ ID NO: 455824 - DNA, 15 bp, Homo sapiens
ttttaactgctatag

SEQ ID NO: 455825 - DNA, 15 bp, Homo sapiens
cttttaactgctata

SEQ ID NO: 455826 - DNA, 15 bp, Homo sapiens
tcttttaactgctat

SEQ ID NO: 455827 - DNA, 15 bp, Homo sapiens
ctcttttaactgcta

SEQ ID NO: 455828 - DNA, 15 bp, Homo sapiens
actcttttaactgct

SEQ ID NO: 455829 - DNA, 15 bp, Homo sapiens
cactcttttaactgc

SEQ ID NO: 455830 - DNA, 15 bp, Homo sapiens
ccactcttttaactg

SEQ ID NO: 455831 - DNA, 15 bp, Homo sapiens
tccactcttttaact

SEQ ID NO: 455832 - DNA, 15 bp, Homo sapiens
gtccactcttttaac

SEQ ID NO: 455833 - DNA, 15 bp, Homo sapiens
agtccactcttttaa

SEQ ID NO: 455834 - DNA, 15 bp, Homo sapiens
tagtccactctttta

SEQ ID NO: 455835 - DNA, 15 bp, Homo sapiens
atagtccactctttt

SEQ ID NO: 455836 - DNA, 15 bp, Homo sapiens
gatagtccactcttt

SEQ ID NO: 455837 - DNA, 15 bp, Homo sapiens
tgatagtccactctt

SEQ ID NO: 455838 - DNA, 15 bp, Homo sapiens
ctgatagtccactct

SEQ ID NO: 455839 - DNA, 15 bp, Homo sapiens
cctgatagtccactc

SEQ ID NO: 455840 - DNA, 15 bp, Homo sapiens
acctgatagtccact

SEQ ID NO: 455841 - DNA, 15 bp, Homo sapiens
gacctgatagtccac

SEQ ID NO: 455842 - DNA, 15 bp, Homo sapiens
tgacctgatagtcca

SEQ ID NO: 455843 - DNA, 15 bp, Homo sapiens
ctgacctgatagtcc

SEQ ID NO: 455844 - DNA, 15 bp, Homo sapiens
tctgacctgatagtc

SEQ ID NO: 455845 - DNA, 15 bp, Homo sapiens
gtctgacctgatagt

SEQ ID NO: 455846 - DNA, 15 bp, Homo sapiens
ggtctgacctgatag

SEQ ID NO: 455847 - DNA, 15 bp, Homo sapiens
aggtctgacctgata

SEQ ID NO: 455848 - DNA, 15 bp, Homo sapiens
taggtctgacctgat

SEQ ID NO: 455849 - DNA, 15 bp, Homo sapiens
ataggtctgacctga

SEQ ID NO: 455850 - DNA, 15 bp, Homo sapiens
aataggtctgacctg

SEQ ID NO: 455851 - DNA, 15 bp, Homo sapiens
caataggtctgacct

SEQ ID NO: 455852 - DNA, 15 bp, Homo sapiens
ccaataggtctgacc

SEQ ID NO: 455853 - DNA, 15 bp, Homo sapiens
cccaataggtctgac

SEQ ID NO: 455854 - DNA, 15 bp, Homo sapiens
gcccaataggtctga

SEQ ID NO: 455855 - DNA, 15 bp, Homo sapiens
agcccaataggtctg

SEQ ID NO: 455856 - DNA, 15 bp, Homo sapiens
aagcccaataggtct

SEQ ID NO: 455857 - DNA, 15 bp, Homo sapiens
aaagcccaataggtc

SEQ ID NO: 455858 - DNA, 15 bp, Homo sapiens
taaagcccaataggt

SEQ ID NO: 455859 - DNA, 15 bp, Homo sapiens
ttaaagcccaatagg

SEQ ID NO: 455860 - DNA, 15 bp, Homo sapiens
attaaagcccaatag

SEQ ID NO: 455861 - DNA, 15 bp, Homo sapiens
gattaaagcccaata

SEQ ID NO: 455862 - DNA, 15 bp, Homo sapiens
ggattaaagcccaat

SEQ ID NO: 455863 - DNA, 15 bp, Homo sapiens
gggattaaagcccaa

SEQ ID NO: 455864 - DNA, 15 bp, Homo sapiens
tgggattaaagccca

SEQ ID NO: 455865 - DNA, 15 bp, Homo sapiens
ctgggattaaagccc

SEQ ID NO: 455866 - DNA, 15 bp, Homo sapiens
actgggattaaagcc

SEQ ID NO: 455867 - DNA, 15 bp, Homo sapiens
aactgggattaaagc

SEQ ID NO: 455868 - DNA, 15 bp, Homo sapiens
gaactgggattaaag

SEQ ID NO: 455869 - DNA, 15 bp, Homo sapiens
agaactgggattaaa

SEQ ID NO: 455870 - DNA, 15 bp, Homo sapiens
cagaactgggattaa

SEQ ID NO: 455871 - DNA, 15 bp, Homo sapiens
gcagaactgggatta

SEQ ID NO: 455872 - DNA, 15 bp, Homo sapiens
ggcagaactgggatt

SEQ ID NO: 455873 - DNA, 15 bp, Homo sapiens
aggcagaactgggat

SEQ ID NO: 455874 - DNA, 15 bp, Homo sapiens
aaggcagaactggga

SEQ ID NO: 455875 - DNA, 15 bp, Homo sapiens
gaaggcagaactggg

SEQ ID NO: 455876 - DNA, 15 bp, Homo sapiens
agaaggcagaactgg

SEQ ID NO: 455877 - DNA, 15 bp, Homo sapiens
gagaaggcagaactg

SEQ ID NO: 455878 - DNA, 15 bp, Homo sapiens
agagaaggcagaact

SEQ ID NO: 455879 - DNA, 15 bp, Homo sapiens
aagagaaggcagaac

SEQ ID NO: 455880 - DNA, 15 bp, Homo sapiens
taagagaaggcagaa

SEQ ID NO: 455881 - DNA, 15 bp, Homo sapiens
ctaagagaaggcaga

SEQ ID NO: 455882 - DNA, 15 bp, Homo sapiens
tctaagagaaggcag

SEQ ID NO: 455883 - DNA, 15 bp, Homo sapiens
gtctaagagaaggca

SEQ ID NO: 455884 - DNA, 15 bp, Homo sapiens
ggtctaagagaaggc

SEQ ID NO: 455885 - DNA, 15 bp, Homo sapiens
aggtctaagagaagg

SEQ ID NO: 455886 - DNA, 15 bp, Homo sapiens
aaggtctaagagaag

SEQ ID NO: 455887 - DNA, 15 bp, Homo sapiens
caaggtctaagagaa

SEQ ID NO: 455888 - DNA, 15 bp, Homo sapiens
ccaaggtctaagaga

SEQ ID NO: 455889 - DNA, 15 bp, Homo sapiens
cccaaggtctaagag

SEQ ID NO: 455890 - DNA, 15 bp, Homo sapiens
gcccaaggtctaaga

SEQ ID NO: 455891 - DNA, 15 bp, Homo sapiens
ggcccaaggtctaag

SEQ ID NO: 455892 - DNA, 15 bp, Homo sapiens
aggcccaaggtctaa

SEQ ID NO: 455893 - DNA, 15 bp, Homo sapiens
caggcccaaggtcta

SEQ ID NO: 455894 - DNA, 15 bp, Homo sapiens
acaggcccaaggtct

SEQ ID NO: 455895 - DNA, 15 bp, Homo sapiens
aacaggcccaaggtc

SEQ ID NO: 455896 - DNA, 15 bp, Homo sapiens
caacaggcccaaggt

SEQ ID NO: 455897 - DNA, 15 bp, Homo sapiens
acaacaggcccaagg

SEQ ID NO: 455898 - DNA, 15 bp, Homo sapiens
aacaacaggcccaag

SEQ ID NO: 455899 - DNA, 15 bp, Homo sapiens
aaacaacaggcccaa

SEQ ID NO: 455900 - DNA, 15 bp, Homo sapiens
aaaacaacaggccca

SEQ ID NO: 455901 - DNA, 15 bp, Homo sapiens
gaaaacaacaggccc

SEQ ID NO: 455902 - DNA, 15 bp, Homo sapiens
tgaaaacaacaggcc

SEQ ID NO: 455903 - DNA, 15 bp, Homo sapiens
gtgaaaacaacaggc

SEQ ID NO: 455904 - DNA, 15 bp, Homo sapiens
agtgaaaacaacagg

SEQ ID NO: 455905 - DNA, 15 bp, Homo sapiens
aagtgaaaacaacag

SEQ ID NO: 455906 - DNA, 15 bp, Homo sapiens
gaagtgaaaacaaca

SEQ ID NO: 455907 - DNA, 15 bp, Homo sapiens
agaagtgaaaacaac

SEQ ID NO: 455908 - DNA, 15 bp, Homo sapiens
gagaagtgaaaacaa

SEQ ID NO: 455909 - DNA, 15 bp, Homo sapiens
agagaagtgaaaaca

SEQ ID NO: 455910 - DNA, 15 bp, Homo sapiens
cagagaagtgaaaac

SEQ ID NO: 455911 - DNA, 15 bp, Homo sapiens
ccagagaagtgaaaa

SEQ ID NO: 455912 - DNA, 15 bp, Homo sapiens
accagagaagtgaaa

SEQ ID NO: 455913 - DNA, 15 bp, Homo sapiens
aaccagagaagtgaa

SEQ ID NO: 455914 - DNA, 15 bp, Homo sapiens
aaaccagagaagtga

SEQ ID NO: 455915 - DNA, 15 bp, Homo sapiens
aaaaccagagaagtg

SEQ ID NO: 455916 - DNA, 15 bp, Homo sapiens
gaaaaccagagaagt

SEQ ID NO: 455917 - DNA, 15 bp, Homo sapiens
tgaaaaccagagaag

SEQ ID NO: 455918 - DNA, 15 bp, Homo sapiens
ctgaaaaccagagaa

SEQ ID NO: 455919 - DNA, 15 bp, Homo sapiens
actgaaaaccagaga

SEQ ID NO: 455920 - DNA, 15 bp, Homo sapiens
aactgaaaaccagag

SEQ ID NO: 455921 - DNA, 15 bp, Homo sapiens
aaactgaaaaccaga

SEQ ID NO: 455922 - DNA, 15 bp, Homo sapiens
gaaactgaaaaccag

SEQ ID NO: 455923 - DNA, 15 bp, Homo sapiens
agaaactgaaaacca

SEQ ID NO: 455924 - DNA, 15 bp, Homo sapiens
gagaaactgaaaacc

SEQ ID NO: 455925 - DNA, 15 bp, Homo sapiens
agagaaactgaaaac

SEQ ID NO: 455926 - DNA, 15 bp, Homo sapiens
cagagaaactgaaaa

SEQ ID NO: 455927 - DNA, 15 bp, Homo sapiens
acagagaaactgaaa

SEQ ID NO: 455928 - DNA, 15 bp, Homo sapiens
gacagagaaactgaa

SEQ ID NO: 455929 - DNA, 15 bp, Homo sapiens
ggacagagaaactga

SEQ ID NO: 455930 - DNA, 15 bp, Homo sapiens
tggacagagaaactg

SEQ ID NO: 455931 - DNA, 15 bp, Homo sapiens
gtggacagagaaact

SEQ ID NO: 455932 - DNA, 15 bp, Homo sapiens
tgtggacagagaaac

SEQ ID NO: 455933 - DNA, 15 bp, Homo sapiens
ttgtggacagagaaa

SEQ ID NO: 455934 - DNA, 15 bp, Homo sapiens
attgtggacagagaa

SEQ ID NO: 455935 - DNA, 15 bp, Homo sapiens
aattgtggacagaga

SEQ ID NO: 455936 - DNA, 15 bp, Homo sapiens
caattgtggacagag

SEQ ID NO: 455937 - DNA, 15 bp, Homo sapiens
acaattgtggacaga

SEQ ID NO: 455938 - DNA, 15 bp, Homo sapiens
cacaattgtggacag

SEQ ID NO: 455939 - DNA, 15 bp, Homo sapiens
ccacaattgtggaca

SEQ ID NO: 455940 - DNA, 15 bp, Homo sapiens
tccacaattgtggac

SEQ ID NO: 455941 - DNA, 15 bp, Homo sapiens
ttccacaattgtgga

SEQ ID NO: 455942 - DNA, 15 bp, Homo sapiens
tttccacaattgtgg

SEQ ID NO: 455943 - DNA, 15 bp, Homo sapiens
gtttccacaattgtg

SEQ ID NO: 455944 - DNA, 15 bp, Homo sapiens
cgtttccacaattgt

SEQ ID NO: 455945 - DNA, 15 bp, Homo sapiens
tcgtttccacaattg

SEQ ID NO: 455946 - DNA, 15 bp, Homo sapiens
ctcgtttccacaatt

SEQ ID NO: 455947 - DNA, 15 bp, Homo sapiens
cctcgtttccacaat

SEQ ID NO: 455948 - DNA, 15 bp, Homo sapiens
acctcgtttccacaa

SEQ ID NO: 455949 - DNA, 15 bp, Homo sapiens
gacctcgtttccaca

SEQ ID NO: 455950 - DNA, 15 bp, Homo sapiens
ggacctcgtttccac

SEQ ID NO: 455951 - DNA, 15 bp, Homo sapiens
tggacctcgtttcca

SEQ ID NO: 455952 - DNA, 15 bp, Homo sapiens
gtggacctcgtttcc

SEQ ID NO: 455953 - DNA, 15 bp, Homo sapiens
agtggacctcgtttc

SEQ ID NO: 455954 - DNA, 15 bp, Homo sapiens
aagtggacctcgttt

SEQ ID NO: 455955 - DNA, 15 bp, Homo sapiens
caagtggacctcgtt

SEQ ID NO: 455956 - DNA, 15 bp, Homo sapiens
acaagtggacctcgt

SEQ ID NO: 455957 - DNA, 15 bp, Homo sapiens
tacaagtggacctcg

SEQ ID NO: 455958 - DNA, 15 bp, Homo sapiens
ctacaagtggacctc

SEQ ID NO: 455959 - DNA, 15 bp, Homo sapiens
tctacaagtggacct

SEQ ID NO: 455960 - DNA, 15 bp, Homo sapiens
ctctacaagtggacc

SEQ ID NO: 455961 - DNA, 15 bp, Homo sapiens
actctacaagtggac

SEQ ID NO: 455962 - DNA, 15 bp, Homo sapiens
tactctacaagtgga

SEQ ID NO: 455963 - DNA, 15 bp, Homo sapiens
ttactctacaagtgg

SEQ ID NO: 455964 - DNA, 15 bp, Homo sapiens
attactctacaagtg

SEQ ID NO: 455965 - DNA, 15 bp, Homo sapiens
aattactctacaagt

SEQ ID NO: 455966 - DNA, 15 bp, Homo sapiens
caattactctacaag

SEQ ID NO: 455967 - DNA, 15 bp, Homo sapiens
tcaattactctacaa

SEQ ID NO: 455968 - DNA, 15 bp, Homo sapiens
ctcaattactctaca

SEQ ID NO: 455969 - DNA, 15 bp, Homo sapiens
tctcaattactctac

SEQ ID NO: 455970 - DNA, 15 bp, Homo sapiens
ctctcaattactcta

SEQ ID NO: 455971 - DNA, 15 bp, Homo sapiens
cctctcaattactct

SEQ ID NO: 455972 - DNA, 15 bp, Homo sapiens
tcctctcaattactc

SEQ ID NO: 455973 - DNA, 15 bp, Homo sapiens
atcctctcaattact

SEQ ID NO: 455974 - DNA, 15 bp, Homo sapiens
catcctctcaattac

SEQ ID NO: 455975 - DNA, 15 bp, Homo sapiens
tcatcctctcaatta

SEQ ID NO: 455976 - DNA, 15 bp, Homo sapiens
ttcatcctctcaatt

SEQ ID NO: 455977 - DNA, 15 bp, Homo sapiens
cttcatcctctcaat

SEQ ID NO: 455978 - DNA, 15 bp, Homo sapiens
gcttcatcctctcaa

SEQ ID NO: 455979 - DNA, 15 bp, Homo sapiens
tgcttcatcctctca

SEQ ID NO: 455980 - DNA, 15 bp, Homo sapiens
ttgcttcatcctctc

SEQ ID NO: 455981 - DNA, 15 bp, Homo sapiens
cttgcttcatcctct

SEQ ID NO: 455982 - DNA, 15 bp, Homo sapiens
tcttgcttcatcctc

SEQ ID NO: 455983 - DNA, 15 bp, Homo sapiens
atcttgcttcatcct

SEQ ID NO: 455984 - DNA, 15 bp, Homo sapiens
catcttgcttcatcc

SEQ ID NO: 455985 - DNA, 15 bp, Homo sapiens
tcatcttgcttcatc

SEQ ID NO: 455986 - DNA, 15 bp, Homo sapiens
atcatcttgcttcat

SEQ ID NO: 455987 - DNA, 15 bp, Homo sapiens
catcatcttgcttca

SEQ ID NO: 455988 - DNA, 15 bp, Homo sapiens
gcatcatcttgcttc

SEQ ID NO: 455989 - DNA, 15 bp, Homo sapiens
tgcatcatcttgctt

SEQ ID NO: 455990 - DNA, 15 bp, Homo sapiens
atgcatcatcttgct

SEQ ID NO: 455991 - DNA, 15 bp, Homo sapiens
tatgcatcatcttgc

SEQ ID NO: 455992 - DNA, 15 bp, Homo sapiens
atatgcatcatcttg

SEQ ID NO: 455993 - DNA, 15 bp, Homo sapiens
gatatgcatcatctt

SEQ ID NO: 455994 - DNA, 15 bp, Homo sapiens
tgatatgcatcatct

SEQ ID NO: 455995 - DNA, 15 bp, Homo sapiens
ttgatatgcatcatc

SEQ ID NO: 455996 - DNA, 15 bp, Homo sapiens
cttgatatgcatcat

SEQ ID NO: 455997 - DNA, 15 bp, Homo sapiens
acttgatatgcatca

SEQ ID NO: 455998 - DNA, 15 bp, Homo sapiens
tacttgatatgcatc

SEQ ID NO: 455999 - DNA, 15 bp, Homo sapiens
gtacttgatatgcat

SEQ ID NO: 456000 - DNA, 15 bp, Homo sapiens
agtacttgatatgca

SEQ ID NO: 456001 - DNA, 15 bp, Homo sapiens
aagtacttgatatgc

SEQ ID NO: 456002 - DNA, 15 bp, Homo sapiens
aaagtacttgatatg

SEQ ID NO: 456003 - DNA, 15 bp, Homo sapiens
caaagtacttgatat

SEQ ID NO: 456004 - DNA, 15 bp, Homo sapiens
gcaaagtacttgata

SEQ ID NO: 456005 - DNA, 15 bp, Homo sapiens
tgcaaagtacttgat

SEQ ID NO: 456006 - DNA, 15 bp, Homo sapiens
atgcaaagtacttga

SEQ ID NO: 456007 - DNA, 15 bp, Homo sapiens
tatgcaaagtacttg

SEQ ID NO: 456008 - DNA, 15 bp, Homo sapiens
ctatgcaaagtactt

SEQ ID NO: 456009 - DNA, 15 bp, Homo sapiens
actatgcaaagtact

SEQ ID NO: 456010 - DNA, 15 bp, Homo sapiens
cactatgcaaagtac

SEQ ID NO: 456011 - DNA, 15 bp, Homo sapiens
gcactatgcaaagta

SEQ ID NO: 456012 - DNA, 15 bp, Homo sapiens
ggcactatgcaaagt

SEQ ID NO: 456013 - DNA, 15 bp, Homo sapiens
cggcactatgcaaag

SEQ ID NO: 456014 - DNA, 15 bp, Homo sapiens
ccggcactatgcaaa

SEQ ID NO: 456015 - DNA, 15 bp, Homo sapiens
cccggcactatgcaa

SEQ ID NO: 456016 - DNA, 15 bp, Homo sapiens
gcccggcactatgca

SEQ ID NO: 456017 - DNA, 15 bp, Homo sapiens
tgcccggcactatgc

SEQ ID NO: 456018 - DNA, 15 bp, Homo sapiens
ctgcccggcactatg

SEQ ID NO: 456019 - DNA, 15 bp, Homo sapiens
tctgcccggcactat

SEQ ID NO: 456020 - DNA, 15 bp, Homo sapiens
gtctgcccggcacta

SEQ ID NO: 456021 - DNA, 15 bp, Homo sapiens
tgtctgcccggcact

SEQ ID NO: 456022 - DNA, 15 bp, Homo sapiens
ctgtctgcccggcac

SEQ ID NO: 456023 - DNA, 15 bp, Homo sapiens
cctgtctgcccggca

SEQ ID NO: 456024 - DNA, 15 bp, Homo sapiens
acctgtctgcccggc

SEQ ID NO: 456025 - DNA, 15 bp, Homo sapiens
tacctgtctgcccgg

SEQ ID NO: 456026 - DNA, 15 bp, Homo sapiens
ttacctgtctgcccg

SEQ ID NO: 456027 - DNA, 15 bp, Homo sapiens
gttacctgtctgccc

SEQ ID NO: 456028 - DNA, 15 bp, Homo sapiens
tgttacctgtctgcc

SEQ ID NO: 456029 - DNA, 15 bp, Homo sapiens
atgttacctgtctgc

SEQ ID NO: 456030 - DNA, 15 bp, Homo sapiens
aatgttacctgtctg

SEQ ID NO: 456031 - DNA, 15 bp, Homo sapiens
gaatgttacctgtct

SEQ ID NO: 456032 - DNA, 15 bp, Homo sapiens
tgaatgttacctgtc

SEQ ID NO: 456033 - DNA, 15 bp, Homo sapiens
ttgaatgttacctgt

SEQ ID NO: 456034 - DNA, 15 bp, Homo sapiens
cttgaatgttacctg

SEQ ID NO: 456035 - DNA, 15 bp, Homo sapiens
acttgaatgttacct

SEQ ID NO: 456036 - DNA, 15 bp, Homo sapiens
cacttgaatgttacc

SEQ ID NO: 456037 - DNA, 15 bp, Homo sapiens
gcacttgaatgttac

SEQ ID NO: 456038 - DNA, 15 bp, Homo sapiens
agcacttgaatgtta

SEQ ID NO: 456039 - DNA, 15 bp, Homo sapiens
tagcacttgaatgtt

SEQ ID NO: 456040 - DNA, 15 bp, Homo sapiens
ttagcacttgaatgt

SEQ ID NO: 456041 - DNA, 15 bp, Homo sapiens
attagcacttgaatg

SEQ ID NO: 456042 - DNA, 15 bp, Homo sapiens
tattagcacttgaat

SEQ ID NO: 456043 - DNA, 15 bp, Homo sapiens
ttattagcacttgaa

SEQ ID NO: 456044 - DNA, 15 bp, Homo sapiens
attattagcacttga

SEQ ID NO: 456045 - DNA, 15 bp, Homo sapiens
aattattagcacttg

SEQ ID NO: 456046 - DNA, 15 bp, Homo sapiens
taattattagcactt

SEQ ID NO: 456047 - DNA, 15 bp, Homo sapiens
gtaattattagcact

SEQ ID NO: 456048 - DNA, 15 bp, Homo sapiens
agtaattattagcac

SEQ ID NO: 456049 - DNA, 15 bp, Homo sapiens
tagtaattattagca

SEQ ID NO: 456050 - DNA, 15 bp, Homo sapiens
atagtaattattagc

SEQ ID NO: 456051 - DNA, 15 bp, Homo sapiens
aatagtaattattag

SEQ ID NO: 456052 - DNA, 15 bp, Homo sapiens
taatagtaattatta

SEQ ID NO: 456053 - DNA, 15 bp, Homo sapiens
ataatagtaattatt

SEQ ID NO: 456054 - DNA, 15 bp, Homo sapiens
aataatagtaattat

SEQ ID NO: 456055 - DNA, 15 bp, Homo sapiens
taataatagtaatta

SEQ ID NO: 456056 - DNA, 15 bp, Homo sapiens
gtaataatagtaatt

SEQ ID NO: 456057 - DNA, 15 bp, Homo sapiens
agtaataatagtaat

SEQ ID NO: 456058 - DNA, 15 bp, Homo sapiens
tagtaataatagtaa

SEQ ID NO: 456059 - DNA, 15 bp, Homo sapiens
atagtaataatagta

SEQ ID NO: 456060 - DNA, 15 bp, Homo sapiens
aatagtaataatagt

SEQ ID NO: 456061 - DNA, 15 bp, Homo sapiens
aaatagtaataatag

SEQ ID NO: 456062 - DNA, 15 bp, Homo sapiens
taaatagtaataata

SEQ ID NO: 456063 - DNA, 15 bp, Homo sapiens
ataaatagtaataat

SEQ ID NO: 456064 - DNA, 15 bp, Homo sapiens
aataaatagtaataa

SEQ ID NO: 456065 - DNA, 15 bp, Homo sapiens
aaataaatagtaata

SEQ ID NO: 456066 - DNA, 15 bp, Homo sapiens
aaaataaatagtaat

SEQ ID NO: 456067 - DNA, 15 bp, Homo sapiens
aaaaataaatagtaa

SEQ ID NO: 456068 - DNA, 15 bp, Homo sapiens
aaaaaataaatagta

SEQ ID NO: 456069 - DNA, 15 bp, Homo sapiens
caaaaaataaatagt

SEQ ID NO: 456070 - DNA, 15 bp, Homo sapiens
tcaaaaaataaatag

SEQ ID NO: 456071 - DNA, 15 bp, Homo sapiens
ctcaaaaaataaata

SEQ ID NO: 456072 - DNA, 15 bp, Homo sapiens
tctcaaaaaataaat

SEQ ID NO: 456073 - DNA, 15 bp, Homo sapiens
gtctcaaaaaataaa

SEQ ID NO: 456074 - DNA, 15 bp, Homo sapiens
tgtctcaaaaaataa

SEQ ID NO: 456075 - DNA, 15 bp, Homo sapiens
ctgtctcaaaaaata

SEQ ID NO: 456076 - DNA, 15 bp, Homo sapiens
cctgtctcaaaaaat

SEQ ID NO: 456077 - DNA, 15 bp, Homo sapiens
acctgtctcaaaaaa

SEQ ID NO: 456078 - DNA, 15 bp, Homo sapiens
aacctgtctcaaaaa

SEQ ID NO: 456079 - DNA, 15 bp, Homo sapiens
gaacctgtctcaaaa

SEQ ID NO: 456080 - DNA, 15 bp, Homo sapiens
agaacctgtctcaaa

SEQ ID NO: 456081 - DNA, 15 bp, Homo sapiens
gagaacctgtctcaa

SEQ ID NO: 456082 - DNA, 15 bp, Homo sapiens
tgagaacctgtctca

SEQ ID NO: 456083 - DNA, 15 bp, Homo sapiens
gtgagaacctgtctc

SEQ ID NO: 456084 - DNA, 15 bp, Homo sapiens
agtgagaacctgtct

SEQ ID NO: 456085 - DNA, 15 bp, Homo sapiens
gagtgagaacctgtc

SEQ ID NO: 456086 - DNA, 15 bp, Homo sapiens
agagtgagaacctgt

SEQ ID NO: 456087 - DNA, 15 bp, Homo sapiens
cagagtgagaacctg

SEQ ID NO: 456088 - DNA, 15 bp, Homo sapiens
acagagtgagaacct

SEQ ID NO: 456089 - DNA, 15 bp, Homo sapiens
gacagagtgagaacc

SEQ ID NO: 456090 - DNA, 15 bp, Homo sapiens
tgacagagtgagaac

SEQ ID NO: 456091 - DNA, 15 bp, Homo sapiens
gtgacagagtgagaa

SEQ ID NO: 456092 - DNA, 15 bp, Homo sapiens
ggtgacagagtgaga

SEQ ID NO: 456093 - DNA, 15 bp, Homo sapiens
aggtgacagagtgag

SEQ ID NO: 456094 - DNA, 15 bp, Homo sapiens
taggtgacagagtga

SEQ ID NO: 456095 - DNA, 15 bp, Homo sapiens
ctaggtgacagagtg

SEQ ID NO: 456096 - DNA, 15 bp, Homo sapiens
cctaggtgacagagt

SEQ ID NO: 456097 - DNA, 15 bp, Homo sapiens
gcctaggtgacagag

SEQ ID NO: 456098 - DNA, 15 bp, Homo sapiens
agcctaggtgacaga

SEQ ID NO: 456099 - DNA, 15 bp, Homo sapiens
cagcctaggtgacag

SEQ ID NO: 456100 - DNA, 15 bp, Homo sapiens
ccagcctaggtgaca

SEQ ID NO: 456101 - DNA, 15 bp, Homo sapiens
tccagcctaggtgac

SEQ ID NO: 456102 - DNA, 15 bp, Homo sapiens
ctccagcctaggtga

SEQ ID NO: 456103 - DNA, 15 bp, Homo sapiens
actccagcctaggtg

SEQ ID NO: 456104 - DNA, 15 bp, Homo sapiens
cactccagcctaggt

SEQ ID NO: 456105 - DNA, 15 bp, Homo sapiens
gctgcactccagcct

SEQ ID NO: 456106 - DNA, 15 bp, Homo sapiens
cgctgcactccagcc

SEQ ID NO: 456107 - DNA, 15 bp, Homo sapiens
ccgctgcactccagc

SEQ ID NO: 456108 - DNA, 15 bp, Homo sapiens
accgctgcactccag

SEQ ID NO: 456109 - DNA, 15 bp, Homo sapiens
caccgctgcactcca

SEQ ID NO: 456110 - DNA, 15 bp, Homo sapiens
tcaccgctgcactcc

SEQ ID NO: 456111 - DNA, 15 bp, Homo sapiens
ctcaccgctgcactc

SEQ ID NO: 456112 - DNA, 15 bp, Homo sapiens
tctcaccgctgcact

SEQ ID NO: 456113 - DNA, 15 bp, Homo sapiens
atctcaccgctgcac

SEQ ID NO: 456114 - DNA, 15 bp, Homo sapiens
gatctcaccgctgca

SEQ ID NO: 456115 - DNA, 15 bp, Homo sapiens
tgatctcaccgctgc

SEQ ID NO: 456116 - DNA, 15 bp, Homo sapiens
gtgatctcaccgctg

SEQ ID NO: 456117 - DNA, 15 bp, Homo sapiens
tgtgatctcaccgct

SEQ ID NO: 456118 - DNA, 15 bp, Homo sapiens
ctgtgatctcaccgc

SEQ ID NO: 456119 - DNA, 15 bp, Homo sapiens
gctgtgatctcaccg

SEQ ID NO: 456120 - DNA, 15 bp, Homo sapiens
agctgtgatctcacc

SEQ ID NO: 456121 - DNA, 15 bp, Homo sapiens
gagctgtgatctcac

SEQ ID NO: 456122 - DNA, 15 bp, Homo sapiens
tgagctgtgatctca

SEQ ID NO: 456123 - DNA, 15 bp, Homo sapiens
atgagctgtgatctc

SEQ ID NO: 456124 - DNA, 15 bp, Homo sapiens
catgagctgtgatct

SEQ ID NO: 456125 - DNA, 15 bp, Homo sapiens
tcatgagctgtgatc

SEQ ID NO: 456126 - DNA, 15 bp, Homo sapiens
gtcatgagctgtgat

SEQ ID NO: 456127 - DNA, 15 bp, Homo sapiens
tgtcatgagctgtga

SEQ ID NO: 456128 - DNA, 15 bp, Homo sapiens
ctgtcatgagctgtg

SEQ ID NO: 456129 - DNA, 15 bp, Homo sapiens
gctgtcatgagctgt

SEQ ID NO: 456130 - DNA, 15 bp, Homo sapiens
ggctgtcatgagctg

SEQ ID NO: 456131 - DNA, 15 bp, Homo sapiens
aggctgtcatgagct

SEQ ID NO: 456132 - DNA, 15 bp, Homo sapiens
aaggctgtcatgagc

SEQ ID NO: 456133 - DNA, 15 bp, Homo sapiens
caaggctgtcatgag

SEQ ID NO: 456134 - DNA, 15 bp, Homo sapiens
tcaaggctgtcatga

SEQ ID NO: 456135 - DNA, 15 bp, Homo sapiens
gtcaaggctgtcatg

SEQ ID NO: 456136 - DNA, 15 bp, Homo sapiens
ggtcaaggctgtcat

SEQ ID NO: 456137 - DNA, 15 bp, Homo sapiens
aggtcaaggctgtca

SEQ ID NO: 456138 - DNA, 15 bp, Homo sapiens
gaggtcaaggctgtc

SEQ ID NO: 456139 - DNA, 15 bp, Homo sapiens
ggaggtcaaggctgt

SEQ ID NO: 456140 - DNA, 15 bp, Homo sapiens
aggaggtcaaggctg

SEQ ID NO: 456141 - DNA, 15 bp, Homo sapiens
taggaggtcaaggct

SEQ ID NO: 456142 - DNA, 15 bp, Homo sapiens
ctaggaggtcaaggc

SEQ ID NO: 456143 - DNA, 15 bp, Homo sapiens
cctaggaggtcaagg

SEQ ID NO: 456144 - DNA, 15 bp, Homo sapiens
gcctaggaggtcaag

SEQ ID NO: 456145 - DNA, 15 bp, Homo sapiens
agcctaggaggtcaa

SEQ ID NO: 456146 - DNA, 15 bp, Homo sapiens
gagcctaggaggtca

SEQ ID NO: 456147 - DNA, 15 bp, Homo sapiens
tgagcctaggaggtc

SEQ ID NO: 456148 - DNA, 15 bp, Homo sapiens
ttgagcctaggaggt

SEQ ID NO: 456149 - DNA, 15 bp, Homo sapiens
cttgagcctaggagg

SEQ ID NO: 456150 - DNA, 15 bp, Homo sapiens
acttgagcctaggag

SEQ ID NO: 456151 - DNA, 15 bp, Homo sapiens
cacttgagcctagga

SEQ ID NO: 456152 - DNA, 15 bp, Homo sapiens
tcacttgagcctagg

SEQ ID NO: 456153 - DNA, 15 bp, Homo sapiens
atcacttgagcctag

SEQ ID NO: 456154 - DNA, 15 bp, Homo sapiens
gatcacttgagccta

SEQ ID NO: 456155 - DNA, 15 bp, Homo sapiens
ggatcacttgagcct

SEQ ID NO: 456156 - DNA, 15 bp, Homo sapiens
aggatcacttgagcc

SEQ ID NO: 456157 - DNA, 15 bp, Homo sapiens
gaggatcacttgagc

SEQ ID NO: 456158 - DNA, 15 bp, Homo sapiens
ggaggatcacttgag

SEQ ID NO: 456159 - DNA, 15 bp, Homo sapiens
gctgaggcaggagga

SEQ ID NO: 456160 - DNA, 15 bp, Homo sapiens
ggctgaggcaggagg

SEQ ID NO: 456161 - DNA, 15 bp, Homo sapiens
aaggctgaggcagga

SEQ ID NO: 456162 - DNA, 15 bp, Homo sapiens
gaaggctgaggcagg

SEQ ID NO: 456163 - DNA, 15 bp, Homo sapiens
cgaaggctgaggcag

SEQ ID NO: 456164 - DNA, 15 bp, Homo sapiens
ccgaaggctgaggca

SEQ ID NO: 456165 - DNA, 15 bp, Homo sapiens
cccgaaggctgaggc

SEQ ID NO: 456166 - DNA, 15 bp, Homo sapiens
ccccgaaggctgagg

SEQ ID NO: 456167 - DNA, 15 bp, Homo sapiens
accccgaaggctgag

SEQ ID NO: 456168 - DNA, 15 bp, Homo sapiens
taccccgaaggctga

SEQ ID NO: 456169 - DNA, 15 bp, Homo sapiens
ctaccccgaaggctg

SEQ ID NO: 456170 - DNA, 15 bp, Homo sapiens
gctaccccgaaggct

SEQ ID NO: 456171 - DNA, 15 bp, Homo sapiens
agctaccccgaaggc

SEQ ID NO: 456172 - DNA, 15 bp, Homo sapiens
cagctaccccgaagg

SEQ ID NO: 456173 - DNA, 15 bp, Homo sapiens
ccagctaccccgaag

SEQ ID NO: 456174 - DNA, 15 bp, Homo sapiens
cccagctaccccgaa

SEQ ID NO: 456175 - DNA, 15 bp, Homo sapiens
ccccagctaccccga

SEQ ID NO: 456176 - DNA, 15 bp, Homo sapiens
gccccagctaccccg

SEQ ID NO: 456177 - DNA, 15 bp, Homo sapiens
agccccagctacccc

SEQ ID NO: 456178 - DNA, 15 bp, Homo sapiens
tagccccagctaccc

SEQ ID NO: 456179 - DNA, 15 bp, Homo sapiens
gtagccccagctacc

SEQ ID NO: 456180 - DNA, 15 bp, Homo sapiens
tgtagccccagctac

SEQ ID NO: 456181 - DNA, 15 bp, Homo sapiens
ctgtagccccagcta

SEQ ID NO: 456182 - DNA, 15 bp, Homo sapiens
cctgtagccccagct

SEQ ID NO: 456183 - DNA, 15 bp, Homo sapiens
acctgtagccccagc

SEQ ID NO: 456184 - DNA, 15 bp, Homo sapiens
cacctgtagccccag

SEQ ID NO: 456185 - DNA, 15 bp, Homo sapiens
acacctgtagcccca

SEQ ID NO: 456186 - DNA, 15 bp, Homo sapiens
cacacctgtagcccc

SEQ ID NO: 456187 - DNA, 15 bp, Homo sapiens
acacacctgtagccc

SEQ ID NO: 456188 - DNA, 15 bp, Homo sapiens
cacacacctgtagcc

SEQ ID NO: 456189 - DNA, 15 bp, Homo sapiens
gcacacacctgtagc

SEQ ID NO: 456190 - DNA, 15 bp, Homo sapiens
agcacacacctgtag

SEQ ID NO: 456191 - DNA, 15 bp, Homo sapiens
tagcacacacctgta

SEQ ID NO: 456192 - DNA, 15 bp, Homo sapiens
gtagcacacacctgt

SEQ ID NO: 456193 - DNA, 15 bp, Homo sapiens
ggtagcacacacctg

SEQ ID NO: 456194 - DNA, 15 bp, Homo sapiens
tggtagcacacacct

SEQ ID NO: 456195 - DNA, 15 bp, Homo sapiens
gtggtagcacacacc

SEQ ID NO: 456196 - DNA, 15 bp, Homo sapiens
ggtggtagcacacac

SEQ ID NO: 456197 - DNA, 15 bp, Homo sapiens
gggtggtagcacaca

SEQ ID NO: 456198 - DNA, 15 bp, Homo sapiens
agggtggtagcacac

SEQ ID NO: 456199 - DNA, 15 bp, Homo sapiens
gagggtggtagcaca

SEQ ID NO: 456200 - DNA, 15 bp, Homo sapiens
tgagggtggtagcac

SEQ ID NO: 456201 - DNA, 15 bp, Homo sapiens
ctgagggtggtagca

SEQ ID NO: 456202 - DNA, 15 bp, Homo sapiens
gctgagggtggtagc

SEQ ID NO: 456203 - DNA, 15 bp, Homo sapiens
agctgagggtggtag

SEQ ID NO: 456204 - DNA, 15 bp, Homo sapiens
tagctgagggtggta

SEQ ID NO: 456205 - DNA, 15 bp, Homo sapiens
ttagctgagggtggt

SEQ ID NO: 456206 - DNA, 15 bp, Homo sapiens
attagctgagggtgg

SEQ ID NO: 456207 - DNA, 15 bp, Homo sapiens
aattagctgagggtg

SEQ ID NO: 456208 - DNA, 15 bp, Homo sapiens
aaattagctgagggt

SEQ ID NO: 456209 - DNA, 15 bp, Homo sapiens
aaaattagctgaggg

SEQ ID NO: 456210 - DNA, 15 bp, Homo sapiens
gaaaattagctgagg

SEQ ID NO: 456211 - DNA, 15 bp, Homo sapiens
agaaaattagctgag

SEQ ID NO: 456212 - DNA, 15 bp, Homo sapiens
tagaaaattagctga

SEQ ID NO: 456213 - DNA, 15 bp, Homo sapiens
ttagaaaattagctg

SEQ ID NO: 456214 - DNA, 15 bp, Homo sapiens
attagaaaattagct

SEQ ID NO: 456215 - DNA, 15 bp, Homo sapiens
aattagaaaattagc

SEQ ID NO: 456216 - DNA, 15 bp, Homo sapiens
aaattagaaaattag

SEQ ID NO: 456217 - DNA, 15 bp, Homo sapiens
aaaattagaaaatta

SEQ ID NO: 456218 - DNA, 15 bp, Homo sapiens
aaaaattagaaaatt

SEQ ID NO: 456219 - DNA, 15 bp, Homo sapiens
aaaaaattagaaaat

SEQ ID NO: 456220 - DNA, 15 bp, Homo sapiens
aaaaaaattagaaaa

SEQ ID NO: 456221 - DNA, 15 bp, Homo sapiens
caaaaaaattagaaa

SEQ ID NO: 456222 - DNA, 15 bp, Homo sapiens
tcaaaaaaattagaa

SEQ ID NO: 456223 - DNA, 15 bp, Homo sapiens
ctcaaaaaaattaga

SEQ ID NO: 456224 - DNA, 15 bp, Homo sapiens
actcaaaaaaattag

SEQ ID NO: 456225 - DNA, 15 bp, Homo sapiens
gactcaaaaaaatta

SEQ ID NO: 456226 - DNA, 15 bp, Homo sapiens
tgactcaaaaaaatt

SEQ ID NO: 456227 - DNA, 15 bp, Homo sapiens
ctgactcaaaaaaat

SEQ ID NO: 456228 - DNA, 15 bp, Homo sapiens
cctgactcaaaaaaa

SEQ ID NO: 456229 - DNA, 15 bp, Homo sapiens
tcctgactcaaaaaa

SEQ ID NO: 456230 - DNA, 15 bp, Homo sapiens
atcctgactcaaaaa

SEQ ID NO: 456231 - DNA, 15 bp, Homo sapiens
gatcctgactcaaaa

SEQ ID NO: 456232 - DNA, 15 bp, Homo sapiens
agatcctgactcaaa

SEQ ID NO: 456233 - DNA, 15 bp, Homo sapiens
gagatcctgactcaa

SEQ ID NO: 456234 - DNA, 15 bp, Homo sapiens
cgagatcctgactca

SEQ ID NO: 456235 - DNA, 15 bp, Homo sapiens
acgagatcctgactc

SEQ ID NO: 456236 - DNA, 15 bp, Homo sapiens
gacgagatcctgact

SEQ ID NO: 456237 - DNA, 15 bp, Homo sapiens
tgacgagatcctgac

SEQ ID NO: 456238 - DNA, 15 bp, Homo sapiens
gtgacgagatcctga

SEQ ID NO: 456239 - DNA, 15 bp, Homo sapiens
cgtgacgagatcctg

SEQ ID NO: 456240 - DNA, 15 bp, Homo sapiens
acgtgacgagatcct

SEQ ID NO: 456241 - DNA, 15 bp, Homo sapiens
aacgtgacgagatcc

SEQ ID NO: 456242 - DNA, 15 bp, Homo sapiens
caacgtgacgagatc

SEQ ID NO: 456243 - DNA, 15 bp, Homo sapiens
gcaacgtgacgagat

SEQ ID NO: 456244 - DNA, 15 bp, Homo sapiens
ggcaacgtgacgaga

SEQ ID NO: 456245 - DNA, 15 bp, Homo sapiens
aggcaacgtgacgag

SEQ ID NO: 456246 - DNA, 15 bp, Homo sapiens
taggcaacgtgacga

SEQ ID NO: 456247 - DNA, 15 bp, Homo sapiens
ctaggcaacgtgacg

SEQ ID NO: 456248 - DNA, 15 bp, Homo sapiens
cctaggcaacgtgac

SEQ ID NO: 456249 - DNA, 15 bp, Homo sapiens
gcctaggcaacgtga

SEQ ID NO: 456250 - DNA, 15 bp, Homo sapiens
agcctaggcaacgtg

SEQ ID NO: 456251 - DNA, 15 bp, Homo sapiens
cagcctaggcaacgt

SEQ ID NO: 456252 - DNA, 15 bp, Homo sapiens
tcagcctaggcaacg

SEQ ID NO: 456253 - DNA, 15 bp, Homo sapiens
ttcagcctaggcaac

SEQ ID NO: 456254 - DNA, 15 bp, Homo sapiens
attcagcctaggcaa

SEQ ID NO: 456255 - DNA, 15 bp, Homo sapiens
aattcagcctaggca

SEQ ID NO: 456256 - DNA, 15 bp, Homo sapiens
taattcagcctaggc

SEQ ID NO: 456257 - DNA, 15 bp, Homo sapiens
gtaattcagcctagg

SEQ ID NO: 456258 - DNA, 15 bp, Homo sapiens
agtaattcagcctag

SEQ ID NO: 456259 - DNA, 15 bp, Homo sapiens
gagtaattcagccta

SEQ ID NO: 456260 - DNA, 15 bp, Homo sapiens
agagtaattcagcct

SEQ ID NO: 456261 - DNA, 15 bp, Homo sapiens
aagagtaattcagcc

SEQ ID NO: 456262 - DNA, 15 bp, Homo sapiens
taagagtaattcagc

SEQ ID NO: 456263 - DNA, 15 bp, Homo sapiens
ataagagtaattcag

SEQ ID NO: 456264 - DNA, 15 bp, Homo sapiens
aataagagtaattca

SEQ ID NO: 456265 - DNA, 15 bp, Homo sapiens
taataagagtaattc

SEQ ID NO: 456266 - DNA, 15 bp, Homo sapiens
ttaataagagtaatt

SEQ ID NO: 456267 - DNA, 15 bp, Homo sapiens
tttaataagagtaat

SEQ ID NO: 456268 - DNA, 15 bp, Homo sapiens
ttttaataagagtaa

SEQ ID NO: 456269 - DNA, 15 bp, Homo sapiens
tttttaataagagta

SEQ ID NO: 456270 - DNA, 15 bp, Homo sapiens
gtttttaataagagt

SEQ ID NO: 456271 - DNA, 15 bp, Homo sapiens
agtttttaataagag

SEQ ID NO: 456272 - DNA, 15 bp, Homo sapiens
tagtttttaataaga

SEQ ID NO: 456273 - DNA, 15 bp, Homo sapiens
atagtttttaataag

SEQ ID NO: 456274 - DNA, 15 bp, Homo sapiens
tatagtttttaataa

SEQ ID NO: 456275 - DNA, 15 bp, Homo sapiens
ttatagtttttaata

SEQ ID NO: 456276 - DNA, 15 bp, Homo sapiens
attatagtttttaat

SEQ ID NO: 456277 - DNA, 15 bp, Homo sapiens
tattatagtttttaa

SEQ ID NO: 456278 - DNA, 15 bp, Homo sapiens
atattatagttttta

SEQ ID NO: 456279 - DNA, 15 bp, Homo sapiens
gatattatagttttt

SEQ ID NO: 456280 - DNA, 15 bp, Homo sapiens
tgatattatagtttt

SEQ ID NO: 456281 - DNA, 15 bp, Homo sapiens
ctgatattatagttt

SEQ ID NO: 456282 - DNA, 15 bp, Homo sapiens
cctgatattatagtt

SEQ ID NO: 456283 - DNA, 15 bp, Homo sapiens
gcctgatattatagt

SEQ ID NO: 456284 - DNA, 15 bp, Homo sapiens
ggcctgatattatag

SEQ ID NO: 456285 - DNA, 15 bp, Homo sapiens
cggcctgatattata

SEQ ID NO: 456286 - DNA, 15 bp, Homo sapiens
tcggcctgatattat

SEQ ID NO: 456287 - DNA, 15 bp, Homo sapiens
ctcggcctgatatta

SEQ ID NO: 456288 - DNA, 15 bp, Homo sapiens
actcggcctgatatt

SEQ ID NO: 456289 - DNA, 15 bp, Homo sapiens
cactcggcctgatat

SEQ ID NO: 456290 - DNA, 15 bp, Homo sapiens
gcactcggcctgata

SEQ ID NO: 456291 - DNA, 15 bp, Homo sapiens
cgcactcggcctgat

SEQ ID NO: 456292 - DNA, 15 bp, Homo sapiens
ccgcactcggcctga

SEQ ID NO: 456293 - DNA, 15 bp, Homo sapiens
accgcactcggcctg

SEQ ID NO: 456294 - DNA, 15 bp, Homo sapiens
caccgcactcggcct

SEQ ID NO: 456295 - DNA, 15 bp, Homo sapiens
ccaccgcactcggcc

SEQ ID NO: 456296 - DNA, 15 bp, Homo sapiens
gccaccgcactcggc

SEQ ID NO: 456297 - DNA, 15 bp, Homo sapiens
agccaccgcactcgg

SEQ ID NO: 456298 - DNA, 15 bp, Homo sapiens
gagccaccgcactcg

SEQ ID NO: 456299 - DNA, 15 bp, Homo sapiens
tgagccaccgcactc

SEQ ID NO: 456300 - DNA, 15 bp, Homo sapiens
gtgagccaccgcact

SEQ ID NO: 456301 - DNA, 15 bp, Homo sapiens
cgtgagccaccgcac

SEQ ID NO: 456302 - DNA, 15 bp, Homo sapiens
gcgtgagccaccgca

SEQ ID NO: 456303 - DNA, 15 bp, Homo sapiens
cgccttggcctccca

SEQ ID NO: 456304 - DNA, 15 bp, Homo sapiens
ccgccttggcctccc

SEQ ID NO: 456305 - DNA, 15 bp, Homo sapiens
cccgccttggcctcc

SEQ ID NO: 456306 - DNA, 15 bp, Homo sapiens
acccgccttggcctc

SEQ ID NO: 456307 - DNA, 15 bp, Homo sapiens
cacccgccttggcct

SEQ ID NO: 456308 - DNA, 15 bp, Homo sapiens
ccacccgccttggcc

SEQ ID NO: 456309 - DNA, 15 bp, Homo sapiens
tccacccgccttggc

SEQ ID NO: 456310 - DNA, 15 bp, Homo sapiens
atccacccgccttgg

SEQ ID NO: 456311 - DNA, 15 bp, Homo sapiens
gatccacccgccttg

SEQ ID NO: 456312 - DNA, 15 bp, Homo sapiens
tgatccacccgcctt

SEQ ID NO: 456313 - DNA, 15 bp, Homo sapiens
gtgatccacccgcct

SEQ ID NO: 456314 - DNA, 15 bp, Homo sapiens
ggtgatccacccgcc

SEQ ID NO: 456315 - DNA, 15 bp, Homo sapiens
aggtgatccacccgc

SEQ ID NO: 456316 - DNA, 15 bp, Homo sapiens
caggtgatccacccg

SEQ ID NO: 456317 - DNA, 15 bp, Homo sapiens
tcaggtgatccaccc

SEQ ID NO: 456318 - DNA, 15 bp, Homo sapiens
ctcaggtgatccacc

SEQ ID NO: 456319 - DNA, 15 bp, Homo sapiens
cctcaggtgatccac

SEQ ID NO: 456320 - DNA, 15 bp, Homo sapiens
acctcaggtgatcca

SEQ ID NO: 456321 - DNA, 15 bp, Homo sapiens
gacctcaggtgatcc

SEQ ID NO: 456322 - DNA, 15 bp, Homo sapiens
gcaggctggtcttga

SEQ ID NO: 456323 - DNA, 15 bp, Homo sapiens
ggcaggctggtcttg

SEQ ID NO: 456324 - DNA, 15 bp, Homo sapiens
gggcaggctggtctt

SEQ ID NO: 456325 - DNA, 15 bp, Homo sapiens
tgggcaggctggtct

SEQ ID NO: 456326 - DNA, 15 bp, Homo sapiens
ttgggcaggctggtc

SEQ ID NO: 456327 - DNA, 15 bp, Homo sapiens
gttgggcaggctggt

SEQ ID NO: 456328 - DNA, 15 bp, Homo sapiens
tgttgggcaggctgg

SEQ ID NO: 456329 - DNA, 15 bp, Homo sapiens
ctgttgggcaggctg

SEQ ID NO: 456330 - DNA, 15 bp, Homo sapiens
tctgttgggcaggct

SEQ ID NO: 456331 - DNA, 15 bp, Homo sapiens
ctctgttgggcaggc

SEQ ID NO: 456332 - DNA, 15 bp, Homo sapiens
actctgttgggcagg

SEQ ID NO: 456333 - DNA, 15 bp, Homo sapiens
cactctgttgggcag

SEQ ID NO: 456334 - DNA, 15 bp, Homo sapiens
tcactctgttgggca

SEQ ID NO: 456335 - DNA, 15 bp, Homo sapiens
ctcactctgttgggc

SEQ ID NO: 456336 - DNA, 15 bp, Homo sapiens
tctcactctgttggg

SEQ ID NO: 456337 - DNA, 15 bp, Homo sapiens
gtctcactctgttgg

SEQ ID NO: 456338 - DNA, 15 bp, Homo sapiens
ggtctcactctgttg

SEQ ID NO: 456339 - DNA, 15 bp, Homo sapiens
gggtctcactctgtt

SEQ ID NO: 456340 - DNA, 15 bp, Homo sapiens
ggggtctcactctgt

SEQ ID NO: 456341 - DNA, 15 bp, Homo sapiens
gggggtctcactctg

SEQ ID NO: 456342 - DNA, 15 bp, Homo sapiens
ggggggtctcactct

SEQ ID NO: 456343 - DNA, 15 bp, Homo sapiens
gggggggtctcactc

SEQ ID NO: 456344 - DNA, 15 bp, Homo sapiens
ggggggggtctcact

SEQ ID NO: 456345 - DNA, 15 bp, Homo sapiens
cggggggggtctcac

SEQ ID NO: 456346 - DNA, 15 bp, Homo sapiens
acggggggggtctca

SEQ ID NO: 456347 - DNA, 15 bp, Homo sapiens
gacggggggggtctc

SEQ ID NO: 456348 - DNA, 15 bp, Homo sapiens
agacggggggggtct

SEQ ID NO: 456349 - DNA, 15 bp, Homo sapiens
gagacggggggggtc

SEQ ID NO: 456350 - DNA, 15 bp, Homo sapiens
agagacggggggggt

SEQ ID NO: 456351 - DNA, 15 bp, Homo sapiens
tagagacgggggggg

SEQ ID NO: 456352 - DNA, 15 bp, Homo sapiens
gtagagacggggggg

SEQ ID NO: 456353 - DNA, 15 bp, Homo sapiens
agtagagacgggggg

SEQ ID NO: 456354 - DNA, 15 bp, Homo sapiens
atatttttagtagag

SEQ ID NO: 456355 - DNA, 15 bp, Homo sapiens
tatatttttagtaga

SEQ ID NO: 456356 - DNA, 15 bp, Homo sapiens
ttatatttttagtag

SEQ ID NO: 456357 - DNA, 15 bp, Homo sapiens
tttatatttttagta

SEQ ID NO: 456358 - DNA, 15 bp, Homo sapiens
ttttatatttttagt

SEQ ID NO: 456359 - DNA, 15 bp, Homo sapiens
tttttatatttttag

SEQ ID NO: 456360 - DNA, 15 bp, Homo sapiens
atttttatattttta

SEQ ID NO: 456361 - DNA, 15 bp, Homo sapiens
aatttttatattttt

SEQ ID NO: 456362 - DNA, 15 bp, Homo sapiens
taatttttatatttt

SEQ ID NO: 456363 - DNA, 15 bp, Homo sapiens
ctaatttttatattt

SEQ ID NO: 456364 - DNA, 15 bp, Homo sapiens
gctaatttttatatt

SEQ ID NO: 456365 - DNA, 15 bp, Homo sapiens
ggctaatttttatat

SEQ ID NO: 456366 - DNA, 15 bp, Homo sapiens
tggctaatttttata

SEQ ID NO: 456367 - DNA, 15 bp, Homo sapiens
ctggctaatttttat

SEQ ID NO: 456368 - DNA, 15 bp, Homo sapiens
actggctaattttta

SEQ ID NO: 456369 - DNA, 15 bp, Homo sapiens
aactggctaattttt

SEQ ID NO: 456370 - DNA, 15 bp, Homo sapiens
caactggctaatttt

SEQ ID NO: 456371 - DNA, 15 bp, Homo sapiens
acaactggctaattt

SEQ ID NO: 456372 - DNA, 15 bp, Homo sapiens
cacaactggctaatt

SEQ ID NO: 456373 - DNA, 15 bp, Homo sapiens
ccacaactggctaat

SEQ ID NO: 456374 - DNA, 15 bp, Homo sapiens
accacaactggctaa

SEQ ID NO: 456375 - DNA, 15 bp, Homo sapiens
caccacaactggcta

SEQ ID NO: 456376 - DNA, 15 bp, Homo sapiens
ccaccacaactggct

SEQ ID NO: 456377 - DNA, 15 bp, Homo sapiens
accaccacaactggc

SEQ ID NO: 456378 - DNA, 15 bp, Homo sapiens
caccaccacaactgg

SEQ ID NO: 456379 - DNA, 15 bp, Homo sapiens
ccaccaccacaactg

SEQ ID NO: 456380 - DNA, 15 bp, Homo sapiens
cccaccaccacaact

SEQ ID NO: 456381 - DNA, 15 bp, Homo sapiens
gcccaccaccacaac

SEQ ID NO: 456382 - DNA, 15 bp, Homo sapiens
tgcccaccaccacaa

SEQ ID NO: 456383 - DNA, 15 bp, Homo sapiens
gtgcccaccaccaca

SEQ ID NO: 456384 - DNA, 15 bp, Homo sapiens
ggtgcccaccaccac

SEQ ID NO: 456385 - DNA, 15 bp, Homo sapiens
atcctgcctcagcct

SEQ ID NO: 456386 - DNA, 15 bp, Homo sapiens
tatcctgcctcagcc

SEQ ID NO: 456387 - DNA, 15 bp, Homo sapiens
ttatcctgcctcagc

SEQ ID NO: 456388 - DNA, 15 bp, Homo sapiens
attatcctgcctcag

SEQ ID NO: 456389 - DNA, 15 bp, Homo sapiens
gattatcctgcctca

SEQ ID NO: 456390 - DNA, 15 bp, Homo sapiens
cgattatcctgcctc

SEQ ID NO: 456391 - DNA, 15 bp, Homo sapiens
gcgattatcctgcct

SEQ ID NO: 456392 - DNA, 15 bp, Homo sapiens
agcgattatcctgcc

SEQ ID NO: 456393 - DNA, 15 bp, Homo sapiens
aagcgattatcctgc

SEQ ID NO: 456394 - DNA, 15 bp, Homo sapiens
caagcgattatcctg

SEQ ID NO: 456395 - DNA, 15 bp, Homo sapiens
tcaagcgattatcct

SEQ ID NO: 456396 - DNA, 15 bp, Homo sapiens
ttcaagcgattatcc

SEQ ID NO: 456397 - DNA, 15 bp, Homo sapiens
gttcaagcgattatc

SEQ ID NO: 456398 - DNA, 15 bp, Homo sapiens
ggttcaagcgattat

SEQ ID NO: 456399 - DNA, 15 bp, Homo sapiens
gggttcaagcgatta

SEQ ID NO: 456400 - DNA, 15 bp, Homo sapiens
cgggttcaagcgatt

SEQ ID NO: 456401 - DNA, 15 bp, Homo sapiens
ccgggttcaagcgat

SEQ ID NO: 456402 - DNA, 15 bp, Homo sapiens
cccgggttcaagcga

SEQ ID NO: 456403 - DNA, 15 bp, Homo sapiens
tcccgggttcaagcg

SEQ ID NO: 456404 - DNA, 15 bp, Homo sapiens
ctcccgggttcaagc

SEQ ID NO: 456405 - DNA, 15 bp, Homo sapiens
cctcccgggttcaag

SEQ ID NO: 456406 - DNA, 15 bp, Homo sapiens
gcctcccgggttcaa

SEQ ID NO: 456407 - DNA, 15 bp, Homo sapiens
cgcctcccgggttca

SEQ ID NO: 456408 - DNA, 15 bp, Homo sapiens
ccgcctcccgggttc

SEQ ID NO: 456409 - DNA, 15 bp, Homo sapiens
tccgcctcccgggtt

SEQ ID NO: 456410 - DNA, 15 bp, Homo sapiens
ctccgcctcccgggt

SEQ ID NO: 456411 - DNA, 15 bp, Homo sapiens
cctccgcctcccggg

SEQ ID NO: 456412 - DNA, 15 bp, Homo sapiens
acctccgcctcccgg

SEQ ID NO: 456413 - DNA, 15 bp, Homo sapiens
aacctccgcctcccg

SEQ ID NO: 456414 - DNA, 15 bp, Homo sapiens
cgcaacctccgcctc

SEQ ID NO: 456415 - DNA, 15 bp, Homo sapiens
ccgcaacctccgcct

SEQ ID NO: 456416 - DNA, 15 bp, Homo sapiens
accgcaacctccgcc

SEQ ID NO: 456417 - DNA, 15 bp, Homo sapiens
caccgcaacctccgc

SEQ ID NO: 456418 - DNA, 15 bp, Homo sapiens
tcaccgcaacctccg

SEQ ID NO: 456419 - DNA, 15 bp, Homo sapiens
ttcaccgcaacctcc

SEQ ID NO: 456420 - DNA, 15 bp, Homo sapiens
gttcaccgcaacctc

SEQ ID NO: 456421 - DNA, 15 bp, Homo sapiens
ggttcaccgcaacct

SEQ ID NO: 456422 - DNA, 15 bp, Homo sapiens
cggttcaccgcaacc

SEQ ID NO: 456423 - DNA, 15 bp, Homo sapiens
tcggttcaccgcaac

SEQ ID NO: 456424 - DNA, 15 bp, Homo sapiens
ctcggttcaccgcaa

SEQ ID NO: 456425 - DNA, 15 bp, Homo sapiens
tctcggttcaccgca

SEQ ID NO: 456426 - DNA, 15 bp, Homo sapiens
atctcggttcaccgc

SEQ ID NO: 456427 - DNA, 15 bp, Homo sapiens
gatctcggttcaccg

SEQ ID NO: 456428 - DNA, 15 bp, Homo sapiens
cgatctcggttcacc

SEQ ID NO: 456429 - DNA, 15 bp, Homo sapiens
acgatctcggttcac

SEQ ID NO: 456430 - DNA, 15 bp, Homo sapiens
cacgatctcggttca

SEQ ID NO: 456431 - DNA, 15 bp, Homo sapiens
gcacgatctcggttc

SEQ ID NO: 456432 - DNA, 15 bp, Homo sapiens
ggcacgatctcggtt

SEQ ID NO: 456433 - DNA, 15 bp, Homo sapiens
tggcacgatctcggt

SEQ ID NO: 456434 - DNA, 15 bp, Homo sapiens
gtggcacgatctcgg

SEQ ID NO: 456435 - DNA, 15 bp, Homo sapiens
agtggcacgatctcg

SEQ ID NO: 456436 - DNA, 15 bp, Homo sapiens
tagtgcagtggcacg

SEQ ID NO: 456437 - DNA, 15 bp, Homo sapiens
gtagtgcagtggcac

SEQ ID NO: 456438 - DNA, 15 bp, Homo sapiens
tgtagtgcagtggca

SEQ ID NO: 456439 - DNA, 15 bp, Homo sapiens
ctgtagtgcagtggc

SEQ ID NO: 456440 - DNA, 15 bp, Homo sapiens
gctgtagtgcagtgg

SEQ ID NO: 456441 - DNA, 15 bp, Homo sapiens
ggctgtagtgcagtg

SEQ ID NO: 456442 - DNA, 15 bp, Homo sapiens
aggctgtagtgcagt

SEQ ID NO: 456443 - DNA, 15 bp, Homo sapiens
caggctgtagtgcag

SEQ ID NO: 456444 - DNA, 15 bp, Homo sapiens
ccaggctgtagtgca

SEQ ID NO: 456445 - DNA, 15 bp, Homo sapiens
cccaggctgtagtgc

SEQ ID NO: 456446 - DNA, 15 bp, Homo sapiens
acccaggctgtagtg

SEQ ID NO: 456447 - DNA, 15 bp, Homo sapiens
cacccaggctgtagt

SEQ ID NO: 456448 - DNA, 15 bp, Homo sapiens
tcacccaggctgtag

SEQ ID NO: 456449 - DNA, 15 bp, Homo sapiens
gtcacccaggctgta

SEQ ID NO: 456450 - DNA, 15 bp, Homo sapiens
tgtcacccaggctgt

SEQ ID NO: 456451 - DNA, 15 bp, Homo sapiens
agtctcactctgtca

SEQ ID NO: 456452 - DNA, 15 bp, Homo sapiens
gagtctcactctgtc

SEQ ID NO: 456453 - DNA, 15 bp, Homo sapiens
agagtctcactctgt

SEQ ID NO: 456454 - DNA, 15 bp, Homo sapiens
cagagtctcactctg

SEQ ID NO: 456455 - DNA, 15 bp, Homo sapiens
acagagtctcactct

SEQ ID NO: 456456 - DNA, 15 bp, Homo sapiens
gacagagtctcactc

SEQ ID NO: 456457 - DNA, 15 bp, Homo sapiens
agacagagtctcact

SEQ ID NO: 456458 - DNA, 15 bp, Homo sapiens
gagacagagtctcac

SEQ ID NO: 456459 - DNA, 15 bp, Homo sapiens
tgagacagagtctca

SEQ ID NO: 456460 - DNA, 15 bp, Homo sapiens
gtttttttgagacag

SEQ ID NO: 456461 - DNA, 15 bp, Homo sapiens
ggtttttttgagaca

SEQ ID NO: 456462 - DNA, 15 bp, Homo sapiens
cggtttttttgagac

SEQ ID NO: 456463 - DNA, 15 bp, Homo sapiens
tcggtttttttgaga

SEQ ID NO: 456464 - DNA, 15 bp, Homo sapiens
ttcggtttttttgag

SEQ ID NO: 456465 - DNA, 15 bp, Homo sapiens
tttcggtttttttga

SEQ ID NO: 456466 - DNA, 15 bp, Homo sapiens
ttttcggtttttttg

SEQ ID NO: 456467 - DNA, 15 bp, Homo sapiens
tttttcggttttttt

SEQ ID NO: 456468 - DNA, 15 bp, Homo sapiens
gtttttcggtttttt

SEQ ID NO: 456469 - DNA, 15 bp, Homo sapiens
tgtttttcggttttt

SEQ ID NO: 456470 - DNA, 15 bp, Homo sapiens
ttgtttttcggtttt

SEQ ID NO: 456471 - DNA, 15 bp, Homo sapiens
tttgtttttcggttt

SEQ ID NO: 456472 - DNA, 15 bp, Homo sapiens
ttttgtttttcggtt

SEQ ID NO: 456473 - DNA, 15 bp, Homo sapiens
tttttgtttttcggt

SEQ ID NO: 456474 - DNA, 15 bp, Homo sapiens
ctttttgtttttcgg

SEQ ID NO: 456475 - DNA, 15 bp, Homo sapiens
gctttttgtttttcg

SEQ ID NO: 456476 - DNA, 15 bp, Homo sapiens
tgctttttgtttttc

SEQ ID NO: 456477 - DNA, 15 bp, Homo sapiens
atgctttttgttttt

SEQ ID NO: 456478 - DNA, 15 bp, Homo sapiens
tatgctttttgtttt

SEQ ID NO: 456479 - DNA, 15 bp, Homo sapiens
ttatgctttttgttt

SEQ ID NO: 456480 - DNA, 15 bp, Homo sapiens
attatgctttttgtt

SEQ ID NO: 456481 - DNA, 15 bp, Homo sapiens
aattatgctttttgt

SEQ ID NO: 456482 - DNA, 15 bp, Homo sapiens
taattatgctttttg

SEQ ID NO: 456483 - DNA, 15 bp, Homo sapiens
ctaattatgcttttt

SEQ ID NO: 456484 - DNA, 15 bp, Homo sapiens
cctaattatgctttt

SEQ ID NO: 456485 - DNA, 15 bp, Homo sapiens
ccctaattatgcttt

SEQ ID NO: 456486 - DNA, 15 bp, Homo sapiens
accctaattatgctt

SEQ ID NO: 456487 - DNA, 15 bp, Homo sapiens
caccctaattatgct

SEQ ID NO: 456488 - DNA, 15 bp, Homo sapiens
ccaccctaattatgc

SEQ ID NO: 456489 - DNA, 15 bp, Homo sapiens
accaccctaattatg

SEQ ID NO: 456490 - DNA, 15 bp, Homo sapiens
taccaccctaattat

SEQ ID NO: 456491 - DNA, 15 bp, Homo sapiens
ttaccaccctaatta

SEQ ID NO: 456492 - DNA, 15 bp, Homo sapiens
gttaccaccctaatt

SEQ ID NO: 456493 - DNA, 15 bp, Homo sapiens
cgttaccaccctaat

SEQ ID NO: 456494 - DNA, 15 bp, Homo sapiens
gcgttaccaccctaa

SEQ ID NO: 456495 - DNA, 15 bp, Homo sapiens
agcgttaccacccta

SEQ ID NO: 456496 - DNA, 15 bp, Homo sapiens
aagcgttaccaccct

SEQ ID NO: 456497 - DNA, 15 bp, Homo sapiens
taagcgttaccaccc

SEQ ID NO: 456498 - DNA, 15 bp, Homo sapiens
ataagcgttaccacc

SEQ ID NO: 456499 - DNA, 15 bp, Homo sapiens
tataagcgttaccac

SEQ ID NO: 456500 - DNA, 15 bp, Homo sapiens
gtataagcgttacca

SEQ ID NO: 456501 - DNA, 15 bp, Homo sapiens
tgtataagcgttacc

SEQ ID NO: 456502 - DNA, 15 bp, Homo sapiens
atgtataagcgttac

SEQ ID NO: 456503 - DNA, 15 bp, Homo sapiens
tatgtataagcgtta

SEQ ID NO: 456504 - DNA, 15 bp, Homo sapiens
ctatgtataagcgtt

SEQ ID NO: 456505 - DNA, 15 bp, Homo sapiens
cctatgtataagcgt

SEQ ID NO: 456506 - DNA, 15 bp, Homo sapiens
ccctatgtataagcg

SEQ ID NO: 456507 - DNA, 15 bp, Homo sapiens
cccctatgtataagc

SEQ ID NO: 456508 - DNA, 15 bp, Homo sapiens
gcccctatgtataag

SEQ ID NO: 456509 - DNA, 15 bp, Homo sapiens
tgcccctatgtataa

SEQ ID NO: 456510 - DNA, 15 bp, Homo sapiens
ctgcccctatgtata

SEQ ID NO: 456511 - DNA, 15 bp, Homo sapiens
cctgcccctatgtat

SEQ ID NO: 456512 - DNA, 15 bp, Homo sapiens
acctgcccctatgta

SEQ ID NO: 456513 - DNA, 15 bp, Homo sapiens
cacctgcccctatgt

SEQ ID NO: 456514 - DNA, 15 bp, Homo sapiens
ccacctgcccctatg

SEQ ID NO: 456515 - DNA, 15 bp, Homo sapiens
tccacctgcccctat

SEQ ID NO: 456516 - DNA, 15 bp, Homo sapiens
ttccacctgccccta

SEQ ID NO: 456517 - DNA, 15 bp, Homo sapiens
attccacctgcccct

SEQ ID NO: 456518 - DNA, 15 bp, Homo sapiens
tattccacctgcccc

SEQ ID NO: 456519 - DNA, 15 bp, Homo sapiens
ttattccacctgccc

SEQ ID NO: 456520 - DNA, 15 bp, Homo sapiens
tttattccacctgcc

SEQ ID NO: 456521 - DNA, 15 bp, Homo sapiens
ttttattccacctgc

SEQ ID NO: 456522 - DNA, 15 bp, Homo sapiens
gttttattccacctg

SEQ ID NO: 456523 - DNA, 15 bp, Homo sapiens
tgttttattccacct

SEQ ID NO: 456524 - DNA, 15 bp, Homo sapiens
atgttttattccacc

SEQ ID NO: 456525 - DNA, 15 bp, Homo sapiens
tatgttttattccac

SEQ ID NO: 456526 - DNA, 15 bp, Homo sapiens
ttatgttttattcca

SEQ ID NO: 456527 - DNA, 15 bp, Homo sapiens
attatgttttattcc

SEQ ID NO: 456528 - DNA, 15 bp, Homo sapiens
aattatgttttattc

SEQ ID NO: 456529 - DNA, 15 bp, Homo sapiens
taattatgttttatt

SEQ ID NO: 456530 - DNA, 15 bp, Homo sapiens
ctaattatgttttat

SEQ ID NO: 456531 - DNA, 15 bp, Homo sapiens
cctaattatgtttta

SEQ ID NO: 456532 - DNA, 15 bp, Homo sapiens
tcctaattatgtttt

SEQ ID NO: 456533 - DNA, 15 bp, Homo sapiens
ctcctaattatgttt

SEQ ID NO: 456534 - DNA, 15 bp, Homo sapiens
cctcctaattatgtt

SEQ ID NO: 456535 - DNA, 15 bp, Homo sapiens
acctcctaattatgt

SEQ ID NO: 456536 - DNA, 15 bp, Homo sapiens
gacctcctaattatg

SEQ ID NO: 456537 - DNA, 15 bp, Homo sapiens
cgacctcctaattat

SEQ ID NO: 456538 - DNA, 15 bp, Homo sapiens
ccgacctcctaatta

SEQ ID NO: 456539 - DNA, 15 bp, Homo sapiens
cccgacctcctaatt

SEQ ID NO: 456540 - DNA, 15 bp, Homo sapiens
gcccgacctcctaat

SEQ ID NO: 456541 - DNA, 15 bp, Homo sapiens
tgcccgacctcctaa

SEQ ID NO: 456542 - DNA, 15 bp, Homo sapiens
atgcccgacctccta

SEQ ID NO: 456543 - DNA, 15 bp, Homo sapiens
catgcccgacctcct

SEQ ID NO: 456544 - DNA, 15 bp, Homo sapiens
ccatgcccgacctcc

SEQ ID NO: 456545 - DNA, 15 bp, Homo sapiens
accatgcccgacctc

SEQ ID NO: 456546 - DNA, 15 bp, Homo sapiens
caccatgcccgacct

SEQ ID NO: 456547 - DNA, 15 bp, Homo sapiens
ccaccatgcccgacc

SEQ ID NO: 456548 - DNA, 15 bp, Homo sapiens
gccaccatgcccgac

SEQ ID NO: 456549 - DNA, 15 bp, Homo sapiens
agccaccatgcccga

SEQ ID NO: 456550 - DNA, 15 bp, Homo sapiens
gagccaccatgcccg

SEQ ID NO: 456551 - DNA, 15 bp, Homo sapiens
tgagccaccatgccc

SEQ ID NO: 456552 - DNA, 15 bp, Homo sapiens
gtgagccaccatgcc

SEQ ID NO: 456553 - DNA, 15 bp, Homo sapiens
cgtgagccaccatgc

SEQ ID NO: 456554 - DNA, 15 bp, Homo sapiens
gcgtgagccaccatg

SEQ ID NO: 456555 - DNA, 15 bp, Homo sapiens
ggcgtgagccaccat

SEQ ID NO: 456556 - DNA, 15 bp, Homo sapiens
aggcgtgagccacca

SEQ ID NO: 456557 - DNA, 15 bp, Homo sapiens
aattacaggcgtgag

SEQ ID NO: 456558 - DNA, 15 bp, Homo sapiens
gaattacaggcgtga

SEQ ID NO: 456559 - DNA, 15 bp, Homo sapiens
ggaattacaggcgtg

SEQ ID NO: 456560 - DNA, 15 bp, Homo sapiens
tggaattacaggcgt

SEQ ID NO: 456561 - DNA, 15 bp, Homo sapiens
ctggaattacaggcg

SEQ ID NO: 456562 - DNA, 15 bp, Homo sapiens
acccgcctcggcctc

SEQ ID NO: 456563 - DNA, 15 bp, Homo sapiens
gacccgcctcggcct

SEQ ID NO: 456564 - DNA, 15 bp, Homo sapiens
tgacccgcctcggcc

SEQ ID NO: 456565 - DNA, 15 bp, Homo sapiens
ctgacccgcctcggc

SEQ ID NO: 456566 - DNA, 15 bp, Homo sapiens
cctgacccgcctcgg

SEQ ID NO: 456567 - DNA, 15 bp, Homo sapiens
tcctgacccgcctcg

SEQ ID NO: 456568 - DNA, 15 bp, Homo sapiens
ctcctgacccgcctc

SEQ ID NO: 456569 - DNA, 15 bp, Homo sapiens
actcctgacccgcct

SEQ ID NO: 456570 - DNA, 15 bp, Homo sapiens
aactcctgacccgcc

SEQ ID NO: 456571 - DNA, 15 bp, Homo sapiens
gaactcctgacccgc

SEQ ID NO: 456572 - DNA, 15 bp, Homo sapiens
tgaactcctgacccg

SEQ ID NO: 456573 - DNA, 15 bp, Homo sapiens
ttgaactcctgaccc

SEQ ID NO: 456574 - DNA, 15 bp, Homo sapiens
atgttgggcaggctg

SEQ ID NO: 456575 - DNA, 15 bp, Homo sapiens
tatgttgggcaggct

SEQ ID NO: 456576 - DNA, 15 bp, Homo sapiens
ctatgttgggcaggc

SEQ ID NO: 456577 - DNA, 15 bp, Homo sapiens
actatgttgggcagg

SEQ ID NO: 456578 - DNA, 15 bp, Homo sapiens
cactatgttgggcag

SEQ ID NO: 456579 - DNA, 15 bp, Homo sapiens
tcactatgttgggca

SEQ ID NO: 456580 - DNA, 15 bp, Homo sapiens
ctcactatgttgggc

SEQ ID NO: 456581 - DNA, 15 bp, Homo sapiens
tctcactatgttggg

SEQ ID NO: 456582 - DNA, 15 bp, Homo sapiens
gtctcactatgttgg

SEQ ID NO: 456583 - DNA, 15 bp, Homo sapiens
gggtctcactatgtt

SEQ ID NO: 456584 - DNA, 15 bp, Homo sapiens
ggggtctcactatgt

SEQ ID NO: 456585 - DNA, 15 bp, Homo sapiens
cggggtctcactatg

SEQ ID NO: 456586 - DNA, 15 bp, Homo sapiens
acggggtctcactat

SEQ ID NO: 456587 - DNA, 15 bp, Homo sapiens
gacggggtctcacta

SEQ ID NO: 456588 - DNA, 15 bp, Homo sapiens
agacggggtctcact

SEQ ID NO: 456589 - DNA, 15 bp, Homo sapiens
gagacggggtctcac

SEQ ID NO: 456590 - DNA, 15 bp, Homo sapiens
agagacggggtctca

SEQ ID NO: 456591 - DNA, 15 bp, Homo sapiens
tagagacggggtctc

SEQ ID NO: 456592 - DNA, 15 bp, Homo sapiens
gtagagacggggtct

SEQ ID NO: 456593 - DNA, 15 bp, Homo sapiens
agtagagacggggtc

SEQ ID NO: 456594 - DNA, 15 bp, Homo sapiens
attttatatttttag

SEQ ID NO: 456595 - DNA, 15 bp, Homo sapiens
aattttatattttta

SEQ ID NO: 456596 - DNA, 15 bp, Homo sapiens
aaattttatattttt

SEQ ID NO: 456597 - DNA, 15 bp, Homo sapiens
taaattttatatttt

SEQ ID NO: 456598 - DNA, 15 bp, Homo sapiens
ctaaattttatattt

SEQ ID NO: 456599 - DNA, 15 bp, Homo sapiens
gctaaattttatatt

SEQ ID NO: 456600 - DNA, 15 bp, Homo sapiens
ggctaaattttatat

SEQ ID NO: 456601 - DNA, 15 bp, Homo sapiens
aggctaaattttata

SEQ ID NO: 456602 - DNA, 15 bp, Homo sapiens
caggctaaattttat

SEQ ID NO: 456603 - DNA, 15 bp, Homo sapiens
acaggctaaatttta

SEQ ID NO: 456604 - DNA, 15 bp, Homo sapiens
aacaggctaaatttt

SEQ ID NO: 456605 - DNA, 15 bp, Homo sapiens
caacaggctaaattt

SEQ ID NO: 456606 - DNA, 15 bp, Homo sapiens
acaacaggctaaatt

SEQ ID NO: 456607 - DNA, 15 bp, Homo sapiens
cacaacaggctaaat

SEQ ID NO: 456608 - DNA, 15 bp, Homo sapiens
ccacaacaggctaaa

SEQ ID NO: 456609 - DNA, 15 bp, Homo sapiens
accacaacaggctaa

SEQ ID NO: 456610 - DNA, 15 bp, Homo sapiens
caccacaacaggcta

SEQ ID NO: 456611 - DNA, 15 bp, Homo sapiens
ccaccacaacaggct

SEQ ID NO: 456612 - DNA, 15 bp, Homo sapiens
gccaccacaacaggc

SEQ ID NO: 456613 - DNA, 15 bp, Homo sapiens
cgccaccacaacagg

SEQ ID NO: 456614 - DNA, 15 bp, Homo sapiens
ccgccaccacaacag

SEQ ID NO: 456615 - DNA, 15 bp, Homo sapiens
cccgccaccacaaca

SEQ ID NO: 456616 - DNA, 15 bp, Homo sapiens
acccgccaccacaac

SEQ ID NO: 456617 - DNA, 15 bp, Homo sapiens
cacccgccaccacaa

SEQ ID NO: 456618 - DNA, 15 bp, Homo sapiens
gcacccgccaccaca

SEQ ID NO: 456619 - DNA, 15 bp, Homo sapiens
ggcacccgccaccac

SEQ ID NO: 456620 - DNA, 15 bp, Homo sapiens
aggcacccgccacca

SEQ ID NO: 456621 - DNA, 15 bp, Homo sapiens
caggcacccgccacc

SEQ ID NO: 456622 - DNA, 15 bp, Homo sapiens
acaggcacccgccac

SEQ ID NO: 456623 - DNA, 15 bp, Homo sapiens
tacaggcacccgcca

SEQ ID NO: 456624 - DNA, 15 bp, Homo sapiens
ctacaggcacccgcc

SEQ ID NO: 456625 - DNA, 15 bp, Homo sapiens
actacaggcacccgc

SEQ ID NO: 456626 - DNA, 15 bp, Homo sapiens
gactacaggcacccg

SEQ ID NO: 456627 - DNA, 15 bp, Homo sapiens
ggactacaggcaccc

SEQ ID NO: 456628 - DNA, 15 bp, Homo sapiens
gggactacaggcacc

SEQ ID NO: 456629 - DNA, 15 bp, Homo sapiens
ggtagctgggactac

SEQ ID NO: 456630 - DNA, 15 bp, Homo sapiens
gggtagctgggacta

SEQ ID NO: 456631 - DNA, 15 bp, Homo sapiens
cgggtagctgggact

SEQ ID NO: 456632 - DNA, 15 bp, Homo sapiens
ccgggtagctgggac

SEQ ID NO: 456633 - DNA, 15 bp, Homo sapiens
cccgggtagctggga

SEQ ID NO: 456634 - DNA, 15 bp, Homo sapiens
tcccgggtagctggg

SEQ ID NO: 456635 - DNA, 15 bp, Homo sapiens
ctcccgggtagctgg

SEQ ID NO: 456636 - DNA, 15 bp, Homo sapiens
cctcccgggtagctg

SEQ ID NO: 456637 - DNA, 15 bp, Homo sapiens
gcctcccgggtagct

SEQ ID NO: 456638 - DNA, 15 bp, Homo sapiens
agcctcccgggtagc

SEQ ID NO: 456639 - DNA, 15 bp, Homo sapiens
cagcctcccgggtag

SEQ ID NO: 456640 - DNA, 15 bp, Homo sapiens
tcagcctcccgggta

SEQ ID NO: 456641 - DNA, 15 bp, Homo sapiens
ctcagcctcccgggt

SEQ ID NO: 456642 - DNA, 15 bp, Homo sapiens
cctcagcctcccggg

SEQ ID NO: 456643 - DNA, 15 bp, Homo sapiens
gcctcagcctcccgg

SEQ ID NO: 456644 - DNA, 15 bp, Homo sapiens
aaagcaattctcctg

SEQ ID NO: 456645 - DNA, 15 bp, Homo sapiens
aaaagcaattctcct

SEQ ID NO: 456646 - DNA, 15 bp, Homo sapiens
caaaagcaattctcc

SEQ ID NO: 456647 - DNA, 15 bp, Homo sapiens
tcaaaagcaattctc

SEQ ID NO: 456648 - DNA, 15 bp, Homo sapiens
ttcaaaagcaattct

SEQ ID NO: 456649 - DNA, 15 bp, Homo sapiens
gttcaaaagcaattc

SEQ ID NO: 456650 - DNA, 15 bp, Homo sapiens
ggttcaaaagcaatt

SEQ ID NO: 456651 - DNA, 15 bp, Homo sapiens
gggttcaaaagcaat

SEQ ID NO: 456652 - DNA, 15 bp, Homo sapiens
tgggttcaaaagcaa

SEQ ID NO: 456653 - DNA, 15 bp, Homo sapiens
ctgggttcaaaagca

SEQ ID NO: 456654 - DNA, 15 bp, Homo sapiens
cctgggttcaaaagc

SEQ ID NO: 456655 - DNA, 15 bp, Homo sapiens
tcctgggttcaaaag

SEQ ID NO: 456656 - DNA, 15 bp, Homo sapiens
ctcctgggttcaaaa

SEQ ID NO: 456657 - DNA, 15 bp, Homo sapiens
cctcctgggttcaaa

SEQ ID NO: 456658 - DNA, 15 bp, Homo sapiens
acctcctgggttcaa

SEQ ID NO: 456659 - DNA, 15 bp, Homo sapiens
cacctcctgggttca

SEQ ID NO: 456660 - DNA, 15 bp, Homo sapiens
ccacctcctgggttc

SEQ ID NO: 456661 - DNA, 15 bp, Homo sapiens
cccacctcctgggtt

SEQ ID NO: 456662 - DNA, 15 bp, Homo sapiens
ccccacctcctgggt

SEQ ID NO: 456663 - DNA, 15 bp, Homo sapiens
cccccacctcctggg

SEQ ID NO: 456664 - DNA, 15 bp, Homo sapiens
acccccacctcctgg

SEQ ID NO: 456665 - DNA, 15 bp, Homo sapiens
aacccccacctcctg

SEQ ID NO: 456666 - DNA, 15 bp, Homo sapiens
caacccccacctcct

SEQ ID NO: 456667 - DNA, 15 bp, Homo sapiens
gcaacccccacctcc

SEQ ID NO: 456668 - DNA, 15 bp, Homo sapiens
tgcaacccccacctc

SEQ ID NO: 456669 - DNA, 15 bp, Homo sapiens
ctgcaacccccacct

SEQ ID NO: 456670 - DNA, 15 bp, Homo sapiens
actgcaacccccacc

SEQ ID NO: 456671 - DNA, 15 bp, Homo sapiens
cactgcaacccccac

SEQ ID NO: 456672 - DNA, 15 bp, Homo sapiens
tcactgcaaccccca

SEQ ID NO: 456673 - DNA, 15 bp, Homo sapiens
ctcactgcaaccccc

SEQ ID NO: 456674 - DNA, 15 bp, Homo sapiens
gctcactgcaacccc

SEQ ID NO: 456675 - DNA, 15 bp, Homo sapiens
agctcactgcaaccc

SEQ ID NO: 456676 - DNA, 15 bp, Homo sapiens
gcgatctcagctcac

SEQ ID NO: 456677 - DNA, 15 bp, Homo sapiens
cgcgatctcagctca

SEQ ID NO: 456678 - DNA, 15 bp, Homo sapiens
gcgcgatctcagctc

SEQ ID NO: 456679 - DNA, 15 bp, Homo sapiens
ggcgcgatctcagct

SEQ ID NO: 456680 - DNA, 15 bp, Homo sapiens
cggcgcgatctcagc

SEQ ID NO: 456681 - DNA, 15 bp, Homo sapiens
gcggcgcgatctcag

SEQ ID NO: 456682 - DNA, 15 bp, Homo sapiens
agcggcgcgatctca

SEQ ID NO: 456683 - DNA, 15 bp, Homo sapiens
cagcggcgcgatctc

SEQ ID NO: 456684 - DNA, 15 bp, Homo sapiens
gcagcggcgcgatct

SEQ ID NO: 456685 - DNA, 15 bp, Homo sapiens
tgcagcggcgcgatc

SEQ ID NO: 456686 - DNA, 15 bp, Homo sapiens
gtgcagcggcgcgat

SEQ ID NO: 456687 - DNA, 15 bp, Homo sapiens
agtgcagcggcgcga

SEQ ID NO: 456688 - DNA, 15 bp, Homo sapiens
gagtgcagcggcgcg

SEQ ID NO: 456689 - DNA, 15 bp, Homo sapiens
ggagtgcagcggcgc

SEQ ID NO: 456690 - DNA, 15 bp, Homo sapiens
tggagtgcagcggcg

SEQ ID NO: 456691 - DNA, 15 bp, Homo sapiens
ctggagtgcagcggc

SEQ ID NO: 456692 - DNA, 15 bp, Homo sapiens
gctggagtgcagcgg

SEQ ID NO: 456693 - DNA, 15 bp, Homo sapiens
ggctggagtgcagcg

SEQ ID NO: 456694 - DNA, 15 bp, Homo sapiens
aggctggagtgcagc

SEQ ID NO: 456695 - DNA, 15 bp, Homo sapiens
tcccaggctggagtg

SEQ ID NO: 456696 - DNA, 15 bp, Homo sapiens
ctcccaggctggagt

SEQ ID NO: 456697 - DNA, 15 bp, Homo sapiens
tctcccaggctggag

SEQ ID NO: 456698 - DNA, 15 bp, Homo sapiens
gtctcccaggctgga

SEQ ID NO: 456699 - DNA, 15 bp, Homo sapiens
tgtctcccaggctgg

SEQ ID NO: 456700 - DNA, 15 bp, Homo sapiens
ctgtctcccaggctg

SEQ ID NO: 456701 - DNA, 15 bp, Homo sapiens
tctgtctcccaggct

SEQ ID NO: 456702 - DNA, 15 bp, Homo sapiens
ctctgtctcccaggc

SEQ ID NO: 456703 - DNA, 15 bp, Homo sapiens
gctctgtctcccagg

SEQ ID NO: 456704 - DNA, 15 bp, Homo sapiens
tgctctgtctcccag

SEQ ID NO: 456705 - DNA, 15 bp, Homo sapiens
ttgctctgtctccca

SEQ ID NO: 456706 - DNA, 15 bp, Homo sapiens
cttgctctgtctccc

SEQ ID NO: 456707 - DNA, 15 bp, Homo sapiens
tcttgctctgtctcc

SEQ ID NO: 456708 - DNA, 15 bp, Homo sapiens
gtcttgctctgtctc

SEQ ID NO: 456709 - DNA, 15 bp, Homo sapiens
agtcttgctctgtct

SEQ ID NO: 456710 - DNA, 15 bp, Homo sapiens
gagtcttgctctgtc

SEQ ID NO: 456711 - DNA, 15 bp, Homo sapiens
ggagtcttgctctgt

SEQ ID NO: 456712 - DNA, 15 bp, Homo sapiens
cggagtcttgctctg

SEQ ID NO: 456713 - DNA, 15 bp, Homo sapiens
acggagtcttgctct

SEQ ID NO: 456714 - DNA, 15 bp, Homo sapiens
gacggagtcttgctc

SEQ ID NO: 456715 - DNA, 15 bp, Homo sapiens
tgacggagtcttgct

SEQ ID NO: 456716 - DNA, 15 bp, Homo sapiens
gtgacggagtcttgc

SEQ ID NO: 456717 - DNA, 15 bp, Homo sapiens
tgtgacggagtcttg

SEQ ID NO: 456718 - DNA, 15 bp, Homo sapiens
ttgtgacggagtctt

SEQ ID NO: 456719 - DNA, 15 bp, Homo sapiens
tttgtgacggagtct

SEQ ID NO: 456720 - DNA, 15 bp, Homo sapiens
ttttgtgacggagtc

SEQ ID NO: 456721 - DNA, 15 bp, Homo sapiens
tttttgtgacggagt

SEQ ID NO: 456722 - DNA, 15 bp, Homo sapiens
gtttttgtgacggag

SEQ ID NO: 456723 - DNA, 15 bp, Homo sapiens
tgtttttgtgacgga

SEQ ID NO: 456724 - DNA, 15 bp, Homo sapiens
ttgtttttgtgacgg

SEQ ID NO: 456725 - DNA, 15 bp, Homo sapiens
tttgtttttgtgacg

SEQ ID NO: 456726 - DNA, 15 bp, Homo sapiens
ttttgtttttgtgac

SEQ ID NO: 456727 - DNA, 15 bp, Homo sapiens
tttttgtttttgtga

SEQ ID NO: 456728 - DNA, 15 bp, Homo sapiens
ttttttgtttttgtg

SEQ ID NO: 456729 - DNA, 15 bp, Homo sapiens
gttttttgtttttgt

SEQ ID NO: 456730 - DNA, 15 bp, Homo sapiens
tgttttttgtttttg

SEQ ID NO: 456731 - DNA, 15 bp, Homo sapiens
ttgttttttgttttt

SEQ ID NO: 456732 - DNA, 15 bp, Homo sapiens
tttgttttttgtttt

SEQ ID NO: 456733 - DNA, 15 bp, Homo sapiens
ttttgttttttgttt

SEQ ID NO: 456734 - DNA, 15 bp, Homo sapiens
tttttgttttttgtt

SEQ ID NO: 456735 - DNA, 15 bp, Homo sapiens
ttttttgttttttgt

SEQ ID NO: 456736 - DNA, 15 bp, Homo sapiens
gttttttgttttttg

SEQ ID NO: 456737 - DNA, 15 bp, Homo sapiens
agttttttgtttttt

SEQ ID NO: 456738 - DNA, 15 bp, Homo sapiens
cagttttttgttttt

SEQ ID NO: 456739 - DNA, 15 bp, Homo sapiens
acagttttttgtttt

SEQ ID NO: 456740 - DNA, 15 bp, Homo sapiens
gacagttttttgttt

SEQ ID NO: 456741 - DNA, 15 bp, Homo sapiens
tgacagttttttgtt

SEQ ID NO: 456742 - DNA, 15 bp, Homo sapiens
atgacagttttttgt

SEQ ID NO: 456743 - DNA, 15 bp, Homo sapiens
tatgacagttttttg

SEQ ID NO: 456744 - DNA, 15 bp, Homo sapiens
atatgacagtttttt

SEQ ID NO: 456745 - DNA, 15 bp, Homo sapiens
gatatgacagttttt

SEQ ID NO: 456746 - DNA, 15 bp, Homo sapiens
tgatatgacagtttt

SEQ ID NO: 456747 - DNA, 15 bp, Homo sapiens
ttgatatgacagttt

SEQ ID NO: 456748 - DNA, 15 bp, Homo sapiens
tttgatatgacagtt

SEQ ID NO: 456749 - DNA, 15 bp, Homo sapiens
ttttgatatgacagt

SEQ ID NO: 456750 - DNA, 15 bp, Homo sapiens
tttttgatatgacag

SEQ ID NO: 456751 - DNA, 15 bp, Homo sapiens
gtttttgatatgaca

SEQ ID NO: 456752 - DNA, 15 bp, Homo sapiens
agtttttgatatgac

SEQ ID NO: 456753 - DNA, 15 bp, Homo sapiens
tagtttttgatatga

SEQ ID NO: 456754 - DNA, 15 bp, Homo sapiens
ttagtttttgatatg

SEQ ID NO: 456755 - DNA, 15 bp, Homo sapiens
tttagtttttgatat

SEQ ID NO: 456756 - DNA, 15 bp, Homo sapiens
gtttagtttttgata

SEQ ID NO: 456757 - DNA, 15 bp, Homo sapiens
agtttagtttttgat

SEQ ID NO: 456758 - DNA, 15 bp, Homo sapiens
tagtttagtttttga

SEQ ID NO: 456759 - DNA, 15 bp, Homo sapiens
ttagtttagtttttg

SEQ ID NO: 456760 - DNA, 15 bp, Homo sapiens
tttagtttagttttt

SEQ ID NO: 456761 - DNA, 15 bp, Homo sapiens
ttttagtttagtttt

SEQ ID NO: 456762 - DNA, 15 bp, Homo sapiens
attttagtttagttt

SEQ ID NO: 456763 - DNA, 15 bp, Homo sapiens
cattttagtttagtt

SEQ ID NO: 456764 - DNA, 15 bp, Homo sapiens
ccattttagtttagt

SEQ ID NO: 456765 - DNA, 15 bp, Homo sapiens
accattttagtttag

SEQ ID NO: 456766 - DNA, 15 bp, Homo sapiens
taccattttagttta

SEQ ID NO: 456767 - DNA, 15 bp, Homo sapiens
ttaccattttagttt

SEQ ID NO: 456768 - DNA, 15 bp, Homo sapiens
attaccattttagtt

SEQ ID NO: 456769 - DNA, 15 bp, Homo sapiens
tattaccattttagt

SEQ ID NO: 456770 - DNA, 15 bp, Homo sapiens
atattaccattttag

SEQ ID NO: 456771 - DNA, 15 bp, Homo sapiens
gatattaccatttta

SEQ ID NO: 456772 - DNA, 15 bp, Homo sapiens
agatattaccatttt

SEQ ID NO: 456773 - DNA, 15 bp, Homo sapiens
cagatattaccattt

SEQ ID NO: 456774 - DNA, 15 bp, Homo sapiens
acagatattaccatt

SEQ ID NO: 456775 - DNA, 15 bp, Homo sapiens
aacagatattaccat

SEQ ID NO: 456776 - DNA, 15 bp, Homo sapiens
taacagatattacca

SEQ ID NO: 456777 - DNA, 15 bp, Homo sapiens
ctaacagatattacc

SEQ ID NO: 456778 - DNA, 15 bp, Homo sapiens
tctaacagatattac

SEQ ID NO: 456779 - DNA, 15 bp, Homo sapiens
atctaacagatatta

SEQ ID NO: 456780 - DNA, 15 bp, Homo sapiens
tatctaacagatatt

SEQ ID NO: 456781 - DNA, 15 bp, Homo sapiens
atatctaacagatat

SEQ ID NO: 456782 - DNA, 15 bp, Homo sapiens
aatatctaacagata

SEQ ID NO: 456783 - DNA, 15 bp, Homo sapiens
taatatctaacagat

SEQ ID NO: 456784 - DNA, 15 bp, Homo sapiens
gtaatatctaacaga

SEQ ID NO: 456785 - DNA, 15 bp, Homo sapiens
tgtaatatctaacag

SEQ ID NO: 456786 - DNA, 15 bp, Homo sapiens
ttgtaatatctaaca

SEQ ID NO: 456787 - DNA, 15 bp, Homo sapiens
tttgtaatatctaac

SEQ ID NO: 456788 - DNA, 15 bp, Homo sapiens
ctttgtaatatctaa

SEQ ID NO: 456789 - DNA, 15 bp, Homo sapiens
actttgtaatatcta

SEQ ID NO: 456790 - DNA, 15 bp, Homo sapiens
gactttgtaatatct

SEQ ID NO: 456791 - DNA, 15 bp, Homo sapiens
tgactttgtaatatc

SEQ ID NO: 456792 - DNA, 15 bp, Homo sapiens
ctgactttgtaatat

SEQ ID NO: 456793 - DNA, 15 bp, Homo sapiens
cctgactttgtaata

SEQ ID NO: 456794 - DNA, 15 bp, Homo sapiens
gcctgactttgtaat

SEQ ID NO: 456795 - DNA, 15 bp, Homo sapiens
tgcctgactttgtaa

SEQ ID NO: 456796 - DNA, 15 bp, Homo sapiens
ttgcctgactttgta

SEQ ID NO: 456797 - DNA, 15 bp, Homo sapiens
tttgcctgactttgt

SEQ ID NO: 456798 - DNA, 15 bp, Homo sapiens
atttgcctgactttg

SEQ ID NO: 456799 - DNA, 15 bp, Homo sapiens
aatttgcctgacttt

SEQ ID NO: 456800 - DNA, 15 bp, Homo sapiens
taatttgcctgactt

SEQ ID NO: 456801 - DNA, 15 bp, Homo sapiens
ataatttgcctgact

SEQ ID NO: 456802 - DNA, 15 bp, Homo sapiens
cataatttgcctgac

SEQ ID NO: 456803 - DNA, 15 bp, Homo sapiens
tcataatttgcctga

SEQ ID NO: 456804 - DNA, 15 bp, Homo sapiens
atcataatttgcctg

SEQ ID NO: 456805 - DNA, 15 bp, Homo sapiens
aatcataatttgcct

SEQ ID NO: 456806 - DNA, 15 bp, Homo sapiens
gaatcataatttgcc

SEQ ID NO: 456807 - DNA, 15 bp, Homo sapiens
tgaatcataatttgc

SEQ ID NO: 456808 - DNA, 15 bp, Homo sapiens
atgaatcataatttg

SEQ ID NO: 456809 - DNA, 15 bp, Homo sapiens
catgaatcataattt

SEQ ID NO: 456810 - DNA, 15 bp, Homo sapiens
ccatgaatcataatt

SEQ ID NO: 456811 - DNA, 15 bp, Homo sapiens
gccatgaatcataat

SEQ ID NO: 456812 - DNA, 15 bp, Homo sapiens
tgccatgaatcataa

SEQ ID NO: 456813 - DNA, 15 bp, Homo sapiens
ctgccatgaatcata

SEQ ID NO: 456814 - DNA, 15 bp, Homo sapiens
gctgccatgaatcat

SEQ ID NO: 456815 - DNA, 15 bp, Homo sapiens
ggctgccatgaatca

SEQ ID NO: 456816 - DNA, 15 bp, Homo sapiens
tggctgccatgaatc

SEQ ID NO: 456817 - DNA, 15 bp, Homo sapiens
gtggctgccatgaat

SEQ ID NO: 456818 - DNA, 15 bp, Homo sapiens
agtggctgccatgaa

SEQ ID NO: 456819 - DNA, 15 bp, Homo sapiens
tagtggctgccatga

SEQ ID NO: 456820 - DNA, 15 bp, Homo sapiens
ttagtggctgccatg

SEQ ID NO: 456821 - DNA, 15 bp, Homo sapiens
attagtggctgccat

SEQ ID NO: 456822 - DNA, 15 bp, Homo sapiens
cattagtggctgcca

SEQ ID NO: 456823 - DNA, 15 bp, Homo sapiens
tcattagtggctgcc

SEQ ID NO: 456824 - DNA, 15 bp, Homo sapiens
gtcattagtggctgc

SEQ ID NO: 456825 - DNA, 15 bp, Homo sapiens
ggtcattagtggctg

SEQ ID NO: 456826 - DNA, 15 bp, Homo sapiens
gggtcattagtggct

SEQ ID NO: 456827 - DNA, 15 bp, Homo sapiens
tgggtcattagtggc

SEQ ID NO: 456828 - DNA, 15 bp, Homo sapiens
ttgggtcattagtgg

SEQ ID NO: 456829 - DNA, 15 bp, Homo sapiens
tttgggtcattagtg

SEQ ID NO: 456830 - DNA, 15 bp, Homo sapiens
ctttgggtcattagt

SEQ ID NO: 456831 - DNA, 15 bp, Homo sapiens
cctttgggtcattag

SEQ ID NO: 456832 - DNA, 15 bp, Homo sapiens
tcctttgggtcatta

SEQ ID NO: 456833 - DNA, 15 bp, Homo sapiens
ctcctttgggtcatt

SEQ ID NO: 456834 - DNA, 15 bp, Homo sapiens
tctcctttgggtcat

SEQ ID NO: 456835 - DNA, 15 bp, Homo sapiens
ctctcctttgggtca

SEQ ID NO: 456836 - DNA, 15 bp, Homo sapiens
tctctcctttgggtc

SEQ ID NO: 456837 - DNA, 15 bp, Homo sapiens
ttctctcctttgggt

SEQ ID NO: 456838 - DNA, 15 bp, Homo sapiens
tttctctcctttggg

SEQ ID NO: 456839 - DNA, 15 bp, Homo sapiens
ctttctctcctttgg

SEQ ID NO: 456840 - DNA, 15 bp, Homo sapiens
tctttctctcctttg

SEQ ID NO: 456841 - DNA, 15 bp, Homo sapiens
ttctttctctccttt

SEQ ID NO: 456842 - DNA, 15 bp, Homo sapiens
attctttctctcctt

SEQ ID NO: 456843 - DNA, 15 bp, Homo sapiens
tattctttctctcct

SEQ ID NO: 456844 - DNA, 15 bp, Homo sapiens
ttattctttctctcc

SEQ ID NO: 456845 - DNA, 15 bp, Homo sapiens
attattctttctctc

SEQ ID NO: 456846 - DNA, 15 bp, Homo sapiens
aattattctttctct

SEQ ID NO: 456847 - DNA, 15 bp, Homo sapiens
taattattctttctc

SEQ ID NO: 456848 - DNA, 15 bp, Homo sapiens
ctaattattctttct

SEQ ID NO: 456849 - DNA, 15 bp, Homo sapiens
gctaattattctttc

SEQ ID NO: 456850 - DNA, 15 bp, Homo sapiens
tgctaattattcttt

SEQ ID NO: 456851 - DNA, 15 bp, Homo sapiens
ctgctaattattctt

SEQ ID NO: 456852 - DNA, 15 bp, Homo sapiens
tctgctaattattct

SEQ ID NO: 456853 - DNA, 15 bp, Homo sapiens
atctgctaattattc

SEQ ID NO: 456854 - DNA, 15 bp, Homo sapiens
aatctgctaattatt

SEQ ID NO: 456855 - DNA, 15 bp, Homo sapiens
gaatctgctaattat

SEQ ID NO: 456856 - DNA, 15 bp, Homo sapiens
agaatctgctaatta

SEQ ID NO: 456857 - DNA, 15 bp, Homo sapiens
tagaatctgctaatt

SEQ ID NO: 456858 - DNA, 15 bp, Homo sapiens
ttagaatctgctaat

SEQ ID NO: 456859 - DNA, 15 bp, Homo sapiens
gttagaatctgctaa

SEQ ID NO: 456860 - DNA, 15 bp, Homo sapiens
ggttagaatctgcta

SEQ ID NO: 456861 - DNA, 15 bp, Homo sapiens
aggttagaatctgct

SEQ ID NO: 456862 - DNA, 15 bp, Homo sapiens
taggttagaatctgc

SEQ ID NO: 456863 - DNA, 15 bp, Homo sapiens
ttaggttagaatctg

SEQ ID NO: 456864 - DNA, 15 bp, Homo sapiens
attaggttagaatct

SEQ ID NO: 456865 - DNA, 15 bp, Homo sapiens
cattaggttagaatc

SEQ ID NO: 456866 - DNA, 15 bp, Homo sapiens
ccattaggttagaat

SEQ ID NO: 456867 - DNA, 15 bp, Homo sapiens
cccattaggttagaa

SEQ ID NO: 456868 - DNA, 15 bp, Homo sapiens
tcccattaggttaga

SEQ ID NO: 456869 - DNA, 15 bp, Homo sapiens
ttcccattaggttag

SEQ ID NO: 456870 - DNA, 15 bp, Homo sapiens
tttcccattaggtta

SEQ ID NO: 456871 - DNA, 15 bp, Homo sapiens
ttttcccattaggtt

SEQ ID NO: 456872 - DNA, 15 bp, Homo sapiens
tttttcccattaggt

SEQ ID NO: 456873 - DNA, 15 bp, Homo sapiens
ttttttcccattagg

SEQ ID NO: 456874 - DNA, 15 bp, Homo sapiens
tttttttcccattag

SEQ ID NO: 456875 - DNA, 15 bp, Homo sapiens
gtttttttcccatta

SEQ ID NO: 456876 - DNA, 15 bp, Homo sapiens
agtttttttcccatt

SEQ ID NO: 456877 - DNA, 15 bp, Homo sapiens
tagtttttttcccat

SEQ ID NO: 456878 - DNA, 15 bp, Homo sapiens
ttagtttttttccca

SEQ ID NO: 456879 - DNA, 15 bp, Homo sapiens
tttagtttttttccc

SEQ ID NO: 456880 - DNA, 15 bp, Homo sapiens
atttagtttttttcc

SEQ ID NO: 456881 - DNA, 15 bp, Homo sapiens
catttagtttttttc

SEQ ID NO: 456882 - DNA, 15 bp, Homo sapiens
tcatttagttttttt

SEQ ID NO: 456883 - DNA, 15 bp, Homo sapiens
ttcatttagtttttt

SEQ ID NO: 456884 - DNA, 15 bp, Homo sapiens
attcatttagttttt

SEQ ID NO: 456885 - DNA, 15 bp, Homo sapiens
tattcatttagtttt

SEQ ID NO: 456886 - DNA, 15 bp, Homo sapiens
ctattcatttagttt

SEQ ID NO: 456887 - DNA, 15 bp, Homo sapiens
cctattcatttagtt

SEQ ID NO: 456888 - DNA, 15 bp, Homo sapiens
ccctattcatttagt

SEQ ID NO: 456889 - DNA, 15 bp, Homo sapiens
tccctattcatttag

SEQ ID NO: 456890 - DNA, 15 bp, Homo sapiens
atccctattcattta

SEQ ID NO: 456891 - DNA, 15 bp, Homo sapiens
catccctattcattt

SEQ ID NO: 456892 - DNA, 15 bp, Homo sapiens
ccatccctattcatt

SEQ ID NO: 456893 - DNA, 15 bp, Homo sapiens
cccatccctattcat

SEQ ID NO: 456894 - DNA, 15 bp, Homo sapiens
ccccatccctattca

SEQ ID NO: 456895 - DNA, 15 bp, Homo sapiens
cccccatccctattc

SEQ ID NO: 456896 - DNA, 15 bp, Homo sapiens
tcccccatccctatt

SEQ ID NO: 456897 - DNA, 15 bp, Homo sapiens
gtcccccatccctat

SEQ ID NO: 456898 - DNA, 15 bp, Homo sapiens
agtcccccatcccta

SEQ ID NO: 456899 - DNA, 15 bp, Homo sapiens
aagtcccccatccct

SEQ ID NO: 456900 - DNA, 15 bp, Homo sapiens
taagtcccccatccc

SEQ ID NO: 456901 - DNA, 15 bp, Homo sapiens
gtaagtcccccatcc

SEQ ID NO: 456902 - DNA, 15 bp, Homo sapiens
tgtaagtcccccatc

SEQ ID NO: 456903 - DNA, 15 bp, Homo sapiens
atgtaagtcccccat

SEQ ID NO: 456904 - DNA, 15 bp, Homo sapiens
aatgtaagtccccca

SEQ ID NO: 456905 - DNA, 15 bp, Homo sapiens
gaatgtaagtccccc

SEQ ID NO: 456906 - DNA, 15 bp, Homo sapiens
agaatgtaagtcccc

SEQ ID NO: 456907 - DNA, 15 bp, Homo sapiens
cagaatgtaagtccc

SEQ ID NO: 456908 - DNA, 15 bp, Homo sapiens
acagaatgtaagtcc

SEQ ID NO: 456909 - DNA, 15 bp, Homo sapiens
aacagaatgtaagtc

SEQ ID NO: 456910 - DNA, 15 bp, Homo sapiens
taacagaatgtaagt

SEQ ID NO: 456911 - DNA, 15 bp, Homo sapiens
ctaacagaatgtaag

SEQ ID NO: 456912 - DNA, 15 bp, Homo sapiens
tctaacagaatgtaa

SEQ ID NO: 456913 - DNA, 15 bp, Homo sapiens
ctctaacagaatgta

SEQ ID NO: 456914 - DNA, 15 bp, Homo sapiens
cctctaacagaatgt

SEQ ID NO: 456915 - DNA, 15 bp, Homo sapiens
tcctctaacagaatg

SEQ ID NO: 456916 - DNA, 15 bp, Homo sapiens
ttcctctaacagaat

SEQ ID NO: 456917 - DNA, 15 bp, Homo sapiens
tttcctctaacagaa

SEQ ID NO: 456918 - DNA, 15 bp, Homo sapiens
atttcctctaacaga

SEQ ID NO: 456919 - DNA, 15 bp, Homo sapiens
aatttcctctaacag

SEQ ID NO: 456920 - DNA, 15 bp, Homo sapiens
caatttcctctaaca

SEQ ID NO: 456921 - DNA, 15 bp, Homo sapiens
tcaatttcctctaac

SEQ ID NO: 456922 - DNA, 15 bp, Homo sapiens
ctcaatttcctctaa

SEQ ID NO: 456923 - DNA, 15 bp, Homo sapiens
cctcaatttcctcta

SEQ ID NO: 456924 - DNA, 15 bp, Homo sapiens
gcctcaatttcctct

SEQ ID NO: 456925 - DNA, 15 bp, Homo sapiens
agcctcaatttcctc

SEQ ID NO: 456926 - DNA, 15 bp, Homo sapiens
cagcctcaatttcct

SEQ ID NO: 456927 - DNA, 15 bp, Homo sapiens
acagcctcaatttcc

SEQ ID NO: 456928 - DNA, 15 bp, Homo sapiens
gacagcctcaatttc

SEQ ID NO: 456929 - DNA, 15 bp, Homo sapiens
tgacagcctcaattt

SEQ ID NO: 456930 - DNA, 15 bp, Homo sapiens
atgacagcctcaatt

SEQ ID NO: 456931 - DNA, 15 bp, Homo sapiens
tatgacagcctcaat

SEQ ID NO: 456932 - DNA, 15 bp, Homo sapiens
atatgacagcctcaa

SEQ ID NO: 456933 - DNA, 15 bp, Homo sapiens
tatatgacagcctca

SEQ ID NO: 456934 - DNA, 15 bp, Homo sapiens
ttatatgacagcctc

SEQ ID NO: 456935 - DNA, 15 bp, Homo sapiens
tttatatgacagcct

SEQ ID NO: 456936 - DNA, 15 bp, Homo sapiens
ttttatatgacagcc

SEQ ID NO: 456937 - DNA, 15 bp, Homo sapiens
cttttatatgacagc

SEQ ID NO: 456938 - DNA, 15 bp, Homo sapiens
ccttttatatgacag

SEQ ID NO: 456939 - DNA, 15 bp, Homo sapiens
tccttttatatgaca

SEQ ID NO: 456940 - DNA, 15 bp, Homo sapiens
ttccttttatatgac

SEQ ID NO: 456941 - DNA, 15 bp, Homo sapiens
attccttttatatga

SEQ ID NO: 456942 - DNA, 15 bp, Homo sapiens
tattccttttatatg

SEQ ID NO: 456943 - DNA, 15 bp, Homo sapiens
ctattccttttatat

SEQ ID NO: 456944 - DNA, 15 bp, Homo sapiens
cctattccttttata

SEQ ID NO: 456945 - DNA, 15 bp, Homo sapiens
acctattccttttat

SEQ ID NO: 456946 - DNA, 15 bp, Homo sapiens
tacctattcctttta

SEQ ID NO: 456947 - DNA, 15 bp, Homo sapiens
ttacctattcctttt

SEQ ID NO: 456948 - DNA, 15 bp, Homo sapiens
cttacctattccttt

SEQ ID NO: 456949 - DNA, 15 bp, Homo sapiens
ccttacctattcctt

SEQ ID NO: 456950 - DNA, 15 bp, Homo sapiens
gccttacctattcct

SEQ ID NO: 456951 - DNA, 15 bp, Homo sapiens
tgccttacctattcc

SEQ ID NO: 456952 - DNA, 15 bp, Homo sapiens
ttgccttacctattc

SEQ ID NO: 456953 - DNA, 15 bp, Homo sapiens
tttgccttacctatt

SEQ ID NO: 456954 - DNA, 15 bp, Homo sapiens
gtttgccttacctat

SEQ ID NO: 456955 - DNA, 15 bp, Homo sapiens
agtttgccttaccta

SEQ ID NO: 456956 - DNA, 15 bp, Homo sapiens
cagtttgccttacct

SEQ ID NO: 456957 - DNA, 15 bp, Homo sapiens
acagtttgccttacc

SEQ ID NO: 456958 - DNA, 15 bp, Homo sapiens
tacagtttgccttac

SEQ ID NO: 456959 - DNA, 15 bp, Homo sapiens
ttacagtttgcctta

SEQ ID NO: 456960 - DNA, 15 bp, Homo sapiens
tttacagtttgcctt

SEQ ID NO: 456961 - DNA, 15 bp, Homo sapiens
atttacagtttgcct

SEQ ID NO: 456962 - DNA, 15 bp, Homo sapiens
aatttacagtttgcc

SEQ ID NO: 456963 - DNA, 15 bp, Homo sapiens
gaatttacagtttgc

SEQ ID NO: 456964 - DNA, 15 bp, Homo sapiens
ggaatttacagtttg

SEQ ID NO: 456965 - DNA, 15 bp, Homo sapiens
aggaatttacagttt

SEQ ID NO: 456966 - DNA, 15 bp, Homo sapiens
caggaatttacagtt

SEQ ID NO: 456967 - DNA, 15 bp, Homo sapiens
acaggaatttacagt

SEQ ID NO: 456968 - DNA, 15 bp, Homo sapiens
aacaggaatttacag

SEQ ID NO: 456969 - DNA, 15 bp, Homo sapiens
aaacaggaatttaca

SEQ ID NO: 456970 - DNA, 15 bp, Homo sapiens
taaacaggaatttac

SEQ ID NO: 456971 - DNA, 15 bp, Homo sapiens
gtaaacaggaattta

SEQ ID NO: 456972 - DNA, 15 bp, Homo sapiens
tgtaaacaggaattt

SEQ ID NO: 456973 - DNA, 15 bp, Homo sapiens
gtgtaaacaggaatt

SEQ ID NO: 456974 - DNA, 15 bp, Homo sapiens
tgtgtaaacaggaat

SEQ ID NO: 456975 - DNA, 15 bp, Homo sapiens
ttgtgtaaacaggaa

SEQ ID NO: 456976 - DNA, 15 bp, Homo sapiens
tttgtgtaaacagga

SEQ ID NO: 456977 - DNA, 15 bp, Homo sapiens
atttgtgtaaacagg

SEQ ID NO: 456978 - DNA, 15 bp, Homo sapiens
catttgtgtaaacag

SEQ ID NO: 456979 - DNA, 15 bp, Homo sapiens
gcatttgtgtaaaca

SEQ ID NO: 456980 - DNA, 15 bp, Homo sapiens
ggcatttgtgtaaac

SEQ ID NO: 456981 - DNA, 15 bp, Homo sapiens
gggcatttgtgtaaa

SEQ ID NO: 456982 - DNA, 15 bp, Homo sapiens
agggcatttgtgtaa

SEQ ID NO: 456983 - DNA, 15 bp, Homo sapiens
aagggcatttgtgta

SEQ ID NO: 456984 - DNA, 15 bp, Homo sapiens
gaagggcatttgtgt

SEQ ID NO: 456985 - DNA, 15 bp, Homo sapiens
agaagggcatttgtg

SEQ ID NO: 456986 - DNA, 15 bp, Homo sapiens
cagaagggcatttgt

SEQ ID NO: 456987 - DNA, 15 bp, Homo sapiens
tcagaagggcatttg

SEQ ID NO: 456988 - DNA, 15 bp, Homo sapiens
atcagaagggcattt

SEQ ID NO: 456989 - DNA, 15 bp, Homo sapiens
tatcagaagggcatt

SEQ ID NO: 456990 - DNA, 15 bp, Homo sapiens
ttatcagaagggcat

SEQ ID NO: 456991 - DNA, 15 bp, Homo sapiens
tttatcagaagggca

SEQ ID NO: 456992 - DNA, 15 bp, Homo sapiens
atttatcagaagggc

SEQ ID NO: 456993 - DNA, 15 bp, Homo sapiens
gatttatcagaaggg

SEQ ID NO: 456994 - DNA, 15 bp, Homo sapiens
agatttatcagaagg

SEQ ID NO: 456995 - DNA, 15 bp, Homo sapiens
gagatttatcagaag

SEQ ID NO: 456996 - DNA, 15 bp, Homo sapiens
agagatttatcagaa

SEQ ID NO: 456997 - DNA, 15 bp, Homo sapiens
cagagatttatcaga

SEQ ID NO: 456998 - DNA, 15 bp, Homo sapiens
gcagagatttatcag

SEQ ID NO: 456999 - DNA, 15 bp, Homo sapiens
tgcagagatttatca

SEQ ID NO: 457000 - DNA, 15 bp, Homo sapiens
atgcagagatttatc

SEQ ID NO: 457001 - DNA, 15 bp, Homo sapiens
aatgcagagatttat

SEQ ID NO: 457002 - DNA, 15 bp, Homo sapiens
caatgcagagattta

SEQ ID NO: 457003 - DNA, 15 bp, Homo sapiens
gcaatgcagagattt

SEQ ID NO: 457004 - DNA, 15 bp, Homo sapiens
ggcaatgcagagatt

SEQ ID NO: 457005 - DNA, 15 bp, Homo sapiens
gggcaatgcagagat

SEQ ID NO: 457006 - DNA, 15 bp, Homo sapiens
tgggcaatgcagaga

SEQ ID NO: 457007 - DNA, 15 bp, Homo sapiens
gtgggcaatgcagag

SEQ ID NO: 457008 - DNA, 15 bp, Homo sapiens
tgtgggcaatgcaga

SEQ ID NO: 457009 - DNA, 15 bp, Homo sapiens
ctgtgggcaatgcag

SEQ ID NO: 457010 - DNA, 15 bp, Homo sapiens
actgtgggcaatgca

SEQ ID NO: 457011 - DNA, 15 bp, Homo sapiens
gactgtgggcaatgc

SEQ ID NO: 457012 - DNA, 15 bp, Homo sapiens
ggactgtgggcaatg

SEQ ID NO: 457013 - DNA, 15 bp, Homo sapiens
tggactgtgggcaat

SEQ ID NO: 457014 - DNA, 15 bp, Homo sapiens
atggactgtgggcaa

SEQ ID NO: 457015 - DNA, 15 bp, Homo sapiens
catggactgtgggca

SEQ ID NO: 457016 - DNA, 15 bp, Homo sapiens
tcatggactgtgggc

SEQ ID NO: 457017 - DNA, 15 bp, Homo sapiens
atcatggactgtggg

SEQ ID NO: 457018 - DNA, 15 bp, Homo sapiens
aatcatggactgtgg

SEQ ID NO: 457019 - DNA, 15 bp, Homo sapiens
taatcatggactgtg

SEQ ID NO: 457020 - DNA, 15 bp, Homo sapiens
gtaatcatggactgt

SEQ ID NO: 457021 - DNA, 15 bp, Homo sapiens
ggtaatcatggactg

SEQ ID NO: 457022 - DNA, 15 bp, Homo sapiens
aggtaatcatggact

SEQ ID NO: 457023 - DNA, 15 bp, Homo sapiens
gaggtaatcatggac

SEQ ID NO: 457024 - DNA, 15 bp, Homo sapiens
agaggtaatcatgga

SEQ ID NO: 457025 - DNA, 15 bp, Homo sapiens
gagaggtaatcatgg

SEQ ID NO: 457026 - DNA, 15 bp, Homo sapiens
ggagaggtaatcatg

SEQ ID NO: 457027 - DNA, 15 bp, Homo sapiens
gggagaggtaatcat

SEQ ID NO: 457028 - DNA, 15 bp, Homo sapiens
agggagaggtaatca

SEQ ID NO: 457029 - DNA, 15 bp, Homo sapiens
aagggagaggtaatc

SEQ ID NO: 457030 - DNA, 15 bp, Homo sapiens
taagggagaggtaat

SEQ ID NO: 457031 - DNA, 15 bp, Homo sapiens
ataagggagaggtaa

SEQ ID NO: 457032 - DNA, 15 bp, Homo sapiens
aataagggagaggta

SEQ ID NO: 457033 - DNA, 15 bp, Homo sapiens
aaataagggagaggt

SEQ ID NO: 457034 - DNA, 15 bp, Homo sapiens
aaaataagggagagg

SEQ ID NO: 457035 - DNA, 15 bp, Homo sapiens
taaaataagggagag

SEQ ID NO: 457036 - DNA, 15 bp, Homo sapiens
ttaaaataagggaga

SEQ ID NO: 457037 - DNA, 15 bp, Homo sapiens
cttaaaataagggag

SEQ ID NO: 457038 - DNA, 15 bp, Homo sapiens
acttaaaataaggga

SEQ ID NO: 457039 - DNA, 15 bp, Homo sapiens
tacttaaaataaggg

SEQ ID NO: 457040 - DNA, 15 bp, Homo sapiens
ttacttaaaataagg

SEQ ID NO: 457041 - DNA, 15 bp, Homo sapiens
attacttaaaataag

SEQ ID NO: 457042 - DNA, 15 bp, Homo sapiens
tattacttaaaataa

SEQ ID NO: 457043 - DNA, 15 bp, Homo sapiens
atattacttaaaata

SEQ ID NO: 457044 - DNA, 15 bp, Homo sapiens
aatattacttaaaat

SEQ ID NO: 457045 - DNA, 15 bp, Homo sapiens
aaatattacttaaaa

SEQ ID NO: 457046 - DNA, 15 bp, Homo sapiens
taaatattacttaaa

SEQ ID NO: 457047 - DNA, 15 bp, Homo sapiens
ttaaatattacttaa

SEQ ID NO: 457048 - DNA, 15 bp, Homo sapiens
gttaaatattactta

SEQ ID NO: 457049 - DNA, 15 bp, Homo sapiens
tgttaaatattactt

SEQ ID NO: 457050 - DNA, 15 bp, Homo sapiens
gtgttaaatattact

SEQ ID NO: 457051 - DNA, 15 bp, Homo sapiens
tgtgttaaatattac

SEQ ID NO: 457052 - DNA, 15 bp, Homo sapiens
atgtgttaaatatta

SEQ ID NO: 457053 - DNA, 15 bp, Homo sapiens
aatgtgttaaatatt

SEQ ID NO: 457054 - DNA, 15 bp, Homo sapiens
taatgtgttaaatat

SEQ ID NO: 457055 - DNA, 15 bp, Homo sapiens
ttaatgtgttaaata

SEQ ID NO: 457056 - DNA, 15 bp, Homo sapiens
tttaatgtgttaaat

SEQ ID NO: 457057 - DNA, 15 bp, Homo sapiens
ttttaatgtgttaaa

SEQ ID NO: 457058 - DNA, 15 bp, Homo sapiens
tttttaatgtgttaa

SEQ ID NO: 457059 - DNA, 15 bp, Homo sapiens
atttttaatgtgtta

SEQ ID NO: 457060 - DNA, 15 bp, Homo sapiens
catttttaatgtgtt

SEQ ID NO: 457061 - DNA, 15 bp, Homo sapiens
ccatttttaatgtgt

SEQ ID NO: 457062 - DNA, 15 bp, Homo sapiens
tccatttttaatgtg

SEQ ID NO: 457063 - DNA, 15 bp, Homo sapiens
atccatttttaatgt

SEQ ID NO: 457064 - DNA, 15 bp, Homo sapiens
aatccatttttaatg

SEQ ID NO: 457065 - DNA, 15 bp, Homo sapiens
taatccatttttaat

SEQ ID NO: 457066 - DNA, 15 bp, Homo sapiens
gtaatccatttttaa

SEQ ID NO: 457067 - DNA, 15 bp, Homo sapiens
ggtaatccattttta

SEQ ID NO: 457068 - DNA, 15 bp, Homo sapiens
tggtaatccattttt

SEQ ID NO: 457069 - DNA, 15 bp, Homo sapiens
gtggtaatccatttt

SEQ ID NO: 457070 - DNA, 15 bp, Homo sapiens
ggtggtaatccattt

SEQ ID NO: 457071 - DNA, 15 bp, Homo sapiens
gggtggtaatccatt

SEQ ID NO: 457072 - DNA, 15 bp, Homo sapiens
tgggtggtaatccat

SEQ ID NO: 457073 - DNA, 15 bp, Homo sapiens
ttgggtggtaatcca

SEQ ID NO: 457074 - DNA, 15 bp, Homo sapiens
cttgggtggtaatcc

SEQ ID NO: 457075 - DNA, 15 bp, Homo sapiens
ccttgggtggtaatc

SEQ ID NO: 457076 - DNA, 15 bp, Homo sapiens
tccttgggtggtaat

SEQ ID NO: 457077 - DNA, 15 bp, Homo sapiens
ttccttgggtggtaa

SEQ ID NO: 457078 - DNA, 15 bp, Homo sapiens
attccttgggtggta

SEQ ID NO: 457079 - DNA, 15 bp, Homo sapiens
aattccttgggtggt

SEQ ID NO: 457080 - DNA, 15 bp, Homo sapiens
caattccttgggtgg

SEQ ID NO: 457081 - DNA, 15 bp, Homo sapiens
gcaattccttgggtg

SEQ ID NO: 457082 - DNA, 15 bp, Homo sapiens
agcaattccttgggt

SEQ ID NO: 457083 - DNA, 15 bp, Homo sapiens
gagcaattccttggg

SEQ ID NO: 457084 - DNA, 15 bp, Homo sapiens
ggagcaattccttgg

SEQ ID NO: 457085 - DNA, 15 bp, Homo sapiens
gggagcaattccttg

SEQ ID NO: 457086 - DNA, 15 bp, Homo sapiens
cgggagcaattcctt

SEQ ID NO: 457087 - DNA, 15 bp, Homo sapiens
tcgggagcaattcct

SEQ ID NO: 457088 - DNA, 15 bp, Homo sapiens
gtcgggagcaattcc

SEQ ID NO: 457089 - DNA, 15 bp, Homo sapiens
ggtcgggagcaattc

SEQ ID NO: 457090 - DNA, 15 bp, Homo sapiens
gggtcgggagcaatt

SEQ ID NO: 457091 - DNA, 15 bp, Homo sapiens
tgggtcgggagcaat

SEQ ID NO: 457092 - DNA, 15 bp, Homo sapiens
ctgggtcgggagcaa

SEQ ID NO: 457093 - DNA, 15 bp, Homo sapiens
tctgggtcgggagca

SEQ ID NO: 457094 - DNA, 15 bp, Homo sapiens
ttctgggtcgggagc

SEQ ID NO: 457095 - DNA, 15 bp, Homo sapiens
tttctgggtcgggag

SEQ ID NO: 457096 - DNA, 15 bp, Homo sapiens
ctttctgggtcggga

SEQ ID NO: 457097 - DNA, 15 bp, Homo sapiens
actttctgggtcggg

SEQ ID NO: 457098 - DNA, 15 bp, Homo sapiens
cactttctgggtcgg

SEQ ID NO: 457099 - DNA, 15 bp, Homo sapiens
gcactttctgggtcg

SEQ ID NO: 457100 - DNA, 15 bp, Homo sapiens
tgcactttctgggtc

SEQ ID NO: 457101 - DNA, 15 bp, Homo sapiens
ctgcactttctgggt

SEQ ID NO: 457102 - DNA, 15 bp, Homo sapiens
cctgcactttctggg

SEQ ID NO: 457103 - DNA, 15 bp, Homo sapiens
acctgcactttctgg

SEQ ID NO: 457104 - DNA, 15 bp, Homo sapiens
tacctgcactttctg

SEQ ID NO: 457105 - DNA, 15 bp, Homo sapiens
ctacctgcactttct

SEQ ID NO: 457106 - DNA, 15 bp, Homo sapiens
actacctgcactttc

SEQ ID NO: 457107 - DNA, 15 bp, Homo sapiens
cactacctgcacttt

SEQ ID NO: 457108 - DNA, 15 bp, Homo sapiens
acactacctgcactt

SEQ ID NO: 457109 - DNA, 15 bp, Homo sapiens
aacactacctgcact

SEQ ID NO: 457110 - DNA, 15 bp, Homo sapiens
caacactacctgcac

SEQ ID NO: 457111 - DNA, 15 bp, Homo sapiens
tcaacactacctgca

SEQ ID NO: 457112 - DNA, 15 bp, Homo sapiens
ttcaacactacctgc

SEQ ID NO: 457113 - DNA, 15 bp, Homo sapiens
cttcaacactacctg

SEQ ID NO: 457114 - DNA, 15 bp, Homo sapiens
ccttcaacactacct

SEQ ID NO: 457115 - DNA, 15 bp, Homo sapiens
accttcaacactacc

SEQ ID NO: 457116 - DNA, 15 bp, Homo sapiens
aaccttcaacactac

SEQ ID NO: 457117 - DNA, 15 bp, Homo sapiens
aaaccttcaacacta

SEQ ID NO: 457118 - DNA, 15 bp, Homo sapiens
caaaccttcaacact

SEQ ID NO: 457119 - DNA, 15 bp, Homo sapiens
tcaaaccttcaacac

SEQ ID NO: 457120 - DNA, 15 bp, Homo sapiens
ctcaaaccttcaaca

SEQ ID NO: 457121 - DNA, 15 bp, Homo sapiens
cctcaaaccttcaac

SEQ ID NO: 457122 - DNA, 15 bp, Homo sapiens
ccctcaaaccttcaa

SEQ ID NO: 457123 - DNA, 15 bp, Homo sapiens
cccctcaaaccttca

SEQ ID NO: 457124 - DNA, 15 bp, Homo sapiens
tcccctcaaaccttc

SEQ ID NO: 457125 - DNA, 15 bp, Homo sapiens
ttcccctcaaacctt

SEQ ID NO: 457126 - DNA, 15 bp, Homo sapiens
cttcccctcaaacct

SEQ ID NO: 457127 - DNA, 15 bp, Homo sapiens
tcttcccctcaaacc

SEQ ID NO: 457128 - DNA, 15 bp, Homo sapiens
ctcttcccctcaaac

SEQ ID NO: 457129 - DNA, 15 bp, Homo sapiens
cctcttcccctcaaa

SEQ ID NO: 457130 - DNA, 15 bp, Homo sapiens
tcctcttcccctcaa

SEQ ID NO: 457131 - DNA, 15 bp, Homo sapiens
ttcctcttcccctca

SEQ ID NO: 457132 - DNA, 15 bp, Homo sapiens
attcctcttcccctc

SEQ ID NO: 457133 - DNA, 15 bp, Homo sapiens
cattcctcttcccct

SEQ ID NO: 457134 - DNA, 15 bp, Homo sapiens
tcattcctcttcccc

SEQ ID NO: 457135 - DNA, 15 bp, Homo sapiens
atcattcctcttccc

SEQ ID NO: 457136 - DNA, 15 bp, Homo sapiens
aatcattcctcttcc

SEQ ID NO: 457137 - DNA, 15 bp, Homo sapiens
taatcattcctcttc

SEQ ID NO: 457138 - DNA, 15 bp, Homo sapiens
ctaatcattcctctt

SEQ ID NO: 457139 - DNA, 15 bp, Homo sapiens
tctaatcattcctct

SEQ ID NO: 457140 - DNA, 15 bp, Homo sapiens
ctctaatcattcctc

SEQ ID NO: 457141 - DNA, 15 bp, Homo sapiens
actctaatcattcct

SEQ ID NO: 457142 - DNA, 15 bp, Homo sapiens
aactctaatcattcc

SEQ ID NO: 457143 - DNA, 15 bp, Homo sapiens
caactctaatcattc

SEQ ID NO: 457144 - DNA, 15 bp, Homo sapiens
ccaactctaatcatt

SEQ ID NO: 457145 - DNA, 15 bp, Homo sapiens
accaactctaatcat

SEQ ID NO: 457146 - DNA, 15 bp, Homo sapiens
aaccaactctaatca

SEQ ID NO: 457147 - DNA, 15 bp, Homo sapiens
caaccaactctaatc

SEQ ID NO: 457148 - DNA, 15 bp, Homo sapiens
acaaccaactctaat

SEQ ID NO: 457149 - DNA, 15 bp, Homo sapiens
cacaaccaactctaa

SEQ ID NO: 457150 - DNA, 15 bp, Homo sapiens
acacaaccaactcta

SEQ ID NO: 457151 - DNA, 15 bp, Homo sapiens
gacacaaccaactct

SEQ ID NO: 457152 - DNA, 15 bp, Homo sapiens
agacacaaccaactc

SEQ ID NO: 457153 - DNA, 15 bp, Homo sapiens
gagacacaaccaact

SEQ ID NO: 457154 - DNA, 15 bp, Homo sapiens
tgagacacaaccaac

SEQ ID NO: 457155 - DNA, 15 bp, Homo sapiens
ctgagacacaaccaa

SEQ ID NO: 457156 - DNA, 15 bp, Homo sapiens
cctgagacacaacca

SEQ ID NO: 457157 - DNA, 15 bp, Homo sapiens
tcctgagacacaacc

SEQ ID NO: 457158 - DNA, 15 bp, Homo sapiens
ttcctgagacacaac

SEQ ID NO: 457159 - DNA, 15 bp, Homo sapiens
cttcctgagacacaa

SEQ ID NO: 457160 - DNA, 15 bp, Homo sapiens
tcttcctgagacaca

SEQ ID NO: 457161 - DNA, 15 bp, Homo sapiens
ttcttcctgagacac

SEQ ID NO: 457162 - DNA, 15 bp, Homo sapiens
cttcttcctgagaca

SEQ ID NO: 457163 - DNA, 15 bp, Homo sapiens
gcttcttcctgagac

SEQ ID NO: 457164 - DNA, 15 bp, Homo sapiens
ggcttcttcctgaga

SEQ ID NO: 457165 - DNA, 15 bp, Homo sapiens
tggcttcttcctgag

SEQ ID NO: 457166 - DNA, 15 bp, Homo sapiens
ttggcttcttcctga

SEQ ID NO: 457167 - DNA, 15 bp, Homo sapiens
gttggcttcttcctg

SEQ ID NO: 457168 - DNA, 15 bp, Homo sapiens
tgttggcttcttcct

SEQ ID NO: 457169 - DNA, 15 bp, Homo sapiens
ctgttggcttcttcc

SEQ ID NO: 457170 - DNA, 15 bp, Homo sapiens
cctgttggcttcttc

SEQ ID NO: 457171 - DNA, 15 bp, Homo sapiens
tcctgttggcttctt

SEQ ID NO: 457172 - DNA, 15 bp, Homo sapiens
ctcctgttggcttct

SEQ ID NO: 457173 - DNA, 15 bp, Homo sapiens
cctcctgttggcttc

SEQ ID NO: 457174 - DNA, 15 bp, Homo sapiens
tcctcctgttggctt

SEQ ID NO: 457175 - DNA, 15 bp, Homo sapiens
ttcctcctgttggct

SEQ ID NO: 457176 - DNA, 15 bp, Homo sapiens
gttcctcctgttggc

SEQ ID NO: 457177 - DNA, 15 bp, Homo sapiens
ggttcctcctgttgg

SEQ ID NO: 457178 - DNA, 15 bp, Homo sapiens
aggttcctcctgttg

SEQ ID NO: 457179 - DNA, 15 bp, Homo sapiens
aaggttcctcctgtt

SEQ ID NO: 457180 - DNA, 15 bp, Homo sapiens
taaggttcctcctgt

SEQ ID NO: 457181 - DNA, 15 bp, Homo sapiens
ataaggttcctcctg

SEQ ID NO: 457182 - DNA, 15 bp, Homo sapiens
aataaggttcctcct

SEQ ID NO: 457183 - DNA, 15 bp, Homo sapiens
aaataaggttcctcc

SEQ ID NO: 457184 - DNA, 15 bp, Homo sapiens
aaaataaggttcctc

SEQ ID NO: 457185 - DNA, 15 bp, Homo sapiens
caaaataaggttcct

SEQ ID NO: 457186 - DNA, 15 bp, Homo sapiens
tcaaaataaggttcc

SEQ ID NO: 457187 - DNA, 15 bp, Homo sapiens
ctcaaaataaggttc

SEQ ID NO: 457188 - DNA, 15 bp, Homo sapiens
actcaaaataaggtt

SEQ ID NO: 457189 - DNA, 15 bp, Homo sapiens
gactcaaaataaggt

SEQ ID NO: 457190 - DNA, 15 bp, Homo sapiens
tgactcaaaataagg

SEQ ID NO: 457191 - DNA, 15 bp, Homo sapiens
ctgactcaaaataag

SEQ ID NO: 457192 - DNA, 15 bp, Homo sapiens
cctgactcaaaataa

SEQ ID NO: 457193 - DNA, 15 bp, Homo sapiens
acctgactcaaaata

SEQ ID NO: 457194 - DNA, 15 bp, Homo sapiens
tacctgactcaaaat

SEQ ID NO: 457195 - DNA, 15 bp, Homo sapiens
ttacctgactcaaaa

SEQ ID NO: 457196 - DNA, 15 bp, Homo sapiens
tttacctgactcaaa

SEQ ID NO: 457197 - DNA, 15 bp, Homo sapiens
ctttacctgactcaa

SEQ ID NO: 457198 - DNA, 15 bp, Homo sapiens
tctttacctgactca

SEQ ID NO: 457199 - DNA, 15 bp, Homo sapiens
ttctttacctgactc

SEQ ID NO: 457200 - DNA, 15 bp, Homo sapiens
cttctttacctgact

SEQ ID NO: 457201 - DNA, 15 bp, Homo sapiens
ccttctttacctgac

SEQ ID NO: 457202 - DNA, 15 bp, Homo sapiens
accttctttacctga

SEQ ID NO: 457203 - DNA, 15 bp, Homo sapiens
caccttctttacctg

SEQ ID NO: 457204 - DNA, 15 bp, Homo sapiens
ccaccttctttacct

SEQ ID NO: 457205 - DNA, 15 bp, Homo sapiens
cccaccttctttacc

SEQ ID NO: 457206 - DNA, 15 bp, Homo sapiens
tcccaccttctttac

SEQ ID NO: 457207 - DNA, 15 bp, Homo sapiens
ctcccaccttcttta

SEQ ID NO: 457208 - DNA, 15 bp, Homo sapiens
actcccaccttcttt

SEQ ID NO: 457209 - DNA, 15 bp, Homo sapiens
cactcccaccttctt

SEQ ID NO: 457210 - DNA, 15 bp, Homo sapiens
tcactcccaccttct

SEQ ID NO: 457211 - DNA, 15 bp, Homo sapiens
ctcactcccaccttc

SEQ ID NO: 457212 - DNA, 15 bp, Homo sapiens
cctcactcccacctt

SEQ ID NO: 457213 - DNA, 15 bp, Homo sapiens
tcctcactcccacct

SEQ ID NO: 457214 - DNA, 15 bp, Homo sapiens
ctcctcactcccacc

SEQ ID NO: 457215 - DNA, 15 bp, Homo sapiens
cctcctcactcccac

SEQ ID NO: 457216 - DNA, 15 bp, Homo sapiens
gcctcctcactccca

SEQ ID NO: 457217 - DNA, 15 bp, Homo sapiens
tgcctcctcactccc

SEQ ID NO: 457218 - DNA, 15 bp, Homo sapiens
atgcctcctcactcc

SEQ ID NO: 457219 - DNA, 15 bp, Homo sapiens
gatgcctcctcactc

SEQ ID NO: 457220 - DNA, 15 bp, Homo sapiens
ggatgcctcctcact

SEQ ID NO: 457221 - DNA, 15 bp, Homo sapiens
gggatgcctcctcac

SEQ ID NO: 457222 - DNA, 15 bp, Homo sapiens
cgggatgcctcctca

SEQ ID NO: 457223 - DNA, 15 bp, Homo sapiens
ccgggatgcctcctc

SEQ ID NO: 457224 - DNA, 15 bp, Homo sapiens
accgggatgcctcct

SEQ ID NO: 457225 - DNA, 15 bp, Homo sapiens
caccgggatgcctcc

SEQ ID NO: 457226 - DNA, 15 bp, Homo sapiens
ccaccgggatgcctc

SEQ ID NO: 457227 - DNA, 15 bp, Homo sapiens
gccaccgggatgcct

SEQ ID NO: 457228 - DNA, 15 bp, Homo sapiens
ggccaccgggatgcc

SEQ ID NO: 457229 - DNA, 15 bp, Homo sapiens
tggccaccgggatgc

SEQ ID NO: 457230 - DNA, 15 bp, Homo sapiens
ctggccaccgggatg

SEQ ID NO: 457231 - DNA, 15 bp, Homo sapiens
cctggccaccgggat

SEQ ID NO: 457232 - DNA, 15 bp, Homo sapiens
acctggccaccggga

SEQ ID NO: 457233 - DNA, 15 bp, Homo sapiens
tacctggccaccggg

SEQ ID NO: 457234 - DNA, 15 bp, Homo sapiens
atacctggccaccgg

SEQ ID NO: 457235 - DNA, 15 bp, Homo sapiens
catacctggccaccg

SEQ ID NO: 457236 - DNA, 15 bp, Homo sapiens
tcatacctggccacc

SEQ ID NO: 457237 - DNA, 15 bp, Homo sapiens
ttcatacctggccac

SEQ ID NO: 457238 - DNA, 15 bp, Homo sapiens
cttcatacctggcca

SEQ ID NO: 457239 - DNA, 15 bp, Homo sapiens
gcttcatacctggcc

SEQ ID NO: 457240 - DNA, 15 bp, Homo sapiens
agcttcatacctggc

SEQ ID NO: 457241 - DNA, 15 bp, Homo sapiens
cagcttcatacctgg

SEQ ID NO: 457242 - DNA, 15 bp, Homo sapiens
ccagcttcatacctg

SEQ ID NO: 457243 - DNA, 15 bp, Homo sapiens
cccagcttcatacct

SEQ ID NO: 457244 - DNA, 15 bp, Homo sapiens
tcccagcttcatacc

SEQ ID NO: 457245 - DNA, 15 bp, Homo sapiens
ctcccagcttcatac

SEQ ID NO: 457246 - DNA, 15 bp, Homo sapiens
gctcccagcttcata

SEQ ID NO: 457247 - DNA, 15 bp, Homo sapiens
agctcccagcttcat

SEQ ID NO: 457248 - DNA, 15 bp, Homo sapiens
cagctcccagcttca

SEQ ID NO: 457249 - DNA, 15 bp, Homo sapiens
tcagctcccagcttc

SEQ ID NO: 457250 - DNA, 15 bp, Homo sapiens
atcagctcccagctt

SEQ ID NO: 457251 - DNA, 15 bp, Homo sapiens
aatcagctcccagct

SEQ ID NO: 457252 - DNA, 15 bp, Homo sapiens
caatcagctcccagc

SEQ ID NO: 457253 - DNA, 15 bp, Homo sapiens
gcaatcagctcccag

SEQ ID NO: 457254 - DNA, 15 bp, Homo sapiens
agcaatcagctccca

SEQ ID NO: 457255 - DNA, 15 bp, Homo sapiens
cagcaatcagctccc

SEQ ID NO: 457256 - DNA, 15 bp, Homo sapiens
gcagcaatcagctcc

SEQ ID NO: 457257 - DNA, 15 bp, Homo sapiens
tgcagcaatcagctc

SEQ ID NO: 457258 - DNA, 15 bp, Homo sapiens
gtgcagcaatcagct

SEQ ID NO: 457259 - DNA, 15 bp, Homo sapiens
tgtgcagcaatcagc

SEQ ID NO: 457260 - DNA, 15 bp, Homo sapiens
atgtgcagcaatcag

SEQ ID NO: 457261 - DNA, 15 bp, Homo sapiens
aatgtgcagcaatca

SEQ ID NO: 457262 - DNA, 15 bp, Homo sapiens
taatgtgcagcaatc

SEQ ID NO: 457263 - DNA, 15 bp, Homo sapiens
gtaatgtgcagcaat

SEQ ID NO: 457264 - DNA, 15 bp, Homo sapiens
agtaatgtgcagcaa

SEQ ID NO: 457265 - DNA, 15 bp, Homo sapiens
gagtaatgtgcagca

SEQ ID NO: 457266 - DNA, 15 bp, Homo sapiens
tgagtaatgtgcagc

SEQ ID NO: 457267 - DNA, 15 bp, Homo sapiens
ctgagtaatgtgcag

SEQ ID NO: 457268 - DNA, 15 bp, Homo sapiens
gctgagtaatgtgca

SEQ ID NO: 457269 - DNA, 15 bp, Homo sapiens
agctgagtaatgtgc

SEQ ID NO: 457270 - DNA, 15 bp, Homo sapiens
cagctgagtaatgtg

SEQ ID NO: 457271 - DNA, 15 bp, Homo sapiens
tcagctgagtaatgt

SEQ ID NO: 457272 - DNA, 15 bp, Homo sapiens
ttcagctgagtaatg

SEQ ID NO: 457273 - DNA, 15 bp, Homo sapiens
attcagctgagtaat

SEQ ID NO: 457274 - DNA, 15 bp, Homo sapiens
aattcagctgagtaa

SEQ ID NO: 457275 - DNA, 15 bp, Homo sapiens
taattcagctgagta

SEQ ID NO: 457276 - DNA, 15 bp, Homo sapiens
ttaattcagctgagt

SEQ ID NO: 457277 - DNA, 15 bp, Homo sapiens
tttaattcagctgag

SEQ ID NO: 457278 - DNA, 15 bp, Homo sapiens
atttaattcagctga

SEQ ID NO: 457279 - DNA, 15 bp, Homo sapiens
catttaattcagctg

SEQ ID NO: 457280 - DNA, 15 bp, Homo sapiens
acatttaattcagct

SEQ ID NO: 457281 - DNA, 15 bp, Homo sapiens
cacatttaattcagc

SEQ ID NO: 457282 - DNA, 15 bp, Homo sapiens
gcacatttaattcag

SEQ ID NO: 457283 - DNA, 15 bp, Homo sapiens
ggcacatttaattca

SEQ ID NO: 457284 - DNA, 15 bp, Homo sapiens
gggcacatttaattc

SEQ ID NO: 457285 - DNA, 15 bp, Homo sapiens
agggcacatttaatt

SEQ ID NO: 457286 - DNA, 15 bp, Homo sapiens
gagggcacatttaat

SEQ ID NO: 457287 - DNA, 15 bp, Homo sapiens
tgagggcacatttaa

SEQ ID NO: 457288 - DNA, 15 bp, Homo sapiens
gtgagggcacattta

SEQ ID NO: 457289 - DNA, 15 bp, Homo sapiens
tgtgagggcacattt

SEQ ID NO: 457290 - DNA, 15 bp, Homo sapiens
atgtgagggcacatt

SEQ ID NO: 457291 - DNA, 15 bp, Homo sapiens
gatgtgagggcacat

SEQ ID NO: 457292 - DNA, 15 bp, Homo sapiens
agatgtgagggcaca

SEQ ID NO: 457293 - DNA, 15 bp, Homo sapiens
cagatgtgagggcac

SEQ ID NO: 457294 - DNA, 15 bp, Homo sapiens
acagatgtgagggca

SEQ ID NO: 457295 - DNA, 15 bp, Homo sapiens
cacagatgtgagggc

SEQ ID NO: 457296 - DNA, 15 bp, Homo sapiens
acacagatgtgaggg

SEQ ID NO: 457297 - DNA, 15 bp, Homo sapiens
cacacagatgtgagg

SEQ ID NO: 457298 - DNA, 15 bp, Homo sapiens
acacacagatgtgag

SEQ ID NO: 457299 - DNA, 15 bp, Homo sapiens
cacacacagatgtga

SEQ ID NO: 457300 - DNA, 15 bp, Homo sapiens
acacacacagatgtg

SEQ ID NO: 457301 - DNA, 15 bp, Homo sapiens
cacacacacagatgt

SEQ ID NO: 457302 - DNA, 15 bp, Homo sapiens
gcacacacacagatg

SEQ ID NO: 457303 - DNA, 15 bp, Homo sapiens
cgcacacacacagat

SEQ ID NO: 457304 - DNA, 15 bp, Homo sapiens
acgcacacacacaga

SEQ ID NO: 457305 - DNA, 15 bp, Homo sapiens
tacgcacacacacag

SEQ ID NO: 457306 - DNA, 15 bp, Homo sapiens
gtacgcacacacaca

SEQ ID NO: 457307 - DNA, 15 bp, Homo sapiens
tgtacgcacacacac

SEQ ID NO: 457308 - DNA, 15 bp, Homo sapiens
atgtacgcacacaca

SEQ ID NO: 457309 - DNA, 15 bp, Homo sapiens
catgtacgcacacac

SEQ ID NO: 457310 - DNA, 15 bp, Homo sapiens
gcatgtacgcacaca

SEQ ID NO: 457311 - DNA, 15 bp, Homo sapiens
tgcatgtacgcacac

SEQ ID NO: 457312 - DNA, 15 bp, Homo sapiens
ttgcatgtacgcaca

SEQ ID NO: 457313 - DNA, 15 bp, Homo sapiens
tttgcatgtacgcac

SEQ ID NO: 457314 - DNA, 15 bp, Homo sapiens
atttgcatgtacgca

SEQ ID NO: 457315 - DNA, 15 bp, Homo sapiens
catttgcatgtacgc

SEQ ID NO: 457316 - DNA, 15 bp, Homo sapiens
acatttgcatgtacg

SEQ ID NO: 457317 - DNA, 15 bp, Homo sapiens
tacatttgcatgtac

SEQ ID NO: 457318 - DNA, 15 bp, Homo sapiens
gtacatttgcatgta

SEQ ID NO: 457319 - DNA, 15 bp, Homo sapiens
tgtacatttgcatgt

SEQ ID NO: 457320 - DNA, 15 bp, Homo sapiens
atgtacatttgcatg

SEQ ID NO: 457321 - DNA, 15 bp, Homo sapiens
catgtacatttgcat

SEQ ID NO: 457322 - DNA, 15 bp, Homo sapiens
acatgtacatttgca

SEQ ID NO: 457323 - DNA, 15 bp, Homo sapiens
cacatgtacatttgc

SEQ ID NO: 457324 - DNA, 15 bp, Homo sapiens
acacatgtacatttg

SEQ ID NO: 457325 - DNA, 15 bp, Homo sapiens
tacacatgtacattt

SEQ ID NO: 457326 - DNA, 15 bp, Homo sapiens
atacacatgtacatt

SEQ ID NO: 457327 - DNA, 15 bp, Homo sapiens
catacacatgtacat

SEQ ID NO: 457328 - DNA, 15 bp, Homo sapiens
tcatacacatgtaca

SEQ ID NO: 457329 - DNA, 15 bp, Homo sapiens
ctcatacacatgtac

SEQ ID NO: 457330 - DNA, 15 bp, Homo sapiens
actcatacacatgta

SEQ ID NO: 457331 - DNA, 15 bp, Homo sapiens
aactcatacacatgt

SEQ ID NO: 457332 - DNA, 15 bp, Homo sapiens
taactcatacacatg

SEQ ID NO: 457333 - DNA, 15 bp, Homo sapiens
ctaactcatacacat

SEQ ID NO: 457334 - DNA, 15 bp, Homo sapiens
actaactcatacaca

SEQ ID NO: 457335 - DNA, 15 bp, Homo sapiens
aactaactcatacac

SEQ ID NO: 457336 - DNA, 15 bp, Homo sapiens
caactaactcataca

SEQ ID NO: 457337 - DNA, 15 bp, Homo sapiens
ccaactaactcatac

SEQ ID NO: 457338 - DNA, 15 bp, Homo sapiens
tccaactaactcata

SEQ ID NO: 457339 - DNA, 15 bp, Homo sapiens
ctccaactaactcat

SEQ ID NO: 457340 - DNA, 15 bp, Homo sapiens
cctccaactaactca

SEQ ID NO: 457341 - DNA, 15 bp, Homo sapiens
ccctccaactaactc

SEQ ID NO: 457342 - DNA, 15 bp, Homo sapiens
cccctccaactaact

SEQ ID NO: 457343 - DNA, 15 bp, Homo sapiens
acccctccaactaac

SEQ ID NO: 457344 - DNA, 15 bp, Homo sapiens
tacccctccaactaa

SEQ ID NO: 457345 - DNA, 15 bp, Homo sapiens
ctacccctccaacta

SEQ ID NO: 457346 - DNA, 15 bp, Homo sapiens
tctacccctccaact

SEQ ID NO: 457347 - DNA, 15 bp, Homo sapiens
gtctacccctccaac

SEQ ID NO: 457348 - DNA, 15 bp, Homo sapiens
ggtctacccctccaa

SEQ ID NO: 457349 - DNA, 15 bp, Homo sapiens
aggtctacccctcca

SEQ ID NO: 457350 - DNA, 15 bp, Homo sapiens
aaggtctacccctcc

SEQ ID NO: 457351 - DNA, 15 bp, Homo sapiens
aaaggtctacccctc

SEQ ID NO: 457352 - DNA, 15 bp, Homo sapiens
taaaggtctacccct

SEQ ID NO: 457353 - DNA, 15 bp, Homo sapiens
ataaaggtctacccc

SEQ ID NO: 457354 - DNA, 15 bp, Homo sapiens
aataaaggtctaccc

SEQ ID NO: 457355 - DNA, 15 bp, Homo sapiens
aaataaaggtctacc

SEQ ID NO: 457356 - DNA, 15 bp, Homo sapiens
aaaataaaggtctac

SEQ ID NO: 457357 - DNA, 15 bp, Homo sapiens
gaaaataaaggtcta

SEQ ID NO: 457358 - DNA, 15 bp, Homo sapiens
ggaaaataaaggtct

SEQ ID NO: 457359 - DNA, 15 bp, Homo sapiens
aggaaaataaaggtc

SEQ ID NO: 457360 - DNA, 15 bp, Homo sapiens
caggaaaataaaggt

SEQ ID NO: 457361 - DNA, 15 bp, Homo sapiens
acaggaaaataaagg

SEQ ID NO: 457362 - DNA, 15 bp, Homo sapiens
gacaggaaaataaag

SEQ ID NO: 457363 - DNA, 15 bp, Homo sapiens
ggacaggaaaataaa

SEQ ID NO: 457364 - DNA, 15 bp, Homo sapiens
aggacaggaaaataa

SEQ ID NO: 457365 - DNA, 15 bp, Homo sapiens
caggacaggaaaata

SEQ ID NO: 457366 - DNA, 15 bp, Homo sapiens
acaggacaggaaaat

SEQ ID NO: 457367 - DNA, 15 bp, Homo sapiens
tacaggacaggaaaa

SEQ ID NO: 457368 - DNA, 15 bp, Homo sapiens
ttacaggacaggaaa

SEQ ID NO: 457369 - DNA, 15 bp, Homo sapiens
gttacaggacaggaa

SEQ ID NO: 457370 - DNA, 15 bp, Homo sapiens
agttacaggacagga

SEQ ID NO: 457371 - DNA, 15 bp, Homo sapiens
aagttacaggacagg

SEQ ID NO: 457372 - DNA, 15 bp, Homo sapiens
aaagttacaggacag

SEQ ID NO: 457373 - DNA, 15 bp, Homo sapiens
gaaagttacaggaca

SEQ ID NO: 457374 - DNA, 15 bp, Homo sapiens
ggaaagttacaggac

SEQ ID NO: 457375 - DNA, 15 bp, Homo sapiens
aggaaagttacagga

SEQ ID NO: 457376 - DNA, 15 bp, Homo sapiens
aaggaaagttacagg

SEQ ID NO: 457377 - DNA, 15 bp, Homo sapiens
aaaggaaagttacag

SEQ ID NO: 457378 - DNA, 15 bp, Homo sapiens
caaaggaaagttaca

SEQ ID NO: 457379 - DNA, 15 bp, Homo sapiens
gcaaaggaaagttac

SEQ ID NO: 457380 - DNA, 15 bp, Homo sapiens
tgcaaaggaaagtta

SEQ ID NO: 457381 - DNA, 15 bp, Homo sapiens
ttgcaaaggaaagtt

SEQ ID NO: 457382 - DNA, 15 bp, Homo sapiens
tttgcaaaggaaagt

SEQ ID NO: 457383 - DNA, 15 bp, Homo sapiens
gtttgcaaaggaaag

SEQ ID NO: 457384 - DNA, 15 bp, Homo sapiens
agtttgcaaaggaaa

SEQ ID NO: 457385 - DNA, 15 bp, Homo sapiens
tagtttgcaaaggaa

SEQ ID NO: 457386 - DNA, 15 bp, Homo sapiens
ttagtttgcaaagga

SEQ ID NO: 457387 - DNA, 15 bp, Homo sapiens
attagtttgcaaagg

SEQ ID NO: 457388 - DNA, 15 bp, Homo sapiens
gattagtttgcaaag

SEQ ID NO: 457389 - DNA, 15 bp, Homo sapiens
agattagtttgcaaa

SEQ ID NO: 457390 - DNA, 15 bp, Homo sapiens
cagattagtttgcaa

SEQ ID NO: 457391 - DNA, 15 bp, Homo sapiens
acagattagtttgca

SEQ ID NO: 457392 - DNA, 15 bp, Homo sapiens
tacagattagtttgc

SEQ ID NO: 457393 - DNA, 15 bp, Homo sapiens
atacagattagtttg

SEQ ID NO: 457394 - DNA, 15 bp, Homo sapiens
aatacagattagttt

SEQ ID NO: 457395 - DNA, 15 bp, Homo sapiens
gaatacagattagtt

SEQ ID NO: 457396 - DNA, 15 bp, Homo sapiens
tgaatacagattagt

SEQ ID NO: 457397 - DNA, 15 bp, Homo sapiens
ctgaatacagattag

SEQ ID NO: 457398 - DNA, 15 bp, Homo sapiens
tctgaatacagatta

SEQ ID NO: 457399 - DNA, 15 bp, Homo sapiens
ttctgaatacagatt

SEQ ID NO: 457400 - DNA, 15 bp, Homo sapiens
gttctgaatacagat

SEQ ID NO: 457401 - DNA, 15 bp, Homo sapiens
tgttctgaatacaga

SEQ ID NO: 457402 - DNA, 15 bp, Homo sapiens
ctgttctgaatacag

SEQ ID NO: 457403 - DNA, 15 bp, Homo sapiens
actgttctgaataca

SEQ ID NO: 457404 - DNA, 15 bp, Homo sapiens
cactgttctgaatac

SEQ ID NO: 457405 - DNA, 15 bp, Homo sapiens
acactgttctgaata

SEQ ID NO: 457406 - DNA, 15 bp, Homo sapiens
aacactgttctgaat

SEQ ID NO: 457407 - DNA, 15 bp, Homo sapiens
caacactgttctgaa

SEQ ID NO: 457408 - DNA, 15 bp, Homo sapiens
gcaacactgttctga

SEQ ID NO: 457409 - DNA, 15 bp, Homo sapiens
tgcaacactgttctg

SEQ ID NO: 457410 - DNA, 15 bp, Homo sapiens
ctgcaacactgttct

SEQ ID NO: 457411 - DNA, 15 bp, Homo sapiens
actgcaacactgttc

SEQ ID NO: 457412 - DNA, 15 bp, Homo sapiens
aactgcaacactgtt

SEQ ID NO: 457413 - DNA, 15 bp, Homo sapiens
taactgcaacactgt

SEQ ID NO: 457414 - DNA, 15 bp, Homo sapiens
ttaactgcaacactg

SEQ ID NO: 457415 - DNA, 15 bp, Homo sapiens
cttaactgcaacact

SEQ ID NO: 457416 - DNA, 15 bp, Homo sapiens
tcttaactgcaacac

SEQ ID NO: 457417 - DNA, 15 bp, Homo sapiens
ttcttaactgcaaca

SEQ ID NO: 457418 - DNA, 15 bp, Homo sapiens
gttcttaactgcaac

SEQ ID NO: 457419 - DNA, 15 bp, Homo sapiens
ggttcttaactgcaa

SEQ ID NO: 457420 - DNA, 15 bp, Homo sapiens
tggttcttaactgca

SEQ ID NO: 457421 - DNA, 15 bp, Homo sapiens
gtggttcttaactgc

SEQ ID NO: 457422 - DNA, 15 bp, Homo sapiens
ggtggttcttaactg

SEQ ID NO: 457423 - DNA, 15 bp, Homo sapiens
gggtggttcttaact

SEQ ID NO: 457424 - DNA, 15 bp, Homo sapiens
tgggtggttcttaac

SEQ ID NO: 457425 - DNA, 15 bp, Homo sapiens
ctgggtggttcttaa

SEQ ID NO: 457426 - DNA, 15 bp, Homo sapiens
gctgggtggttctta

SEQ ID NO: 457427 - DNA, 15 bp, Homo sapiens
agctgggtggttctt

SEQ ID NO: 457428 - DNA, 15 bp, Homo sapiens
aagctgggtggttct

SEQ ID NO: 457429 - DNA, 15 bp, Homo sapiens
caagctgggtggttc

SEQ ID NO: 457430 - DNA, 15 bp, Homo sapiens
acaagctgggtggtt

SEQ ID NO: 457431 - DNA, 15 bp, Homo sapiens
gacaagctgggtggt

SEQ ID NO: 457432 - DNA, 15 bp, Homo sapiens
ggacaagctgggtgg

SEQ ID NO: 457433 - DNA, 15 bp, Homo sapiens
tggacaagctgggtg

SEQ ID NO: 457434 - DNA, 15 bp, Homo sapiens
atggacaagctgggt

SEQ ID NO: 457435 - DNA, 15 bp, Homo sapiens
catggacaagctggg

SEQ ID NO: 457436 - DNA, 15 bp, Homo sapiens
tcatggacaagctgg

SEQ ID NO: 457437 - DNA, 15 bp, Homo sapiens
ttcatggacaagctg

SEQ ID NO: 457438 - DNA, 15 bp, Homo sapiens
tttcatggacaagct

SEQ ID NO: 457439 - DNA, 15 bp, Homo sapiens
gtttcatggacaagc

SEQ ID NO: 457440 - DNA, 15 bp, Homo sapiens
tgtttcatggacaag

SEQ ID NO: 457441 - DNA, 15 bp, Homo sapiens
ctgtttcatggacaa

SEQ ID NO: 457442 - DNA, 15 bp, Homo sapiens
cctgtttcatggaca

SEQ ID NO: 457443 - DNA, 15 bp, Homo sapiens
acctgtttcatggac

SEQ ID NO: 457444 - DNA, 15 bp, Homo sapiens
aacctgtttcatgga

SEQ ID NO: 457445 - DNA, 15 bp, Homo sapiens
gaacctgtttcatgg

SEQ ID NO: 457446 - DNA, 15 bp, Homo sapiens
agaacctgtttcatg

SEQ ID NO: 457447 - DNA, 15 bp, Homo sapiens
gagaacctgtttcat

SEQ ID NO: 457448 - DNA, 15 bp, Homo sapiens
agagaacctgtttca

SEQ ID NO: 457449 - DNA, 15 bp, Homo sapiens
gagagaacctgtttc

SEQ ID NO: 457450 - DNA, 15 bp, Homo sapiens
tgagagaacctgttt

SEQ ID NO: 457451 - DNA, 15 bp, Homo sapiens
gtgagagaacctgtt

SEQ ID NO: 457452 - DNA, 15 bp, Homo sapiens
ggtgagagaacctgt

SEQ ID NO: 457453 - DNA, 15 bp, Homo sapiens
gggtgagagaacctg

SEQ ID NO: 457454 - DNA, 15 bp, Homo sapiens
ggggtgagagaacct

SEQ ID NO: 457455 - DNA, 15 bp, Homo sapiens
tggggtgagagaacc

SEQ ID NO: 457456 - DNA, 15 bp, Homo sapiens
atggggtgagagaac

SEQ ID NO: 457457 - DNA, 15 bp, Homo sapiens
gatggggtgagagaa

SEQ ID NO: 457458 - DNA, 15 bp, Homo sapiens
agatggggtgagaga

SEQ ID NO: 457459 - DNA, 15 bp, Homo sapiens
gagatggggtgagag

SEQ ID NO: 457460 - DNA, 15 bp, Homo sapiens
ggagatggggtgaga

SEQ ID NO: 457461 - DNA, 15 bp, Homo sapiens
gggagatggggtgag

SEQ ID NO: 457462 - DNA, 15 bp, Homo sapiens
ggggagatggggtga

SEQ ID NO: 457463 - DNA, 15 bp, Homo sapiens
tggggagatggggtg

SEQ ID NO: 457464 - DNA, 15 bp, Homo sapiens
ctggggagatggggt

SEQ ID NO: 457465 - DNA, 15 bp, Homo sapiens
actggggagatgggg

SEQ ID NO: 457466 - DNA, 15 bp, Homo sapiens
aactggggagatggg

SEQ ID NO: 457467 - DNA, 15 bp, Homo sapiens
aaactggggagatgg

SEQ ID NO: 457468 - DNA, 15 bp, Homo sapiens
aaaactggggagatg

SEQ ID NO: 457469 - DNA, 15 bp, Homo sapiens
taaaactggggagat

SEQ ID NO: 457470 - DNA, 15 bp, Homo sapiens
ctaaaactggggaga

SEQ ID NO: 457471 - DNA, 15 bp, Homo sapiens
tctaaaactggggag

SEQ ID NO: 457472 - DNA, 15 bp, Homo sapiens
ctctaaaactgggga

SEQ ID NO: 457473 - DNA, 15 bp, Homo sapiens
tctctaaaactgggg

SEQ ID NO: 457474 - DNA, 15 bp, Homo sapiens
ttctctaaaactggg

SEQ ID NO: 457475 - DNA, 15 bp, Homo sapiens
cttctctaaaactgg

SEQ ID NO: 457476 - DNA, 15 bp, Homo sapiens
ccttctctaaaactg

SEQ ID NO: 457477 - DNA, 15 bp, Homo sapiens
gccttctctaaaact

SEQ ID NO: 457478 - DNA, 15 bp, Homo sapiens
tgccttctctaaaac

SEQ ID NO: 457479 - DNA, 15 bp, Homo sapiens
ctgccttctctaaaa

SEQ ID NO: 457480 - DNA, 15 bp, Homo sapiens
cctgccttctctaaa

SEQ ID NO: 457481 - DNA, 15 bp, Homo sapiens
tcctgccttctctaa

SEQ ID NO: 457482 - DNA, 15 bp, Homo sapiens
ttcctgccttctcta

SEQ ID NO: 457483 - DNA, 15 bp, Homo sapiens
tttcctgccttctct

SEQ ID NO: 457484 - DNA, 15 bp, Homo sapiens
ctttcctgccttctc

SEQ ID NO: 457485 - DNA, 15 bp, Homo sapiens
tctttcctgccttct

SEQ ID NO: 457486 - DNA, 15 bp, Homo sapiens
ttctttcctgccttc

SEQ ID NO: 457487 - DNA, 15 bp, Homo sapiens
tttctttcctgcctt

SEQ ID NO: 457488 - DNA, 15 bp, Homo sapiens
ttttctttcctgcct

SEQ ID NO: 457489 - DNA, 15 bp, Homo sapiens
cttttctttcctgcc

SEQ ID NO: 457490 - DNA, 15 bp, Homo sapiens
ccttttctttcctgc

SEQ ID NO: 457491 - DNA, 15 bp, Homo sapiens
gccttttctttcctg

SEQ ID NO: 457492 - DNA, 15 bp, Homo sapiens
tgccttttctttcct

SEQ ID NO: 457493 - DNA, 15 bp, Homo sapiens
ctgccttttctttcc

SEQ ID NO: 457494 - DNA, 15 bp, Homo sapiens
actgccttttctttc

SEQ ID NO: 457495 - DNA, 15 bp, Homo sapiens
cactgccttttcttt

SEQ ID NO: 457496 - DNA, 15 bp, Homo sapiens
gcactgccttttctt

SEQ ID NO: 457497 - DNA, 15 bp, Homo sapiens
agcactgccttttct

SEQ ID NO: 457498 - DNA, 15 bp, Homo sapiens
aagcactgccttttc

SEQ ID NO: 457499 - DNA, 15 bp, Homo sapiens
aaagcactgcctttt

SEQ ID NO: 457500 - DNA, 15 bp, Homo sapiens
aaaagcactgccttt

SEQ ID NO: 457501 - DNA, 15 bp, Homo sapiens
gaaaagcactgcctt

SEQ ID NO: 457502 - DNA, 15 bp, Homo sapiens
agaaaagcactgcct

SEQ ID NO: 457503 - DNA, 15 bp, Homo sapiens
aagaaaagcactgcc

SEQ ID NO: 457504 - DNA, 15 bp, Homo sapiens
aaagaaaagcactgc

SEQ ID NO: 457505 - DNA, 15 bp, Homo sapiens
aaaagaaaagcactg

SEQ ID NO: 457506 - DNA, 15 bp, Homo sapiens
aaaaagaaaagcact

SEQ ID NO: 457507 - DNA, 15 bp, Homo sapiens
aaaaaagaaaagcac

SEQ ID NO: 457508 - DNA, 15 bp, Homo sapiens
gaaaaaagaaaagca

SEQ ID NO: 457509 - DNA, 15 bp, Homo sapiens
ggaaaaaagaaaagc

SEQ ID NO: 457510 - DNA, 15 bp, Homo sapiens
aggaaaaaagaaaag

SEQ ID NO: 457511 - DNA, 15 bp, Homo sapiens
caggaaaaaagaaaa

SEQ ID NO: 457512 - DNA, 15 bp, Homo sapiens
ccaggaaaaaagaaa

SEQ ID NO: 457513 - DNA, 15 bp, Homo sapiens
gccaggaaaaaagaa

SEQ ID NO: 457514 - DNA, 15 bp, Homo sapiens
ggccaggaaaaaaga

SEQ ID NO: 457515 - DNA, 15 bp, Homo sapiens
cggccaggaaaaaag

SEQ ID NO: 457516 - DNA, 15 bp, Homo sapiens
acggccaggaaaaaa

SEQ ID NO: 457517 - DNA, 15 bp, Homo sapiens
tacggccaggaaaaa

SEQ ID NO: 457518 - DNA, 15 bp, Homo sapiens
atacggccaggaaaa

SEQ ID NO: 457519 - DNA, 15 bp, Homo sapiens
catacggccaggaaa

SEQ ID NO: 457520 - DNA, 15 bp, Homo sapiens
gcatacggccaggaa

SEQ ID NO: 457521 - DNA, 15 bp, Homo sapiens
cgcatacggccagga

SEQ ID NO: 457522 - DNA, 15 bp, Homo sapiens
ccgcatacggccagg

SEQ ID NO: 457523 - DNA, 15 bp, Homo sapiens
cccgcatacggccag

SEQ ID NO: 457524 - DNA, 15 bp, Homo sapiens
ccccgcatacggcca

SEQ ID NO: 457525 - DNA, 15 bp, Homo sapiens
gccccgcatacggcc

SEQ ID NO: 457526 - DNA, 15 bp, Homo sapiens
tgccccgcatacggc

SEQ ID NO: 457527 - DNA, 15 bp, Homo sapiens
ctgccccgcatacgg

SEQ ID NO: 457528 - DNA, 15 bp, Homo sapiens
cctgccccgcatacg

SEQ ID NO: 457529 - DNA, 15 bp, Homo sapiens
tcctgccccgcatac

SEQ ID NO: 457530 - DNA, 15 bp, Homo sapiens
ttcctgccccgcata

SEQ ID NO: 457531 - DNA, 15 bp, Homo sapiens
cttcctgccccgcat

SEQ ID NO: 457532 - DNA, 15 bp, Homo sapiens
tcttcctgccccgca

SEQ ID NO: 457533 - DNA, 15 bp, Homo sapiens
ttcttcctgccccgc

SEQ ID NO: 457534 - DNA, 15 bp, Homo sapiens
cttcttcctgccccg

SEQ ID NO: 457535 - DNA, 15 bp, Homo sapiens
gcttcttcctgcccc

SEQ ID NO: 457536 - DNA, 15 bp, Homo sapiens
ggcttcttcctgccc

SEQ ID NO: 457537 - DNA, 15 bp, Homo sapiens
tggcttcttcctgcc

SEQ ID NO: 457538 - DNA, 15 bp, Homo sapiens
ctggcttcttcctgc

SEQ ID NO: 457539 - DNA, 15 bp, Homo sapiens
gctggcttcttcctg

SEQ ID NO: 457540 - DNA, 15 bp, Homo sapiens
tgctggcttcttcct

SEQ ID NO: 457541 - DNA, 15 bp, Homo sapiens
ctgctggcttcttcc

SEQ ID NO: 457542 - DNA, 15 bp, Homo sapiens
tctgctggcttcttc

SEQ ID NO: 457543 - DNA, 15 bp, Homo sapiens
ctctgctggcttctt

SEQ ID NO: 457544 - DNA, 15 bp, Homo sapiens
gctctgctggcttct

SEQ ID NO: 457545 - DNA, 15 bp, Homo sapiens
agctctgctggcttc

SEQ ID NO: 457546 - DNA, 15 bp, Homo sapiens
aagctctgctggctt

SEQ ID NO: 457547 - DNA, 15 bp, Homo sapiens
caagctctgctggct

SEQ ID NO: 457548 - DNA, 15 bp, Homo sapiens
tcaagctctgctggc

SEQ ID NO: 457549 - DNA, 15 bp, Homo sapiens
ttcaagctctgctgg

SEQ ID NO: 457550 - DNA, 15 bp, Homo sapiens
tttcaagctctgctg

SEQ ID NO: 457551 - DNA, 15 bp, Homo sapiens
ctttcaagctctgct

SEQ ID NO: 457552 - DNA, 15 bp, Homo sapiens
tctttcaagctctgc

SEQ ID NO: 457553 - DNA, 15 bp, Homo sapiens
ctctttcaagctctg

SEQ ID NO: 457554 - DNA, 15 bp, Homo sapiens
tctctttcaagctct

SEQ ID NO: 457555 - DNA, 15 bp, Homo sapiens
ttctctttcaagctc

SEQ ID NO: 457556 - DNA, 15 bp, Homo sapiens
tttctctttcaagct

SEQ ID NO: 457557 - DNA, 15 bp, Homo sapiens
ctttctctttcaagc

SEQ ID NO: 457558 - DNA, 15 bp, Homo sapiens
actttctctttcaag

SEQ ID NO: 457559 - DNA, 15 bp, Homo sapiens
tactttctctttcaa

SEQ ID NO: 457560 - DNA, 15 bp, Homo sapiens
ttactttctctttca

SEQ ID NO: 457561 - DNA, 15 bp, Homo sapiens
tttactttctctttc

SEQ ID NO: 457562 - DNA, 15 bp, Homo sapiens
gtttactttctcttt

SEQ ID NO: 457563 - DNA, 15 bp, Homo sapiens
ggtttactttctctt

SEQ ID NO: 457564 - DNA, 15 bp, Homo sapiens
aggtttactttctct

SEQ ID NO: 457565 - DNA, 15 bp, Homo sapiens
aaggtttactttctc

SEQ ID NO: 457566 - DNA, 15 bp, Homo sapiens
gaaggtttactttct

SEQ ID NO: 457567 - DNA, 15 bp, Homo sapiens
agaaggtttactttc

SEQ ID NO: 457568 - DNA, 15 bp, Homo sapiens
cagaaggtttacttt

SEQ ID NO: 457569 - DNA, 15 bp, Homo sapiens
ccagaaggtttactt

SEQ ID NO: 457570 - DNA, 15 bp, Homo sapiens
cccagaaggtttact

SEQ ID NO: 457571 - DNA, 15 bp, Homo sapiens
tcccagaaggtttac

SEQ ID NO: 457572 - DNA, 15 bp, Homo sapiens
ttcccagaaggttta

SEQ ID NO: 457573 - DNA, 15 bp, Homo sapiens
tttcccagaaggttt

SEQ ID NO: 457574 - DNA, 15 bp, Homo sapiens
atttcccagaaggtt

SEQ ID NO: 457575 - DNA, 15 bp, Homo sapiens
tatttcccagaaggt

SEQ ID NO: 457576 - DNA, 15 bp, Homo sapiens
ttatttcccagaagg

SEQ ID NO: 457577 - DNA, 15 bp, Homo sapiens
tttatttcccagaag

SEQ ID NO: 457578 - DNA, 15 bp, Homo sapiens
gtttatttcccagaa

SEQ ID NO: 457579 - DNA, 15 bp, Homo sapiens
cgtttatttcccaga

SEQ ID NO: 457580 - DNA, 15 bp, Homo sapiens
ccgtttatttcccag

SEQ ID NO: 457581 - DNA, 15 bp, Homo sapiens
gccgtttatttccca

SEQ ID NO: 457582 - DNA, 15 bp, Homo sapiens
agccgtttatttccc

SEQ ID NO: 457583 - DNA, 15 bp, Homo sapiens
aagccgtttatttcc

SEQ ID NO: 457584 - DNA, 15 bp, Homo sapiens
caagccgtttatttc

SEQ ID NO: 457585 - DNA, 15 bp, Homo sapiens
ccaagccgtttattt

SEQ ID NO: 457586 - DNA, 15 bp, Homo sapiens
gccaagccgtttatt

SEQ ID NO: 457587 - DNA, 15 bp, Homo sapiens
agccaagccgtttat

SEQ ID NO: 457588 - DNA, 15 bp, Homo sapiens
aagccaagccgttta

SEQ ID NO: 457589 - DNA, 15 bp, Homo sapiens
gaagccaagccgttt

SEQ ID NO: 457590 - DNA, 15 bp, Homo sapiens
ggaagccaagccgtt

SEQ ID NO: 457591 - DNA, 15 bp, Homo sapiens
gggaagccaagccgt

SEQ ID NO: 457592 - DNA, 15 bp, Homo sapiens
agggaagccaagccg

SEQ ID NO: 457593 - DNA, 15 bp, Homo sapiens
tagggaagccaagcc

SEQ ID NO: 457594 - DNA, 15 bp, Homo sapiens
atagggaagccaagc

SEQ ID NO: 457595 - DNA, 15 bp, Homo sapiens
aatagggaagccaag

SEQ ID NO: 457596 - DNA, 15 bp, Homo sapiens
caatagggaagccaa

SEQ ID NO: 457597 - DNA, 15 bp, Homo sapiens
acaatagggaagcca

SEQ ID NO: 457598 - DNA, 15 bp, Homo sapiens
cacaatagggaagcc

SEQ ID NO: 457599 - DNA, 15 bp, Homo sapiens
ccacaatagggaagc

SEQ ID NO: 457600 - DNA, 15 bp, Homo sapiens
tccacaatagggaag

SEQ ID NO: 457601 - DNA, 15 bp, Homo sapiens
ctccacaatagggaa

SEQ ID NO: 457602 - DNA, 15 bp, Homo sapiens
cctccacaataggga

SEQ ID NO: 457603 - DNA, 15 bp, Homo sapiens
tcctccacaataggg

SEQ ID NO: 457604 - DNA, 15 bp, Homo sapiens
ctcctccacaatagg

SEQ ID NO: 457605 - DNA, 15 bp, Homo sapiens
cctcctccacaatag

SEQ ID NO: 457606 - DNA, 15 bp, Homo sapiens
tcctcctccacaata

SEQ ID NO: 457607 - DNA, 15 bp, Homo sapiens
ctcctcctccacaat

SEQ ID NO: 457608 - DNA, 15 bp, Homo sapiens
actcctcctccacaa

SEQ ID NO: 457609 - DNA, 15 bp, Homo sapiens
cactcctcctccaca

SEQ ID NO: 457610 - DNA, 15 bp, Homo sapiens
gcactcctcctccac

SEQ ID NO: 457611 - DNA, 15 bp, Homo sapiens
tgcactcctcctcca

SEQ ID NO: 457612 - DNA, 15 bp, Homo sapiens
ttgcactcctcctcc

SEQ ID NO: 457613 - DNA, 15 bp, Homo sapiens
tttgcactcctcctc

SEQ ID NO: 457614 - DNA, 15 bp, Homo sapiens
atttgcactcctcct

SEQ ID NO: 457615 - DNA, 15 bp, Homo sapiens
aatttgcactcctcc

SEQ ID NO: 457616 - DNA, 15 bp, Homo sapiens
taatttgcactcctc

SEQ ID NO: 457617 - DNA, 15 bp, Homo sapiens
ataatttgcactcct

SEQ ID NO: 457618 - DNA, 15 bp, Homo sapiens
aataatttgcactcc

SEQ ID NO: 457619 - DNA, 15 bp, Homo sapiens
taataatttgcactc

SEQ ID NO: 457620 - DNA, 15 bp, Homo sapiens
ctaataatttgcact

SEQ ID NO: 457621 - DNA, 15 bp, Homo sapiens
cctaataatttgcac

SEQ ID NO: 457622 - DNA, 15 bp, Homo sapiens
ccctaataatttgca

SEQ ID NO: 457623 - DNA, 15 bp, Homo sapiens
cccctaataatttgc

SEQ ID NO: 457624 - DNA, 15 bp, Homo sapiens
ccccctaataatttg

SEQ ID NO: 457625 - DNA, 15 bp, Homo sapiens
tccccctaataattt

SEQ ID NO: 457626 - DNA, 15 bp, Homo sapiens
atccccctaataatt

SEQ ID NO: 457627 - DNA, 15 bp, Homo sapiens
catccccctaataat

SEQ ID NO: 457628 - DNA, 15 bp, Homo sapiens
acatccccctaataa

SEQ ID NO: 457629 - DNA, 15 bp, Homo sapiens
aacatccccctaata

SEQ ID NO: 457630 - DNA, 15 bp, Homo sapiens
aaacatccccctaat

SEQ ID NO: 457631 - DNA, 15 bp, Homo sapiens
caaacatccccctaa

SEQ ID NO: 457632 - DNA, 15 bp, Homo sapiens
ccaaacatcccccta

SEQ ID NO: 457633 - DNA, 15 bp, Homo sapiens
cccaaacatccccct

SEQ ID NO: 457634 - DNA, 15 bp, Homo sapiens
acccaaacatccccc

SEQ ID NO: 457635 - DNA, 15 bp, Homo sapiens
tacccaaacatcccc

SEQ ID NO: 457636 - DNA, 15 bp, Homo sapiens
ctacccaaacatccc

SEQ ID NO: 457637 - DNA, 15 bp, Homo sapiens
actacccaaacatcc

SEQ ID NO: 457638 - DNA, 15 bp, Homo sapiens
aactacccaaacatc

SEQ ID NO: 457639 - DNA, 15 bp, Homo sapiens
aaactacccaaacat

SEQ ID NO: 457640 - DNA, 15 bp, Homo sapiens
aaaactacccaaaca

SEQ ID NO: 457641 - DNA, 15 bp, Homo sapiens
aaaaactacccaaac

SEQ ID NO: 457642 - DNA, 15 bp, Homo sapiens
caaaaactacccaaa

SEQ ID NO: 457643 - DNA, 15 bp, Homo sapiens
acaaaaactacccaa

SEQ ID NO: 457644 - DNA, 15 bp, Homo sapiens
tacaaaaactaccca

SEQ ID NO: 457645 - DNA, 15 bp, Homo sapiens
ctacaaaaactaccc

SEQ ID NO: 457646 - DNA, 15 bp, Homo sapiens
tctacaaaaactacc

SEQ ID NO: 457647 - DNA, 15 bp, Homo sapiens
ttctacaaaaactac

SEQ ID NO: 457648 - DNA, 15 bp, Homo sapiens
cttctacaaaaacta

SEQ ID NO: 457649 - DNA, 15 bp, Homo sapiens
gcttctacaaaaact

SEQ ID NO: 457650 - DNA, 15 bp, Homo sapiens
ggcttctacaaaaac

SEQ ID NO: 457651 - DNA, 15 bp, Homo sapiens
tggcttctacaaaaa

SEQ ID NO: 457652 - DNA, 15 bp, Homo sapiens
atggcttctacaaaa

SEQ ID NO: 457653 - DNA, 15 bp, Homo sapiens
aatggcttctacaaa

SEQ ID NO: 457654 - DNA, 15 bp, Homo sapiens
aaatggcttctacaa

SEQ ID NO: 457655 - DNA, 15 bp, Homo sapiens
gaaatggcttctaca

SEQ ID NO: 457656 - DNA, 15 bp, Homo sapiens
agaaatggcttctac

SEQ ID NO: 457657 - DNA, 15 bp, Homo sapiens
cagaaatggcttcta

SEQ ID NO: 457658 - DNA, 15 bp, Homo sapiens
tcagaaatggcttct

SEQ ID NO: 457659 - DNA, 15 bp, Homo sapiens
ttcagaaatggcttc

SEQ ID NO: 457660 - DNA, 15 bp, Homo sapiens
tttcagaaatggctt

SEQ ID NO: 457661 - DNA, 15 bp, Homo sapiens
ttttcagaaatggct

SEQ ID NO: 457662 - DNA, 15 bp, Homo sapiens
gttttcagaaatggc

SEQ ID NO: 457663 - DNA, 15 bp, Homo sapiens
agttttcagaaatgg

SEQ ID NO: 457664 - DNA, 15 bp, Homo sapiens
cagttttcagaaatg

SEQ ID NO: 457665 - DNA, 15 bp, Homo sapiens
tcagttttcagaaat

SEQ ID NO: 457666 - DNA, 15 bp, Homo sapiens
atcagttttcagaaa

SEQ ID NO: 457667 - DNA, 15 bp, Homo sapiens
aatcagttttcagaa

SEQ ID NO: 457668 - DNA, 15 bp, Homo sapiens
aaatcagttttcaga

SEQ ID NO: 457669 - DNA, 15 bp, Homo sapiens
caaatcagttttcag

SEQ ID NO: 457670 - DNA, 15 bp, Homo sapiens
ccaaatcagttttca

SEQ ID NO: 457671 - DNA, 15 bp, Homo sapiens
tccaaatcagttttc

SEQ ID NO: 457672 - DNA, 15 bp, Homo sapiens
atccaaatcagtttt

SEQ ID NO: 457673 - DNA, 15 bp, Homo sapiens
aatccaaatcagttt

SEQ ID NO: 457674 - DNA, 15 bp, Homo sapiens
taatccaaatcagtt

SEQ ID NO: 457675 - DNA, 15 bp, Homo sapiens
ctaatccaaatcagt

SEQ ID NO: 457676 - DNA, 15 bp, Homo sapiens
actaatccaaatcag

SEQ ID NO: 457677 - DNA, 15 bp, Homo sapiens
cactaatccaaatca

SEQ ID NO: 457678 - DNA, 15 bp, Homo sapiens
tcactaatccaaatc

SEQ ID NO: 457679 - DNA, 15 bp, Homo sapiens
ttcactaatccaaat

SEQ ID NO: 457680 - DNA, 15 bp, Homo sapiens
cttcactaatccaaa

SEQ ID NO: 457681 - DNA, 15 bp, Homo sapiens
ccttcactaatccaa

SEQ ID NO: 457682 - DNA, 15 bp, Homo sapiens
accttcactaatcca

SEQ ID NO: 457683 - DNA, 15 bp, Homo sapiens
taccttcactaatcc

SEQ ID NO: 457684 - DNA, 15 bp, Homo sapiens
ttaccttcactaatc

SEQ ID NO: 457685 - DNA, 15 bp, Homo sapiens
cttaccttcactaat

SEQ ID NO: 457686 - DNA, 15 bp, Homo sapiens
gcttaccttcactaa

SEQ ID NO: 457687 - DNA, 15 bp, Homo sapiens
ggcttaccttcacta

SEQ ID NO: 457688 - DNA, 15 bp, Homo sapiens
gggcttaccttcact

SEQ ID NO: 457689 - DNA, 15 bp, Homo sapiens
tgggcttaccttcac

SEQ ID NO: 457690 - DNA, 15 bp, Homo sapiens
ttgggcttaccttca

SEQ ID NO: 457691 - DNA, 15 bp, Homo sapiens
attgggcttaccttc

SEQ ID NO: 457692 - DNA, 15 bp, Homo sapiens
aattgggcttacctt

SEQ ID NO: 457693 - DNA, 15 bp, Homo sapiens
aaattgggcttacct

SEQ ID NO: 457694 - DNA, 15 bp, Homo sapiens
taaattgggcttacc

SEQ ID NO: 457695 - DNA, 15 bp, Homo sapiens
ctaaattgggcttac

SEQ ID NO: 457696 - DNA, 15 bp, Homo sapiens
cctaaattgggctta

SEQ ID NO: 457697 - DNA, 15 bp, Homo sapiens
tcctaaattgggctt

SEQ ID NO: 457698 - DNA, 15 bp, Homo sapiens
ttcctaaattgggct

SEQ ID NO: 457699 - DNA, 15 bp, Homo sapiens
tttcctaaattgggc

SEQ ID NO: 457700 - DNA, 15 bp, Homo sapiens
ttttcctaaattggg

SEQ ID NO: 457701 - DNA, 15 bp, Homo sapiens
gttttcctaaattgg

SEQ ID NO: 457702 - DNA, 15 bp, Homo sapiens
ggttttcctaaattg

SEQ ID NO: 457703 - DNA, 15 bp, Homo sapiens
gggttttcctaaatt

SEQ ID NO: 457704 - DNA, 15 bp, Homo sapiens
agggttttcctaaat

SEQ ID NO: 457705 - DNA, 15 bp, Homo sapiens
cagggttttcctaaa

SEQ ID NO: 457706 - DNA, 15 bp, Homo sapiens
gcagggttttcctaa

SEQ ID NO: 457707 - DNA, 15 bp, Homo sapiens
ggcagggttttccta

SEQ ID NO: 457708 - DNA, 15 bp, Homo sapiens
gggcagggttttcct

SEQ ID NO: 457709 - DNA, 15 bp, Homo sapiens
tgggcagggttttcc

SEQ ID NO: 457710 - DNA, 15 bp, Homo sapiens
ctgggcagggttttc

SEQ ID NO: 457711 - DNA, 15 bp, Homo sapiens
actgggcagggtttt

SEQ ID NO: 457712 - DNA, 15 bp, Homo sapiens
gactgggcagggttt

SEQ ID NO: 457713 - DNA, 15 bp, Homo sapiens
agactgggcagggtt

SEQ ID NO: 457714 - DNA, 15 bp, Homo sapiens
cagactgggcagggt

SEQ ID NO: 457715 - DNA, 15 bp, Homo sapiens
ccagactgggcaggg

SEQ ID NO: 457716 - DNA, 15 bp, Homo sapiens
accagactgggcagg

SEQ ID NO: 457717 - DNA, 15 bp, Homo sapiens
caccagactgggcag

SEQ ID NO: 457718 - DNA, 15 bp, Homo sapiens
acaccagactgggca

SEQ ID NO: 457719 - DNA, 15 bp, Homo sapiens
gacaccagactgggc

SEQ ID NO: 457720 - DNA, 15 bp, Homo sapiens
tgacaccagactggg

SEQ ID NO: 457721 - DNA, 15 bp, Homo sapiens
ctgacaccagactgg

SEQ ID NO: 457722 - DNA, 15 bp, Homo sapiens
gctgacaccagactg

SEQ ID NO: 457723 - DNA, 15 bp, Homo sapiens
ggctgacaccagact

SEQ ID NO: 457724 - DNA, 15 bp, Homo sapiens
tggctgacaccagac

SEQ ID NO: 457725 - DNA, 15 bp, Homo sapiens
gtggctgacaccaga

SEQ ID NO: 457726 - DNA, 15 bp, Homo sapiens
ggtggctgacaccag

SEQ ID NO: 457727 - DNA, 15 bp, Homo sapiens
aggtggctgacacca

SEQ ID NO: 457728 - DNA, 15 bp, Homo sapiens
caggtggctgacacc

SEQ ID NO: 457729 - DNA, 15 bp, Homo sapiens
acaggtggctgacac

SEQ ID NO: 457730 - DNA, 15 bp, Homo sapiens
aacaggtggctgaca

SEQ ID NO: 457731 - DNA, 15 bp, Homo sapiens
aaacaggtggctgac

SEQ ID NO: 457732 - DNA, 15 bp, Homo sapiens
gaaacaggtggctga

SEQ ID NO: 457733 - DNA, 15 bp, Homo sapiens
ggaaacaggtggctg

SEQ ID NO: 457734 - DNA, 15 bp, Homo sapiens
gggaaacaggtggct

SEQ ID NO: 457735 - DNA, 15 bp, Homo sapiens
cgggaaacaggtggc

SEQ ID NO: 457736 - DNA, 15 bp, Homo sapiens
gcgggaaacaggtgg

SEQ ID NO: 457737 - DNA, 15 bp, Homo sapiens
agcgggaaacaggtg

SEQ ID NO: 457738 - DNA, 15 bp, Homo sapiens
aagcgggaaacaggt

SEQ ID NO: 457739 - DNA, 15 bp, Homo sapiens
aaagcgggaaacagg

SEQ ID NO: 457740 - DNA, 15 bp, Homo sapiens
caaagcgggaaacag

SEQ ID NO: 457741 - DNA, 15 bp, Homo sapiens
acaaagcgggaaaca

SEQ ID NO: 457742 - DNA, 15 bp, Homo sapiens
aacaaagcgggaaac

SEQ ID NO: 457743 - DNA, 15 bp, Homo sapiens
aaacaaagcgggaaa

SEQ ID NO: 457744 - DNA, 15 bp, Homo sapiens
caaacaaagcgggaa

SEQ ID NO: 457745 - DNA, 15 bp, Homo sapiens
tcaaacaaagcggga

SEQ ID NO: 457746 - DNA, 15 bp, Homo sapiens
atcaaacaaagcggg

SEQ ID NO: 457747 - DNA, 15 bp, Homo sapiens
aatcaaacaaagcgg

SEQ ID NO: 457748 - DNA, 15 bp, Homo sapiens
caatcaaacaaagcg

SEQ ID NO: 457749 - DNA, 15 bp, Homo sapiens
tcaatcaaacaaagc

SEQ ID NO: 457750 - DNA, 15 bp, Homo sapiens
atcaatcaaacaaag

SEQ ID NO: 457751 - DNA, 15 bp, Homo sapiens
aatcaatcaaacaaa

SEQ ID NO: 457752 - DNA, 15 bp, Homo sapiens
aaatcaatcaaacaa

SEQ ID NO: 457753 - DNA, 15 bp, Homo sapiens
caaatcaatcaaaca

SEQ ID NO: 457754 - DNA, 15 bp, Homo sapiens
tcaaatcaatcaaac

SEQ ID NO: 457755 - DNA, 15 bp, Homo sapiens
atcaaatcaatcaaa

SEQ ID NO: 457756 - DNA, 15 bp, Homo sapiens
aatcaaatcaatcaa

SEQ ID NO: 457757 - DNA, 15 bp, Homo sapiens
taatcaaatcaatca

SEQ ID NO: 457758 - DNA, 15 bp, Homo sapiens
ctaatcaaatcaatc

SEQ ID NO: 457759 - DNA, 15 bp, Homo sapiens
actaatcaaatcaat

SEQ ID NO: 457760 - DNA, 15 bp, Homo sapiens
aactaatcaaatcaa

SEQ ID NO: 457761 - DNA, 15 bp, Homo sapiens
aaactaatcaaatca

SEQ ID NO: 457762 - DNA, 15 bp, Homo sapiens
caaactaatcaaatc

SEQ ID NO: 457763 - DNA, 15 bp, Homo sapiens
acaaactaatcaaat

SEQ ID NO: 457764 - DNA, 15 bp, Homo sapiens
cacaaactaatcaaa

SEQ ID NO: 457765 - DNA, 15 bp, Homo sapiens
ccacaaactaatcaa

SEQ ID NO: 457766 - DNA, 15 bp, Homo sapiens
accacaaactaatca

SEQ ID NO: 457767 - DNA, 15 bp, Homo sapiens
taccacaaactaatc

SEQ ID NO: 457768 - DNA, 15 bp, Homo sapiens
ataccacaaactaat

SEQ ID NO: 457769 - DNA, 15 bp, Homo sapiens
aataccacaaactaa

SEQ ID NO: 457770 - DNA, 15 bp, Homo sapiens
gaataccacaaacta

SEQ ID NO: 457771 - DNA, 15 bp, Homo sapiens
agaataccacaaact

SEQ ID NO: 457772 - DNA, 15 bp, Homo sapiens
cagaataccacaaac

SEQ ID NO: 457773 - DNA, 15 bp, Homo sapiens
tcagaataccacaaa

SEQ ID NO: 457774 - DNA, 15 bp, Homo sapiens
gtcagaataccacaa

SEQ ID NO: 457775 - DNA, 15 bp, Homo sapiens
ggtcagaataccaca

SEQ ID NO: 457776 - DNA, 15 bp, Homo sapiens
aggtcagaataccac

SEQ ID NO: 457777 - DNA, 15 bp, Homo sapiens
gaggtcagaatacca

SEQ ID NO: 457778 - DNA, 15 bp, Homo sapiens
agaggtcagaatacc

SEQ ID NO: 457779 - DNA, 15 bp, Homo sapiens
gagaggtcagaatac

SEQ ID NO: 457780 - DNA, 15 bp, Homo sapiens
tgagaggtcagaata

SEQ ID NO: 457781 - DNA, 15 bp, Homo sapiens
atgagaggtcagaat

SEQ ID NO: 457782 - DNA, 15 bp, Homo sapiens
aatgagaggtcagaa

SEQ ID NO: 457783 - DNA, 15 bp, Homo sapiens
aaatgagaggtcaga

SEQ ID NO: 457784 - DNA, 15 bp, Homo sapiens
aaaatgagaggtcag

SEQ ID NO: 457785 - DNA, 15 bp, Homo sapiens
aaaaatgagaggtca

SEQ ID NO: 457786 - DNA, 15 bp, Homo sapiens
taaaaatgagaggtc

SEQ ID NO: 457787 - DNA, 15 bp, Homo sapiens
ataaaaatgagaggt

SEQ ID NO: 457788 - DNA, 15 bp, Homo sapiens
aataaaaatgagagg

SEQ ID NO: 457789 - DNA, 15 bp, Homo sapiens
taataaaaatgagag

SEQ ID NO: 457790 - DNA, 15 bp, Homo sapiens
gtaataaaaatgaga

SEQ ID NO: 457791 - DNA, 15 bp, Homo sapiens
tgtaataaaaatgag

SEQ ID NO: 457792 - DNA, 15 bp, Homo sapiens
ttgtaataaaaatga

SEQ ID NO: 457793 - DNA, 15 bp, Homo sapiens
cttgtaataaaaatg

SEQ ID NO: 457794 - DNA, 15 bp, Homo sapiens
tcttgtaataaaaat

SEQ ID NO: 457795 - DNA, 15 bp, Homo sapiens
ctcttgtaataaaaa

SEQ ID NO: 457796 - DNA, 15 bp, Homo sapiens
actcttgtaataaaa

SEQ ID NO: 457797 - DNA, 15 bp, Homo sapiens
aactcttgtaataaa

SEQ ID NO: 457798 - DNA, 15 bp, Homo sapiens
caactcttgtaataa

SEQ ID NO: 457799 - DNA, 15 bp, Homo sapiens
ccaactcttgtaata

SEQ ID NO: 457800 - DNA, 15 bp, Homo sapiens
tccaactcttgtaat

SEQ ID NO: 457801 - DNA, 15 bp, Homo sapiens
ttccaactcttgtaa

SEQ ID NO: 457802 - DNA, 15 bp, Homo sapiens
cttccaactcttgta

SEQ ID NO: 457803 - DNA, 15 bp, Homo sapiens
tcttccaactcttgt

SEQ ID NO: 457804 - DNA, 15 bp, Homo sapiens
atcttccaactcttg

SEQ ID NO: 457805 - DNA, 15 bp, Homo sapiens
aatcttccaactctt

SEQ ID NO: 457806 - DNA, 15 bp, Homo sapiens
aaatcttccaactct

SEQ ID NO: 457807 - DNA, 15 bp, Homo sapiens
caaatcttccaactc

SEQ ID NO: 457808 - DNA, 15 bp, Homo sapiens
tcaaatcttccaact

SEQ ID NO: 457809 - DNA, 15 bp, Homo sapiens
ctcaaatcttccaac

SEQ ID NO: 457810 - DNA, 15 bp, Homo sapiens
actcaaatcttccaa

SEQ ID NO: 457811 - DNA, 15 bp, Homo sapiens
gactcaaatcttcca

SEQ ID NO: 457812 - DNA, 15 bp, Homo sapiens
agactcaaatcttcc

SEQ ID NO: 457813 - DNA, 15 bp, Homo sapiens
cagactcaaatcttc

SEQ ID NO: 457814 - DNA, 15 bp, Homo sapiens
tcagactcaaatctt

SEQ ID NO: 457815 - DNA, 15 bp, Homo sapiens
ttcagactcaaatct

SEQ ID NO: 457816 - DNA, 15 bp, Homo sapiens
gttcagactcaaatc

SEQ ID NO: 457817 - DNA, 15 bp, Homo sapiens
agttcagactcaaat

SEQ ID NO: 457818 - DNA, 15 bp, Homo sapiens
aagttcagactcaaa

SEQ ID NO: 457819 - DNA, 15 bp, Homo sapiens
caagttcagactcaa

SEQ ID NO: 457820 - DNA, 15 bp, Homo sapiens
tcaagttcagactca

SEQ ID NO: 457821 - DNA, 15 bp, Homo sapiens
ctcaagttcagactc

SEQ ID NO: 457822 - DNA, 15 bp, Homo sapiens
gctcaagttcagact

SEQ ID NO: 457823 - DNA, 15 bp, Homo sapiens
tgctcaagttcagac

SEQ ID NO: 457824 - DNA, 15 bp, Homo sapiens
gtgctcaagttcaga

SEQ ID NO: 457825 - DNA, 15 bp, Homo sapiens
ggtgctcaagttcag

SEQ ID NO: 457826 - DNA, 15 bp, Homo sapiens
aggtgctcaagttca

SEQ ID NO: 457827 - DNA, 15 bp, Homo sapiens
caggtgctcaagttc

SEQ ID NO: 457828 - DNA, 15 bp, Homo sapiens
gcaggtgctcaagtt

SEQ ID NO: 457829 - DNA, 15 bp, Homo sapiens
agcaggtgctcaagt

SEQ ID NO: 457830 - DNA, 15 bp, Homo sapiens
aagcaggtgctcaag

SEQ ID NO: 457831 - DNA, 15 bp, Homo sapiens
gaagcaggtgctcaa

SEQ ID NO: 457832 - DNA, 15 bp, Homo sapiens
cgaagcaggtgctca

SEQ ID NO: 457833 - DNA, 15 bp, Homo sapiens
ccgaagcaggtgctc

SEQ ID NO: 457834 - DNA, 15 bp, Homo sapiens
accgaagcaggtgct

SEQ ID NO: 457835 - DNA, 15 bp, Homo sapiens
caccgaagcaggtgc

SEQ ID NO: 457836 - DNA, 15 bp, Homo sapiens
tcaccgaagcaggtg

SEQ ID NO: 457837 - DNA, 15 bp, Homo sapiens
ttcaccgaagcaggt

SEQ ID NO: 457838 - DNA, 15 bp, Homo sapiens
tttcaccgaagcagg

SEQ ID NO: 457839 - DNA, 15 bp, Homo sapiens
ctttcaccgaagcag

SEQ ID NO: 457840 - DNA, 15 bp, Homo sapiens
gctttcaccgaagca

SEQ ID NO: 457841 - DNA, 15 bp, Homo sapiens
agctttcaccgaagc

SEQ ID NO: 457842 - DNA, 15 bp, Homo sapiens
aagctttcaccgaag

SEQ ID NO: 457843 - DNA, 15 bp, Homo sapiens
gaagctttcaccgaa

SEQ ID NO: 457844 - DNA, 15 bp, Homo sapiens
ggaagctttcaccga

SEQ ID NO: 457845 - DNA, 15 bp, Homo sapiens
aggaagctttcaccg

SEQ ID NO: 457846 - DNA, 15 bp, Homo sapiens
taggaagctttcacc

SEQ ID NO: 457847 - DNA, 15 bp, Homo sapiens
ttaggaagctttcac

SEQ ID NO: 457848 - DNA, 15 bp, Homo sapiens
tttaggaagctttca

SEQ ID NO: 457849 - DNA, 15 bp, Homo sapiens
ttttaggaagctttc

SEQ ID NO: 457850 - DNA, 15 bp, Homo sapiens
attttaggaagcttt

SEQ ID NO: 457851 - DNA, 15 bp, Homo sapiens
cattttaggaagctt

SEQ ID NO: 457852 - DNA, 15 bp, Homo sapiens
gcattttaggaagct

SEQ ID NO: 457853 - DNA, 15 bp, Homo sapiens
tgcattttaggaagc

SEQ ID NO: 457854 - DNA, 15 bp, Homo sapiens
atgcattttaggaag

SEQ ID NO: 457855 - DNA, 15 bp, Homo sapiens
catgcattttaggaa

SEQ ID NO: 457856 - DNA, 15 bp, Homo sapiens
acatgcattttagga

SEQ ID NO: 457857 - DNA, 15 bp, Homo sapiens
aacatgcattttagg

SEQ ID NO: 457858 - DNA, 15 bp, Homo sapiens
aaacatgcattttag

SEQ ID NO: 457859 - DNA, 15 bp, Homo sapiens
aaaacatgcatttta

SEQ ID NO: 457860 - DNA, 15 bp, Homo sapiens
aaaaacatgcatttt

SEQ ID NO: 457861 - DNA, 15 bp, Homo sapiens
aaaaaacatgcattt

SEQ ID NO: 457862 - DNA, 15 bp, Homo sapiens
gaaaaaacatgcatt

SEQ ID NO: 457863 - DNA, 15 bp, Homo sapiens
tgaaaaaacatgcat

SEQ ID NO: 457864 - DNA, 15 bp, Homo sapiens
gtgaaaaaacatgca

SEQ ID NO: 457865 - DNA, 15 bp, Homo sapiens
tgtgaaaaaacatgc

SEQ ID NO: 457866 - DNA, 15 bp, Homo sapiens
atgtgaaaaaacatg

SEQ ID NO: 457867 - DNA, 15 bp, Homo sapiens
aatgtgaaaaaacat

SEQ ID NO: 457868 - DNA, 15 bp, Homo sapiens
aaatgtgaaaaaaca

SEQ ID NO: 457869 - DNA, 15 bp, Homo sapiens
aaaatgtgaaaaaac

SEQ ID NO: 457870 - DNA, 15 bp, Homo sapiens
aaaaatgtgaaaaaa

SEQ ID NO: 457871 - DNA, 15 bp, Homo sapiens
aaaaaatgtgaaaaa

SEQ ID NO: 457872 - DNA, 15 bp, Homo sapiens
gaaaaaatgtgaaaa

SEQ ID NO: 457873 - DNA, 15 bp, Homo sapiens
agaaaaaatgtgaaa

SEQ ID NO: 457874 - DNA, 15 bp, Homo sapiens
gagaaaaaatgtgaa

SEQ ID NO: 457875 - DNA, 15 bp, Homo sapiens
tgagaaaaaatgtga

SEQ ID NO: 457876 - DNA, 15 bp, Homo sapiens
atgagaaaaaatgtg

SEQ ID NO: 457877 - DNA, 15 bp, Homo sapiens
catgagaaaaaatgt

SEQ ID NO: 457878 - DNA, 15 bp, Homo sapiens
acatgagaaaaaatg

SEQ ID NO: 457879 - DNA, 15 bp, Homo sapiens
aacatgagaaaaaat

SEQ ID NO: 457880 - DNA, 15 bp, Homo sapiens
gaacatgagaaaaaa

SEQ ID NO: 457881 - DNA, 15 bp, Homo sapiens
tgaacatgagaaaaa

SEQ ID NO: 457882 - DNA, 15 bp, Homo sapiens
atgaacatgagaaaa

SEQ ID NO: 457883 - DNA, 15 bp, Homo sapiens
aatgaacatgagaaa

SEQ ID NO: 457884 - DNA, 15 bp, Homo sapiens
aaatgaacatgagaa

SEQ ID NO: 457885 - DNA, 15 bp, Homo sapiens
aaaatgaacatgaga

SEQ ID NO: 457886 - DNA, 15 bp, Homo sapiens
caaaatgaacatgag

SEQ ID NO: 457887 - DNA, 15 bp, Homo sapiens
acaaaatgaacatga

SEQ ID NO: 457888 - DNA, 15 bp, Homo sapiens
aacaaaatgaacatg

SEQ ID NO: 457889 - DNA, 15 bp, Homo sapiens
aaacaaaatgaacat

SEQ ID NO: 457890 - DNA, 15 bp, Homo sapiens
aaaacaaaatgaaca

SEQ ID NO: 457891 - DNA, 15 bp, Homo sapiens
caaaacaaaatgaac

SEQ ID NO: 457892 - DNA, 15 bp, Homo sapiens
gcaaaacaaaatgaa

SEQ ID NO: 457893 - DNA, 15 bp, Homo sapiens
agcaaaacaaaatga

SEQ ID NO: 457894 - DNA, 15 bp, Homo sapiens
aagcaaaacaaaatg

SEQ ID NO: 457895 - DNA, 15 bp, Homo sapiens
aaagcaaaacaaaat

SEQ ID NO: 457896 - DNA, 15 bp, Homo sapiens
aaaagcaaaacaaaa

SEQ ID NO: 457897 - DNA, 15 bp, Homo sapiens
aaaaagcaaaacaaa

SEQ ID NO: 457898 - DNA, 15 bp, Homo sapiens
taaaaagcaaaacaa

SEQ ID NO: 457899 - DNA, 15 bp, Homo sapiens
ctaaaaagcaaaaca

SEQ ID NO: 457900 - DNA, 15 bp, Homo sapiens
gctaaaaagcaaaac

SEQ ID NO: 457901 - DNA, 15 bp, Homo sapiens
tgctaaaaagcaaaa

SEQ ID NO: 457902 - DNA, 15 bp, Homo sapiens
ttgctaaaaagcaaa

SEQ ID NO: 457903 - DNA, 15 bp, Homo sapiens
tttgctaaaaagcaa

SEQ ID NO: 457904 - DNA, 15 bp, Homo sapiens
gtttgctaaaaagca

SEQ ID NO: 457905 - DNA, 15 bp, Homo sapiens
tgtttgctaaaaagc

SEQ ID NO: 457906 - DNA, 15 bp, Homo sapiens
gtgtttgctaaaaag

SEQ ID NO: 457907 - DNA, 15 bp, Homo sapiens
agtgtttgctaaaaa

SEQ ID NO: 457908 - DNA, 15 bp, Homo sapiens
aagtgtttgctaaaa

SEQ ID NO: 457909 - DNA, 15 bp, Homo sapiens
aaagtgtttgctaaa

SEQ ID NO: 457910 - DNA, 15 bp, Homo sapiens
aaaagtgtttgctaa

SEQ ID NO: 457911 - DNA, 15 bp, Homo sapiens
aaaaagtgtttgcta

SEQ ID NO: 457912 - DNA, 15 bp, Homo sapiens
gaaaaagtgtttgct

SEQ ID NO: 457913 - DNA, 15 bp, Homo sapiens
agaaaaagtgtttgc

SEQ ID NO: 457914 - DNA, 15 bp, Homo sapiens
cagaaaaagtgtttg

SEQ ID NO: 457915 - DNA, 15 bp, Homo sapiens
tcagaaaaagtgttt

SEQ ID NO: 457916 - DNA, 15 bp, Homo sapiens
gtcagaaaaagtgtt

SEQ ID NO: 457917 - DNA, 15 bp, Homo sapiens
tgtcagaaaaagtgt

SEQ ID NO: 457918 - DNA, 15 bp, Homo sapiens
ctgtcagaaaaagtg

SEQ ID NO: 457919 - DNA, 15 bp, Homo sapiens
tctgtcagaaaaagt

SEQ ID NO: 457920 - DNA, 15 bp, Homo sapiens
ttctgtcagaaaaag

SEQ ID NO: 457921 - DNA, 15 bp, Homo sapiens
attctgtcagaaaaa

SEQ ID NO: 457922 - DNA, 15 bp, Homo sapiens
gattctgtcagaaaa

SEQ ID NO: 457923 - DNA, 15 bp, Homo sapiens
agattctgtcagaaa

SEQ ID NO: 457924 - DNA, 15 bp, Homo sapiens
tagattctgtcagaa

SEQ ID NO: 457925 - DNA, 15 bp, Homo sapiens
ttagattctgtcaga

SEQ ID NO: 457926 - DNA, 15 bp, Homo sapiens
tttagattctgtcag

SEQ ID NO: 457927 - DNA, 15 bp, Homo sapiens
ttttagattctgtca

SEQ ID NO: 457928 - DNA, 15 bp, Homo sapiens
cttttagattctgtc

SEQ ID NO: 457929 - DNA, 15 bp, Homo sapiens
gcttttagattctgt

SEQ ID NO: 457930 - DNA, 15 bp, Homo sapiens
tgcttttagattctg

SEQ ID NO: 457931 - DNA, 15 bp, Homo sapiens
atgcttttagattct

SEQ ID NO: 457932 - DNA, 15 bp, Homo sapiens
aatgcttttagattc

SEQ ID NO: 457933 - DNA, 15 bp, Homo sapiens
taatgcttttagatt

SEQ ID NO: 457934 - DNA, 15 bp, Homo sapiens
ctaatgcttttagat

SEQ ID NO: 457935 - DNA, 15 bp, Homo sapiens
tctaatgcttttaga

SEQ ID NO: 457936 - DNA, 15 bp, Homo sapiens
gtctaatgcttttag

SEQ ID NO: 457937 - DNA, 15 bp, Homo sapiens
agtctaatgctttta

SEQ ID NO: 457938 - DNA, 15 bp, Homo sapiens
aagtctaatgctttt

SEQ ID NO: 457939 - DNA, 15 bp, Homo sapiens
aaagtctaatgcttt

SEQ ID NO: 457940 - DNA, 15 bp, Homo sapiens
aaaagtctaatgctt

SEQ ID NO: 457941 - DNA, 15 bp, Homo sapiens
gaaaagtctaatgct

SEQ ID NO: 457942 - DNA, 15 bp, Homo sapiens
agaaaagtctaatgc

SEQ ID NO: 457943 - DNA, 15 bp, Homo sapiens
aagaaaagtctaatg

SEQ ID NO: 457944 - DNA, 15 bp, Homo sapiens
caagaaaagtctaat

SEQ ID NO: 457945 - DNA, 15 bp, Homo sapiens
acaagaaaagtctaa

SEQ ID NO: 457946 - DNA, 15 bp, Homo sapiens
aacaagaaaagtcta

SEQ ID NO: 457947 - DNA, 15 bp, Homo sapiens
aaacaagaaaagtct

SEQ ID NO: 457948 - DNA, 15 bp, Homo sapiens
aaaacaagaaaagtc

SEQ ID NO: 457949 - DNA, 15 bp, Homo sapiens
gaaaacaagaaaagt

SEQ ID NO: 457950 - DNA, 15 bp, Homo sapiens
ggaaaacaagaaaag

SEQ ID NO: 457951 - DNA, 15 bp, Homo sapiens
gggaaaacaagaaaa

SEQ ID NO: 457952 - DNA, 15 bp, Homo sapiens
ggggaaaacaagaaa

SEQ ID NO: 457953 - DNA, 15 bp, Homo sapiens
aggggaaaacaagaa

SEQ ID NO: 457954 - DNA, 15 bp, Homo sapiens
aaggggaaaacaaga

SEQ ID NO: 457955 - DNA, 15 bp, Homo sapiens
gaaggggaaaacaag

SEQ ID NO: 457956 - DNA, 15 bp, Homo sapiens
agaaggggaaaacaa

SEQ ID NO: 457957 - DNA, 15 bp, Homo sapiens
gagaaggggaaaaca

SEQ ID NO: 457958 - DNA, 15 bp, Homo sapiens
agagaaggggaaaac

SEQ ID NO: 457959 - DNA, 15 bp, Homo sapiens
gagagaaggggaaaa

SEQ ID NO: 457960 - DNA, 15 bp, Homo sapiens
ggagagaaggggaaa

SEQ ID NO: 457961 - DNA, 15 bp, Homo sapiens
gggagagaaggggaa

SEQ ID NO: 457962 - DNA, 15 bp, Homo sapiens
ggggagagaagggga

SEQ ID NO: 457963 - DNA, 15 bp, Homo sapiens
tggggagagaagggg

SEQ ID NO: 457964 - DNA, 15 bp, Homo sapiens
gtggggagagaaggg

SEQ ID NO: 457965 - DNA, 15 bp, Homo sapiens
tgtggggagagaagg

SEQ ID NO: 457966 - DNA, 15 bp, Homo sapiens
ttgtggggagagaag

SEQ ID NO: 457967 - DNA, 15 bp, Homo sapiens
attgtggggagagaa

SEQ ID NO: 457968 - DNA, 15 bp, Homo sapiens
cattgtggggagaga

SEQ ID NO: 457969 - DNA, 15 bp, Homo sapiens
acattgtggggagag

SEQ ID NO: 457970 - DNA, 15 bp, Homo sapiens
tacattgtggggaga

SEQ ID NO: 457971 - DNA, 15 bp, Homo sapiens
ttacattgtggggag

SEQ ID NO: 457972 - DNA, 15 bp, Homo sapiens
attacattgtgggga

SEQ ID NO: 457973 - DNA, 15 bp, Homo sapiens
gattacattgtgggg

SEQ ID NO: 457974 - DNA, 15 bp, Homo sapiens
agattacattgtggg

SEQ ID NO: 457975 - DNA, 15 bp, Homo sapiens
aagattacattgtgg

SEQ ID NO: 457976 - DNA, 15 bp, Homo sapiens
caagattacattgtg

SEQ ID NO: 457977 - DNA, 15 bp, Homo sapiens
tcaagattacattgt

SEQ ID NO: 457978 - DNA, 15 bp, Homo sapiens
ttcaagattacattg

SEQ ID NO: 457979 - DNA, 15 bp, Homo sapiens
tttcaagattacatt

SEQ ID NO: 457980 - DNA, 15 bp, Homo sapiens
ttttcaagattacat

SEQ ID NO: 457981 - DNA, 15 bp, Homo sapiens
gttttcaagattaca

SEQ ID NO: 457982 - DNA, 15 bp, Homo sapiens
ggttttcaagattac

SEQ ID NO: 457983 - DNA, 15 bp, Homo sapiens
gggttttcaagatta

SEQ ID NO: 457984 - DNA, 15 bp, Homo sapiens
tgggttttcaagatt

SEQ ID NO: 457985 - DNA, 15 bp, Homo sapiens
ttgggttttcaagat

SEQ ID NO: 457986 - DNA, 15 bp, Homo sapiens
tttgggttttcaaga

SEQ ID NO: 457987 - DNA, 15 bp, Homo sapiens
atttgggttttcaag

SEQ ID NO: 457988 - DNA, 15 bp, Homo sapiens
catttgggttttcaa

SEQ ID NO: 457989 - DNA, 15 bp, Homo sapiens
acatttgggttttca

SEQ ID NO: 457990 - DNA, 15 bp, Homo sapiens
aacatttgggttttc

SEQ ID NO: 457991 - DNA, 15 bp, Homo sapiens
taacatttgggtttt

SEQ ID NO: 457992 - DNA, 15 bp, Homo sapiens
ctaacatttgggttt

SEQ ID NO: 457993 - DNA, 15 bp, Homo sapiens
gctaacatttgggtt

SEQ ID NO: 457994 - DNA, 15 bp, Homo sapiens
agctaacatttgggt

SEQ ID NO: 457995 - DNA, 15 bp, Homo sapiens
cagctaacatttggg

SEQ ID NO: 457996 - DNA, 15 bp, Homo sapiens
acagctaacatttgg

SEQ ID NO: 457997 - DNA, 15 bp, Homo sapiens
cacagctaacatttg

SEQ ID NO: 457998 - DNA, 15 bp, Homo sapiens
acacagctaacattt

SEQ ID NO: 457999 - DNA, 15 bp, Homo sapiens
tacacagctaacatt

SEQ ID NO: 458000 - DNA, 15 bp, Homo sapiens
ttacacagctaacat

SEQ ID NO: 458001 - DNA, 15 bp, Homo sapiens
tttacacagctaaca

SEQ ID NO: 458002 - DNA, 15 bp, Homo sapiens
atttacacagctaac

SEQ ID NO: 458003 - DNA, 15 bp, Homo sapiens
aatttacacagctaa

SEQ ID NO: 458004 - DNA, 15 bp, Homo sapiens
taatttacacagcta

SEQ ID NO: 458005 - DNA, 15 bp, Homo sapiens
gtaatttacacagct

SEQ ID NO: 458006 - DNA, 15 bp, Homo sapiens
ggtaatttacacagc

SEQ ID NO: 458007 - DNA, 15 bp, Homo sapiens
aggtaatttacacag

SEQ ID NO: 458008 - DNA, 15 bp, Homo sapiens
gaggtaatttacaca

SEQ ID NO: 458009 - DNA, 15 bp, Homo sapiens
agaggtaatttacac

SEQ ID NO: 458010 - DNA, 15 bp, Homo sapiens
gagaggtaatttaca

SEQ ID NO: 458011 - DNA, 15 bp, Homo sapiens
ggagaggtaatttac

SEQ ID NO: 458012 - DNA, 15 bp, Homo sapiens
gggagaggtaattta

SEQ ID NO: 458013 - DNA, 15 bp, Homo sapiens
cgggagaggtaattt

SEQ ID NO: 458014 - DNA, 15 bp, Homo sapiens
acgggagaggtaatt

SEQ ID NO: 458015 - DNA, 15 bp, Homo sapiens
tacgggagaggtaat

SEQ ID NO: 458016 - DNA, 15 bp, Homo sapiens
ttacgggagaggtaa

SEQ ID NO: 458017 - DNA, 15 bp, Homo sapiens
tttacgggagaggta

SEQ ID NO: 458018 - DNA, 15 bp, Homo sapiens
gtttacgggagaggt

SEQ ID NO: 458019 - DNA, 15 bp, Homo sapiens
ggtttacgggagagg

SEQ ID NO: 458020 - DNA, 15 bp, Homo sapiens
tggtttacgggagag

SEQ ID NO: 458021 - DNA, 15 bp, Homo sapiens
ttggtttacgggaga

SEQ ID NO: 458022 - DNA, 15 bp, Homo sapiens
tttggtttacgggag

SEQ ID NO: 458023 - DNA, 15 bp, Homo sapiens
gtttggtttacggga

SEQ ID NO: 458024 - DNA, 15 bp, Homo sapiens
tgtttggtttacggg

SEQ ID NO: 458025 - DNA, 15 bp, Homo sapiens
ttgtttggtttacgg

SEQ ID NO: 458026 - DNA, 15 bp, Homo sapiens
tttgtttggtttacg

SEQ ID NO: 458027 - DNA, 15 bp, Homo sapiens
ctttgtttggtttac

SEQ ID NO: 458028 - DNA, 15 bp, Homo sapiens
actttgtttggttta

SEQ ID NO: 458029 - DNA, 15 bp, Homo sapiens
cactttgtttggttt

SEQ ID NO: 458030 - DNA, 15 bp, Homo sapiens
gcactttgtttggtt

SEQ ID NO: 458031 - DNA, 15 bp, Homo sapiens
tgcactttgtttggt

SEQ ID NO: 458032 - DNA, 15 bp, Homo sapiens
ttgcactttgtttgg

SEQ ID NO: 458033 - DNA, 15 bp, Homo sapiens
attgcactttgtttg

SEQ ID NO: 458034 - DNA, 15 bp, Homo sapiens
tattgcactttgttt

SEQ ID NO: 458035 - DNA, 15 bp, Homo sapiens
atattgcactttgtt

SEQ ID NO: 458036 - DNA, 15 bp, Homo sapiens
aatattgcactttgt

SEQ ID NO: 458037 - DNA, 15 bp, Homo sapiens
caatattgcactttg

SEQ ID NO: 458038 - DNA, 15 bp, Homo sapiens
gcaatattgcacttt

SEQ ID NO: 458039 - DNA, 15 bp, Homo sapiens
tgcaatattgcactt

SEQ ID NO: 458040 - DNA, 15 bp, Homo sapiens
atgcaatattgcact

SEQ ID NO: 458041 - DNA, 15 bp, Homo sapiens
aatgcaatattgcac

SEQ ID NO: 458042 - DNA, 15 bp, Homo sapiens
caatgcaatattgca

SEQ ID NO: 458043 - DNA, 15 bp, Homo sapiens
tcaatgcaatattgc

SEQ ID NO: 458044 - DNA, 15 bp, Homo sapiens
ctcaatgcaatattg

SEQ ID NO: 458045 - DNA, 15 bp, Homo sapiens
actcaatgcaatatt

SEQ ID NO: 458046 - DNA, 15 bp, Homo sapiens
aactcaatgcaatat

SEQ ID NO: 458047 - DNA, 15 bp, Homo sapiens
taactcaatgcaata

SEQ ID NO: 458048 - DNA, 15 bp, Homo sapiens
ctaactcaatgcaat

SEQ ID NO: 458049 - DNA, 15 bp, Homo sapiens
gctaactcaatgcaa

SEQ ID NO: 458050 - DNA, 15 bp, Homo sapiens
tgctaactcaatgca

SEQ ID NO: 458051 - DNA, 15 bp, Homo sapiens
atgctaactcaatgc

SEQ ID NO: 458052 - DNA, 15 bp, Homo sapiens
aatgctaactcaatg

SEQ ID NO: 458053 - DNA, 15 bp, Homo sapiens
caatgctaactcaat

SEQ ID NO: 458054 - DNA, 15 bp, Homo sapiens
tcaatgctaactcaa

SEQ ID NO: 458055 - DNA, 15 bp, Homo sapiens
ttcaatgctaactca

SEQ ID NO: 458056 - DNA, 15 bp, Homo sapiens
tttcaatgctaactc

SEQ ID NO: 458057 - DNA, 15 bp, Homo sapiens
atttcaatgctaact

SEQ ID NO: 458058 - DNA, 15 bp, Homo sapiens
tatttcaatgctaac

SEQ ID NO: 458059 - DNA, 15 bp, Homo sapiens
ctatttcaatgctaa

SEQ ID NO: 458060 - DNA, 15 bp, Homo sapiens
actatttcaatgcta

SEQ ID NO: 458061 - DNA, 15 bp, Homo sapiens
gactatttcaatgct

SEQ ID NO: 458062 - DNA, 15 bp, Homo sapiens
cgactatttcaatgc

SEQ ID NO: 458063 - DNA, 15 bp, Homo sapiens
ccgactatttcaatg

SEQ ID NO: 458064 - DNA, 15 bp, Homo sapiens
gccgactatttcaat

SEQ ID NO: 458065 - DNA, 15 bp, Homo sapiens
ggccgactatttcaa

SEQ ID NO: 458066 - DNA, 15 bp, Homo sapiens
aggccgactatttca

SEQ ID NO: 458067 - DNA, 15 bp, Homo sapiens
aaggccgactatttc

SEQ ID NO: 458068 - DNA, 15 bp, Homo sapiens
aaaggccgactattt

SEQ ID NO: 458069 - DNA, 15 bp, Homo sapiens
caaaggccgactatt

SEQ ID NO: 458070 - DNA, 15 bp, Homo sapiens
tcaaaggccgactat

SEQ ID NO: 458071 - DNA, 15 bp, Homo sapiens
ttcaaaggccgacta

SEQ ID NO: 458072 - DNA, 15 bp, Homo sapiens
attcaaaggccgact

SEQ ID NO: 458073 - DNA, 15 bp, Homo sapiens
aattcaaaggccgac

SEQ ID NO: 458074 - DNA, 15 bp, Homo sapiens
aaattcaaaggccga

SEQ ID NO: 458075 - DNA, 15 bp, Homo sapiens
aaaattcaaaggccg

SEQ ID NO: 458076 - DNA, 15 bp, Homo sapiens
aaaaattcaaaggcc

SEQ ID NO: 458077 - DNA, 15 bp, Homo sapiens
aaaaaattcaaaggc

SEQ ID NO: 458078 - DNA, 15 bp, Homo sapiens
aaaaaaattcaaagg

SEQ ID NO: 458079 - DNA, 15 bp, Homo sapiens
gaaaaaaattcaaag

SEQ ID NO: 458080 - DNA, 15 bp, Homo sapiens
agaaaaaaattcaaa

SEQ ID NO: 458081 - DNA, 15 bp, Homo sapiens
tagaaaaaaattcaa

SEQ ID NO: 458082 - DNA, 15 bp, Homo sapiens
gtagaaaaaaattca

SEQ ID NO: 458083 - DNA, 15 bp, Homo sapiens
agtagaaaaaaattc

SEQ ID NO: 458084 - DNA, 15 bp, Homo sapiens
aagtagaaaaaaatt

SEQ ID NO: 458085 - DNA, 15 bp, Homo sapiens
caagtagaaaaaaat

SEQ ID NO: 458086 - DNA, 15 bp, Homo sapiens
acaagtagaaaaaaa

SEQ ID NO: 458087 - DNA, 15 bp, Homo sapiens
cacaagtagaaaaaa

SEQ ID NO: 458088 - DNA, 15 bp, Homo sapiens
ccacaagtagaaaaa

SEQ ID NO: 458089 - DNA, 15 bp, Homo sapiens
accacaagtagaaaa

SEQ ID NO: 458090 - DNA, 15 bp, Homo sapiens
aaccacaagtagaaa

SEQ ID NO: 458091 - DNA, 15 bp, Homo sapiens
aaaccacaagtagaa

SEQ ID NO: 458092 - DNA, 15 bp, Homo sapiens
taaaccacaagtaga

SEQ ID NO: 458093 - DNA, 15 bp, Homo sapiens
ctaaaccacaagtag

SEQ ID NO: 458094 - DNA, 15 bp, Homo sapiens
tctaaaccacaagta

SEQ ID NO: 458095 - DNA, 15 bp, Homo sapiens
gtctaaaccacaagt

SEQ ID NO: 458096 - DNA, 15 bp, Homo sapiens
tgtctaaaccacaag

SEQ ID NO: 458097 - DNA, 15 bp, Homo sapiens
atgtctaaaccacaa

SEQ ID NO: 458098 - DNA, 15 bp, Homo sapiens
tatgtctaaaccaca

SEQ ID NO: 458099 - DNA, 15 bp, Homo sapiens
ttatgtctaaaccac

SEQ ID NO: 458100 - DNA, 15 bp, Homo sapiens
attatgtctaaacca

SEQ ID NO: 458101 - DNA, 15 bp, Homo sapiens
tattatgtctaaacc

SEQ ID NO: 458102 - DNA, 15 bp, Homo sapiens
ttattatgtctaaac

SEQ ID NO: 458103 - DNA, 15 bp, Homo sapiens
tttattatgtctaaa

SEQ ID NO: 458104 - DNA, 15 bp, Homo sapiens
atttattatgtctaa

SEQ ID NO: 458105 - DNA, 15 bp, Homo sapiens
tatttattatgtcta

SEQ ID NO: 458106 - DNA, 15 bp, Homo sapiens
atatttattatgtct

SEQ ID NO: 458107 - DNA, 15 bp, Homo sapiens
aatatttattatgtc

SEQ ID NO: 458108 - DNA, 15 bp, Homo sapiens
aaatatttattatgt

SEQ ID NO: 458109 - DNA, 15 bp, Homo sapiens
gaaatatttattatg

SEQ ID NO: 458110 - DNA, 15 bp, Homo sapiens
tgaaatatttattat

SEQ ID NO: 458111 - DNA, 15 bp, Homo sapiens
atgaaatatttatta

SEQ ID NO: 458112 - DNA, 15 bp, Homo sapiens
gatgaaatatttatt

SEQ ID NO: 458113 - DNA, 15 bp, Homo sapiens
agatgaaatatttat

SEQ ID NO: 458114 - DNA, 15 bp, Homo sapiens
gagatgaaatattta

SEQ ID NO: 458115 - DNA, 15 bp, Homo sapiens
tgagatgaaatattt

SEQ ID NO: 458116 - DNA, 15 bp, Homo sapiens
ctgagatgaaatatt

SEQ ID NO: 458117 - DNA, 15 bp, Homo sapiens
tctgagatgaaatat

SEQ ID NO: 458118 - DNA, 15 bp, Homo sapiens
gtctgagatgaaata

SEQ ID NO: 458119 - DNA, 15 bp, Homo sapiens
agtctgagatgaaat

SEQ ID NO: 458120 - DNA, 15 bp, Homo sapiens
cagtctgagatgaaa

SEQ ID NO: 458121 - DNA, 15 bp, Homo sapiens
tcagtctgagatgaa

SEQ ID NO: 458122 - DNA, 15 bp, Homo sapiens
gtcagtctgagatga

SEQ ID NO: 458123 - DNA, 15 bp, Homo sapiens
agtcagtctgagatg

SEQ ID NO: 458124 - DNA, 15 bp, Homo sapiens
aagtcagtctgagat

SEQ ID NO: 458125 - DNA, 15 bp, Homo sapiens
aaagtcagtctgaga

SEQ ID NO: 458126 - DNA, 15 bp, Homo sapiens
gaaagtcagtctgag

SEQ ID NO: 458127 - DNA, 15 bp, Homo sapiens
agaaagtcagtctga

SEQ ID NO: 458128 - DNA, 15 bp, Homo sapiens
gagaaagtcagtctg

SEQ ID NO: 458129 - DNA, 15 bp, Homo sapiens
cgagaaagtcagtct

SEQ ID NO: 458130 - DNA, 15 bp, Homo sapiens
tcgagaaagtcagtc

SEQ ID NO: 458131 - DNA, 15 bp, Homo sapiens
gtcgagaaagtcagt

SEQ ID NO: 458132 - DNA, 15 bp, Homo sapiens
tgtcgagaaagtcag

SEQ ID NO: 458133 - DNA, 15 bp, Homo sapiens
ttgtcgagaaagtca

SEQ ID NO: 458134 - DNA, 15 bp, Homo sapiens
tttgtcgagaaagtc

SEQ ID NO: 458135 - DNA, 15 bp, Homo sapiens
atttgtcgagaaagt

SEQ ID NO: 458136 - DNA, 15 bp, Homo sapiens
gatttgtcgagaaag

SEQ ID NO: 458137 - DNA, 15 bp, Homo sapiens
tgatttgtcgagaaa

SEQ ID NO: 458138 - DNA, 15 bp, Homo sapiens
ctgatttgtcgagaa

SEQ ID NO: 458139 - DNA, 15 bp, Homo sapiens
actgatttgtcgaga

SEQ ID NO: 458140 - DNA, 15 bp, Homo sapiens
aactgatttgtcgag

SEQ ID NO: 458141 - DNA, 15 bp, Homo sapiens
aaactgatttgtcga

SEQ ID NO: 458142 - DNA, 15 bp, Homo sapiens
aaaactgatttgtcg

SEQ ID NO: 458143 - DNA, 15 bp, Homo sapiens
caaaactgatttgtc

SEQ ID NO: 458144 - DNA, 15 bp, Homo sapiens
gcaaaactgatttgt

SEQ ID NO: 458145 - DNA, 15 bp, Homo sapiens
tgcaaaactgatttg

SEQ ID NO: 458146 - DNA, 15 bp, Homo sapiens
atgcaaaactgattt

SEQ ID NO: 458147 - DNA, 15 bp, Homo sapiens
aatgcaaaactgatt

SEQ ID NO: 458148 - DNA, 15 bp, Homo sapiens
aaatgcaaaactgat

SEQ ID NO: 458149 - DNA, 15 bp, Homo sapiens
caaatgcaaaactga

SEQ ID NO: 458150 - DNA, 15 bp, Homo sapiens
ccaaatgcaaaactg

SEQ ID NO: 458151 - DNA, 15 bp, Homo sapiens
cccaaatgcaaaact

SEQ ID NO: 458152 - DNA, 15 bp, Homo sapiens
gcccaaatgcaaaac

SEQ ID NO: 458153 - DNA, 15 bp, Homo sapiens
ggcccaaatgcaaaa

SEQ ID NO: 458154 - DNA, 15 bp, Homo sapiens
aggcccaaatgcaaa

SEQ ID NO: 458155 - DNA, 15 bp, Homo sapiens
gaggcccaaatgcaa

SEQ ID NO: 458156 - DNA, 15 bp, Homo sapiens
agaggcccaaatgca

SEQ ID NO: 458157 - DNA, 15 bp, Homo sapiens
aagaggcccaaatgc

SEQ ID NO: 458158 - DNA, 15 bp, Homo sapiens
aaagaggcccaaatg

SEQ ID NO: 458159 - DNA, 15 bp, Homo sapiens
aaaagaggcccaaat

SEQ ID NO: 458160 - DNA, 15 bp, Homo sapiens
gaaaagaggcccaaa

SEQ ID NO: 458161 - DNA, 15 bp, Homo sapiens
tgaaaagaggcccaa

SEQ ID NO: 458162 - DNA, 15 bp, Homo sapiens
atgaaaagaggccca

SEQ ID NO: 458163 - DNA, 15 bp, Homo sapiens
gatgaaaagaggccc

SEQ ID NO: 458164 - DNA, 15 bp, Homo sapiens
tgatgaaaagaggcc

SEQ ID NO: 458165 - DNA, 15 bp, Homo sapiens
ctgatgaaaagaggc

SEQ ID NO: 458166 - DNA, 15 bp, Homo sapiens
actgatgaaaagagg

SEQ ID NO: 458167 - DNA, 15 bp, Homo sapiens
tactgatgaaaagag

SEQ ID NO: 458168 - DNA, 15 bp, Homo sapiens
atactgatgaaaaga

SEQ ID NO: 458169 - DNA, 15 bp, Homo sapiens
catactgatgaaaag

SEQ ID NO: 458170 - DNA, 15 bp, Homo sapiens
acatactgatgaaaa

SEQ ID NO: 458171 - DNA, 15 bp, Homo sapiens
aacatactgatgaaa

SEQ ID NO: 458172 - DNA, 15 bp, Homo sapiens
aaacatactgatgaa

SEQ ID NO: 458173 - DNA, 15 bp, Homo sapiens
taaacatactgatga

SEQ ID NO: 458174 - DNA, 15 bp, Homo sapiens
ctaaacatactgatg

SEQ ID NO: 458175 - DNA, 15 bp, Homo sapiens
cctaaacatactgat

SEQ ID NO: 458176 - DNA, 15 bp, Homo sapiens
ccctaaacatactga

SEQ ID NO: 458177 - DNA, 15 bp, Homo sapiens
tccctaaacatactg

SEQ ID NO: 458178 - DNA, 15 bp, Homo sapiens
ttccctaaacatact

SEQ ID NO: 458179 - DNA, 15 bp, Homo sapiens
tttccctaaacatac

SEQ ID NO: 458180 - DNA, 15 bp, Homo sapiens
ctttccctaaacata

SEQ ID NO: 458181 - DNA, 15 bp, Homo sapiens
gctttccctaaacat

SEQ ID NO: 458182 - DNA, 15 bp, Homo sapiens
tgctttccctaaaca

SEQ ID NO: 458183 - DNA, 15 bp, Homo sapiens
gtgctttccctaaac

SEQ ID NO: 458184 - DNA, 15 bp, Homo sapiens
tgtgctttccctaaa

SEQ ID NO: 458185 - DNA, 15 bp, Homo sapiens
atgtgctttccctaa

SEQ ID NO: 458186 - DNA, 15 bp, Homo sapiens
aatgtgctttcccta

SEQ ID NO: 458187 - DNA, 15 bp, Homo sapiens
aaatgtgctttccct

SEQ ID NO: 458188 - DNA, 15 bp, Homo sapiens
taaatgtgctttccc

SEQ ID NO: 458189 - DNA, 15 bp, Homo sapiens
ataaatgtgctttcc

SEQ ID NO: 458190 - DNA, 15 bp, Homo sapiens
aataaatgtgctttc

SEQ ID NO: 458191 - DNA, 15 bp, Homo sapiens
caataaatgtgcttt

SEQ ID NO: 458192 - DNA, 15 bp, Homo sapiens
tcaataaatgtgctt

SEQ ID NO: 458193 - DNA, 15 bp, Homo sapiens
ttcaataaatgtgct

SEQ ID NO: 458194 - DNA, 15 bp, Homo sapiens
tttcaataaatgtgc

SEQ ID NO: 458195 - DNA, 15 bp, Homo sapiens
gtttcaataaatgtg

SEQ ID NO: 458196 - DNA, 15 bp, Homo sapiens
tgtttcaataaatgt

SEQ ID NO: 458197 - DNA, 15 bp, Homo sapiens
atgtttcaataaatg

SEQ ID NO: 458198 - DNA, 15 bp, Homo sapiens
aatgtttcaataaat

SEQ ID NO: 458199 - DNA, 15 bp, Homo sapiens
taatgtttcaataaa

SEQ ID NO: 458200 - DNA, 15 bp, Homo sapiens
ttaatgtttcaataa

SEQ ID NO: 458201 - DNA, 15 bp, Homo sapiens
gttaatgtttcaata

SEQ ID NO: 458202 - DNA, 15 bp, Homo sapiens
ggttaatgtttcaat

SEQ ID NO: 458203 - DNA, 15 bp, Homo sapiens
tggttaatgtttcaa

SEQ ID NO: 458204 - DNA, 15 bp, Homo sapiens
ttggttaatgtttca

SEQ ID NO: 458205 - DNA, 15 bp, Homo sapiens
tttggttaatgtttc

SEQ ID NO: 458206 - DNA, 15 bp, Homo sapiens
ttttggttaatgttt

SEQ ID NO: 458207 - DNA, 15 bp, Homo sapiens
attttggttaatgtt

SEQ ID NO: 458208 - DNA, 15 bp, Homo sapiens
cattttggttaatgt

SEQ ID NO: 458209 - DNA, 15 bp, Homo sapiens
tcattttggttaatg

SEQ ID NO: 458210 - DNA, 15 bp, Homo sapiens
ttcattttggttaat

SEQ ID NO: 458211 - DNA, 15 bp, Homo sapiens
tttcattttggttaa

SEQ ID NO: 458212 - DNA, 15 bp, Homo sapiens
gtttcattttggtta

SEQ ID NO: 458213 - DNA, 15 bp, Homo sapiens
tgtttcattttggtt

SEQ ID NO: 458214 - DNA, 15 bp, Homo sapiens
atgtttcattttggt

SEQ ID NO: 458215 - DNA, 15 bp, Homo sapiens
tatgtttcattttgg

SEQ ID NO: 458216 - DNA, 15 bp, Homo sapiens
ttatgtttcattttg

SEQ ID NO: 458217 - DNA, 15 bp, Homo sapiens
attatgtttcatttt

SEQ ID NO: 458218 - DNA, 15 bp, Homo sapiens
aattatgtttcattt

SEQ ID NO: 458219 - DNA, 15 bp, Homo sapiens
taattatgtttcatt

SEQ ID NO: 458220 - DNA, 15 bp, Homo sapiens
ctaattatgtttcat

SEQ ID NO: 458221 - DNA, 15 bp, Homo sapiens
cctaattatgtttca

SEQ ID NO: 458222 - DNA, 15 bp, Homo sapiens
tcctaattatgtttc

SEQ ID NO: 458223 - DNA, 15 bp, Homo sapiens
gcctcctaattatgt

SEQ ID NO: 458224 - DNA, 15 bp, Homo sapiens
ggcctcctaattatg

SEQ ID NO: 458225 - DNA, 15 bp, Homo sapiens
cggcctcctaattat

SEQ ID NO: 458226 - DNA, 15 bp, Homo sapiens
ccggcctcctaatta

SEQ ID NO: 458227 - DNA, 15 bp, Homo sapiens
cccggcctcctaatt

SEQ ID NO: 458228 - DNA, 15 bp, Homo sapiens
tcccggcctcctaat

SEQ ID NO: 458229 - DNA, 15 bp, Homo sapiens
ctcccggcctcctaa

SEQ ID NO: 458230 - DNA, 15 bp, Homo sapiens
gctcccggcctccta

SEQ ID NO: 458231 - DNA, 15 bp, Homo sapiens
cgctcccggcctcct

SEQ ID NO: 458232 - DNA, 15 bp, Homo sapiens
tcgctcccggcctcc

SEQ ID NO: 458233 - DNA, 15 bp, Homo sapiens
atcgctcccggcctc

SEQ ID NO: 458234 - DNA, 15 bp, Homo sapiens
catcgctcccggcct

SEQ ID NO: 458235 - DNA, 15 bp, Homo sapiens
ccatcgctcccggcc

SEQ ID NO: 458236 - DNA, 15 bp, Homo sapiens
gccatcgctcccggc

SEQ ID NO: 458237 - DNA, 15 bp, Homo sapiens
agccatcgctcccgg

SEQ ID NO: 458238 - DNA, 15 bp, Homo sapiens
gagccatcgctcccg

SEQ ID NO: 458239 - DNA, 15 bp, Homo sapiens
tgagccatcgctccc

SEQ ID NO: 458240 - DNA, 15 bp, Homo sapiens
gtgagccatcgctcc

SEQ ID NO: 458241 - DNA, 15 bp, Homo sapiens
cgtgagccatcgctc

SEQ ID NO: 458242 - DNA, 15 bp, Homo sapiens
gcgtgagccatcgct

SEQ ID NO: 458243 - DNA, 15 bp, Homo sapiens
ggcgtgagccatcgc

SEQ ID NO: 458244 - DNA, 15 bp, Homo sapiens
aggcgtgagccatcg

SEQ ID NO: 458245 - DNA, 15 bp, Homo sapiens
caggcgtgagccatc

SEQ ID NO: 458246 - DNA, 15 bp, Homo sapiens
acaggcgtgagccat

SEQ ID NO: 458247 - DNA, 15 bp, Homo sapiens
tctcccaaagtgctg

SEQ ID NO: 458248 - DNA, 15 bp, Homo sapiens
gtctcccaaagtgct

SEQ ID NO: 458249 - DNA, 15 bp, Homo sapiens
ggtctcccaaagtgc

SEQ ID NO: 458250 - DNA, 15 bp, Homo sapiens
tggtctcccaaagtg

SEQ ID NO: 458251 - DNA, 15 bp, Homo sapiens
ttggtctcccaaagt

SEQ ID NO: 458252 - DNA, 15 bp, Homo sapiens
cttggtctcccaaag

SEQ ID NO: 458253 - DNA, 15 bp, Homo sapiens
ccttggtctcccaaa

SEQ ID NO: 458254 - DNA, 15 bp, Homo sapiens
gccttggtctcccaa

SEQ ID NO: 458255 - DNA, 15 bp, Homo sapiens
tgccttggtctccca

SEQ ID NO: 458256 - DNA, 15 bp, Homo sapiens
atgccttggtctccc

SEQ ID NO: 458257 - DNA, 15 bp, Homo sapiens
catgccttggtctcc

SEQ ID NO: 458258 - DNA, 15 bp, Homo sapiens
acatgccttggtctc

SEQ ID NO: 458259 - DNA, 15 bp, Homo sapiens
cacatgccttggtct

SEQ ID NO: 458260 - DNA, 15 bp, Homo sapiens
ccacatgccttggtc

SEQ ID NO: 458261 - DNA, 15 bp, Homo sapiens
tccacatgccttggt

SEQ ID NO: 458262 - DNA, 15 bp, Homo sapiens
atccacatgccttgg

SEQ ID NO: 458263 - DNA, 15 bp, Homo sapiens
aatccacatgccttg

SEQ ID NO: 458264 - DNA, 15 bp, Homo sapiens
caatccacatgcctt

SEQ ID NO: 458265 - DNA, 15 bp, Homo sapiens
gcaatccacatgcct

SEQ ID NO: 458266 - DNA, 15 bp, Homo sapiens
agcaatccacatgcc

SEQ ID NO: 458267 - DNA, 15 bp, Homo sapiens
aagcaatccacatgc

SEQ ID NO: 458268 - DNA, 15 bp, Homo sapiens
caagcaatccacatg

SEQ ID NO: 458269 - DNA, 15 bp, Homo sapiens
tcaagcaatccacat

SEQ ID NO: 458270 - DNA, 15 bp, Homo sapiens
ctcaagcaatccaca

SEQ ID NO: 458271 - DNA, 15 bp, Homo sapiens
cctcaagcaatccac

SEQ ID NO: 458272 - DNA, 15 bp, Homo sapiens
acctcaagcaatcca

SEQ ID NO: 458273 - DNA, 15 bp, Homo sapiens
gacctcaagcaatcc

SEQ ID NO: 458274 - DNA, 15 bp, Homo sapiens
tgacctcaagcaatc

SEQ ID NO: 458275 - DNA, 15 bp, Homo sapiens
ctgacctcaagcaat

SEQ ID NO: 458276 - DNA, 15 bp, Homo sapiens
cctgacctcaagcaa

SEQ ID NO: 458277 - DNA, 15 bp, Homo sapiens
tcctgacctcaagca

SEQ ID NO: 458278 - DNA, 15 bp, Homo sapiens
ctcctgacctcaagc

SEQ ID NO: 458279 - DNA, 15 bp, Homo sapiens
atggtcttgaactcc

SEQ ID NO: 458280 - DNA, 15 bp, Homo sapiens
gatggtcttgaactc

SEQ ID NO: 458281 - DNA, 15 bp, Homo sapiens
ggatggtcttgaact

SEQ ID NO: 458282 - DNA, 15 bp, Homo sapiens
aggatggtcttgaac

SEQ ID NO: 458283 - DNA, 15 bp, Homo sapiens
aaggatggtcttgaa

SEQ ID NO: 458284 - DNA, 15 bp, Homo sapiens
caaggatggtcttga

SEQ ID NO: 458285 - DNA, 15 bp, Homo sapiens
gcaaggatggtcttg

SEQ ID NO: 458286 - DNA, 15 bp, Homo sapiens
ggcaaggatggtctt

SEQ ID NO: 458287 - DNA, 15 bp, Homo sapiens
cggcaaggatggtct

SEQ ID NO: 458288 - DNA, 15 bp, Homo sapiens
tcggcaaggatggtc

SEQ ID NO: 458289 - DNA, 15 bp, Homo sapiens
gtcggcaaggatggt

SEQ ID NO: 458290 - DNA, 15 bp, Homo sapiens
agtcggcaaggatgg

SEQ ID NO: 458291 - DNA, 15 bp, Homo sapiens
aagtcggcaaggatg

SEQ ID NO: 458292 - DNA, 15 bp, Homo sapiens
caagtcggcaaggat

SEQ ID NO: 458293 - DNA, 15 bp, Homo sapiens
ccaagtcggcaagga

SEQ ID NO: 458294 - DNA, 15 bp, Homo sapiens
accaagtcggcaagg

SEQ ID NO: 458295 - DNA, 15 bp, Homo sapiens
caccaagtcggcaag

SEQ ID NO: 458296 - DNA, 15 bp, Homo sapiens
tcaccaagtcggcaa

SEQ ID NO: 458297 - DNA, 15 bp, Homo sapiens
ttcaccaagtcggca

SEQ ID NO: 458298 - DNA, 15 bp, Homo sapiens
tttcaccaagtcggc

SEQ ID NO: 458299 - DNA, 15 bp, Homo sapiens
atttcaccaagtcgg

SEQ ID NO: 458300 - DNA, 15 bp, Homo sapiens
gatttcaccaagtcg

SEQ ID NO: 458301 - DNA, 15 bp, Homo sapiens
ggatttcaccaagtc

SEQ ID NO: 458302 - DNA, 15 bp, Homo sapiens
aggatttcaccaagt

SEQ ID NO: 458303 - DNA, 15 bp, Homo sapiens
caggatttcaccaag

SEQ ID NO: 458304 - DNA, 15 bp, Homo sapiens
acaggatttcaccaa

SEQ ID NO: 458305 - DNA, 15 bp, Homo sapiens
aacaggatttcacca

SEQ ID NO: 458306 - DNA, 15 bp, Homo sapiens
aaacaggatttcacc

SEQ ID NO: 458307 - DNA, 15 bp, Homo sapiens
gaaacaggatttcac

SEQ ID NO: 458308 - DNA, 15 bp, Homo sapiens
agaaacaggatttca

SEQ ID NO: 458309 - DNA, 15 bp, Homo sapiens
tagaaacaggatttc

SEQ ID NO: 458310 - DNA, 15 bp, Homo sapiens
gtagaaacaggattt

SEQ ID NO: 458311 - DNA, 15 bp, Homo sapiens
agtagaaacaggatt

SEQ ID NO: 458312 - DNA, 15 bp, Homo sapiens
cagtagaaacaggat

SEQ ID NO: 458313 - DNA, 15 bp, Homo sapiens
tcagtagaaacagga

SEQ ID NO: 458314 - DNA, 15 bp, Homo sapiens
ttcagtagaaacagg

SEQ ID NO: 458315 - DNA, 15 bp, Homo sapiens
tttcagtagaaacag

SEQ ID NO: 458316 - DNA, 15 bp, Homo sapiens
ttttcagtagaaaca

SEQ ID NO: 458317 - DNA, 15 bp, Homo sapiens
attttcagtagaaac

SEQ ID NO: 458318 - DNA, 15 bp, Homo sapiens
tattttcagtagaaa

SEQ ID NO: 458319 - DNA, 15 bp, Homo sapiens
gtattttcagtagaa

SEQ ID NO: 458320 - DNA, 15 bp, Homo sapiens
tgtattttcagtaga

SEQ ID NO: 458321 - DNA, 15 bp, Homo sapiens
ttgtattttcagtag

SEQ ID NO: 458322 - DNA, 15 bp, Homo sapiens
tttgtattttcagta

SEQ ID NO: 458323 - DNA, 15 bp, Homo sapiens
ttttgtattttcagt

SEQ ID NO: 458324 - DNA, 15 bp, Homo sapiens
tttttgtattttcag

SEQ ID NO: 458325 - DNA, 15 bp, Homo sapiens
ttttttgtattttca

SEQ ID NO: 458326 - DNA, 15 bp, Homo sapiens
gttttttgtattttc

SEQ ID NO: 458327 - DNA, 15 bp, Homo sapiens
agttttttgtatttt

SEQ ID NO: 458328 - DNA, 15 bp, Homo sapiens
tagttttttgtattt

SEQ ID NO: 458329 - DNA, 15 bp, Homo sapiens
ctagttttttgtatt

SEQ ID NO: 458330 - DNA, 15 bp, Homo sapiens
gctagttttttgtat

SEQ ID NO: 458331 - DNA, 15 bp, Homo sapiens
agctagttttttgta

SEQ ID NO: 458332 - DNA, 15 bp, Homo sapiens
cagctagttttttgt

SEQ ID NO: 458333 - DNA, 15 bp, Homo sapiens
ccagctagttttttg

SEQ ID NO: 458334 - DNA, 15 bp, Homo sapiens
cccagctagtttttt

SEQ ID NO: 458335 - DNA, 15 bp, Homo sapiens
acccagctagttttt

SEQ ID NO: 458336 - DNA, 15 bp, Homo sapiens
cacccagctagtttt

SEQ ID NO: 458337 - DNA, 15 bp, Homo sapiens
acacccagctagttt

SEQ ID NO: 458338 - DNA, 15 bp, Homo sapiens
cacacccagctagtt

SEQ ID NO: 458339 - DNA, 15 bp, Homo sapiens
ccacacccagctagt

SEQ ID NO: 458340 - DNA, 15 bp, Homo sapiens
accacacccagctag

SEQ ID NO: 458341 - DNA, 15 bp, Homo sapiens
caccacacccagcta

SEQ ID NO: 458342 - DNA, 15 bp, Homo sapiens
tcaccacacccagct

SEQ ID NO: 458343 - DNA, 15 bp, Homo sapiens
gtcaccacacccagc

SEQ ID NO: 458344 - DNA, 15 bp, Homo sapiens
cgtcaccacacccag

SEQ ID NO: 458345 - DNA, 15 bp, Homo sapiens
gcgtcaccacaccca

SEQ ID NO: 458346 - DNA, 15 bp, Homo sapiens
cgcgtcaccacaccc

SEQ ID NO: 458347 - DNA, 15 bp, Homo sapiens
acgcgtcaccacacc

SEQ ID NO: 458348 - DNA, 15 bp, Homo sapiens
cacgcgtcaccacac

SEQ ID NO: 458349 - DNA, 15 bp, Homo sapiens
gcacgcgtcaccaca

SEQ ID NO: 458350 - DNA, 15 bp, Homo sapiens
ggcacgcgtcaccac

SEQ ID NO: 458351 - DNA, 15 bp, Homo sapiens
aggcacgcgtcacca

SEQ ID NO: 458352 - DNA, 15 bp, Homo sapiens
caggcacgcgtcacc

SEQ ID NO: 458353 - DNA, 15 bp, Homo sapiens
acaggcacgcgtcac

SEQ ID NO: 458354 - DNA, 15 bp, Homo sapiens
tacaggcacgcgtca

SEQ ID NO: 458355 - DNA, 15 bp, Homo sapiens
ttacaggcacgcgtc

SEQ ID NO: 458356 - DNA, 15 bp, Homo sapiens
attacaggcacgcgt

SEQ ID NO: 458357 - DNA, 15 bp, Homo sapiens
gattacaggcacgcg

SEQ ID NO: 458358 - DNA, 15 bp, Homo sapiens
ggattacaggcacgc

SEQ ID NO: 458359 - DNA, 15 bp, Homo sapiens
gggattacaggcacg

SEQ ID NO: 458360 - DNA, 15 bp, Homo sapiens
tgggattacaggcac

SEQ ID NO: 458361 - DNA, 15 bp, Homo sapiens
agagtagctgggatt

SEQ ID NO: 458362 - DNA, 15 bp, Homo sapiens
cagagtagctgggat

SEQ ID NO: 458363 - DNA, 15 bp, Homo sapiens
ccagagtagctggga

SEQ ID NO: 458364 - DNA, 15 bp, Homo sapiens
tccagagtagctggg

SEQ ID NO: 458365 - DNA, 15 bp, Homo sapiens
tagcctccagagtag

SEQ ID NO: 458366 - DNA, 15 bp, Homo sapiens
ttagcctccagagta

SEQ ID NO: 458367 - DNA, 15 bp, Homo sapiens
tttagcctccagagt

SEQ ID NO: 458368 - DNA, 15 bp, Homo sapiens
ctttagcctccagag

SEQ ID NO: 458369 - DNA, 15 bp, Homo sapiens
gctttagcctccaga

SEQ ID NO: 458370 - DNA, 15 bp, Homo sapiens
tgctttagcctccag

SEQ ID NO: 458371 - DNA, 15 bp, Homo sapiens
ttgctttagcctcca

SEQ ID NO: 458372 - DNA, 15 bp, Homo sapiens
cttgctttagcctcc

SEQ ID NO: 458373 - DNA, 15 bp, Homo sapiens
tcttgctttagcctc

SEQ ID NO: 458374 - DNA, 15 bp, Homo sapiens
ctcttgctttagcct

SEQ ID NO: 458375 - DNA, 15 bp, Homo sapiens
tctcttgctttagcc

SEQ ID NO: 458376 - DNA, 15 bp, Homo sapiens
ttctcttgctttagc

SEQ ID NO: 458377 - DNA, 15 bp, Homo sapiens
attctcttgctttag

SEQ ID NO: 458378 - DNA, 15 bp, Homo sapiens
gattctcttgcttta

SEQ ID NO: 458379 - DNA, 15 bp, Homo sapiens
cgattctcttgcttt

SEQ ID NO: 458380 - DNA, 15 bp, Homo sapiens
gcgattctcttgctt

SEQ ID NO: 458381 - DNA, 15 bp, Homo sapiens
agcgattctcttgct

SEQ ID NO: 458382 - DNA, 15 bp, Homo sapiens
aagcgattctcttgc

SEQ ID NO: 458383 - DNA, 15 bp, Homo sapiens
caagcgattctcttg

SEQ ID NO: 458384 - DNA, 15 bp, Homo sapiens
tcaagcgattctctt

SEQ ID NO: 458385 - DNA, 15 bp, Homo sapiens
ttcaagcgattctct

SEQ ID NO: 458386 - DNA, 15 bp, Homo sapiens
gttcaagcgattctc

SEQ ID NO: 458387 - DNA, 15 bp, Homo sapiens
ggttcaagcgattct

SEQ ID NO: 458388 - DNA, 15 bp, Homo sapiens
aggttcaagcgattc

SEQ ID NO: 458389 - DNA, 15 bp, Homo sapiens
caggttcaagcgatt

SEQ ID NO: 458390 - DNA, 15 bp, Homo sapiens
ccaggttcaagcgat

SEQ ID NO: 458391 - DNA, 15 bp, Homo sapiens
cccaggttcaagcga

SEQ ID NO: 458392 - DNA, 15 bp, Homo sapiens
tcccaggttcaagcg

SEQ ID NO: 458393 - DNA, 15 bp, Homo sapiens
cctctgcctcccagg

SEQ ID NO: 458394 - DNA, 15 bp, Homo sapiens
acctctgcctcccag

SEQ ID NO: 458395 - DNA, 15 bp, Homo sapiens
aacctctgcctccca

SEQ ID NO: 458396 - DNA, 15 bp, Homo sapiens
actcactgcaacctc

SEQ ID NO: 458397 - DNA, 15 bp, Homo sapiens
gactcactgcaacct

SEQ ID NO: 458398 - DNA, 15 bp, Homo sapiens
cgactcactgcaacc

SEQ ID NO: 458399 - DNA, 15 bp, Homo sapiens
tcgactcactgcaac

SEQ ID NO: 458400 - DNA, 15 bp, Homo sapiens
ctcgactcactgcaa

SEQ ID NO: 458401 - DNA, 15 bp, Homo sapiens
tctcgactcactgca

SEQ ID NO: 458402 - DNA, 15 bp, Homo sapiens
atctcgactcactgc

SEQ ID NO: 458403 - DNA, 15 bp, Homo sapiens
gatctcgactcactg

SEQ ID NO: 458404 - DNA, 15 bp, Homo sapiens
cgatctcgactcact

SEQ ID NO: 458405 - DNA, 15 bp, Homo sapiens
acgatctcgactcac

SEQ ID NO: 458406 - DNA, 15 bp, Homo sapiens
cacgatctcgactca

SEQ ID NO: 458407 - DNA, 15 bp, Homo sapiens
gcacgatctcgactc

SEQ ID NO: 458408 - DNA, 15 bp, Homo sapiens
ggcacgatctcgact

SEQ ID NO: 458409 - DNA, 15 bp, Homo sapiens
tggcacgatctcgac

SEQ ID NO: 458410 - DNA, 15 bp, Homo sapiens
gtggcacgatctcga

SEQ ID NO: 458411 - DNA, 15 bp, Homo sapiens
tctctgttgcccagg

SEQ ID NO: 458412 - DNA, 15 bp, Homo sapiens
gtctctgttgcccag

SEQ ID NO: 458413 - DNA, 15 bp, Homo sapiens
agtctctgttgccca

SEQ ID NO: 458414 - DNA, 15 bp, Homo sapiens
gagtctctgttgccc

SEQ ID NO: 458415 - DNA, 15 bp, Homo sapiens
ggagtctctgttgcc

SEQ ID NO: 458416 - DNA, 15 bp, Homo sapiens
cggagtctctgttgc

SEQ ID NO: 458417 - DNA, 15 bp, Homo sapiens
acggagtctctgttg

SEQ ID NO: 458418 - DNA, 15 bp, Homo sapiens
gacggagtctctgtt

SEQ ID NO: 458419 - DNA, 15 bp, Homo sapiens
agacggagtctctgt

SEQ ID NO: 458420 - DNA, 15 bp, Homo sapiens
gagacggagtctctg

SEQ ID NO: 458421 - DNA, 15 bp, Homo sapiens
tgagacggagtctct

SEQ ID NO: 458422 - DNA, 15 bp, Homo sapiens
gtttgagacggagtc

SEQ ID NO: 458423 - DNA, 15 bp, Homo sapiens
tgtttgagacggagt

SEQ ID NO: 458424 - DNA, 15 bp, Homo sapiens
ttgtttgagacggag

SEQ ID NO: 458425 - DNA, 15 bp, Homo sapiens
gttgtttgagacgga

SEQ ID NO: 458426 - DNA, 15 bp, Homo sapiens
ggttgtttgagacgg

SEQ ID NO: 458427 - DNA, 15 bp, Homo sapiens
tggttgtttgagacg

SEQ ID NO: 458428 - DNA, 15 bp, Homo sapiens
ttggttgtttgagac

SEQ ID NO: 458429 - DNA, 15 bp, Homo sapiens
tttggttgtttgaga

SEQ ID NO: 458430 - DNA, 15 bp, Homo sapiens
ttttggttgtttgag

SEQ ID NO: 458431 - DNA, 15 bp, Homo sapiens
tttttggttgtttga

SEQ ID NO: 458432 - DNA, 15 bp, Homo sapiens
ttttttggttgtttg

SEQ ID NO: 458433 - DNA, 15 bp, Homo sapiens
tttttttggttgttt

SEQ ID NO: 458434 - DNA, 15 bp, Homo sapiens
gtttttttggttgtt

SEQ ID NO: 458435 - DNA, 15 bp, Homo sapiens
tgtttttttggttgt

SEQ ID NO: 458436 - DNA, 15 bp, Homo sapiens
ttgtttttttggttg

SEQ ID NO: 458437 - DNA, 15 bp, Homo sapiens
tttgtttttttggtt

SEQ ID NO: 458438 - DNA, 15 bp, Homo sapiens
ttttgtttttttggt

SEQ ID NO: 458439 - DNA, 15 bp, Homo sapiens
tttttgtttttttgg

SEQ ID NO: 458440 - DNA, 15 bp, Homo sapiens
gtttttgtttttttg

SEQ ID NO: 458441 - DNA, 15 bp, Homo sapiens
tgtttttgttttttt

SEQ ID NO: 458442 - DNA, 15 bp, Homo sapiens
ttgtttttgtttttt

SEQ ID NO: 458443 - DNA, 15 bp, Homo sapiens
cttgtttttgttttt

SEQ ID NO: 458444 - DNA, 15 bp, Homo sapiens
gcttgtttttgtttt

SEQ ID NO: 458445 - DNA, 15 bp, Homo sapiens
tgcttgtttttgttt

SEQ ID NO: 458446 - DNA, 15 bp, Homo sapiens
atgcttgtttttgtt

SEQ ID NO: 458447 - DNA, 15 bp, Homo sapiens
tatgcttgtttttgt

SEQ ID NO: 458448 - DNA, 15 bp, Homo sapiens
ttatgcttgtttttg

SEQ ID NO: 458449 - DNA, 15 bp, Homo sapiens
attatgcttgttttt

SEQ ID NO: 458450 - DNA, 15 bp, Homo sapiens
aattatgcttgtttt

SEQ ID NO: 458451 - DNA, 15 bp, Homo sapiens
taattatgcttgttt

SEQ ID NO: 458452 - DNA, 15 bp, Homo sapiens
ctaattatgcttgtt

SEQ ID NO: 458453 - DNA, 15 bp, Homo sapiens
cctaattatgcttgt

SEQ ID NO: 458454 - DNA, 15 bp, Homo sapiens
ccctaattatgcttg

SEQ ID NO: 458455 - DNA, 15 bp, Homo sapiens
attattccacctgcc

SEQ ID NO: 458456 - DNA, 15 bp, Homo sapiens
aattattccacctgc

SEQ ID NO: 458457 - DNA, 15 bp, Homo sapiens
caattattccacctg

SEQ ID NO: 458458 - DNA, 15 bp, Homo sapiens
tcaattattccacct

SEQ ID NO: 458459 - DNA, 15 bp, Homo sapiens
ttcaattattccacc

SEQ ID NO: 458460 - DNA, 15 bp, Homo sapiens
cttcaattattccac

SEQ ID NO: 458461 - DNA, 15 bp, Homo sapiens
gcttcaattattcca

SEQ ID NO: 458462 - DNA, 15 bp, Homo sapiens
tgcttcaattattcc

SEQ ID NO: 458463 - DNA, 15 bp, Homo sapiens
atgcttcaattattc

SEQ ID NO: 458464 - DNA, 15 bp, Homo sapiens
aatgcttcaattatt

SEQ ID NO: 458465 - DNA, 15 bp, Homo sapiens
gaatgcttcaattat

SEQ ID NO: 458466 - DNA, 15 bp, Homo sapiens
agaatgcttcaatta

SEQ ID NO: 458467 - DNA, 15 bp, Homo sapiens
cagaatgcttcaatt

SEQ ID NO: 458468 - DNA, 15 bp, Homo sapiens
ccagaatgcttcaat

SEQ ID NO: 458469 - DNA, 15 bp, Homo sapiens
tccagaatgcttcaa

SEQ ID NO: 458470 - DNA, 15 bp, Homo sapiens
ctccagaatgcttca

SEQ ID NO: 458471 - DNA, 15 bp, Homo sapiens
gctccagaatgcttc

SEQ ID NO: 458472 - DNA, 15 bp, Homo sapiens
ggctccagaatgctt

SEQ ID NO: 458473 - DNA, 15 bp, Homo sapiens
tggctccagaatgct

SEQ ID NO: 458474 - DNA, 15 bp, Homo sapiens
ctggctccagaatgc

SEQ ID NO: 458475 - DNA, 15 bp, Homo sapiens
tctggctccagaatg

SEQ ID NO: 458476 - DNA, 15 bp, Homo sapiens
ttctggctccagaat

SEQ ID NO: 458477 - DNA, 15 bp, Homo sapiens
tttctggctccagaa

SEQ ID NO: 458478 - DNA, 15 bp, Homo sapiens
atttctggctccaga

SEQ ID NO: 458479 - DNA, 15 bp, Homo sapiens
tatttctggctccag

SEQ ID NO: 458480 - DNA, 15 bp, Homo sapiens
ttatttctggctcca

SEQ ID NO: 458481 - DNA, 15 bp, Homo sapiens
attatttctggctcc

SEQ ID NO: 458482 - DNA, 15 bp, Homo sapiens
gattatttctggctc

SEQ ID NO: 458483 - DNA, 15 bp, Homo sapiens
tgattatttctggct

SEQ ID NO: 458484 - DNA, 15 bp, Homo sapiens
ttgattatttctggc

SEQ ID NO: 458485 - DNA, 15 bp, Homo sapiens
gttgattatttctgg

SEQ ID NO: 458486 - DNA, 15 bp, Homo sapiens
agttgattatttctg

SEQ ID NO: 458487 - DNA, 15 bp, Homo sapiens
cagttgattatttct

SEQ ID NO: 458488 - DNA, 15 bp, Homo sapiens
tcagttgattatttc

SEQ ID NO: 458489 - DNA, 15 bp, Homo sapiens
atcagttgattattt

SEQ ID NO: 458490 - DNA, 15 bp, Homo sapiens
aatcagttgattatt

SEQ ID NO: 458491 - DNA, 15 bp, Homo sapiens
taatcagttgattat

SEQ ID NO: 458492 - DNA, 15 bp, Homo sapiens
ttaatcagttgatta

SEQ ID NO: 458493 - DNA, 15 bp, Homo sapiens
cttaatcagttgatt

SEQ ID NO: 458494 - DNA, 15 bp, Homo sapiens
tcttaatcagttgat

SEQ ID NO: 458495 - DNA, 15 bp, Homo sapiens
ttcttaatcagttga

SEQ ID NO: 458496 - DNA, 15 bp, Homo sapiens
attcttaatcagttg

SEQ ID NO: 458497 - DNA, 15 bp, Homo sapiens
tattcttaatcagtt

SEQ ID NO: 458498 - DNA, 15 bp, Homo sapiens
ttattcttaatcagt

SEQ ID NO: 458499 - DNA, 15 bp, Homo sapiens
attattcttaatcag

SEQ ID NO: 458500 - DNA, 15 bp, Homo sapiens
gattattcttaatca

SEQ ID NO: 458501 - DNA, 15 bp, Homo sapiens
agattattcttaatc

SEQ ID NO: 458502 - DNA, 15 bp, Homo sapiens
cagattattcttaat

SEQ ID NO: 458503 - DNA, 15 bp, Homo sapiens
ccagattattcttaa

SEQ ID NO: 458504 - DNA, 15 bp, Homo sapiens
gccagattattctta

SEQ ID NO: 458505 - DNA, 15 bp, Homo sapiens
agccagattattctt

SEQ ID NO: 458506 - DNA, 15 bp, Homo sapiens
cagccagattattct

SEQ ID NO: 458507 - DNA, 15 bp, Homo sapiens
ccagccagattattc

SEQ ID NO: 458508 - DNA, 15 bp, Homo sapiens
cccagccagattatt

SEQ ID NO: 458509 - DNA, 15 bp, Homo sapiens
acccagccagattat

SEQ ID NO: 458510 - DNA, 15 bp, Homo sapiens
cacccagccagatta

SEQ ID NO: 458511 - DNA, 15 bp, Homo sapiens
gcacccagccagatt

SEQ ID NO: 458512 - DNA, 15 bp, Homo sapiens
cgcacccagccagat

SEQ ID NO: 458513 - DNA, 15 bp, Homo sapiens
ccgcacccagccaga

SEQ ID NO: 458514 - DNA, 15 bp, Homo sapiens
accgcacccagccag

SEQ ID NO: 458515 - DNA, 15 bp, Homo sapiens
caccgcacccagcca

SEQ ID NO: 458516 - DNA, 15 bp, Homo sapiens
ccaccgcacccagcc

SEQ ID NO: 458517 - DNA, 15 bp, Homo sapiens
gccaccgcacccagc

SEQ ID NO: 458518 - DNA, 15 bp, Homo sapiens
agccaccgcacccag

SEQ ID NO: 458519 - DNA, 15 bp, Homo sapiens
gagccaccgcaccca

SEQ ID NO: 458520 - DNA, 15 bp, Homo sapiens
tgagccaccgcaccc

SEQ ID NO: 458521 - DNA, 15 bp, Homo sapiens
gtgagccaccgcacc

SEQ ID NO: 458522 - DNA, 15 bp, Homo sapiens
tgagtagctgggatt

SEQ ID NO: 458523 - DNA, 15 bp, Homo sapiens
ctgagtagctgggat

SEQ ID NO: 458524 - DNA, 15 bp, Homo sapiens
gattctcctgcctca

SEQ ID NO: 458525 - DNA, 15 bp, Homo sapiens
cgattctcctgcctc

SEQ ID NO: 458526 - DNA, 15 bp, Homo sapiens
gcgattctcctgcct

SEQ ID NO: 458527 - DNA, 15 bp, Homo sapiens
agcgattctcctgcc

SEQ ID NO: 458528 - DNA, 15 bp, Homo sapiens
aagcgattctcctgc

SEQ ID NO: 458529 - DNA, 15 bp, Homo sapiens
caagcgattctcctg

SEQ ID NO: 458530 - DNA, 15 bp, Homo sapiens
tcaagcgattctcct

SEQ ID NO: 458531 - DNA, 15 bp, Homo sapiens
ttcaagcgattctcc

SEQ ID NO: 458532 - DNA, 15 bp, Homo sapiens
acctccacctcccag

SEQ ID NO: 458533 - DNA, 15 bp, Homo sapiens
aacctccacctccca

SEQ ID NO: 458534 - DNA, 15 bp, Homo sapiens
caacctccacctccc

SEQ ID NO: 458535 - DNA, 15 bp, Homo sapiens
gcaacctccacctcc

SEQ ID NO: 458536 - DNA, 15 bp, Homo sapiens
tgcaacctccacctc

SEQ ID NO: 458537 - DNA, 15 bp, Homo sapiens
ctgcaacctccacct

SEQ ID NO: 458538 - DNA, 15 bp, Homo sapiens
actgcaacctccacc

SEQ ID NO: 458539 - DNA, 15 bp, Homo sapiens
cactgcaacctccac

SEQ ID NO: 458540 - DNA, 15 bp, Homo sapiens
tcactgcaacctcca

SEQ ID NO: 458541 - DNA, 15 bp, Homo sapiens
cggctcactgcaacc

SEQ ID NO: 458542 - DNA, 15 bp, Homo sapiens
tcggctcactgcaac

SEQ ID NO: 458543 - DNA, 15 bp, Homo sapiens
ctcggctcactgcaa

SEQ ID NO: 458544 - DNA, 15 bp, Homo sapiens
tctcggctcactgca

SEQ ID NO: 458545 - DNA, 15 bp, Homo sapiens
atctcggctcactgc

SEQ ID NO: 458546 - DNA, 15 bp, Homo sapiens
gatctcggctcactg

SEQ ID NO: 458547 - DNA, 15 bp, Homo sapiens
cgatctcggctcact

SEQ ID NO: 458548 - DNA, 15 bp, Homo sapiens
gcgatctcggctcac

SEQ ID NO: 458549 - DNA, 15 bp, Homo sapiens
cgcgatctcggctca

SEQ ID NO: 458550 - DNA, 15 bp, Homo sapiens
gcgcgatctcggctc

SEQ ID NO: 458551 - DNA, 15 bp, Homo sapiens
ggcgcgatctcggct

SEQ ID NO: 458552 - DNA, 15 bp, Homo sapiens
tggcgcgatctcggc

SEQ ID NO: 458553 - DNA, 15 bp, Homo sapiens
atggcgcgatctcgg

SEQ ID NO: 458554 - DNA, 15 bp, Homo sapiens
aatggcgcgatctcg

SEQ ID NO: 458555 - DNA, 15 bp, Homo sapiens
caatggcgcgatctc

SEQ ID NO: 458556 - DNA, 15 bp, Homo sapiens
gcaatggcgcgatct

SEQ ID NO: 458557 - DNA, 15 bp, Homo sapiens
tgcaatggcgcgatc

SEQ ID NO: 458558 - DNA, 15 bp, Homo sapiens
gtgcaatggcgcgat

SEQ ID NO: 458559 - DNA, 15 bp, Homo sapiens
agtgcaatggcgcga

SEQ ID NO: 458560 - DNA, 15 bp, Homo sapiens
gagtgcaatggcgcg

SEQ ID NO: 458561 - DNA, 15 bp, Homo sapiens
ggagtgcaatggcgc

SEQ ID NO: 458562 - DNA, 15 bp, Homo sapiens
tggagtgcaatggcg

SEQ ID NO: 458563 - DNA, 15 bp, Homo sapiens
agcccaggctggagt

SEQ ID NO: 458564 - DNA, 15 bp, Homo sapiens
tagcccaggctggag

SEQ ID NO: 458565 - DNA, 15 bp, Homo sapiens
atagcccaggctgga

SEQ ID NO: 458566 - DNA, 15 bp, Homo sapiens
catagcccaggctgg

SEQ ID NO: 458567 - DNA, 15 bp, Homo sapiens
ccatagcccaggctg

SEQ ID NO: 458568 - DNA, 15 bp, Homo sapiens
tccatagcccaggct

SEQ ID NO: 458569 - DNA, 15 bp, Homo sapiens
ctccatagcccaggc

SEQ ID NO: 458570 - DNA, 15 bp, Homo sapiens
gctccatagcccagg

SEQ ID NO: 458571 - DNA, 15 bp, Homo sapiens
tgctccatagcccag

SEQ ID NO: 458572 - DNA, 15 bp, Homo sapiens
ttgctccatagccca

SEQ ID NO: 458573 - DNA, 15 bp, Homo sapiens
cttgctccatagccc

SEQ ID NO: 458574 - DNA, 15 bp, Homo sapiens
tcttgctccatagcc

SEQ ID NO: 458575 - DNA, 15 bp, Homo sapiens
gtcttgctccatagc

SEQ ID NO: 458576 - DNA, 15 bp, Homo sapiens
agtcttgctccatag

SEQ ID NO: 458577 - DNA, 15 bp, Homo sapiens
gagtcttgctccata

SEQ ID NO: 458578 - DNA, 15 bp, Homo sapiens
ggagtcttgctccat

SEQ ID NO: 458579 - DNA, 15 bp, Homo sapiens
tggagtcttgctcca

SEQ ID NO: 458580 - DNA, 15 bp, Homo sapiens
atggagtcttgctcc

SEQ ID NO: 458581 - DNA, 15 bp, Homo sapiens
gatggagtcttgctc

SEQ ID NO: 458582 - DNA, 15 bp, Homo sapiens
agatggagtcttgct

SEQ ID NO: 458583 - DNA, 15 bp, Homo sapiens
gagatggagtcttgc

SEQ ID NO: 458584 - DNA, 15 bp, Homo sapiens
tgagatggagtcttg

SEQ ID NO: 458585 - DNA, 15 bp, Homo sapiens
ttgagatggagtctt

SEQ ID NO: 458586 - DNA, 15 bp, Homo sapiens
gattttttttttttt

SEQ ID NO: 458587 - DNA, 15 bp, Homo sapiens
ggatttttttttttt

SEQ ID NO: 458588 - DNA, 15 bp, Homo sapiens
aggattttttttttt

SEQ ID NO: 458589 - DNA, 15 bp, Homo sapiens
caggatttttttttt

SEQ ID NO: 458590 - DNA, 15 bp, Homo sapiens
acaggattttttttt

SEQ ID NO: 458591 - DNA, 15 bp, Homo sapiens
aacaggatttttttt

SEQ ID NO: 458592 - DNA, 15 bp, Homo sapiens
aaacaggattttttt

SEQ ID NO: 458593 - DNA, 15 bp, Homo sapiens
gaaacaggatttttt

SEQ ID NO: 458594 - DNA, 15 bp, Homo sapiens
agaaacaggattttt

SEQ ID NO: 458595 - DNA, 15 bp, Homo sapiens
cagaaacaggatttt

SEQ ID NO: 458596 - DNA, 15 bp, Homo sapiens
gcagaaacaggattt

SEQ ID NO: 458597 - DNA, 15 bp, Homo sapiens
tgcagaaacaggatt

SEQ ID NO: 458598 - DNA, 15 bp, Homo sapiens
ctgcagaaacaggat

SEQ ID NO: 458599 - DNA, 15 bp, Homo sapiens
tctgcagaaacagga

SEQ ID NO: 458600 - DNA, 15 bp, Homo sapiens
ttctgcagaaacagg

SEQ ID NO: 458601 - DNA, 15 bp, Homo sapiens
tttctgcagaaacag

SEQ ID NO: 458602 - DNA, 15 bp, Homo sapiens
atttctgcagaaaca

SEQ ID NO: 458603 - DNA, 15 bp, Homo sapiens
tatttctgcagaaac

SEQ ID NO: 458604 - DNA, 15 bp, Homo sapiens
atatttctgcagaaa

SEQ ID NO: 458605 - DNA, 15 bp, Homo sapiens
gatatttctgcagaa

SEQ ID NO: 458606 - DNA, 15 bp, Homo sapiens
ggatatttctgcaga

SEQ ID NO: 458607 - DNA, 15 bp, Homo sapiens
gggatatttctgcag

SEQ ID NO: 458608 - DNA, 15 bp, Homo sapiens
tgggatatttctgca

SEQ ID NO: 458609 - DNA, 15 bp, Homo sapiens
ctgggatatttctgc

SEQ ID NO: 458610 - DNA, 15 bp, Homo sapiens
cctgggatatttctg

SEQ ID NO: 458611 - DNA, 15 bp, Homo sapiens
acctgggatatttct

SEQ ID NO: 458612 - DNA, 15 bp, Homo sapiens
cacctgggatatttc

SEQ ID NO: 458613 - DNA, 15 bp, Homo sapiens
acacctgggatattt

SEQ ID NO: 458614 - DNA, 15 bp, Homo sapiens
gacacctgggatatt

SEQ ID NO: 458615 - DNA, 15 bp, Homo sapiens
ggacacctgggatat

SEQ ID NO: 458616 - DNA, 15 bp, Homo sapiens
aggacacctgggata

SEQ ID NO: 458617 - DNA, 15 bp, Homo sapiens
caggacacctgggat

SEQ ID NO: 458618 - DNA, 15 bp, Homo sapiens
ccaggacacctggga

SEQ ID NO: 458619 - DNA, 15 bp, Homo sapiens
cccaggacacctggg

SEQ ID NO: 458620 - DNA, 15 bp, Homo sapiens
acccaggacacctgg

SEQ ID NO: 458621 - DNA, 15 bp, Homo sapiens
gacccaggacacctg

SEQ ID NO: 458622 - DNA, 15 bp, Homo sapiens
tgacccaggacacct

SEQ ID NO: 458623 - DNA, 15 bp, Homo sapiens
ctgacccaggacacc

SEQ ID NO: 458624 - DNA, 15 bp, Homo sapiens
gctgacccaggacac

SEQ ID NO: 458625 - DNA, 15 bp, Homo sapiens
tgctgacccaggaca

SEQ ID NO: 458626 - DNA, 15 bp, Homo sapiens
ctgctgacccaggac

SEQ ID NO: 458627 - DNA, 15 bp, Homo sapiens
actgctgacccagga

SEQ ID NO: 458628 - DNA, 15 bp, Homo sapiens
cactgctgacccagg

SEQ ID NO: 458629 - DNA, 15 bp, Homo sapiens
gcactgctgacccag

SEQ ID NO: 458630 - DNA, 15 bp, Homo sapiens
ggcactgctgaccca

SEQ ID NO: 458631 - DNA, 15 bp, Homo sapiens
gggcactgctgaccc

SEQ ID NO: 458632 - DNA, 15 bp, Homo sapiens
ggggcactgctgacc

SEQ ID NO: 458633 - DNA, 15 bp, Homo sapiens
tggggcactgctgac

SEQ ID NO: 458634 - DNA, 15 bp, Homo sapiens
atggggcactgctga

SEQ ID NO: 458635 - DNA, 15 bp, Homo sapiens
tatggggcactgctg

SEQ ID NO: 458636 - DNA, 15 bp, Homo sapiens
ctatggggcactgct

SEQ ID NO: 458637 - DNA, 15 bp, Homo sapiens
tctatggggcactgc

SEQ ID NO: 458638 - DNA, 15 bp, Homo sapiens
atctatggggcactg

SEQ ID NO: 458639 - DNA, 15 bp, Homo sapiens
aatctatggggcact

SEQ ID NO: 458640 - DNA, 15 bp, Homo sapiens
gaatctatggggcac

SEQ ID NO: 458641 - DNA, 15 bp, Homo sapiens
ggaatctatggggca

SEQ ID NO: 458642 - DNA, 15 bp, Homo sapiens
tggaatctatggggc

SEQ ID NO: 458643 - DNA, 15 bp, Homo sapiens
gtggaatctatgggg

SEQ ID NO: 458644 - DNA, 15 bp, Homo sapiens
cgtggaatctatggg

SEQ ID NO: 458645 - DNA, 15 bp, Homo sapiens
ccgtggaatctatgg

SEQ ID NO: 458646 - DNA, 15 bp, Homo sapiens
tccgtggaatctatg

SEQ ID NO: 458647 - DNA, 15 bp, Homo sapiens
gtccgtggaatctat

SEQ ID NO: 458648 - DNA, 15 bp, Homo sapiens
cgtccgtggaatcta

SEQ ID NO: 458649 - DNA, 15 bp, Homo sapiens
acgtccgtggaatct

SEQ ID NO: 458650 - DNA, 15 bp, Homo sapiens
aacgtccgtggaatc

SEQ ID NO: 458651 - DNA, 15 bp, Homo sapiens
aaacgtccgtggaat

SEQ ID NO: 458652 - DNA, 15 bp, Homo sapiens
taaacgtccgtggaa

SEQ ID NO: 458653 - DNA, 15 bp, Homo sapiens
gtaaacgtccgtgga

SEQ ID NO: 458654 - DNA, 15 bp, Homo sapiens
ggtaaacgtccgtgg

SEQ ID NO: 458655 - DNA, 15 bp, Homo sapiens
gggtaaacgtccgtg

SEQ ID NO: 458656 - DNA, 15 bp, Homo sapiens
agggtaaacgtccgt

SEQ ID NO: 458657 - DNA, 15 bp, Homo sapiens
tagggtaaacgtccg

SEQ ID NO: 458658 - DNA, 15 bp, Homo sapiens
ttagggtaaacgtcc

SEQ ID NO: 458659 - DNA, 15 bp, Homo sapiens
cttagggtaaacgtc

SEQ ID NO: 458660 - DNA, 15 bp, Homo sapiens
acttagggtaaacgt

SEQ ID NO: 458661 - DNA, 15 bp, Homo sapiens
aacttagggtaaacg

SEQ ID NO: 458662 - DNA, 15 bp, Homo sapiens
aaacttagggtaaac

SEQ ID NO: 458663 - DNA, 15 bp, Homo sapiens
aaaacttagggtaaa

SEQ ID NO: 458664 - DNA, 15 bp, Homo sapiens
gaaaacttagggtaa

SEQ ID NO: 458665 - DNA, 15 bp, Homo sapiens
ggaaaacttagggta

SEQ ID NO: 458666 - DNA, 15 bp, Homo sapiens
tggaaaacttagggt

SEQ ID NO: 458667 - DNA, 15 bp, Homo sapiens
ttggaaaacttaggg

SEQ ID NO: 458668 - DNA, 15 bp, Homo sapiens
attggaaaacttagg

SEQ ID NO: 458669 - DNA, 15 bp, Homo sapiens
cattggaaaacttag

SEQ ID NO: 458670 - DNA, 15 bp, Homo sapiens
ccattggaaaactta

SEQ ID NO: 458671 - DNA, 15 bp, Homo sapiens
cccattggaaaactt

SEQ ID NO: 458672 - DNA, 15 bp, Homo sapiens
tcccattggaaaact

SEQ ID NO: 458673 - DNA, 15 bp, Homo sapiens
ctcccattggaaaac

SEQ ID NO: 458674 - DNA, 15 bp, Homo sapiens
actcccattggaaaa

SEQ ID NO: 458675 - DNA, 15 bp, Homo sapiens
aactcccattggaaa

SEQ ID NO: 458676 - DNA, 15 bp, Homo sapiens
gaactcccattggaa

SEQ ID NO: 458677 - DNA, 15 bp, Homo sapiens
tgaactcccattgga

SEQ ID NO: 458678 - DNA, 15 bp, Homo sapiens
atgaactcccattgg

SEQ ID NO: 458679 - DNA, 15 bp, Homo sapiens
tatgaactcccattg

SEQ ID NO: 458680 - DNA, 15 bp, Homo sapiens
gtatgaactcccatt

SEQ ID NO: 458681 - DNA, 15 bp, Homo sapiens
ggtatgaactcccat

SEQ ID NO: 458682 - DNA, 15 bp, Homo sapiens
aggtatgaactccca

SEQ ID NO: 458683 - DNA, 15 bp, Homo sapiens
gaggtatgaactccc

SEQ ID NO: 458684 - DNA, 15 bp, Homo sapiens
agaggtatgaactcc

SEQ ID NO: 458685 - DNA, 15 bp, Homo sapiens
tagaggtatgaactc

SEQ ID NO: 458686 - DNA, 15 bp, Homo sapiens
atagaggtatgaact

SEQ ID NO: 458687 - DNA, 15 bp, Homo sapiens
tatagaggtatgaac

SEQ ID NO: 458688 - DNA, 15 bp, Homo sapiens
gtatagaggtatgaa

SEQ ID NO: 458689 - DNA, 15 bp, Homo sapiens
ggtatagaggtatga

SEQ ID NO: 458690 - DNA, 15 bp, Homo sapiens
gggtatagaggtatg

SEQ ID NO: 458691 - DNA, 15 bp, Homo sapiens
tgggtatagaggtat

SEQ ID NO: 458692 - DNA, 15 bp, Homo sapiens
ctgggtatagaggta

SEQ ID NO: 458693 - DNA, 15 bp, Homo sapiens
actgggtatagaggt

SEQ ID NO: 458694 - DNA, 15 bp, Homo sapiens
cactgggtatagagg

SEQ ID NO: 458695 - DNA, 15 bp, Homo sapiens
tcactgggtatagag

SEQ ID NO: 458696 - DNA, 15 bp, Homo sapiens
ctcactgggtataga

SEQ ID NO: 458697 - DNA, 15 bp, Homo sapiens
tctcactgggtatag

SEQ ID NO: 458698 - DNA, 15 bp, Homo sapiens
ttctcactgggtata

SEQ ID NO: 458699 - DNA, 15 bp, Homo sapiens
attctcactgggtat

SEQ ID NO: 458700 - DNA, 15 bp, Homo sapiens
tattctcactgggta

SEQ ID NO: 458701 - DNA, 15 bp, Homo sapiens
atattctcactgggt

SEQ ID NO: 458702 - DNA, 15 bp, Homo sapiens
aatattctcactggg

SEQ ID NO: 458703 - DNA, 15 bp, Homo sapiens
aaatattctcactgg

SEQ ID NO: 458704 - DNA, 15 bp, Homo sapiens
aaaatattctcactg

SEQ ID NO: 458705 - DNA, 15 bp, Homo sapiens
gaaaatattctcact

SEQ ID NO: 458706 - DNA, 15 bp, Homo sapiens
agaaaatattctcac

SEQ ID NO: 458707 - DNA, 15 bp, Homo sapiens
cagaaaatattctca

SEQ ID NO: 458708 - DNA, 15 bp, Homo sapiens
tcagaaaatattctc

SEQ ID NO: 458709 - DNA, 15 bp, Homo sapiens
ctcagaaaatattct

SEQ ID NO: 458710 - DNA, 15 bp, Homo sapiens
actcagaaaatattc

SEQ ID NO: 458711 - DNA, 15 bp, Homo sapiens
tactcagaaaatatt

SEQ ID NO: 458712 - DNA, 15 bp, Homo sapiens
ttactcagaaaatat

SEQ ID NO: 458713 - DNA, 15 bp, Homo sapiens
attactcagaaaata

SEQ ID NO: 458714 - DNA, 15 bp, Homo sapiens
cattactcagaaaat

SEQ ID NO: 458715 - DNA, 15 bp, Homo sapiens
ccattactcagaaaa

SEQ ID NO: 458716 - DNA, 15 bp, Homo sapiens
cccattactcagaaa

SEQ ID NO: 458717 - DNA, 15 bp, Homo sapiens
tcccattactcagaa

SEQ ID NO: 458718 - DNA, 15 bp, Homo sapiens
ttcccattactcaga

SEQ ID NO: 458719 - DNA, 15 bp, Homo sapiens
attcccattactcag

SEQ ID NO: 458720 - DNA, 15 bp, Homo sapiens
cattcccattactca

SEQ ID NO: 458721 - DNA, 15 bp, Homo sapiens
tcattcccattactc

SEQ ID NO: 458722 - DNA, 15 bp, Homo sapiens
ctcattcccattact

SEQ ID NO: 458723 - DNA, 15 bp, Homo sapiens
tctcattcccattac

SEQ ID NO: 458724 - DNA, 15 bp, Homo sapiens
atctcattcccatta

SEQ ID NO: 458725 - DNA, 15 bp, Homo sapiens
aatctcattcccatt

SEQ ID NO: 458726 - DNA, 15 bp, Homo sapiens
caatctcattcccat

SEQ ID NO: 458727 - DNA, 15 bp, Homo sapiens
ccaatctcattccca

SEQ ID NO: 458728 - DNA, 15 bp, Homo sapiens
tccaatctcattccc

SEQ ID NO: 458729 - DNA, 15 bp, Homo sapiens
ctccaatctcattcc

SEQ ID NO: 458730 - DNA, 15 bp, Homo sapiens
tctccaatctcattc

SEQ ID NO: 458731 - DNA, 15 bp, Homo sapiens
atctccaatctcatt

SEQ ID NO: 458732 - DNA, 15 bp, Homo sapiens
catctccaatctcat

SEQ ID NO: 458733 - DNA, 15 bp, Homo sapiens
acatctccaatctca

SEQ ID NO: 458734 - DNA, 15 bp, Homo sapiens
tacatctccaatctc

SEQ ID NO: 458735 - DNA, 15 bp, Homo sapiens
ctacatctccaatct

SEQ ID NO: 458736 - DNA, 15 bp, Homo sapiens
cctacatctccaatc

SEQ ID NO: 458737 - DNA, 15 bp, Homo sapiens
ccctacatctccaat

SEQ ID NO: 458738 - DNA, 15 bp, Homo sapiens
accctacatctccaa

SEQ ID NO: 458739 - DNA, 15 bp, Homo sapiens
taccctacatctcca

SEQ ID NO: 458740 - DNA, 15 bp, Homo sapiens
ctaccctacatctcc

SEQ ID NO: 458741 - DNA, 15 bp, Homo sapiens
tctaccctacatctc

SEQ ID NO: 458742 - DNA, 15 bp, Homo sapiens
ctctaccctacatct

SEQ ID NO: 458743 - DNA, 15 bp, Homo sapiens
tctctaccctacatc

SEQ ID NO: 458744 - DNA, 15 bp, Homo sapiens
ttctctaccctacat

SEQ ID NO: 458745 - DNA, 15 bp, Homo sapiens
cttctctaccctaca

SEQ ID NO: 458746 - DNA, 15 bp, Homo sapiens
tcttctctaccctac

SEQ ID NO: 458747 - DNA, 15 bp, Homo sapiens
atcttctctacccta

SEQ ID NO: 458748 - DNA, 15 bp, Homo sapiens
gatcttctctaccct

SEQ ID NO: 458749 - DNA, 15 bp, Homo sapiens
ggatcttctctaccc

SEQ ID NO: 458750 - DNA, 15 bp, Homo sapiens
tggatcttctctacc

SEQ ID NO: 458751 - DNA, 15 bp, Homo sapiens
atggatcttctctac

SEQ ID NO: 458752 - DNA, 15 bp, Homo sapiens
tatggatcttctcta

SEQ ID NO: 458753 - DNA, 15 bp, Homo sapiens
gtatggatcttctct

SEQ ID NO: 458754 - DNA, 15 bp, Homo sapiens
tgtatggatcttctc

SEQ ID NO: 458755 - DNA, 15 bp, Homo sapiens
ctgtatggatcttct

SEQ ID NO: 458756 - DNA, 15 bp, Homo sapiens
actgtatggatcttc

SEQ ID NO: 458757 - DNA, 15 bp, Homo sapiens
gactgtatggatctt

SEQ ID NO: 458758 - DNA, 15 bp, Homo sapiens
agactgtatggatct

SEQ ID NO: 458759 - DNA, 15 bp, Homo sapiens
aagactgtatggatc

SEQ ID NO: 458760 - DNA, 15 bp, Homo sapiens
aaagactgtatggat

SEQ ID NO: 458761 - DNA, 15 bp, Homo sapiens
caaagactgtatgga

SEQ ID NO: 458762 - DNA, 15 bp, Homo sapiens
ccaaagactgtatgg

SEQ ID NO: 458763 - DNA, 15 bp, Homo sapiens
cccaaagactgtatg

SEQ ID NO: 458764 - DNA, 15 bp, Homo sapiens
acccaaagactgtat

SEQ ID NO: 458765 - DNA, 15 bp, Homo sapiens
aacccaaagactgta

SEQ ID NO: 458766 - DNA, 15 bp, Homo sapiens
taacccaaagactgt

SEQ ID NO: 458767 - DNA, 15 bp, Homo sapiens
ttaacccaaagactg

SEQ ID NO: 458768 - DNA, 15 bp, Homo sapiens
tttaacccaaagact

SEQ ID NO: 458769 - DNA, 15 bp, Homo sapiens
gtttaacccaaagac

SEQ ID NO: 458770 - DNA, 15 bp, Homo sapiens
agtttaacccaaaga

SEQ ID NO: 458771 - DNA, 15 bp, Homo sapiens
aagtttaacccaaag

SEQ ID NO: 458772 - DNA, 15 bp, Homo sapiens
aaagtttaacccaaa

SEQ ID NO: 458773 - DNA, 15 bp, Homo sapiens
aaaagtttaacccaa

SEQ ID NO: 458774 - DNA, 15 bp, Homo sapiens
aaaaagtttaaccca

SEQ ID NO: 458775 - DNA, 15 bp, Homo sapiens
gaaaaagtttaaccc

SEQ ID NO: 458776 - DNA, 15 bp, Homo sapiens
ggaaaaagtttaacc

SEQ ID NO: 458777 - DNA, 15 bp, Homo sapiens
aggaaaaagtttaac

SEQ ID NO: 458778 - DNA, 15 bp, Homo sapiens
gaggaaaaagtttaa

SEQ ID NO: 458779 - DNA, 15 bp, Homo sapiens
agaggaaaaagttta

SEQ ID NO: 458780 - DNA, 15 bp, Homo sapiens
aagaggaaaaagttt

SEQ ID NO: 458781 - DNA, 15 bp, Homo sapiens
aaagaggaaaaagtt

SEQ ID NO: 458782 - DNA, 15 bp, Homo sapiens
caaagaggaaaaagt

SEQ ID NO: 458783 - DNA, 15 bp, Homo sapiens
gcaaagaggaaaaag

SEQ ID NO: 458784 - DNA, 15 bp, Homo sapiens
ggcaaagaggaaaaa

SEQ ID NO: 458785 - DNA, 15 bp, Homo sapiens
aggcaaagaggaaaa

SEQ ID NO: 458786 - DNA, 15 bp, Homo sapiens
taggcaaagaggaaa

SEQ ID NO: 458787 - DNA, 15 bp, Homo sapiens
ctaggcaaagaggaa

SEQ ID NO: 458788 - DNA, 15 bp, Homo sapiens
cctaggcaaagagga

SEQ ID NO: 458789 - DNA, 15 bp, Homo sapiens
tcctaggcaaagagg

SEQ ID NO: 458790 - DNA, 15 bp, Homo sapiens
ttcctaggcaaagag

SEQ ID NO: 458791 - DNA, 15 bp, Homo sapiens
tttcctaggcaaaga

SEQ ID NO: 458792 - DNA, 15 bp, Homo sapiens
ctttcctaggcaaag

SEQ ID NO: 458793 - DNA, 15 bp, Homo sapiens
tctttcctaggcaaa

SEQ ID NO: 458794 - DNA, 15 bp, Homo sapiens
atctttcctaggcaa

SEQ ID NO: 458795 - DNA, 15 bp, Homo sapiens
aatctttcctaggca

SEQ ID NO: 458796 - DNA, 15 bp, Homo sapiens
taatctttcctaggc

SEQ ID NO: 458797 - DNA, 15 bp, Homo sapiens
ttaatctttcctagg

SEQ ID NO: 458798 - DNA, 15 bp, Homo sapiens
attaatctttcctag

SEQ ID NO: 458799 - DNA, 15 bp, Homo sapiens
cattaatctttccta

SEQ ID NO: 458800 - DNA, 15 bp, Homo sapiens
gcattaatctttcct

SEQ ID NO: 458801 - DNA, 15 bp, Homo sapiens
agcattaatctttcc

SEQ ID NO: 458802 - DNA, 15 bp, Homo sapiens
tagcattaatctttc

SEQ ID NO: 458803 - DNA, 15 bp, Homo sapiens
ttagcattaatcttt

SEQ ID NO: 458804 - DNA, 15 bp, Homo sapiens
attagcattaatctt

SEQ ID NO: 458805 - DNA, 15 bp, Homo sapiens
gattagcattaatct

SEQ ID NO: 458806 - DNA, 15 bp, Homo sapiens
agattagcattaatc

SEQ ID NO: 458807 - DNA, 15 bp, Homo sapiens
aagattagcattaat

SEQ ID NO: 458808 - DNA, 15 bp, Homo sapiens
taagattagcattaa

SEQ ID NO: 458809 - DNA, 15 bp, Homo sapiens
ttaagattagcatta

SEQ ID NO: 458810 - DNA, 15 bp, Homo sapiens
gttaagattagcatt

SEQ ID NO: 458811 - DNA, 15 bp, Homo sapiens
ggttaagattagcat

SEQ ID NO: 458812 - DNA, 15 bp, Homo sapiens
tggttaagattagca

SEQ ID NO: 458813 - DNA, 15 bp, Homo sapiens
gtggttaagattagc

SEQ ID NO: 458814 - DNA, 15 bp, Homo sapiens
tgtggttaagattag

SEQ ID NO: 458815 - DNA, 15 bp, Homo sapiens
ctgtggttaagatta

SEQ ID NO: 458816 - DNA, 15 bp, Homo sapiens
tctgtggttaagatt

SEQ ID NO: 458817 - DNA, 15 bp, Homo sapiens
atctgtggttaagat

SEQ ID NO: 458818 - DNA, 15 bp, Homo sapiens
aatctgtggttaaga

SEQ ID NO: 458819 - DNA, 15 bp, Homo sapiens
aaatctgtggttaag

SEQ ID NO: 458820 - DNA, 15 bp, Homo sapiens
caaatctgtggttaa

SEQ ID NO: 458821 - DNA, 15 bp, Homo sapiens
acaaatctgtggtta

SEQ ID NO: 458822 - DNA, 15 bp, Homo sapiens
tacaaatctgtggtt

SEQ ID NO: 458823 - DNA, 15 bp, Homo sapiens
ctacaaatctgtggt

SEQ ID NO: 458824 - DNA, 15 bp, Homo sapiens
actacaaatctgtgg

SEQ ID NO: 458825 - DNA, 15 bp, Homo sapiens
tactacaaatctgtg

SEQ ID NO: 458826 - DNA, 15 bp, Homo sapiens
ttactacaaatctgt

SEQ ID NO: 458827 - DNA, 15 bp, Homo sapiens
cttactacaaatctg

SEQ ID NO: 458828 - DNA, 15 bp, Homo sapiens
tcttactacaaatct

SEQ ID NO: 458829 - DNA, 15 bp, Homo sapiens
ttcttactacaaatc

SEQ ID NO: 458830 - DNA, 15 bp, Homo sapiens
attcttactacaaat

SEQ ID NO: 458831 - DNA, 15 bp, Homo sapiens
cattcttactacaaa

SEQ ID NO: 458832 - DNA, 15 bp, Homo sapiens
acattcttactacaa

SEQ ID NO: 458833 - DNA, 15 bp, Homo sapiens
tacattcttactaca

SEQ ID NO: 458834 - DNA, 15 bp, Homo sapiens
atacattcttactac

SEQ ID NO: 458835 - DNA, 15 bp, Homo sapiens
gatacattcttacta

SEQ ID NO: 458836 - DNA, 15 bp, Homo sapiens
tgatacattcttact

SEQ ID NO: 458837 - DNA, 15 bp, Homo sapiens
ctgatacattcttac

SEQ ID NO: 458838 - DNA, 15 bp, Homo sapiens
actgatacattctta

SEQ ID NO: 458839 - DNA, 15 bp, Homo sapiens
aactgatacattctt

SEQ ID NO: 458840 - DNA, 15 bp, Homo sapiens
aaactgatacattct

SEQ ID NO: 458841 - DNA, 15 bp, Homo sapiens
aaaactgatacattc

SEQ ID NO: 458842 - DNA, 15 bp, Homo sapiens
caaaactgatacatt

SEQ ID NO: 458843 - DNA, 15 bp, Homo sapiens
acaaaactgatacat

SEQ ID NO: 458844 - DNA, 15 bp, Homo sapiens
gacaaaactgataca

SEQ ID NO: 458845 - DNA, 15 bp, Homo sapiens
tgacaaaactgatac

SEQ ID NO: 458846 - DNA, 15 bp, Homo sapiens
atgacaaaactgata

SEQ ID NO: 458847 - DNA, 15 bp, Homo sapiens
aatgacaaaactgat

SEQ ID NO: 458848 - DNA, 15 bp, Homo sapiens
gaatgacaaaactga

SEQ ID NO: 458849 - DNA, 15 bp, Homo sapiens
tgaatgacaaaactg

SEQ ID NO: 458850 - DNA, 15 bp, Homo sapiens
ctgaatgacaaaact

SEQ ID NO: 458851 - DNA, 15 bp, Homo sapiens
actgaatgacaaaac

SEQ ID NO: 458852 - DNA, 15 bp, Homo sapiens
aactgaatgacaaaa

SEQ ID NO: 458853 - DNA, 15 bp, Homo sapiens
gaactgaatgacaaa

SEQ ID NO: 458854 - DNA, 15 bp, Homo sapiens
agaactgaatgacaa

SEQ ID NO: 458855 - DNA, 15 bp, Homo sapiens
tagaactgaatgaca

SEQ ID NO: 458856 - DNA, 15 bp, Homo sapiens
ctagaactgaatgac

SEQ ID NO: 458857 - DNA, 15 bp, Homo sapiens
tctagaactgaatga

SEQ ID NO: 458858 - DNA, 15 bp, Homo sapiens
gtctagaactgaatg

SEQ ID NO: 458859 - DNA, 15 bp, Homo sapiens
agtctagaactgaat

SEQ ID NO: 458860 - DNA, 15 bp, Homo sapiens
gagtctagaactgaa

SEQ ID NO: 458861 - DNA, 15 bp, Homo sapiens
ggagtctagaactga

SEQ ID NO: 458862 - DNA, 15 bp, Homo sapiens
tggagtctagaactg

SEQ ID NO: 458863 - DNA, 15 bp, Homo sapiens
ctggagtctagaact

SEQ ID NO: 458864 - DNA, 15 bp, Homo sapiens
actggagtctagaac

SEQ ID NO: 458865 - DNA, 15 bp, Homo sapiens
aactggagtctagaa

SEQ ID NO: 458866 - DNA, 15 bp, Homo sapiens
aaactggagtctaga

SEQ ID NO: 458867 - DNA, 15 bp, Homo sapiens
aaaactggagtctag

SEQ ID NO: 458868 - DNA, 15 bp, Homo sapiens
gaaaactggagtcta

SEQ ID NO: 458869 - DNA, 15 bp, Homo sapiens
agaaaactggagtct

SEQ ID NO: 458870 - DNA, 15 bp, Homo sapiens
aagaaaactggagtc

SEQ ID NO: 458871 - DNA, 15 bp, Homo sapiens
aaagaaaactggagt

SEQ ID NO: 458872 - DNA, 15 bp, Homo sapiens
taaagaaaactggag

SEQ ID NO: 458873 - DNA, 15 bp, Homo sapiens
ataaagaaaactgga

SEQ ID NO: 458874 - DNA, 15 bp, Homo sapiens
aataaagaaaactgg

SEQ ID NO: 458875 - DNA, 15 bp, Homo sapiens
caataaagaaaactg

SEQ ID NO: 458876 - DNA, 15 bp, Homo sapiens
acaataaagaaaact

SEQ ID NO: 458877 - DNA, 15 bp, Homo sapiens
tacaataaagaaaac

SEQ ID NO: 458878 - DNA, 15 bp, Homo sapiens
ttacaataaagaaaa

SEQ ID NO: 458879 - DNA, 15 bp, Homo sapiens
attacaataaagaaa

SEQ ID NO: 458880 - DNA, 15 bp, Homo sapiens
tattacaataaagaa

SEQ ID NO: 458881 - DNA, 15 bp, Homo sapiens
gtattacaataaaga

SEQ ID NO: 458882 - DNA, 15 bp, Homo sapiens
ggtattacaataaag

SEQ ID NO: 458883 - DNA, 15 bp, Homo sapiens
tggtattacaataaa

SEQ ID NO: 458884 - DNA, 15 bp, Homo sapiens
ttggtattacaataa

SEQ ID NO: 458885 - DNA, 15 bp, Homo sapiens
attggtattacaata

SEQ ID NO: 458886 - DNA, 15 bp, Homo sapiens
tattggtattacaat

SEQ ID NO: 458887 - DNA, 15 bp, Homo sapiens
atattggtattacaa

SEQ ID NO: 458888 - DNA, 15 bp, Homo sapiens
aatattggtattaca

SEQ ID NO: 458889 - DNA, 15 bp, Homo sapiens
aaatattggtattac

SEQ ID NO: 458890 - DNA, 15 bp, Homo sapiens
aaaatattggtatta

SEQ ID NO: 458891 - DNA, 15 bp, Homo sapiens
taaaatattggtatt

SEQ ID NO: 458892 - DNA, 15 bp, Homo sapiens
ctaaaatattggtat

SEQ ID NO: 458893 - DNA, 15 bp, Homo sapiens
tctaaaatattggta

SEQ ID NO: 458894 - DNA, 15 bp, Homo sapiens
ctctaaaatattggt

SEQ ID NO: 458895 - DNA, 15 bp, Homo sapiens
actctaaaatattgg

SEQ ID NO: 458896 - DNA, 15 bp, Homo sapiens
tactctaaaatattg

SEQ ID NO: 458897 - DNA, 15 bp, Homo sapiens
ttactctaaaatatt

SEQ ID NO: 458898 - DNA, 15 bp, Homo sapiens
tttactctaaaatat

SEQ ID NO: 458899 - DNA, 15 bp, Homo sapiens
atttactctaaaata

SEQ ID NO: 458900 - DNA, 15 bp, Homo sapiens
aatttactctaaaat

SEQ ID NO: 458901 - DNA, 15 bp, Homo sapiens
aaatttactctaaaa

SEQ ID NO: 458902 - DNA, 15 bp, Homo sapiens
aaaatttactctaaa

SEQ ID NO: 458903 - DNA, 15 bp, Homo sapiens
caaaatttactctaa

SEQ ID NO: 458904 - DNA, 15 bp, Homo sapiens
tcaaaatttactcta

SEQ ID NO: 458905 - DNA, 15 bp, Homo sapiens
ttcaaaatttactct

SEQ ID NO: 458906 - DNA, 15 bp, Homo sapiens
tttcaaaatttactc

SEQ ID NO: 458907 - DNA, 15 bp, Homo sapiens
atttcaaaatttact

SEQ ID NO: 458908 - DNA, 15 bp, Homo sapiens
catttcaaaatttac

SEQ ID NO: 458909 - DNA, 15 bp, Homo sapiens
tcatttcaaaattta

SEQ ID NO: 458910 - DNA, 15 bp, Homo sapiens
ttcatttcaaaattt

SEQ ID NO: 458911 - DNA, 15 bp, Homo sapiens
attcatttcaaaatt

SEQ ID NO: 458912 - DNA, 15 bp, Homo sapiens
gattcatttcaaaat

SEQ ID NO: 458913 - DNA, 15 bp, Homo sapiens
tgattcatttcaaaa

SEQ ID NO: 458914 - DNA, 15 bp, Homo sapiens
ctgattcatttcaaa

SEQ ID NO: 458915 - DNA, 15 bp, Homo sapiens
actgattcatttcaa

SEQ ID NO: 458916 - DNA, 15 bp, Homo sapiens
tactgattcatttca

SEQ ID NO: 458917 - DNA, 15 bp, Homo sapiens
gtactgattcatttc

SEQ ID NO: 458918 - DNA, 15 bp, Homo sapiens
tgtactgattcattt

SEQ ID NO: 458919 - DNA, 15 bp, Homo sapiens
ttgtactgattcatt

SEQ ID NO: 458920 - DNA, 15 bp, Homo sapiens
tttgtactgattcat

SEQ ID NO: 458921 - DNA, 15 bp, Homo sapiens
ttttgtactgattca

SEQ ID NO: 458922 - DNA, 15 bp, Homo sapiens
cttttgtactgattc

SEQ ID NO: 458923 - DNA, 15 bp, Homo sapiens
tcttttgtactgatt

SEQ ID NO: 458924 - DNA, 15 bp, Homo sapiens
atcttttgtactgat

SEQ ID NO: 458925 - DNA, 15 bp, Homo sapiens
tatcttttgtactga

SEQ ID NO: 458926 - DNA, 15 bp, Homo sapiens
atatcttttgtactg

SEQ ID NO: 458927 - DNA, 15 bp, Homo sapiens
catatcttttgtact

SEQ ID NO: 458928 - DNA, 15 bp, Homo sapiens
acatatcttttgtac

SEQ ID NO: 458929 - DNA, 15 bp, Homo sapiens
tacatatcttttgta

SEQ ID NO: 458930 - DNA, 15 bp, Homo sapiens
ctacatatcttttgt

SEQ ID NO: 458931 - DNA, 15 bp, Homo sapiens
actacatatcttttg

SEQ ID NO: 458932 - DNA, 15 bp, Homo sapiens
tactacatatctttt

SEQ ID NO: 458933 - DNA, 15 bp, Homo sapiens
ttactacatatcttt

SEQ ID NO: 458934 - DNA, 15 bp, Homo sapiens
cttactacatatctt

SEQ ID NO: 458935 - DNA, 15 bp, Homo sapiens
acttactacatatct

SEQ ID NO: 458936 - DNA, 15 bp, Homo sapiens
cacttactacatatc

SEQ ID NO: 458937 - DNA, 15 bp, Homo sapiens
ccacttactacatat

SEQ ID NO: 458938 - DNA, 15 bp, Homo sapiens
tccacttactacata

SEQ ID NO: 458939 - DNA, 15 bp, Homo sapiens
ttccacttactacat

SEQ ID NO: 458940 - DNA, 15 bp, Homo sapiens
tttccacttactaca

SEQ ID NO: 458941 - DNA, 15 bp, Homo sapiens
ctttccacttactac

SEQ ID NO: 458942 - DNA, 15 bp, Homo sapiens
actttccacttacta

SEQ ID NO: 458943 - DNA, 15 bp, Homo sapiens
aactttccacttact

SEQ ID NO: 458944 - DNA, 15 bp, Homo sapiens
taactttccacttac

SEQ ID NO: 458945 - DNA, 15 bp, Homo sapiens
ctaactttccactta

SEQ ID NO: 458946 - DNA, 15 bp, Homo sapiens
actaactttccactt

SEQ ID NO: 458947 - DNA, 15 bp, Homo sapiens
gactaactttccact

SEQ ID NO: 458948 - DNA, 15 bp, Homo sapiens
ggactaactttccac

SEQ ID NO: 458949 - DNA, 15 bp, Homo sapiens
cggactaactttcca

SEQ ID NO: 458950 - DNA, 15 bp, Homo sapiens
gcggactaactttcc

SEQ ID NO: 458951 - DNA, 15 bp, Homo sapiens
tgcggactaactttc

SEQ ID NO: 458952 - DNA, 15 bp, Homo sapiens
gtgcggactaacttt

SEQ ID NO: 458953 - DNA, 15 bp, Homo sapiens
ggtgcggactaactt

SEQ ID NO: 458954 - DNA, 15 bp, Homo sapiens
aggtgcggactaact

SEQ ID NO: 458955 - DNA, 15 bp, Homo sapiens
aaggtgcggactaac

SEQ ID NO: 458956 - DNA, 15 bp, Homo sapiens
taaggtgcggactaa

SEQ ID NO: 458957 - DNA, 15 bp, Homo sapiens
ataaggtgcggacta

SEQ ID NO: 458958 - DNA, 15 bp, Homo sapiens
gataaggtgcggact

SEQ ID NO: 458959 - DNA, 15 bp, Homo sapiens
ggataaggtgcggac

SEQ ID NO: 458960 - DNA, 15 bp, Homo sapiens
aggataaggtgcgga

SEQ ID NO: 458961 - DNA, 15 bp, Homo sapiens
aaggataaggtgcgg

SEQ ID NO: 458962 - DNA, 15 bp, Homo sapiens
caaggataaggtgcg

SEQ ID NO: 458963 - DNA, 15 bp, Homo sapiens
ccaaggataaggtgc

SEQ ID NO: 458964 - DNA, 15 bp, Homo sapiens
cccaaggataaggtg

SEQ ID NO: 458965 - DNA, 15 bp, Homo sapiens
tcccaaggataaggt

SEQ ID NO: 458966 - DNA, 15 bp, Homo sapiens
gtcccaaggataagg

SEQ ID NO: 458967 - DNA, 15 bp, Homo sapiens
agtcccaaggataag

SEQ ID NO: 458968 - DNA, 15 bp, Homo sapiens
gagtcccaaggataa

SEQ ID NO: 458969 - DNA, 15 bp, Homo sapiens
agagtcccaaggata

SEQ ID NO: 458970 - DNA, 15 bp, Homo sapiens
aagagtcccaaggat

SEQ ID NO: 458971 - DNA, 15 bp, Homo sapiens
aaagagtcccaagga

SEQ ID NO: 458972 - DNA, 15 bp, Homo sapiens
gaaagagtcccaagg

SEQ ID NO: 458973 - DNA, 15 bp, Homo sapiens
ggaaagagtcccaag

SEQ ID NO: 458974 - DNA, 15 bp, Homo sapiens
gggaaagagtcccaa

SEQ ID NO: 458975 - DNA, 15 bp, Homo sapiens
tgggaaagagtccca

SEQ ID NO: 458976 - DNA, 15 bp, Homo sapiens
ctgggaaagagtccc

SEQ ID NO: 458977 - DNA, 15 bp, Homo sapiens
cctgggaaagagtcc

SEQ ID NO: 458978 - DNA, 15 bp, Homo sapiens
ccctgggaaagagtc

SEQ ID NO: 458979 - DNA, 15 bp, Homo sapiens
tccctgggaaagagt

SEQ ID NO: 458980 - DNA, 15 bp, Homo sapiens
gtccctgggaaagag

SEQ ID NO: 458981 - DNA, 15 bp, Homo sapiens
tgtccctgggaaaga

SEQ ID NO: 458982 - DNA, 15 bp, Homo sapiens
ctgtccctgggaaag

SEQ ID NO: 458983 - DNA, 15 bp, Homo sapiens
gctgtccctgggaaa

SEQ ID NO: 458984 - DNA, 15 bp, Homo sapiens
agctgtccctgggaa

SEQ ID NO: 458985 - DNA, 15 bp, Homo sapiens
tagctgtccctggga

SEQ ID NO: 458986 - DNA, 15 bp, Homo sapiens
ctagctgtccctggg

SEQ ID NO: 458987 - DNA, 15 bp, Homo sapiens
actagctgtccctgg

SEQ ID NO: 458988 - DNA, 15 bp, Homo sapiens
aactagctgtccctg

SEQ ID NO: 458989 - DNA, 15 bp, Homo sapiens
taactagctgtccct

SEQ ID NO: 458990 - DNA, 15 bp, Homo sapiens
gtaactagctgtccc

SEQ ID NO: 458991 - DNA, 15 bp, Homo sapiens
ggtaactagctgtcc

SEQ ID NO: 458992 - DNA, 15 bp, Homo sapiens
aggtaactagctgtc

SEQ ID NO: 458993 - DNA, 15 bp, Homo sapiens
taggtaactagctgt

SEQ ID NO: 458994 - DNA, 15 bp, Homo sapiens
gtaggtaactagctg

SEQ ID NO: 458995 - DNA, 15 bp, Homo sapiens
agtaggtaactagct

SEQ ID NO: 458996 - DNA, 15 bp, Homo sapiens
tagtaggtaactagc

SEQ ID NO: 458997 - DNA, 15 bp, Homo sapiens
atagtaggtaactag

SEQ ID NO: 458998 - DNA, 15 bp, Homo sapiens
aatagtaggtaacta

SEQ ID NO: 458999 - DNA, 15 bp, Homo sapiens
aaatagtaggtaact

SEQ ID NO: 459000 - DNA, 15 bp, Homo sapiens
taaatagtaggtaac

SEQ ID NO: 459001 - DNA, 15 bp, Homo sapiens
ataaatagtaggtaa

SEQ ID NO: 459002 - DNA, 15 bp, Homo sapiens
gataaatagtaggta

SEQ ID NO: 459003 - DNA, 15 bp, Homo sapiens
agataaatagtaggt

SEQ ID NO: 459004 - DNA, 15 bp, Homo sapiens
gagataaatagtagg

SEQ ID NO: 459005 - DNA, 15 bp, Homo sapiens
agagataaatagtag

SEQ ID NO: 459006 - DNA, 15 bp, Homo sapiens
cacttacatggaaca

SEQ ID NO: 459007 - DNA, 15 bp, Homo sapiens
tcacttacatggaac

SEQ ID NO: 459008 - DNA, 15 bp, Homo sapiens
gtcacttacatggaa

SEQ ID NO: 459009 - DNA, 15 bp, Homo sapiens
ggtcacttacatgga

SEQ ID NO: 459010 - DNA, 15 bp, Homo sapiens
tggtcacttacatgg

SEQ ID NO: 459011 - DNA, 15 bp, Homo sapiens
ctggtcacttacatg

SEQ ID NO: 459012 - DNA, 15 bp, Homo sapiens
cctggtcacttacat

SEQ ID NO: 459013 - DNA, 15 bp, Homo sapiens
tcctggtcacttaca

SEQ ID NO: 459014 - DNA, 15 bp, Homo sapiens
gtcctggtcacttac

SEQ ID NO: 459015 - DNA, 15 bp, Homo sapiens
agtcctggtcactta

SEQ ID NO: 459016 - DNA, 15 bp, Homo sapiens
tagtcctggtcactt

SEQ ID NO: 459017 - DNA, 15 bp, Homo sapiens
gtagtcctggtcact

SEQ ID NO: 459018 - DNA, 15 bp, Homo sapiens
ggtagtcctggtcac

SEQ ID NO: 459019 - DNA, 15 bp, Homo sapiens
aggtagtcctggtca

SEQ ID NO: 459020 - DNA, 15 bp, Homo sapiens
aaggtagtcctggtc

SEQ ID NO: 459021 - DNA, 15 bp, Homo sapiens
taaggtagtcctggt

SEQ ID NO: 459022 - DNA, 15 bp, Homo sapiens
ctaaggtagtcctgg

SEQ ID NO: 459023 - DNA, 15 bp, Homo sapiens
actaaggtagtcctg

SEQ ID NO: 459024 - DNA, 15 bp, Homo sapiens
tactaaggtagtcct

SEQ ID NO: 459025 - DNA, 15 bp, Homo sapiens
atactaaggtagtcc

SEQ ID NO: 459026 - DNA, 15 bp, Homo sapiens
aatactaaggtagtc

SEQ ID NO: 459027 - DNA, 15 bp, Homo sapiens
aaatactaaggtagt

SEQ ID NO: 459028 - DNA, 15 bp, Homo sapiens
gaaatactaaggtag

SEQ ID NO: 459029 - DNA, 15 bp, Homo sapiens
cgaaatactaaggta

SEQ ID NO: 459030 - DNA, 15 bp, Homo sapiens
acgaaatactaaggt

SEQ ID NO: 459031 - DNA, 15 bp, Homo sapiens
tacgaaatactaagg

SEQ ID NO: 459032 - DNA, 15 bp, Homo sapiens
atacgaaatactaag

SEQ ID NO: 459033 - DNA, 15 bp, Homo sapiens
tatacgaaatactaa

SEQ ID NO: 459034 - DNA, 15 bp, Homo sapiens
ctatacgaaatacta

SEQ ID NO: 459035 - DNA, 15 bp, Homo sapiens
cctatacgaaatact

SEQ ID NO: 459036 - DNA, 15 bp, Homo sapiens
ccctatacgaaatac

SEQ ID NO: 459037 - DNA, 15 bp, Homo sapiens
tccctatacgaaata

SEQ ID NO: 459038 - DNA, 15 bp, Homo sapiens
ttccctatacgaaat

SEQ ID NO: 459039 - DNA, 15 bp, Homo sapiens
tttccctatacgaaa

SEQ ID NO: 459040 - DNA, 15 bp, Homo sapiens
ctttccctatacgaa

SEQ ID NO: 459041 - DNA, 15 bp, Homo sapiens
actttccctatacga

SEQ ID NO: 459042 - DNA, 15 bp, Homo sapiens
cactttccctatacg

SEQ ID NO: 459043 - DNA, 15 bp, Homo sapiens
tcactttccctatac

SEQ ID NO: 459044 - DNA, 15 bp, Homo sapiens
gtcactttccctata

SEQ ID NO: 459045 - DNA, 15 bp, Homo sapiens
ggtcactttccctat

SEQ ID NO: 459046 - DNA, 15 bp, Homo sapiens
aggtcactttcccta

SEQ ID NO: 459047 - DNA, 15 bp, Homo sapiens
caggtcactttccct

SEQ ID NO: 459048 - DNA, 15 bp, Homo sapiens
tcaggtcactttccc

SEQ ID NO: 459049 - DNA, 15 bp, Homo sapiens
ttcaggtcactttcc

SEQ ID NO: 459050 - DNA, 15 bp, Homo sapiens
attcaggtcactttc

SEQ ID NO: 459051 - DNA, 15 bp, Homo sapiens
tattcaggtcacttt

SEQ ID NO: 459052 - DNA, 15 bp, Homo sapiens
ttattcaggtcactt

SEQ ID NO: 459053 - DNA, 15 bp, Homo sapiens
tttattcaggtcact

SEQ ID NO: 459054 - DNA, 15 bp, Homo sapiens
atttattcaggtcac

SEQ ID NO: 459055 - DNA, 15 bp, Homo sapiens
aatttattcaggtca

SEQ ID NO: 459056 - DNA, 15 bp, Homo sapiens
aaatttattcaggtc

SEQ ID NO: 459057 - DNA, 15 bp, Homo sapiens
caaatttattcaggt

SEQ ID NO: 459058 - DNA, 15 bp, Homo sapiens
tcaaatttattcagg

SEQ ID NO: 459059 - DNA, 15 bp, Homo sapiens
ctcaaatttattcag

SEQ ID NO: 459060 - DNA, 15 bp, Homo sapiens
tctcaaatttattca

SEQ ID NO: 459061 - DNA, 15 bp, Homo sapiens
ttctcaaatttattc

SEQ ID NO: 459062 - DNA, 15 bp, Homo sapiens
tttctcaaatttatt

SEQ ID NO: 459063 - DNA, 15 bp, Homo sapiens
ttttctcaaatttat

SEQ ID NO: 459064 - DNA, 15 bp, Homo sapiens
cttttctcaaattta

SEQ ID NO: 459065 - DNA, 15 bp, Homo sapiens
tcttttctcaaattt

SEQ ID NO: 459066 - DNA, 15 bp, Homo sapiens
ttcttttctcaaatt

SEQ ID NO: 459067 - DNA, 15 bp, Homo sapiens
attcttttctcaaat

SEQ ID NO: 459068 - DNA, 15 bp, Homo sapiens
gattcttttctcaaa

SEQ ID NO: 459069 - DNA, 15 bp, Homo sapiens
agattcttttctcaa

SEQ ID NO: 459070 - DNA, 15 bp, Homo sapiens
aagattcttttctca

SEQ ID NO: 459071 - DNA, 15 bp, Homo sapiens
gaagattcttttctc

SEQ ID NO: 459072 - DNA, 15 bp, Homo sapiens
ggaagattcttttct

SEQ ID NO: 459073 - DNA, 15 bp, Homo sapiens
aggaagattcttttc

SEQ ID NO: 459074 - DNA, 15 bp, Homo sapiens
aaggaagattctttt

SEQ ID NO: 459075 - DNA, 15 bp, Homo sapiens
gaaggaagattcttt

SEQ ID NO: 459076 - DNA, 15 bp, Homo sapiens
agaaggaagattctt

SEQ ID NO: 459077 - DNA, 15 bp, Homo sapiens
gagaaggaagattct

SEQ ID NO: 459078 - DNA, 15 bp, Homo sapiens
agagaaggaagattc

SEQ ID NO: 459079 - DNA, 15 bp, Homo sapiens
gagagaaggaagatt

SEQ ID NO: 459080 - DNA, 15 bp, Homo sapiens
ggagagaaggaagat

SEQ ID NO: 459081 - DNA, 15 bp, Homo sapiens
tggagagaaggaaga

SEQ ID NO: 459082 - DNA, 15 bp, Homo sapiens
ctggagagaaggaag

SEQ ID NO: 459083 - DNA, 15 bp, Homo sapiens
actggagagaaggaa

SEQ ID NO: 459084 - DNA, 15 bp, Homo sapiens
tactggagagaagga

SEQ ID NO: 459085 - DNA, 15 bp, Homo sapiens
ttactggagagaagg

SEQ ID NO: 459086 - DNA, 15 bp, Homo sapiens
cttactggagagaag

SEQ ID NO: 459087 - DNA, 15 bp, Homo sapiens
gcttactggagagaa

SEQ ID NO: 459088 - DNA, 15 bp, Homo sapiens
tgcttactggagaga

SEQ ID NO: 459089 - DNA, 15 bp, Homo sapiens
gtgcttactggagag

SEQ ID NO: 459090 - DNA, 15 bp, Homo sapiens
agtgcttactggaga

SEQ ID NO: 459091 - DNA, 15 bp, Homo sapiens
cagtgcttactggag

SEQ ID NO: 459092 - DNA, 15 bp, Homo sapiens
tcagtgcttactgga

SEQ ID NO: 459093 - DNA, 15 bp, Homo sapiens
ctcagtgcttactgg

SEQ ID NO: 459094 - DNA, 15 bp, Homo sapiens
cctcagtgcttactg

SEQ ID NO: 459095 - DNA, 15 bp, Homo sapiens
acctcagtgcttact

SEQ ID NO: 459096 - DNA, 15 bp, Homo sapiens
tacctcagtgcttac

SEQ ID NO: 459097 - DNA, 15 bp, Homo sapiens
ttacctcagtgctta

SEQ ID NO: 459098 - DNA, 15 bp, Homo sapiens
cttacctcagtgctt

SEQ ID NO: 459099 - DNA, 15 bp, Homo sapiens
gcttacctcagtgct

SEQ ID NO: 459100 - DNA, 15 bp, Homo sapiens
tgcttacctcagtgc

SEQ ID NO: 459101 - DNA, 15 bp, Homo sapiens
atgcttacctcagtg

SEQ ID NO: 459102 - DNA, 15 bp, Homo sapiens
aatgcttacctcagt

SEQ ID NO: 459103 - DNA, 15 bp, Homo sapiens
caatgcttacctcag

SEQ ID NO: 459104 - DNA, 15 bp, Homo sapiens
tcaatgcttacctca

SEQ ID NO: 459105 - DNA, 15 bp, Homo sapiens
ctcaatgcttacctc

SEQ ID NO: 459106 - DNA, 15 bp, Homo sapiens
gctcaatgcttacct

SEQ ID NO: 459107 - DNA, 15 bp, Homo sapiens
ggctcaatgcttacc

SEQ ID NO: 459108 - DNA, 15 bp, Homo sapiens
tggctcaatgcttac

SEQ ID NO: 459109 - DNA, 15 bp, Homo sapiens
atggctcaatgctta

SEQ ID NO: 459110 - DNA, 15 bp, Homo sapiens
tatggctcaatgctt

SEQ ID NO: 459111 - DNA, 15 bp, Homo sapiens
atatggctcaatgct

SEQ ID NO: 459112 - DNA, 15 bp, Homo sapiens
aatatggctcaatgc

SEQ ID NO: 459113 - DNA, 15 bp, Homo sapiens
taatatggctcaatg

SEQ ID NO: 459114 - DNA, 15 bp, Homo sapiens
ataatatggctcaat

SEQ ID NO: 459115 - DNA, 15 bp, Homo sapiens
tataatatggctcaa

SEQ ID NO: 459116 - DNA, 15 bp, Homo sapiens
ctataatatggctca

SEQ ID NO: 459117 - DNA, 15 bp, Homo sapiens
cctataatatggctc

SEQ ID NO: 459118 - DNA, 15 bp, Homo sapiens
acctataatatggct

SEQ ID NO: 459119 - DNA, 15 bp, Homo sapiens
aacctataatatggc

SEQ ID NO: 459120 - DNA, 15 bp, Homo sapiens
aaacctataatatgg

SEQ ID NO: 459121 - DNA, 15 bp, Homo sapiens
taaacctataatatg

SEQ ID NO: 459122 - DNA, 15 bp, Homo sapiens
ataaacctataatat

SEQ ID NO: 459123 - DNA, 15 bp, Homo sapiens
cataaacctataata

SEQ ID NO: 459124 - DNA, 15 bp, Homo sapiens
tcataaacctataat

SEQ ID NO: 459125 - DNA, 15 bp, Homo sapiens
gtcataaacctataa

SEQ ID NO: 459126 - DNA, 15 bp, Homo sapiens
agtcataaacctata

SEQ ID NO: 459127 - DNA, 15 bp, Homo sapiens
aagtcataaacctat

SEQ ID NO: 459128 - DNA, 15 bp, Homo sapiens
aaagtcataaaccta

SEQ ID NO: 459129 - DNA, 15 bp, Homo sapiens
caaagtcataaacct

SEQ ID NO: 459130 - DNA, 15 bp, Homo sapiens
tcaaagtcataaacc

SEQ ID NO: 459131 - DNA, 15 bp, Homo sapiens
ctcaaagtcataaac

SEQ ID NO: 459132 - DNA, 15 bp, Homo sapiens
tctcaaagtcataaa

SEQ ID NO: 459133 - DNA, 15 bp, Homo sapiens
gtctcaaagtcataa

SEQ ID NO: 459134 - DNA, 15 bp, Homo sapiens
agtctcaaagtcata

SEQ ID NO: 459135 - DNA, 15 bp, Homo sapiens
gagtctcaaagtcat

SEQ ID NO: 459136 - DNA, 15 bp, Homo sapiens
tgagtctcaaagtca

SEQ ID NO: 459137 - DNA, 15 bp, Homo sapiens
ctgagtctcaaagtc

SEQ ID NO: 459138 - DNA, 15 bp, Homo sapiens
tctgagtctcaaagt

SEQ ID NO: 459139 - DNA, 15 bp, Homo sapiens
ttctgagtctcaaag

SEQ ID NO: 459140 - DNA, 15 bp, Homo sapiens
tttctgagtctcaaa

SEQ ID NO: 459141 - DNA, 15 bp, Homo sapiens
atttctgagtctcaa

SEQ ID NO: 459142 - DNA, 15 bp, Homo sapiens
aatttctgagtctca

SEQ ID NO: 459143 - DNA, 15 bp, Homo sapiens
aaatttctgagtctc

SEQ ID NO: 459144 - DNA, 15 bp, Homo sapiens
taaatttctgagtct

SEQ ID NO: 459145 - DNA, 15 bp, Homo sapiens
ttaaatttctgagtc

SEQ ID NO: 459146 - DNA, 15 bp, Homo sapiens
tttaaatttctgagt

SEQ ID NO: 459147 - DNA, 15 bp, Homo sapiens
atttaaatttctgag

SEQ ID NO: 459148 - DNA, 15 bp, Homo sapiens
aatttaaatttctga

SEQ ID NO: 459149 - DNA, 15 bp, Homo sapiens
gaatttaaatttctg

SEQ ID NO: 459150 - DNA, 15 bp, Homo sapiens
agaatttaaatttct

SEQ ID NO: 459151 - DNA, 15 bp, Homo sapiens
aagaatttaaatttc

SEQ ID NO: 459152 - DNA, 15 bp, Homo sapiens
caagaatttaaattt

SEQ ID NO: 459153 - DNA, 15 bp, Homo sapiens
ccaagaatttaaatt

SEQ ID NO: 459154 - DNA, 15 bp, Homo sapiens
gccaagaatttaaat

SEQ ID NO: 459155 - DNA, 15 bp, Homo sapiens
ggccaagaatttaaa

SEQ ID NO: 459156 - DNA, 15 bp, Homo sapiens
tggccaagaatttaa

SEQ ID NO: 459157 - DNA, 15 bp, Homo sapiens
ctggccaagaattta

SEQ ID NO: 459158 - DNA, 15 bp, Homo sapiens
cctggccaagaattt

SEQ ID NO: 459159 - DNA, 15 bp, Homo sapiens
gcctggccaagaatt

SEQ ID NO: 459160 - DNA, 15 bp, Homo sapiens
cgcctggccaagaat

SEQ ID NO: 459161 - DNA, 15 bp, Homo sapiens
gcgcctggccaagaa

SEQ ID NO: 459162 - DNA, 15 bp, Homo sapiens
tgcgcctggccaaga

SEQ ID NO: 459163 - DNA, 15 bp, Homo sapiens
ctgcgcctggccaag

SEQ ID NO: 459164 - DNA, 15 bp, Homo sapiens
actgcgcctggccaa

SEQ ID NO: 459165 - DNA, 15 bp, Homo sapiens
cactgcgcctggcca

SEQ ID NO: 459166 - DNA, 15 bp, Homo sapiens
ccactgcgcctggcc

SEQ ID NO: 459167 - DNA, 15 bp, Homo sapiens
gccactgcgcctggc

SEQ ID NO: 459168 - DNA, 15 bp, Homo sapiens
agccactgcgcctgg

SEQ ID NO: 459169 - DNA, 15 bp, Homo sapiens
gagccactgcgcctg

SEQ ID NO: 459170 - DNA, 15 bp, Homo sapiens
tgagccactgcgcct

SEQ ID NO: 459171 - DNA, 15 bp, Homo sapiens
gtgagccactgcgcc

SEQ ID NO: 459172 - DNA, 15 bp, Homo sapiens
cgtgagccactgcgc

SEQ ID NO: 459173 - DNA, 15 bp, Homo sapiens
gcgtgagccactgcg

SEQ ID NO: 459174 - DNA, 15 bp, Homo sapiens
ggcgtgagccactgc

SEQ ID NO: 459175 - DNA, 15 bp, Homo sapiens
aggcgtgagccactg

SEQ ID NO: 459176 - DNA, 15 bp, Homo sapiens
caggcgtgagccact

SEQ ID NO: 459177 - DNA, 15 bp, Homo sapiens
gttacaggcgtgagc

SEQ ID NO: 459178 - DNA, 15 bp, Homo sapiens
ggttacaggcgtgag

SEQ ID NO: 459179 - DNA, 15 bp, Homo sapiens
gggttacaggcgtga

SEQ ID NO: 459180 - DNA, 15 bp, Homo sapiens
ggggttacaggcgtg

SEQ ID NO: 459181 - DNA, 15 bp, Homo sapiens
tggggttacaggcgt

SEQ ID NO: 459182 - DNA, 15 bp, Homo sapiens
ttggggttacaggcg

SEQ ID NO: 459183 - DNA, 15 bp, Homo sapiens
gttggggttacaggc

SEQ ID NO: 459184 - DNA, 15 bp, Homo sapiens
tgttggggttacagg

SEQ ID NO: 459185 - DNA, 15 bp, Homo sapiens
gtgttggggttacag

SEQ ID NO: 459186 - DNA, 15 bp, Homo sapiens
agtgttggggttaca

SEQ ID NO: 459187 - DNA, 15 bp, Homo sapiens
aagtgttggggttac

SEQ ID NO: 459188 - DNA, 15 bp, Homo sapiens
aaagtgttggggtta

SEQ ID NO: 459189 - DNA, 15 bp, Homo sapiens
caaagtgttggggtt

SEQ ID NO: 459190 - DNA, 15 bp, Homo sapiens
ccaaagtgttggggt

SEQ ID NO: 459191 - DNA, 15 bp, Homo sapiens
cccaaagtgttgggg

SEQ ID NO: 459192 - DNA, 15 bp, Homo sapiens
tcccaaagtgttggg

SEQ ID NO: 459193 - DNA, 15 bp, Homo sapiens
ctcccaaagtgttgg

SEQ ID NO: 459194 - DNA, 15 bp, Homo sapiens
cctcccaaagtgttg

SEQ ID NO: 459195 - DNA, 15 bp, Homo sapiens
gcctcccaaagtgtt

SEQ ID NO: 459196 - DNA, 15 bp, Homo sapiens
ggcctcccaaagtgt

SEQ ID NO: 459197 - DNA, 15 bp, Homo sapiens
tgcctgccttggcct

SEQ ID NO: 459198 - DNA, 15 bp, Homo sapiens
ctgcctgccttggcc

SEQ ID NO: 459199 - DNA, 15 bp, Homo sapiens
tctgcctgccttggc

SEQ ID NO: 459200 - DNA, 15 bp, Homo sapiens
atctgcctgccttgg

SEQ ID NO: 459201 - DNA, 15 bp, Homo sapiens
gatctgcctgccttg

SEQ ID NO: 459202 - DNA, 15 bp, Homo sapiens
tgatctgcctgcctt

SEQ ID NO: 459203 - DNA, 15 bp, Homo sapiens
gtgatctgcctgcct

SEQ ID NO: 459204 - DNA, 15 bp, Homo sapiens
agtgatctgcctgcc

SEQ ID NO: 459205 - DNA, 15 bp, Homo sapiens
aagtgatctgcctgc

SEQ ID NO: 459206 - DNA, 15 bp, Homo sapiens
caagtgatctgcctg

SEQ ID NO: 459207 - DNA, 15 bp, Homo sapiens
tcaagtgatctgcct

SEQ ID NO: 459208 - DNA, 15 bp, Homo sapiens
ctcaagtgatctgcc

SEQ ID NO: 459209 - DNA, 15 bp, Homo sapiens
cctcaagtgatctgc

SEQ ID NO: 459210 - DNA, 15 bp, Homo sapiens
acctcaagtgatctg

SEQ ID NO: 459211 - DNA, 15 bp, Homo sapiens
gacctcaagtgatct

SEQ ID NO: 459212 - DNA, 15 bp, Homo sapiens
ttggtctcaaactcc

SEQ ID NO: 459213 - DNA, 15 bp, Homo sapiens
gttggtctcaaactc

SEQ ID NO: 459214 - DNA, 15 bp, Homo sapiens
ggttggtctcaaact

SEQ ID NO: 459215 - DNA, 15 bp, Homo sapiens
aggttggtctcaaac

SEQ ID NO: 459216 - DNA, 15 bp, Homo sapiens
caggttggtctcaaa

SEQ ID NO: 459217 - DNA, 15 bp, Homo sapiens
ccaggttggtctcaa

SEQ ID NO: 459218 - DNA, 15 bp, Homo sapiens
gccaggttggtctca

SEQ ID NO: 459219 - DNA, 15 bp, Homo sapiens
ggccaggttggtctc

SEQ ID NO: 459220 - DNA, 15 bp, Homo sapiens
tggccaggttggtct

SEQ ID NO: 459221 - DNA, 15 bp, Homo sapiens
ttggccaggttggtc

SEQ ID NO: 459222 - DNA, 15 bp, Homo sapiens
tttggccaggttggt

SEQ ID NO: 459223 - DNA, 15 bp, Homo sapiens
ttttggccaggttgg

SEQ ID NO: 459224 - DNA, 15 bp, Homo sapiens
attttggccaggttg

SEQ ID NO: 459225 - DNA, 15 bp, Homo sapiens
cattttggccaggtt

SEQ ID NO: 459226 - DNA, 15 bp, Homo sapiens
ccattttggccaggt

SEQ ID NO: 459227 - DNA, 15 bp, Homo sapiens
accattttggccagg

SEQ ID NO: 459228 - DNA, 15 bp, Homo sapiens
caccattttggccag

SEQ ID NO: 459229 - DNA, 15 bp, Homo sapiens
tcaccattttggcca

SEQ ID NO: 459230 - DNA, 15 bp, Homo sapiens
ttcaccattttggcc

SEQ ID NO: 459231 - DNA, 15 bp, Homo sapiens
tttcaccattttggc

SEQ ID NO: 459232 - DNA, 15 bp, Homo sapiens
gtttcaccattttgg

SEQ ID NO: 459233 - DNA, 15 bp, Homo sapiens
agtttcaccattttg

SEQ ID NO: 459234 - DNA, 15 bp, Homo sapiens
gagtttcaccatttt

SEQ ID NO: 459235 - DNA, 15 bp, Homo sapiens
ggagtttcaccattt

SEQ ID NO: 459236 - DNA, 15 bp, Homo sapiens
tggagtttcaccatt

SEQ ID NO: 459237 - DNA, 15 bp, Homo sapiens
atggagtttcaccat

SEQ ID NO: 459238 - DNA, 15 bp, Homo sapiens
gatggagtttcacca

SEQ ID NO: 459239 - DNA, 15 bp, Homo sapiens
agatggagtttcacc

SEQ ID NO: 459240 - DNA, 15 bp, Homo sapiens
gagatggagtttcac

SEQ ID NO: 459241 - DNA, 15 bp, Homo sapiens
agagatggagtttca

SEQ ID NO: 459242 - DNA, 15 bp, Homo sapiens
tagagatggagtttc

SEQ ID NO: 459243 - DNA, 15 bp, Homo sapiens
gtagagatggagttt

SEQ ID NO: 459244 - DNA, 15 bp, Homo sapiens
cgtagagatggagtt

SEQ ID NO: 459245 - DNA, 15 bp, Homo sapiens
tcgtagagatggagt

SEQ ID NO: 459246 - DNA, 15 bp, Homo sapiens
ttcgtagagatggag

SEQ ID NO: 459247 - DNA, 15 bp, Homo sapiens
tttcgtagagatgga

SEQ ID NO: 459248 - DNA, 15 bp, Homo sapiens
ttttcgtagagatgg

SEQ ID NO: 459249 - DNA, 15 bp, Homo sapiens
tttttcgtagagatg

SEQ ID NO: 459250 - DNA, 15 bp, Homo sapiens
atttttcgtagagat

SEQ ID NO: 459251 - DNA, 15 bp, Homo sapiens
tatttttcgtagaga

SEQ ID NO: 459252 - DNA, 15 bp, Homo sapiens
gtatttttcgtagag

SEQ ID NO: 459253 - DNA, 15 bp, Homo sapiens
tgtatttttcgtaga

SEQ ID NO: 459254 - DNA, 15 bp, Homo sapiens
ttgtatttttcgtag

SEQ ID NO: 459255 - DNA, 15 bp, Homo sapiens
tttgtatttttcgta

SEQ ID NO: 459256 - DNA, 15 bp, Homo sapiens
ttttgtatttttcgt

SEQ ID NO: 459257 - DNA, 15 bp, Homo sapiens
tttttgtatttttcg

SEQ ID NO: 459258 - DNA, 15 bp, Homo sapiens
atttttgtatttttc

SEQ ID NO: 459259 - DNA, 15 bp, Homo sapiens
cgccaccacacctgg

SEQ ID NO: 459260 - DNA, 15 bp, Homo sapiens
ccgccaccacacctg

SEQ ID NO: 459261 - DNA, 15 bp, Homo sapiens
cccgccaccacacct

SEQ ID NO: 459262 - DNA, 15 bp, Homo sapiens
gcccgccaccacacc

SEQ ID NO: 459263 - DNA, 15 bp, Homo sapiens
tgcccgccaccacac

SEQ ID NO: 459264 - DNA, 15 bp, Homo sapiens
gtgcccgccaccaca

SEQ ID NO: 459265 - DNA, 15 bp, Homo sapiens
ggtgcccgccaccac

SEQ ID NO: 459266 - DNA, 15 bp, Homo sapiens
aggtgcccgccacca

SEQ ID NO: 459267 - DNA, 15 bp, Homo sapiens
caggtgcccgccacc

SEQ ID NO: 459268 - DNA, 15 bp, Homo sapiens
acaggtgcccgccac

SEQ ID NO: 459269 - DNA, 15 bp, Homo sapiens
tacaggtgcccgcca

SEQ ID NO: 459270 - DNA, 15 bp, Homo sapiens
ttacaggtgcccgcc

SEQ ID NO: 459271 - DNA, 15 bp, Homo sapiens
attacaggtgcccgc

SEQ ID NO: 459272 - DNA, 15 bp, Homo sapiens
gattacaggtgcccg

SEQ ID NO: 459273 - DNA, 15 bp, Homo sapiens
aagtagctgggatta

SEQ ID NO: 459274 - DNA, 15 bp, Homo sapiens
caagtagctgggatt

SEQ ID NO: 459275 - DNA, 15 bp, Homo sapiens
ccaagtagctgggat

SEQ ID NO: 459276 - DNA, 15 bp, Homo sapiens
tacctcagcctccca

SEQ ID NO: 459277 - DNA, 15 bp, Homo sapiens
ttacctcagcctccc

SEQ ID NO: 459278 - DNA, 15 bp, Homo sapiens
cttacctcagcctcc

SEQ ID NO: 459279 - DNA, 15 bp, Homo sapiens
tcttacctcagcctc

SEQ ID NO: 459280 - DNA, 15 bp, Homo sapiens
ctcttacctcagcct

SEQ ID NO: 459281 - DNA, 15 bp, Homo sapiens
tctcttacctcagcc

SEQ ID NO: 459282 - DNA, 15 bp, Homo sapiens
ttctcttacctcagc

SEQ ID NO: 459283 - DNA, 15 bp, Homo sapiens
attctcttacctcag

SEQ ID NO: 459284 - DNA, 15 bp, Homo sapiens
cattctcttacctca

SEQ ID NO: 459285 - DNA, 15 bp, Homo sapiens
ccattctcttacctc

SEQ ID NO: 459286 - DNA, 15 bp, Homo sapiens
gccattctcttacct

SEQ ID NO: 459287 - DNA, 15 bp, Homo sapiens
agccattctcttacc

SEQ ID NO: 459288 - DNA, 15 bp, Homo sapiens
aagccattctcttac

SEQ ID NO: 459289 - DNA, 15 bp, Homo sapiens
taagccattctctta

SEQ ID NO: 459290 - DNA, 15 bp, Homo sapiens
ttaagccattctctt

SEQ ID NO: 459291 - DNA, 15 bp, Homo sapiens
cttaagccattctct

SEQ ID NO: 459292 - DNA, 15 bp, Homo sapiens
acttaagccattctc

SEQ ID NO: 459293 - DNA, 15 bp, Homo sapiens
aacttaagccattct

SEQ ID NO: 459294 - DNA, 15 bp, Homo sapiens
gaacttaagccattc

SEQ ID NO: 459295 - DNA, 15 bp, Homo sapiens
agaacttaagccatt

SEQ ID NO: 459296 - DNA, 15 bp, Homo sapiens
gagaacttaagccat

SEQ ID NO: 459297 - DNA, 15 bp, Homo sapiens
agagaacttaagcca

SEQ ID NO: 459298 - DNA, 15 bp, Homo sapiens
aagagaacttaagcc

SEQ ID NO: 459299 - DNA, 15 bp, Homo sapiens
aaagagaacttaagc

SEQ ID NO: 459300 - DNA, 15 bp, Homo sapiens
taaagagaacttaag

SEQ ID NO: 459301 - DNA, 15 bp, Homo sapiens
ataaagagaacttaa

SEQ ID NO: 459302 - DNA, 15 bp, Homo sapiens
gataaagagaactta

SEQ ID NO: 459303 - DNA, 15 bp, Homo sapiens
agataaagagaactt

SEQ ID NO: 459304 - DNA, 15 bp, Homo sapiens
cagataaagagaact

SEQ ID NO: 459305 - DNA, 15 bp, Homo sapiens
gcagataaagagaac

SEQ ID NO: 459306 - DNA, 15 bp, Homo sapiens
agcagataaagagaa

SEQ ID NO: 459307 - DNA, 15 bp, Homo sapiens
aagcagataaagaga

SEQ ID NO: 459308 - DNA, 15 bp, Homo sapiens
aaagcagataaagag

SEQ ID NO: 459309 - DNA, 15 bp, Homo sapiens
taaagcagataaaga

SEQ ID NO: 459310 - DNA, 15 bp, Homo sapiens
ataaagcagataaag

SEQ ID NO: 459311 - DNA, 15 bp, Homo sapiens
aataaagcagataaa

SEQ ID NO: 459312 - DNA, 15 bp, Homo sapiens
aaataaagcagataa

SEQ ID NO: 459313 - DNA, 15 bp, Homo sapiens
gaaataaagcagata

SEQ ID NO: 459314 - DNA, 15 bp, Homo sapiens
tgaaataaagcagat

SEQ ID NO: 459315 - DNA, 15 bp, Homo sapiens
ctgaaataaagcaga

SEQ ID NO: 459316 - DNA, 15 bp, Homo sapiens
actgaaataaagcag

SEQ ID NO: 459317 - DNA, 15 bp, Homo sapiens
aactgaaataaagca

SEQ ID NO: 459318 - DNA, 15 bp, Homo sapiens
caactgaaataaagc

SEQ ID NO: 459319 - DNA, 15 bp, Homo sapiens
gcaactgaaataaag

SEQ ID NO: 459320 - DNA, 15 bp, Homo sapiens
ggcaactgaaataaa

SEQ ID NO: 459321 - DNA, 15 bp, Homo sapiens
aggcaactgaaataa

SEQ ID NO: 459322 - DNA, 15 bp, Homo sapiens
gaggcaactgaaata

SEQ ID NO: 459323 - DNA, 15 bp, Homo sapiens
agaggcaactgaaat

SEQ ID NO: 459324 - DNA, 15 bp, Homo sapiens
gagaggcaactgaaa

SEQ ID NO: 459325 - DNA, 15 bp, Homo sapiens
agagaggcaactgaa

SEQ ID NO: 459326 - DNA, 15 bp, Homo sapiens
aagagaggcaactga

SEQ ID NO: 459327 - DNA, 15 bp, Homo sapiens
taagagaggcaactg

SEQ ID NO: 459328 - DNA, 15 bp, Homo sapiens
ctaagagaggcaact

SEQ ID NO: 459329 - DNA, 15 bp, Homo sapiens
tctaagagaggcaac

SEQ ID NO: 459330 - DNA, 15 bp, Homo sapiens
atctaagagaggcaa

SEQ ID NO: 459331 - DNA, 15 bp, Homo sapiens
catctaagagaggca

SEQ ID NO: 459332 - DNA, 15 bp, Homo sapiens
tcatctaagagaggc

SEQ ID NO: 459333 - DNA, 15 bp, Homo sapiens
ttcatctaagagagg

SEQ ID NO: 459334 - DNA, 15 bp, Homo sapiens
attcatctaagagag

SEQ ID NO: 459335 - DNA, 15 bp, Homo sapiens
tattcatctaagaga

SEQ ID NO: 459336 - DNA, 15 bp, Homo sapiens
atattcatctaagag

SEQ ID NO: 459337 - DNA, 15 bp, Homo sapiens
aatattcatctaaga

SEQ ID NO: 459338 - DNA, 15 bp, Homo sapiens
taatattcatctaag

SEQ ID NO: 459339 - DNA, 15 bp, Homo sapiens
ttaatattcatctaa

SEQ ID NO: 459340 - DNA, 15 bp, Homo sapiens
attaatattcatcta

SEQ ID NO: 459341 - DNA, 15 bp, Homo sapiens
cattaatattcatct

SEQ ID NO: 459342 - DNA, 15 bp, Homo sapiens
tcattaatattcatc

SEQ ID NO: 459343 - DNA, 15 bp, Homo sapiens
gtcattaatattcat

SEQ ID NO: 459344 - DNA, 15 bp, Homo sapiens
agtcattaatattca

SEQ ID NO: 459345 - DNA, 15 bp, Homo sapiens
aagtcattaatattc

SEQ ID NO: 459346 - DNA, 15 bp, Homo sapiens
taagtcattaatatt

SEQ ID NO: 459347 - DNA, 15 bp, Homo sapiens
gtaagtcattaatat

SEQ ID NO: 459348 - DNA, 15 bp, Homo sapiens
tgtaagtcattaata

SEQ ID NO: 459349 - DNA, 15 bp, Homo sapiens
atgtaagtcattaat

SEQ ID NO: 459350 - DNA, 15 bp, Homo sapiens
tatgtaagtcattaa

SEQ ID NO: 459351 - DNA, 15 bp, Homo sapiens
ctatgtaagtcatta

SEQ ID NO: 459352 - DNA, 15 bp, Homo sapiens
gctatgtaagtcatt

SEQ ID NO: 459353 - DNA, 15 bp, Homo sapiens
tgctatgtaagtcat

SEQ ID NO: 459354 - DNA, 15 bp, Homo sapiens
atgctatgtaagtca

SEQ ID NO: 459355 - DNA, 15 bp, Homo sapiens
aatgctatgtaagtc

SEQ ID NO: 459356 - DNA, 15 bp, Homo sapiens
aaatgctatgtaagt

SEQ ID NO: 459357 - DNA, 15 bp, Homo sapiens
aaaatgctatgtaag

SEQ ID NO: 459358 - DNA, 15 bp, Homo sapiens
taaaatgctatgtaa

SEQ ID NO: 459359 - DNA, 15 bp, Homo sapiens
ctaaaatgctatgta

SEQ ID NO: 459360 - DNA, 15 bp, Homo sapiens
tctaaaatgctatgt

SEQ ID NO: 459361 - DNA, 15 bp, Homo sapiens
atctaaaatgctatg

SEQ ID NO: 459362 - DNA, 15 bp, Homo sapiens
gatctaaaatgctat

SEQ ID NO: 459363 - DNA, 15 bp, Homo sapiens
tgatctaaaatgcta

SEQ ID NO: 459364 - DNA, 15 bp, Homo sapiens
ctgatctaaaatgct

SEQ ID NO: 459365 - DNA, 15 bp, Homo sapiens
actgatctaaaatgc

SEQ ID NO: 459366 - DNA, 15 bp, Homo sapiens
cactgatctaaaatg

SEQ ID NO: 459367 - DNA, 15 bp, Homo sapiens
ccactgatctaaaat

SEQ ID NO: 459368 - DNA, 15 bp, Homo sapiens
tccactgatctaaaa

SEQ ID NO: 459369 - DNA, 15 bp, Homo sapiens
atccactgatctaaa

SEQ ID NO: 459370 - DNA, 15 bp, Homo sapiens
catccactgatctaa

SEQ ID NO: 459371 - DNA, 15 bp, Homo sapiens
acatccactgatcta

SEQ ID NO: 459372 - DNA, 15 bp, Homo sapiens
aacatccactgatct

SEQ ID NO: 459373 - DNA, 15 bp, Homo sapiens
aaacatccactgatc

SEQ ID NO: 459374 - DNA, 15 bp, Homo sapiens
aaaacatccactgat

SEQ ID NO: 459375 - DNA, 15 bp, Homo sapiens
aaaaacatccactga

SEQ ID NO: 459376 - DNA, 15 bp, Homo sapiens
caaaaacatccactg

SEQ ID NO: 459377 - DNA, 15 bp, Homo sapiens
acaaaaacatccact

SEQ ID NO: 459378 - DNA, 15 bp, Homo sapiens
cacaaaaacatccac

SEQ ID NO: 459379 - DNA, 15 bp, Homo sapiens
tcacaaaaacatcca

SEQ ID NO: 459380 - DNA, 15 bp, Homo sapiens
atcacaaaaacatcc

SEQ ID NO: 459381 - DNA, 15 bp, Homo sapiens
aatcacaaaaacatc

SEQ ID NO: 459382 - DNA, 15 bp, Homo sapiens
gaatcacaaaaacat

SEQ ID NO: 459383 - DNA, 15 bp, Homo sapiens
agaatcacaaaaaca

SEQ ID NO: 459384 - DNA, 15 bp, Homo sapiens
aagaatcacaaaaac

SEQ ID NO: 459385 - DNA, 15 bp, Homo sapiens
aaagaatcacaaaaa

SEQ ID NO: 459386 - DNA, 15 bp, Homo sapiens
aaaagaatcacaaaa

SEQ ID NO: 459387 - DNA, 15 bp, Homo sapiens
taaaagaatcacaaa

SEQ ID NO: 459388 - DNA, 15 bp, Homo sapiens
ataaaagaatcacaa

SEQ ID NO: 459389 - DNA, 15 bp, Homo sapiens
aataaaagaatcaca

SEQ ID NO: 459390 - DNA, 15 bp, Homo sapiens
aaataaaagaatcac

SEQ ID NO: 459391 - DNA, 15 bp, Homo sapiens
caaataaaagaatca

SEQ ID NO: 459392 - DNA, 15 bp, Homo sapiens
tcaaataaaagaatc

SEQ ID NO: 459393 - DNA, 15 bp, Homo sapiens
ctcaaataaaagaat

SEQ ID NO: 459394 - DNA, 15 bp, Homo sapiens
gctcaaataaaagaa

SEQ ID NO: 459395 - DNA, 15 bp, Homo sapiens
agctcaaataaaaga

SEQ ID NO: 459396 - DNA, 15 bp, Homo sapiens
aagctcaaataaaag

SEQ ID NO: 459397 - DNA, 15 bp, Homo sapiens
aaagctcaaataaaa

SEQ ID NO: 459398 - DNA, 15 bp, Homo sapiens
caaagctcaaataaa

SEQ ID NO: 459399 - DNA, 15 bp, Homo sapiens
ccaaagctcaaataa

SEQ ID NO: 459400 - DNA, 15 bp, Homo sapiens
gccaaagctcaaata

SEQ ID NO: 459401 - DNA, 15 bp, Homo sapiens
ggccaaagctcaaat

SEQ ID NO: 459402 - DNA, 15 bp, Homo sapiens
tggccaaagctcaaa

SEQ ID NO: 459403 - DNA, 15 bp, Homo sapiens
ttggccaaagctcaa

SEQ ID NO: 459404 - DNA, 15 bp, Homo sapiens
tttggccaaagctca

SEQ ID NO: 459405 - DNA, 15 bp, Homo sapiens
ctttggccaaagctc

SEQ ID NO: 459406 - DNA, 15 bp, Homo sapiens
tctttggccaaagct

SEQ ID NO: 459407 - DNA, 15 bp, Homo sapiens
atctttggccaaagc

SEQ ID NO: 459408 - DNA, 15 bp, Homo sapiens
tatctttggccaaag

SEQ ID NO: 459409 - DNA, 15 bp, Homo sapiens
ttatctttggccaaa

SEQ ID NO: 459410 - DNA, 15 bp, Homo sapiens
gttatctttggccaa

SEQ ID NO: 459411 - DNA, 15 bp, Homo sapiens
tgttatctttggcca

SEQ ID NO: 459412 - DNA, 15 bp, Homo sapiens
ctgttatctttggcc

SEQ ID NO: 459413 - DNA, 15 bp, Homo sapiens
actgttatctttggc

SEQ ID NO: 459414 - DNA, 15 bp, Homo sapiens
tactgttatctttgg

SEQ ID NO: 459415 - DNA, 15 bp, Homo sapiens
gtactgttatctttg

SEQ ID NO: 459416 - DNA, 15 bp, Homo sapiens
ggtactgttatcttt

SEQ ID NO: 459417 - DNA, 15 bp, Homo sapiens
gggtactgttatctt

SEQ ID NO: 459418 - DNA, 15 bp, Homo sapiens
tgggtactgttatct

SEQ ID NO: 459419 - DNA, 15 bp, Homo sapiens
gtgggtactgttatc

SEQ ID NO: 459420 - DNA, 15 bp, Homo sapiens
tgtgggtactgttat

SEQ ID NO: 459421 - DNA, 15 bp, Homo sapiens
ctgtgggtactgtta

SEQ ID NO: 459422 - DNA, 15 bp, Homo sapiens
cctgtgggtactgtt

SEQ ID NO: 459423 - DNA, 15 bp, Homo sapiens
acctgtgggtactgt

SEQ ID NO: 459424 - DNA, 15 bp, Homo sapiens
aacctgtgggtactg

SEQ ID NO: 459425 - DNA, 15 bp, Homo sapiens
aaacctgtgggtact

SEQ ID NO: 459426 - DNA, 15 bp, Homo sapiens
aaaacctgtgggtac

SEQ ID NO: 459427 - DNA, 15 bp, Homo sapiens
aaaaacctgtgggta

SEQ ID NO: 459428 - DNA, 15 bp, Homo sapiens
aaaaaacctgtgggt

SEQ ID NO: 459429 - DNA, 15 bp, Homo sapiens
gaaaaaacctgtggg

SEQ ID NO: 459430 - DNA, 15 bp, Homo sapiens
ggaaaaaacctgtgg

SEQ ID NO: 459431 - DNA, 15 bp, Homo sapiens
tggaaaaaacctgtg

SEQ ID NO: 459432 - DNA, 15 bp, Homo sapiens
ctggaaaaaacctgt

SEQ ID NO: 459433 - DNA, 15 bp, Homo sapiens
gctggaaaaaacctg

SEQ ID NO: 459434 - DNA, 15 bp, Homo sapiens
agctggaaaaaacct

SEQ ID NO: 459435 - DNA, 15 bp, Homo sapiens
tagctggaaaaaacc

SEQ ID NO: 459436 - DNA, 15 bp, Homo sapiens
gtagctggaaaaaac

SEQ ID NO: 459437 - DNA, 15 bp, Homo sapiens
agtagctggaaaaaa

SEQ ID NO: 459438 - DNA, 15 bp, Homo sapiens
gagtagctggaaaaa

SEQ ID NO: 459439 - DNA, 15 bp, Homo sapiens
cgagtagctggaaaa

SEQ ID NO: 459440 - DNA, 15 bp, Homo sapiens
gcgagtagctggaaa

SEQ ID NO: 459441 - DNA, 15 bp, Homo sapiens
agcgagtagctggaa

SEQ ID NO: 459442 - DNA, 15 bp, Homo sapiens
gagcgagtagctgga

SEQ ID NO: 459443 - DNA, 15 bp, Homo sapiens
agagcgagtagctgg

SEQ ID NO: 459444 - DNA, 15 bp, Homo sapiens
aagagcgagtagctg

SEQ ID NO: 459445 - DNA, 15 bp, Homo sapiens
gaagagcgagtagct

SEQ ID NO: 459446 - DNA, 15 bp, Homo sapiens
agaagagcgagtagc

SEQ ID NO: 459447 - DNA, 15 bp, Homo sapiens
gagaagagcgagtag

SEQ ID NO: 459448 - DNA, 15 bp, Homo sapiens
ggagaagagcgagta

SEQ ID NO: 459449 - DNA, 15 bp, Homo sapiens
gggagaagagcgagt

SEQ ID NO: 459450 - DNA, 15 bp, Homo sapiens
agggagaagagcgag

SEQ ID NO: 459451 - DNA, 15 bp, Homo sapiens
aagggagaagagcga

SEQ ID NO: 459452 - DNA, 15 bp, Homo sapiens
gaagggagaagagcg

SEQ ID NO: 459453 - DNA, 15 bp, Homo sapiens
tgaagggagaagagc

SEQ ID NO: 459454 - DNA, 15 bp, Homo sapiens
ctgaagggagaagag

SEQ ID NO: 459455 - DNA, 15 bp, Homo sapiens
actgaagggagaaga

SEQ ID NO: 459456 - DNA, 15 bp, Homo sapiens
cactgaagggagaag

SEQ ID NO: 459457 - DNA, 15 bp, Homo sapiens
ccactgaagggagaa

SEQ ID NO: 459458 - DNA, 15 bp, Homo sapiens
gccactgaagggaga

SEQ ID NO: 459459 - DNA, 15 bp, Homo sapiens
ggccactgaagggag

SEQ ID NO: 459460 - DNA, 15 bp, Homo sapiens
gggccactgaaggga

SEQ ID NO: 459461 - DNA, 15 bp, Homo sapiens
agggccactgaaggg

SEQ ID NO: 459462 - DNA, 15 bp, Homo sapiens
gagggccactgaagg

SEQ ID NO: 459463 - DNA, 15 bp, Homo sapiens
cgagggccactgaag

SEQ ID NO: 459464 - DNA, 15 bp, Homo sapiens
tcgagggccactgaa

SEQ ID NO: 459465 - DNA, 15 bp, Homo sapiens
ctcgagggccactga

SEQ ID NO: 459466 - DNA, 15 bp, Homo sapiens
gctcgagggccactg

SEQ ID NO: 459467 - DNA, 15 bp, Homo sapiens
ggctcgagggccact

SEQ ID NO: 459468 - DNA, 15 bp, Homo sapiens
aggctcgagggccac

SEQ ID NO: 459469 - DNA, 15 bp, Homo sapiens
caggctcgagggcca

SEQ ID NO: 459470 - DNA, 15 bp, Homo sapiens
ccaggctcgagggcc

SEQ ID NO: 459471 - DNA, 15 bp, Homo sapiens
tccaggctcgagggc

SEQ ID NO: 459472 - DNA, 15 bp, Homo sapiens
ttccaggctcgaggg

SEQ ID NO: 459473 - DNA, 15 bp, Homo sapiens
tttccaggctcgagg

SEQ ID NO: 459474 - DNA, 15 bp, Homo sapiens
ttttccaggctcgag

SEQ ID NO: 459475 - DNA, 15 bp, Homo sapiens
attttccaggctcga

SEQ ID NO: 459476 - DNA, 15 bp, Homo sapiens
gattttccaggctcg

SEQ ID NO: 459477 - DNA, 15 bp, Homo sapiens
agattttccaggctc

SEQ ID NO: 459478 - DNA, 15 bp, Homo sapiens
cagattttccaggct

SEQ ID NO: 459479 - DNA, 15 bp, Homo sapiens
tcagattttccaggc

SEQ ID NO: 459480 - DNA, 15 bp, Homo sapiens
gtcagattttccagg

SEQ ID NO: 459481 - DNA, 15 bp, Homo sapiens
tgtcagattttccag

SEQ ID NO: 459482 - DNA, 15 bp, Homo sapiens
atgtcagattttcca

SEQ ID NO: 459483 - DNA, 15 bp, Homo sapiens
catgtcagattttcc

SEQ ID NO: 459484 - DNA, 15 bp, Homo sapiens
tcatgtcagattttc

SEQ ID NO: 459485 - DNA, 15 bp, Homo sapiens
gtcatgtcagatttt

SEQ ID NO: 459486 - DNA, 15 bp, Homo sapiens
tgtcatgtcagattt

SEQ ID NO: 459487 - DNA, 15 bp, Homo sapiens
ttgtcatgtcagatt

SEQ ID NO: 459488 - DNA, 15 bp, Homo sapiens
attgtcatgtcagat

SEQ ID NO: 459489 - DNA, 15 bp, Homo sapiens
cattgtcatgtcaga

SEQ ID NO: 459490 - DNA, 15 bp, Homo sapiens
acattgtcatgtcag

SEQ ID NO: 459491 - DNA, 15 bp, Homo sapiens
cacattgtcatgtca

SEQ ID NO: 459492 - DNA, 15 bp, Homo sapiens
gcacattgtcatgtc

SEQ ID NO: 459493 - DNA, 15 bp, Homo sapiens
agcacattgtcatgt

SEQ ID NO: 459494 - DNA, 15 bp, Homo sapiens
aagcacattgtcatg

SEQ ID NO: 459495 - DNA, 15 bp, Homo sapiens
caagcacattgtcat

SEQ ID NO: 459496 - DNA, 15 bp, Homo sapiens
gcaagcacattgtca

SEQ ID NO: 459497 - DNA, 15 bp, Homo sapiens
agcaagcacattgtc

SEQ ID NO: 459498 - DNA, 15 bp, Homo sapiens
gagcaagcacattgt

SEQ ID NO: 459499 - DNA, 15 bp, Homo sapiens
tgagcaagcacattg

SEQ ID NO: 459500 - DNA, 15 bp, Homo sapiens
ttgagcaagcacatt

SEQ ID NO: 459501 - DNA, 15 bp, Homo sapiens
gttgagcaagcacat

SEQ ID NO: 459502 - DNA, 15 bp, Homo sapiens
ggttgagcaagcaca

SEQ ID NO: 459503 - DNA, 15 bp, Homo sapiens
aggttgagcaagcac

SEQ ID NO: 459504 - DNA, 15 bp, Homo sapiens
taggttgagcaagca

SEQ ID NO: 459505 - DNA, 15 bp, Homo sapiens
gtaggttgagcaagc

SEQ ID NO: 459506 - DNA, 15 bp, Homo sapiens
ggtaggttgagcaag

SEQ ID NO: 459507 - DNA, 15 bp, Homo sapiens
tggtaggttgagcaa

SEQ ID NO: 459508 - DNA, 15 bp, Homo sapiens
gtggtaggttgagca

SEQ ID NO: 459509 - DNA, 15 bp, Homo sapiens
agtggtaggttgagc

SEQ ID NO: 459510 - DNA, 15 bp, Homo sapiens
cagtggtaggttgag

SEQ ID NO: 459511 - DNA, 15 bp, Homo sapiens
acagtggtaggttga

SEQ ID NO: 459512 - DNA, 15 bp, Homo sapiens
aacagtggtaggttg

SEQ ID NO: 459513 - DNA, 15 bp, Homo sapiens
aaacagtggtaggtt

SEQ ID NO: 459514 - DNA, 15 bp, Homo sapiens
aaaacagtggtaggt

SEQ ID NO: 459515 - DNA, 15 bp, Homo sapiens
aaaaacagtggtagg

SEQ ID NO: 459516 - DNA, 15 bp, Homo sapiens
gaaaaacagtggtag

SEQ ID NO: 459517 - DNA, 15 bp, Homo sapiens
agaaaaacagtggta

SEQ ID NO: 459518 - DNA, 15 bp, Homo sapiens
aagaaaaacagtggt

SEQ ID NO: 459519 - DNA, 15 bp, Homo sapiens
aaagaaaaacagtgg

SEQ ID NO: 459520 - DNA, 15 bp, Homo sapiens
aaaagaaaaacagtg

SEQ ID NO: 459521 - DNA, 15 bp, Homo sapiens
caaaagaaaaacagt

SEQ ID NO: 459522 - DNA, 15 bp, Homo sapiens
tcaaaagaaaaacag

SEQ ID NO: 459523 - DNA, 15 bp, Homo sapiens
ttcaaaagaaaaaca

SEQ ID NO: 459524 - DNA, 15 bp, Homo sapiens
tttcaaaagaaaaac

SEQ ID NO: 459525 - DNA, 15 bp, Homo sapiens
ttttcaaaagaaaaa

SEQ ID NO: 459526 - DNA, 15 bp, Homo sapiens
cttttcaaaagaaaa

SEQ ID NO: 459527 - DNA, 15 bp, Homo sapiens
acttttcaaaagaaa

SEQ ID NO: 459528 - DNA, 15 bp, Homo sapiens
aacttttcaaaagaa

SEQ ID NO: 459529 - DNA, 15 bp, Homo sapiens
aaacttttcaaaaga

SEQ ID NO: 459530 - DNA, 15 bp, Homo sapiens
caaacttttcaaaag

SEQ ID NO: 459531 - DNA, 15 bp, Homo sapiens
ccaaacttttcaaaa

SEQ ID NO: 459532 - DNA, 15 bp, Homo sapiens
gccaaacttttcaaa

SEQ ID NO: 459533 - DNA, 15 bp, Homo sapiens
tgccaaacttttcaa

SEQ ID NO: 459534 - DNA, 15 bp, Homo sapiens
ctgccaaacttttca

SEQ ID NO: 459535 - DNA, 15 bp, Homo sapiens
gctgccaaacttttc

SEQ ID NO: 459536 - DNA, 15 bp, Homo sapiens
ggctgccaaactttt

SEQ ID NO: 459537 - DNA, 15 bp, Homo sapiens
aggctgccaaacttt

SEQ ID NO: 459538 - DNA, 15 bp, Homo sapiens
caggctgccaaactt

SEQ ID NO: 459539 - DNA, 15 bp, Homo sapiens
acaggctgccaaact

SEQ ID NO: 459540 - DNA, 15 bp, Homo sapiens
aacaggctgccaaac

SEQ ID NO: 459541 - DNA, 15 bp, Homo sapiens
aaacaggctgccaaa

SEQ ID NO: 459542 - DNA, 15 bp, Homo sapiens
gaaacaggctgccaa

SEQ ID NO: 459543 - DNA, 15 bp, Homo sapiens
agaaacaggctgcca

SEQ ID NO: 459544 - DNA, 15 bp, Homo sapiens
cagaaacaggctgcc

SEQ ID NO: 459545 - DNA, 15 bp, Homo sapiens
tcagaaacaggctgc

SEQ ID NO: 459546 - DNA, 15 bp, Homo sapiens
gtcagaaacaggctg

SEQ ID NO: 459547 - DNA, 15 bp, Homo sapiens
agtcagaaacaggct

SEQ ID NO: 459548 - DNA, 15 bp, Homo sapiens
gagtcagaaacaggc

SEQ ID NO: 459549 - DNA, 15 bp, Homo sapiens
ggagtcagaaacagg

SEQ ID NO: 459550 - DNA, 15 bp, Homo sapiens
aggagtcagaaacag

SEQ ID NO: 459551 - DNA, 15 bp, Homo sapiens
taggagtcagaaaca

SEQ ID NO: 459552 - DNA, 15 bp, Homo sapiens
ataggagtcagaaac

SEQ ID NO: 459553 - DNA, 15 bp, Homo sapiens
cataggagtcagaaa

SEQ ID NO: 459554 - DNA, 15 bp, Homo sapiens
tcataggagtcagaa

SEQ ID NO: 459555 - DNA, 15 bp, Homo sapiens
ttcataggagtcaga

SEQ ID NO: 459556 - DNA, 15 bp, Homo sapiens
cttcataggagtcag

SEQ ID NO: 459557 - DNA, 15 bp, Homo sapiens
ccttcataggagtca

SEQ ID NO: 459558 - DNA, 15 bp, Homo sapiens
accttcataggagtc

SEQ ID NO: 459559 - DNA, 15 bp, Homo sapiens
caccttcataggagt

SEQ ID NO: 459560 - DNA, 15 bp, Homo sapiens
tcaccttcataggag

SEQ ID NO: 459561 - DNA, 15 bp, Homo sapiens
ttcaccttcatagga

SEQ ID NO: 459562 - DNA, 15 bp, Homo sapiens
attcaccttcatagg

SEQ ID NO: 459563 - DNA, 15 bp, Homo sapiens
aattcaccttcatag

SEQ ID NO: 459564 - DNA, 15 bp, Homo sapiens
gaattcaccttcata

SEQ ID NO: 459565 - DNA, 15 bp, Homo sapiens
ggaattcaccttcat

SEQ ID NO: 459566 - DNA, 15 bp, Homo sapiens
aggaattcaccttca

SEQ ID NO: 459567 - DNA, 15 bp, Homo sapiens
gaggaattcaccttc

SEQ ID NO: 459568 - DNA, 15 bp, Homo sapiens
tgaggaattcacctt

SEQ ID NO: 459569 - DNA, 15 bp, Homo sapiens
ctgaggaattcacct

SEQ ID NO: 459570 - DNA, 15 bp, Homo sapiens
gctgaggaattcacc

SEQ ID NO: 459571 - DNA, 15 bp, Homo sapiens
tgctgaggaattcac

SEQ ID NO: 459572 - DNA, 15 bp, Homo sapiens
atgctgaggaattca

SEQ ID NO: 459573 - DNA, 15 bp, Homo sapiens
aatgctgaggaattc

SEQ ID NO: 459574 - DNA, 15 bp, Homo sapiens
gaatgctgaggaatt

SEQ ID NO: 459575 - DNA, 15 bp, Homo sapiens
tgaatgctgaggaat

SEQ ID NO: 459576 - DNA, 15 bp, Homo sapiens
gtgaatgctgaggaa

SEQ ID NO: 459577 - DNA, 15 bp, Homo sapiens
tgtgaatgctgagga

SEQ ID NO: 459578 - DNA, 15 bp, Homo sapiens
ctgtgaatgctgagg

SEQ ID NO: 459579 - DNA, 15 bp, Homo sapiens
actgtgaatgctgag

SEQ ID NO: 459580 - DNA, 15 bp, Homo sapiens
aactgtgaatgctga

SEQ ID NO: 459581 - DNA, 15 bp, Homo sapiens
aaactgtgaatgctg

SEQ ID NO: 459582 - DNA, 15 bp, Homo sapiens
taaactgtgaatgct

SEQ ID NO: 459583 - DNA, 15 bp, Homo sapiens
ataaactgtgaatgc

SEQ ID NO: 459584 - DNA, 15 bp, Homo sapiens
aataaactgtgaatg

SEQ ID NO: 459585 - DNA, 15 bp, Homo sapiens
taataaactgtgaat

SEQ ID NO: 459586 - DNA, 15 bp, Homo sapiens
ctaataaactgtgaa

SEQ ID NO: 459587 - DNA, 15 bp, Homo sapiens
tctaataaactgtga

SEQ ID NO: 459588 - DNA, 15 bp, Homo sapiens
ttctaataaactgtg

SEQ ID NO: 459589 - DNA, 15 bp, Homo sapiens
tttctaataaactgt

SEQ ID NO: 459590 - DNA, 15 bp, Homo sapiens
ttttctaataaactg

SEQ ID NO: 459591 - DNA, 15 bp, Homo sapiens
tttttctaataaact

SEQ ID NO: 459592 - DNA, 15 bp, Homo sapiens
atttttctaataaac

SEQ ID NO: 459593 - DNA, 15 bp, Homo sapiens
tatttttctaataaa

SEQ ID NO: 459594 - DNA, 15 bp, Homo sapiens
gtatttttctaataa

SEQ ID NO: 459595 - DNA, 15 bp, Homo sapiens
agtatttttctaata

SEQ ID NO: 459596 - DNA, 15 bp, Homo sapiens
aagtatttttctaat

SEQ ID NO: 459597 - DNA, 15 bp, Homo sapiens
aaagtatttttctaa

SEQ ID NO: 459598 - DNA, 15 bp, Homo sapiens
caaagtatttttcta

SEQ ID NO: 459599 - DNA, 15 bp, Homo sapiens
gcaaagtatttttct

SEQ ID NO: 459600 - DNA, 15 bp, Homo sapiens
agcaaagtatttttc

SEQ ID NO: 459601 - DNA, 15 bp, Homo sapiens
aagcaaagtattttt

SEQ ID NO: 459602 - DNA, 15 bp, Homo sapiens
gaagcaaagtatttt

SEQ ID NO: 459603 - DNA, 15 bp, Homo sapiens
agaagcaaagtattt

SEQ ID NO: 459604 - DNA, 15 bp, Homo sapiens
gagaagcaaagtatt

SEQ ID NO: 459605 - DNA, 15 bp, Homo sapiens
agagaagcaaagtat

SEQ ID NO: 459606 - DNA, 15 bp, Homo sapiens
gagagaagcaaagta

SEQ ID NO: 459607 - DNA, 15 bp, Homo sapiens
ggagagaagcaaagt

SEQ ID NO: 459608 - DNA, 15 bp, Homo sapiens
tggagagaagcaaag

SEQ ID NO: 459609 - DNA, 15 bp, Homo sapiens
ttggagagaagcaaa

SEQ ID NO: 459610 - DNA, 15 bp, Homo sapiens
tttggagagaagcaa

SEQ ID NO: 459611 - DNA, 15 bp, Homo sapiens
gtttggagagaagca

SEQ ID NO: 459612 - DNA, 15 bp, Homo sapiens
agtttggagagaagc

SEQ ID NO: 459613 - DNA, 15 bp, Homo sapiens
gagtttggagagaag

SEQ ID NO: 459614 - DNA, 15 bp, Homo sapiens
cgagtttggagagaa

SEQ ID NO: 459615 - DNA, 15 bp, Homo sapiens
tcgagtttggagaga

SEQ ID NO: 459616 - DNA, 15 bp, Homo sapiens
ttcgagtttggagag

SEQ ID NO: 459617 - DNA, 15 bp, Homo sapiens
tttcgagtttggaga

SEQ ID NO: 459618 - DNA, 15 bp, Homo sapiens
atttcgagtttggag

SEQ ID NO: 459619 - DNA, 15 bp, Homo sapiens
aatttcgagtttgga

SEQ ID NO: 459620 - DNA, 15 bp, Homo sapiens
gaatttcgagtttgg

SEQ ID NO: 459621 - DNA, 15 bp, Homo sapiens
tgaatttcgagtttg

SEQ ID NO: 459622 - DNA, 15 bp, Homo sapiens
ttgaatttcgagttt

SEQ ID NO: 459623 - DNA, 15 bp, Homo sapiens
cttgaatttcgagtt

SEQ ID NO: 459624 - DNA, 15 bp, Homo sapiens
tcttgaatttcgagt

SEQ ID NO: 459625 - DNA, 15 bp, Homo sapiens
atcttgaatttcgag

SEQ ID NO: 459626 - DNA, 15 bp, Homo sapiens
tatcttgaatttcga

SEQ ID NO: 459627 - DNA, 15 bp, Homo sapiens
ttatcttgaatttcg

SEQ ID NO: 459628 - DNA, 15 bp, Homo sapiens
gttatcttgaatttc

SEQ ID NO: 459629 - DNA, 15 bp, Homo sapiens
ggttatcttgaattt

SEQ ID NO: 459630 - DNA, 15 bp, Homo sapiens
tggttatcttgaatt

SEQ ID NO: 459631 - DNA, 15 bp, Homo sapiens
ttggttatcttgaat

SEQ ID NO: 459632 - DNA, 15 bp, Homo sapiens
tttggttatcttgaa

SEQ ID NO: 459633 - DNA, 15 bp, Homo sapiens
gtttggttatcttga

SEQ ID NO: 459634 - DNA, 15 bp, Homo sapiens
ggtttggttatcttg

SEQ ID NO: 459635 - DNA, 15 bp, Homo sapiens
aggtttggttatctt

SEQ ID NO: 459636 - DNA, 15 bp, Homo sapiens
taggtttggttatct

SEQ ID NO: 459637 - DNA, 15 bp, Homo sapiens
ataggtttggttatc

SEQ ID NO: 459638 - DNA, 15 bp, Homo sapiens
tataggtttggttat

SEQ ID NO: 459639 - DNA, 15 bp, Homo sapiens
atataggtttggtta

SEQ ID NO: 459640 - DNA, 15 bp, Homo sapiens
tatataggtttggtt

SEQ ID NO: 459641 - DNA, 15 bp, Homo sapiens
atatataggtttggt

SEQ ID NO: 459642 - DNA, 15 bp, Homo sapiens
tatatataggtttgg

SEQ ID NO: 459643 - DNA, 15 bp, Homo sapiens
ctatatataggtttg

SEQ ID NO: 459644 - DNA, 15 bp, Homo sapiens
cctatatataggttt

SEQ ID NO: 459645 - DNA, 15 bp, Homo sapiens
gcctatatataggtt

SEQ ID NO: 459646 - DNA, 15 bp, Homo sapiens
agcctatatataggt

SEQ ID NO: 459647 - DNA, 15 bp, Homo sapiens
cagcctatatatagg

SEQ ID NO: 459648 - DNA, 15 bp, Homo sapiens
tcagcctatatatag

SEQ ID NO: 459649 - DNA, 15 bp, Homo sapiens
atcagcctatatata

SEQ ID NO: 459650 - DNA, 15 bp, Homo sapiens
gatcagcctatatat

SEQ ID NO: 459651 - DNA, 15 bp, Homo sapiens
agatcagcctatata

SEQ ID NO: 459652 - DNA, 15 bp, Homo sapiens
aagatcagcctatat

SEQ ID NO: 459653 - DNA, 15 bp, Homo sapiens
aaagatcagcctata

SEQ ID NO: 459654 - DNA, 15 bp, Homo sapiens
gaaagatcagcctat

SEQ ID NO: 459655 - DNA, 15 bp, Homo sapiens
tgaaagatcagccta

SEQ ID NO: 459656 - DNA, 15 bp, Homo sapiens
ctgaaagatcagcct

SEQ ID NO: 459657 - DNA, 15 bp, Homo sapiens
cctgaaagatcagcc

SEQ ID NO: 459658 - DNA, 15 bp, Homo sapiens
tcctgaaagatcagc

SEQ ID NO: 459659 - DNA, 15 bp, Homo sapiens
atcctgaaagatcag

SEQ ID NO: 459660 - DNA, 15 bp, Homo sapiens
catcctgaaagatca

SEQ ID NO: 459661 - DNA, 15 bp, Homo sapiens
gcatcctgaaagatc

SEQ ID NO: 459662 - DNA, 15 bp, Homo sapiens
tgcatcctgaaagat

SEQ ID NO: 459663 - DNA, 15 bp, Homo sapiens
ctgcatcctgaaaga

SEQ ID NO: 459664 - DNA, 15 bp, Homo sapiens
actgcatcctgaaag

SEQ ID NO: 459665 - DNA, 15 bp, Homo sapiens
aactgcatcctgaaa

SEQ ID NO: 459666 - DNA, 15 bp, Homo sapiens
caactgcatcctgaa

SEQ ID NO: 459667 - DNA, 15 bp, Homo sapiens
acaactgcatcctga

SEQ ID NO: 459668 - DNA, 15 bp, Homo sapiens
gacaactgcatcctg

SEQ ID NO: 459669 - DNA, 15 bp, Homo sapiens
tgacaactgcatcct

SEQ ID NO: 459670 - DNA, 15 bp, Homo sapiens
atgacaactgcatcc

SEQ ID NO: 459671 - DNA, 15 bp, Homo sapiens
catgacaactgcatc

SEQ ID NO: 459672 - DNA, 15 bp, Homo sapiens
acatgacaactgcat

SEQ ID NO: 459673 - DNA, 15 bp, Homo sapiens
aacatgacaactgca

SEQ ID NO: 459674 - DNA, 15 bp, Homo sapiens
caacatgacaactgc

SEQ ID NO: 459675 - DNA, 15 bp, Homo sapiens
tcaacatgacaactg

SEQ ID NO: 459676 - DNA, 15 bp, Homo sapiens
atcaacatgacaact

SEQ ID NO: 459677 - DNA, 15 bp, Homo sapiens
catcaacatgacaac

SEQ ID NO: 459678 - DNA, 15 bp, Homo sapiens
gcatcaacatgacaa

SEQ ID NO: 459679 - DNA, 15 bp, Homo sapiens
ggcatcaacatgaca

SEQ ID NO: 459680 - DNA, 15 bp, Homo sapiens
tggcatcaacatgac

SEQ ID NO: 459681 - DNA, 15 bp, Homo sapiens
atggcatcaacatga

SEQ ID NO: 459682 - DNA, 15 bp, Homo sapiens
catggcatcaacatg

SEQ ID NO: 459683 - DNA, 15 bp, Homo sapiens
gcatggcatcaacat

SEQ ID NO: 459684 - DNA, 15 bp, Homo sapiens
agcatggcatcaaca

SEQ ID NO: 459685 - DNA, 15 bp, Homo sapiens
aagcatggcatcaac

SEQ ID NO: 459686 - DNA, 15 bp, Homo sapiens
aaagcatggcatcaa

SEQ ID NO: 459687 - DNA, 15 bp, Homo sapiens
aaaagcatggcatca

SEQ ID NO: 459688 - DNA, 15 bp, Homo sapiens
gaaaagcatggcatc

SEQ ID NO: 459689 - DNA, 15 bp, Homo sapiens
tgaaaagcatggcat

SEQ ID NO: 459690 - DNA, 15 bp, Homo sapiens
ctgaaaagcatggca

SEQ ID NO: 459691 - DNA, 15 bp, Homo sapiens
actgaaaagcatggc

SEQ ID NO: 459692 - DNA, 15 bp, Homo sapiens
tactgaaaagcatgg

SEQ ID NO: 459693 - DNA, 15 bp, Homo sapiens
atactgaaaagcatg

SEQ ID NO: 459694 - DNA, 15 bp, Homo sapiens
gatactgaaaagcat

SEQ ID NO: 459695 - DNA, 15 bp, Homo sapiens
cgatactgaaaagca

SEQ ID NO: 459696 - DNA, 15 bp, Homo sapiens
acgatactgaaaagc

SEQ ID NO: 459697 - DNA, 15 bp, Homo sapiens
cacgatactgaaaag

SEQ ID NO: 459698 - DNA, 15 bp, Homo sapiens
ccacgatactgaaaa

SEQ ID NO: 459699 - DNA, 15 bp, Homo sapiens
gccacgatactgaaa

SEQ ID NO: 459700 - DNA, 15 bp, Homo sapiens
ggccacgatactgaa

SEQ ID NO: 459701 - DNA, 15 bp, Homo sapiens
tggccacgatactga

SEQ ID NO: 459702 - DNA, 15 bp, Homo sapiens
atggccacgatactg

SEQ ID NO: 459703 - DNA, 15 bp, Homo sapiens
gatggccacgatact

SEQ ID NO: 459704 - DNA, 15 bp, Homo sapiens
tgatggccacgatac

SEQ ID NO: 459705 - DNA, 15 bp, Homo sapiens
atgatggccacgata

SEQ ID NO: 459706 - DNA, 15 bp, Homo sapiens
gatgatggccacgat

SEQ ID NO: 459707 - DNA, 15 bp, Homo sapiens
agatgatggccacga

SEQ ID NO: 459708 - DNA, 15 bp, Homo sapiens
cagatgatggccacg

SEQ ID NO: 459709 - DNA, 15 bp, Homo sapiens
acagatgatggccac

SEQ ID NO: 459710 - DNA, 15 bp, Homo sapiens
aacagatgatggcca

SEQ ID NO: 459711 - DNA, 15 bp, Homo sapiens
gaacagatgatggcc

SEQ ID NO: 459712 - DNA, 15 bp, Homo sapiens
tgaacagatgatggc

SEQ ID NO: 459713 - DNA, 15 bp, Homo sapiens
ctgaacagatgatgg

SEQ ID NO: 459714 - DNA, 15 bp, Homo sapiens
actgaacagatgatg

SEQ ID NO: 459715 - DNA, 15 bp, Homo sapiens
tactgaacagatgat

SEQ ID NO: 459716 - DNA, 15 bp, Homo sapiens
ctactgaacagatga

SEQ ID NO: 459717 - DNA, 15 bp, Homo sapiens
cctactgaacagatg

SEQ ID NO: 459718 - DNA, 15 bp, Homo sapiens
ccctactgaacagat

SEQ ID NO: 459719 - DNA, 15 bp, Homo sapiens
cccctactgaacaga

SEQ ID NO: 459720 - DNA, 15 bp, Homo sapiens
tcccctactgaacag

SEQ ID NO: 459721 - DNA, 15 bp, Homo sapiens
ctcccctactgaaca

SEQ ID NO: 459722 - DNA, 15 bp, Homo sapiens
cctcccctactgaac

SEQ ID NO: 459723 - DNA, 15 bp, Homo sapiens
acctcccctactgaa

SEQ ID NO: 459724 - DNA, 15 bp, Homo sapiens
cacctcccctactga

SEQ ID NO: 459725 - DNA, 15 bp, Homo sapiens
acacctcccctactg

SEQ ID NO: 459726 - DNA, 15 bp, Homo sapiens
tacacctcccctact

SEQ ID NO: 459727 - DNA, 15 bp, Homo sapiens
gtacacctcccctac

SEQ ID NO: 459728 - DNA, 15 bp, Homo sapiens
agtacacctccccta

SEQ ID NO: 459729 - DNA, 15 bp, Homo sapiens
aagtacacctcccct

SEQ ID NO: 459730 - DNA, 15 bp, Homo sapiens
gaagtacacctcccc

SEQ ID NO: 459731 - DNA, 15 bp, Homo sapiens
agaagtacacctccc

SEQ ID NO: 459732 - DNA, 15 bp, Homo sapiens
cagaagtacacctcc

SEQ ID NO: 459733 - DNA, 15 bp, Homo sapiens
acagaagtacacctc

SEQ ID NO: 459734 - DNA, 15 bp, Homo sapiens
tacagaagtacacct

SEQ ID NO: 459735 - DNA, 15 bp, Homo sapiens
ttacagaagtacacc

SEQ ID NO: 459736 - DNA, 15 bp, Homo sapiens
attacagaagtacac

SEQ ID NO: 459737 - DNA, 15 bp, Homo sapiens
cattacagaagtaca

SEQ ID NO: 459738 - DNA, 15 bp, Homo sapiens
ccattacagaagtac

SEQ ID NO: 459739 - DNA, 15 bp, Homo sapiens
cccattacagaagta

SEQ ID NO: 459740 - DNA, 15 bp, Homo sapiens
tcccattacagaagt

SEQ ID NO: 459741 - DNA, 15 bp, Homo sapiens
ctcccattacagaag

SEQ ID NO: 459742 - DNA, 15 bp, Homo sapiens
cctcccattacagaa

SEQ ID NO: 459743 - DNA, 15 bp, Homo sapiens
acctcccattacaga

SEQ ID NO: 459744 - DNA, 15 bp, Homo sapiens
cacctcccattacag

SEQ ID NO: 459745 - DNA, 15 bp, Homo sapiens
ccacctcccattaca

SEQ ID NO: 459746 - DNA, 15 bp, Homo sapiens
accacctcccattac

SEQ ID NO: 459747 - DNA, 15 bp, Homo sapiens
caccacctcccatta

SEQ ID NO: 459748 - DNA, 15 bp, Homo sapiens
ccaccacctcccatt

SEQ ID NO: 459749 - DNA, 15 bp, Homo sapiens
accaccacctcccat

SEQ ID NO: 459750 - DNA, 15 bp, Homo sapiens
aaccaccacctccca

SEQ ID NO: 459751 - DNA, 15 bp, Homo sapiens
taaccaccacctccc

SEQ ID NO: 459752 - DNA, 15 bp, Homo sapiens
ataaccaccacctcc

SEQ ID NO: 459753 - DNA, 15 bp, Homo sapiens
cataaccaccacctc

SEQ ID NO: 459754 - DNA, 15 bp, Homo sapiens
acataaccaccacct

SEQ ID NO: 459755 - DNA, 15 bp, Homo sapiens
cacataaccaccacc

SEQ ID NO: 459756 - DNA, 15 bp, Homo sapiens
acacataaccaccac

SEQ ID NO: 459757 - DNA, 15 bp, Homo sapiens
cacacataaccacca

SEQ ID NO: 459758 - DNA, 15 bp, Homo sapiens
acacacataaccacc

SEQ ID NO: 459759 - DNA, 15 bp, Homo sapiens
cacacacataaccac

SEQ ID NO: 459760 - DNA, 15 bp, Homo sapiens
acacacacataacca

SEQ ID NO: 459761 - DNA, 15 bp, Homo sapiens
cacacacacataacc

SEQ ID NO: 459762 - DNA, 15 bp, Homo sapiens
gcacacacacataac

SEQ ID NO: 459763 - DNA, 15 bp, Homo sapiens
tgcacacacacataa

SEQ ID NO: 459764 - DNA, 15 bp, Homo sapiens
ttgcacacacacata

SEQ ID NO: 459765 - DNA, 15 bp, Homo sapiens
cttgcacacacacat

SEQ ID NO: 459766 - DNA, 15 bp, Homo sapiens
acttgcacacacaca

SEQ ID NO: 459767 - DNA, 15 bp, Homo sapiens
cacttgcacacacac

SEQ ID NO: 459768 - DNA, 15 bp, Homo sapiens
acacttgcacacaca

SEQ ID NO: 459769 - DNA, 15 bp, Homo sapiens
aacacttgcacacac

SEQ ID NO: 459770 - DNA, 15 bp, Homo sapiens
aaacacttgcacaca

SEQ ID NO: 459771 - DNA, 15 bp, Homo sapiens
taaacacttgcacac

SEQ ID NO: 459772 - DNA, 15 bp, Homo sapiens
ataaacacttgcaca

SEQ ID NO: 459773 - DNA, 15 bp, Homo sapiens
aataaacacttgcac

SEQ ID NO: 459774 - DNA, 15 bp, Homo sapiens
aaataaacacttgca

SEQ ID NO: 459775 - DNA, 15 bp, Homo sapiens
caaataaacacttgc

SEQ ID NO: 459776 - DNA, 15 bp, Homo sapiens
ccaaataaacacttg

SEQ ID NO: 459777 - DNA, 15 bp, Homo sapiens
accaaataaacactt

SEQ ID NO: 459778 - DNA, 15 bp, Homo sapiens
caccaaataaacact

SEQ ID NO: 459779 - DNA, 15 bp, Homo sapiens
acaccaaataaacac

SEQ ID NO: 459780 - DNA, 15 bp, Homo sapiens
gacaccaaataaaca

SEQ ID NO: 459781 - DNA, 15 bp, Homo sapiens
agacaccaaataaac

SEQ ID NO: 459782 - DNA, 15 bp, Homo sapiens
aagacaccaaataaa

SEQ ID NO: 459783 - DNA, 15 bp, Homo sapiens
taagacaccaaataa

SEQ ID NO: 459784 - DNA, 15 bp, Homo sapiens
ttaagacaccaaata

SEQ ID NO: 459785 - DNA, 15 bp, Homo sapiens
cttaagacaccaaat

SEQ ID NO: 459786 - DNA, 15 bp, Homo sapiens
acttaagacaccaaa

SEQ ID NO: 459787 - DNA, 15 bp, Homo sapiens
aacttaagacaccaa

SEQ ID NO: 459788 - DNA, 15 bp, Homo sapiens
taacttaagacacca

SEQ ID NO: 459789 - DNA, 15 bp, Homo sapiens
ctaacttaagacacc

SEQ ID NO: 459790 - DNA, 15 bp, Homo sapiens
gctaacttaagacac

SEQ ID NO: 459791 - DNA, 15 bp, Homo sapiens
ggctaacttaagaca

SEQ ID NO: 459792 - DNA, 15 bp, Homo sapiens
aggctaacttaagac

SEQ ID NO: 459793 - DNA, 15 bp, Homo sapiens
caggctaacttaaga

SEQ ID NO: 459794 - DNA, 15 bp, Homo sapiens
acaggctaacttaag

SEQ ID NO: 459795 - DNA, 15 bp, Homo sapiens
cacaggctaacttaa

SEQ ID NO: 459796 - DNA, 15 bp, Homo sapiens
ccacaggctaactta

SEQ ID NO: 459797 - DNA, 15 bp, Homo sapiens
cccacaggctaactt

SEQ ID NO: 459798 - DNA, 15 bp, Homo sapiens
tcccacaggctaact

SEQ ID NO: 459799 - DNA, 15 bp, Homo sapiens
ttcccacaggctaac

SEQ ID NO: 459800 - DNA, 15 bp, Homo sapiens
cttcccacaggctaa

SEQ ID NO: 459801 - DNA, 15 bp, Homo sapiens
acttcccacaggcta

SEQ ID NO: 459802 - DNA, 15 bp, Homo sapiens
aacttcccacaggct

SEQ ID NO: 459803 - DNA, 15 bp, Homo sapiens
gaacttcccacaggc

SEQ ID NO: 459804 - DNA, 15 bp, Homo sapiens
agaacttcccacagg

SEQ ID NO: 459805 - DNA, 15 bp, Homo sapiens
tagaacttcccacag

SEQ ID NO: 459806 - DNA, 15 bp, Homo sapiens
ttagaacttcccaca

SEQ ID NO: 459807 - DNA, 15 bp, Homo sapiens
tttagaacttcccac

SEQ ID NO: 459808 - DNA, 15 bp, Homo sapiens
atttagaacttccca

SEQ ID NO: 459809 - DNA, 15 bp, Homo sapiens
gatttagaacttccc

SEQ ID NO: 459810 - DNA, 15 bp, Homo sapiens
tgatttagaacttcc

SEQ ID NO: 459811 - DNA, 15 bp, Homo sapiens
ctgatttagaacttc

SEQ ID NO: 459812 - DNA, 15 bp, Homo sapiens
cctgatttagaactt

SEQ ID NO: 459813 - DNA, 15 bp, Homo sapiens
tcctgatttagaact

SEQ ID NO: 459814 - DNA, 15 bp, Homo sapiens
atcctgatttagaac

SEQ ID NO: 459815 - DNA, 15 bp, Homo sapiens
catcctgatttagaa

SEQ ID NO: 459816 - DNA, 15 bp, Homo sapiens
ccatcctgatttaga

SEQ ID NO: 459817 - DNA, 15 bp, Homo sapiens
accatcctgatttag

SEQ ID NO: 459818 - DNA, 15 bp, Homo sapiens
taccatcctgattta

SEQ ID NO: 459819 - DNA, 15 bp, Homo sapiens
gtaccatcctgattt

SEQ ID NO: 459820 - DNA, 15 bp, Homo sapiens
cgtaccatcctgatt

SEQ ID NO: 459821 - DNA, 15 bp, Homo sapiens
acgtaccatcctgat

SEQ ID NO: 459822 - DNA, 15 bp, Homo sapiens
cacgtaccatcctga

SEQ ID NO: 459823 - DNA, 15 bp, Homo sapiens
ccacgtaccatcctg

SEQ ID NO: 459824 - DNA, 15 bp, Homo sapiens
accacgtaccatcct

SEQ ID NO: 459825 - DNA, 15 bp, Homo sapiens
aaccacgtaccatcc

SEQ ID NO: 459826 - DNA, 15 bp, Homo sapiens
caaccacgtaccatc

SEQ ID NO: 459827 - DNA, 15 bp, Homo sapiens
gcaaccacgtaccat

SEQ ID NO: 459828 - DNA, 15 bp, Homo sapiens
ggcaaccacgtacca

SEQ ID NO: 459829 - DNA, 15 bp, Homo sapiens
tggcaaccacgtacc

SEQ ID NO: 459830 - DNA, 15 bp, Homo sapiens
ctggcaaccacgtac

SEQ ID NO: 459831 - DNA, 15 bp, Homo sapiens
gctggcaaccacgta

SEQ ID NO: 459832 - DNA, 15 bp, Homo sapiens
tgctggcaaccacgt

SEQ ID NO: 459833 - DNA, 15 bp, Homo sapiens
ctgctggcaaccacg

SEQ ID NO: 459834 - DNA, 15 bp, Homo sapiens
tctgctggcaaccac

SEQ ID NO: 459835 - DNA, 15 bp, Homo sapiens
ctctgctggcaacca

SEQ ID NO: 459836 - DNA, 15 bp, Homo sapiens
tctctgctggcaacc

SEQ ID NO: 459837 - DNA, 15 bp, Homo sapiens
ctctctgctggcaac

SEQ ID NO: 459838 - DNA, 15 bp, Homo sapiens
gctctctgctggcaa

SEQ ID NO: 459839 - DNA, 15 bp, Homo sapiens
agctctctgctggca

SEQ ID NO: 459840 - DNA, 15 bp, Homo sapiens
cagctctctgctggc

SEQ ID NO: 459841 - DNA, 15 bp, Homo sapiens
gcagctctctgctgg

SEQ ID NO: 459842 - DNA, 15 bp, Homo sapiens
agcagctctctgctg

SEQ ID NO: 459843 - DNA, 15 bp, Homo sapiens
gagcagctctctgct

SEQ ID NO: 459844 - DNA, 15 bp, Homo sapiens
ggagcagctctctgc

SEQ ID NO: 459845 - DNA, 15 bp, Homo sapiens
aggagcagctctctg

SEQ ID NO: 459846 - DNA, 15 bp, Homo sapiens
gaggagcagctctct

SEQ ID NO: 459847 - DNA, 15 bp, Homo sapiens
tgaggagcagctctc

SEQ ID NO: 459848 - DNA, 15 bp, Homo sapiens
ttgaggagcagctct

SEQ ID NO: 459849 - DNA, 15 bp, Homo sapiens
cttgaggagcagctc

SEQ ID NO: 459850 - DNA, 15 bp, Homo sapiens
acttgaggagcagct

SEQ ID NO: 459851 - DNA, 15 bp, Homo sapiens
cacttgaggagcagc

SEQ ID NO: 459852 - DNA, 15 bp, Homo sapiens
tcacttgaggagcag

SEQ ID NO: 459853 - DNA, 15 bp, Homo sapiens
ttcacttgaggagca

SEQ ID NO: 459854 - DNA, 15 bp, Homo sapiens
cttcacttgaggagc

SEQ ID NO: 459855 - DNA, 15 bp, Homo sapiens
ccttcacttgaggag

SEQ ID NO: 459856 - DNA, 15 bp, Homo sapiens
tccttcacttgagga

SEQ ID NO: 459857 - DNA, 15 bp, Homo sapiens
ctccttcacttgagg

SEQ ID NO: 459858 - DNA, 15 bp, Homo sapiens
cctccttcacttgag

SEQ ID NO: 459859 - DNA, 15 bp, Homo sapiens
acctccttcacttga

SEQ ID NO: 459860 - DNA, 15 bp, Homo sapiens
tacctccttcacttg

SEQ ID NO: 459861 - DNA, 15 bp, Homo sapiens
ctacctccttcactt

SEQ ID NO: 459862 - DNA, 15 bp, Homo sapiens
tctacctccttcact

SEQ ID NO: 459863 - DNA, 15 bp, Homo sapiens
ttctacctccttcac

SEQ ID NO: 459864 - DNA, 15 bp, Homo sapiens
attctacctccttca

SEQ ID NO: 459865 - DNA, 15 bp, Homo sapiens
gattctacctccttc

SEQ ID NO: 459866 - DNA, 15 bp, Homo sapiens
tgattctacctcctt

SEQ ID NO: 459867 - DNA, 15 bp, Homo sapiens
ttgattctacctcct

SEQ ID NO: 459868 - DNA, 15 bp, Homo sapiens
tttgattctacctcc

SEQ ID NO: 459869 - DNA, 15 bp, Homo sapiens
ctttgattctacctc

SEQ ID NO: 459870 - DNA, 15 bp, Homo sapiens
gctttgattctacct

SEQ ID NO: 459871 - DNA, 15 bp, Homo sapiens
ggctttgattctacc

SEQ ID NO: 459872 - DNA, 15 bp, Homo sapiens
tggctttgattctac

SEQ ID NO: 459873 - DNA, 15 bp, Homo sapiens
ttggctttgattcta

SEQ ID NO: 459874 - DNA, 15 bp, Homo sapiens
attggctttgattct

SEQ ID NO: 459875 - DNA, 15 bp, Homo sapiens
tattggctttgattc

SEQ ID NO: 459876 - DNA, 15 bp, Homo sapiens
ctattggctttgatt

SEQ ID NO: 459877 - DNA, 15 bp, Homo sapiens
cctattggctttgat

SEQ ID NO: 459878 - DNA, 15 bp, Homo sapiens
tcctattggctttga

SEQ ID NO: 459879 - DNA, 15 bp, Homo sapiens
ttcctattggctttg

SEQ ID NO: 459880 - DNA, 15 bp, Homo sapiens
tttcctattggcttt

SEQ ID NO: 459881 - DNA, 15 bp, Homo sapiens
ctttcctattggctt

SEQ ID NO: 459882 - DNA, 15 bp, Homo sapiens
tctttcctattggct

SEQ ID NO: 459883 - DNA, 15 bp, Homo sapiens
ctctttcctattggc

SEQ ID NO: 459884 - DNA, 15 bp, Homo sapiens
gctctttcctattgg

SEQ ID NO: 459885 - DNA, 15 bp, Homo sapiens
ggctctttcctattg

SEQ ID NO: 459886 - DNA, 15 bp, Homo sapiens
aggctctttcctatt

SEQ ID NO: 459887 - DNA, 15 bp, Homo sapiens
gaggctctttcctat

SEQ ID NO: 459888 - DNA, 15 bp, Homo sapiens
tgaggctctttccta

SEQ ID NO: 459889 - DNA, 15 bp, Homo sapiens
ctgaggctctttcct

SEQ ID NO: 459890 - DNA, 15 bp, Homo sapiens
tctgaggctctttcc

SEQ ID NO: 459891 - DNA, 15 bp, Homo sapiens
atctgaggctctttc

SEQ ID NO: 459892 - DNA, 15 bp, Homo sapiens
catctgaggctcttt

SEQ ID NO: 459893 - DNA, 15 bp, Homo sapiens
gcatctgaggctctt

SEQ ID NO: 459894 - DNA, 15 bp, Homo sapiens
agcatctgaggctct

SEQ ID NO: 459895 - DNA, 15 bp, Homo sapiens
aagcatctgaggctc

SEQ ID NO: 459896 - DNA, 15 bp, Homo sapiens
taagcatctgaggct

SEQ ID NO: 459897 - DNA, 15 bp, Homo sapiens
ataagcatctgaggc

SEQ ID NO: 459898 - DNA, 15 bp, Homo sapiens
tataagcatctgagg

SEQ ID NO: 459899 - DNA, 15 bp, Homo sapiens
atataagcatctgag

SEQ ID NO: 459900 - DNA, 15 bp, Homo sapiens
tatataagcatctga

SEQ ID NO: 459901 - DNA, 15 bp, Homo sapiens
atatataagcatctg

SEQ ID NO: 459902 - DNA, 15 bp, Homo sapiens
catatataagcatct

SEQ ID NO: 459903 - DNA, 15 bp, Homo sapiens
acatatataagcatc

SEQ ID NO: 459904 - DNA, 15 bp, Homo sapiens
tacatatataagcat

SEQ ID NO: 459905 - DNA, 15 bp, Homo sapiens
gtacatatataagca

SEQ ID NO: 459906 - DNA, 15 bp, Homo sapiens
ggtacatatataagc

SEQ ID NO: 459907 - DNA, 15 bp, Homo sapiens
cggtacatatataag

SEQ ID NO: 459908 - DNA, 15 bp, Homo sapiens
acggtacatatataa

SEQ ID NO: 459909 - DNA, 15 bp, Homo sapiens
cacggtacatatata

SEQ ID NO: 459910 - DNA, 15 bp, Homo sapiens
ccacggtacatatat

SEQ ID NO: 459911 - DNA, 15 bp, Homo sapiens
cccacggtacatata

SEQ ID NO: 459912 - DNA, 15 bp, Homo sapiens
ccccacggtacatat

SEQ ID NO: 459913 - DNA, 15 bp, Homo sapiens
tccccacggtacata

SEQ ID NO: 459914 - DNA, 15 bp, Homo sapiens
atccccacggtacat

SEQ ID NO: 459915 - DNA, 15 bp, Homo sapiens
aatccccacggtaca

SEQ ID NO: 459916 - DNA, 15 bp, Homo sapiens
gaatccccacggtac

SEQ ID NO: 459917 - DNA, 15 bp, Homo sapiens
tgaatccccacggta

SEQ ID NO: 459918 - DNA, 15 bp, Homo sapiens
ctgaatccccacggt

SEQ ID NO: 459919 - DNA, 15 bp, Homo sapiens
tctgaatccccacgg

SEQ ID NO: 459920 - DNA, 15 bp, Homo sapiens
ctctgaatccccacg

SEQ ID NO: 459921 - DNA, 15 bp, Homo sapiens
actctgaatccccac

SEQ ID NO: 459922 - DNA, 15 bp, Homo sapiens
cactctgaatcccca

SEQ ID NO: 459923 - DNA, 15 bp, Homo sapiens
tcactctgaatcccc

SEQ ID NO: 459924 - DNA, 15 bp, Homo sapiens
ttcactctgaatccc

SEQ ID NO: 459925 - DNA, 15 bp, Homo sapiens
tttcactctgaatcc

SEQ ID NO: 459926 - DNA, 15 bp, Homo sapiens
ctttcactctgaatc

SEQ ID NO: 459927 - DNA, 15 bp, Homo sapiens
gctttcactctgaat

SEQ ID NO: 459928 - DNA, 15 bp, Homo sapiens
tgctttcactctgaa

SEQ ID NO: 459929 - DNA, 15 bp, Homo sapiens
ctgctttcactctga

SEQ ID NO: 459930 - DNA, 15 bp, Homo sapiens
actgctttcactctg

SEQ ID NO: 459931 - DNA, 15 bp, Homo sapiens
gactgctttcactct

SEQ ID NO: 459932 - DNA, 15 bp, Homo sapiens
tgactgctttcactc

SEQ ID NO: 459933 - DNA, 15 bp, Homo sapiens
atgactgctttcact

SEQ ID NO: 459934 - DNA, 15 bp, Homo sapiens
aatgactgctttcac

SEQ ID NO: 459935 - DNA, 15 bp, Homo sapiens
caatgactgctttca

SEQ ID NO: 459936 - DNA, 15 bp, Homo sapiens
ccaatgactgctttc

SEQ ID NO: 459937 - DNA, 15 bp, Homo sapiens
tccaatgactgcttt

SEQ ID NO: 459938 - DNA, 15 bp, Homo sapiens
gtccaatgactgctt

SEQ ID NO: 459939 - DNA, 15 bp, Homo sapiens
agtccaatgactgct

SEQ ID NO: 459940 - DNA, 15 bp, Homo sapiens
tagtccaatgactgc

SEQ ID NO: 459941 - DNA, 15 bp, Homo sapiens
ctagtccaatgactg

SEQ ID NO: 459942 - DNA, 15 bp, Homo sapiens
cctagtccaatgact

SEQ ID NO: 459943 - DNA, 15 bp, Homo sapiens
ccctagtccaatgac

SEQ ID NO: 459944 - DNA, 15 bp, Homo sapiens
cccctagtccaatga

SEQ ID NO: 459945 - DNA, 15 bp, Homo sapiens
acccctagtccaatg

SEQ ID NO: 459946 - DNA, 15 bp, Homo sapiens
cacccctagtccaat

SEQ ID NO: 459947 - DNA, 15 bp, Homo sapiens
ccacccctagtccaa

SEQ ID NO: 459948 - DNA, 15 bp, Homo sapiens
cccacccctagtcca

SEQ ID NO: 459949 - DNA, 15 bp, Homo sapiens
ccccacccctagtcc

SEQ ID NO: 459950 - DNA, 15 bp, Homo sapiens
accccacccctagtc

SEQ ID NO: 459951 - DNA, 15 bp, Homo sapiens
aaccccacccctagt

SEQ ID NO: 459952 - DNA, 15 bp, Homo sapiens
taaccccacccctag

SEQ ID NO: 459953 - DNA, 15 bp, Homo sapiens
ctaaccccaccccta

SEQ ID NO: 459954 - DNA, 15 bp, Homo sapiens
cctaaccccacccct

SEQ ID NO: 459955 - DNA, 15 bp, Homo sapiens
ccctaaccccacccc

SEQ ID NO: 459956 - DNA, 15 bp, Homo sapiens
tccctaaccccaccc

SEQ ID NO: 459957 - DNA, 15 bp, Homo sapiens
ctccctaaccccacc

SEQ ID NO: 459958 - DNA, 15 bp, Homo sapiens
tctccctaaccccac

SEQ ID NO: 459959 - DNA, 15 bp, Homo sapiens
ctctccctaacccca

SEQ ID NO: 459960 - DNA, 15 bp, Homo sapiens
gctctccctaacccc

SEQ ID NO: 459961 - DNA, 15 bp, Homo sapiens
ggctctccctaaccc

SEQ ID NO: 459962 - DNA, 15 bp, Homo sapiens
aggctctccctaacc

SEQ ID NO: 459963 - DNA, 15 bp, Homo sapiens
caggctctccctaac

SEQ ID NO: 459964 - DNA, 15 bp, Homo sapiens
acaggctctccctaa

SEQ ID NO: 459965 - DNA, 15 bp, Homo sapiens
gacaggctctcccta

SEQ ID NO: 459966 - DNA, 15 bp, Homo sapiens
agacaggctctccct

SEQ ID NO: 459967 - DNA, 15 bp, Homo sapiens
cagacaggctctccc

SEQ ID NO: 459968 - DNA, 15 bp, Homo sapiens
tcagacaggctctcc

SEQ ID NO: 459969 - DNA, 15 bp, Homo sapiens
gtcagacaggctctc

SEQ ID NO: 459970 - DNA, 15 bp, Homo sapiens
tgtcagacaggctct

SEQ ID NO: 459971 - DNA, 15 bp, Homo sapiens
ctgtcagacaggctc

SEQ ID NO: 459972 - DNA, 15 bp, Homo sapiens
tctgtcagacaggct

SEQ ID NO: 459973 - DNA, 15 bp, Homo sapiens
gtctgtcagacaggc

SEQ ID NO: 459974 - DNA, 15 bp, Homo sapiens
tgtctgtcagacagg

SEQ ID NO: 459975 - DNA, 15 bp, Homo sapiens
gtgtctgtcagacag

SEQ ID NO: 459976 - DNA, 15 bp, Homo sapiens
tgtgtctgtcagaca

SEQ ID NO: 459977 - DNA, 15 bp, Homo sapiens
ttgtgtctgtcagac

SEQ ID NO: 459978 - DNA, 15 bp, Homo sapiens
cttgtgtctgtcaga

SEQ ID NO: 459979 - DNA, 15 bp, Homo sapiens
tcttgtgtctgtcag

SEQ ID NO: 459980 - DNA, 15 bp, Homo sapiens
ttcttgtgtctgtca

SEQ ID NO: 459981 - DNA, 15 bp, Homo sapiens
tttcttgtgtctgtc

SEQ ID NO: 459982 - DNA, 15 bp, Homo sapiens
ctttcttgtgtctgt

SEQ ID NO: 459983 - DNA, 15 bp, Homo sapiens
cctttcttgtgtctg

SEQ ID NO: 459984 - DNA, 15 bp, Homo sapiens
ccctttcttgtgtct

SEQ ID NO: 459985 - DNA, 15 bp, Homo sapiens
tccctttcttgtgtc

SEQ ID NO: 459986 - DNA, 15 bp, Homo sapiens
atccctttcttgtgt

SEQ ID NO: 459987 - DNA, 15 bp, Homo sapiens
catccctttcttgtg

SEQ ID NO: 459988 - DNA, 15 bp, Homo sapiens
ccatccctttcttgt

SEQ ID NO: 459989 - DNA, 15 bp, Homo sapiens
tccatccctttcttg

SEQ ID NO: 459990 - DNA, 15 bp, Homo sapiens
atccatccctttctt

SEQ ID NO: 459991 - DNA, 15 bp, Homo sapiens
tatccatccctttct

SEQ ID NO: 459992 - DNA, 15 bp, Homo sapiens
ttatccatccctttc

SEQ ID NO: 459993 - DNA, 15 bp, Homo sapiens
gttatccatcccttt

SEQ ID NO: 459994 - DNA, 15 bp, Homo sapiens
cgttatccatccctt

SEQ ID NO: 459995 - DNA, 15 bp, Homo sapiens
gcgttatccatccct

SEQ ID NO: 459996 - DNA, 15 bp, Homo sapiens
ggcgttatccatccc

SEQ ID NO: 459997 - DNA, 15 bp, Homo sapiens
tggcgttatccatcc

SEQ ID NO: 459998 - DNA, 15 bp, Homo sapiens
gtggcgttatccatc

SEQ ID NO: 459999 - DNA, 15 bp, Homo sapiens
ggtggcgttatccat

SEQ ID NO: 460000 - DNA, 15 bp, Homo sapiens
gggtggcgttatcca

SEQ ID NO: 460001 - DNA, 15 bp, Homo sapiens
tgggtggcgttatcc

SEQ ID NO: 460002 - DNA, 15 bp, Homo sapiens
ctgggtggcgttatc

SEQ ID NO: 460003 - DNA, 15 bp, Homo sapiens
tctgggtggcgttat

SEQ ID NO: 460004 - DNA, 15 bp, Homo sapiens
ctctgggtggcgtta

SEQ ID NO: 460005 - DNA, 15 bp, Homo sapiens
tctctgggtggcgtt

SEQ ID NO: 460006 - DNA, 15 bp, Homo sapiens
ttctctgggtggcgt

SEQ ID NO: 460007 - DNA, 15 bp, Homo sapiens
tttctctgggtggcg

SEQ ID NO: 460008 - DNA, 15 bp, Homo sapiens
ttttctctgggtggc

SEQ ID NO: 460009 - DNA, 15 bp, Homo sapiens
tttttctctgggtgg

SEQ ID NO: 460010 - DNA, 15 bp, Homo sapiens
ttttttctctgggtg

SEQ ID NO: 460011 - DNA, 15 bp, Homo sapiens
cttttttctctgggt

SEQ ID NO: 460012 - DNA, 15 bp, Homo sapiens
gcttttttctctggg

SEQ ID NO: 460013 - DNA, 15 bp, Homo sapiens
tgcttttttctctgg

SEQ ID NO: 460014 - DNA, 15 bp, Homo sapiens
atgcttttttctctg

SEQ ID NO: 460015 - DNA, 15 bp, Homo sapiens
aatgcttttttctct

SEQ ID NO: 460016 - DNA, 15 bp, Homo sapiens
aaatgcttttttctc

SEQ ID NO: 460017 - DNA, 15 bp, Homo sapiens
aaaatgcttttttct

SEQ ID NO: 460018 - DNA, 15 bp, Homo sapiens
taaaatgcttttttc

SEQ ID NO: 460019 - DNA, 15 bp, Homo sapiens
ctaaaatgctttttt

SEQ ID NO: 460020 - DNA, 15 bp, Homo sapiens
cctaaaatgcttttt

SEQ ID NO: 460021 - DNA, 15 bp, Homo sapiens
gcctaaaatgctttt

SEQ ID NO: 460022 - DNA, 15 bp, Homo sapiens
tgcctaaaatgcttt

SEQ ID NO: 460023 - DNA, 15 bp, Homo sapiens
ttgcctaaaatgctt

SEQ ID NO: 460024 - DNA, 15 bp, Homo sapiens
cttgcctaaaatgct

SEQ ID NO: 460025 - DNA, 15 bp, Homo sapiens
tcttgcctaaaatgc

SEQ ID NO: 460026 - DNA, 15 bp, Homo sapiens
ttcttgcctaaaatg

SEQ ID NO: 460027 - DNA, 15 bp, Homo sapiens
gttcttgcctaaaat

SEQ ID NO: 460028 - DNA, 15 bp, Homo sapiens
tgttcttgcctaaaa

SEQ ID NO: 460029 - DNA, 15 bp, Homo sapiens
ttgttcttgcctaaa

SEQ ID NO: 460030 - DNA, 15 bp, Homo sapiens
tttgttcttgcctaa

SEQ ID NO: 460031 - DNA, 15 bp, Homo sapiens
atttgttcttgccta

SEQ ID NO: 460032 - DNA, 15 bp, Homo sapiens
tatttgttcttgcct

SEQ ID NO: 460033 - DNA, 15 bp, Homo sapiens
atatttgttcttgcc

SEQ ID NO: 460034 - DNA, 15 bp, Homo sapiens
catatttgttcttgc

SEQ ID NO: 460035 - DNA, 15 bp, Homo sapiens
tcatatttgttcttg

SEQ ID NO: 460036 - DNA, 15 bp, Homo sapiens
ttcatatttgttctt

SEQ ID NO: 460037 - DNA, 15 bp, Homo sapiens
tttcatatttgttct

SEQ ID NO: 460038 - DNA, 15 bp, Homo sapiens
ttttcatatttgttc

SEQ ID NO: 460039 - DNA, 15 bp, Homo sapiens
tttttcatatttgtt

SEQ ID NO: 460040 - DNA, 15 bp, Homo sapiens
ctttttcatatttgt

SEQ ID NO: 460041 - DNA, 15 bp, Homo sapiens
cctttttcatatttg

SEQ ID NO: 460042 - DNA, 15 bp, Homo sapiens
tcctttttcatattt

SEQ ID NO: 460043 - DNA, 15 bp, Homo sapiens
ttcctttttcatatt

SEQ ID NO: 460044 - DNA, 15 bp, Homo sapiens
gttcctttttcatat

SEQ ID NO: 460045 - DNA, 15 bp, Homo sapiens
tgttcctttttcata

SEQ ID NO: 460046 - DNA, 15 bp, Homo sapiens
ttgttcctttttcat

SEQ ID NO: 460047 - DNA, 15 bp, Homo sapiens
tttgttcctttttca

SEQ ID NO: 460048 - DNA, 15 bp, Homo sapiens
ctttgttcctttttc

SEQ ID NO: 460049 - DNA, 15 bp, Homo sapiens
actttgttccttttt

SEQ ID NO: 460050 - DNA, 15 bp, Homo sapiens
gactttgttcctttt

SEQ ID NO: 460051 - DNA, 15 bp, Homo sapiens
agactttgttccttt

SEQ ID NO: 460052 - DNA, 15 bp, Homo sapiens
cagactttgttcctt

SEQ ID NO: 460053 - DNA, 15 bp, Homo sapiens
acagactttgttcct

SEQ ID NO: 460054 - DNA, 15 bp, Homo sapiens
cacagactttgttcc

SEQ ID NO: 460055 - DNA, 15 bp, Homo sapiens
ccacagactttgttc

SEQ ID NO: 460056 - DNA, 15 bp, Homo sapiens
cccacagactttgtt

SEQ ID NO: 460057 - DNA, 15 bp, Homo sapiens
acccacagactttgt

SEQ ID NO: 460058 - DNA, 15 bp, Homo sapiens
cacccacagactttg

SEQ ID NO: 460059 - DNA, 15 bp, Homo sapiens
ccacccacagacttt

SEQ ID NO: 460060 - DNA, 15 bp, Homo sapiens
cccacccacagactt

SEQ ID NO: 460061 - DNA, 15 bp, Homo sapiens
ccccacccacagact

SEQ ID NO: 460062 - DNA, 15 bp, Homo sapiens
cccccacccacagac

SEQ ID NO: 460063 - DNA, 15 bp, Homo sapiens
ccccccacccacaga

SEQ ID NO: 460064 - DNA, 15 bp, Homo sapiens
gccccccacccacag

SEQ ID NO: 460065 - DNA, 15 bp, Homo sapiens
tgccccccacccaca

SEQ ID NO: 460066 - DNA, 15 bp, Homo sapiens
ttgccccccacccac

SEQ ID NO: 460067 - DNA, 15 bp, Homo sapiens
cttgccccccaccca

SEQ ID NO: 460068 - DNA, 15 bp, Homo sapiens
ccttgccccccaccc

SEQ ID NO: 460069 - DNA, 15 bp, Homo sapiens
tccttgccccccacc

SEQ ID NO: 460070 - DNA, 15 bp, Homo sapiens
ctccttgccccccac

SEQ ID NO: 460071 - DNA, 15 bp, Homo sapiens
cctccttgcccccca

SEQ ID NO: 460072 - DNA, 15 bp, Homo sapiens
tcctccttgcccccc

SEQ ID NO: 460073 - DNA, 15 bp, Homo sapiens
ctcctccttgccccc

SEQ ID NO: 460074 - DNA, 15 bp, Homo sapiens
tctcctccttgcccc

SEQ ID NO: 460075 - DNA, 15 bp, Homo sapiens
atctcctccttgccc

SEQ ID NO: 460076 - DNA, 15 bp, Homo sapiens
tatctcctccttgcc

SEQ ID NO: 460077 - DNA, 15 bp, Homo sapiens
ttatctcctccttgc

SEQ ID NO: 460078 - DNA, 15 bp, Homo sapiens
cttatctcctccttg

SEQ ID NO: 460079 - DNA, 15 bp, Homo sapiens
acttatctcctcctt

SEQ ID NO: 460080 - DNA, 15 bp, Homo sapiens
aacttatctcctcct

SEQ ID NO: 460081 - DNA, 15 bp, Homo sapiens
caacttatctcctcc

SEQ ID NO: 460082 - DNA, 15 bp, Homo sapiens
tcaacttatctcctc

SEQ ID NO: 460083 - DNA, 15 bp, Homo sapiens
gtcaacttatctcct

SEQ ID NO: 460084 - DNA, 15 bp, Homo sapiens
agtcaacttatctcc

SEQ ID NO: 460085 - DNA, 15 bp, Homo sapiens
aagtcaacttatctc

SEQ ID NO: 460086 - DNA, 15 bp, Homo sapiens
caagtcaacttatct

SEQ ID NO: 460087 - DNA, 15 bp, Homo sapiens
tcaagtcaacttatc

SEQ ID NO: 460088 - DNA, 15 bp, Homo sapiens
ttcaagtcaacttat

SEQ ID NO: 460089 - DNA, 15 bp, Homo sapiens
cttcaagtcaactta

SEQ ID NO: 460090 - DNA, 15 bp, Homo sapiens
ccttcaagtcaactt

SEQ ID NO: 460091 - DNA, 15 bp, Homo sapiens
tccttcaagtcaact

SEQ ID NO: 460092 - DNA, 15 bp, Homo sapiens
ttccttcaagtcaac

SEQ ID NO: 460093 - DNA, 15 bp, Homo sapiens
cttccttcaagtcaa

SEQ ID NO: 460094 - DNA, 15 bp, Homo sapiens
tcttccttcaagtca

SEQ ID NO: 460095 - DNA, 15 bp, Homo sapiens
gtcttccttcaagtc

SEQ ID NO: 460096 - DNA, 15 bp, Homo sapiens
tgtcttccttcaagt

SEQ ID NO: 460097 - DNA, 15 bp, Homo sapiens
ttgtcttccttcaag

SEQ ID NO: 460098 - DNA, 15 bp, Homo sapiens
gttgtcttccttcaa

SEQ ID NO: 460099 - DNA, 15 bp, Homo sapiens
tgttgtcttccttca

SEQ ID NO: 460100 - DNA, 15 bp, Homo sapiens
gtgttgtcttccttc

SEQ ID NO: 460101 - DNA, 15 bp, Homo sapiens
agtgttgtcttcctt

SEQ ID NO: 460102 - DNA, 15 bp, Homo sapiens
aagtgttgtcttcct

SEQ ID NO: 460103 - DNA, 15 bp, Homo sapiens
taagtgttgtcttcc

SEQ ID NO: 460104 - DNA, 15 bp, Homo sapiens
ataagtgttgtcttc

SEQ ID NO: 460105 - DNA, 15 bp, Homo sapiens
cataagtgttgtctt

SEQ ID NO: 460106 - DNA, 15 bp, Homo sapiens
tcataagtgttgtct

SEQ ID NO: 460107 - DNA, 15 bp, Homo sapiens
ttcataagtgttgtc

SEQ ID NO: 460108 - DNA, 15 bp, Homo sapiens
tttcataagtgttgt

SEQ ID NO: 460109 - DNA, 15 bp, Homo sapiens
ctttcataagtgttg

SEQ ID NO: 460110 - DNA, 15 bp, Homo sapiens
actttcataagtgtt

SEQ ID NO: 460111 - DNA, 15 bp, Homo sapiens
gactttcataagtgt

SEQ ID NO: 460112 - DNA, 15 bp, Homo sapiens
tgactttcataagtg

SEQ ID NO: 460113 - DNA, 15 bp, Homo sapiens
gtgactttcataagt

SEQ ID NO: 460114 - DNA, 15 bp, Homo sapiens
ggtgactttcataag

SEQ ID NO: 460115 - DNA, 15 bp, Homo sapiens
aggtgactttcataa

SEQ ID NO: 460116 - DNA, 15 bp, Homo sapiens
caggtgactttcata

SEQ ID NO: 460117 - DNA, 15 bp, Homo sapiens
ccaggtgactttcat

SEQ ID NO: 460118 - DNA, 15 bp, Homo sapiens
tccaggtgactttca

SEQ ID NO: 460119 - DNA, 15 bp, Homo sapiens
ctccaggtgactttc

SEQ ID NO: 460120 - DNA, 15 bp, Homo sapiens
cctccaggtgacttt

SEQ ID NO: 460121 - DNA, 15 bp, Homo sapiens
gcctccaggtgactt

SEQ ID NO: 460122 - DNA, 15 bp, Homo sapiens
agcctccaggtgact

SEQ ID NO: 460123 - DNA, 15 bp, Homo sapiens
cagcctccaggtgac

SEQ ID NO: 460124 - DNA, 15 bp, Homo sapiens
ccagcctccaggtga

SEQ ID NO: 460125 - DNA, 15 bp, Homo sapiens
cccagcctccaggtg

SEQ ID NO: 460126 - DNA, 15 bp, Homo sapiens
acccagcctccaggt

SEQ ID NO: 460127 - DNA, 15 bp, Homo sapiens
cacccagcctccagg

SEQ ID NO: 460128 - DNA, 15 bp, Homo sapiens
gcacccagcctccag

SEQ ID NO: 460129 - DNA, 15 bp, Homo sapiens
ggcacccagcctcca

SEQ ID NO: 460130 - DNA, 15 bp, Homo sapiens
tggcacccagcctcc

SEQ ID NO: 460131 - DNA, 15 bp, Homo sapiens
atggcacccagcctc

SEQ ID NO: 460132 - DNA, 15 bp, Homo sapiens
catggcacccagcct

SEQ ID NO: 460133 - DNA, 15 bp, Homo sapiens
ccatggcacccagcc

SEQ ID NO: 460134 - DNA, 15 bp, Homo sapiens
gccatggcacccagc

SEQ ID NO: 460135 - DNA, 15 bp, Homo sapiens
agccatggcacccag

SEQ ID NO: 460136 - DNA, 15 bp, Homo sapiens
gagccatggcaccca

SEQ ID NO: 460137 - DNA, 15 bp, Homo sapiens
tgagccatggcaccc

SEQ ID NO: 460138 - DNA, 15 bp, Homo sapiens
atgagccatggcacc

SEQ ID NO: 460139 - DNA, 15 bp, Homo sapiens
catgagccatggcac

SEQ ID NO: 460140 - DNA, 15 bp, Homo sapiens
gcatgagccatggca

SEQ ID NO: 460141 - DNA, 15 bp, Homo sapiens
ggcatgagccatggc

SEQ ID NO: 460142 - DNA, 15 bp, Homo sapiens
aggcatgagccatgg

SEQ ID NO: 460143 - DNA, 15 bp, Homo sapiens
taggcatgagccatg

SEQ ID NO: 460144 - DNA, 15 bp, Homo sapiens
cgattataggcatga

SEQ ID NO: 460145 - DNA, 15 bp, Homo sapiens
gcgattataggcatg

SEQ ID NO: 460146 - DNA, 15 bp, Homo sapiens
tgcgattataggcat

SEQ ID NO: 460147 - DNA, 15 bp, Homo sapiens
ctgcgattataggca

SEQ ID NO: 460148 - DNA, 15 bp, Homo sapiens
gctgcgattataggc

SEQ ID NO: 460149 - DNA, 15 bp, Homo sapiens
tgctgcgattatagg

SEQ ID NO: 460150 - DNA, 15 bp, Homo sapiens
gtgctgcgattatag

SEQ ID NO: 460151 - DNA, 15 bp, Homo sapiens
agtgctgcgattata

SEQ ID NO: 460152 - DNA, 15 bp, Homo sapiens
aagtgctgcgattat

SEQ ID NO: 460153 - DNA, 15 bp, Homo sapiens
aaagtgctgcgatta

SEQ ID NO: 460154 - DNA, 15 bp, Homo sapiens
caaagtgctgcgatt

SEQ ID NO: 460155 - DNA, 15 bp, Homo sapiens
ccaaagtgctgcgat

SEQ ID NO: 460156 - DNA, 15 bp, Homo sapiens
cccaaagtgctgcga

SEQ ID NO: 460157 - DNA, 15 bp, Homo sapiens
tcccaaagtgctgcg

SEQ ID NO: 460158 - DNA, 15 bp, Homo sapiens
ctcccaaagtgctgc

SEQ ID NO: 460159 - DNA, 15 bp, Homo sapiens
tacctcggcctccca

SEQ ID NO: 460160 - DNA, 15 bp, Homo sapiens
ctacctcggcctccc

SEQ ID NO: 460161 - DNA, 15 bp, Homo sapiens
cctacctcggcctcc

SEQ ID NO: 460162 - DNA, 15 bp, Homo sapiens
tcctacctcggcctc

SEQ ID NO: 460163 - DNA, 15 bp, Homo sapiens
ctcctacctcggcct

SEQ ID NO: 460164 - DNA, 15 bp, Homo sapiens
cctcctacctcggcc

SEQ ID NO: 460165 - DNA, 15 bp, Homo sapiens
tcctcctacctcggc

SEQ ID NO: 460166 - DNA, 15 bp, Homo sapiens
gtcctcctacctcgg

SEQ ID NO: 460167 - DNA, 15 bp, Homo sapiens
tgtcctcctacctcg

SEQ ID NO: 460168 - DNA, 15 bp, Homo sapiens
ttgtcctcctacctc

SEQ ID NO: 460169 - DNA, 15 bp, Homo sapiens
gttgtcctcctacct

SEQ ID NO: 460170 - DNA, 15 bp, Homo sapiens
agttgtcctcctacc

SEQ ID NO: 460171 - DNA, 15 bp, Homo sapiens
aagttgtcctcctac

SEQ ID NO: 460172 - DNA, 15 bp, Homo sapiens
caagttgtcctccta

SEQ ID NO: 460173 - DNA, 15 bp, Homo sapiens
tcaagttgtcctcct

SEQ ID NO: 460174 - DNA, 15 bp, Homo sapiens
ctcaagttgtcctcc

SEQ ID NO: 460175 - DNA, 15 bp, Homo sapiens
gctcaagttgtcctc

SEQ ID NO: 460176 - DNA, 15 bp, Homo sapiens
ggctcaagttgtcct

SEQ ID NO: 460177 - DNA, 15 bp, Homo sapiens
gggctcaagttgtcc

SEQ ID NO: 460178 - DNA, 15 bp, Homo sapiens
tgggctcaagttgtc

SEQ ID NO: 460179 - DNA, 15 bp, Homo sapiens
ctgggctcaagttgt

SEQ ID NO: 460180 - DNA, 15 bp, Homo sapiens
cctgggctcaagttg

SEQ ID NO: 460181 - DNA, 15 bp, Homo sapiens
tcctgggctcaagtt

SEQ ID NO: 460182 - DNA, 15 bp, Homo sapiens
ctcctgggctcaagt

SEQ ID NO: 460183 - DNA, 15 bp, Homo sapiens
cgaactcctgggctc

SEQ ID NO: 460184 - DNA, 15 bp, Homo sapiens
tcgaactcctgggct

SEQ ID NO: 460185 - DNA, 15 bp, Homo sapiens
ctcgaactcctgggc

SEQ ID NO: 460186 - DNA, 15 bp, Homo sapiens
tctcgaactcctggg

SEQ ID NO: 460187 - DNA, 15 bp, Homo sapiens
gtctcgaactcctgg

SEQ ID NO: 460188 - DNA, 15 bp, Homo sapiens
ggtctcgaactcctg

SEQ ID NO: 460189 - DNA, 15 bp, Homo sapiens
tggtctcgaactcct

SEQ ID NO: 460190 - DNA, 15 bp, Homo sapiens
atggtctcgaactcc

SEQ ID NO: 460191 - DNA, 15 bp, Homo sapiens
gatggtctcgaactc

SEQ ID NO: 460192 - DNA, 15 bp, Homo sapiens
ggatggtctcgaact

SEQ ID NO: 460193 - DNA, 15 bp, Homo sapiens
aggatggtctcgaac

SEQ ID NO: 460194 - DNA, 15 bp, Homo sapiens
caggatggtctcgaa

SEQ ID NO: 460195 - DNA, 15 bp, Homo sapiens
cccaggatggtctcg

SEQ ID NO: 460196 - DNA, 15 bp, Homo sapiens
gcccaggatggtctc

SEQ ID NO: 460197 - DNA, 15 bp, Homo sapiens
tgcccaggatggtct

SEQ ID NO: 460198 - DNA, 15 bp, Homo sapiens
ttgcccaggatggtc

SEQ ID NO: 460199 - DNA, 15 bp, Homo sapiens
gttgcccaggatggt

SEQ ID NO: 460200 - DNA, 15 bp, Homo sapiens
atgttgcccaggatg

SEQ ID NO: 460201 - DNA, 15 bp, Homo sapiens
catgttgcccaggat

SEQ ID NO: 460202 - DNA, 15 bp, Homo sapiens
ccatgttgcccagga

SEQ ID NO: 460203 - DNA, 15 bp, Homo sapiens
accatgttgcccagg

SEQ ID NO: 460204 - DNA, 15 bp, Homo sapiens
gtctcaccatgttgc

SEQ ID NO: 460205 - DNA, 15 bp, Homo sapiens
agtctcaccatgttg

SEQ ID NO: 460206 - DNA, 15 bp, Homo sapiens
cagtctcaccatgtt

SEQ ID NO: 460207 - DNA, 15 bp, Homo sapiens
tcagtctcaccatgt

SEQ ID NO: 460208 - DNA, 15 bp, Homo sapiens
ctcagtctcaccatg

SEQ ID NO: 460209 - DNA, 15 bp, Homo sapiens
actcagtctcaccat

SEQ ID NO: 460210 - DNA, 15 bp, Homo sapiens
gactcagtctcacca

SEQ ID NO: 460211 - DNA, 15 bp, Homo sapiens
agactcagtctcacc

SEQ ID NO: 460212 - DNA, 15 bp, Homo sapiens
gagactcagtctcac

SEQ ID NO: 460213 - DNA, 15 bp, Homo sapiens
agagactcagtctca

SEQ ID NO: 460214 - DNA, 15 bp, Homo sapiens
tagagactcagtctc

SEQ ID NO: 460215 - DNA, 15 bp, Homo sapiens
gtagagactcagtct

SEQ ID NO: 460216 - DNA, 15 bp, Homo sapiens
ggtagagactcagtc

SEQ ID NO: 460217 - DNA, 15 bp, Homo sapiens
tggtagagactcagt

SEQ ID NO: 460218 - DNA, 15 bp, Homo sapiens
ttggtagagactcag

SEQ ID NO: 460219 - DNA, 15 bp, Homo sapiens
tttggtagagactca

SEQ ID NO: 460220 - DNA, 15 bp, Homo sapiens
ttttggtagagactc

SEQ ID NO: 460221 - DNA, 15 bp, Homo sapiens
tttttggtagagact

SEQ ID NO: 460222 - DNA, 15 bp, Homo sapiens
ttttttggtagagac

SEQ ID NO: 460223 - DNA, 15 bp, Homo sapiens
tttttttggtagaga

SEQ ID NO: 460224 - DNA, 15 bp, Homo sapiens
ttttttttggtagag

SEQ ID NO: 460225 - DNA, 15 bp, Homo sapiens
tttttttttggtaga

SEQ ID NO: 460226 - DNA, 15 bp, Homo sapiens
ttttttttttggtag

SEQ ID NO: 460227 - DNA, 15 bp, Homo sapiens
tttttttttttggta

SEQ ID NO: 460228 - DNA, 15 bp, Homo sapiens
ttttttttttttggt

SEQ ID NO: 460229 - DNA, 15 bp, Homo sapiens
ttctttttttttttt

SEQ ID NO: 460230 - DNA, 15 bp, Homo sapiens
aattttctttttttt

SEQ ID NO: 460231 - DNA, 15 bp, Homo sapiens
taattttcttttttt

SEQ ID NO: 460232 - DNA, 15 bp, Homo sapiens
ataattttctttttt

SEQ ID NO: 460233 - DNA, 15 bp, Homo sapiens
gataattttcttttt

SEQ ID NO: 460234 - DNA, 15 bp, Homo sapiens
ggataattttctttt

SEQ ID NO: 460235 - DNA, 15 bp, Homo sapiens
tggataattttcttt

SEQ ID NO: 460236 - DNA, 15 bp, Homo sapiens
ctggataattttctt

SEQ ID NO: 460237 - DNA, 15 bp, Homo sapiens
tctggataattttct

SEQ ID NO: 460238 - DNA, 15 bp, Homo sapiens
gtctggataattttc

SEQ ID NO: 460239 - DNA, 15 bp, Homo sapiens
tgtctggataatttt

SEQ ID NO: 460240 - DNA, 15 bp, Homo sapiens
atgtctggataattt

SEQ ID NO: 460241 - DNA, 15 bp, Homo sapiens
catgtctggataatt

SEQ ID NO: 460242 - DNA, 15 bp, Homo sapiens
ccatgtctggataat

SEQ ID NO: 460243 - DNA, 15 bp, Homo sapiens
accatgtctggataa

SEQ ID NO: 460244 - DNA, 15 bp, Homo sapiens
caccatgtctggata

SEQ ID NO: 460245 - DNA, 15 bp, Homo sapiens
ccaccatgtctggat

SEQ ID NO: 460246 - DNA, 15 bp, Homo sapiens
gccaccatgtctgga

SEQ ID NO: 460247 - DNA, 15 bp, Homo sapiens
tgccaccatgtctgg

SEQ ID NO: 460248 - DNA, 15 bp, Homo sapiens
atgccaccatgtctg

SEQ ID NO: 460249 - DNA, 15 bp, Homo sapiens
catgccaccatgtct

SEQ ID NO: 460250 - DNA, 15 bp, Homo sapiens
acatgccaccatgtc

SEQ ID NO: 460251 - DNA, 15 bp, Homo sapiens
cacatgccaccatgt

SEQ ID NO: 460252 - DNA, 15 bp, Homo sapiens
gcacatgccaccatg

SEQ ID NO: 460253 - DNA, 15 bp, Homo sapiens
ggcacatgccaccat

SEQ ID NO: 460254 - DNA, 15 bp, Homo sapiens
aggcacatgccacca

SEQ ID NO: 460255 - DNA, 15 bp, Homo sapiens
caggcacatgccacc

SEQ ID NO: 460256 - DNA, 15 bp, Homo sapiens
acaggcacatgccac

SEQ ID NO: 460257 - DNA, 15 bp, Homo sapiens
tacaggcacatgcca

SEQ ID NO: 460258 - DNA, 15 bp, Homo sapiens
ttacaggcacatgcc

SEQ ID NO: 460259 - DNA, 15 bp, Homo sapiens
attacaggcacatgc

SEQ ID NO: 460260 - DNA, 15 bp, Homo sapiens
gattacaggcacatg

SEQ ID NO: 460261 - DNA, 15 bp, Homo sapiens
ggattacaggcacat

SEQ ID NO: 460262 - DNA, 15 bp, Homo sapiens
actgggattacaggc

SEQ ID NO: 460263 - DNA, 15 bp, Homo sapiens
aactgggattacagg

SEQ ID NO: 460264 - DNA, 15 bp, Homo sapiens
taactgggattacag

SEQ ID NO: 460265 - DNA, 15 bp, Homo sapiens
gtaactgggattaca

SEQ ID NO: 460266 - DNA, 15 bp, Homo sapiens
agtaactgggattac

SEQ ID NO: 460267 - DNA, 15 bp, Homo sapiens
gagtaactgggatta

SEQ ID NO: 460268 - DNA, 15 bp, Homo sapiens
tgagtaactgggatt

SEQ ID NO: 460269 - DNA, 15 bp, Homo sapiens
ctgagtaactgggat

SEQ ID NO: 460270 - DNA, 15 bp, Homo sapiens
cctgagtaactggga

SEQ ID NO: 460271 - DNA, 15 bp, Homo sapiens
tcctgagtaactggg

SEQ ID NO: 460272 - DNA, 15 bp, Homo sapiens
ctcctgagtaactgg

SEQ ID NO: 460273 - DNA, 15 bp, Homo sapiens
cctcctgagtaactg

SEQ ID NO: 460274 - DNA, 15 bp, Homo sapiens
gcctcctgagtaact

SEQ ID NO: 460275 - DNA, 15 bp, Homo sapiens
agcctcctgagtaac

SEQ ID NO: 460276 - DNA, 15 bp, Homo sapiens
cagcctcctgagtaa

SEQ ID NO: 460277 - DNA, 15 bp, Homo sapiens
ccctcccacctcagc

SEQ ID NO: 460278 - DNA, 15 bp, Homo sapiens
accctcccacctcag

SEQ ID NO: 460279 - DNA, 15 bp, Homo sapiens
aaccctcccacctca

SEQ ID NO: 460280 - DNA, 15 bp, Homo sapiens
caaccctcccacctc

SEQ ID NO: 460281 - DNA, 15 bp, Homo sapiens
gcaaccctcccacct

SEQ ID NO: 460282 - DNA, 15 bp, Homo sapiens
agcaaccctcccacc

SEQ ID NO: 460283 - DNA, 15 bp, Homo sapiens
aagcaaccctcccac

SEQ ID NO: 460284 - DNA, 15 bp, Homo sapiens
caagcaaccctccca

SEQ ID NO: 460285 - DNA, 15 bp, Homo sapiens
tcaagcaaccctccc

SEQ ID NO: 460286 - DNA, 15 bp, Homo sapiens
ctcaagcaaccctcc

SEQ ID NO: 460287 - DNA, 15 bp, Homo sapiens
gctcaagcaaccctc

SEQ ID NO: 460288 - DNA, 15 bp, Homo sapiens
ggctcaagcaaccct

SEQ ID NO: 460289 - DNA, 15 bp, Homo sapiens
gggctcaagcaaccc

SEQ ID NO: 460290 - DNA, 15 bp, Homo sapiens
tgggctcaagcaacc

SEQ ID NO: 460291 - DNA, 15 bp, Homo sapiens
ctgggctcaagcaac

SEQ ID NO: 460292 - DNA, 15 bp, Homo sapiens
cctcctgggctcaag

SEQ ID NO: 460293 - DNA, 15 bp, Homo sapiens
acctcctgggctcaa

SEQ ID NO: 460294 - DNA, 15 bp, Homo sapiens
aacctcctgggctca

SEQ ID NO: 460295 - DNA, 15 bp, Homo sapiens
caacctcctgggctc

SEQ ID NO: 460296 - DNA, 15 bp, Homo sapiens
tcaacctcctgggct

SEQ ID NO: 460297 - DNA, 15 bp, Homo sapiens
ctcaacctcctgggc

SEQ ID NO: 460298 - DNA, 15 bp, Homo sapiens
cctcaacctcctggg

SEQ ID NO: 460299 - DNA, 15 bp, Homo sapiens
gcctcaacctcctgg

SEQ ID NO: 460300 - DNA, 15 bp, Homo sapiens
agcctcaacctcctg

SEQ ID NO: 460301 - DNA, 15 bp, Homo sapiens
cagcctcaacctcct

SEQ ID NO: 460302 - DNA, 15 bp, Homo sapiens
gcagcctcaacctcc

SEQ ID NO: 460303 - DNA, 15 bp, Homo sapiens
tgcagcctcaacctc

SEQ ID NO: 460304 - DNA, 15 bp, Homo sapiens
ctgcagcctcaacct

SEQ ID NO: 460305 - DNA, 15 bp, Homo sapiens
actgcagcctcaacc

SEQ ID NO: 460306 - DNA, 15 bp, Homo sapiens
cactgcagcctcaac

SEQ ID NO: 460307 - DNA, 15 bp, Homo sapiens
tcactgcagcctcaa

SEQ ID NO: 460308 - DNA, 15 bp, Homo sapiens
ctcactgcagcctca

SEQ ID NO: 460309 - DNA, 15 bp, Homo sapiens
cagctcactgcagcc

SEQ ID NO: 460310 - DNA, 15 bp, Homo sapiens
acagctcactgcagc

SEQ ID NO: 460311 - DNA, 15 bp, Homo sapiens
cacagctcactgcag

SEQ ID NO: 460312 - DNA, 15 bp, Homo sapiens
tcacagctcactgca

SEQ ID NO: 460313 - DNA, 15 bp, Homo sapiens
atcacagctcactgc

SEQ ID NO: 460314 - DNA, 15 bp, Homo sapiens
gatcacagctcactg

SEQ ID NO: 460315 - DNA, 15 bp, Homo sapiens
cgatcacagctcact

SEQ ID NO: 460316 - DNA, 15 bp, Homo sapiens
acgatcacagctcac

SEQ ID NO: 460317 - DNA, 15 bp, Homo sapiens
tacgatcacagctca

SEQ ID NO: 460318 - DNA, 15 bp, Homo sapiens
atacgatcacagctc

SEQ ID NO: 460319 - DNA, 15 bp, Homo sapiens
aatacgatcacagct

SEQ ID NO: 460320 - DNA, 15 bp, Homo sapiens
taatacgatcacagc

SEQ ID NO: 460321 - DNA, 15 bp, Homo sapiens
ataatacgatcacag

SEQ ID NO: 460322 - DNA, 15 bp, Homo sapiens
aataatacgatcaca

SEQ ID NO: 460323 - DNA, 15 bp, Homo sapiens
caataatacgatcac

SEQ ID NO: 460324 - DNA, 15 bp, Homo sapiens
gcaataatacgatca

SEQ ID NO: 460325 - DNA, 15 bp, Homo sapiens
tgcaataatacgatc

SEQ ID NO: 460326 - DNA, 15 bp, Homo sapiens
gtgcaataatacgat

SEQ ID NO: 460327 - DNA, 15 bp, Homo sapiens
agtgcaataatacga

SEQ ID NO: 460328 - DNA, 15 bp, Homo sapiens
gagtgcaataatacg

SEQ ID NO: 460329 - DNA, 15 bp, Homo sapiens
ggagtgcaataatac

SEQ ID NO: 460330 - DNA, 15 bp, Homo sapiens
tggagtgcaataata

SEQ ID NO: 460331 - DNA, 15 bp, Homo sapiens
ctggagtgcaataat

SEQ ID NO: 460332 - DNA, 15 bp, Homo sapiens
gctggagtgcaataa

SEQ ID NO: 460333 - DNA, 15 bp, Homo sapiens
ggctggagtgcaata

SEQ ID NO: 460334 - DNA, 15 bp, Homo sapiens
tacccaggctggagt

SEQ ID NO: 460335 - DNA, 15 bp, Homo sapiens
ttacccaggctggag

SEQ ID NO: 460336 - DNA, 15 bp, Homo sapiens
gttacccaggctgga

SEQ ID NO: 460337 - DNA, 15 bp, Homo sapiens
tgttacccaggctgg

SEQ ID NO: 460338 - DNA, 15 bp, Homo sapiens
ctgttacccaggctg

SEQ ID NO: 460339 - DNA, 15 bp, Homo sapiens
tctgttacccaggct

SEQ ID NO: 460340 - DNA, 15 bp, Homo sapiens
ctctgttacccaggc

SEQ ID NO: 460341 - DNA, 15 bp, Homo sapiens
gctctgttacccagg

SEQ ID NO: 460342 - DNA, 15 bp, Homo sapiens
tgctctgttacccag

SEQ ID NO: 460343 - DNA, 15 bp, Homo sapiens
ttgctctgttaccca

SEQ ID NO: 460344 - DNA, 15 bp, Homo sapiens
cttgctctgttaccc

SEQ ID NO: 460345 - DNA, 15 bp, Homo sapiens
tcttgctctgttacc

SEQ ID NO: 460346 - DNA, 15 bp, Homo sapiens
gtcttgctctgttac

SEQ ID NO: 460347 - DNA, 15 bp, Homo sapiens
ggtcttgctctgtta

SEQ ID NO: 460348 - DNA, 15 bp, Homo sapiens
gggtcttgctctgtt

SEQ ID NO: 460349 - DNA, 15 bp, Homo sapiens
agggtcttgctctgt

SEQ ID NO: 460350 - DNA, 15 bp, Homo sapiens
cagggtcttgctctg

SEQ ID NO: 460351 - DNA, 15 bp, Homo sapiens
acagggtcttgctct

SEQ ID NO: 460352 - DNA, 15 bp, Homo sapiens
gacagggtcttgctc

SEQ ID NO: 460353 - DNA, 15 bp, Homo sapiens
agacagggtcttgct

SEQ ID NO: 460354 - DNA, 15 bp, Homo sapiens
gagacagggtcttgc

SEQ ID NO: 460355 - DNA, 15 bp, Homo sapiens
tgagacagggtcttg

SEQ ID NO: 460356 - DNA, 15 bp, Homo sapiens
ttgagacagggtctt

SEQ ID NO: 460357 - DNA, 15 bp, Homo sapiens
attttttgagacagg

SEQ ID NO: 460358 - DNA, 15 bp, Homo sapiens
cattttttgagacag

SEQ ID NO: 460359 - DNA, 15 bp, Homo sapiens
tcattttttgagaca

SEQ ID NO: 460360 - DNA, 15 bp, Homo sapiens
ttcattttttgagac

SEQ ID NO: 460361 - DNA, 15 bp, Homo sapiens
tttcattttttgaga

SEQ ID NO: 460362 - DNA, 15 bp, Homo sapiens
ctttcattttttgag

SEQ ID NO: 460363 - DNA, 15 bp, Homo sapiens
actttcattttttga

SEQ ID NO: 460364 - DNA, 15 bp, Homo sapiens
gactttcattttttg

SEQ ID NO: 460365 - DNA, 15 bp, Homo sapiens
tgactttcatttttt

SEQ ID NO: 460366 - DNA, 15 bp, Homo sapiens
atgactttcattttt

SEQ ID NO: 460367 - DNA, 15 bp, Homo sapiens
gatgactttcatttt

SEQ ID NO: 460368 - DNA, 15 bp, Homo sapiens
agatgactttcattt

SEQ ID NO: 460369 - DNA, 15 bp, Homo sapiens
cagatgactttcatt

SEQ ID NO: 460370 - DNA, 15 bp, Homo sapiens
acagatgactttcat

SEQ ID NO: 460371 - DNA, 15 bp, Homo sapiens
tacagatgactttca

SEQ ID NO: 460372 - DNA, 15 bp, Homo sapiens
ctacagatgactttc

SEQ ID NO: 460373 - DNA, 15 bp, Homo sapiens
cctacagatgacttt

SEQ ID NO: 460374 - DNA, 15 bp, Homo sapiens
gcctacagatgactt

SEQ ID NO: 460375 - DNA, 15 bp, Homo sapiens
agcctacagatgact

SEQ ID NO: 460376 - DNA, 15 bp, Homo sapiens
cagcctacagatgac

SEQ ID NO: 460377 - DNA, 15 bp, Homo sapiens
ccagcctacagatga

SEQ ID NO: 460378 - DNA, 15 bp, Homo sapiens
tccagcctacagatg

SEQ ID NO: 460379 - DNA, 15 bp, Homo sapiens
ctccagcctacagat

SEQ ID NO: 460380 - DNA, 15 bp, Homo sapiens
tctccagcctacaga

SEQ ID NO: 460381 - DNA, 15 bp, Homo sapiens
ctctccagcctacag

SEQ ID NO: 460382 - DNA, 15 bp, Homo sapiens
tctctccagcctaca

SEQ ID NO: 460383 - DNA, 15 bp, Homo sapiens
ctctctccagcctac

SEQ ID NO: 460384 - DNA, 15 bp, Homo sapiens
cctctctccagccta

SEQ ID NO: 460385 - DNA, 15 bp, Homo sapiens
tcctctctccagcct

SEQ ID NO: 460386 - DNA, 15 bp, Homo sapiens
ttcctctctccagcc

SEQ ID NO: 460387 - DNA, 15 bp, Homo sapiens
gttcctctctccagc

SEQ ID NO: 460388 - DNA, 15 bp, Homo sapiens
agttcctctctccag

SEQ ID NO: 460389 - DNA, 15 bp, Homo sapiens
cagttcctctctcca

SEQ ID NO: 460390 - DNA, 15 bp, Homo sapiens
ccagttcctctctcc

SEQ ID NO: 460391 - DNA, 15 bp, Homo sapiens
tccagttcctctctc

SEQ ID NO: 460392 - DNA, 15 bp, Homo sapiens
ttccagttcctctct

SEQ ID NO: 460393 - DNA, 15 bp, Homo sapiens
cttccagttcctctc

SEQ ID NO: 460394 - DNA, 15 bp, Homo sapiens
ccttccagttcctct

SEQ ID NO: 460395 - DNA, 15 bp, Homo sapiens
cccttccagttcctc

SEQ ID NO: 460396 - DNA, 15 bp, Homo sapiens
ccccttccagttcct

SEQ ID NO: 460397 - DNA, 15 bp, Homo sapiens
gccccttccagttcc

SEQ ID NO: 460398 - DNA, 15 bp, Homo sapiens
agccccttccagttc

SEQ ID NO: 460399 - DNA, 15 bp, Homo sapiens
tagccccttccagtt

SEQ ID NO: 460400 - DNA, 15 bp, Homo sapiens
ttagccccttccagt

SEQ ID NO: 460401 - DNA, 15 bp, Homo sapiens
tttagccccttccag

SEQ ID NO: 460402 - DNA, 15 bp, Homo sapiens
ctttagccccttcca

SEQ ID NO: 460403 - DNA, 15 bp, Homo sapiens
actttagccccttcc

SEQ ID NO: 460404 - DNA, 15 bp, Homo sapiens
aactttagccccttc

SEQ ID NO: 460405 - DNA, 15 bp, Homo sapiens
caactttagcccctt

SEQ ID NO: 460406 - DNA, 15 bp, Homo sapiens
ccaactttagcccct

SEQ ID NO: 460407 - DNA, 15 bp, Homo sapiens
gccaactttagcccc

SEQ ID NO: 460408 - DNA, 15 bp, Homo sapiens
agccaactttagccc

SEQ ID NO: 460409 - DNA, 15 bp, Homo sapiens
cagccaactttagcc

SEQ ID NO: 460410 - DNA, 15 bp, Homo sapiens
tcagccaactttagc

SEQ ID NO: 460411 - DNA, 15 bp, Homo sapiens
ctcagccaactttag

SEQ ID NO: 460412 - DNA, 15 bp, Homo sapiens
actcagccaacttta

SEQ ID NO: 460413 - DNA, 15 bp, Homo sapiens
tactcagccaacttt

SEQ ID NO: 460414 - DNA, 15 bp, Homo sapiens
ctactcagccaactt

SEQ ID NO: 460415 - DNA, 15 bp, Homo sapiens
actactcagccaact

SEQ ID NO: 460416 - DNA, 15 bp, Homo sapiens
aactactcagccaac

SEQ ID NO: 460417 - DNA, 15 bp, Homo sapiens
taactactcagccaa

SEQ ID NO: 460418 - DNA, 15 bp, Homo sapiens
gtaactactcagcca

SEQ ID NO: 460419 - DNA, 15 bp, Homo sapiens
tgtaactactcagcc

SEQ ID NO: 460420 - DNA, 15 bp, Homo sapiens
ctgtaactactcagc

SEQ ID NO: 460421 - DNA, 15 bp, Homo sapiens
tctgtaactactcag

SEQ ID NO: 460422 - DNA, 15 bp, Homo sapiens
ctctgtaactactca

SEQ ID NO: 460423 - DNA, 15 bp, Homo sapiens
gctctgtaactactc

SEQ ID NO: 460424 - DNA, 15 bp, Homo sapiens
ggctctgtaactact

SEQ ID NO: 460425 - DNA, 15 bp, Homo sapiens
aggctctgtaactac

SEQ ID NO: 460426 - DNA, 15 bp, Homo sapiens
caggctctgtaacta

SEQ ID NO: 460427 - DNA, 15 bp, Homo sapiens
tcaggctctgtaact

SEQ ID NO: 460428 - DNA, 15 bp, Homo sapiens
ctcaggctctgtaac

SEQ ID NO: 460429 - DNA, 15 bp, Homo sapiens
tctcaggctctgtaa

SEQ ID NO: 460430 - DNA, 15 bp, Homo sapiens
atctcaggctctgta

SEQ ID NO: 460431 - DNA, 15 bp, Homo sapiens
tatctcaggctctgt

SEQ ID NO: 460432 - DNA, 15 bp, Homo sapiens
ttatctcaggctctg

SEQ ID NO: 460433 - DNA, 15 bp, Homo sapiens
cttatctcaggctct

SEQ ID NO: 460434 - DNA, 15 bp, Homo sapiens
ccttatctcaggctc

SEQ ID NO: 460435 - DNA, 15 bp, Homo sapiens
cccttatctcaggct

SEQ ID NO: 460436 - DNA, 15 bp, Homo sapiens
acccttatctcaggc

SEQ ID NO: 460437 - DNA, 15 bp, Homo sapiens
tacccttatctcagg

SEQ ID NO: 460438 - DNA, 15 bp, Homo sapiens
ttacccttatctcag

SEQ ID NO: 460439 - DNA, 15 bp, Homo sapiens
tttacccttatctca

SEQ ID NO: 460440 - DNA, 15 bp, Homo sapiens
ctttacccttatctc

SEQ ID NO: 460441 - DNA, 15 bp, Homo sapiens
tctttacccttatct

SEQ ID NO: 460442 - DNA, 15 bp, Homo sapiens
atctttacccttatc

SEQ ID NO: 460443 - DNA, 15 bp, Homo sapiens
aatctttacccttat

SEQ ID NO: 460444 - DNA, 15 bp, Homo sapiens
aaatctttaccctta

SEQ ID NO: 460445 - DNA, 15 bp, Homo sapiens
aaaatctttaccctt

SEQ ID NO: 460446 - DNA, 15 bp, Homo sapiens
caaaatctttaccct

SEQ ID NO: 460447 - DNA, 15 bp, Homo sapiens
gcaaaatctttaccc

SEQ ID NO: 460448 - DNA, 15 bp, Homo sapiens
tgcaaaatctttacc

SEQ ID NO: 460449 - DNA, 15 bp, Homo sapiens
atgcaaaatctttac

SEQ ID NO: 460450 - DNA, 15 bp, Homo sapiens
aatgcaaaatcttta

SEQ ID NO: 460451 - DNA, 15 bp, Homo sapiens
caatgcaaaatcttt

SEQ ID NO: 460452 - DNA, 15 bp, Homo sapiens
ccaatgcaaaatctt

SEQ ID NO: 460453 - DNA, 15 bp, Homo sapiens
tccaatgcaaaatct

SEQ ID NO: 460454 - DNA, 15 bp, Homo sapiens
gtccaatgcaaaatc

SEQ ID NO: 460455 - DNA, 15 bp, Homo sapiens
tgtccaatgcaaaat

SEQ ID NO: 460456 - DNA, 15 bp, Homo sapiens
ttgtccaatgcaaaa

SEQ ID NO: 460457 - DNA, 15 bp, Homo sapiens
attgtccaatgcaaa

SEQ ID NO: 460458 - DNA, 15 bp, Homo sapiens
cattgtccaatgcaa

SEQ ID NO: 460459 - DNA, 15 bp, Homo sapiens
tcattgtccaatgca

SEQ ID NO: 460460 - DNA, 15 bp, Homo sapiens
ctcattgtccaatgc

SEQ ID NO: 460461 - DNA, 15 bp, Homo sapiens
tctcattgtccaatg

SEQ ID NO: 460462 - DNA, 15 bp, Homo sapiens
atctcattgtccaat

SEQ ID NO: 460463 - DNA, 15 bp, Homo sapiens
catctcattgtccaa

SEQ ID NO: 460464 - DNA, 15 bp, Homo sapiens
acatctcattgtcca

SEQ ID NO: 460465 - DNA, 15 bp, Homo sapiens
aacatctcattgtcc

SEQ ID NO: 460466 - DNA, 15 bp, Homo sapiens
taacatctcattgtc

SEQ ID NO: 460467 - DNA, 15 bp, Homo sapiens
ctaacatctcattgt

SEQ ID NO: 460468 - DNA, 15 bp, Homo sapiens
actaacatctcattg

SEQ ID NO: 460469 - DNA, 15 bp, Homo sapiens
cactaacatctcatt

SEQ ID NO: 460470 - DNA, 15 bp, Homo sapiens
acactaacatctcat

SEQ ID NO: 460471 - DNA, 15 bp, Homo sapiens
cacactaacatctca

SEQ ID NO: 460472 - DNA, 15 bp, Homo sapiens
acacactaacatctc

SEQ ID NO: 460473 - DNA, 15 bp, Homo sapiens
cacacactaacatct

SEQ ID NO: 460474 - DNA, 15 bp, Homo sapiens
acacacactaacatc

SEQ ID NO: 460475 - DNA, 15 bp, Homo sapiens
aacacacactaacat

SEQ ID NO: 460476 - DNA, 15 bp, Homo sapiens
aaacacacactaaca

SEQ ID NO: 460477 - DNA, 15 bp, Homo sapiens
aaaacacacactaac

SEQ ID NO: 460478 - DNA, 15 bp, Homo sapiens
aaaaacacacactaa

SEQ ID NO: 460479 - DNA, 15 bp, Homo sapiens
caaaaacacacacta

SEQ ID NO: 460480 - DNA, 15 bp, Homo sapiens
tcaaaaacacacact

SEQ ID NO: 460481 - DNA, 15 bp, Homo sapiens
ctcaaaaacacacac

SEQ ID NO: 460482 - DNA, 15 bp, Homo sapiens
gctcaaaaacacaca

SEQ ID NO: 460483 - DNA, 15 bp, Homo sapiens
agctcaaaaacacac

SEQ ID NO: 460484 - DNA, 15 bp, Homo sapiens
cagctcaaaaacaca

SEQ ID NO: 460485 - DNA, 15 bp, Homo sapiens
ccagctcaaaaacac

SEQ ID NO: 460486 - DNA, 15 bp, Homo sapiens
cccagctcaaaaaca

SEQ ID NO: 460487 - DNA, 15 bp, Homo sapiens
ccccagctcaaaaac

SEQ ID NO: 460488 - DNA, 15 bp, Homo sapiens
tccccagctcaaaaa

SEQ ID NO: 460489 - DNA, 15 bp, Homo sapiens
ctccccagctcaaaa

SEQ ID NO: 460490 - DNA, 15 bp, Homo sapiens
actccccagctcaaa

SEQ ID NO: 460491 - DNA, 15 bp, Homo sapiens
cactccccagctcaa

SEQ ID NO: 460492 - DNA, 15 bp, Homo sapiens
gcactccccagctca

SEQ ID NO: 460493 - DNA, 15 bp, Homo sapiens
agcactccccagctc

SEQ ID NO: 460494 - DNA, 15 bp, Homo sapiens
cagcactccccagct

SEQ ID NO: 460495 - DNA, 15 bp, Homo sapiens
acagcactccccagc

SEQ ID NO: 460496 - DNA, 15 bp, Homo sapiens
cacagcactccccag

SEQ ID NO: 460497 - DNA, 15 bp, Homo sapiens
tcacagcactcccca

SEQ ID NO: 460498 - DNA, 15 bp, Homo sapiens
atcacagcactcccc

SEQ ID NO: 460499 - DNA, 15 bp, Homo sapiens
aatcacagcactccc

SEQ ID NO: 460500 - DNA, 15 bp, Homo sapiens
aaatcacagcactcc

SEQ ID NO: 460501 - DNA, 15 bp, Homo sapiens
aaaatcacagcactc

SEQ ID NO: 460502 - DNA, 15 bp, Homo sapiens
taaaatcacagcact

SEQ ID NO: 460503 - DNA, 15 bp, Homo sapiens
gtaaaatcacagcac

SEQ ID NO: 460504 - DNA, 15 bp, Homo sapiens
agtaaaatcacagca

SEQ ID NO: 460505 - DNA, 15 bp, Homo sapiens
gagtaaaatcacagc

SEQ ID NO: 460506 - DNA, 15 bp, Homo sapiens
agagtaaaatcacag

SEQ ID NO: 460507 - DNA, 15 bp, Homo sapiens
aagagtaaaatcaca

SEQ ID NO: 460508 - DNA, 15 bp, Homo sapiens
taagagtaaaatcac

SEQ ID NO: 460509 - DNA, 15 bp, Homo sapiens
ataagagtaaaatca

SEQ ID NO: 460510 - DNA, 15 bp, Homo sapiens
aataagagtaaaatc

SEQ ID NO: 460511 - DNA, 15 bp, Homo sapiens
caataagagtaaaat

SEQ ID NO: 460512 - DNA, 15 bp, Homo sapiens
tcaataagagtaaaa

SEQ ID NO: 460513 - DNA, 15 bp, Homo sapiens
ttcaataagagtaaa

SEQ ID NO: 460514 - DNA, 15 bp, Homo sapiens
cttcaataagagtaa

SEQ ID NO: 460515 - DNA, 15 bp, Homo sapiens
tcttcaataagagta

SEQ ID NO: 460516 - DNA, 15 bp, Homo sapiens
ttcttcaataagagt

SEQ ID NO: 460517 - DNA, 15 bp, Homo sapiens
attcttcaataagag

SEQ ID NO: 460518 - DNA, 15 bp, Homo sapiens
gattcttcaataaga

SEQ ID NO: 460519 - DNA, 15 bp, Homo sapiens
tgattcttcaataag

SEQ ID NO: 460520 - DNA, 15 bp, Homo sapiens
gtgattcttcaataa

SEQ ID NO: 460521 - DNA, 15 bp, Homo sapiens
agtgattcttcaata

SEQ ID NO: 460522 - DNA, 15 bp, Homo sapiens
cagtgattcttcaat

SEQ ID NO: 460523 - DNA, 15 bp, Homo sapiens
tcagtgattcttcaa

SEQ ID NO: 460524 - DNA, 15 bp, Homo sapiens
ttcagtgattcttca

SEQ ID NO: 460525 - DNA, 15 bp, Homo sapiens
cttcagtgattcttc

SEQ ID NO: 460526 - DNA, 15 bp, Homo sapiens
ccttcagtgattctt

SEQ ID NO: 460527 - DNA, 15 bp, Homo sapiens
tccttcagtgattct

SEQ ID NO: 460528 - DNA, 15 bp, Homo sapiens
atccttcagtgattc

SEQ ID NO: 460529 - DNA, 15 bp, Homo sapiens
aatccttcagtgatt

SEQ ID NO: 460530 - DNA, 15 bp, Homo sapiens
taatccttcagtgat

SEQ ID NO: 460531 - DNA, 15 bp, Homo sapiens
ataatccttcagtga

SEQ ID NO: 460532 - DNA, 15 bp, Homo sapiens
aataatccttcagtg

SEQ ID NO: 460533 - DNA, 15 bp, Homo sapiens
gaataatccttcagt

SEQ ID NO: 460534 - DNA, 15 bp, Homo sapiens
agaataatccttcag

SEQ ID NO: 460535 - DNA, 15 bp, Homo sapiens
aagaataatccttca

SEQ ID NO: 460536 - DNA, 15 bp, Homo sapiens
caagaataatccttc

SEQ ID NO: 460537 - DNA, 15 bp, Homo sapiens
tcaagaataatcctt

SEQ ID NO: 460538 - DNA, 15 bp, Homo sapiens
ttcaagaataatcct

SEQ ID NO: 460539 - DNA, 15 bp, Homo sapiens
attcaagaataatcc

SEQ ID NO: 460540 - DNA, 15 bp, Homo sapiens
gattcaagaataatc

SEQ ID NO: 460541 - DNA, 15 bp, Homo sapiens
tgattcaagaataat

SEQ ID NO: 460542 - DNA, 15 bp, Homo sapiens
ctgattcaagaataa

SEQ ID NO: 460543 - DNA, 15 bp, Homo sapiens
actgattcaagaata

SEQ ID NO: 460544 - DNA, 15 bp, Homo sapiens
cactgattcaagaat

SEQ ID NO: 460545 - DNA, 15 bp, Homo sapiens
tcactgattcaagaa

SEQ ID NO: 460546 - DNA, 15 bp, Homo sapiens
atcactgattcaaga

SEQ ID NO: 460547 - DNA, 15 bp, Homo sapiens
aatcactgattcaag

SEQ ID NO: 460548 - DNA, 15 bp, Homo sapiens
gaatcactgattcaa

SEQ ID NO: 460549 - DNA, 15 bp, Homo sapiens
agaatcactgattca

SEQ ID NO: 460550 - DNA, 15 bp, Homo sapiens
aagaatcactgattc

SEQ ID NO: 460551 - DNA, 15 bp, Homo sapiens
caagaatcactgatt

SEQ ID NO: 460552 - DNA, 15 bp, Homo sapiens
tcaagaatcactgat

SEQ ID NO: 460553 - DNA, 15 bp, Homo sapiens
atcaagaatcactga

SEQ ID NO: 460554 - DNA, 15 bp, Homo sapiens
gatcaagaatcactg

SEQ ID NO: 460555 - DNA, 15 bp, Homo sapiens
tgatcaagaatcact

SEQ ID NO: 460556 - DNA, 15 bp, Homo sapiens
atgatcaagaatcac

SEQ ID NO: 460557 - DNA, 15 bp, Homo sapiens
aatgatcaagaatca

SEQ ID NO: 460558 - DNA, 15 bp, Homo sapiens
gaatgatcaagaatc

SEQ ID NO: 460559 - DNA, 15 bp, Homo sapiens
agaatgatcaagaat

SEQ ID NO: 460560 - DNA, 15 bp, Homo sapiens
aagaatgatcaagaa

SEQ ID NO: 460561 - DNA, 15 bp, Homo sapiens
caagaatgatcaaga

SEQ ID NO: 460562 - DNA, 15 bp, Homo sapiens
tcaagaatgatcaag

SEQ ID NO: 460563 - DNA, 15 bp, Homo sapiens
ttcaagaatgatcaa

SEQ ID NO: 460564 - DNA, 15 bp, Homo sapiens
attcaagaatgatca

SEQ ID NO: 460565 - DNA, 15 bp, Homo sapiens
aattcaagaatgatc

SEQ ID NO: 460566 - DNA, 15 bp, Homo sapiens
aaattcaagaatgat

SEQ ID NO: 460567 - DNA, 15 bp, Homo sapiens
aaaattcaagaatga

SEQ ID NO: 460568 - DNA, 15 bp, Homo sapiens
aaaaattcaagaatg

SEQ ID NO: 460569 - DNA, 15 bp, Homo sapiens
gaaaaattcaagaat

SEQ ID NO: 460570 - DNA, 15 bp, Homo sapiens
tgaaaaattcaagaa

SEQ ID NO: 460571 - DNA, 15 bp, Homo sapiens
ttgaaaaattcaaga

SEQ ID NO: 460572 - DNA, 15 bp, Homo sapiens
tttgaaaaattcaag

SEQ ID NO: 460573 - DNA, 15 bp, Homo sapiens
gtttgaaaaattcaa

SEQ ID NO: 460574 - DNA, 15 bp, Homo sapiens
tgtttgaaaaattca

SEQ ID NO: 460575 - DNA, 15 bp, Homo sapiens
ctgtttgaaaaattc

SEQ ID NO: 460576 - DNA, 15 bp, Homo sapiens
gctgtttgaaaaatt

SEQ ID NO: 460577 - DNA, 15 bp, Homo sapiens
tgctgtttgaaaaat

SEQ ID NO: 460578 - DNA, 15 bp, Homo sapiens
ttgctgtttgaaaaa

SEQ ID NO: 460579 - DNA, 15 bp, Homo sapiens
tttgctgtttgaaaa

SEQ ID NO: 460580 - DNA, 15 bp, Homo sapiens
ttttgctgtttgaaa

SEQ ID NO: 460581 - DNA, 15 bp, Homo sapiens
gttttgctgtttgaa

SEQ ID NO: 460582 - DNA, 15 bp, Homo sapiens
agttttgctgtttga

SEQ ID NO: 460583 - DNA, 15 bp, Homo sapiens
cagttttgctgtttg

SEQ ID NO: 460584 - DNA, 15 bp, Homo sapiens
ccagttttgctgttt

SEQ ID NO: 460585 - DNA, 15 bp, Homo sapiens
tccagttttgctgtt

SEQ ID NO: 460586 - DNA, 15 bp, Homo sapiens
ttccagttttgctgt

SEQ ID NO: 460587 - DNA, 15 bp, Homo sapiens
cttccagttttgctg

SEQ ID NO: 460588 - DNA, 15 bp, Homo sapiens
tcttccagttttgct

SEQ ID NO: 460589 - DNA, 15 bp, Homo sapiens
ctcttccagttttgc

SEQ ID NO: 460590 - DNA, 15 bp, Homo sapiens
actcttccagttttg

SEQ ID NO: 460591 - DNA, 15 bp, Homo sapiens
aactcttccagtttt

SEQ ID NO: 460592 - DNA, 15 bp, Homo sapiens
caactcttccagttt

SEQ ID NO: 460593 - DNA, 15 bp, Homo sapiens
ccaactcttccagtt

SEQ ID NO: 460594 - DNA, 15 bp, Homo sapiens
gccaactcttccagt

SEQ ID NO: 460595 - DNA, 15 bp, Homo sapiens
ggccaactcttccag

SEQ ID NO: 460596 - DNA, 15 bp, Homo sapiens
aggccaactcttcca

SEQ ID NO: 460597 - DNA, 15 bp, Homo sapiens
taggccaactcttcc

SEQ ID NO: 460598 - DNA, 15 bp, Homo sapiens
ataggccaactcttc

SEQ ID NO: 460599 - DNA, 15 bp, Homo sapiens
aataggccaactctt

SEQ ID NO: 460600 - DNA, 15 bp, Homo sapiens
gaataggccaactct

SEQ ID NO: 460601 - DNA, 15 bp, Homo sapiens
ggaataggccaactc

SEQ ID NO: 460602 - DNA, 15 bp, Homo sapiens
aggaataggccaact

SEQ ID NO: 460603 - DNA, 15 bp, Homo sapiens
gaggaataggccaac

SEQ ID NO: 460604 - DNA, 15 bp, Homo sapiens
tgaggaataggccaa

SEQ ID NO: 460605 - DNA, 15 bp, Homo sapiens
ctgaggaataggcca

SEQ ID NO: 460606 - DNA, 15 bp, Homo sapiens
tctgaggaataggcc

SEQ ID NO: 460607 - DNA, 15 bp, Homo sapiens
ttctgaggaataggc

SEQ ID NO: 460608 - DNA, 15 bp, Homo sapiens
attctgaggaatagg

SEQ ID NO: 460609 - DNA, 15 bp, Homo sapiens
tattctgaggaatag

SEQ ID NO: 460610 - DNA, 15 bp, Homo sapiens
atattctgaggaata

SEQ ID NO: 460611 - DNA, 15 bp, Homo sapiens
aatattctgaggaat

SEQ ID NO: 460612 - DNA, 15 bp, Homo sapiens
aaatattctgaggaa

SEQ ID NO: 460613 - DNA, 15 bp, Homo sapiens
aaaatattctgagga

SEQ ID NO: 460614 - DNA, 15 bp, Homo sapiens
gaaaatattctgagg

SEQ ID NO: 460615 - DNA, 15 bp, Homo sapiens
agaaaatattctgag

SEQ ID NO: 460616 - DNA, 15 bp, Homo sapiens
tagaaaatattctga

SEQ ID NO: 460617 - DNA, 15 bp, Homo sapiens
ttagaaaatattctg

SEQ ID NO: 460618 - DNA, 15 bp, Homo sapiens
attagaaaatattct

SEQ ID NO: 460619 - DNA, 15 bp, Homo sapiens
aattagaaaatattc

SEQ ID NO: 460620 - DNA, 15 bp, Homo sapiens
caattagaaaatatt

SEQ ID NO: 460621 - DNA, 15 bp, Homo sapiens
ccaattagaaaatat

SEQ ID NO: 460622 - DNA, 15 bp, Homo sapiens
cccaattagaaaata

SEQ ID NO: 460623 - DNA, 15 bp, Homo sapiens
gcccaattagaaaat

SEQ ID NO: 460624 - DNA, 15 bp, Homo sapiens
cgcccaattagaaaa

SEQ ID NO: 460625 - DNA, 15 bp, Homo sapiens
gcgcccaattagaaa

SEQ ID NO: 460626 - DNA, 15 bp, Homo sapiens
tgcgcccaattagaa

SEQ ID NO: 460627 - DNA, 15 bp, Homo sapiens
ctgcgcccaattaga

SEQ ID NO: 460628 - DNA, 15 bp, Homo sapiens
actgcgcccaattag

SEQ ID NO: 460629 - DNA, 15 bp, Homo sapiens
cactgcgcccaatta

SEQ ID NO: 460630 - DNA, 15 bp, Homo sapiens
acactgcgcccaatt

SEQ ID NO: 460631 - DNA, 15 bp, Homo sapiens
gacactgcgcccaat

SEQ ID NO: 460632 - DNA, 15 bp, Homo sapiens
ggacactgcgcccaa

SEQ ID NO: 460633 - DNA, 15 bp, Homo sapiens
aggacactgcgccca

SEQ ID NO: 460634 - DNA, 15 bp, Homo sapiens
gaggacactgcgccc

SEQ ID NO: 460635 - DNA, 15 bp, Homo sapiens
tgaggacactgcgcc

SEQ ID NO: 460636 - DNA, 15 bp, Homo sapiens
gtgaggacactgcgc

SEQ ID NO: 460637 - DNA, 15 bp, Homo sapiens
agtgaggacactgcg

SEQ ID NO: 460638 - DNA, 15 bp, Homo sapiens
aagtgaggacactgc

SEQ ID NO: 460639 - DNA, 15 bp, Homo sapiens
caagtgaggacactg

SEQ ID NO: 460640 - DNA, 15 bp, Homo sapiens
ccaagtgaggacact

SEQ ID NO: 460641 - DNA, 15 bp, Homo sapiens
cccaagtgaggacac

SEQ ID NO: 460642 - DNA, 15 bp, Homo sapiens
tcccaagtgaggaca

SEQ ID NO: 460643 - DNA, 15 bp, Homo sapiens
ctcccaagtgaggac

SEQ ID NO: 460644 - DNA, 15 bp, Homo sapiens
tctcccaagtgagga

SEQ ID NO: 460645 - DNA, 15 bp, Homo sapiens
ttctcccaagtgagg

SEQ ID NO: 460646 - DNA, 15 bp, Homo sapiens
gttctcccaagtgag

SEQ ID NO: 460647 - DNA, 15 bp, Homo sapiens
ggttctcccaagtga

SEQ ID NO: 460648 - DNA, 15 bp, Homo sapiens
aggttctcccaagtg

SEQ ID NO: 460649 - DNA, 15 bp, Homo sapiens
caggttctcccaagt

SEQ ID NO: 460650 - DNA, 15 bp, Homo sapiens
ccaggttctcccaag

SEQ ID NO: 460651 - DNA, 15 bp, Homo sapiens
gccaggttctcccaa

SEQ ID NO: 460652 - DNA, 15 bp, Homo sapiens
agccaggttctccca

SEQ ID NO: 460653 - DNA, 15 bp, Homo sapiens
tagccaggttctccc

SEQ ID NO: 460654 - DNA, 15 bp, Homo sapiens
gtagccaggttctcc

SEQ ID NO: 460655 - DNA, 15 bp, Homo sapiens
tgtagccaggttctc

SEQ ID NO: 460656 - DNA, 15 bp, Homo sapiens
gtgtagccaggttct

SEQ ID NO: 460657 - DNA, 15 bp, Homo sapiens
tgtgtagccaggttc

SEQ ID NO: 460658 - DNA, 15 bp, Homo sapiens
gtgtgtagccaggtt

SEQ ID NO: 460659 - DNA, 15 bp, Homo sapiens
agtgtgtagccaggt

SEQ ID NO: 460660 - DNA, 15 bp, Homo sapiens
aagtgtgtagccagg

SEQ ID NO: 460661 - DNA, 15 bp, Homo sapiens
aaagtgtgtagccag

SEQ ID NO: 460662 - DNA, 15 bp, Homo sapiens
taaagtgtgtagcca

SEQ ID NO: 460663 - DNA, 15 bp, Homo sapiens
ctaaagtgtgtagcc

SEQ ID NO: 460664 - DNA, 15 bp, Homo sapiens
actaaagtgtgtagc

SEQ ID NO: 460665 - DNA, 15 bp, Homo sapiens
aactaaagtgtgtag

SEQ ID NO: 460666 - DNA, 15 bp, Homo sapiens
caactaaagtgtgta

SEQ ID NO: 460667 - DNA, 15 bp, Homo sapiens
acaactaaagtgtgt

SEQ ID NO: 460668 - DNA, 15 bp, Homo sapiens
tacaactaaagtgtg

SEQ ID NO: 460669 - DNA, 15 bp, Homo sapiens
ttacaactaaagtgt

SEQ ID NO: 460670 - DNA, 15 bp, Homo sapiens
attacaactaaagtg

SEQ ID NO: 460671 - DNA, 15 bp, Homo sapiens
aattacaactaaagt

SEQ ID NO: 460672 - DNA, 15 bp, Homo sapiens
gaattacaactaaag

SEQ ID NO: 460673 - DNA, 15 bp, Homo sapiens
tgaattacaactaaa

SEQ ID NO: 460674 - DNA, 15 bp, Homo sapiens
gtgaattacaactaa

SEQ ID NO: 460675 - DNA, 15 bp, Homo sapiens
agtgaattacaacta

SEQ ID NO: 460676 - DNA, 15 bp, Homo sapiens
gagtgaattacaact

SEQ ID NO: 460677 - DNA, 15 bp, Homo sapiens
ggagtgaattacaac

SEQ ID NO: 460678 - DNA, 15 bp, Homo sapiens
tggagtgaattacaa

SEQ ID NO: 460679 - DNA, 15 bp, Homo sapiens
ctggagtgaattaca

SEQ ID NO: 460680 - DNA, 15 bp, Homo sapiens
actggagtgaattac

SEQ ID NO: 460681 - DNA, 15 bp, Homo sapiens
gactggagtgaatta

SEQ ID NO: 460682 - DNA, 15 bp, Homo sapiens
cgactggagtgaatt

SEQ ID NO: 460683 - DNA, 15 bp, Homo sapiens
acgactggagtgaat

SEQ ID NO: 460684 - DNA, 15 bp, Homo sapiens
aacgactggagtgaa

SEQ ID NO: 460685 - DNA, 15 bp, Homo sapiens
gaacgactggagtga

SEQ ID NO: 460686 - DNA, 15 bp, Homo sapiens
tgaacgactggagtg

SEQ ID NO: 460687 - DNA, 15 bp, Homo sapiens
atgaacgactggagt

SEQ ID NO: 460688 - DNA, 15 bp, Homo sapiens
aatgaacgactggag

SEQ ID NO: 460689 - DNA, 15 bp, Homo sapiens
gaatgaacgactgga

SEQ ID NO: 460690 - DNA, 15 bp, Homo sapiens
tgaatgaacgactgg

SEQ ID NO: 460691 - DNA, 15 bp, Homo sapiens
atgaatgaacgactg

SEQ ID NO: 460692 - DNA, 15 bp, Homo sapiens
aatgaatgaacgact

SEQ ID NO: 460693 - DNA, 15 bp, Homo sapiens
gaatgaatgaacgac

SEQ ID NO: 460694 - DNA, 15 bp, Homo sapiens
tgaatgaatgaacga

SEQ ID NO: 460695 - DNA, 15 bp, Homo sapiens
ttgaatgaatgaacg

SEQ ID NO: 460696 - DNA, 15 bp, Homo sapiens
attgaatgaatgaac

SEQ ID NO: 460697 - DNA, 15 bp, Homo sapiens
tattgaatgaatgaa

SEQ ID NO: 460698 - DNA, 15 bp, Homo sapiens
gtattgaatgaatga

SEQ ID NO: 460699 - DNA, 15 bp, Homo sapiens
ggtattgaatgaatg

SEQ ID NO: 460700 - DNA, 15 bp, Homo sapiens
aggtattgaatgaat

SEQ ID NO: 460701 - DNA, 15 bp, Homo sapiens
taggtattgaatgaa

SEQ ID NO: 460702 - DNA, 15 bp, Homo sapiens
ataggtattgaatga

SEQ ID NO: 460703 - DNA, 15 bp, Homo sapiens
aataggtattgaatg

SEQ ID NO: 460704 - DNA, 15 bp, Homo sapiens
aaataggtattgaat

SEQ ID NO: 460705 - DNA, 15 bp, Homo sapiens
aaaataggtattgaa

SEQ ID NO: 460706 - DNA, 15 bp, Homo sapiens
aaaaataggtattga

SEQ ID NO: 460707 - DNA, 15 bp, Homo sapiens
aaaaaataggtattg

SEQ ID NO: 460708 - DNA, 15 bp, Homo sapiens
gaaaaaataggtatt

SEQ ID NO: 460709 - DNA, 15 bp, Homo sapiens
tgaaaaaataggtat

SEQ ID NO: 460710 - DNA, 15 bp, Homo sapiens
ctgaaaaaataggta

SEQ ID NO: 460711 - DNA, 15 bp, Homo sapiens
gctgaaaaaataggt

SEQ ID NO: 460712 - DNA, 15 bp, Homo sapiens
tgctgaaaaaatagg

SEQ ID NO: 460713 - DNA, 15 bp, Homo sapiens
gtgctgaaaaaatag

SEQ ID NO: 460714 - DNA, 15 bp, Homo sapiens
ggtgctgaaaaaata

SEQ ID NO: 460715 - DNA, 15 bp, Homo sapiens
aggtgctgaaaaaat

SEQ ID NO: 460716 - DNA, 15 bp, Homo sapiens
taggtgctgaaaaaa

SEQ ID NO: 460717 - DNA, 15 bp, Homo sapiens
ataggtgctgaaaaa

SEQ ID NO: 460718 - DNA, 15 bp, Homo sapiens
aataggtgctgaaaa

SEQ ID NO: 460719 - DNA, 15 bp, Homo sapiens
taataggtgctgaaa

SEQ ID NO: 460720 - DNA, 15 bp, Homo sapiens
ataataggtgctgaa

SEQ ID NO: 460721 - DNA, 15 bp, Homo sapiens
cataataggtgctga

SEQ ID NO: 460722 - DNA, 15 bp, Homo sapiens
tcataataggtgctg

SEQ ID NO: 460723 - DNA, 15 bp, Homo sapiens
ctcataataggtgct

SEQ ID NO: 460724 - DNA, 15 bp, Homo sapiens
gctcataataggtgc

SEQ ID NO: 460725 - DNA, 15 bp, Homo sapiens
ggctcataataggtg

SEQ ID NO: 460726 - DNA, 15 bp, Homo sapiens
tggctcataataggt

SEQ ID NO: 460727 - DNA, 15 bp, Homo sapiens
ctggctcataatagg

SEQ ID NO: 460728 - DNA, 15 bp, Homo sapiens
tctggctcataatag

SEQ ID NO: 460729 - DNA, 15 bp, Homo sapiens
gtctggctcataata

SEQ ID NO: 460730 - DNA, 15 bp, Homo sapiens
tgtctggctcataat

SEQ ID NO: 460731 - DNA, 15 bp, Homo sapiens
gtgtctggctcataa

SEQ ID NO: 460732 - DNA, 15 bp, Homo sapiens
agtgtctggctcata

SEQ ID NO: 460733 - DNA, 15 bp, Homo sapiens
tagtgtctggctcat

SEQ ID NO: 460734 - DNA, 15 bp, Homo sapiens
atagtgtctggctca

SEQ ID NO: 460735 - DNA, 15 bp, Homo sapiens
catagtgtctggctc

SEQ ID NO: 460736 - DNA, 15 bp, Homo sapiens
gcatagtgtctggct

SEQ ID NO: 460737 - DNA, 15 bp, Homo sapiens
agcatagtgtctggc

SEQ ID NO: 460738 - DNA, 15 bp, Homo sapiens
cagcatagtgtctgg

SEQ ID NO: 460739 - DNA, 15 bp, Homo sapiens
ccagcatagtgtctg

SEQ ID NO: 460740 - DNA, 15 bp, Homo sapiens
tccagcatagtgtct

SEQ ID NO: 460741 - DNA, 15 bp, Homo sapiens
atccagcatagtgtc

SEQ ID NO: 460742 - DNA, 15 bp, Homo sapiens
catccagcatagtgt

SEQ ID NO: 460743 - DNA, 15 bp, Homo sapiens
gcatccagcatagtg

SEQ ID NO: 460744 - DNA, 15 bp, Homo sapiens
ggcatccagcatagt

SEQ ID NO: 460745 - DNA, 15 bp, Homo sapiens
tggcatccagcatag

SEQ ID NO: 460746 - DNA, 15 bp, Homo sapiens
ctggcatccagcata

SEQ ID NO: 460747 - DNA, 15 bp, Homo sapiens
cctggcatccagcat

SEQ ID NO: 460748 - DNA, 15 bp, Homo sapiens
ccctggcatccagca

SEQ ID NO: 460749 - DNA, 15 bp, Homo sapiens
accctggcatccagc

SEQ ID NO: 460750 - DNA, 15 bp, Homo sapiens
aaccctggcatccag

SEQ ID NO: 460751 - DNA, 15 bp, Homo sapiens
gaaccctggcatcca

SEQ ID NO: 460752 - DNA, 15 bp, Homo sapiens
tgaaccctggcatcc

SEQ ID NO: 460753 - DNA, 15 bp, Homo sapiens
ctgaaccctggcatc

SEQ ID NO: 460754 - DNA, 15 bp, Homo sapiens
cctgaaccctggcat

SEQ ID NO: 460755 - DNA, 15 bp, Homo sapiens
ccctgaaccctggca

SEQ ID NO: 460756 - DNA, 15 bp, Homo sapiens
accctgaaccctggc

SEQ ID NO: 460757 - DNA, 15 bp, Homo sapiens
taccctgaaccctgg

SEQ ID NO: 460758 - DNA, 15 bp, Homo sapiens
ctaccctgaaccctg

SEQ ID NO: 460759 - DNA, 15 bp, Homo sapiens
cctaccctgaaccct

SEQ ID NO: 460760 - DNA, 15 bp, Homo sapiens
tcctaccctgaaccc

SEQ ID NO: 460761 - DNA, 15 bp, Homo sapiens
gtcctaccctgaacc

SEQ ID NO: 460762 - DNA, 15 bp, Homo sapiens
tgtcctaccctgaac

SEQ ID NO: 460763 - DNA, 15 bp, Homo sapiens
gtgtcctaccctgaa

SEQ ID NO: 460764 - DNA, 15 bp, Homo sapiens
cgtgtcctaccctga

SEQ ID NO: 460765 - DNA, 15 bp, Homo sapiens
gcgtgtcctaccctg

SEQ ID NO: 460766 - DNA, 15 bp, Homo sapiens
agcgtgtcctaccct

SEQ ID NO: 460767 - DNA, 15 bp, Homo sapiens
tagcgtgtcctaccc

SEQ ID NO: 460768 - DNA, 15 bp, Homo sapiens
ctagcgtgtcctacc

SEQ ID NO: 460769 - DNA, 15 bp, Homo sapiens
actagcgtgtcctac

SEQ ID NO: 460770 - DNA, 15 bp, Homo sapiens
cactagcgtgtccta

SEQ ID NO: 460771 - DNA, 15 bp, Homo sapiens
tcactagcgtgtcct

SEQ ID NO: 460772 - DNA, 15 bp, Homo sapiens
ctcactagcgtgtcc

SEQ ID NO: 460773 - DNA, 15 bp, Homo sapiens
gctcactagcgtgtc

SEQ ID NO: 460774 - DNA, 15 bp, Homo sapiens
tgctcactagcgtgt

SEQ ID NO: 460775 - DNA, 15 bp, Homo sapiens
ttgctcactagcgtg

SEQ ID NO: 460776 - DNA, 15 bp, Homo sapiens
tttgctcactagcgt

SEQ ID NO: 460777 - DNA, 15 bp, Homo sapiens
ttttgctcactagcg

SEQ ID NO: 460778 - DNA, 15 bp, Homo sapiens
cttttgctcactagc

SEQ ID NO: 460779 - DNA, 15 bp, Homo sapiens
gcttttgctcactag

SEQ ID NO: 460780 - DNA, 15 bp, Homo sapiens
ggcttttgctcacta

SEQ ID NO: 460781 - DNA, 15 bp, Homo sapiens
tggcttttgctcact

SEQ ID NO: 460782 - DNA, 15 bp, Homo sapiens
ttggcttttgctcac

SEQ ID NO: 460783 - DNA, 15 bp, Homo sapiens
cttggcttttgctca

SEQ ID NO: 460784 - DNA, 15 bp, Homo sapiens
tcttggcttttgctc

SEQ ID NO: 460785 - DNA, 15 bp, Homo sapiens
gtcttggcttttgct

SEQ ID NO: 460786 - DNA, 15 bp, Homo sapiens
agtcttggcttttgc

SEQ ID NO: 460787 - DNA, 15 bp, Homo sapiens
gagtcttggcttttg

SEQ ID NO: 460788 - DNA, 15 bp, Homo sapiens
agagtcttggctttt

SEQ ID NO: 460789 - DNA, 15 bp, Homo sapiens
aagagtcttggcttt

SEQ ID NO: 460790 - DNA, 15 bp, Homo sapiens
gaagagtcttggctt

SEQ ID NO: 460791 - DNA, 15 bp, Homo sapiens
agaagagtcttggct

SEQ ID NO: 460792 - DNA, 15 bp, Homo sapiens
aagaagagtcttggc

SEQ ID NO: 460793 - DNA, 15 bp, Homo sapiens
caagaagagtcttgg

SEQ ID NO: 460794 - DNA, 15 bp, Homo sapiens
acaagaagagtcttg

SEQ ID NO: 460795 - DNA, 15 bp, Homo sapiens
gacaagaagagtctt

SEQ ID NO: 460796 - DNA, 15 bp, Homo sapiens
agacaagaagagtct

SEQ ID NO: 460797 - DNA, 15 bp, Homo sapiens
aagacaagaagagtc

SEQ ID NO: 460798 - DNA, 15 bp, Homo sapiens
gaagacaagaagagt

SEQ ID NO: 460799 - DNA, 15 bp, Homo sapiens
tgaagacaagaagag

SEQ ID NO: 460800 - DNA, 15 bp, Homo sapiens
atgaagacaagaaga

SEQ ID NO: 460801 - DNA, 15 bp, Homo sapiens
catgaagacaagaag

SEQ ID NO: 460802 - DNA, 15 bp, Homo sapiens
ccatgaagacaagaa

SEQ ID NO: 460803 - DNA, 15 bp, Homo sapiens
cccatgaagacaaga

SEQ ID NO: 460804 - DNA, 15 bp, Homo sapiens
ccccatgaagacaag

SEQ ID NO: 460805 - DNA, 15 bp, Homo sapiens
gccccatgaagacaa

SEQ ID NO: 460806 - DNA, 15 bp, Homo sapiens
agccccatgaagaca

SEQ ID NO: 460807 - DNA, 15 bp, Homo sapiens
aagccccatgaagac

SEQ ID NO: 460808 - DNA, 15 bp, Homo sapiens
aaagccccatgaaga

SEQ ID NO: 460809 - DNA, 15 bp, Homo sapiens
gaaagccccatgaag

SEQ ID NO: 460810 - DNA, 15 bp, Homo sapiens
tgaaagccccatgaa

SEQ ID NO: 460811 - DNA, 15 bp, Homo sapiens
ctgaaagccccatga

SEQ ID NO: 460812 - DNA, 15 bp, Homo sapiens
actgaaagccccatg

SEQ ID NO: 460813 - DNA, 15 bp, Homo sapiens
gactgaaagccccat

SEQ ID NO: 460814 - DNA, 15 bp, Homo sapiens
ggactgaaagcccca

SEQ ID NO: 460815 - DNA, 15 bp, Homo sapiens
tggactgaaagcccc

SEQ ID NO: 460816 - DNA, 15 bp, Homo sapiens
ctggactgaaagccc

SEQ ID NO: 460817 - DNA, 15 bp, Homo sapiens
gctggactgaaagcc

SEQ ID NO: 460818 - DNA, 15 bp, Homo sapiens
tgctggactgaaagc

SEQ ID NO: 460819 - DNA, 15 bp, Homo sapiens
atgctggactgaaag

SEQ ID NO: 460820 - DNA, 15 bp, Homo sapiens
tatgctggactgaaa

SEQ ID NO: 460821 - DNA, 15 bp, Homo sapiens
ctatgctggactgaa

SEQ ID NO: 460822 - DNA, 15 bp, Homo sapiens
actatgctggactga

SEQ ID NO: 460823 - DNA, 15 bp, Homo sapiens
cactatgctggactg

SEQ ID NO: 460824 - DNA, 15 bp, Homo sapiens
ccactatgctggact

SEQ ID NO: 460825 - DNA, 15 bp, Homo sapiens
accactatgctggac

SEQ ID NO: 460826 - DNA, 15 bp, Homo sapiens
aaccactatgctgga

SEQ ID NO: 460827 - DNA, 15 bp, Homo sapiens
taaccactatgctgg

SEQ ID NO: 460828 - DNA, 15 bp, Homo sapiens
ataaccactatgctg

SEQ ID NO: 460829 - DNA, 15 bp, Homo sapiens
cataaccactatgct

SEQ ID NO: 460830 - DNA, 15 bp, Homo sapiens
tcataaccactatgc

SEQ ID NO: 460831 - DNA, 15 bp, Homo sapiens
ctcataaccactatg

SEQ ID NO: 460832 - DNA, 15 bp, Homo sapiens
actcataaccactat

SEQ ID NO: 460833 - DNA, 15 bp, Homo sapiens
gactcataaccacta

SEQ ID NO: 460834 - DNA, 15 bp, Homo sapiens
ggactcataaccact

SEQ ID NO: 460835 - DNA, 15 bp, Homo sapiens
tggactcataaccac

SEQ ID NO: 460836 - DNA, 15 bp, Homo sapiens
ttggactcataacca

SEQ ID NO: 460837 - DNA, 15 bp, Homo sapiens
cttggactcataacc

SEQ ID NO: 460838 - DNA, 15 bp, Homo sapiens
acttggactcataac

SEQ ID NO: 460839 - DNA, 15 bp, Homo sapiens
aacttggactcataa

SEQ ID NO: 460840 - DNA, 15 bp, Homo sapiens
taacttggactcata

SEQ ID NO: 460841 - DNA, 15 bp, Homo sapiens
ttaacttggactcat

SEQ ID NO: 460842 - DNA, 15 bp, Homo sapiens
attaacttggactca

SEQ ID NO: 460843 - DNA, 15 bp, Homo sapiens
cattaacttggactc

SEQ ID NO: 460844 - DNA, 15 bp, Homo sapiens
ccattaacttggact

SEQ ID NO: 460845 - DNA, 15 bp, Homo sapiens
tccattaacttggac

SEQ ID NO: 460846 - DNA, 15 bp, Homo sapiens
ctccattaacttgga

SEQ ID NO: 460847 - DNA, 15 bp, Homo sapiens
actccattaacttgg

SEQ ID NO: 460848 - DNA, 15 bp, Homo sapiens
gactccattaacttg

SEQ ID NO: 460849 - DNA, 15 bp, Homo sapiens
tgactccattaactt

SEQ ID NO: 460850 - DNA, 15 bp, Homo sapiens
gtgactccattaact

SEQ ID NO: 460851 - DNA, 15 bp, Homo sapiens
tgtgactccattaac

SEQ ID NO: 460852 - DNA, 15 bp, Homo sapiens
ctgtgactccattaa

SEQ ID NO: 460853 - DNA, 15 bp, Homo sapiens
actgtgactccatta

SEQ ID NO: 460854 - DNA, 15 bp, Homo sapiens
tactgtgactccatt

SEQ ID NO: 460855 - DNA, 15 bp, Homo sapiens
gtactgtgactccat

SEQ ID NO: 460856 - DNA, 15 bp, Homo sapiens
agtactgtgactcca

SEQ ID NO: 460857 - DNA, 15 bp, Homo sapiens
aagtactgtgactcc

SEQ ID NO: 460858 - DNA, 15 bp, Homo sapiens
caagtactgtgactc

SEQ ID NO: 460859 - DNA, 15 bp, Homo sapiens
ccaagtactgtgact

SEQ ID NO: 460860 - DNA, 15 bp, Homo sapiens
cccaagtactgtgac

SEQ ID NO: 460861 - DNA, 15 bp, Homo sapiens
acccaagtactgtga

SEQ ID NO: 460862 - DNA, 15 bp, Homo sapiens
cacccaagtactgtg

SEQ ID NO: 460863 - DNA, 15 bp, Homo sapiens
gcacccaagtactgt

SEQ ID NO: 460864 - DNA, 15 bp, Homo sapiens
tgcacccaagtactg

SEQ ID NO: 460865 - DNA, 15 bp, Homo sapiens
ttgcacccaagtact

SEQ ID NO: 460866 - DNA, 15 bp, Homo sapiens
cttgcacccaagtac

SEQ ID NO: 460867 - DNA, 15 bp, Homo sapiens
acttgcacccaagta

SEQ ID NO: 460868 - DNA, 15 bp, Homo sapiens
gacttgcacccaagt

SEQ ID NO: 460869 - DNA, 15 bp, Homo sapiens
tgacttgcacccaag

SEQ ID NO: 460870 - DNA, 15 bp, Homo sapiens
atgacttgcacccaa

SEQ ID NO: 460871 - DNA, 15 bp, Homo sapiens
catgacttgcaccca

SEQ ID NO: 460872 - DNA, 15 bp, Homo sapiens
ccatgacttgcaccc

SEQ ID NO: 460873 - DNA, 15 bp, Homo sapiens
accatgacttgcacc

SEQ ID NO: 460874 - DNA, 15 bp, Homo sapiens
caccatgacttgcac

SEQ ID NO: 460875 - DNA, 15 bp, Homo sapiens
tcaccatgacttgca

SEQ ID NO: 460876 - DNA, 15 bp, Homo sapiens
atcaccatgacttgc

SEQ ID NO: 460877 - DNA, 15 bp, Homo sapiens
catcaccatgacttg

SEQ ID NO: 460878 - DNA, 15 bp, Homo sapiens
ccatcaccatgactt

SEQ ID NO: 460879 - DNA, 15 bp, Homo sapiens
accatcaccatgact

SEQ ID NO: 460880 - DNA, 15 bp, Homo sapiens
caccatcaccatgac

SEQ ID NO: 460881 - DNA, 15 bp, Homo sapiens
tcaccatcaccatga

SEQ ID NO: 460882 - DNA, 15 bp, Homo sapiens
atcaccatcaccatg

SEQ ID NO: 460883 - DNA, 15 bp, Homo sapiens
tatcaccatcaccat

SEQ ID NO: 460884 - DNA, 15 bp, Homo sapiens
ctatcaccatcacca

SEQ ID NO: 460885 - DNA, 15 bp, Homo sapiens
tctatcaccatcacc

SEQ ID NO: 460886 - DNA, 15 bp, Homo sapiens
ttctatcaccatcac

SEQ ID NO: 460887 - DNA, 15 bp, Homo sapiens
cttctatcaccatca

SEQ ID NO: 460888 - DNA, 15 bp, Homo sapiens
ccttctatcaccatc

SEQ ID NO: 460889 - DNA, 15 bp, Homo sapiens
tccttctatcaccat

SEQ ID NO: 460890 - DNA, 15 bp, Homo sapiens
ttccttctatcacca

SEQ ID NO: 460891 - DNA, 15 bp, Homo sapiens
cttccttctatcacc

SEQ ID NO: 460892 - DNA, 15 bp, Homo sapiens
ccttccttctatcac

SEQ ID NO: 460893 - DNA, 15 bp, Homo sapiens
gccttccttctatca

SEQ ID NO: 460894 - DNA, 15 bp, Homo sapiens
tgccttccttctatc

SEQ ID NO: 460895 - DNA, 15 bp, Homo sapiens
atgccttccttctat

SEQ ID NO: 460896 - DNA, 15 bp, Homo sapiens
catgccttccttcta

SEQ ID NO: 460897 - DNA, 15 bp, Homo sapiens
acatgccttccttct

SEQ ID NO: 460898 - DNA, 15 bp, Homo sapiens
cacatgccttccttc

SEQ ID NO: 460899 - DNA, 15 bp, Homo sapiens
acacatgccttcctt

SEQ ID NO: 460900 - DNA, 15 bp, Homo sapiens
cacacatgccttcct

SEQ ID NO: 460901 - DNA, 15 bp, Homo sapiens
tcacacatgccttcc

SEQ ID NO: 460902 - DNA, 15 bp, Homo sapiens
ctcacacatgccttc

SEQ ID NO: 460903 - DNA, 15 bp, Homo sapiens
cctcacacatgcctt

SEQ ID NO: 460904 - DNA, 15 bp, Homo sapiens
ccctcacacatgcct

SEQ ID NO: 460905 - DNA, 15 bp, Homo sapiens
gccctcacacatgcc

SEQ ID NO: 460906 - DNA, 15 bp, Homo sapiens
ggccctcacacatgc

SEQ ID NO: 460907 - DNA, 15 bp, Homo sapiens
tggccctcacacatg

SEQ ID NO: 460908 - DNA, 15 bp, Homo sapiens
ctggccctcacacat

SEQ ID NO: 460909 - DNA, 15 bp, Homo sapiens
actggccctcacaca

SEQ ID NO: 460910 - DNA, 15 bp, Homo sapiens
cactggccctcacac

SEQ ID NO: 460911 - DNA, 15 bp, Homo sapiens
ccactggccctcaca

SEQ ID NO: 460912 - DNA, 15 bp, Homo sapiens
gccactggccctcac

SEQ ID NO: 460913 - DNA, 15 bp, Homo sapiens
tgccactggccctca

SEQ ID NO: 460914 - DNA, 15 bp, Homo sapiens
ctgccactggccctc

SEQ ID NO: 460915 - DNA, 15 bp, Homo sapiens
cctgccactggccct

SEQ ID NO: 460916 - DNA, 15 bp, Homo sapiens
gcctgccactggccc

SEQ ID NO: 460917 - DNA, 15 bp, Homo sapiens
tgcctgccactggcc

SEQ ID NO: 460918 - DNA, 15 bp, Homo sapiens
ctgcctgccactggc

SEQ ID NO: 460919 - DNA, 15 bp, Homo sapiens
cctgcctgccactgg

SEQ ID NO: 460920 - DNA, 15 bp, Homo sapiens
tcctgcctgccactg

SEQ ID NO: 460921 - DNA, 15 bp, Homo sapiens
ctcctgcctgccact

SEQ ID NO: 460922 - DNA, 15 bp, Homo sapiens
gctcctgcctgccac

SEQ ID NO: 460923 - DNA, 15 bp, Homo sapiens
ggctcctgcctgcca

SEQ ID NO: 460924 - DNA, 15 bp, Homo sapiens
aggctcctgcctgcc

SEQ ID NO: 460925 - DNA, 15 bp, Homo sapiens
caggctcctgcctgc

SEQ ID NO: 460926 - DNA, 15 bp, Homo sapiens
ccaggctcctgcctg

SEQ ID NO: 460927 - DNA, 15 bp, Homo sapiens
accaggctcctgcct

SEQ ID NO: 460928 - DNA, 15 bp, Homo sapiens
caccaggctcctgcc

SEQ ID NO: 460929 - DNA, 15 bp, Homo sapiens
acaccaggctcctgc

SEQ ID NO: 460930 - DNA, 15 bp, Homo sapiens
aacaccaggctcctg

SEQ ID NO: 460931 - DNA, 15 bp, Homo sapiens
aaacaccaggctcct

SEQ ID NO: 460932 - DNA, 15 bp, Homo sapiens
aaaacaccaggctcc

SEQ ID NO: 460933 - DNA, 15 bp, Homo sapiens
aaaaacaccaggctc

SEQ ID NO: 460934 - DNA, 15 bp, Homo sapiens
caaaaacaccaggct

SEQ ID NO: 460935 - DNA, 15 bp, Homo sapiens
tcaaaaacaccaggc

SEQ ID NO: 460936 - DNA, 15 bp, Homo sapiens
ctcaaaaacaccagg

SEQ ID NO: 460937 - DNA, 15 bp, Homo sapiens
cctcaaaaacaccag

SEQ ID NO: 460938 - DNA, 15 bp, Homo sapiens
tcctcaaaaacacca

SEQ ID NO: 460939 - DNA, 15 bp, Homo sapiens
gtcctcaaaaacacc

SEQ ID NO: 460940 - DNA, 15 bp, Homo sapiens
ggtcctcaaaaacac

SEQ ID NO: 460941 - DNA, 15 bp, Homo sapiens
aggtcctcaaaaaca

SEQ ID NO: 460942 - DNA, 15 bp, Homo sapiens
caggtcctcaaaaac

SEQ ID NO: 460943 - DNA, 15 bp, Homo sapiens
tcaggtcctcaaaaa

SEQ ID NO: 460944 - DNA, 15 bp, Homo sapiens
ttcaggtcctcaaaa

SEQ ID NO: 460945 - DNA, 15 bp, Homo sapiens
cttcaggtcctcaaa

SEQ ID NO: 460946 - DNA, 15 bp, Homo sapiens
tcttcaggtcctcaa

SEQ ID NO: 460947 - DNA, 15 bp, Homo sapiens
ttcttcaggtcctca

SEQ ID NO: 460948 - DNA, 15 bp, Homo sapiens
cttcttcaggtcctc

SEQ ID NO: 460949 - DNA, 15 bp, Homo sapiens
ccttcttcaggtcct

SEQ ID NO: 460950 - DNA, 15 bp, Homo sapiens
tccttcttcaggtcc

SEQ ID NO: 460951 - DNA, 15 bp, Homo sapiens
ctccttcttcaggtc

SEQ ID NO: 460952 - DNA, 15 bp, Homo sapiens
gctccttcttcaggt

SEQ ID NO: 460953 - DNA, 15 bp, Homo sapiens
tgctccttcttcagg

SEQ ID NO: 460954 - DNA, 15 bp, Homo sapiens
ctgctccttcttcag

SEQ ID NO: 460955 - DNA, 15 bp, Homo sapiens
tctgctccttcttca

SEQ ID NO: 460956 - DNA, 15 bp, Homo sapiens
ctctgctccttcttc

SEQ ID NO: 460957 - DNA, 15 bp, Homo sapiens
actctgctccttctt

SEQ ID NO: 460958 - DNA, 15 bp, Homo sapiens
cactctgctccttct

SEQ ID NO: 460959 - DNA, 15 bp, Homo sapiens
tcactctgctccttc

SEQ ID NO: 460960 - DNA, 15 bp, Homo sapiens
ctcactctgctcctt

SEQ ID NO: 460961 - DNA, 15 bp, Homo sapiens
actcactctgctcct

SEQ ID NO: 460962 - DNA, 15 bp, Homo sapiens
cactcactctgctcc

SEQ ID NO: 460963 - DNA, 15 bp, Homo sapiens
gcactcactctgctc

SEQ ID NO: 460964 - DNA, 15 bp, Homo sapiens
ggcactcactctgct

SEQ ID NO: 460965 - DNA, 15 bp, Homo sapiens
tggcactcactctgc

SEQ ID NO: 460966 - DNA, 15 bp, Homo sapiens
ctggcactcactctg

SEQ ID NO: 460967 - DNA, 15 bp, Homo sapiens
cctggcactcactct

SEQ ID NO: 460968 - DNA, 15 bp, Homo sapiens
tcctggcactcactc

SEQ ID NO: 460969 - DNA, 15 bp, Homo sapiens
ttcctggcactcact

SEQ ID NO: 460970 - DNA, 15 bp, Homo sapiens
gttcctggcactcac

SEQ ID NO: 460971 - DNA, 15 bp, Homo sapiens
agttcctggcactca

SEQ ID NO: 460972 - DNA, 15 bp, Homo sapiens
aagttcctggcactc

SEQ ID NO: 460973 - DNA, 15 bp, Homo sapiens
taagttcctggcact

SEQ ID NO: 460974 - DNA, 15 bp, Homo sapiens
ctaagttcctggcac

SEQ ID NO: 460975 - DNA, 15 bp, Homo sapiens
gctaagttcctggca

SEQ ID NO: 460976 - DNA, 15 bp, Homo sapiens
ggctaagttcctggc

SEQ ID NO: 460977 - DNA, 15 bp, Homo sapiens
tggctaagttcctgg

SEQ ID NO: 460978 - DNA, 15 bp, Homo sapiens
gtggctaagttcctg

SEQ ID NO: 460979 - DNA, 15 bp, Homo sapiens
ggtggctaagttcct

SEQ ID NO: 460980 - DNA, 15 bp, Homo sapiens
tggtggctaagttcc

SEQ ID NO: 460981 - DNA, 15 bp, Homo sapiens
ctggtggctaagttc

SEQ ID NO: 460982 - DNA, 15 bp, Homo sapiens
gctggtggctaagtt

SEQ ID NO: 460983 - DNA, 15 bp, Homo sapiens
agctggtggctaagt

SEQ ID NO: 460984 - DNA, 15 bp, Homo sapiens
cagctggtggctaag

SEQ ID NO: 460985 - DNA, 15 bp, Homo sapiens
ccagctggtggctaa

SEQ ID NO: 460986 - DNA, 15 bp, Homo sapiens
accagctggtggcta

SEQ ID NO: 460987 - DNA, 15 bp, Homo sapiens
taccagctggtggct

SEQ ID NO: 460988 - DNA, 15 bp, Homo sapiens
gtaccagctggtggc

SEQ ID NO: 460989 - DNA, 15 bp, Homo sapiens
ggtaccagctggtgg

SEQ ID NO: 460990 - DNA, 15 bp, Homo sapiens
tggtaccagctggtg

SEQ ID NO: 460991 - DNA, 15 bp, Homo sapiens
ctggtaccagctggt

SEQ ID NO: 460992 - DNA, 15 bp, Homo sapiens
gctggtaccagctgg

SEQ ID NO: 460993 - DNA, 15 bp, Homo sapiens
ggctggtaccagctg

SEQ ID NO: 460994 - DNA, 15 bp, Homo sapiens
tggctggtaccagct

SEQ ID NO: 460995 - DNA, 15 bp, Homo sapiens
atggctggtaccagc

SEQ ID NO: 460996 - DNA, 15 bp, Homo sapiens
tatggctggtaccag

SEQ ID NO: 460997 - DNA, 15 bp, Homo sapiens
gtatggctggtacca

SEQ ID NO: 460998 - DNA, 15 bp, Homo sapiens
cgtatggctggtacc

SEQ ID NO: 460999 - DNA, 15 bp, Homo sapiens
tcgtatggctggtac

SEQ ID NO: 461000 - DNA, 15 bp, Homo sapiens
ctcgtatggctggta

SEQ ID NO: 461001 - DNA, 15 bp, Homo sapiens
tctcgtatggctggt

SEQ ID NO: 461002 - DNA, 15 bp, Homo sapiens
ctctcgtatggctgg

SEQ ID NO: 461003 - DNA, 15 bp, Homo sapiens
cctctcgtatggctg

SEQ ID NO: 461004 - DNA, 15 bp, Homo sapiens
ccctctcgtatggct

SEQ ID NO: 461005 - DNA, 15 bp, Homo sapiens
cccctctcgtatggc

SEQ ID NO: 461006 - DNA, 15 bp, Homo sapiens
gcccctctcgtatgg

SEQ ID NO: 461007 - DNA, 15 bp, Homo sapiens
tgcccctctcgtatg

SEQ ID NO: 461008 - DNA, 15 bp, Homo sapiens
ctgcccctctcgtat

SEQ ID NO: 461009 - DNA, 15 bp, Homo sapiens
tctgcccctctcgta

SEQ ID NO: 461010 - DNA, 15 bp, Homo sapiens
ctctgcccctctcgt

SEQ ID NO: 461011 - DNA, 15 bp, Homo sapiens
gctctgcccctctcg

SEQ ID NO: 461012 - DNA, 15 bp, Homo sapiens
ggctctgcccctctc

SEQ ID NO: 461013 - DNA, 15 bp, Homo sapiens
tggctctgcccctct

SEQ ID NO: 461014 - DNA, 15 bp, Homo sapiens
ctggctctgcccctc

SEQ ID NO: 461015 - DNA, 15 bp, Homo sapiens
gctggctctgcccct

SEQ ID NO: 461016 - DNA, 15 bp, Homo sapiens
ggctggctctgcccc

SEQ ID NO: 461017 - DNA, 15 bp, Homo sapiens
tggctggctctgccc

SEQ ID NO: 461018 - DNA, 15 bp, Homo sapiens
ctggctggctctgcc

SEQ ID NO: 461019 - DNA, 15 bp, Homo sapiens
cctggctggctctgc

SEQ ID NO: 461020 - DNA, 15 bp, Homo sapiens
tcctggctggctctg

SEQ ID NO: 461021 - DNA, 15 bp, Homo sapiens
atcctggctggctct

SEQ ID NO: 461022 - DNA, 15 bp, Homo sapiens
catcctggctggctc

SEQ ID NO: 461023 - DNA, 15 bp, Homo sapiens
acatcctggctggct

SEQ ID NO: 461024 - DNA, 15 bp, Homo sapiens
gacatcctggctggc

SEQ ID NO: 461025 - DNA, 15 bp, Homo sapiens
cgacatcctggctgg

SEQ ID NO: 461026 - DNA, 15 bp, Homo sapiens
ccgacatcctggctg

SEQ ID NO: 461027 - DNA, 15 bp, Homo sapiens
accgacatcctggct

SEQ ID NO: 461028 - DNA, 15 bp, Homo sapiens
gaccgacatcctggc

SEQ ID NO: 461029 - DNA, 15 bp, Homo sapiens
tgaccgacatcctgg

SEQ ID NO: 461030 - DNA, 15 bp, Homo sapiens
atgaccgacatcctg

SEQ ID NO: 461031 - DNA, 15 bp, Homo sapiens
catgaccgacatcct

SEQ ID NO: 461032 - DNA, 15 bp, Homo sapiens
gcatgaccgacatcc

SEQ ID NO: 461033 - DNA, 15 bp, Homo sapiens
agcatgaccgacatc

SEQ ID NO: 461034 - DNA, 15 bp, Homo sapiens
tagcatgaccgacat

SEQ ID NO: 461035 - DNA, 15 bp, Homo sapiens
ctagcatgaccgaca

SEQ ID NO: 461036 - DNA, 15 bp, Homo sapiens
actagcatgaccgac

SEQ ID NO: 461037 - DNA, 15 bp, Homo sapiens
tactagcatgaccga

SEQ ID NO: 461038 - DNA, 15 bp, Homo sapiens
ttactagcatgaccg

SEQ ID NO: 461039 - DNA, 15 bp, Homo sapiens
attactagcatgacc

SEQ ID NO: 461040 - DNA, 15 bp, Homo sapiens
cattactagcatgac

SEQ ID NO: 461041 - DNA, 15 bp, Homo sapiens
tcattactagcatga

SEQ ID NO: 461042 - DNA, 15 bp, Homo sapiens
ctcattactagcatg

SEQ ID NO: 461043 - DNA, 15 bp, Homo sapiens
actcattactagcat

SEQ ID NO: 461044 - DNA, 15 bp, Homo sapiens
tactcattactagca

SEQ ID NO: 461045 - DNA, 15 bp, Homo sapiens
gtactcattactagc

SEQ ID NO: 461046 - DNA, 15 bp, Homo sapiens
tgtactcattactag

SEQ ID NO: 461047 - DNA, 15 bp, Homo sapiens
ttgtactcattacta

SEQ ID NO: 461048 - DNA, 15 bp, Homo sapiens
tttgtactcattact

SEQ ID NO: 461049 - DNA, 15 bp, Homo sapiens
gtttgtactcattac

SEQ ID NO: 461050 - DNA, 15 bp, Homo sapiens
tgtttgtactcatta

SEQ ID NO: 461051 - DNA, 15 bp, Homo sapiens
gtgtttgtactcatt

SEQ ID NO: 461052 - DNA, 15 bp, Homo sapiens
agtgtttgtactcat

SEQ ID NO: 461053 - DNA, 15 bp, Homo sapiens
aagtgtttgtactca

SEQ ID NO: 461054 - DNA, 15 bp, Homo sapiens
taagtgtttgtactc

SEQ ID NO: 461055 - DNA, 15 bp, Homo sapiens
gtaagtgtttgtact

SEQ ID NO: 461056 - DNA, 15 bp, Homo sapiens
tgtaagtgtttgtac

SEQ ID NO: 461057 - DNA, 15 bp, Homo sapiens
atgtaagtgtttgta

SEQ ID NO: 461058 - DNA, 15 bp, Homo sapiens
catgtaagtgtttgt

SEQ ID NO: 461059 - DNA, 15 bp, Homo sapiens
gcatgtaagtgtttg

SEQ ID NO: 461060 - DNA, 15 bp, Homo sapiens
agcatgtaagtgttt

SEQ ID NO: 461061 - DNA, 15 bp, Homo sapiens
cagcatgtaagtgtt

SEQ ID NO: 461062 - DNA, 15 bp, Homo sapiens
gcagcatgtaagtgt

SEQ ID NO: 461063 - DNA, 15 bp, Homo sapiens
tgcagcatgtaagtg

SEQ ID NO: 461064 - DNA, 15 bp, Homo sapiens
gtgcagcatgtaagt

SEQ ID NO: 461065 - DNA, 15 bp, Homo sapiens
cgtgcagcatgtaag

SEQ ID NO: 461066 - DNA, 15 bp, Homo sapiens
gcgtgcagcatgtaa

SEQ ID NO: 461067 - DNA, 15 bp, Homo sapiens
agcgtgcagcatgta

SEQ ID NO: 461068 - DNA, 15 bp, Homo sapiens
tagcgtgcagcatgt

SEQ ID NO: 461069 - DNA, 15 bp, Homo sapiens
atagcgtgcagcatg

SEQ ID NO: 461070 - DNA, 15 bp, Homo sapiens
aatagcgtgcagcat

SEQ ID NO: 461071 - DNA, 15 bp, Homo sapiens
caatagcgtgcagca

SEQ ID NO: 461072 - DNA, 15 bp, Homo sapiens
ccaatagcgtgcagc

SEQ ID NO: 461073 - DNA, 15 bp, Homo sapiens
cccaatagcgtgcag

SEQ ID NO: 461074 - DNA, 15 bp, Homo sapiens
gcccaatagcgtgca

SEQ ID NO: 461075 - DNA, 15 bp, Homo sapiens
agcccaatagcgtgc

SEQ ID NO: 461076 - DNA, 15 bp, Homo sapiens
gagcccaatagcgtg

SEQ ID NO: 461077 - DNA, 15 bp, Homo sapiens
ggagcccaatagcgt

SEQ ID NO: 461078 - DNA, 15 bp, Homo sapiens
aggagcccaatagcg

SEQ ID NO: 461079 - DNA, 15 bp, Homo sapiens
caggagcccaatagc

SEQ ID NO: 461080 - DNA, 15 bp, Homo sapiens
tcaggagcccaatag

SEQ ID NO: 461081 - DNA, 15 bp, Homo sapiens
ctcaggagcccaata

SEQ ID NO: 461082 - DNA, 15 bp, Homo sapiens
actcaggagcccaat

SEQ ID NO: 461083 - DNA, 15 bp, Homo sapiens
cactcaggagcccaa

SEQ ID NO: 461084 - DNA, 15 bp, Homo sapiens
gcactcaggagccca

SEQ ID NO: 461085 - DNA, 15 bp, Homo sapiens
agcactcaggagccc

SEQ ID NO: 461086 - DNA, 15 bp, Homo sapiens
tagcactcaggagcc

SEQ ID NO: 461087 - DNA, 15 bp, Homo sapiens
gtagcactcaggagc

SEQ ID NO: 461088 - DNA, 15 bp, Homo sapiens
cgtagcactcaggag

SEQ ID NO: 461089 - DNA, 15 bp, Homo sapiens
acgtagcactcagga

SEQ ID NO: 461090 - DNA, 15 bp, Homo sapiens
cacgtagcactcagg

SEQ ID NO: 461091 - DNA, 15 bp, Homo sapiens
acacgtagcactcag

SEQ ID NO: 461092 - DNA, 15 bp, Homo sapiens
aacacgtagcactca

SEQ ID NO: 461093 - DNA, 15 bp, Homo sapiens
gaacacgtagcactc

SEQ ID NO: 461094 - DNA, 15 bp, Homo sapiens
tgaacacgtagcact

SEQ ID NO: 461095 - DNA, 15 bp, Homo sapiens
atgaacacgtagcac

SEQ ID NO: 461096 - DNA, 15 bp, Homo sapiens
aatgaacacgtagca

SEQ ID NO: 461097 - DNA, 15 bp, Homo sapiens
taatgaacacgtagc

SEQ ID NO: 461098 - DNA, 15 bp, Homo sapiens
ctaatgaacacgtag

SEQ ID NO: 461099 - DNA, 15 bp, Homo sapiens
gctaatgaacacgta

SEQ ID NO: 461100 - DNA, 15 bp, Homo sapiens
agctaatgaacacgt

SEQ ID NO: 461101 - DNA, 15 bp, Homo sapiens
gagctaatgaacacg

SEQ ID NO: 461102 - DNA, 15 bp, Homo sapiens
cgagctaatgaacac

SEQ ID NO: 461103 - DNA, 15 bp, Homo sapiens
tcgagctaatgaaca

SEQ ID NO: 461104 - DNA, 15 bp, Homo sapiens
atcgagctaatgaac

SEQ ID NO: 461105 - DNA, 15 bp, Homo sapiens
catcgagctaatgaa

SEQ ID NO: 461106 - DNA, 15 bp, Homo sapiens
tcatcgagctaatga

SEQ ID NO: 461107 - DNA, 15 bp, Homo sapiens
ttcatcgagctaatg

SEQ ID NO: 461108 - DNA, 15 bp, Homo sapiens
attcatcgagctaat

SEQ ID NO: 461109 - DNA, 15 bp, Homo sapiens
aattcatcgagctaa

SEQ ID NO: 461110 - DNA, 15 bp, Homo sapiens
aaattcatcgagcta

SEQ ID NO: 461111 - DNA, 15 bp, Homo sapiens
caaattcatcgagct

SEQ ID NO: 461112 - DNA, 15 bp, Homo sapiens
acaaattcatcgagc

SEQ ID NO: 461113 - DNA, 15 bp, Homo sapiens
tacaaattcatcgag

SEQ ID NO: 461114 - DNA, 15 bp, Homo sapiens
gtacaaattcatcga

SEQ ID NO: 461115 - DNA, 15 bp, Homo sapiens
tgtacaaattcatcg

SEQ ID NO: 461116 - DNA, 15 bp, Homo sapiens
ctgtacaaattcatc

SEQ ID NO: 461117 - DNA, 15 bp, Homo sapiens
gctgtacaaattcat

SEQ ID NO: 461118 - DNA, 15 bp, Homo sapiens
tgctgtacaaattca

SEQ ID NO: 461119 - DNA, 15 bp, Homo sapiens
ttgctgtacaaattc

SEQ ID NO: 461120 - DNA, 15 bp, Homo sapiens
gttgctgtacaaatt

SEQ ID NO: 461121 - DNA, 15 bp, Homo sapiens
ggttgctgtacaaat

SEQ ID NO: 461122 - DNA, 15 bp, Homo sapiens
gggttgctgtacaaa

SEQ ID NO: 461123 - DNA, 15 bp, Homo sapiens
agggttgctgtacaa

SEQ ID NO: 461124 - DNA, 15 bp, Homo sapiens
cagggttgctgtaca

SEQ ID NO: 461125 - DNA, 15 bp, Homo sapiens
acagggttgctgtac

SEQ ID NO: 461126 - DNA, 15 bp, Homo sapiens
cacagggttgctgta

SEQ ID NO: 461127 - DNA, 15 bp, Homo sapiens
tcacagggttgctgt

SEQ ID NO: 461128 - DNA, 15 bp, Homo sapiens
ctcacagggttgctg

SEQ ID NO: 461129 - DNA, 15 bp, Homo sapiens
cctcacagggttgct

SEQ ID NO: 461130 - DNA, 15 bp, Homo sapiens
acctcacagggttgc

SEQ ID NO: 461131 - DNA, 15 bp, Homo sapiens
tacctcacagggttg

SEQ ID NO: 461132 - DNA, 15 bp, Homo sapiens
ttacctcacagggtt

SEQ ID NO: 461133 - DNA, 15 bp, Homo sapiens
cttacctcacagggt

SEQ ID NO: 461134 - DNA, 15 bp, Homo sapiens
gcttacctcacaggg

SEQ ID NO: 461135 - DNA, 15 bp, Homo sapiens
tgcttacctcacagg

SEQ ID NO: 461136 - DNA, 15 bp, Homo sapiens
gtgcttacctcacag

SEQ ID NO: 461137 - DNA, 15 bp, Homo sapiens
agtgcttacctcaca

SEQ ID NO: 461138 - DNA, 15 bp, Homo sapiens
cagtgcttacctcac

SEQ ID NO: 461139 - DNA, 15 bp, Homo sapiens
acagtgcttacctca

SEQ ID NO: 461140 - DNA, 15 bp, Homo sapiens
aacagtgcttacctc

SEQ ID NO: 461141 - DNA, 15 bp, Homo sapiens
gaacagtgcttacct

SEQ ID NO: 461142 - DNA, 15 bp, Homo sapiens
agaacagtgcttacc

SEQ ID NO: 461143 - DNA, 15 bp, Homo sapiens
gagaacagtgcttac

SEQ ID NO: 461144 - DNA, 15 bp, Homo sapiens
agagaacagtgctta

SEQ ID NO: 461145 - DNA, 15 bp, Homo sapiens
gagagaacagtgctt

SEQ ID NO: 461146 - DNA, 15 bp, Homo sapiens
ggagagaacagtgct

SEQ ID NO: 461147 - DNA, 15 bp, Homo sapiens
gggagagaacagtgc

SEQ ID NO: 461148 - DNA, 15 bp, Homo sapiens
ggggagagaacagtg

SEQ ID NO: 461149 - DNA, 15 bp, Homo sapiens
aggggagagaacagt

SEQ ID NO: 461150 - DNA, 15 bp, Homo sapiens
aaggggagagaacag

SEQ ID NO: 461151 - DNA, 15 bp, Homo sapiens
aaaggggagagaaca

SEQ ID NO: 461152 - DNA, 15 bp, Homo sapiens
gaaaggggagagaac

SEQ ID NO: 461153 - DNA, 15 bp, Homo sapiens
agaaaggggagagaa

SEQ ID NO: 461154 - DNA, 15 bp, Homo sapiens
tagaaaggggagaga

SEQ ID NO: 461155 - DNA, 15 bp, Homo sapiens
atagaaaggggagag

SEQ ID NO: 461156 - DNA, 15 bp, Homo sapiens
tatagaaaggggaga

SEQ ID NO: 461157 - DNA, 15 bp, Homo sapiens
ctatagaaaggggag

SEQ ID NO: 461158 - DNA, 15 bp, Homo sapiens
tctatagaaagggga

SEQ ID NO: 461159 - DNA, 15 bp, Homo sapiens
atctatagaaagggg

SEQ ID NO: 461160 - DNA, 15 bp, Homo sapiens
catctatagaaaggg

SEQ ID NO: 461161 - DNA, 15 bp, Homo sapiens
tcatctatagaaagg

SEQ ID NO: 461162 - DNA, 15 bp, Homo sapiens
ctcatctatagaaag

SEQ ID NO: 461163 - DNA, 15 bp, Homo sapiens
cctcatctatagaaa

SEQ ID NO: 461164 - DNA, 15 bp, Homo sapiens
tcctcatctatagaa

SEQ ID NO: 461165 - DNA, 15 bp, Homo sapiens
ttcctcatctataga

SEQ ID NO: 461166 - DNA, 15 bp, Homo sapiens
tttcctcatctatag

SEQ ID NO: 461167 - DNA, 15 bp, Homo sapiens
atttcctcatctata

SEQ ID NO: 461168 - DNA, 15 bp, Homo sapiens
aatttcctcatctat

SEQ ID NO: 461169 - DNA, 15 bp, Homo sapiens
taatttcctcatcta

SEQ ID NO: 461170 - DNA, 15 bp, Homo sapiens
ttaatttcctcatct

SEQ ID NO: 461171 - DNA, 15 bp, Homo sapiens
cttaatttcctcatc

SEQ ID NO: 461172 - DNA, 15 bp, Homo sapiens
ccttaatttcctcat

SEQ ID NO: 461173 - DNA, 15 bp, Homo sapiens
gccttaatttcctca

SEQ ID NO: 461174 - DNA, 15 bp, Homo sapiens
tgccttaatttcctc

SEQ ID NO: 461175 - DNA, 15 bp, Homo sapiens
gtgccttaatttcct

SEQ ID NO: 461176 - DNA, 15 bp, Homo sapiens
tgtgccttaatttcc

SEQ ID NO: 461177 - DNA, 15 bp, Homo sapiens
ttgtgccttaatttc

SEQ ID NO: 461178 - DNA, 15 bp, Homo sapiens
tttgtgccttaattt

SEQ ID NO: 461179 - DNA, 15 bp, Homo sapiens
ctttgtgccttaatt

SEQ ID NO: 461180 - DNA, 15 bp, Homo sapiens
tctttgtgccttaat

SEQ ID NO: 461181 - DNA, 15 bp, Homo sapiens
ctctttgtgccttaa

SEQ ID NO: 461182 - DNA, 15 bp, Homo sapiens
cctctttgtgcctta

SEQ ID NO: 461183 - DNA, 15 bp, Homo sapiens
tcctctttgtgcctt

SEQ ID NO: 461184 - DNA, 15 bp, Homo sapiens
atcctctttgtgcct

SEQ ID NO: 461185 - DNA, 15 bp, Homo sapiens
tatcctctttgtgcc

SEQ ID NO: 461186 - DNA, 15 bp, Homo sapiens
ttatcctctttgtgc

SEQ ID NO: 461187 - DNA, 15 bp, Homo sapiens
tttatcctctttgtg

SEQ ID NO: 461188 - DNA, 15 bp, Homo sapiens
atttatcctctttgt

SEQ ID NO: 461189 - DNA, 15 bp, Homo sapiens
tatttatcctctttg

SEQ ID NO: 461190 - DNA, 15 bp, Homo sapiens
ttatttatcctcttt

SEQ ID NO: 461191 - DNA, 15 bp, Homo sapiens
gttatttatcctctt

SEQ ID NO: 461192 - DNA, 15 bp, Homo sapiens
agttatttatcctct

SEQ ID NO: 461193 - DNA, 15 bp, Homo sapiens
cagttatttatcctc

SEQ ID NO: 461194 - DNA, 15 bp, Homo sapiens
ccagttatttatcct

SEQ ID NO: 461195 - DNA, 15 bp, Homo sapiens
gccagttatttatcc

SEQ ID NO: 461196 - DNA, 15 bp, Homo sapiens
tgccagttatttatc

SEQ ID NO: 461197 - DNA, 15 bp, Homo sapiens
gtgccagttatttat

SEQ ID NO: 461198 - DNA, 15 bp, Homo sapiens
ggtgccagttattta

SEQ ID NO: 461199 - DNA, 15 bp, Homo sapiens
tggtgccagttattt

SEQ ID NO: 461200 - DNA, 15 bp, Homo sapiens
ctggtgccagttatt

SEQ ID NO: 461201 - DNA, 15 bp, Homo sapiens
gctggtgccagttat

SEQ ID NO: 461202 - DNA, 15 bp, Homo sapiens
agctggtgccagtta

SEQ ID NO: 461203 - DNA, 15 bp, Homo sapiens
tagctggtgccagtt

SEQ ID NO: 461204 - DNA, 15 bp, Homo sapiens
gtagctggtgccagt

SEQ ID NO: 461205 - DNA, 15 bp, Homo sapiens
tgtagctggtgccag

SEQ ID NO: 461206 - DNA, 15 bp, Homo sapiens
gtgtagctggtgcca

SEQ ID NO: 461207 - DNA, 15 bp, Homo sapiens
cgtgtagctggtgcc

SEQ ID NO: 461208 - DNA, 15 bp, Homo sapiens
gcgtgtagctggtgc

SEQ ID NO: 461209 - DNA, 15 bp, Homo sapiens
agcgtgtagctggtg

SEQ ID NO: 461210 - DNA, 15 bp, Homo sapiens
tagcgtgtagctggt

SEQ ID NO: 461211 - DNA, 15 bp, Homo sapiens
ttagcgtgtagctgg

SEQ ID NO: 461212 - DNA, 15 bp, Homo sapiens
cttagcgtgtagctg

SEQ ID NO: 461213 - DNA, 15 bp, Homo sapiens
acttagcgtgtagct

SEQ ID NO: 461214 - DNA, 15 bp, Homo sapiens
cacttagcgtgtagc

SEQ ID NO: 461215 - DNA, 15 bp, Homo sapiens
tcacttagcgtgtag

SEQ ID NO: 461216 - DNA, 15 bp, Homo sapiens
atcacttagcgtgta

SEQ ID NO: 461217 - DNA, 15 bp, Homo sapiens
gatcacttagcgtgt

SEQ ID NO: 461218 - DNA, 15 bp, Homo sapiens
cgatcacttagcgtg

SEQ ID NO: 461219 - DNA, 15 bp, Homo sapiens
tcgatcacttagcgt

SEQ ID NO: 461220 - DNA, 15 bp, Homo sapiens
ttcgatcacttagcg

SEQ ID NO: 461221 - DNA, 15 bp, Homo sapiens
cttcgatcacttagc

SEQ ID NO: 461222 - DNA, 15 bp, Homo sapiens
acttcgatcacttag

SEQ ID NO: 461223 - DNA, 15 bp, Homo sapiens
cacttcgatcactta

SEQ ID NO: 461224 - DNA, 15 bp, Homo sapiens
ccacttcgatcactt

SEQ ID NO: 461225 - DNA, 15 bp, Homo sapiens
accacttcgatcact

SEQ ID NO: 461226 - DNA, 15 bp, Homo sapiens
caccacttcgatcac

SEQ ID NO: 461227 - DNA, 15 bp, Homo sapiens
ccaccacttcgatca

SEQ ID NO: 461228 - DNA, 15 bp, Homo sapiens
tccaccacttcgatc

SEQ ID NO: 461229 - DNA, 15 bp, Homo sapiens
ttccaccacttcgat

SEQ ID NO: 461230 - DNA, 15 bp, Homo sapiens
gttccaccacttcga

SEQ ID NO: 461231 - DNA, 15 bp, Homo sapiens
ggttccaccacttcg

SEQ ID NO: 461232 - DNA, 15 bp, Homo sapiens
tggttccaccacttc

SEQ ID NO: 461233 - DNA, 15 bp, Homo sapiens
ctggttccaccactt

SEQ ID NO: 461234 - DNA, 15 bp, Homo sapiens
cctggttccaccact

SEQ ID NO: 461235 - DNA, 15 bp, Homo sapiens
tcctggttccaccac

SEQ ID NO: 461236 - DNA, 15 bp, Homo sapiens
atcctggttccacca

SEQ ID NO: 461237 - DNA, 15 bp, Homo sapiens
aatcctggttccacc

SEQ ID NO: 461238 - DNA, 15 bp, Homo sapiens
gaatcctggttccac

SEQ ID NO: 461239 - DNA, 15 bp, Homo sapiens
tgaatcctggttcca

SEQ ID NO: 461240 - DNA, 15 bp, Homo sapiens
ttgaatcctggttcc

SEQ ID NO: 461241 - DNA, 15 bp, Homo sapiens
tttgaatcctggttc

SEQ ID NO: 461242 - DNA, 15 bp, Homo sapiens
atttgaatcctggtt

SEQ ID NO: 461243 - DNA, 15 bp, Homo sapiens
gatttgaatcctggt

SEQ ID NO: 461244 - DNA, 15 bp, Homo sapiens
ggatttgaatcctgg

SEQ ID NO: 461245 - DNA, 15 bp, Homo sapiens
tggatttgaatcctg

SEQ ID NO: 461246 - DNA, 15 bp, Homo sapiens
atggatttgaatcct

SEQ ID NO: 461247 - DNA, 15 bp, Homo sapiens
catggatttgaatcc

SEQ ID NO: 461248 - DNA, 15 bp, Homo sapiens
gcatggatttgaatc

SEQ ID NO: 461249 - DNA, 15 bp, Homo sapiens
agcatggatttgaat

SEQ ID NO: 461250 - DNA, 15 bp, Homo sapiens
tagcatggatttgaa

SEQ ID NO: 461251 - DNA, 15 bp, Homo sapiens
atagcatggatttga

SEQ ID NO: 461252 - DNA, 15 bp, Homo sapiens
aatagcatggatttg

SEQ ID NO: 461253 - DNA, 15 bp, Homo sapiens
gaatagcatggattt

SEQ ID NO: 461254 - DNA, 15 bp, Homo sapiens
agaatagcatggatt

SEQ ID NO: 461255 - DNA, 15 bp, Homo sapiens
cagaatagcatggat

SEQ ID NO: 461256 - DNA, 15 bp, Homo sapiens
gcagaatagcatgga

SEQ ID NO: 461257 - DNA, 15 bp, Homo sapiens
ggcagaatagcatgg

SEQ ID NO: 461258 - DNA, 15 bp, Homo sapiens
aggcagaatagcatg

SEQ ID NO: 461259 - DNA, 15 bp, Homo sapiens
aaggcagaatagcat

SEQ ID NO: 461260 - DNA, 15 bp, Homo sapiens
taaggcagaatagca

SEQ ID NO: 461261 - DNA, 15 bp, Homo sapiens
ttaaggcagaatagc

SEQ ID NO: 461262 - DNA, 15 bp, Homo sapiens
cttaaggcagaatag

SEQ ID NO: 461263 - DNA, 15 bp, Homo sapiens
tcttaaggcagaata

SEQ ID NO: 461264 - DNA, 15 bp, Homo sapiens
atcttaaggcagaat

SEQ ID NO: 461265 - DNA, 15 bp, Homo sapiens
tatcttaaggcagaa

SEQ ID NO: 461266 - DNA, 15 bp, Homo sapiens
ttatcttaaggcaga

SEQ ID NO: 461267 - DNA, 15 bp, Homo sapiens
gttatcttaaggcag

SEQ ID NO: 461268 - DNA, 15 bp, Homo sapiens
tgttatcttaaggca

SEQ ID NO: 461269 - DNA, 15 bp, Homo sapiens
ttgttatcttaaggc

SEQ ID NO: 461270 - DNA, 15 bp, Homo sapiens
tttgttatcttaagg

SEQ ID NO: 461271 - DNA, 15 bp, Homo sapiens
atttgttatcttaag

SEQ ID NO: 461272 - DNA, 15 bp, Homo sapiens
gatttgttatcttaa

SEQ ID NO: 461273 - DNA, 15 bp, Homo sapiens
agatttgttatctta

SEQ ID NO: 461274 - DNA, 15 bp, Homo sapiens
aagatttgttatctt

SEQ ID NO: 461275 - DNA, 15 bp, Homo sapiens
caagatttgttatct

SEQ ID NO: 461276 - DNA, 15 bp, Homo sapiens
acaagatttgttatc

SEQ ID NO: 461277 - DNA, 15 bp, Homo sapiens
aacaagatttgttat

SEQ ID NO: 461278 - DNA, 15 bp, Homo sapiens
aaacaagatttgtta

SEQ ID NO: 461279 - DNA, 15 bp, Homo sapiens
aaaacaagatttgtt

SEQ ID NO: 461280 - DNA, 15 bp, Homo sapiens
aaaaacaagatttgt

SEQ ID NO: 461281 - DNA, 15 bp, Homo sapiens
aaaaaacaagatttg

SEQ ID NO: 461282 - DNA, 15 bp, Homo sapiens
taaaaaacaagattt

SEQ ID NO: 461283 - DNA, 15 bp, Homo sapiens
ctaaaaaacaagatt

SEQ ID NO: 461284 - DNA, 15 bp, Homo sapiens
gctaaaaaacaagat

SEQ ID NO: 461285 - DNA, 15 bp, Homo sapiens
ggctaaaaaacaaga

SEQ ID NO: 461286 - DNA, 15 bp, Homo sapiens
aggctaaaaaacaag

SEQ ID NO: 461287 - DNA, 15 bp, Homo sapiens
taggctaaaaaacaa

SEQ ID NO: 461288 - DNA, 15 bp, Homo sapiens
ttaggctaaaaaaca

SEQ ID NO: 461289 - DNA, 15 bp, Homo sapiens
cttaggctaaaaaac

SEQ ID NO: 461290 - DNA, 15 bp, Homo sapiens
tcttaggctaaaaaa

SEQ ID NO: 461291 - DNA, 15 bp, Homo sapiens
ttcttaggctaaaaa

SEQ ID NO: 461292 - DNA, 15 bp, Homo sapiens
gttcttaggctaaaa

SEQ ID NO: 461293 - DNA, 15 bp, Homo sapiens
tgttcttaggctaaa

SEQ ID NO: 461294 - DNA, 15 bp, Homo sapiens
ctgttcttaggctaa

SEQ ID NO: 461295 - DNA, 15 bp, Homo sapiens
tctgttcttaggcta

SEQ ID NO: 461296 - DNA, 15 bp, Homo sapiens
ctctgttcttaggct

SEQ ID NO: 461297 - DNA, 15 bp, Homo sapiens
gctctgttcttaggc

SEQ ID NO: 461298 - DNA, 15 bp, Homo sapiens
tgctctgttcttagg

SEQ ID NO: 461299 - DNA, 15 bp, Homo sapiens
ctgctctgttcttag

SEQ ID NO: 461300 - DNA, 15 bp, Homo sapiens
actgctctgttctta

SEQ ID NO: 461301 - DNA, 15 bp, Homo sapiens
gactgctctgttctt

SEQ ID NO: 461302 - DNA, 15 bp, Homo sapiens
tgactgctctgttct

SEQ ID NO: 461303 - DNA, 15 bp, Homo sapiens
atgactgctctgttc

SEQ ID NO: 461304 - DNA, 15 bp, Homo sapiens
gatgactgctctgtt

SEQ ID NO: 461305 - DNA, 15 bp, Homo sapiens
tgatgactgctctgt

SEQ ID NO: 461306 - DNA, 15 bp, Homo sapiens
ctgatgactgctctg

SEQ ID NO: 461307 - DNA, 15 bp, Homo sapiens
cctgatgactgctct

SEQ ID NO: 461308 - DNA, 15 bp, Homo sapiens
tcctgatgactgctc

SEQ ID NO: 461309 - DNA, 15 bp, Homo sapiens
ctcctgatgactgct

SEQ ID NO: 461310 - DNA, 15 bp, Homo sapiens
cctcctgatgactgc

SEQ ID NO: 461311 - DNA, 15 bp, Homo sapiens
ccctcctgatgactg

SEQ ID NO: 461312 - DNA, 15 bp, Homo sapiens
accctcctgatgact

SEQ ID NO: 461313 - DNA, 15 bp, Homo sapiens
aaccctcctgatgac

SEQ ID NO: 461314 - DNA, 15 bp, Homo sapiens
aaaccctcctgatga

SEQ ID NO: 461315 - DNA, 15 bp, Homo sapiens
aaaaccctcctgatg

SEQ ID NO: 461316 - DNA, 15 bp, Homo sapiens
taaaaccctcctgat

SEQ ID NO: 461317 - DNA, 15 bp, Homo sapiens
ttaaaaccctcctga

SEQ ID NO: 461318 - DNA, 15 bp, Homo sapiens
cttaaaaccctcctg

SEQ ID NO: 461319 - DNA, 15 bp, Homo sapiens
acttaaaaccctcct

SEQ ID NO: 461320 - DNA, 15 bp, Homo sapiens
tacttaaaaccctcc

SEQ ID NO: 461321 - DNA, 15 bp, Homo sapiens
ctacttaaaaccctc

SEQ ID NO: 461322 - DNA, 15 bp, Homo sapiens
cctacttaaaaccct

SEQ ID NO: 461323 - DNA, 15 bp, Homo sapiens
ccctacttaaaaccc

SEQ ID NO: 461324 - DNA, 15 bp, Homo sapiens
cccctacttaaaacc

SEQ ID NO: 461325 - DNA, 15 bp, Homo sapiens
acccctacttaaaac

SEQ ID NO: 461326 - DNA, 15 bp, Homo sapiens
cacccctacttaaaa

SEQ ID NO: 461327 - DNA, 15 bp, Homo sapiens
acacccctacttaaa

SEQ ID NO: 461328 - DNA, 15 bp, Homo sapiens
cacacccctacttaa

SEQ ID NO: 461329 - DNA, 15 bp, Homo sapiens
ccacacccctactta

SEQ ID NO: 461330 - DNA, 15 bp, Homo sapiens
gccacacccctactt

SEQ ID NO: 461331 - DNA, 15 bp, Homo sapiens
tgccacacccctact

SEQ ID NO: 461332 - DNA, 15 bp, Homo sapiens
ttgccacacccctac

SEQ ID NO: 461333 - DNA, 15 bp, Homo sapiens
cttgccacaccccta

SEQ ID NO: 461334 - DNA, 15 bp, Homo sapiens
tcttgccacacccct

SEQ ID NO: 461335 - DNA, 15 bp, Homo sapiens
atcttgccacacccc

SEQ ID NO: 461336 - DNA, 15 bp, Homo sapiens
gatcttgccacaccc

SEQ ID NO: 461337 - DNA, 15 bp, Homo sapiens
tgatcttgccacacc

SEQ ID NO: 461338 - DNA, 15 bp, Homo sapiens
ttgatcttgccacac

SEQ ID NO: 461339 - DNA, 15 bp, Homo sapiens
cttgatcttgccaca

SEQ ID NO: 461340 - DNA, 15 bp, Homo sapiens
acttgatcttgccac

SEQ ID NO: 461341 - DNA, 15 bp, Homo sapiens
aacttgatcttgcca

SEQ ID NO: 461342 - DNA, 15 bp, Homo sapiens
aaacttgatcttgcc

SEQ ID NO: 461343 - DNA, 15 bp, Homo sapiens
caaacttgatcttgc

SEQ ID NO: 461344 - DNA, 15 bp, Homo sapiens
acaaacttgatcttg

SEQ ID NO: 461345 - DNA, 15 bp, Homo sapiens
cacaaacttgatctt

SEQ ID NO: 461346 - DNA, 15 bp, Homo sapiens
acacaaacttgatct

SEQ ID NO: 461347 - DNA, 15 bp, Homo sapiens
gacacaaacttgatc

SEQ ID NO: 461348 - DNA, 15 bp, Homo sapiens
agacacaaacttgat

SEQ ID NO: 461349 - DNA, 15 bp, Homo sapiens
aagacacaaacttga

SEQ ID NO: 461350 - DNA, 15 bp, Homo sapiens
caagacacaaacttg

SEQ ID NO: 461351 - DNA, 15 bp, Homo sapiens
tcaagacacaaactt

SEQ ID NO: 461352 - DNA, 15 bp, Homo sapiens
ttcaagacacaaact

SEQ ID NO: 461353 - DNA, 15 bp, Homo sapiens
tttcaagacacaaac

SEQ ID NO: 461354 - DNA, 15 bp, Homo sapiens
ttttcaagacacaaa

SEQ ID NO: 461355 - DNA, 15 bp, Homo sapiens
cttttcaagacacaa

SEQ ID NO: 461356 - DNA, 15 bp, Homo sapiens
ccttttcaagacaca

SEQ ID NO: 461357 - DNA, 15 bp, Homo sapiens
accttttcaagacac

SEQ ID NO: 461358 - DNA, 15 bp, Homo sapiens
gaccttttcaagaca

SEQ ID NO: 461359 - DNA, 15 bp, Homo sapiens
agaccttttcaagac

SEQ ID NO: 461360 - DNA, 15 bp, Homo sapiens
gagaccttttcaaga

SEQ ID NO: 461361 - DNA, 15 bp, Homo sapiens
agagaccttttcaag

SEQ ID NO: 461362 - DNA, 15 bp, Homo sapiens
gagagaccttttcaa

SEQ ID NO: 461363 - DNA, 15 bp, Homo sapiens
agagagaccttttca

SEQ ID NO: 461364 - DNA, 15 bp, Homo sapiens
tagagagaccttttc

SEQ ID NO: 461365 - DNA, 15 bp, Homo sapiens
gtagagagacctttt

SEQ ID NO: 461366 - DNA, 15 bp, Homo sapiens
ggtagagagaccttt

SEQ ID NO: 461367 - DNA, 15 bp, Homo sapiens
gggtagagagacctt

SEQ ID NO: 461368 - DNA, 15 bp, Homo sapiens
tgggtagagagacct

SEQ ID NO: 461369 - DNA, 15 bp, Homo sapiens
gtgggtagagagacc

SEQ ID NO: 461370 - DNA, 15 bp, Homo sapiens
tgtgggtagagagac

SEQ ID NO: 461371 - DNA, 15 bp, Homo sapiens
ctgtgggtagagaga

SEQ ID NO: 461372 - DNA, 15 bp, Homo sapiens
actgtgggtagagag

SEQ ID NO: 461373 - DNA, 15 bp, Homo sapiens
cactgtgggtagaga

SEQ ID NO: 461374 - DNA, 15 bp, Homo sapiens
acactgtgggtagag

SEQ ID NO: 461375 - DNA, 15 bp, Homo sapiens
cacactgtgggtaga

SEQ ID NO: 461376 - DNA, 15 bp, Homo sapiens
ccacactgtgggtag

SEQ ID NO: 461377 - DNA, 15 bp, Homo sapiens
tccacactgtgggta

SEQ ID NO: 461378 - DNA, 15 bp, Homo sapiens
ttccacactgtgggt

SEQ ID NO: 461379 - DNA, 15 bp, Homo sapiens
tttccacactgtggg

SEQ ID NO: 461380 - DNA, 15 bp, Homo sapiens
ttttccacactgtgg

SEQ ID NO: 461381 - DNA, 15 bp, Homo sapiens
attttccacactgtg

SEQ ID NO: 461382 - DNA, 15 bp, Homo sapiens
cattttccacactgt

SEQ ID NO: 461383 - DNA, 15 bp, Homo sapiens
ccattttccacactg

SEQ ID NO: 461384 - DNA, 15 bp, Homo sapiens
gccattttccacact

SEQ ID NO: 461385 - DNA, 15 bp, Homo sapiens
ggccattttccacac

SEQ ID NO: 461386 - DNA, 15 bp, Homo sapiens
aggccattttccaca

SEQ ID NO: 461387 - DNA, 15 bp, Homo sapiens
caggccattttccac

SEQ ID NO: 461388 - DNA, 15 bp, Homo sapiens
ccaggccattttcca

SEQ ID NO: 461389 - DNA, 15 bp, Homo sapiens
tccaggccattttcc

SEQ ID NO: 461390 - DNA, 15 bp, Homo sapiens
ctccaggccattttc

SEQ ID NO: 461391 - DNA, 15 bp, Homo sapiens
cctccaggccatttt

SEQ ID NO: 461392 - DNA, 15 bp, Homo sapiens
gcctccaggccattt

SEQ ID NO: 461393 - DNA, 15 bp, Homo sapiens
tgcctccaggccatt

SEQ ID NO: 461394 - DNA, 15 bp, Homo sapiens
ttgcctccaggccat

SEQ ID NO: 461395 - DNA, 15 bp, Homo sapiens
cttgcctccaggcca

SEQ ID NO: 461396 - DNA, 15 bp, Homo sapiens
gcttgcctccaggcc

SEQ ID NO: 461397 - DNA, 15 bp, Homo sapiens
tgcttgcctccaggc

SEQ ID NO: 461398 - DNA, 15 bp, Homo sapiens
gtgcttgcctccagg

SEQ ID NO: 461399 - DNA, 15 bp, Homo sapiens
tgtgcttgcctccag

SEQ ID NO: 461400 - DNA, 15 bp, Homo sapiens
gtgtgcttgcctcca

SEQ ID NO: 461401 - DNA, 15 bp, Homo sapiens
tgtgtgcttgcctcc

SEQ ID NO: 461402 - DNA, 15 bp, Homo sapiens
ctgtgtgcttgcctc

SEQ ID NO: 461403 - DNA, 15 bp, Homo sapiens
tctgtgtgcttgcct

SEQ ID NO: 461404 - DNA, 15 bp, Homo sapiens
atctgtgtgcttgcc

SEQ ID NO: 461405 - DNA, 15 bp, Homo sapiens
catctgtgtgcttgc

SEQ ID NO: 461406 - DNA, 15 bp, Homo sapiens
acatctgtgtgcttg

SEQ ID NO: 461407 - DNA, 15 bp, Homo sapiens
aacatctgtgtgctt

SEQ ID NO: 461408 - DNA, 15 bp, Homo sapiens
caacatctgtgtgct

SEQ ID NO: 461409 - DNA, 15 bp, Homo sapiens
ccaacatctgtgtgc

SEQ ID NO: 461410 - DNA, 15 bp, Homo sapiens
cccaacatctgtgtg

SEQ ID NO: 461411 - DNA, 15 bp, Homo sapiens
tcccaacatctgtgt

SEQ ID NO: 461412 - DNA, 15 bp, Homo sapiens
ctcccaacatctgtg

SEQ ID NO: 461413 - DNA, 15 bp, Homo sapiens
tctcccaacatctgt

SEQ ID NO: 461414 - DNA, 15 bp, Homo sapiens
gtctcccaacatctg

SEQ ID NO: 461415 - DNA, 15 bp, Homo sapiens
tgtctcccaacatct

SEQ ID NO: 461416 - DNA, 15 bp, Homo sapiens
ctgtctcccaacatc

SEQ ID NO: 461417 - DNA, 15 bp, Homo sapiens
actgtctcccaacat

SEQ ID NO: 461418 - DNA, 15 bp, Homo sapiens
aactgtctcccaaca

SEQ ID NO: 461419 - DNA, 15 bp, Homo sapiens
taactgtctcccaac

SEQ ID NO: 461420 - DNA, 15 bp, Homo sapiens
ttaactgtctcccaa

SEQ ID NO: 461421 - DNA, 15 bp, Homo sapiens
gttaactgtctccca

SEQ ID NO: 461422 - DNA, 15 bp, Homo sapiens
tgttaactgtctccc

SEQ ID NO: 461423 - DNA, 15 bp, Homo sapiens
ctgttaactgtctcc

SEQ ID NO: 461424 - DNA, 15 bp, Homo sapiens
gctgttaactgtctc

SEQ ID NO: 461425 - DNA, 15 bp, Homo sapiens
agctgttaactgtct

SEQ ID NO: 461426 - DNA, 15 bp, Homo sapiens
gagctgttaactgtc

SEQ ID NO: 461427 - DNA, 15 bp, Homo sapiens
agagctgttaactgt

SEQ ID NO: 461428 - DNA, 15 bp, Homo sapiens
aagagctgttaactg

SEQ ID NO: 461429 - DNA, 15 bp, Homo sapiens
caagagctgttaact

SEQ ID NO: 461430 - DNA, 15 bp, Homo sapiens
gcaagagctgttaac

SEQ ID NO: 461431 - DNA, 15 bp, Homo sapiens
ggcaagagctgttaa

SEQ ID NO: 461432 - DNA, 15 bp, Homo sapiens
tggcaagagctgtta

SEQ ID NO: 461433 - DNA, 15 bp, Homo sapiens
atggcaagagctgtt

SEQ ID NO: 461434 - DNA, 15 bp, Homo sapiens
catggcaagagctgt

SEQ ID NO: 461435 - DNA, 15 bp, Homo sapiens
ccatggcaagagctg

SEQ ID NO: 461436 - DNA, 15 bp, Homo sapiens
gccatggcaagagct

SEQ ID NO: 461437 - DNA, 15 bp, Homo sapiens
ggccatggcaagagc

SEQ ID NO: 461438 - DNA, 15 bp, Homo sapiens
gggccatggcaagag

SEQ ID NO: 461439 - DNA, 15 bp, Homo sapiens
ggggccatggcaaga

SEQ ID NO: 461440 - DNA, 15 bp, Homo sapiens
gggggccatggcaag

SEQ ID NO: 461441 - DNA, 15 bp, Homo sapiens
agggggccatggcaa

SEQ ID NO: 461442 - DNA, 15 bp, Homo sapiens
tagggggccatggca

SEQ ID NO: 461443 - DNA, 15 bp, Homo sapiens
atagggggccatggc

SEQ ID NO: 461444 - DNA, 15 bp, Homo sapiens
catagggggccatgg

SEQ ID NO: 461445 - DNA, 15 bp, Homo sapiens
gcatagggggccatg

SEQ ID NO: 461446 - DNA, 15 bp, Homo sapiens
tgcatagggggccat

SEQ ID NO: 461447 - DNA, 15 bp, Homo sapiens
atgcatagggggcca

SEQ ID NO: 461448 - DNA, 15 bp, Homo sapiens
aatgcatagggggcc

SEQ ID NO: 461449 - DNA, 15 bp, Homo sapiens
aaatgcatagggggc

SEQ ID NO: 461450 - DNA, 15 bp, Homo sapiens
aaaatgcataggggg

SEQ ID NO: 461451 - DNA, 15 bp, Homo sapiens
caaaatgcatagggg

SEQ ID NO: 461452 - DNA, 15 bp, Homo sapiens
ccaaaatgcataggg

SEQ ID NO: 461453 - DNA, 15 bp, Homo sapiens
gccaaaatgcatagg

SEQ ID NO: 461454 - DNA, 15 bp, Homo sapiens
agccaaaatgcatag

SEQ ID NO: 461455 - DNA, 15 bp, Homo sapiens
gagccaaaatgcata

SEQ ID NO: 461456 - DNA, 15 bp, Homo sapiens
agagccaaaatgcat

SEQ ID NO: 461457 - DNA, 15 bp, Homo sapiens
cagagccaaaatgca

SEQ ID NO: 461458 - DNA, 15 bp, Homo sapiens
tcagagccaaaatgc

SEQ ID NO: 461459 - DNA, 15 bp, Homo sapiens
atcagagccaaaatg

SEQ ID NO: 461460 - DNA, 15 bp, Homo sapiens
catcagagccaaaat

SEQ ID NO: 461461 - DNA, 15 bp, Homo sapiens
acatcagagccaaaa

SEQ ID NO: 461462 - DNA, 15 bp, Homo sapiens
aacatcagagccaaa

SEQ ID NO: 461463 - DNA, 15 bp, Homo sapiens
aaacatcagagccaa

SEQ ID NO: 461464 - DNA, 15 bp, Homo sapiens
gaaacatcagagcca

SEQ ID NO: 461465 - DNA, 15 bp, Homo sapiens
agaaacatcagagcc

SEQ ID NO: 461466 - DNA, 15 bp, Homo sapiens
cagaaacatcagagc

SEQ ID NO: 461467 - DNA, 15 bp, Homo sapiens
gcagaaacatcagag

SEQ ID NO: 461468 - DNA, 15 bp, Homo sapiens
ggcagaaacatcaga

SEQ ID NO: 461469 - DNA, 15 bp, Homo sapiens
aggcagaaacatcag

SEQ ID NO: 461470 - DNA, 15 bp, Homo sapiens
caggcagaaacatca

SEQ ID NO: 461471 - DNA, 15 bp, Homo sapiens
tcaggcagaaacatc

SEQ ID NO: 461472 - DNA, 15 bp, Homo sapiens
atcaggcagaaacat

SEQ ID NO: 461473 - DNA, 15 bp, Homo sapiens
aatcaggcagaaaca

SEQ ID NO: 461474 - DNA, 15 bp, Homo sapiens
aaatcaggcagaaac

SEQ ID NO: 461475 - DNA, 15 bp, Homo sapiens
aaaatcaggcagaaa

SEQ ID NO: 461476 - DNA, 15 bp, Homo sapiens
aaaaatcaggcagaa

SEQ ID NO: 461477 - DNA, 15 bp, Homo sapiens
gaaaaatcaggcaga

SEQ ID NO: 461478 - DNA, 15 bp, Homo sapiens
agaaaaatcaggcag

SEQ ID NO: 461479 - DNA, 15 bp, Homo sapiens
gagaaaaatcaggca

SEQ ID NO: 461480 - DNA, 15 bp, Homo sapiens
agagaaaaatcaggc

SEQ ID NO: 461481 - DNA, 15 bp, Homo sapiens
aagagaaaaatcagg

SEQ ID NO: 461482 - DNA, 15 bp, Homo sapiens
caagagaaaaatcag

SEQ ID NO: 461483 - DNA, 15 bp, Homo sapiens
gcaagagaaaaatca

SEQ ID NO: 461484 - DNA, 15 bp, Homo sapiens
ggcaagagaaaaatc

SEQ ID NO: 461485 - DNA, 15 bp, Homo sapiens
aggcaagagaaaaat

SEQ ID NO: 461486 - DNA, 15 bp, Homo sapiens
gaggcaagagaaaaa

SEQ ID NO: 461487 - DNA, 15 bp, Homo sapiens
agaggcaagagaaaa

SEQ ID NO: 461488 - DNA, 15 bp, Homo sapiens
cagaggcaagagaaa

SEQ ID NO: 461489 - DNA, 15 bp, Homo sapiens
gcagaggcaagagaa

SEQ ID NO: 461490 - DNA, 15 bp, Homo sapiens
ggcagaggcaagaga

SEQ ID NO: 461491 - DNA, 15 bp, Homo sapiens
aggcagaggcaagag

SEQ ID NO: 461492 - DNA, 15 bp, Homo sapiens
gaggcagaggcaaga

SEQ ID NO: 461493 - DNA, 15 bp, Homo sapiens
agaggcagaggcaag

SEQ ID NO: 461494 - DNA, 15 bp, Homo sapiens
aagaggcagaggcaa

SEQ ID NO: 461495 - DNA, 15 bp, Homo sapiens
aaagaggcagaggca

SEQ ID NO: 461496 - DNA, 15 bp, Homo sapiens
aaaagaggcagaggc

SEQ ID NO: 461497 - DNA, 15 bp, Homo sapiens
gaaaagaggcagagg

SEQ ID NO: 461498 - DNA, 15 bp, Homo sapiens
ggaaaagaggcagag

SEQ ID NO: 461499 - DNA, 15 bp, Homo sapiens
aggaaaagaggcaga

SEQ ID NO: 461500 - DNA, 15 bp, Homo sapiens
caggaaaagaggcag

SEQ ID NO: 461501 - DNA, 15 bp, Homo sapiens
tcaggaaaagaggca

SEQ ID NO: 461502 - DNA, 15 bp, Homo sapiens
ctcaggaaaagaggc

SEQ ID NO: 461503 - DNA, 15 bp, Homo sapiens
cctcaggaaaagagg

SEQ ID NO: 461504 - DNA, 15 bp, Homo sapiens
ccctcaggaaaagag

SEQ ID NO: 461505 - DNA, 15 bp, Homo sapiens
cccctcaggaaaaga

SEQ ID NO: 461506 - DNA, 15 bp, Homo sapiens
tcccctcaggaaaag

SEQ ID NO: 461507 - DNA, 15 bp, Homo sapiens
atcccctcaggaaaa

SEQ ID NO: 461508 - DNA, 15 bp, Homo sapiens
catcccctcaggaaa

SEQ ID NO: 461509 - DNA, 15 bp, Homo sapiens
ccatcccctcaggaa

SEQ ID NO: 461510 - DNA, 15 bp, Homo sapiens
gccatcccctcagga

SEQ ID NO: 461511 - DNA, 15 bp, Homo sapiens
tgccatcccctcagg

SEQ ID NO: 461512 - DNA, 15 bp, Homo sapiens
ctgccatcccctcag

SEQ ID NO: 461513 - DNA, 15 bp, Homo sapiens
cctgccatcccctca

SEQ ID NO: 461514 - DNA, 15 bp, Homo sapiens
acctgccatcccctc

SEQ ID NO: 461515 - DNA, 15 bp, Homo sapiens
aacctgccatcccct

SEQ ID NO: 461516 - DNA, 15 bp, Homo sapiens
aaacctgccatcccc

SEQ ID NO: 461517 - DNA, 15 bp, Homo sapiens
aaaacctgccatccc

SEQ ID NO: 461518 - DNA, 15 bp, Homo sapiens
taaaacctgccatcc

SEQ ID NO: 461519 - DNA, 15 bp, Homo sapiens
gtaaaacctgccatc

SEQ ID NO: 461520 - DNA, 15 bp, Homo sapiens
ggtaaaacctgccat

SEQ ID NO: 461521 - DNA, 15 bp, Homo sapiens
tggtaaaacctgcca

SEQ ID NO: 461522 - DNA, 15 bp, Homo sapiens
atggtaaaacctgcc

SEQ ID NO: 461523 - DNA, 15 bp, Homo sapiens
aatggtaaaacctgc

SEQ ID NO: 461524 - DNA, 15 bp, Homo sapiens
gaatggtaaaacctg

SEQ ID NO: 461525 - DNA, 15 bp, Homo sapiens
tgaatggtaaaacct

SEQ ID NO: 461526 - DNA, 15 bp, Homo sapiens
ctgaatggtaaaacc

SEQ ID NO: 461527 - DNA, 15 bp, Homo sapiens
gctgaatggtaaaac

SEQ ID NO: 461528 - DNA, 15 bp, Homo sapiens
agctgaatggtaaaa

SEQ ID NO: 461529 - DNA, 15 bp, Homo sapiens
cagctgaatggtaaa

SEQ ID NO: 461530 - DNA, 15 bp, Homo sapiens
ccagctgaatggtaa

SEQ ID NO: 461531 - DNA, 15 bp, Homo sapiens
tccagctgaatggta

SEQ ID NO: 461532 - DNA, 15 bp, Homo sapiens
ctccagctgaatggt

SEQ ID NO: 461533 - DNA, 15 bp, Homo sapiens
actccagctgaatgg

SEQ ID NO: 461534 - DNA, 15 bp, Homo sapiens
tactccagctgaatg

SEQ ID NO: 461535 - DNA, 15 bp, Homo sapiens
gtactccagctgaat

SEQ ID NO: 461536 - DNA, 15 bp, Homo sapiens
tgtactccagctgaa

SEQ ID NO: 461537 - DNA, 15 bp, Homo sapiens
ttgtactccagctga

SEQ ID NO: 461538 - DNA, 15 bp, Homo sapiens
tttgtactccagctg

SEQ ID NO: 461539 - DNA, 15 bp, Homo sapiens
gtttgtactccagct

SEQ ID NO: 461540 - DNA, 15 bp, Homo sapiens
ggtttgtactccagc

SEQ ID NO: 461541 - DNA, 15 bp, Homo sapiens
gggtttgtactccag

SEQ ID NO: 461542 - DNA, 15 bp, Homo sapiens
agggtttgtactcca

SEQ ID NO: 461543 - DNA, 15 bp, Homo sapiens
cagggtttgtactcc

SEQ ID NO: 461544 - DNA, 15 bp, Homo sapiens
tcagggtttgtactc

SEQ ID NO: 461545 - DNA, 15 bp, Homo sapiens
ttcagggtttgtact

SEQ ID NO: 461546 - DNA, 15 bp, Homo sapiens
gttcagggtttgtac

SEQ ID NO: 461547 - DNA, 15 bp, Homo sapiens
ggttcagggtttgta

SEQ ID NO: 461548 - DNA, 15 bp, Homo sapiens
gggttcagggtttgt

SEQ ID NO: 461549 - DNA, 15 bp, Homo sapiens
agggttcagggtttg

SEQ ID NO: 461550 - DNA, 15 bp, Homo sapiens
aagggttcagggttt

SEQ ID NO: 461551 - DNA, 15 bp, Homo sapiens
aaagggttcagggtt

SEQ ID NO: 461552 - DNA, 15 bp, Homo sapiens
aaaagggttcagggt

SEQ ID NO: 461553 - DNA, 15 bp, Homo sapiens
aaaaagggttcaggg

SEQ ID NO: 461554 - DNA, 15 bp, Homo sapiens
caaaaagggttcagg

SEQ ID NO: 461555 - DNA, 15 bp, Homo sapiens
ccaaaaagggttcag

SEQ ID NO: 461556 - DNA, 15 bp, Homo sapiens
accaaaaagggttca

SEQ ID NO: 461557 - DNA, 15 bp, Homo sapiens
aaccaaaaagggttc

SEQ ID NO: 461558 - DNA, 15 bp, Homo sapiens
taaccaaaaagggtt

SEQ ID NO: 461559 - DNA, 15 bp, Homo sapiens
ttaaccaaaaagggt

SEQ ID NO: 461560 - DNA, 15 bp, Homo sapiens
tttaaccaaaaaggg

SEQ ID NO: 461561 - DNA, 15 bp, Homo sapiens
atttaaccaaaaagg

SEQ ID NO: 461562 - DNA, 15 bp, Homo sapiens
tatttaaccaaaaag

SEQ ID NO: 461563 - DNA, 15 bp, Homo sapiens
atatttaaccaaaaa

SEQ ID NO: 461564 - DNA, 15 bp, Homo sapiens
gatatttaaccaaaa

SEQ ID NO: 461565 - DNA, 15 bp, Homo sapiens
agatatttaaccaaa

SEQ ID NO: 461566 - DNA, 15 bp, Homo sapiens
tagatatttaaccaa

SEQ ID NO: 461567 - DNA, 15 bp, Homo sapiens
gtagatatttaacca

SEQ ID NO: 461568 - DNA, 15 bp, Homo sapiens
agtagatatttaacc

SEQ ID NO: 461569 - DNA, 15 bp, Homo sapiens
aagtagatatttaac

SEQ ID NO: 461570 - DNA, 15 bp, Homo sapiens
caagtagatatttaa

SEQ ID NO: 461571 - DNA, 15 bp, Homo sapiens
gcaagtagatattta

SEQ ID NO: 461572 - DNA, 15 bp, Homo sapiens
agcaagtagatattt

SEQ ID NO: 461573 - DNA, 15 bp, Homo sapiens
aagcaagtagatatt

SEQ ID NO: 461574 - DNA, 15 bp, Homo sapiens
aaagcaagtagatat

SEQ ID NO: 461575 - DNA, 15 bp, Homo sapiens
aaaagcaagtagata

SEQ ID NO: 461576 - DNA, 15 bp, Homo sapiens
gaaaagcaagtagat

SEQ ID NO: 461577 - DNA, 15 bp, Homo sapiens
ggaaaagcaagtaga

SEQ ID NO: 461578 - DNA, 15 bp, Homo sapiens
aggaaaagcaagtag

SEQ ID NO: 461579 - DNA, 15 bp, Homo sapiens
taggaaaagcaagta

SEQ ID NO: 461580 - DNA, 15 bp, Homo sapiens
gtaggaaaagcaagt

SEQ ID NO: 461581 - DNA, 15 bp, Homo sapiens
tgtaggaaaagcaag

SEQ ID NO: 461582 - DNA, 15 bp, Homo sapiens
ctgtaggaaaagcaa

SEQ ID NO: 461583 - DNA, 15 bp, Homo sapiens
actgtaggaaaagca

SEQ ID NO: 461584 - DNA, 15 bp, Homo sapiens
tactgtaggaaaagc

SEQ ID NO: 461585 - DNA, 15 bp, Homo sapiens
atactgtaggaaaag

SEQ ID NO: 461586 - DNA, 15 bp, Homo sapiens
aatactgtaggaaaa

SEQ ID NO: 461587 - DNA, 15 bp, Homo sapiens
taatactgtaggaaa

SEQ ID NO: 461588 - DNA, 15 bp, Homo sapiens
ataatactgtaggaa

SEQ ID NO: 461589 - DNA, 15 bp, Homo sapiens
aataatactgtagga

SEQ ID NO: 461590 - DNA, 15 bp, Homo sapiens
aaataatactgtagg

SEQ ID NO: 461591 - DNA, 15 bp, Homo sapiens
aaaataatactgtag

SEQ ID NO: 461592 - DNA, 15 bp, Homo sapiens
caaaataatactgta

SEQ ID NO: 461593 - DNA, 15 bp, Homo sapiens
tcaaaataatactgt

SEQ ID NO: 461594 - DNA, 15 bp, Homo sapiens
ctcaaaataatactg

SEQ ID NO: 461595 - DNA, 15 bp, Homo sapiens
actcaaaataatact

SEQ ID NO: 461596 - DNA, 15 bp, Homo sapiens
aactcaaaataatac

SEQ ID NO: 461597 - DNA, 15 bp, Homo sapiens
caactcaaaataata

SEQ ID NO: 461598 - DNA, 15 bp, Homo sapiens
gcaactcaaaataat

SEQ ID NO: 461599 - DNA, 15 bp, Homo sapiens
agcaactcaaaataa

SEQ ID NO: 461600 - DNA, 15 bp, Homo sapiens
cagcaactcaaaata

SEQ ID NO: 461601 - DNA, 15 bp, Homo sapiens
acagcaactcaaaat

SEQ ID NO: 461602 - DNA, 15 bp, Homo sapiens
cacagcaactcaaaa

SEQ ID NO: 461603 - DNA, 15 bp, Homo sapiens
ccacagcaactcaaa

SEQ ID NO: 461604 - DNA, 15 bp, Homo sapiens
gccacagcaactcaa

SEQ ID NO: 461605 - DNA, 15 bp, Homo sapiens
agccacagcaactca

SEQ ID NO: 461606 - DNA, 15 bp, Homo sapiens
cagccacagcaactc

SEQ ID NO: 461607 - DNA, 15 bp, Homo sapiens
acagccacagcaact

SEQ ID NO: 461608 - DNA, 15 bp, Homo sapiens
tacagccacagcaac

SEQ ID NO: 461609 - DNA, 15 bp, Homo sapiens
ttacagccacagcaa

SEQ ID NO: 461610 - DNA, 15 bp, Homo sapiens
attacagccacagca

SEQ ID NO: 461611 - DNA, 15 bp, Homo sapiens
cattacagccacagc

SEQ ID NO: 461612 - DNA, 15 bp, Homo sapiens
acattacagccacag

SEQ ID NO: 461613 - DNA, 15 bp, Homo sapiens
gacattacagccaca

SEQ ID NO: 461614 - DNA, 15 bp, Homo sapiens
agacattacagccac

SEQ ID NO: 461615 - DNA, 15 bp, Homo sapiens
aagacattacagcca

SEQ ID NO: 461616 - DNA, 15 bp, Homo sapiens
caagacattacagcc

SEQ ID NO: 461617 - DNA, 15 bp, Homo sapiens
tcaagacattacagc

SEQ ID NO: 461618 - DNA, 15 bp, Homo sapiens
ctcaagacattacag

SEQ ID NO: 461619 - DNA, 15 bp, Homo sapiens
cctcaagacattaca

SEQ ID NO: 461620 - DNA, 15 bp, Homo sapiens
ccctcaagacattac

SEQ ID NO: 461621 - DNA, 15 bp, Homo sapiens
tccctcaagacatta

SEQ ID NO: 461622 - DNA, 15 bp, Homo sapiens
ttccctcaagacatt

SEQ ID NO: 461623 - DNA, 15 bp, Homo sapiens
attccctcaagacat

SEQ ID NO: 461624 - DNA, 15 bp, Homo sapiens
gattccctcaagaca

SEQ ID NO: 461625 - DNA, 15 bp, Homo sapiens
cgattccctcaagac

SEQ ID NO: 461626 - DNA, 15 bp, Homo sapiens
tcgattccctcaaga

SEQ ID NO: 461627 - DNA, 15 bp, Homo sapiens
ctcgattccctcaag

SEQ ID NO: 461628 - DNA, 15 bp, Homo sapiens
gctcgattccctcaa

SEQ ID NO: 461629 - DNA, 15 bp, Homo sapiens
agctcgattccctca

SEQ ID NO: 461630 - DNA, 15 bp, Homo sapiens
aagctcgattccctc

SEQ ID NO: 461631 - DNA, 15 bp, Homo sapiens
caagctcgattccct

SEQ ID NO: 461632 - DNA, 15 bp, Homo sapiens
tcaagctcgattccc

SEQ ID NO: 461633 - DNA, 15 bp, Homo sapiens
gtcaagctcgattcc

SEQ ID NO: 461634 - DNA, 15 bp, Homo sapiens
tgtcaagctcgattc

SEQ ID NO: 461635 - DNA, 15 bp, Homo sapiens
ctgtcaagctcgatt

SEQ ID NO: 461636 - DNA, 15 bp, Homo sapiens
actgtcaagctcgat

SEQ ID NO: 461637 - DNA, 15 bp, Homo sapiens
tactgtcaagctcga

SEQ ID NO: 461638 - DNA, 15 bp, Homo sapiens
ttactgtcaagctcg

SEQ ID NO: 461639 - DNA, 15 bp, Homo sapiens
attactgtcaagctc

SEQ ID NO: 461640 - DNA, 15 bp, Homo sapiens
aattactgtcaagct

SEQ ID NO: 461641 - DNA, 15 bp, Homo sapiens
aaattactgtcaagc

SEQ ID NO: 461642 - DNA, 15 bp, Homo sapiens
taaattactgtcaag

SEQ ID NO: 461643 - DNA, 15 bp, Homo sapiens
ataaattactgtcaa

SEQ ID NO: 461644 - DNA, 15 bp, Homo sapiens
tataaattactgtca

SEQ ID NO: 461645 - DNA, 15 bp, Homo sapiens
ctataaattactgtc

SEQ ID NO: 461646 - DNA, 15 bp, Homo sapiens
tctataaattactgt

SEQ ID NO: 461647 - DNA, 15 bp, Homo sapiens
ttctataaattactg

SEQ ID NO: 461648 - DNA, 15 bp, Homo sapiens
gttctataaattact

SEQ ID NO: 461649 - DNA, 15 bp, Homo sapiens
tgttctataaattac

SEQ ID NO: 461650 - DNA, 15 bp, Homo sapiens
ttgttctataaatta

SEQ ID NO: 461651 - DNA, 15 bp, Homo sapiens
tttgttctataaatt

SEQ ID NO: 461652 - DNA, 15 bp, Homo sapiens
gtttgttctataaat

SEQ ID NO: 461653 - DNA, 15 bp, Homo sapiens
tgtttgttctataaa

SEQ ID NO: 461654 - DNA, 15 bp, Homo sapiens
ctgtttgttctataa

SEQ ID NO: 461655 - DNA, 15 bp, Homo sapiens
actgtttgttctata

SEQ ID NO: 461656 - DNA, 15 bp, Homo sapiens
aactgtttgttctat

SEQ ID NO: 461657 - DNA, 15 bp, Homo sapiens
aaactgtttgttcta

SEQ ID NO: 461658 - DNA, 15 bp, Homo sapiens
aaaactgtttgttct

SEQ ID NO: 461659 - DNA, 15 bp, Homo sapiens
aaaaactgtttgttc

SEQ ID NO: 461660 - DNA, 15 bp, Homo sapiens
taaaaactgtttgtt

SEQ ID NO: 461661 - DNA, 15 bp, Homo sapiens
ctaaaaactgtttgt

SEQ ID NO: 461662 - DNA, 15 bp, Homo sapiens
tctaaaaactgtttg

SEQ ID NO: 461663 - DNA, 15 bp, Homo sapiens
ctctaaaaactgttt

SEQ ID NO: 461664 - DNA, 15 bp, Homo sapiens
tctctaaaaactgtt

SEQ ID NO: 461665 - DNA, 15 bp, Homo sapiens
gtctctaaaaactgt

SEQ ID NO: 461666 - DNA, 15 bp, Homo sapiens
agtctctaaaaactg

SEQ ID NO: 461667 - DNA, 15 bp, Homo sapiens
cagtctctaaaaact

SEQ ID NO: 461668 - DNA, 15 bp, Homo sapiens
acagtctctaaaaac

SEQ ID NO: 461669 - DNA, 15 bp, Homo sapiens
cacagtctctaaaaa

SEQ ID NO: 461670 - DNA, 15 bp, Homo sapiens
acacagtctctaaaa

SEQ ID NO: 461671 - DNA, 15 bp, Homo sapiens
cacacagtctctaaa

SEQ ID NO: 461672 - DNA, 15 bp, Homo sapiens
ccacacagtctctaa

SEQ ID NO: 461673 - DNA, 15 bp, Homo sapiens
gccacacagtctcta

SEQ ID NO: 461674 - DNA, 15 bp, Homo sapiens
ggccacacagtctct

SEQ ID NO: 461675 - DNA, 15 bp, Homo sapiens
gggccacacagtctc

SEQ ID NO: 461676 - DNA, 15 bp, Homo sapiens
tgggccacacagtct

SEQ ID NO: 461677 - DNA, 15 bp, Homo sapiens
ttgggccacacagtc

SEQ ID NO: 461678 - DNA, 15 bp, Homo sapiens
attgggccacacagt

SEQ ID NO: 461679 - DNA, 15 bp, Homo sapiens
aattgggccacacag

SEQ ID NO: 461680 - DNA, 15 bp, Homo sapiens
caattgggccacaca

SEQ ID NO: 461681 - DNA, 15 bp, Homo sapiens
gcaattgggccacac

SEQ ID NO: 461682 - DNA, 15 bp, Homo sapiens
ggcaattgggccaca

SEQ ID NO: 461683 - DNA, 15 bp, Homo sapiens
gggcaattgggccac

SEQ ID NO: 461684 - DNA, 15 bp, Homo sapiens
agggcaattgggcca

SEQ ID NO: 461685 - DNA, 15 bp, Homo sapiens
gagggcaattgggcc

SEQ ID NO: 461686 - DNA, 15 bp, Homo sapiens
agagggcaattgggc

SEQ ID NO: 461687 - DNA, 15 bp, Homo sapiens
gagagggcaattggg

SEQ ID NO: 461688 - DNA, 15 bp, Homo sapiens
tgagagggcaattgg

SEQ ID NO: 461689 - DNA, 15 bp, Homo sapiens
ttgagagggcaattg

SEQ ID NO: 461690 - DNA, 15 bp, Homo sapiens
attgagagggcaatt

SEQ ID NO: 461691 - DNA, 15 bp, Homo sapiens
cattgagagggcaat

SEQ ID NO: 461692 - DNA, 15 bp, Homo sapiens
acattgagagggcaa

SEQ ID NO: 461693 - DNA, 15 bp, Homo sapiens
aacattgagagggca

SEQ ID NO: 461694 - DNA, 15 bp, Homo sapiens
caacattgagagggc

SEQ ID NO: 461695 - DNA, 15 bp, Homo sapiens
ccaacattgagaggg

SEQ ID NO: 461696 - DNA, 15 bp, Homo sapiens
gccaacattgagagg

SEQ ID NO: 461697 - DNA, 15 bp, Homo sapiens
tgccaacattgagag

SEQ ID NO: 461698 - DNA, 15 bp, Homo sapiens
gtgccaacattgaga

SEQ ID NO: 461699 - DNA, 15 bp, Homo sapiens
agtgccaacattgag

SEQ ID NO: 461700 - DNA, 15 bp, Homo sapiens
gagtgccaacattga

SEQ ID NO: 461701 - DNA, 15 bp, Homo sapiens
ggagtgccaacattg

SEQ ID NO: 461702 - DNA, 15 bp, Homo sapiens
aggagtgccaacatt

SEQ ID NO: 461703 - DNA, 15 bp, Homo sapiens
caggagtgccaacat

SEQ ID NO: 461704 - DNA, 15 bp, Homo sapiens
gcaggagtgccaaca

SEQ ID NO: 461705 - DNA, 15 bp, Homo sapiens
ggcaggagtgccaac

SEQ ID NO: 461706 - DNA, 15 bp, Homo sapiens
tggcaggagtgccaa

SEQ ID NO: 461707 - DNA, 15 bp, Homo sapiens
atggcaggagtgcca

SEQ ID NO: 461708 - DNA, 15 bp, Homo sapiens
catggcaggagtgcc

SEQ ID NO: 461709 - DNA, 15 bp, Homo sapiens
tcatggcaggagtgc

SEQ ID NO: 461710 - DNA, 15 bp, Homo sapiens
gtcatggcaggagtg

SEQ ID NO: 461711 - DNA, 15 bp, Homo sapiens
tgtcatggcaggagt

SEQ ID NO: 461712 - DNA, 15 bp, Homo sapiens
atgtcatggcaggag

SEQ ID NO: 461713 - DNA, 15 bp, Homo sapiens
aatgtcatggcagga

SEQ ID NO: 461714 - DNA, 15 bp, Homo sapiens
aaatgtcatggcagg

SEQ ID NO: 461715 - DNA, 15 bp, Homo sapiens
taaatgtcatggcag

SEQ ID NO: 461716 - DNA, 15 bp, Homo sapiens
gtaaatgtcatggca

SEQ ID NO: 461717 - DNA, 15 bp, Homo sapiens
ggtaaatgtcatggc

SEQ ID NO: 461718 - DNA, 15 bp, Homo sapiens
tggtaaatgtcatgg

SEQ ID NO: 461719 - DNA, 15 bp, Homo sapiens
atggtaaatgtcatg

SEQ ID NO: 461720 - DNA, 15 bp, Homo sapiens
catggtaaatgtcat

SEQ ID NO: 461721 - DNA, 15 bp, Homo sapiens
gcatggtaaatgtca

SEQ ID NO: 461722 - DNA, 15 bp, Homo sapiens
agcatggtaaatgtc

SEQ ID NO: 461723 - DNA, 15 bp, Homo sapiens
cagcatggtaaatgt

SEQ ID NO: 461724 - DNA, 15 bp, Homo sapiens
tcagcatggtaaatg

SEQ ID NO: 461725 - DNA, 15 bp, Homo sapiens
ctcagcatggtaaat

SEQ ID NO: 461726 - DNA, 15 bp, Homo sapiens
gctcagcatggtaaa

SEQ ID NO: 461727 - DNA, 15 bp, Homo sapiens
tgctcagcatggtaa

SEQ ID NO: 461728 - DNA, 15 bp, Homo sapiens
atgctcagcatggta

SEQ ID NO: 461729 - DNA, 15 bp, Homo sapiens
catgctcagcatggt

SEQ ID NO: 461730 - DNA, 15 bp, Homo sapiens
acatgctcagcatgg

SEQ ID NO: 461731 - DNA, 15 bp, Homo sapiens
cacatgctcagcatg

SEQ ID NO: 461732 - DNA, 15 bp, Homo sapiens
tcacatgctcagcat

SEQ ID NO: 461733 - DNA, 15 bp, Homo sapiens
gtcacatgctcagca

SEQ ID NO: 461734 - DNA, 15 bp, Homo sapiens
ggtcacatgctcagc

SEQ ID NO: 461735 - DNA, 15 bp, Homo sapiens
cggtcacatgctcag

SEQ ID NO: 461736 - DNA, 15 bp, Homo sapiens
gcggtcacatgctca

SEQ ID NO: 461737 - DNA, 15 bp, Homo sapiens
ggcggtcacatgctc

SEQ ID NO: 461738 - DNA, 15 bp, Homo sapiens
tggcggtcacatgct

SEQ ID NO: 461739 - DNA, 15 bp, Homo sapiens
atggcggtcacatgc

SEQ ID NO: 461740 - DNA, 15 bp, Homo sapiens
gatggcggtcacatg

SEQ ID NO: 461741 - DNA, 15 bp, Homo sapiens
agatggcggtcacat

SEQ ID NO: 461742 - DNA, 15 bp, Homo sapiens
cagatggcggtcaca

SEQ ID NO: 461743 - DNA, 15 bp, Homo sapiens
tcagatggcggtcac

SEQ ID NO: 461744 - DNA, 15 bp, Homo sapiens
ttcagatggcggtca

SEQ ID NO: 461745 - DNA, 15 bp, Homo sapiens
attcagatggcggtc

SEQ ID NO: 461746 - DNA, 15 bp, Homo sapiens
tattcagatggcggt

SEQ ID NO: 461747 - DNA, 15 bp, Homo sapiens
gtattcagatggcgg

SEQ ID NO: 461748 - DNA, 15 bp, Homo sapiens
ggtattcagatggcg

SEQ ID NO: 461749 - DNA, 15 bp, Homo sapiens
tggtattcagatggc

SEQ ID NO: 461750 - DNA, 15 bp, Homo sapiens
ttggtattcagatgg

SEQ ID NO: 461751 - DNA, 15 bp, Homo sapiens
tttggtattcagatg

SEQ ID NO: 461752 - DNA, 15 bp, Homo sapiens
atttggtattcagat

SEQ ID NO: 461753 - DNA, 15 bp, Homo sapiens
catttggtattcaga

SEQ ID NO: 461754 - DNA, 15 bp, Homo sapiens
gcatttggtattcag

SEQ ID NO: 461755 - DNA, 15 bp, Homo sapiens
ggcatttggtattca

SEQ ID NO: 461756 - DNA, 15 bp, Homo sapiens
tggcatttggtattc

SEQ ID NO: 461757 - DNA, 15 bp, Homo sapiens
gtggcatttggtatt

SEQ ID NO: 461758 - DNA, 15 bp, Homo sapiens
tgtggcatttggtat

SEQ ID NO: 461759 - DNA, 15 bp, Homo sapiens
ctgtggcatttggta

SEQ ID NO: 461760 - DNA, 15 bp, Homo sapiens
cctgtggcatttggt

SEQ ID NO: 461761 - DNA, 15 bp, Homo sapiens
tcctgtggcatttgg

SEQ ID NO: 461762 - DNA, 15 bp, Homo sapiens
ttcctgtggcatttg

SEQ ID NO: 461763 - DNA, 15 bp, Homo sapiens
gttcctgtggcattt

SEQ ID NO: 461764 - DNA, 15 bp, Homo sapiens
ggttcctgtggcatt

SEQ ID NO: 461765 - DNA, 15 bp, Homo sapiens
aggttcctgtggcat

SEQ ID NO: 461766 - DNA, 15 bp, Homo sapiens
caggttcctgtggca

SEQ ID NO: 461767 - DNA, 15 bp, Homo sapiens
ccaggttcctgtggc

SEQ ID NO: 461768 - DNA, 15 bp, Homo sapiens
cccaggttcctgtgg

SEQ ID NO: 461769 - DNA, 15 bp, Homo sapiens
tcccaggttcctgtg

SEQ ID NO: 461770 - DNA, 15 bp, Homo sapiens
ctcccaggttcctgt

SEQ ID NO: 461771 - DNA, 15 bp, Homo sapiens
cctcccaggttcctg

SEQ ID NO: 461772 - DNA, 15 bp, Homo sapiens
acctcccaggttcct

SEQ ID NO: 461773 - DNA, 15 bp, Homo sapiens
aacctcccaggttcc

SEQ ID NO: 461774 - DNA, 15 bp, Homo sapiens
caacctcccaggttc

SEQ ID NO: 461775 - DNA, 15 bp, Homo sapiens
acaacctcccaggtt

SEQ ID NO: 461776 - DNA, 15 bp, Homo sapiens
gacaacctcccaggt

SEQ ID NO: 461777 - DNA, 15 bp, Homo sapiens
tgacaacctcccagg

SEQ ID NO: 461778 - DNA, 15 bp, Homo sapiens
gtgacaacctcccag

SEQ ID NO: 461779 - DNA, 15 bp, Homo sapiens
agtgacaacctccca

SEQ ID NO: 461780 - DNA, 15 bp, Homo sapiens
aagtgacaacctccc

SEQ ID NO: 461781 - DNA, 15 bp, Homo sapiens
taagtgacaacctcc

SEQ ID NO: 461782 - DNA, 15 bp, Homo sapiens
gtaagtgacaacctc

SEQ ID NO: 461783 - DNA, 15 bp, Homo sapiens
agtaagtgacaacct

SEQ ID NO: 461784 - DNA, 15 bp, Homo sapiens
gagtaagtgacaacc

SEQ ID NO: 461785 - DNA, 15 bp, Homo sapiens
ggagtaagtgacaac

SEQ ID NO: 461786 - DNA, 15 bp, Homo sapiens
aggagtaagtgacaa

SEQ ID NO: 461787 - DNA, 15 bp, Homo sapiens
gaggagtaagtgaca

SEQ ID NO: 461788 - DNA, 15 bp, Homo sapiens
ggaggagtaagtgac

SEQ ID NO: 461789 - DNA, 15 bp, Homo sapiens
gggaggagtaagtga

SEQ ID NO: 461790 - DNA, 15 bp, Homo sapiens
agggaggagtaagtg

SEQ ID NO: 461791 - DNA, 15 bp, Homo sapiens
aagggaggagtaagt

SEQ ID NO: 461792 - DNA, 15 bp, Homo sapiens
aaagggaggagtaag

SEQ ID NO: 461793 - DNA, 15 bp, Homo sapiens
gaaagggaggagtaa

SEQ ID NO: 461794 - DNA, 15 bp, Homo sapiens
agaaagggaggagta

SEQ ID NO: 461795 - DNA, 15 bp, Homo sapiens
gagaaagggaggagt

SEQ ID NO: 461796 - DNA, 15 bp, Homo sapiens
agagaaagggaggag

SEQ ID NO: 461797 - DNA, 15 bp, Homo sapiens
cagagaaagggagga

SEQ ID NO: 461798 - DNA, 15 bp, Homo sapiens
tcagagaaagggagg

SEQ ID NO: 461799 - DNA, 15 bp, Homo sapiens
ctcagagaaagggag

SEQ ID NO: 461800 - DNA, 15 bp, Homo sapiens
actcagagaaaggga

SEQ ID NO: 461801 - DNA, 15 bp, Homo sapiens
gactcagagaaaggg

SEQ ID NO: 461802 - DNA, 15 bp, Homo sapiens
tgactcagagaaagg

SEQ ID NO: 461803 - DNA, 15 bp, Homo sapiens
gtgactcagagaaag

SEQ ID NO: 461804 - DNA, 15 bp, Homo sapiens
ggtgactcagagaaa

SEQ ID NO: 461805 - DNA, 15 bp, Homo sapiens
aggtgactcagagaa

SEQ ID NO: 461806 - DNA, 15 bp, Homo sapiens
aaggtgactcagaga

SEQ ID NO: 461807 - DNA, 15 bp, Homo sapiens
aaaggtgactcagag

SEQ ID NO: 461808 - DNA, 15 bp, Homo sapiens
caaaggtgactcaga

SEQ ID NO: 461809 - DNA, 15 bp, Homo sapiens
gcaaaggtgactcag

SEQ ID NO: 461810 - DNA, 15 bp, Homo sapiens
ggcaaaggtgactca

SEQ ID NO: 461811 - DNA, 15 bp, Homo sapiens
gggcaaaggtgactc

SEQ ID NO: 461812 - DNA, 15 bp, Homo sapiens
agggcaaaggtgact

SEQ ID NO: 461813 - DNA, 15 bp, Homo sapiens
aagggcaaaggtgac

SEQ ID NO: 461814 - DNA, 15 bp, Homo sapiens
gaagggcaaaggtga

SEQ ID NO: 461815 - DNA, 15 bp, Homo sapiens
tgaagggcaaaggtg

SEQ ID NO: 461816 - DNA, 15 bp, Homo sapiens
ctgaagggcaaaggt

SEQ ID NO: 461817 - DNA, 15 bp, Homo sapiens
actgaagggcaaagg

SEQ ID NO: 461818 - DNA, 15 bp, Homo sapiens
gactgaagggcaaag

SEQ ID NO: 461819 - DNA, 15 bp, Homo sapiens
tgactgaagggcaaa

SEQ ID NO: 461820 - DNA, 15 bp, Homo sapiens
ctgactgaagggcaa

SEQ ID NO: 461821 - DNA, 15 bp, Homo sapiens
actgactgaagggca

SEQ ID NO: 461822 - DNA, 15 bp, Homo sapiens
gactgactgaagggc

SEQ ID NO: 461823 - DNA, 15 bp, Homo sapiens
tgactgactgaaggg

SEQ ID NO: 461824 - DNA, 15 bp, Homo sapiens
gtgactgactgaagg

SEQ ID NO: 461825 - DNA, 15 bp, Homo sapiens
ggtgactgactgaag

SEQ ID NO: 461826 - DNA, 15 bp, Homo sapiens
tggtgactgactgaa

SEQ ID NO: 461827 - DNA, 15 bp, Homo sapiens
ttggtgactgactga

SEQ ID NO: 461828 - DNA, 15 bp, Homo sapiens
cttggtgactgactg

SEQ ID NO: 461829 - DNA, 15 bp, Homo sapiens
acttggtgactgact

SEQ ID NO: 461830 - DNA, 15 bp, Homo sapiens
gacttggtgactgac

SEQ ID NO: 461831 - DNA, 15 bp, Homo sapiens
ggacttggtgactga

SEQ ID NO: 461832 - DNA, 15 bp, Homo sapiens
gggacttggtgactg

SEQ ID NO: 461833 - DNA, 15 bp, Homo sapiens
tgggacttggtgact

SEQ ID NO: 461834 - DNA, 15 bp, Homo sapiens
atgggacttggtgac

SEQ ID NO: 461835 - DNA, 15 bp, Homo sapiens
gatgggacttggtga

SEQ ID NO: 461836 - DNA, 15 bp, Homo sapiens
tgatgggacttggtg

SEQ ID NO: 461837 - DNA, 15 bp, Homo sapiens
gtgatgggacttggt

SEQ ID NO: 461838 - DNA, 15 bp, Homo sapiens
tgtgatgggacttgg

SEQ ID NO: 461839 - DNA, 15 bp, Homo sapiens
atgtgatgggacttg

SEQ ID NO: 461840 - DNA, 15 bp, Homo sapiens
catgtgatgggactt

SEQ ID NO: 461841 - DNA, 15 bp, Homo sapiens
acatgtgatgggact

SEQ ID NO: 461842 - DNA, 15 bp, Homo sapiens
tacatgtgatgggac

SEQ ID NO: 461843 - DNA, 15 bp, Homo sapiens
ctacatgtgatggga

SEQ ID NO: 461844 - DNA, 15 bp, Homo sapiens
gctacatgtgatggg

SEQ ID NO: 461845 - DNA, 15 bp, Homo sapiens
agctacatgtgatgg

SEQ ID NO: 461846 - DNA, 15 bp, Homo sapiens
gagctacatgtgatg

SEQ ID NO: 461847 - DNA, 15 bp, Homo sapiens
agagctacatgtgat

SEQ ID NO: 461848 - DNA, 15 bp, Homo sapiens
cagagctacatgtga

SEQ ID NO: 461849 - DNA, 15 bp, Homo sapiens
acagagctacatgtg

SEQ ID NO: 461850 - DNA, 15 bp, Homo sapiens
tacagagctacatgt

SEQ ID NO: 461851 - DNA, 15 bp, Homo sapiens
ttacagagctacatg

SEQ ID NO: 461852 - DNA, 15 bp, Homo sapiens
attacagagctacat

SEQ ID NO: 461853 - DNA, 15 bp, Homo sapiens
cattacagagctaca

SEQ ID NO: 461854 - DNA, 15 bp, Homo sapiens
acattacagagctac

SEQ ID NO: 461855 - DNA, 15 bp, Homo sapiens
gacattacagagcta

SEQ ID NO: 461856 - DNA, 15 bp, Homo sapiens
tgacattacagagct

SEQ ID NO: 461857 - DNA, 15 bp, Homo sapiens
gtgacattacagagc

SEQ ID NO: 461858 - DNA, 15 bp, Homo sapiens
tgtgacattacagag

SEQ ID NO: 461859 - DNA, 15 bp, Homo sapiens
ctgtgacattacaga

SEQ ID NO: 461860 - DNA, 15 bp, Homo sapiens
tctgtgacattacag

SEQ ID NO: 461861 - DNA, 15 bp, Homo sapiens
ttctgtgacattaca

SEQ ID NO: 461862 - DNA, 15 bp, Homo sapiens
cttctgtgacattac

SEQ ID NO: 461863 - DNA, 15 bp, Homo sapiens
tcttctgtgacatta

SEQ ID NO: 461864 - DNA, 15 bp, Homo sapiens
atcttctgtgacatt

SEQ ID NO: 461865 - DNA, 15 bp, Homo sapiens
catcttctgtgacat

SEQ ID NO: 461866 - DNA, 15 bp, Homo sapiens
ccatcttctgtgaca

SEQ ID NO: 461867 - DNA, 15 bp, Homo sapiens
tccatcttctgtgac

SEQ ID NO: 461868 - DNA, 15 bp, Homo sapiens
atccatcttctgtga

SEQ ID NO: 461869 - DNA, 15 bp, Homo sapiens
catccatcttctgtg

SEQ ID NO: 461870 - DNA, 15 bp, Homo sapiens
acatccatcttctgt

SEQ ID NO: 461871 - DNA, 15 bp, Homo sapiens
gacatccatcttctg

SEQ ID NO: 461872 - DNA, 15 bp, Homo sapiens
agacatccatcttct

SEQ ID NO: 461873 - DNA, 15 bp, Homo sapiens
cagacatccatcttc

SEQ ID NO: 461874 - DNA, 15 bp, Homo sapiens
gcagacatccatctt

SEQ ID NO: 461875 - DNA, 15 bp, Homo sapiens
ggcagacatccatct

SEQ ID NO: 461876 - DNA, 15 bp, Homo sapiens
aggcagacatccatc

SEQ ID NO: 461877 - DNA, 15 bp, Homo sapiens
gaggcagacatccat

SEQ ID NO: 461878 - DNA, 15 bp, Homo sapiens
tgaggcagacatcca

SEQ ID NO: 461879 - DNA, 15 bp, Homo sapiens
ttgaggcagacatcc

SEQ ID NO: 461880 - DNA, 15 bp, Homo sapiens
tttgaggcagacatc

SEQ ID NO: 461881 - DNA, 15 bp, Homo sapiens
ttttgaggcagacat

SEQ ID NO: 461882 - DNA, 15 bp, Homo sapiens
gttttgaggcagaca

SEQ ID NO: 461883 - DNA, 15 bp, Homo sapiens
tgttttgaggcagac

SEQ ID NO: 461884 - DNA, 15 bp, Homo sapiens
gtgttttgaggcaga

SEQ ID NO: 461885 - DNA, 15 bp, Homo sapiens
agtgttttgaggcag

SEQ ID NO: 461886 - DNA, 15 bp, Homo sapiens
aagtgttttgaggca

SEQ ID NO: 461887 - DNA, 15 bp, Homo sapiens
taagtgttttgaggc

SEQ ID NO: 461888 - DNA, 15 bp, Homo sapiens
gtaagtgttttgagg

SEQ ID NO: 461889 - DNA, 15 bp, Homo sapiens
tgtaagtgttttgag

SEQ ID NO: 461890 - DNA, 15 bp, Homo sapiens
ttgtaagtgttttga

SEQ ID NO: 461891 - DNA, 15 bp, Homo sapiens
attgtaagtgttttg

SEQ ID NO: 461892 - DNA, 15 bp, Homo sapiens
cattgtaagtgtttt

SEQ ID NO: 461893 - DNA, 15 bp, Homo sapiens
gcattgtaagtgttt

SEQ ID NO: 461894 - DNA, 15 bp, Homo sapiens
agcattgtaagtgtt

SEQ ID NO: 461895 - DNA, 15 bp, Homo sapiens
cagcattgtaagtgt

SEQ ID NO: 461896 - DNA, 15 bp, Homo sapiens
gcagcattgtaagtg

SEQ ID NO: 461897 - DNA, 15 bp, Homo sapiens
agcagcattgtaagt

SEQ ID NO: 461898 - DNA, 15 bp, Homo sapiens
tagcagcattgtaag

SEQ ID NO: 461899 - DNA, 15 bp, Homo sapiens
gtagcagcattgtaa

SEQ ID NO: 461900 - DNA, 15 bp, Homo sapiens
ggtagcagcattgta

SEQ ID NO: 461901 - DNA, 15 bp, Homo sapiens
aggtagcagcattgt

SEQ ID NO: 461902 - DNA, 15 bp, Homo sapiens
taggtagcagcattg

SEQ ID NO: 461903 - DNA, 15 bp, Homo sapiens
ttaggtagcagcatt

SEQ ID NO: 461904 - DNA, 15 bp, Homo sapiens
tttaggtagcagcat

SEQ ID NO: 461905 - DNA, 15 bp, Homo sapiens
atttaggtagcagca

SEQ ID NO: 461906 - DNA, 15 bp, Homo sapiens
aatttaggtagcagc

SEQ ID NO: 461907 - DNA, 15 bp, Homo sapiens
caatttaggtagcag

SEQ ID NO: 461908 - DNA, 15 bp, Homo sapiens
ccaatttaggtagca

SEQ ID NO: 461909 - DNA, 15 bp, Homo sapiens
cccaatttaggtagc

SEQ ID NO: 461910 - DNA, 15 bp, Homo sapiens
gcccaatttaggtag

SEQ ID NO: 461911 - DNA, 15 bp, Homo sapiens
tgcccaatttaggta

SEQ ID NO: 461912 - DNA, 15 bp, Homo sapiens
ctgcccaatttaggt

SEQ ID NO: 461913 - DNA, 15 bp, Homo sapiens
gctgcccaatttagg

SEQ ID NO: 461914 - DNA, 15 bp, Homo sapiens
ggctgcccaatttag

SEQ ID NO: 461915 - DNA, 15 bp, Homo sapiens
tggctgcccaattta

SEQ ID NO: 461916 - DNA, 15 bp, Homo sapiens
gtggctgcccaattt

SEQ ID NO: 461917 - DNA, 15 bp, Homo sapiens
cgtggctgcccaatt

SEQ ID NO: 461918 - DNA, 15 bp, Homo sapiens
tcgtggctgcccaat

SEQ ID NO: 461919 - DNA, 15 bp, Homo sapiens
gtcgtggctgcccaa

SEQ ID NO: 461920 - DNA, 15 bp, Homo sapiens
ggtcgtggctgccca

SEQ ID NO: 461921 - DNA, 15 bp, Homo sapiens
aggtcgtggctgccc

SEQ ID NO: 461922 - DNA, 15 bp, Homo sapiens
gaggtcgtggctgcc

SEQ ID NO: 461923 - DNA, 15 bp, Homo sapiens
ggaggtcgtggctgc

SEQ ID NO: 461924 - DNA, 15 bp, Homo sapiens
gggaggtcgtggctg

SEQ ID NO: 461925 - DNA, 15 bp, Homo sapiens
tgggaggtcgtggct

SEQ ID NO: 461926 - DNA, 15 bp, Homo sapiens
gtgggaggtcgtggc

SEQ ID NO: 461927 - DNA, 15 bp, Homo sapiens
ggtgggaggtcgtgg

SEQ ID NO: 461928 - DNA, 15 bp, Homo sapiens
tggtgggaggtcgtg

SEQ ID NO: 461929 - DNA, 15 bp, Homo sapiens
ctggtgggaggtcgt

SEQ ID NO: 461930 - DNA, 15 bp, Homo sapiens
cctggtgggaggtcg

SEQ ID NO: 461931 - DNA, 15 bp, Homo sapiens
tcctggtgggaggtc

SEQ ID NO: 461932 - DNA, 15 bp, Homo sapiens
atcctggtgggaggt

SEQ ID NO: 461933 - DNA, 15 bp, Homo sapiens
aatcctggtgggagg

SEQ ID NO: 461934 - DNA, 15 bp, Homo sapiens
taatcctggtgggag

SEQ ID NO: 461935 - DNA, 15 bp, Homo sapiens
ataatcctggtggga

SEQ ID NO: 461936 - DNA, 15 bp, Homo sapiens
aataatcctggtggg

SEQ ID NO: 461937 - DNA, 15 bp, Homo sapiens
caataatcctggtgg

SEQ ID NO: 461938 - DNA, 15 bp, Homo sapiens
gcaataatcctggtg

SEQ ID NO: 461939 - DNA, 15 bp, Homo sapiens
tgcaataatcctggt

SEQ ID NO: 461940 - DNA, 15 bp, Homo sapiens
ctgcaataatcctgg

SEQ ID NO: 461941 - DNA, 15 bp, Homo sapiens
gctgcaataatcctg

SEQ ID NO: 461942 - DNA, 15 bp, Homo sapiens
ggctgcaataatcct

SEQ ID NO: 461943 - DNA, 15 bp, Homo sapiens
aggctgcaataatcc

SEQ ID NO: 461944 - DNA, 15 bp, Homo sapiens
caggctgcaataatc

SEQ ID NO: 461945 - DNA, 15 bp, Homo sapiens
tcaggctgcaataat

SEQ ID NO: 461946 - DNA, 15 bp, Homo sapiens
ctcaggctgcaataa

SEQ ID NO: 461947 - DNA, 15 bp, Homo sapiens
cctcaggctgcaata

SEQ ID NO: 461948 - DNA, 15 bp, Homo sapiens
ccctcaggctgcaat

SEQ ID NO: 461949 - DNA, 15 bp, Homo sapiens
tccctcaggctgcaa

SEQ ID NO: 461950 - DNA, 15 bp, Homo sapiens
atccctcaggctgca

SEQ ID NO: 461951 - DNA, 15 bp, Homo sapiens
gatccctcaggctgc

SEQ ID NO: 461952 - DNA, 15 bp, Homo sapiens
agatccctcaggctg

SEQ ID NO: 461953 - DNA, 15 bp, Homo sapiens
aagatccctcaggct

SEQ ID NO: 461954 - DNA, 15 bp, Homo sapiens
aaagatccctcaggc

SEQ ID NO: 461955 - DNA, 15 bp, Homo sapiens
aaaagatccctcagg

SEQ ID NO: 461956 - DNA, 15 bp, Homo sapiens
aaaaagatccctcag

SEQ ID NO: 461957 - DNA, 15 bp, Homo sapiens
caaaaagatccctca

SEQ ID NO: 461958 - DNA, 15 bp, Homo sapiens
tcaaaaagatccctc

SEQ ID NO: 461959 - DNA, 15 bp, Homo sapiens
ttcaaaaagatccct

SEQ ID NO: 461960 - DNA, 15 bp, Homo sapiens
tttcaaaaagatccc

SEQ ID NO: 461961 - DNA, 15 bp, Homo sapiens
atttcaaaaagatcc

SEQ ID NO: 461962 - DNA, 15 bp, Homo sapiens
catttcaaaaagatc

SEQ ID NO: 461963 - DNA, 15 bp, Homo sapiens
acatttcaaaaagat

SEQ ID NO: 461964 - DNA, 15 bp, Homo sapiens
tacatttcaaaaaga

SEQ ID NO: 461965 - DNA, 15 bp, Homo sapiens
ttacatttcaaaaag

SEQ ID NO: 461966 - DNA, 15 bp, Homo sapiens
tttacatttcaaaaa

SEQ ID NO: 461967 - DNA, 15 bp, Homo sapiens
atttacatttcaaaa

SEQ ID NO: 461968 - DNA, 15 bp, Homo sapiens
gatttacatttcaaa

SEQ ID NO: 461969 - DNA, 15 bp, Homo sapiens
tgatttacatttcaa

SEQ ID NO: 461970 - DNA, 15 bp, Homo sapiens
ttgatttacatttca

SEQ ID NO: 461971 - DNA, 15 bp, Homo sapiens
tttgatttacatttc

SEQ ID NO: 461972 - DNA, 15 bp, Homo sapiens
gtttgatttacattt

SEQ ID NO: 461973 - DNA, 15 bp, Homo sapiens
agtttgatttacatt

SEQ ID NO: 461974 - DNA, 15 bp, Homo sapiens
tagtttgatttacat

SEQ ID NO: 461975 - DNA, 15 bp, Homo sapiens
atagtttgatttaca

SEQ ID NO: 461976 - DNA, 15 bp, Homo sapiens
gatagtttgatttac

SEQ ID NO: 461977 - DNA, 15 bp, Homo sapiens
tgatagtttgattta

SEQ ID NO: 461978 - DNA, 15 bp, Homo sapiens
gtgatagtttgattt

SEQ ID NO: 461979 - DNA, 15 bp, Homo sapiens
agtgatagtttgatt

SEQ ID NO: 461980 - DNA, 15 bp, Homo sapiens
aagtgatagtttgat

SEQ ID NO: 461981 - DNA, 15 bp, Homo sapiens
caagtgatagtttga

SEQ ID NO: 461982 - DNA, 15 bp, Homo sapiens
acaagtgatagtttg

SEQ ID NO: 461983 - DNA, 15 bp, Homo sapiens
gacaagtgatagttt

SEQ ID NO: 461984 - DNA, 15 bp, Homo sapiens
agacaagtgatagtt

SEQ ID NO: 461985 - DNA, 15 bp, Homo sapiens
cagacaagtgatagt

SEQ ID NO: 461986 - DNA, 15 bp, Homo sapiens
acagacaagtgatag

SEQ ID NO: 461987 - DNA, 15 bp, Homo sapiens
aacagacaagtgata

SEQ ID NO: 461988 - DNA, 15 bp, Homo sapiens
aaacagacaagtgat

SEQ ID NO: 461989 - DNA, 15 bp, Homo sapiens
taaacagacaagtga

SEQ ID NO: 461990 - DNA, 15 bp, Homo sapiens
ttaaacagacaagtg

SEQ ID NO: 461991 - DNA, 15 bp, Homo sapiens
tttaaacagacaagt

SEQ ID NO: 461992 - DNA, 15 bp, Homo sapiens
ctttaaacagacaag

SEQ ID NO: 461993 - DNA, 15 bp, Homo sapiens
gctttaaacagacaa

SEQ ID NO: 461994 - DNA, 15 bp, Homo sapiens
agctttaaacagaca

SEQ ID NO: 461995 - DNA, 15 bp, Homo sapiens
aagctttaaacagac

SEQ ID NO: 461996 - DNA, 15 bp, Homo sapiens
aaagctttaaacaga

SEQ ID NO: 461997 - DNA, 15 bp, Homo sapiens
aaaagctttaaacag

SEQ ID NO: 461998 - DNA, 15 bp, Homo sapiens
gaaaagctttaaaca

SEQ ID NO: 461999 - DNA, 15 bp, Homo sapiens
tgaaaagctttaaac

SEQ ID NO: 462000 - DNA, 15 bp, Homo sapiens
ttgaaaagctttaaa

SEQ ID NO: 462001 - DNA, 15 bp, Homo sapiens
tttgaaaagctttaa

SEQ ID NO: 462002 - DNA, 15 bp, Homo sapiens
ctttgaaaagcttta

SEQ ID NO: 462003 - DNA, 15 bp, Homo sapiens
tctttgaaaagcttt

SEQ ID NO: 462004 - DNA, 15 bp, Homo sapiens
gtctttgaaaagctt

SEQ ID NO: 462005 - DNA, 15 bp, Homo sapiens
agtctttgaaaagct

SEQ ID NO: 462006 - DNA, 15 bp, Homo sapiens
aagtctttgaaaagc

SEQ ID NO: 462007 - DNA, 15 bp, Homo sapiens
taagtctttgaaaag

SEQ ID NO: 462008 - DNA, 15 bp, Homo sapiens
gtaagtctttgaaaa

SEQ ID NO: 462009 - DNA, 15 bp, Homo sapiens
ggtaagtctttgaaa

SEQ ID NO: 462010 - DNA, 15 bp, Homo sapiens
gggtaagtctttgaa

SEQ ID NO: 462011 - DNA, 15 bp, Homo sapiens
ggggtaagtctttga

SEQ ID NO: 462012 - DNA, 15 bp, Homo sapiens
tggggtaagtctttg

SEQ ID NO: 462013 - DNA, 15 bp, Homo sapiens
atggggtaagtcttt

SEQ ID NO: 462014 - DNA, 15 bp, Homo sapiens
aatggggtaagtctt

SEQ ID NO: 462015 - DNA, 15 bp, Homo sapiens
caatggggtaagtct

SEQ ID NO: 462016 - DNA, 15 bp, Homo sapiens
gcaatggggtaagtc

SEQ ID NO: 462017 - DNA, 15 bp, Homo sapiens
ggcaatggggtaagt

SEQ ID NO: 462018 - DNA, 15 bp, Homo sapiens
gggcaatggggtaag

SEQ ID NO: 462019 - DNA, 15 bp, Homo sapiens
agggcaatggggtaa

SEQ ID NO: 462020 - DNA, 15 bp, Homo sapiens
aagggcaatggggta

SEQ ID NO: 462021 - DNA, 15 bp, Homo sapiens
caagggcaatggggt

SEQ ID NO: 462022 - DNA, 15 bp, Homo sapiens
ccaagggcaatgggg

SEQ ID NO: 462023 - DNA, 15 bp, Homo sapiens
tccaagggcaatggg

SEQ ID NO: 462024 - DNA, 15 bp, Homo sapiens
ttccaagggcaatgg

SEQ ID NO: 462025 - DNA, 15 bp, Homo sapiens
cttccaagggcaatg

SEQ ID NO: 462026 - DNA, 15 bp, Homo sapiens
tcttccaagggcaat

SEQ ID NO: 462027 - DNA, 15 bp, Homo sapiens
ttcttccaagggcaa

SEQ ID NO: 462028 - DNA, 15 bp, Homo sapiens
tttcttccaagggca

SEQ ID NO: 462029 - DNA, 15 bp, Homo sapiens
ctttcttccaagggc

SEQ ID NO: 462030 - DNA, 15 bp, Homo sapiens
actttcttccaaggg

SEQ ID NO: 462031 - DNA, 15 bp, Homo sapiens
cactttcttccaagg

SEQ ID NO: 462032 - DNA, 15 bp, Homo sapiens
gcactttcttccaag

SEQ ID NO: 462033 - DNA, 15 bp, Homo sapiens
tgcactttcttccaa

SEQ ID NO: 462034 - DNA, 15 bp, Homo sapiens
ctgcactttcttcca

SEQ ID NO: 462035 - DNA, 15 bp, Homo sapiens
tctgcactttcttcc

SEQ ID NO: 462036 - DNA, 15 bp, Homo sapiens
atctgcactttcttc

SEQ ID NO: 462037 - DNA, 15 bp, Homo sapiens
tatctgcactttctt

SEQ ID NO: 462038 - DNA, 15 bp, Homo sapiens
atatctgcactttct

SEQ ID NO: 462039 - DNA, 15 bp, Homo sapiens
gatatctgcactttc

SEQ ID NO: 462040 - DNA, 15 bp, Homo sapiens
agatatctgcacttt

SEQ ID NO: 462041 - DNA, 15 bp, Homo sapiens
aagatatctgcactt

SEQ ID NO: 462042 - DNA, 15 bp, Homo sapiens
caagatatctgcact

SEQ ID NO: 462043 - DNA, 15 bp, Homo sapiens
tcaagatatctgcac

SEQ ID NO: 462044 - DNA, 15 bp, Homo sapiens
gtcaagatatctgca

SEQ ID NO: 462045 - DNA, 15 bp, Homo sapiens
tgtcaagatatctgc

SEQ ID NO: 462046 - DNA, 15 bp, Homo sapiens
ctgtcaagatatctg

SEQ ID NO: 462047 - DNA, 15 bp, Homo sapiens
cctgtcaagatatct

SEQ ID NO: 462048 - DNA, 15 bp, Homo sapiens
tcctgtcaagatatc

SEQ ID NO: 462049 - DNA, 15 bp, Homo sapiens
ctcctgtcaagatat

SEQ ID NO: 462050 - DNA, 15 bp, Homo sapiens
tctcctgtcaagata

SEQ ID NO: 462051 - DNA, 15 bp, Homo sapiens
ctctcctgtcaagat

SEQ ID NO: 462052 - DNA, 15 bp, Homo sapiens
gctctcctgtcaaga

SEQ ID NO: 462053 - DNA, 15 bp, Homo sapiens
ggctctcctgtcaag

SEQ ID NO: 462054 - DNA, 15 bp, Homo sapiens
aggctctcctgtcaa

SEQ ID NO: 462055 - DNA, 15 bp, Homo sapiens
aaggctctcctgtca

SEQ ID NO: 462056 - DNA, 15 bp, Homo sapiens
gaaggctctcctgtc

SEQ ID NO: 462057 - DNA, 15 bp, Homo sapiens
agaaggctctcctgt

SEQ ID NO: 462058 - DNA, 15 bp, Homo sapiens
gagaaggctctcctg

SEQ ID NO: 462059 - DNA, 15 bp, Homo sapiens
ggagaaggctctcct

SEQ ID NO: 462060 - DNA, 15 bp, Homo sapiens
tggagaaggctctcc

SEQ ID NO: 462061 - DNA, 15 bp, Homo sapiens
ctggagaaggctctc

SEQ ID NO: 462062 - DNA, 15 bp, Homo sapiens
gctggagaaggctct

SEQ ID NO: 462063 - DNA, 15 bp, Homo sapiens
ggctggagaaggctc

SEQ ID NO: 462064 - DNA, 15 bp, Homo sapiens
aggctggagaaggct

SEQ ID NO: 462065 - DNA, 15 bp, Homo sapiens
gaggctggagaaggc

SEQ ID NO: 462066 - DNA, 15 bp, Homo sapiens
ggaggctggagaagg

SEQ ID NO: 462067 - DNA, 15 bp, Homo sapiens
aggaggctggagaag

SEQ ID NO: 462068 - DNA, 15 bp, Homo sapiens
gaggaggctggagaa

SEQ ID NO: 462069 - DNA, 15 bp, Homo sapiens
agaggaggctggaga

SEQ ID NO: 462070 - DNA, 15 bp, Homo sapiens
aagaggaggctggag

SEQ ID NO: 462071 - DNA, 15 bp, Homo sapiens
gaagaggaggctgga

SEQ ID NO: 462072 - DNA, 15 bp, Homo sapiens
agaagaggaggctgg

SEQ ID NO: 462073 - DNA, 15 bp, Homo sapiens
cagaagaggaggctg

SEQ ID NO: 462074 - DNA, 15 bp, Homo sapiens
gcagaagaggaggct

SEQ ID NO: 462075 - DNA, 15 bp, Homo sapiens
ggcagaagaggaggc

SEQ ID NO: 462076 - DNA, 15 bp, Homo sapiens
cggcagaagaggagg

SEQ ID NO: 462077 - DNA, 15 bp, Homo sapiens
acggcagaagaggag

SEQ ID NO: 462078 - DNA, 15 bp, Homo sapiens
cacggcagaagagga

SEQ ID NO: 462079 - DNA, 15 bp, Homo sapiens
ccacggcagaagagg

SEQ ID NO: 462080 - DNA, 15 bp, Homo sapiens
accacggcagaagag

SEQ ID NO: 462081 - DNA, 15 bp, Homo sapiens
gaccacggcagaaga

SEQ ID NO: 462082 - DNA, 15 bp, Homo sapiens
agaccacggcagaag

SEQ ID NO: 462083 - DNA, 15 bp, Homo sapiens
gagaccacggcagaa

SEQ ID NO: 462084 - DNA, 15 bp, Homo sapiens
ggagaccacggcaga

SEQ ID NO: 462085 - DNA, 15 bp, Homo sapiens
aggagaccacggcag

SEQ ID NO: 462086 - DNA, 15 bp, Homo sapiens
aaggagaccacggca

SEQ ID NO: 462087 - DNA, 15 bp, Homo sapiens
caaggagaccacggc

SEQ ID NO: 462088 - DNA, 15 bp, Homo sapiens
acaaggagaccacgg

SEQ ID NO: 462089 - DNA, 15 bp, Homo sapiens
tacaaggagaccacg

SEQ ID NO: 462090 - DNA, 15 bp, Homo sapiens
gtacaaggagaccac

SEQ ID NO: 462091 - DNA, 15 bp, Homo sapiens
tgtacaaggagacca

SEQ ID NO: 462092 - DNA, 15 bp, Homo sapiens
ctgtacaaggagacc

SEQ ID NO: 462093 - DNA, 15 bp, Homo sapiens
actgtacaaggagac

SEQ ID NO: 462094 - DNA, 15 bp, Homo sapiens
gactgtacaaggaga

SEQ ID NO: 462095 - DNA, 15 bp, Homo sapiens
agactgtacaaggag

SEQ ID NO: 462096 - DNA, 15 bp, Homo sapiens
gagactgtacaagga

SEQ ID NO: 462097 - DNA, 15 bp, Homo sapiens
agagactgtacaagg

SEQ ID NO: 462098 - DNA, 15 bp, Homo sapiens
tagagactgtacaag

SEQ ID NO: 462099 - DNA, 15 bp, Homo sapiens
gtagagactgtacaa

SEQ ID NO: 462100 - DNA, 15 bp, Homo sapiens
tgtagagactgtaca

SEQ ID NO: 462101 - DNA, 15 bp, Homo sapiens
ctgtagagactgtac

SEQ ID NO: 462102 - DNA, 15 bp, Homo sapiens
actgtagagactgta

SEQ ID NO: 462103 - DNA, 15 bp, Homo sapiens
cactgtagagactgt

SEQ ID NO: 462104 - DNA, 15 bp, Homo sapiens
acactgtagagactg

SEQ ID NO: 462105 - DNA, 15 bp, Homo sapiens
tacactgtagagact

SEQ ID NO: 462106 - DNA, 15 bp, Homo sapiens
gtacactgtagagac

SEQ ID NO: 462107 - DNA, 15 bp, Homo sapiens
agtacactgtagaga

SEQ ID NO: 462108 - DNA, 15 bp, Homo sapiens
cagtacactgtagag

SEQ ID NO: 462109 - DNA, 15 bp, Homo sapiens
gcagtacactgtaga

SEQ ID NO: 462110 - DNA, 15 bp, Homo sapiens
agcagtacactgtag

SEQ ID NO: 462111 - DNA, 15 bp, Homo sapiens
aagcagtacactgta

SEQ ID NO: 462112 - DNA, 15 bp, Homo sapiens
gaagcagtacactgt

SEQ ID NO: 462113 - DNA, 15 bp, Homo sapiens
tgaagcagtacactg

SEQ ID NO: 462114 - DNA, 15 bp, Homo sapiens
atgaagcagtacact

SEQ ID NO: 462115 - DNA, 15 bp, Homo sapiens
aatgaagcagtacac

SEQ ID NO: 462116 - DNA, 15 bp, Homo sapiens
taatgaagcagtaca

SEQ ID NO: 462117 - DNA, 15 bp, Homo sapiens
ctaatgaagcagtac

SEQ ID NO: 462118 - DNA, 15 bp, Homo sapiens
tctaatgaagcagta

SEQ ID NO: 462119 - DNA, 15 bp, Homo sapiens
ttctaatgaagcagt

SEQ ID NO: 462120 - DNA, 15 bp, Homo sapiens
gttctaatgaagcag

SEQ ID NO: 462121 - DNA, 15 bp, Homo sapiens
ggttctaatgaagca

SEQ ID NO: 462122 - DNA, 15 bp, Homo sapiens
gggttctaatgaagc

SEQ ID NO: 462123 - DNA, 15 bp, Homo sapiens
agggttctaatgaag

SEQ ID NO: 462124 - DNA, 15 bp, Homo sapiens
cagggttctaatgaa

SEQ ID NO: 462125 - DNA, 15 bp, Homo sapiens
ccagggttctaatga

SEQ ID NO: 462126 - DNA, 15 bp, Homo sapiens
tccagggttctaatg

SEQ ID NO: 462127 - DNA, 15 bp, Homo sapiens
ctccagggttctaat

SEQ ID NO: 462128 - DNA, 15 bp, Homo sapiens
tctccagggttctaa

SEQ ID NO: 462129 - DNA, 15 bp, Homo sapiens
atctccagggttcta

SEQ ID NO: 462130 - DNA, 15 bp, Homo sapiens
aatctccagggttct

SEQ ID NO: 462131 - DNA, 15 bp, Homo sapiens
taatctccagggttc

SEQ ID NO: 462132 - DNA, 15 bp, Homo sapiens
ataatctccagggtt

SEQ ID NO: 462133 - DNA, 15 bp, Homo sapiens
aataatctccagggt

SEQ ID NO: 462134 - DNA, 15 bp, Homo sapiens
taataatctccaggg

SEQ ID NO: 462135 - DNA, 15 bp, Homo sapiens
ataataatctccagg

SEQ ID NO: 462136 - DNA, 15 bp, Homo sapiens
aataataatctccag

SEQ ID NO: 462137 - DNA, 15 bp, Homo sapiens
aaataataatctcca

SEQ ID NO: 462138 - DNA, 15 bp, Homo sapiens
caaataataatctcc

SEQ ID NO: 462139 - DNA, 15 bp, Homo sapiens
gcaaataataatctc

SEQ ID NO: 462140 - DNA, 15 bp, Homo sapiens
agcaaataataatct

SEQ ID NO: 462141 - DNA, 15 bp, Homo sapiens
tagcaaataataatc

SEQ ID NO: 462142 - DNA, 15 bp, Homo sapiens
ctagcaaataataat

SEQ ID NO: 462143 - DNA, 15 bp, Homo sapiens
actagcaaataataa

SEQ ID NO: 462144 - DNA, 15 bp, Homo sapiens
aactagcaaataata

SEQ ID NO: 462145 - DNA, 15 bp, Homo sapiens
gaactagcaaataat

SEQ ID NO: 462146 - DNA, 15 bp, Homo sapiens
agaactagcaaataa

SEQ ID NO: 462147 - DNA, 15 bp, Homo sapiens
cagaactagcaaata

SEQ ID NO: 462148 - DNA, 15 bp, Homo sapiens
ccagaactagcaaat

SEQ ID NO: 462149 - DNA, 15 bp, Homo sapiens
cccagaactagcaaa

SEQ ID NO: 462150 - DNA, 15 bp, Homo sapiens
gcccagaactagcaa

SEQ ID NO: 462151 - DNA, 15 bp, Homo sapiens
agcccagaactagca

SEQ ID NO: 462152 - DNA, 15 bp, Homo sapiens
tagcccagaactagc

SEQ ID NO: 462153 - DNA, 15 bp, Homo sapiens
ttagcccagaactag

SEQ ID NO: 462154 - DNA, 15 bp, Homo sapiens
cttagcccagaacta

SEQ ID NO: 462155 - DNA, 15 bp, Homo sapiens
tcttagcccagaact

SEQ ID NO: 462156 - DNA, 15 bp, Homo sapiens
ttcttagcccagaac

SEQ ID NO: 462157 - DNA, 15 bp, Homo sapiens
gttcttagcccagaa

SEQ ID NO: 462158 - DNA, 15 bp, Homo sapiens
agttcttagcccaga

SEQ ID NO: 462159 - DNA, 15 bp, Homo sapiens
cagttcttagcccag

SEQ ID NO: 462160 - DNA, 15 bp, Homo sapiens
ccagttcttagccca

SEQ ID NO: 462161 - DNA, 15 bp, Homo sapiens
gccagttcttagccc

SEQ ID NO: 462162 - DNA, 15 bp, Homo sapiens
tgccagttcttagcc

SEQ ID NO: 462163 - DNA, 15 bp, Homo sapiens
gtgccagttcttagc

SEQ ID NO: 462164 - DNA, 15 bp, Homo sapiens
ggtgccagttcttag

SEQ ID NO: 462165 - DNA, 15 bp, Homo sapiens
aggtgccagttctta

SEQ ID NO: 462166 - DNA, 15 bp, Homo sapiens
caggtgccagttctt

SEQ ID NO: 462167 - DNA, 15 bp, Homo sapiens
ccaggtgccagttct

SEQ ID NO: 462168 - DNA, 15 bp, Homo sapiens
gccaggtgccagttc

SEQ ID NO: 462169 - DNA, 15 bp, Homo sapiens
agccaggtgccagtt

SEQ ID NO: 462170 - DNA, 15 bp, Homo sapiens
aagccaggtgccagt

SEQ ID NO: 462171 - DNA, 15 bp, Homo sapiens
aaagccaggtgccag

SEQ ID NO: 462172 - DNA, 15 bp, Homo sapiens
caaagccaggtgcca

SEQ ID NO: 462173 - DNA, 15 bp, Homo sapiens
acaaagccaggtgcc

SEQ ID NO: 462174 - DNA, 15 bp, Homo sapiens
tacaaagccaggtgc

SEQ ID NO: 462175 - DNA, 15 bp, Homo sapiens
ctacaaagccaggtg

SEQ ID NO: 462176 - DNA, 15 bp, Homo sapiens
tctacaaagccaggt

SEQ ID NO: 462177 - DNA, 15 bp, Homo sapiens
ctctacaaagccagg

SEQ ID NO: 462178 - DNA, 15 bp, Homo sapiens
gctctacaaagccag

SEQ ID NO: 462179 - DNA, 15 bp, Homo sapiens
agctctacaaagcca

SEQ ID NO: 462180 - DNA, 15 bp, Homo sapiens
gagctctacaaagcc

SEQ ID NO: 462181 - DNA, 15 bp, Homo sapiens
ggagctctacaaagc

SEQ ID NO: 462182 - DNA, 15 bp, Homo sapiens
aggagctctacaaag

SEQ ID NO: 462183 - DNA, 15 bp, Homo sapiens
gaggagctctacaaa

SEQ ID NO: 462184 - DNA, 15 bp, Homo sapiens
tgaggagctctacaa

SEQ ID NO: 462185 - DNA, 15 bp, Homo sapiens
ctgaggagctctaca

SEQ ID NO: 462186 - DNA, 15 bp, Homo sapiens
cctgaggagctctac

SEQ ID NO: 462187 - DNA, 15 bp, Homo sapiens
tcctgaggagctcta

SEQ ID NO: 462188 - DNA, 15 bp, Homo sapiens
ctcctgaggagctct

SEQ ID NO: 462189 - DNA, 15 bp, Homo sapiens
tctcctgaggagctc

SEQ ID NO: 462190 - DNA, 15 bp, Homo sapiens
atctcctgaggagct

SEQ ID NO: 462191 - DNA, 15 bp, Homo sapiens
aatctcctgaggagc

SEQ ID NO: 462192 - DNA, 15 bp, Homo sapiens
gaatctcctgaggag

SEQ ID NO: 462193 - DNA, 15 bp, Homo sapiens
agaatctcctgagga

SEQ ID NO: 462194 - DNA, 15 bp, Homo sapiens
cagaatctcctgagg

SEQ ID NO: 462195 - DNA, 15 bp, Homo sapiens
tcagaatctcctgag

SEQ ID NO: 462196 - DNA, 15 bp, Homo sapiens
ctcagaatctcctga

SEQ ID NO: 462197 - DNA, 15 bp, Homo sapiens
cctcagaatctcctg

SEQ ID NO: 462198 - DNA, 15 bp, Homo sapiens
gcctcagaatctcct

SEQ ID NO: 462199 - DNA, 15 bp, Homo sapiens
cgcctcagaatctcc

SEQ ID NO: 462200 - DNA, 15 bp, Homo sapiens
acgcctcagaatctc

SEQ ID NO: 462201 - DNA, 15 bp, Homo sapiens
tacgcctcagaatct

SEQ ID NO: 462202 - DNA, 15 bp, Homo sapiens
atacgcctcagaatc

SEQ ID NO: 462203 - DNA, 15 bp, Homo sapiens
aatacgcctcagaat

SEQ ID NO: 462204 - DNA, 15 bp, Homo sapiens
gaatacgcctcagaa

SEQ ID NO: 462205 - DNA, 15 bp, Homo sapiens
tgaatacgcctcaga

SEQ ID NO: 462206 - DNA, 15 bp, Homo sapiens
ctgaatacgcctcag

SEQ ID NO: 462207 - DNA, 15 bp, Homo sapiens
tctgaatacgcctca

SEQ ID NO: 462208 - DNA, 15 bp, Homo sapiens
ctctgaatacgcctc

SEQ ID NO: 462209 - DNA, 15 bp, Homo sapiens
actctgaatacgcct

SEQ ID NO: 462210 - DNA, 15 bp, Homo sapiens
aactctgaatacgcc

SEQ ID NO: 462211 - DNA, 15 bp, Homo sapiens
caactctgaatacgc

SEQ ID NO: 462212 - DNA, 15 bp, Homo sapiens
tcaactctgaatacg

SEQ ID NO: 462213 - DNA, 15 bp, Homo sapiens
ctcaactctgaatac

SEQ ID NO: 462214 - DNA, 15 bp, Homo sapiens
gctcaactctgaata

SEQ ID NO: 462215 - DNA, 15 bp, Homo sapiens
ggctcaactctgaat

SEQ ID NO: 462216 - DNA, 15 bp, Homo sapiens
gggctcaactctgaa

SEQ ID NO: 462217 - DNA, 15 bp, Homo sapiens
agggctcaactctga

SEQ ID NO: 462218 - DNA, 15 bp, Homo sapiens
cagggctcaactctg

SEQ ID NO: 462219 - DNA, 15 bp, Homo sapiens
tcagggctcaactct

SEQ ID NO: 462220 - DNA, 15 bp, Homo sapiens
atcagggctcaactc

SEQ ID NO: 462221 - DNA, 15 bp, Homo sapiens
gatcagggctcaact

SEQ ID NO: 462222 - DNA, 15 bp, Homo sapiens
agatcagggctcaac

SEQ ID NO: 462223 - DNA, 15 bp, Homo sapiens
gagatcagggctcaa

SEQ ID NO: 462224 - DNA, 15 bp, Homo sapiens
agagatcagggctca

SEQ ID NO: 462225 - DNA, 15 bp, Homo sapiens
cagagatcagggctc

SEQ ID NO: 462226 - DNA, 15 bp, Homo sapiens
gcagagatcagggct

SEQ ID NO: 462227 - DNA, 15 bp, Homo sapiens
agcagagatcagggc

SEQ ID NO: 462228 - DNA, 15 bp, Homo sapiens
gagcagagatcaggg

SEQ ID NO: 462229 - DNA, 15 bp, Homo sapiens
agagcagagatcagg

SEQ ID NO: 462230 - DNA, 15 bp, Homo sapiens
cagagcagagatcag

SEQ ID NO: 462231 - DNA, 15 bp, Homo sapiens
tcagagcagagatca

SEQ ID NO: 462232 - DNA, 15 bp, Homo sapiens
atcagagcagagatc

SEQ ID NO: 462233 - DNA, 15 bp, Homo sapiens
aatcagagcagagat

SEQ ID NO: 462234 - DNA, 15 bp, Homo sapiens
aaatcagagcagaga

SEQ ID NO: 462235 - DNA, 15 bp, Homo sapiens
gaaatcagagcagag

SEQ ID NO: 462236 - DNA, 15 bp, Homo sapiens
cgaaatcagagcaga

SEQ ID NO: 462237 - DNA, 15 bp, Homo sapiens
tcgaaatcagagcag

SEQ ID NO: 462238 - DNA, 15 bp, Homo sapiens
ctcgaaatcagagca

SEQ ID NO: 462239 - DNA, 15 bp, Homo sapiens
cctcgaaatcagagc

SEQ ID NO: 462240 - DNA, 15 bp, Homo sapiens
acctcgaaatcagag

SEQ ID NO: 462241 - DNA, 15 bp, Homo sapiens
aacctcgaaatcaga

SEQ ID NO: 462242 - DNA, 15 bp, Homo sapiens
gaacctcgaaatcag

SEQ ID NO: 462243 - DNA, 15 bp, Homo sapiens
agaacctcgaaatca

SEQ ID NO: 462244 - DNA, 15 bp, Homo sapiens
gagaacctcgaaatc

SEQ ID NO: 462245 - DNA, 15 bp, Homo sapiens
cgagaacctcgaaat

SEQ ID NO: 462246 - DNA, 15 bp, Homo sapiens
acgagaacctcgaaa

SEQ ID NO: 462247 - DNA, 15 bp, Homo sapiens
aacgagaacctcgaa

SEQ ID NO: 462248 - DNA, 15 bp, Homo sapiens
taacgagaacctcga

SEQ ID NO: 462249 - DNA, 15 bp, Homo sapiens
ataacgagaacctcg

SEQ ID NO: 462250 - DNA, 15 bp, Homo sapiens
tataacgagaacctc

SEQ ID NO: 462251 - DNA, 15 bp, Homo sapiens
atataacgagaacct

SEQ ID NO: 462252 - DNA, 15 bp, Homo sapiens
aatataacgagaacc

SEQ ID NO: 462253 - DNA, 15 bp, Homo sapiens
aaatataacgagaac

SEQ ID NO: 462254 - DNA, 15 bp, Homo sapiens
taaatataacgagaa

SEQ ID NO: 462255 - DNA, 15 bp, Homo sapiens
ataaatataacgaga

SEQ ID NO: 462256 - DNA, 15 bp, Homo sapiens
aataaatataacgag

SEQ ID NO: 462257 - DNA, 15 bp, Homo sapiens
taataaatataacga

SEQ ID NO: 462258 - DNA, 15 bp, Homo sapiens
ttaataaatataacg

SEQ ID NO: 462259 - DNA, 15 bp, Homo sapiens
attaataaatataac

SEQ ID NO: 462260 - DNA, 15 bp, Homo sapiens
cattaataaatataa

SEQ ID NO: 462261 - DNA, 15 bp, Homo sapiens
tcattaataaatata

SEQ ID NO: 462262 - DNA, 15 bp, Homo sapiens
atcattaataaatat

SEQ ID NO: 462263 - DNA, 15 bp, Homo sapiens
gatcattaataaata

SEQ ID NO: 462264 - DNA, 15 bp, Homo sapiens
tgatcattaataaat

SEQ ID NO: 462265 - DNA, 15 bp, Homo sapiens
gtgatcattaataaa

SEQ ID NO: 462266 - DNA, 15 bp, Homo sapiens
cgtgatcattaataa

SEQ ID NO: 462267 - DNA, 15 bp, Homo sapiens
tcgtgatcattaata

SEQ ID NO: 462268 - DNA, 15 bp, Homo sapiens
ttcgtgatcattaat

SEQ ID NO: 462269 - DNA, 15 bp, Homo sapiens
tttcgtgatcattaa

SEQ ID NO: 462270 - DNA, 15 bp, Homo sapiens
ttttcgtgatcatta

SEQ ID NO: 462271 - DNA, 15 bp, Homo sapiens
tttttcgtgatcatt

SEQ ID NO: 462272 - DNA, 15 bp, Homo sapiens
ttttttcgtgatcat

SEQ ID NO: 462273 - DNA, 15 bp, Homo sapiens
attttttcgtgatca

SEQ ID NO: 462274 - DNA, 15 bp, Homo sapiens
aattttttcgtgatc

SEQ ID NO: 462275 - DNA, 15 bp, Homo sapiens
aaattttttcgtgat

SEQ ID NO: 462276 - DNA, 15 bp, Homo sapiens
taaattttttcgtga

SEQ ID NO: 462277 - DNA, 15 bp, Homo sapiens
ataaattttttcgtg

SEQ ID NO: 462278 - DNA, 15 bp, Homo sapiens
aataaattttttcgt

SEQ ID NO: 462279 - DNA, 15 bp, Homo sapiens
taataaattttttcg

SEQ ID NO: 462280 - DNA, 15 bp, Homo sapiens
ataataaattttttc

SEQ ID NO: 462281 - DNA, 15 bp, Homo sapiens
aataataaatttttt

SEQ ID NO: 462282 - DNA, 15 bp, Homo sapiens
taataataaattttt

SEQ ID NO: 462283 - DNA, 15 bp, Homo sapiens
ataataataaatttt

SEQ ID NO: 462284 - DNA, 15 bp, Homo sapiens
aataataataaattt

SEQ ID NO: 462285 - DNA, 15 bp, Homo sapiens
gaataataataaatt

SEQ ID NO: 462286 - DNA, 15 bp, Homo sapiens
agaataataataaat

SEQ ID NO: 462287 - DNA, 15 bp, Homo sapiens
aagaataataataaa

SEQ ID NO: 462288 - DNA, 15 bp, Homo sapiens
aaagaataataataa

SEQ ID NO: 462289 - DNA, 15 bp, Homo sapiens
caaagaataataata

SEQ ID NO: 462290 - DNA, 15 bp, Homo sapiens
ccaaagaataataat

SEQ ID NO: 462291 - DNA, 15 bp, Homo sapiens
gccaaagaataataa

SEQ ID NO: 462292 - DNA, 15 bp, Homo sapiens
ggccaaagaataata

SEQ ID NO: 462293 - DNA, 15 bp, Homo sapiens
aggccaaagaataat

SEQ ID NO: 462294 - DNA, 15 bp, Homo sapiens
gaggccaaagaataa

SEQ ID NO: 462295 - DNA, 15 bp, Homo sapiens
tgaggccaaagaata

SEQ ID NO: 462296 - DNA, 15 bp, Homo sapiens
gtgaggccaaagaat

SEQ ID NO: 462297 - DNA, 15 bp, Homo sapiens
agtgaggccaaagaa

SEQ ID NO: 462298 - DNA, 15 bp, Homo sapiens
aagtgaggccaaaga

SEQ ID NO: 462299 - DNA, 15 bp, Homo sapiens
aaagtgaggccaaag

SEQ ID NO: 462300 - DNA, 15 bp, Homo sapiens
taaagtgaggccaaa

SEQ ID NO: 462301 - DNA, 15 bp, Homo sapiens
ctaaagtgaggccaa

SEQ ID NO: 462302 - DNA, 15 bp, Homo sapiens
gctaaagtgaggcca

SEQ ID NO: 462303 - DNA, 15 bp, Homo sapiens
tgctaaagtgaggcc

SEQ ID NO: 462304 - DNA, 15 bp, Homo sapiens
atgctaaagtgaggc

SEQ ID NO: 462305 - DNA, 15 bp, Homo sapiens
gatgctaaagtgagg

SEQ ID NO: 462306 - DNA, 15 bp, Homo sapiens
tgatgctaaagtgag

SEQ ID NO: 462307 - DNA, 15 bp, Homo sapiens
atgatgctaaagtga

SEQ ID NO: 462308 - DNA, 15 bp, Homo sapiens
gatgatgctaaagtg

SEQ ID NO: 462309 - DNA, 15 bp, Homo sapiens
agatgatgctaaagt

SEQ ID NO: 462310 - DNA, 15 bp, Homo sapiens
cagatgatgctaaag

SEQ ID NO: 462311 - DNA, 15 bp, Homo sapiens
tcagatgatgctaaa

SEQ ID NO: 462312 - DNA, 15 bp, Homo sapiens
ctcagatgatgctaa

SEQ ID NO: 462313 - DNA, 15 bp, Homo sapiens
cctcagatgatgcta

SEQ ID NO: 462314 - DNA, 15 bp, Homo sapiens
tcctcagatgatgct

SEQ ID NO: 462315 - DNA, 15 bp, Homo sapiens
ttcctcagatgatgc

SEQ ID NO: 462316 - DNA, 15 bp, Homo sapiens
attcctcagatgatg

SEQ ID NO: 462317 - DNA, 15 bp, Homo sapiens
aattcctcagatgat

SEQ ID NO: 462318 - DNA, 15 bp, Homo sapiens
aaattcctcagatga

SEQ ID NO: 462319 - DNA, 15 bp, Homo sapiens
aaaattcctcagatg

SEQ ID NO: 462320 - DNA, 15 bp, Homo sapiens
aaaaattcctcagat

SEQ ID NO: 462321 - DNA, 15 bp, Homo sapiens
aaaaaattcctcaga

SEQ ID NO: 462322 - DNA, 15 bp, Homo sapiens
aaaaaaattcctcag

SEQ ID NO: 462323 - DNA, 15 bp, Homo sapiens
aaaaaaaattcctca

SEQ ID NO: 462324 - DNA, 15 bp, Homo sapiens
aaaaaaaaattcctc

SEQ ID NO: 462325 - DNA, 15 bp, Homo sapiens
aaaaaaaaaattcct

SEQ ID NO: 462326 - DNA, 15 bp, Homo sapiens
aaaaaaaaaaattcc

SEQ ID NO: 462327 - DNA, 15 bp, Homo sapiens
gtcaaaaaaaaaaaa

SEQ ID NO: 462328 - DNA, 15 bp, Homo sapiens
tgtcaaaaaaaaaaa

SEQ ID NO: 462329 - DNA, 15 bp, Homo sapiens
ctgtcaaaaaaaaaa

SEQ ID NO: 462330 - DNA, 15 bp, Homo sapiens
tctgtcaaaaaaaaa

SEQ ID NO: 462331 - DNA, 15 bp, Homo sapiens
ctctgtcaaaaaaaa

SEQ ID NO: 462332 - DNA, 15 bp, Homo sapiens
actctgtcaaaaaaa

SEQ ID NO: 462333 - DNA, 15 bp, Homo sapiens
aactctgtcaaaaaa

SEQ ID NO: 462334 - DNA, 15 bp, Homo sapiens
aaactctgtcaaaaa

SEQ ID NO: 462335 - DNA, 15 bp, Homo sapiens
aaaactctgtcaaaa

SEQ ID NO: 462336 - DNA, 15 bp, Homo sapiens
caaaactctgtcaaa

SEQ ID NO: 462337 - DNA, 15 bp, Homo sapiens
gcaaaactctgtcaa

SEQ ID NO: 462338 - DNA, 15 bp, Homo sapiens
agcaaaactctgtca

SEQ ID NO: 462339 - DNA, 15 bp, Homo sapiens
agagcaaaactctgt

SEQ ID NO: 462340 - DNA, 15 bp, Homo sapiens
aagagcaaaactctg

SEQ ID NO: 462341 - DNA, 15 bp, Homo sapiens
caagagcaaaactct

SEQ ID NO: 462342 - DNA, 15 bp, Homo sapiens
acaagagcaaaactc

SEQ ID NO: 462343 - DNA, 15 bp, Homo sapiens
aacaagagcaaaact

SEQ ID NO: 462344 - DNA, 15 bp, Homo sapiens
caacaagagcaaaac

SEQ ID NO: 462345 - DNA, 15 bp, Homo sapiens
gcaacaagagcaaaa

SEQ ID NO: 462346 - DNA, 15 bp, Homo sapiens
ggcaacaagagcaaa

SEQ ID NO: 462347 - DNA, 15 bp, Homo sapiens
gggcaacaagagcaa

SEQ ID NO: 462348 - DNA, 15 bp, Homo sapiens
tgggcaacaagagca

SEQ ID NO: 462349 - DNA, 15 bp, Homo sapiens
acgccattgcactcc

SEQ ID NO: 462350 - DNA, 15 bp, Homo sapiens
cacgccattgcactc

SEQ ID NO: 462351 - DNA, 15 bp, Homo sapiens
tcacgccattgcact

SEQ ID NO: 462352 - DNA, 15 bp, Homo sapiens
atcacgccattgcac

SEQ ID NO: 462353 - DNA, 15 bp, Homo sapiens
gatcacgccattgca

SEQ ID NO: 462354 - DNA, 15 bp, Homo sapiens
agatcacgccattgc

SEQ ID NO: 462355 - DNA, 15 bp, Homo sapiens
gagatcacgccattg

SEQ ID NO: 462356 - DNA, 15 bp, Homo sapiens
tgagatcacgccatt

SEQ ID NO: 462357 - DNA, 15 bp, Homo sapiens
ctgagatcacgccat

SEQ ID NO: 462358 - DNA, 15 bp, Homo sapiens
gctgagatcacgcca

SEQ ID NO: 462359 - DNA, 15 bp, Homo sapiens
agctgagatcacgcc

SEQ ID NO: 462360 - DNA, 15 bp, Homo sapiens
gagctgagatcacgc

SEQ ID NO: 462361 - DNA, 15 bp, Homo sapiens
tgagctgagatcacg

SEQ ID NO: 462362 - DNA, 15 bp, Homo sapiens
gtgagctgagatcac

SEQ ID NO: 462363 - DNA, 15 bp, Homo sapiens
ccgggaggcggaggt

SEQ ID NO: 462364 - DNA, 15 bp, Homo sapiens
cccgggaggcggagg

SEQ ID NO: 462365 - DNA, 15 bp, Homo sapiens
ggagaatctcttgaa

SEQ ID NO: 462366 - DNA, 15 bp, Homo sapiens
aggagaatctcttga

SEQ ID NO: 462367 - DNA, 15 bp, Homo sapiens
caggagaatctcttg

SEQ ID NO: 462368 - DNA, 15 bp, Homo sapiens
gcaggagaatctctt

SEQ ID NO: 462369 - DNA, 15 bp, Homo sapiens
ggcaggagaatctct

SEQ ID NO: 462370 - DNA, 15 bp, Homo sapiens
aggcaggagaatctc

SEQ ID NO: 462371 - DNA, 15 bp, Homo sapiens
gaggcaggagaatct

SEQ ID NO: 462372 - DNA, 15 bp, Homo sapiens
ttcagctacttggga

SEQ ID NO: 462373 - DNA, 15 bp, Homo sapiens
tttcagctacttggg

SEQ ID NO: 462374 - DNA, 15 bp, Homo sapiens
atttcagctacttgg

SEQ ID NO: 462375 - DNA, 15 bp, Homo sapiens
aatttcagctacttg

SEQ ID NO: 462376 - DNA, 15 bp, Homo sapiens
taatttcagctactt

SEQ ID NO: 462377 - DNA, 15 bp, Homo sapiens
gtaatttcagctact

SEQ ID NO: 462378 - DNA, 15 bp, Homo sapiens
tgtaatttcagctac

SEQ ID NO: 462379 - DNA, 15 bp, Homo sapiens
ctgtaatttcagcta

SEQ ID NO: 462380 - DNA, 15 bp, Homo sapiens
cctgtaatttcagct

SEQ ID NO: 462381 - DNA, 15 bp, Homo sapiens
gcctgtaatttcagc

SEQ ID NO: 462382 - DNA, 15 bp, Homo sapiens
tgcctgtaatttcag

SEQ ID NO: 462383 - DNA, 15 bp, Homo sapiens
atgcctgtaatttca

SEQ ID NO: 462384 - DNA, 15 bp, Homo sapiens
gatgcctgtaatttc

SEQ ID NO: 462385 - DNA, 15 bp, Homo sapiens
ggatgcctgtaattt

SEQ ID NO: 462386 - DNA, 15 bp, Homo sapiens
tggatgcctgtaatt

SEQ ID NO: 462387 - DNA, 15 bp, Homo sapiens
gtggatgcctgtaat

SEQ ID NO: 462388 - DNA, 15 bp, Homo sapiens
ggtggatgcctgtaa

SEQ ID NO: 462389 - DNA, 15 bp, Homo sapiens
tggtggatgcctgta

SEQ ID NO: 462390 - DNA, 15 bp, Homo sapiens
gtggtggatgcctgt

SEQ ID NO: 462391 - DNA, 15 bp, Homo sapiens
ggtggtggatgcctg

SEQ ID NO: 462392 - DNA, 15 bp, Homo sapiens
tggtggtggatgcct

SEQ ID NO: 462393 - DNA, 15 bp, Homo sapiens
atggtggtggatgcc

SEQ ID NO: 462394 - DNA, 15 bp, Homo sapiens
catggtggtggatgc

SEQ ID NO: 462395 - DNA, 15 bp, Homo sapiens
gcatggtggtggatg

SEQ ID NO: 462396 - DNA, 15 bp, Homo sapiens
ggcatggtggtggat

SEQ ID NO: 462397 - DNA, 15 bp, Homo sapiens
aggcatggtggtgga

SEQ ID NO: 462398 - DNA, 15 bp, Homo sapiens
caggcatggtggtgg

SEQ ID NO: 462399 - DNA, 15 bp, Homo sapiens
gcaggcatggtggtg

SEQ ID NO: 462400 - DNA, 15 bp, Homo sapiens
agcaggcatggtggt

SEQ ID NO: 462401 - DNA, 15 bp, Homo sapiens
tagcaggcatggtgg

SEQ ID NO: 462402 - DNA, 15 bp, Homo sapiens
ttagcaggcatggtg

SEQ ID NO: 462403 - DNA, 15 bp, Homo sapiens
attagcaggcatggt

SEQ ID NO: 462404 - DNA, 15 bp, Homo sapiens
cattagcaggcatgg

SEQ ID NO: 462405 - DNA, 15 bp, Homo sapiens
acattagcaggcatg

SEQ ID NO: 462406 - DNA, 15 bp, Homo sapiens
aacattagcaggcat

SEQ ID NO: 462407 - DNA, 15 bp, Homo sapiens
aaacattagcaggca

SEQ ID NO: 462408 - DNA, 15 bp, Homo sapiens
aaaacattagcaggc

SEQ ID NO: 462409 - DNA, 15 bp, Homo sapiens
aaaaacattagcagg

SEQ ID NO: 462410 - DNA, 15 bp, Homo sapiens
caaaaacattagcag

SEQ ID NO: 462411 - DNA, 15 bp, Homo sapiens
acaaaaacattagca

SEQ ID NO: 462412 - DNA, 15 bp, Homo sapiens
tacaaaaacattagc

SEQ ID NO: 462413 - DNA, 15 bp, Homo sapiens
atacaaaaacattag

SEQ ID NO: 462414 - DNA, 15 bp, Homo sapiens
aatacaaaaacatta

SEQ ID NO: 462415 - DNA, 15 bp, Homo sapiens
aaatacaaaaacatt

SEQ ID NO: 462416 - DNA, 15 bp, Homo sapiens
aaaatacaaaaacat

SEQ ID NO: 462417 - DNA, 15 bp, Homo sapiens
aaaaatacaaaaaca

SEQ ID NO: 462418 - DNA, 15 bp, Homo sapiens
aaaaaatacaaaaac

SEQ ID NO: 462419 - DNA, 15 bp, Homo sapiens
taaaaaatacaaaaa

SEQ ID NO: 462420 - DNA, 15 bp, Homo sapiens
ctaaaaaatacaaaa

SEQ ID NO: 462421 - DNA, 15 bp, Homo sapiens
actaaaaaatacaaa

SEQ ID NO: 462422 - DNA, 15 bp, Homo sapiens
tactaaaaaatacaa

SEQ ID NO: 462423 - DNA, 15 bp, Homo sapiens
ctactaaaaaataca

SEQ ID NO: 462424 - DNA, 15 bp, Homo sapiens
tctactaaaaaatac

SEQ ID NO: 462425 - DNA, 15 bp, Homo sapiens
ctctactaaaaaata

SEQ ID NO: 462426 - DNA, 15 bp, Homo sapiens
cctctactaaaaaat

SEQ ID NO: 462427 - DNA, 15 bp, Homo sapiens
acctctactaaaaaa

SEQ ID NO: 462428 - DNA, 15 bp, Homo sapiens
cacctctactaaaaa

SEQ ID NO: 462429 - DNA, 15 bp, Homo sapiens
ccacctctactaaaa

SEQ ID NO: 462430 - DNA, 15 bp, Homo sapiens
cccacctctactaaa

SEQ ID NO: 462431 - DNA, 15 bp, Homo sapiens
gcccacctctactaa

SEQ ID NO: 462432 - DNA, 15 bp, Homo sapiens
agcccacctctacta

SEQ ID NO: 462433 - DNA, 15 bp, Homo sapiens
aagcccacctctact

SEQ ID NO: 462434 - DNA, 15 bp, Homo sapiens
aaagcccacctctac

SEQ ID NO: 462435 - DNA, 15 bp, Homo sapiens
gaaagcccacctcta

SEQ ID NO: 462436 - DNA, 15 bp, Homo sapiens
tgaaagcccacctct

SEQ ID NO: 462437 - DNA, 15 bp, Homo sapiens
gtgaaagcccacctc

SEQ ID NO: 462438 - DNA, 15 bp, Homo sapiens
tgtgaaagcccacct

SEQ ID NO: 462439 - DNA, 15 bp, Homo sapiens
ctgtgaaagcccacc

SEQ ID NO: 462440 - DNA, 15 bp, Homo sapiens
actgtgaaagcccac

SEQ ID NO: 462441 - DNA, 15 bp, Homo sapiens
cactgtgaaagccca

SEQ ID NO: 462442 - DNA, 15 bp, Homo sapiens
acactgtgaaagccc

SEQ ID NO: 462443 - DNA, 15 bp, Homo sapiens
aacactgtgaaagcc

SEQ ID NO: 462444 - DNA, 15 bp, Homo sapiens
caacactgtgaaagc

SEQ ID NO: 462445 - DNA, 15 bp, Homo sapiens
ccaacactgtgaaag

SEQ ID NO: 462446 - DNA, 15 bp, Homo sapiens
accaacactgtgaaa

SEQ ID NO: 462447 - DNA, 15 bp, Homo sapiens
gaccaacactgtgaa

SEQ ID NO: 462448 - DNA, 15 bp, Homo sapiens
tgaccaacactgtga

SEQ ID NO: 462449 - DNA, 15 bp, Homo sapiens
ctgaccaacactgtg

SEQ ID NO: 462450 - DNA, 15 bp, Homo sapiens
cctgaccaacactgt

SEQ ID NO: 462451 - DNA, 15 bp, Homo sapiens
gcctgaccaacactg

SEQ ID NO: 462452 - DNA, 15 bp, Homo sapiens
agcctgaccaacact

SEQ ID NO: 462453 - DNA, 15 bp, Homo sapiens
cagcctgaccaacac

SEQ ID NO: 462454 - DNA, 15 bp, Homo sapiens
aaccagcctgaccaa

SEQ ID NO: 462455 - DNA, 15 bp, Homo sapiens
aaaccagcctgacca

SEQ ID NO: 462456 - DNA, 15 bp, Homo sapiens
aaaaccagcctgacc

SEQ ID NO: 462457 - DNA, 15 bp, Homo sapiens
caaaaccagcctgac

SEQ ID NO: 462458 - DNA, 15 bp, Homo sapiens
tcaaaaccagcctga

SEQ ID NO: 462459 - DNA, 15 bp, Homo sapiens
ttcaaaaccagcctg

SEQ ID NO: 462460 - DNA, 15 bp, Homo sapiens
gttcaaaaccagcct

SEQ ID NO: 462461 - DNA, 15 bp, Homo sapiens
agttcaaaaccagcc

SEQ ID NO: 462462 - DNA, 15 bp, Homo sapiens
gagttcaaaaccagc

SEQ ID NO: 462463 - DNA, 15 bp, Homo sapiens
ggagttcaaaaccag

SEQ ID NO: 462464 - DNA, 15 bp, Homo sapiens
aggagttcaaaacca

SEQ ID NO: 462465 - DNA, 15 bp, Homo sapiens
caggagttcaaaacc

SEQ ID NO: 462466 - DNA, 15 bp, Homo sapiens
tcaggagttcaaaac

SEQ ID NO: 462467 - DNA, 15 bp, Homo sapiens
gtcaggagttcaaaa

SEQ ID NO: 462468 - DNA, 15 bp, Homo sapiens
cgtcaggagttcaaa

SEQ ID NO: 462469 - DNA, 15 bp, Homo sapiens
acgtcaggagttcaa

SEQ ID NO: 462470 - DNA, 15 bp, Homo sapiens
gacgtcaggagttca

SEQ ID NO: 462471 - DNA, 15 bp, Homo sapiens
tgacgtcaggagttc

SEQ ID NO: 462472 - DNA, 15 bp, Homo sapiens
ctgacgtcaggagtt

SEQ ID NO: 462473 - DNA, 15 bp, Homo sapiens
gctgacgtcaggagt

SEQ ID NO: 462474 - DNA, 15 bp, Homo sapiens
agctgacgtcaggag

SEQ ID NO: 462475 - DNA, 15 bp, Homo sapiens
cagctgacgtcagga

SEQ ID NO: 462476 - DNA, 15 bp, Homo sapiens
tcagctgacgtcagg

SEQ ID NO: 462477 - DNA, 15 bp, Homo sapiens
atcagctgacgtcag

SEQ ID NO: 462478 - DNA, 15 bp, Homo sapiens
gatcagctgacgtca

SEQ ID NO: 462479 - DNA, 15 bp, Homo sapiens
ggatcagctgacgtc

SEQ ID NO: 462480 - DNA, 15 bp, Homo sapiens
tggatcagctgacgt

SEQ ID NO: 462481 - DNA, 15 bp, Homo sapiens
gtggatcagctgacg

SEQ ID NO: 462482 - DNA, 15 bp, Homo sapiens
ggtggatcagctgac

SEQ ID NO: 462483 - DNA, 15 bp, Homo sapiens
gggtggatcagctga

SEQ ID NO: 462484 - DNA, 15 bp, Homo sapiens
tgggtggatcagctg

SEQ ID NO: 462485 - DNA, 15 bp, Homo sapiens
gtgggtggatcagct

SEQ ID NO: 462486 - DNA, 15 bp, Homo sapiens
ggtgggtggatcagc

SEQ ID NO: 462487 - DNA, 15 bp, Homo sapiens
aggtgggtggatcag

SEQ ID NO: 462488 - DNA, 15 bp, Homo sapiens
taggtgggtggatca

SEQ ID NO: 462489 - DNA, 15 bp, Homo sapiens
ctaggtgggtggatc

SEQ ID NO: 462490 - DNA, 15 bp, Homo sapiens
cctaggtgggtggat

SEQ ID NO: 462491 - DNA, 15 bp, Homo sapiens
gcctaggtgggtgga

SEQ ID NO: 462492 - DNA, 15 bp, Homo sapiens
ggcctaggtgggtgg

SEQ ID NO: 462493 - DNA, 15 bp, Homo sapiens
gggcctaggtgggtg

SEQ ID NO: 462494 - DNA, 15 bp, Homo sapiens
ggggcctaggtgggt

SEQ ID NO: 462495 - DNA, 15 bp, Homo sapiens
gggggcctaggtggg

SEQ ID NO: 462496 - DNA, 15 bp, Homo sapiens
ggggggcctaggtgg

SEQ ID NO: 462497 - DNA, 15 bp, Homo sapiens
tggggggcctaggtg

SEQ ID NO: 462498 - DNA, 15 bp, Homo sapiens
ctggggggcctaggt

SEQ ID NO: 462499 - DNA, 15 bp, Homo sapiens
tctggggggcctagg

SEQ ID NO: 462500 - DNA, 15 bp, Homo sapiens
ctctggggggcctag

SEQ ID NO: 462501 - DNA, 15 bp, Homo sapiens
actctggggggccta

SEQ ID NO: 462502 - DNA, 15 bp, Homo sapiens
cactctggggggcct

SEQ ID NO: 462503 - DNA, 15 bp, Homo sapiens
gcactctggggggcc

SEQ ID NO: 462504 - DNA, 15 bp, Homo sapiens
agcactctggggggc

SEQ ID NO: 462505 - DNA, 15 bp, Homo sapiens
cagcactctgggggg

SEQ ID NO: 462506 - DNA, 15 bp, Homo sapiens
ccagcactctggggg

SEQ ID NO: 462507 - DNA, 15 bp, Homo sapiens
cccagcactctgggg

SEQ ID NO: 462508 - DNA, 15 bp, Homo sapiens
tcccagcactctggg

SEQ ID NO: 462509 - DNA, 15 bp, Homo sapiens
atcccagcactctgg

SEQ ID NO: 462510 - DNA, 15 bp, Homo sapiens
aatcccagcactctg

SEQ ID NO: 462511 - DNA, 15 bp, Homo sapiens
taatcccagcactct

SEQ ID NO: 462512 - DNA, 15 bp, Homo sapiens
gtaatcccagcactc

SEQ ID NO: 462513 - DNA, 15 bp, Homo sapiens
tgggcacggtggctc

SEQ ID NO: 462514 - DNA, 15 bp, Homo sapiens
ctgggcacggtggct

SEQ ID NO: 462515 - DNA, 15 bp, Homo sapiens
gctgggcacggtggc

SEQ ID NO: 462516 - DNA, 15 bp, Homo sapiens
ggctgggcacggtgg

SEQ ID NO: 462517 - DNA, 15 bp, Homo sapiens
cggctgggcacggtg

SEQ ID NO: 462518 - DNA, 15 bp, Homo sapiens
acggctgggcacggt

SEQ ID NO: 462519 - DNA, 15 bp, Homo sapiens
tacggctgggcacgg

SEQ ID NO: 462520 - DNA, 15 bp, Homo sapiens
ctacggctgggcacg

SEQ ID NO: 462521 - DNA, 15 bp, Homo sapiens
gctacggctgggcac

SEQ ID NO: 462522 - DNA, 15 bp, Homo sapiens
agctacggctgggca

SEQ ID NO: 462523 - DNA, 15 bp, Homo sapiens
aagctacggctgggc

SEQ ID NO: 462524 - DNA, 15 bp, Homo sapiens
aaagctacggctggg

SEQ ID NO: 462525 - DNA, 15 bp, Homo sapiens
gaaagctacggctgg

SEQ ID NO: 462526 - DNA, 15 bp, Homo sapiens
cgaaagctacggctg

SEQ ID NO: 462527 - DNA, 15 bp, Homo sapiens
tcgaaagctacggct

SEQ ID NO: 462528 - DNA, 15 bp, Homo sapiens
ttcgaaagctacggc

SEQ ID NO: 462529 - DNA, 15 bp, Homo sapiens
tttcgaaagctacgg

SEQ ID NO: 462530 - DNA, 15 bp, Homo sapiens
atttcgaaagctacg

SEQ ID NO: 462531 - DNA, 15 bp, Homo sapiens
aatttcgaaagctac

SEQ ID NO: 462532 - DNA, 15 bp, Homo sapiens
aaatttcgaaagcta

SEQ ID NO: 462533 - DNA, 15 bp, Homo sapiens
caaatttcgaaagct

SEQ ID NO: 462534 - DNA, 15 bp, Homo sapiens
tcaaatttcgaaagc

SEQ ID NO: 462535 - DNA, 15 bp, Homo sapiens
ttcaaatttcgaaag

SEQ ID NO: 462536 - DNA, 15 bp, Homo sapiens
tttcaaatttcgaaa

SEQ ID NO: 462537 - DNA, 15 bp, Homo sapiens
gtttcaaatttcgaa

SEQ ID NO: 462538 - DNA, 15 bp, Homo sapiens
ggtttcaaatttcga

SEQ ID NO: 462539 - DNA, 15 bp, Homo sapiens
aggtttcaaatttcg

SEQ ID NO: 462540 - DNA, 15 bp, Homo sapiens
caggtttcaaatttc

SEQ ID NO: 462541 - DNA, 15 bp, Homo sapiens
ccaggtttcaaattt

SEQ ID NO: 462542 - DNA, 15 bp, Homo sapiens
accaggtttcaaatt

SEQ ID NO: 462543 - DNA, 15 bp, Homo sapiens
gaccaggtttcaaat

SEQ ID NO: 462544 - DNA, 15 bp, Homo sapiens
ggaccaggtttcaaa

SEQ ID NO: 462545 - DNA, 15 bp, Homo sapiens
gggaccaggtttcaa

SEQ ID NO: 462546 - DNA, 15 bp, Homo sapiens
tgggaccaggtttca

SEQ ID NO: 462547 - DNA, 15 bp, Homo sapiens
gtgggaccaggtttc

SEQ ID NO: 462548 - DNA, 15 bp, Homo sapiens
agtgggaccaggttt

SEQ ID NO: 462549 - DNA, 15 bp, Homo sapiens
cagtgggaccaggtt

SEQ ID NO: 462550 - DNA, 15 bp, Homo sapiens
acagtgggaccaggt

SEQ ID NO: 462551 - DNA, 15 bp, Homo sapiens
gacagtgggaccagg

SEQ ID NO: 462552 - DNA, 15 bp, Homo sapiens
tgacagtgggaccag

SEQ ID NO: 462553 - DNA, 15 bp, Homo sapiens
ctgacagtgggacca

SEQ ID NO: 462554 - DNA, 15 bp, Homo sapiens
tctgacagtgggacc

SEQ ID NO: 462555 - DNA, 15 bp, Homo sapiens
ctctgacagtgggac

SEQ ID NO: 462556 - DNA, 15 bp, Homo sapiens
cctctgacagtggga

SEQ ID NO: 462557 - DNA, 15 bp, Homo sapiens
acctctgacagtggg

SEQ ID NO: 462558 - DNA, 15 bp, Homo sapiens
aacctctgacagtgg

SEQ ID NO: 462559 - DNA, 15 bp, Homo sapiens
gaacctctgacagtg

SEQ ID NO: 462560 - DNA, 15 bp, Homo sapiens
ggaacctctgacagt

SEQ ID NO: 462561 - DNA, 15 bp, Homo sapiens
tggaacctctgacag

SEQ ID NO: 462562 - DNA, 15 bp, Homo sapiens
ttggaacctctgaca

SEQ ID NO: 462563 - DNA, 15 bp, Homo sapiens
attggaacctctgac

SEQ ID NO: 462564 - DNA, 15 bp, Homo sapiens
aattggaacctctga

SEQ ID NO: 462565 - DNA, 15 bp, Homo sapiens
aaattggaacctctg

SEQ ID NO: 462566 - DNA, 15 bp, Homo sapiens
caaattggaacctct

SEQ ID NO: 462567 - DNA, 15 bp, Homo sapiens
ccaaattggaacctc

SEQ ID NO: 462568 - DNA, 15 bp, Homo sapiens
gccaaattggaacct

SEQ ID NO: 462569 - DNA, 15 bp, Homo sapiens
tgccaaattggaacc

SEQ ID NO: 462570 - DNA, 15 bp, Homo sapiens
gtgccaaattggaac

SEQ ID NO: 462571 - DNA, 15 bp, Homo sapiens
agtgccaaattggaa

SEQ ID NO: 462572 - DNA, 15 bp, Homo sapiens
cagtgccaaattgga

SEQ ID NO: 462573 - DNA, 15 bp, Homo sapiens
ccagtgccaaattgg

SEQ ID NO: 462574 - DNA, 15 bp, Homo sapiens
accagtgccaaattg

SEQ ID NO: 462575 - DNA, 15 bp, Homo sapiens
aaccagtgccaaatt

SEQ ID NO: 462576 - DNA, 15 bp, Homo sapiens
aaaccagtgccaaat

SEQ ID NO: 462577 - DNA, 15 bp, Homo sapiens
caaaccagtgccaaa

SEQ ID NO: 462578 - DNA, 15 bp, Homo sapiens
ccaaaccagtgccaa

SEQ ID NO: 462579 - DNA, 15 bp, Homo sapiens
accaaaccagtgcca

SEQ ID NO: 462580 - DNA, 15 bp, Homo sapiens
aaccaaaccagtgcc

SEQ ID NO: 462581 - DNA, 15 bp, Homo sapiens
gaaccaaaccagtgc

SEQ ID NO: 462582 - DNA, 15 bp, Homo sapiens
ggaaccaaaccagtg

SEQ ID NO: 462583 - DNA, 15 bp, Homo sapiens
gggaaccaaaccagt

SEQ ID NO: 462584 - DNA, 15 bp, Homo sapiens
tgggaaccaaaccag

SEQ ID NO: 462585 - DNA, 15 bp, Homo sapiens
ctgggaaccaaacca

SEQ ID NO: 462586 - DNA, 15 bp, Homo sapiens
cctgggaaccaaacc

SEQ ID NO: 462587 - DNA, 15 bp, Homo sapiens
gcctgggaaccaaac

SEQ ID NO: 462588 - DNA, 15 bp, Homo sapiens
tgcctgggaaccaaa

SEQ ID NO: 462589 - DNA, 15 bp, Homo sapiens
atgcctgggaaccaa

SEQ ID NO: 462590 - DNA, 15 bp, Homo sapiens
gatgcctgggaacca

SEQ ID NO: 462591 - DNA, 15 bp, Homo sapiens
agatgcctgggaacc

SEQ ID NO: 462592 - DNA, 15 bp, Homo sapiens
aagatgcctgggaac

SEQ ID NO: 462593 - DNA, 15 bp, Homo sapiens
aaagatgcctgggaa

SEQ ID NO: 462594 - DNA, 15 bp, Homo sapiens
gaaagatgcctggga

SEQ ID NO: 462595 - DNA, 15 bp, Homo sapiens
agaaagatgcctggg

SEQ ID NO: 462596 - DNA, 15 bp, Homo sapiens
aagaaagatgcctgg

SEQ ID NO: 462597 - DNA, 15 bp, Homo sapiens
caagaaagatgcctg

SEQ ID NO: 462598 - DNA, 15 bp, Homo sapiens
gcaagaaagatgcct

SEQ ID NO: 462599 - DNA, 15 bp, Homo sapiens
agcaagaaagatgcc

SEQ ID NO: 462600 - DNA, 15 bp, Homo sapiens
cagcaagaaagatgc

SEQ ID NO: 462601 - DNA, 15 bp, Homo sapiens
acagcaagaaagatg

SEQ ID NO: 462602 - DNA, 15 bp, Homo sapiens
tacagcaagaaagat

SEQ ID NO: 462603 - DNA, 15 bp, Homo sapiens
atacagcaagaaaga

SEQ ID NO: 462604 - DNA, 15 bp, Homo sapiens
tatacagcaagaaag

SEQ ID NO: 462605 - DNA, 15 bp, Homo sapiens
atatacagcaagaaa

SEQ ID NO: 462606 - DNA, 15 bp, Homo sapiens
tatatacagcaagaa

SEQ ID NO: 462607 - DNA, 15 bp, Homo sapiens
atatatacagcaaga

SEQ ID NO: 462608 - DNA, 15 bp, Homo sapiens
aatatatacagcaag

SEQ ID NO: 462609 - DNA, 15 bp, Homo sapiens
aaatatatacagcaa

SEQ ID NO: 462610 - DNA, 15 bp, Homo sapiens
aaaatatatacagca

SEQ ID NO: 462611 - DNA, 15 bp, Homo sapiens
aaaaatatatacagc

SEQ ID NO: 462612 - DNA, 15 bp, Homo sapiens
aaaaaatatatacag

SEQ ID NO: 462613 - DNA, 15 bp, Homo sapiens
taaaaaatatataca

SEQ ID NO: 462614 - DNA, 15 bp, Homo sapiens
ctaaaaaatatatac

SEQ ID NO: 462615 - DNA, 15 bp, Homo sapiens
actaaaaaatatata

SEQ ID NO: 462616 - DNA, 15 bp, Homo sapiens
cactaaaaaatatat

SEQ ID NO: 462617 - DNA, 15 bp, Homo sapiens
acactaaaaaatata

SEQ ID NO: 462618 - DNA, 15 bp, Homo sapiens
gacactaaaaaatat

SEQ ID NO: 462619 - DNA, 15 bp, Homo sapiens
tgacactaaaaaata

SEQ ID NO: 462620 - DNA, 15 bp, Homo sapiens
ctgacactaaaaaat

SEQ ID NO: 462621 - DNA, 15 bp, Homo sapiens
gctgacactaaaaaa

SEQ ID NO: 462622 - DNA, 15 bp, Homo sapiens
ggctgacactaaaaa

SEQ ID NO: 462623 - DNA, 15 bp, Homo sapiens
tggctgacactaaaa

SEQ ID NO: 462624 - DNA, 15 bp, Homo sapiens
ctggctgacactaaa

SEQ ID NO: 462625 - DNA, 15 bp, Homo sapiens
cctggctgacactaa

SEQ ID NO: 462626 - DNA, 15 bp, Homo sapiens
ccctggctgacacta

SEQ ID NO: 462627 - DNA, 15 bp, Homo sapiens
accctggctgacact

SEQ ID NO: 462628 - DNA, 15 bp, Homo sapiens
caccctggctgacac

SEQ ID NO: 462629 - DNA, 15 bp, Homo sapiens
ccaccctggctgaca

SEQ ID NO: 462630 - DNA, 15 bp, Homo sapiens
tccaccctggctgac

SEQ ID NO: 462631 - DNA, 15 bp, Homo sapiens
ctccaccctggctga

SEQ ID NO: 462632 - DNA, 15 bp, Homo sapiens
tctccaccctggctg

SEQ ID NO: 462633 - DNA, 15 bp, Homo sapiens
gtctccaccctggct

SEQ ID NO: 462634 - DNA, 15 bp, Homo sapiens
ggtctccaccctggc

SEQ ID NO: 462635 - DNA, 15 bp, Homo sapiens
aggtctccaccctgg

SEQ ID NO: 462636 - DNA, 15 bp, Homo sapiens
gaggtctccaccctg

SEQ ID NO: 462637 - DNA, 15 bp, Homo sapiens
agaggtctccaccct

SEQ ID NO: 462638 - DNA, 15 bp, Homo sapiens
cagaggtctccaccc

SEQ ID NO: 462639 - DNA, 15 bp, Homo sapiens
acagaggtctccacc

SEQ ID NO: 462640 - DNA, 15 bp, Homo sapiens
tacagaggtctccac

SEQ ID NO: 462641 - DNA, 15 bp, Homo sapiens
atacagaggtctcca

SEQ ID NO: 462642 - DNA, 15 bp, Homo sapiens
aatacagaggtctcc

SEQ ID NO: 462643 - DNA, 15 bp, Homo sapiens
taatacagaggtctc

SEQ ID NO: 462644 - DNA, 15 bp, Homo sapiens
gtaatacagaggtct

SEQ ID NO: 462645 - DNA, 15 bp, Homo sapiens
agtaatacagaggtc

SEQ ID NO: 462646 - DNA, 15 bp, Homo sapiens
aagtaatacagaggt

SEQ ID NO: 462647 - DNA, 15 bp, Homo sapiens
gaagtaatacagagg

SEQ ID NO: 462648 - DNA, 15 bp, Homo sapiens
tgaagtaatacagag

SEQ ID NO: 462649 - DNA, 15 bp, Homo sapiens
atgaagtaatacaga

SEQ ID NO: 462650 - DNA, 15 bp, Homo sapiens
catgaagtaatacag

SEQ ID NO: 462651 - DNA, 15 bp, Homo sapiens
ccatgaagtaataca

SEQ ID NO: 462652 - DNA, 15 bp, Homo sapiens
cccatgaagtaatac

SEQ ID NO: 462653 - DNA, 15 bp, Homo sapiens
ccccatgaagtaata

SEQ ID NO: 462654 - DNA, 15 bp, Homo sapiens
tccccatgaagtaat

SEQ ID NO: 462655 - DNA, 15 bp, Homo sapiens
ttccccatgaagtaa

SEQ ID NO: 462656 - DNA, 15 bp, Homo sapiens
cttccccatgaagta

SEQ ID NO: 462657 - DNA, 15 bp, Homo sapiens
tcttccccatgaagt

SEQ ID NO: 462658 - DNA, 15 bp, Homo sapiens
ttcttccccatgaag

SEQ ID NO: 462659 - DNA, 15 bp, Homo sapiens
attcttccccatgaa

SEQ ID NO: 462660 - DNA, 15 bp, Homo sapiens
aattcttccccatga

SEQ ID NO: 462661 - DNA, 15 bp, Homo sapiens
aaattcttccccatg

SEQ ID NO: 462662 - DNA, 15 bp, Homo sapiens
caaattcttccccat

SEQ ID NO: 462663 - DNA, 15 bp, Homo sapiens
ccaaattcttcccca

SEQ ID NO: 462664 - DNA, 15 bp, Homo sapiens
cccaaattcttcccc

SEQ ID NO: 462665 - DNA, 15 bp, Homo sapiens
tcccaaattcttccc

SEQ ID NO: 462666 - DNA, 15 bp, Homo sapiens
ctcccaaattcttcc

SEQ ID NO: 462667 - DNA, 15 bp, Homo sapiens
tctcccaaattcttc

SEQ ID NO: 462668 - DNA, 15 bp, Homo sapiens
ttctcccaaattctt

SEQ ID NO: 462669 - DNA, 15 bp, Homo sapiens
cttctcccaaattct

SEQ ID NO: 462670 - DNA, 15 bp, Homo sapiens
tcttctcccaaattc

SEQ ID NO: 462671 - DNA, 15 bp, Homo sapiens
atcttctcccaaatt

SEQ ID NO: 462672 - DNA, 15 bp, Homo sapiens
catcttctcccaaat

SEQ ID NO: 462673 - DNA, 15 bp, Homo sapiens
acatcttctcccaaa

SEQ ID NO: 462674 - DNA, 15 bp, Homo sapiens
aacatcttctcccaa

SEQ ID NO: 462675 - DNA, 15 bp, Homo sapiens
caacatcttctccca

SEQ ID NO: 462676 - DNA, 15 bp, Homo sapiens
acaacatcttctccc

SEQ ID NO: 462677 - DNA, 15 bp, Homo sapiens
cacaacatcttctcc

SEQ ID NO: 462678 - DNA, 15 bp, Homo sapiens
tcacaacatcttctc

SEQ ID NO: 462679 - DNA, 15 bp, Homo sapiens
ctcacaacatcttct

SEQ ID NO: 462680 - DNA, 15 bp, Homo sapiens
cctcacaacatcttc

SEQ ID NO: 462681 - DNA, 15 bp, Homo sapiens
tcctcacaacatctt

SEQ ID NO: 462682 - DNA, 15 bp, Homo sapiens
ctcctcacaacatct

SEQ ID NO: 462683 - DNA, 15 bp, Homo sapiens
tctcctcacaacatc

SEQ ID NO: 462684 - DNA, 15 bp, Homo sapiens
gtctcctcacaacat

SEQ ID NO: 462685 - DNA, 15 bp, Homo sapiens
tgtctcctcacaaca

SEQ ID NO: 462686 - DNA, 15 bp, Homo sapiens
ctgtctcctcacaac

SEQ ID NO: 462687 - DNA, 15 bp, Homo sapiens
cctgtctcctcacaa

SEQ ID NO: 462688 - DNA, 15 bp, Homo sapiens
acctgtctcctcaca

SEQ ID NO: 462689 - DNA, 15 bp, Homo sapiens
aacctgtctcctcac

SEQ ID NO: 462690 - DNA, 15 bp, Homo sapiens
gaacctgtctcctca

SEQ ID NO: 462691 - DNA, 15 bp, Homo sapiens
agaacctgtctcctc

SEQ ID NO: 462692 - DNA, 15 bp, Homo sapiens
tagaacctgtctcct

SEQ ID NO: 462693 - DNA, 15 bp, Homo sapiens
ctagaacctgtctcc

SEQ ID NO: 462694 - DNA, 15 bp, Homo sapiens
actagaacctgtctc

SEQ ID NO: 462695 - DNA, 15 bp, Homo sapiens
gactagaacctgtct

SEQ ID NO: 462696 - DNA, 15 bp, Homo sapiens
ggactagaacctgtc

SEQ ID NO: 462697 - DNA, 15 bp, Homo sapiens
aggactagaacctgt

SEQ ID NO: 462698 - DNA, 15 bp, Homo sapiens
taggactagaacctg

SEQ ID NO: 462699 - DNA, 15 bp, Homo sapiens
ctaggactagaacct

SEQ ID NO: 462700 - DNA, 15 bp, Homo sapiens
tctaggactagaacc

SEQ ID NO: 462701 - DNA, 15 bp, Homo sapiens
ctctaggactagaac

SEQ ID NO: 462702 - DNA, 15 bp, Homo sapiens
actctaggactagaa

SEQ ID NO: 462703 - DNA, 15 bp, Homo sapiens
cactctaggactaga

SEQ ID NO: 462704 - DNA, 15 bp, Homo sapiens
tcactctaggactag

SEQ ID NO: 462705 - DNA, 15 bp, Homo sapiens
atcactctaggacta

SEQ ID NO: 462706 - DNA, 15 bp, Homo sapiens
aatcactctaggact

SEQ ID NO: 462707 - DNA, 15 bp, Homo sapiens
aaatcactctaggac

SEQ ID NO: 462708 - DNA, 15 bp, Homo sapiens
taaatcactctagga

SEQ ID NO: 462709 - DNA, 15 bp, Homo sapiens
ataaatcactctagg

SEQ ID NO: 462710 - DNA, 15 bp, Homo sapiens
gataaatcactctag

SEQ ID NO: 462711 - DNA, 15 bp, Homo sapiens
ggataaatcactcta

SEQ ID NO: 462712 - DNA, 15 bp, Homo sapiens
aggataaatcactct

SEQ ID NO: 462713 - DNA, 15 bp, Homo sapiens
aaggataaatcactc

SEQ ID NO: 462714 - DNA, 15 bp, Homo sapiens
aaaggataaatcact

SEQ ID NO: 462715 - DNA, 15 bp, Homo sapiens
gaaaggataaatcac

SEQ ID NO: 462716 - DNA, 15 bp, Homo sapiens
agaaaggataaatca

SEQ ID NO: 462717 - DNA, 15 bp, Homo sapiens
gagaaaggataaatc

SEQ ID NO: 462718 - DNA, 15 bp, Homo sapiens
cgagaaaggataaat

SEQ ID NO: 462719 - DNA, 15 bp, Homo sapiens
acgagaaaggataaa

SEQ ID NO: 462720 - DNA, 15 bp, Homo sapiens
tacgagaaaggataa

SEQ ID NO: 462721 - DNA, 15 bp, Homo sapiens
gtacgagaaaggata

SEQ ID NO: 462722 - DNA, 15 bp, Homo sapiens
tgtacgagaaaggat

SEQ ID NO: 462723 - DNA, 15 bp, Homo sapiens
ctgtacgagaaagga

SEQ ID NO: 462724 - DNA, 15 bp, Homo sapiens
tctgtacgagaaagg

SEQ ID NO: 462725 - DNA, 15 bp, Homo sapiens
atctgtacgagaaag

SEQ ID NO: 462726 - DNA, 15 bp, Homo sapiens
aatctgtacgagaaa

SEQ ID NO: 462727 - DNA, 15 bp, Homo sapiens
aaatctgtacgagaa

SEQ ID NO: 462728 - DNA, 15 bp, Homo sapiens
gaaatctgtacgaga

SEQ ID NO: 462729 - DNA, 15 bp, Homo sapiens
ggaaatctgtacgag

SEQ ID NO: 462730 - DNA, 15 bp, Homo sapiens
tggaaatctgtacga

SEQ ID NO: 462731 - DNA, 15 bp, Homo sapiens
ctggaaatctgtacg

SEQ ID NO: 462732 - DNA, 15 bp, Homo sapiens
cctggaaatctgtac

SEQ ID NO: 462733 - DNA, 15 bp, Homo sapiens
acctggaaatctgta

SEQ ID NO: 462734 - DNA, 15 bp, Homo sapiens
tacctggaaatctgt

SEQ ID NO: 462735 - DNA, 15 bp, Homo sapiens
atacctggaaatctg

SEQ ID NO: 462736 - DNA, 15 bp, Homo sapiens
aatacctggaaatct

SEQ ID NO: 462737 - DNA, 15 bp, Homo sapiens
aaatacctggaaatc

SEQ ID NO: 462738 - DNA, 15 bp, Homo sapiens
caaatacctggaaat

SEQ ID NO: 462739 - DNA, 15 bp, Homo sapiens
tcaaatacctggaaa

SEQ ID NO: 462740 - DNA, 15 bp, Homo sapiens
ctcaaatacctggaa

SEQ ID NO: 462741 - DNA, 15 bp, Homo sapiens
cctcaaatacctgga

SEQ ID NO: 462742 - DNA, 15 bp, Homo sapiens
ccctcaaatacctgg

SEQ ID NO: 462743 - DNA, 15 bp, Homo sapiens
cccctcaaatacctg

SEQ ID NO: 462744 - DNA, 15 bp, Homo sapiens
gcccctcaaatacct

SEQ ID NO: 462745 - DNA, 15 bp, Homo sapiens
ggcccctcaaatacc

SEQ ID NO: 462746 - DNA, 15 bp, Homo sapiens
tggcccctcaaatac

SEQ ID NO: 462747 - DNA, 15 bp, Homo sapiens
gtggcccctcaaata

SEQ ID NO: 462748 - DNA, 15 bp, Homo sapiens
agtggcccctcaaat

SEQ ID NO: 462749 - DNA, 15 bp, Homo sapiens
gagtggcccctcaaa

SEQ ID NO: 462750 - DNA, 15 bp, Homo sapiens
agagtggcccctcaa

SEQ ID NO: 462751 - DNA, 15 bp, Homo sapiens
aagagtggcccctca

SEQ ID NO: 462752 - DNA, 15 bp, Homo sapiens
gaagagtggcccctc

SEQ ID NO: 462753 - DNA, 15 bp, Homo sapiens
agaagagtggcccct

SEQ ID NO: 462754 - DNA, 15 bp, Homo sapiens
cagaagagtggcccc

SEQ ID NO: 462755 - DNA, 15 bp, Homo sapiens
acagaagagtggccc

SEQ ID NO: 462756 - DNA, 15 bp, Homo sapiens
tacagaagagtggcc

SEQ ID NO: 462757 - DNA, 15 bp, Homo sapiens
ttacagaagagtggc

SEQ ID NO: 462758 - DNA, 15 bp, Homo sapiens
attacagaagagtgg

SEQ ID NO: 462759 - DNA, 15 bp, Homo sapiens
aattacagaagagtg

SEQ ID NO: 462760 - DNA, 15 bp, Homo sapiens
gaattacagaagagt

SEQ ID NO: 462761 - DNA, 15 bp, Homo sapiens
tgaattacagaagag

SEQ ID NO: 462762 - DNA, 15 bp, Homo sapiens
atgaattacagaaga

SEQ ID NO: 462763 - DNA, 15 bp, Homo sapiens
catgaattacagaag

SEQ ID NO: 462764 - DNA, 15 bp, Homo sapiens
acatgaattacagaa

SEQ ID NO: 462765 - DNA, 15 bp, Homo sapiens
aacatgaattacaga

SEQ ID NO: 462766 - DNA, 15 bp, Homo sapiens
aaacatgaattacag

SEQ ID NO: 462767 - DNA, 15 bp, Homo sapiens
aaaacatgaattaca

SEQ ID NO: 462768 - DNA, 15 bp, Homo sapiens
aaaaacatgaattac

SEQ ID NO: 462769 - DNA, 15 bp, Homo sapiens
gaaaaacatgaatta

SEQ ID NO: 462770 - DNA, 15 bp, Homo sapiens
agaaaaacatgaatt

SEQ ID NO: 462771 - DNA, 15 bp, Homo sapiens
gagaaaaacatgaat

SEQ ID NO: 462772 - DNA, 15 bp, Homo sapiens
agagaaaaacatgaa

SEQ ID NO: 462773 - DNA, 15 bp, Homo sapiens
gagagaaaaacatga

SEQ ID NO: 462774 - DNA, 15 bp, Homo sapiens
ggagagaaaaacatg

SEQ ID NO: 462775 - DNA, 15 bp, Homo sapiens
aggagagaaaaacat

SEQ ID NO: 462776 - DNA, 15 bp, Homo sapiens
taggagagaaaaaca

SEQ ID NO: 462777 - DNA, 15 bp, Homo sapiens
ttaggagagaaaaac

SEQ ID NO: 462778 - DNA, 15 bp, Homo sapiens
gttaggagagaaaaa

SEQ ID NO: 462779 - DNA, 15 bp, Homo sapiens
ggttaggagagaaaa

SEQ ID NO: 462780 - DNA, 15 bp, Homo sapiens
aggttaggagagaaa

SEQ ID NO: 462781 - DNA, 15 bp, Homo sapiens
gaggttaggagagaa

SEQ ID NO: 462782 - DNA, 15 bp, Homo sapiens
tgaggttaggagaga

SEQ ID NO: 462783 - DNA, 15 bp, Homo sapiens
gtgaggttaggagag

SEQ ID NO: 462784 - DNA, 15 bp, Homo sapiens
agtgaggttaggaga

SEQ ID NO: 462785 - DNA, 15 bp, Homo sapiens
gagtgaggttaggag

SEQ ID NO: 462786 - DNA, 15 bp, Homo sapiens
ggagtgaggttagga

SEQ ID NO: 462787 - DNA, 15 bp, Homo sapiens
aggagtgaggttagg

SEQ ID NO: 462788 - DNA, 15 bp, Homo sapiens
caggagtgaggttag

SEQ ID NO: 462789 - DNA, 15 bp, Homo sapiens
acaggagtgaggtta

SEQ ID NO: 462790 - DNA, 15 bp, Homo sapiens
aacaggagtgaggtt

SEQ ID NO: 462791 - DNA, 15 bp, Homo sapiens
caacaggagtgaggt

SEQ ID NO: 462792 - DNA, 15 bp, Homo sapiens
gcaacaggagtgagg

SEQ ID NO: 462793 - DNA, 15 bp, Homo sapiens
ggcaacaggagtgag

SEQ ID NO: 462794 - DNA, 15 bp, Homo sapiens
aggcaacaggagtga

SEQ ID NO: 462795 - DNA, 15 bp, Homo sapiens
caggcaacaggagtg

SEQ ID NO: 462796 - DNA, 15 bp, Homo sapiens
gcaggcaacaggagt

SEQ ID NO: 462797 - DNA, 15 bp, Homo sapiens
tgcaggcaacaggag

SEQ ID NO: 462798 - DNA, 15 bp, Homo sapiens
atgcaggcaacagga

SEQ ID NO: 462799 - DNA, 15 bp, Homo sapiens
gatgcaggcaacagg

SEQ ID NO: 462800 - DNA, 15 bp, Homo sapiens
agatgcaggcaacag

SEQ ID NO: 462801 - DNA, 15 bp, Homo sapiens
aagatgcaggcaaca

SEQ ID NO: 462802 - DNA, 15 bp, Homo sapiens
gaagatgcaggcaac

SEQ ID NO: 462803 - DNA, 15 bp, Homo sapiens
agaagatgcaggcaa

SEQ ID NO: 462804 - DNA, 15 bp, Homo sapiens
aagaagatgcaggca

SEQ ID NO: 462805 - DNA, 15 bp, Homo sapiens
caagaagatgcaggc

SEQ ID NO: 462806 - DNA, 15 bp, Homo sapiens
gcaagaagatgcagg

SEQ ID NO: 462807 - DNA, 15 bp, Homo sapiens
agcaagaagatgcag

SEQ ID NO: 462808 - DNA, 15 bp, Homo sapiens
cagcaagaagatgca

SEQ ID NO: 462809 - DNA, 15 bp, Homo sapiens
tcagcaagaagatgc

SEQ ID NO: 462810 - DNA, 15 bp, Homo sapiens
ctcagcaagaagatg

SEQ ID NO: 462811 - DNA, 15 bp, Homo sapiens
gctcagcaagaagat

SEQ ID NO: 462812 - DNA, 15 bp, Homo sapiens
tgctcagcaagaaga

SEQ ID NO: 462813 - DNA, 15 bp, Homo sapiens
ttgctcagcaagaag

SEQ ID NO: 462814 - DNA, 15 bp, Homo sapiens
tttgctcagcaagaa

SEQ ID NO: 462815 - DNA, 15 bp, Homo sapiens
ttttgctcagcaaga

SEQ ID NO: 462816 - DNA, 15 bp, Homo sapiens
attttgctcagcaag

SEQ ID NO: 462817 - DNA, 15 bp, Homo sapiens
tattttgctcagcaa

SEQ ID NO: 462818 - DNA, 15 bp, Homo sapiens
atattttgctcagca

SEQ ID NO: 462819 - DNA, 15 bp, Homo sapiens
aatattttgctcagc

SEQ ID NO: 462820 - DNA, 15 bp, Homo sapiens
gaatattttgctcag

SEQ ID NO: 462821 - DNA, 15 bp, Homo sapiens
tgaatattttgctca

SEQ ID NO: 462822 - DNA, 15 bp, Homo sapiens
ttgaatattttgctc

SEQ ID NO: 462823 - DNA, 15 bp, Homo sapiens
cttgaatattttgct

SEQ ID NO: 462824 - DNA, 15 bp, Homo sapiens
ccttgaatattttgc

SEQ ID NO: 462825 - DNA, 15 bp, Homo sapiens
accttgaatattttg

SEQ ID NO: 462826 - DNA, 15 bp, Homo sapiens
gaccttgaatatttt

SEQ ID NO: 462827 - DNA, 15 bp, Homo sapiens
agaccttgaatattt

SEQ ID NO: 462828 - DNA, 15 bp, Homo sapiens
aagaccttgaatatt

SEQ ID NO: 462829 - DNA, 15 bp, Homo sapiens
gaagaccttgaatat

SEQ ID NO: 462830 - DNA, 15 bp, Homo sapiens
tgaagaccttgaata

SEQ ID NO: 462831 - DNA, 15 bp, Homo sapiens
ttgaagaccttgaat

SEQ ID NO: 462832 - DNA, 15 bp, Homo sapiens
gttgaagaccttgaa

SEQ ID NO: 462833 - DNA, 15 bp, Homo sapiens
agttgaagaccttga

SEQ ID NO: 462834 - DNA, 15 bp, Homo sapiens
gagttgaagaccttg

SEQ ID NO: 462835 - DNA, 15 bp, Homo sapiens
ggagttgaagacctt

SEQ ID NO: 462836 - DNA, 15 bp, Homo sapiens
aggagttgaagacct

SEQ ID NO: 462837 - DNA, 15 bp, Homo sapiens
gaggagttgaagacc

SEQ ID NO: 462838 - DNA, 15 bp, Homo sapiens
tgaggagttgaagac

SEQ ID NO: 462839 - DNA, 15 bp, Homo sapiens
gtgaggagttgaaga

SEQ ID NO: 462840 - DNA, 15 bp, Homo sapiens
tgtgaggagttgaag

SEQ ID NO: 462841 - DNA, 15 bp, Homo sapiens
gtgtgaggagttgaa

SEQ ID NO: 462842 - DNA, 15 bp, Homo sapiens
ggtgtgaggagttga

SEQ ID NO: 462843 - DNA, 15 bp, Homo sapiens
gggtgtgaggagttg

SEQ ID NO: 462844 - DNA, 15 bp, Homo sapiens
agggtgtgaggagtt

SEQ ID NO: 462845 - DNA, 15 bp, Homo sapiens
cagggtgtgaggagt

SEQ ID NO: 462846 - DNA, 15 bp, Homo sapiens
ccagggtgtgaggag

SEQ ID NO: 462847 - DNA, 15 bp, Homo sapiens
accagggtgtgagga

SEQ ID NO: 462848 - DNA, 15 bp, Homo sapiens
aaccagggtgtgagg

SEQ ID NO: 462849 - DNA, 15 bp, Homo sapiens
caaccagggtgtgag

SEQ ID NO: 462850 - DNA, 15 bp, Homo sapiens
acaaccagggtgtga

SEQ ID NO: 462851 - DNA, 15 bp, Homo sapiens
gacaaccagggtgtg

SEQ ID NO: 462852 - DNA, 15 bp, Homo sapiens
ggacaaccagggtgt

SEQ ID NO: 462853 - DNA, 15 bp, Homo sapiens
gggacaaccagggtg

SEQ ID NO: 462854 - DNA, 15 bp, Homo sapiens
agggacaaccagggt

SEQ ID NO: 462855 - DNA, 15 bp, Homo sapiens
gagggacaaccaggg

SEQ ID NO: 462856 - DNA, 15 bp, Homo sapiens
ggagggacaaccagg

SEQ ID NO: 462857 - DNA, 15 bp, Homo sapiens
gggagggacaaccag

SEQ ID NO: 462858 - DNA, 15 bp, Homo sapiens
agggagggacaacca

SEQ ID NO: 462859 - DNA, 15 bp, Homo sapiens
cagggagggacaacc

SEQ ID NO: 462860 - DNA, 15 bp, Homo sapiens
ccagggagggacaac

SEQ ID NO: 462861 - DNA, 15 bp, Homo sapiens
tccagggagggacaa

SEQ ID NO: 462862 - DNA, 15 bp, Homo sapiens
atccagggagggaca

SEQ ID NO: 462863 - DNA, 15 bp, Homo sapiens
catccagggagggac

SEQ ID NO: 462864 - DNA, 15 bp, Homo sapiens
acatccagggaggga

SEQ ID NO: 462865 - DNA, 15 bp, Homo sapiens
cacatccagggaggg

SEQ ID NO: 462866 - DNA, 15 bp, Homo sapiens
acacatccagggagg

SEQ ID NO: 462867 - DNA, 15 bp, Homo sapiens
ggagtagctgggatt

SEQ ID NO: 462868 - DNA, 15 bp, Homo sapiens
tggagtagctgggat

SEQ ID NO: 462869 - DNA, 15 bp, Homo sapiens
ctggagtagctggga

SEQ ID NO: 462870 - DNA, 15 bp, Homo sapiens
tctggagtagctggg

SEQ ID NO: 462871 - DNA, 15 bp, Homo sapiens
ctctggagtagctgg

SEQ ID NO: 462872 - DNA, 15 bp, Homo sapiens
cctctggagtagctg

SEQ ID NO: 462873 - DNA, 15 bp, Homo sapiens
gcctctggagtagct

SEQ ID NO: 462874 - DNA, 15 bp, Homo sapiens
agcctctggagtagc

SEQ ID NO: 462875 - DNA, 15 bp, Homo sapiens
cagcctctggagtag

SEQ ID NO: 462876 - DNA, 15 bp, Homo sapiens
tcagcctctggagta

SEQ ID NO: 462877 - DNA, 15 bp, Homo sapiens
ctcagcctctggagt

SEQ ID NO: 462878 - DNA, 15 bp, Homo sapiens
cctcagcctctggag

SEQ ID NO: 462879 - DNA, 15 bp, Homo sapiens
gcctcagcctctgga

SEQ ID NO: 462880 - DNA, 15 bp, Homo sapiens
tgcctcagcctctgg

SEQ ID NO: 462881 - DNA, 15 bp, Homo sapiens
atgcctcagcctctg

SEQ ID NO: 462882 - DNA, 15 bp, Homo sapiens
catgcctcagcctct

SEQ ID NO: 462883 - DNA, 15 bp, Homo sapiens
tcatgcctcagcctc

SEQ ID NO: 462884 - DNA, 15 bp, Homo sapiens
ctcatgcctcagcct

SEQ ID NO: 462885 - DNA, 15 bp, Homo sapiens
tctcatgcctcagcc

SEQ ID NO: 462886 - DNA, 15 bp, Homo sapiens
ttctcatgcctcagc

SEQ ID NO: 462887 - DNA, 15 bp, Homo sapiens
attctcatgcctcag

SEQ ID NO: 462888 - DNA, 15 bp, Homo sapiens
gattctcatgcctca

SEQ ID NO: 462889 - DNA, 15 bp, Homo sapiens
tgattctcatgcctc

SEQ ID NO: 462890 - DNA, 15 bp, Homo sapiens
gtgattctcatgcct

SEQ ID NO: 462891 - DNA, 15 bp, Homo sapiens
agtgattctcatgcc

SEQ ID NO: 462892 - DNA, 15 bp, Homo sapiens
aagtgattctcatgc

SEQ ID NO: 462893 - DNA, 15 bp, Homo sapiens
caagtgattctcatg

SEQ ID NO: 462894 - DNA, 15 bp, Homo sapiens
tcaagtgattctcat

SEQ ID NO: 462895 - DNA, 15 bp, Homo sapiens
ttcaagtgattctca

SEQ ID NO: 462896 - DNA, 15 bp, Homo sapiens
agttcaagtgattct

SEQ ID NO: 462897 - DNA, 15 bp, Homo sapiens
gagttcaagtgattc

SEQ ID NO: 462898 - DNA, 15 bp, Homo sapiens
tgagttcaagtgatt

SEQ ID NO: 462899 - DNA, 15 bp, Homo sapiens
ctgagttcaagtgat

SEQ ID NO: 462900 - DNA, 15 bp, Homo sapiens
cctgagttcaagtga

SEQ ID NO: 462901 - DNA, 15 bp, Homo sapiens
tcctgagttcaagtg

SEQ ID NO: 462902 - DNA, 15 bp, Homo sapiens
ctcctgagttcaagt

SEQ ID NO: 462903 - DNA, 15 bp, Homo sapiens
tctcctgagttcaag

SEQ ID NO: 462904 - DNA, 15 bp, Homo sapiens
atctcctgagttcaa

SEQ ID NO: 462905 - DNA, 15 bp, Homo sapiens
catctcctgagttca

SEQ ID NO: 462906 - DNA, 15 bp, Homo sapiens
ccatctcctgagttc

SEQ ID NO: 462907 - DNA, 15 bp, Homo sapiens
tccatctcctgagtt

SEQ ID NO: 462908 - DNA, 15 bp, Homo sapiens
ctccatctcctgagt

SEQ ID NO: 462909 - DNA, 15 bp, Homo sapiens
cctccatctcctgag

SEQ ID NO: 462910 - DNA, 15 bp, Homo sapiens
acctccatctcctga

SEQ ID NO: 462911 - DNA, 15 bp, Homo sapiens
aacctccatctcctg

SEQ ID NO: 462912 - DNA, 15 bp, Homo sapiens
caacctccatctcct

SEQ ID NO: 462913 - DNA, 15 bp, Homo sapiens
gcaacctccatctcc

SEQ ID NO: 462914 - DNA, 15 bp, Homo sapiens
tgcaacctccatctc

SEQ ID NO: 462915 - DNA, 15 bp, Homo sapiens
ctgcaacctccatct

SEQ ID NO: 462916 - DNA, 15 bp, Homo sapiens
actgcaacctccatc

SEQ ID NO: 462917 - DNA, 15 bp, Homo sapiens
cactgcaacctccat

SEQ ID NO: 462918 - DNA, 15 bp, Homo sapiens
accatctcagctcac

SEQ ID NO: 462919 - DNA, 15 bp, Homo sapiens
caccatctcagctca

SEQ ID NO: 462920 - DNA, 15 bp, Homo sapiens
gcaccatctcagctc

SEQ ID NO: 462921 - DNA, 15 bp, Homo sapiens
ggcaccatctcagct

SEQ ID NO: 462922 - DNA, 15 bp, Homo sapiens
tggcaccatctcagc

SEQ ID NO: 462923 - DNA, 15 bp, Homo sapiens
gtggcaccatctcag

SEQ ID NO: 462924 - DNA, 15 bp, Homo sapiens
agtggcaccatctca

SEQ ID NO: 462925 - DNA, 15 bp, Homo sapiens
cagtggcaccatctc

SEQ ID NO: 462926 - DNA, 15 bp, Homo sapiens
gcagtggcaccatct

SEQ ID NO: 462927 - DNA, 15 bp, Homo sapiens
tgcagtggcaccatc

SEQ ID NO: 462928 - DNA, 15 bp, Homo sapiens
gtgcagtggcaccat

SEQ ID NO: 462929 - DNA, 15 bp, Homo sapiens
agtgcagtggcacca

SEQ ID NO: 462930 - DNA, 15 bp, Homo sapiens
gagtgcagtggcacc

SEQ ID NO: 462931 - DNA, 15 bp, Homo sapiens
agagtgcagtggcac

SEQ ID NO: 462932 - DNA, 15 bp, Homo sapiens
gcccaggctagagtg

SEQ ID NO: 462933 - DNA, 15 bp, Homo sapiens
tgcccaggctagagt

SEQ ID NO: 462934 - DNA, 15 bp, Homo sapiens
ttgcccaggctagag

SEQ ID NO: 462935 - DNA, 15 bp, Homo sapiens
gttgcccaggctaga

SEQ ID NO: 462936 - DNA, 15 bp, Homo sapiens
tgttgcccaggctag

SEQ ID NO: 462937 - DNA, 15 bp, Homo sapiens
ctgttgcccaggcta

SEQ ID NO: 462938 - DNA, 15 bp, Homo sapiens
atctcactctgttgc

SEQ ID NO: 462939 - DNA, 15 bp, Homo sapiens
aatctcactctgttg

SEQ ID NO: 462940 - DNA, 15 bp, Homo sapiens
gaatctcactctgtt

SEQ ID NO: 462941 - DNA, 15 bp, Homo sapiens
agaatctcactctgt

SEQ ID NO: 462942 - DNA, 15 bp, Homo sapiens
cagaatctcactctg

SEQ ID NO: 462943 - DNA, 15 bp, Homo sapiens
acagaatctcactct

SEQ ID NO: 462944 - DNA, 15 bp, Homo sapiens
gacagaatctcactc

SEQ ID NO: 462945 - DNA, 15 bp, Homo sapiens
agacagaatctcact

SEQ ID NO: 462946 - DNA, 15 bp, Homo sapiens
gagacagaatctcac

SEQ ID NO: 462947 - DNA, 15 bp, Homo sapiens
tgagacagaatctca

SEQ ID NO: 462948 - DNA, 15 bp, Homo sapiens
ttgagacagaatctc

SEQ ID NO: 462949 - DNA, 15 bp, Homo sapiens
gtttgagacagaatc

SEQ ID NO: 462950 - DNA, 15 bp, Homo sapiens
tgtttgagacagaat

SEQ ID NO: 462951 - DNA, 15 bp, Homo sapiens
ttgtttgagacagaa

SEQ ID NO: 462952 - DNA, 15 bp, Homo sapiens
gttgtttgagacaga

SEQ ID NO: 462953 - DNA, 15 bp, Homo sapiens
tgttgtttgagacag

SEQ ID NO: 462954 - DNA, 15 bp, Homo sapiens
ttgttgtttgagaca

SEQ ID NO: 462955 - DNA, 15 bp, Homo sapiens
gttgttgtttgagac

SEQ ID NO: 462956 - DNA, 15 bp, Homo sapiens
tgttgttgtttgaga

SEQ ID NO: 462957 - DNA, 15 bp, Homo sapiens
ttgttgttgtttgag

SEQ ID NO: 462958 - DNA, 15 bp, Homo sapiens
gttgttgttgtttga

SEQ ID NO: 462959 - DNA, 15 bp, Homo sapiens
tgttgttgttgtttg

SEQ ID NO: 462960 - DNA, 15 bp, Homo sapiens
ttgttgttgttgttt

SEQ ID NO: 462961 - DNA, 15 bp, Homo sapiens
gttgttgttgttgtt

SEQ ID NO: 462962 - DNA, 15 bp, Homo sapiens
tgttgttgttgttgt

SEQ ID NO: 462963 - DNA, 15 bp, Homo sapiens
ttgttgttgttgttg

SEQ ID NO: 462964 - DNA, 15 bp, Homo sapiens
attgttgttgttgtt

SEQ ID NO: 462965 - DNA, 15 bp, Homo sapiens
tattgttgttgttgt

SEQ ID NO: 462966 - DNA, 15 bp, Homo sapiens
ttattgttgttgttg

SEQ ID NO: 462967 - DNA, 15 bp, Homo sapiens
gttattgttgttgtt

SEQ ID NO: 462968 - DNA, 15 bp, Homo sapiens
tgttattgttgttgt

SEQ ID NO: 462969 - DNA, 15 bp, Homo sapiens
ttgttattgttgttg

SEQ ID NO: 462970 - DNA, 15 bp, Homo sapiens
tttgttattgttgtt

SEQ ID NO: 462971 - DNA, 15 bp, Homo sapiens
ttttgttattgttgt

SEQ ID NO: 462972 - DNA, 15 bp, Homo sapiens
gttttgttattgttg

SEQ ID NO: 462973 - DNA, 15 bp, Homo sapiens
tgttttgttattgtt

SEQ ID NO: 462974 - DNA, 15 bp, Homo sapiens
atgttttgttattgt

SEQ ID NO: 462975 - DNA, 15 bp, Homo sapiens
gatgttttgttattg

SEQ ID NO: 462976 - DNA, 15 bp, Homo sapiens
agatgttttgttatt

SEQ ID NO: 462977 - DNA, 15 bp, Homo sapiens
gagatgttttgttat

SEQ ID NO: 462978 - DNA, 15 bp, Homo sapiens
agagatgttttgtta

SEQ ID NO: 462979 - DNA, 15 bp, Homo sapiens
aagagatgttttgtt

SEQ ID NO: 462980 - DNA, 15 bp, Homo sapiens
aaagagatgttttgt

SEQ ID NO: 462981 - DNA, 15 bp, Homo sapiens
aaaagagatgttttg

SEQ ID NO: 462982 - DNA, 15 bp, Homo sapiens
gaaaagagatgtttt

SEQ ID NO: 462983 - DNA, 15 bp, Homo sapiens
tgaaaagagatgttt

SEQ ID NO: 462984 - DNA, 15 bp, Homo sapiens
ctgaaaagagatgtt

SEQ ID NO: 462985 - DNA, 15 bp, Homo sapiens
cctgaaaagagatgt

SEQ ID NO: 462986 - DNA, 15 bp, Homo sapiens
gcctgaaaagagatg

SEQ ID NO: 462987 - DNA, 15 bp, Homo sapiens
ggcctgaaaagagat

SEQ ID NO: 462988 - DNA, 15 bp, Homo sapiens
tggcctgaaaagaga

SEQ ID NO: 462989 - DNA, 15 bp, Homo sapiens
ctggcctgaaaagag

SEQ ID NO: 462990 - DNA, 15 bp, Homo sapiens
acctggcctgaaaag

SEQ ID NO: 462991 - DNA, 15 bp, Homo sapiens
tacctggcctgaaaa

SEQ ID NO: 462992 - DNA, 15 bp, Homo sapiens
gtacctggcctgaaa

SEQ ID NO: 462993 - DNA, 15 bp, Homo sapiens
agtacctggcctgaa

SEQ ID NO: 462994 - DNA, 15 bp, Homo sapiens
cagtacctggcctga

SEQ ID NO: 462995 - DNA, 15 bp, Homo sapiens
acagtacctggcctg

SEQ ID NO: 462996 - DNA, 15 bp, Homo sapiens
cacagtacctggcct

SEQ ID NO: 462997 - DNA, 15 bp, Homo sapiens
ccacagtacctggcc

SEQ ID NO: 462998 - DNA, 15 bp, Homo sapiens
gccacagtacctggc

SEQ ID NO: 462999 - DNA, 15 bp, Homo sapiens
agccacagtacctgg

SEQ ID NO: 463000 - DNA, 15 bp, Homo sapiens
gagccacagtacctg

SEQ ID NO: 463001 - DNA, 15 bp, Homo sapiens
tgagccacagtacct

SEQ ID NO: 463002 - DNA, 15 bp, Homo sapiens
gtgagccacagtacc

SEQ ID NO: 463003 - DNA, 15 bp, Homo sapiens
cgtgagccacagtac

SEQ ID NO: 463004 - DNA, 15 bp, Homo sapiens
gcgtgagccacagta

SEQ ID NO: 463005 - DNA, 15 bp, Homo sapiens
ggcgtgagccacagt

SEQ ID NO: 463006 - DNA, 15 bp, Homo sapiens
aggcgtgagccacag

SEQ ID NO: 463007 - DNA, 15 bp, Homo sapiens
caggcgtgagccaca

SEQ ID NO: 463008 - DNA, 15 bp, Homo sapiens
tttggcctcccaaag

SEQ ID NO: 463009 - DNA, 15 bp, Homo sapiens
ttttggcctcccaaa

SEQ ID NO: 463010 - DNA, 15 bp, Homo sapiens
gttttggcctcccaa

SEQ ID NO: 463011 - DNA, 15 bp, Homo sapiens
tgttttggcctccca

SEQ ID NO: 463012 - DNA, 15 bp, Homo sapiens
ctgttttggcctccc

SEQ ID NO: 463013 - DNA, 15 bp, Homo sapiens
cctgttttggcctcc

SEQ ID NO: 463014 - DNA, 15 bp, Homo sapiens
tcctgttttggcctc

SEQ ID NO: 463015 - DNA, 15 bp, Homo sapiens
ctcctgttttggcct

SEQ ID NO: 463016 - DNA, 15 bp, Homo sapiens
cctcctgttttggcc

SEQ ID NO: 463017 - DNA, 15 bp, Homo sapiens
ccctcctgttttggc

SEQ ID NO: 463018 - DNA, 15 bp, Homo sapiens
accctcctgttttgg

SEQ ID NO: 463019 - DNA, 15 bp, Homo sapiens
gaccctcctgttttg

SEQ ID NO: 463020 - DNA, 15 bp, Homo sapiens
cgaccctcctgtttt

SEQ ID NO: 463021 - DNA, 15 bp, Homo sapiens
gcgaccctcctgttt

SEQ ID NO: 463022 - DNA, 15 bp, Homo sapiens
agcgaccctcctgtt

SEQ ID NO: 463023 - DNA, 15 bp, Homo sapiens
aagcgaccctcctgt

SEQ ID NO: 463024 - DNA, 15 bp, Homo sapiens
caagcgaccctcctg

SEQ ID NO: 463025 - DNA, 15 bp, Homo sapiens
tcaagcgaccctcct

SEQ ID NO: 463026 - DNA, 15 bp, Homo sapiens
ctcaagcgaccctcc

SEQ ID NO: 463027 - DNA, 15 bp, Homo sapiens
tctcaagcgaccctc

SEQ ID NO: 463028 - DNA, 15 bp, Homo sapiens
gtctcaagcgaccct

SEQ ID NO: 463029 - DNA, 15 bp, Homo sapiens
ggtctcaagcgaccc

SEQ ID NO: 463030 - DNA, 15 bp, Homo sapiens
tggtctcaagcgacc

SEQ ID NO: 463031 - DNA, 15 bp, Homo sapiens
ctggtctcaagcgac

SEQ ID NO: 463032 - DNA, 15 bp, Homo sapiens
cctggtctcaagcga

SEQ ID NO: 463033 - DNA, 15 bp, Homo sapiens
tcctggtctcaagcg

SEQ ID NO: 463034 - DNA, 15 bp, Homo sapiens
ctcctggtctcaagc

SEQ ID NO: 463035 - DNA, 15 bp, Homo sapiens
actcctggtctcaag

SEQ ID NO: 463036 - DNA, 15 bp, Homo sapiens
aactcctggtctcaa

SEQ ID NO: 463037 - DNA, 15 bp, Homo sapiens
aaactcctggtctca

SEQ ID NO: 463038 - DNA, 15 bp, Homo sapiens
caaactcctggtctc

SEQ ID NO: 463039 - DNA, 15 bp, Homo sapiens
tcaaactcctggtct

SEQ ID NO: 463040 - DNA, 15 bp, Homo sapiens
ctcaaactcctggtc

SEQ ID NO: 463041 - DNA, 15 bp, Homo sapiens
tctcaaactcctggt

SEQ ID NO: 463042 - DNA, 15 bp, Homo sapiens
ctgcccaagctggtc

SEQ ID NO: 463043 - DNA, 15 bp, Homo sapiens
gctgcccaagctggt

SEQ ID NO: 463044 - DNA, 15 bp, Homo sapiens
agctgcccaagctgg

SEQ ID NO: 463045 - DNA, 15 bp, Homo sapiens
cagctgcccaagctg

SEQ ID NO: 463046 - DNA, 15 bp, Homo sapiens
ccagctgcccaagct

SEQ ID NO: 463047 - DNA, 15 bp, Homo sapiens
accagctgcccaagc

SEQ ID NO: 463048 - DNA, 15 bp, Homo sapiens
gaccagctgcccaag

SEQ ID NO: 463049 - DNA, 15 bp, Homo sapiens
agaccagctgcccaa

SEQ ID NO: 463050 - DNA, 15 bp, Homo sapiens
gagaccagctgccca

SEQ ID NO: 463051 - DNA, 15 bp, Homo sapiens
agagaccagctgccc

SEQ ID NO: 463052 - DNA, 15 bp, Homo sapiens
tagagaccagctgcc

SEQ ID NO: 463053 - DNA, 15 bp, Homo sapiens
atagagaccagctgc

SEQ ID NO: 463054 - DNA, 15 bp, Homo sapiens
aatagagaccagctg

SEQ ID NO: 463055 - DNA, 15 bp, Homo sapiens
aaatagagaccagct

SEQ ID NO: 463056 - DNA, 15 bp, Homo sapiens
caaatagagaccagc

SEQ ID NO: 463057 - DNA, 15 bp, Homo sapiens
tcaaatagagaccag

SEQ ID NO: 463058 - DNA, 15 bp, Homo sapiens
ttcaaatagagacca

SEQ ID NO: 463059 - DNA, 15 bp, Homo sapiens
gttcaaatagagacc

SEQ ID NO: 463060 - DNA, 15 bp, Homo sapiens
tgttcaaatagagac

SEQ ID NO: 463061 - DNA, 15 bp, Homo sapiens
ttgttcaaatagaga

SEQ ID NO: 463062 - DNA, 15 bp, Homo sapiens
tttgttcaaatagag

SEQ ID NO: 463063 - DNA, 15 bp, Homo sapiens
gtttgttcaaataga

SEQ ID NO: 463064 - DNA, 15 bp, Homo sapiens
tgtttgttcaaatag

SEQ ID NO: 463065 - DNA, 15 bp, Homo sapiens
ttgtttgttcaaata

SEQ ID NO: 463066 - DNA, 15 bp, Homo sapiens
tttgtttgttcaaat

SEQ ID NO: 463067 - DNA, 15 bp, Homo sapiens
gtttgtttgttcaaa

SEQ ID NO: 463068 - DNA, 15 bp, Homo sapiens
tgtttgtttgttcaa

SEQ ID NO: 463069 - DNA, 15 bp, Homo sapiens
ttgtttgtttgttca

SEQ ID NO: 463070 - DNA, 15 bp, Homo sapiens
tttgtttgtttgttc

SEQ ID NO: 463071 - DNA, 15 bp, Homo sapiens
gtgtttgtttgtttg

SEQ ID NO: 463072 - DNA, 15 bp, Homo sapiens
tgtgtttgtttgttt

SEQ ID NO: 463073 - DNA, 15 bp, Homo sapiens
ttgtgtttgtttgtt

SEQ ID NO: 463074 - DNA, 15 bp, Homo sapiens
attgtgtttgtttgt

SEQ ID NO: 463075 - DNA, 15 bp, Homo sapiens
tattgtgtttgtttg

SEQ ID NO: 463076 - DNA, 15 bp, Homo sapiens
gtattgtgtttgttt

SEQ ID NO: 463077 - DNA, 15 bp, Homo sapiens
agtattgtgtttgtt

SEQ ID NO: 463078 - DNA, 15 bp, Homo sapiens
gagtattgtgtttgt

SEQ ID NO: 463079 - DNA, 15 bp, Homo sapiens
agagtattgtgtttg

SEQ ID NO: 463080 - DNA, 15 bp, Homo sapiens
aagagtattgtgttt

SEQ ID NO: 463081 - DNA, 15 bp, Homo sapiens
aaagagtattgtgtt

SEQ ID NO: 463082 - DNA, 15 bp, Homo sapiens
aaaagagtattgtgt

SEQ ID NO: 463083 - DNA, 15 bp, Homo sapiens
gaaaagagtattgtg

SEQ ID NO: 463084 - DNA, 15 bp, Homo sapiens
tgaaaagagtattgt

SEQ ID NO: 463085 - DNA, 15 bp, Homo sapiens
atgaaaagagtattg

SEQ ID NO: 463086 - DNA, 15 bp, Homo sapiens
tatgaaaagagtatt

SEQ ID NO: 463087 - DNA, 15 bp, Homo sapiens
ctatgaaaagagtat

SEQ ID NO: 463088 - DNA, 15 bp, Homo sapiens
tctatgaaaagagta

SEQ ID NO: 463089 - DNA, 15 bp, Homo sapiens
ttctatgaaaagagt

SEQ ID NO: 463090 - DNA, 15 bp, Homo sapiens
tttctatgaaaagag

SEQ ID NO: 463091 - DNA, 15 bp, Homo sapiens
ttttctatgaaaaga

SEQ ID NO: 463092 - DNA, 15 bp, Homo sapiens
tttttctatgaaaag

SEQ ID NO: 463093 - DNA, 15 bp, Homo sapiens
atttttctatgaaaa

SEQ ID NO: 463094 - DNA, 15 bp, Homo sapiens
catttttctatgaaa

SEQ ID NO: 463095 - DNA, 15 bp, Homo sapiens
acatttttctatgaa

SEQ ID NO: 463096 - DNA, 15 bp, Homo sapiens
aacatttttctatga

SEQ ID NO: 463097 - DNA, 15 bp, Homo sapiens
aaacatttttctatg

SEQ ID NO: 463098 - DNA, 15 bp, Homo sapiens
taaacatttttctat

SEQ ID NO: 463099 - DNA, 15 bp, Homo sapiens
gtaaacatttttcta

SEQ ID NO: 463100 - DNA, 15 bp, Homo sapiens
agtaaacatttttct

SEQ ID NO: 463101 - DNA, 15 bp, Homo sapiens
tagtaaacatttttc

SEQ ID NO: 463102 - DNA, 15 bp, Homo sapiens
gtagtaaacattttt

SEQ ID NO: 463103 - DNA, 15 bp, Homo sapiens
tgtagtaaacatttt

SEQ ID NO: 463104 - DNA, 15 bp, Homo sapiens
gtgtagtaaacattt

SEQ ID NO: 463105 - DNA, 15 bp, Homo sapiens
tgtgtagtaaacatt

SEQ ID NO: 463106 - DNA, 15 bp, Homo sapiens
ttgtgtagtaaacat

SEQ ID NO: 463107 - DNA, 15 bp, Homo sapiens
attgtgtagtaaaca

SEQ ID NO: 463108 - DNA, 15 bp, Homo sapiens
tattgtgtagtaaac

SEQ ID NO: 463109 - DNA, 15 bp, Homo sapiens
ttattgtgtagtaaa

SEQ ID NO: 463110 - DNA, 15 bp, Homo sapiens
tttattgtgtagtaa

SEQ ID NO: 463111 - DNA, 15 bp, Homo sapiens
gtttattgtgtagta

SEQ ID NO: 463112 - DNA, 15 bp, Homo sapiens
agtttattgtgtagt

SEQ ID NO: 463113 - DNA, 15 bp, Homo sapiens
aagtttattgtgtag

SEQ ID NO: 463114 - DNA, 15 bp, Homo sapiens
aaagtttattgtgta

SEQ ID NO: 463115 - DNA, 15 bp, Homo sapiens
taaagtttattgtgt

SEQ ID NO: 463116 - DNA, 15 bp, Homo sapiens
ttaaagtttattgtg

SEQ ID NO: 463117 - DNA, 15 bp, Homo sapiens
tttaaagtttattgt

SEQ ID NO: 463118 - DNA, 15 bp, Homo sapiens
ttttaaagtttattg

SEQ ID NO: 463119 - DNA, 15 bp, Homo sapiens
cttttaaagtttatt

SEQ ID NO: 463120 - DNA, 15 bp, Homo sapiens
tcttttaaagtttat

SEQ ID NO: 463121 - DNA, 15 bp, Homo sapiens
ttcttttaaagttta

SEQ ID NO: 463122 - DNA, 15 bp, Homo sapiens
attcttttaaagttt

SEQ ID NO: 463123 - DNA, 15 bp, Homo sapiens
tattcttttaaagtt

SEQ ID NO: 463124 - DNA, 15 bp, Homo sapiens
atattcttttaaagt

SEQ ID NO: 463125 - DNA, 15 bp, Homo sapiens
catattcttttaaag

SEQ ID NO: 463126 - DNA, 15 bp, Homo sapiens
gcatattcttttaaa

SEQ ID NO: 463127 - DNA, 15 bp, Homo sapiens
tgcatattcttttaa

SEQ ID NO: 463128 - DNA, 15 bp, Homo sapiens
ctgcatattctttta

SEQ ID NO: 463129 - DNA, 15 bp, Homo sapiens
gctgcatattctttt

SEQ ID NO: 463130 - DNA, 15 bp, Homo sapiens
agctgcatattcttt

SEQ ID NO: 463131 - DNA, 15 bp, Homo sapiens
cagctgcatattctt

SEQ ID NO: 463132 - DNA, 15 bp, Homo sapiens
acagctgcatattct

SEQ ID NO: 463133 - DNA, 15 bp, Homo sapiens
tacagctgcatattc

SEQ ID NO: 463134 - DNA, 15 bp, Homo sapiens
atacagctgcatatt

SEQ ID NO: 463135 - DNA, 15 bp, Homo sapiens
aatacagctgcatat

SEQ ID NO: 463136 - DNA, 15 bp, Homo sapiens
taatacagctgcata

SEQ ID NO: 463137 - DNA, 15 bp, Homo sapiens
ttaatacagctgcat

SEQ ID NO: 463138 - DNA, 15 bp, Homo sapiens
attaatacagctgca

SEQ ID NO: 463139 - DNA, 15 bp, Homo sapiens
cattaatacagctgc

SEQ ID NO: 463140 - DNA, 15 bp, Homo sapiens
gcattaatacagctg

SEQ ID NO: 463141 - DNA, 15 bp, Homo sapiens
agcattaatacagct

SEQ ID NO: 463142 - DNA, 15 bp, Homo sapiens
tagcattaatacagc

SEQ ID NO: 463143 - DNA, 15 bp, Homo sapiens
atagcattaatacag

SEQ ID NO: 463144 - DNA, 15 bp, Homo sapiens
catagcattaataca

SEQ ID NO: 463145 - DNA, 15 bp, Homo sapiens
tcatagcattaatac

SEQ ID NO: 463146 - DNA, 15 bp, Homo sapiens
gtcatagcattaata

SEQ ID NO: 463147 - DNA, 15 bp, Homo sapiens
agtcatagcattaat

SEQ ID NO: 463148 - DNA, 15 bp, Homo sapiens
gagtcatagcattaa

SEQ ID NO: 463149 - DNA, 15 bp, Homo sapiens
ggagtcatagcatta

SEQ ID NO: 463150 - DNA, 15 bp, Homo sapiens
tggagtcatagcatt

SEQ ID NO: 463151 - DNA, 15 bp, Homo sapiens
ttggagtcatagcat

SEQ ID NO: 463152 - DNA, 15 bp, Homo sapiens
attggagtcatagca

SEQ ID NO: 463153 - DNA, 15 bp, Homo sapiens
cattggagtcatagc

SEQ ID NO: 463154 - DNA, 15 bp, Homo sapiens
acattggagtcatag

SEQ ID NO: 463155 - DNA, 15 bp, Homo sapiens
tacattggagtcata

SEQ ID NO: 463156 - DNA, 15 bp, Homo sapiens
ttacattggagtcat

SEQ ID NO: 463157 - DNA, 15 bp, Homo sapiens
tttacattggagtca

SEQ ID NO: 463158 - DNA, 15 bp, Homo sapiens
ttttacattggagtc

SEQ ID NO: 463159 - DNA, 15 bp, Homo sapiens
tttttacattggagt

SEQ ID NO: 463160 - DNA, 15 bp, Homo sapiens
ttttttacattggag

SEQ ID NO: 463161 - DNA, 15 bp, Homo sapiens
tttttttacattgga

SEQ ID NO: 463162 - DNA, 15 bp, Homo sapiens
ttttttttacattgg

SEQ ID NO: 463163 - DNA, 15 bp, Homo sapiens
tttttttttacattg

SEQ ID NO: 463164 - DNA, 15 bp, Homo sapiens
ttttttttttacatt

SEQ ID NO: 463165 - DNA, 15 bp, Homo sapiens
tttttttttttacat

SEQ ID NO: 463166 - DNA, 15 bp, Homo sapiens
ttttttttttttaca

SEQ ID NO: 463167 - DNA, 15 bp, Homo sapiens
tttttttttttttac

SEQ ID NO: 463168 - DNA, 15 bp, Homo sapiens
attttttttttttta

SEQ ID NO: 463169 - DNA, 15 bp, Homo sapiens
atatttttttttttt

SEQ ID NO: 463170 - DNA, 15 bp, Homo sapiens
tatattttttttttt

SEQ ID NO: 463171 - DNA, 15 bp, Homo sapiens
atatatttttttttt

SEQ ID NO: 463172 - DNA, 15 bp, Homo sapiens
tatatattttttttt

SEQ ID NO: 463173 - DNA, 15 bp, Homo sapiens
atatatatttttttt

SEQ ID NO: 463174 - DNA, 15 bp, Homo sapiens
tatatatattttttt

SEQ ID NO: 463175 - DNA, 15 bp, Homo sapiens
atatatatatttttt

SEQ ID NO: 463176 - DNA, 15 bp, Homo sapiens
tatatatatattttt

SEQ ID NO: 463177 - DNA, 15 bp, Homo sapiens
atatatatatatttt

SEQ ID NO: 463178 - DNA, 15 bp, Homo sapiens
tatatatatatattt

SEQ ID NO: 463179 - DNA, 15 bp, Homo sapiens
atatatatatatatt

SEQ ID NO: 463180 - DNA, 15 bp, Homo sapiens
tatatatatatatat

SEQ ID NO: 463181 - DNA, 15 bp, Homo sapiens
atatatatatatata

SEQ ID NO: 463182 - DNA, 15 bp, Homo sapiens
gtatatatatatata

SEQ ID NO: 463183 - DNA, 15 bp, Homo sapiens
tgtatatatatatat

SEQ ID NO: 463184 - DNA, 15 bp, Homo sapiens
gtgtatatatatata

SEQ ID NO: 463185 - DNA, 15 bp, Homo sapiens
tgtgtatatatatat

SEQ ID NO: 463186 - DNA, 15 bp, Homo sapiens
gtgtgtatatatata

SEQ ID NO: 463187 - DNA, 15 bp, Homo sapiens
tgtgtgtatatatat

SEQ ID NO: 463188 - DNA, 15 bp, Homo sapiens
gtgtgtgtatatata

SEQ ID NO: 463189 - DNA, 15 bp, Homo sapiens
tgtgtgtgtatatat

SEQ ID NO: 463190 - DNA, 15 bp, Homo sapiens
gtgtgtgtgtatata

SEQ ID NO: 463191 - DNA, 15 bp, Homo sapiens
tgtgtgtgtgtatat

SEQ ID NO: 463192 - DNA, 15 bp, Homo sapiens
ttgtgtgtgtgtata

SEQ ID NO: 463193 - DNA, 15 bp, Homo sapiens
tttgtgtgtgtgtat

SEQ ID NO: 463194 - DNA, 15 bp, Homo sapiens
gtttgtgtgtgtgta

SEQ ID NO: 463195 - DNA, 15 bp, Homo sapiens
tgtttgtgtgtgtgt

SEQ ID NO: 463196 - DNA, 15 bp, Homo sapiens
gtgtttgtgtgtgtg

SEQ ID NO: 463197 - DNA, 15 bp, Homo sapiens
tgtgtttgtgtgtgt

SEQ ID NO: 463198 - DNA, 15 bp, Homo sapiens
atgtgtttgtgtgtg

SEQ ID NO: 463199 - DNA, 15 bp, Homo sapiens
aatgtgtttgtgtgt

SEQ ID NO: 463200 - DNA, 15 bp, Homo sapiens
gaatgtgtttgtgtg

SEQ ID NO: 463201 - DNA, 15 bp, Homo sapiens
agaatgtgtttgtgt

SEQ ID NO: 463202 - DNA, 15 bp, Homo sapiens
cagaatgtgtttgtg

SEQ ID NO: 463203 - DNA, 15 bp, Homo sapiens
tcagaatgtgtttgt

SEQ ID NO: 463204 - DNA, 15 bp, Homo sapiens
ttcagaatgtgtttg

SEQ ID NO: 463205 - DNA, 15 bp, Homo sapiens
tttcagaatgtgttt

SEQ ID NO: 463206 - DNA, 15 bp, Homo sapiens
atttcagaatgtgtt

SEQ ID NO: 463207 - DNA, 15 bp, Homo sapiens
tatttcagaatgtgt

SEQ ID NO: 463208 - DNA, 15 bp, Homo sapiens
ctatttcagaatgtg

SEQ ID NO: 463209 - DNA, 15 bp, Homo sapiens
tctatttcagaatgt

SEQ ID NO: 463210 - DNA, 15 bp, Homo sapiens
atctatttcagaatg

SEQ ID NO: 463211 - DNA, 15 bp, Homo sapiens
aatctatttcagaat

SEQ ID NO: 463212 - DNA, 15 bp, Homo sapiens
aaatctatttcagaa

SEQ ID NO: 463213 - DNA, 15 bp, Homo sapiens
taaatctatttcaga

SEQ ID NO: 463214 - DNA, 15 bp, Homo sapiens
ttaaatctatttcag

SEQ ID NO: 463215 - DNA, 15 bp, Homo sapiens
tttaaatctatttca

SEQ ID NO: 463216 - DNA, 15 bp, Homo sapiens
ctttaaatctatttc

SEQ ID NO: 463217 - DNA, 15 bp, Homo sapiens
cctttaaatctattt

SEQ ID NO: 463218 - DNA, 15 bp, Homo sapiens
tcctttaaatctatt

SEQ ID NO: 463219 - DNA, 15 bp, Homo sapiens
ttcctttaaatctat

SEQ ID NO: 463220 - DNA, 15 bp, Homo sapiens
attcctttaaatcta

SEQ ID NO: 463221 - DNA, 15 bp, Homo sapiens
aattcctttaaatct

SEQ ID NO: 463222 - DNA, 15 bp, Homo sapiens
taattcctttaaatc

SEQ ID NO: 463223 - DNA, 15 bp, Homo sapiens
gtaattcctttaaat

SEQ ID NO: 463224 - DNA, 15 bp, Homo sapiens
tgtaattcctttaaa

SEQ ID NO: 463225 - DNA, 15 bp, Homo sapiens
atgtaattcctttaa

SEQ ID NO: 463226 - DNA, 15 bp, Homo sapiens
gatgtaattccttta

SEQ ID NO: 463227 - DNA, 15 bp, Homo sapiens
tgatgtaattccttt

SEQ ID NO: 463228 - DNA, 15 bp, Homo sapiens
ttgatgtaattcctt

SEQ ID NO: 463229 - DNA, 15 bp, Homo sapiens
gttgatgtaattcct

SEQ ID NO: 463230 - DNA, 15 bp, Homo sapiens
tgttgatgtaattcc

SEQ ID NO: 463231 - DNA, 15 bp, Homo sapiens
atgttgatgtaattc

SEQ ID NO: 463232 - DNA, 15 bp, Homo sapiens
catgttgatgtaatt

SEQ ID NO: 463233 - DNA, 15 bp, Homo sapiens
acatgttgatgtaat

SEQ ID NO: 463234 - DNA, 15 bp, Homo sapiens
gacatgttgatgtaa

SEQ ID NO: 463235 - DNA, 15 bp, Homo sapiens
tgacatgttgatgta

SEQ ID NO: 463236 - DNA, 15 bp, Homo sapiens
ttgacatgttgatgt

SEQ ID NO: 463237 - DNA, 15 bp, Homo sapiens
attgacatgttgatg

SEQ ID NO: 463238 - DNA, 15 bp, Homo sapiens
aattgacatgttgat

SEQ ID NO: 463239 - DNA, 15 bp, Homo sapiens
aaattgacatgttga

SEQ ID NO: 463240 - DNA, 15 bp, Homo sapiens
aaaattgacatgttg

SEQ ID NO: 463241 - DNA, 15 bp, Homo sapiens
aaaaattgacatgtt

SEQ ID NO: 463242 - DNA, 15 bp, Homo sapiens
taaaaattgacatgt

SEQ ID NO: 463243 - DNA, 15 bp, Homo sapiens
ataaaaattgacatg

SEQ ID NO: 463244 - DNA, 15 bp, Homo sapiens
aataaaaattgacat

SEQ ID NO: 463245 - DNA, 15 bp, Homo sapiens
aaataaaaattgaca

SEQ ID NO: 463246 - DNA, 15 bp, Homo sapiens
aaaataaaaattgac

SEQ ID NO: 463247 - DNA, 15 bp, Homo sapiens
aaaaataaaaattga

SEQ ID NO: 463248 - DNA, 15 bp, Homo sapiens
aaaaaataaaaattg

SEQ ID NO: 463249 - DNA, 15 bp, Homo sapiens
gaaaaaataaaaatt

SEQ ID NO: 463250 - DNA, 15 bp, Homo sapiens
cgaaaaaataaaaat

SEQ ID NO: 463251 - DNA, 15 bp, Homo sapiens
ccgaaaaaataaaaa

SEQ ID NO: 463252 - DNA, 15 bp, Homo sapiens
tccgaaaaaataaaa

SEQ ID NO: 463253 - DNA, 15 bp, Homo sapiens
ctccgaaaaaataaa

SEQ ID NO: 463254 - DNA, 15 bp, Homo sapiens
tctccgaaaaaataa

SEQ ID NO: 463255 - DNA, 15 bp, Homo sapiens
gtctccgaaaaaata

SEQ ID NO: 463256 - DNA, 15 bp, Homo sapiens
tgtctccgaaaaaat

SEQ ID NO: 463257 - DNA, 15 bp, Homo sapiens
ctgtctccgaaaaaa

SEQ ID NO: 463258 - DNA, 15 bp, Homo sapiens
cctgtctccgaaaaa

SEQ ID NO: 463259 - DNA, 15 bp, Homo sapiens
ccctgtctccgaaaa

SEQ ID NO: 463260 - DNA, 15 bp, Homo sapiens
accctgtctccgaaa

SEQ ID NO: 463261 - DNA, 15 bp, Homo sapiens
gaccctgtctccgaa

SEQ ID NO: 463262 - DNA, 15 bp, Homo sapiens
agaccctgtctccga

SEQ ID NO: 463263 - DNA, 15 bp, Homo sapiens
gagaccctgtctccg

SEQ ID NO: 463264 - DNA, 15 bp, Homo sapiens
cgagaccctgtctcc

SEQ ID NO: 463265 - DNA, 15 bp, Homo sapiens
gcgagaccctgtctc

SEQ ID NO: 463266 - DNA, 15 bp, Homo sapiens
agcgagaccctgtct

SEQ ID NO: 463267 - DNA, 15 bp, Homo sapiens
cagcgagaccctgtc

SEQ ID NO: 463268 - DNA, 15 bp, Homo sapiens
acagcgagaccctgt

SEQ ID NO: 463269 - DNA, 15 bp, Homo sapiens
cacagcgagaccctg

SEQ ID NO: 463270 - DNA, 15 bp, Homo sapiens
acacagcgagaccct

SEQ ID NO: 463271 - DNA, 15 bp, Homo sapiens
gacacagcgagaccc

SEQ ID NO: 463272 - DNA, 15 bp, Homo sapiens
tgacacagcgagacc

SEQ ID NO: 463273 - DNA, 15 bp, Homo sapiens
ttgggtgacacagcg

SEQ ID NO: 463274 - DNA, 15 bp, Homo sapiens
cttgggtgacacagc

SEQ ID NO: 463275 - DNA, 15 bp, Homo sapiens
gcttgggtgacacag

SEQ ID NO: 463276 - DNA, 15 bp, Homo sapiens
agcttgggtgacaca

SEQ ID NO: 463277 - DNA, 15 bp, Homo sapiens
cagcttgggtgacac

SEQ ID NO: 463278 - DNA, 15 bp, Homo sapiens
ccagcttgggtgaca

SEQ ID NO: 463279 - DNA, 15 bp, Homo sapiens
tccagcttgggtgac

SEQ ID NO: 463280 - DNA, 15 bp, Homo sapiens
ctccagcttgggtga

SEQ ID NO: 463281 - DNA, 15 bp, Homo sapiens
actccagcttgggtg

SEQ ID NO: 463282 - DNA, 15 bp, Homo sapiens
tactccagcttgggt

SEQ ID NO: 463283 - DNA, 15 bp, Homo sapiens
gtactccagcttggg

SEQ ID NO: 463284 - DNA, 15 bp, Homo sapiens
tgtactccagcttgg

SEQ ID NO: 463285 - DNA, 15 bp, Homo sapiens
ctgtactccagcttg

SEQ ID NO: 463286 - DNA, 15 bp, Homo sapiens
actgtactccagctt

SEQ ID NO: 463287 - DNA, 15 bp, Homo sapiens
cactgtactccagct

SEQ ID NO: 463288 - DNA, 15 bp, Homo sapiens
ccactgtactccagc

SEQ ID NO: 463289 - DNA, 15 bp, Homo sapiens
accactgtactccag

SEQ ID NO: 463290 - DNA, 15 bp, Homo sapiens
caccactgtactcca

SEQ ID NO: 463291 - DNA, 15 bp, Homo sapiens
gcaccactgtactcc

SEQ ID NO: 463292 - DNA, 15 bp, Homo sapiens
tgcaccactgtactc

SEQ ID NO: 463293 - DNA, 15 bp, Homo sapiens
ttgcaccactgtact

SEQ ID NO: 463294 - DNA, 15 bp, Homo sapiens
attgcaccactgtac

SEQ ID NO: 463295 - DNA, 15 bp, Homo sapiens
gattgcaccactgta

SEQ ID NO: 463296 - DNA, 15 bp, Homo sapiens
tgattgcaccactgt

SEQ ID NO: 463297 - DNA, 15 bp, Homo sapiens
gtgattgcaccactg

SEQ ID NO: 463298 - DNA, 15 bp, Homo sapiens
tgtgattgcaccact

SEQ ID NO: 463299 - DNA, 15 bp, Homo sapiens
ctgtgattgcaccac

SEQ ID NO: 463300 - DNA, 15 bp, Homo sapiens
gctgtgattgcacca

SEQ ID NO: 463301 - DNA, 15 bp, Homo sapiens
agctgtgattgcacc

SEQ ID NO: 463302 - DNA, 15 bp, Homo sapiens
gagctgtgattgcac

SEQ ID NO: 463303 - DNA, 15 bp, Homo sapiens
tgagctgtgattgca

SEQ ID NO: 463304 - DNA, 15 bp, Homo sapiens
gtgagctgtgattgc

SEQ ID NO: 463305 - DNA, 15 bp, Homo sapiens
agtgagctgtgattg

SEQ ID NO: 463306 - DNA, 15 bp, Homo sapiens
cagtgagctgtgatt

SEQ ID NO: 463307 - DNA, 15 bp, Homo sapiens
gctgcagtgagctgt

SEQ ID NO: 463308 - DNA, 15 bp, Homo sapiens
ggctgcagtgagctg

SEQ ID NO: 463309 - DNA, 15 bp, Homo sapiens
aggctgcagtgagct

SEQ ID NO: 463310 - DNA, 15 bp, Homo sapiens
aaggctgcagtgagc

SEQ ID NO: 463311 - DNA, 15 bp, Homo sapiens
caaggctgcagtgag

SEQ ID NO: 463312 - DNA, 15 bp, Homo sapiens
tcaaggctgcagtga

SEQ ID NO: 463313 - DNA, 15 bp, Homo sapiens
gtcaaggctgcagtg

SEQ ID NO: 463314 - DNA, 15 bp, Homo sapiens
agtcaaggctgcagt

SEQ ID NO: 463315 - DNA, 15 bp, Homo sapiens
aagtcaaggctgcag

SEQ ID NO: 463316 - DNA, 15 bp, Homo sapiens
gaagtcaaggctgca

SEQ ID NO: 463317 - DNA, 15 bp, Homo sapiens
ggaagtcaaggctgc

SEQ ID NO: 463318 - DNA, 15 bp, Homo sapiens
aggaagtcaaggctg

SEQ ID NO: 463319 - DNA, 15 bp, Homo sapiens
caggaagtcaaggct

SEQ ID NO: 463320 - DNA, 15 bp, Homo sapiens
ccaggaagtcaaggc

SEQ ID NO: 463321 - DNA, 15 bp, Homo sapiens
gccaggaagtcaagg

SEQ ID NO: 463322 - DNA, 15 bp, Homo sapiens
ggccaggaagtcaag

SEQ ID NO: 463323 - DNA, 15 bp, Homo sapiens
aggccaggaagtcaa

SEQ ID NO: 463324 - DNA, 15 bp, Homo sapiens
gaggccaggaagtca

SEQ ID NO: 463325 - DNA, 15 bp, Homo sapiens
tgaggccaggaagtc

SEQ ID NO: 463326 - DNA, 15 bp, Homo sapiens
ttgaggccaggaagt

SEQ ID NO: 463327 - DNA, 15 bp, Homo sapiens
cttgaggccaggaag

SEQ ID NO: 463328 - DNA, 15 bp, Homo sapiens
acttgaggccaggaa

SEQ ID NO: 463329 - DNA, 15 bp, Homo sapiens
cacttgaggccagga

SEQ ID NO: 463330 - DNA, 15 bp, Homo sapiens
tcacttgaggccagg

SEQ ID NO: 463331 - DNA, 15 bp, Homo sapiens
atcacttgaggccag

SEQ ID NO: 463332 - DNA, 15 bp, Homo sapiens
gatcacttgaggcca

SEQ ID NO: 463333 - DNA, 15 bp, Homo sapiens
ggatcacttgaggcc

SEQ ID NO: 463334 - DNA, 15 bp, Homo sapiens
aggatcacttgaggc

SEQ ID NO: 463335 - DNA, 15 bp, Homo sapiens
gaggatcacttgagg

SEQ ID NO: 463336 - DNA, 15 bp, Homo sapiens
gggaggatcacttga

SEQ ID NO: 463337 - DNA, 15 bp, Homo sapiens
ggggaggatcacttg

SEQ ID NO: 463338 - DNA, 15 bp, Homo sapiens
gggggaggatcactt

SEQ ID NO: 463339 - DNA, 15 bp, Homo sapiens
ggggggaggatcact

SEQ ID NO: 463340 - DNA, 15 bp, Homo sapiens
aggggggaggatcac

SEQ ID NO: 463341 - DNA, 15 bp, Homo sapiens
gaggggggaggatca

SEQ ID NO: 463342 - DNA, 15 bp, Homo sapiens
tgaggggggaggatc

SEQ ID NO: 463343 - DNA, 15 bp, Homo sapiens
ctgaggggggaggat

SEQ ID NO: 463344 - DNA, 15 bp, Homo sapiens
gctgaggggggagga

SEQ ID NO: 463345 - DNA, 15 bp, Homo sapiens
ggctgaggggggagg

SEQ ID NO: 463346 - DNA, 15 bp, Homo sapiens
aggctgaggggggag

SEQ ID NO: 463347 - DNA, 15 bp, Homo sapiens
gaggctgagggggga

SEQ ID NO: 463348 - DNA, 15 bp, Homo sapiens
ggaggctgagggggg

SEQ ID NO: 463349 - DNA, 15 bp, Homo sapiens
gggaggctgaggggg

SEQ ID NO: 463350 - DNA, 15 bp, Homo sapiens
tgggaggctgagggg

SEQ ID NO: 463351 - DNA, 15 bp, Homo sapiens
ttgggaggctgaggg

SEQ ID NO: 463352 - DNA, 15 bp, Homo sapiens
ccccagcactttggg

SEQ ID NO: 463353 - DNA, 15 bp, Homo sapiens
accccagcactttgg

SEQ ID NO: 463354 - DNA, 15 bp, Homo sapiens
gaccccagcactttg

SEQ ID NO: 463355 - DNA, 15 bp, Homo sapiens
tgaccccagcacttt

SEQ ID NO: 463356 - DNA, 15 bp, Homo sapiens
gtgaccccagcactt

SEQ ID NO: 463357 - DNA, 15 bp, Homo sapiens
tgtgaccccagcact

SEQ ID NO: 463358 - DNA, 15 bp, Homo sapiens
ctgtgaccccagcac

SEQ ID NO: 463359 - DNA, 15 bp, Homo sapiens
tctgtgaccccagca

SEQ ID NO: 463360 - DNA, 15 bp, Homo sapiens
gtctgtgaccccagc

SEQ ID NO: 463361 - DNA, 15 bp, Homo sapiens
ggtctgtgaccccag

SEQ ID NO: 463362 - DNA, 15 bp, Homo sapiens
tggtctgtgacccca

SEQ ID NO: 463363 - DNA, 15 bp, Homo sapiens
gtggtctgtgacccc

SEQ ID NO: 463364 - DNA, 15 bp, Homo sapiens
ggtggtctgtgaccc

SEQ ID NO: 463365 - DNA, 15 bp, Homo sapiens
tggtggtctgtgacc

SEQ ID NO: 463366 - DNA, 15 bp, Homo sapiens
gtggtggtctgtgac

SEQ ID NO: 463367 - DNA, 15 bp, Homo sapiens
tgtggtggtctgtga

SEQ ID NO: 463368 - DNA, 15 bp, Homo sapiens
gtgtggtggtctgtg

SEQ ID NO: 463369 - DNA, 15 bp, Homo sapiens
ggtgtggtggtctgt

SEQ ID NO: 463370 - DNA, 15 bp, Homo sapiens
aggtgtggtggtctg

SEQ ID NO: 463371 - DNA, 15 bp, Homo sapiens
caggtgtggtggtct

SEQ ID NO: 463372 - DNA, 15 bp, Homo sapiens
ccaggtgtggtggtc

SEQ ID NO: 463373 - DNA, 15 bp, Homo sapiens
gccaggtgtggtggt

SEQ ID NO: 463374 - DNA, 15 bp, Homo sapiens
tgccaggtgtggtgg

SEQ ID NO: 463375 - DNA, 15 bp, Homo sapiens
ttgccaggtgtggtg

SEQ ID NO: 463376 - DNA, 15 bp, Homo sapiens
gttgccaggtgtggt

SEQ ID NO: 463377 - DNA, 15 bp, Homo sapiens
tgttgccaggtgtgg

SEQ ID NO: 463378 - DNA, 15 bp, Homo sapiens
atgttgccaggtgtg

SEQ ID NO: 463379 - DNA, 15 bp, Homo sapiens
catgttgccaggtgt

SEQ ID NO: 463380 - DNA, 15 bp, Homo sapiens
acatgttgccaggtg

SEQ ID NO: 463381 - DNA, 15 bp, Homo sapiens
gacatgttgccaggt

SEQ ID NO: 463382 - DNA, 15 bp, Homo sapiens
tgacatgttgccagg

SEQ ID NO: 463383 - DNA, 15 bp, Homo sapiens
ctgacatgttgccag

SEQ ID NO: 463384 - DNA, 15 bp, Homo sapiens
actgacatgttgcca

SEQ ID NO: 463385 - DNA, 15 bp, Homo sapiens
aactgacatgttgcc

SEQ ID NO: 463386 - DNA, 15 bp, Homo sapiens
aaactgacatgttgc

SEQ ID NO: 463387 - DNA, 15 bp, Homo sapiens
aaaactgacatgttg

SEQ ID NO: 463388 - DNA, 15 bp, Homo sapiens
aaaaactgacatgtt

SEQ ID NO: 463389 - DNA, 15 bp, Homo sapiens
caaaaactgacatgt

SEQ ID NO: 463390 - DNA, 15 bp, Homo sapiens
acaaaaactgacatg

SEQ ID NO: 463391 - DNA, 15 bp, Homo sapiens
aacaaaaactgacat

SEQ ID NO: 463392 - DNA, 15 bp, Homo sapiens
gaacaaaaactgaca

SEQ ID NO: 463393 - DNA, 15 bp, Homo sapiens
agaacaaaaactgac

SEQ ID NO: 463394 - DNA, 15 bp, Homo sapiens
cagaacaaaaactga

SEQ ID NO: 463395 - DNA, 15 bp, Homo sapiens
gcagaacaaaaactg

SEQ ID NO: 463396 - DNA, 15 bp, Homo sapiens
tgcagaacaaaaact

SEQ ID NO: 463397 - DNA, 15 bp, Homo sapiens
atgcagaacaaaaac

SEQ ID NO: 463398 - DNA, 15 bp, Homo sapiens
tatgcagaacaaaaa

SEQ ID NO: 463399 - DNA, 15 bp, Homo sapiens
ctatgcagaacaaaa

SEQ ID NO: 463400 - DNA, 15 bp, Homo sapiens
actatgcagaacaaa

SEQ ID NO: 463401 - DNA, 15 bp, Homo sapiens
cactatgcagaacaa

SEQ ID NO: 463402 - DNA, 15 bp, Homo sapiens
ccactatgcagaaca

SEQ ID NO: 463403 - DNA, 15 bp, Homo sapiens
cccactatgcagaac

SEQ ID NO: 463404 - DNA, 15 bp, Homo sapiens
tcccactatgcagaa

SEQ ID NO: 463405 - DNA, 15 bp, Homo sapiens
atcccactatgcaga

SEQ ID NO: 463406 - DNA, 15 bp, Homo sapiens
catcccactatgcag

SEQ ID NO: 463407 - DNA, 15 bp, Homo sapiens
ccatcccactatgca

SEQ ID NO: 463408 - DNA, 15 bp, Homo sapiens
accatcccactatgc

SEQ ID NO: 463409 - DNA, 15 bp, Homo sapiens
caccatcccactatg

SEQ ID NO: 463410 - DNA, 15 bp, Homo sapiens
ccaccatcccactat

SEQ ID NO: 463411 - DNA, 15 bp, Homo sapiens
cccaccatcccacta

SEQ ID NO: 463412 - DNA, 15 bp, Homo sapiens
tcccaccatcccact

SEQ ID NO: 463413 - DNA, 15 bp, Homo sapiens
atcccaccatcccac

SEQ ID NO: 463414 - DNA, 15 bp, Homo sapiens
tatcccaccatccca

SEQ ID NO: 463415 - DNA, 15 bp, Homo sapiens
atatcccaccatccc

SEQ ID NO: 463416 - DNA, 15 bp, Homo sapiens
catatcccaccatcc

SEQ ID NO: 463417 - DNA, 15 bp, Homo sapiens
ccatatcccaccatc

SEQ ID NO: 463418 - DNA, 15 bp, Homo sapiens
tccatatcccaccat

SEQ ID NO: 463419 - DNA, 15 bp, Homo sapiens
atccatatcccacca

SEQ ID NO: 463420 - DNA, 15 bp, Homo sapiens
catccatatcccacc

SEQ ID NO: 463421 - DNA, 15 bp, Homo sapiens
acatccatatcccac

SEQ ID NO: 463422 - DNA, 15 bp, Homo sapiens
aacatccatatccca

SEQ ID NO: 463423 - DNA, 15 bp, Homo sapiens
aaacatccatatccc

SEQ ID NO: 463424 - DNA, 15 bp, Homo sapiens
aaaacatccatatcc

SEQ ID NO: 463425 - DNA, 15 bp, Homo sapiens
aaaaacatccatatc

SEQ ID NO: 463426 - DNA, 15 bp, Homo sapiens
taaaaacatccatat

SEQ ID NO: 463427 - DNA, 15 bp, Homo sapiens
ataaaaacatccata

SEQ ID NO: 463428 - DNA, 15 bp, Homo sapiens
gataaaaacatccat

SEQ ID NO: 463429 - DNA, 15 bp, Homo sapiens
agataaaaacatcca

SEQ ID NO: 463430 - DNA, 15 bp, Homo sapiens
aagataaaaacatcc

SEQ ID NO: 463431 - DNA, 15 bp, Homo sapiens
aaagataaaaacatc

SEQ ID NO: 463432 - DNA, 15 bp, Homo sapiens
aaaagataaaaacat

SEQ ID NO: 463433 - DNA, 15 bp, Homo sapiens
taaaagataaaaaca

SEQ ID NO: 463434 - DNA, 15 bp, Homo sapiens
ataaaagataaaaac

SEQ ID NO: 463435 - DNA, 15 bp, Homo sapiens
aataaaagataaaaa

SEQ ID NO: 463436 - DNA, 15 bp, Homo sapiens
aaataaaagataaaa

SEQ ID NO: 463437 - DNA, 15 bp, Homo sapiens
aaaataaaagataaa

SEQ ID NO: 463438 - DNA, 15 bp, Homo sapiens
gaaaataaaagataa

SEQ ID NO: 463439 - DNA, 15 bp, Homo sapiens
agaaaataaaagata

SEQ ID NO: 463440 - DNA, 15 bp, Homo sapiens
aagaaaataaaagat

SEQ ID NO: 463441 - DNA, 15 bp, Homo sapiens
aaagaaaataaaaga

SEQ ID NO: 463442 - DNA, 15 bp, Homo sapiens
aaaagaaaataaaag

SEQ ID NO: 463443 - DNA, 15 bp, Homo sapiens
aaaaagaaaataaaa

SEQ ID NO: 463444 - DNA, 15 bp, Homo sapiens
aaaaaagaaaataaa

SEQ ID NO: 463445 - DNA, 15 bp, Homo sapiens
taaaaaagaaaataa

SEQ ID NO: 463446 - DNA, 15 bp, Homo sapiens
ataaaaaagaaaata

SEQ ID NO: 463447 - DNA, 15 bp, Homo sapiens
tataaaaaagaaaat

SEQ ID NO: 463448 - DNA, 15 bp, Homo sapiens
atataaaaaagaaaa

SEQ ID NO: 463449 - DNA, 15 bp, Homo sapiens
aatataaaaaagaaa

SEQ ID NO: 463450 - DNA, 15 bp, Homo sapiens
aaatataaaaaagaa

SEQ ID NO: 463451 - DNA, 15 bp, Homo sapiens
aaaatataaaaaaga

SEQ ID NO: 463452 - DNA, 15 bp, Homo sapiens
aaaaatataaaaaag

SEQ ID NO: 463453 - DNA, 15 bp, Homo sapiens
gaaaaatataaaaaa

SEQ ID NO: 463454 - DNA, 15 bp, Homo sapiens
agaaaaatataaaaa

SEQ ID NO: 463455 - DNA, 15 bp, Homo sapiens
tagaaaaatataaaa

SEQ ID NO: 463456 - DNA, 15 bp, Homo sapiens
ttagaaaaatataaa

SEQ ID NO: 463457 - DNA, 15 bp, Homo sapiens
tttagaaaaatataa

SEQ ID NO: 463458 - DNA, 15 bp, Homo sapiens
atttagaaaaatata

SEQ ID NO: 463459 - DNA, 15 bp, Homo sapiens
aatttagaaaaatat

SEQ ID NO: 463460 - DNA, 15 bp, Homo sapiens
aaatttagaaaaata

SEQ ID NO: 463461 - DNA, 15 bp, Homo sapiens
aaaatttagaaaaat

SEQ ID NO: 463462 - DNA, 15 bp, Homo sapiens
gaaaatttagaaaaa

SEQ ID NO: 463463 - DNA, 15 bp, Homo sapiens
ggaaaatttagaaaa

SEQ ID NO: 463464 - DNA, 15 bp, Homo sapiens
tggaaaatttagaaa

SEQ ID NO: 463465 - DNA, 15 bp, Homo sapiens
gtggaaaatttagaa

SEQ ID NO: 463466 - DNA, 15 bp, Homo sapiens
tgtggaaaatttaga

SEQ ID NO: 463467 - DNA, 15 bp, Homo sapiens
atgtggaaaatttag

SEQ ID NO: 463468 - DNA, 15 bp, Homo sapiens
aatgtggaaaattta

SEQ ID NO: 463469 - DNA, 15 bp, Homo sapiens
caatgtggaaaattt

SEQ ID NO: 463470 - DNA, 15 bp, Homo sapiens
tcaatgtggaaaatt

SEQ ID NO: 463471 - DNA, 15 bp, Homo sapiens
ttcaatgtggaaaat

SEQ ID NO: 463472 - DNA, 15 bp, Homo sapiens
gttcaatgtggaaaa

SEQ ID NO: 463473 - DNA, 15 bp, Homo sapiens
tgttcaatgtggaaa

SEQ ID NO: 463474 - DNA, 15 bp, Homo sapiens
atgttcaatgtggaa

SEQ ID NO: 463475 - DNA, 15 bp, Homo sapiens
aatgttcaatgtgga

SEQ ID NO: 463476 - DNA, 15 bp, Homo sapiens
taatgttcaatgtgg

SEQ ID NO: 463477 - DNA, 15 bp, Homo sapiens
ataatgttcaatgtg

SEQ ID NO: 463478 - DNA, 15 bp, Homo sapiens
aataatgttcaatgt

SEQ ID NO: 463479 - DNA, 15 bp, Homo sapiens
aaataatgttcaatg

SEQ ID NO: 463480 - DNA, 15 bp, Homo sapiens
aaaataatgttcaat

SEQ ID NO: 463481 - DNA, 15 bp, Homo sapiens
taaaataatgttcaa

SEQ ID NO: 463482 - DNA, 15 bp, Homo sapiens
ataaaataatgttca

SEQ ID NO: 463483 - DNA, 15 bp, Homo sapiens
tataaaataatgttc

SEQ ID NO: 463484 - DNA, 15 bp, Homo sapiens
ttataaaataatgtt

SEQ ID NO: 463485 - DNA, 15 bp, Homo sapiens
attataaaataatgt

SEQ ID NO: 463486 - DNA, 15 bp, Homo sapiens
gattataaaataatg

SEQ ID NO: 463487 - DNA, 15 bp, Homo sapiens
agattataaaataat

SEQ ID NO: 463488 - DNA, 15 bp, Homo sapiens
aagattataaaataa

SEQ ID NO: 463489 - DNA, 15 bp, Homo sapiens
aaagattataaaata

SEQ ID NO: 463490 - DNA, 15 bp, Homo sapiens
gaaagattataaaat

SEQ ID NO: 463491 - DNA, 15 bp, Homo sapiens
tgaaagattataaaa

SEQ ID NO: 463492 - DNA, 15 bp, Homo sapiens
ttgaaagattataaa

SEQ ID NO: 463493 - DNA, 15 bp, Homo sapiens
tttgaaagattataa

SEQ ID NO: 463494 - DNA, 15 bp, Homo sapiens
gtttgaaagattata

SEQ ID NO: 463495 - DNA, 15 bp, Homo sapiens
tgtttgaaagattat

SEQ ID NO: 463496 - DNA, 15 bp, Homo sapiens
atgtttgaaagatta

SEQ ID NO: 463497 - DNA, 15 bp, Homo sapiens
tatgtttgaaagatt

SEQ ID NO: 463498 - DNA, 15 bp, Homo sapiens
atatgtttgaaagat

SEQ ID NO: 463499 - DNA, 15 bp, Homo sapiens
gatatgtttgaaaga

SEQ ID NO: 463500 - DNA, 15 bp, Homo sapiens
agatatgtttgaaag

SEQ ID NO: 463501 - DNA, 15 bp, Homo sapiens
gagatatgtttgaaa

SEQ ID NO: 463502 - DNA, 15 bp, Homo sapiens
agagatatgtttgaa

SEQ ID NO: 463503 - DNA, 15 bp, Homo sapiens
aagagatatgtttga

SEQ ID NO: 463504 - DNA, 15 bp, Homo sapiens
taagagatatgtttg

SEQ ID NO: 463505 - DNA, 15 bp, Homo sapiens
ttaagagatatgttt

SEQ ID NO: 463506 - DNA, 15 bp, Homo sapiens
tttaagagatatgtt

SEQ ID NO: 463507 - DNA, 15 bp, Homo sapiens
ttttaagagatatgt

SEQ ID NO: 463508 - DNA, 15 bp, Homo sapiens
cttttaagagatatg

SEQ ID NO: 463509 - DNA, 15 bp, Homo sapiens
ccttttaagagatat

SEQ ID NO: 463510 - DNA, 15 bp, Homo sapiens
tccttttaagagata

SEQ ID NO: 463511 - DNA, 15 bp, Homo sapiens
gtccttttaagagat

SEQ ID NO: 463512 - DNA, 15 bp, Homo sapiens
agtccttttaagaga

SEQ ID NO: 463513 - DNA, 15 bp, Homo sapiens
cagtccttttaagag

SEQ ID NO: 463514 - DNA, 15 bp, Homo sapiens
ccagtccttttaaga

SEQ ID NO: 463515 - DNA, 15 bp, Homo sapiens
accagtccttttaag

SEQ ID NO: 463516 - DNA, 15 bp, Homo sapiens
aaccagtccttttaa

SEQ ID NO: 463517 - DNA, 15 bp, Homo sapiens
gaaccagtcctttta

SEQ ID NO: 463518 - DNA, 15 bp, Homo sapiens
ggaaccagtcctttt

SEQ ID NO: 463519 - DNA, 15 bp, Homo sapiens
aggaaccagtccttt

SEQ ID NO: 463520 - DNA, 15 bp, Homo sapiens
taggaaccagtcctt

SEQ ID NO: 463521 - DNA, 15 bp, Homo sapiens
ataggaaccagtcct

SEQ ID NO: 463522 - DNA, 15 bp, Homo sapiens
tataggaaccagtcc

SEQ ID NO: 463523 - DNA, 15 bp, Homo sapiens
ctataggaaccagtc

SEQ ID NO: 463524 - DNA, 15 bp, Homo sapiens
tctataggaaccagt

SEQ ID NO: 463525 - DNA, 15 bp, Homo sapiens
ttctataggaaccag

SEQ ID NO: 463526 - DNA, 15 bp, Homo sapiens
attctataggaacca

SEQ ID NO: 463527 - DNA, 15 bp, Homo sapiens
aattctataggaacc

SEQ ID NO: 463528 - DNA, 15 bp, Homo sapiens
gaattctataggaac

SEQ ID NO: 463529 - DNA, 15 bp, Homo sapiens
tgaattctataggaa

SEQ ID NO: 463530 - DNA, 15 bp, Homo sapiens
ctgaattctatagga

SEQ ID NO: 463531 - DNA, 15 bp, Homo sapiens
actgaattctatagg

SEQ ID NO: 463532 - DNA, 15 bp, Homo sapiens
cactgaattctatag

SEQ ID NO: 463533 - DNA, 15 bp, Homo sapiens
gcactgaattctata

SEQ ID NO: 463534 - DNA, 15 bp, Homo sapiens
tgcactgaattctat

SEQ ID NO: 463535 - DNA, 15 bp, Homo sapiens
ttgcactgaattcta

SEQ ID NO: 463536 - DNA, 15 bp, Homo sapiens
cttgcactgaattct

SEQ ID NO: 463537 - DNA, 15 bp, Homo sapiens
tcttgcactgaattc

SEQ ID NO: 463538 - DNA, 15 bp, Homo sapiens
ttcttgcactgaatt

SEQ ID NO: 463539 - DNA, 15 bp, Homo sapiens
tttcttgcactgaat

SEQ ID NO: 463540 - DNA, 15 bp, Homo sapiens
atttcttgcactgaa

SEQ ID NO: 463541 - DNA, 15 bp, Homo sapiens
gatttcttgcactga

SEQ ID NO: 463542 - DNA, 15 bp, Homo sapiens
agatttcttgcactg

SEQ ID NO: 463543 - DNA, 15 bp, Homo sapiens
aagatttcttgcact

SEQ ID NO: 463544 - DNA, 15 bp, Homo sapiens
gaagatttcttgcac

SEQ ID NO: 463545 - DNA, 15 bp, Homo sapiens
agaagatttcttgca

SEQ ID NO: 463546 - DNA, 15 bp, Homo sapiens
cagaagatttcttgc

SEQ ID NO: 463547 - DNA, 15 bp, Homo sapiens
acagaagatttcttg

SEQ ID NO: 463548 - DNA, 15 bp, Homo sapiens
cacagaagatttctt

SEQ ID NO: 463549 - DNA, 15 bp, Homo sapiens
acacagaagatttct

SEQ ID NO: 463550 - DNA, 15 bp, Homo sapiens
aacacagaagatttc

SEQ ID NO: 463551 - DNA, 15 bp, Homo sapiens
aaacacagaagattt

SEQ ID NO: 463552 - DNA, 15 bp, Homo sapiens
gaaacacagaagatt

SEQ ID NO: 463553 - DNA, 15 bp, Homo sapiens
agaaacacagaagat

SEQ ID NO: 463554 - DNA, 15 bp, Homo sapiens
aagaaacacagaaga

SEQ ID NO: 463555 - DNA, 15 bp, Homo sapiens
aaagaaacacagaag

SEQ ID NO: 463556 - DNA, 15 bp, Homo sapiens
taaagaaacacagaa

SEQ ID NO: 463557 - DNA, 15 bp, Homo sapiens
ataaagaaacacaga

SEQ ID NO: 463558 - DNA, 15 bp, Homo sapiens
tataaagaaacacag

SEQ ID NO: 463559 - DNA, 15 bp, Homo sapiens
gtataaagaaacaca

SEQ ID NO: 463560 - DNA, 15 bp, Homo sapiens
agtataaagaaacac

SEQ ID NO: 463561 - DNA, 15 bp, Homo sapiens
aagtataaagaaaca

SEQ ID NO: 463562 - DNA, 15 bp, Homo sapiens
aaagtataaagaaac

SEQ ID NO: 463563 - DNA, 15 bp, Homo sapiens
caaagtataaagaaa

SEQ ID NO: 463564 - DNA, 15 bp, Homo sapiens
ccaaagtataaagaa

SEQ ID NO: 463565 - DNA, 15 bp, Homo sapiens
accaaagtataaaga

SEQ ID NO: 463566 - DNA, 15 bp, Homo sapiens
aaccaaagtataaag

SEQ ID NO: 463567 - DNA, 15 bp, Homo sapiens
caaccaaagtataaa

SEQ ID NO: 463568 - DNA, 15 bp, Homo sapiens
gcaaccaaagtataa

SEQ ID NO: 463569 - DNA, 15 bp, Homo sapiens
ggcaaccaaagtata

SEQ ID NO: 463570 - DNA, 15 bp, Homo sapiens
aggcaaccaaagtat

SEQ ID NO: 463571 - DNA, 15 bp, Homo sapiens
aaggcaaccaaagta

SEQ ID NO: 463572 - DNA, 15 bp, Homo sapiens
caaggcaaccaaagt

SEQ ID NO: 463573 - DNA, 15 bp, Homo sapiens
tcaaggcaaccaaag

SEQ ID NO: 463574 - DNA, 15 bp, Homo sapiens
atcaaggcaaccaaa

SEQ ID NO: 463575 - DNA, 15 bp, Homo sapiens
gatcaaggcaaccaa

SEQ ID NO: 463576 - DNA, 15 bp, Homo sapiens
tgatcaaggcaacca

SEQ ID NO: 463577 - DNA, 15 bp, Homo sapiens
gtgatcaaggcaacc

SEQ ID NO: 463578 - DNA, 15 bp, Homo sapiens
agtgatcaaggcaac

SEQ ID NO: 463579 - DNA, 15 bp, Homo sapiens
cagtgatcaaggcaa

SEQ ID NO: 463580 - DNA, 15 bp, Homo sapiens
ccagtgatcaaggca

SEQ ID NO: 463581 - DNA, 15 bp, Homo sapiens
cccagtgatcaaggc

SEQ ID NO: 463582 - DNA, 15 bp, Homo sapiens
gcccagtgatcaagg

SEQ ID NO: 463583 - DNA, 15 bp, Homo sapiens
ggcccagtgatcaag

SEQ ID NO: 463584 - DNA, 15 bp, Homo sapiens
aggcccagtgatcaa

SEQ ID NO: 463585 - DNA, 15 bp, Homo sapiens
aaggcccagtgatca

SEQ ID NO: 463586 - DNA, 15 bp, Homo sapiens
aaaggcccagtgatc

SEQ ID NO: 463587 - DNA, 15 bp, Homo sapiens
gaaaggcccagtgat

SEQ ID NO: 463588 - DNA, 15 bp, Homo sapiens
ggaaaggcccagtga

SEQ ID NO: 463589 - DNA, 15 bp, Homo sapiens
aggaaaggcccagtg

SEQ ID NO: 463590 - DNA, 15 bp, Homo sapiens
caggaaaggcccagt

SEQ ID NO: 463591 - DNA, 15 bp, Homo sapiens
tcaggaaaggcccag

SEQ ID NO: 463592 - DNA, 15 bp, Homo sapiens
gtcaggaaaggccca

SEQ ID NO: 463593 - DNA, 15 bp, Homo sapiens
tgtcaggaaaggccc

SEQ ID NO: 463594 - DNA, 15 bp, Homo sapiens
ctgtcaggaaaggcc

SEQ ID NO: 463595 - DNA, 15 bp, Homo sapiens
gctgtcaggaaaggc

SEQ ID NO: 463596 - DNA, 15 bp, Homo sapiens
tgctgtcaggaaagg

SEQ ID NO: 463597 - DNA, 15 bp, Homo sapiens
ttgctgtcaggaaag

SEQ ID NO: 463598 - DNA, 15 bp, Homo sapiens
tttgctgtcaggaaa

SEQ ID NO: 463599 - DNA, 15 bp, Homo sapiens
ctttgctgtcaggaa

SEQ ID NO: 463600 - DNA, 15 bp, Homo sapiens
tctttgctgtcagga

SEQ ID NO: 463601 - DNA, 15 bp, Homo sapiens
ttctttgctgtcagg

SEQ ID NO: 463602 - DNA, 15 bp, Homo sapiens
cttctttgctgtcag

SEQ ID NO: 463603 - DNA, 15 bp, Homo sapiens
tcttctttgctgtca

SEQ ID NO: 463604 - DNA, 15 bp, Homo sapiens
ctcttctttgctgtc

SEQ ID NO: 463605 - DNA, 15 bp, Homo sapiens
cctcttctttgctgt

SEQ ID NO: 463606 - DNA, 15 bp, Homo sapiens
acctcttctttgctg

SEQ ID NO: 463607 - DNA, 15 bp, Homo sapiens
aacctcttctttgct

SEQ ID NO: 463608 - DNA, 15 bp, Homo sapiens
taacctcttctttgc

SEQ ID NO: 463609 - DNA, 15 bp, Homo sapiens
ctaacctcttctttg

SEQ ID NO: 463610 - DNA, 15 bp, Homo sapiens
actaacctcttcttt

SEQ ID NO: 463611 - DNA, 15 bp, Homo sapiens
cactaacctcttctt

SEQ ID NO: 463612 - DNA, 15 bp, Homo sapiens
acactaacctcttct

SEQ ID NO: 463613 - DNA, 15 bp, Homo sapiens
tacactaacctcttc

SEQ ID NO: 463614 - DNA, 15 bp, Homo sapiens
ctacactaacctctt

SEQ ID NO: 463615 - DNA, 15 bp, Homo sapiens
cctacactaacctct

SEQ ID NO: 463616 - DNA, 15 bp, Homo sapiens
gcctacactaacctc

SEQ ID NO: 463617 - DNA, 15 bp, Homo sapiens
tgcctacactaacct

SEQ ID NO: 463618 - DNA, 15 bp, Homo sapiens
ctgcctacactaacc

SEQ ID NO: 463619 - DNA, 15 bp, Homo sapiens
gctgcctacactaac

SEQ ID NO: 463620 - DNA, 15 bp, Homo sapiens
tgctgcctacactaa

SEQ ID NO: 463621 - DNA, 15 bp, Homo sapiens
ctgctgcctacacta

SEQ ID NO: 463622 - DNA, 15 bp, Homo sapiens
tctgctgcctacact

SEQ ID NO: 463623 - DNA, 15 bp, Homo sapiens
atctgctgcctacac

SEQ ID NO: 463624 - DNA, 15 bp, Homo sapiens
tatctgctgcctaca

SEQ ID NO: 463625 - DNA, 15 bp, Homo sapiens
ttatctgctgcctac

SEQ ID NO: 463626 - DNA, 15 bp, Homo sapiens
tttatctgctgccta

SEQ ID NO: 463627 - DNA, 15 bp, Homo sapiens
ttttatctgctgcct

SEQ ID NO: 463628 - DNA, 15 bp, Homo sapiens
gttttatctgctgcc

SEQ ID NO: 463629 - DNA, 15 bp, Homo sapiens
tgttttatctgctgc

SEQ ID NO: 463630 - DNA, 15 bp, Homo sapiens
gtgttttatctgctg

SEQ ID NO: 463631 - DNA, 15 bp, Homo sapiens
tgtgttttatctgct

SEQ ID NO: 463632 - DNA, 15 bp, Homo sapiens
ctgtgttttatctgc

SEQ ID NO: 463633 - DNA, 15 bp, Homo sapiens
cctgtgttttatctg

SEQ ID NO: 463634 - DNA, 15 bp, Homo sapiens
acctgtgttttatct

SEQ ID NO: 463635 - DNA, 15 bp, Homo sapiens
tacctgtgttttatc

SEQ ID NO: 463636 - DNA, 15 bp, Homo sapiens
atacctgtgttttat

SEQ ID NO: 463637 - DNA, 15 bp, Homo sapiens
catacctgtgtttta

SEQ ID NO: 463638 - DNA, 15 bp, Homo sapiens
gcatacctgtgtttt

SEQ ID NO: 463639 - DNA, 15 bp, Homo sapiens
agcatacctgtgttt

SEQ ID NO: 463640 - DNA, 15 bp, Homo sapiens
gagcatacctgtgtt

SEQ ID NO: 463641 - DNA, 15 bp, Homo sapiens
agagcatacctgtgt

SEQ ID NO: 463642 - DNA, 15 bp, Homo sapiens
tagagcatacctgtg

SEQ ID NO: 463643 - DNA, 15 bp, Homo sapiens
atagagcatacctgt

SEQ ID NO: 463644 - DNA, 15 bp, Homo sapiens
aatagagcatacctg

SEQ ID NO: 463645 - DNA, 15 bp, Homo sapiens
aaatagagcatacct

SEQ ID NO: 463646 - DNA, 15 bp, Homo sapiens
taaatagagcatacc

SEQ ID NO: 463647 - DNA, 15 bp, Homo sapiens
ttaaatagagcatac

SEQ ID NO: 463648 - DNA, 15 bp, Homo sapiens
tttaaatagagcata

SEQ ID NO: 463649 - DNA, 15 bp, Homo sapiens
ttttaaatagagcat

SEQ ID NO: 463650 - DNA, 15 bp, Homo sapiens
attttaaatagagca

SEQ ID NO: 463651 - DNA, 15 bp, Homo sapiens
cattttaaatagagc

SEQ ID NO: 463652 - DNA, 15 bp, Homo sapiens
gcattttaaatagag

SEQ ID NO: 463653 - DNA, 15 bp, Homo sapiens
tgcattttaaataga

SEQ ID NO: 463654 - DNA, 15 bp, Homo sapiens
atgcattttaaatag

SEQ ID NO: 463655 - DNA, 15 bp, Homo sapiens
catgcattttaaata

SEQ ID NO: 463656 - DNA, 15 bp, Homo sapiens
acatgcattttaaat

SEQ ID NO: 463657 - DNA, 15 bp, Homo sapiens
tacatgcattttaaa

SEQ ID NO: 463658 - DNA, 15 bp, Homo sapiens
atacatgcattttaa

SEQ ID NO: 463659 - DNA, 15 bp, Homo sapiens
aatacatgcatttta

SEQ ID NO: 463660 - DNA, 15 bp, Homo sapiens
aaatacatgcatttt

SEQ ID NO: 463661 - DNA, 15 bp, Homo sapiens
taaatacatgcattt

SEQ ID NO: 463662 - DNA, 15 bp, Homo sapiens
ataaatacatgcatt

SEQ ID NO: 463663 - DNA, 15 bp, Homo sapiens
tataaatacatgcat

SEQ ID NO: 463664 - DNA, 15 bp, Homo sapiens
ttataaatacatgca

SEQ ID NO: 463665 - DNA, 15 bp, Homo sapiens
attataaatacatgc

SEQ ID NO: 463666 - DNA, 15 bp, Homo sapiens
tattataaatacatg

SEQ ID NO: 463667 - DNA, 15 bp, Homo sapiens
ttattataaatacat

SEQ ID NO: 463668 - DNA, 15 bp, Homo sapiens
tttattataaataca

SEQ ID NO: 463669 - DNA, 15 bp, Homo sapiens
ttttattataaatac

SEQ ID NO: 463670 - DNA, 15 bp, Homo sapiens
cttttattataaata

SEQ ID NO: 463671 - DNA, 15 bp, Homo sapiens
acttttattataaat

SEQ ID NO: 463672 - DNA, 15 bp, Homo sapiens
tacttttattataaa

SEQ ID NO: 463673 - DNA, 15 bp, Homo sapiens
atacttttattataa

SEQ ID NO: 463674 - DNA, 15 bp, Homo sapiens
tatacttttattata

SEQ ID NO: 463675 - DNA, 15 bp, Homo sapiens
ctatacttttattat

SEQ ID NO: 463676 - DNA, 15 bp, Homo sapiens
cctatacttttatta

SEQ ID NO: 463677 - DNA, 15 bp, Homo sapiens
acctatacttttatt

SEQ ID NO: 463678 - DNA, 15 bp, Homo sapiens
cacctatacttttat

SEQ ID NO: 463679 - DNA, 15 bp, Homo sapiens
ccacctatactttta

SEQ ID NO: 463680 - DNA, 15 bp, Homo sapiens
accacctatactttt

SEQ ID NO: 463681 - DNA, 15 bp, Homo sapiens
taccacctatacttt

SEQ ID NO: 463682 - DNA, 15 bp, Homo sapiens
gtaccacctatactt

SEQ ID NO: 463683 - DNA, 15 bp, Homo sapiens
ggtaccacctatact

SEQ ID NO: 463684 - DNA, 15 bp, Homo sapiens
gggtaccacctatac

SEQ ID NO: 463685 - DNA, 15 bp, Homo sapiens
tgggtaccacctata

SEQ ID NO: 463686 - DNA, 15 bp, Homo sapiens
ttgggtaccacctat

SEQ ID NO: 463687 - DNA, 15 bp, Homo sapiens
tttgggtaccaccta

SEQ ID NO: 463688 - DNA, 15 bp, Homo sapiens
ctttgggtaccacct

SEQ ID NO: 463689 - DNA, 15 bp, Homo sapiens
cctttgggtaccacc

SEQ ID NO: 463690 - DNA, 15 bp, Homo sapiens
tcctttgggtaccac

SEQ ID NO: 463691 - DNA, 15 bp, Homo sapiens
ttcctttgggtacca

SEQ ID NO: 463692 - DNA, 15 bp, Homo sapiens
tttcctttgggtacc

SEQ ID NO: 463693 - DNA, 15 bp, Homo sapiens
ttttcctttgggtac

SEQ ID NO: 463694 - DNA, 15 bp, Homo sapiens
attttcctttgggta

SEQ ID NO: 463695 - DNA, 15 bp, Homo sapiens
cattttcctttgggt

SEQ ID NO: 463696 - DNA, 15 bp, Homo sapiens
acattttcctttggg

SEQ ID NO: 463697 - DNA, 15 bp, Homo sapiens
gacattttcctttgg

SEQ ID NO: 463698 - DNA, 15 bp, Homo sapiens
tgacattttcctttg

SEQ ID NO: 463699 - DNA, 15 bp, Homo sapiens
atgacattttccttt

SEQ ID NO: 463700 - DNA, 15 bp, Homo sapiens
catgacattttcctt

SEQ ID NO: 463701 - DNA, 15 bp, Homo sapiens
tcatgacattttcct

SEQ ID NO: 463702 - DNA, 15 bp, Homo sapiens
gtcatgacattttcc

SEQ ID NO: 463703 - DNA, 15 bp, Homo sapiens
tgtcatgacattttc

SEQ ID NO: 463704 - DNA, 15 bp, Homo sapiens
gtgtcatgacatttt

SEQ ID NO: 463705 - DNA, 15 bp, Homo sapiens
tgtgtcatgacattt

SEQ ID NO: 463706 - DNA, 15 bp, Homo sapiens
atgtgtcatgacatt

SEQ ID NO: 463707 - DNA, 15 bp, Homo sapiens
aatgtgtcatgacat

SEQ ID NO: 463708 - DNA, 15 bp, Homo sapiens
caatgtgtcatgaca

SEQ ID NO: 463709 - DNA, 15 bp, Homo sapiens
gcaatgtgtcatgac

SEQ ID NO: 463710 - DNA, 15 bp, Homo sapiens
tgcaatgtgtcatga

SEQ ID NO: 463711 - DNA, 15 bp, Homo sapiens
ttgcaatgtgtcatg

SEQ ID NO: 463712 - DNA, 15 bp, Homo sapiens
tttgcaatgtgtcat

SEQ ID NO: 463713 - DNA, 15 bp, Homo sapiens
ctttgcaatgtgtca

SEQ ID NO: 463714 - DNA, 15 bp, Homo sapiens
actttgcaatgtgtc

SEQ ID NO: 463715 - DNA, 15 bp, Homo sapiens
cactttgcaatgtgt

SEQ ID NO: 463716 - DNA, 15 bp, Homo sapiens
ccactttgcaatgtg

SEQ ID NO: 463717 - DNA, 15 bp, Homo sapiens
tccactttgcaatgt

SEQ ID NO: 463718 - DNA, 15 bp, Homo sapiens
ttccactttgcaatg

SEQ ID NO: 463719 - DNA, 15 bp, Homo sapiens
gttccactttgcaat

SEQ ID NO: 463720 - DNA, 15 bp, Homo sapiens
tgttccactttgcaa

SEQ ID NO: 463721 - DNA, 15 bp, Homo sapiens
ctgttccactttgca

SEQ ID NO: 463722 - DNA, 15 bp, Homo sapiens
tctgttccactttgc

SEQ ID NO: 463723 - DNA, 15 bp, Homo sapiens
ttctgttccactttg

SEQ ID NO: 463724 - DNA, 15 bp, Homo sapiens
cttctgttccacttt

SEQ ID NO: 463725 - DNA, 15 bp, Homo sapiens
acttctgttccactt

SEQ ID NO: 463726 - DNA, 15 bp, Homo sapiens
aacttctgttccact

SEQ ID NO: 463727 - DNA, 15 bp, Homo sapiens
taacttctgttccac

SEQ ID NO: 463728 - DNA, 15 bp, Homo sapiens
ataacttctgttcca

SEQ ID NO: 463729 - DNA, 15 bp, Homo sapiens
gataacttctgttcc

SEQ ID NO: 463730 - DNA, 15 bp, Homo sapiens
agataacttctgttc

SEQ ID NO: 463731 - DNA, 15 bp, Homo sapiens
aagataacttctgtt

SEQ ID NO: 463732 - DNA, 15 bp, Homo sapiens
aaagataacttctgt

SEQ ID NO: 463733 - DNA, 15 bp, Homo sapiens
taaagataacttctg

SEQ ID NO: 463734 - DNA, 15 bp, Homo sapiens
ctaaagataacttct

SEQ ID NO: 463735 - DNA, 15 bp, Homo sapiens
tctaaagataacttc

SEQ ID NO: 463736 - DNA, 15 bp, Homo sapiens
atctaaagataactt

SEQ ID NO: 463737 - DNA, 15 bp, Homo sapiens
gatctaaagataact

SEQ ID NO: 463738 - DNA, 15 bp, Homo sapiens
tgatctaaagataac

SEQ ID NO: 463739 - DNA, 15 bp, Homo sapiens
gtgatctaaagataa

SEQ ID NO: 463740 - DNA, 15 bp, Homo sapiens
agtgatctaaagata

SEQ ID NO: 463741 - DNA, 15 bp, Homo sapiens
aagtgatctaaagat

SEQ ID NO: 463742 - DNA, 15 bp, Homo sapiens
aaagtgatctaaaga

SEQ ID NO: 463743 - DNA, 15 bp, Homo sapiens
gaaagtgatctaaag

SEQ ID NO: 463744 - DNA, 15 bp, Homo sapiens
agaaagtgatctaaa

SEQ ID NO: 463745 - DNA, 15 bp, Homo sapiens
cagaaagtgatctaa

SEQ ID NO: 463746 - DNA, 15 bp, Homo sapiens
acagaaagtgatcta

SEQ ID NO: 463747 - DNA, 15 bp, Homo sapiens
aacagaaagtgatct

SEQ ID NO: 463748 - DNA, 15 bp, Homo sapiens
gaacagaaagtgatc

SEQ ID NO: 463749 - DNA, 15 bp, Homo sapiens
agaacagaaagtgat

SEQ ID NO: 463750 - DNA, 15 bp, Homo sapiens
cagaacagaaagtga

SEQ ID NO: 463751 - DNA, 15 bp, Homo sapiens
ccagaacagaaagtg

SEQ ID NO: 463752 - DNA, 15 bp, Homo sapiens
tccagaacagaaagt

SEQ ID NO: 463753 - DNA, 15 bp, Homo sapiens
atccagaacagaaag

SEQ ID NO: 463754 - DNA, 15 bp, Homo sapiens
aatccagaacagaaa

SEQ ID NO: 463755 - DNA, 15 bp, Homo sapiens
taatccagaacagaa

SEQ ID NO: 463756 - DNA, 15 bp, Homo sapiens
ataatccagaacaga

SEQ ID NO: 463757 - DNA, 15 bp, Homo sapiens
aataatccagaacag

SEQ ID NO: 463758 - DNA, 15 bp, Homo sapiens
caataatccagaaca

SEQ ID NO: 463759 - DNA, 15 bp, Homo sapiens
acaataatccagaac

SEQ ID NO: 463760 - DNA, 15 bp, Homo sapiens
tacaataatccagaa

SEQ ID NO: 463761 - DNA, 15 bp, Homo sapiens
atacaataatccaga

SEQ ID NO: 463762 - DNA, 15 bp, Homo sapiens
catacaataatccag

SEQ ID NO: 463763 - DNA, 15 bp, Homo sapiens
tcatacaataatcca

SEQ ID NO: 463764 - DNA, 15 bp, Homo sapiens
ctcatacaataatcc

SEQ ID NO: 463765 - DNA, 15 bp, Homo sapiens
gctcatacaataatc

SEQ ID NO: 463766 - DNA, 15 bp, Homo sapiens
ggctcatacaataat

SEQ ID NO: 463767 - DNA, 15 bp, Homo sapiens
aggctcatacaataa

SEQ ID NO: 463768 - DNA, 15 bp, Homo sapiens
caggctcatacaata

SEQ ID NO: 463769 - DNA, 15 bp, Homo sapiens
tcaggctcatacaat

SEQ ID NO: 463770 - DNA, 15 bp, Homo sapiens
atcaggctcatacaa

SEQ ID NO: 463771 - DNA, 15 bp, Homo sapiens
aatcaggctcataca

SEQ ID NO: 463772 - DNA, 15 bp, Homo sapiens
aaatcaggctcatac

SEQ ID NO: 463773 - DNA, 15 bp, Homo sapiens
aaaatcaggctcata

SEQ ID NO: 463774 - DNA, 15 bp, Homo sapiens
gaaaatcaggctcat

SEQ ID NO: 463775 - DNA, 15 bp, Homo sapiens
cgaaaatcaggctca

SEQ ID NO: 463776 - DNA, 15 bp, Homo sapiens
acgaaaatcaggctc

SEQ ID NO: 463777 - DNA, 15 bp, Homo sapiens
gacgaaaatcaggct

SEQ ID NO: 463778 - DNA, 15 bp, Homo sapiens
agacgaaaatcaggc

SEQ ID NO: 463779 - DNA, 15 bp, Homo sapiens
gagacgaaaatcagg

SEQ ID NO: 463780 - DNA, 15 bp, Homo sapiens
agagacgaaaatcag

SEQ ID NO: 463781 - DNA, 15 bp, Homo sapiens
gagagacgaaaatca

SEQ ID NO: 463782 - DNA, 15 bp, Homo sapiens
agagagacgaaaatc

SEQ ID NO: 463783 - DNA, 15 bp, Homo sapiens
aagagagacgaaaat

SEQ ID NO: 463784 - DNA, 15 bp, Homo sapiens
aaagagagacgaaaa

SEQ ID NO: 463785 - DNA, 15 bp, Homo sapiens
gaaagagagacgaaa

SEQ ID NO: 463786 - DNA, 15 bp, Homo sapiens
ggaaagagagacgaa

SEQ ID NO: 463787 - DNA, 15 bp, Homo sapiens
cggaaagagagacga

SEQ ID NO: 463788 - DNA, 15 bp, Homo sapiens
gcggaaagagagacg

SEQ ID NO: 463789 - DNA, 15 bp, Homo sapiens
ggcggaaagagagac

SEQ ID NO: 463790 - DNA, 15 bp, Homo sapiens
aggcggaaagagaga

SEQ ID NO: 463791 - DNA, 15 bp, Homo sapiens
aaggcggaaagagag

SEQ ID NO: 463792 - DNA, 15 bp, Homo sapiens
gaaggcggaaagaga

SEQ ID NO: 463793 - DNA, 15 bp, Homo sapiens
ggaaggcggaaagag

SEQ ID NO: 463794 - DNA, 15 bp, Homo sapiens
gggaaggcggaaaga

SEQ ID NO: 463795 - DNA, 15 bp, Homo sapiens
agggaaggcggaaag

SEQ ID NO: 463796 - DNA, 15 bp, Homo sapiens
gagggaaggcggaaa

SEQ ID NO: 463797 - DNA, 15 bp, Homo sapiens
tgagggaaggcggaa

SEQ ID NO: 463798 - DNA, 15 bp, Homo sapiens
gtgagggaaggcgga

SEQ ID NO: 463799 - DNA, 15 bp, Homo sapiens
ggtgagggaaggcgg

SEQ ID NO: 463800 - DNA, 15 bp, Homo sapiens
gggtgagggaaggcg

SEQ ID NO: 463801 - DNA, 15 bp, Homo sapiens
agggtgagggaaggc

SEQ ID NO: 463802 - DNA, 15 bp, Homo sapiens
gagggtgagggaagg

SEQ ID NO: 463803 - DNA, 15 bp, Homo sapiens
cgagggtgagggaag

SEQ ID NO: 463804 - DNA, 15 bp, Homo sapiens
acgagggtgagggaa

SEQ ID NO: 463805 - DNA, 15 bp, Homo sapiens
aacgagggtgaggga

SEQ ID NO: 463806 - DNA, 15 bp, Homo sapiens
caacgagggtgaggg

SEQ ID NO: 463807 - DNA, 15 bp, Homo sapiens
acaacgagggtgagg

SEQ ID NO: 463808 - DNA, 15 bp, Homo sapiens
tacaacgagggtgag

SEQ ID NO: 463809 - DNA, 15 bp, Homo sapiens
ttacaacgagggtga

SEQ ID NO: 463810 - DNA, 15 bp, Homo sapiens
tttacaacgagggtg

SEQ ID NO: 463811 - DNA, 15 bp, Homo sapiens
atttacaacgagggt

SEQ ID NO: 463812 - DNA, 15 bp, Homo sapiens
gatttacaacgaggg

SEQ ID NO: 463813 - DNA, 15 bp, Homo sapiens
ggatttacaacgagg

SEQ ID NO: 463814 - DNA, 15 bp, Homo sapiens
tggatttacaacgag

SEQ ID NO: 463815 - DNA, 15 bp, Homo sapiens
gtggatttacaacga

SEQ ID NO: 463816 - DNA, 15 bp, Homo sapiens
agtggatttacaacg

SEQ ID NO: 463817 - DNA, 15 bp, Homo sapiens
tagtggatttacaac

SEQ ID NO: 463818 - DNA, 15 bp, Homo sapiens
ctagtggatttacaa

SEQ ID NO: 463819 - DNA, 15 bp, Homo sapiens
actagtggatttaca

SEQ ID NO: 463820 - DNA, 15 bp, Homo sapiens
cactagtggatttac

SEQ ID NO: 463821 - DNA, 15 bp, Homo sapiens
gcactagtggattta

SEQ ID NO: 463822 - DNA, 15 bp, Homo sapiens
tgcactagtggattt

SEQ ID NO: 463823 - DNA, 15 bp, Homo sapiens
atgcactagtggatt

SEQ ID NO: 463824 - DNA, 15 bp, Homo sapiens
catgcactagtggat

SEQ ID NO: 463825 - DNA, 15 bp, Homo sapiens
ccatgcactagtgga

SEQ ID NO: 463826 - DNA, 15 bp, Homo sapiens
tccatgcactagtgg

SEQ ID NO: 463827 - DNA, 15 bp, Homo sapiens
atccatgcactagtg

SEQ ID NO: 463828 - DNA, 15 bp, Homo sapiens
catccatgcactagt

SEQ ID NO: 463829 - DNA, 15 bp, Homo sapiens
acatccatgcactag

SEQ ID NO: 463830 - DNA, 15 bp, Homo sapiens
cacatccatgcacta

SEQ ID NO: 463831 - DNA, 15 bp, Homo sapiens
tcacatccatgcact

SEQ ID NO: 463832 - DNA, 15 bp, Homo sapiens
ttcacatccatgcac

SEQ ID NO: 463833 - DNA, 15 bp, Homo sapiens
cttcacatccatgca

SEQ ID NO: 463834 - DNA, 15 bp, Homo sapiens
acttcacatccatgc

SEQ ID NO: 463835 - DNA, 15 bp, Homo sapiens
tacttcacatccatg

SEQ ID NO: 463836 - DNA, 15 bp, Homo sapiens
gtacttcacatccat

SEQ ID NO: 463837 - DNA, 15 bp, Homo sapiens
tgtacttcacatcca

SEQ ID NO: 463838 - DNA, 15 bp, Homo sapiens
ttgtacttcacatcc

SEQ ID NO: 463839 - DNA, 15 bp, Homo sapiens
cttgtacttcacatc

SEQ ID NO: 463840 - DNA, 15 bp, Homo sapiens
acttgtacttcacat

SEQ ID NO: 463841 - DNA, 15 bp, Homo sapiens
gacttgtacttcaca

SEQ ID NO: 463842 - DNA, 15 bp, Homo sapiens
agacttgtacttcac

SEQ ID NO: 463843 - DNA, 15 bp, Homo sapiens
aagacttgtacttca

SEQ ID NO: 463844 - DNA, 15 bp, Homo sapiens
taagacttgtacttc

SEQ ID NO: 463845 - DNA, 15 bp, Homo sapiens
ttaagacttgtactt

SEQ ID NO: 463846 - DNA, 15 bp, Homo sapiens
gttaagacttgtact

SEQ ID NO: 463847 - DNA, 15 bp, Homo sapiens
agttaagacttgtac

SEQ ID NO: 463848 - DNA, 15 bp, Homo sapiens
aagttaagacttgta

SEQ ID NO: 463849 - DNA, 15 bp, Homo sapiens
aaagttaagacttgt

SEQ ID NO: 463850 - DNA, 15 bp, Homo sapiens
taaagttaagacttg

SEQ ID NO: 463851 - DNA, 15 bp, Homo sapiens
ttaaagttaagactt

SEQ ID NO: 463852 - DNA, 15 bp, Homo sapiens
tttaaagttaagact

SEQ ID NO: 463853 - DNA, 15 bp, Homo sapiens
ttttaaagttaagac

SEQ ID NO: 463854 - DNA, 15 bp, Homo sapiens
tttttaaagttaaga

SEQ ID NO: 463855 - DNA, 15 bp, Homo sapiens
ctttttaaagttaag

SEQ ID NO: 463856 - DNA, 15 bp, Homo sapiens
actttttaaagttaa

SEQ ID NO: 463857 - DNA, 15 bp, Homo sapiens
aactttttaaagtta

SEQ ID NO: 463858 - DNA, 15 bp, Homo sapiens
aaactttttaaagtt

SEQ ID NO: 463859 - DNA, 15 bp, Homo sapiens
aaaactttttaaagt

SEQ ID NO: 463860 - DNA, 15 bp, Homo sapiens
taaaactttttaaag

SEQ ID NO: 463861 - DNA, 15 bp, Homo sapiens
ataaaactttttaaa

SEQ ID NO: 463862 - DNA, 15 bp, Homo sapiens
cataaaactttttaa

SEQ ID NO: 463863 - DNA, 15 bp, Homo sapiens
tcataaaacttttta

SEQ ID NO: 463864 - DNA, 15 bp, Homo sapiens
ttcataaaacttttt

SEQ ID NO: 463865 - DNA, 15 bp, Homo sapiens
cttcataaaactttt

SEQ ID NO: 463866 - DNA, 15 bp, Homo sapiens
gcttcataaaacttt

SEQ ID NO: 463867 - DNA, 15 bp, Homo sapiens
agcttcataaaactt

SEQ ID NO: 463868 - DNA, 15 bp, Homo sapiens
cagcttcataaaact

SEQ ID NO: 463869 - DNA, 15 bp, Homo sapiens
acagcttcataaaac

SEQ ID NO: 463870 - DNA, 15 bp, Homo sapiens
cacagcttcataaaa

SEQ ID NO: 463871 - DNA, 15 bp, Homo sapiens
acacagcttcataaa

SEQ ID NO: 463872 - DNA, 15 bp, Homo sapiens
tacacagcttcataa

SEQ ID NO: 463873 - DNA, 15 bp, Homo sapiens
ctacacagcttcata

SEQ ID NO: 463874 - DNA, 15 bp, Homo sapiens
actacacagcttcat

SEQ ID NO: 463875 - DNA, 15 bp, Homo sapiens
tactacacagcttca

SEQ ID NO: 463876 - DNA, 15 bp, Homo sapiens
ttactacacagcttc

SEQ ID NO: 463877 - DNA, 15 bp, Homo sapiens
tttactacacagctt

SEQ ID NO: 463878 - DNA, 15 bp, Homo sapiens
atttactacacagct

SEQ ID NO: 463879 - DNA, 15 bp, Homo sapiens
gatttactacacagc

SEQ ID NO: 463880 - DNA, 15 bp, Homo sapiens
ggatttactacacag

SEQ ID NO: 463881 - DNA, 15 bp, Homo sapiens
gggatttactacaca

SEQ ID NO: 463882 - DNA, 15 bp, Homo sapiens
agggatttactacac

SEQ ID NO: 463883 - DNA, 15 bp, Homo sapiens
aagggatttactaca

SEQ ID NO: 463884 - DNA, 15 bp, Homo sapiens
aaagggatttactac

SEQ ID NO: 463885 - DNA, 15 bp, Homo sapiens
aaaagggatttacta

SEQ ID NO: 463886 - DNA, 15 bp, Homo sapiens
caaaagggatttact

SEQ ID NO: 463887 - DNA, 15 bp, Homo sapiens
acaaaagggatttac

SEQ ID NO: 463888 - DNA, 15 bp, Homo sapiens
tacaaaagggattta

SEQ ID NO: 463889 - DNA, 15 bp, Homo sapiens
ttacaaaagggattt

SEQ ID NO: 463890 - DNA, 15 bp, Homo sapiens
cttacaaaagggatt

SEQ ID NO: 463891 - DNA, 15 bp, Homo sapiens
acttacaaaagggat

SEQ ID NO: 463892 - DNA, 15 bp, Homo sapiens
cacttacaaaaggga

SEQ ID NO: 463893 - DNA, 15 bp, Homo sapiens
ccacttacaaaaggg

SEQ ID NO: 463894 - DNA, 15 bp, Homo sapiens
accacttacaaaagg

SEQ ID NO: 463895 - DNA, 15 bp, Homo sapiens
gaccacttacaaaag

SEQ ID NO: 463896 - DNA, 15 bp, Homo sapiens
agaccacttacaaaa

SEQ ID NO: 463897 - DNA, 15 bp, Homo sapiens
aagaccacttacaaa

SEQ ID NO: 463898 - DNA, 15 bp, Homo sapiens
caagaccacttacaa

SEQ ID NO: 463899 - DNA, 15 bp, Homo sapiens
tcaagaccacttaca

SEQ ID NO: 463900 - DNA, 15 bp, Homo sapiens
gtcaagaccacttac

SEQ ID NO: 463901 - DNA, 15 bp, Homo sapiens
agtcaagaccactta

SEQ ID NO: 463902 - DNA, 15 bp, Homo sapiens
cagtcaagaccactt

SEQ ID NO: 463903 - DNA, 15 bp, Homo sapiens
gcagtcaagaccact

SEQ ID NO: 463904 - DNA, 15 bp, Homo sapiens
cgcagtcaagaccac

SEQ ID NO: 463905 - DNA, 15 bp, Homo sapiens
acgcagtcaagacca

SEQ ID NO: 463906 - DNA, 15 bp, Homo sapiens
aacgcagtcaagacc

SEQ ID NO: 463907 - DNA, 15 bp, Homo sapiens
aaacgcagtcaagac

SEQ ID NO: 463908 - DNA, 15 bp, Homo sapiens
gaaacgcagtcaaga

SEQ ID NO: 463909 - DNA, 15 bp, Homo sapiens
agaaacgcagtcaag

SEQ ID NO: 463910 - DNA, 15 bp, Homo sapiens
gagaaacgcagtcaa

SEQ ID NO: 463911 - DNA, 15 bp, Homo sapiens
tgagaaacgcagtca

SEQ ID NO: 463912 - DNA, 15 bp, Homo sapiens
ttgagaaacgcagtc

SEQ ID NO: 463913 - DNA, 15 bp, Homo sapiens
attgagaaacgcagt

SEQ ID NO: 463914 - DNA, 15 bp, Homo sapiens
tattgagaaacgcag

SEQ ID NO: 463915 - DNA, 15 bp, Homo sapiens
atattgagaaacgca

SEQ ID NO: 463916 - DNA, 15 bp, Homo sapiens
tatattgagaaacgc

SEQ ID NO: 463917 - DNA, 15 bp, Homo sapiens
atatattgagaaacg

SEQ ID NO: 463918 - DNA, 15 bp, Homo sapiens
gatatattgagaaac

SEQ ID NO: 463919 - DNA, 15 bp, Homo sapiens
agatatattgagaaa

SEQ ID NO: 463920 - DNA, 15 bp, Homo sapiens
aagatatattgagaa

SEQ ID NO: 463921 - DNA, 15 bp, Homo sapiens
aaagatatattgaga

SEQ ID NO: 463922 - DNA, 15 bp, Homo sapiens
aaaagatatattgag

SEQ ID NO: 463923 - DNA, 15 bp, Homo sapiens
caaaagatatattga

SEQ ID NO: 463924 - DNA, 15 bp, Homo sapiens
ccaaaagatatattg

SEQ ID NO: 463925 - DNA, 15 bp, Homo sapiens
accaaaagatatatt

SEQ ID NO: 463926 - DNA, 15 bp, Homo sapiens
aaccaaaagatatat

SEQ ID NO: 463927 - DNA, 15 bp, Homo sapiens
aaaccaaaagatata

SEQ ID NO: 463928 - DNA, 15 bp, Homo sapiens
gaaaccaaaagatat

SEQ ID NO: 463929 - DNA, 15 bp, Homo sapiens
tgaaaccaaaagata

SEQ ID NO: 463930 - DNA, 15 bp, Homo sapiens
atgaaaccaaaagat

SEQ ID NO: 463931 - DNA, 15 bp, Homo sapiens
aatgaaaccaaaaga

SEQ ID NO: 463932 - DNA, 15 bp, Homo sapiens
taatgaaaccaaaag

SEQ ID NO: 463933 - DNA, 15 bp, Homo sapiens
ctaatgaaaccaaaa

SEQ ID NO: 463934 - DNA, 15 bp, Homo sapiens
tctaatgaaaccaaa

SEQ ID NO: 463935 - DNA, 15 bp, Homo sapiens
atctaatgaaaccaa

SEQ ID NO: 463936 - DNA, 15 bp, Homo sapiens
aatctaatgaaacca

SEQ ID NO: 463937 - DNA, 15 bp, Homo sapiens
gaatctaatgaaacc

SEQ ID NO: 463938 - DNA, 15 bp, Homo sapiens
tgaatctaatgaaac

SEQ ID NO: 463939 - DNA, 15 bp, Homo sapiens
ttgaatctaatgaaa

SEQ ID NO: 463940 - DNA, 15 bp, Homo sapiens
cttgaatctaatgaa

SEQ ID NO: 463941 - DNA, 15 bp, Homo sapiens
acttgaatctaatga

SEQ ID NO: 463942 - DNA, 15 bp, Homo sapiens
tacttgaatctaatg

SEQ ID NO: 463943 - DNA, 15 bp, Homo sapiens
atacttgaatctaat

SEQ ID NO: 463944 - DNA, 15 bp, Homo sapiens
tatacttgaatctaa

SEQ ID NO: 463945 - DNA, 15 bp, Homo sapiens
atatacttgaatcta

SEQ ID NO: 463946 - DNA, 15 bp, Homo sapiens
tatatacttgaatct

SEQ ID NO: 463947 - DNA, 15 bp, Homo sapiens
ttatatacttgaatc

SEQ ID NO: 463948 - DNA, 15 bp, Homo sapiens
tttatatacttgaat

SEQ ID NO: 463949 - DNA, 15 bp, Homo sapiens
atttatatacttgaa

SEQ ID NO: 463950 - DNA, 15 bp, Homo sapiens
catttatatacttga

SEQ ID NO: 463951 - DNA, 15 bp, Homo sapiens
tcatttatatacttg

SEQ ID NO: 463952 - DNA, 15 bp, Homo sapiens
ctcatttatatactt

SEQ ID NO: 463953 - DNA, 15 bp, Homo sapiens
tctcatttatatact

SEQ ID NO: 463954 - DNA, 15 bp, Homo sapiens
ttctcatttatatac

SEQ ID NO: 463955 - DNA, 15 bp, Homo sapiens
gttctcatttatata

SEQ ID NO: 463956 - DNA, 15 bp, Homo sapiens
agttctcatttatat

SEQ ID NO: 463957 - DNA, 15 bp, Homo sapiens
cagttctcatttata

SEQ ID NO: 463958 - DNA, 15 bp, Homo sapiens
acagttctcatttat

SEQ ID NO: 463959 - DNA, 15 bp, Homo sapiens
tacagttctcattta

SEQ ID NO: 463960 - DNA, 15 bp, Homo sapiens
ttacagttctcattt

SEQ ID NO: 463961 - DNA, 15 bp, Homo sapiens
gttacagttctcatt

SEQ ID NO: 463962 - DNA, 15 bp, Homo sapiens
agttacagttctcat

SEQ ID NO: 463963 - DNA, 15 bp, Homo sapiens
aagttacagttctca

SEQ ID NO: 463964 - DNA, 15 bp, Homo sapiens
aaagttacagttctc

SEQ ID NO: 463965 - DNA, 15 bp, Homo sapiens
caaagttacagttct

SEQ ID NO: 463966 - DNA, 15 bp, Homo sapiens
ccaaagttacagttc

SEQ ID NO: 463967 - DNA, 15 bp, Homo sapiens
tccaaagttacagtt

SEQ ID NO: 463968 - DNA, 15 bp, Homo sapiens
gtccaaagttacagt

SEQ ID NO: 463969 - DNA, 15 bp, Homo sapiens
tgtccaaagttacag

SEQ ID NO: 463970 - DNA, 15 bp, Homo sapiens
ctgtccaaagttaca

SEQ ID NO: 463971 - DNA, 15 bp, Homo sapiens
tctgtccaaagttac

SEQ ID NO: 463972 - DNA, 15 bp, Homo sapiens
gtctgtccaaagtta

SEQ ID NO: 463973 - DNA, 15 bp, Homo sapiens
agtctgtccaaagtt

SEQ ID NO: 463974 - DNA, 15 bp, Homo sapiens
aagtctgtccaaagt

SEQ ID NO: 463975 - DNA, 15 bp, Homo sapiens
aaagtctgtccaaag

SEQ ID NO: 463976 - DNA, 15 bp, Homo sapiens
aaaagtctgtccaaa

SEQ ID NO: 463977 - DNA, 15 bp, Homo sapiens
aaaaagtctgtccaa

SEQ ID NO: 463978 - DNA, 15 bp, Homo sapiens
gaaaaagtctgtcca

SEQ ID NO: 463979 - DNA, 15 bp, Homo sapiens
tgaaaaagtctgtcc

SEQ ID NO: 463980 - DNA, 15 bp, Homo sapiens
ctgaaaaagtctgtc

SEQ ID NO: 463981 - DNA, 15 bp, Homo sapiens
actgaaaaagtctgt

SEQ ID NO: 463982 - DNA, 15 bp, Homo sapiens
gactgaaaaagtctg

SEQ ID NO: 463983 - DNA, 15 bp, Homo sapiens
tgactgaaaaagtct

SEQ ID NO: 463984 - DNA, 15 bp, Homo sapiens
atgactgaaaaagtc

SEQ ID NO: 463985 - DNA, 15 bp, Homo sapiens
gatgactgaaaaagt

SEQ ID NO: 463986 - DNA, 15 bp, Homo sapiens
agatgactgaaaaag

SEQ ID NO: 463987 - DNA, 15 bp, Homo sapiens
aagatgactgaaaaa

SEQ ID NO: 463988 - DNA, 15 bp, Homo sapiens
aaagatgactgaaaa

SEQ ID NO: 463989 - DNA, 15 bp, Homo sapiens
taaagatgactgaaa

SEQ ID NO: 463990 - DNA, 15 bp, Homo sapiens
gtaaagatgactgaa

SEQ ID NO: 463991 - DNA, 15 bp, Homo sapiens
cgtaaagatgactga

SEQ ID NO: 463992 - DNA, 15 bp, Homo sapiens
ccgtaaagatgactg

SEQ ID NO: 463993 - DNA, 15 bp, Homo sapiens
accgtaaagatgact

SEQ ID NO: 463994 - DNA, 15 bp, Homo sapiens
taccgtaaagatgac

SEQ ID NO: 463995 - DNA, 15 bp, Homo sapiens
ttaccgtaaagatga

SEQ ID NO: 463996 - DNA, 15 bp, Homo sapiens
attaccgtaaagatg

SEQ ID NO: 463997 - DNA, 15 bp, Homo sapiens
tattaccgtaaagat

SEQ ID NO: 463998 - DNA, 15 bp, Homo sapiens
ttattaccgtaaaga

SEQ ID NO: 463999 - DNA, 15 bp, Homo sapiens
cttattaccgtaaag

SEQ ID NO: 464000 - DNA, 15 bp, Homo sapiens
acttattaccgtaaa

SEQ ID NO: 464001 - DNA, 15 bp, Homo sapiens
aacttattaccgtaa

SEQ ID NO: 464002 - DNA, 15 bp, Homo sapiens
gaacttattaccgta

SEQ ID NO: 464003 - DNA, 15 bp, Homo sapiens
ggaacttattaccgt

SEQ ID NO: 464004 - DNA, 15 bp, Homo sapiens
gggaacttattaccg

SEQ ID NO: 464005 - DNA, 15 bp, Homo sapiens
tgggaacttattacc

SEQ ID NO: 464006 - DNA, 15 bp, Homo sapiens
ttgggaacttattac

SEQ ID NO: 464007 - DNA, 15 bp, Homo sapiens
attgggaacttatta

SEQ ID NO: 464008 - DNA, 15 bp, Homo sapiens
aattgggaacttatt

SEQ ID NO: 464009 - DNA, 15 bp, Homo sapiens
taattgggaacttat

SEQ ID NO: 464010 - DNA, 15 bp, Homo sapiens
ctaattgggaactta

SEQ ID NO: 464011 - DNA, 15 bp, Homo sapiens
tctaattgggaactt

SEQ ID NO: 464012 - DNA, 15 bp, Homo sapiens
gtctaattgggaact

SEQ ID NO: 464013 - DNA, 15 bp, Homo sapiens
tgtctaattgggaac

SEQ ID NO: 464014 - DNA, 15 bp, Homo sapiens
ttgtctaattgggaa

SEQ ID NO: 464015 - DNA, 15 bp, Homo sapiens
attgtctaattggga

SEQ ID NO: 464016 - DNA, 15 bp, Homo sapiens
tattgtctaattggg

SEQ ID NO: 464017 - DNA, 15 bp, Homo sapiens
ctattgtctaattgg

SEQ ID NO: 464018 - DNA, 15 bp, Homo sapiens
actattgtctaattg

SEQ ID NO: 464019 - DNA, 15 bp, Homo sapiens
aactattgtctaatt

SEQ ID NO: 464020 - DNA, 15 bp, Homo sapiens
taactattgtctaat

SEQ ID NO: 464021 - DNA, 15 bp, Homo sapiens
ataactattgtctaa

SEQ ID NO: 464022 - DNA, 15 bp, Homo sapiens
aataactattgtcta

SEQ ID NO: 464023 - DNA, 15 bp, Homo sapiens
aaataactattgtct

SEQ ID NO: 464024 - DNA, 15 bp, Homo sapiens
caaataactattgtc

SEQ ID NO: 464025 - DNA, 15 bp, Homo sapiens
acaaataactattgt

SEQ ID NO: 464026 - DNA, 15 bp, Homo sapiens
aacaaataactattg

SEQ ID NO: 464027 - DNA, 15 bp, Homo sapiens
aaacaaataactatt

SEQ ID NO: 464028 - DNA, 15 bp, Homo sapiens
aaaacaaataactat

SEQ ID NO: 464029 - DNA, 15 bp, Homo sapiens
taaaacaaataacta

SEQ ID NO: 464030 - DNA, 15 bp, Homo sapiens
ataaaacaaataact

SEQ ID NO: 464031 - DNA, 15 bp, Homo sapiens
cataaaacaaataac

SEQ ID NO: 464032 - DNA, 15 bp, Homo sapiens
tcataaaacaaataa

SEQ ID NO: 464033 - DNA, 15 bp, Homo sapiens
gtcataaaacaaata

SEQ ID NO: 464034 - DNA, 15 bp, Homo sapiens
agtcataaaacaaat

SEQ ID NO: 464035 - DNA, 15 bp, Homo sapiens
aagtcataaaacaaa

SEQ ID NO: 464036 - DNA, 15 bp, Homo sapiens
caagtcataaaacaa

SEQ ID NO: 464037 - DNA, 15 bp, Homo sapiens
gcaagtcataaaaca

SEQ ID NO: 464038 - DNA, 15 bp, Homo sapiens
agcaagtcataaaac

SEQ ID NO: 464039 - DNA, 15 bp, Homo sapiens
cagcaagtcataaaa

SEQ ID NO: 464040 - DNA, 15 bp, Homo sapiens
acagcaagtcataaa

SEQ ID NO: 464041 - DNA, 15 bp, Homo sapiens
aacagcaagtcataa

SEQ ID NO: 464042 - DNA, 15 bp, Homo sapiens
caacagcaagtcata

SEQ ID NO: 464043 - DNA, 15 bp, Homo sapiens
ccaacagcaagtcat

SEQ ID NO: 464044 - DNA, 15 bp, Homo sapiens
accaacagcaagtca

SEQ ID NO: 464045 - DNA, 15 bp, Homo sapiens
taccaacagcaagtc

SEQ ID NO: 464046 - DNA, 15 bp, Homo sapiens
ctaccaacagcaagt

SEQ ID NO: 464047 - DNA, 15 bp, Homo sapiens
cctaccaacagcaag

SEQ ID NO: 464048 - DNA, 15 bp, Homo sapiens
acctaccaacagcaa

SEQ ID NO: 464049 - DNA, 15 bp, Homo sapiens
aacctaccaacagca

SEQ ID NO: 464050 - DNA, 15 bp, Homo sapiens
taacctaccaacagc

SEQ ID NO: 464051 - DNA, 15 bp, Homo sapiens
ataacctaccaacag

SEQ ID NO: 464052 - DNA, 15 bp, Homo sapiens
gataacctaccaaca

SEQ ID NO: 464053 - DNA, 15 bp, Homo sapiens
ggataacctaccaac

SEQ ID NO: 464054 - DNA, 15 bp, Homo sapiens
gggataacctaccaa

SEQ ID NO: 464055 - DNA, 15 bp, Homo sapiens
ggggataacctacca

SEQ ID NO: 464056 - DNA, 15 bp, Homo sapiens
tggggataacctacc

SEQ ID NO: 464057 - DNA, 15 bp, Homo sapiens
ttggggataacctac

SEQ ID NO: 464058 - DNA, 15 bp, Homo sapiens
cttggggataaccta

SEQ ID NO: 464059 - DNA, 15 bp, Homo sapiens
ccttggggataacct

SEQ ID NO: 464060 - DNA, 15 bp, Homo sapiens
cccttggggataacc

SEQ ID NO: 464061 - DNA, 15 bp, Homo sapiens
tcccttggggataac

SEQ ID NO: 464062 - DNA, 15 bp, Homo sapiens
gtcccttggggataa

SEQ ID NO: 464063 - DNA, 15 bp, Homo sapiens
agtcccttggggata

SEQ ID NO: 464064 - DNA, 15 bp, Homo sapiens
cagtcccttggggat

SEQ ID NO: 464065 - DNA, 15 bp, Homo sapiens
tcagtcccttgggga

SEQ ID NO: 464066 - DNA, 15 bp, Homo sapiens
ctcagtcccttgggg

SEQ ID NO: 464067 - DNA, 15 bp, Homo sapiens
tctcagtcccttggg

SEQ ID NO: 464068 - DNA, 15 bp, Homo sapiens
ttctcagtcccttgg

SEQ ID NO: 464069 - DNA, 15 bp, Homo sapiens
tttctcagtcccttg

SEQ ID NO: 464070 - DNA, 15 bp, Homo sapiens
atttctcagtccctt

SEQ ID NO: 464071 - DNA, 15 bp, Homo sapiens
aatttctcagtccct

SEQ ID NO: 464072 - DNA, 15 bp, Homo sapiens
gaatttctcagtccc

SEQ ID NO: 464073 - DNA, 15 bp, Homo sapiens
ggaatttctcagtcc

SEQ ID NO: 464074 - DNA, 15 bp, Homo sapiens
aggaatttctcagtc

SEQ ID NO: 464075 - DNA, 15 bp, Homo sapiens
caggaatttctcagt

SEQ ID NO: 464076 - DNA, 15 bp, Homo sapiens
acaggaatttctcag

SEQ ID NO: 464077 - DNA, 15 bp, Homo sapiens
aacaggaatttctca

SEQ ID NO: 464078 - DNA, 15 bp, Homo sapiens
aaacaggaatttctc

SEQ ID NO: 464079 - DNA, 15 bp, Homo sapiens
aaaacaggaatttct

SEQ ID NO: 464080 - DNA, 15 bp, Homo sapiens
caaaacaggaatttc

SEQ ID NO: 464081 - DNA, 15 bp, Homo sapiens
tcaaaacaggaattt

SEQ ID NO: 464082 - DNA, 15 bp, Homo sapiens
ttcaaaacaggaatt

SEQ ID NO: 464083 - DNA, 15 bp, Homo sapiens
tttcaaaacaggaat

SEQ ID NO: 464084 - DNA, 15 bp, Homo sapiens
ttttcaaaacaggaa

SEQ ID NO: 464085 - DNA, 15 bp, Homo sapiens
cttttcaaaacagga

SEQ ID NO: 464086 - DNA, 15 bp, Homo sapiens
acttttcaaaacagg

SEQ ID NO: 464087 - DNA, 15 bp, Homo sapiens
gacttttcaaaacag

SEQ ID NO: 464088 - DNA, 15 bp, Homo sapiens
ggacttttcaaaaca

SEQ ID NO: 464089 - DNA, 15 bp, Homo sapiens
tggacttttcaaaac

SEQ ID NO: 464090 - DNA, 15 bp, Homo sapiens
ttggacttttcaaaa

SEQ ID NO: 464091 - DNA, 15 bp, Homo sapiens
tttggacttttcaaa

SEQ ID NO: 464092 - DNA, 15 bp, Homo sapiens
ttttggacttttcaa

SEQ ID NO: 464093 - DNA, 15 bp, Homo sapiens
tttttggacttttca

SEQ ID NO: 464094 - DNA, 15 bp, Homo sapiens
ctttttggacttttc

SEQ ID NO: 464095 - DNA, 15 bp, Homo sapiens
actttttggactttt

SEQ ID NO: 464096 - DNA, 15 bp, Homo sapiens
gactttttggacttt

SEQ ID NO: 464097 - DNA, 15 bp, Homo sapiens
agactttttggactt

SEQ ID NO: 464098 - DNA, 15 bp, Homo sapiens
aagactttttggact

SEQ ID NO: 464099 - DNA, 15 bp, Homo sapiens
aaagactttttggac

SEQ ID NO: 464100 - DNA, 15 bp, Homo sapiens
caaagactttttgga

SEQ ID NO: 464101 - DNA, 15 bp, Homo sapiens
tcaaagactttttgg

SEQ ID NO: 464102 - DNA, 15 bp, Homo sapiens
atcaaagactttttg

SEQ ID NO: 464103 - DNA, 15 bp, Homo sapiens
catcaaagacttttt

SEQ ID NO: 464104 - DNA, 15 bp, Homo sapiens
tcatcaaagactttt

SEQ ID NO: 464105 - DNA, 15 bp, Homo sapiens
gtcatcaaagacttt

SEQ ID NO: 464106 - DNA, 15 bp, Homo sapiens
agtcatcaaagactt

SEQ ID NO: 464107 - DNA, 15 bp, Homo sapiens
aagtcatcaaagact

SEQ ID NO: 464108 - DNA, 15 bp, Homo sapiens
caagtcatcaaagac

SEQ ID NO: 464109 - DNA, 15 bp, Homo sapiens
gcaagtcatcaaaga

SEQ ID NO: 464110 - DNA, 15 bp, Homo sapiens
agcaagtcatcaaag

SEQ ID NO: 464111 - DNA, 15 bp, Homo sapiens
cagcaagtcatcaaa

SEQ ID NO: 464112 - DNA, 15 bp, Homo sapiens
acagcaagtcatcaa

SEQ ID NO: 464113 - DNA, 15 bp, Homo sapiens
aacagcaagtcatca

SEQ ID NO: 464114 - DNA, 15 bp, Homo sapiens
aaacagcaagtcatc

SEQ ID NO: 464115 - DNA, 15 bp, Homo sapiens
gaaacagcaagtcat

SEQ ID NO: 464116 - DNA, 15 bp, Homo sapiens
tgaaacagcaagtca

SEQ ID NO: 464117 - DNA, 15 bp, Homo sapiens
atgaaacagcaagtc

SEQ ID NO: 464118 - DNA, 15 bp, Homo sapiens
aatgaaacagcaagt

SEQ ID NO: 464119 - DNA, 15 bp, Homo sapiens
aaatgaaacagcaag

SEQ ID NO: 464120 - DNA, 15 bp, Homo sapiens
aaaatgaaacagcaa

SEQ ID NO: 464121 - DNA, 15 bp, Homo sapiens
aaaaatgaaacagca

SEQ ID NO: 464122 - DNA, 15 bp, Homo sapiens
aaaaaatgaaacagc

SEQ ID NO: 464123 - DNA, 15 bp, Homo sapiens
aaaaaaatgaaacag

SEQ ID NO: 464124 - DNA, 15 bp, Homo sapiens
gaaaaaaatgaaaca

SEQ ID NO: 464125 - DNA, 15 bp, Homo sapiens
agaaaaaaatgaaac

SEQ ID NO: 464126 - DNA, 15 bp, Homo sapiens
aagaaaaaaatgaaa

SEQ ID NO: 464127 - DNA, 15 bp, Homo sapiens
aaagaaaaaaatgaa

SEQ ID NO: 464128 - DNA, 15 bp, Homo sapiens
aaaagaaaaaaatga

SEQ ID NO: 464129 - DNA, 15 bp, Homo sapiens
gaaaagaaaaaaatg

SEQ ID NO: 464130 - DNA, 15 bp, Homo sapiens
agaaaagaaaaaaat

SEQ ID NO: 464131 - DNA, 15 bp, Homo sapiens
gagaaaagaaaaaaa

SEQ ID NO: 464132 - DNA, 15 bp, Homo sapiens
agagaaaagaaaaaa

SEQ ID NO: 464133 - DNA, 15 bp, Homo sapiens
aagagaaaagaaaaa

SEQ ID NO: 464134 - DNA, 15 bp, Homo sapiens
gaagagaaaagaaaa

SEQ ID NO: 464135 - DNA, 15 bp, Homo sapiens
tgaagagaaaagaaa

SEQ ID NO: 464136 - DNA, 15 bp, Homo sapiens
ctgaagagaaaagaa

SEQ ID NO: 464137 - DNA, 15 bp, Homo sapiens
actgaagagaaaaga

SEQ ID NO: 464138 - DNA, 15 bp, Homo sapiens
aactgaagagaaaag

SEQ ID NO: 464139 - DNA, 15 bp, Homo sapiens
taactgaagagaaaa

SEQ ID NO: 464140 - DNA, 15 bp, Homo sapiens
ataactgaagagaaa

SEQ ID NO: 464141 - DNA, 15 bp, Homo sapiens
tataactgaagagaa

SEQ ID NO: 464142 - DNA, 15 bp, Homo sapiens
ctataactgaagaga

SEQ ID NO: 464143 - DNA, 15 bp, Homo sapiens
tctataactgaagag

SEQ ID NO: 464144 - DNA, 15 bp, Homo sapiens
ttctataactgaaga

SEQ ID NO: 464145 - DNA, 15 bp, Homo sapiens
tttctataactgaag

SEQ ID NO: 464146 - DNA, 15 bp, Homo sapiens
ttttctataactgaa

SEQ ID NO: 464147 - DNA, 15 bp, Homo sapiens
gttttctataactga

SEQ ID NO: 464148 - DNA, 15 bp, Homo sapiens
tgttttctataactg

SEQ ID NO: 464149 - DNA, 15 bp, Homo sapiens
ctgttttctataact

SEQ ID NO: 464150 - DNA, 15 bp, Homo sapiens
cctgttttctataac

SEQ ID NO: 464151 - DNA, 15 bp, Homo sapiens
tcctgttttctataa

SEQ ID NO: 464152 - DNA, 15 bp, Homo sapiens
atcctgttttctata

SEQ ID NO: 464153 - DNA, 15 bp, Homo sapiens
aatcctgttttctat

SEQ ID NO: 464154 - DNA, 15 bp, Homo sapiens
taatcctgttttcta

SEQ ID NO: 464155 - DNA, 15 bp, Homo sapiens
gtaatcctgttttct

SEQ ID NO: 464156 - DNA, 15 bp, Homo sapiens
tgtaatcctgttttc

SEQ ID NO: 464157 - DNA, 15 bp, Homo sapiens
gtgtaatcctgtttt

SEQ ID NO: 464158 - DNA, 15 bp, Homo sapiens
ggtgtaatcctgttt

SEQ ID NO: 464159 - DNA, 15 bp, Homo sapiens
gggtgtaatcctgtt

SEQ ID NO: 464160 - DNA, 15 bp, Homo sapiens
tgggtgtaatcctgt

SEQ ID NO: 464161 - DNA, 15 bp, Homo sapiens
gtgggtgtaatcctg

SEQ ID NO: 464162 - DNA, 15 bp, Homo sapiens
ggtgggtgtaatcct

SEQ ID NO: 464163 - DNA, 15 bp, Homo sapiens
aggtgggtgtaatcc

SEQ ID NO: 464164 - DNA, 15 bp, Homo sapiens
aaggtgggtgtaatc

SEQ ID NO: 464165 - DNA, 15 bp, Homo sapiens
caaggtgggtgtaat

SEQ ID NO: 464166 - DNA, 15 bp, Homo sapiens
gcaaggtgggtgtaa

SEQ ID NO: 464167 - DNA, 15 bp, Homo sapiens
ggcaaggtgggtgta

SEQ ID NO: 464168 - DNA, 15 bp, Homo sapiens
aggcaaggtgggtgt

SEQ ID NO: 464169 - DNA, 15 bp, Homo sapiens
aaggcaaggtgggtg

SEQ ID NO: 464170 - DNA, 15 bp, Homo sapiens
aaaggcaaggtgggt

SEQ ID NO: 464171 - DNA, 15 bp, Homo sapiens
caaaggcaaggtggg

SEQ ID NO: 464172 - DNA, 15 bp, Homo sapiens
acaaaggcaaggtgg

SEQ ID NO: 464173 - DNA, 15 bp, Homo sapiens
tacaaaggcaaggtg

SEQ ID NO: 464174 - DNA, 15 bp, Homo sapiens
gtacaaaggcaaggt

SEQ ID NO: 464175 - DNA, 15 bp, Homo sapiens
tgtacaaaggcaagg

SEQ ID NO: 464176 - DNA, 15 bp, Homo sapiens
ctgtacaaaggcaag

SEQ ID NO: 464177 - DNA, 15 bp, Homo sapiens
actgtacaaaggcaa

SEQ ID NO: 464178 - DNA, 15 bp, Homo sapiens
cactgtacaaaggca

SEQ ID NO: 464179 - DNA, 15 bp, Homo sapiens
gcactgtacaaaggc

SEQ ID NO: 464180 - DNA, 15 bp, Homo sapiens
tgcactgtacaaagg

SEQ ID NO: 464181 - DNA, 15 bp, Homo sapiens
atgcactgtacaaag

SEQ ID NO: 464182 - DNA, 15 bp, Homo sapiens
gatgcactgtacaaa

SEQ ID NO: 464183 - DNA, 15 bp, Homo sapiens
agatgcactgtacaa

SEQ ID NO: 464184 - DNA, 15 bp, Homo sapiens
tagatgcactgtaca

SEQ ID NO: 464185 - DNA, 15 bp, Homo sapiens
gtagatgcactgtac

SEQ ID NO: 464186 - DNA, 15 bp, Homo sapiens
agtagatgcactgta

SEQ ID NO: 464187 - DNA, 15 bp, Homo sapiens
tagtagatgcactgt

SEQ ID NO: 464188 - DNA, 15 bp, Homo sapiens
atagtagatgcactg

SEQ ID NO: 464189 - DNA, 15 bp, Homo sapiens
gatagtagatgcact

SEQ ID NO: 464190 - DNA, 15 bp, Homo sapiens
agatagtagatgcac

SEQ ID NO: 464191 - DNA, 15 bp, Homo sapiens
cagatagtagatgca

SEQ ID NO: 464192 - DNA, 15 bp, Homo sapiens
gcagatagtagatgc

SEQ ID NO: 464193 - DNA, 15 bp, Homo sapiens
agcagatagtagatg

SEQ ID NO: 464194 - DNA, 15 bp, Homo sapiens
cagcagatagtagat

SEQ ID NO: 464195 - DNA, 15 bp, Homo sapiens
tcagcagatagtaga

SEQ ID NO: 464196 - DNA, 15 bp, Homo sapiens
gtcagcagatagtag

SEQ ID NO: 464197 - DNA, 15 bp, Homo sapiens
agtcagcagatagta

SEQ ID NO: 464198 - DNA, 15 bp, Homo sapiens
aagtcagcagatagt

SEQ ID NO: 464199 - DNA, 15 bp, Homo sapiens
taagtcagcagatag

SEQ ID NO: 464200 - DNA, 15 bp, Homo sapiens
ttaagtcagcagata

SEQ ID NO: 464201 - DNA, 15 bp, Homo sapiens
gttaagtcagcagat

SEQ ID NO: 464202 - DNA, 15 bp, Homo sapiens
ggttaagtcagcaga

SEQ ID NO: 464203 - DNA, 15 bp, Homo sapiens
aggttaagtcagcag

SEQ ID NO: 464204 - DNA, 15 bp, Homo sapiens
caggttaagtcagca

SEQ ID NO: 464205 - DNA, 15 bp, Homo sapiens
tcaggttaagtcagc

SEQ ID NO: 464206 - DNA, 15 bp, Homo sapiens
ctcaggttaagtcag

SEQ ID NO: 464207 - DNA, 15 bp, Homo sapiens
actcaggttaagtca

SEQ ID NO: 464208 - DNA, 15 bp, Homo sapiens
tactcaggttaagtc

SEQ ID NO: 464209 - DNA, 15 bp, Homo sapiens
ttactcaggttaagt

SEQ ID NO: 464210 - DNA, 15 bp, Homo sapiens
tttactcaggttaag

SEQ ID NO: 464211 - DNA, 15 bp, Homo sapiens
atttactcaggttaa

SEQ ID NO: 464212 - DNA, 15 bp, Homo sapiens
catttactcaggtta

SEQ ID NO: 464213 - DNA, 15 bp, Homo sapiens
gcatttactcaggtt

SEQ ID NO: 464214 - DNA, 15 bp, Homo sapiens
agcatttactcaggt

SEQ ID NO: 464215 - DNA, 15 bp, Homo sapiens
aagcatttactcagg

SEQ ID NO: 464216 - DNA, 15 bp, Homo sapiens
aaagcatttactcag

SEQ ID NO: 464217 - DNA, 15 bp, Homo sapiens
caaagcatttactca

SEQ ID NO: 464218 - DNA, 15 bp, Homo sapiens
tcaaagcatttactc

SEQ ID NO: 464219 - DNA, 15 bp, Homo sapiens
ttcaaagcatttact

SEQ ID NO: 464220 - DNA, 15 bp, Homo sapiens
attcaaagcatttac

SEQ ID NO: 464221 - DNA, 15 bp, Homo sapiens
aattcaaagcattta

SEQ ID NO: 464222 - DNA, 15 bp, Homo sapiens
caattcaaagcattt

SEQ ID NO: 464223 - DNA, 15 bp, Homo sapiens
tcaattcaaagcatt

SEQ ID NO: 464224 - DNA, 15 bp, Homo sapiens
ctcaattcaaagcat

SEQ ID NO: 464225 - DNA, 15 bp, Homo sapiens
gctcaattcaaagca

SEQ ID NO: 464226 - DNA, 15 bp, Homo sapiens
ggctcaattcaaagc

SEQ ID NO: 464227 - DNA, 15 bp, Homo sapiens
gggctcaattcaaag

SEQ ID NO: 464228 - DNA, 15 bp, Homo sapiens
ggggctcaattcaaa

SEQ ID NO: 464229 - DNA, 15 bp, Homo sapiens
tggggctcaattcaa

SEQ ID NO: 464230 - DNA, 15 bp, Homo sapiens
atggggctcaattca

SEQ ID NO: 464231 - DNA, 15 bp, Homo sapiens
tatggggctcaattc

SEQ ID NO: 464232 - DNA, 15 bp, Homo sapiens
atatggggctcaatt

SEQ ID NO: 464233 - DNA, 15 bp, Homo sapiens
tatatggggctcaat

SEQ ID NO: 464234 - DNA, 15 bp, Homo sapiens
ttatatggggctcaa

SEQ ID NO: 464235 - DNA, 15 bp, Homo sapiens
attatatggggctca

SEQ ID NO: 464236 - DNA, 15 bp, Homo sapiens
cattatatggggctc

SEQ ID NO: 464237 - DNA, 15 bp, Homo sapiens
acattatatggggct

SEQ ID NO: 464238 - DNA, 15 bp, Homo sapiens
gacattatatggggc

SEQ ID NO: 464239 - DNA, 15 bp, Homo sapiens
ggacattatatgggg

SEQ ID NO: 464240 - DNA, 15 bp, Homo sapiens
aggacattatatggg

SEQ ID NO: 464241 - DNA, 15 bp, Homo sapiens
taggacattatatgg

SEQ ID NO: 464242 - DNA, 15 bp, Homo sapiens
ttaggacattatatg

SEQ ID NO: 464243 - DNA, 15 bp, Homo sapiens
cttaggacattatat

SEQ ID NO: 464244 - DNA, 15 bp, Homo sapiens
ccttaggacattata

SEQ ID NO: 464245 - DNA, 15 bp, Homo sapiens
gccttaggacattat

SEQ ID NO: 464246 - DNA, 15 bp, Homo sapiens
tgccttaggacatta

SEQ ID NO: 464247 - DNA, 15 bp, Homo sapiens
ctgccttaggacatt

SEQ ID NO: 464248 - DNA, 15 bp, Homo sapiens
gctgccttaggacat

SEQ ID NO: 464249 - DNA, 15 bp, Homo sapiens
ggctgccttaggaca

SEQ ID NO: 464250 - DNA, 15 bp, Homo sapiens
aggctgccttaggac

SEQ ID NO: 464251 - DNA, 15 bp, Homo sapiens
taggctgccttagga

SEQ ID NO: 464252 - DNA, 15 bp, Homo sapiens
ataggctgccttagg

SEQ ID NO: 464253 - DNA, 15 bp, Homo sapiens
tataggctgccttag

SEQ ID NO: 464254 - DNA, 15 bp, Homo sapiens
atataggctgcctta

SEQ ID NO: 464255 - DNA, 15 bp, Homo sapiens
catataggctgcctt

SEQ ID NO: 464256 - DNA, 15 bp, Homo sapiens
ccatataggctgcct

SEQ ID NO: 464257 - DNA, 15 bp, Homo sapiens
tccatataggctgcc

SEQ ID NO: 464258 - DNA, 15 bp, Homo sapiens
ctccatataggctgc

SEQ ID NO: 464259 - DNA, 15 bp, Homo sapiens
actccatataggctg

SEQ ID NO: 464260 - DNA, 15 bp, Homo sapiens
tactccatataggct

SEQ ID NO: 464261 - DNA, 15 bp, Homo sapiens
ttactccatataggc

SEQ ID NO: 464262 - DNA, 15 bp, Homo sapiens
attactccatatagg

SEQ ID NO: 464263 - DNA, 15 bp, Homo sapiens
cattactccatatag

SEQ ID NO: 464264 - DNA, 15 bp, Homo sapiens
tcattactccatata

SEQ ID NO: 464265 - DNA, 15 bp, Homo sapiens
ttcattactccatat

SEQ ID NO: 464266 - DNA, 15 bp, Homo sapiens
attcattactccata

SEQ ID NO: 464267 - DNA, 15 bp, Homo sapiens
aattcattactccat

SEQ ID NO: 464268 - DNA, 15 bp, Homo sapiens
caattcattactcca

SEQ ID NO: 464269 - DNA, 15 bp, Homo sapiens
acaattcattactcc

SEQ ID NO: 464270 - DNA, 15 bp, Homo sapiens
gacaattcattactc

SEQ ID NO: 464271 - DNA, 15 bp, Homo sapiens
agacaattcattact

SEQ ID NO: 464272 - DNA, 15 bp, Homo sapiens
aagacaattcattac

SEQ ID NO: 464273 - DNA, 15 bp, Homo sapiens
gaagacaattcatta

SEQ ID NO: 464274 - DNA, 15 bp, Homo sapiens
agaagacaattcatt

SEQ ID NO: 464275 - DNA, 15 bp, Homo sapiens
gagaagacaattcat

SEQ ID NO: 464276 - DNA, 15 bp, Homo sapiens
agagaagacaattca

SEQ ID NO: 464277 - DNA, 15 bp, Homo sapiens
gagagaagacaattc

SEQ ID NO: 464278 - DNA, 15 bp, Homo sapiens
agagagaagacaatt

SEQ ID NO: 464279 - DNA, 15 bp, Homo sapiens
aagagagaagacaat

SEQ ID NO: 464280 - DNA, 15 bp, Homo sapiens
taagagagaagacaa

SEQ ID NO: 464281 - DNA, 15 bp, Homo sapiens
ataagagagaagaca

SEQ ID NO: 464282 - DNA, 15 bp, Homo sapiens
cataagagagaagac

SEQ ID NO: 464283 - DNA, 15 bp, Homo sapiens
gcataagagagaaga

SEQ ID NO: 464284 - DNA, 15 bp, Homo sapiens
tgcataagagagaag

SEQ ID NO: 464285 - DNA, 15 bp, Homo sapiens
gtgcataagagagaa

SEQ ID NO: 464286 - DNA, 15 bp, Homo sapiens
ggtgcataagagaga

SEQ ID NO: 464287 - DNA, 15 bp, Homo sapiens
gggtgcataagagag

SEQ ID NO: 464288 - DNA, 15 bp, Homo sapiens
tgggtgcataagaga

SEQ ID NO: 464289 - DNA, 15 bp, Homo sapiens
ctgggtgcataagag

SEQ ID NO: 464290 - DNA, 15 bp, Homo sapiens
tctgggtgcataaga

SEQ ID NO: 464291 - DNA, 15 bp, Homo sapiens
ctctgggtgcataag

SEQ ID NO: 464292 - DNA, 15 bp, Homo sapiens
actctgggtgcataa

SEQ ID NO: 464293 - DNA, 15 bp, Homo sapiens
cactctgggtgcata

SEQ ID NO: 464294 - DNA, 15 bp, Homo sapiens
ccactctgggtgcat

SEQ ID NO: 464295 - DNA, 15 bp, Homo sapiens
accactctgggtgca

SEQ ID NO: 464296 - DNA, 15 bp, Homo sapiens
taccactctgggtgc

SEQ ID NO: 464297 - DNA, 15 bp, Homo sapiens
ctaccactctgggtg

SEQ ID NO: 464298 - DNA, 15 bp, Homo sapiens
actaccactctgggt

SEQ ID NO: 464299 - DNA, 15 bp, Homo sapiens
aactaccactctggg

SEQ ID NO: 464300 - DNA, 15 bp, Homo sapiens
caactaccactctgg

SEQ ID NO: 464301 - DNA, 15 bp, Homo sapiens
ccaactaccactctg

SEQ ID NO: 464302 - DNA, 15 bp, Homo sapiens
gccaactaccactct

SEQ ID NO: 464303 - DNA, 15 bp, Homo sapiens
tgccaactaccactc

SEQ ID NO: 464304 - DNA, 15 bp, Homo sapiens
gtgccaactaccact

SEQ ID NO: 464305 - DNA, 15 bp, Homo sapiens
agtgccaactaccac

SEQ ID NO: 464306 - DNA, 15 bp, Homo sapiens
gagtgccaactacca

SEQ ID NO: 464307 - DNA, 15 bp, Homo sapiens
tgagtgccaactacc

SEQ ID NO: 464308 - DNA, 15 bp, Homo sapiens
ttgagtgccaactac

SEQ ID NO: 464309 - DNA, 15 bp, Homo sapiens
cttgagtgccaacta

SEQ ID NO: 464310 - DNA, 15 bp, Homo sapiens
acttgagtgccaact

SEQ ID NO: 464311 - DNA, 15 bp, Homo sapiens
aacttgagtgccaac

SEQ ID NO: 464312 - DNA, 15 bp, Homo sapiens
caacttgagtgccaa

SEQ ID NO: 464313 - DNA, 15 bp, Homo sapiens
acaacttgagtgcca

SEQ ID NO: 464314 - DNA, 15 bp, Homo sapiens
aacaacttgagtgcc

SEQ ID NO: 464315 - DNA, 15 bp, Homo sapiens
gaacaacttgagtgc

SEQ ID NO: 464316 - DNA, 15 bp, Homo sapiens
ggaacaacttgagtg

SEQ ID NO: 464317 - DNA, 15 bp, Homo sapiens
aggaacaacttgagt

SEQ ID NO: 464318 - DNA, 15 bp, Homo sapiens
gaggaacaacttgag

SEQ ID NO: 464319 - DNA, 15 bp, Homo sapiens
tgaggaacaacttga

SEQ ID NO: 464320 - DNA, 15 bp, Homo sapiens
ctgaggaacaacttg

SEQ ID NO: 464321 - DNA, 15 bp, Homo sapiens
tctgaggaacaactt

SEQ ID NO: 464322 - DNA, 15 bp, Homo sapiens
atctgaggaacaact

SEQ ID NO: 464323 - DNA, 15 bp, Homo sapiens
tatctgaggaacaac

SEQ ID NO: 464324 - DNA, 15 bp, Homo sapiens
ttatctgaggaacaa

SEQ ID NO: 464325 - DNA, 15 bp, Homo sapiens
gttatctgaggaaca

SEQ ID NO: 464326 - DNA, 15 bp, Homo sapiens
agttatctgaggaac

SEQ ID NO: 464327 - DNA, 15 bp, Homo sapiens
aagttatctgaggaa

SEQ ID NO: 464328 - DNA, 15 bp, Homo sapiens
aaagttatctgagga

SEQ ID NO: 464329 - DNA, 15 bp, Homo sapiens
caaagttatctgagg

SEQ ID NO: 464330 - DNA, 15 bp, Homo sapiens
acaaagttatctgag

SEQ ID NO: 464331 - DNA, 15 bp, Homo sapiens
cacaaagttatctga

SEQ ID NO: 464332 - DNA, 15 bp, Homo sapiens
acacaaagttatctg

SEQ ID NO: 464333 - DNA, 15 bp, Homo sapiens
cacacaaagttatct

SEQ ID NO: 464334 - DNA, 15 bp, Homo sapiens
acacacaaagttatc

SEQ ID NO: 464335 - DNA, 15 bp, Homo sapiens
aacacacaaagttat

SEQ ID NO: 464336 - DNA, 15 bp, Homo sapiens
gaacacacaaagtta

SEQ ID NO: 464337 - DNA, 15 bp, Homo sapiens
agaacacacaaagtt

SEQ ID NO: 464338 - DNA, 15 bp, Homo sapiens
cagaacacacaaagt

SEQ ID NO: 464339 - DNA, 15 bp, Homo sapiens
ccagaacacacaaag

SEQ ID NO: 464340 - DNA, 15 bp, Homo sapiens
cccagaacacacaaa

SEQ ID NO: 464341 - DNA, 15 bp, Homo sapiens
ccccagaacacacaa

SEQ ID NO: 464342 - DNA, 15 bp, Homo sapiens
gccccagaacacaca

SEQ ID NO: 464343 - DNA, 15 bp, Homo sapiens
agccccagaacacac

SEQ ID NO: 464344 - DNA, 15 bp, Homo sapiens
gagccccagaacaca

SEQ ID NO: 464345 - DNA, 15 bp, Homo sapiens
tgagccccagaacac

SEQ ID NO: 464346 - DNA, 15 bp, Homo sapiens
ttgagccccagaaca

SEQ ID NO: 464347 - DNA, 15 bp, Homo sapiens
attgagccccagaac

SEQ ID NO: 464348 - DNA, 15 bp, Homo sapiens
cattgagccccagaa

SEQ ID NO: 464349 - DNA, 15 bp, Homo sapiens
tcattgagccccaga

SEQ ID NO: 464350 - DNA, 15 bp, Homo sapiens
ttcattgagccccag

SEQ ID NO: 464351 - DNA, 15 bp, Homo sapiens
cttcattgagcccca

SEQ ID NO: 464352 - DNA, 15 bp, Homo sapiens
acttcattgagcccc

SEQ ID NO: 464353 - DNA, 15 bp, Homo sapiens
tacttcattgagccc

SEQ ID NO: 464354 - DNA, 15 bp, Homo sapiens
ctacttcattgagcc

SEQ ID NO: 464355 - DNA, 15 bp, Homo sapiens
actacttcattgagc

SEQ ID NO: 464356 - DNA, 15 bp, Homo sapiens
aactacttcattgag

SEQ ID NO: 464357 - DNA, 15 bp, Homo sapiens
taactacttcattga

SEQ ID NO: 464358 - DNA, 15 bp, Homo sapiens
ataactacttcattg

SEQ ID NO: 464359 - DNA, 15 bp, Homo sapiens
aataactacttcatt

SEQ ID NO: 464360 - DNA, 15 bp, Homo sapiens
taataactacttcat

SEQ ID NO: 464361 - DNA, 15 bp, Homo sapiens
ttaataactacttca

SEQ ID NO: 464362 - DNA, 15 bp, Homo sapiens
cttaataactacttc

SEQ ID NO: 464363 - DNA, 15 bp, Homo sapiens
acttaataactactt

SEQ ID NO: 464364 - DNA, 15 bp, Homo sapiens
gacttaataactact

SEQ ID NO: 464365 - DNA, 15 bp, Homo sapiens
tgacttaataactac

SEQ ID NO: 464366 - DNA, 15 bp, Homo sapiens
gtgacttaataacta

SEQ ID NO: 464367 - DNA, 15 bp, Homo sapiens
tgtgacttaataact

SEQ ID NO: 464368 - DNA, 15 bp, Homo sapiens
ctgtgacttaataac

SEQ ID NO: 464369 - DNA, 15 bp, Homo sapiens
cctgtgacttaataa

SEQ ID NO: 464370 - DNA, 15 bp, Homo sapiens
gcctgtgacttaata

SEQ ID NO: 464371 - DNA, 15 bp, Homo sapiens
agcctgtgacttaat

SEQ ID NO: 464372 - DNA, 15 bp, Homo sapiens
aagcctgtgacttaa

SEQ ID NO: 464373 - DNA, 15 bp, Homo sapiens
caagcctgtgactta

SEQ ID NO: 464374 - DNA, 15 bp, Homo sapiens
ccaagcctgtgactt

SEQ ID NO: 464375 - DNA, 15 bp, Homo sapiens
cccaagcctgtgact

SEQ ID NO: 464376 - DNA, 15 bp, Homo sapiens
ccccaagcctgtgac

SEQ ID NO: 464377 - DNA, 15 bp, Homo sapiens
tccccaagcctgtga

SEQ ID NO: 464378 - DNA, 15 bp, Homo sapiens
ctccccaagcctgtg

SEQ ID NO: 464379 - DNA, 15 bp, Homo sapiens
tctccccaagcctgt

SEQ ID NO: 464380 - DNA, 15 bp, Homo sapiens
ttctccccaagcctg

SEQ ID NO: 464381 - DNA, 15 bp, Homo sapiens
gttctccccaagcct

SEQ ID NO: 464382 - DNA, 15 bp, Homo sapiens
tgttctccccaagcc

SEQ ID NO: 464383 - DNA, 15 bp, Homo sapiens
atgttctccccaagc

SEQ ID NO: 464384 - DNA, 15 bp, Homo sapiens
aatgttctccccaag

SEQ ID NO: 464385 - DNA, 15 bp, Homo sapiens
gaatgttctccccaa

SEQ ID NO: 464386 - DNA, 15 bp, Homo sapiens
tgaatgttctcccca

SEQ ID NO: 464387 - DNA, 15 bp, Homo sapiens
atgaatgttctcccc

SEQ ID NO: 464388 - DNA, 15 bp, Homo sapiens
gatgaatgttctccc

SEQ ID NO: 464389 - DNA, 15 bp, Homo sapiens
ggatgaatgttctcc

SEQ ID NO: 464390 - DNA, 15 bp, Homo sapiens
aggatgaatgttctc

SEQ ID NO: 464391 - DNA, 15 bp, Homo sapiens
taggatgaatgttct

SEQ ID NO: 464392 - DNA, 15 bp, Homo sapiens
ataggatgaatgttc

SEQ ID NO: 464393 - DNA, 15 bp, Homo sapiens
cataggatgaatgtt

SEQ ID NO: 464394 - DNA, 15 bp, Homo sapiens
ccataggatgaatgt

SEQ ID NO: 464395 - DNA, 15 bp, Homo sapiens
gccataggatgaatg

SEQ ID NO: 464396 - DNA, 15 bp, Homo sapiens
tgccataggatgaat

SEQ ID NO: 464397 - DNA, 15 bp, Homo sapiens
atgccataggatgaa

SEQ ID NO: 464398 - DNA, 15 bp, Homo sapiens
aatgccataggatga

SEQ ID NO: 464399 - DNA, 15 bp, Homo sapiens
caatgccataggatg

SEQ ID NO: 464400 - DNA, 15 bp, Homo sapiens
tcaatgccataggat

SEQ ID NO: 464401 - DNA, 15 bp, Homo sapiens
ttcaatgccatagga

SEQ ID NO: 464402 - DNA, 15 bp, Homo sapiens
attcaatgccatagg

SEQ ID NO: 464403 - DNA, 15 bp, Homo sapiens
cattcaatgccatag

SEQ ID NO: 464404 - DNA, 15 bp, Homo sapiens
tcattcaatgccata

SEQ ID NO: 464405 - DNA, 15 bp, Homo sapiens
ttcattcaatgccat

SEQ ID NO: 464406 - DNA, 15 bp, Homo sapiens
cttcattcaatgcca

SEQ ID NO: 464407 - DNA, 15 bp, Homo sapiens
acttcattcaatgcc

SEQ ID NO: 464408 - DNA, 15 bp, Homo sapiens
cacttcattcaatgc

SEQ ID NO: 464409 - DNA, 15 bp, Homo sapiens
acacttcattcaatg

SEQ ID NO: 464410 - DNA, 15 bp, Homo sapiens
aacacttcattcaat

SEQ ID NO: 464411 - DNA, 15 bp, Homo sapiens
caacacttcattcaa

SEQ ID NO: 464412 - DNA, 15 bp, Homo sapiens
gcaacacttcattca

SEQ ID NO: 464413 - DNA, 15 bp, Homo sapiens
ggcaacacttcattc

SEQ ID NO: 464414 - DNA, 15 bp, Homo sapiens
gggcaacacttcatt

SEQ ID NO: 464415 - DNA, 15 bp, Homo sapiens
tgggcaacacttcat

SEQ ID NO: 464416 - DNA, 15 bp, Homo sapiens
ttgggcaacacttca

SEQ ID NO: 464417 - DNA, 15 bp, Homo sapiens
attgggcaacacttc

SEQ ID NO: 464418 - DNA, 15 bp, Homo sapiens
aattgggcaacactt

SEQ ID NO: 464419 - DNA, 15 bp, Homo sapiens
gaattgggcaacact

SEQ ID NO: 464420 - DNA, 15 bp, Homo sapiens
agaattgggcaacac

SEQ ID NO: 464421 - DNA, 15 bp, Homo sapiens
tagaattgggcaaca

SEQ ID NO: 464422 - DNA, 15 bp, Homo sapiens
ctagaattgggcaac

SEQ ID NO: 464423 - DNA, 15 bp, Homo sapiens
tctagaattgggcaa

SEQ ID NO: 464424 - DNA, 15 bp, Homo sapiens
ttctagaattgggca

SEQ ID NO: 464425 - DNA, 15 bp, Homo sapiens
attctagaattgggc

SEQ ID NO: 464426 - DNA, 15 bp, Homo sapiens
cattctagaattggg

SEQ ID NO: 464427 - DNA, 15 bp, Homo sapiens
acattctagaattgg

SEQ ID NO: 464428 - DNA, 15 bp, Homo sapiens
gacattctagaattg

SEQ ID NO: 464429 - DNA, 15 bp, Homo sapiens
agacattctagaatt

SEQ ID NO: 464430 - DNA, 15 bp, Homo sapiens
tagacattctagaat

SEQ ID NO: 464431 - DNA, 15 bp, Homo sapiens
ttagacattctagaa

SEQ ID NO: 464432 - DNA, 15 bp, Homo sapiens
attagacattctaga

SEQ ID NO: 464433 - DNA, 15 bp, Homo sapiens
tattagacattctag

SEQ ID NO: 464434 - DNA, 15 bp, Homo sapiens
ttattagacattcta

SEQ ID NO: 464435 - DNA, 15 bp, Homo sapiens
tttattagacattct

SEQ ID NO: 464436 - DNA, 15 bp, Homo sapiens
ttttattagacattc

SEQ ID NO: 464437 - DNA, 15 bp, Homo sapiens
attttattagacatt

SEQ ID NO: 464438 - DNA, 15 bp, Homo sapiens
aattttattagacat

SEQ ID NO: 464439 - DNA, 15 bp, Homo sapiens
aaattttattagaca

SEQ ID NO: 464440 - DNA, 15 bp, Homo sapiens
aaaattttattagac

SEQ ID NO: 464441 - DNA, 15 bp, Homo sapiens
aaaaattttattaga

SEQ ID NO: 464442 - DNA, 15 bp, Homo sapiens
aaaaaattttattag

SEQ ID NO: 464443 - DNA, 15 bp, Homo sapiens
aaaaaaattttatta

SEQ ID NO: 464444 - DNA, 15 bp, Homo sapiens
taaaaaaattttatt

SEQ ID NO: 464445 - DNA, 15 bp, Homo sapiens
ttaaaaaaattttat

SEQ ID NO: 464446 - DNA, 15 bp, Homo sapiens
tttaaaaaaatttta

SEQ ID NO: 464447 - DNA, 15 bp, Homo sapiens
ttttaaaaaaatttt

SEQ ID NO: 464448 - DNA, 15 bp, Homo sapiens
tttttaaaaaaattt

SEQ ID NO: 464449 - DNA, 15 bp, Homo sapiens
gtttttaaaaaaatt

SEQ ID NO: 464450 - DNA, 15 bp, Homo sapiens
ggtttttaaaaaaat

SEQ ID NO: 464451 - DNA, 15 bp, Homo sapiens
gggtttttaaaaaaa

SEQ ID NO: 464452 - DNA, 15 bp, Homo sapiens
tgggtttttaaaaaa

SEQ ID NO: 464453 - DNA, 15 bp, Homo sapiens
gtgggtttttaaaaa

SEQ ID NO: 464454 - DNA, 15 bp, Homo sapiens
tgtgggtttttaaaa

SEQ ID NO: 464455 - DNA, 15 bp, Homo sapiens
ctgtgggtttttaaa

SEQ ID NO: 464456 - DNA, 15 bp, Homo sapiens
cctgtgggtttttaa

SEQ ID NO: 464457 - DNA, 15 bp, Homo sapiens
gcctgtgggttttta

SEQ ID NO: 464458 - DNA, 15 bp, Homo sapiens
agcctgtgggttttt

SEQ ID NO: 464459 - DNA, 15 bp, Homo sapiens
aagcctgtgggtttt

SEQ ID NO: 464460 - DNA, 15 bp, Homo sapiens
taagcctgtgggttt

SEQ ID NO: 464461 - DNA, 15 bp, Homo sapiens
ctaagcctgtgggtt

SEQ ID NO: 464462 - DNA, 15 bp, Homo sapiens
tctaagcctgtgggt

SEQ ID NO: 464463 - DNA, 15 bp, Homo sapiens
ttctaagcctgtggg

SEQ ID NO: 464464 - DNA, 15 bp, Homo sapiens
attctaagcctgtgg

SEQ ID NO: 464465 - DNA, 15 bp, Homo sapiens
aattctaagcctgtg

SEQ ID NO: 464466 - DNA, 15 bp, Homo sapiens
taattctaagcctgt

SEQ ID NO: 464467 - DNA, 15 bp, Homo sapiens
ataattctaagcctg

SEQ ID NO: 464468 - DNA, 15 bp, Homo sapiens
aataattctaagcct

SEQ ID NO: 464469 - DNA, 15 bp, Homo sapiens
gaataattctaagcc

SEQ ID NO: 464470 - DNA, 15 bp, Homo sapiens
ggaataattctaagc

SEQ ID NO: 464471 - DNA, 15 bp, Homo sapiens
cggaataattctaag

SEQ ID NO: 464472 - DNA, 15 bp, Homo sapiens
acggaataattctaa

SEQ ID NO: 464473 - DNA, 15 bp, Homo sapiens
tacggaataattcta

SEQ ID NO: 464474 - DNA, 15 bp, Homo sapiens
ctacggaataattct

SEQ ID NO: 464475 - DNA, 15 bp, Homo sapiens
tctacggaataattc

SEQ ID NO: 464476 - DNA, 15 bp, Homo sapiens
atctacggaataatt

SEQ ID NO: 464477 - DNA, 15 bp, Homo sapiens
tatctacggaataat

SEQ ID NO: 464478 - DNA, 15 bp, Homo sapiens
atatctacggaataa

SEQ ID NO: 464479 - DNA, 15 bp, Homo sapiens
catatctacggaata

SEQ ID NO: 464480 - DNA, 15 bp, Homo sapiens
tcatatctacggaat

SEQ ID NO: 464481 - DNA, 15 bp, Homo sapiens
ttcatatctacggaa

SEQ ID NO: 464482 - DNA, 15 bp, Homo sapiens
cttcatatctacgga

SEQ ID NO: 464483 - DNA, 15 bp, Homo sapiens
acttcatatctacgg

SEQ ID NO: 464484 - DNA, 15 bp, Homo sapiens
tacttcatatctacg

SEQ ID NO: 464485 - DNA, 15 bp, Homo sapiens
ttacttcatatctac

SEQ ID NO: 464486 - DNA, 15 bp, Homo sapiens
attacttcatatcta

SEQ ID NO: 464487 - DNA, 15 bp, Homo sapiens
cattacttcatatct

SEQ ID NO: 464488 - DNA, 15 bp, Homo sapiens
acattacttcatatc

SEQ ID NO: 464489 - DNA, 15 bp, Homo sapiens
tacattacttcatat

SEQ ID NO: 464490 - DNA, 15 bp, Homo sapiens
ctacattacttcata

SEQ ID NO: 464491 - DNA, 15 bp, Homo sapiens
actacattacttcat

SEQ ID NO: 464492 - DNA, 15 bp, Homo sapiens
aactacattacttca

SEQ ID NO: 464493 - DNA, 15 bp, Homo sapiens
taactacattacttc

SEQ ID NO: 464494 - DNA, 15 bp, Homo sapiens
ctaactacattactt

SEQ ID NO: 464495 - DNA, 15 bp, Homo sapiens
tctaactacattact

SEQ ID NO: 464496 - DNA, 15 bp, Homo sapiens
ttctaactacattac

SEQ ID NO: 464497 - DNA, 15 bp, Homo sapiens
gttctaactacatta

SEQ ID NO: 464498 - DNA, 15 bp, Homo sapiens
agttctaactacatt

SEQ ID NO: 464499 - DNA, 15 bp, Homo sapiens
aagttctaactacat

SEQ ID NO: 464500 - DNA, 15 bp, Homo sapiens
taagttctaactaca

SEQ ID NO: 464501 - DNA, 15 bp, Homo sapiens
ctaagttctaactac

SEQ ID NO: 464502 - DNA, 15 bp, Homo sapiens
actaagttctaacta

SEQ ID NO: 464503 - DNA, 15 bp, Homo sapiens
cactaagttctaact

SEQ ID NO: 464504 - DNA, 15 bp, Homo sapiens
ccactaagttctaac

SEQ ID NO: 464505 - DNA, 15 bp, Homo sapiens
tccactaagttctaa

SEQ ID NO: 464506 - DNA, 15 bp, Homo sapiens
ctccactaagttcta

SEQ ID NO: 464507 - DNA, 15 bp, Homo sapiens
actccactaagttct

SEQ ID NO: 464508 - DNA, 15 bp, Homo sapiens
aactccactaagttc

SEQ ID NO: 464509 - DNA, 15 bp, Homo sapiens
gaactccactaagtt

SEQ ID NO: 464510 - DNA, 15 bp, Homo sapiens
agaactccactaagt

SEQ ID NO: 464511 - DNA, 15 bp, Homo sapiens
aagaactccactaag

SEQ ID NO: 464512 - DNA, 15 bp, Homo sapiens
aaagaactccactaa

SEQ ID NO: 464513 - DNA, 15 bp, Homo sapiens
taaagaactccacta

SEQ ID NO: 464514 - DNA, 15 bp, Homo sapiens
ctaaagaactccact

SEQ ID NO: 464515 - DNA, 15 bp, Homo sapiens
tctaaagaactccac

SEQ ID NO: 464516 - DNA, 15 bp, Homo sapiens
atctaaagaactcca

SEQ ID NO: 464517 - DNA, 15 bp, Homo sapiens
aatctaaagaactcc

SEQ ID NO: 464518 - DNA, 15 bp, Homo sapiens
taatctaaagaactc

SEQ ID NO: 464519 - DNA, 15 bp, Homo sapiens
ttaatctaaagaact

SEQ ID NO: 464520 - DNA, 15 bp, Homo sapiens
gttaatctaaagaac

SEQ ID NO: 464521 - DNA, 15 bp, Homo sapiens
agttaatctaaagaa

SEQ ID NO: 464522 - DNA, 15 bp, Homo sapiens
aagttaatctaaaga

SEQ ID NO: 464523 - DNA, 15 bp, Homo sapiens
caagttaatctaaag

SEQ ID NO: 464524 - DNA, 15 bp, Homo sapiens
acaagttaatctaaa

SEQ ID NO: 464525 - DNA, 15 bp, Homo sapiens
tacaagttaatctaa

SEQ ID NO: 464526 - DNA, 15 bp, Homo sapiens
ttacaagttaatcta

SEQ ID NO: 464527 - DNA, 15 bp, Homo sapiens
attacaagttaatct

SEQ ID NO: 464528 - DNA, 15 bp, Homo sapiens
aattacaagttaatc

SEQ ID NO: 464529 - DNA, 15 bp, Homo sapiens
aaattacaagttaat

SEQ ID NO: 464530 - DNA, 15 bp, Homo sapiens
caaattacaagttaa

SEQ ID NO: 464531 - DNA, 15 bp, Homo sapiens
tcaaattacaagtta

SEQ ID NO: 464532 - DNA, 15 bp, Homo sapiens
ttcaaattacaagtt

SEQ ID NO: 464533 - DNA, 15 bp, Homo sapiens
tttcaaattacaagt

SEQ ID NO: 464534 - DNA, 15 bp, Homo sapiens
ttttcaaattacaag

SEQ ID NO: 464535 - DNA, 15 bp, Homo sapiens
tttttcaaattacaa

SEQ ID NO: 464536 - DNA, 15 bp, Homo sapiens
gtttttcaaattaca

SEQ ID NO: 464537 - DNA, 15 bp, Homo sapiens
ggtttttcaaattac

SEQ ID NO: 464538 - DNA, 15 bp, Homo sapiens
tggtttttcaaatta

SEQ ID NO: 464539 - DNA, 15 bp, Homo sapiens
ttggtttttcaaatt

SEQ ID NO: 464540 - DNA, 15 bp, Homo sapiens
tttggtttttcaaat

SEQ ID NO: 464541 - DNA, 15 bp, Homo sapiens
ttttggtttttcaaa

SEQ ID NO: 464542 - DNA, 15 bp, Homo sapiens
attttggtttttcaa

SEQ ID NO: 464543 - DNA, 15 bp, Homo sapiens
aattttggtttttca

SEQ ID NO: 464544 - DNA, 15 bp, Homo sapiens
caattttggtttttc

SEQ ID NO: 464545 - DNA, 15 bp, Homo sapiens
tcaattttggttttt

SEQ ID NO: 464546 - DNA, 15 bp, Homo sapiens
ttcaattttggtttt

SEQ ID NO: 464547 - DNA, 15 bp, Homo sapiens
tttcaattttggttt

SEQ ID NO: 464548 - DNA, 15 bp, Homo sapiens
atttcaattttggtt

SEQ ID NO: 464549 - DNA, 15 bp, Homo sapiens
aatttcaattttggt

SEQ ID NO: 464550 - DNA, 15 bp, Homo sapiens
caatttcaattttgg

SEQ ID NO: 464551 - DNA, 15 bp, Homo sapiens
acaatttcaattttg

SEQ ID NO: 464552 - DNA, 15 bp, Homo sapiens
cacaatttcaatttt

SEQ ID NO: 464553 - DNA, 15 bp, Homo sapiens
tcacaatttcaattt

SEQ ID NO: 464554 - DNA, 15 bp, Homo sapiens
ttcacaatttcaatt

SEQ ID NO: 464555 - DNA, 15 bp, Homo sapiens
tttcacaatttcaat

SEQ ID NO: 464556 - DNA, 15 bp, Homo sapiens
atttcacaatttcaa

SEQ ID NO: 464557 - DNA, 15 bp, Homo sapiens
tatttcacaatttca

SEQ ID NO: 464558 - DNA, 15 bp, Homo sapiens
ttatttcacaatttc

SEQ ID NO: 464559 - DNA, 15 bp, Homo sapiens
gttatttcacaattt

SEQ ID NO: 464560 - DNA, 15 bp, Homo sapiens
tgttatttcacaatt

SEQ ID NO: 464561 - DNA, 15 bp, Homo sapiens
atgttatttcacaat

SEQ ID NO: 464562 - DNA, 15 bp, Homo sapiens
catgttatttcacaa

SEQ ID NO: 464563 - DNA, 15 bp, Homo sapiens
ccatgttatttcaca

SEQ ID NO: 464564 - DNA, 15 bp, Homo sapiens
cccatgttatttcac

SEQ ID NO: 464565 - DNA, 15 bp, Homo sapiens
gcccatgttatttca

SEQ ID NO: 464566 - DNA, 15 bp, Homo sapiens
agcccatgttatttc

SEQ ID NO: 464567 - DNA, 15 bp, Homo sapiens
gagcccatgttattt

SEQ ID NO: 464568 - DNA, 15 bp, Homo sapiens
agagcccatgttatt

SEQ ID NO: 464569 - DNA, 15 bp, Homo sapiens
aagagcccatgttat

SEQ ID NO: 464570 - DNA, 15 bp, Homo sapiens
aaagagcccatgtta

SEQ ID NO: 464571 - DNA, 15 bp, Homo sapiens
caaagagcccatgtt

SEQ ID NO: 464572 - DNA, 15 bp, Homo sapiens
tcaaagagcccatgt

SEQ ID NO: 464573 - DNA, 15 bp, Homo sapiens
ctcaaagagcccatg

SEQ ID NO: 464574 - DNA, 15 bp, Homo sapiens
cctcaaagagcccat

SEQ ID NO: 464575 - DNA, 15 bp, Homo sapiens
acctcaaagagccca

SEQ ID NO: 464576 - DNA, 15 bp, Homo sapiens
gacctcaaagagccc

SEQ ID NO: 464577 - DNA, 15 bp, Homo sapiens
agacctcaaagagcc

SEQ ID NO: 464578 - DNA, 15 bp, Homo sapiens
aagacctcaaagagc

SEQ ID NO: 464579 - DNA, 15 bp, Homo sapiens
aaagacctcaaagag

SEQ ID NO: 464580 - DNA, 15 bp, Homo sapiens
aaaagacctcaaaga

SEQ ID NO: 464581 - DNA, 15 bp, Homo sapiens
gaaaagacctcaaag

SEQ ID NO: 464582 - DNA, 15 bp, Homo sapiens
ggaaaagacctcaaa

SEQ ID NO: 464583 - DNA, 15 bp, Homo sapiens
tggaaaagacctcaa

SEQ ID NO: 464584 - DNA, 15 bp, Homo sapiens
ctggaaaagacctca

SEQ ID NO: 464585 - DNA, 15 bp, Homo sapiens
actggaaaagacctc

SEQ ID NO: 464586 - DNA, 15 bp, Homo sapiens
tactggaaaagacct

SEQ ID NO: 464587 - DNA, 15 bp, Homo sapiens
ttactggaaaagacc

SEQ ID NO: 464588 - DNA, 15 bp, Homo sapiens
tttactggaaaagac

SEQ ID NO: 464589 - DNA, 15 bp, Homo sapiens
ttttactggaaaaga

SEQ ID NO: 464590 - DNA, 15 bp, Homo sapiens
gttttactggaaaag

SEQ ID NO: 464591 - DNA, 15 bp, Homo sapiens
tgttttactggaaaa

SEQ ID NO: 464592 - DNA, 15 bp, Homo sapiens
ctgttttactggaaa

SEQ ID NO: 464593 - DNA, 15 bp, Homo sapiens
actgttttactggaa

SEQ ID NO: 464594 - DNA, 15 bp, Homo sapiens
aactgttttactgga

SEQ ID NO: 464595 - DNA, 15 bp, Homo sapiens
taactgttttactgg

SEQ ID NO: 464596 - DNA, 15 bp, Homo sapiens
gtaactgttttactg

SEQ ID NO: 464597 - DNA, 15 bp, Homo sapiens
tgtaactgttttact

SEQ ID NO: 464598 - DNA, 15 bp, Homo sapiens
ctgtaactgttttac

SEQ ID NO: 464599 - DNA, 15 bp, Homo sapiens
actgtaactgtttta

SEQ ID NO: 464600 - DNA, 15 bp, Homo sapiens
tactgtaactgtttt

SEQ ID NO: 464601 - DNA, 15 bp, Homo sapiens
ttactgtaactgttt

SEQ ID NO: 464602 - DNA, 15 bp, Homo sapiens
tttactgtaactgtt

SEQ ID NO: 464603 - DNA, 15 bp, Homo sapiens
ctttactgtaactgt

SEQ ID NO: 464604 - DNA, 15 bp, Homo sapiens
gctttactgtaactg

SEQ ID NO: 464605 - DNA, 15 bp, Homo sapiens
agctttactgtaact

SEQ ID NO: 464606 - DNA, 15 bp, Homo sapiens
cagctttactgtaac

SEQ ID NO: 464607 - DNA, 15 bp, Homo sapiens
gcagctttactgtaa

SEQ ID NO: 464608 - DNA, 15 bp, Homo sapiens
agcagctttactgta

SEQ ID NO: 464609 - DNA, 15 bp, Homo sapiens
aagcagctttactgt

SEQ ID NO: 464610 - DNA, 15 bp, Homo sapiens
caagcagctttactg

SEQ ID NO: 464611 - DNA, 15 bp, Homo sapiens
ccaagcagctttact

SEQ ID NO: 464612 - DNA, 15 bp, Homo sapiens
gccaagcagctttac

SEQ ID NO: 464613 - DNA, 15 bp, Homo sapiens
tgccaagcagcttta

SEQ ID NO: 464614 - DNA, 15 bp, Homo sapiens
ctgccaagcagcttt

SEQ ID NO: 464615 - DNA, 15 bp, Homo sapiens
actgccaagcagctt

SEQ ID NO: 464616 - DNA, 15 bp, Homo sapiens
cactgccaagcagct

SEQ ID NO: 464617 - DNA, 15 bp, Homo sapiens
tcactgccaagcagc

SEQ ID NO: 464618 - DNA, 15 bp, Homo sapiens
atcactgccaagcag

SEQ ID NO: 464619 - DNA, 15 bp, Homo sapiens
aatcactgccaagca

SEQ ID NO: 464620 - DNA, 15 bp, Homo sapiens
aaatcactgccaagc

SEQ ID NO: 464621 - DNA, 15 bp, Homo sapiens
aaaatcactgccaag

SEQ ID NO: 464622 - DNA, 15 bp, Homo sapiens
gaaaatcactgccaa

SEQ ID NO: 464623 - DNA, 15 bp, Homo sapiens
ggaaaatcactgcca

SEQ ID NO: 464624 - DNA, 15 bp, Homo sapiens
aggaaaatcactgcc

SEQ ID NO: 464625 - DNA, 15 bp, Homo sapiens
taggaaaatcactgc

SEQ ID NO: 464626 - DNA, 15 bp, Homo sapiens
ctaggaaaatcactg

SEQ ID NO: 464627 - DNA, 15 bp, Homo sapiens
tctaggaaaatcact

SEQ ID NO: 464628 - DNA, 15 bp, Homo sapiens
gtctaggaaaatcac

SEQ ID NO: 464629 - DNA, 15 bp, Homo sapiens
tgtctaggaaaatca

SEQ ID NO: 464630 - DNA, 15 bp, Homo sapiens
gtgtctaggaaaatc

SEQ ID NO: 464631 - DNA, 15 bp, Homo sapiens
agtgtctaggaaaat

SEQ ID NO: 464632 - DNA, 15 bp, Homo sapiens
aagtgtctaggaaaa

SEQ ID NO: 464633 - DNA, 15 bp, Homo sapiens
aaagtgtctaggaaa

SEQ ID NO: 464634 - DNA, 15 bp, Homo sapiens
caaagtgtctaggaa

SEQ ID NO: 464635 - DNA, 15 bp, Homo sapiens
ccaaagtgtctagga

SEQ ID NO: 464636 - DNA, 15 bp, Homo sapiens
gccaaagtgtctagg

SEQ ID NO: 464637 - DNA, 15 bp, Homo sapiens
agccaaagtgtctag

SEQ ID NO: 464638 - DNA, 15 bp, Homo sapiens
tagccaaagtgtcta

SEQ ID NO: 464639 - DNA, 15 bp, Homo sapiens
ctagccaaagtgtct

SEQ ID NO: 464640 - DNA, 15 bp, Homo sapiens
actagccaaagtgtc

SEQ ID NO: 464641 - DNA, 15 bp, Homo sapiens
gactagccaaagtgt

SEQ ID NO: 464642 - DNA, 15 bp, Homo sapiens
tgactagccaaagtg

SEQ ID NO: 464643 - DNA, 15 bp, Homo sapiens
atgactagccaaagt

SEQ ID NO: 464644 - DNA, 15 bp, Homo sapiens
gatgactagccaaag

SEQ ID NO: 464645 - DNA, 15 bp, Homo sapiens
agatgactagccaaa

SEQ ID NO: 464646 - DNA, 15 bp, Homo sapiens
gagatgactagccaa

SEQ ID NO: 464647 - DNA, 15 bp, Homo sapiens
ggagatgactagcca

SEQ ID NO: 464648 - DNA, 15 bp, Homo sapiens
aggagatgactagcc

SEQ ID NO: 464649 - DNA, 15 bp, Homo sapiens
caggagatgactagc

SEQ ID NO: 464650 - DNA, 15 bp, Homo sapiens
acaggagatgactag

SEQ ID NO: 464651 - DNA, 15 bp, Homo sapiens
cacaggagatgacta

SEQ ID NO: 464652 - DNA, 15 bp, Homo sapiens
tcacaggagatgact

SEQ ID NO: 464653 - DNA, 15 bp, Homo sapiens
gtcacaggagatgac

SEQ ID NO: 464654 - DNA, 15 bp, Homo sapiens
agtcacaggagatga

SEQ ID NO: 464655 - DNA, 15 bp, Homo sapiens
cagtcacaggagatg

SEQ ID NO: 464656 - DNA, 15 bp, Homo sapiens
gcagtcacaggagat

SEQ ID NO: 464657 - DNA, 15 bp, Homo sapiens
agcagtcacaggaga

SEQ ID NO: 464658 - DNA, 15 bp, Homo sapiens
cagcagtcacaggag

SEQ ID NO: 464659 - DNA, 15 bp, Homo sapiens
acagcagtcacagga

SEQ ID NO: 464660 - DNA, 15 bp, Homo sapiens
aacagcagtcacagg

SEQ ID NO: 464661 - DNA, 15 bp, Homo sapiens
taacagcagtcacag

SEQ ID NO: 464662 - DNA, 15 bp, Homo sapiens
ttaacagcagtcaca

SEQ ID NO: 464663 - DNA, 15 bp, Homo sapiens
attaacagcagtcac

SEQ ID NO: 464664 - DNA, 15 bp, Homo sapiens
aattaacagcagtca

SEQ ID NO: 464665 - DNA, 15 bp, Homo sapiens
taattaacagcagtc

SEQ ID NO: 464666 - DNA, 15 bp, Homo sapiens
ttaattaacagcagt

SEQ ID NO: 464667 - DNA, 15 bp, Homo sapiens
tttaattaacagcag

SEQ ID NO: 464668 - DNA, 15 bp, Homo sapiens
atttaattaacagca

SEQ ID NO: 464669 - DNA, 15 bp, Homo sapiens
tatttaattaacagc

SEQ ID NO: 464670 - DNA, 15 bp, Homo sapiens
atatttaattaacag

SEQ ID NO: 464671 - DNA, 15 bp, Homo sapiens
catatttaattaaca

SEQ ID NO: 464672 - DNA, 15 bp, Homo sapiens
ccatatttaattaac

SEQ ID NO: 464673 - DNA, 15 bp, Homo sapiens
accatatttaattaa

SEQ ID NO: 464674 - DNA, 15 bp, Homo sapiens
aaccatatttaatta

SEQ ID NO: 464675 - DNA, 15 bp, Homo sapiens
aaaccatatttaatt

SEQ ID NO: 464676 - DNA, 15 bp, Homo sapiens
caaaccatatttaat

SEQ ID NO: 464677 - DNA, 15 bp, Homo sapiens
acaaaccatatttaa

SEQ ID NO: 464678 - DNA, 15 bp, Homo sapiens
tacaaaccatattta

SEQ ID NO: 464679 - DNA, 15 bp, Homo sapiens
ctacaaaccatattt

SEQ ID NO: 464680 - DNA, 15 bp, Homo sapiens
gctacaaaccatatt

SEQ ID NO: 464681 - DNA, 15 bp, Homo sapiens
agctacaaaccatat

SEQ ID NO: 464682 - DNA, 15 bp, Homo sapiens
tagctacaaaccata

SEQ ID NO: 464683 - DNA, 15 bp, Homo sapiens
ttagctacaaaccat

SEQ ID NO: 464684 - DNA, 15 bp, Homo sapiens
cttagctacaaacca

SEQ ID NO: 464685 - DNA, 15 bp, Homo sapiens
gcttagctacaaacc

SEQ ID NO: 464686 - DNA, 15 bp, Homo sapiens
tgcttagctacaaac

SEQ ID NO: 464687 - DNA, 15 bp, Homo sapiens
ctgcttagctacaaa

SEQ ID NO: 464688 - DNA, 15 bp, Homo sapiens
gctgcttagctacaa

SEQ ID NO: 464689 - DNA, 15 bp, Homo sapiens
ggctgcttagctaca

SEQ ID NO: 464690 - DNA, 15 bp, Homo sapiens
aggctgcttagctac

SEQ ID NO: 464691 - DNA, 15 bp, Homo sapiens
caggctgcttagcta

SEQ ID NO: 464692 - DNA, 15 bp, Homo sapiens
acaggctgcttagct

SEQ ID NO: 464693 - DNA, 15 bp, Homo sapiens
tacaggctgcttagc

SEQ ID NO: 464694 - DNA, 15 bp, Homo sapiens
ttacaggctgcttag

SEQ ID NO: 464695 - DNA, 15 bp, Homo sapiens
cttacaggctgctta

SEQ ID NO: 464696 - DNA, 15 bp, Homo sapiens
ccttacaggctgctt

SEQ ID NO: 464697 - DNA, 15 bp, Homo sapiens
tccttacaggctgct

SEQ ID NO: 464698 - DNA, 15 bp, Homo sapiens
ctccttacaggctgc

SEQ ID NO: 464699 - DNA, 15 bp, Homo sapiens
tctccttacaggctg

SEQ ID NO: 464700 - DNA, 15 bp, Homo sapiens
ttctccttacaggct

SEQ ID NO: 464701 - DNA, 15 bp, Homo sapiens
cttctccttacaggc

SEQ ID NO: 464702 - DNA, 15 bp, Homo sapiens
tcttctccttacagg

SEQ ID NO: 464703 - DNA, 15 bp, Homo sapiens
gtcttctccttacag

SEQ ID NO: 464704 - DNA, 15 bp, Homo sapiens
agtcttctccttaca

SEQ ID NO: 464705 - DNA, 15 bp, Homo sapiens
tagtcttctccttac

SEQ ID NO: 464706 - DNA, 15 bp, Homo sapiens
atagtcttctcctta

SEQ ID NO: 464707 - DNA, 15 bp, Homo sapiens
catagtcttctcctt

SEQ ID NO: 464708 - DNA, 15 bp, Homo sapiens
ccatagtcttctcct

SEQ ID NO: 464709 - DNA, 15 bp, Homo sapiens
tccatagtcttctcc

SEQ ID NO: 464710 - DNA, 15 bp, Homo sapiens
ttccatagtcttctc

SEQ ID NO: 464711 - DNA, 15 bp, Homo sapiens
cttccatagtcttct

SEQ ID NO: 464712 - DNA, 15 bp, Homo sapiens
acttccatagtcttc

SEQ ID NO: 464713 - DNA, 15 bp, Homo sapiens
tacttccatagtctt

SEQ ID NO: 464714 - DNA, 15 bp, Homo sapiens
atacttccatagtct

SEQ ID NO: 464715 - DNA, 15 bp, Homo sapiens
aatacttccatagtc

SEQ ID NO: 464716 - DNA, 15 bp, Homo sapiens
aaatacttccatagt

SEQ ID NO: 464717 - DNA, 15 bp, Homo sapiens
caaatacttccatag

SEQ ID NO: 464718 - DNA, 15 bp, Homo sapiens
gcaaatacttccata

SEQ ID NO: 464719 - DNA, 15 bp, Homo sapiens
tgcaaatacttccat

SEQ ID NO: 464720 - DNA, 15 bp, Homo sapiens
atgcaaatacttcca

SEQ ID NO: 464721 - DNA, 15 bp, Homo sapiens
tatgcaaatacttcc

SEQ ID NO: 464722 - DNA, 15 bp, Homo sapiens
atatgcaaatacttc

SEQ ID NO: 464723 - DNA, 15 bp, Homo sapiens
aatatgcaaatactt

SEQ ID NO: 464724 - DNA, 15 bp, Homo sapiens
gaatatgcaaatact

SEQ ID NO: 464725 - DNA, 15 bp, Homo sapiens
agaatatgcaaatac

SEQ ID NO: 464726 - DNA, 15 bp, Homo sapiens
gagaatatgcaaata

SEQ ID NO: 464727 - DNA, 15 bp, Homo sapiens
agagaatatgcaaat

SEQ ID NO: 464728 - DNA, 15 bp, Homo sapiens
gagagaatatgcaaa

SEQ ID NO: 464729 - DNA, 15 bp, Homo sapiens
ggagagaatatgcaa

SEQ ID NO: 464730 - DNA, 15 bp, Homo sapiens
aggagagaatatgca

SEQ ID NO: 464731 - DNA, 15 bp, Homo sapiens
aaggagagaatatgc

SEQ ID NO: 464732 - DNA, 15 bp, Homo sapiens
caaggagagaatatg

SEQ ID NO: 464733 - DNA, 15 bp, Homo sapiens
tcaaggagagaatat

SEQ ID NO: 464734 - DNA, 15 bp, Homo sapiens
ttcaaggagagaata

SEQ ID NO: 464735 - DNA, 15 bp, Homo sapiens
tttcaaggagagaat

SEQ ID NO: 464736 - DNA, 15 bp, Homo sapiens
ttttcaaggagagaa

SEQ ID NO: 464737 - DNA, 15 bp, Homo sapiens
attttcaaggagaga

SEQ ID NO: 464738 - DNA, 15 bp, Homo sapiens
tattttcaaggagag

SEQ ID NO: 464739 - DNA, 15 bp, Homo sapiens
gtattttcaaggaga

SEQ ID NO: 464740 - DNA, 15 bp, Homo sapiens
agtattttcaaggag

SEQ ID NO: 464741 - DNA, 15 bp, Homo sapiens
tagtattttcaagga

SEQ ID NO: 464742 - DNA, 15 bp, Homo sapiens
gtagtattttcaagg

SEQ ID NO: 464743 - DNA, 15 bp, Homo sapiens
ggtagtattttcaag

SEQ ID NO: 464744 - DNA, 15 bp, Homo sapiens
aggtagtattttcaa

SEQ ID NO: 464745 - DNA, 15 bp, Homo sapiens
caggtagtattttca

SEQ ID NO: 464746 - DNA, 15 bp, Homo sapiens
ccaggtagtattttc

SEQ ID NO: 464747 - DNA, 15 bp, Homo sapiens
accaggtagtatttt

SEQ ID NO: 464748 - DNA, 15 bp, Homo sapiens
gaccaggtagtattt

SEQ ID NO: 464749 - DNA, 15 bp, Homo sapiens
agaccaggtagtatt

SEQ ID NO: 464750 - DNA, 15 bp, Homo sapiens
aagaccaggtagtat

SEQ ID NO: 464751 - DNA, 15 bp, Homo sapiens
aaagaccaggtagta

SEQ ID NO: 464752 - DNA, 15 bp, Homo sapiens
caaagaccaggtagt

SEQ ID NO: 464753 - DNA, 15 bp, Homo sapiens
ccaaagaccaggtag

SEQ ID NO: 464754 - DNA, 15 bp, Homo sapiens
gccaaagaccaggta

SEQ ID NO: 464755 - DNA, 15 bp, Homo sapiens
agccaaagaccaggt

SEQ ID NO: 464756 - DNA, 15 bp, Homo sapiens
aagccaaagaccagg

SEQ ID NO: 464757 - DNA, 15 bp, Homo sapiens
aaagccaaagaccag

SEQ ID NO: 464758 - DNA, 15 bp, Homo sapiens
taaagccaaagacca

SEQ ID NO: 464759 - DNA, 15 bp, Homo sapiens
ttaaagccaaagacc

SEQ ID NO: 464760 - DNA, 15 bp, Homo sapiens
cttaaagccaaagac

SEQ ID NO: 464761 - DNA, 15 bp, Homo sapiens
acttaaagccaaaga

SEQ ID NO: 464762 - DNA, 15 bp, Homo sapiens
aacttaaagccaaag

SEQ ID NO: 464763 - DNA, 15 bp, Homo sapiens
taacttaaagccaaa

SEQ ID NO: 464764 - DNA, 15 bp, Homo sapiens
ataacttaaagccaa

SEQ ID NO: 464765 - DNA, 15 bp, Homo sapiens
tataacttaaagcca

SEQ ID NO: 464766 - DNA, 15 bp, Homo sapiens
gtataacttaaagcc

SEQ ID NO: 464767 - DNA, 15 bp, Homo sapiens
agtataacttaaagc

SEQ ID NO: 464768 - DNA, 15 bp, Homo sapiens
aagtataacttaaag

SEQ ID NO: 464769 - DNA, 15 bp, Homo sapiens
aaagtataacttaaa

SEQ ID NO: 464770 - DNA, 15 bp, Homo sapiens
aaaagtataacttaa

SEQ ID NO: 464771 - DNA, 15 bp, Homo sapiens
taaaagtataactta

SEQ ID NO: 464772 - DNA, 15 bp, Homo sapiens
ataaaagtataactt

SEQ ID NO: 464773 - DNA, 15 bp, Homo sapiens
aataaaagtataact

SEQ ID NO: 464774 - DNA, 15 bp, Homo sapiens
aaataaaagtataac

SEQ ID NO: 464775 - DNA, 15 bp, Homo sapiens
aaaataaaagtataa

SEQ ID NO: 464776 - DNA, 15 bp, Homo sapiens
gaaaataaaagtata

SEQ ID NO: 464777 - DNA, 15 bp, Homo sapiens
ggaaaataaaagtat

SEQ ID NO: 464778 - DNA, 15 bp, Homo sapiens
gggaaaataaaagta

SEQ ID NO: 464779 - DNA, 15 bp, Homo sapiens
ggggaaaataaaagt

SEQ ID NO: 464780 - DNA, 15 bp, Homo sapiens
aggggaaaataaaag

SEQ ID NO: 464781 - DNA, 15 bp, Homo sapiens
caggggaaaataaaa

SEQ ID NO: 464782 - DNA, 15 bp, Homo sapiens
acaggggaaaataaa

SEQ ID NO: 464783 - DNA, 15 bp, Homo sapiens
tacaggggaaaataa

SEQ ID NO: 464784 - DNA, 15 bp, Homo sapiens
ctacaggggaaaata

SEQ ID NO: 464785 - DNA, 15 bp, Homo sapiens
tctacaggggaaaat

SEQ ID NO: 464786 - DNA, 15 bp, Homo sapiens
ttctacaggggaaaa

SEQ ID NO: 464787 - DNA, 15 bp, Homo sapiens
attctacaggggaaa

SEQ ID NO: 464788 - DNA, 15 bp, Homo sapiens
tattctacaggggaa

SEQ ID NO: 464789 - DNA, 15 bp, Homo sapiens
ttattctacagggga

SEQ ID NO: 464790 - DNA, 15 bp, Homo sapiens
gttattctacagggg

SEQ ID NO: 464791 - DNA, 15 bp, Homo sapiens
agttattctacaggg

SEQ ID NO: 464792 - DNA, 15 bp, Homo sapiens
tagttattctacagg

SEQ ID NO: 464793 - DNA, 15 bp, Homo sapiens
atagttattctacag

SEQ ID NO: 464794 - DNA, 15 bp, Homo sapiens
aatagttattctaca

SEQ ID NO: 464795 - DNA, 15 bp, Homo sapiens
taatagttattctac

SEQ ID NO: 464796 - DNA, 15 bp, Homo sapiens
ttaatagttattcta

SEQ ID NO: 464797 - DNA, 15 bp, Homo sapiens
tttaatagttattct

SEQ ID NO: 464798 - DNA, 15 bp, Homo sapiens
ctttaatagttattc

SEQ ID NO: 464799 - DNA, 15 bp, Homo sapiens
actttaatagttatt

SEQ ID NO: 464800 - DNA, 15 bp, Homo sapiens
tactttaatagttat

SEQ ID NO: 464801 - DNA, 15 bp, Homo sapiens
atactttaatagtta

SEQ ID NO: 464802 - DNA, 15 bp, Homo sapiens
aatactttaatagtt

SEQ ID NO: 464803 - DNA, 15 bp, Homo sapiens
taatactttaatagt

SEQ ID NO: 464804 - DNA, 15 bp, Homo sapiens
gtaatactttaatag

SEQ ID NO: 464805 - DNA, 15 bp, Homo sapiens
ggtaatactttaata

SEQ ID NO: 464806 - DNA, 15 bp, Homo sapiens
aggtaatactttaat

SEQ ID NO: 464807 - DNA, 15 bp, Homo sapiens
taggtaatactttaa

SEQ ID NO: 464808 - DNA, 15 bp, Homo sapiens
ataggtaatacttta

SEQ ID NO: 464809 - DNA, 15 bp, Homo sapiens
cataggtaatacttt

SEQ ID NO: 464810 - DNA, 15 bp, Homo sapiens
ccataggtaatactt

SEQ ID NO: 464811 - DNA, 15 bp, Homo sapiens
accataggtaatact

SEQ ID NO: 464812 - DNA, 15 bp, Homo sapiens
caccataggtaatac

SEQ ID NO: 464813 - DNA, 15 bp, Homo sapiens
tcaccataggtaata

SEQ ID NO: 464814 - DNA, 15 bp, Homo sapiens
atcaccataggtaat

SEQ ID NO: 464815 - DNA, 15 bp, Homo sapiens
aatcaccataggtaa

SEQ ID NO: 464816 - DNA, 15 bp, Homo sapiens
taatcaccataggta

SEQ ID NO: 464817 - DNA, 15 bp, Homo sapiens
ctaatcaccataggt

SEQ ID NO: 464818 - DNA, 15 bp, Homo sapiens
tctaatcaccatagg

SEQ ID NO: 464819 - DNA, 15 bp, Homo sapiens
gtctaatcaccatag

SEQ ID NO: 464820 - DNA, 15 bp, Homo sapiens
agtctaatcaccata

SEQ ID NO: 464821 - DNA, 15 bp, Homo sapiens
tagtctaatcaccat

SEQ ID NO: 464822 - DNA, 15 bp, Homo sapiens
ttagtctaatcacca

SEQ ID NO: 464823 - DNA, 15 bp, Homo sapiens
cttagtctaatcacc

SEQ ID NO: 464824 - DNA, 15 bp, Homo sapiens
tcttagtctaatcac

SEQ ID NO: 464825 - DNA, 15 bp, Homo sapiens
ttcttagtctaatca

SEQ ID NO: 464826 - DNA, 15 bp, Homo sapiens
cttcttagtctaatc

SEQ ID NO: 464827 - DNA, 15 bp, Homo sapiens
acttcttagtctaat

SEQ ID NO: 464828 - DNA, 15 bp, Homo sapiens
tacttcttagtctaa

SEQ ID NO: 464829 - DNA, 15 bp, Homo sapiens
ttacttcttagtcta

SEQ ID NO: 464830 - DNA, 15 bp, Homo sapiens
tttacttcttagtct

SEQ ID NO: 464831 - DNA, 15 bp, Homo sapiens
ttttacttcttagtc

SEQ ID NO: 464832 - DNA, 15 bp, Homo sapiens
gttttacttcttagt

SEQ ID NO: 464833 - DNA, 15 bp, Homo sapiens
tgttttacttcttag

SEQ ID NO: 464834 - DNA, 15 bp, Homo sapiens
atgttttacttctta

SEQ ID NO: 464835 - DNA, 15 bp, Homo sapiens
catgttttacttctt

SEQ ID NO: 464836 - DNA, 15 bp, Homo sapiens
tcatgttttacttct

SEQ ID NO: 464837 - DNA, 15 bp, Homo sapiens
ttcatgttttacttc

SEQ ID NO: 464838 - DNA, 15 bp, Homo sapiens
tttcatgttttactt

SEQ ID NO: 464839 - DNA, 15 bp, Homo sapiens
atttcatgttttact

SEQ ID NO: 464840 - DNA, 15 bp, Homo sapiens
gatttcatgttttac

SEQ ID NO: 464841 - DNA, 15 bp, Homo sapiens
tgatttcatgtttta

SEQ ID NO: 464842 - DNA, 15 bp, Homo sapiens
ctgatttcatgtttt

SEQ ID NO: 464843 - DNA, 15 bp, Homo sapiens
actgatttcatgttt

SEQ ID NO: 464844 - DNA, 15 bp, Homo sapiens
gactgatttcatgtt

SEQ ID NO: 464845 - DNA, 15 bp, Homo sapiens
tgactgatttcatgt

SEQ ID NO: 464846 - DNA, 15 bp, Homo sapiens
atgactgatttcatg

SEQ ID NO: 464847 - DNA, 15 bp, Homo sapiens
aatgactgatttcat

SEQ ID NO: 464848 - DNA, 15 bp, Homo sapiens
caatgactgatttca

SEQ ID NO: 464849 - DNA, 15 bp, Homo sapiens
acaatgactgatttc

SEQ ID NO: 464850 - DNA, 15 bp, Homo sapiens
aacaatgactgattt

SEQ ID NO: 464851 - DNA, 15 bp, Homo sapiens
caacaatgactgatt

SEQ ID NO: 464852 - DNA, 15 bp, Homo sapiens
ccaacaatgactgat

SEQ ID NO: 464853 - DNA, 15 bp, Homo sapiens
accaacaatgactga

SEQ ID NO: 464854 - DNA, 15 bp, Homo sapiens
caccaacaatgactg

SEQ ID NO: 464855 - DNA, 15 bp, Homo sapiens
gcaccaacaatgact

SEQ ID NO: 464856 - DNA, 15 bp, Homo sapiens
ggcaccaacaatgac

SEQ ID NO: 464857 - DNA, 15 bp, Homo sapiens
gggcaccaacaatga

SEQ ID NO: 464858 - DNA, 15 bp, Homo sapiens
agggcaccaacaatg

SEQ ID NO: 464859 - DNA, 15 bp, Homo sapiens
cagggcaccaacaat

SEQ ID NO: 464860 - DNA, 15 bp, Homo sapiens
ccagggcaccaacaa

SEQ ID NO: 464861 - DNA, 15 bp, Homo sapiens
accagggcaccaaca

SEQ ID NO: 464862 - DNA, 15 bp, Homo sapiens
caccagggcaccaac

SEQ ID NO: 464863 - DNA, 15 bp, Homo sapiens
gcaccagggcaccaa

SEQ ID NO: 464864 - DNA, 15 bp, Homo sapiens
ggcaccagggcacca

SEQ ID NO: 464865 - DNA, 15 bp, Homo sapiens
aggcaccagggcacc

SEQ ID NO: 464866 - DNA, 15 bp, Homo sapiens
aaggcaccagggcac

SEQ ID NO: 464867 - DNA, 15 bp, Homo sapiens
gaaggcaccagggca

SEQ ID NO: 464868 - DNA, 15 bp, Homo sapiens
agaaggcaccagggc

SEQ ID NO: 464869 - DNA, 15 bp, Homo sapiens
aagaaggcaccaggg

SEQ ID NO: 464870 - DNA, 15 bp, Homo sapiens
aaagaaggcaccagg

SEQ ID NO: 464871 - DNA, 15 bp, Homo sapiens
aaaagaaggcaccag

SEQ ID NO: 464872 - DNA, 15 bp, Homo sapiens
aaaaagaaggcacca

SEQ ID NO: 464873 - DNA, 15 bp, Homo sapiens
aaaaaagaaggcacc

SEQ ID NO: 464874 - DNA, 15 bp, Homo sapiens
aaaaaaagaaggcac

SEQ ID NO: 464875 - DNA, 15 bp, Homo sapiens
aaaaaaaagaaggca

SEQ ID NO: 464876 - DNA, 15 bp, Homo sapiens
aaaaaaaaagaaggc

SEQ ID NO: 464877 - DNA, 15 bp, Homo sapiens
aaaaaaaaaagaagg

SEQ ID NO: 464878 - DNA, 15 bp, Homo sapiens
aaaaaaaaaaagaag

SEQ ID NO: 464879 - DNA, 15 bp, Homo sapiens
gagtgagactctgtc

SEQ ID NO: 464880 - DNA, 15 bp, Homo sapiens
agagtgagactctgt

SEQ ID NO: 464881 - DNA, 15 bp, Homo sapiens
cagagtgagactctg

SEQ ID NO: 464882 - DNA, 15 bp, Homo sapiens
acagagtgagactct

SEQ ID NO: 464883 - DNA, 15 bp, Homo sapiens
aacagagtgagactc

SEQ ID NO: 464884 - DNA, 15 bp, Homo sapiens
caacagagtgagact

SEQ ID NO: 464885 - DNA, 15 bp, Homo sapiens
gcaacagagtgagac

SEQ ID NO: 464886 - DNA, 15 bp, Homo sapiens
ggcaacagagtgaga

SEQ ID NO: 464887 - DNA, 15 bp, Homo sapiens
gggcaacagagtgag

SEQ ID NO: 464888 - DNA, 15 bp, Homo sapiens
tgggcaacagagtga

SEQ ID NO: 464889 - DNA, 15 bp, Homo sapiens
ctgggcaacagagtg

SEQ ID NO: 464890 - DNA, 15 bp, Homo sapiens
cctgggcaacagagt

SEQ ID NO: 464891 - DNA, 15 bp, Homo sapiens
aagatcgtgccattg

SEQ ID NO: 464892 - DNA, 15 bp, Homo sapiens
caagatcgtgccatt

SEQ ID NO: 464893 - DNA, 15 bp, Homo sapiens
ccaagatcgtgccat

SEQ ID NO: 464894 - DNA, 15 bp, Homo sapiens
gccaagatcgtgcca

SEQ ID NO: 464895 - DNA, 15 bp, Homo sapiens
agccaagatcgtgcc

SEQ ID NO: 464896 - DNA, 15 bp, Homo sapiens
gagccaagatcgtgc

SEQ ID NO: 464897 - DNA, 15 bp, Homo sapiens
tgagccaagatcgtg

SEQ ID NO: 464898 - DNA, 15 bp, Homo sapiens
gtgagccaagatcgt

SEQ ID NO: 464899 - DNA, 15 bp, Homo sapiens
agtgagccaagatcg

SEQ ID NO: 464900 - DNA, 15 bp, Homo sapiens
gtctcagctacttgg

SEQ ID NO: 464901 - DNA, 15 bp, Homo sapiens
agtctcagctacttg

SEQ ID NO: 464902 - DNA, 15 bp, Homo sapiens
tagtctcagctactt

SEQ ID NO: 464903 - DNA, 15 bp, Homo sapiens
gtagtctcagctact

SEQ ID NO: 464904 - DNA, 15 bp, Homo sapiens
tgtagtctcagctac

SEQ ID NO: 464905 - DNA, 15 bp, Homo sapiens
ctgtagtctcagcta

SEQ ID NO: 464906 - DNA, 15 bp, Homo sapiens
cctgtagtctcagct

SEQ ID NO: 464907 - DNA, 15 bp, Homo sapiens
gcctgtagtctcagc

SEQ ID NO: 464908 - DNA, 15 bp, Homo sapiens
cgcctgtagtctcag

SEQ ID NO: 464909 - DNA, 15 bp, Homo sapiens
gcgcctgtagtctca

SEQ ID NO: 464910 - DNA, 15 bp, Homo sapiens
ggcgcctgtagtctc

SEQ ID NO: 464911 - DNA, 15 bp, Homo sapiens
gggcgcctgtagtct

SEQ ID NO: 464912 - DNA, 15 bp, Homo sapiens
tgggcgcctgtagtc

SEQ ID NO: 464913 - DNA, 15 bp, Homo sapiens
gtgggcgcctgtagt

SEQ ID NO: 464914 - DNA, 15 bp, Homo sapiens
ggtgggcgcctgtag

SEQ ID NO: 464915 - DNA, 15 bp, Homo sapiens
tggtgggcgcctgta

SEQ ID NO: 464916 - DNA, 15 bp, Homo sapiens
gtggtgggcgcctgt

SEQ ID NO: 464917 - DNA, 15 bp, Homo sapiens
ggtggtgggcgcctg

SEQ ID NO: 464918 - DNA, 15 bp, Homo sapiens
tggtggtgggcgcct

SEQ ID NO: 464919 - DNA, 15 bp, Homo sapiens
gtggtggtgggcgcc

SEQ ID NO: 464920 - DNA, 15 bp, Homo sapiens
cgtggtggtgggcgc

SEQ ID NO: 464921 - DNA, 15 bp, Homo sapiens
gcgtggtggtgggcg

SEQ ID NO: 464922 - DNA, 15 bp, Homo sapiens
ggcgtggtggtgggc

SEQ ID NO: 464923 - DNA, 15 bp, Homo sapiens
aggcgtggtggtggg

SEQ ID NO: 464924 - DNA, 15 bp, Homo sapiens
caggcgtggtggtgg

SEQ ID NO: 464925 - DNA, 15 bp, Homo sapiens
ccaggcgtggtggtg

SEQ ID NO: 464926 - DNA, 15 bp, Homo sapiens
gccaggcgtggtggt

SEQ ID NO: 464927 - DNA, 15 bp, Homo sapiens
tcaaaaattagccag

SEQ ID NO: 464928 - DNA, 15 bp, Homo sapiens
ttcaaaaattagcca

SEQ ID NO: 464929 - DNA, 15 bp, Homo sapiens
attcaaaaattagcc

SEQ ID NO: 464930 - DNA, 15 bp, Homo sapiens
aattcaaaaattagc

SEQ ID NO: 464931 - DNA, 15 bp, Homo sapiens
aaattcaaaaattag

SEQ ID NO: 464932 - DNA, 15 bp, Homo sapiens
aaaattcaaaaatta

SEQ ID NO: 464933 - DNA, 15 bp, Homo sapiens
aaaaattcaaaaatt

SEQ ID NO: 464934 - DNA, 15 bp, Homo sapiens
taaaaattcaaaaat

SEQ ID NO: 464935 - DNA, 15 bp, Homo sapiens
ctaaaaattcaaaaa

SEQ ID NO: 464936 - DNA, 15 bp, Homo sapiens
actaaaaattcaaaa

SEQ ID NO: 464937 - DNA, 15 bp, Homo sapiens
tactaaaaattcaaa

SEQ ID NO: 464938 - DNA, 15 bp, Homo sapiens
ctactaaaaattcaa

SEQ ID NO: 464939 - DNA, 15 bp, Homo sapiens
tctactaaaaattca

SEQ ID NO: 464940 - DNA, 15 bp, Homo sapiens
ctctactaaaaattc

SEQ ID NO: 464941 - DNA, 15 bp, Homo sapiens
tctctactaaaaatt

SEQ ID NO: 464942 - DNA, 15 bp, Homo sapiens
tatagtgaaaccctg

SEQ ID NO: 464943 - DNA, 15 bp, Homo sapiens
atatagtgaaaccct

SEQ ID NO: 464944 - DNA, 15 bp, Homo sapiens
aatatagtgaaaccc

SEQ ID NO: 464945 - DNA, 15 bp, Homo sapiens
ccaatatagtgaaac

SEQ ID NO: 464946 - DNA, 15 bp, Homo sapiens
gccaatatagtgaaa

SEQ ID NO: 464947 - DNA, 15 bp, Homo sapiens
agccaatatagtgaa

SEQ ID NO: 464948 - DNA, 15 bp, Homo sapiens
tagccaatatagtga

SEQ ID NO: 464949 - DNA, 15 bp, Homo sapiens
ctagccaatatagtg

SEQ ID NO: 464950 - DNA, 15 bp, Homo sapiens
cctagccaatatagt

SEQ ID NO: 464951 - DNA, 15 bp, Homo sapiens
gcctagccaatatag

SEQ ID NO: 464952 - DNA, 15 bp, Homo sapiens
agcctagccaatata

SEQ ID NO: 464953 - DNA, 15 bp, Homo sapiens
cagcctagccaatat

SEQ ID NO: 464954 - DNA, 15 bp, Homo sapiens
ccagcctagccaata

SEQ ID NO: 464955 - DNA, 15 bp, Homo sapiens
accagcctagccaat

SEQ ID NO: 464956 - DNA, 15 bp, Homo sapiens
gaccagcctagccaa

SEQ ID NO: 464957 - DNA, 15 bp, Homo sapiens
agaccagcctagcca

SEQ ID NO: 464958 - DNA, 15 bp, Homo sapiens
gagaccagcctagcc

SEQ ID NO: 464959 - DNA, 15 bp, Homo sapiens
tgagaccagcctagc

SEQ ID NO: 464960 - DNA, 15 bp, Homo sapiens
aaggtcaggagtttg

SEQ ID NO: 464961 - DNA, 15 bp, Homo sapiens
caaggtcaggagttt

SEQ ID NO: 464962 - DNA, 15 bp, Homo sapiens
tgggcggatcacaag

SEQ ID NO: 464963 - DNA, 15 bp, Homo sapiens
gtgggcggatcacaa

SEQ ID NO: 464964 - DNA, 15 bp, Homo sapiens
ggtgggcggatcaca

SEQ ID NO: 464965 - DNA, 15 bp, Homo sapiens
aggtgggcggatcac

SEQ ID NO: 464966 - DNA, 15 bp, Homo sapiens
gaggtgggcggatca

SEQ ID NO: 464967 - DNA, 15 bp, Homo sapiens
tgaggtgggcggatc

SEQ ID NO: 464968 - DNA, 15 bp, Homo sapiens
ctgaggtgggcggat

SEQ ID NO: 464969 - DNA, 15 bp, Homo sapiens
gctgaggtgggcgga

SEQ ID NO: 464970 - DNA, 15 bp, Homo sapiens
ggctgaggtgggcgg

SEQ ID NO: 464971 - DNA, 15 bp, Homo sapiens
aggctgaggtgggcg

SEQ ID NO: 464972 - DNA, 15 bp, Homo sapiens
acctataatcccagc

SEQ ID NO: 464973 - DNA, 15 bp, Homo sapiens
cacctataatcccag

SEQ ID NO: 464974 - DNA, 15 bp, Homo sapiens
acacctataatccca

SEQ ID NO: 464975 - DNA, 15 bp, Homo sapiens
aacacctataatccc

SEQ ID NO: 464976 - DNA, 15 bp, Homo sapiens
taacacctataatcc

SEQ ID NO: 464977 - DNA, 15 bp, Homo sapiens
ctaacacctataatc

SEQ ID NO: 464978 - DNA, 15 bp, Homo sapiens
gctaacacctataat

SEQ ID NO: 464979 - DNA, 15 bp, Homo sapiens
ggctaacacctataa

SEQ ID NO: 464980 - DNA, 15 bp, Homo sapiens
tggctaacacctata

SEQ ID NO: 464981 - DNA, 15 bp, Homo sapiens
gtggctaacacctat

SEQ ID NO: 464982 - DNA, 15 bp, Homo sapiens
agtggctaacaccta

SEQ ID NO: 464983 - DNA, 15 bp, Homo sapiens
cagtggctaacacct

SEQ ID NO: 464984 - DNA, 15 bp, Homo sapiens
acagtggctaacacc

SEQ ID NO: 464985 - DNA, 15 bp, Homo sapiens
cacagtggctaacac

SEQ ID NO: 464986 - DNA, 15 bp, Homo sapiens
gcacagtggctaaca

SEQ ID NO: 464987 - DNA, 15 bp, Homo sapiens
ggcacagtggctaac

SEQ ID NO: 464988 - DNA, 15 bp, Homo sapiens
gggcacagtggctaa

SEQ ID NO: 464989 - DNA, 15 bp, Homo sapiens
tgggcacagtggcta

SEQ ID NO: 464990 - DNA, 15 bp, Homo sapiens
ctgggcacagtggct

SEQ ID NO: 464991 - DNA, 15 bp, Homo sapiens
gctgggcacagtggc

SEQ ID NO: 464992 - DNA, 15 bp, Homo sapiens
ggctgggcacagtgg

SEQ ID NO: 464993 - DNA, 15 bp, Homo sapiens
aggctgggcacagtg

SEQ ID NO: 464994 - DNA, 15 bp, Homo sapiens
caggctgggcacagt

SEQ ID NO: 464995 - DNA, 15 bp, Homo sapiens
ccaggctgggcacag

SEQ ID NO: 464996 - DNA, 15 bp, Homo sapiens
accaggctgggcaca

SEQ ID NO: 464997 - DNA, 15 bp, Homo sapiens
caccaggctgggcac

SEQ ID NO: 464998 - DNA, 15 bp, Homo sapiens
gcaccaggctgggca

SEQ ID NO: 464999 - DNA, 15 bp, Homo sapiens
agcaccaggctgggc

SEQ ID NO: 465000 - DNA, 15 bp, Homo sapiens
aagcaccaggctggg

SEQ ID NO: 465001 - DNA, 15 bp, Homo sapiens
aaagcaccaggctgg

SEQ ID NO: 465002 - DNA, 15 bp, Homo sapiens
taaagcaccaggctg

SEQ ID NO: 465003 - DNA, 15 bp, Homo sapiens
ttaaagcaccaggct

SEQ ID NO: 465004 - DNA, 15 bp, Homo sapiens
attaaagcaccaggc

SEQ ID NO: 465005 - DNA, 15 bp, Homo sapiens
aattaaagcaccagg

SEQ ID NO: 465006 - DNA, 15 bp, Homo sapiens
aaattaaagcaccag

SEQ ID NO: 465007 - DNA, 15 bp, Homo sapiens
aaaattaaagcacca

SEQ ID NO: 465008 - DNA, 15 bp, Homo sapiens
taaaattaaagcacc

SEQ ID NO: 465009 - DNA, 15 bp, Homo sapiens
ataaaattaaagcac

SEQ ID NO: 465010 - DNA, 15 bp, Homo sapiens
cataaaattaaagca

SEQ ID NO: 465011 - DNA, 15 bp, Homo sapiens
ccataaaattaaagc

SEQ ID NO: 465012 - DNA, 15 bp, Homo sapiens
tccataaaattaaag

SEQ ID NO: 465013 - DNA, 15 bp, Homo sapiens
ttccataaaattaaa

SEQ ID NO: 465014 - DNA, 15 bp, Homo sapiens
tttccataaaattaa

SEQ ID NO: 465015 - DNA, 15 bp, Homo sapiens
ttttccataaaatta

SEQ ID NO: 465016 - DNA, 15 bp, Homo sapiens
tttttccataaaatt

SEQ ID NO: 465017 - DNA, 15 bp, Homo sapiens
ttttttccataaaat

SEQ ID NO: 465018 - DNA, 15 bp, Homo sapiens
gttttttccataaaa

SEQ ID NO: 465019 - DNA, 15 bp, Homo sapiens
agttttttccataaa

SEQ ID NO: 465020 - DNA, 15 bp, Homo sapiens
tagttttttccataa

SEQ ID NO: 465021 - DNA, 15 bp, Homo sapiens
gtagttttttccata

SEQ ID NO: 465022 - DNA, 15 bp, Homo sapiens
agtagttttttccat

SEQ ID NO: 465023 - DNA, 15 bp, Homo sapiens
tagtagttttttcca

SEQ ID NO: 465024 - DNA, 15 bp, Homo sapiens
ctagtagttttttcc

SEQ ID NO: 465025 - DNA, 15 bp, Homo sapiens
gctagtagttttttc

SEQ ID NO: 465026 - DNA, 15 bp, Homo sapiens
agctagtagtttttt

SEQ ID NO: 465027 - DNA, 15 bp, Homo sapiens
cagctagtagttttt

SEQ ID NO: 465028 - DNA, 15 bp, Homo sapiens
ccagctagtagtttt

SEQ ID NO: 465029 - DNA, 15 bp, Homo sapiens
accagctagtagttt

SEQ ID NO: 465030 - DNA, 15 bp, Homo sapiens
aaccagctagtagtt

SEQ ID NO: 465031 - DNA, 15 bp, Homo sapiens
aaaccagctagtagt

SEQ ID NO: 465032 - DNA, 15 bp, Homo sapiens
gaaaccagctagtag

SEQ ID NO: 465033 - DNA, 15 bp, Homo sapiens
agaaaccagctagta

SEQ ID NO: 465034 - DNA, 15 bp, Homo sapiens
cagaaaccagctagt

SEQ ID NO: 465035 - DNA, 15 bp, Homo sapiens
acagaaaccagctag

SEQ ID NO: 465036 - DNA, 15 bp, Homo sapiens
aacagaaaccagcta

SEQ ID NO: 465037 - DNA, 15 bp, Homo sapiens
aaacagaaaccagct

SEQ ID NO: 465038 - DNA, 15 bp, Homo sapiens
aaaacagaaaccagc

SEQ ID NO: 465039 - DNA, 15 bp, Homo sapiens
taaaacagaaaccag

SEQ ID NO: 465040 - DNA, 15 bp, Homo sapiens
ttaaaacagaaacca

SEQ ID NO: 465041 - DNA, 15 bp, Homo sapiens
cttaaaacagaaacc

SEQ ID NO: 465042 - DNA, 15 bp, Homo sapiens
tcttaaaacagaaac

SEQ ID NO: 465043 - DNA, 15 bp, Homo sapiens
ttcttaaaacagaaa

SEQ ID NO: 465044 - DNA, 15 bp, Homo sapiens
tttcttaaaacagaa

SEQ ID NO: 465045 - DNA, 15 bp, Homo sapiens
atttcttaaaacaga

SEQ ID NO: 465046 - DNA, 15 bp, Homo sapiens
tatttcttaaaacag

SEQ ID NO: 465047 - DNA, 15 bp, Homo sapiens
ttatttcttaaaaca

SEQ ID NO: 465048 - DNA, 15 bp, Homo sapiens
gttatttcttaaaac

SEQ ID NO: 465049 - DNA, 15 bp, Homo sapiens
tgttatttcttaaaa

SEQ ID NO: 465050 - DNA, 15 bp, Homo sapiens
gtgttatttcttaaa

SEQ ID NO: 465051 - DNA, 15 bp, Homo sapiens
tgtgttatttcttaa

SEQ ID NO: 465052 - DNA, 15 bp, Homo sapiens
ctgtgttatttctta

SEQ ID NO: 465053 - DNA, 15 bp, Homo sapiens
cctgtgttatttctt

SEQ ID NO: 465054 - DNA, 15 bp, Homo sapiens
gcctgtgttatttct

SEQ ID NO: 465055 - DNA, 15 bp, Homo sapiens
ggcctgtgttatttc

SEQ ID NO: 465056 - DNA, 15 bp, Homo sapiens
cggcctgtgttattt

SEQ ID NO: 465057 - DNA, 15 bp, Homo sapiens
ccggcctgtgttatt

SEQ ID NO: 465058 - DNA, 15 bp, Homo sapiens
cccggcctgtgttat

SEQ ID NO: 465059 - DNA, 15 bp, Homo sapiens
acccggcctgtgtta

SEQ ID NO: 465060 - DNA, 15 bp, Homo sapiens
cacccggcctgtgtt

SEQ ID NO: 465061 - DNA, 15 bp, Homo sapiens
gcacccggcctgtgt

SEQ ID NO: 465062 - DNA, 15 bp, Homo sapiens
ggcacccggcctgtg

SEQ ID NO: 465063 - DNA, 15 bp, Homo sapiens
tggcacccggcctgt

SEQ ID NO: 465064 - DNA, 15 bp, Homo sapiens
atggcacccggcctg

SEQ ID NO: 465065 - DNA, 15 bp, Homo sapiens
catggcacccggcct

SEQ ID NO: 465066 - DNA, 15 bp, Homo sapiens
tcatggcacccggcc

SEQ ID NO: 465067 - DNA, 15 bp, Homo sapiens
gtcatggcacccggc

SEQ ID NO: 465068 - DNA, 15 bp, Homo sapiens
agtcatggcacccgg

SEQ ID NO: 465069 - DNA, 15 bp, Homo sapiens
aagtcatggcacccg

SEQ ID NO: 465070 - DNA, 15 bp, Homo sapiens
caagtcatggcaccc

SEQ ID NO: 465071 - DNA, 15 bp, Homo sapiens
gcaagtcatggcacc

SEQ ID NO: 465072 - DNA, 15 bp, Homo sapiens
cgcaagtcatggcac

SEQ ID NO: 465073 - DNA, 15 bp, Homo sapiens
gcgcaagtcatggca

SEQ ID NO: 465074 - DNA, 15 bp, Homo sapiens
agcgcaagtcatggc

SEQ ID NO: 465075 - DNA, 15 bp, Homo sapiens
aagcgcaagtcatgg

SEQ ID NO: 465076 - DNA, 15 bp, Homo sapiens
caagcgcaagtcatg

SEQ ID NO: 465077 - DNA, 15 bp, Homo sapiens
acaagcgcaagtcat

SEQ ID NO: 465078 - DNA, 15 bp, Homo sapiens
tacaagcgcaagtca

SEQ ID NO: 465079 - DNA, 15 bp, Homo sapiens
gtacaagcgcaagtc

SEQ ID NO: 465080 - DNA, 15 bp, Homo sapiens
agtacaagcgcaagt

SEQ ID NO: 465081 - DNA, 15 bp, Homo sapiens
gagtacaagcgcaag

SEQ ID NO: 465082 - DNA, 15 bp, Homo sapiens
ggagtacaagcgcaa

SEQ ID NO: 465083 - DNA, 15 bp, Homo sapiens
gggagtacaagcgca

SEQ ID NO: 465084 - DNA, 15 bp, Homo sapiens
tgggagtacaagcgc

SEQ ID NO: 465085 - DNA, 15 bp, Homo sapiens
ctgggagtacaagcg

SEQ ID NO: 465086 - DNA, 15 bp, Homo sapiens
gctgggagtacaagc

SEQ ID NO: 465087 - DNA, 15 bp, Homo sapiens
tgctgggagtacaag

SEQ ID NO: 465088 - DNA, 15 bp, Homo sapiens
ctgctgggagtacaa

SEQ ID NO: 465089 - DNA, 15 bp, Homo sapiens
actgctgggagtaca

SEQ ID NO: 465090 - DNA, 15 bp, Homo sapiens
aactgctgggagtac

SEQ ID NO: 465091 - DNA, 15 bp, Homo sapiens
aaactgctgggagta

SEQ ID NO: 465092 - DNA, 15 bp, Homo sapiens
caaactgctgggagt

SEQ ID NO: 465093 - DNA, 15 bp, Homo sapiens
ccaaactgctgggag

SEQ ID NO: 465094 - DNA, 15 bp, Homo sapiens
cccaaactgctggga

SEQ ID NO: 465095 - DNA, 15 bp, Homo sapiens
tcccaaactgctggg

SEQ ID NO: 465096 - DNA, 15 bp, Homo sapiens
ctcccaaactgctgg

SEQ ID NO: 465097 - DNA, 15 bp, Homo sapiens
cctcccaaactgctg

SEQ ID NO: 465098 - DNA, 15 bp, Homo sapiens
gcctcccaaactgct

SEQ ID NO: 465099 - DNA, 15 bp, Homo sapiens
ggcctcccaaactgc

SEQ ID NO: 465100 - DNA, 15 bp, Homo sapiens
cggcctcccaaactg

SEQ ID NO: 465101 - DNA, 15 bp, Homo sapiens
tcggcctcccaaact

SEQ ID NO: 465102 - DNA, 15 bp, Homo sapiens
cgcccgcctcggcct

SEQ ID NO: 465103 - DNA, 15 bp, Homo sapiens
ccgcccgcctcggcc

SEQ ID NO: 465104 - DNA, 15 bp, Homo sapiens
tccgcccgcctcggc

SEQ ID NO: 465105 - DNA, 15 bp, Homo sapiens
atccgcccgcctcgg

SEQ ID NO: 465106 - DNA, 15 bp, Homo sapiens
gatccgcccgcctcg

SEQ ID NO: 465107 - DNA, 15 bp, Homo sapiens
tgatccgcccgcctc

SEQ ID NO: 465108 - DNA, 15 bp, Homo sapiens
gtgatccgcccgcct

SEQ ID NO: 465109 - DNA, 15 bp, Homo sapiens
cgtgatccgcccgcc

SEQ ID NO: 465110 - DNA, 15 bp, Homo sapiens
tcgtgatccgcccgc

SEQ ID NO: 465111 - DNA, 15 bp, Homo sapiens
ctcgtgatccgcccg

SEQ ID NO: 465112 - DNA, 15 bp, Homo sapiens
aaactcctgacctcg

SEQ ID NO: 465113 - DNA, 15 bp, Homo sapiens
tatgttggccaggct

SEQ ID NO: 465114 - DNA, 15 bp, Homo sapiens
ctatgttggccaggc

SEQ ID NO: 465115 - DNA, 15 bp, Homo sapiens
actatgttggccagg

SEQ ID NO: 465116 - DNA, 15 bp, Homo sapiens
cactatgttggccag

SEQ ID NO: 465117 - DNA, 15 bp, Homo sapiens
tcactatgttggcca

SEQ ID NO: 465118 - DNA, 15 bp, Homo sapiens
ttcactatgttggcc

SEQ ID NO: 465119 - DNA, 15 bp, Homo sapiens
tttcactatgttggc

SEQ ID NO: 465120 - DNA, 15 bp, Homo sapiens
gtttcactatgttgg

SEQ ID NO: 465121 - DNA, 15 bp, Homo sapiens
ggtttcactatgttg

SEQ ID NO: 465122 - DNA, 15 bp, Homo sapiens
gggtttcactatgtt

SEQ ID NO: 465123 - DNA, 15 bp, Homo sapiens
ggggtttcactatgt

SEQ ID NO: 465124 - DNA, 15 bp, Homo sapiens
cggggtttcactatg

SEQ ID NO: 465125 - DNA, 15 bp, Homo sapiens
acggggtttcactat

SEQ ID NO: 465126 - DNA, 15 bp, Homo sapiens
gacggggtttcacta

SEQ ID NO: 465127 - DNA, 15 bp, Homo sapiens
agacggggtttcact

SEQ ID NO: 465128 - DNA, 15 bp, Homo sapiens
cccaccacgcccggc

SEQ ID NO: 465129 - DNA, 15 bp, Homo sapiens
ccccaccacgcccgg

SEQ ID NO: 465130 - DNA, 15 bp, Homo sapiens
gccccaccacgcccg

SEQ ID NO: 465131 - DNA, 15 bp, Homo sapiens
tgccccaccacgccc

SEQ ID NO: 465132 - DNA, 15 bp, Homo sapiens
atgccccaccacgcc

SEQ ID NO: 465133 - DNA, 15 bp, Homo sapiens
catgccccaccacgc

SEQ ID NO: 465134 - DNA, 15 bp, Homo sapiens
gcatgccccaccacg

SEQ ID NO: 465135 - DNA, 15 bp, Homo sapiens
ggcatgccccaccac

SEQ ID NO: 465136 - DNA, 15 bp, Homo sapiens
aggcatgccccacca

SEQ ID NO: 465137 - DNA, 15 bp, Homo sapiens
caggcatgccccacc

SEQ ID NO: 465138 - DNA, 15 bp, Homo sapiens
acaggcatgccccac

SEQ ID NO: 465139 - DNA, 15 bp, Homo sapiens
tacaggcatgcccca

SEQ ID NO: 465140 - DNA, 15 bp, Homo sapiens
ctacaggcatgcccc

SEQ ID NO: 465141 - DNA, 15 bp, Homo sapiens
actacaggcatgccc

SEQ ID NO: 465142 - DNA, 15 bp, Homo sapiens
gactacaggcatgcc

SEQ ID NO: 465143 - DNA, 15 bp, Homo sapiens
ggactacaggcatgc

SEQ ID NO: 465144 - DNA, 15 bp, Homo sapiens
gggactacaggcatg

SEQ ID NO: 465145 - DNA, 15 bp, Homo sapiens
tgggactacaggcat

SEQ ID NO: 465146 - DNA, 15 bp, Homo sapiens
gcgatcttggctcac

SEQ ID NO: 465147 - DNA, 15 bp, Homo sapiens
ggcgatcttggctca

SEQ ID NO: 465148 - DNA, 15 bp, Homo sapiens
gggcgatcttggctc

SEQ ID NO: 465149 - DNA, 15 bp, Homo sapiens
ggggcgatcttggct

SEQ ID NO: 465150 - DNA, 15 bp, Homo sapiens
tggggcgatcttggc

SEQ ID NO: 465151 - DNA, 15 bp, Homo sapiens
gtggggcgatcttgg

SEQ ID NO: 465152 - DNA, 15 bp, Homo sapiens
agtggggcgatcttg

SEQ ID NO: 465153 - DNA, 15 bp, Homo sapiens
cagtggggcgatctt

SEQ ID NO: 465154 - DNA, 15 bp, Homo sapiens
gcagtggggcgatct

SEQ ID NO: 465155 - DNA, 15 bp, Homo sapiens
tgcagtggggcgatc

SEQ ID NO: 465156 - DNA, 15 bp, Homo sapiens
gtgcagtggggcgat

SEQ ID NO: 465157 - DNA, 15 bp, Homo sapiens
tgtgcagtggggcga

SEQ ID NO: 465158 - DNA, 15 bp, Homo sapiens
gtgtgcagtggggcg

SEQ ID NO: 465159 - DNA, 15 bp, Homo sapiens
ggtgtgcagtggggc

SEQ ID NO: 465160 - DNA, 15 bp, Homo sapiens
tggtgtgcagtgggg

SEQ ID NO: 465161 - DNA, 15 bp, Homo sapiens
ctggtgtgcagtggg

SEQ ID NO: 465162 - DNA, 15 bp, Homo sapiens
gctggtgtgcagtgg

SEQ ID NO: 465163 - DNA, 15 bp, Homo sapiens
ggctggtgtgcagtg

SEQ ID NO: 465164 - DNA, 15 bp, Homo sapiens
gggctggtgtgcagt

SEQ ID NO: 465165 - DNA, 15 bp, Homo sapiens
cgggctggtgtgcag

SEQ ID NO: 465166 - DNA, 15 bp, Homo sapiens
ccgggctggtgtgca

SEQ ID NO: 465167 - DNA, 15 bp, Homo sapiens
cccgggctggtgtgc

SEQ ID NO: 465168 - DNA, 15 bp, Homo sapiens
acccgggctggtgtg

SEQ ID NO: 465169 - DNA, 15 bp, Homo sapiens
cacccgggctggtgt

SEQ ID NO: 465170 - DNA, 15 bp, Homo sapiens
tcacccgggctggtg

SEQ ID NO: 465171 - DNA, 15 bp, Homo sapiens
gtcacccgggctggt

SEQ ID NO: 465172 - DNA, 15 bp, Homo sapiens
tgtcacccgggctgg

SEQ ID NO: 465173 - DNA, 15 bp, Homo sapiens
ctgtcacccgggctg

SEQ ID NO: 465174 - DNA, 15 bp, Homo sapiens
actgtcacccgggct

SEQ ID NO: 465175 - DNA, 15 bp, Homo sapiens
tactgtcacccgggc

SEQ ID NO: 465176 - DNA, 15 bp, Homo sapiens
atactgtcacccggg

SEQ ID NO: 465177 - DNA, 15 bp, Homo sapiens
aatactgtcacccgg

SEQ ID NO: 465178 - DNA, 15 bp, Homo sapiens
aaatactgtcacccg

SEQ ID NO: 465179 - DNA, 15 bp, Homo sapiens
gaaatactgtcaccc

SEQ ID NO: 465180 - DNA, 15 bp, Homo sapiens
tgaaatactgtcacc

SEQ ID NO: 465181 - DNA, 15 bp, Homo sapiens
atgaaatactgtcac

SEQ ID NO: 465182 - DNA, 15 bp, Homo sapiens
gatgaaatactgtca

SEQ ID NO: 465183 - DNA, 15 bp, Homo sapiens
agatgaaatactgtc

SEQ ID NO: 465184 - DNA, 15 bp, Homo sapiens
gagatgaaatactgt

SEQ ID NO: 465185 - DNA, 15 bp, Homo sapiens
tgagatgaaatactg

SEQ ID NO: 465186 - DNA, 15 bp, Homo sapiens
ttgagatgaaatact

SEQ ID NO: 465187 - DNA, 15 bp, Homo sapiens
tttgagatgaaatac

SEQ ID NO: 465188 - DNA, 15 bp, Homo sapiens
ttttgagatgaaata

SEQ ID NO: 465189 - DNA, 15 bp, Homo sapiens
tttttgagatgaaat

SEQ ID NO: 465190 - DNA, 15 bp, Homo sapiens
ttttttgagatgaaa

SEQ ID NO: 465191 - DNA, 15 bp, Homo sapiens
tttttttgagatgaa

SEQ ID NO: 465192 - DNA, 15 bp, Homo sapiens
ttttttttgagatga

SEQ ID NO: 465193 - DNA, 15 bp, Homo sapiens
gttcttttttttttt

SEQ ID NO: 465194 - DNA, 15 bp, Homo sapiens
tgttctttttttttt

SEQ ID NO: 465195 - DNA, 15 bp, Homo sapiens
gtgttcttttttttt

SEQ ID NO: 465196 - DNA, 15 bp, Homo sapiens
tgtgttctttttttt

SEQ ID NO: 465197 - DNA, 15 bp, Homo sapiens
ttgtgttcttttttt

SEQ ID NO: 465198 - DNA, 15 bp, Homo sapiens
attgtgttctttttt

SEQ ID NO: 465199 - DNA, 15 bp, Homo sapiens
aattgtgttcttttt

SEQ ID NO: 465200 - DNA, 15 bp, Homo sapiens
taattgtgttctttt

SEQ ID NO: 465201 - DNA, 15 bp, Homo sapiens
ataattgtgttcttt

SEQ ID NO: 465202 - DNA, 15 bp, Homo sapiens
aataattgtgttctt

SEQ ID NO: 465203 - DNA, 15 bp, Homo sapiens
caataattgtgttct

SEQ ID NO: 465204 - DNA, 15 bp, Homo sapiens
acaataattgtgttc

SEQ ID NO: 465205 - DNA, 15 bp, Homo sapiens
tacaataattgtgtt

SEQ ID NO: 465206 - DNA, 15 bp, Homo sapiens
gtacaataattgtgt

SEQ ID NO: 465207 - DNA, 15 bp, Homo sapiens
agtacaataattgtg

SEQ ID NO: 465208 - DNA, 15 bp, Homo sapiens
tagtacaataattgt

SEQ ID NO: 465209 - DNA, 15 bp, Homo sapiens
gtagtacaataattg

SEQ ID NO: 465210 - DNA, 15 bp, Homo sapiens
agtagtacaataatt

SEQ ID NO: 465211 - DNA, 15 bp, Homo sapiens
aagtagtacaataat

SEQ ID NO: 465212 - DNA, 15 bp, Homo sapiens
taagtagtacaataa

SEQ ID NO: 465213 - DNA, 15 bp, Homo sapiens
gtaagtagtacaata

SEQ ID NO: 465214 - DNA, 15 bp, Homo sapiens
agtaagtagtacaat

SEQ ID NO: 465215 - DNA, 15 bp, Homo sapiens
tagtaagtagtacaa

SEQ ID NO: 465216 - DNA, 15 bp, Homo sapiens
ctagtaagtagtaca

SEQ ID NO: 465217 - DNA, 15 bp, Homo sapiens
gctagtaagtagtac

SEQ ID NO: 465218 - DNA, 15 bp, Homo sapiens
ggctagtaagtagta

SEQ ID NO: 465219 - DNA, 15 bp, Homo sapiens
gggctagtaagtagt

SEQ ID NO: 465220 - DNA, 15 bp, Homo sapiens
agggctagtaagtag

SEQ ID NO: 465221 - DNA, 15 bp, Homo sapiens
gagggctagtaagta

SEQ ID NO: 465222 - DNA, 15 bp, Homo sapiens
ggagggctagtaagt

SEQ ID NO: 465223 - DNA, 15 bp, Homo sapiens
aggagggctagtaag

SEQ ID NO: 465224 - DNA, 15 bp, Homo sapiens
gaggagggctagtaa

SEQ ID NO: 465225 - DNA, 15 bp, Homo sapiens
agaggagggctagta

SEQ ID NO: 465226 - DNA, 15 bp, Homo sapiens
cagaggagggctagt

SEQ ID NO: 465227 - DNA, 15 bp, Homo sapiens
acagaggagggctag

SEQ ID NO: 465228 - DNA, 15 bp, Homo sapiens
gacagaggagggcta

SEQ ID NO: 465229 - DNA, 15 bp, Homo sapiens
ggacagaggagggct

SEQ ID NO: 465230 - DNA, 15 bp, Homo sapiens
gggacagaggagggc

SEQ ID NO: 465231 - DNA, 15 bp, Homo sapiens
ggggacagaggaggg

SEQ ID NO: 465232 - DNA, 15 bp, Homo sapiens
tggggacagaggagg

SEQ ID NO: 465233 - DNA, 15 bp, Homo sapiens
ctggggacagaggag

SEQ ID NO: 465234 - DNA, 15 bp, Homo sapiens
gctggggacagagga

SEQ ID NO: 465235 - DNA, 15 bp, Homo sapiens
agctggggacagagg

SEQ ID NO: 465236 - DNA, 15 bp, Homo sapiens
tagctggggacagag

SEQ ID NO: 465237 - DNA, 15 bp, Homo sapiens
ttagctggggacaga

SEQ ID NO: 465238 - DNA, 15 bp, Homo sapiens
tttagctggggacag

SEQ ID NO: 465239 - DNA, 15 bp, Homo sapiens
ttttagctggggaca

SEQ ID NO: 465240 - DNA, 15 bp, Homo sapiens
tttttagctggggac

SEQ ID NO: 465241 - DNA, 15 bp, Homo sapiens
atttttagctgggga

SEQ ID NO: 465242 - DNA, 15 bp, Homo sapiens
tatttttagctgggg

SEQ ID NO: 465243 - DNA, 15 bp, Homo sapiens
ttatttttagctggg

SEQ ID NO: 465244 - DNA, 15 bp, Homo sapiens
cttatttttagctgg

SEQ ID NO: 465245 - DNA, 15 bp, Homo sapiens
tcttatttttagctg

SEQ ID NO: 465246 - DNA, 15 bp, Homo sapiens
ttcttatttttagct

SEQ ID NO: 465247 - DNA, 15 bp, Homo sapiens
gttcttatttttagc

SEQ ID NO: 465248 - DNA, 15 bp, Homo sapiens
tgttcttatttttag

SEQ ID NO: 465249 - DNA, 15 bp, Homo sapiens
ctgttcttattttta

SEQ ID NO: 465250 - DNA, 15 bp, Homo sapiens
gctgttcttattttt

SEQ ID NO: 465251 - DNA, 15 bp, Homo sapiens
tgctgttcttatttt

SEQ ID NO: 465252 - DNA, 15 bp, Homo sapiens
ttgctgttcttattt

SEQ ID NO: 465253 - DNA, 15 bp, Homo sapiens
gttgctgttcttatt

SEQ ID NO: 465254 - DNA, 15 bp, Homo sapiens
tgttgctgttcttat

SEQ ID NO: 465255 - DNA, 15 bp, Homo sapiens
ttgttgctgttctta

SEQ ID NO: 465256 - DNA, 15 bp, Homo sapiens
gttgttgctgttctt

SEQ ID NO: 465257 - DNA, 15 bp, Homo sapiens
ggttgttgctgttct

SEQ ID NO: 465258 - DNA, 15 bp, Homo sapiens
tggttgttgctgttc

SEQ ID NO: 465259 - DNA, 15 bp, Homo sapiens
ttggttgttgctgtt

SEQ ID NO: 465260 - DNA, 15 bp, Homo sapiens
tttggttgttgctgt

SEQ ID NO: 465261 - DNA, 15 bp, Homo sapiens
ttttggttgttgctg

SEQ ID NO: 465262 - DNA, 15 bp, Homo sapiens
tttttggttgttgct

SEQ ID NO: 465263 - DNA, 15 bp, Homo sapiens
ttttttggttgttgc

SEQ ID NO: 465264 - DNA, 15 bp, Homo sapiens
attttttggttgttg

SEQ ID NO: 465265 - DNA, 15 bp, Homo sapiens
gattttttggttgtt

SEQ ID NO: 465266 - DNA, 15 bp, Homo sapiens
ggattttttggttgt

SEQ ID NO: 465267 - DNA, 15 bp, Homo sapiens
aggattttttggttg

SEQ ID NO: 465268 - DNA, 15 bp, Homo sapiens
aaggattttttggtt

SEQ ID NO: 465269 - DNA, 15 bp, Homo sapiens
taaggattttttggt

SEQ ID NO: 465270 - DNA, 15 bp, Homo sapiens
ctaaggattttttgg

SEQ ID NO: 465271 - DNA, 15 bp, Homo sapiens
actaaggattttttg

SEQ ID NO: 465272 - DNA, 15 bp, Homo sapiens
aactaaggatttttt

SEQ ID NO: 465273 - DNA, 15 bp, Homo sapiens
taactaaggattttt

SEQ ID NO: 465274 - DNA, 15 bp, Homo sapiens
ataactaaggatttt

SEQ ID NO: 465275 - DNA, 15 bp, Homo sapiens
cataactaaggattt

SEQ ID NO: 465276 - DNA, 15 bp, Homo sapiens
acataactaaggatt

SEQ ID NO: 465277 - DNA, 15 bp, Homo sapiens
tacataactaaggat

SEQ ID NO: 465278 - DNA, 15 bp, Homo sapiens
gtacataactaagga

SEQ ID NO: 465279 - DNA, 15 bp, Homo sapiens
agtacataactaagg

SEQ ID NO: 465280 - DNA, 15 bp, Homo sapiens
cagtacataactaag

SEQ ID NO: 465281 - DNA, 15 bp, Homo sapiens
ccagtacataactaa

SEQ ID NO: 465282 - DNA, 15 bp, Homo sapiens
tccagtacataacta

SEQ ID NO: 465283 - DNA, 15 bp, Homo sapiens
ttccagtacataact

SEQ ID NO: 465284 - DNA, 15 bp, Homo sapiens
tttccagtacataac

SEQ ID NO: 465285 - DNA, 15 bp, Homo sapiens
atttccagtacataa

SEQ ID NO: 465286 - DNA, 15 bp, Homo sapiens
catttccagtacata

SEQ ID NO: 465287 - DNA, 15 bp, Homo sapiens
tcatttccagtacat

SEQ ID NO: 465288 - DNA, 15 bp, Homo sapiens
ttcatttccagtaca

SEQ ID NO: 465289 - DNA, 15 bp, Homo sapiens
attcatttccagtac

SEQ ID NO: 465290 - DNA, 15 bp, Homo sapiens
aattcatttccagta

SEQ ID NO: 465291 - DNA, 15 bp, Homo sapiens
taattcatttccagt

SEQ ID NO: 465292 - DNA, 15 bp, Homo sapiens
ctaattcatttccag

SEQ ID NO: 465293 - DNA, 15 bp, Homo sapiens
tctaattcatttcca

SEQ ID NO: 465294 - DNA, 15 bp, Homo sapiens
atctaattcatttcc

SEQ ID NO: 465295 - DNA, 15 bp, Homo sapiens
tatctaattcatttc

SEQ ID NO: 465296 - DNA, 15 bp, Homo sapiens
ttatctaattcattt

SEQ ID NO: 465297 - DNA, 15 bp, Homo sapiens
attatctaattcatt

SEQ ID NO: 465298 - DNA, 15 bp, Homo sapiens
aattatctaattcat

SEQ ID NO: 465299 - DNA, 15 bp, Homo sapiens
aaattatctaattca

SEQ ID NO: 465300 - DNA, 15 bp, Homo sapiens
aaaattatctaattc

SEQ ID NO: 465301 - DNA, 15 bp, Homo sapiens
gaaaattatctaatt

SEQ ID NO: 465302 - DNA, 15 bp, Homo sapiens
tgaaaattatctaat

SEQ ID NO: 465303 - DNA, 15 bp, Homo sapiens
ttgaaaattatctaa

SEQ ID NO: 465304 - DNA, 15 bp, Homo sapiens
attgaaaattatcta

SEQ ID NO: 465305 - DNA, 15 bp, Homo sapiens
tattgaaaattatct

SEQ ID NO: 465306 - DNA, 15 bp, Homo sapiens
ttattgaaaattatc

SEQ ID NO: 465307 - DNA, 15 bp, Homo sapiens
gttattgaaaattat

SEQ ID NO: 465308 - DNA, 15 bp, Homo sapiens
agttattgaaaatta

SEQ ID NO: 465309 - DNA, 15 bp, Homo sapiens
aagttattgaaaatt

SEQ ID NO: 465310 - DNA, 15 bp, Homo sapiens
taagttattgaaaat

SEQ ID NO: 465311 - DNA, 15 bp, Homo sapiens
gtaagttattgaaaa

SEQ ID NO: 465312 - DNA, 15 bp, Homo sapiens
tgtaagttattgaaa

SEQ ID NO: 465313 - DNA, 15 bp, Homo sapiens
gtgtaagttattgaa

SEQ ID NO: 465314 - DNA, 15 bp, Homo sapiens
cgtgtaagttattga

SEQ ID NO: 465315 - DNA, 15 bp, Homo sapiens
acgtgtaagttattg

SEQ ID NO: 465316 - DNA, 15 bp, Homo sapiens
aacgtgtaagttatt

SEQ ID NO: 465317 - DNA, 15 bp, Homo sapiens
aaacgtgtaagttat

SEQ ID NO: 465318 - DNA, 15 bp, Homo sapiens
aaaacgtgtaagtta

SEQ ID NO: 465319 - DNA, 15 bp, Homo sapiens
aaaaacgtgtaagtt

SEQ ID NO: 465320 - DNA, 15 bp, Homo sapiens
taaaaacgtgtaagt

SEQ ID NO: 465321 - DNA, 15 bp, Homo sapiens
ctaaaaacgtgtaag

SEQ ID NO: 465322 - DNA, 15 bp, Homo sapiens
cctaaaaacgtgtaa

SEQ ID NO: 465323 - DNA, 15 bp, Homo sapiens
tcctaaaaacgtgta

SEQ ID NO: 465324 - DNA, 15 bp, Homo sapiens
atcctaaaaacgtgt

SEQ ID NO: 465325 - DNA, 15 bp, Homo sapiens
tatcctaaaaacgtg

SEQ ID NO: 465326 - DNA, 15 bp, Homo sapiens
atatcctaaaaacgt

SEQ ID NO: 465327 - DNA, 15 bp, Homo sapiens
catatcctaaaaacg

SEQ ID NO: 465328 - DNA, 15 bp, Homo sapiens
acatatcctaaaaac

SEQ ID NO: 465329 - DNA, 15 bp, Homo sapiens
aacatatcctaaaaa

SEQ ID NO: 465330 - DNA, 15 bp, Homo sapiens
taacatatcctaaaa

SEQ ID NO: 465331 - DNA, 15 bp, Homo sapiens
ctaacatatcctaaa

SEQ ID NO: 465332 - DNA, 15 bp, Homo sapiens
actaacatatcctaa

SEQ ID NO: 465333 - DNA, 15 bp, Homo sapiens
aactaacatatccta

SEQ ID NO: 465334 - DNA, 15 bp, Homo sapiens
aaactaacatatcct

SEQ ID NO: 465335 - DNA, 15 bp, Homo sapiens
caaactaacatatcc

SEQ ID NO: 465336 - DNA, 15 bp, Homo sapiens
tcaaactaacatatc

SEQ ID NO: 465337 - DNA, 15 bp, Homo sapiens
ttcaaactaacatat

SEQ ID NO: 465338 - DNA, 15 bp, Homo sapiens
tttcaaactaacata

SEQ ID NO: 465339 - DNA, 15 bp, Homo sapiens
ttttcaaactaacat

SEQ ID NO: 465340 - DNA, 15 bp, Homo sapiens
attttcaaactaaca

SEQ ID NO: 465341 - DNA, 15 bp, Homo sapiens
cattttcaaactaac

SEQ ID NO: 465342 - DNA, 15 bp, Homo sapiens
gcattttcaaactaa

SEQ ID NO: 465343 - DNA, 15 bp, Homo sapiens
tgcattttcaaacta

SEQ ID NO: 465344 - DNA, 15 bp, Homo sapiens
ttgcattttcaaact

SEQ ID NO: 465345 - DNA, 15 bp, Homo sapiens
tttgcattttcaaac

SEQ ID NO: 465346 - DNA, 15 bp, Homo sapiens
atttgcattttcaaa

SEQ ID NO: 465347 - DNA, 15 bp, Homo sapiens
tatttgcattttcaa

SEQ ID NO: 465348 - DNA, 15 bp, Homo sapiens
atatttgcattttca

SEQ ID NO: 465349 - DNA, 15 bp, Homo sapiens
aatatttgcattttc

SEQ ID NO: 465350 - DNA, 15 bp, Homo sapiens
gaatatttgcatttt

SEQ ID NO: 465351 - DNA, 15 bp, Homo sapiens
tgaatatttgcattt

SEQ ID NO: 465352 - DNA, 15 bp, Homo sapiens
atgaatatttgcatt

SEQ ID NO: 465353 - DNA, 15 bp, Homo sapiens
catgaatatttgcat

SEQ ID NO: 465354 - DNA, 15 bp, Homo sapiens
gcatgaatatttgca

SEQ ID NO: 465355 - DNA, 15 bp, Homo sapiens
tgcatgaatatttgc

SEQ ID NO: 465356 - DNA, 15 bp, Homo sapiens
atgcatgaatatttg

SEQ ID NO: 465357 - DNA, 15 bp, Homo sapiens
catgcatgaatattt

SEQ ID NO: 465358 - DNA, 15 bp, Homo sapiens
tcatgcatgaatatt

SEQ ID NO: 465359 - DNA, 15 bp, Homo sapiens
gtcatgcatgaatat

SEQ ID NO: 465360 - DNA, 15 bp, Homo sapiens
ggtcatgcatgaata

SEQ ID NO: 465361 - DNA, 15 bp, Homo sapiens
gggtcatgcatgaat

SEQ ID NO: 465362 - DNA, 15 bp, Homo sapiens
ggggtcatgcatgaa

SEQ ID NO: 465363 - DNA, 15 bp, Homo sapiens
tggggtcatgcatga

SEQ ID NO: 465364 - DNA, 15 bp, Homo sapiens
ctggggtcatgcatg

SEQ ID NO: 465365 - DNA, 15 bp, Homo sapiens
actggggtcatgcat

SEQ ID NO: 465366 - DNA, 15 bp, Homo sapiens
cactggggtcatgca

SEQ ID NO: 465367 - DNA, 15 bp, Homo sapiens
acactggggtcatgc

SEQ ID NO: 465368 - DNA, 15 bp, Homo sapiens
aacactggggtcatg

SEQ ID NO: 465369 - DNA, 15 bp, Homo sapiens
taacactggggtcat

SEQ ID NO: 465370 - DNA, 15 bp, Homo sapiens
ttaacactggggtca

SEQ ID NO: 465371 - DNA, 15 bp, Homo sapiens
attaacactggggtc

SEQ ID NO: 465372 - DNA, 15 bp, Homo sapiens
gattaacactggggt

SEQ ID NO: 465373 - DNA, 15 bp, Homo sapiens
agattaacactgggg

SEQ ID NO: 465374 - DNA, 15 bp, Homo sapiens
tagattaacactggg

SEQ ID NO: 465375 - DNA, 15 bp, Homo sapiens
atagattaacactgg

SEQ ID NO: 465376 - DNA, 15 bp, Homo sapiens
catagattaacactg

SEQ ID NO: 465377 - DNA, 15 bp, Homo sapiens
tcatagattaacact

SEQ ID NO: 465378 - DNA, 15 bp, Homo sapiens
atcatagattaacac

SEQ ID NO: 465379 - DNA, 15 bp, Homo sapiens
catcatagattaaca

SEQ ID NO: 465380 - DNA, 15 bp, Homo sapiens
ccatcatagattaac

SEQ ID NO: 465381 - DNA, 15 bp, Homo sapiens
tccatcatagattaa

SEQ ID NO: 465382 - DNA, 15 bp, Homo sapiens
ctccatcatagatta

SEQ ID NO: 465383 - DNA, 15 bp, Homo sapiens
gctccatcatagatt

SEQ ID NO: 465384 - DNA, 15 bp, Homo sapiens
tgctccatcatagat

SEQ ID NO: 465385 - DNA, 15 bp, Homo sapiens
ctgctccatcataga

SEQ ID NO: 465386 - DNA, 15 bp, Homo sapiens
cctgctccatcatag

SEQ ID NO: 465387 - DNA, 15 bp, Homo sapiens
acctgctccatcata

SEQ ID NO: 465388 - DNA, 15 bp, Homo sapiens
tacctgctccatcat

SEQ ID NO: 465389 - DNA, 15 bp, Homo sapiens
atacctgctccatca

SEQ ID NO: 465390 - DNA, 15 bp, Homo sapiens
tatacctgctccatc

SEQ ID NO: 465391 - DNA, 15 bp, Homo sapiens
ctatacctgctccat

SEQ ID NO: 465392 - DNA, 15 bp, Homo sapiens
actatacctgctcca

SEQ ID NO: 465393 - DNA, 15 bp, Homo sapiens
cactatacctgctcc

SEQ ID NO: 465394 - DNA, 15 bp, Homo sapiens
ccactatacctgctc

SEQ ID NO: 465395 - DNA, 15 bp, Homo sapiens
cccactatacctgct

SEQ ID NO: 465396 - DNA, 15 bp, Homo sapiens
tcccactatacctgc

SEQ ID NO: 465397 - DNA, 15 bp, Homo sapiens
atcccactatacctg

SEQ ID NO: 465398 - DNA, 15 bp, Homo sapiens
catcccactatacct

SEQ ID NO: 465399 - DNA, 15 bp, Homo sapiens
gcatcccactatacc

SEQ ID NO: 465400 - DNA, 15 bp, Homo sapiens
agcatcccactatac

SEQ ID NO: 465401 - DNA, 15 bp, Homo sapiens
cagcatcccactata

SEQ ID NO: 465402 - DNA, 15 bp, Homo sapiens
acagcatcccactat

SEQ ID NO: 465403 - DNA, 15 bp, Homo sapiens
aacagcatcccacta

SEQ ID NO: 465404 - DNA, 15 bp, Homo sapiens
aaacagcatcccact

SEQ ID NO: 465405 - DNA, 15 bp, Homo sapiens
gaaacagcatcccac

SEQ ID NO: 465406 - DNA, 15 bp, Homo sapiens
tgaaacagcatccca

SEQ ID NO: 465407 - DNA, 15 bp, Homo sapiens
atgaaacagcatccc

SEQ ID NO: 465408 - DNA, 15 bp, Homo sapiens
catgaaacagcatcc

SEQ ID NO: 465409 - DNA, 15 bp, Homo sapiens
tcatgaaacagcatc

SEQ ID NO: 465410 - DNA, 15 bp, Homo sapiens
atcatgaaacagcat

SEQ ID NO: 465411 - DNA, 15 bp, Homo sapiens
aatcatgaaacagca

SEQ ID NO: 465412 - DNA, 15 bp, Homo sapiens
aaatcatgaaacagc

SEQ ID NO: 465413 - DNA, 15 bp, Homo sapiens
taaatcatgaaacag

SEQ ID NO: 465414 - DNA, 15 bp, Homo sapiens
ttaaatcatgaaaca

SEQ ID NO: 465415 - DNA, 15 bp, Homo sapiens
attaaatcatgaaac

SEQ ID NO: 465416 - DNA, 15 bp, Homo sapiens
aattaaatcatgaaa

SEQ ID NO: 465417 - DNA, 15 bp, Homo sapiens
aaattaaatcatgaa

SEQ ID NO: 465418 - DNA, 15 bp, Homo sapiens
caaattaaatcatga

SEQ ID NO: 465419 - DNA, 15 bp, Homo sapiens
ccaaattaaatcatg

SEQ ID NO: 465420 - DNA, 15 bp, Homo sapiens
tccaaattaaatcat

SEQ ID NO: 465421 - DNA, 15 bp, Homo sapiens
gtccaaattaaatca

SEQ ID NO: 465422 - DNA, 15 bp, Homo sapiens
ggtccaaattaaatc

SEQ ID NO: 465423 - DNA, 15 bp, Homo sapiens
aggtccaaattaaat

SEQ ID NO: 465424 - DNA, 15 bp, Homo sapiens
aaggtccaaattaaa

SEQ ID NO: 465425 - DNA, 15 bp, Homo sapiens
gaaggtccaaattaa

SEQ ID NO: 465426 - DNA, 15 bp, Homo sapiens
tgaaggtccaaatta

SEQ ID NO: 465427 - DNA, 15 bp, Homo sapiens
ctgaaggtccaaatt

SEQ ID NO: 465428 - DNA, 15 bp, Homo sapiens
cctgaaggtccaaat

SEQ ID NO: 465429 - DNA, 15 bp, Homo sapiens
ccctgaaggtccaaa

SEQ ID NO: 465430 - DNA, 15 bp, Homo sapiens
tccctgaaggtccaa

SEQ ID NO: 465431 - DNA, 15 bp, Homo sapiens
ctccctgaaggtcca

SEQ ID NO: 465432 - DNA, 15 bp, Homo sapiens
actccctgaaggtcc

SEQ ID NO: 465433 - DNA, 15 bp, Homo sapiens
tactccctgaaggtc

SEQ ID NO: 465434 - DNA, 15 bp, Homo sapiens
ctactccctgaaggt

SEQ ID NO: 465435 - DNA, 15 bp, Homo sapiens
tctactccctgaagg

SEQ ID NO: 465436 - DNA, 15 bp, Homo sapiens
gtctactccctgaag

SEQ ID NO: 465437 - DNA, 15 bp, Homo sapiens
agtctactccctgaa

SEQ ID NO: 465438 - DNA, 15 bp, Homo sapiens
cagtctactccctga

SEQ ID NO: 465439 - DNA, 15 bp, Homo sapiens
acagtctactccctg

SEQ ID NO: 465440 - DNA, 15 bp, Homo sapiens
cacagtctactccct

SEQ ID NO: 465441 - DNA, 15 bp, Homo sapiens
tcacagtctactccc

SEQ ID NO: 465442 - DNA, 15 bp, Homo sapiens
atcacagtctactcc

SEQ ID NO: 465443 - DNA, 15 bp, Homo sapiens
catcacagtctactc

SEQ ID NO: 465444 - DNA, 15 bp, Homo sapiens
gcatcacagtctact

SEQ ID NO: 465445 - DNA, 15 bp, Homo sapiens
ggcatcacagtctac

SEQ ID NO: 465446 - DNA, 15 bp, Homo sapiens
aggcatcacagtcta

SEQ ID NO: 465447 - DNA, 15 bp, Homo sapiens
gaggcatcacagtct

SEQ ID NO: 465448 - DNA, 15 bp, Homo sapiens
agaggcatcacagtc

SEQ ID NO: 465449 - DNA, 15 bp, Homo sapiens
cagaggcatcacagt

SEQ ID NO: 465450 - DNA, 15 bp, Homo sapiens
gcagaggcatcacag

SEQ ID NO: 465451 - DNA, 15 bp, Homo sapiens
tgcagaggcatcaca

SEQ ID NO: 465452 - DNA, 15 bp, Homo sapiens
atgcagaggcatcac

SEQ ID NO: 465453 - DNA, 15 bp, Homo sapiens
aatgcagaggcatca

SEQ ID NO: 465454 - DNA, 15 bp, Homo sapiens
aaatgcagaggcatc

SEQ ID NO: 465455 - DNA, 15 bp, Homo sapiens
caaatgcagaggcat

SEQ ID NO: 465456 - DNA, 15 bp, Homo sapiens
acaaatgcagaggca

SEQ ID NO: 465457 - DNA, 15 bp, Homo sapiens
tacaaatgcagaggc

SEQ ID NO: 465458 - DNA, 15 bp, Homo sapiens
atacaaatgcagagg

SEQ ID NO: 465459 - DNA, 15 bp, Homo sapiens
gatacaaatgcagag

SEQ ID NO: 465460 - DNA, 15 bp, Homo sapiens
ggatacaaatgcaga

SEQ ID NO: 465461 - DNA, 15 bp, Homo sapiens
tggatacaaatgcag

SEQ ID NO: 465462 - DNA, 15 bp, Homo sapiens
ttggatacaaatgca

SEQ ID NO: 465463 - DNA, 15 bp, Homo sapiens
cttggatacaaatgc

SEQ ID NO: 465464 - DNA, 15 bp, Homo sapiens
tcttggatacaaatg

SEQ ID NO: 465465 - DNA, 15 bp, Homo sapiens
gtcttggatacaaat

SEQ ID NO: 465466 - DNA, 15 bp, Homo sapiens
tgtcttggatacaaa

SEQ ID NO: 465467 - DNA, 15 bp, Homo sapiens
ttgtcttggatacaa

SEQ ID NO: 465468 - DNA, 15 bp, Homo sapiens
tttgtcttggataca

SEQ ID NO: 465469 - DNA, 15 bp, Homo sapiens
atttgtcttggatac

SEQ ID NO: 465470 - DNA, 15 bp, Homo sapiens
tatttgtcttggata

SEQ ID NO: 465471 - DNA, 15 bp, Homo sapiens
ttatttgtcttggat

SEQ ID NO: 465472 - DNA, 15 bp, Homo sapiens
attatttgtcttgga

SEQ ID NO: 465473 - DNA, 15 bp, Homo sapiens
aattatttgtcttgg

SEQ ID NO: 465474 - DNA, 15 bp, Homo sapiens
taattatttgtcttg

SEQ ID NO: 465475 - DNA, 15 bp, Homo sapiens
ttaattatttgtctt

SEQ ID NO: 465476 - DNA, 15 bp, Homo sapiens
tttaattatttgtct

SEQ ID NO: 465477 - DNA, 15 bp, Homo sapiens
atttaattatttgtc

SEQ ID NO: 465478 - DNA, 15 bp, Homo sapiens
tatttaattatttgt

SEQ ID NO: 465479 - DNA, 15 bp, Homo sapiens
ctatttaattatttg

SEQ ID NO: 465480 - DNA, 15 bp, Homo sapiens
actatttaattattt

SEQ ID NO: 465481 - DNA, 15 bp, Homo sapiens
gactatttaattatt

SEQ ID NO: 465482 - DNA, 15 bp, Homo sapiens
agactatttaattat

SEQ ID NO: 465483 - DNA, 15 bp, Homo sapiens
tagactatttaatta

SEQ ID NO: 465484 - DNA, 15 bp, Homo sapiens
atagactatttaatt

SEQ ID NO: 465485 - DNA, 15 bp, Homo sapiens
aatagactatttaat

SEQ ID NO: 465486 - DNA, 15 bp, Homo sapiens
aaatagactatttaa

SEQ ID NO: 465487 - DNA, 15 bp, Homo sapiens
aaaatagactattta

SEQ ID NO: 465488 - DNA, 15 bp, Homo sapiens
aaaaatagactattt

SEQ ID NO: 465489 - DNA, 15 bp, Homo sapiens
caaaaatagactatt

SEQ ID NO: 465490 - DNA, 15 bp, Homo sapiens
ccaaaaatagactat

SEQ ID NO: 465491 - DNA, 15 bp, Homo sapiens
gccaaaaatagacta

SEQ ID NO: 465492 - DNA, 15 bp, Homo sapiens
agccaaaaatagact

SEQ ID NO: 465493 - DNA, 15 bp, Homo sapiens
cagccaaaaatagac

SEQ ID NO: 465494 - DNA, 15 bp, Homo sapiens
ccagccaaaaataga

SEQ ID NO: 465495 - DNA, 15 bp, Homo sapiens
cccagccaaaaatag

SEQ ID NO: 465496 - DNA, 15 bp, Homo sapiens
gcccagccaaaaata

SEQ ID NO: 465497 - DNA, 15 bp, Homo sapiens
tgcccagccaaaaat

SEQ ID NO: 465498 - DNA, 15 bp, Homo sapiens
atgcccagccaaaaa

SEQ ID NO: 465499 - DNA, 15 bp, Homo sapiens
catgcccagccaaaa

SEQ ID NO: 465500 - DNA, 15 bp, Homo sapiens
tcatgcccagccaaa

SEQ ID NO: 465501 - DNA, 15 bp, Homo sapiens
atcatgcccagccaa

SEQ ID NO: 465502 - DNA, 15 bp, Homo sapiens
catcatgcccagcca

SEQ ID NO: 465503 - DNA, 15 bp, Homo sapiens
gcatcatgcccagcc

SEQ ID NO: 465504 - DNA, 15 bp, Homo sapiens
ggcatcatgcccagc

SEQ ID NO: 465505 - DNA, 15 bp, Homo sapiens
aggcatcatgcccag

SEQ ID NO: 465506 - DNA, 15 bp, Homo sapiens
gaggcatcatgccca

SEQ ID NO: 465507 - DNA, 15 bp, Homo sapiens
tgaggcatcatgccc

SEQ ID NO: 465508 - DNA, 15 bp, Homo sapiens
atgaggcatcatgcc

SEQ ID NO: 465509 - DNA, 15 bp, Homo sapiens
catgaggcatcatgc

SEQ ID NO: 465510 - DNA, 15 bp, Homo sapiens
gcatgaggcatcatg

SEQ ID NO: 465511 - DNA, 15 bp, Homo sapiens
ggcatgaggcatcat

SEQ ID NO: 465512 - DNA, 15 bp, Homo sapiens
aggcatgaggcatca

SEQ ID NO: 465513 - DNA, 15 bp, Homo sapiens
caggcatgaggcatc

SEQ ID NO: 465514 - DNA, 15 bp, Homo sapiens
gcaggcatgaggcat

SEQ ID NO: 465515 - DNA, 15 bp, Homo sapiens
tgcaggcatgaggca

SEQ ID NO: 465516 - DNA, 15 bp, Homo sapiens
ctgcaggcatgaggc

SEQ ID NO: 465517 - DNA, 15 bp, Homo sapiens
actgcaggcatgagg

SEQ ID NO: 465518 - DNA, 15 bp, Homo sapiens
gactgcaggcatgag

SEQ ID NO: 465519 - DNA, 15 bp, Homo sapiens
ggactgcaggcatga

SEQ ID NO: 465520 - DNA, 15 bp, Homo sapiens
tgctgggactgcagg

SEQ ID NO: 465521 - DNA, 15 bp, Homo sapiens
gtgctgggactgcag

SEQ ID NO: 465522 - DNA, 15 bp, Homo sapiens
agtgctgggactgca

SEQ ID NO: 465523 - DNA, 15 bp, Homo sapiens
aagtgctgggactgc

SEQ ID NO: 465524 - DNA, 15 bp, Homo sapiens
aaagtgctgggactg

SEQ ID NO: 465525 - DNA, 15 bp, Homo sapiens
caaagtgctgggact

SEQ ID NO: 465526 - DNA, 15 bp, Homo sapiens
ccaaagtgctgggac

SEQ ID NO: 465527 - DNA, 15 bp, Homo sapiens
cgatcctcccacctc

SEQ ID NO: 465528 - DNA, 15 bp, Homo sapiens
gcgatcctcccacct

SEQ ID NO: 465529 - DNA, 15 bp, Homo sapiens
agcgatcctcccacc

SEQ ID NO: 465530 - DNA, 15 bp, Homo sapiens
aagcgatcctcccac

SEQ ID NO: 465531 - DNA, 15 bp, Homo sapiens
caagcgatcctccca

SEQ ID NO: 465532 - DNA, 15 bp, Homo sapiens
tcaagcgatcctccc

SEQ ID NO: 465533 - DNA, 15 bp, Homo sapiens
cctcaagcgatcctc

SEQ ID NO: 465534 - DNA, 15 bp, Homo sapiens
gcctcaagcgatcct

SEQ ID NO: 465535 - DNA, 15 bp, Homo sapiens
ggcctcaagcgatcc

SEQ ID NO: 465536 - DNA, 15 bp, Homo sapiens
tggcctcaagcgatc

SEQ ID NO: 465537 - DNA, 15 bp, Homo sapiens
ctggcctcaagcgat

SEQ ID NO: 465538 - DNA, 15 bp, Homo sapiens
cctggcctcaagcga

SEQ ID NO: 465539 - DNA, 15 bp, Homo sapiens
tcctggcctcaagcg

SEQ ID NO: 465540 - DNA, 15 bp, Homo sapiens
ctcctggcctcaagc

SEQ ID NO: 465541 - DNA, 15 bp, Homo sapiens
actcctggcctcaag

SEQ ID NO: 465542 - DNA, 15 bp, Homo sapiens
aactcctggcctcaa

SEQ ID NO: 465543 - DNA, 15 bp, Homo sapiens
gaactcctggcctca

SEQ ID NO: 465544 - DNA, 15 bp, Homo sapiens
tgaactcctggcctc

SEQ ID NO: 465545 - DNA, 15 bp, Homo sapiens
ttgaactcctggcct

SEQ ID NO: 465546 - DNA, 15 bp, Homo sapiens
cttgaactcctggcc

SEQ ID NO: 465547 - DNA, 15 bp, Homo sapiens
tcttgaactcctggc

SEQ ID NO: 465548 - DNA, 15 bp, Homo sapiens
atcttgaactcctgg

SEQ ID NO: 465549 - DNA, 15 bp, Homo sapiens
actgatcttgaactc

SEQ ID NO: 465550 - DNA, 15 bp, Homo sapiens
gactgatcttgaact

SEQ ID NO: 465551 - DNA, 15 bp, Homo sapiens
agactgatcttgaac

SEQ ID NO: 465552 - DNA, 15 bp, Homo sapiens
cagactgatcttgaa

SEQ ID NO: 465553 - DNA, 15 bp, Homo sapiens
ccagactgatcttga

SEQ ID NO: 465554 - DNA, 15 bp, Homo sapiens
cccagactgatcttg

SEQ ID NO: 465555 - DNA, 15 bp, Homo sapiens
gcccagactgatctt

SEQ ID NO: 465556 - DNA, 15 bp, Homo sapiens
tgcccagactgatct

SEQ ID NO: 465557 - DNA, 15 bp, Homo sapiens
ttgcccagactgatc

SEQ ID NO: 465558 - DNA, 15 bp, Homo sapiens
gttgcccagactgat

SEQ ID NO: 465559 - DNA, 15 bp, Homo sapiens
tgttgcccagactga

SEQ ID NO: 465560 - DNA, 15 bp, Homo sapiens
ttgttgcccagactg

SEQ ID NO: 465561 - DNA, 15 bp, Homo sapiens
tttgttgcccagact

SEQ ID NO: 465562 - DNA, 15 bp, Homo sapiens
ttttgttgcccagac

SEQ ID NO: 465563 - DNA, 15 bp, Homo sapiens
attttgttgcccaga

SEQ ID NO: 465564 - DNA, 15 bp, Homo sapiens
cattttgttgcccag

SEQ ID NO: 465565 - DNA, 15 bp, Homo sapiens
tcattttgttgccca

SEQ ID NO: 465566 - DNA, 15 bp, Homo sapiens
ctcattttgttgccc

SEQ ID NO: 465567 - DNA, 15 bp, Homo sapiens
tctcattttgttgcc

SEQ ID NO: 465568 - DNA, 15 bp, Homo sapiens
gtctcattttgttgc

SEQ ID NO: 465569 - DNA, 15 bp, Homo sapiens
ggtctcattttgttg

SEQ ID NO: 465570 - DNA, 15 bp, Homo sapiens
aggtctcattttgtt

SEQ ID NO: 465571 - DNA, 15 bp, Homo sapiens
aaggtctcattttgt

SEQ ID NO: 465572 - DNA, 15 bp, Homo sapiens
caaggtctcattttg

SEQ ID NO: 465573 - DNA, 15 bp, Homo sapiens
acaaggtctcatttt

SEQ ID NO: 465574 - DNA, 15 bp, Homo sapiens
gacaaggtctcattt

SEQ ID NO: 465575 - DNA, 15 bp, Homo sapiens
agacaaggtctcatt

SEQ ID NO: 465576 - DNA, 15 bp, Homo sapiens
gagacaaggtctcat

SEQ ID NO: 465577 - DNA, 15 bp, Homo sapiens
agagacaaggtctca

SEQ ID NO: 465578 - DNA, 15 bp, Homo sapiens
tagagacaaggtctc

SEQ ID NO: 465579 - DNA, 15 bp, Homo sapiens
gtagagacaaggtct

SEQ ID NO: 465580 - DNA, 15 bp, Homo sapiens
tgtagagacaaggtc

SEQ ID NO: 465581 - DNA, 15 bp, Homo sapiens
ttgtagagacaaggt

SEQ ID NO: 465582 - DNA, 15 bp, Homo sapiens
tttgtagagacaagg

SEQ ID NO: 465583 - DNA, 15 bp, Homo sapiens
ttttgtagagacaag

SEQ ID NO: 465584 - DNA, 15 bp, Homo sapiens
tttttgtagagacaa

SEQ ID NO: 465585 - DNA, 15 bp, Homo sapiens
gtttttgtagagaca

SEQ ID NO: 465586 - DNA, 15 bp, Homo sapiens
agtttttgtagagac

SEQ ID NO: 465587 - DNA, 15 bp, Homo sapiens
tagtttttgtagaga

SEQ ID NO: 465588 - DNA, 15 bp, Homo sapiens
gtagtttttgtagag

SEQ ID NO: 465589 - DNA, 15 bp, Homo sapiens
tgtagtttttgtaga

SEQ ID NO: 465590 - DNA, 15 bp, Homo sapiens
ttgtagtttttgtag

SEQ ID NO: 465591 - DNA, 15 bp, Homo sapiens
tttgtagtttttgta

SEQ ID NO: 465592 - DNA, 15 bp, Homo sapiens
ttttgtagtttttgt

SEQ ID NO: 465593 - DNA, 15 bp, Homo sapiens
tttttgtagtttttg

SEQ ID NO: 465594 - DNA, 15 bp, Homo sapiens
ttttttgtagttttt

SEQ ID NO: 465595 - DNA, 15 bp, Homo sapiens
attttttgtagtttt

SEQ ID NO: 465596 - DNA, 15 bp, Homo sapiens
aattttttgtagttt

SEQ ID NO: 465597 - DNA, 15 bp, Homo sapiens
taattttttgtagtt

SEQ ID NO: 465598 - DNA, 15 bp, Homo sapiens
ctaattttttgtagt

SEQ ID NO: 465599 - DNA, 15 bp, Homo sapiens
gctaattttttgtag

SEQ ID NO: 465600 - DNA, 15 bp, Homo sapiens
agctaattttttgta

SEQ ID NO: 465601 - DNA, 15 bp, Homo sapiens
cagctaattttttgt

SEQ ID NO: 465602 - DNA, 15 bp, Homo sapiens
tcagctaattttttg

SEQ ID NO: 465603 - DNA, 15 bp, Homo sapiens
ttcagctaatttttt

SEQ ID NO: 465604 - DNA, 15 bp, Homo sapiens
gttcagctaattttt

SEQ ID NO: 465605 - DNA, 15 bp, Homo sapiens
tgttcagctaatttt

SEQ ID NO: 465606 - DNA, 15 bp, Homo sapiens
atgttcagctaattt

SEQ ID NO: 465607 - DNA, 15 bp, Homo sapiens
aatgttcagctaatt

SEQ ID NO: 465608 - DNA, 15 bp, Homo sapiens
caatgttcagctaat

SEQ ID NO: 465609 - DNA, 15 bp, Homo sapiens
acaatgttcagctaa

SEQ ID NO: 465610 - DNA, 15 bp, Homo sapiens
cacaatgttcagcta

SEQ ID NO: 465611 - DNA, 15 bp, Homo sapiens
ccacaatgttcagct

SEQ ID NO: 465612 - DNA, 15 bp, Homo sapiens
gccacaatgttcagc

SEQ ID NO: 465613 - DNA, 15 bp, Homo sapiens
agccacaatgttcag

SEQ ID NO: 465614 - DNA, 15 bp, Homo sapiens
aagccacaatgttca

SEQ ID NO: 465615 - DNA, 15 bp, Homo sapiens
caagccacaatgttc

SEQ ID NO: 465616 - DNA, 15 bp, Homo sapiens
acaagccacaatgtt

SEQ ID NO: 465617 - DNA, 15 bp, Homo sapiens
cacaagccacaatgt

SEQ ID NO: 465618 - DNA, 15 bp, Homo sapiens
gcacaagccacaatg

SEQ ID NO: 465619 - DNA, 15 bp, Homo sapiens
ggcacaagccacaat

SEQ ID NO: 465620 - DNA, 15 bp, Homo sapiens
gggcacaagccacaa

SEQ ID NO: 465621 - DNA, 15 bp, Homo sapiens
ggggcacaagccaca

SEQ ID NO: 465622 - DNA, 15 bp, Homo sapiens
aggggcacaagccac

SEQ ID NO: 465623 - DNA, 15 bp, Homo sapiens
taggggcacaagcca

SEQ ID NO: 465624 - DNA, 15 bp, Homo sapiens
ctaggggcacaagcc

SEQ ID NO: 465625 - DNA, 15 bp, Homo sapiens
actaggggcacaagc

SEQ ID NO: 465626 - DNA, 15 bp, Homo sapiens
gactaggggcacaag

SEQ ID NO: 465627 - DNA, 15 bp, Homo sapiens
ggactaggggcacaa

SEQ ID NO: 465628 - DNA, 15 bp, Homo sapiens
gggactaggggcaca

SEQ ID NO: 465629 - DNA, 15 bp, Homo sapiens
tgggactaggggcac

SEQ ID NO: 465630 - DNA, 15 bp, Homo sapiens
ctgggactaggggca

SEQ ID NO: 465631 - DNA, 15 bp, Homo sapiens
gctgggactaggggc

SEQ ID NO: 465632 - DNA, 15 bp, Homo sapiens
agctgggactagggg

SEQ ID NO: 465633 - DNA, 15 bp, Homo sapiens
tagctgggactaggg

SEQ ID NO: 465634 - DNA, 15 bp, Homo sapiens
gtagctgggactagg

SEQ ID NO: 465635 - DNA, 15 bp, Homo sapiens
agtagctgggactag

SEQ ID NO: 465636 - DNA, 15 bp, Homo sapiens
acctgagtagctggg

SEQ ID NO: 465637 - DNA, 15 bp, Homo sapiens
gacctgagtagctgg

SEQ ID NO: 465638 - DNA, 15 bp, Homo sapiens
ggacctgagtagctg

SEQ ID NO: 465639 - DNA, 15 bp, Homo sapiens
gggacctgagtagct

SEQ ID NO: 465640 - DNA, 15 bp, Homo sapiens
agggacctgagtagc

SEQ ID NO: 465641 - DNA, 15 bp, Homo sapiens
cagggacctgagtag

SEQ ID NO: 465642 - DNA, 15 bp, Homo sapiens
tcagggacctgagta

SEQ ID NO: 465643 - DNA, 15 bp, Homo sapiens
ctcagggacctgagt

SEQ ID NO: 465644 - DNA, 15 bp, Homo sapiens
actcagggacctgag

SEQ ID NO: 465645 - DNA, 15 bp, Homo sapiens
aactcagggacctga

SEQ ID NO: 465646 - DNA, 15 bp, Homo sapiens
taactcagggacctg

SEQ ID NO: 465647 - DNA, 15 bp, Homo sapiens
ctaactcagggacct

SEQ ID NO: 465648 - DNA, 15 bp, Homo sapiens
cctaactcagggacc

SEQ ID NO: 465649 - DNA, 15 bp, Homo sapiens
tcctaactcagggac

SEQ ID NO: 465650 - DNA, 15 bp, Homo sapiens
ctcctaactcaggga

SEQ ID NO: 465651 - DNA, 15 bp, Homo sapiens
cctcctaactcaggg

SEQ ID NO: 465652 - DNA, 15 bp, Homo sapiens
tcctcctaactcagg

SEQ ID NO: 465653 - DNA, 15 bp, Homo sapiens
atcctcctaactcag

SEQ ID NO: 465654 - DNA, 15 bp, Homo sapiens
aatcctcctaactca

SEQ ID NO: 465655 - DNA, 15 bp, Homo sapiens
caatcctcctaactc

SEQ ID NO: 465656 - DNA, 15 bp, Homo sapiens
gcaatcctcctaact

SEQ ID NO: 465657 - DNA, 15 bp, Homo sapiens
agcaatcctcctaac

SEQ ID NO: 465658 - DNA, 15 bp, Homo sapiens
aagcaatcctcctaa

SEQ ID NO: 465659 - DNA, 15 bp, Homo sapiens
caactcctgggctca

SEQ ID NO: 465660 - DNA, 15 bp, Homo sapiens
ccaactcctgggctc

SEQ ID NO: 465661 - DNA, 15 bp, Homo sapiens
tccaactcctgggct

SEQ ID NO: 465662 - DNA, 15 bp, Homo sapiens
ctccaactcctgggc

SEQ ID NO: 465663 - DNA, 15 bp, Homo sapiens
cctccaactcctggg

SEQ ID NO: 465664 - DNA, 15 bp, Homo sapiens
acctccaactcctgg

SEQ ID NO: 465665 - DNA, 15 bp, Homo sapiens
aacctccaactcctg

SEQ ID NO: 465666 - DNA, 15 bp, Homo sapiens
taacctccaactcct

SEQ ID NO: 465667 - DNA, 15 bp, Homo sapiens
gtaacctccaactcc

SEQ ID NO: 465668 - DNA, 15 bp, Homo sapiens
tgtaacctccaactc

SEQ ID NO: 465669 - DNA, 15 bp, Homo sapiens
ctgtaacctccaact

SEQ ID NO: 465670 - DNA, 15 bp, Homo sapiens
actgtaacctccaac

SEQ ID NO: 465671 - DNA, 15 bp, Homo sapiens
cactgtaacctccaa

SEQ ID NO: 465672 - DNA, 15 bp, Homo sapiens
atcactgtaacctcc

SEQ ID NO: 465673 - DNA, 15 bp, Homo sapiens
gatcactgtaacctc

SEQ ID NO: 465674 - DNA, 15 bp, Homo sapiens
agatcactgtaacct

SEQ ID NO: 465675 - DNA, 15 bp, Homo sapiens
tagatcactgtaacc

SEQ ID NO: 465676 - DNA, 15 bp, Homo sapiens
atagatcactgtaac

SEQ ID NO: 465677 - DNA, 15 bp, Homo sapiens
tatagatcactgtaa

SEQ ID NO: 465678 - DNA, 15 bp, Homo sapiens
atatagatcactgta

SEQ ID NO: 465679 - DNA, 15 bp, Homo sapiens
aatatagatcactgt

SEQ ID NO: 465680 - DNA, 15 bp, Homo sapiens
aaatatagatcactg

SEQ ID NO: 465681 - DNA, 15 bp, Homo sapiens
caaatatagatcact

SEQ ID NO: 465682 - DNA, 15 bp, Homo sapiens
gcaaatatagatcac

SEQ ID NO: 465683 - DNA, 15 bp, Homo sapiens
ggcaaatatagatca

SEQ ID NO: 465684 - DNA, 15 bp, Homo sapiens
tggcaaatatagatc

SEQ ID NO: 465685 - DNA, 15 bp, Homo sapiens
gtggcaaatatagat

SEQ ID NO: 465686 - DNA, 15 bp, Homo sapiens
agtggcaaatataga

SEQ ID NO: 465687 - DNA, 15 bp, Homo sapiens
cagtggcaaatatag

SEQ ID NO: 465688 - DNA, 15 bp, Homo sapiens
gcagtggcaaatata

SEQ ID NO: 465689 - DNA, 15 bp, Homo sapiens
tgcagtggcaaatat

SEQ ID NO: 465690 - DNA, 15 bp, Homo sapiens
gtgcagtggcaaata

SEQ ID NO: 465691 - DNA, 15 bp, Homo sapiens
agtgcagtggcaaat

SEQ ID NO: 465692 - DNA, 15 bp, Homo sapiens
gagtgcagtggcaaa

SEQ ID NO: 465693 - DNA, 15 bp, Homo sapiens
ggagtgcagtggcaa

SEQ ID NO: 465694 - DNA, 15 bp, Homo sapiens
tctctctctgtcacc

SEQ ID NO: 465695 - DNA, 15 bp, Homo sapiens
gtctctctctgtcac

SEQ ID NO: 465696 - DNA, 15 bp, Homo sapiens
ggtctctctctgtca

SEQ ID NO: 465697 - DNA, 15 bp, Homo sapiens
gggtctctctctgtc

SEQ ID NO: 465698 - DNA, 15 bp, Homo sapiens
agggtctctctctgt

SEQ ID NO: 465699 - DNA, 15 bp, Homo sapiens
cagggtctctctctg

SEQ ID NO: 465700 - DNA, 15 bp, Homo sapiens
acagggtctctctct

SEQ ID NO: 465701 - DNA, 15 bp, Homo sapiens
gacagggtctctctc

SEQ ID NO: 465702 - DNA, 15 bp, Homo sapiens
agacagggtctctct

SEQ ID NO: 465703 - DNA, 15 bp, Homo sapiens
gagacagggtctctc

SEQ ID NO: 465704 - DNA, 15 bp, Homo sapiens
tgagacagggtctct

SEQ ID NO: 465705 - DNA, 15 bp, Homo sapiens
tattttttgagacag

SEQ ID NO: 465706 - DNA, 15 bp, Homo sapiens
ttattttttgagaca

SEQ ID NO: 465707 - DNA, 15 bp, Homo sapiens
tttattttttgagac

SEQ ID NO: 465708 - DNA, 15 bp, Homo sapiens
ctttattttttgaga

SEQ ID NO: 465709 - DNA, 15 bp, Homo sapiens
actttattttttgag

SEQ ID NO: 465710 - DNA, 15 bp, Homo sapiens
gactttattttttga

SEQ ID NO: 465711 - DNA, 15 bp, Homo sapiens
agactttattttttg

SEQ ID NO: 465712 - DNA, 15 bp, Homo sapiens
cagactttatttttt

SEQ ID NO: 465713 - DNA, 15 bp, Homo sapiens
acagactttattttt

SEQ ID NO: 465714 - DNA, 15 bp, Homo sapiens
aacagactttatttt

SEQ ID NO: 465715 - DNA, 15 bp, Homo sapiens
aaacagactttattt

SEQ ID NO: 465716 - DNA, 15 bp, Homo sapiens
aaaacagactttatt

SEQ ID NO: 465717 - DNA, 15 bp, Homo sapiens
aaaaacagactttat

SEQ ID NO: 465718 - DNA, 15 bp, Homo sapiens
taaaaacagacttta

SEQ ID NO: 465719 - DNA, 15 bp, Homo sapiens
ttaaaaacagacttt

SEQ ID NO: 465720 - DNA, 15 bp, Homo sapiens
tttaaaaacagactt

SEQ ID NO: 465721 - DNA, 15 bp, Homo sapiens
ttttaaaaacagact

SEQ ID NO: 465722 - DNA, 15 bp, Homo sapiens
attttaaaaacagac

SEQ ID NO: 465723 - DNA, 15 bp, Homo sapiens
aattttaaaaacaga

SEQ ID NO: 465724 - DNA, 15 bp, Homo sapiens
taattttaaaaacag

SEQ ID NO: 465725 - DNA, 15 bp, Homo sapiens
ttaattttaaaaaca

SEQ ID NO: 465726 - DNA, 15 bp, Homo sapiens
attaattttaaaaac

SEQ ID NO: 465727 - DNA, 15 bp, Homo sapiens
aattaattttaaaaa

SEQ ID NO: 465728 - DNA, 15 bp, Homo sapiens
aaattaattttaaaa

SEQ ID NO: 465729 - DNA, 15 bp, Homo sapiens
aaaattaattttaaa

SEQ ID NO: 465730 - DNA, 15 bp, Homo sapiens
taaaattaattttaa

SEQ ID NO: 465731 - DNA, 15 bp, Homo sapiens
ttaaaattaatttta

SEQ ID NO: 465732 - DNA, 15 bp, Homo sapiens
tttaaaattaatttt

SEQ ID NO: 465733 - DNA, 15 bp, Homo sapiens
gtttaaaattaattt

SEQ ID NO: 465734 - DNA, 15 bp, Homo sapiens
tgtttaaaattaatt

SEQ ID NO: 465735 - DNA, 15 bp, Homo sapiens
gtgtttaaaattaat

SEQ ID NO: 465736 - DNA, 15 bp, Homo sapiens
agtgtttaaaattaa

SEQ ID NO: 465737 - DNA, 15 bp, Homo sapiens
cagtgtttaaaatta

SEQ ID NO: 465738 - DNA, 15 bp, Homo sapiens
ccagtgtttaaaatt

SEQ ID NO: 465739 - DNA, 15 bp, Homo sapiens
tccagtgtttaaaat

SEQ ID NO: 465740 - DNA, 15 bp, Homo sapiens
ctccagtgtttaaaa

SEQ ID NO: 465741 - DNA, 15 bp, Homo sapiens
actccagtgtttaaa

SEQ ID NO: 465742 - DNA, 15 bp, Homo sapiens
aactccagtgtttaa

SEQ ID NO: 465743 - DNA, 15 bp, Homo sapiens
aaactccagtgttta

SEQ ID NO: 465744 - DNA, 15 bp, Homo sapiens
taaactccagtgttt

SEQ ID NO: 465745 - DNA, 15 bp, Homo sapiens
ataaactccagtgtt

SEQ ID NO: 465746 - DNA, 15 bp, Homo sapiens
aataaactccagtgt

SEQ ID NO: 465747 - DNA, 15 bp, Homo sapiens
taataaactccagtg

SEQ ID NO: 465748 - DNA, 15 bp, Homo sapiens
gtaataaactccagt

SEQ ID NO: 465749 - DNA, 15 bp, Homo sapiens
tgtaataaactccag

SEQ ID NO: 465750 - DNA, 15 bp, Homo sapiens
ttgtaataaactcca

SEQ ID NO: 465751 - DNA, 15 bp, Homo sapiens
tttgtaataaactcc

SEQ ID NO: 465752 - DNA, 15 bp, Homo sapiens
ttttgtaataaactc

SEQ ID NO: 465753 - DNA, 15 bp, Homo sapiens
tttttgtaataaact

SEQ ID NO: 465754 - DNA, 15 bp, Homo sapiens
ctttttgtaataaac

SEQ ID NO: 465755 - DNA, 15 bp, Homo sapiens
gctttttgtaataaa

SEQ ID NO: 465756 - DNA, 15 bp, Homo sapiens
tgctttttgtaataa

SEQ ID NO: 465757 - DNA, 15 bp, Homo sapiens
ctgctttttgtaata

SEQ ID NO: 465758 - DNA, 15 bp, Homo sapiens
actgctttttgtaat

SEQ ID NO: 465759 - DNA, 15 bp, Homo sapiens
aactgctttttgtaa

SEQ ID NO: 465760 - DNA, 15 bp, Homo sapiens
caactgctttttgta

SEQ ID NO: 465761 - DNA, 15 bp, Homo sapiens
ccaactgctttttgt

SEQ ID NO: 465762 - DNA, 15 bp, Homo sapiens
accaactgctttttg

SEQ ID NO: 465763 - DNA, 15 bp, Homo sapiens
aaccaactgcttttt

SEQ ID NO: 465764 - DNA, 15 bp, Homo sapiens
gaaccaactgctttt

SEQ ID NO: 465765 - DNA, 15 bp, Homo sapiens
agaaccaactgcttt

SEQ ID NO: 465766 - DNA, 15 bp, Homo sapiens
aagaaccaactgctt

SEQ ID NO: 465767 - DNA, 15 bp, Homo sapiens
aaagaaccaactgct

SEQ ID NO: 465768 - DNA, 15 bp, Homo sapiens
aaaagaaccaactgc

SEQ ID NO: 465769 - DNA, 15 bp, Homo sapiens
aaaaagaaccaactg

SEQ ID NO: 465770 - DNA, 15 bp, Homo sapiens
aaaaaagaaccaact

SEQ ID NO: 465771 - DNA, 15 bp, Homo sapiens
aaaaaaagaaccaac

SEQ ID NO: 465772 - DNA, 15 bp, Homo sapiens
taaaaaaagaaccaa

SEQ ID NO: 465773 - DNA, 15 bp, Homo sapiens
ttaaaaaaagaacca

SEQ ID NO: 465774 - DNA, 15 bp, Homo sapiens
tttaaaaaaagaacc

SEQ ID NO: 465775 - DNA, 15 bp, Homo sapiens
atttaaaaaaagaac

SEQ ID NO: 465776 - DNA, 15 bp, Homo sapiens
gatttaaaaaaagaa

SEQ ID NO: 465777 - DNA, 15 bp, Homo sapiens
tgatttaaaaaaaga

SEQ ID NO: 465778 - DNA, 15 bp, Homo sapiens
atgatttaaaaaaag

SEQ ID NO: 465779 - DNA, 15 bp, Homo sapiens
aatgatttaaaaaaa

SEQ ID NO: 465780 - DNA, 15 bp, Homo sapiens
aaatgatttaaaaaa

SEQ ID NO: 465781 - DNA, 15 bp, Homo sapiens
aaaatgatttaaaaa

SEQ ID NO: 465782 - DNA, 15 bp, Homo sapiens
aaaaatgatttaaaa

SEQ ID NO: 465783 - DNA, 15 bp, Homo sapiens
aaaaaatgatttaaa

SEQ ID NO: 465784 - DNA, 15 bp, Homo sapiens
aaaaaaatgatttaa

SEQ ID NO: 465785 - DNA, 15 bp, Homo sapiens
aaaaaaaatgattta

SEQ ID NO: 465786 - DNA, 15 bp, Homo sapiens
aaaaaaaaatgattt

SEQ ID NO: 465787 - DNA, 15 bp, Homo sapiens
taaaaaaaaatgatt

SEQ ID NO: 465788 - DNA, 15 bp, Homo sapiens
ctaaaaaaaaatgat

SEQ ID NO: 465789 - DNA, 15 bp, Homo sapiens
cctaaaaaaaaatga

SEQ ID NO: 465790 - DNA, 15 bp, Homo sapiens
tcctaaaaaaaaatg

SEQ ID NO: 465791 - DNA, 15 bp, Homo sapiens
ctcctaaaaaaaaat

SEQ ID NO: 465792 - DNA, 15 bp, Homo sapiens
tctcctaaaaaaaaa

SEQ ID NO: 465793 - DNA, 15 bp, Homo sapiens
ttctcctaaaaaaaa

SEQ ID NO: 465794 - DNA, 15 bp, Homo sapiens
gttctcctaaaaaaa

SEQ ID NO: 465795 - DNA, 15 bp, Homo sapiens
ggttctcctaaaaaa

SEQ ID NO: 465796 - DNA, 15 bp, Homo sapiens
tggttctcctaaaaa

SEQ ID NO: 465797 - DNA, 15 bp, Homo sapiens
gtggttctcctaaaa

SEQ ID NO: 465798 - DNA, 15 bp, Homo sapiens
ggtggttctcctaaa

SEQ ID NO: 465799 - DNA, 15 bp, Homo sapiens
cggtggttctcctaa

SEQ ID NO: 465800 - DNA, 15 bp, Homo sapiens
gcggtggttctccta

SEQ ID NO: 465801 - DNA, 15 bp, Homo sapiens
agcggtggttctcct

SEQ ID NO: 465802 - DNA, 15 bp, Homo sapiens
aagcggtggttctcc

SEQ ID NO: 465803 - DNA, 15 bp, Homo sapiens
aaagcggtggttctc

SEQ ID NO: 465804 - DNA, 15 bp, Homo sapiens
aaaagcggtggttct

SEQ ID NO: 465805 - DNA, 15 bp, Homo sapiens
aaaaagcggtggttc

SEQ ID NO: 465806 - DNA, 15 bp, Homo sapiens
caaaaagcggtggtt

SEQ ID NO: 465807 - DNA, 15 bp, Homo sapiens
ccaaaaagcggtggt

SEQ ID NO: 465808 - DNA, 15 bp, Homo sapiens
gccaaaaagcggtgg

SEQ ID NO: 465809 - DNA, 15 bp, Homo sapiens
agccaaaaagcggtg

SEQ ID NO: 465810 - DNA, 15 bp, Homo sapiens
tagccaaaaagcggt

SEQ ID NO: 465811 - DNA, 15 bp, Homo sapiens
gtagccaaaaagcgg

SEQ ID NO: 465812 - DNA, 15 bp, Homo sapiens
tgtagccaaaaagcg

SEQ ID NO: 465813 - DNA, 15 bp, Homo sapiens
atgtagccaaaaagc

SEQ ID NO: 465814 - DNA, 15 bp, Homo sapiens
aatgtagccaaaaag

SEQ ID NO: 465815 - DNA, 15 bp, Homo sapiens
caatgtagccaaaaa

SEQ ID NO: 465816 - DNA, 15 bp, Homo sapiens
acaatgtagccaaaa

SEQ ID NO: 465817 - DNA, 15 bp, Homo sapiens
gacaatgtagccaaa

SEQ ID NO: 465818 - DNA, 15 bp, Homo sapiens
agacaatgtagccaa

SEQ ID NO: 465819 - DNA, 15 bp, Homo sapiens
tagacaatgtagcca

SEQ ID NO: 465820 - DNA, 15 bp, Homo sapiens
ctagacaatgtagcc

SEQ ID NO: 465821 - DNA, 15 bp, Homo sapiens
tctagacaatgtagc

SEQ ID NO: 465822 - DNA, 15 bp, Homo sapiens
ctctagacaatgtag

SEQ ID NO: 465823 - DNA, 15 bp, Homo sapiens
actctagacaatgta

SEQ ID NO: 465824 - DNA, 15 bp, Homo sapiens
tactctagacaatgt

SEQ ID NO: 465825 - DNA, 15 bp, Homo sapiens
ctactctagacaatg

SEQ ID NO: 465826 - DNA, 15 bp, Homo sapiens
gctactctagacaat

SEQ ID NO: 465827 - DNA, 15 bp, Homo sapiens
tgctactctagacaa

SEQ ID NO: 465828 - DNA, 15 bp, Homo sapiens
ctgctactctagaca

SEQ ID NO: 465829 - DNA, 15 bp, Homo sapiens
actgctactctagac

SEQ ID NO: 465830 - DNA, 15 bp, Homo sapiens
cactgctactctaga

SEQ ID NO: 465831 - DNA, 15 bp, Homo sapiens
acactgctactctag

SEQ ID NO: 465832 - DNA, 15 bp, Homo sapiens
aacactgctactcta

SEQ ID NO: 465833 - DNA, 15 bp, Homo sapiens
gaacactgctactct

SEQ ID NO: 465834 - DNA, 15 bp, Homo sapiens
tgaacactgctactc

SEQ ID NO: 465835 - DNA, 15 bp, Homo sapiens
ttgaacactgctact

SEQ ID NO: 465836 - DNA, 15 bp, Homo sapiens
attgaacactgctac

SEQ ID NO: 465837 - DNA, 15 bp, Homo sapiens
tattgaacactgcta

SEQ ID NO: 465838 - DNA, 15 bp, Homo sapiens
ttattgaacactgct

SEQ ID NO: 465839 - DNA, 15 bp, Homo sapiens
tttattgaacactgc

SEQ ID NO: 465840 - DNA, 15 bp, Homo sapiens
ttttattgaacactg

SEQ ID NO: 465841 - DNA, 15 bp, Homo sapiens
tttttattgaacact

SEQ ID NO: 465842 - DNA, 15 bp, Homo sapiens
atttttattgaacac

SEQ ID NO: 465843 - DNA, 15 bp, Homo sapiens
tatttttattgaaca

SEQ ID NO: 465844 - DNA, 15 bp, Homo sapiens
ttatttttattgaac

SEQ ID NO: 465845 - DNA, 15 bp, Homo sapiens
cttatttttattgaa

SEQ ID NO: 465846 - DNA, 15 bp, Homo sapiens
tcttatttttattga

SEQ ID NO: 465847 - DNA, 15 bp, Homo sapiens
atcttatttttattg

SEQ ID NO: 465848 - DNA, 15 bp, Homo sapiens
gatcttatttttatt

SEQ ID NO: 465849 - DNA, 15 bp, Homo sapiens
ggatcttatttttat

SEQ ID NO: 465850 - DNA, 15 bp, Homo sapiens
tggatcttattttta

SEQ ID NO: 465851 - DNA, 15 bp, Homo sapiens
ttggatcttattttt

SEQ ID NO: 465852 - DNA, 15 bp, Homo sapiens
cttggatcttatttt

SEQ ID NO: 465853 - DNA, 15 bp, Homo sapiens
acttggatcttattt

SEQ ID NO: 465854 - DNA, 15 bp, Homo sapiens
gacttggatcttatt

SEQ ID NO: 465855 - DNA, 15 bp, Homo sapiens
tgacttggatcttat

SEQ ID NO: 465856 - DNA, 15 bp, Homo sapiens
gtgacttggatctta

SEQ ID NO: 465857 - DNA, 15 bp, Homo sapiens
tgtgacttggatctt

SEQ ID NO: 465858 - DNA, 15 bp, Homo sapiens
atgtgacttggatct

SEQ ID NO: 465859 - DNA, 15 bp, Homo sapiens
tatgtgacttggatc

SEQ ID NO: 465860 - DNA, 15 bp, Homo sapiens
atatgtgacttggat

SEQ ID NO: 465861 - DNA, 15 bp, Homo sapiens
catatgtgacttgga

SEQ ID NO: 465862 - DNA, 15 bp, Homo sapiens
acatatgtgacttgg

SEQ ID NO: 465863 - DNA, 15 bp, Homo sapiens
tacatatgtgacttg

SEQ ID NO: 465864 - DNA, 15 bp, Homo sapiens
ttacatatgtgactt

SEQ ID NO: 465865 - DNA, 15 bp, Homo sapiens
attacatatgtgact

SEQ ID NO: 465866 - DNA, 15 bp, Homo sapiens
cattacatatgtgac

SEQ ID NO: 465867 - DNA, 15 bp, Homo sapiens
acattacatatgtga

SEQ ID NO: 465868 - DNA, 15 bp, Homo sapiens
aacattacatatgtg

SEQ ID NO: 465869 - DNA, 15 bp, Homo sapiens
taacattacatatgt

SEQ ID NO: 465870 - DNA, 15 bp, Homo sapiens
ttaacattacatatg

SEQ ID NO: 465871 - DNA, 15 bp, Homo sapiens
cttaacattacatat

SEQ ID NO: 465872 - DNA, 15 bp, Homo sapiens
acttaacattacata

SEQ ID NO: 465873 - DNA, 15 bp, Homo sapiens
aacttaacattacat

SEQ ID NO: 465874 - DNA, 15 bp, Homo sapiens
aaacttaacattaca

SEQ ID NO: 465875 - DNA, 15 bp, Homo sapiens
aaaacttaacattac

SEQ ID NO: 465876 - DNA, 15 bp, Homo sapiens
gaaaacttaacatta

SEQ ID NO: 465877 - DNA, 15 bp, Homo sapiens
agaaaacttaacatt

SEQ ID NO: 465878 - DNA, 15 bp, Homo sapiens
aagaaaacttaacat

SEQ ID NO: 465879 - DNA, 15 bp, Homo sapiens
aaagaaaacttaaca

SEQ ID NO: 465880 - DNA, 15 bp, Homo sapiens
aaaagaaaacttaac

SEQ ID NO: 465881 - DNA, 15 bp, Homo sapiens
taaaagaaaacttaa

SEQ ID NO: 465882 - DNA, 15 bp, Homo sapiens
ctaaaagaaaactta

SEQ ID NO: 465883 - DNA, 15 bp, Homo sapiens
actaaaagaaaactt

SEQ ID NO: 465884 - DNA, 15 bp, Homo sapiens
aactaaaagaaaact

SEQ ID NO: 465885 - DNA, 15 bp, Homo sapiens
aaactaaaagaaaac

SEQ ID NO: 465886 - DNA, 15 bp, Homo sapiens
gaaactaaaagaaaa

SEQ ID NO: 465887 - DNA, 15 bp, Homo sapiens
agaaactaaaagaaa

SEQ ID NO: 465888 - DNA, 15 bp, Homo sapiens
aagaaactaaaagaa

SEQ ID NO: 465889 - DNA, 15 bp, Homo sapiens
aaagaaactaaaaga

SEQ ID NO: 465890 - DNA, 15 bp, Homo sapiens
aaaagaaactaaaag

SEQ ID NO: 465891 - DNA, 15 bp, Homo sapiens
aaaaagaaactaaaa

SEQ ID NO: 465892 - DNA, 15 bp, Homo sapiens
gaaaaagaaactaaa

SEQ ID NO: 465893 - DNA, 15 bp, Homo sapiens
agaaaaagaaactaa

SEQ ID NO: 465894 - DNA, 15 bp, Homo sapiens
aagaaaaagaaacta

SEQ ID NO: 465895 - DNA, 15 bp, Homo sapiens
aaagaaaaagaaact

SEQ ID NO: 465896 - DNA, 15 bp, Homo sapiens
aaaagaaaaagaaac

SEQ ID NO: 465897 - DNA, 15 bp, Homo sapiens
gaaaagaaaaagaaa

SEQ ID NO: 465898 - DNA, 15 bp, Homo sapiens
agaaaagaaaaagaa

SEQ ID NO: 465899 - DNA, 15 bp, Homo sapiens
aagaaaagaaaaaga

SEQ ID NO: 465900 - DNA, 15 bp, Homo sapiens
aaagaaaagaaaaag

SEQ ID NO: 465901 - DNA, 15 bp, Homo sapiens
aaaagaaaagaaaaa

SEQ ID NO: 465902 - DNA, 15 bp, Homo sapiens
gaaaagaaaagaaaa

SEQ ID NO: 465903 - DNA, 15 bp, Homo sapiens
gagaaaagaaaagaa

SEQ ID NO: 465904 - DNA, 15 bp, Homo sapiens
agagaaaagaaaaga

SEQ ID NO: 465905 - DNA, 15 bp, Homo sapiens
aagagaaaagaaaag

SEQ ID NO: 465906 - DNA, 15 bp, Homo sapiens
agaagagaaaagaaa

SEQ ID NO: 465907 - DNA, 15 bp, Homo sapiens
aagaagagaaaagaa

SEQ ID NO: 465908 - DNA, 15 bp, Homo sapiens
aaagaagagaaaaga

SEQ ID NO: 465909 - DNA, 15 bp, Homo sapiens
gaaagaagagaaaag

SEQ ID NO: 465910 - DNA, 15 bp, Homo sapiens
agaaagaagagaaaa

SEQ ID NO: 465911 - DNA, 15 bp, Homo sapiens
aagaaagaagagaaa

SEQ ID NO: 465912 - DNA, 15 bp, Homo sapiens
aaagaaagaagagaa

SEQ ID NO: 465913 - DNA, 15 bp, Homo sapiens
gaaagaaagaagaga

SEQ ID NO: 465914 - DNA, 15 bp, Homo sapiens
agaaagaaagaagag

SEQ ID NO: 465915 - DNA, 15 bp, Homo sapiens
aagaaagaaagaaga

SEQ ID NO: 465916 - DNA, 15 bp, Homo sapiens
aaagaaagaaagaag

SEQ ID NO: 465917 - DNA, 15 bp, Homo sapiens
gaaagaaagaaagaa

SEQ ID NO: 465918 - DNA, 15 bp, Homo sapiens
agaaagaaagaaaga

SEQ ID NO: 465919 - DNA, 15 bp, Homo sapiens
aagaaagaaagaaag

SEQ ID NO: 465920 - DNA, 15 bp, Homo sapiens
aaaaaagaaagaaag

SEQ ID NO: 465921 - DNA, 15 bp, Homo sapiens
aaaaaaagaaagaaa

SEQ ID NO: 465922 - DNA, 15 bp, Homo sapiens
aaaaaaaagaaagaa

SEQ ID NO: 465923 - DNA, 15 bp, Homo sapiens
aaaaaaaaagaaaga

SEQ ID NO: 465924 - DNA, 15 bp, Homo sapiens
aaaaaaaaaagaaag

SEQ ID NO: 465925 - DNA, 15 bp, Homo sapiens
atcaaaaaaaaaaaa

SEQ ID NO: 465926 - DNA, 15 bp, Homo sapiens
tatcaaaaaaaaaaa

SEQ ID NO: 465927 - DNA, 15 bp, Homo sapiens
atatcaaaaaaaaaa

SEQ ID NO: 465928 - DNA, 15 bp, Homo sapiens
catatcaaaaaaaaa

SEQ ID NO: 465929 - DNA, 15 bp, Homo sapiens
gcatatcaaaaaaaa

SEQ ID NO: 465930 - DNA, 15 bp, Homo sapiens
tgcatatcaaaaaaa

SEQ ID NO: 465931 - DNA, 15 bp, Homo sapiens
ctgcatatcaaaaaa

SEQ ID NO: 465932 - DNA, 15 bp, Homo sapiens
actgcatatcaaaaa

SEQ ID NO: 465933 - DNA, 15 bp, Homo sapiens
gactgcatatcaaaa

SEQ ID NO: 465934 - DNA, 15 bp, Homo sapiens
agactgcatatcaaa

SEQ ID NO: 465935 - DNA, 15 bp, Homo sapiens
gagactgcatatcaa

SEQ ID NO: 465936 - DNA, 15 bp, Homo sapiens
tgagactgcatatca

SEQ ID NO: 465937 - DNA, 15 bp, Homo sapiens
gtgagactgcatatc

SEQ ID NO: 465938 - DNA, 15 bp, Homo sapiens
agtgagactgcatat

SEQ ID NO: 465939 - DNA, 15 bp, Homo sapiens
gagtgagactgcata

SEQ ID NO: 465940 - DNA, 15 bp, Homo sapiens
agagtgagactgcat

SEQ ID NO: 465941 - DNA, 15 bp, Homo sapiens
cagagtgagactgca

SEQ ID NO: 465942 - DNA, 15 bp, Homo sapiens
acagagtgagactgc

SEQ ID NO: 465943 - DNA, 15 bp, Homo sapiens
aacagagtgagactg

SEQ ID NO: 465944 - DNA, 15 bp, Homo sapiens
cgtgccactgcactc

SEQ ID NO: 465945 - DNA, 15 bp, Homo sapiens
tcgtgccactgcact

SEQ ID NO: 465946 - DNA, 15 bp, Homo sapiens
atcgtgccactgcac

SEQ ID NO: 465947 - DNA, 15 bp, Homo sapiens
gatcgtgccactgca

SEQ ID NO: 465948 - DNA, 15 bp, Homo sapiens
agatcgtgccactgc

SEQ ID NO: 465949 - DNA, 15 bp, Homo sapiens
gagatcgtgccactg

SEQ ID NO: 465950 - DNA, 15 bp, Homo sapiens
cgagatcgtgccact

SEQ ID NO: 465951 - DNA, 15 bp, Homo sapiens
ccgagatcgtgccac

SEQ ID NO: 465952 - DNA, 15 bp, Homo sapiens
gccgagatcgtgcca

SEQ ID NO: 465953 - DNA, 15 bp, Homo sapiens
ggccgagatcgtgcc

SEQ ID NO: 465954 - DNA, 15 bp, Homo sapiens
gggccgagatcgtgc

SEQ ID NO: 465955 - DNA, 15 bp, Homo sapiens
tgggccgagatcgtg

SEQ ID NO: 465956 - DNA, 15 bp, Homo sapiens
gtgggccgagatcgt

SEQ ID NO: 465957 - DNA, 15 bp, Homo sapiens
agtgggccgagatcg

SEQ ID NO: 465958 - DNA, 15 bp, Homo sapiens
cagtgggccgagatc

SEQ ID NO: 465959 - DNA, 15 bp, Homo sapiens
gcagtgggccgagat

SEQ ID NO: 465960 - DNA, 15 bp, Homo sapiens
tgcagtgggccgaga

SEQ ID NO: 465961 - DNA, 15 bp, Homo sapiens
ttgcagtgggccgag

SEQ ID NO: 465962 - DNA, 15 bp, Homo sapiens
gttgcagtgggccga

SEQ ID NO: 465963 - DNA, 15 bp, Homo sapiens
ggttgcagtgggccg

SEQ ID NO: 465964 - DNA, 15 bp, Homo sapiens
aggttgcagtgggcc

SEQ ID NO: 465965 - DNA, 15 bp, Homo sapiens
gaggttgcagtgggc

SEQ ID NO: 465966 - DNA, 15 bp, Homo sapiens
ggaggttgcagtggg

SEQ ID NO: 465967 - DNA, 15 bp, Homo sapiens
cggaggttgcagtgg

SEQ ID NO: 465968 - DNA, 15 bp, Homo sapiens
acatgcctgtagtcc

SEQ ID NO: 465969 - DNA, 15 bp, Homo sapiens
cacatgcctgtagtc

SEQ ID NO: 465970 - DNA, 15 bp, Homo sapiens
gcacatgcctgtagt

SEQ ID NO: 465971 - DNA, 15 bp, Homo sapiens
ggcacatgcctgtag

SEQ ID NO: 465972 - DNA, 15 bp, Homo sapiens
tatggtggcacatgc

SEQ ID NO: 465973 - DNA, 15 bp, Homo sapiens
gtatggtggcacatg

SEQ ID NO: 465974 - DNA, 15 bp, Homo sapiens
ggtatggtggcacat

SEQ ID NO: 465975 - DNA, 15 bp, Homo sapiens
gggtatggtggcaca

SEQ ID NO: 465976 - DNA, 15 bp, Homo sapiens
tgggtatggtggcac

SEQ ID NO: 465977 - DNA, 15 bp, Homo sapiens
ctgggtatggtggca

SEQ ID NO: 465978 - DNA, 15 bp, Homo sapiens
gctgggtatggtggc

SEQ ID NO: 465979 - DNA, 15 bp, Homo sapiens
agctgggtatggtgg

SEQ ID NO: 465980 - DNA, 15 bp, Homo sapiens
tagctgggtatggtg

SEQ ID NO: 465981 - DNA, 15 bp, Homo sapiens
ttagctgggtatggt

SEQ ID NO: 465982 - DNA, 15 bp, Homo sapiens
attagctgggtatgg

SEQ ID NO: 465983 - DNA, 15 bp, Homo sapiens
aattagctgggtatg

SEQ ID NO: 465984 - DNA, 15 bp, Homo sapiens
aaattagctgggtat

SEQ ID NO: 465985 - DNA, 15 bp, Homo sapiens
aaaattagctgggta

SEQ ID NO: 465986 - DNA, 15 bp, Homo sapiens
aaaaattagctgggt

SEQ ID NO: 465987 - DNA, 15 bp, Homo sapiens
tccatctctactaaa

SEQ ID NO: 465988 - DNA, 15 bp, Homo sapiens
ctccatctctactaa

SEQ ID NO: 465989 - DNA, 15 bp, Homo sapiens
gctccatctctacta

SEQ ID NO: 465990 - DNA, 15 bp, Homo sapiens
agctccatctctact

SEQ ID NO: 465991 - DNA, 15 bp, Homo sapiens
aagctccatctctac

SEQ ID NO: 465992 - DNA, 15 bp, Homo sapiens
aaagctccatctcta

SEQ ID NO: 465993 - DNA, 15 bp, Homo sapiens
caaagctccatctct

SEQ ID NO: 465994 - DNA, 15 bp, Homo sapiens
gcaaagctccatctc

SEQ ID NO: 465995 - DNA, 15 bp, Homo sapiens
ggcaaagctccatct

SEQ ID NO: 465996 - DNA, 15 bp, Homo sapiens
tggcaaagctccatc

SEQ ID NO: 465997 - DNA, 15 bp, Homo sapiens
atggcaaagctccat

SEQ ID NO: 465998 - DNA, 15 bp, Homo sapiens
catggcaaagctcca

SEQ ID NO: 465999 - DNA, 15 bp, Homo sapiens
acatggcaaagctcc

SEQ ID NO: 466000 - DNA, 15 bp, Homo sapiens
aacatggcaaagctc

SEQ ID NO: 466001 - DNA, 15 bp, Homo sapiens
caacatggcaaagct

SEQ ID NO: 466002 - DNA, 15 bp, Homo sapiens
ccaacatggcaaagc

SEQ ID NO: 466003 - DNA, 15 bp, Homo sapiens
gccaacatggcaaag

SEQ ID NO: 466004 - DNA, 15 bp, Homo sapiens
ggccaacatggcaaa

SEQ ID NO: 466005 - DNA, 15 bp, Homo sapiens
tggccaacatggcaa

SEQ ID NO: 466006 - DNA, 15 bp, Homo sapiens
ctggccaacatggca

SEQ ID NO: 466007 - DNA, 15 bp, Homo sapiens
actggccaacatggc

SEQ ID NO: 466008 - DNA, 15 bp, Homo sapiens
gactggccaacatgg

SEQ ID NO: 466009 - DNA, 15 bp, Homo sapiens
agactggccaacatg

SEQ ID NO: 466010 - DNA, 15 bp, Homo sapiens
cagactggccaacat

SEQ ID NO: 466011 - DNA, 15 bp, Homo sapiens
ccagactggccaaca

SEQ ID NO: 466012 - DNA, 15 bp, Homo sapiens
accagactggccaac

SEQ ID NO: 466013 - DNA, 15 bp, Homo sapiens
gaccagactggccaa

SEQ ID NO: 466014 - DNA, 15 bp, Homo sapiens
agaccagactggcca

SEQ ID NO: 466015 - DNA, 15 bp, Homo sapiens
gagaccagactggcc

SEQ ID NO: 466016 - DNA, 15 bp, Homo sapiens
tgagaccagactggc

SEQ ID NO: 466017 - DNA, 15 bp, Homo sapiens
ttgagaccagactgg

SEQ ID NO: 466018 - DNA, 15 bp, Homo sapiens
tttgagaccagactg

SEQ ID NO: 466019 - DNA, 15 bp, Homo sapiens
gtttgagaccagact

SEQ ID NO: 466020 - DNA, 15 bp, Homo sapiens
agtttgagaccagac

SEQ ID NO: 466021 - DNA, 15 bp, Homo sapiens
gagtttgagaccaga

SEQ ID NO: 466022 - DNA, 15 bp, Homo sapiens
cgaggtcaggagttt

SEQ ID NO: 466023 - DNA, 15 bp, Homo sapiens
ccgaggtcaggagtt

SEQ ID NO: 466024 - DNA, 15 bp, Homo sapiens
cccgaggtcaggagt

SEQ ID NO: 466025 - DNA, 15 bp, Homo sapiens
acccgaggtcaggag

SEQ ID NO: 466026 - DNA, 15 bp, Homo sapiens
cacccgaggtcagga

SEQ ID NO: 466027 - DNA, 15 bp, Homo sapiens
tcacccgaggtcagg

SEQ ID NO: 466028 - DNA, 15 bp, Homo sapiens
atcacccgaggtcag

SEQ ID NO: 466029 - DNA, 15 bp, Homo sapiens
gatcacccgaggtca

SEQ ID NO: 466030 - DNA, 15 bp, Homo sapiens
ggatcacccgaggtc

SEQ ID NO: 466031 - DNA, 15 bp, Homo sapiens
tggatcacccgaggt

SEQ ID NO: 466032 - DNA, 15 bp, Homo sapiens
gtggatcacccgagg

SEQ ID NO: 466033 - DNA, 15 bp, Homo sapiens
tgtggatcacccgag

SEQ ID NO: 466034 - DNA, 15 bp, Homo sapiens
atgtggatcacccga

SEQ ID NO: 466035 - DNA, 15 bp, Homo sapiens
catgtggatcacccg

SEQ ID NO: 466036 - DNA, 15 bp, Homo sapiens
gcatgtggatcaccc

SEQ ID NO: 466037 - DNA, 15 bp, Homo sapiens
agcatgtggatcacc

SEQ ID NO: 466038 - DNA, 15 bp, Homo sapiens
aagcatgtggatcac

SEQ ID NO: 466039 - DNA, 15 bp, Homo sapiens
aaagcatgtggatca

SEQ ID NO: 466040 - DNA, 15 bp, Homo sapiens
caaagcatgtggatc

SEQ ID NO: 466041 - DNA, 15 bp, Homo sapiens
ccaaagcatgtggat

SEQ ID NO: 466042 - DNA, 15 bp, Homo sapiens
gccaaagcatgtgga

SEQ ID NO: 466043 - DNA, 15 bp, Homo sapiens
ggccaaagcatgtgg

SEQ ID NO: 466044 - DNA, 15 bp, Homo sapiens
aggccaaagcatgtg

SEQ ID NO: 466045 - DNA, 15 bp, Homo sapiens
gaggccaaagcatgt

SEQ ID NO: 466046 - DNA, 15 bp, Homo sapiens
ggaggccaaagcatg

SEQ ID NO: 466047 - DNA, 15 bp, Homo sapiens
gggaggccaaagcat

SEQ ID NO: 466048 - DNA, 15 bp, Homo sapiens
agggaggccaaagca

SEQ ID NO: 466049 - DNA, 15 bp, Homo sapiens
tagggaggccaaagc

SEQ ID NO: 466050 - DNA, 15 bp, Homo sapiens
ttagggaggccaaag

SEQ ID NO: 466051 - DNA, 15 bp, Homo sapiens
cttagggaggccaaa

SEQ ID NO: 466052 - DNA, 15 bp, Homo sapiens
acttagggaggccaa

SEQ ID NO: 466053 - DNA, 15 bp, Homo sapiens
cacttagggaggcca

SEQ ID NO: 466054 - DNA, 15 bp, Homo sapiens
gcacttagggaggcc

SEQ ID NO: 466055 - DNA, 15 bp, Homo sapiens
agcacttagggaggc

SEQ ID NO: 466056 - DNA, 15 bp, Homo sapiens
cagcacttagggagg

SEQ ID NO: 466057 - DNA, 15 bp, Homo sapiens
ccagcacttagggag

SEQ ID NO: 466058 - DNA, 15 bp, Homo sapiens
cccagcacttaggga

SEQ ID NO: 466059 - DNA, 15 bp, Homo sapiens
tcccagcacttaggg

SEQ ID NO: 466060 - DNA, 15 bp, Homo sapiens
atcccagcacttagg

SEQ ID NO: 466061 - DNA, 15 bp, Homo sapiens
aatcccagcacttag

SEQ ID NO: 466062 - DNA, 15 bp, Homo sapiens
taatcccagcactta

SEQ ID NO: 466063 - DNA, 15 bp, Homo sapiens
gggcatggtggctca

SEQ ID NO: 466064 - DNA, 15 bp, Homo sapiens
agggcatggtggctc

SEQ ID NO: 466065 - DNA, 15 bp, Homo sapiens
tagggcatggtggct

SEQ ID NO: 466066 - DNA, 15 bp, Homo sapiens
gtagggcatggtggc

SEQ ID NO: 466067 - DNA, 15 bp, Homo sapiens
ggtagggcatggtgg

SEQ ID NO: 466068 - DNA, 15 bp, Homo sapiens
tggtagggcatggtg

SEQ ID NO: 466069 - DNA, 15 bp, Homo sapiens
ttggtagggcatggt

SEQ ID NO: 466070 - DNA, 15 bp, Homo sapiens
attggtagggcatgg

SEQ ID NO: 466071 - DNA, 15 bp, Homo sapiens
cattggtagggcatg

SEQ ID NO: 466072 - DNA, 15 bp, Homo sapiens
acattggtagggcat

SEQ ID NO: 466073 - DNA, 15 bp, Homo sapiens
aacattggtagggca

SEQ ID NO: 466074 - DNA, 15 bp, Homo sapiens
taacattggtagggc

SEQ ID NO: 466075 - DNA, 15 bp, Homo sapiens
ttaacattggtaggg

SEQ ID NO: 466076 - DNA, 15 bp, Homo sapiens
cttaacattggtagg

SEQ ID NO: 466077 - DNA, 15 bp, Homo sapiens
acttaacattggtag

SEQ ID NO: 466078 - DNA, 15 bp, Homo sapiens
aacttaacattggta

SEQ ID NO: 466079 - DNA, 15 bp, Homo sapiens
aaacttaacattggt

SEQ ID NO: 466080 - DNA, 15 bp, Homo sapiens
aaaacttaacattgg

SEQ ID NO: 466081 - DNA, 15 bp, Homo sapiens
gaaaacttaacattg

SEQ ID NO: 466082 - DNA, 15 bp, Homo sapiens
tagaaaacttaacat

SEQ ID NO: 466083 - DNA, 15 bp, Homo sapiens
ctagaaaacttaaca

SEQ ID NO: 466084 - DNA, 15 bp, Homo sapiens
actagaaaacttaac

SEQ ID NO: 466085 - DNA, 15 bp, Homo sapiens
tactagaaaacttaa

SEQ ID NO: 466086 - DNA, 15 bp, Homo sapiens
ctactagaaaactta

SEQ ID NO: 466087 - DNA, 15 bp, Homo sapiens
gctactagaaaactt

SEQ ID NO: 466088 - DNA, 15 bp, Homo sapiens
ggctactagaaaact

SEQ ID NO: 466089 - DNA, 15 bp, Homo sapiens
tggctactagaaaac

SEQ ID NO: 466090 - DNA, 15 bp, Homo sapiens
atggctactagaaaa

SEQ ID NO: 466091 - DNA, 15 bp, Homo sapiens
tatggctactagaaa

SEQ ID NO: 466092 - DNA, 15 bp, Homo sapiens
atatggctactagaa

SEQ ID NO: 466093 - DNA, 15 bp, Homo sapiens
aatatggctactaga

SEQ ID NO: 466094 - DNA, 15 bp, Homo sapiens
taatatggctactag

SEQ ID NO: 466095 - DNA, 15 bp, Homo sapiens
ttaatatggctacta

SEQ ID NO: 466096 - DNA, 15 bp, Homo sapiens
tttaatatggctact

SEQ ID NO: 466097 - DNA, 15 bp, Homo sapiens
ttttaatatggctac

SEQ ID NO: 466098 - DNA, 15 bp, Homo sapiens
cttttaatatggcta

SEQ ID NO: 466099 - DNA, 15 bp, Homo sapiens
tcttttaatatggct

SEQ ID NO: 466100 - DNA, 15 bp, Homo sapiens
ttcttttaatatggc

SEQ ID NO: 466101 - DNA, 15 bp, Homo sapiens
cttcttttaatatgg

SEQ ID NO: 466102 - DNA, 15 bp, Homo sapiens
acttcttttaatatg

SEQ ID NO: 466103 - DNA, 15 bp, Homo sapiens
tacttcttttaatat

SEQ ID NO: 466104 - DNA, 15 bp, Homo sapiens
ttacttcttttaata

SEQ ID NO: 466105 - DNA, 15 bp, Homo sapiens
tttacttcttttaat

SEQ ID NO: 466106 - DNA, 15 bp, Homo sapiens
ttttacttcttttaa

SEQ ID NO: 466107 - DNA, 15 bp, Homo sapiens
tttttacttctttta

SEQ ID NO: 466108 - DNA, 15 bp, Homo sapiens
ctttttacttctttt

SEQ ID NO: 466109 - DNA, 15 bp, Homo sapiens
tctttttacttcttt

SEQ ID NO: 466110 - DNA, 15 bp, Homo sapiens
ttctttttacttctt

SEQ ID NO: 466111 - DNA, 15 bp, Homo sapiens
tttctttttacttct

SEQ ID NO: 466112 - DNA, 15 bp, Homo sapiens
atttctttttacttc

SEQ ID NO: 466113 - DNA, 15 bp, Homo sapiens
catttctttttactt

SEQ ID NO: 466114 - DNA, 15 bp, Homo sapiens
ccatttctttttact

SEQ ID NO: 466115 - DNA, 15 bp, Homo sapiens
cccatttctttttac

SEQ ID NO: 466116 - DNA, 15 bp, Homo sapiens
acccatttcttttta

SEQ ID NO: 466117 - DNA, 15 bp, Homo sapiens
cacccatttcttttt

SEQ ID NO: 466118 - DNA, 15 bp, Homo sapiens
tcacccatttctttt

SEQ ID NO: 466119 - DNA, 15 bp, Homo sapiens
ttcacccatttcttt

SEQ ID NO: 466120 - DNA, 15 bp, Homo sapiens
cttcacccatttctt

SEQ ID NO: 466121 - DNA, 15 bp, Homo sapiens
acttcacccatttct

SEQ ID NO: 466122 - DNA, 15 bp, Homo sapiens
aacttcacccatttc

SEQ ID NO: 466123 - DNA, 15 bp, Homo sapiens
taacttcacccattt

SEQ ID NO: 466124 - DNA, 15 bp, Homo sapiens
ttaacttcacccatt

SEQ ID NO: 466125 - DNA, 15 bp, Homo sapiens
attaacttcacccat

SEQ ID NO: 466126 - DNA, 15 bp, Homo sapiens
aattaacttcaccca

SEQ ID NO: 466127 - DNA, 15 bp, Homo sapiens
aaattaacttcaccc

SEQ ID NO: 466128 - DNA, 15 bp, Homo sapiens
aaaattaacttcacc

SEQ ID NO: 466129 - DNA, 15 bp, Homo sapiens
taaaattaacttcac

SEQ ID NO: 466130 - DNA, 15 bp, Homo sapiens
ttaaaattaacttca

SEQ ID NO: 466131 - DNA, 15 bp, Homo sapiens
attaaaattaacttc

SEQ ID NO: 466132 - DNA, 15 bp, Homo sapiens
tattaaaattaactt

SEQ ID NO: 466133 - DNA, 15 bp, Homo sapiens
ttattaaaattaact

SEQ ID NO: 466134 - DNA, 15 bp, Homo sapiens
attattaaaattaac

SEQ ID NO: 466135 - DNA, 15 bp, Homo sapiens
tattattaaaattaa

SEQ ID NO: 466136 - DNA, 15 bp, Homo sapiens
atattattaaaatta

SEQ ID NO: 466137 - DNA, 15 bp, Homo sapiens
tatattattaaaatt

SEQ ID NO: 466138 - DNA, 15 bp, Homo sapiens
atatattattaaaat

SEQ ID NO: 466139 - DNA, 15 bp, Homo sapiens
aatatattattaaaa

SEQ ID NO: 466140 - DNA, 15 bp, Homo sapiens
aaatatattattaaa

SEQ ID NO: 466141 - DNA, 15 bp, Homo sapiens
aaaatatattattaa

SEQ ID NO: 466142 - DNA, 15 bp, Homo sapiens
taaaatatattatta

SEQ ID NO: 466143 - DNA, 15 bp, Homo sapiens
ataaaatatattatt

SEQ ID NO: 466144 - DNA, 15 bp, Homo sapiens
aataaaatatattat

SEQ ID NO: 466145 - DNA, 15 bp, Homo sapiens
aaataaaatatatta

SEQ ID NO: 466146 - DNA, 15 bp, Homo sapiens
taaataaaatatatt

SEQ ID NO: 466147 - DNA, 15 bp, Homo sapiens
ttaaataaaatatat

SEQ ID NO: 466148 - DNA, 15 bp, Homo sapiens
gttaaataaaatata

SEQ ID NO: 466149 - DNA, 15 bp, Homo sapiens
ggttaaataaaatat

SEQ ID NO: 466150 - DNA, 15 bp, Homo sapiens
gggttaaataaaata

SEQ ID NO: 466151 - DNA, 15 bp, Homo sapiens
tgggttaaataaaat

SEQ ID NO: 466152 - DNA, 15 bp, Homo sapiens
ttgggttaaataaaa

SEQ ID NO: 466153 - DNA, 15 bp, Homo sapiens
attgggttaaataaa

SEQ ID NO: 466154 - DNA, 15 bp, Homo sapiens
tattgggttaaataa

SEQ ID NO: 466155 - DNA, 15 bp, Homo sapiens
atattgggttaaata

SEQ ID NO: 466156 - DNA, 15 bp, Homo sapiens
tatattgggttaaat

SEQ ID NO: 466157 - DNA, 15 bp, Homo sapiens
atatattgggttaaa

SEQ ID NO: 466158 - DNA, 15 bp, Homo sapiens
gatatattgggttaa

SEQ ID NO: 466159 - DNA, 15 bp, Homo sapiens
agatatattgggtta

SEQ ID NO: 466160 - DNA, 15 bp, Homo sapiens
tagatatattgggtt

SEQ ID NO: 466161 - DNA, 15 bp, Homo sapiens
ttagatatattgggt

SEQ ID NO: 466162 - DNA, 15 bp, Homo sapiens
tttagatatattggg

SEQ ID NO: 466163 - DNA, 15 bp, Homo sapiens
ttttagatatattgg

SEQ ID NO: 466164 - DNA, 15 bp, Homo sapiens
attttagatatattg

SEQ ID NO: 466165 - DNA, 15 bp, Homo sapiens
tattttagatatatt

SEQ ID NO: 466166 - DNA, 15 bp, Homo sapiens
atattttagatatat

SEQ ID NO: 466167 - DNA, 15 bp, Homo sapiens
aatattttagatata

SEQ ID NO: 466168 - DNA, 15 bp, Homo sapiens
taatattttagatat

SEQ ID NO: 466169 - DNA, 15 bp, Homo sapiens
ataatattttagata

SEQ ID NO: 466170 - DNA, 15 bp, Homo sapiens
gataatattttagat

SEQ ID NO: 466171 - DNA, 15 bp, Homo sapiens
tgataatattttaga

SEQ ID NO: 466172 - DNA, 15 bp, Homo sapiens
atgataatattttag

SEQ ID NO: 466173 - DNA, 15 bp, Homo sapiens
aatgataatatttta

SEQ ID NO: 466174 - DNA, 15 bp, Homo sapiens
aaatgataatatttt

SEQ ID NO: 466175 - DNA, 15 bp, Homo sapiens
gaaatgataatattt

SEQ ID NO: 466176 - DNA, 15 bp, Homo sapiens
tgaaatgataatatt

SEQ ID NO: 466177 - DNA, 15 bp, Homo sapiens
ttgaaatgataatat

SEQ ID NO: 466178 - DNA, 15 bp, Homo sapiens
gttgaaatgataata

SEQ ID NO: 466179 - DNA, 15 bp, Homo sapiens
tgttgaaatgataat

SEQ ID NO: 466180 - DNA, 15 bp, Homo sapiens
atgttgaaatgataa

SEQ ID NO: 466181 - DNA, 15 bp, Homo sapiens
catgttgaaatgata

SEQ ID NO: 466182 - DNA, 15 bp, Homo sapiens
tcatgttgaaatgat

SEQ ID NO: 466183 - DNA, 15 bp, Homo sapiens
ttcatgttgaaatga

SEQ ID NO: 466184 - DNA, 15 bp, Homo sapiens
gttcatgttgaaatg

SEQ ID NO: 466185 - DNA, 15 bp, Homo sapiens
tgttcatgttgaaat

SEQ ID NO: 466186 - DNA, 15 bp, Homo sapiens
ttgttcatgttgaaa

SEQ ID NO: 466187 - DNA, 15 bp, Homo sapiens
cttgttcatgttgaa

SEQ ID NO: 466188 - DNA, 15 bp, Homo sapiens
tcttgttcatgttga

SEQ ID NO: 466189 - DNA, 15 bp, Homo sapiens
atcttgttcatgttg

SEQ ID NO: 466190 - DNA, 15 bp, Homo sapiens
tatcttgttcatgtt

SEQ ID NO: 466191 - DNA, 15 bp, Homo sapiens
gtatcttgttcatgt

SEQ ID NO: 466192 - DNA, 15 bp, Homo sapiens
agtatcttgttcatg

SEQ ID NO: 466193 - DNA, 15 bp, Homo sapiens
aagtatcttgttcat

SEQ ID NO: 466194 - DNA, 15 bp, Homo sapiens
aaagtatcttgttca

SEQ ID NO: 466195 - DNA, 15 bp, Homo sapiens
taaagtatcttgttc

SEQ ID NO: 466196 - DNA, 15 bp, Homo sapiens
gtaaagtatcttgtt

SEQ ID NO: 466197 - DNA, 15 bp, Homo sapiens
tgtaaagtatcttgt

SEQ ID NO: 466198 - DNA, 15 bp, Homo sapiens
atgtaaagtatcttg

SEQ ID NO: 466199 - DNA, 15 bp, Homo sapiens
aatgtaaagtatctt

SEQ ID NO: 466200 - DNA, 15 bp, Homo sapiens
gaatgtaaagtatct

SEQ ID NO: 466201 - DNA, 15 bp, Homo sapiens
agaatgtaaagtatc

SEQ ID NO: 466202 - DNA, 15 bp, Homo sapiens
aagaatgtaaagtat

SEQ ID NO: 466203 - DNA, 15 bp, Homo sapiens
aaagaatgtaaagta

SEQ ID NO: 466204 - DNA, 15 bp, Homo sapiens
aaaagaatgtaaagt

SEQ ID NO: 466205 - DNA, 15 bp, Homo sapiens
caaaagaatgtaaag

SEQ ID NO: 466206 - DNA, 15 bp, Homo sapiens
acaaaagaatgtaaa

SEQ ID NO: 466207 - DNA, 15 bp, Homo sapiens
aacaaaagaatgtaa

SEQ ID NO: 466208 - DNA, 15 bp, Homo sapiens
aaacaaaagaatgta

SEQ ID NO: 466209 - DNA, 15 bp, Homo sapiens
aaaacaaaagaatgt

SEQ ID NO: 466210 - DNA, 15 bp, Homo sapiens
aaaaacaaaagaatg

SEQ ID NO: 466211 - DNA, 15 bp, Homo sapiens
gaaaaacaaaagaat

SEQ ID NO: 466212 - DNA, 15 bp, Homo sapiens
tgaaaaacaaaagaa

SEQ ID NO: 466213 - DNA, 15 bp, Homo sapiens
gtgaaaaacaaaaga

SEQ ID NO: 466214 - DNA, 15 bp, Homo sapiens
agtgaaaaacaaaag

SEQ ID NO: 466215 - DNA, 15 bp, Homo sapiens
tagtgaaaaacaaaa

SEQ ID NO: 466216 - DNA, 15 bp, Homo sapiens
ttagtgaaaaacaaa

SEQ ID NO: 466217 - DNA, 15 bp, Homo sapiens
cttagtgaaaaacaa

SEQ ID NO: 466218 - DNA, 15 bp, Homo sapiens
acttagtgaaaaaca

SEQ ID NO: 466219 - DNA, 15 bp, Homo sapiens
gacttagtgaaaaac

SEQ ID NO: 466220 - DNA, 15 bp, Homo sapiens
ggacttagtgaaaaa

SEQ ID NO: 466221 - DNA, 15 bp, Homo sapiens
aggacttagtgaaaa

SEQ ID NO: 466222 - DNA, 15 bp, Homo sapiens
gaggacttagtgaaa

SEQ ID NO: 466223 - DNA, 15 bp, Homo sapiens
tgaggacttagtgaa

SEQ ID NO: 466224 - DNA, 15 bp, Homo sapiens
ttgaggacttagtga

SEQ ID NO: 466225 - DNA, 15 bp, Homo sapiens
tttgaggacttagtg

SEQ ID NO: 466226 - DNA, 15 bp, Homo sapiens
ttttgaggacttagt

SEQ ID NO: 466227 - DNA, 15 bp, Homo sapiens
attttgaggacttag

SEQ ID NO: 466228 - DNA, 15 bp, Homo sapiens
gattttgaggactta

SEQ ID NO: 466229 - DNA, 15 bp, Homo sapiens
ggattttgaggactt

SEQ ID NO: 466230 - DNA, 15 bp, Homo sapiens
tggattttgaggact

SEQ ID NO: 466231 - DNA, 15 bp, Homo sapiens
ctggattttgaggac

SEQ ID NO: 466232 - DNA, 15 bp, Homo sapiens
actggattttgagga

SEQ ID NO: 466233 - DNA, 15 bp, Homo sapiens
cactggattttgagg

SEQ ID NO: 466234 - DNA, 15 bp, Homo sapiens
acactggattttgag

SEQ ID NO: 466235 - DNA, 15 bp, Homo sapiens
cacactggattttga

SEQ ID NO: 466236 - DNA, 15 bp, Homo sapiens
acacactggattttg

SEQ ID NO: 466237 - DNA, 15 bp, Homo sapiens
tacacactggatttt

SEQ ID NO: 466238 - DNA, 15 bp, Homo sapiens
atacacactggattt

SEQ ID NO: 466239 - DNA, 15 bp, Homo sapiens
aatacacactggatt

SEQ ID NO: 466240 - DNA, 15 bp, Homo sapiens
aaatacacactggat

SEQ ID NO: 466241 - DNA, 15 bp, Homo sapiens
aaaatacacactgga

SEQ ID NO: 466242 - DNA, 15 bp, Homo sapiens
taaaatacacactgg

SEQ ID NO: 466243 - DNA, 15 bp, Homo sapiens
ataaaatacacactg

SEQ ID NO: 466244 - DNA, 15 bp, Homo sapiens
tataaaatacacact

SEQ ID NO: 466245 - DNA, 15 bp, Homo sapiens
atataaaatacacac

SEQ ID NO: 466246 - DNA, 15 bp, Homo sapiens
aatataaaatacaca

SEQ ID NO: 466247 - DNA, 15 bp, Homo sapiens
caatataaaatacac

SEQ ID NO: 466248 - DNA, 15 bp, Homo sapiens
tcaatataaaataca

SEQ ID NO: 466249 - DNA, 15 bp, Homo sapiens
gtcaatataaaatac

SEQ ID NO: 466250 - DNA, 15 bp, Homo sapiens
tgtcaatataaaata

SEQ ID NO: 466251 - DNA, 15 bp, Homo sapiens
ctgtcaatataaaat

SEQ ID NO: 466252 - DNA, 15 bp, Homo sapiens
gctgtcaatataaaa

SEQ ID NO: 466253 - DNA, 15 bp, Homo sapiens
tgctgtcaatataaa

SEQ ID NO: 466254 - DNA, 15 bp, Homo sapiens
atgctgtcaatataa

SEQ ID NO: 466255 - DNA, 15 bp, Homo sapiens
tatgctgtcaatata

SEQ ID NO: 466256 - DNA, 15 bp, Homo sapiens
ctatgctgtcaatat

SEQ ID NO: 466257 - DNA, 15 bp, Homo sapiens
actatgctgtcaata

SEQ ID NO: 466258 - DNA, 15 bp, Homo sapiens
aactatgctgtcaat

SEQ ID NO: 466259 - DNA, 15 bp, Homo sapiens
gaactatgctgtcaa

SEQ ID NO: 466260 - DNA, 15 bp, Homo sapiens
tgaactatgctgtca

SEQ ID NO: 466261 - DNA, 15 bp, Homo sapiens
ctgaactatgctgtc

SEQ ID NO: 466262 - DNA, 15 bp, Homo sapiens
actgaactatgctgt

SEQ ID NO: 466263 - DNA, 15 bp, Homo sapiens
aactgaactatgctg

SEQ ID NO: 466264 - DNA, 15 bp, Homo sapiens
aaactgaactatgct

SEQ ID NO: 466265 - DNA, 15 bp, Homo sapiens
caaactgaactatgc

SEQ ID NO: 466266 - DNA, 15 bp, Homo sapiens
tcaaactgaactatg

SEQ ID NO: 466267 - DNA, 15 bp, Homo sapiens
ttcaaactgaactat

SEQ ID NO: 466268 - DNA, 15 bp, Homo sapiens
cttcaaactgaacta

SEQ ID NO: 466269 - DNA, 15 bp, Homo sapiens
gcttcaaactgaact

SEQ ID NO: 466270 - DNA, 15 bp, Homo sapiens
tgcttcaaactgaac

SEQ ID NO: 466271 - DNA, 15 bp, Homo sapiens
ctgcttcaaactgaa

SEQ ID NO: 466272 - DNA, 15 bp, Homo sapiens
gctgcttcaaactga

SEQ ID NO: 466273 - DNA, 15 bp, Homo sapiens
ggctgcttcaaactg

SEQ ID NO: 466274 - DNA, 15 bp, Homo sapiens
tggctgcttcaaact

SEQ ID NO: 466275 - DNA, 15 bp, Homo sapiens
gtggctgcttcaaac

SEQ ID NO: 466276 - DNA, 15 bp, Homo sapiens
tgtggctgcttcaaa

SEQ ID NO: 466277 - DNA, 15 bp, Homo sapiens
atgtggctgcttcaa

SEQ ID NO: 466278 - DNA, 15 bp, Homo sapiens
tcctcatgtatcaag

SEQ ID NO: 466279 - DNA, 15 bp, Homo sapiens
ctcctcatgtatcaa

SEQ ID NO: 466280 - DNA, 15 bp, Homo sapiens
cctcctcatgtatca

SEQ ID NO: 466281 - DNA, 15 bp, Homo sapiens
ccctcctcatgtatc

SEQ ID NO: 466282 - DNA, 15 bp, Homo sapiens
tccctcctcatgtat

SEQ ID NO: 466283 - DNA, 15 bp, Homo sapiens
ttccctcctcatgta

SEQ ID NO: 466284 - DNA, 15 bp, Homo sapiens
tttccctcctcatgt

SEQ ID NO: 466285 - DNA, 15 bp, Homo sapiens
ttttccctcctcatg

SEQ ID NO: 466286 - DNA, 15 bp, Homo sapiens
attttccctcctcat

SEQ ID NO: 466287 - DNA, 15 bp, Homo sapiens
tattttccctcctca

SEQ ID NO: 466288 - DNA, 15 bp, Homo sapiens
gtattttccctcctc

SEQ ID NO: 466289 - DNA, 15 bp, Homo sapiens
ggtattttccctcct

SEQ ID NO: 466290 - DNA, 15 bp, Homo sapiens
aggtattttccctcc

SEQ ID NO: 466291 - DNA, 15 bp, Homo sapiens
aaggtattttccctc

SEQ ID NO: 466292 - DNA, 15 bp, Homo sapiens
caaggtattttccct

SEQ ID NO: 466293 - DNA, 15 bp, Homo sapiens
ccaaggtattttccc

SEQ ID NO: 466294 - DNA, 15 bp, Homo sapiens
tccaaggtattttcc

SEQ ID NO: 466295 - DNA, 15 bp, Homo sapiens
ctccaaggtattttc

SEQ ID NO: 466296 - DNA, 15 bp, Homo sapiens
gctccaaggtatttt

SEQ ID NO: 466297 - DNA, 15 bp, Homo sapiens
agctccaaggtattt

SEQ ID NO: 466298 - DNA, 15 bp, Homo sapiens
cagctccaaggtatt

SEQ ID NO: 466299 - DNA, 15 bp, Homo sapiens
acagctccaaggtat

SEQ ID NO: 466300 - DNA, 15 bp, Homo sapiens
cacagctccaaggta

SEQ ID NO: 466301 - DNA, 15 bp, Homo sapiens
gcacagctccaaggt

SEQ ID NO: 466302 - DNA, 15 bp, Homo sapiens
agcacagctccaagg

SEQ ID NO: 466303 - DNA, 15 bp, Homo sapiens
cagcacagctccaag

SEQ ID NO: 466304 - DNA, 15 bp, Homo sapiens
gcagcacagctccaa

SEQ ID NO: 466305 - DNA, 15 bp, Homo sapiens
tgcagcacagctcca

SEQ ID NO: 466306 - DNA, 15 bp, Homo sapiens
gtgcagcacagctcc

SEQ ID NO: 466307 - DNA, 15 bp, Homo sapiens
tgtgcagcacagctc

SEQ ID NO: 466308 - DNA, 15 bp, Homo sapiens
atgtgcagcacagct

SEQ ID NO: 466309 - DNA, 15 bp, Homo sapiens
catgtgcagcacagc

SEQ ID NO: 466310 - DNA, 15 bp, Homo sapiens
acatgtgcagcacag

SEQ ID NO: 466311 - DNA, 15 bp, Homo sapiens
tacatgtgcagcaca

SEQ ID NO: 466312 - DNA, 15 bp, Homo sapiens
ttacatgtgcagcac

SEQ ID NO: 466313 - DNA, 15 bp, Homo sapiens
tttacatgtgcagca

SEQ ID NO: 466314 - DNA, 15 bp, Homo sapiens
ctttacatgtgcagc

SEQ ID NO: 466315 - DNA, 15 bp, Homo sapiens
actttacatgtgcag

SEQ ID NO: 466316 - DNA, 15 bp, Homo sapiens
tactttacatgtgca

SEQ ID NO: 466317 - DNA, 15 bp, Homo sapiens
gtactttacatgtgc

SEQ ID NO: 466318 - DNA, 15 bp, Homo sapiens
tgtactttacatgtg

SEQ ID NO: 466319 - DNA, 15 bp, Homo sapiens
gtgtactttacatgt

SEQ ID NO: 466320 - DNA, 15 bp, Homo sapiens
tgtgtactttacatg

SEQ ID NO: 466321 - DNA, 15 bp, Homo sapiens
ctgtgtactttacat

SEQ ID NO: 466322 - DNA, 15 bp, Homo sapiens
cctgtgtactttaca

SEQ ID NO: 466323 - DNA, 15 bp, Homo sapiens
tcctgtgtactttac

SEQ ID NO: 466324 - DNA, 15 bp, Homo sapiens
ctcctgtgtacttta

SEQ ID NO: 466325 - DNA, 15 bp, Homo sapiens
tctcctgtgtacttt

SEQ ID NO: 466326 - DNA, 15 bp, Homo sapiens
atctcctgtgtactt

SEQ ID NO: 466327 - DNA, 15 bp, Homo sapiens
aatctcctgtgtact

SEQ ID NO: 466328 - DNA, 15 bp, Homo sapiens
aaatctcctgtgtac

SEQ ID NO: 466329 - DNA, 15 bp, Homo sapiens
taaatctcctgtgta

SEQ ID NO: 466330 - DNA, 15 bp, Homo sapiens
ctaaatctcctgtgt

SEQ ID NO: 466331 - DNA, 15 bp, Homo sapiens
tctaaatctcctgtg

SEQ ID NO: 466332 - DNA, 15 bp, Homo sapiens
ttctaaatctcctgt

SEQ ID NO: 466333 - DNA, 15 bp, Homo sapiens
tttctaaatctcctg

SEQ ID NO: 466334 - DNA, 15 bp, Homo sapiens
ttttctaaatctcct

SEQ ID NO: 466335 - DNA, 15 bp, Homo sapiens
gttttctaaatctcc

SEQ ID NO: 466336 - DNA, 15 bp, Homo sapiens
agttttctaaatctc

SEQ ID NO: 466337 - DNA, 15 bp, Homo sapiens
aagttttctaaatct

SEQ ID NO: 466338 - DNA, 15 bp, Homo sapiens
gaagttttctaaatc

SEQ ID NO: 466339 - DNA, 15 bp, Homo sapiens
cgaagttttctaaat

SEQ ID NO: 466340 - DNA, 15 bp, Homo sapiens
acgaagttttctaaa

SEQ ID NO: 466341 - DNA, 15 bp, Homo sapiens
tacgaagttttctaa

SEQ ID NO: 466342 - DNA, 15 bp, Homo sapiens
ctacgaagttttcta

SEQ ID NO: 466343 - DNA, 15 bp, Homo sapiens
gctacgaagttttct

SEQ ID NO: 466344 - DNA, 15 bp, Homo sapiens
tgctacgaagttttc

SEQ ID NO: 466345 - DNA, 15 bp, Homo sapiens
ttgctacgaagtttt

SEQ ID NO: 466346 - DNA, 15 bp, Homo sapiens
tttgctacgaagttt

SEQ ID NO: 466347 - DNA, 15 bp, Homo sapiens
ttttgctacgaagtt

SEQ ID NO: 466348 - DNA, 15 bp, Homo sapiens
tttttgctacgaagt

SEQ ID NO: 466349 - DNA, 15 bp, Homo sapiens
ttttttgctacgaag

SEQ ID NO: 466350 - DNA, 15 bp, Homo sapiens
tttttttgctacgaa

SEQ ID NO: 466351 - DNA, 15 bp, Homo sapiens
ttttttttgctacga

SEQ ID NO: 466352 - DNA, 15 bp, Homo sapiens
cttttttttgctacg

SEQ ID NO: 466353 - DNA, 15 bp, Homo sapiens
tcttttttttgctac

SEQ ID NO: 466354 - DNA, 15 bp, Homo sapiens
ctcttttttttgcta

SEQ ID NO: 466355 - DNA, 15 bp, Homo sapiens
actcttttttttgct

SEQ ID NO: 466356 - DNA, 15 bp, Homo sapiens
cactcttttttttgc

SEQ ID NO: 466357 - DNA, 15 bp, Homo sapiens
acactcttttttttg

SEQ ID NO: 466358 - DNA, 15 bp, Homo sapiens
tacactctttttttt

SEQ ID NO: 466359 - DNA, 15 bp, Homo sapiens
ttacactcttttttt

SEQ ID NO: 466360 - DNA, 15 bp, Homo sapiens
tttacactctttttt

SEQ ID NO: 466361 - DNA, 15 bp, Homo sapiens
ctttacactcttttt

SEQ ID NO: 466362 - DNA, 15 bp, Homo sapiens
actttacactctttt

SEQ ID NO: 466363 - DNA, 15 bp, Homo sapiens
tactttacactcttt

SEQ ID NO: 466364 - DNA, 15 bp, Homo sapiens
atactttacactctt

SEQ ID NO: 466365 - DNA, 15 bp, Homo sapiens
gatactttacactct

SEQ ID NO: 466366 - DNA, 15 bp, Homo sapiens
agatactttacactc

SEQ ID NO: 466367 - DNA, 15 bp, Homo sapiens
gagatactttacact

SEQ ID NO: 466368 - DNA, 15 bp, Homo sapiens
tgagatactttacac

SEQ ID NO: 466369 - DNA, 15 bp, Homo sapiens
atgagatactttaca

SEQ ID NO: 466370 - DNA, 15 bp, Homo sapiens
aatgagatactttac

SEQ ID NO: 466371 - DNA, 15 bp, Homo sapiens
taatgagatacttta

SEQ ID NO: 466372 - DNA, 15 bp, Homo sapiens
ttaatgagatacttt

SEQ ID NO: 466373 - DNA, 15 bp, Homo sapiens
attaatgagatactt

SEQ ID NO: 466374 - DNA, 15 bp, Homo sapiens
tattaatgagatact

SEQ ID NO: 466375 - DNA, 15 bp, Homo sapiens
ctattaatgagatac

SEQ ID NO: 466376 - DNA, 15 bp, Homo sapiens
actattaatgagata

SEQ ID NO: 466377 - DNA, 15 bp, Homo sapiens
aactattaatgagat

SEQ ID NO: 466378 - DNA, 15 bp, Homo sapiens
aaactattaatgaga

SEQ ID NO: 466379 - DNA, 15 bp, Homo sapiens
aaaactattaatgag

SEQ ID NO: 466380 - DNA, 15 bp, Homo sapiens
aaaaactattaatga

SEQ ID NO: 466381 - DNA, 15 bp, Homo sapiens
caaaaactattaatg

SEQ ID NO: 466382 - DNA, 15 bp, Homo sapiens
acaaaaactattaat

SEQ ID NO: 466383 - DNA, 15 bp, Homo sapiens
cacaaaaactattaa

SEQ ID NO: 466384 - DNA, 15 bp, Homo sapiens
ccacaaaaactatta

SEQ ID NO: 466385 - DNA, 15 bp, Homo sapiens
cccacaaaaactatt

SEQ ID NO: 466386 - DNA, 15 bp, Homo sapiens
gcccacaaaaactat

SEQ ID NO: 466387 - DNA, 15 bp, Homo sapiens
agcccacaaaaacta

SEQ ID NO: 466388 - DNA, 15 bp, Homo sapiens
cagcccacaaaaact

SEQ ID NO: 466389 - DNA, 15 bp, Homo sapiens
ccagcccacaaaaac

SEQ ID NO: 466390 - DNA, 15 bp, Homo sapiens
tccagcccacaaaaa

SEQ ID NO: 466391 - DNA, 15 bp, Homo sapiens
gtccagcccacaaaa

SEQ ID NO: 466392 - DNA, 15 bp, Homo sapiens
tgtccagcccacaaa

SEQ ID NO: 466393 - DNA, 15 bp, Homo sapiens
gtgtccagcccacaa

SEQ ID NO: 466394 - DNA, 15 bp, Homo sapiens
cgtgtccagcccaca

SEQ ID NO: 466395 - DNA, 15 bp, Homo sapiens
ccgtgtccagcccac

SEQ ID NO: 466396 - DNA, 15 bp, Homo sapiens
accgtgtccagccca

SEQ ID NO: 466397 - DNA, 15 bp, Homo sapiens
caccgtgtccagccc

SEQ ID NO: 466398 - DNA, 15 bp, Homo sapiens
ccaccgtgtccagcc

SEQ ID NO: 466399 - DNA, 15 bp, Homo sapiens
gccaccgtgtccagc

SEQ ID NO: 466400 - DNA, 15 bp, Homo sapiens
agccaccgtgtccag

SEQ ID NO: 466401 - DNA, 15 bp, Homo sapiens
gagccaccgtgtcca

SEQ ID NO: 466402 - DNA, 15 bp, Homo sapiens
tgagccaccgtgtcc

SEQ ID NO: 466403 - DNA, 15 bp, Homo sapiens
ttgagccaccgtgtc

SEQ ID NO: 466404 - DNA, 15 bp, Homo sapiens
cttgagccaccgtgt

SEQ ID NO: 466405 - DNA, 15 bp, Homo sapiens
gcttgagccaccgtg

SEQ ID NO: 466406 - DNA, 15 bp, Homo sapiens
ggcttgagccaccgt

SEQ ID NO: 466407 - DNA, 15 bp, Homo sapiens
aggcttgagccaccg

SEQ ID NO: 466408 - DNA, 15 bp, Homo sapiens
taggcttgagccacc

SEQ ID NO: 466409 - DNA, 15 bp, Homo sapiens
ataggcttgagccac

SEQ ID NO: 466410 - DNA, 15 bp, Homo sapiens
tataggcttgagcca

SEQ ID NO: 466411 - DNA, 15 bp, Homo sapiens
gtataggcttgagcc

SEQ ID NO: 466412 - DNA, 15 bp, Homo sapiens
agtataggcttgagc

SEQ ID NO: 466413 - DNA, 15 bp, Homo sapiens
gagtataggcttgag

SEQ ID NO: 466414 - DNA, 15 bp, Homo sapiens
agagtataggcttga

SEQ ID NO: 466415 - DNA, 15 bp, Homo sapiens
aagagtataggcttg

SEQ ID NO: 466416 - DNA, 15 bp, Homo sapiens
caagagtataggctt

SEQ ID NO: 466417 - DNA, 15 bp, Homo sapiens
ccaagagtataggct

SEQ ID NO: 466418 - DNA, 15 bp, Homo sapiens
gccaagagtataggc

SEQ ID NO: 466419 - DNA, 15 bp, Homo sapiens
tgccaagagtatagg

SEQ ID NO: 466420 - DNA, 15 bp, Homo sapiens
gtgccaagagtatag

SEQ ID NO: 466421 - DNA, 15 bp, Homo sapiens
tgtgccaagagtata

SEQ ID NO: 466422 - DNA, 15 bp, Homo sapiens
atgtgccaagagtat

SEQ ID NO: 466423 - DNA, 15 bp, Homo sapiens
aatgtgccaagagta

SEQ ID NO: 466424 - DNA, 15 bp, Homo sapiens
caatgtgccaagagt

SEQ ID NO: 466425 - DNA, 15 bp, Homo sapiens
ccaatgtgccaagag

SEQ ID NO: 466426 - DNA, 15 bp, Homo sapiens
cccaatgtgccaaga

SEQ ID NO: 466427 - DNA, 15 bp, Homo sapiens
tcccaatgtgccaag

SEQ ID NO: 466428 - DNA, 15 bp, Homo sapiens
ctcccaatgtgccaa

SEQ ID NO: 466429 - DNA, 15 bp, Homo sapiens
cctcccaatgtgcca

SEQ ID NO: 466430 - DNA, 15 bp, Homo sapiens
gcctcccaatgtgcc

SEQ ID NO: 466431 - DNA, 15 bp, Homo sapiens
agcctcccaatgtgc

SEQ ID NO: 466432 - DNA, 15 bp, Homo sapiens
cagcctcccaatgtg

SEQ ID NO: 466433 - DNA, 15 bp, Homo sapiens
tcagcctcccaatgt

SEQ ID NO: 466434 - DNA, 15 bp, Homo sapiens
tctcagcctcccaat

SEQ ID NO: 466435 - DNA, 15 bp, Homo sapiens
atctcagcctcccaa

SEQ ID NO: 466436 - DNA, 15 bp, Homo sapiens
catctcagcctccca

SEQ ID NO: 466437 - DNA, 15 bp, Homo sapiens
gcatctcagcctccc

SEQ ID NO: 466438 - DNA, 15 bp, Homo sapiens
tgcatctcagcctcc

SEQ ID NO: 466439 - DNA, 15 bp, Homo sapiens
atgcatctcagcctc

SEQ ID NO: 466440 - DNA, 15 bp, Homo sapiens
catgcatctcagcct

SEQ ID NO: 466441 - DNA, 15 bp, Homo sapiens
tcatgcatctcagcc

SEQ ID NO: 466442 - DNA, 15 bp, Homo sapiens
ctcatgcatctcagc

SEQ ID NO: 466443 - DNA, 15 bp, Homo sapiens
actcatgcatctcag

SEQ ID NO: 466444 - DNA, 15 bp, Homo sapiens
gactcatgcatctca

SEQ ID NO: 466445 - DNA, 15 bp, Homo sapiens
agactcatgcatctc

SEQ ID NO: 466446 - DNA, 15 bp, Homo sapiens
tagactcatgcatct

SEQ ID NO: 466447 - DNA, 15 bp, Homo sapiens
ctagactcatgcatc

SEQ ID NO: 466448 - DNA, 15 bp, Homo sapiens
cctagactcatgcat

SEQ ID NO: 466449 - DNA, 15 bp, Homo sapiens
tcctagactcatgca

SEQ ID NO: 466450 - DNA, 15 bp, Homo sapiens
ctcctagactcatgc

SEQ ID NO: 466451 - DNA, 15 bp, Homo sapiens
actcctagactcatg

SEQ ID NO: 466452 - DNA, 15 bp, Homo sapiens
aactcctagactcat

SEQ ID NO: 466453 - DNA, 15 bp, Homo sapiens
aaactcctagactca

SEQ ID NO: 466454 - DNA, 15 bp, Homo sapiens
caaactcctagactc

SEQ ID NO: 466455 - DNA, 15 bp, Homo sapiens
tcaaactcctagact

SEQ ID NO: 466456 - DNA, 15 bp, Homo sapiens
ctcaaactcctagac

SEQ ID NO: 466457 - DNA, 15 bp, Homo sapiens
tctcaaactcctaga

SEQ ID NO: 466458 - DNA, 15 bp, Homo sapiens
gtctcaaactcctag

SEQ ID NO: 466459 - DNA, 15 bp, Homo sapiens
ggtctcaaactccta

SEQ ID NO: 466460 - DNA, 15 bp, Homo sapiens
gtgttgcccaggctg

SEQ ID NO: 466461 - DNA, 15 bp, Homo sapiens
tgtgttgcccaggct

SEQ ID NO: 466462 - DNA, 15 bp, Homo sapiens
ctgtgttgcccaggc

SEQ ID NO: 466463 - DNA, 15 bp, Homo sapiens
actgtgttgcccagg

SEQ ID NO: 466464 - DNA, 15 bp, Homo sapiens
tactgtgttgcccag

SEQ ID NO: 466465 - DNA, 15 bp, Homo sapiens
ctactgtgttgccca

SEQ ID NO: 466466 - DNA, 15 bp, Homo sapiens
cctactgtgttgccc

SEQ ID NO: 466467 - DNA, 15 bp, Homo sapiens
tcctactgtgttgcc

SEQ ID NO: 466468 - DNA, 15 bp, Homo sapiens
gtcctactgtgttgc

SEQ ID NO: 466469 - DNA, 15 bp, Homo sapiens
ggtcctactgtgttg

SEQ ID NO: 466470 - DNA, 15 bp, Homo sapiens
gggtcctactgtgtt

SEQ ID NO: 466471 - DNA, 15 bp, Homo sapiens
ggggtcctactgtgt

SEQ ID NO: 466472 - DNA, 15 bp, Homo sapiens
cggggtcctactgtg

SEQ ID NO: 466473 - DNA, 15 bp, Homo sapiens
acggggtcctactgt

SEQ ID NO: 466474 - DNA, 15 bp, Homo sapiens
gacggggtcctactg

SEQ ID NO: 466475 - DNA, 15 bp, Homo sapiens
agacggggtcctact

SEQ ID NO: 466476 - DNA, 15 bp, Homo sapiens
gagacggggtcctac

SEQ ID NO: 466477 - DNA, 15 bp, Homo sapiens
agagacggggtccta

SEQ ID NO: 466478 - DNA, 15 bp, Homo sapiens
tagagacggggtcct

SEQ ID NO: 466479 - DNA, 15 bp, Homo sapiens
gtagagacggggtcc

SEQ ID NO: 466480 - DNA, 15 bp, Homo sapiens
tgtagagacggggtc

SEQ ID NO: 466481 - DNA, 15 bp, Homo sapiens
ttgtagagacggggt

SEQ ID NO: 466482 - DNA, 15 bp, Homo sapiens
tttgtagagacgggg

SEQ ID NO: 466483 - DNA, 15 bp, Homo sapiens
ttttgtagagacggg

SEQ ID NO: 466484 - DNA, 15 bp, Homo sapiens
tttttgtagagacgg

SEQ ID NO: 466485 - DNA, 15 bp, Homo sapiens
atttttgtagagacg

SEQ ID NO: 466486 - DNA, 15 bp, Homo sapiens
tatttttgtagagac

SEQ ID NO: 466487 - DNA, 15 bp, Homo sapiens
ttatttttgtagaga

SEQ ID NO: 466488 - DNA, 15 bp, Homo sapiens
attatttttgtagag

SEQ ID NO: 466489 - DNA, 15 bp, Homo sapiens
gattatttttgtaga

SEQ ID NO: 466490 - DNA, 15 bp, Homo sapiens
tgattatttttgtag

SEQ ID NO: 466491 - DNA, 15 bp, Homo sapiens
ctgattatttttgta

SEQ ID NO: 466492 - DNA, 15 bp, Homo sapiens
gctgattatttttgt

SEQ ID NO: 466493 - DNA, 15 bp, Homo sapiens
ggctgattatttttg

SEQ ID NO: 466494 - DNA, 15 bp, Homo sapiens
tggctgattattttt

SEQ ID NO: 466495 - DNA, 15 bp, Homo sapiens
ctggctgattatttt

SEQ ID NO: 466496 - DNA, 15 bp, Homo sapiens
tctggctgattattt

SEQ ID NO: 466497 - DNA, 15 bp, Homo sapiens
atctggctgattatt

SEQ ID NO: 466498 - DNA, 15 bp, Homo sapiens
catctggctgattat

SEQ ID NO: 466499 - DNA, 15 bp, Homo sapiens
acatctggctgatta

SEQ ID NO: 466500 - DNA, 15 bp, Homo sapiens
cacatctggctgatt

SEQ ID NO: 466501 - DNA, 15 bp, Homo sapiens
ccacatctggctgat

SEQ ID NO: 466502 - DNA, 15 bp, Homo sapiens
accacatctggctga

SEQ ID NO: 466503 - DNA, 15 bp, Homo sapiens
caccacatctggctg

SEQ ID NO: 466504 - DNA, 15 bp, Homo sapiens
gcaccacatctggct

SEQ ID NO: 466505 - DNA, 15 bp, Homo sapiens
cgcaccacatctggc

SEQ ID NO: 466506 - DNA, 15 bp, Homo sapiens
gcgcaccacatctgg

SEQ ID NO: 466507 - DNA, 15 bp, Homo sapiens
tgcgcaccacatctg

SEQ ID NO: 466508 - DNA, 15 bp, Homo sapiens
atgcgcaccacatct

SEQ ID NO: 466509 - DNA, 15 bp, Homo sapiens
gatgcgcaccacatc

SEQ ID NO: 466510 - DNA, 15 bp, Homo sapiens
agatgcgcaccacat

SEQ ID NO: 466511 - DNA, 15 bp, Homo sapiens
cagatgcgcaccaca

SEQ ID NO: 466512 - DNA, 15 bp, Homo sapiens
acagatgcgcaccac

SEQ ID NO: 466513 - DNA, 15 bp, Homo sapiens
tacagatgcgcacca

SEQ ID NO: 466514 - DNA, 15 bp, Homo sapiens
ctacagatgcgcacc

SEQ ID NO: 466515 - DNA, 15 bp, Homo sapiens
actacagatgcgcac

SEQ ID NO: 466516 - DNA, 15 bp, Homo sapiens
gactacagatgcgca

SEQ ID NO: 466517 - DNA, 15 bp, Homo sapiens
ggactacagatgcgc

SEQ ID NO: 466518 - DNA, 15 bp, Homo sapiens
gggactacagatgcg

SEQ ID NO: 466519 - DNA, 15 bp, Homo sapiens
tgggactacagatgc

SEQ ID NO: 466520 - DNA, 15 bp, Homo sapiens
ctgggactacagatg

SEQ ID NO: 466521 - DNA, 15 bp, Homo sapiens
actgggactacagat

SEQ ID NO: 466522 - DNA, 15 bp, Homo sapiens
aactgggactacaga

SEQ ID NO: 466523 - DNA, 15 bp, Homo sapiens
taactgggactacag

SEQ ID NO: 466524 - DNA, 15 bp, Homo sapiens
gtaactgggactaca

SEQ ID NO: 466525 - DNA, 15 bp, Homo sapiens
agtaactgggactac

SEQ ID NO: 466526 - DNA, 15 bp, Homo sapiens
aagtaactgggacta

SEQ ID NO: 466527 - DNA, 15 bp, Homo sapiens
caagtaactgggact

SEQ ID NO: 466528 - DNA, 15 bp, Homo sapiens
tcaagtaactgggac

SEQ ID NO: 466529 - DNA, 15 bp, Homo sapiens
ctcaagtaactggga

SEQ ID NO: 466530 - DNA, 15 bp, Homo sapiens
tctcaagtaactggg

SEQ ID NO: 466531 - DNA, 15 bp, Homo sapiens
ctctcaagtaactgg

SEQ ID NO: 466532 - DNA, 15 bp, Homo sapiens
cctctcaagtaactg

SEQ ID NO: 466533 - DNA, 15 bp, Homo sapiens
gcctctcaagtaact

SEQ ID NO: 466534 - DNA, 15 bp, Homo sapiens
agcctctcaagtaac

SEQ ID NO: 466535 - DNA, 15 bp, Homo sapiens
cagcctctcaagtaa

SEQ ID NO: 466536 - DNA, 15 bp, Homo sapiens
tcagcctctcaagta

SEQ ID NO: 466537 - DNA, 15 bp, Homo sapiens
ctcagcctctcaagt

SEQ ID NO: 466538 - DNA, 15 bp, Homo sapiens
cctcagcctctcaag

SEQ ID NO: 466539 - DNA, 15 bp, Homo sapiens
acctcagcctctcaa

SEQ ID NO: 466540 - DNA, 15 bp, Homo sapiens
cacctcagcctctca

SEQ ID NO: 466541 - DNA, 15 bp, Homo sapiens
ccacctcagcctctc

SEQ ID NO: 466542 - DNA, 15 bp, Homo sapiens
cccacctcagcctct

SEQ ID NO: 466543 - DNA, 15 bp, Homo sapiens
acgatcctcccacct

SEQ ID NO: 466544 - DNA, 15 bp, Homo sapiens
aacgatcctcccacc

SEQ ID NO: 466545 - DNA, 15 bp, Homo sapiens
aaacgatcctcccac

SEQ ID NO: 466546 - DNA, 15 bp, Homo sapiens
caaacgatcctccca

SEQ ID NO: 466547 - DNA, 15 bp, Homo sapiens
tcaaacgatcctccc

SEQ ID NO: 466548 - DNA, 15 bp, Homo sapiens
ctcaaacgatcctcc

SEQ ID NO: 466549 - DNA, 15 bp, Homo sapiens
gctcaaacgatcctc

SEQ ID NO: 466550 - DNA, 15 bp, Homo sapiens
agctcaaacgatcct

SEQ ID NO: 466551 - DNA, 15 bp, Homo sapiens
cagctcaaacgatcc

SEQ ID NO: 466552 - DNA, 15 bp, Homo sapiens
ccagctcaaacgatc

SEQ ID NO: 466553 - DNA, 15 bp, Homo sapiens
cccagctcaaacgat

SEQ ID NO: 466554 - DNA, 15 bp, Homo sapiens
tcccagctcaaacga

SEQ ID NO: 466555 - DNA, 15 bp, Homo sapiens
ttcccagctcaaacg

SEQ ID NO: 466556 - DNA, 15 bp, Homo sapiens
cttcccagctcaaac

SEQ ID NO: 466557 - DNA, 15 bp, Homo sapiens
acttcccagctcaaa

SEQ ID NO: 466558 - DNA, 15 bp, Homo sapiens
aacttcccagctcaa

SEQ ID NO: 466559 - DNA, 15 bp, Homo sapiens
caacttcccagctca

SEQ ID NO: 466560 - DNA, 15 bp, Homo sapiens
tcaacttcccagctc

SEQ ID NO: 466561 - DNA, 15 bp, Homo sapiens
ctcaacttcccagct

SEQ ID NO: 466562 - DNA, 15 bp, Homo sapiens
cctcaacttcccagc

SEQ ID NO: 466563 - DNA, 15 bp, Homo sapiens
gcctcaacttcccag

SEQ ID NO: 466564 - DNA, 15 bp, Homo sapiens
agcctcaacttccca

SEQ ID NO: 466565 - DNA, 15 bp, Homo sapiens
tagcctcaacttccc

SEQ ID NO: 466566 - DNA, 15 bp, Homo sapiens
gtagcctcaacttcc

SEQ ID NO: 466567 - DNA, 15 bp, Homo sapiens
tgtagcctcaacttc

SEQ ID NO: 466568 - DNA, 15 bp, Homo sapiens
ctgtagcctcaactt

SEQ ID NO: 466569 - DNA, 15 bp, Homo sapiens
actgtagcctcaact

SEQ ID NO: 466570 - DNA, 15 bp, Homo sapiens
cactgtagcctcaac

SEQ ID NO: 466571 - DNA, 15 bp, Homo sapiens
tcactgtagcctcaa

SEQ ID NO: 466572 - DNA, 15 bp, Homo sapiens
ctcactgtagcctca

SEQ ID NO: 466573 - DNA, 15 bp, Homo sapiens
gctcactgtagcctc

SEQ ID NO: 466574 - DNA, 15 bp, Homo sapiens
agctcactgtagcct

SEQ ID NO: 466575 - DNA, 15 bp, Homo sapiens
cagctcactgtagcc

SEQ ID NO: 466576 - DNA, 15 bp, Homo sapiens
acagctcactgtagc

SEQ ID NO: 466577 - DNA, 15 bp, Homo sapiens
cacagctcactgtag

SEQ ID NO: 466578 - DNA, 15 bp, Homo sapiens
tcacagctcactgta

SEQ ID NO: 466579 - DNA, 15 bp, Homo sapiens
atcacagctcactgt

SEQ ID NO: 466580 - DNA, 15 bp, Homo sapiens
aatcacagctcactg

SEQ ID NO: 466581 - DNA, 15 bp, Homo sapiens
caatcacagctcact

SEQ ID NO: 466582 - DNA, 15 bp, Homo sapiens
tcaatcacagctcac

SEQ ID NO: 466583 - DNA, 15 bp, Homo sapiens
ttcaatcacagctca

SEQ ID NO: 466584 - DNA, 15 bp, Homo sapiens
gttcaatcacagctc

SEQ ID NO: 466585 - DNA, 15 bp, Homo sapiens
ggttcaatcacagct

SEQ ID NO: 466586 - DNA, 15 bp, Homo sapiens
tggttcaatcacagc

SEQ ID NO: 466587 - DNA, 15 bp, Homo sapiens
gtggttcaatcacag

SEQ ID NO: 466588 - DNA, 15 bp, Homo sapiens
agtggttcaatcaca

SEQ ID NO: 466589 - DNA, 15 bp, Homo sapiens
cagtggttcaatcac

SEQ ID NO: 466590 - DNA, 15 bp, Homo sapiens
gcagtggttcaatca

SEQ ID NO: 466591 - DNA, 15 bp, Homo sapiens
tgcagtggttcaatc

SEQ ID NO: 466592 - DNA, 15 bp, Homo sapiens
gtgcagtggttcaat

SEQ ID NO: 466593 - DNA, 15 bp, Homo sapiens
agtgcagtggttcaa

SEQ ID NO: 466594 - DNA, 15 bp, Homo sapiens
gagtgcagtggttca

SEQ ID NO: 466595 - DNA, 15 bp, Homo sapiens
ggagtgcagtggttc

SEQ ID NO: 466596 - DNA, 15 bp, Homo sapiens
tggagtgcagtggtt

SEQ ID NO: 466597 - DNA, 15 bp, Homo sapiens
gcactctgtcaccca

SEQ ID NO: 466598 - DNA, 15 bp, Homo sapiens
ggcactctgtcaccc

SEQ ID NO: 466599 - DNA, 15 bp, Homo sapiens
aggcactctgtcacc

SEQ ID NO: 466600 - DNA, 15 bp, Homo sapiens
caggcactctgtcac

SEQ ID NO: 466601 - DNA, 15 bp, Homo sapiens
acaggcactctgtca

SEQ ID NO: 466602 - DNA, 15 bp, Homo sapiens
gacaggcactctgtc

SEQ ID NO: 466603 - DNA, 15 bp, Homo sapiens
agacaggcactctgt

SEQ ID NO: 466604 - DNA, 15 bp, Homo sapiens
gagacaggcactctg

SEQ ID NO: 466605 - DNA, 15 bp, Homo sapiens
ggagacaggcactct

SEQ ID NO: 466606 - DNA, 15 bp, Homo sapiens
tggagacaggcactc

SEQ ID NO: 466607 - DNA, 15 bp, Homo sapiens
ttggagacaggcact

SEQ ID NO: 466608 - DNA, 15 bp, Homo sapiens
tttggagacaggcac

SEQ ID NO: 466609 - DNA, 15 bp, Homo sapiens
ttttggagacaggca

SEQ ID NO: 466610 - DNA, 15 bp, Homo sapiens
tttttggagacaggc

SEQ ID NO: 466611 - DNA, 15 bp, Homo sapiens
attttttggagacag

SEQ ID NO: 466612 - DNA, 15 bp, Homo sapiens
tattttttggagaca

SEQ ID NO: 466613 - DNA, 15 bp, Homo sapiens
ttattttttggagac

SEQ ID NO: 466614 - DNA, 15 bp, Homo sapiens
tttattttttggaga

SEQ ID NO: 466615 - DNA, 15 bp, Homo sapiens
atttattttttggag

SEQ ID NO: 466616 - DNA, 15 bp, Homo sapiens
tatttattttttgga

SEQ ID NO: 466617 - DNA, 15 bp, Homo sapiens
ttatttattttttgg

SEQ ID NO: 466618 - DNA, 15 bp, Homo sapiens
tttatttattttttg

SEQ ID NO: 466619 - DNA, 15 bp, Homo sapiens
attatttatttattt

SEQ ID NO: 466620 - DNA, 15 bp, Homo sapiens
tattatttatttatt

SEQ ID NO: 466621 - DNA, 15 bp, Homo sapiens
ttattatttatttat

SEQ ID NO: 466622 - DNA, 15 bp, Homo sapiens
attattatttattta

SEQ ID NO: 466623 - DNA, 15 bp, Homo sapiens
tattattatttattt

SEQ ID NO: 466624 - DNA, 15 bp, Homo sapiens
atattattatttatt

SEQ ID NO: 466625 - DNA, 15 bp, Homo sapiens
catattattatttat

SEQ ID NO: 466626 - DNA, 15 bp, Homo sapiens
acatattattattta

SEQ ID NO: 466627 - DNA, 15 bp, Homo sapiens
aacatattattattt

SEQ ID NO: 466628 - DNA, 15 bp, Homo sapiens
aaacatattattatt

SEQ ID NO: 466629 - DNA, 15 bp, Homo sapiens
aaaacatattattat

SEQ ID NO: 466630 - DNA, 15 bp, Homo sapiens
caaaacatattatta

SEQ ID NO: 466631 - DNA, 15 bp, Homo sapiens
acaaaacatattatt

SEQ ID NO: 466632 - DNA, 15 bp, Homo sapiens
tacaaaacatattat

SEQ ID NO: 466633 - DNA, 15 bp, Homo sapiens
atacaaaacatatta

SEQ ID NO: 466634 - DNA, 15 bp, Homo sapiens
catacaaaacatatt

SEQ ID NO: 466635 - DNA, 15 bp, Homo sapiens
acatacaaaacatat

SEQ ID NO: 466636 - DNA, 15 bp, Homo sapiens
aacatacaaaacata

SEQ ID NO: 466637 - DNA, 15 bp, Homo sapiens
gaacatacaaaacat

SEQ ID NO: 466638 - DNA, 15 bp, Homo sapiens
tgaacatacaaaaca

SEQ ID NO: 466639 - DNA, 15 bp, Homo sapiens
atgaacatacaaaac

SEQ ID NO: 466640 - DNA, 15 bp, Homo sapiens
tatgaacatacaaaa

SEQ ID NO: 466641 - DNA, 15 bp, Homo sapiens
atatgaacatacaaa

SEQ ID NO: 466642 - DNA, 15 bp, Homo sapiens
catatgaacatacaa

SEQ ID NO: 466643 - DNA, 15 bp, Homo sapiens
acatatgaacataca

SEQ ID NO: 466644 - DNA, 15 bp, Homo sapiens
aacatatgaacatac

SEQ ID NO: 466645 - DNA, 15 bp, Homo sapiens
caacatatgaacata

SEQ ID NO: 466646 - DNA, 15 bp, Homo sapiens
gcaacatatgaacat

SEQ ID NO: 466647 - DNA, 15 bp, Homo sapiens
tgcaacatatgaaca

SEQ ID NO: 466648 - DNA, 15 bp, Homo sapiens
ttgcaacatatgaac

SEQ ID NO: 466649 - DNA, 15 bp, Homo sapiens
attgcaacatatgaa

SEQ ID NO: 466650 - DNA, 15 bp, Homo sapiens
tattgcaacatatga

SEQ ID NO: 466651 - DNA, 15 bp, Homo sapiens
ttattgcaacatatg

SEQ ID NO: 466652 - DNA, 15 bp, Homo sapiens
gttattgcaacatat

SEQ ID NO: 466653 - DNA, 15 bp, Homo sapiens
tgttattgcaacata

SEQ ID NO: 466654 - DNA, 15 bp, Homo sapiens
atgttattgcaacat

SEQ ID NO: 466655 - DNA, 15 bp, Homo sapiens
aatgttattgcaaca

SEQ ID NO: 466656 - DNA, 15 bp, Homo sapiens
aaatgttattgcaac

SEQ ID NO: 466657 - DNA, 15 bp, Homo sapiens
aaaatgttattgcaa

SEQ ID NO: 466658 - DNA, 15 bp, Homo sapiens
caaaatgttattgca

SEQ ID NO: 466659 - DNA, 15 bp, Homo sapiens
ccaaaatgttattgc

SEQ ID NO: 466660 - DNA, 15 bp, Homo sapiens
tccaaaatgttattg

SEQ ID NO: 466661 - DNA, 15 bp, Homo sapiens
atccaaaatgttatt

SEQ ID NO: 466662 - DNA, 15 bp, Homo sapiens
tatccaaaatgttat

SEQ ID NO: 466663 - DNA, 15 bp, Homo sapiens
atatccaaaatgtta

SEQ ID NO: 466664 - DNA, 15 bp, Homo sapiens
tatatccaaaatgtt

SEQ ID NO: 466665 - DNA, 15 bp, Homo sapiens
atatatccaaaatgt

SEQ ID NO: 466666 - DNA, 15 bp, Homo sapiens
aatatatccaaaatg

SEQ ID NO: 466667 - DNA, 15 bp, Homo sapiens
taatatatccaaaat

SEQ ID NO: 466668 - DNA, 15 bp, Homo sapiens
ttaatatatccaaaa

SEQ ID NO: 466669 - DNA, 15 bp, Homo sapiens
tttaatatatccaaa

SEQ ID NO: 466670 - DNA, 15 bp, Homo sapiens
atttaatatatccaa

SEQ ID NO: 466671 - DNA, 15 bp, Homo sapiens
catttaatatatcca

SEQ ID NO: 466672 - DNA, 15 bp, Homo sapiens
tcatttaatatatcc

SEQ ID NO: 466673 - DNA, 15 bp, Homo sapiens
ttcatttaatatatc

SEQ ID NO: 466674 - DNA, 15 bp, Homo sapiens
tttcatttaatatat

SEQ ID NO: 466675 - DNA, 15 bp, Homo sapiens
atttcatttaatata

SEQ ID NO: 466676 - DNA, 15 bp, Homo sapiens
tatttcatttaatat

SEQ ID NO: 466677 - DNA, 15 bp, Homo sapiens
ttatttcatttaata

SEQ ID NO: 466678 - DNA, 15 bp, Homo sapiens
tttatttcatttaat

SEQ ID NO: 466679 - DNA, 15 bp, Homo sapiens
ttttatttcatttaa

SEQ ID NO: 466680 - DNA, 15 bp, Homo sapiens
attttatttcattta

SEQ ID NO: 466681 - DNA, 15 bp, Homo sapiens
tattttatttcattt

SEQ ID NO: 466682 - DNA, 15 bp, Homo sapiens
gtattttatttcatt

SEQ ID NO: 466683 - DNA, 15 bp, Homo sapiens
tgtattttatttcat

SEQ ID NO: 466684 - DNA, 15 bp, Homo sapiens
atgtattttatttca

SEQ ID NO: 466685 - DNA, 15 bp, Homo sapiens
aatgtattttatttc

SEQ ID NO: 466686 - DNA, 15 bp, Homo sapiens
taatgtattttattt

SEQ ID NO: 466687 - DNA, 15 bp, Homo sapiens
ttaatgtattttatt

SEQ ID NO: 466688 - DNA, 15 bp, Homo sapiens
tttaatgtattttat

SEQ ID NO: 466689 - DNA, 15 bp, Homo sapiens
ttttaatgtatttta

SEQ ID NO: 466690 - DNA, 15 bp, Homo sapiens
attttaatgtatttt

SEQ ID NO: 466691 - DNA, 15 bp, Homo sapiens
aattttaatgtattt

SEQ ID NO: 466692 - DNA, 15 bp, Homo sapiens
taattttaatgtatt

SEQ ID NO: 466693 - DNA, 15 bp, Homo sapiens
ttaattttaatgtat

SEQ ID NO: 466694 - DNA, 15 bp, Homo sapiens
attaattttaatgta

SEQ ID NO: 466695 - DNA, 15 bp, Homo sapiens
aattaattttaatgt

SEQ ID NO: 466696 - DNA, 15 bp, Homo sapiens
aaattaattttaatg

SEQ ID NO: 466697 - DNA, 15 bp, Homo sapiens
gaaattaattttaat

SEQ ID NO: 466698 - DNA, 15 bp, Homo sapiens
tgaaattaattttaa

SEQ ID NO: 466699 - DNA, 15 bp, Homo sapiens
gtgaaattaatttta

SEQ ID NO: 466700 - DNA, 15 bp, Homo sapiens
ggtgaaattaatttt

SEQ ID NO: 466701 - DNA, 15 bp, Homo sapiens
aggtgaaattaattt

SEQ ID NO: 466702 - DNA, 15 bp, Homo sapiens
caggtgaaattaatt

SEQ ID NO: 466703 - DNA, 15 bp, Homo sapiens
acaggtgaaattaat

SEQ ID NO: 466704 - DNA, 15 bp, Homo sapiens
aacaggtgaaattaa

SEQ ID NO: 466705 - DNA, 15 bp, Homo sapiens
aaacaggtgaaatta

SEQ ID NO: 466706 - DNA, 15 bp, Homo sapiens
gaaacaggtgaaatt

SEQ ID NO: 466707 - DNA, 15 bp, Homo sapiens
agaaacaggtgaaat

SEQ ID NO: 466708 - DNA, 15 bp, Homo sapiens
aagaaacaggtgaaa

SEQ ID NO: 466709 - DNA, 15 bp, Homo sapiens
aaagaaacaggtgaa

SEQ ID NO: 466710 - DNA, 15 bp, Homo sapiens
aaaagaaacaggtga

SEQ ID NO: 466711 - DNA, 15 bp, Homo sapiens
gaaaagaaacaggtg

SEQ ID NO: 466712 - DNA, 15 bp, Homo sapiens
agaaaagaaacaggt

SEQ ID NO: 466713 - DNA, 15 bp, Homo sapiens
aagaaaagaaacagg

SEQ ID NO: 466714 - DNA, 15 bp, Homo sapiens
aaagaaaagaaacag

SEQ ID NO: 466715 - DNA, 15 bp, Homo sapiens
aaaagaaaagaaaca

SEQ ID NO: 466716 - DNA, 15 bp, Homo sapiens
gaaaagaaaagaaac

SEQ ID NO: 466717 - DNA, 15 bp, Homo sapiens
aaaaaaaaagaaaag

SEQ ID NO: 466718 - DNA, 15 bp, Homo sapiens
tagcgagactccatc

SEQ ID NO: 466719 - DNA, 15 bp, Homo sapiens
atagcgagactccat

SEQ ID NO: 466720 - DNA, 15 bp, Homo sapiens
catagcgagactcca

SEQ ID NO: 466721 - DNA, 15 bp, Homo sapiens
acatagcgagactcc

SEQ ID NO: 466722 - DNA, 15 bp, Homo sapiens
gacatagcgagactc

SEQ ID NO: 466723 - DNA, 15 bp, Homo sapiens
tgacatagcgagact

SEQ ID NO: 466724 - DNA, 15 bp, Homo sapiens
atgacatagcgagac

SEQ ID NO: 466725 - DNA, 15 bp, Homo sapiens
gatgacatagcgaga

SEQ ID NO: 466726 - DNA, 15 bp, Homo sapiens
tgatgacatagcgag

SEQ ID NO: 466727 - DNA, 15 bp, Homo sapiens
ctgatgacatagcga

SEQ ID NO: 466728 - DNA, 15 bp, Homo sapiens
cctgatgacatagcg

SEQ ID NO: 466729 - DNA, 15 bp, Homo sapiens
gcctgatgacatagc

SEQ ID NO: 466730 - DNA, 15 bp, Homo sapiens
agcctgatgacatag

SEQ ID NO: 466731 - DNA, 15 bp, Homo sapiens
cagcctgatgacata

SEQ ID NO: 466732 - DNA, 15 bp, Homo sapiens
ccagcctgatgacat

SEQ ID NO: 466733 - DNA, 15 bp, Homo sapiens
tccagcctgatgaca

SEQ ID NO: 466734 - DNA, 15 bp, Homo sapiens
ctccagcctgatgac

SEQ ID NO: 466735 - DNA, 15 bp, Homo sapiens
actccagcctgatga

SEQ ID NO: 466736 - DNA, 15 bp, Homo sapiens
cactccagcctgatg

SEQ ID NO: 466737 - DNA, 15 bp, Homo sapiens
gcactccagcctgat

SEQ ID NO: 466738 - DNA, 15 bp, Homo sapiens
tgcactccagcctga

SEQ ID NO: 466739 - DNA, 15 bp, Homo sapiens
agccgagatcgtgcc

SEQ ID NO: 466740 - DNA, 15 bp, Homo sapiens
gagccgagatcgtgc

SEQ ID NO: 466741 - DNA, 15 bp, Homo sapiens
tgagccgagatcgtg

SEQ ID NO: 466742 - DNA, 15 bp, Homo sapiens
gtgagccgagatcgt

SEQ ID NO: 466743 - DNA, 15 bp, Homo sapiens
aggaggaggaggttg

SEQ ID NO: 466744 - DNA, 15 bp, Homo sapiens
caggaggaggaggtt

SEQ ID NO: 466745 - DNA, 15 bp, Homo sapiens
ccaggaggaggaggt

SEQ ID NO: 466746 - DNA, 15 bp, Homo sapiens
cccaggaggaggagg

SEQ ID NO: 466747 - DNA, 15 bp, Homo sapiens
acccaggaggaggag

SEQ ID NO: 466748 - DNA, 15 bp, Homo sapiens
aacccaggaggagga

SEQ ID NO: 466749 - DNA, 15 bp, Homo sapiens
gaacccaggaggagg

SEQ ID NO: 466750 - DNA, 15 bp, Homo sapiens
tgaacccaggaggag

SEQ ID NO: 466751 - DNA, 15 bp, Homo sapiens
ttgaacccaggagga

SEQ ID NO: 466752 - DNA, 15 bp, Homo sapiens
ctgaggcagaagaat

SEQ ID NO: 466753 - DNA, 15 bp, Homo sapiens
gctgaggcagaagaa

SEQ ID NO: 466754 - DNA, 15 bp, Homo sapiens
ggctgaggcagaaga

SEQ ID NO: 466755 - DNA, 15 bp, Homo sapiens
aggctgaggcagaag

SEQ ID NO: 466756 - DNA, 15 bp, Homo sapiens
gaggctgaggcagaa

SEQ ID NO: 466757 - DNA, 15 bp, Homo sapiens
agggaggctgaggca

SEQ ID NO: 466758 - DNA, 15 bp, Homo sapiens
tagggaggctgaggc

SEQ ID NO: 466759 - DNA, 15 bp, Homo sapiens
ctagggaggctgagg

SEQ ID NO: 466760 - DNA, 15 bp, Homo sapiens
actagggaggctgag

SEQ ID NO: 466761 - DNA, 15 bp, Homo sapiens
tactagggaggctga

SEQ ID NO: 466762 - DNA, 15 bp, Homo sapiens
ctactagggaggctg

SEQ ID NO: 466763 - DNA, 15 bp, Homo sapiens
gctactagggaggct

SEQ ID NO: 466764 - DNA, 15 bp, Homo sapiens
agctactagggaggc

SEQ ID NO: 466765 - DNA, 15 bp, Homo sapiens
cagctactagggagg

SEQ ID NO: 466766 - DNA, 15 bp, Homo sapiens
ccagctactagggag

SEQ ID NO: 466767 - DNA, 15 bp, Homo sapiens
cccagctactaggga

SEQ ID NO: 466768 - DNA, 15 bp, Homo sapiens
tcccagctactaggg

SEQ ID NO: 466769 - DNA, 15 bp, Homo sapiens
atcccagctactagg

SEQ ID NO: 466770 - DNA, 15 bp, Homo sapiens
aatcccagctactag

SEQ ID NO: 466771 - DNA, 15 bp, Homo sapiens
taatcccagctacta

SEQ ID NO: 466772 - DNA, 15 bp, Homo sapiens
ttaatcccagctact

SEQ ID NO: 466773 - DNA, 15 bp, Homo sapiens
tttaatcccagctac

SEQ ID NO: 466774 - DNA, 15 bp, Homo sapiens
ctttaatcccagcta

SEQ ID NO: 466775 - DNA, 15 bp, Homo sapiens
cctttaatcccagct

SEQ ID NO: 466776 - DNA, 15 bp, Homo sapiens
gcctttaatcccagc

SEQ ID NO: 466777 - DNA, 15 bp, Homo sapiens
tgcctttaatcccag

SEQ ID NO: 466778 - DNA, 15 bp, Homo sapiens
atgcctttaatccca

SEQ ID NO: 466779 - DNA, 15 bp, Homo sapiens
catgcctttaatccc

SEQ ID NO: 466780 - DNA, 15 bp, Homo sapiens
acatgcctttaatcc

SEQ ID NO: 466781 - DNA, 15 bp, Homo sapiens
cacatgcctttaatc

SEQ ID NO: 466782 - DNA, 15 bp, Homo sapiens
gcacatgcctttaat

SEQ ID NO: 466783 - DNA, 15 bp, Homo sapiens
ggcacatgcctttaa

SEQ ID NO: 466784 - DNA, 15 bp, Homo sapiens
tggcacatgccttta

SEQ ID NO: 466785 - DNA, 15 bp, Homo sapiens
gtggcacatgccttt

SEQ ID NO: 466786 - DNA, 15 bp, Homo sapiens
ggtggcacatgcctt

SEQ ID NO: 466787 - DNA, 15 bp, Homo sapiens
tgggtgtggtggcac

SEQ ID NO: 466788 - DNA, 15 bp, Homo sapiens
ctgggtgtggtggca

SEQ ID NO: 466789 - DNA, 15 bp, Homo sapiens
aaaattagctgggtg

SEQ ID NO: 466790 - DNA, 15 bp, Homo sapiens
tggtgaaaccccgtc

SEQ ID NO: 466791 - DNA, 15 bp, Homo sapiens
atggtgaaaccccgt

SEQ ID NO: 466792 - DNA, 15 bp, Homo sapiens
tatggtgaaaccccg

SEQ ID NO: 466793 - DNA, 15 bp, Homo sapiens
atatggtgaaacccc

SEQ ID NO: 466794 - DNA, 15 bp, Homo sapiens
aatatggtgaaaccc

SEQ ID NO: 466795 - DNA, 15 bp, Homo sapiens
caatatggtgaaacc

SEQ ID NO: 466796 - DNA, 15 bp, Homo sapiens
ccaatatggtgaaac

SEQ ID NO: 466797 - DNA, 15 bp, Homo sapiens
gccaatatggtgaaa

SEQ ID NO: 466798 - DNA, 15 bp, Homo sapiens
ggccaatatggtgaa

SEQ ID NO: 466799 - DNA, 15 bp, Homo sapiens
tggccaatatggtga

SEQ ID NO: 466800 - DNA, 15 bp, Homo sapiens
ctggccaatatggtg

SEQ ID NO: 466801 - DNA, 15 bp, Homo sapiens
tcctggccaatatgg

SEQ ID NO: 466802 - DNA, 15 bp, Homo sapiens
atcctggccaatatg

SEQ ID NO: 466803 - DNA, 15 bp, Homo sapiens
catcctggccaatat

SEQ ID NO: 466804 - DNA, 15 bp, Homo sapiens
ccatcctggccaata

SEQ ID NO: 466805 - DNA, 15 bp, Homo sapiens
accatcctggccaat

SEQ ID NO: 466806 - DNA, 15 bp, Homo sapiens
gaccatcctggccaa

SEQ ID NO: 466807 - DNA, 15 bp, Homo sapiens
agaccatcctggcca

SEQ ID NO: 466808 - DNA, 15 bp, Homo sapiens
gagaccatcctggcc

SEQ ID NO: 466809 - DNA, 15 bp, Homo sapiens
tgaggtcaggagatc

SEQ ID NO: 466810 - DNA, 15 bp, Homo sapiens
atgaggtcaggagat

SEQ ID NO: 466811 - DNA, 15 bp, Homo sapiens
catgaggtcaggaga

SEQ ID NO: 466812 - DNA, 15 bp, Homo sapiens
cggatcatgaggtca

SEQ ID NO: 466813 - DNA, 15 bp, Homo sapiens
gcggatcatgaggtc

SEQ ID NO: 466814 - DNA, 15 bp, Homo sapiens
ggcggatcatgaggt

SEQ ID NO: 466815 - DNA, 15 bp, Homo sapiens
aggcggatcatgagg

SEQ ID NO: 466816 - DNA, 15 bp, Homo sapiens
caggcggatcatgag

SEQ ID NO: 466817 - DNA, 15 bp, Homo sapiens
gcaggcggatcatga

SEQ ID NO: 466818 - DNA, 15 bp, Homo sapiens
ggcaggcggatcatg

SEQ ID NO: 466819 - DNA, 15 bp, Homo sapiens
aggcaggcggatcat

SEQ ID NO: 466820 - DNA, 15 bp, Homo sapiens
aactttgggaggcca

SEQ ID NO: 466821 - DNA, 15 bp, Homo sapiens
gcctgtaatcccaga

SEQ ID NO: 466822 - DNA, 15 bp, Homo sapiens
tgcagtggctcacgc

SEQ ID NO: 466823 - DNA, 15 bp, Homo sapiens
gtgcagtggctcacg

SEQ ID NO: 466824 - DNA, 15 bp, Homo sapiens
gggtgcagtggctca

SEQ ID NO: 466825 - DNA, 15 bp, Homo sapiens
tgggtgcagtggctc

SEQ ID NO: 466826 - DNA, 15 bp, Homo sapiens
ctgggtgcagtggct

SEQ ID NO: 466827 - DNA, 15 bp, Homo sapiens
gctgggtgcagtggc

SEQ ID NO: 466828 - DNA, 15 bp, Homo sapiens
ggctgggtgcagtgg

SEQ ID NO: 466829 - DNA, 15 bp, Homo sapiens
aggctgggtgcagtg

SEQ ID NO: 466830 - DNA, 15 bp, Homo sapiens
gaggctgggtgcagt

SEQ ID NO: 466831 - DNA, 15 bp, Homo sapiens
agaggctgggtgcag

SEQ ID NO: 466832 - DNA, 15 bp, Homo sapiens
aagaggctgggtgca

SEQ ID NO: 466833 - DNA, 15 bp, Homo sapiens
aaagaggctgggtgc

SEQ ID NO: 466834 - DNA, 15 bp, Homo sapiens
aaaagaggctgggtg

SEQ ID NO: 466835 - DNA, 15 bp, Homo sapiens
taaaagaggctgggt

SEQ ID NO: 466836 - DNA, 15 bp, Homo sapiens
ttaaaagaggctggg

SEQ ID NO: 466837 - DNA, 15 bp, Homo sapiens
gttaaaagaggctgg

SEQ ID NO: 466838 - DNA, 15 bp, Homo sapiens
agttaaaagaggctg

SEQ ID NO: 466839 - DNA, 15 bp, Homo sapiens
aagttaaaagaggct

SEQ ID NO: 466840 - DNA, 15 bp, Homo sapiens
aaagttaaaagaggc

SEQ ID NO: 466841 - DNA, 15 bp, Homo sapiens
aaaagttaaaagagg

SEQ ID NO: 466842 - DNA, 15 bp, Homo sapiens
aaaaagttaaaagag

SEQ ID NO: 466843 - DNA, 15 bp, Homo sapiens
taaaaagttaaaaga

SEQ ID NO: 466844 - DNA, 15 bp, Homo sapiens
ttaaaaagttaaaag

SEQ ID NO: 466845 - DNA, 15 bp, Homo sapiens
cttaaaaagttaaaa

SEQ ID NO: 466846 - DNA, 15 bp, Homo sapiens
acttaaaaagttaaa

SEQ ID NO: 466847 - DNA, 15 bp, Homo sapiens
tacttaaaaagttaa

SEQ ID NO: 466848 - DNA, 15 bp, Homo sapiens
atacttaaaaagtta

SEQ ID NO: 466849 - DNA, 15 bp, Homo sapiens
catacttaaaaagtt

SEQ ID NO: 466850 - DNA, 15 bp, Homo sapiens
ccatacttaaaaagt

SEQ ID NO: 466851 - DNA, 15 bp, Homo sapiens
gccatacttaaaaag

SEQ ID NO: 466852 - DNA, 15 bp, Homo sapiens
agccatacttaaaaa

SEQ ID NO: 466853 - DNA, 15 bp, Homo sapiens
tagccatacttaaaa

SEQ ID NO: 466854 - DNA, 15 bp, Homo sapiens
gtagccatacttaaa

SEQ ID NO: 466855 - DNA, 15 bp, Homo sapiens
ggtagccatacttaa

SEQ ID NO: 466856 - DNA, 15 bp, Homo sapiens
tggtagccatactta

SEQ ID NO: 466857 - DNA, 15 bp, Homo sapiens
ctggtagccatactt

SEQ ID NO: 466858 - DNA, 15 bp, Homo sapiens
tctggtagccatact

SEQ ID NO: 466859 - DNA, 15 bp, Homo sapiens
ttctggtagccatac

SEQ ID NO: 466860 - DNA, 15 bp, Homo sapiens
tttctggtagccata

SEQ ID NO: 466861 - DNA, 15 bp, Homo sapiens
ttttctggtagccat

SEQ ID NO: 466862 - DNA, 15 bp, Homo sapiens
attttctggtagcca

SEQ ID NO: 466863 - DNA, 15 bp, Homo sapiens
aattttctggtagcc

SEQ ID NO: 466864 - DNA, 15 bp, Homo sapiens
aaattttctggtagc

SEQ ID NO: 466865 - DNA, 15 bp, Homo sapiens
taaattttctggtag

SEQ ID NO: 466866 - DNA, 15 bp, Homo sapiens
ttaaattttctggta

SEQ ID NO: 466867 - DNA, 15 bp, Homo sapiens
tttaaattttctggt

SEQ ID NO: 466868 - DNA, 15 bp, Homo sapiens
ttttaaattttctgg

SEQ ID NO: 466869 - DNA, 15 bp, Homo sapiens
attttaaattttctg

SEQ ID NO: 466870 - DNA, 15 bp, Homo sapiens
cattttaaattttct

SEQ ID NO: 466871 - DNA, 15 bp, Homo sapiens
gcattttaaattttc

SEQ ID NO: 466872 - DNA, 15 bp, Homo sapiens
tgcattttaaatttt

SEQ ID NO: 466873 - DNA, 15 bp, Homo sapiens
atgcattttaaattt

SEQ ID NO: 466874 - DNA, 15 bp, Homo sapiens
catgcattttaaatt

SEQ ID NO: 466875 - DNA, 15 bp, Homo sapiens
cacatgcattttaaa

SEQ ID NO: 466876 - DNA, 15 bp, Homo sapiens
acacatgcattttaa

SEQ ID NO: 466877 - DNA, 15 bp, Homo sapiens
cacacatgcatttta

SEQ ID NO: 466878 - DNA, 15 bp, Homo sapiens
ccacacatgcatttt

SEQ ID NO: 466879 - DNA, 15 bp, Homo sapiens
gccacacatgcattt

SEQ ID NO: 466880 - DNA, 15 bp, Homo sapiens
ggccacacatgcatt

SEQ ID NO: 466881 - DNA, 15 bp, Homo sapiens
aggccacacatgcat

SEQ ID NO: 466882 - DNA, 15 bp, Homo sapiens
caggccacacatgca

SEQ ID NO: 466883 - DNA, 15 bp, Homo sapiens
acaggccacacatgc

SEQ ID NO: 466884 - DNA, 15 bp, Homo sapiens
tacaggccacacatg

SEQ ID NO: 466885 - DNA, 15 bp, Homo sapiens
atacaggccacacat

SEQ ID NO: 466886 - DNA, 15 bp, Homo sapiens
aatacaggccacaca

SEQ ID NO: 466887 - DNA, 15 bp, Homo sapiens
gaatacaggccacac

SEQ ID NO: 466888 - DNA, 15 bp, Homo sapiens
agaatacaggccaca

SEQ ID NO: 466889 - DNA, 15 bp, Homo sapiens
tagaatacaggccac

SEQ ID NO: 466890 - DNA, 15 bp, Homo sapiens
atagaatacaggcca

SEQ ID NO: 466891 - DNA, 15 bp, Homo sapiens
aatagaatacaggcc

SEQ ID NO: 466892 - DNA, 15 bp, Homo sapiens
aaatagaatacaggc

SEQ ID NO: 466893 - DNA, 15 bp, Homo sapiens
gaaatagaatacagg

SEQ ID NO: 466894 - DNA, 15 bp, Homo sapiens
agaaatagaatacag

SEQ ID NO: 466895 - DNA, 15 bp, Homo sapiens
cagaaatagaataca

SEQ ID NO: 466896 - DNA, 15 bp, Homo sapiens
acagaaatagaatac

SEQ ID NO: 466897 - DNA, 15 bp, Homo sapiens
aacagaaatagaata

SEQ ID NO: 466898 - DNA, 15 bp, Homo sapiens
caacagaaatagaat

SEQ ID NO: 466899 - DNA, 15 bp, Homo sapiens
ccaacagaaatagaa

SEQ ID NO: 466900 - DNA, 15 bp, Homo sapiens
tccaacagaaataga

SEQ ID NO: 466901 - DNA, 15 bp, Homo sapiens
atccaacagaaatag

SEQ ID NO: 466902 - DNA, 15 bp, Homo sapiens
catccaacagaaata

SEQ ID NO: 466903 - DNA, 15 bp, Homo sapiens
gcatccaacagaaat

SEQ ID NO: 466904 - DNA, 15 bp, Homo sapiens
agcatccaacagaaa

SEQ ID NO: 466905 - DNA, 15 bp, Homo sapiens
cagcatccaacagaa

SEQ ID NO: 466906 - DNA, 15 bp, Homo sapiens
gcagcatccaacaga

SEQ ID NO: 466907 - DNA, 15 bp, Homo sapiens
agcagcatccaacag

SEQ ID NO: 466908 - DNA, 15 bp, Homo sapiens
cagcagcatccaaca

SEQ ID NO: 466909 - DNA, 15 bp, Homo sapiens
gcagcagcatccaac

SEQ ID NO: 466910 - DNA, 15 bp, Homo sapiens
ggcagcagcatccaa

SEQ ID NO: 466911 - DNA, 15 bp, Homo sapiens
aggcagcagcatcca

SEQ ID NO: 466912 - DNA, 15 bp, Homo sapiens
aaggcagcagcatcc

SEQ ID NO: 466913 - DNA, 15 bp, Homo sapiens
taaggcagcagcatc

SEQ ID NO: 466914 - DNA, 15 bp, Homo sapiens
ctaaggcagcagcat

SEQ ID NO: 466915 - DNA, 15 bp, Homo sapiens
tctaaggcagcagca

SEQ ID NO: 466916 - DNA, 15 bp, Homo sapiens
atctaaggcagcagc

SEQ ID NO: 466917 - DNA, 15 bp, Homo sapiens
aatctaaggcagcag

SEQ ID NO: 466918 - DNA, 15 bp, Homo sapiens
taatctaaggcagca

SEQ ID NO: 466919 - DNA, 15 bp, Homo sapiens
ataatctaaggcagc

SEQ ID NO: 466920 - DNA, 15 bp, Homo sapiens
aataatctaaggcag

SEQ ID NO: 466921 - DNA, 15 bp, Homo sapiens
taataatctaaggca

SEQ ID NO: 466922 - DNA, 15 bp, Homo sapiens
ttaataatctaaggc

SEQ ID NO: 466923 - DNA, 15 bp, Homo sapiens
attaataatctaagg

SEQ ID NO: 466924 - DNA, 15 bp, Homo sapiens
aattaataatctaag

SEQ ID NO: 466925 - DNA, 15 bp, Homo sapiens
taattaataatctaa

SEQ ID NO: 466926 - DNA, 15 bp, Homo sapiens
ataattaataatcta

SEQ ID NO: 466927 - DNA, 15 bp, Homo sapiens
aataattaataatct

SEQ ID NO: 466928 - DNA, 15 bp, Homo sapiens
gaataattaataatc

SEQ ID NO: 466929 - DNA, 15 bp, Homo sapiens
tgaataattaataat

SEQ ID NO: 466930 - DNA, 15 bp, Homo sapiens
ttgaataattaataa

SEQ ID NO: 466931 - DNA, 15 bp, Homo sapiens
attgaataattaata

SEQ ID NO: 466932 - DNA, 15 bp, Homo sapiens
cattgaataattaat

SEQ ID NO: 466933 - DNA, 15 bp, Homo sapiens
acattgaataattaa

SEQ ID NO: 466934 - DNA, 15 bp, Homo sapiens
tacattgaataatta

SEQ ID NO: 466935 - DNA, 15 bp, Homo sapiens
ttacattgaataatt

SEQ ID NO: 466936 - DNA, 15 bp, Homo sapiens
tttacattgaataat

SEQ ID NO: 466937 - DNA, 15 bp, Homo sapiens
ctttacattgaataa

SEQ ID NO: 466938 - DNA, 15 bp, Homo sapiens
tctttacattgaata

SEQ ID NO: 466939 - DNA, 15 bp, Homo sapiens
gtctttacattgaat

SEQ ID NO: 466940 - DNA, 15 bp, Homo sapiens
agtctttacattgaa

SEQ ID NO: 466941 - DNA, 15 bp, Homo sapiens
cagtctttacattga

SEQ ID NO: 466942 - DNA, 15 bp, Homo sapiens
gcagtctttacattg

SEQ ID NO: 466943 - DNA, 15 bp, Homo sapiens
agcagtctttacatt

SEQ ID NO: 466944 - DNA, 15 bp, Homo sapiens
cagcagtctttacat

SEQ ID NO: 466945 - DNA, 15 bp, Homo sapiens
ccagcagtctttaca

SEQ ID NO: 466946 - DNA, 15 bp, Homo sapiens
cccagcagtctttac

SEQ ID NO: 466947 - DNA, 15 bp, Homo sapiens
tcccagcagtcttta

SEQ ID NO: 466948 - DNA, 15 bp, Homo sapiens
ctcccagcagtcttt

SEQ ID NO: 466949 - DNA, 15 bp, Homo sapiens
cctcccagcagtctt

SEQ ID NO: 466950 - DNA, 15 bp, Homo sapiens
acctcccagcagtct

SEQ ID NO: 466951 - DNA, 15 bp, Homo sapiens
tacctcccagcagtc

SEQ ID NO: 466952 - DNA, 15 bp, Homo sapiens
gtacctcccagcagt

SEQ ID NO: 466953 - DNA, 15 bp, Homo sapiens
agtacctcccagcag

SEQ ID NO: 466954 - DNA, 15 bp, Homo sapiens
tagtacctcccagca

SEQ ID NO: 466955 - DNA, 15 bp, Homo sapiens
gtagtacctcccagc

SEQ ID NO: 466956 - DNA, 15 bp, Homo sapiens
ggtagtacctcccag

SEQ ID NO: 466957 - DNA, 15 bp, Homo sapiens
aggtagtacctccca

SEQ ID NO: 466958 - DNA, 15 bp, Homo sapiens
caggtagtacctccc

SEQ ID NO: 466959 - DNA, 15 bp, Homo sapiens
gcaggtagtacctcc

SEQ ID NO: 466960 - DNA, 15 bp, Homo sapiens
tgcaggtagtacctc

SEQ ID NO: 466961 - DNA, 15 bp, Homo sapiens
gtgcaggtagtacct

SEQ ID NO: 466962 - DNA, 15 bp, Homo sapiens
agtgcaggtagtacc

SEQ ID NO: 466963 - DNA, 15 bp, Homo sapiens
aagtgcaggtagtac

SEQ ID NO: 466964 - DNA, 15 bp, Homo sapiens
gaagtgcaggtagta

SEQ ID NO: 466965 - DNA, 15 bp, Homo sapiens
ggaagtgcaggtagt

SEQ ID NO: 466966 - DNA, 15 bp, Homo sapiens
gggaagtgcaggtag

SEQ ID NO: 466967 - DNA, 15 bp, Homo sapiens
agggaagtgcaggta

SEQ ID NO: 466968 - DNA, 15 bp, Homo sapiens
cagggaagtgcaggt

SEQ ID NO: 466969 - DNA, 15 bp, Homo sapiens
tcagggaagtgcagg

SEQ ID NO: 466970 - DNA, 15 bp, Homo sapiens
ttcagggaagtgcag

SEQ ID NO: 466971 - DNA, 15 bp, Homo sapiens
attcagggaagtgca

SEQ ID NO: 466972 - DNA, 15 bp, Homo sapiens
tattcagggaagtgc

SEQ ID NO: 466973 - DNA, 15 bp, Homo sapiens
atattcagggaagtg

SEQ ID NO: 466974 - DNA, 15 bp, Homo sapiens
tatattcagggaagt

SEQ ID NO: 466975 - DNA, 15 bp, Homo sapiens
atatattcagggaag

SEQ ID NO: 466976 - DNA, 15 bp, Homo sapiens
catatattcagggaa

SEQ ID NO: 466977 - DNA, 15 bp, Homo sapiens
gcatatattcaggga

SEQ ID NO: 466978 - DNA, 15 bp, Homo sapiens
agcatatattcaggg

SEQ ID NO: 466979 - DNA, 15 bp, Homo sapiens
aagcatatattcagg

SEQ ID NO: 466980 - DNA, 15 bp, Homo sapiens
caagcatatattcag

SEQ ID NO: 466981 - DNA, 15 bp, Homo sapiens
tcaagcatatattca

SEQ ID NO: 466982 - DNA, 15 bp, Homo sapiens
ctcaagcatatattc

SEQ ID NO: 466983 - DNA, 15 bp, Homo sapiens
tctcaagcatatatt

SEQ ID NO: 466984 - DNA, 15 bp, Homo sapiens
ctctcaagcatatat

SEQ ID NO: 466985 - DNA, 15 bp, Homo sapiens
gctctcaagcatata

SEQ ID NO: 466986 - DNA, 15 bp, Homo sapiens
agctctcaagcatat

SEQ ID NO: 466987 - DNA, 15 bp, Homo sapiens
gagctctcaagcata

SEQ ID NO: 466988 - DNA, 15 bp, Homo sapiens
ggagctctcaagcat

SEQ ID NO: 466989 - DNA, 15 bp, Homo sapiens
tggagctctcaagca

SEQ ID NO: 466990 - DNA, 15 bp, Homo sapiens
gtggagctctcaagc

SEQ ID NO: 466991 - DNA, 15 bp, Homo sapiens
ggtggagctctcaag

SEQ ID NO: 466992 - DNA, 15 bp, Homo sapiens
tggtggagctctcaa

SEQ ID NO: 466993 - DNA, 15 bp, Homo sapiens
ctggtggagctctca

SEQ ID NO: 466994 - DNA, 15 bp, Homo sapiens
gctggtggagctctc

SEQ ID NO: 466995 - DNA, 15 bp, Homo sapiens
ggctggtggagctct

SEQ ID NO: 466996 - DNA, 15 bp, Homo sapiens
cggctggtggagctc

SEQ ID NO: 466997 - DNA, 15 bp, Homo sapiens
acggctggtggagct

SEQ ID NO: 466998 - DNA, 15 bp, Homo sapiens
gacggctggtggagc

SEQ ID NO: 466999 - DNA, 15 bp, Homo sapiens
agacggctggtggag

SEQ ID NO: 467000 - DNA, 15 bp, Homo sapiens
aagacggctggtgga

SEQ ID NO: 467001 - DNA, 15 bp, Homo sapiens
gaagacggctggtgg

SEQ ID NO: 467002 - DNA, 15 bp, Homo sapiens
tgaagacggctggtg

SEQ ID NO: 467003 - DNA, 15 bp, Homo sapiens
gtgaagacggctggt

SEQ ID NO: 467004 - DNA, 15 bp, Homo sapiens
tgtgaagacggctgg

SEQ ID NO: 467005 - DNA, 15 bp, Homo sapiens
ctgtgaagacggctg

SEQ ID NO: 467006 - DNA, 15 bp, Homo sapiens
actgtgaagacggct

SEQ ID NO: 467007 - DNA, 15 bp, Homo sapiens
tactgtgaagacggc

SEQ ID NO: 467008 - DNA, 15 bp, Homo sapiens
ctactgtgaagacgg

SEQ ID NO: 467009 - DNA, 15 bp, Homo sapiens
gctactgtgaagacg

SEQ ID NO: 467010 - DNA, 15 bp, Homo sapiens
tgctactgtgaagac

SEQ ID NO: 467011 - DNA, 15 bp, Homo sapiens
ttgctactgtgaaga

SEQ ID NO: 467012 - DNA, 15 bp, Homo sapiens
cttgctactgtgaag

SEQ ID NO: 467013 - DNA, 15 bp, Homo sapiens
tcttgctactgtgaa

SEQ ID NO: 467014 - DNA, 15 bp, Homo sapiens
ctcttgctactgtga

SEQ ID NO: 467015 - DNA, 15 bp, Homo sapiens
cctcttgctactgtg

SEQ ID NO: 467016 - DNA, 15 bp, Homo sapiens
ccctcttgctactgt

SEQ ID NO: 467017 - DNA, 15 bp, Homo sapiens
cccctcttgctactg

SEQ ID NO: 467018 - DNA, 15 bp, Homo sapiens
acccctcttgctact

SEQ ID NO: 467019 - DNA, 15 bp, Homo sapiens
tacccctcttgctac

SEQ ID NO: 467020 - DNA, 15 bp, Homo sapiens
atacccctcttgcta

SEQ ID NO: 467021 - DNA, 15 bp, Homo sapiens
aatacccctcttgct

SEQ ID NO: 467022 - DNA, 15 bp, Homo sapiens
gaatacccctcttgc

SEQ ID NO: 467023 - DNA, 15 bp, Homo sapiens
agaatacccctcttg

SEQ ID NO: 467024 - DNA, 15 bp, Homo sapiens
cagaatacccctctt

SEQ ID NO: 467025 - DNA, 15 bp, Homo sapiens
tcagaatacccctct

SEQ ID NO: 467026 - DNA, 15 bp, Homo sapiens
ctcagaatacccctc

SEQ ID NO: 467027 - DNA, 15 bp, Homo sapiens
actcagaatacccct

SEQ ID NO: 467028 - DNA, 15 bp, Homo sapiens
gactcagaatacccc

SEQ ID NO: 467029 - DNA, 15 bp, Homo sapiens
agactcagaataccc

SEQ ID NO: 467030 - DNA, 15 bp, Homo sapiens
cagactcagaatacc

SEQ ID NO: 467031 - DNA, 15 bp, Homo sapiens
acagactcagaatac

SEQ ID NO: 467032 - DNA, 15 bp, Homo sapiens
gacagactcagaata

SEQ ID NO: 467033 - DNA, 15 bp, Homo sapiens
ggacagactcagaat

SEQ ID NO: 467034 - DNA, 15 bp, Homo sapiens
gggacagactcagaa

SEQ ID NO: 467035 - DNA, 15 bp, Homo sapiens
ggggacagactcaga

SEQ ID NO: 467036 - DNA, 15 bp, Homo sapiens
gggggacagactcag

SEQ ID NO: 467037 - DNA, 15 bp, Homo sapiens
tgggggacagactca

SEQ ID NO: 467038 - DNA, 15 bp, Homo sapiens
ttgggggacagactc

SEQ ID NO: 467039 - DNA, 15 bp, Homo sapiens
tttgggggacagact

SEQ ID NO: 467040 - DNA, 15 bp, Homo sapiens
ctttgggggacagac

SEQ ID NO: 467041 - DNA, 15 bp, Homo sapiens
tctttgggggacaga

SEQ ID NO: 467042 - DNA, 15 bp, Homo sapiens
ctctttgggggacag

SEQ ID NO: 467043 - DNA, 15 bp, Homo sapiens
cctctttgggggaca

SEQ ID NO: 467044 - DNA, 15 bp, Homo sapiens
ccctctttgggggac

SEQ ID NO: 467045 - DNA, 15 bp, Homo sapiens
tccctctttggggga

SEQ ID NO: 467046 - DNA, 15 bp, Homo sapiens
ctccctctttggggg

SEQ ID NO: 467047 - DNA, 15 bp, Homo sapiens
cctccctctttgggg

SEQ ID NO: 467048 - DNA, 15 bp, Homo sapiens
ccctccctctttggg

SEQ ID NO: 467049 - DNA, 15 bp, Homo sapiens
tccctccctctttgg

SEQ ID NO: 467050 - DNA, 15 bp, Homo sapiens
ctccctccctctttg

SEQ ID NO: 467051 - DNA, 15 bp, Homo sapiens
tctccctccctcttt

SEQ ID NO: 467052 - DNA, 15 bp, Homo sapiens
ttctccctccctctt

SEQ ID NO: 467053 - DNA, 15 bp, Homo sapiens
cttctccctccctct

SEQ ID NO: 467054 - DNA, 15 bp, Homo sapiens
acttctccctccctc

SEQ ID NO: 467055 - DNA, 15 bp, Homo sapiens
cacttctccctccct

SEQ ID NO: 467056 - DNA, 15 bp, Homo sapiens
gcacttctccctccc

SEQ ID NO: 467057 - DNA, 15 bp, Homo sapiens
tgcacttctccctcc

SEQ ID NO: 467058 - DNA, 15 bp, Homo sapiens
ctgcacttctccctc

SEQ ID NO: 467059 - DNA, 15 bp, Homo sapiens
gctgcacttctccct

SEQ ID NO: 467060 - DNA, 15 bp, Homo sapiens
ggctgcacttctccc

SEQ ID NO: 467061 - DNA, 15 bp, Homo sapiens
gggctgcacttctcc

SEQ ID NO: 467062 - DNA, 15 bp, Homo sapiens
agggctgcacttctc

SEQ ID NO: 467063 - DNA, 15 bp, Homo sapiens
gagggctgcacttct

SEQ ID NO: 467064 - DNA, 15 bp, Homo sapiens
agagggctgcacttc

SEQ ID NO: 467065 - DNA, 15 bp, Homo sapiens
gagagggctgcactt

SEQ ID NO: 467066 - DNA, 15 bp, Homo sapiens
tgagagggctgcact

SEQ ID NO: 467067 - DNA, 15 bp, Homo sapiens
ctgagagggctgcac

SEQ ID NO: 467068 - DNA, 15 bp, Homo sapiens
cctgagagggctgca

SEQ ID NO: 467069 - DNA, 15 bp, Homo sapiens
acctgagagggctgc

SEQ ID NO: 467070 - DNA, 15 bp, Homo sapiens
aacctgagagggctg

SEQ ID NO: 467071 - DNA, 15 bp, Homo sapiens
gaacctgagagggct

SEQ ID NO: 467072 - DNA, 15 bp, Homo sapiens
agaacctgagagggc

SEQ ID NO: 467073 - DNA, 15 bp, Homo sapiens
cagaacctgagaggg

SEQ ID NO: 467074 - DNA, 15 bp, Homo sapiens
acagaacctgagagg

SEQ ID NO: 467075 - DNA, 15 bp, Homo sapiens
gacagaacctgagag

SEQ ID NO: 467076 - DNA, 15 bp, Homo sapiens
tgacagaacctgaga

SEQ ID NO: 467077 - DNA, 15 bp, Homo sapiens
ctgacagaacctgag

SEQ ID NO: 467078 - DNA, 15 bp, Homo sapiens
tctgacagaacctga

SEQ ID NO: 467079 - DNA, 15 bp, Homo sapiens
ttctgacagaacctg

SEQ ID NO: 467080 - DNA, 15 bp, Homo sapiens
tttctgacagaacct

SEQ ID NO: 467081 - DNA, 15 bp, Homo sapiens
ttttctgacagaacc

SEQ ID NO: 467082 - DNA, 15 bp, Homo sapiens
gttttctgacagaac

SEQ ID NO: 467083 - DNA, 15 bp, Homo sapiens
ggttttctgacagaa

SEQ ID NO: 467084 - DNA, 15 bp, Homo sapiens
aggttttctgacaga

SEQ ID NO: 467085 - DNA, 15 bp, Homo sapiens
caggttttctgacag

SEQ ID NO: 467086 - DNA, 15 bp, Homo sapiens
tcaggttttctgaca

SEQ ID NO: 467087 - DNA, 15 bp, Homo sapiens
atcaggttttctgac

SEQ ID NO: 467088 - DNA, 15 bp, Homo sapiens
gatcaggttttctga

SEQ ID NO: 467089 - DNA, 15 bp, Homo sapiens
ggatcaggttttctg

SEQ ID NO: 467090 - DNA, 15 bp, Homo sapiens
gggatcaggttttct

SEQ ID NO: 467091 - DNA, 15 bp, Homo sapiens
tgggatcaggttttc

SEQ ID NO: 467092 - DNA, 15 bp, Homo sapiens
ctgggatcaggtttt

SEQ ID NO: 467093 - DNA, 15 bp, Homo sapiens
cctgggatcaggttt

SEQ ID NO: 467094 - DNA, 15 bp, Homo sapiens
gcctgggatcaggtt

SEQ ID NO: 467095 - DNA, 15 bp, Homo sapiens
ggcctgggatcaggt

SEQ ID NO: 467096 - DNA, 15 bp, Homo sapiens
tggcctgggatcagg

SEQ ID NO: 467097 - DNA, 15 bp, Homo sapiens
ctggcctgggatcag

SEQ ID NO: 467098 - DNA, 15 bp, Homo sapiens
cctggcctgggatca

SEQ ID NO: 467099 - DNA, 15 bp, Homo sapiens
gcctggcctgggatc

SEQ ID NO: 467100 - DNA, 15 bp, Homo sapiens
cgcctggcctgggat

SEQ ID NO: 467101 - DNA, 15 bp, Homo sapiens
acgcctggcctggga

SEQ ID NO: 467102 - DNA, 15 bp, Homo sapiens
cacgcctggcctggg

SEQ ID NO: 467103 - DNA, 15 bp, Homo sapiens
ccacgcctggcctgg

SEQ ID NO: 467104 - DNA, 15 bp, Homo sapiens
accacgcctggcctg

SEQ ID NO: 467105 - DNA, 15 bp, Homo sapiens
taccacgcctggcct

SEQ ID NO: 467106 - DNA, 15 bp, Homo sapiens
ctaccacgcctggcc

SEQ ID NO: 467107 - DNA, 15 bp, Homo sapiens
gctaccacgcctggc

SEQ ID NO: 467108 - DNA, 15 bp, Homo sapiens
agctaccacgcctgg

SEQ ID NO: 467109 - DNA, 15 bp, Homo sapiens
aagctaccacgcctg

SEQ ID NO: 467110 - DNA, 15 bp, Homo sapiens
taagctaccacgcct

SEQ ID NO: 467111 - DNA, 15 bp, Homo sapiens
gtaagctaccacgcc

SEQ ID NO: 467112 - DNA, 15 bp, Homo sapiens
cgtaagctaccacgc

SEQ ID NO: 467113 - DNA, 15 bp, Homo sapiens
gcgtaagctaccacg

SEQ ID NO: 467114 - DNA, 15 bp, Homo sapiens
ggcgtaagctaccac

SEQ ID NO: 467115 - DNA, 15 bp, Homo sapiens
aggcgtaagctacca

SEQ ID NO: 467116 - DNA, 15 bp, Homo sapiens
caggcgtaagctacc

SEQ ID NO: 467117 - DNA, 15 bp, Homo sapiens
acaggcgtaagctac

SEQ ID NO: 467118 - DNA, 15 bp, Homo sapiens
tacaggcgtaagcta

SEQ ID NO: 467119 - DNA, 15 bp, Homo sapiens
ttacaggcgtaagct

SEQ ID NO: 467120 - DNA, 15 bp, Homo sapiens
attacaggcgtaagc

SEQ ID NO: 467121 - DNA, 15 bp, Homo sapiens
gattacaggcgtaag

SEQ ID NO: 467122 - DNA, 15 bp, Homo sapiens
acctcccaaagtgct

SEQ ID NO: 467123 - DNA, 15 bp, Homo sapiens
aacctcccaaagtgc

SEQ ID NO: 467124 - DNA, 15 bp, Homo sapiens
caacctcccaaagtg

SEQ ID NO: 467125 - DNA, 15 bp, Homo sapiens
tcaacctcccaaagt

SEQ ID NO: 467126 - DNA, 15 bp, Homo sapiens
ctcaacctcccaaag

SEQ ID NO: 467127 - DNA, 15 bp, Homo sapiens
cctcaacctcccaaa

SEQ ID NO: 467128 - DNA, 15 bp, Homo sapiens
cctcctgcctcaacc

SEQ ID NO: 467129 - DNA, 15 bp, Homo sapiens
tcctcctgcctcaac

SEQ ID NO: 467130 - DNA, 15 bp, Homo sapiens
atcctcctgcctcaa

SEQ ID NO: 467131 - DNA, 15 bp, Homo sapiens
taagcaatcctcctg

SEQ ID NO: 467132 - DNA, 15 bp, Homo sapiens
ttaagcaatcctcct

SEQ ID NO: 467133 - DNA, 15 bp, Homo sapiens
cttaagcaatcctcc

SEQ ID NO: 467134 - DNA, 15 bp, Homo sapiens
gcttaagcaatcctc

SEQ ID NO: 467135 - DNA, 15 bp, Homo sapiens
ggcttaagcaatcct

SEQ ID NO: 467136 - DNA, 15 bp, Homo sapiens
gggcttaagcaatcc

SEQ ID NO: 467137 - DNA, 15 bp, Homo sapiens
tgggcttaagcaatc

SEQ ID NO: 467138 - DNA, 15 bp, Homo sapiens
ctgggcttaagcaat

SEQ ID NO: 467139 - DNA, 15 bp, Homo sapiens
cctgggcttaagcaa

SEQ ID NO: 467140 - DNA, 15 bp, Homo sapiens
tcctgggcttaagca

SEQ ID NO: 467141 - DNA, 15 bp, Homo sapiens
ctcctgggcttaagc

SEQ ID NO: 467142 - DNA, 15 bp, Homo sapiens
actcctgggcttaag

SEQ ID NO: 467143 - DNA, 15 bp, Homo sapiens
aactcctgggcttaa

SEQ ID NO: 467144 - DNA, 15 bp, Homo sapiens
gaactcctgggctta

SEQ ID NO: 467145 - DNA, 15 bp, Homo sapiens
cgaactcctgggctt

SEQ ID NO: 467146 - DNA, 15 bp, Homo sapiens
cactgtgttgcccag

SEQ ID NO: 467147 - DNA, 15 bp, Homo sapiens
tcactgtgttgccca

SEQ ID NO: 467148 - DNA, 15 bp, Homo sapiens
ttcactgtgttgccc

SEQ ID NO: 467149 - DNA, 15 bp, Homo sapiens
cttcactgtgttgcc

SEQ ID NO: 467150 - DNA, 15 bp, Homo sapiens
tcttcactgtgttgc

SEQ ID NO: 467151 - DNA, 15 bp, Homo sapiens
gtcttcactgtgttg

SEQ ID NO: 467152 - DNA, 15 bp, Homo sapiens
ggtcttcactgtgtt

SEQ ID NO: 467153 - DNA, 15 bp, Homo sapiens
gggtcttcactgtgt

SEQ ID NO: 467154 - DNA, 15 bp, Homo sapiens
agggtcttcactgtg

SEQ ID NO: 467155 - DNA, 15 bp, Homo sapiens
tagggtcttcactgt

SEQ ID NO: 467156 - DNA, 15 bp, Homo sapiens
atagggtcttcactg

SEQ ID NO: 467157 - DNA, 15 bp, Homo sapiens
gatagggtcttcact

SEQ ID NO: 467158 - DNA, 15 bp, Homo sapiens
agatagggtcttcac

SEQ ID NO: 467159 - DNA, 15 bp, Homo sapiens
gagatagggtcttca

SEQ ID NO: 467160 - DNA, 15 bp, Homo sapiens
agagatagggtcttc

SEQ ID NO: 467161 - DNA, 15 bp, Homo sapiens
tagagatagggtctt

SEQ ID NO: 467162 - DNA, 15 bp, Homo sapiens
gtagagatagggtct

SEQ ID NO: 467163 - DNA, 15 bp, Homo sapiens
tgtagagatagggtc

SEQ ID NO: 467164 - DNA, 15 bp, Homo sapiens
ttgtagagatagggt

SEQ ID NO: 467165 - DNA, 15 bp, Homo sapiens
tttgtagagataggg

SEQ ID NO: 467166 - DNA, 15 bp, Homo sapiens
ttttgtagagatagg

SEQ ID NO: 467167 - DNA, 15 bp, Homo sapiens
tttttgtagagatag

SEQ ID NO: 467168 - DNA, 15 bp, Homo sapiens
atttttgtagagata

SEQ ID NO: 467169 - DNA, 15 bp, Homo sapiens
aatttttgtagagat

SEQ ID NO: 467170 - DNA, 15 bp, Homo sapiens
aaatttttgtagaga

SEQ ID NO: 467171 - DNA, 15 bp, Homo sapiens
aaaatttttgtagag

SEQ ID NO: 467172 - DNA, 15 bp, Homo sapiens
aaaaatttttgtaga

SEQ ID NO: 467173 - DNA, 15 bp, Homo sapiens
aaaaaatttttgtag

SEQ ID NO: 467174 - DNA, 15 bp, Homo sapiens
aaaaaaatttttgta

SEQ ID NO: 467175 - DNA, 15 bp, Homo sapiens
taaaaaaatttttgt

SEQ ID NO: 467176 - DNA, 15 bp, Homo sapiens
ttaaaaaaatttttg

SEQ ID NO: 467177 - DNA, 15 bp, Homo sapiens
tttaaaaaaattttt

SEQ ID NO: 467178 - DNA, 15 bp, Homo sapiens
ttttttaaaaaaatt

SEQ ID NO: 467179 - DNA, 15 bp, Homo sapiens
tttttttaaaaaaat

SEQ ID NO: 467180 - DNA, 15 bp, Homo sapiens
atttttttaaaaaaa

SEQ ID NO: 467181 - DNA, 15 bp, Homo sapiens
aatttttttaaaaaa

SEQ ID NO: 467182 - DNA, 15 bp, Homo sapiens
taatttttttaaaaa

SEQ ID NO: 467183 - DNA, 15 bp, Homo sapiens
ctaatttttttaaaa

SEQ ID NO: 467184 - DNA, 15 bp, Homo sapiens
gctaatttttttaaa

SEQ ID NO: 467185 - DNA, 15 bp, Homo sapiens
ggctaatttttttaa

SEQ ID NO: 467186 - DNA, 15 bp, Homo sapiens
tggctaattttttta

SEQ ID NO: 467187 - DNA, 15 bp, Homo sapiens
gcacctggctaattt

SEQ ID NO: 467188 - DNA, 15 bp, Homo sapiens
tgcacctggctaatt

SEQ ID NO: 467189 - DNA, 15 bp, Homo sapiens
ctgcacctggctaat

SEQ ID NO: 467190 - DNA, 15 bp, Homo sapiens
gctgcacctggctaa

SEQ ID NO: 467191 - DNA, 15 bp, Homo sapiens
tgctgcacctggcta

SEQ ID NO: 467192 - DNA, 15 bp, Homo sapiens
ttgctgcacctggct

SEQ ID NO: 467193 - DNA, 15 bp, Homo sapiens
attgctgcacctggc

SEQ ID NO: 467194 - DNA, 15 bp, Homo sapiens
cattgctgcacctgg

SEQ ID NO: 467195 - DNA, 15 bp, Homo sapiens
gcattgctgcacctg

SEQ ID NO: 467196 - DNA, 15 bp, Homo sapiens
agcattgctgcacct

SEQ ID NO: 467197 - DNA, 15 bp, Homo sapiens
cagcattgctgcacc

SEQ ID NO: 467198 - DNA, 15 bp, Homo sapiens
gcagcattgctgcac

SEQ ID NO: 467199 - DNA, 15 bp, Homo sapiens
ggcagcattgctgca

SEQ ID NO: 467200 - DNA, 15 bp, Homo sapiens
aggcagcattgctgc

SEQ ID NO: 467201 - DNA, 15 bp, Homo sapiens
caggcagcattgctg

SEQ ID NO: 467202 - DNA, 15 bp, Homo sapiens
acaggcagcattgct

SEQ ID NO: 467203 - DNA, 15 bp, Homo sapiens
tacaggcagcattgc

SEQ ID NO: 467204 - DNA, 15 bp, Homo sapiens
gtacaggcagcattg

SEQ ID NO: 467205 - DNA, 15 bp, Homo sapiens
agtacaggcagcatt

SEQ ID NO: 467206 - DNA, 15 bp, Homo sapiens
gagtacaggcagcat

SEQ ID NO: 467207 - DNA, 15 bp, Homo sapiens
ggagtacaggcagca

SEQ ID NO: 467208 - DNA, 15 bp, Homo sapiens
gggagtacaggcagc

SEQ ID NO: 467209 - DNA, 15 bp, Homo sapiens
tgggagtacaggcag

SEQ ID NO: 467210 - DNA, 15 bp, Homo sapiens
ctgggagtacaggca

SEQ ID NO: 467211 - DNA, 15 bp, Homo sapiens
gctgggagtacaggc

SEQ ID NO: 467212 - DNA, 15 bp, Homo sapiens
agctgggagtacagg

SEQ ID NO: 467213 - DNA, 15 bp, Homo sapiens
cagctgggagtacag

SEQ ID NO: 467214 - DNA, 15 bp, Homo sapiens
gcagctgggagtaca

SEQ ID NO: 467215 - DNA, 15 bp, Homo sapiens
agcagctgggagtac

SEQ ID NO: 467216 - DNA, 15 bp, Homo sapiens
aagcagctgggagta

SEQ ID NO: 467217 - DNA, 15 bp, Homo sapiens
caagcagctgggagt

SEQ ID NO: 467218 - DNA, 15 bp, Homo sapiens
ccaagcagctgggag

SEQ ID NO: 467219 - DNA, 15 bp, Homo sapiens
cccaagcagctggga

SEQ ID NO: 467220 - DNA, 15 bp, Homo sapiens
tcccaagcagctggg

SEQ ID NO: 467221 - DNA, 15 bp, Homo sapiens
ctcccaagcagctgg

SEQ ID NO: 467222 - DNA, 15 bp, Homo sapiens
cctcccaagcagctg

SEQ ID NO: 467223 - DNA, 15 bp, Homo sapiens
gcctcccaagcagct

SEQ ID NO: 467224 - DNA, 15 bp, Homo sapiens
agcctcccaagcagc

SEQ ID NO: 467225 - DNA, 15 bp, Homo sapiens
cagcctcccaagcag

SEQ ID NO: 467226 - DNA, 15 bp, Homo sapiens
tcagcctcccaagca

SEQ ID NO: 467227 - DNA, 15 bp, Homo sapiens
ctcagcctcccaagc

SEQ ID NO: 467228 - DNA, 15 bp, Homo sapiens
ctacctcagcctccc

SEQ ID NO: 467229 - DNA, 15 bp, Homo sapiens
ggcaatcctcctacc

SEQ ID NO: 467230 - DNA, 15 bp, Homo sapiens
aggcaatcctcctac

SEQ ID NO: 467231 - DNA, 15 bp, Homo sapiens
caggcaatcctccta

SEQ ID NO: 467232 - DNA, 15 bp, Homo sapiens
tcaggcaatcctcct

SEQ ID NO: 467233 - DNA, 15 bp, Homo sapiens
ctcaggcaatcctcc

SEQ ID NO: 467234 - DNA, 15 bp, Homo sapiens
gctcaggcaatcctc

SEQ ID NO: 467235 - DNA, 15 bp, Homo sapiens
ggctcaggcaatcct

SEQ ID NO: 467236 - DNA, 15 bp, Homo sapiens
gggctcaggcaatcc

SEQ ID NO: 467237 - DNA, 15 bp, Homo sapiens
tgggctcaggcaatc

SEQ ID NO: 467238 - DNA, 15 bp, Homo sapiens
ctgggctcaggcaat

SEQ ID NO: 467239 - DNA, 15 bp, Homo sapiens
cctgggctcaggcaa

SEQ ID NO: 467240 - DNA, 15 bp, Homo sapiens
tcctgggctcaggca

SEQ ID NO: 467241 - DNA, 15 bp, Homo sapiens
ctcctgggctcaggc

SEQ ID NO: 467242 - DNA, 15 bp, Homo sapiens
actcctgggctcagg

SEQ ID NO: 467243 - DNA, 15 bp, Homo sapiens
aactcctgggctcag

SEQ ID NO: 467244 - DNA, 15 bp, Homo sapiens
taactcctgggctca

SEQ ID NO: 467245 - DNA, 15 bp, Homo sapiens
ctaactcctgggctc

SEQ ID NO: 467246 - DNA, 15 bp, Homo sapiens
tctaactcctgggct

SEQ ID NO: 467247 - DNA, 15 bp, Homo sapiens
ctctaactcctgggc

SEQ ID NO: 467248 - DNA, 15 bp, Homo sapiens
cctctaactcctggg

SEQ ID NO: 467249 - DNA, 15 bp, Homo sapiens
acctctaactcctgg

SEQ ID NO: 467250 - DNA, 15 bp, Homo sapiens
aacctctaactcctg

SEQ ID NO: 467251 - DNA, 15 bp, Homo sapiens
caacctctaactcct

SEQ ID NO: 467252 - DNA, 15 bp, Homo sapiens
gcaacctctaactcc

SEQ ID NO: 467253 - DNA, 15 bp, Homo sapiens
tgcaacctctaactc

SEQ ID NO: 467254 - DNA, 15 bp, Homo sapiens
ctgcaacctctaact

SEQ ID NO: 467255 - DNA, 15 bp, Homo sapiens
cctgcaacctctaac

SEQ ID NO: 467256 - DNA, 15 bp, Homo sapiens
tcctgcaacctctaa

SEQ ID NO: 467257 - DNA, 15 bp, Homo sapiens
ctcctgcaacctcta

SEQ ID NO: 467258 - DNA, 15 bp, Homo sapiens
actcctgcaacctct

SEQ ID NO: 467259 - DNA, 15 bp, Homo sapiens
aactcctgcaacctc

SEQ ID NO: 467260 - DNA, 15 bp, Homo sapiens
taactcctgcaacct

SEQ ID NO: 467261 - DNA, 15 bp, Homo sapiens
ctaactcctgcaacc

SEQ ID NO: 467262 - DNA, 15 bp, Homo sapiens
tctaactcctgcaac

SEQ ID NO: 467263 - DNA, 15 bp, Homo sapiens
ctctaactcctgcaa

SEQ ID NO: 467264 - DNA, 15 bp, Homo sapiens
cctctaactcctgca

SEQ ID NO: 467265 - DNA, 15 bp, Homo sapiens
acctctaactcctgc

SEQ ID NO: 467266 - DNA, 15 bp, Homo sapiens
gaacctctaactcct

SEQ ID NO: 467267 - DNA, 15 bp, Homo sapiens
ggaacctctaactcc

SEQ ID NO: 467268 - DNA, 15 bp, Homo sapiens
tggaacctctaactc

SEQ ID NO: 467269 - DNA, 15 bp, Homo sapiens
gtggaacctctaact

SEQ ID NO: 467270 - DNA, 15 bp, Homo sapiens
cgtggaacctctaac

SEQ ID NO: 467271 - DNA, 15 bp, Homo sapiens
tcgtggaacctctaa

SEQ ID NO: 467272 - DNA, 15 bp, Homo sapiens
atcgtggaacctcta

SEQ ID NO: 467273 - DNA, 15 bp, Homo sapiens
gatcgtggaacctct

SEQ ID NO: 467274 - DNA, 15 bp, Homo sapiens
cgatcgtggaacctc

SEQ ID NO: 467275 - DNA, 15 bp, Homo sapiens
gcgatcgtggaacct

SEQ ID NO: 467276 - DNA, 15 bp, Homo sapiens
tgcgatcgtggaacc

SEQ ID NO: 467277 - DNA, 15 bp, Homo sapiens
gtgcgatcgtggaac

SEQ ID NO: 467278 - DNA, 15 bp, Homo sapiens
ggtgcgatcgtggaa

SEQ ID NO: 467279 - DNA, 15 bp, Homo sapiens
aggtgcgatcgtgga

SEQ ID NO: 467280 - DNA, 15 bp, Homo sapiens
aaggtgcgatcgtgg

SEQ ID NO: 467281 - DNA, 15 bp, Homo sapiens
aaaggtgcgatcgtg

SEQ ID NO: 467282 - DNA, 15 bp, Homo sapiens
gaaaggtgcgatcgt

SEQ ID NO: 467283 - DNA, 15 bp, Homo sapiens
tgaaaggtgcgatcg

SEQ ID NO: 467284 - DNA, 15 bp, Homo sapiens
atgaaaggtgcgatc

SEQ ID NO: 467285 - DNA, 15 bp, Homo sapiens
aatgaaaggtgcgat

SEQ ID NO: 467286 - DNA, 15 bp, Homo sapiens
gaatgaaaggtgcga

SEQ ID NO: 467287 - DNA, 15 bp, Homo sapiens
ggaatgaaaggtgcg

SEQ ID NO: 467288 - DNA, 15 bp, Homo sapiens
cggaatgaaaggtgc

SEQ ID NO: 467289 - DNA, 15 bp, Homo sapiens
acggaatgaaaggtg

SEQ ID NO: 467290 - DNA, 15 bp, Homo sapiens
aacggaatgaaaggt

SEQ ID NO: 467291 - DNA, 15 bp, Homo sapiens
taacggaatgaaagg

SEQ ID NO: 467292 - DNA, 15 bp, Homo sapiens
gtaacggaatgaaag

SEQ ID NO: 467293 - DNA, 15 bp, Homo sapiens
tgtaacggaatgaaa

SEQ ID NO: 467294 - DNA, 15 bp, Homo sapiens
atgtaacggaatgaa

SEQ ID NO: 467295 - DNA, 15 bp, Homo sapiens
aatgtaacggaatga

SEQ ID NO: 467296 - DNA, 15 bp, Homo sapiens
aaatgtaacggaatg

SEQ ID NO: 467297 - DNA, 15 bp, Homo sapiens
caaatgtaacggaat

SEQ ID NO: 467298 - DNA, 15 bp, Homo sapiens
gcaaatgtaacggaa

SEQ ID NO: 467299 - DNA, 15 bp, Homo sapiens
agcaaatgtaacgga

SEQ ID NO: 467300 - DNA, 15 bp, Homo sapiens
cagcaaatgtaacgg

SEQ ID NO: 467301 - DNA, 15 bp, Homo sapiens
gcagcaaatgtaacg

SEQ ID NO: 467302 - DNA, 15 bp, Homo sapiens
ggcagcaaatgtaac

SEQ ID NO: 467303 - DNA, 15 bp, Homo sapiens
aggcagcaaatgtaa

SEQ ID NO: 467304 - DNA, 15 bp, Homo sapiens
aaggcagcaaatgta

SEQ ID NO: 467305 - DNA, 15 bp, Homo sapiens
caaggcagcaaatgt

SEQ ID NO: 467306 - DNA, 15 bp, Homo sapiens
tcaaggcagcaaatg

SEQ ID NO: 467307 - DNA, 15 bp, Homo sapiens
ctcaaggcagcaaat

SEQ ID NO: 467308 - DNA, 15 bp, Homo sapiens
tctcaaggcagcaaa

SEQ ID NO: 467309 - DNA, 15 bp, Homo sapiens
ttctcaaggcagcaa

SEQ ID NO: 467310 - DNA, 15 bp, Homo sapiens
gttctcaaggcagca

SEQ ID NO: 467311 - DNA, 15 bp, Homo sapiens
tgttctcaaggcagc

SEQ ID NO: 467312 - DNA, 15 bp, Homo sapiens
ctgttctcaaggcag

SEQ ID NO: 467313 - DNA, 15 bp, Homo sapiens
tctgttctcaaggca

SEQ ID NO: 467314 - DNA, 15 bp, Homo sapiens
ttctgttctcaaggc

SEQ ID NO: 467315 - DNA, 15 bp, Homo sapiens
cttctgttctcaagg

SEQ ID NO: 467316 - DNA, 15 bp, Homo sapiens
tcttctgttctcaag

SEQ ID NO: 467317 - DNA, 15 bp, Homo sapiens
gtcttctgttctcaa

SEQ ID NO: 467318 - DNA, 15 bp, Homo sapiens
ggtcttctgttctca

SEQ ID NO: 467319 - DNA, 15 bp, Homo sapiens
aggtcttctgttctc

SEQ ID NO: 467320 - DNA, 15 bp, Homo sapiens
caggtcttctgttct

SEQ ID NO: 467321 - DNA, 15 bp, Homo sapiens
gcaggtcttctgttc

SEQ ID NO: 467322 - DNA, 15 bp, Homo sapiens
agcaggtcttctgtt

SEQ ID NO: 467323 - DNA, 15 bp, Homo sapiens
cagcaggtcttctgt

SEQ ID NO: 467324 - DNA, 15 bp, Homo sapiens
ccagcaggtcttctg

SEQ ID NO: 467325 - DNA, 15 bp, Homo sapiens
accagcaggtcttct

SEQ ID NO: 467326 - DNA, 15 bp, Homo sapiens
aaccagcaggtcttc

SEQ ID NO: 467327 - DNA, 15 bp, Homo sapiens
aaaccagcaggtctt

SEQ ID NO: 467328 - DNA, 15 bp, Homo sapiens
aaaaccagcaggtct

SEQ ID NO: 467329 - DNA, 15 bp, Homo sapiens
caaaaccagcaggtc

SEQ ID NO: 467330 - DNA, 15 bp, Homo sapiens
acaaaaccagcaggt

SEQ ID NO: 467331 - DNA, 15 bp, Homo sapiens
aacaaaaccagcagg

SEQ ID NO: 467332 - DNA, 15 bp, Homo sapiens
caacaaaaccagcag

SEQ ID NO: 467333 - DNA, 15 bp, Homo sapiens
gcaacaaaaccagca

SEQ ID NO: 467334 - DNA, 15 bp, Homo sapiens
ggcaacaaaaccagc

SEQ ID NO: 467335 - DNA, 15 bp, Homo sapiens
tggcaacaaaaccag

SEQ ID NO: 467336 - DNA, 15 bp, Homo sapiens
ctggcaacaaaacca

SEQ ID NO: 467337 - DNA, 15 bp, Homo sapiens
actggcaacaaaacc

SEQ ID NO: 467338 - DNA, 15 bp, Homo sapiens
aactggcaacaaaac

SEQ ID NO: 467339 - DNA, 15 bp, Homo sapiens
aaactggcaacaaaa

SEQ ID NO: 467340 - DNA, 15 bp, Homo sapiens
caaactggcaacaaa

SEQ ID NO: 467341 - DNA, 15 bp, Homo sapiens
gcaaactggcaacaa

SEQ ID NO: 467342 - DNA, 15 bp, Homo sapiens
agcaaactggcaaca

SEQ ID NO: 467343 - DNA, 15 bp, Homo sapiens
gagcaaactggcaac

SEQ ID NO: 467344 - DNA, 15 bp, Homo sapiens
tgagcaaactggcaa

SEQ ID NO: 467345 - DNA, 15 bp, Homo sapiens
ctgagcaaactggca

SEQ ID NO: 467346 - DNA, 15 bp, Homo sapiens
actgagcaaactggc

SEQ ID NO: 467347 - DNA, 15 bp, Homo sapiens
gactgagcaaactgg

SEQ ID NO: 467348 - DNA, 15 bp, Homo sapiens
tgactgagcaaactg

SEQ ID NO: 467349 - DNA, 15 bp, Homo sapiens
atgactgagcaaact

SEQ ID NO: 467350 - DNA, 15 bp, Homo sapiens
aatgactgagcaaac

SEQ ID NO: 467351 - DNA, 15 bp, Homo sapiens
aaatgactgagcaaa

SEQ ID NO: 467352 - DNA, 15 bp, Homo sapiens
aaaatgactgagcaa

SEQ ID NO: 467353 - DNA, 15 bp, Homo sapiens
aaaaatgactgagca

SEQ ID NO: 467354 - DNA, 15 bp, Homo sapiens
taaaaatgactgagc

SEQ ID NO: 467355 - DNA, 15 bp, Homo sapiens
ataaaaatgactgag

SEQ ID NO: 467356 - DNA, 15 bp, Homo sapiens
cataaaaatgactga

SEQ ID NO: 467357 - DNA, 15 bp, Homo sapiens
tcataaaaatgactg

SEQ ID NO: 467358 - DNA, 15 bp, Homo sapiens
ttcataaaaatgact

SEQ ID NO: 467359 - DNA, 15 bp, Homo sapiens
tttcataaaaatgac

SEQ ID NO: 467360 - DNA, 15 bp, Homo sapiens
ttttcataaaaatga

SEQ ID NO: 467361 - DNA, 15 bp, Homo sapiens
tttttcataaaaatg

SEQ ID NO: 467362 - DNA, 15 bp, Homo sapiens
ctttttcataaaaat

SEQ ID NO: 467363 - DNA, 15 bp, Homo sapiens
gctttttcataaaaa

SEQ ID NO: 467364 - DNA, 15 bp, Homo sapiens
ggctttttcataaaa

SEQ ID NO: 467365 - DNA, 15 bp, Homo sapiens
tggctttttcataaa

SEQ ID NO: 467366 - DNA, 15 bp, Homo sapiens
ctggctttttcataa

SEQ ID NO: 467367 - DNA, 15 bp, Homo sapiens
actggctttttcata

SEQ ID NO: 467368 - DNA, 15 bp, Homo sapiens
cactggctttttcat

SEQ ID NO: 467369 - DNA, 15 bp, Homo sapiens
gcactggctttttca

SEQ ID NO: 467370 - DNA, 15 bp, Homo sapiens
agcactggctttttc

SEQ ID NO: 467371 - DNA, 15 bp, Homo sapiens
tagcactggcttttt

SEQ ID NO: 467372 - DNA, 15 bp, Homo sapiens
ttagcactggctttt

SEQ ID NO: 467373 - DNA, 15 bp, Homo sapiens
gttagcactggcttt

SEQ ID NO: 467374 - DNA, 15 bp, Homo sapiens
agttagcactggctt

SEQ ID NO: 467375 - DNA, 15 bp, Homo sapiens
tagttagcactggct

SEQ ID NO: 467376 - DNA, 15 bp, Homo sapiens
ctagttagcactggc

SEQ ID NO: 467377 - DNA, 15 bp, Homo sapiens
cctagttagcactgg

SEQ ID NO: 467378 - DNA, 15 bp, Homo sapiens
acctagttagcactg

SEQ ID NO: 467379 - DNA, 15 bp, Homo sapiens
cacctagttagcact

SEQ ID NO: 467380 - DNA, 15 bp, Homo sapiens
gcacctagttagcac

SEQ ID NO: 467381 - DNA, 15 bp, Homo sapiens
agcacctagttagca

SEQ ID NO: 467382 - DNA, 15 bp, Homo sapiens
aagcacctagttagc

SEQ ID NO: 467383 - DNA, 15 bp, Homo sapiens
gaagcacctagttag

SEQ ID NO: 467384 - DNA, 15 bp, Homo sapiens
agaagcacctagtta

SEQ ID NO: 467385 - DNA, 15 bp, Homo sapiens
aagaagcacctagtt

SEQ ID NO: 467386 - DNA, 15 bp, Homo sapiens
gaagaagcacctagt

SEQ ID NO: 467387 - DNA, 15 bp, Homo sapiens
cgaagaagcacctag

SEQ ID NO: 467388 - DNA, 15 bp, Homo sapiens
acgaagaagcaccta

SEQ ID NO: 467389 - DNA, 15 bp, Homo sapiens
cacgaagaagcacct

SEQ ID NO: 467390 - DNA, 15 bp, Homo sapiens
gcacgaagaagcacc

SEQ ID NO: 467391 - DNA, 15 bp, Homo sapiens
ggcacgaagaagcac

SEQ ID NO: 467392 - DNA, 15 bp, Homo sapiens
aggcacgaagaagca

SEQ ID NO: 467393 - DNA, 15 bp, Homo sapiens
aaggcacgaagaagc

SEQ ID NO: 467394 - DNA, 15 bp, Homo sapiens
gaaggcacgaagaag

SEQ ID NO: 467395 - DNA, 15 bp, Homo sapiens
agaaggcacgaagaa

SEQ ID NO: 467396 - DNA, 15 bp, Homo sapiens
gagaaggcacgaaga

SEQ ID NO: 467397 - DNA, 15 bp, Homo sapiens
agagaaggcacgaag

SEQ ID NO: 467398 - DNA, 15 bp, Homo sapiens
cagagaaggcacgaa

SEQ ID NO: 467399 - DNA, 15 bp, Homo sapiens
tcagagaaggcacga

SEQ ID NO: 467400 - DNA, 15 bp, Homo sapiens
ctcagagaaggcacg

SEQ ID NO: 467401 - DNA, 15 bp, Homo sapiens
tctcagagaaggcac

SEQ ID NO: 467402 - DNA, 15 bp, Homo sapiens
ttctcagagaaggca

SEQ ID NO: 467403 - DNA, 15 bp, Homo sapiens
attctcagagaaggc

SEQ ID NO: 467404 - DNA, 15 bp, Homo sapiens
gattctcagagaagg

SEQ ID NO: 467405 - DNA, 15 bp, Homo sapiens
tgattctcagagaag

SEQ ID NO: 467406 - DNA, 15 bp, Homo sapiens
ttgattctcagagaa

SEQ ID NO: 467407 - DNA, 15 bp, Homo sapiens
cttgattctcagaga

SEQ ID NO: 467408 - DNA, 15 bp, Homo sapiens
tcttgattctcagag

SEQ ID NO: 467409 - DNA, 15 bp, Homo sapiens
ttcttgattctcaga

SEQ ID NO: 467410 - DNA, 15 bp, Homo sapiens
gttcttgattctcag

SEQ ID NO: 467411 - DNA, 15 bp, Homo sapiens
agttcttgattctca

SEQ ID NO: 467412 - DNA, 15 bp, Homo sapiens
gagttcttgattctc

SEQ ID NO: 467413 - DNA, 15 bp, Homo sapiens
agagttcttgattct

SEQ ID NO: 467414 - DNA, 15 bp, Homo sapiens
tagagttcttgattc

SEQ ID NO: 467415 - DNA, 15 bp, Homo sapiens
ctagagttcttgatt

SEQ ID NO: 467416 - DNA, 15 bp, Homo sapiens
actagagttcttgat

SEQ ID NO: 467417 - DNA, 15 bp, Homo sapiens
tactagagttcttga

SEQ ID NO: 467418 - DNA, 15 bp, Homo sapiens
atactagagttcttg

SEQ ID NO: 467419 - DNA, 15 bp, Homo sapiens
catactagagttctt

SEQ ID NO: 467420 - DNA, 15 bp, Homo sapiens
acatactagagttct

SEQ ID NO: 467421 - DNA, 15 bp, Homo sapiens
aacatactagagttc

SEQ ID NO: 467422 - DNA, 15 bp, Homo sapiens
aaacatactagagtt

SEQ ID NO: 467423 - DNA, 15 bp, Homo sapiens
caaacatactagagt

SEQ ID NO: 467424 - DNA, 15 bp, Homo sapiens
gcaaacatactagag

SEQ ID NO: 467425 - DNA, 15 bp, Homo sapiens
cgcaaacatactaga

SEQ ID NO: 467426 - DNA, 15 bp, Homo sapiens
acgcaaacatactag

SEQ ID NO: 467427 - DNA, 15 bp, Homo sapiens
cacgcaaacatacta

SEQ ID NO: 467428 - DNA, 15 bp, Homo sapiens
acacgcaaacatact

SEQ ID NO: 467429 - DNA, 15 bp, Homo sapiens
cacacgcaaacatac

SEQ ID NO: 467430 - DNA, 15 bp, Homo sapiens
acacacgcaaacata

SEQ ID NO: 467431 - DNA, 15 bp, Homo sapiens
aacacacgcaaacat

SEQ ID NO: 467432 - DNA, 15 bp, Homo sapiens
gaacacacgcaaaca

SEQ ID NO: 467433 - DNA, 15 bp, Homo sapiens
tgaacacacgcaaac

SEQ ID NO: 467434 - DNA, 15 bp, Homo sapiens
ctgaacacacgcaaa

SEQ ID NO: 467435 - DNA, 15 bp, Homo sapiens
actgaacacacgcaa

SEQ ID NO: 467436 - DNA, 15 bp, Homo sapiens
gactgaacacacgca

SEQ ID NO: 467437 - DNA, 15 bp, Homo sapiens
agactgaacacacgc

SEQ ID NO: 467438 - DNA, 15 bp, Homo sapiens
gagactgaacacacg

SEQ ID NO: 467439 - DNA, 15 bp, Homo sapiens
agagactgaacacac

SEQ ID NO: 467440 - DNA, 15 bp, Homo sapiens
gagagactgaacaca

SEQ ID NO: 467441 - DNA, 15 bp, Homo sapiens
tgagagactgaacac

SEQ ID NO: 467442 - DNA, 15 bp, Homo sapiens
atgagagactgaaca

SEQ ID NO: 467443 - DNA, 15 bp, Homo sapiens
aatgagagactgaac

SEQ ID NO: 467444 - DNA, 15 bp, Homo sapiens
taatgagagactgaa

SEQ ID NO: 467445 - DNA, 15 bp, Homo sapiens
ttaatgagagactga

SEQ ID NO: 467446 - DNA, 15 bp, Homo sapiens
tttaatgagagactg

SEQ ID NO: 467447 - DNA, 15 bp, Homo sapiens
atttaatgagagact

SEQ ID NO: 467448 - DNA, 15 bp, Homo sapiens
catttaatgagagac

SEQ ID NO: 467449 - DNA, 15 bp, Homo sapiens
acatttaatgagaga

SEQ ID NO: 467450 - DNA, 15 bp, Homo sapiens
aacatttaatgagag

SEQ ID NO: 467451 - DNA, 15 bp, Homo sapiens
gaacatttaatgaga

SEQ ID NO: 467452 - DNA, 15 bp, Homo sapiens
agaacatttaatgag

SEQ ID NO: 467453 - DNA, 15 bp, Homo sapiens
gagaacatttaatga

SEQ ID NO: 467454 - DNA, 15 bp, Homo sapiens
tgagaacatttaatg

SEQ ID NO: 467455 - DNA, 15 bp, Homo sapiens
gtgagaacatttaat

SEQ ID NO: 467456 - DNA, 15 bp, Homo sapiens
agtgagaacatttaa

SEQ ID NO: 467457 - DNA, 15 bp, Homo sapiens
tagtgagaacattta

SEQ ID NO: 467458 - DNA, 15 bp, Homo sapiens
atagtgagaacattt

SEQ ID NO: 467459 - DNA, 15 bp, Homo sapiens
gatagtgagaacatt

SEQ ID NO: 467460 - DNA, 15 bp, Homo sapiens
ggatagtgagaacat

SEQ ID NO: 467461 - DNA, 15 bp, Homo sapiens
gggatagtgagaaca

SEQ ID NO: 467462 - DNA, 15 bp, Homo sapiens
tgggatagtgagaac

SEQ ID NO: 467463 - DNA, 15 bp, Homo sapiens
ctgggatagtgagaa

SEQ ID NO: 467464 - DNA, 15 bp, Homo sapiens
tctgggatagtgaga

SEQ ID NO: 467465 - DNA, 15 bp, Homo sapiens
ctctgggatagtgag

SEQ ID NO: 467466 - DNA, 15 bp, Homo sapiens
tctctgggatagtga

SEQ ID NO: 467467 - DNA, 15 bp, Homo sapiens
ttctctgggatagtg

SEQ ID NO: 467468 - DNA, 15 bp, Homo sapiens
gttctctgggatagt

SEQ ID NO: 467469 - DNA, 15 bp, Homo sapiens
ggttctctgggatag

SEQ ID NO: 467470 - DNA, 15 bp, Homo sapiens
tggttctctgggata

SEQ ID NO: 467471 - DNA, 15 bp, Homo sapiens
atggttctctgggat

SEQ ID NO: 467472 - DNA, 15 bp, Homo sapiens
gatggttctctggga

SEQ ID NO: 467473 - DNA, 15 bp, Homo sapiens
agatggttctctggg

SEQ ID NO: 467474 - DNA, 15 bp, Homo sapiens
gagatggttctctgg

SEQ ID NO: 467475 - DNA, 15 bp, Homo sapiens
tgagatggttctctg

SEQ ID NO: 467476 - DNA, 15 bp, Homo sapiens
atgagatggttctct

SEQ ID NO: 467477 - DNA, 15 bp, Homo sapiens
aatgagatggttctc

SEQ ID NO: 467478 - DNA, 15 bp, Homo sapiens
caatgagatggttct

SEQ ID NO: 467479 - DNA, 15 bp, Homo sapiens
ccaatgagatggttc

SEQ ID NO: 467480 - DNA, 15 bp, Homo sapiens
tccaatgagatggtt

SEQ ID NO: 467481 - DNA, 15 bp, Homo sapiens
gtccaatgagatggt

SEQ ID NO: 467482 - DNA, 15 bp, Homo sapiens
ggtccaatgagatgg

SEQ ID NO: 467483 - DNA, 15 bp, Homo sapiens
aggtccaatgagatg

SEQ ID NO: 467484 - DNA, 15 bp, Homo sapiens
aaggtccaatgagat

SEQ ID NO: 467485 - DNA, 15 bp, Homo sapiens
caaggtccaatgaga

SEQ ID NO: 467486 - DNA, 15 bp, Homo sapiens
ccaaggtccaatgag

SEQ ID NO: 467487 - DNA, 15 bp, Homo sapiens
accaaggtccaatga

SEQ ID NO: 467488 - DNA, 15 bp, Homo sapiens
gaccaaggtccaatg

SEQ ID NO: 467489 - DNA, 15 bp, Homo sapiens
agaccaaggtccaat

SEQ ID NO: 467490 - DNA, 15 bp, Homo sapiens
cagaccaaggtccaa

SEQ ID NO: 467491 - DNA, 15 bp, Homo sapiens
acagaccaaggtcca

SEQ ID NO: 467492 - DNA, 15 bp, Homo sapiens
tacagaccaaggtcc

SEQ ID NO: 467493 - DNA, 15 bp, Homo sapiens
gtacagaccaaggtc

SEQ ID NO: 467494 - DNA, 15 bp, Homo sapiens
tgtacagaccaaggt

SEQ ID NO: 467495 - DNA, 15 bp, Homo sapiens
atgtacagaccaagg

SEQ ID NO: 467496 - DNA, 15 bp, Homo sapiens
tatgtacagaccaag

SEQ ID NO: 467497 - DNA, 15 bp, Homo sapiens
gtatgtacagaccaa

SEQ ID NO: 467498 - DNA, 15 bp, Homo sapiens
ggtatgtacagacca

SEQ ID NO: 467499 - DNA, 15 bp, Homo sapiens
aggtatgtacagacc

SEQ ID NO: 467500 - DNA, 15 bp, Homo sapiens
aaggtatgtacagac

SEQ ID NO: 467501 - DNA, 15 bp, Homo sapiens
gaaggtatgtacaga

SEQ ID NO: 467502 - DNA, 15 bp, Homo sapiens
tgaaggtatgtacag

SEQ ID NO: 467503 - DNA, 15 bp, Homo sapiens
atgaaggtatgtaca

SEQ ID NO: 467504 - DNA, 15 bp, Homo sapiens
gatgaaggtatgtac

SEQ ID NO: 467505 - DNA, 15 bp, Homo sapiens
agatgaaggtatgta

SEQ ID NO: 467506 - DNA, 15 bp, Homo sapiens
aagatgaaggtatgt

SEQ ID NO: 467507 - DNA, 15 bp, Homo sapiens
aaagatgaaggtatg

SEQ ID NO: 467508 - DNA, 15 bp, Homo sapiens
caaagatgaaggtat

SEQ ID NO: 467509 - DNA, 15 bp, Homo sapiens
ccaaagatgaaggta

SEQ ID NO: 467510 - DNA, 15 bp, Homo sapiens
gccaaagatgaaggt

SEQ ID NO: 467511 - DNA, 15 bp, Homo sapiens
agccaaagatgaagg

SEQ ID NO: 467512 - DNA, 15 bp, Homo sapiens
gagccaaagatgaag

SEQ ID NO: 467513 - DNA, 15 bp, Homo sapiens
agagccaaagatgaa

SEQ ID NO: 467514 - DNA, 15 bp, Homo sapiens
cagagccaaagatga

SEQ ID NO: 467515 - DNA, 15 bp, Homo sapiens
tcagagccaaagatg

SEQ ID NO: 467516 - DNA, 15 bp, Homo sapiens
gtcagagccaaagat

SEQ ID NO: 467517 - DNA, 15 bp, Homo sapiens
agtcagagccaaaga

SEQ ID NO: 467518 - DNA, 15 bp, Homo sapiens
aagtcagagccaaag

SEQ ID NO: 467519 - DNA, 15 bp, Homo sapiens
caagtcagagccaaa

SEQ ID NO: 467520 - DNA, 15 bp, Homo sapiens
acaagtcagagccaa

SEQ ID NO: 467521 - DNA, 15 bp, Homo sapiens
tacaagtcagagcca

SEQ ID NO: 467522 - DNA, 15 bp, Homo sapiens
ttacaagtcagagcc

SEQ ID NO: 467523 - DNA, 15 bp, Homo sapiens
attacaagtcagagc

SEQ ID NO: 467524 - DNA, 15 bp, Homo sapiens
aattacaagtcagag

SEQ ID NO: 467525 - DNA, 15 bp, Homo sapiens
taattacaagtcaga

SEQ ID NO: 467526 - DNA, 15 bp, Homo sapiens
ataattacaagtcag

SEQ ID NO: 467527 - DNA, 15 bp, Homo sapiens
aataattacaagtca

SEQ ID NO: 467528 - DNA, 15 bp, Homo sapiens
aaataattacaagtc

SEQ ID NO: 467529 - DNA, 15 bp, Homo sapiens
aaaataattacaagt

SEQ ID NO: 467530 - DNA, 15 bp, Homo sapiens
aaaaataattacaag

SEQ ID NO: 467531 - DNA, 15 bp, Homo sapiens
taaaaataattacaa

SEQ ID NO: 467532 - DNA, 15 bp, Homo sapiens
ctaaaaataattaca

SEQ ID NO: 467533 - DNA, 15 bp, Homo sapiens
tctaaaaataattac

SEQ ID NO: 467534 - DNA, 15 bp, Homo sapiens
ttctaaaaataatta

SEQ ID NO: 467535 - DNA, 15 bp, Homo sapiens
gttctaaaaataatt

SEQ ID NO: 467536 - DNA, 15 bp, Homo sapiens
agttctaaaaataat

SEQ ID NO: 467537 - DNA, 15 bp, Homo sapiens
aagttctaaaaataa

SEQ ID NO: 467538 - DNA, 15 bp, Homo sapiens
gaagttctaaaaata

SEQ ID NO: 467539 - DNA, 15 bp, Homo sapiens
agaagttctaaaaat

SEQ ID NO: 467540 - DNA, 15 bp, Homo sapiens
gagaagttctaaaaa

SEQ ID NO: 467541 - DNA, 15 bp, Homo sapiens
agagaagttctaaaa

SEQ ID NO: 467542 - DNA, 15 bp, Homo sapiens
aagagaagttctaaa

SEQ ID NO: 467543 - DNA, 15 bp, Homo sapiens
aaagagaagttctaa

SEQ ID NO: 467544 - DNA, 15 bp, Homo sapiens
aaaagagaagttcta

SEQ ID NO: 467545 - DNA, 15 bp, Homo sapiens
aaaaagagaagttct

SEQ ID NO: 467546 - DNA, 15 bp, Homo sapiens
aaaaaagagaagttc

SEQ ID NO: 467547 - DNA, 15 bp, Homo sapiens
aaaaaaagagaagtt

SEQ ID NO: 467548 - DNA, 15 bp, Homo sapiens
aaaaaaaagagaagt

SEQ ID NO: 467549 - DNA, 15 bp, Homo sapiens
aaaaaaaaagagaag

SEQ ID NO: 467550 - DNA, 15 bp, Homo sapiens
aaaaaaaaaaaagag

SEQ ID NO: 467551 - DNA, 15 bp, Homo sapiens
aaaactctgtctcca

SEQ ID NO: 467552 - DNA, 15 bp, Homo sapiens
caaaactctgtctcc

SEQ ID NO: 467553 - DNA, 15 bp, Homo sapiens
tagagcaaaactctg

SEQ ID NO: 467554 - DNA, 15 bp, Homo sapiens
ctagagcaaaactct

SEQ ID NO: 467555 - DNA, 15 bp, Homo sapiens
actagagcaaaactc

SEQ ID NO: 467556 - DNA, 15 bp, Homo sapiens
aactagagcaaaact

SEQ ID NO: 467557 - DNA, 15 bp, Homo sapiens
caactagagcaaaac

SEQ ID NO: 467558 - DNA, 15 bp, Homo sapiens
gcaactagagcaaaa

SEQ ID NO: 467559 - DNA, 15 bp, Homo sapiens
ggcaactagagcaaa

SEQ ID NO: 467560 - DNA, 15 bp, Homo sapiens
tggcaactagagcaa

SEQ ID NO: 467561 - DNA, 15 bp, Homo sapiens
ctggcaactagagca

SEQ ID NO: 467562 - DNA, 15 bp, Homo sapiens
tctggcaactagagc

SEQ ID NO: 467563 - DNA, 15 bp, Homo sapiens
gtctggcaactagag

SEQ ID NO: 467564 - DNA, 15 bp, Homo sapiens
agtctggcaactaga

SEQ ID NO: 467565 - DNA, 15 bp, Homo sapiens
cagtctggcaactag

SEQ ID NO: 467566 - DNA, 15 bp, Homo sapiens
ccagtctggcaacta

SEQ ID NO: 467567 - DNA, 15 bp, Homo sapiens
tccagtctggcaact

SEQ ID NO: 467568 - DNA, 15 bp, Homo sapiens
ttccagtctggcaac

SEQ ID NO: 467569 - DNA, 15 bp, Homo sapiens
attccagtctggcaa

SEQ ID NO: 467570 - DNA, 15 bp, Homo sapiens
cattccagtctggca

SEQ ID NO: 467571 - DNA, 15 bp, Homo sapiens
gcattccagtctggc

SEQ ID NO: 467572 - DNA, 15 bp, Homo sapiens
tgcattccagtctgg

SEQ ID NO: 467573 - DNA, 15 bp, Homo sapiens
ctgcattccagtctg

SEQ ID NO: 467574 - DNA, 15 bp, Homo sapiens
actgcattccagtct

SEQ ID NO: 467575 - DNA, 15 bp, Homo sapiens
cactgcattccagtc

SEQ ID NO: 467576 - DNA, 15 bp, Homo sapiens
ccactgcattccagt

SEQ ID NO: 467577 - DNA, 15 bp, Homo sapiens
gccactgcattccag

SEQ ID NO: 467578 - DNA, 15 bp, Homo sapiens
tgccactgcattcca

SEQ ID NO: 467579 - DNA, 15 bp, Homo sapiens
gtgccactgcattcc

SEQ ID NO: 467580 - DNA, 15 bp, Homo sapiens
cgtgccactgcattc

SEQ ID NO: 467581 - DNA, 15 bp, Homo sapiens
tcgtgccactgcatt

SEQ ID NO: 467582 - DNA, 15 bp, Homo sapiens
atcgtgccactgcat

SEQ ID NO: 467583 - DNA, 15 bp, Homo sapiens
tgagatcgtgccact

SEQ ID NO: 467584 - DNA, 15 bp, Homo sapiens
ctgagatcgtgccac

SEQ ID NO: 467585 - DNA, 15 bp, Homo sapiens
ggtgagctgagatcg

SEQ ID NO: 467586 - DNA, 15 bp, Homo sapiens
aggtgagctgagatc

SEQ ID NO: 467587 - DNA, 15 bp, Homo sapiens
gaggtgagctgagat

SEQ ID NO: 467588 - DNA, 15 bp, Homo sapiens
tgaggtgagctgaga

SEQ ID NO: 467589 - DNA, 15 bp, Homo sapiens
ttgaggtgagctgag

SEQ ID NO: 467590 - DNA, 15 bp, Homo sapiens
gttgaggtgagctga

SEQ ID NO: 467591 - DNA, 15 bp, Homo sapiens
ggttgaggtgagctg

SEQ ID NO: 467592 - DNA, 15 bp, Homo sapiens
aggttgaggtgagct

SEQ ID NO: 467593 - DNA, 15 bp, Homo sapiens
gaggttgaggtgagc

SEQ ID NO: 467594 - DNA, 15 bp, Homo sapiens
agaggttgaggtgag

SEQ ID NO: 467595 - DNA, 15 bp, Homo sapiens
cagaggttgaggtga

SEQ ID NO: 467596 - DNA, 15 bp, Homo sapiens
gcagaggttgaggtg

SEQ ID NO: 467597 - DNA, 15 bp, Homo sapiens
ggcagaggttgaggt

SEQ ID NO: 467598 - DNA, 15 bp, Homo sapiens
aggcagaggttgagg

SEQ ID NO: 467599 - DNA, 15 bp, Homo sapiens
aaggcagaggttgag

SEQ ID NO: 467600 - DNA, 15 bp, Homo sapiens
gaaggcagaggttga

SEQ ID NO: 467601 - DNA, 15 bp, Homo sapiens
ggaaggcagaggttg

SEQ ID NO: 467602 - DNA, 15 bp, Homo sapiens
tggaaggcagaggtt

SEQ ID NO: 467603 - DNA, 15 bp, Homo sapiens
ctggaaggcagaggt

SEQ ID NO: 467604 - DNA, 15 bp, Homo sapiens
cctggaaggcagagg

SEQ ID NO: 467605 - DNA, 15 bp, Homo sapiens
acctggaaggcagag

SEQ ID NO: 467606 - DNA, 15 bp, Homo sapiens
aacctggaaggcaga

SEQ ID NO: 467607 - DNA, 15 bp, Homo sapiens
gaacctggaaggcag

SEQ ID NO: 467608 - DNA, 15 bp, Homo sapiens
tgaacctggaaggca

SEQ ID NO: 467609 - DNA, 15 bp, Homo sapiens
ttgaacctggaaggc

SEQ ID NO: 467610 - DNA, 15 bp, Homo sapiens
cttgaacctggaagg

SEQ ID NO: 467611 - DNA, 15 bp, Homo sapiens
gcttgaacctggaag

SEQ ID NO: 467612 - DNA, 15 bp, Homo sapiens
tgcttgaacctggaa

SEQ ID NO: 467613 - DNA, 15 bp, Homo sapiens
ttgcttgaacctgga

SEQ ID NO: 467614 - DNA, 15 bp, Homo sapiens
ttgaggcaggagaat

SEQ ID NO: 467615 - DNA, 15 bp, Homo sapiens
gttgaggcaggagaa

SEQ ID NO: 467616 - DNA, 15 bp, Homo sapiens
ggttgaggcaggaga

SEQ ID NO: 467617 - DNA, 15 bp, Homo sapiens
aggttgaggcaggag

SEQ ID NO: 467618 - DNA, 15 bp, Homo sapiens
gaggttgaggcagga

SEQ ID NO: 467619 - DNA, 15 bp, Homo sapiens
agaggttgaggcagg

SEQ ID NO: 467620 - DNA, 15 bp, Homo sapiens
aagaggttgaggcag

SEQ ID NO: 467621 - DNA, 15 bp, Homo sapiens
caagaggttgaggca

SEQ ID NO: 467622 - DNA, 15 bp, Homo sapiens
tcaagaggttgaggc

SEQ ID NO: 467623 - DNA, 15 bp, Homo sapiens
ctcaagaggttgagg

SEQ ID NO: 467624 - DNA, 15 bp, Homo sapiens
actcaagaggttgag

SEQ ID NO: 467625 - DNA, 15 bp, Homo sapiens
tactcaagaggttga

SEQ ID NO: 467626 - DNA, 15 bp, Homo sapiens
ctactcaagaggttg

SEQ ID NO: 467627 - DNA, 15 bp, Homo sapiens
gctactcaagaggtt

SEQ ID NO: 467628 - DNA, 15 bp, Homo sapiens
agctactcaagaggt

SEQ ID NO: 467629 - DNA, 15 bp, Homo sapiens
cagctactcaagagg

SEQ ID NO: 467630 - DNA, 15 bp, Homo sapiens
acagctactcaagag

SEQ ID NO: 467631 - DNA, 15 bp, Homo sapiens
tacagctactcaaga

SEQ ID NO: 467632 - DNA, 15 bp, Homo sapiens
ttacagctactcaag

SEQ ID NO: 467633 - DNA, 15 bp, Homo sapiens
attacagctactcaa

SEQ ID NO: 467634 - DNA, 15 bp, Homo sapiens
aattacagctactca

SEQ ID NO: 467635 - DNA, 15 bp, Homo sapiens
taattacagctactc

SEQ ID NO: 467636 - DNA, 15 bp, Homo sapiens
gtaattacagctact

SEQ ID NO: 467637 - DNA, 15 bp, Homo sapiens
tgtaattacagctac

SEQ ID NO: 467638 - DNA, 15 bp, Homo sapiens
ctgtaattacagcta

SEQ ID NO: 467639 - DNA, 15 bp, Homo sapiens
cctgtaattacagct

SEQ ID NO: 467640 - DNA, 15 bp, Homo sapiens
gcctgtaattacagc

SEQ ID NO: 467641 - DNA, 15 bp, Homo sapiens
tgcctgtaattacag

SEQ ID NO: 467642 - DNA, 15 bp, Homo sapiens
atgcctgtaattaca

SEQ ID NO: 467643 - DNA, 15 bp, Homo sapiens
catgcctgtaattac

SEQ ID NO: 467644 - DNA, 15 bp, Homo sapiens
acatgcctgtaatta

SEQ ID NO: 467645 - DNA, 15 bp, Homo sapiens
cacatgcctgtaatt

SEQ ID NO: 467646 - DNA, 15 bp, Homo sapiens
cgtggtggcacatgc

SEQ ID NO: 467647 - DNA, 15 bp, Homo sapiens
gcgtggtggcacatg

SEQ ID NO: 467648 - DNA, 15 bp, Homo sapiens
ggcgtggtggcacat

SEQ ID NO: 467649 - DNA, 15 bp, Homo sapiens
aggcgtggtggcaca

SEQ ID NO: 467650 - DNA, 15 bp, Homo sapiens
caggcgtggtggcac

SEQ ID NO: 467651 - DNA, 15 bp, Homo sapiens
caaaattagccaggc

SEQ ID NO: 467652 - DNA, 15 bp, Homo sapiens
acaaaattagccagg

SEQ ID NO: 467653 - DNA, 15 bp, Homo sapiens
cacaaaattagccag

SEQ ID NO: 467654 - DNA, 15 bp, Homo sapiens
acacaaaattagcca

SEQ ID NO: 467655 - DNA, 15 bp, Homo sapiens
aacacaaaattagcc

SEQ ID NO: 467656 - DNA, 15 bp, Homo sapiens
aaacacaaaattagc

SEQ ID NO: 467657 - DNA, 15 bp, Homo sapiens
aaaacacaaaattag

SEQ ID NO: 467658 - DNA, 15 bp, Homo sapiens
aaaaacacaaaatta

SEQ ID NO: 467659 - DNA, 15 bp, Homo sapiens
taaaaacacaaaatt

SEQ ID NO: 467660 - DNA, 15 bp, Homo sapiens
ctaaaaacacaaaat

SEQ ID NO: 467661 - DNA, 15 bp, Homo sapiens
actaaaaacacaaaa

SEQ ID NO: 467662 - DNA, 15 bp, Homo sapiens
tactaaaaacacaaa

SEQ ID NO: 467663 - DNA, 15 bp, Homo sapiens
ctactaaaaacacaa

SEQ ID NO: 467664 - DNA, 15 bp, Homo sapiens
tctactaaaaacaca

SEQ ID NO: 467665 - DNA, 15 bp, Homo sapiens
ttggagaaaccctgt

SEQ ID NO: 467666 - DNA, 15 bp, Homo sapiens
cttggagaaaccctg

SEQ ID NO: 467667 - DNA, 15 bp, Homo sapiens
acttggagaaaccct

SEQ ID NO: 467668 - DNA, 15 bp, Homo sapiens
aacttggagaaaccc

SEQ ID NO: 467669 - DNA, 15 bp, Homo sapiens
caacttggagaaacc

SEQ ID NO: 467670 - DNA, 15 bp, Homo sapiens
ccaacttggagaaac

SEQ ID NO: 467671 - DNA, 15 bp, Homo sapiens
accaacttggagaaa

SEQ ID NO: 467672 - DNA, 15 bp, Homo sapiens
gaccaacttggagaa

SEQ ID NO: 467673 - DNA, 15 bp, Homo sapiens
tgaccaacttggaga

SEQ ID NO: 467674 - DNA, 15 bp, Homo sapiens
ctgaccaacttggag

SEQ ID NO: 467675 - DNA, 15 bp, Homo sapiens
cctgaccaacttgga

SEQ ID NO: 467676 - DNA, 15 bp, Homo sapiens
gcctgaccaacttgg

SEQ ID NO: 467677 - DNA, 15 bp, Homo sapiens
agcctgaccaacttg

SEQ ID NO: 467678 - DNA, 15 bp, Homo sapiens
cagcctgaccaactt

SEQ ID NO: 467679 - DNA, 15 bp, Homo sapiens
ccagcctgaccaact

SEQ ID NO: 467680 - DNA, 15 bp, Homo sapiens
tgagaccagcctgac

SEQ ID NO: 467681 - DNA, 15 bp, Homo sapiens
ttgagaccagcctga

SEQ ID NO: 467682 - DNA, 15 bp, Homo sapiens
aaggcgggcagatca

SEQ ID NO: 467683 - DNA, 15 bp, Homo sapiens
caaggcgggcagatc

SEQ ID NO: 467684 - DNA, 15 bp, Homo sapiens
ccaaggcgggcagat

SEQ ID NO: 467685 - DNA, 15 bp, Homo sapiens
gccaaggcgggcaga

SEQ ID NO: 467686 - DNA, 15 bp, Homo sapiens
ggccaaggcgggcag

SEQ ID NO: 467687 - DNA, 15 bp, Homo sapiens
aggccaaggcgggca

SEQ ID NO: 467688 - DNA, 15 bp, Homo sapiens
gaggccaaggcgggc

SEQ ID NO: 467689 - DNA, 15 bp, Homo sapiens
ggaggccaaggcggg

SEQ ID NO: 467690 - DNA, 15 bp, Homo sapiens
gggaggccaaggcgg

SEQ ID NO: 467691 - DNA, 15 bp, Homo sapiens
tacgcctgtaatccc

SEQ ID NO: 467692 - DNA, 15 bp, Homo sapiens
ttacgcctgtaatcc

SEQ ID NO: 467693 - DNA, 15 bp, Homo sapiens
cttacgcctgtaatc

SEQ ID NO: 467694 - DNA, 15 bp, Homo sapiens
gcttacgcctgtaat

SEQ ID NO: 467695 - DNA, 15 bp, Homo sapiens
ggcttacgcctgtaa

SEQ ID NO: 467696 - DNA, 15 bp, Homo sapiens
tggcttacgcctgta

SEQ ID NO: 467697 - DNA, 15 bp, Homo sapiens
gtggcttacgcctgt

SEQ ID NO: 467698 - DNA, 15 bp, Homo sapiens
agtggcttacgcctg

SEQ ID NO: 467699 - DNA, 15 bp, Homo sapiens
cagtggcttacgcct

SEQ ID NO: 467700 - DNA, 15 bp, Homo sapiens
gcagtggcttacgcc

SEQ ID NO: 467701 - DNA, 15 bp, Homo sapiens
cgcagtggcttacgc

SEQ ID NO: 467702 - DNA, 15 bp, Homo sapiens
gcgcagtggcttacg

SEQ ID NO: 467703 - DNA, 15 bp, Homo sapiens
ggcgcagtggcttac

SEQ ID NO: 467704 - DNA, 15 bp, Homo sapiens
aggcgcagtggctta

SEQ ID NO: 467705 - DNA, 15 bp, Homo sapiens
caggcgcagtggctt

SEQ ID NO: 467706 - DNA, 15 bp, Homo sapiens
ccaggcgcagtggct

SEQ ID NO: 467707 - DNA, 15 bp, Homo sapiens
gccaggcgcagtggc

SEQ ID NO: 467708 - DNA, 15 bp, Homo sapiens
ggccaggcgcagtgg

SEQ ID NO: 467709 - DNA, 15 bp, Homo sapiens
aggccaggcgcagtg

SEQ ID NO: 467710 - DNA, 15 bp, Homo sapiens
taggccaggcgcagt

SEQ ID NO: 467711 - DNA, 15 bp, Homo sapiens
ttaggccaggcgcag

SEQ ID NO: 467712 - DNA, 15 bp, Homo sapiens
attaggccaggcgca

SEQ ID NO: 467713 - DNA, 15 bp, Homo sapiens
aattaggccaggcgc

SEQ ID NO: 467714 - DNA, 15 bp, Homo sapiens
aaattaggccaggcg

SEQ ID NO: 467715 - DNA, 15 bp, Homo sapiens
aaaattaggccaggc

SEQ ID NO: 467716 - DNA, 15 bp, Homo sapiens
taaaattaggccagg

SEQ ID NO: 467717 - DNA, 15 bp, Homo sapiens
ctaaaattaggccag

SEQ ID NO: 467718 - DNA, 15 bp, Homo sapiens
tctaaaattaggcca

SEQ ID NO: 467719 - DNA, 15 bp, Homo sapiens
ttctaaaattaggcc

SEQ ID NO: 467720 - DNA, 15 bp, Homo sapiens
gttctaaaattaggc

SEQ ID NO: 467721 - DNA, 15 bp, Homo sapiens
agttctaaaattagg

SEQ ID NO: 467722 - DNA, 15 bp, Homo sapiens
aagttctaaaattag

SEQ ID NO: 467723 - DNA, 15 bp, Homo sapiens
caagttctaaaatta

SEQ ID NO: 467724 - DNA, 15 bp, Homo sapiens
acaagttctaaaatt

SEQ ID NO: 467725 - DNA, 15 bp, Homo sapiens
aacaagttctaaaat

SEQ ID NO: 467726 - DNA, 15 bp, Homo sapiens
taacaagttctaaaa

SEQ ID NO: 467727 - DNA, 15 bp, Homo sapiens
ttaacaagttctaaa

SEQ ID NO: 467728 - DNA, 15 bp, Homo sapiens
tttaacaagttctaa

SEQ ID NO: 467729 - DNA, 15 bp, Homo sapiens
ttttaacaagttcta

SEQ ID NO: 467730 - DNA, 15 bp, Homo sapiens
gttttaacaagttct

SEQ ID NO: 467731 - DNA, 15 bp, Homo sapiens
tgttttaacaagttc

SEQ ID NO: 467732 - DNA, 15 bp, Homo sapiens
ttgttttaacaagtt

SEQ ID NO: 467733 - DNA, 15 bp, Homo sapiens
gttgttttaacaagt

SEQ ID NO: 467734 - DNA, 15 bp, Homo sapiens
agttgttttaacaag

SEQ ID NO: 467735 - DNA, 15 bp, Homo sapiens
aagttgttttaacaa

SEQ ID NO: 467736 - DNA, 15 bp, Homo sapiens
caagttgttttaaca

SEQ ID NO: 467737 - DNA, 15 bp, Homo sapiens
ccaagttgttttaac

SEQ ID NO: 467738 - DNA, 15 bp, Homo sapiens
gccaagttgttttaa

SEQ ID NO: 467739 - DNA, 15 bp, Homo sapiens
ggccaagttgtttta

SEQ ID NO: 467740 - DNA, 15 bp, Homo sapiens
aggccaagttgtttt

SEQ ID NO: 467741 - DNA, 15 bp, Homo sapiens
gaggccaagttgttt

SEQ ID NO: 467742 - DNA, 15 bp, Homo sapiens
agaggccaagttgtt

SEQ ID NO: 467743 - DNA, 15 bp, Homo sapiens
tagaggccaagttgt

SEQ ID NO: 467744 - DNA, 15 bp, Homo sapiens
atagaggccaagttg

SEQ ID NO: 467745 - DNA, 15 bp, Homo sapiens
aatagaggccaagtt

SEQ ID NO: 467746 - DNA, 15 bp, Homo sapiens
caatagaggccaagt

SEQ ID NO: 467747 - DNA, 15 bp, Homo sapiens
tcaatagaggccaag

SEQ ID NO: 467748 - DNA, 15 bp, Homo sapiens
atcaatagaggccaa

SEQ ID NO: 467749 - DNA, 15 bp, Homo sapiens
tatcaatagaggcca

SEQ ID NO: 467750 - DNA, 15 bp, Homo sapiens
atatcaatagaggcc

SEQ ID NO: 467751 - DNA, 15 bp, Homo sapiens
aatatcaatagaggc

SEQ ID NO: 467752 - DNA, 15 bp, Homo sapiens
aaatatcaatagagg

SEQ ID NO: 467753 - DNA, 15 bp, Homo sapiens
gaaatatcaatagag

SEQ ID NO: 467754 - DNA, 15 bp, Homo sapiens
ggaaatatcaataga

SEQ ID NO: 467755 - DNA, 15 bp, Homo sapiens
tggaaatatcaatag

SEQ ID NO: 467756 - DNA, 15 bp, Homo sapiens
atggaaatatcaata

SEQ ID NO: 467757 - DNA, 15 bp, Homo sapiens
catggaaatatcaat

SEQ ID NO: 467758 - DNA, 15 bp, Homo sapiens
tcatggaaatatcaa

SEQ ID NO: 467759 - DNA, 15 bp, Homo sapiens
gtcatggaaatatca

SEQ ID NO: 467760 - DNA, 15 bp, Homo sapiens
ggtcatggaaatatc

SEQ ID NO: 467761 - DNA, 15 bp, Homo sapiens
gggtcatggaaatat

SEQ ID NO: 467762 - DNA, 15 bp, Homo sapiens
tgggtcatggaaata

SEQ ID NO: 467763 - DNA, 15 bp, Homo sapiens
atgggtcatggaaat

SEQ ID NO: 467764 - DNA, 15 bp, Homo sapiens
catgggtcatggaaa

SEQ ID NO: 467765 - DNA, 15 bp, Homo sapiens
gcatgggtcatggaa

SEQ ID NO: 467766 - DNA, 15 bp, Homo sapiens
agcatgggtcatgga

SEQ ID NO: 467767 - DNA, 15 bp, Homo sapiens
tagcatgggtcatgg

SEQ ID NO: 467768 - DNA, 15 bp, Homo sapiens
atagcatgggtcatg

SEQ ID NO: 467769 - DNA, 15 bp, Homo sapiens
aatagcatgggtcat

SEQ ID NO: 467770 - DNA, 15 bp, Homo sapiens
gaatagcatgggtca

SEQ ID NO: 467771 - DNA, 15 bp, Homo sapiens
tgaatagcatgggtc

SEQ ID NO: 467772 - DNA, 15 bp, Homo sapiens
ctgaatagcatgggt

SEQ ID NO: 467773 - DNA, 15 bp, Homo sapiens
tctgaatagcatggg

SEQ ID NO: 467774 - DNA, 15 bp, Homo sapiens
ttctgaatagcatgg

SEQ ID NO: 467775 - DNA, 15 bp, Homo sapiens
tttctgaatagcatg

SEQ ID NO: 467776 - DNA, 15 bp, Homo sapiens
ctttctgaatagcat

SEQ ID NO: 467777 - DNA, 15 bp, Homo sapiens
tctttctgaatagca

SEQ ID NO: 467778 - DNA, 15 bp, Homo sapiens
ctctttctgaatagc

SEQ ID NO: 467779 - DNA, 15 bp, Homo sapiens
cctctttctgaatag

SEQ ID NO: 467780 - DNA, 15 bp, Homo sapiens
tcctctttctgaata

SEQ ID NO: 467781 - DNA, 15 bp, Homo sapiens
atcctctttctgaat

SEQ ID NO: 467782 - DNA, 15 bp, Homo sapiens
aatcctctttctgaa

SEQ ID NO: 467783 - DNA, 15 bp, Homo sapiens
taatcctctttctga

SEQ ID NO: 467784 - DNA, 15 bp, Homo sapiens
gtaatcctctttctg

SEQ ID NO: 467785 - DNA, 15 bp, Homo sapiens
tgtaatcctctttct

SEQ ID NO: 467786 - DNA, 15 bp, Homo sapiens
ctgtaatcctctttc

SEQ ID NO: 467787 - DNA, 15 bp, Homo sapiens
cctgtaatcctcttt

SEQ ID NO: 467788 - DNA, 15 bp, Homo sapiens
acctgtaatcctctt

SEQ ID NO: 467789 - DNA, 15 bp, Homo sapiens
tacctgtaatcctct

SEQ ID NO: 467790 - DNA, 15 bp, Homo sapiens
ttacctgtaatcctc

SEQ ID NO: 467791 - DNA, 15 bp, Homo sapiens
attacctgtaatcct

SEQ ID NO: 467792 - DNA, 15 bp, Homo sapiens
aattacctgtaatcc

SEQ ID NO: 467793 - DNA, 15 bp, Homo sapiens
taattacctgtaatc

SEQ ID NO: 467794 - DNA, 15 bp, Homo sapiens
ctaattacctgtaat

SEQ ID NO: 467795 - DNA, 15 bp, Homo sapiens
gctaattacctgtaa

SEQ ID NO: 467796 - DNA, 15 bp, Homo sapiens
agctaattacctgta

SEQ ID NO: 467797 - DNA, 15 bp, Homo sapiens
cagctaattacctgt

SEQ ID NO: 467798 - DNA, 15 bp, Homo sapiens
ccagctaattacctg

SEQ ID NO: 467799 - DNA, 15 bp, Homo sapiens
gccagctaattacct

SEQ ID NO: 467800 - DNA, 15 bp, Homo sapiens
agccagctaattacc

SEQ ID NO: 467801 - DNA, 15 bp, Homo sapiens
cagccagctaattac

SEQ ID NO: 467802 - DNA, 15 bp, Homo sapiens
ccagccagctaatta

SEQ ID NO: 467803 - DNA, 15 bp, Homo sapiens
cccagccagctaatt

SEQ ID NO: 467804 - DNA, 15 bp, Homo sapiens
acccagccagctaat

SEQ ID NO: 467805 - DNA, 15 bp, Homo sapiens
aacccagccagctaa

SEQ ID NO: 467806 - DNA, 15 bp, Homo sapiens
aaacccagccagcta

SEQ ID NO: 467807 - DNA, 15 bp, Homo sapiens
gaaacccagccagct

SEQ ID NO: 467808 - DNA, 15 bp, Homo sapiens
agaaacccagccagc

SEQ ID NO: 467809 - DNA, 15 bp, Homo sapiens
gagaaacccagccag

SEQ ID NO: 467810 - DNA, 15 bp, Homo sapiens
tgagaaacccagcca

SEQ ID NO: 467811 - DNA, 15 bp, Homo sapiens
atgagaaacccagcc

SEQ ID NO: 467812 - DNA, 15 bp, Homo sapiens
tatgagaaacccagc

SEQ ID NO: 467813 - DNA, 15 bp, Homo sapiens
gtatgagaaacccag

SEQ ID NO: 467814 - DNA, 15 bp, Homo sapiens
ggtatgagaaaccca

SEQ ID NO: 467815 - DNA, 15 bp, Homo sapiens
tggtatgagaaaccc

SEQ ID NO: 467816 - DNA, 15 bp, Homo sapiens
ctggtatgagaaacc

SEQ ID NO: 467817 - DNA, 15 bp, Homo sapiens
tctggtatgagaaac

SEQ ID NO: 467818 - DNA, 15 bp, Homo sapiens
ctctggtatgagaaa

SEQ ID NO: 467819 - DNA, 15 bp, Homo sapiens
gctctggtatgagaa

SEQ ID NO: 467820 - DNA, 15 bp, Homo sapiens
tgctctggtatgaga

SEQ ID NO: 467821 - DNA, 15 bp, Homo sapiens
atgctctggtatgag

SEQ ID NO: 467822 - DNA, 15 bp, Homo sapiens
aatgctctggtatga

SEQ ID NO: 467823 - DNA, 15 bp, Homo sapiens
aaatgctctggtatg

SEQ ID NO: 467824 - DNA, 15 bp, Homo sapiens
gaaatgctctggtat

SEQ ID NO: 467825 - DNA, 15 bp, Homo sapiens
tgaaatgctctggta

SEQ ID NO: 467826 - DNA, 15 bp, Homo sapiens
gtgaaatgctctggt

SEQ ID NO: 467827 - DNA, 15 bp, Homo sapiens
agtgaaatgctctgg

SEQ ID NO: 467828 - DNA, 15 bp, Homo sapiens
cagtgaaatgctctg

SEQ ID NO: 467829 - DNA, 15 bp, Homo sapiens
ccagtgaaatgctct

SEQ ID NO: 467830 - DNA, 15 bp, Homo sapiens
cccagtgaaatgctc

SEQ ID NO: 467831 - DNA, 15 bp, Homo sapiens
tcccagtgaaatgct

SEQ ID NO: 467832 - DNA, 15 bp, Homo sapiens
atcccagtgaaatgc

SEQ ID NO: 467833 - DNA, 15 bp, Homo sapiens
catcccagtgaaatg

SEQ ID NO: 467834 - DNA, 15 bp, Homo sapiens
acatcccagtgaaat

SEQ ID NO: 467835 - DNA, 15 bp, Homo sapiens
aacatcccagtgaaa

SEQ ID NO: 467836 - DNA, 15 bp, Homo sapiens
gaacatcccagtgaa

SEQ ID NO: 467837 - DNA, 15 bp, Homo sapiens
ggaacatcccagtga

SEQ ID NO: 467838 - DNA, 15 bp, Homo sapiens
aggaacatcccagtg

SEQ ID NO: 467839 - DNA, 15 bp, Homo sapiens
caggaacatcccagt

SEQ ID NO: 467840 - DNA, 15 bp, Homo sapiens
tcaggaacatcccag

SEQ ID NO: 467841 - DNA, 15 bp, Homo sapiens
ttcaggaacatccca

SEQ ID NO: 467842 - DNA, 15 bp, Homo sapiens
gttcaggaacatccc

SEQ ID NO: 467843 - DNA, 15 bp, Homo sapiens
ggttcaggaacatcc

SEQ ID NO: 467844 - DNA, 15 bp, Homo sapiens
aggttcaggaacatc

SEQ ID NO: 467845 - DNA, 15 bp, Homo sapiens
caggttcaggaacat

SEQ ID NO: 467846 - DNA, 15 bp, Homo sapiens
ccaggttcaggaaca

SEQ ID NO: 467847 - DNA, 15 bp, Homo sapiens
cccaggttcaggaac

SEQ ID NO: 467848 - DNA, 15 bp, Homo sapiens
tcccaggttcaggaa

SEQ ID NO: 467849 - DNA, 15 bp, Homo sapiens
gtcccaggttcagga

SEQ ID NO: 467850 - DNA, 15 bp, Homo sapiens
tgtcccaggttcagg

SEQ ID NO: 467851 - DNA, 15 bp, Homo sapiens
ttgtcccaggttcag

SEQ ID NO: 467852 - DNA, 15 bp, Homo sapiens
gttgtcccaggttca

SEQ ID NO: 467853 - DNA, 15 bp, Homo sapiens
agttgtcccaggttc

SEQ ID NO: 467854 - DNA, 15 bp, Homo sapiens
aagttgtcccaggtt

SEQ ID NO: 467855 - DNA, 15 bp, Homo sapiens
aaagttgtcccaggt

SEQ ID NO: 467856 - DNA, 15 bp, Homo sapiens
aaaagttgtcccagg

SEQ ID NO: 467857 - DNA, 15 bp, Homo sapiens
taaaagttgtcccag

SEQ ID NO: 467858 - DNA, 15 bp, Homo sapiens
ataaaagttgtccca

SEQ ID NO: 467859 - DNA, 15 bp, Homo sapiens
cataaaagttgtccc

SEQ ID NO: 467860 - DNA, 15 bp, Homo sapiens
gcataaaagttgtcc

SEQ ID NO: 467861 - DNA, 15 bp, Homo sapiens
ggcataaaagttgtc

SEQ ID NO: 467862 - DNA, 15 bp, Homo sapiens
aggcataaaagttgt

SEQ ID NO: 467863 - DNA, 15 bp, Homo sapiens
caggcataaaagttg

SEQ ID NO: 467864 - DNA, 15 bp, Homo sapiens
ccaggcataaaagtt

SEQ ID NO: 467865 - DNA, 15 bp, Homo sapiens
gccaggcataaaagt

SEQ ID NO: 467866 - DNA, 15 bp, Homo sapiens
tgccaggcataaaag

SEQ ID NO: 467867 - DNA, 15 bp, Homo sapiens
atgccaggcataaaa

SEQ ID NO: 467868 - DNA, 15 bp, Homo sapiens
aatgccaggcataaa

SEQ ID NO: 467869 - DNA, 15 bp, Homo sapiens
aaatgccaggcataa

SEQ ID NO: 467870 - DNA, 15 bp, Homo sapiens
aaaatgccaggcata

SEQ ID NO: 467871 - DNA, 15 bp, Homo sapiens
aaaaatgccaggcat

SEQ ID NO: 467872 - DNA, 15 bp, Homo sapiens
gaaaaatgccaggca

SEQ ID NO: 467873 - DNA, 15 bp, Homo sapiens
agaaaaatgccaggc

SEQ ID NO: 467874 - DNA, 15 bp, Homo sapiens
aagaaaaatgccagg

SEQ ID NO: 467875 - DNA, 15 bp, Homo sapiens
aaagaaaaatgccag

SEQ ID NO: 467876 - DNA, 15 bp, Homo sapiens
gaaagaaaaatgcca

SEQ ID NO: 467877 - DNA, 15 bp, Homo sapiens
ggaaagaaaaatgcc

SEQ ID NO: 467878 - DNA, 15 bp, Homo sapiens
aggaaagaaaaatgc

SEQ ID NO: 467879 - DNA, 15 bp, Homo sapiens
aaggaaagaaaaatg

SEQ ID NO: 467880 - DNA, 15 bp, Homo sapiens
gaaggaaagaaaaat

SEQ ID NO: 467881 - DNA, 15 bp, Homo sapiens
agaaggaaagaaaaa

SEQ ID NO: 467882 - DNA, 15 bp, Homo sapiens
gagaaggaaagaaaa

SEQ ID NO: 467883 - DNA, 15 bp, Homo sapiens
agagaaggaaagaaa

SEQ ID NO: 467884 - DNA, 15 bp, Homo sapiens
cagagaaggaaagaa

SEQ ID NO: 467885 - DNA, 15 bp, Homo sapiens
acagagaaggaaaga

SEQ ID NO: 467886 - DNA, 15 bp, Homo sapiens
aacagagaaggaaag

SEQ ID NO: 467887 - DNA, 15 bp, Homo sapiens
caacagagaaggaaa

SEQ ID NO: 467888 - DNA, 15 bp, Homo sapiens
acaacagagaaggaa

SEQ ID NO: 467889 - DNA, 15 bp, Homo sapiens
gacaacagagaagga

SEQ ID NO: 467890 - DNA, 15 bp, Homo sapiens
ggacaacagagaagg

SEQ ID NO: 467891 - DNA, 15 bp, Homo sapiens
gggacaacagagaag

SEQ ID NO: 467892 - DNA, 15 bp, Homo sapiens
tgggacaacagagaa

SEQ ID NO: 467893 - DNA, 15 bp, Homo sapiens
ctgggacaacagaga

SEQ ID NO: 467894 - DNA, 15 bp, Homo sapiens
tctgggacaacagag

SEQ ID NO: 467895 - DNA, 15 bp, Homo sapiens
gtctgggacaacaga

SEQ ID NO: 467896 - DNA, 15 bp, Homo sapiens
agtctgggacaacag

SEQ ID NO: 467897 - DNA, 15 bp, Homo sapiens
tagtctgggacaaca

SEQ ID NO: 467898 - DNA, 15 bp, Homo sapiens
ttagtctgggacaac

SEQ ID NO: 467899 - DNA, 15 bp, Homo sapiens
cttagtctgggacaa

SEQ ID NO: 467900 - DNA, 15 bp, Homo sapiens
gcttagtctgggaca

SEQ ID NO: 467901 - DNA, 15 bp, Homo sapiens
tgcttagtctgggac

SEQ ID NO: 467902 - DNA, 15 bp, Homo sapiens
ttgcttagtctggga

SEQ ID NO: 467903 - DNA, 15 bp, Homo sapiens
attgcttagtctggg

SEQ ID NO: 467904 - DNA, 15 bp, Homo sapiens
aattgcttagtctgg

SEQ ID NO: 467905 - DNA, 15 bp, Homo sapiens
aaattgcttagtctg

SEQ ID NO: 467906 - DNA, 15 bp, Homo sapiens
aaaattgcttagtct

SEQ ID NO: 467907 - DNA, 15 bp, Homo sapiens
aaaaattgcttagtc

SEQ ID NO: 467908 - DNA, 15 bp, Homo sapiens
taaaaattgcttagt

SEQ ID NO: 467909 - DNA, 15 bp, Homo sapiens
ttaaaaattgcttag

SEQ ID NO: 467910 - DNA, 15 bp, Homo sapiens
tttaaaaattgctta

SEQ ID NO: 467911 - DNA, 15 bp, Homo sapiens
ttttaaaaattgctt

SEQ ID NO: 467912 - DNA, 15 bp, Homo sapiens
attttaaaaattgct

SEQ ID NO: 467913 - DNA, 15 bp, Homo sapiens
tattttaaaaattgc

SEQ ID NO: 467914 - DNA, 15 bp, Homo sapiens
ctattttaaaaattg

SEQ ID NO: 467915 - DNA, 15 bp, Homo sapiens
actattttaaaaatt

SEQ ID NO: 467916 - DNA, 15 bp, Homo sapiens
aactattttaaaaat

SEQ ID NO: 467917 - DNA, 15 bp, Homo sapiens
taactattttaaaaa

SEQ ID NO: 467918 - DNA, 15 bp, Homo sapiens
ataactattttaaaa

SEQ ID NO: 467919 - DNA, 15 bp, Homo sapiens
aataactattttaaa

SEQ ID NO: 467920 - DNA, 15 bp, Homo sapiens
taataactattttaa

SEQ ID NO: 467921 - DNA, 15 bp, Homo sapiens
ataataactatttta

SEQ ID NO: 467922 - DNA, 15 bp, Homo sapiens
aataataactatttt

SEQ ID NO: 467923 - DNA, 15 bp, Homo sapiens
aaataataactattt

SEQ ID NO: 467924 - DNA, 15 bp, Homo sapiens
caaataataactatt

SEQ ID NO: 467925 - DNA, 15 bp, Homo sapiens
acaaataataactat

SEQ ID NO: 467926 - DNA, 15 bp, Homo sapiens
aacaaataataacta

SEQ ID NO: 467927 - DNA, 15 bp, Homo sapiens
caacaaataataact

SEQ ID NO: 467928 - DNA, 15 bp, Homo sapiens
tcaacaaataataac

SEQ ID NO: 467929 - DNA, 15 bp, Homo sapiens
ctcaacaaataataa

SEQ ID NO: 467930 - DNA, 15 bp, Homo sapiens
actcaacaaataata

SEQ ID NO: 467931 - DNA, 15 bp, Homo sapiens
tactcaacaaataat

SEQ ID NO: 467932 - DNA, 15 bp, Homo sapiens
ctactcaacaaataa

SEQ ID NO: 467933 - DNA, 15 bp, Homo sapiens
cctactcaacaaata

SEQ ID NO: 467934 - DNA, 15 bp, Homo sapiens
tcctactcaacaaat

SEQ ID NO: 467935 - DNA, 15 bp, Homo sapiens
ctcctactcaacaaa

SEQ ID NO: 467936 - DNA, 15 bp, Homo sapiens
tctcctactcaacaa

SEQ ID NO: 467937 - DNA, 15 bp, Homo sapiens
ttctcctactcaaca

SEQ ID NO: 467938 - DNA, 15 bp, Homo sapiens
attctcctactcaac

SEQ ID NO: 467939 - DNA, 15 bp, Homo sapiens
gattctcctactcaa

SEQ ID NO: 467940 - DNA, 15 bp, Homo sapiens
agattctcctactca

SEQ ID NO: 467941 - DNA, 15 bp, Homo sapiens
gagattctcctactc

SEQ ID NO: 467942 - DNA, 15 bp, Homo sapiens
tgagattctcctact

SEQ ID NO: 467943 - DNA, 15 bp, Homo sapiens
ctgagattctcctac

SEQ ID NO: 467944 - DNA, 15 bp, Homo sapiens
cctgagattctccta

SEQ ID NO: 467945 - DNA, 15 bp, Homo sapiens
gcctgagattctcct

SEQ ID NO: 467946 - DNA, 15 bp, Homo sapiens
tgcctgagattctcc

SEQ ID NO: 467947 - DNA, 15 bp, Homo sapiens
ctgcctgagattctc

SEQ ID NO: 467948 - DNA, 15 bp, Homo sapiens
tctgcctgagattct

SEQ ID NO: 467949 - DNA, 15 bp, Homo sapiens
atctgcctgagattc

SEQ ID NO: 467950 - DNA, 15 bp, Homo sapiens
gatctgcctgagatt

SEQ ID NO: 467951 - DNA, 15 bp, Homo sapiens
agatctgcctgagat

SEQ ID NO: 467952 - DNA, 15 bp, Homo sapiens
aagatctgcctgaga

SEQ ID NO: 467953 - DNA, 15 bp, Homo sapiens
gaagatctgcctgag

SEQ ID NO: 467954 - DNA, 15 bp, Homo sapiens
ggaagatctgcctga

SEQ ID NO: 467955 - DNA, 15 bp, Homo sapiens
aggaagatctgcctg

SEQ ID NO: 467956 - DNA, 15 bp, Homo sapiens
caggaagatctgcct

SEQ ID NO: 467957 - DNA, 15 bp, Homo sapiens
ccaggaagatctgcc

SEQ ID NO: 467958 - DNA, 15 bp, Homo sapiens
tccaggaagatctgc

SEQ ID NO: 467959 - DNA, 15 bp, Homo sapiens
atccaggaagatctg

SEQ ID NO: 467960 - DNA, 15 bp, Homo sapiens
gatccaggaagatct

SEQ ID NO: 467961 - DNA, 15 bp, Homo sapiens
ggatccaggaagatc

SEQ ID NO: 467962 - DNA, 15 bp, Homo sapiens
aggatccaggaagat

SEQ ID NO: 467963 - DNA, 15 bp, Homo sapiens
gaggatccaggaaga

SEQ ID NO: 467964 - DNA, 15 bp, Homo sapiens
tgaggatccaggaag

SEQ ID NO: 467965 - DNA, 15 bp, Homo sapiens
atgaggatccaggaa

SEQ ID NO: 467966 - DNA, 15 bp, Homo sapiens
aatgaggatccagga

SEQ ID NO: 467967 - DNA, 15 bp, Homo sapiens
aaatgaggatccagg

SEQ ID NO: 467968 - DNA, 15 bp, Homo sapiens
taaatgaggatccag

SEQ ID NO: 467969 - DNA, 15 bp, Homo sapiens
ataaatgaggatcca

SEQ ID NO: 467970 - DNA, 15 bp, Homo sapiens
tataaatgaggatcc

SEQ ID NO: 467971 - DNA, 15 bp, Homo sapiens
gtataaatgaggatc

SEQ ID NO: 467972 - DNA, 15 bp, Homo sapiens
agtataaatgaggat

SEQ ID NO: 467973 - DNA, 15 bp, Homo sapiens
aagtataaatgagga

SEQ ID NO: 467974 - DNA, 15 bp, Homo sapiens
aaagtataaatgagg

SEQ ID NO: 467975 - DNA, 15 bp, Homo sapiens
aaaagtataaatgag

SEQ ID NO: 467976 - DNA, 15 bp, Homo sapiens
taaaagtataaatga

SEQ ID NO: 467977 - DNA, 15 bp, Homo sapiens
ttaaaagtataaatg

SEQ ID NO: 467978 - DNA, 15 bp, Homo sapiens
tttaaaagtataaat

SEQ ID NO: 467979 - DNA, 15 bp, Homo sapiens
gtttaaaagtataaa

SEQ ID NO: 467980 - DNA, 15 bp, Homo sapiens
ggtttaaaagtataa

SEQ ID NO: 467981 - DNA, 15 bp, Homo sapiens
aggtttaaaagtata

SEQ ID NO: 467982 - DNA, 15 bp, Homo sapiens
caggtttaaaagtat

SEQ ID NO: 467983 - DNA, 15 bp, Homo sapiens
acaggtttaaaagta

SEQ ID NO: 467984 - DNA, 15 bp, Homo sapiens
tacaggtttaaaagt

SEQ ID NO: 467985 - DNA, 15 bp, Homo sapiens
ctacaggtttaaaag

SEQ ID NO: 467986 - DNA, 15 bp, Homo sapiens
actacaggtttaaaa

SEQ ID NO: 467987 - DNA, 15 bp, Homo sapiens
gactacaggtttaaa

SEQ ID NO: 467988 - DNA, 15 bp, Homo sapiens
agactacaggtttaa

SEQ ID NO: 467989 - DNA, 15 bp, Homo sapiens
aagactacaggttta

SEQ ID NO: 467990 - DNA, 15 bp, Homo sapiens
caagactacaggttt

SEQ ID NO: 467991 - DNA, 15 bp, Homo sapiens
ccaagactacaggtt

SEQ ID NO: 467992 - DNA, 15 bp, Homo sapiens
tccaagactacaggt

SEQ ID NO: 467993 - DNA, 15 bp, Homo sapiens
ttccaagactacagg

SEQ ID NO: 467994 - DNA, 15 bp, Homo sapiens
attccaagactacag

SEQ ID NO: 467995 - DNA, 15 bp, Homo sapiens
aattccaagactaca

SEQ ID NO: 467996 - DNA, 15 bp, Homo sapiens
taattccaagactac

SEQ ID NO: 467997 - DNA, 15 bp, Homo sapiens
ctaattccaagacta

SEQ ID NO: 467998 - DNA, 15 bp, Homo sapiens
actaattccaagact

SEQ ID NO: 467999 - DNA, 15 bp, Homo sapiens
cactaattccaagac

SEQ ID NO: 468000 - DNA, 15 bp, Homo sapiens
gcactaattccaaga

SEQ ID NO: 468001 - DNA, 15 bp, Homo sapiens
agcactaattccaag

SEQ ID NO: 468002 - DNA, 15 bp, Homo sapiens
gagcactaattccaa

SEQ ID NO: 468003 - DNA, 15 bp, Homo sapiens
agagcactaattcca

SEQ ID NO: 468004 - DNA, 15 bp, Homo sapiens
cagagcactaattcc

SEQ ID NO: 468005 - DNA, 15 bp, Homo sapiens
acagagcactaattc

SEQ ID NO: 468006 - DNA, 15 bp, Homo sapiens
gacagagcactaatt

SEQ ID NO: 468007 - DNA, 15 bp, Homo sapiens
ggacagagcactaat

SEQ ID NO: 468008 - DNA, 15 bp, Homo sapiens
gggacagagcactaa

SEQ ID NO: 468009 - DNA, 15 bp, Homo sapiens
ggggacagagcacta

SEQ ID NO: 468010 - DNA, 15 bp, Homo sapiens
gggggacagagcact

SEQ ID NO: 468011 - DNA, 15 bp, Homo sapiens
tgggggacagagcac

SEQ ID NO: 468012 - DNA, 15 bp, Homo sapiens
ttgggggacagagca

SEQ ID NO: 468013 - DNA, 15 bp, Homo sapiens
gttgggggacagagc

SEQ ID NO: 468014 - DNA, 15 bp, Homo sapiens
ggttgggggacagag

SEQ ID NO: 468015 - DNA, 15 bp, Homo sapiens
gggttgggggacaga

SEQ ID NO: 468016 - DNA, 15 bp, Homo sapiens
ggggttgggggacag

SEQ ID NO: 468017 - DNA, 15 bp, Homo sapiens
tggggttgggggaca

SEQ ID NO: 468018 - DNA, 15 bp, Homo sapiens
ttggggttgggggac

SEQ ID NO: 468019 - DNA, 15 bp, Homo sapiens
tttggggttggggga

SEQ ID NO: 468020 - DNA, 15 bp, Homo sapiens
gtttggggttggggg

SEQ ID NO: 468021 - DNA, 15 bp, Homo sapiens
tgtttggggttgggg

SEQ ID NO: 468022 - DNA, 15 bp, Homo sapiens
atgtttggggttggg

SEQ ID NO: 468023 - DNA, 15 bp, Homo sapiens
gatgtttggggttgg

SEQ ID NO: 468024 - DNA, 15 bp, Homo sapiens
ggatgtttggggttg

SEQ ID NO: 468025 - DNA, 15 bp, Homo sapiens
tggatgtttggggtt

SEQ ID NO: 468026 - DNA, 15 bp, Homo sapiens
ttggatgtttggggt

SEQ ID NO: 468027 - DNA, 15 bp, Homo sapiens
attggatgtttgggg

SEQ ID NO: 468028 - DNA, 15 bp, Homo sapiens
aattggatgtttggg

SEQ ID NO: 468029 - DNA, 15 bp, Homo sapiens
aaattggatgtttgg

SEQ ID NO: 468030 - DNA, 15 bp, Homo sapiens
gaaattggatgtttg

SEQ ID NO: 468031 - DNA, 15 bp, Homo sapiens
agaaattggatgttt

SEQ ID NO: 468032 - DNA, 15 bp, Homo sapiens
tagaaattggatgtt

SEQ ID NO: 468033 - DNA, 15 bp, Homo sapiens
gtagaaattggatgt

SEQ ID NO: 468034 - DNA, 15 bp, Homo sapiens
tgtagaaattggatg

SEQ ID NO: 468035 - DNA, 15 bp, Homo sapiens
atgtagaaattggat

SEQ ID NO: 468036 - DNA, 15 bp, Homo sapiens
aatgtagaaattgga

SEQ ID NO: 468037 - DNA, 15 bp, Homo sapiens
aaatgtagaaattgg

SEQ ID NO: 468038 - DNA, 15 bp, Homo sapiens
aaaatgtagaaattg

SEQ ID NO: 468039 - DNA, 15 bp, Homo sapiens
caaaatgtagaaatt

SEQ ID NO: 468040 - DNA, 15 bp, Homo sapiens
ccaaaatgtagaaat

SEQ ID NO: 468041 - DNA, 15 bp, Homo sapiens
gccaaaatgtagaaa

SEQ ID NO: 468042 - DNA, 15 bp, Homo sapiens
agccaaaatgtagaa

SEQ ID NO: 468043 - DNA, 15 bp, Homo sapiens
tagccaaaatgtaga

SEQ ID NO: 468044 - DNA, 15 bp, Homo sapiens
gtagccaaaatgtag

SEQ ID NO: 468045 - DNA, 15 bp, Homo sapiens
tgtagccaaaatgta

SEQ ID NO: 468046 - DNA, 15 bp, Homo sapiens
ctgtagccaaaatgt

SEQ ID NO: 468047 - DNA, 15 bp, Homo sapiens
actgtagccaaaatg

SEQ ID NO: 468048 - DNA, 15 bp, Homo sapiens
tactgtagccaaaat

SEQ ID NO: 468049 - DNA, 15 bp, Homo sapiens
gtactgtagccaaaa

SEQ ID NO: 468050 - DNA, 15 bp, Homo sapiens
tgtactgtagccaaa

SEQ ID NO: 468051 - DNA, 15 bp, Homo sapiens
ctgtactgtagccaa

SEQ ID NO: 468052 - DNA, 15 bp, Homo sapiens
cctgtactgtagcca

SEQ ID NO: 468053 - DNA, 15 bp, Homo sapiens
acctgtactgtagcc

SEQ ID NO: 468054 - DNA, 15 bp, Homo sapiens
aacctgtactgtagc

SEQ ID NO: 468055 - DNA, 15 bp, Homo sapiens
aaacctgtactgtag

SEQ ID NO: 468056 - DNA, 15 bp, Homo sapiens
taaacctgtactgta

SEQ ID NO: 468057 - DNA, 15 bp, Homo sapiens
gtaaacctgtactgt

SEQ ID NO: 468058 - DNA, 15 bp, Homo sapiens
agtaaacctgtactg

SEQ ID NO: 468059 - DNA, 15 bp, Homo sapiens
cagtaaacctgtact

SEQ ID NO: 468060 - DNA, 15 bp, Homo sapiens
acagtaaacctgtac

SEQ ID NO: 468061 - DNA, 15 bp, Homo sapiens
cacagtaaacctgta

SEQ ID NO: 468062 - DNA, 15 bp, Homo sapiens
acacagtaaacctgt

SEQ ID NO: 468063 - DNA, 15 bp, Homo sapiens
tacacagtaaacctg

SEQ ID NO: 468064 - DNA, 15 bp, Homo sapiens
atacacagtaaacct

SEQ ID NO: 468065 - DNA, 15 bp, Homo sapiens
tatacacagtaaacc

SEQ ID NO: 468066 - DNA, 15 bp, Homo sapiens
ttatacacagtaaac

SEQ ID NO: 468067 - DNA, 15 bp, Homo sapiens
gttatacacagtaaa

SEQ ID NO: 468068 - DNA, 15 bp, Homo sapiens
agttatacacagtaa

SEQ ID NO: 468069 - DNA, 15 bp, Homo sapiens
tagttatacacagta

SEQ ID NO: 468070 - DNA, 15 bp, Homo sapiens
ttagttatacacagt

SEQ ID NO: 468071 - DNA, 15 bp, Homo sapiens
tttagttatacacag

SEQ ID NO: 468072 - DNA, 15 bp, Homo sapiens
ttttagttatacaca

SEQ ID NO: 468073 - DNA, 15 bp, Homo sapiens
cttttagttatacac

SEQ ID NO: 468074 - DNA, 15 bp, Homo sapiens
ccttttagttataca

SEQ ID NO: 468075 - DNA, 15 bp, Homo sapiens
cccttttagttatac

SEQ ID NO: 468076 - DNA, 15 bp, Homo sapiens
gcccttttagttata

SEQ ID NO: 468077 - DNA, 15 bp, Homo sapiens
agcccttttagttat

SEQ ID NO: 468078 - DNA, 15 bp, Homo sapiens
cagcccttttagtta

SEQ ID NO: 468079 - DNA, 15 bp, Homo sapiens
acagcccttttagtt

SEQ ID NO: 468080 - DNA, 15 bp, Homo sapiens
cacagcccttttagt

SEQ ID NO: 468081 - DNA, 15 bp, Homo sapiens
ccacagcccttttag

SEQ ID NO: 468082 - DNA, 15 bp, Homo sapiens
tccacagccctttta

SEQ ID NO: 468083 - DNA, 15 bp, Homo sapiens
ctccacagccctttt

SEQ ID NO: 468084 - DNA, 15 bp, Homo sapiens
cctccacagcccttt

SEQ ID NO: 468085 - DNA, 15 bp, Homo sapiens
tcctccacagccctt

SEQ ID NO: 468086 - DNA, 15 bp, Homo sapiens
ctcctccacagccct

SEQ ID NO: 468087 - DNA, 15 bp, Homo sapiens
tctcctccacagccc

SEQ ID NO: 468088 - DNA, 15 bp, Homo sapiens
ttctcctccacagcc

SEQ ID NO: 468089 - DNA, 15 bp, Homo sapiens
tttctcctccacagc

SEQ ID NO: 468090 - DNA, 15 bp, Homo sapiens
ctttctcctccacag

SEQ ID NO: 468091 - DNA, 15 bp, Homo sapiens
tctttctcctccaca

SEQ ID NO: 468092 - DNA, 15 bp, Homo sapiens
ttctttctcctccac

SEQ ID NO: 468093 - DNA, 15 bp, Homo sapiens
tttctttctcctcca

SEQ ID NO: 468094 - DNA, 15 bp, Homo sapiens
ctttctttctcctcc

SEQ ID NO: 468095 - DNA, 15 bp, Homo sapiens
cctttctttctcctc

SEQ ID NO: 468096 - DNA, 15 bp, Homo sapiens
tcctttctttctcct

SEQ ID NO: 468097 - DNA, 15 bp, Homo sapiens
ttcctttctttctcc

SEQ ID NO: 468098 - DNA, 15 bp, Homo sapiens
gttcctttctttctc

SEQ ID NO: 468099 - DNA, 15 bp, Homo sapiens
ggttcctttctttct

SEQ ID NO: 468100 - DNA, 15 bp, Homo sapiens
cggttcctttctttc

SEQ ID NO: 468101 - DNA, 15 bp, Homo sapiens
tcggttcctttcttt

SEQ ID NO: 468102 - DNA, 15 bp, Homo sapiens
gtcggttcctttctt

SEQ ID NO: 468103 - DNA, 15 bp, Homo sapiens
tgtcggttcctttct

SEQ ID NO: 468104 - DNA, 15 bp, Homo sapiens
atgtcggttcctttc

SEQ ID NO: 468105 - DNA, 15 bp, Homo sapiens
aatgtcggttccttt

SEQ ID NO: 468106 - DNA, 15 bp, Homo sapiens
aaatgtcggttcctt

SEQ ID NO: 468107 - DNA, 15 bp, Homo sapiens
caaatgtcggttcct

SEQ ID NO: 468108 - DNA, 15 bp, Homo sapiens
acaaatgtcggttcc

SEQ ID NO: 468109 - DNA, 15 bp, Homo sapiens
aacaaatgtcggttc

SEQ ID NO: 468110 - DNA, 15 bp, Homo sapiens
caacaaatgtcggtt

SEQ ID NO: 468111 - DNA, 15 bp, Homo sapiens
ccaacaaatgtcggt

SEQ ID NO: 468112 - DNA, 15 bp, Homo sapiens
cccaacaaatgtcgg

SEQ ID NO: 468113 - DNA, 15 bp, Homo sapiens
gcccaacaaatgtcg

SEQ ID NO: 468114 - DNA, 15 bp, Homo sapiens
tgcccaacaaatgtc

SEQ ID NO: 468115 - DNA, 15 bp, Homo sapiens
atgcccaacaaatgt

SEQ ID NO: 468116 - DNA, 15 bp, Homo sapiens
gatgcccaacaaatg

SEQ ID NO: 468117 - DNA, 15 bp, Homo sapiens
agatgcccaacaaat

SEQ ID NO: 468118 - DNA, 15 bp, Homo sapiens
cagatgcccaacaaa

SEQ ID NO: 468119 - DNA, 15 bp, Homo sapiens
acagatgcccaacaa

SEQ ID NO: 468120 - DNA, 15 bp, Homo sapiens
aacagatgcccaaca

SEQ ID NO: 468121 - DNA, 15 bp, Homo sapiens
taacagatgcccaac

SEQ ID NO: 468122 - DNA, 15 bp, Homo sapiens
ataacagatgcccaa

SEQ ID NO: 468123 - DNA, 15 bp, Homo sapiens
cataacagatgccca

SEQ ID NO: 468124 - DNA, 15 bp, Homo sapiens
acataacagatgccc

SEQ ID NO: 468125 - DNA, 15 bp, Homo sapiens
cacataacagatgcc

SEQ ID NO: 468126 - DNA, 15 bp, Homo sapiens
gcacataacagatgc

SEQ ID NO: 468127 - DNA, 15 bp, Homo sapiens
ggcacataacagatg

SEQ ID NO: 468128 - DNA, 15 bp, Homo sapiens
tggcacataacagat

SEQ ID NO: 468129 - DNA, 15 bp, Homo sapiens
atggcacataacaga

SEQ ID NO: 468130 - DNA, 15 bp, Homo sapiens
catggcacataacag

SEQ ID NO: 468131 - DNA, 15 bp, Homo sapiens
gcatggcacataaca

SEQ ID NO: 468132 - DNA, 15 bp, Homo sapiens
tgcatggcacataac

SEQ ID NO: 468133 - DNA, 15 bp, Homo sapiens
gtgcatggcacataa

SEQ ID NO: 468134 - DNA, 15 bp, Homo sapiens
agtgcatggcacata

SEQ ID NO: 468135 - DNA, 15 bp, Homo sapiens
cagtgcatggcacat

SEQ ID NO: 468136 - DNA, 15 bp, Homo sapiens
tcagtgcatggcaca

SEQ ID NO: 468137 - DNA, 15 bp, Homo sapiens
ctcagtgcatggcac

SEQ ID NO: 468138 - DNA, 15 bp, Homo sapiens
gctcagtgcatggca

SEQ ID NO: 468139 - DNA, 15 bp, Homo sapiens
agctcagtgcatggc

SEQ ID NO: 468140 - DNA, 15 bp, Homo sapiens
cagctcagtgcatgg

SEQ ID NO: 468141 - DNA, 15 bp, Homo sapiens
ccagctcagtgcatg

SEQ ID NO: 468142 - DNA, 15 bp, Homo sapiens
tccagctcagtgcat

SEQ ID NO: 468143 - DNA, 15 bp, Homo sapiens
atccagctcagtgca

SEQ ID NO: 468144 - DNA, 15 bp, Homo sapiens
catccagctcagtgc

SEQ ID NO: 468145 - DNA, 15 bp, Homo sapiens
gcatccagctcagtg

SEQ ID NO: 468146 - DNA, 15 bp, Homo sapiens
agcatccagctcagt

SEQ ID NO: 468147 - DNA, 15 bp, Homo sapiens
cagcatccagctcag

SEQ ID NO: 468148 - DNA, 15 bp, Homo sapiens
acagcatccagctca

SEQ ID NO: 468149 - DNA, 15 bp, Homo sapiens
tacagcatccagctc

SEQ ID NO: 468150 - DNA, 15 bp, Homo sapiens
ctacagcatccagct

SEQ ID NO: 468151 - DNA, 15 bp, Homo sapiens
cctacagcatccagc

SEQ ID NO: 468152 - DNA, 15 bp, Homo sapiens
tcctacagcatccag

SEQ ID NO: 468153 - DNA, 15 bp, Homo sapiens
ttcctacagcatcca

SEQ ID NO: 468154 - DNA, 15 bp, Homo sapiens
attcctacagcatcc

SEQ ID NO: 468155 - DNA, 15 bp, Homo sapiens
tattcctacagcatc

SEQ ID NO: 468156 - DNA, 15 bp, Homo sapiens
atattcctacagcat

SEQ ID NO: 468157 - DNA, 15 bp, Homo sapiens
gatattcctacagca

SEQ ID NO: 468158 - DNA, 15 bp, Homo sapiens
agatattcctacagc

SEQ ID NO: 468159 - DNA, 15 bp, Homo sapiens
gagatattcctacag

SEQ ID NO: 468160 - DNA, 15 bp, Homo sapiens
tgagatattcctaca

SEQ ID NO: 468161 - DNA, 15 bp, Homo sapiens
ttgagatattcctac

SEQ ID NO: 468162 - DNA, 15 bp, Homo sapiens
attgagatattccta

SEQ ID NO: 468163 - DNA, 15 bp, Homo sapiens
tattgagatattcct

SEQ ID NO: 468164 - DNA, 15 bp, Homo sapiens
gtattgagatattcc

SEQ ID NO: 468165 - DNA, 15 bp, Homo sapiens
ggtattgagatattc

SEQ ID NO: 468166 - DNA, 15 bp, Homo sapiens
aggtattgagatatt

SEQ ID NO: 468167 - DNA, 15 bp, Homo sapiens
gaggtattgagatat

SEQ ID NO: 468168 - DNA, 15 bp, Homo sapiens
agaggtattgagata

SEQ ID NO: 468169 - DNA, 15 bp, Homo sapiens
cagaggtattgagat

SEQ ID NO: 468170 - DNA, 15 bp, Homo sapiens
tcagaggtattgaga

SEQ ID NO: 468171 - DNA, 15 bp, Homo sapiens
ctcagaggtattgag

SEQ ID NO: 468172 - DNA, 15 bp, Homo sapiens
cctcagaggtattga

SEQ ID NO: 468173 - DNA, 15 bp, Homo sapiens
tcctcagaggtattg

SEQ ID NO: 468174 - DNA, 15 bp, Homo sapiens
ctcctcagaggtatt

SEQ ID NO: 468175 - DNA, 15 bp, Homo sapiens
actcctcagaggtat

SEQ ID NO: 468176 - DNA, 15 bp, Homo sapiens
cactcctcagaggta

SEQ ID NO: 468177 - DNA, 15 bp, Homo sapiens
ccactcctcagaggt

SEQ ID NO: 468178 - DNA, 15 bp, Homo sapiens
cccactcctcagagg

SEQ ID NO: 468179 - DNA, 15 bp, Homo sapiens
tcccactcctcagag

SEQ ID NO: 468180 - DNA, 15 bp, Homo sapiens
ttcccactcctcaga

SEQ ID NO: 468181 - DNA, 15 bp, Homo sapiens
attcccactcctcag

SEQ ID NO: 468182 - DNA, 15 bp, Homo sapiens
aattcccactcctca

SEQ ID NO: 468183 - DNA, 15 bp, Homo sapiens
taattcccactcctc

SEQ ID NO: 468184 - DNA, 15 bp, Homo sapiens
ataattcccactcct

SEQ ID NO: 468185 - DNA, 15 bp, Homo sapiens
aataattcccactcc

SEQ ID NO: 468186 - DNA, 15 bp, Homo sapiens
taataattcccactc

SEQ ID NO: 468187 - DNA, 15 bp, Homo sapiens
ataataattcccact

SEQ ID NO: 468188 - DNA, 15 bp, Homo sapiens
gataataattcccac

SEQ ID NO: 468189 - DNA, 15 bp, Homo sapiens
agataataattccca

SEQ ID NO: 468190 - DNA, 15 bp, Homo sapiens
gagataataattccc

SEQ ID NO: 468191 - DNA, 15 bp, Homo sapiens
agagataataattcc

SEQ ID NO: 468192 - DNA, 15 bp, Homo sapiens
tagagataataattc

SEQ ID NO: 468193 - DNA, 15 bp, Homo sapiens
atagagataataatt

SEQ ID NO: 468194 - DNA, 15 bp, Homo sapiens
aatagagataataat

SEQ ID NO: 468195 - DNA, 15 bp, Homo sapiens
aaatagagataataa

SEQ ID NO: 468196 - DNA, 15 bp, Homo sapiens
aaaatagagataata

SEQ ID NO: 468197 - DNA, 15 bp, Homo sapiens
taaaatagagataat

SEQ ID NO: 468198 - DNA, 15 bp, Homo sapiens
ataaaatagagataa

SEQ ID NO: 468199 - DNA, 15 bp, Homo sapiens
tataaaatagagata

SEQ ID NO: 468200 - DNA, 15 bp, Homo sapiens
ctataaaatagagat

SEQ ID NO: 468201 - DNA, 15 bp, Homo sapiens
tctataaaatagaga

SEQ ID NO: 468202 - DNA, 15 bp, Homo sapiens
gtctataaaatagag

SEQ ID NO: 468203 - DNA, 15 bp, Homo sapiens
tgtctataaaataga

SEQ ID NO: 468204 - DNA, 15 bp, Homo sapiens
ttgtctataaaatag

SEQ ID NO: 468205 - DNA, 15 bp, Homo sapiens
cttgtctataaaata

SEQ ID NO: 468206 - DNA, 15 bp, Homo sapiens
ccttgtctataaaat

SEQ ID NO: 468207 - DNA, 15 bp, Homo sapiens
cccttgtctataaaa

SEQ ID NO: 468208 - DNA, 15 bp, Homo sapiens
tcccttgtctataaa

SEQ ID NO: 468209 - DNA, 15 bp, Homo sapiens
ttcccttgtctataa

SEQ ID NO: 468210 - DNA, 15 bp, Homo sapiens
attcccttgtctata

SEQ ID NO: 468211 - DNA, 15 bp, Homo sapiens
tattcccttgtctat

SEQ ID NO: 468212 - DNA, 15 bp, Homo sapiens
ctattcccttgtcta

SEQ ID NO: 468213 - DNA, 15 bp, Homo sapiens
tctattcccttgtct

SEQ ID NO: 468214 - DNA, 15 bp, Homo sapiens
ttctattcccttgtc

SEQ ID NO: 468215 - DNA, 15 bp, Homo sapiens
tttctattcccttgt

SEQ ID NO: 468216 - DNA, 15 bp, Homo sapiens
atttctattcccttg

SEQ ID NO: 468217 - DNA, 15 bp, Homo sapiens
gatttctattccctt

SEQ ID NO: 468218 - DNA, 15 bp, Homo sapiens
agatttctattccct

SEQ ID NO: 468219 - DNA, 15 bp, Homo sapiens
cagatttctattccc

SEQ ID NO: 468220 - DNA, 15 bp, Homo sapiens
ccagatttctattcc

SEQ ID NO: 468221 - DNA, 15 bp, Homo sapiens
cccagatttctattc

SEQ ID NO: 468222 - DNA, 15 bp, Homo sapiens
tcccagatttctatt

SEQ ID NO: 468223 - DNA, 15 bp, Homo sapiens
ctcccagatttctat

SEQ ID NO: 468224 - DNA, 15 bp, Homo sapiens
actcccagatttcta

SEQ ID NO: 468225 - DNA, 15 bp, Homo sapiens
aactcccagatttct

SEQ ID NO: 468226 - DNA, 15 bp, Homo sapiens
taactcccagatttc

SEQ ID NO: 468227 - DNA, 15 bp, Homo sapiens
ttaactcccagattt

SEQ ID NO: 468228 - DNA, 15 bp, Homo sapiens
cttaactcccagatt

SEQ ID NO: 468229 - DNA, 15 bp, Homo sapiens
acttaactcccagat

SEQ ID NO: 468230 - DNA, 15 bp, Homo sapiens
tacttaactcccaga

SEQ ID NO: 468231 - DNA, 15 bp, Homo sapiens
ttacttaactcccag

SEQ ID NO: 468232 - DNA, 15 bp, Homo sapiens
attacttaactccca

SEQ ID NO: 468233 - DNA, 15 bp, Homo sapiens
aattacttaactccc

SEQ ID NO: 468234 - DNA, 15 bp, Homo sapiens
aaattacttaactcc

SEQ ID NO: 468235 - DNA, 15 bp, Homo sapiens
aaaattacttaactc

SEQ ID NO: 468236 - DNA, 15 bp, Homo sapiens
aaaaattacttaact

SEQ ID NO: 468237 - DNA, 15 bp, Homo sapiens
aaaaaattacttaac

SEQ ID NO: 468238 - DNA, 15 bp, Homo sapiens
taaaaaattacttaa

SEQ ID NO: 468239 - DNA, 15 bp, Homo sapiens
ttaaaaaattactta

SEQ ID NO: 468240 - DNA, 15 bp, Homo sapiens
attaaaaaattactt

SEQ ID NO: 468241 - DNA, 15 bp, Homo sapiens
aattaaaaaattact

SEQ ID NO: 468242 - DNA, 15 bp, Homo sapiens
aaattaaaaaattac

SEQ ID NO: 468243 - DNA, 15 bp, Homo sapiens
gaaattaaaaaatta

SEQ ID NO: 468244 - DNA, 15 bp, Homo sapiens
tgaaattaaaaaatt

SEQ ID NO: 468245 - DNA, 15 bp, Homo sapiens
gtgaaattaaaaaat

SEQ ID NO: 468246 - DNA, 15 bp, Homo sapiens
tgtgaaattaaaaaa

SEQ ID NO: 468247 - DNA, 15 bp, Homo sapiens
gtgtgaaattaaaaa

SEQ ID NO: 468248 - DNA, 15 bp, Homo sapiens
tgtgtgaaattaaaa

SEQ ID NO: 468249 - DNA, 15 bp, Homo sapiens
gtgtgtgaaattaaa

SEQ ID NO: 468250 - DNA, 15 bp, Homo sapiens
agtgtgtgaaattaa

SEQ ID NO: 468251 - DNA, 15 bp, Homo sapiens
aagtgtgtgaaatta

SEQ ID NO: 468252 - DNA, 15 bp, Homo sapiens
gaagtgtgtgaaatt

SEQ ID NO: 468253 - DNA, 15 bp, Homo sapiens
agaagtgtgtgaaat

SEQ ID NO: 468254 - DNA, 15 bp, Homo sapiens
cagaagtgtgtgaaa

SEQ ID NO: 468255 - DNA, 15 bp, Homo sapiens
ccagaagtgtgtgaa

SEQ ID NO: 468256 - DNA, 15 bp, Homo sapiens
accagaagtgtgtga

SEQ ID NO: 468257 - DNA, 15 bp, Homo sapiens
taccagaagtgtgtg

SEQ ID NO: 468258 - DNA, 15 bp, Homo sapiens
ctaccagaagtgtgt

SEQ ID NO: 468259 - DNA, 15 bp, Homo sapiens
tctaccagaagtgtg

SEQ ID NO: 468260 - DNA, 15 bp, Homo sapiens
atctaccagaagtgt

SEQ ID NO: 468261 - DNA, 15 bp, Homo sapiens
tatctaccagaagtg

SEQ ID NO: 468262 - DNA, 15 bp, Homo sapiens
ttatctaccagaagt

SEQ ID NO: 468263 - DNA, 15 bp, Homo sapiens
attatctaccagaag

SEQ ID NO: 468264 - DNA, 15 bp, Homo sapiens
cattatctaccagaa

SEQ ID NO: 468265 - DNA, 15 bp, Homo sapiens
ccattatctaccaga

SEQ ID NO: 468266 - DNA, 15 bp, Homo sapiens
tccattatctaccag

SEQ ID NO: 468267 - DNA, 15 bp, Homo sapiens
atccattatctacca

SEQ ID NO: 468268 - DNA, 15 bp, Homo sapiens
aatccattatctacc

SEQ ID NO: 468269 - DNA, 15 bp, Homo sapiens
gaatccattatctac

SEQ ID NO: 468270 - DNA, 15 bp, Homo sapiens
agaatccattatcta

SEQ ID NO: 468271 - DNA, 15 bp, Homo sapiens
tagaatccattatct

SEQ ID NO: 468272 - DNA, 15 bp, Homo sapiens
ctagaatccattatc

SEQ ID NO: 468273 - DNA, 15 bp, Homo sapiens
tctagaatccattat

SEQ ID NO: 468274 - DNA, 15 bp, Homo sapiens
ttctagaatccatta

SEQ ID NO: 468275 - DNA, 15 bp, Homo sapiens
gttctagaatccatt

SEQ ID NO: 468276 - DNA, 15 bp, Homo sapiens
ggttctagaatccat

SEQ ID NO: 468277 - DNA, 15 bp, Homo sapiens
aggttctagaatcca

SEQ ID NO: 468278 - DNA, 15 bp, Homo sapiens
caggttctagaatcc

SEQ ID NO: 468279 - DNA, 15 bp, Homo sapiens
ccaggttctagaatc

SEQ ID NO: 468280 - DNA, 15 bp, Homo sapiens
gccaggttctagaat

SEQ ID NO: 468281 - DNA, 15 bp, Homo sapiens
tgccaggttctagaa

SEQ ID NO: 468282 - DNA, 15 bp, Homo sapiens
atgccaggttctaga

SEQ ID NO: 468283 - DNA, 15 bp, Homo sapiens
tatgccaggttctag

SEQ ID NO: 468284 - DNA, 15 bp, Homo sapiens
ttatgccaggttcta

SEQ ID NO: 468285 - DNA, 15 bp, Homo sapiens
attatgccaggttct

SEQ ID NO: 468286 - DNA, 15 bp, Homo sapiens
tattatgccaggttc

SEQ ID NO: 468287 - DNA, 15 bp, Homo sapiens
ctattatgccaggtt

SEQ ID NO: 468288 - DNA, 15 bp, Homo sapiens
gctattatgccaggt

SEQ ID NO: 468289 - DNA, 15 bp, Homo sapiens
ggctattatgccagg

SEQ ID NO: 468290 - DNA, 15 bp, Homo sapiens
tggctattatgccag

SEQ ID NO: 468291 - DNA, 15 bp, Homo sapiens
gtggctattatgcca

SEQ ID NO: 468292 - DNA, 15 bp, Homo sapiens
agtggctattatgcc

SEQ ID NO: 468293 - DNA, 15 bp, Homo sapiens
aagtggctattatgc

SEQ ID NO: 468294 - DNA, 15 bp, Homo sapiens
caagtggctattatg

SEQ ID NO: 468295 - DNA, 15 bp, Homo sapiens
acaagtggctattat

SEQ ID NO: 468296 - DNA, 15 bp, Homo sapiens
gacaagtggctatta

SEQ ID NO: 468297 - DNA, 15 bp, Homo sapiens
tgacaagtggctatt

SEQ ID NO: 468298 - DNA, 15 bp, Homo sapiens
atgacaagtggctat

SEQ ID NO: 468299 - DNA, 15 bp, Homo sapiens
gatgacaagtggcta

SEQ ID NO: 468300 - DNA, 15 bp, Homo sapiens
ggatgacaagtggct

SEQ ID NO: 468301 - DNA, 15 bp, Homo sapiens
gggatgacaagtggc

SEQ ID NO: 468302 - DNA, 15 bp, Homo sapiens
tgggatgacaagtgg

SEQ ID NO: 468303 - DNA, 15 bp, Homo sapiens
ctgggatgacaagtg

SEQ ID NO: 468304 - DNA, 15 bp, Homo sapiens
actgggatgacaagt

SEQ ID NO: 468305 - DNA, 15 bp, Homo sapiens
cactgggatgacaag

SEQ ID NO: 468306 - DNA, 15 bp, Homo sapiens
acactgggatgacaa

SEQ ID NO: 468307 - DNA, 15 bp, Homo sapiens
tacactgggatgaca

SEQ ID NO: 468308 - DNA, 15 bp, Homo sapiens
ttacactgggatgac

SEQ ID NO: 468309 - DNA, 15 bp, Homo sapiens
tttacactgggatga

SEQ ID NO: 468310 - DNA, 15 bp, Homo sapiens
ttttacactgggatg

SEQ ID NO: 468311 - DNA, 15 bp, Homo sapiens
cttttacactgggat

SEQ ID NO: 468312 - DNA, 15 bp, Homo sapiens
tcttttacactggga

SEQ ID NO: 468313 - DNA, 15 bp, Homo sapiens
ctcttttacactggg

SEQ ID NO: 468314 - DNA, 15 bp, Homo sapiens
tctcttttacactgg

SEQ ID NO: 468315 - DNA, 15 bp, Homo sapiens
atctcttttacactg

SEQ ID NO: 468316 - DNA, 15 bp, Homo sapiens
catctcttttacact

SEQ ID NO: 468317 - DNA, 15 bp, Homo sapiens
acatctcttttacac

SEQ ID NO: 468318 - DNA, 15 bp, Homo sapiens
cacatctcttttaca

SEQ ID NO: 468319 - DNA, 15 bp, Homo sapiens
acacatctcttttac

SEQ ID NO: 468320 - DNA, 15 bp, Homo sapiens
cacacatctctttta

SEQ ID NO: 468321 - DNA, 15 bp, Homo sapiens
ccacacatctctttt

SEQ ID NO: 468322 - DNA, 15 bp, Homo sapiens
gccacacatctcttt

SEQ ID NO: 468323 - DNA, 15 bp, Homo sapiens
ggccacacatctctt

SEQ ID NO: 468324 - DNA, 15 bp, Homo sapiens
tggccacacatctct

SEQ ID NO: 468325 - DNA, 15 bp, Homo sapiens
ctggccacacatctc

SEQ ID NO: 468326 - DNA, 15 bp, Homo sapiens
tctggccacacatct

SEQ ID NO: 468327 - DNA, 15 bp, Homo sapiens
atctggccacacatc

SEQ ID NO: 468328 - DNA, 15 bp, Homo sapiens
catctggccacacat

SEQ ID NO: 468329 - DNA, 15 bp, Homo sapiens
ccatctggccacaca

SEQ ID NO: 468330 - DNA, 15 bp, Homo sapiens
cccatctggccacac

SEQ ID NO: 468331 - DNA, 15 bp, Homo sapiens
ccccatctggccaca

SEQ ID NO: 468332 - DNA, 15 bp, Homo sapiens
accccatctggccac

SEQ ID NO: 468333 - DNA, 15 bp, Homo sapiens
caccccatctggcca

SEQ ID NO: 468334 - DNA, 15 bp, Homo sapiens
ccaccccatctggcc

SEQ ID NO: 468335 - DNA, 15 bp, Homo sapiens
gccaccccatctggc

SEQ ID NO: 468336 - DNA, 15 bp, Homo sapiens
agccaccccatctgg

SEQ ID NO: 468337 - DNA, 15 bp, Homo sapiens
gagccaccccatctg

SEQ ID NO: 468338 - DNA, 15 bp, Homo sapiens
tgagccaccccatct

SEQ ID NO: 468339 - DNA, 15 bp, Homo sapiens
gtgagccaccccatc

SEQ ID NO: 468340 - DNA, 15 bp, Homo sapiens
tgtgagccaccccat

SEQ ID NO: 468341 - DNA, 15 bp, Homo sapiens
atgtgagccacccca

SEQ ID NO: 468342 - DNA, 15 bp, Homo sapiens
tatgtgagccacccc

SEQ ID NO: 468343 - DNA, 15 bp, Homo sapiens
atatgtgagccaccc

SEQ ID NO: 468344 - DNA, 15 bp, Homo sapiens
catatgtgagccacc

SEQ ID NO: 468345 - DNA, 15 bp, Homo sapiens
acatatgtgagccac

SEQ ID NO: 468346 - DNA, 15 bp, Homo sapiens
tacatatgtgagcca

SEQ ID NO: 468347 - DNA, 15 bp, Homo sapiens
ttacatatgtgagcc

SEQ ID NO: 468348 - DNA, 15 bp, Homo sapiens
attacatatgtgagc

SEQ ID NO: 468349 - DNA, 15 bp, Homo sapiens
gattacatatgtgag

SEQ ID NO: 468350 - DNA, 15 bp, Homo sapiens
ggattacatatgtga

SEQ ID NO: 468351 - DNA, 15 bp, Homo sapiens
gggattacatatgtg

SEQ ID NO: 468352 - DNA, 15 bp, Homo sapiens
tgggattacatatgt

SEQ ID NO: 468353 - DNA, 15 bp, Homo sapiens
ctgggattacatatg

SEQ ID NO: 468354 - DNA, 15 bp, Homo sapiens
gctgggattacatat

SEQ ID NO: 468355 - DNA, 15 bp, Homo sapiens
tgctgggattacata

SEQ ID NO: 468356 - DNA, 15 bp, Homo sapiens
gtgctgggattacat

SEQ ID NO: 468357 - DNA, 15 bp, Homo sapiens
ttcccaaagtgctgg

SEQ ID NO: 468358 - DNA, 15 bp, Homo sapiens
cttcccaaagtgctg

SEQ ID NO: 468359 - DNA, 15 bp, Homo sapiens
gcttcccaaagtgct

SEQ ID NO: 468360 - DNA, 15 bp, Homo sapiens
ggcttcccaaagtgc

SEQ ID NO: 468361 - DNA, 15 bp, Homo sapiens
cggcttcccaaagtg

SEQ ID NO: 468362 - DNA, 15 bp, Homo sapiens
tcggcttcccaaagt

SEQ ID NO: 468363 - DNA, 15 bp, Homo sapiens
ctcggcttcccaaag

SEQ ID NO: 468364 - DNA, 15 bp, Homo sapiens
cctcggcttcccaaa

SEQ ID NO: 468365 - DNA, 15 bp, Homo sapiens
gcctcggcttcccaa

SEQ ID NO: 468366 - DNA, 15 bp, Homo sapiens
tgcctcggcttccca

SEQ ID NO: 468367 - DNA, 15 bp, Homo sapiens
ctgcctcggcttccc

SEQ ID NO: 468368 - DNA, 15 bp, Homo sapiens
cctgcctcggcttcc

SEQ ID NO: 468369 - DNA, 15 bp, Homo sapiens
tcctgcctcggcttc

SEQ ID NO: 468370 - DNA, 15 bp, Homo sapiens
ctcctgcctcggctt

SEQ ID NO: 468371 - DNA, 15 bp, Homo sapiens
cctcctgcctcggct

SEQ ID NO: 468372 - DNA, 15 bp, Homo sapiens
tcctcctgcctcggc

SEQ ID NO: 468373 - DNA, 15 bp, Homo sapiens
atcctcctgcctcgg

SEQ ID NO: 468374 - DNA, 15 bp, Homo sapiens
catcctcctgcctcg

SEQ ID NO: 468375 - DNA, 15 bp, Homo sapiens
tcatcctcctgcctc

SEQ ID NO: 468376 - DNA, 15 bp, Homo sapiens
gtcatcctcctgcct

SEQ ID NO: 468377 - DNA, 15 bp, Homo sapiens
agtcatcctcctgcc

SEQ ID NO: 468378 - DNA, 15 bp, Homo sapiens
aagtcatcctcctgc

SEQ ID NO: 468379 - DNA, 15 bp, Homo sapiens
caagtcatcctcctg

SEQ ID NO: 468380 - DNA, 15 bp, Homo sapiens
tcaagtcatcctcct

SEQ ID NO: 468381 - DNA, 15 bp, Homo sapiens
ctcaagtcatcctcc

SEQ ID NO: 468382 - DNA, 15 bp, Homo sapiens
gctcaagtcatcctc

SEQ ID NO: 468383 - DNA, 15 bp, Homo sapiens
ggctcaagtcatcct

SEQ ID NO: 468384 - DNA, 15 bp, Homo sapiens
gggctcaagtcatcc

SEQ ID NO: 468385 - DNA, 15 bp, Homo sapiens
tgggctcaagtcatc

SEQ ID NO: 468386 - DNA, 15 bp, Homo sapiens
ctgggctcaagtcat

SEQ ID NO: 468387 - DNA, 15 bp, Homo sapiens
cctgggctcaagtca

SEQ ID NO: 468388 - DNA, 15 bp, Homo sapiens
tcctgggctcaagtc

SEQ ID NO: 468389 - DNA, 15 bp, Homo sapiens
atgcccaggctggtc

SEQ ID NO: 468390 - DNA, 15 bp, Homo sapiens
catgcccaggctggt

SEQ ID NO: 468391 - DNA, 15 bp, Homo sapiens
acatgcccaggctgg

SEQ ID NO: 468392 - DNA, 15 bp, Homo sapiens
aacatgcccaggctg

SEQ ID NO: 468393 - DNA, 15 bp, Homo sapiens
aaacatgcccaggct

SEQ ID NO: 468394 - DNA, 15 bp, Homo sapiens
aaaacatgcccaggc

SEQ ID NO: 468395 - DNA, 15 bp, Homo sapiens
caaaacatgcccagg

SEQ ID NO: 468396 - DNA, 15 bp, Homo sapiens
acaaaacatgcccag

SEQ ID NO: 468397 - DNA, 15 bp, Homo sapiens
aacaaaacatgccca

SEQ ID NO: 468398 - DNA, 15 bp, Homo sapiens
aaacaaaacatgccc

SEQ ID NO: 468399 - DNA, 15 bp, Homo sapiens
caaacaaaacatgcc

SEQ ID NO: 468400 - DNA, 15 bp, Homo sapiens
acaaacaaaacatgc

SEQ ID NO: 468401 - DNA, 15 bp, Homo sapiens
gacaaacaaaacatg

SEQ ID NO: 468402 - DNA, 15 bp, Homo sapiens
agacaaacaaaacat

SEQ ID NO: 468403 - DNA, 15 bp, Homo sapiens
gagacaaacaaaaca

SEQ ID NO: 468404 - DNA, 15 bp, Homo sapiens
tgagacaaacaaaac

SEQ ID NO: 468405 - DNA, 15 bp, Homo sapiens
gtgagacaaacaaaa

SEQ ID NO: 468406 - DNA, 15 bp, Homo sapiens
cgtgagacaaacaaa

SEQ ID NO: 468407 - DNA, 15 bp, Homo sapiens
tcgtgagacaaacaa

SEQ ID NO: 468408 - DNA, 15 bp, Homo sapiens
ttcgtgagacaaaca

SEQ ID NO: 468409 - DNA, 15 bp, Homo sapiens
tttcgtgagacaaac

SEQ ID NO: 468410 - DNA, 15 bp, Homo sapiens
gtttcgtgagacaaa

SEQ ID NO: 468411 - DNA, 15 bp, Homo sapiens
tgtttcgtgagacaa

SEQ ID NO: 468412 - DNA, 15 bp, Homo sapiens
atgtttcgtgagaca

SEQ ID NO: 468413 - DNA, 15 bp, Homo sapiens
aatgtttcgtgagac

SEQ ID NO: 468414 - DNA, 15 bp, Homo sapiens
aaatgtttcgtgaga

SEQ ID NO: 468415 - DNA, 15 bp, Homo sapiens
aaaatgtttcgtgag

SEQ ID NO: 468416 - DNA, 15 bp, Homo sapiens
aaaaatgtttcgtga

SEQ ID NO: 468417 - DNA, 15 bp, Homo sapiens
aaaaaatgtttcgtg

SEQ ID NO: 468418 - DNA, 15 bp, Homo sapiens
taaaaaatgtttcgt

SEQ ID NO: 468419 - DNA, 15 bp, Homo sapiens
ttaaaaaatgtttcg

SEQ ID NO: 468420 - DNA, 15 bp, Homo sapiens
tttaaaaaatgtttc

SEQ ID NO: 468421 - DNA, 15 bp, Homo sapiens
ttttaaaaaatgttt

SEQ ID NO: 468422 - DNA, 15 bp, Homo sapiens
tttttaaaaaatgtt

SEQ ID NO: 468423 - DNA, 15 bp, Homo sapiens
ttttttaaaaaatgt

SEQ ID NO: 468424 - DNA, 15 bp, Homo sapiens
attttttaaaaaatg

SEQ ID NO: 468425 - DNA, 15 bp, Homo sapiens
cattttttaaaaaat

SEQ ID NO: 468426 - DNA, 15 bp, Homo sapiens
tcattttttaaaaaa

SEQ ID NO: 468427 - DNA, 15 bp, Homo sapiens
ctcattttttaaaaa

SEQ ID NO: 468428 - DNA, 15 bp, Homo sapiens
actcattttttaaaa

SEQ ID NO: 468429 - DNA, 15 bp, Homo sapiens
cactcattttttaaa

SEQ ID NO: 468430 - DNA, 15 bp, Homo sapiens
acactcattttttaa

SEQ ID NO: 468431 - DNA, 15 bp, Homo sapiens
cacactcatttttta

SEQ ID NO: 468432 - DNA, 15 bp, Homo sapiens
ccacactcatttttt

SEQ ID NO: 468433 - DNA, 15 bp, Homo sapiens
gccacactcattttt

SEQ ID NO: 468434 - DNA, 15 bp, Homo sapiens
tgccacactcatttt

SEQ ID NO: 468435 - DNA, 15 bp, Homo sapiens
atgccacactcattt

SEQ ID NO: 468436 - DNA, 15 bp, Homo sapiens
catgccacactcatt

SEQ ID NO: 468437 - DNA, 15 bp, Homo sapiens
ccatgccacactcat

SEQ ID NO: 468438 - DNA, 15 bp, Homo sapiens
accatgccacactca

SEQ ID NO: 468439 - DNA, 15 bp, Homo sapiens
caccatgccacactc

SEQ ID NO: 468440 - DNA, 15 bp, Homo sapiens
acaccatgccacact

SEQ ID NO: 468441 - DNA, 15 bp, Homo sapiens
aacaccatgccacac

SEQ ID NO: 468442 - DNA, 15 bp, Homo sapiens
caacaccatgccaca

SEQ ID NO: 468443 - DNA, 15 bp, Homo sapiens
acaacaccatgccac

SEQ ID NO: 468444 - DNA, 15 bp, Homo sapiens
cacaacaccatgcca

SEQ ID NO: 468445 - DNA, 15 bp, Homo sapiens
acacaacaccatgcc

SEQ ID NO: 468446 - DNA, 15 bp, Homo sapiens
cacacaacaccatgc

SEQ ID NO: 468447 - DNA, 15 bp, Homo sapiens
gcacacaacaccatg

SEQ ID NO: 468448 - DNA, 15 bp, Homo sapiens
ggcacacaacaccat

SEQ ID NO: 468449 - DNA, 15 bp, Homo sapiens
aggcacacaacacca

SEQ ID NO: 468450 - DNA, 15 bp, Homo sapiens
taggcacacaacacc

SEQ ID NO: 468451 - DNA, 15 bp, Homo sapiens
ataggcacacaacac

SEQ ID NO: 468452 - DNA, 15 bp, Homo sapiens
tataggcacacaaca

SEQ ID NO: 468453 - DNA, 15 bp, Homo sapiens
ctataggcacacaac

SEQ ID NO: 468454 - DNA, 15 bp, Homo sapiens
actataggcacacaa

SEQ ID NO: 468455 - DNA, 15 bp, Homo sapiens
gactataggcacaca

SEQ ID NO: 468456 - DNA, 15 bp, Homo sapiens
ggactataggcacac

SEQ ID NO: 468457 - DNA, 15 bp, Homo sapiens
gggactataggcaca

SEQ ID NO: 468458 - DNA, 15 bp, Homo sapiens
tgggactataggcac

SEQ ID NO: 468459 - DNA, 15 bp, Homo sapiens
ctgggactataggca

SEQ ID NO: 468460 - DNA, 15 bp, Homo sapiens
gctgggactataggc

SEQ ID NO: 468461 - DNA, 15 bp, Homo sapiens
agctgggactatagg

SEQ ID NO: 468462 - DNA, 15 bp, Homo sapiens
gagctgggactatag

SEQ ID NO: 468463 - DNA, 15 bp, Homo sapiens
ggagctgggactata

SEQ ID NO: 468464 - DNA, 15 bp, Homo sapiens
aggagctgggactat

SEQ ID NO: 468465 - DNA, 15 bp, Homo sapiens
gaggagctgggacta

SEQ ID NO: 468466 - DNA, 15 bp, Homo sapiens
cgaggagctgggact

SEQ ID NO: 468467 - DNA, 15 bp, Homo sapiens
ccgaggagctgggac

SEQ ID NO: 468468 - DNA, 15 bp, Homo sapiens
cccgaggagctggga

SEQ ID NO: 468469 - DNA, 15 bp, Homo sapiens
tcccgaggagctggg

SEQ ID NO: 468470 - DNA, 15 bp, Homo sapiens
ctcccgaggagctgg

SEQ ID NO: 468471 - DNA, 15 bp, Homo sapiens
cctcccgaggagctg

SEQ ID NO: 468472 - DNA, 15 bp, Homo sapiens
gcctcccgaggagct

SEQ ID NO: 468473 - DNA, 15 bp, Homo sapiens
agcctcccgaggagc

SEQ ID NO: 468474 - DNA, 15 bp, Homo sapiens
cagcctcccgaggag

SEQ ID NO: 468475 - DNA, 15 bp, Homo sapiens
tcagcctcccgagga

SEQ ID NO: 468476 - DNA, 15 bp, Homo sapiens
ctcagcctcccgagg

SEQ ID NO: 468477 - DNA, 15 bp, Homo sapiens
acctcagcctcccga

SEQ ID NO: 468478 - DNA, 15 bp, Homo sapiens
cacctcagcctcccg

SEQ ID NO: 468479 - DNA, 15 bp, Homo sapiens
agatcctcccacctc

SEQ ID NO: 468480 - DNA, 15 bp, Homo sapiens
gagatcctcccacct

SEQ ID NO: 468481 - DNA, 15 bp, Homo sapiens
agagatcctcccacc

SEQ ID NO: 468482 - DNA, 15 bp, Homo sapiens
aagagatcctcccac

SEQ ID NO: 468483 - DNA, 15 bp, Homo sapiens
caagagatcctccca

SEQ ID NO: 468484 - DNA, 15 bp, Homo sapiens
tcaagagatcctccc

SEQ ID NO: 468485 - DNA, 15 bp, Homo sapiens
ctcaagagatcctcc

SEQ ID NO: 468486 - DNA, 15 bp, Homo sapiens
gctcaagagatcctc

SEQ ID NO: 468487 - DNA, 15 bp, Homo sapiens
ggctcaagagatcct

SEQ ID NO: 468488 - DNA, 15 bp, Homo sapiens
gggctcaagagatcc

SEQ ID NO: 468489 - DNA, 15 bp, Homo sapiens
tgggctcaagagatc

SEQ ID NO: 468490 - DNA, 15 bp, Homo sapiens
atgggctcaagagat

SEQ ID NO: 468491 - DNA, 15 bp, Homo sapiens
catgggctcaagaga

SEQ ID NO: 468492 - DNA, 15 bp, Homo sapiens
tcatgggctcaagag

SEQ ID NO: 468493 - DNA, 15 bp, Homo sapiens
atcatgggctcaaga

SEQ ID NO: 468494 - DNA, 15 bp, Homo sapiens
gatcatgggctcaag

SEQ ID NO: 468495 - DNA, 15 bp, Homo sapiens
tgatcatgggctcaa

SEQ ID NO: 468496 - DNA, 15 bp, Homo sapiens
atgatcatgggctca

SEQ ID NO: 468497 - DNA, 15 bp, Homo sapiens
catgatcatgggctc

SEQ ID NO: 468498 - DNA, 15 bp, Homo sapiens
gcatgatcatgggct

SEQ ID NO: 468499 - DNA, 15 bp, Homo sapiens
ggcatgatcatgggc

SEQ ID NO: 468500 - DNA, 15 bp, Homo sapiens
tggcatgatcatggg

SEQ ID NO: 468501 - DNA, 15 bp, Homo sapiens
atggcatgatcatgg

SEQ ID NO: 468502 - DNA, 15 bp, Homo sapiens
aatggcatgatcatg

SEQ ID NO: 468503 - DNA, 15 bp, Homo sapiens
caatggcatgatcat

SEQ ID NO: 468504 - DNA, 15 bp, Homo sapiens
gcaatggcatgatca

SEQ ID NO: 468505 - DNA, 15 bp, Homo sapiens
tgcaatggcatgatc

SEQ ID NO: 468506 - DNA, 15 bp, Homo sapiens
gtgcaatggcatgat

SEQ ID NO: 468507 - DNA, 15 bp, Homo sapiens
agtgcaatggcatga

SEQ ID NO: 468508 - DNA, 15 bp, Homo sapiens
gagtgcaatggcatg

SEQ ID NO: 468509 - DNA, 15 bp, Homo sapiens
agagtgcaatggcat

SEQ ID NO: 468510 - DNA, 15 bp, Homo sapiens
tagagtgcaatggca

SEQ ID NO: 468511 - DNA, 15 bp, Homo sapiens
ctagagtgcaatggc

SEQ ID NO: 468512 - DNA, 15 bp, Homo sapiens
gctagagtgcaatgg

SEQ ID NO: 468513 - DNA, 15 bp, Homo sapiens
ggctagagtgcaatg

SEQ ID NO: 468514 - DNA, 15 bp, Homo sapiens
aggctagagtgcaat

SEQ ID NO: 468515 - DNA, 15 bp, Homo sapiens
caggctagagtgcaa

SEQ ID NO: 468516 - DNA, 15 bp, Homo sapiens
ggcccaggctagagt

SEQ ID NO: 468517 - DNA, 15 bp, Homo sapiens
tggcccaggctagag

SEQ ID NO: 468518 - DNA, 15 bp, Homo sapiens
gtggcccaggctaga

SEQ ID NO: 468519 - DNA, 15 bp, Homo sapiens
tgtggcccaggctag

SEQ ID NO: 468520 - DNA, 15 bp, Homo sapiens
ctgtggcccaggcta

SEQ ID NO: 468521 - DNA, 15 bp, Homo sapiens
gtcttgctctgtggc

SEQ ID NO: 468522 - DNA, 15 bp, Homo sapiens
agtcttgctctgtgg

SEQ ID NO: 468523 - DNA, 15 bp, Homo sapiens
gagtcttgctctgtg

SEQ ID NO: 468524 - DNA, 15 bp, Homo sapiens
aagacagagtcttgc

SEQ ID NO: 468525 - DNA, 15 bp, Homo sapiens
gaagacagagtcttg

SEQ ID NO: 468526 - DNA, 15 bp, Homo sapiens
tgaagacagagtctt

SEQ ID NO: 468527 - DNA, 15 bp, Homo sapiens
ttgaagacagagtct

SEQ ID NO: 468528 - DNA, 15 bp, Homo sapiens
tttgaagacagagtc

SEQ ID NO: 468529 - DNA, 15 bp, Homo sapiens
ttttgaagacagagt

SEQ ID NO: 468530 - DNA, 15 bp, Homo sapiens
tttttgaagacagag

SEQ ID NO: 468531 - DNA, 15 bp, Homo sapiens
ttttttgaagacaga

SEQ ID NO: 468532 - DNA, 15 bp, Homo sapiens
attttttgaagacag

SEQ ID NO: 468533 - DNA, 15 bp, Homo sapiens
tattttttgaagaca

SEQ ID NO: 468534 - DNA, 15 bp, Homo sapiens
ttattttttgaagac

SEQ ID NO: 468535 - DNA, 15 bp, Homo sapiens
attattttttgaaga

SEQ ID NO: 468536 - DNA, 15 bp, Homo sapiens
tattattttttgaag

SEQ ID NO: 468537 - DNA, 15 bp, Homo sapiens
ttattattttttgaa

SEQ ID NO: 468538 - DNA, 15 bp, Homo sapiens
tttattattttttga

SEQ ID NO: 468539 - DNA, 15 bp, Homo sapiens
ttttattattttttg

SEQ ID NO: 468540 - DNA, 15 bp, Homo sapiens
tttttattatttttt

SEQ ID NO: 468541 - DNA, 15 bp, Homo sapiens
ctttttattattttt

SEQ ID NO: 468542 - DNA, 15 bp, Homo sapiens
cctttttattatttt

SEQ ID NO: 468543 - DNA, 15 bp, Homo sapiens
tcctttttattattt

SEQ ID NO: 468544 - DNA, 15 bp, Homo sapiens
ctcctttttattatt

SEQ ID NO: 468545 - DNA, 15 bp, Homo sapiens
gctcctttttattat

SEQ ID NO: 468546 - DNA, 15 bp, Homo sapiens
agctcctttttatta

SEQ ID NO: 468547 - DNA, 15 bp, Homo sapiens
cagctcctttttatt

SEQ ID NO: 468548 - DNA, 15 bp, Homo sapiens
acagctcctttttat

SEQ ID NO: 468549 - DNA, 15 bp, Homo sapiens
cacagctccttttta

SEQ ID NO: 468550 - DNA, 15 bp, Homo sapiens
tcacagctccttttt

SEQ ID NO: 468551 - DNA, 15 bp, Homo sapiens
atcacagctcctttt

SEQ ID NO: 468552 - DNA, 15 bp, Homo sapiens
aatcacagctccttt

SEQ ID NO: 468553 - DNA, 15 bp, Homo sapiens
taatcacagctcctt

SEQ ID NO: 468554 - DNA, 15 bp, Homo sapiens
ataatcacagctcct

SEQ ID NO: 468555 - DNA, 15 bp, Homo sapiens
gataatcacagctcc

SEQ ID NO: 468556 - DNA, 15 bp, Homo sapiens
ggataatcacagctc

SEQ ID NO: 468557 - DNA, 15 bp, Homo sapiens
gggataatcacagct

SEQ ID NO: 468558 - DNA, 15 bp, Homo sapiens
tgggataatcacagc

SEQ ID NO: 468559 - DNA, 15 bp, Homo sapiens
ttgggataatcacag

SEQ ID NO: 468560 - DNA, 15 bp, Homo sapiens
cttgggataatcaca

SEQ ID NO: 468561 - DNA, 15 bp, Homo sapiens
ccttgggataatcac

SEQ ID NO: 468562 - DNA, 15 bp, Homo sapiens
accttgggataatca

SEQ ID NO: 468563 - DNA, 15 bp, Homo sapiens
caccttgggataatc

SEQ ID NO: 468564 - DNA, 15 bp, Homo sapiens
ccaccttgggataat

SEQ ID NO: 468565 - DNA, 15 bp, Homo sapiens
cccaccttgggataa

SEQ ID NO: 468566 - DNA, 15 bp, Homo sapiens
ccccaccttgggata

SEQ ID NO: 468567 - DNA, 15 bp, Homo sapiens
tccccaccttgggat

SEQ ID NO: 468568 - DNA, 15 bp, Homo sapiens
atccccaccttggga

SEQ ID NO: 468569 - DNA, 15 bp, Homo sapiens
aatccccaccttggg

SEQ ID NO: 468570 - DNA, 15 bp, Homo sapiens
caatccccaccttgg

SEQ ID NO: 468571 - DNA, 15 bp, Homo sapiens
acaatccccaccttg

SEQ ID NO: 468572 - DNA, 15 bp, Homo sapiens
cacaatccccacctt

SEQ ID NO: 468573 - DNA, 15 bp, Homo sapiens
tcacaatccccacct

SEQ ID NO: 468574 - DNA, 15 bp, Homo sapiens
ttcacaatccccacc

SEQ ID NO: 468575 - DNA, 15 bp, Homo sapiens
attcacaatccccac

SEQ ID NO: 468576 - DNA, 15 bp, Homo sapiens
cattcacaatcccca

SEQ ID NO: 468577 - DNA, 15 bp, Homo sapiens
acattcacaatcccc

SEQ ID NO: 468578 - DNA, 15 bp, Homo sapiens
cacattcacaatccc

SEQ ID NO: 468579 - DNA, 15 bp, Homo sapiens
acacattcacaatcc

SEQ ID NO: 468580 - DNA, 15 bp, Homo sapiens
aacacattcacaatc

SEQ ID NO: 468581 - DNA, 15 bp, Homo sapiens
aaacacattcacaat

SEQ ID NO: 468582 - DNA, 15 bp, Homo sapiens
caaacacattcacaa

SEQ ID NO: 468583 - DNA, 15 bp, Homo sapiens
acaaacacattcaca

SEQ ID NO: 468584 - DNA, 15 bp, Homo sapiens
tacaaacacattcac

SEQ ID NO: 468585 - DNA, 15 bp, Homo sapiens
atacaaacacattca

SEQ ID NO: 468586 - DNA, 15 bp, Homo sapiens
aatacaaacacattc

SEQ ID NO: 468587 - DNA, 15 bp, Homo sapiens
caatacaaacacatt

SEQ ID NO: 468588 - DNA, 15 bp, Homo sapiens
acaatacaaacacat

SEQ ID NO: 468589 - DNA, 15 bp, Homo sapiens
aacaatacaaacaca

SEQ ID NO: 468590 - DNA, 15 bp, Homo sapiens
gaacaatacaaacac

SEQ ID NO: 468591 - DNA, 15 bp, Homo sapiens
agaacaatacaaaca

SEQ ID NO: 468592 - DNA, 15 bp, Homo sapiens
tagaacaatacaaac

SEQ ID NO: 468593 - DNA, 15 bp, Homo sapiens
ttagaacaatacaaa

SEQ ID NO: 468594 - DNA, 15 bp, Homo sapiens
tttagaacaatacaa

SEQ ID NO: 468595 - DNA, 15 bp, Homo sapiens
gtttagaacaataca

SEQ ID NO: 468596 - DNA, 15 bp, Homo sapiens
agtttagaacaatac

SEQ ID NO: 468597 - DNA, 15 bp, Homo sapiens
cagtttagaacaata

SEQ ID NO: 468598 - DNA, 15 bp, Homo sapiens
ccagtttagaacaat

SEQ ID NO: 468599 - DNA, 15 bp, Homo sapiens
cccagtttagaacaa

SEQ ID NO: 468600 - DNA, 15 bp, Homo sapiens
tcccagtttagaaca

SEQ ID NO: 468601 - DNA, 15 bp, Homo sapiens
ctcccagtttagaac

SEQ ID NO: 468602 - DNA, 15 bp, Homo sapiens
tctcccagtttagaa

SEQ ID NO: 468603 - DNA, 15 bp, Homo sapiens
ttctcccagtttaga

SEQ ID NO: 468604 - DNA, 15 bp, Homo sapiens
tttctcccagtttag

SEQ ID NO: 468605 - DNA, 15 bp, Homo sapiens
gtttctcccagttta

SEQ ID NO: 468606 - DNA, 15 bp, Homo sapiens
tgtttctcccagttt

SEQ ID NO: 468607 - DNA, 15 bp, Homo sapiens
ctgtttctcccagtt

SEQ ID NO: 468608 - DNA, 15 bp, Homo sapiens
cctgtttctcccagt

SEQ ID NO: 468609 - DNA, 15 bp, Homo sapiens
gcctgtttctcccag

SEQ ID NO: 468610 - DNA, 15 bp, Homo sapiens
agcctgtttctccca

SEQ ID NO: 468611 - DNA, 15 bp, Homo sapiens
cagcctgtttctccc

SEQ ID NO: 468612 - DNA, 15 bp, Homo sapiens
ccagcctgtttctcc

SEQ ID NO: 468613 - DNA, 15 bp, Homo sapiens
cccagcctgtttctc

SEQ ID NO: 468614 - DNA, 15 bp, Homo sapiens
acccagcctgtttct

SEQ ID NO: 468615 - DNA, 15 bp, Homo sapiens
cacccagcctgtttc

SEQ ID NO: 468616 - DNA, 15 bp, Homo sapiens
acacccagcctgttt

SEQ ID NO: 468617 - DNA, 15 bp, Homo sapiens
cacacccagcctgtt

SEQ ID NO: 468618 - DNA, 15 bp, Homo sapiens
acacacccagcctgt

SEQ ID NO: 468619 - DNA, 15 bp, Homo sapiens
aacacacccagcctg

SEQ ID NO: 468620 - DNA, 15 bp, Homo sapiens
caacacacccagcct

SEQ ID NO: 468621 - DNA, 15 bp, Homo sapiens
ccaacacacccagcc

SEQ ID NO: 468622 - DNA, 15 bp, Homo sapiens
gccaacacacccagc

SEQ ID NO: 468623 - DNA, 15 bp, Homo sapiens
agccaacacacccag

SEQ ID NO: 468624 - DNA, 15 bp, Homo sapiens
aagccaacacaccca

SEQ ID NO: 468625 - DNA, 15 bp, Homo sapiens
taagccaacacaccc

SEQ ID NO: 468626 - DNA, 15 bp, Homo sapiens
ataagccaacacacc

SEQ ID NO: 468627 - DNA, 15 bp, Homo sapiens
cataagccaacacac

SEQ ID NO: 468628 - DNA, 15 bp, Homo sapiens
gcataagccaacaca

SEQ ID NO: 468629 - DNA, 15 bp, Homo sapiens
ggcataagccaacac

SEQ ID NO: 468630 - DNA, 15 bp, Homo sapiens
aggcataagccaaca

SEQ ID NO: 468631 - DNA, 15 bp, Homo sapiens
caggcataagccaac

SEQ ID NO: 468632 - DNA, 15 bp, Homo sapiens
acaggcataagccaa

SEQ ID NO: 468633 - DNA, 15 bp, Homo sapiens
tacaggcataagcca

SEQ ID NO: 468634 - DNA, 15 bp, Homo sapiens
ttacaggcataagcc

SEQ ID NO: 468635 - DNA, 15 bp, Homo sapiens
attacaggcataagc

SEQ ID NO: 468636 - DNA, 15 bp, Homo sapiens
gattacaggcataag

SEQ ID NO: 468637 - DNA, 15 bp, Homo sapiens
agattacaggcataa

SEQ ID NO: 468638 - DNA, 15 bp, Homo sapiens
gagattacaggcata

SEQ ID NO: 468639 - DNA, 15 bp, Homo sapiens
tgagattacaggcat

SEQ ID NO: 468640 - DNA, 15 bp, Homo sapiens
ctgagattacaggca

SEQ ID NO: 468641 - DNA, 15 bp, Homo sapiens
tcccaccttggcctc

SEQ ID NO: 468642 - DNA, 15 bp, Homo sapiens
ctcccaccttggcct

SEQ ID NO: 468643 - DNA, 15 bp, Homo sapiens
cctcccaccttggcc

SEQ ID NO: 468644 - DNA, 15 bp, Homo sapiens
tcctcccaccttggc

SEQ ID NO: 468645 - DNA, 15 bp, Homo sapiens
atcctcccaccttgg

SEQ ID NO: 468646 - DNA, 15 bp, Homo sapiens
gatcctcccaccttg

SEQ ID NO: 468647 - DNA, 15 bp, Homo sapiens
caagtgatcctccca

SEQ ID NO: 468648 - DNA, 15 bp, Homo sapiens
tcaagtgatcctccc

SEQ ID NO: 468649 - DNA, 15 bp, Homo sapiens
ctcaagtgatcctcc

SEQ ID NO: 468650 - DNA, 15 bp, Homo sapiens
actcaagtgatcctc

SEQ ID NO: 468651 - DNA, 15 bp, Homo sapiens
gactcaagtgatcct

SEQ ID NO: 468652 - DNA, 15 bp, Homo sapiens
ggactcaagtgatcc

SEQ ID NO: 468653 - DNA, 15 bp, Homo sapiens
tggactcaagtgatc

SEQ ID NO: 468654 - DNA, 15 bp, Homo sapiens
ctggactcaagtgat

SEQ ID NO: 468655 - DNA, 15 bp, Homo sapiens
cctggactcaagtga

SEQ ID NO: 468656 - DNA, 15 bp, Homo sapiens
tcctggactcaagtg

SEQ ID NO: 468657 - DNA, 15 bp, Homo sapiens
ctcctggactcaagt

SEQ ID NO: 468658 - DNA, 15 bp, Homo sapiens
gaactcctggactca

SEQ ID NO: 468659 - DNA, 15 bp, Homo sapiens
tgaactcctggactc

SEQ ID NO: 468660 - DNA, 15 bp, Homo sapiens
ttgaactcctggact

SEQ ID NO: 468661 - DNA, 15 bp, Homo sapiens
cttgaactcctggac

SEQ ID NO: 468662 - DNA, 15 bp, Homo sapiens
ccttgaactcctgga

SEQ ID NO: 468663 - DNA, 15 bp, Homo sapiens
gccttgaactcctgg

SEQ ID NO: 468664 - DNA, 15 bp, Homo sapiens
ggccttgaactcctg

SEQ ID NO: 468665 - DNA, 15 bp, Homo sapiens
tggccttgaactcct

SEQ ID NO: 468666 - DNA, 15 bp, Homo sapiens
gtggccttgaactcc

SEQ ID NO: 468667 - DNA, 15 bp, Homo sapiens
ggtggccttgaactc

SEQ ID NO: 468668 - DNA, 15 bp, Homo sapiens
gggtggccttgaact

SEQ ID NO: 468669 - DNA, 15 bp, Homo sapiens
agggtggccttgaac

SEQ ID NO: 468670 - DNA, 15 bp, Homo sapiens
cagggtggccttgaa

SEQ ID NO: 468671 - DNA, 15 bp, Homo sapiens
ccagggtggccttga

SEQ ID NO: 468672 - DNA, 15 bp, Homo sapiens
cccagggtggccttg

SEQ ID NO: 468673 - DNA, 15 bp, Homo sapiens
gcccagggtggcctt

SEQ ID NO: 468674 - DNA, 15 bp, Homo sapiens
tgcccagggtggcct

SEQ ID NO: 468675 - DNA, 15 bp, Homo sapiens
ttgcccagggtggcc

SEQ ID NO: 468676 - DNA, 15 bp, Homo sapiens
gttgcccagggtggc

SEQ ID NO: 468677 - DNA, 15 bp, Homo sapiens
tgttgcccagggtgg

SEQ ID NO: 468678 - DNA, 15 bp, Homo sapiens
ctgttgcccagggtg

SEQ ID NO: 468679 - DNA, 15 bp, Homo sapiens
cctgttgcccagggt

SEQ ID NO: 468680 - DNA, 15 bp, Homo sapiens
gcctgttgcccaggg

SEQ ID NO: 468681 - DNA, 15 bp, Homo sapiens
tgcctgttgcccagg

SEQ ID NO: 468682 - DNA, 15 bp, Homo sapiens
ttgcctgttgcccag

SEQ ID NO: 468683 - DNA, 15 bp, Homo sapiens
tttgcctgttgccca

SEQ ID NO: 468684 - DNA, 15 bp, Homo sapiens
ttttgcctgttgccc

SEQ ID NO: 468685 - DNA, 15 bp, Homo sapiens
tttttgcctgttgcc

SEQ ID NO: 468686 - DNA, 15 bp, Homo sapiens
ttttttgcctgttgc

SEQ ID NO: 468687 - DNA, 15 bp, Homo sapiens
attttttgcctgttg

SEQ ID NO: 468688 - DNA, 15 bp, Homo sapiens
tattttttgcctgtt

SEQ ID NO: 468689 - DNA, 15 bp, Homo sapiens
ctattttttgcctgt

SEQ ID NO: 468690 - DNA, 15 bp, Homo sapiens
tctattttttgcctg

SEQ ID NO: 468691 - DNA, 15 bp, Homo sapiens
ctctattttttgcct

SEQ ID NO: 468692 - DNA, 15 bp, Homo sapiens
tctctattttttgcc

SEQ ID NO: 468693 - DNA, 15 bp, Homo sapiens
gtctctattttttgc

SEQ ID NO: 468694 - DNA, 15 bp, Homo sapiens
ggtctctattttttg

SEQ ID NO: 468695 - DNA, 15 bp, Homo sapiens
gggtctctatttttt

SEQ ID NO: 468696 - DNA, 15 bp, Homo sapiens
ggggtctctattttt

SEQ ID NO: 468697 - DNA, 15 bp, Homo sapiens
tggggtctctatttt

SEQ ID NO: 468698 - DNA, 15 bp, Homo sapiens
atggggtctctattt

SEQ ID NO: 468699 - DNA, 15 bp, Homo sapiens
gatggggtctctatt

SEQ ID NO: 468700 - DNA, 15 bp, Homo sapiens
agatggggtctctat

SEQ ID NO: 468701 - DNA, 15 bp, Homo sapiens
gagatggggtctcta

SEQ ID NO: 468702 - DNA, 15 bp, Homo sapiens
agagatggggtctct

SEQ ID NO: 468703 - DNA, 15 bp, Homo sapiens
tagagatggggtctc

SEQ ID NO: 468704 - DNA, 15 bp, Homo sapiens
atagagatggggtct

SEQ ID NO: 468705 - DNA, 15 bp, Homo sapiens
aatagagatggggtc

SEQ ID NO: 468706 - DNA, 15 bp, Homo sapiens
aaatagagatggggt

SEQ ID NO: 468707 - DNA, 15 bp, Homo sapiens
aaaatagagatgggg

SEQ ID NO: 468708 - DNA, 15 bp, Homo sapiens
aaaaatagagatggg

SEQ ID NO: 468709 - DNA, 15 bp, Homo sapiens
aaaaaatagagatgg

SEQ ID NO: 468710 - DNA, 15 bp, Homo sapiens
taaaaaatagagatg

SEQ ID NO: 468711 - DNA, 15 bp, Homo sapiens
ttaaaaaatagagat

SEQ ID NO: 468712 - DNA, 15 bp, Homo sapiens
tttaaaaaatagaga

SEQ ID NO: 468713 - DNA, 15 bp, Homo sapiens
ttttaaaaaatagag

SEQ ID NO: 468714 - DNA, 15 bp, Homo sapiens
tttttaaaaaataga

SEQ ID NO: 468715 - DNA, 15 bp, Homo sapiens
atttttaaaaaatag

SEQ ID NO: 468716 - DNA, 15 bp, Homo sapiens
tatttttaaaaaata

SEQ ID NO: 468717 - DNA, 15 bp, Homo sapiens
ttatttttaaaaaat

SEQ ID NO: 468718 - DNA, 15 bp, Homo sapiens
tttatttttaaaaaa

SEQ ID NO: 468719 - DNA, 15 bp, Homo sapiens
ttttatttttaaaaa

SEQ ID NO: 468720 - DNA, 15 bp, Homo sapiens
attttatttttaaaa

SEQ ID NO: 468721 - DNA, 15 bp, Homo sapiens
tattttatttttaaa

SEQ ID NO: 468722 - DNA, 15 bp, Homo sapiens
ttattttatttttaa

SEQ ID NO: 468723 - DNA, 15 bp, Homo sapiens
tttattttattttta

SEQ ID NO: 468724 - DNA, 15 bp, Homo sapiens
gtttattttattttt

SEQ ID NO: 468725 - DNA, 15 bp, Homo sapiens
agtttattttatttt

SEQ ID NO: 468726 - DNA, 15 bp, Homo sapiens
cagtttattttattt

SEQ ID NO: 468727 - DNA, 15 bp, Homo sapiens
ccagtttattttatt

SEQ ID NO: 468728 - DNA, 15 bp, Homo sapiens
cccagtttattttat

SEQ ID NO: 468729 - DNA, 15 bp, Homo sapiens
tcccagtttatttta

SEQ ID NO: 468730 - DNA, 15 bp, Homo sapiens
ctcccagtttatttt

SEQ ID NO: 468731 - DNA, 15 bp, Homo sapiens
tctcccagtttattt

SEQ ID NO: 468732 - DNA, 15 bp, Homo sapiens
ttctcccagtttatt

SEQ ID NO: 468733 - DNA, 15 bp, Homo sapiens
tttctcccagtttat

SEQ ID NO: 468734 - DNA, 15 bp, Homo sapiens
ctttctcccagttta

SEQ ID NO: 468735 - DNA, 15 bp, Homo sapiens
tctttctcccagttt

SEQ ID NO: 468736 - DNA, 15 bp, Homo sapiens
ttctttctcccagtt

SEQ ID NO: 468737 - DNA, 15 bp, Homo sapiens
cttctttctcccagt

SEQ ID NO: 468738 - DNA, 15 bp, Homo sapiens
gcttctttctcccag

SEQ ID NO: 468739 - DNA, 15 bp, Homo sapiens
tgcttctttctccca

SEQ ID NO: 468740 - DNA, 15 bp, Homo sapiens
ctgcttctttctccc

SEQ ID NO: 468741 - DNA, 15 bp, Homo sapiens
cctgcttctttctcc

SEQ ID NO: 468742 - DNA, 15 bp, Homo sapiens
ccctgcttctttctc

SEQ ID NO: 468743 - DNA, 15 bp, Homo sapiens
accctgcttctttct

SEQ ID NO: 468744 - DNA, 15 bp, Homo sapiens
gaccctgcttctttc

SEQ ID NO: 468745 - DNA, 15 bp, Homo sapiens
ggaccctgcttcttt

SEQ ID NO: 468746 - DNA, 15 bp, Homo sapiens
aggaccctgcttctt

SEQ ID NO: 468747 - DNA, 15 bp, Homo sapiens
gaggaccctgcttct

SEQ ID NO: 468748 - DNA, 15 bp, Homo sapiens
ggaggaccctgcttc

SEQ ID NO: 468749 - DNA, 15 bp, Homo sapiens
gggaggaccctgctt

SEQ ID NO: 468750 - DNA, 15 bp, Homo sapiens
ggggaggaccctgct

SEQ ID NO: 468751 - DNA, 15 bp, Homo sapiens
tggggaggaccctgc

SEQ ID NO: 468752 - DNA, 15 bp, Homo sapiens
ctggggaggaccctg

SEQ ID NO: 468753 - DNA, 15 bp, Homo sapiens
tctggggaggaccct

SEQ ID NO: 468754 - DNA, 15 bp, Homo sapiens
ctctggggaggaccc

SEQ ID NO: 468755 - DNA, 15 bp, Homo sapiens
gctctggggaggacc

SEQ ID NO: 468756 - DNA, 15 bp, Homo sapiens
tgctctggggaggac

SEQ ID NO: 468757 - DNA, 15 bp, Homo sapiens
atgctctggggagga

SEQ ID NO: 468758 - DNA, 15 bp, Homo sapiens
gatgctctggggagg

SEQ ID NO: 468759 - DNA, 15 bp, Homo sapiens
agatgctctggggag

SEQ ID NO: 468760 - DNA, 15 bp, Homo sapiens
aagatgctctgggga

SEQ ID NO: 468761 - DNA, 15 bp, Homo sapiens
aaagatgctctgggg

SEQ ID NO: 468762 - DNA, 15 bp, Homo sapiens
taaagatgctctggg

SEQ ID NO: 468763 - DNA, 15 bp, Homo sapiens
ataaagatgctctgg

SEQ ID NO: 468764 - DNA, 15 bp, Homo sapiens
gataaagatgctctg

SEQ ID NO: 468765 - DNA, 15 bp, Homo sapiens
ggataaagatgctct

SEQ ID NO: 468766 - DNA, 15 bp, Homo sapiens
gggataaagatgctc

SEQ ID NO: 468767 - DNA, 15 bp, Homo sapiens
agggataaagatgct

SEQ ID NO: 468768 - DNA, 15 bp, Homo sapiens
tagggataaagatgc

SEQ ID NO: 468769 - DNA, 15 bp, Homo sapiens
ctagggataaagatg

SEQ ID NO: 468770 - DNA, 15 bp, Homo sapiens
actagggataaagat

SEQ ID NO: 468771 - DNA, 15 bp, Homo sapiens
gactagggataaaga

SEQ ID NO: 468772 - DNA, 15 bp, Homo sapiens
tgactagggataaag

SEQ ID NO: 468773 - DNA, 15 bp, Homo sapiens
gtgactagggataaa

SEQ ID NO: 468774 - DNA, 15 bp, Homo sapiens
tgtgactagggataa

SEQ ID NO: 468775 - DNA, 15 bp, Homo sapiens
ctgtgactagggata

SEQ ID NO: 468776 - DNA, 15 bp, Homo sapiens
tctgtgactagggat

SEQ ID NO: 468777 - DNA, 15 bp, Homo sapiens
gtctgtgactaggga

SEQ ID NO: 468778 - DNA, 15 bp, Homo sapiens
ggtctgtgactaggg

SEQ ID NO: 468779 - DNA, 15 bp, Homo sapiens
aggtctgtgactagg

SEQ ID NO: 468780 - DNA, 15 bp, Homo sapiens
caggtctgtgactag

SEQ ID NO: 468781 - DNA, 15 bp, Homo sapiens
tcaggtctgtgacta

SEQ ID NO: 468782 - DNA, 15 bp, Homo sapiens
gtcaggtctgtgact

SEQ ID NO: 468783 - DNA, 15 bp, Homo sapiens
tgtcaggtctgtgac

SEQ ID NO: 468784 - DNA, 15 bp, Homo sapiens
gtgtcaggtctgtga

SEQ ID NO: 468785 - DNA, 15 bp, Homo sapiens
ggtgtcaggtctgtg

SEQ ID NO: 468786 - DNA, 15 bp, Homo sapiens
aggtgtcaggtctgt

SEQ ID NO: 468787 - DNA, 15 bp, Homo sapiens
caggtgtcaggtctg

SEQ ID NO: 468788 - DNA, 15 bp, Homo sapiens
acaggtgtcaggtct

SEQ ID NO: 468789 - DNA, 15 bp, Homo sapiens
cacaggtgtcaggtc

SEQ ID NO: 468790 - DNA, 15 bp, Homo sapiens
acacaggtgtcaggt

SEQ ID NO: 468791 - DNA, 15 bp, Homo sapiens
aacacaggtgtcagg

SEQ ID NO: 468792 - DNA, 15 bp, Homo sapiens
caacacaggtgtcag

SEQ ID NO: 468793 - DNA, 15 bp, Homo sapiens
ccaacacaggtgtca

SEQ ID NO: 468794 - DNA, 15 bp, Homo sapiens
cccaacacaggtgtc

SEQ ID NO: 468795 - DNA, 15 bp, Homo sapiens
gcccaacacaggtgt

SEQ ID NO: 468796 - DNA, 15 bp, Homo sapiens
tgcccaacacaggtg

SEQ ID NO: 468797 - DNA, 15 bp, Homo sapiens
ttgcccaacacaggt

SEQ ID NO: 468798 - DNA, 15 bp, Homo sapiens
attgcccaacacagg

SEQ ID NO: 468799 - DNA, 15 bp, Homo sapiens
cattgcccaacacag

SEQ ID NO: 468800 - DNA, 15 bp, Homo sapiens
ccattgcccaacaca

SEQ ID NO: 468801 - DNA, 15 bp, Homo sapiens
gccattgcccaacac

SEQ ID NO: 468802 - DNA, 15 bp, Homo sapiens
agccattgcccaaca

SEQ ID NO: 468803 - DNA, 15 bp, Homo sapiens
tagccattgcccaac

SEQ ID NO: 468804 - DNA, 15 bp, Homo sapiens
gtagccattgcccaa

SEQ ID NO: 468805 - DNA, 15 bp, Homo sapiens
agtagccattgccca

SEQ ID NO: 468806 - DNA, 15 bp, Homo sapiens
aagtagccattgccc

SEQ ID NO: 468807 - DNA, 15 bp, Homo sapiens
gaagtagccattgcc

SEQ ID NO: 468808 - DNA, 15 bp, Homo sapiens
agaagtagccattgc

SEQ ID NO: 468809 - DNA, 15 bp, Homo sapiens
tagaagtagccattg

SEQ ID NO: 468810 - DNA, 15 bp, Homo sapiens
ctagaagtagccatt

SEQ ID NO: 468811 - DNA, 15 bp, Homo sapiens
tctagaagtagccat

SEQ ID NO: 468812 - DNA, 15 bp, Homo sapiens
atctagaagtagcca

SEQ ID NO: 468813 - DNA, 15 bp, Homo sapiens
aatctagaagtagcc

SEQ ID NO: 468814 - DNA, 15 bp, Homo sapiens
caatctagaagtagc

SEQ ID NO: 468815 - DNA, 15 bp, Homo sapiens
acaatctagaagtag

SEQ ID NO: 468816 - DNA, 15 bp, Homo sapiens
aacaatctagaagta

SEQ ID NO: 468817 - DNA, 15 bp, Homo sapiens
aaacaatctagaagt

SEQ ID NO: 468818 - DNA, 15 bp, Homo sapiens
taaacaatctagaag

SEQ ID NO: 468819 - DNA, 15 bp, Homo sapiens
gtaaacaatctagaa

SEQ ID NO: 468820 - DNA, 15 bp, Homo sapiens
ggtaaacaatctaga

SEQ ID NO: 468821 - DNA, 15 bp, Homo sapiens
gggtaaacaatctag

SEQ ID NO: 468822 - DNA, 15 bp, Homo sapiens
ggggtaaacaatcta

SEQ ID NO: 468823 - DNA, 15 bp, Homo sapiens
aggggtaaacaatct

SEQ ID NO: 468824 - DNA, 15 bp, Homo sapiens
taggggtaaacaatc

SEQ ID NO: 468825 - DNA, 15 bp, Homo sapiens
gtaggggtaaacaat

SEQ ID NO: 468826 - DNA, 15 bp, Homo sapiens
agtaggggtaaacaa

SEQ ID NO: 468827 - DNA, 15 bp, Homo sapiens
cagtaggggtaaaca

SEQ ID NO: 468828 - DNA, 15 bp, Homo sapiens
ccagtaggggtaaac

SEQ ID NO: 468829 - DNA, 15 bp, Homo sapiens
cccagtaggggtaaa

SEQ ID NO: 468830 - DNA, 15 bp, Homo sapiens
tcccagtaggggtaa

SEQ ID NO: 468831 - DNA, 15 bp, Homo sapiens
gtcccagtaggggta

SEQ ID NO: 468832 - DNA, 15 bp, Homo sapiens
agtcccagtaggggt

SEQ ID NO: 468833 - DNA, 15 bp, Homo sapiens
aagtcccagtagggg

SEQ ID NO: 468834 - DNA, 15 bp, Homo sapiens
caagtcccagtaggg

SEQ ID NO: 468835 - DNA, 15 bp, Homo sapiens
acaagtcccagtagg

SEQ ID NO: 468836 - DNA, 15 bp, Homo sapiens
cacaagtcccagtag

SEQ ID NO: 468837 - DNA, 15 bp, Homo sapiens
ccacaagtcccagta

SEQ ID NO: 468838 - DNA, 15 bp, Homo sapiens
accacaagtcccagt

SEQ ID NO: 468839 - DNA, 15 bp, Homo sapiens
caccacaagtcccag

SEQ ID NO: 468840 - DNA, 15 bp, Homo sapiens
tcaccacaagtccca

SEQ ID NO: 468841 - DNA, 15 bp, Homo sapiens
ttcaccacaagtccc

SEQ ID NO: 468842 - DNA, 15 bp, Homo sapiens
gttcaccacaagtcc

SEQ ID NO: 468843 - DNA, 15 bp, Homo sapiens
tgttcaccacaagtc

SEQ ID NO: 468844 - DNA, 15 bp, Homo sapiens
atgttcaccacaagt

SEQ ID NO: 468845 - DNA, 15 bp, Homo sapiens
tatgttcaccacaag

SEQ ID NO: 468846 - DNA, 15 bp, Homo sapiens
atatgttcaccacaa

SEQ ID NO: 468847 - DNA, 15 bp, Homo sapiens
catatgttcaccaca

SEQ ID NO: 468848 - DNA, 15 bp, Homo sapiens
gcatatgttcaccac

SEQ ID NO: 468849 - DNA, 15 bp, Homo sapiens
tgcatatgttcacca

SEQ ID NO: 468850 - DNA, 15 bp, Homo sapiens
gtgcatatgttcacc

SEQ ID NO: 468851 - DNA, 15 bp, Homo sapiens
tgtgcatatgttcac

SEQ ID NO: 468852 - DNA, 15 bp, Homo sapiens
gtgtgcatatgttca

SEQ ID NO: 468853 - DNA, 15 bp, Homo sapiens
agtgtgcatatgttc

SEQ ID NO: 468854 - DNA, 15 bp, Homo sapiens
aagtgtgcatatgtt

SEQ ID NO: 468855 - DNA, 15 bp, Homo sapiens
aaagtgtgcatatgt

SEQ ID NO: 468856 - DNA, 15 bp, Homo sapiens
caaagtgtgcatatg

SEQ ID NO: 468857 - DNA, 15 bp, Homo sapiens
ccaaagtgtgcatat

SEQ ID NO: 468858 - DNA, 15 bp, Homo sapiens
accaaagtgtgcata

SEQ ID NO: 468859 - DNA, 15 bp, Homo sapiens
aaccaaagtgtgcat

SEQ ID NO: 468860 - DNA, 15 bp, Homo sapiens
aaaccaaagtgtgca

SEQ ID NO: 468861 - DNA, 15 bp, Homo sapiens
taaaccaaagtgtgc

SEQ ID NO: 468862 - DNA, 15 bp, Homo sapiens
gtaaaccaaagtgtg

SEQ ID NO: 468863 - DNA, 15 bp, Homo sapiens
tgtaaaccaaagtgt

SEQ ID NO: 468864 - DNA, 15 bp, Homo sapiens
ctgtaaaccaaagtg

SEQ ID NO: 468865 - DNA, 15 bp, Homo sapiens
actgtaaaccaaagt

SEQ ID NO: 468866 - DNA, 15 bp, Homo sapiens
aactgtaaaccaaag

SEQ ID NO: 468867 - DNA, 15 bp, Homo sapiens
caactgtaaaccaaa

SEQ ID NO: 468868 - DNA, 15 bp, Homo sapiens
ccaactgtaaaccaa

SEQ ID NO: 468869 - DNA, 15 bp, Homo sapiens
cccaactgtaaacca

SEQ ID NO: 468870 - DNA, 15 bp, Homo sapiens
tcccaactgtaaacc

SEQ ID NO: 468871 - DNA, 15 bp, Homo sapiens
gtcccaactgtaaac

SEQ ID NO: 468872 - DNA, 15 bp, Homo sapiens
ggtcccaactgtaaa

SEQ ID NO: 468873 - DNA, 15 bp, Homo sapiens
gggtcccaactgtaa

SEQ ID NO: 468874 - DNA, 15 bp, Homo sapiens
ggggtcccaactgta

SEQ ID NO: 468875 - DNA, 15 bp, Homo sapiens
aggggtcccaactgt

SEQ ID NO: 468876 - DNA, 15 bp, Homo sapiens
caggggtcccaactg

SEQ ID NO: 468877 - DNA, 15 bp, Homo sapiens
tcaggggtcccaact

SEQ ID NO: 468878 - DNA, 15 bp, Homo sapiens
atcaggggtcccaac

SEQ ID NO: 468879 - DNA, 15 bp, Homo sapiens
aatcaggggtcccaa

SEQ ID NO: 468880 - DNA, 15 bp, Homo sapiens
aaatcaggggtccca

SEQ ID NO: 468881 - DNA, 15 bp, Homo sapiens
aaaatcaggggtccc

SEQ ID NO: 468882 - DNA, 15 bp, Homo sapiens
taaaatcaggggtcc

SEQ ID NO: 468883 - DNA, 15 bp, Homo sapiens
ctaaaatcaggggtc

SEQ ID NO: 468884 - DNA, 15 bp, Homo sapiens
gctaaaatcaggggt

SEQ ID NO: 468885 - DNA, 15 bp, Homo sapiens
tgctaaaatcagggg

SEQ ID NO: 468886 - DNA, 15 bp, Homo sapiens
ctgctaaaatcaggg

SEQ ID NO: 468887 - DNA, 15 bp, Homo sapiens
cctgctaaaatcagg

SEQ ID NO: 468888 - DNA, 15 bp, Homo sapiens
tcctgctaaaatcag

SEQ ID NO: 468889 - DNA, 15 bp, Homo sapiens
atcctgctaaaatca

SEQ ID NO: 468890 - DNA, 15 bp, Homo sapiens
catcctgctaaaatc

SEQ ID NO: 468891 - DNA, 15 bp, Homo sapiens
ccatcctgctaaaat

SEQ ID NO: 468892 - DNA, 15 bp, Homo sapiens
gccatcctgctaaaa

SEQ ID NO: 468893 - DNA, 15 bp, Homo sapiens
ggccatcctgctaaa

SEQ ID NO: 468894 - DNA, 15 bp, Homo sapiens
gggccatcctgctaa

SEQ ID NO: 468895 - DNA, 15 bp, Homo sapiens
tgggccatcctgcta

SEQ ID NO: 468896 - DNA, 15 bp, Homo sapiens
ttgggccatcctgct

SEQ ID NO: 468897 - DNA, 15 bp, Homo sapiens
attgggccatcctgc

SEQ ID NO: 468898 - DNA, 15 bp, Homo sapiens
cattgggccatcctg

SEQ ID NO: 468899 - DNA, 15 bp, Homo sapiens
ccattgggccatcct

SEQ ID NO: 468900 - DNA, 15 bp, Homo sapiens
tccattgggccatcc

SEQ ID NO: 468901 - DNA, 15 bp, Homo sapiens
ttccattgggccatc

SEQ ID NO: 468902 - DNA, 15 bp, Homo sapiens
attccattgggccat

SEQ ID NO: 468903 - DNA, 15 bp, Homo sapiens
gattccattgggcca

SEQ ID NO: 468904 - DNA, 15 bp, Homo sapiens
tgattccattgggcc

SEQ ID NO: 468905 - DNA, 15 bp, Homo sapiens
ctgattccattgggc

SEQ ID NO: 468906 - DNA, 15 bp, Homo sapiens
gctgattccattggg

SEQ ID NO: 468907 - DNA, 15 bp, Homo sapiens
agctgattccattgg

SEQ ID NO: 468908 - DNA, 15 bp, Homo sapiens
tagctgattccattg

SEQ ID NO: 468909 - DNA, 15 bp, Homo sapiens
gtagctgattccatt

SEQ ID NO: 468910 - DNA, 15 bp, Homo sapiens
tgtagctgattccat

SEQ ID NO: 468911 - DNA, 15 bp, Homo sapiens
ctgtagctgattcca

SEQ ID NO: 468912 - DNA, 15 bp, Homo sapiens
gctgtagctgattcc

SEQ ID NO: 468913 - DNA, 15 bp, Homo sapiens
tgctgtagctgattc

SEQ ID NO: 468914 - DNA, 15 bp, Homo sapiens
ctgctgtagctgatt

SEQ ID NO: 468915 - DNA, 15 bp, Homo sapiens
gctgctgtagctgat

SEQ ID NO: 468916 - DNA, 15 bp, Homo sapiens
agctgctgtagctga

SEQ ID NO: 468917 - DNA, 15 bp, Homo sapiens
aagctgctgtagctg

SEQ ID NO: 468918 - DNA, 15 bp, Homo sapiens
caagctgctgtagct

SEQ ID NO: 468919 - DNA, 15 bp, Homo sapiens
tcaagctgctgtagc

SEQ ID NO: 468920 - DNA, 15 bp, Homo sapiens
gtcaagctgctgtag

SEQ ID NO: 468921 - DNA, 15 bp, Homo sapiens
tgtcaagctgctgta

SEQ ID NO: 468922 - DNA, 15 bp, Homo sapiens
gtgtcaagctgctgt

SEQ ID NO: 468923 - DNA, 15 bp, Homo sapiens
tgtgtcaagctgctg

SEQ ID NO: 468924 - DNA, 15 bp, Homo sapiens
gtgtgtcaagctgct

SEQ ID NO: 468925 - DNA, 15 bp, Homo sapiens
cgtgtgtcaagctgc

SEQ ID NO: 468926 - DNA, 15 bp, Homo sapiens
ccgtgtgtcaagctg

SEQ ID NO: 468927 - DNA, 15 bp, Homo sapiens
accgtgtgtcaagct

SEQ ID NO: 468928 - DNA, 15 bp, Homo sapiens
taccgtgtgtcaagc

SEQ ID NO: 468929 - DNA, 15 bp, Homo sapiens
gtaccgtgtgtcaag

SEQ ID NO: 468930 - DNA, 15 bp, Homo sapiens
ggtaccgtgtgtcaa

SEQ ID NO: 468931 - DNA, 15 bp, Homo sapiens
aggtaccgtgtgtca

SEQ ID NO: 468932 - DNA, 15 bp, Homo sapiens
caggtaccgtgtgtc

SEQ ID NO: 468933 - DNA, 15 bp, Homo sapiens
ccaggtaccgtgtgt

SEQ ID NO: 468934 - DNA, 15 bp, Homo sapiens
tccaggtaccgtgtg

SEQ ID NO: 468935 - DNA, 15 bp, Homo sapiens
ctccaggtaccgtgt

SEQ ID NO: 468936 - DNA, 15 bp, Homo sapiens
gctccaggtaccgtg

SEQ ID NO: 468937 - DNA, 15 bp, Homo sapiens
tgctccaggtaccgt

SEQ ID NO: 468938 - DNA, 15 bp, Homo sapiens
ctgctccaggtaccg

SEQ ID NO: 468939 - DNA, 15 bp, Homo sapiens
gctgctccaggtacc

SEQ ID NO: 468940 - DNA, 15 bp, Homo sapiens
agctgctccaggtac

SEQ ID NO: 468941 - DNA, 15 bp, Homo sapiens
gagctgctccaggta

SEQ ID NO: 468942 - DNA, 15 bp, Homo sapiens
ggagctgctccaggt

SEQ ID NO: 468943 - DNA, 15 bp, Homo sapiens
tggagctgctccagg

SEQ ID NO: 468944 - DNA, 15 bp, Homo sapiens
atggagctgctccag

SEQ ID NO: 468945 - DNA, 15 bp, Homo sapiens
gatggagctgctcca

SEQ ID NO: 468946 - DNA, 15 bp, Homo sapiens
tgatggagctgctcc

SEQ ID NO: 468947 - DNA, 15 bp, Homo sapiens
ctgatggagctgctc

SEQ ID NO: 468948 - DNA, 15 bp, Homo sapiens
gctgatggagctgct

SEQ ID NO: 468949 - DNA, 15 bp, Homo sapiens
agctgatggagctgc

SEQ ID NO: 468950 - DNA, 15 bp, Homo sapiens
gagctgatggagctg

SEQ ID NO: 468951 - DNA, 15 bp, Homo sapiens
agagctgatggagct

SEQ ID NO: 468952 - DNA, 15 bp, Homo sapiens
tagagctgatggagc

SEQ ID NO: 468953 - DNA, 15 bp, Homo sapiens
gtagagctgatggag

SEQ ID NO: 468954 - DNA, 15 bp, Homo sapiens
tgtagagctgatgga

SEQ ID NO: 468955 - DNA, 15 bp, Homo sapiens
ctgtagagctgatgg

SEQ ID NO: 468956 - DNA, 15 bp, Homo sapiens
actgtagagctgatg

SEQ ID NO: 468957 - DNA, 15 bp, Homo sapiens
cactgtagagctgat

SEQ ID NO: 468958 - DNA, 15 bp, Homo sapiens
tcactgtagagctga

SEQ ID NO: 468959 - DNA, 15 bp, Homo sapiens
gtcactgtagagctg

SEQ ID NO: 468960 - DNA, 15 bp, Homo sapiens
tgtcactgtagagct

SEQ ID NO: 468961 - DNA, 15 bp, Homo sapiens
ctgtcactgtagagc

SEQ ID NO: 468962 - DNA, 15 bp, Homo sapiens
gctgtcactgtagag

SEQ ID NO: 468963 - DNA, 15 bp, Homo sapiens
agctgtcactgtaga

SEQ ID NO: 468964 - DNA, 15 bp, Homo sapiens
aagctgtcactgtag

SEQ ID NO: 468965 - DNA, 15 bp, Homo sapiens
gaagctgtcactgta

SEQ ID NO: 468966 - DNA, 15 bp, Homo sapiens
ggaagctgtcactgt

SEQ ID NO: 468967 - DNA, 15 bp, Homo sapiens
gggaagctgtcactg

SEQ ID NO: 468968 - DNA, 15 bp, Homo sapiens
tgggaagctgtcact

SEQ ID NO: 468969 - DNA, 15 bp, Homo sapiens
ttgggaagctgtcac

SEQ ID NO: 468970 - DNA, 15 bp, Homo sapiens
attgggaagctgtca

SEQ ID NO: 468971 - DNA, 15 bp, Homo sapiens
cattgggaagctgtc

SEQ ID NO: 468972 - DNA, 15 bp, Homo sapiens
ccattgggaagctgt

SEQ ID NO: 468973 - DNA, 15 bp, Homo sapiens
tccattgggaagctg

SEQ ID NO: 468974 - DNA, 15 bp, Homo sapiens
ctccattgggaagct

SEQ ID NO: 468975 - DNA, 15 bp, Homo sapiens
gctccattgggaagc

SEQ ID NO: 468976 - DNA, 15 bp, Homo sapiens
agctccattgggaag

SEQ ID NO: 468977 - DNA, 15 bp, Homo sapiens
cagctccattgggaa

SEQ ID NO: 468978 - DNA, 15 bp, Homo sapiens
gcagctccattggga

SEQ ID NO: 468979 - DNA, 15 bp, Homo sapiens
cgcagctccattggg

SEQ ID NO: 468980 - DNA, 15 bp, Homo sapiens
ccgcagctccattgg

SEQ ID NO: 468981 - DNA, 15 bp, Homo sapiens
gccgcagctccattg

SEQ ID NO: 468982 - DNA, 15 bp, Homo sapiens
tgccgcagctccatt

SEQ ID NO: 468983 - DNA, 15 bp, Homo sapiens
ctgccgcagctccat

SEQ ID NO: 468984 - DNA, 15 bp, Homo sapiens
actgccgcagctcca

SEQ ID NO: 468985 - DNA, 15 bp, Homo sapiens
aactgccgcagctcc

SEQ ID NO: 468986 - DNA, 15 bp, Homo sapiens
aaactgccgcagctc

SEQ ID NO: 468987 - DNA, 15 bp, Homo sapiens
gaaactgccgcagct

SEQ ID NO: 468988 - DNA, 15 bp, Homo sapiens
agaaactgccgcagc

SEQ ID NO: 468989 - DNA, 15 bp, Homo sapiens
cagaaactgccgcag

SEQ ID NO: 468990 - DNA, 15 bp, Homo sapiens
ccagaaactgccgca

SEQ ID NO: 468991 - DNA, 15 bp, Homo sapiens
gccagaaactgccgc

SEQ ID NO: 468992 - DNA, 15 bp, Homo sapiens
ggccagaaactgccg

SEQ ID NO: 468993 - DNA, 15 bp, Homo sapiens
gggccagaaactgcc

SEQ ID NO: 468994 - DNA, 15 bp, Homo sapiens
ggggccagaaactgc

SEQ ID NO: 468995 - DNA, 15 bp, Homo sapiens
aggggccagaaactg

SEQ ID NO: 468996 - DNA, 15 bp, Homo sapiens
aaggggccagaaact

SEQ ID NO: 468997 - DNA, 15 bp, Homo sapiens
caaggggccagaaac

SEQ ID NO: 468998 - DNA, 15 bp, Homo sapiens
ccaaggggccagaaa

SEQ ID NO: 468999 - DNA, 15 bp, Homo sapiens
tccaaggggccagaa

SEQ ID NO: 469000 - DNA, 15 bp, Homo sapiens
atccaaggggccaga

SEQ ID NO: 469001 - DNA, 15 bp, Homo sapiens
aatccaaggggccag

SEQ ID NO: 469002 - DNA, 15 bp, Homo sapiens
caatccaaggggcca

SEQ ID NO: 469003 - DNA, 15 bp, Homo sapiens
tcaatccaaggggcc

SEQ ID NO: 469004 - DNA, 15 bp, Homo sapiens
ctcaatccaaggggc

SEQ ID NO: 469005 - DNA, 15 bp, Homo sapiens
tctcaatccaagggg

SEQ ID NO: 469006 - DNA, 15 bp, Homo sapiens
ctctcaatccaaggg

SEQ ID NO: 469007 - DNA, 15 bp, Homo sapiens
actctcaatccaagg

SEQ ID NO: 469008 - DNA, 15 bp, Homo sapiens
gactctcaatccaag

SEQ ID NO: 469009 - DNA, 15 bp, Homo sapiens
tgactctcaatccaa

SEQ ID NO: 469010 - DNA, 15 bp, Homo sapiens
ttgactctcaatcca

SEQ ID NO: 469011 - DNA, 15 bp, Homo sapiens
cttgactctcaatcc

SEQ ID NO: 469012 - DNA, 15 bp, Homo sapiens
tcttgactctcaatc

SEQ ID NO: 469013 - DNA, 15 bp, Homo sapiens
atcttgactctcaat

SEQ ID NO: 469014 - DNA, 15 bp, Homo sapiens
aatcttgactctcaa

SEQ ID NO: 469015 - DNA, 15 bp, Homo sapiens
caatcttgactctca

SEQ ID NO: 469016 - DNA, 15 bp, Homo sapiens
ccaatcttgactctc

SEQ ID NO: 469017 - DNA, 15 bp, Homo sapiens
accaatcttgactct

SEQ ID NO: 469018 - DNA, 15 bp, Homo sapiens
taccaatcttgactc

SEQ ID NO: 469019 - DNA, 15 bp, Homo sapiens
ttaccaatcttgact

SEQ ID NO: 469020 - DNA, 15 bp, Homo sapiens
cttaccaatcttgac

SEQ ID NO: 469021 - DNA, 15 bp, Homo sapiens
acttaccaatcttga

SEQ ID NO: 469022 - DNA, 15 bp, Homo sapiens
gacttaccaatcttg

SEQ ID NO: 469023 - DNA, 15 bp, Homo sapiens
ggacttaccaatctt

SEQ ID NO: 469024 - DNA, 15 bp, Homo sapiens
aggacttaccaatct

SEQ ID NO: 469025 - DNA, 15 bp, Homo sapiens
aaggacttaccaatc

SEQ ID NO: 469026 - DNA, 15 bp, Homo sapiens
gaaggacttaccaat

SEQ ID NO: 469027 - DNA, 15 bp, Homo sapiens
agaaggacttaccaa

SEQ ID NO: 469028 - DNA, 15 bp, Homo sapiens
aagaaggacttacca

SEQ ID NO: 469029 - DNA, 15 bp, Homo sapiens
taagaaggacttacc

SEQ ID NO: 469030 - DNA, 15 bp, Homo sapiens
ttaagaaggacttac

SEQ ID NO: 469031 - DNA, 15 bp, Homo sapiens
cttaagaaggactta

SEQ ID NO: 469032 - DNA, 15 bp, Homo sapiens
acttaagaaggactt

SEQ ID NO: 469033 - DNA, 15 bp, Homo sapiens
cacttaagaaggact

SEQ ID NO: 469034 - DNA, 15 bp, Homo sapiens
tcacttaagaaggac

SEQ ID NO: 469035 - DNA, 15 bp, Homo sapiens
gtcacttaagaagga

SEQ ID NO: 469036 - DNA, 15 bp, Homo sapiens
agtcacttaagaagg

SEQ ID NO: 469037 - DNA, 15 bp, Homo sapiens
gagtcacttaagaag

SEQ ID NO: 469038 - DNA, 15 bp, Homo sapiens
agagtcacttaagaa

SEQ ID NO: 469039 - DNA, 15 bp, Homo sapiens
gagagtcacttaaga

SEQ ID NO: 469040 - DNA, 15 bp, Homo sapiens
ggagagtcacttaag

SEQ ID NO: 469041 - DNA, 15 bp, Homo sapiens
tggagagtcacttaa

SEQ ID NO: 469042 - DNA, 15 bp, Homo sapiens
ttggagagtcactta

SEQ ID NO: 469043 - DNA, 15 bp, Homo sapiens
tttggagagtcactt

SEQ ID NO: 469044 - DNA, 15 bp, Homo sapiens
atttggagagtcact

SEQ ID NO: 469045 - DNA, 15 bp, Homo sapiens
aatttggagagtcac

SEQ ID NO: 469046 - DNA, 15 bp, Homo sapiens
caatttggagagtca

SEQ ID NO: 469047 - DNA, 15 bp, Homo sapiens
acaatttggagagtc

SEQ ID NO: 469048 - DNA, 15 bp, Homo sapiens
aacaatttggagagt

SEQ ID NO: 469049 - DNA, 15 bp, Homo sapiens
taacaatttggagag

SEQ ID NO: 469050 - DNA, 15 bp, Homo sapiens
ctaacaatttggaga

SEQ ID NO: 469051 - DNA, 15 bp, Homo sapiens
cctaacaatttggag

SEQ ID NO: 469052 - DNA, 15 bp, Homo sapiens
acctaacaatttgga

SEQ ID NO: 469053 - DNA, 15 bp, Homo sapiens
aacctaacaatttgg

SEQ ID NO: 469054 - DNA, 15 bp, Homo sapiens
aaacctaacaatttg

SEQ ID NO: 469055 - DNA, 15 bp, Homo sapiens
gaaacctaacaattt

SEQ ID NO: 469056 - DNA, 15 bp, Homo sapiens
tgaaacctaacaatt

SEQ ID NO: 469057 - DNA, 15 bp, Homo sapiens
ctgaaacctaacaat

SEQ ID NO: 469058 - DNA, 15 bp, Homo sapiens
actgaaacctaacaa

SEQ ID NO: 469059 - DNA, 15 bp, Homo sapiens
aactgaaacctaaca

SEQ ID NO: 469060 - DNA, 15 bp, Homo sapiens
aaactgaaacctaac

SEQ ID NO: 469061 - DNA, 15 bp, Homo sapiens
caaactgaaacctaa

SEQ ID NO: 469062 - DNA, 15 bp, Homo sapiens
tcaaactgaaaccta

SEQ ID NO: 469063 - DNA, 15 bp, Homo sapiens
ctcaaactgaaacct

SEQ ID NO: 469064 - DNA, 15 bp, Homo sapiens
actcaaactgaaacc

SEQ ID NO: 469065 - DNA, 15 bp, Homo sapiens
gactcaaactgaaac

SEQ ID NO: 469066 - DNA, 15 bp, Homo sapiens
tgactcaaactgaaa

SEQ ID NO: 469067 - DNA, 15 bp, Homo sapiens
ttgactcaaactgaa

SEQ ID NO: 469068 - DNA, 15 bp, Homo sapiens
cttgactcaaactga

SEQ ID NO: 469069 - DNA, 15 bp, Homo sapiens
tcttgactcaaactg

SEQ ID NO: 469070 - DNA, 15 bp, Homo sapiens
ctcttgactcaaact

SEQ ID NO: 469071 - DNA, 15 bp, Homo sapiens
tctcttgactcaaac

SEQ ID NO: 469072 - DNA, 15 bp, Homo sapiens
gtctcttgactcaaa

SEQ ID NO: 469073 - DNA, 15 bp, Homo sapiens
tgtctcttgactcaa

SEQ ID NO: 469074 - DNA, 15 bp, Homo sapiens
atgtctcttgactca

SEQ ID NO: 469075 - DNA, 15 bp, Homo sapiens
catgtctcttgactc

SEQ ID NO: 469076 - DNA, 15 bp, Homo sapiens
tcatgtctcttgact

SEQ ID NO: 469077 - DNA, 15 bp, Homo sapiens
ttcatgtctcttgac

SEQ ID NO: 469078 - DNA, 15 bp, Homo sapiens
gttcatgtctcttga

SEQ ID NO: 469079 - DNA, 15 bp, Homo sapiens
agttcatgtctcttg

SEQ ID NO: 469080 - DNA, 15 bp, Homo sapiens
gagttcatgtctctt

SEQ ID NO: 469081 - DNA, 15 bp, Homo sapiens
agagttcatgtctct

SEQ ID NO: 469082 - DNA, 15 bp, Homo sapiens
aagagttcatgtctc

SEQ ID NO: 469083 - DNA, 15 bp, Homo sapiens
taagagttcatgtct

SEQ ID NO: 469084 - DNA, 15 bp, Homo sapiens
ttaagagttcatgtc

SEQ ID NO: 469085 - DNA, 15 bp, Homo sapiens
attaagagttcatgt

SEQ ID NO: 469086 - DNA, 15 bp, Homo sapiens
cattaagagttcatg

SEQ ID NO: 469087 - DNA, 15 bp, Homo sapiens
acattaagagttcat

SEQ ID NO: 469088 - DNA, 15 bp, Homo sapiens
gacattaagagttca

SEQ ID NO: 469089 - DNA, 15 bp, Homo sapiens
tgacattaagagttc

SEQ ID NO: 469090 - DNA, 15 bp, Homo sapiens
atgacattaagagtt

SEQ ID NO: 469091 - DNA, 15 bp, Homo sapiens
catgacattaagagt

SEQ ID NO: 469092 - DNA, 15 bp, Homo sapiens
gcatgacattaagag

SEQ ID NO: 469093 - DNA, 15 bp, Homo sapiens
ggcatgacattaaga

SEQ ID NO: 469094 - DNA, 15 bp, Homo sapiens
aggcatgacattaag

SEQ ID NO: 469095 - DNA, 15 bp, Homo sapiens
aaggcatgacattaa

SEQ ID NO: 469096 - DNA, 15 bp, Homo sapiens
caaggcatgacatta

SEQ ID NO: 469097 - DNA, 15 bp, Homo sapiens
gcaaggcatgacatt

SEQ ID NO: 469098 - DNA, 15 bp, Homo sapiens
agcaaggcatgacat

SEQ ID NO: 469099 - DNA, 15 bp, Homo sapiens
cagcaaggcatgaca

SEQ ID NO: 469100 - DNA, 15 bp, Homo sapiens
acagcaaggcatgac

SEQ ID NO: 469101 - DNA, 15 bp, Homo sapiens
aacagcaaggcatga

SEQ ID NO: 469102 - DNA, 15 bp, Homo sapiens
gaacagcaaggcatg

SEQ ID NO: 469103 - DNA, 15 bp, Homo sapiens
ggaacagcaaggcat

SEQ ID NO: 469104 - DNA, 15 bp, Homo sapiens
tggaacagcaaggca

SEQ ID NO: 469105 - DNA, 15 bp, Homo sapiens
atggaacagcaaggc

SEQ ID NO: 469106 - DNA, 15 bp, Homo sapiens
aatggaacagcaagg

SEQ ID NO: 469107 - DNA, 15 bp, Homo sapiens
taatggaacagcaag

SEQ ID NO: 469108 - DNA, 15 bp, Homo sapiens
ttaatggaacagcaa

SEQ ID NO: 469109 - DNA, 15 bp, Homo sapiens
tttaatggaacagca

SEQ ID NO: 469110 - DNA, 15 bp, Homo sapiens
ttttaatggaacagc

SEQ ID NO: 469111 - DNA, 15 bp, Homo sapiens
tttttaatggaacag

SEQ ID NO: 469112 - DNA, 15 bp, Homo sapiens
ttttttaatggaaca

SEQ ID NO: 469113 - DNA, 15 bp, Homo sapiens
attttttaatggaac

SEQ ID NO: 469114 - DNA, 15 bp, Homo sapiens
cattttttaatggaa

SEQ ID NO: 469115 - DNA, 15 bp, Homo sapiens
acattttttaatgga

SEQ ID NO: 469116 - DNA, 15 bp, Homo sapiens
tacattttttaatgg

SEQ ID NO: 469117 - DNA, 15 bp, Homo sapiens
atacattttttaatg

SEQ ID NO: 469118 - DNA, 15 bp, Homo sapiens
catacattttttaat

SEQ ID NO: 469119 - DNA, 15 bp, Homo sapiens
ccatacattttttaa

SEQ ID NO: 469120 - DNA, 15 bp, Homo sapiens
cccatacatttttta

SEQ ID NO: 469121 - DNA, 15 bp, Homo sapiens
acccatacatttttt

SEQ ID NO: 469122 - DNA, 15 bp, Homo sapiens
tacccatacattttt

SEQ ID NO: 469123 - DNA, 15 bp, Homo sapiens
gtacccatacatttt

SEQ ID NO: 469124 - DNA, 15 bp, Homo sapiens
tgtacccatacattt

SEQ ID NO: 469125 - DNA, 15 bp, Homo sapiens
ctgtacccatacatt

SEQ ID NO: 469126 - DNA, 15 bp, Homo sapiens
cctgtacccatacat

SEQ ID NO: 469127 - DNA, 15 bp, Homo sapiens
acctgtacccataca

SEQ ID NO: 469128 - DNA, 15 bp, Homo sapiens
cacctgtacccatac

SEQ ID NO: 469129 - DNA, 15 bp, Homo sapiens
tcacctgtacccata

SEQ ID NO: 469130 - DNA, 15 bp, Homo sapiens
atcacctgtacccat

SEQ ID NO: 469131 - DNA, 15 bp, Homo sapiens
catcacctgtaccca

SEQ ID NO: 469132 - DNA, 15 bp, Homo sapiens
ccatcacctgtaccc

SEQ ID NO: 469133 - DNA, 15 bp, Homo sapiens
cccatcacctgtacc

SEQ ID NO: 469134 - DNA, 15 bp, Homo sapiens
ccccatcacctgtac

SEQ ID NO: 469135 - DNA, 15 bp, Homo sapiens
tccccatcacctgta

SEQ ID NO: 469136 - DNA, 15 bp, Homo sapiens
ttccccatcacctgt

SEQ ID NO: 469137 - DNA, 15 bp, Homo sapiens
tttccccatcacctg

SEQ ID NO: 469138 - DNA, 15 bp, Homo sapiens
ttttccccatcacct

SEQ ID NO: 469139 - DNA, 15 bp, Homo sapiens
attttccccatcacc

SEQ ID NO: 469140 - DNA, 15 bp, Homo sapiens
cattttccccatcac

SEQ ID NO: 469141 - DNA, 15 bp, Homo sapiens
tcattttccccatca

SEQ ID NO: 469142 - DNA, 15 bp, Homo sapiens
ctcattttccccatc

SEQ ID NO: 469143 - DNA, 15 bp, Homo sapiens
tctcattttccccat

SEQ ID NO: 469144 - DNA, 15 bp, Homo sapiens
atctcattttcccca

SEQ ID NO: 469145 - DNA, 15 bp, Homo sapiens
gatctcattttcccc

SEQ ID NO: 469146 - DNA, 15 bp, Homo sapiens
tgatctcattttccc

SEQ ID NO: 469147 - DNA, 15 bp, Homo sapiens
ctgatctcattttcc

SEQ ID NO: 469148 - DNA, 15 bp, Homo sapiens
cctgatctcattttc

SEQ ID NO: 469149 - DNA, 15 bp, Homo sapiens
tcctgatctcatttt

SEQ ID NO: 469150 - DNA, 15 bp, Homo sapiens
ctcctgatctcattt

SEQ ID NO: 469151 - DNA, 15 bp, Homo sapiens
tctcctgatctcatt

SEQ ID NO: 469152 - DNA, 15 bp, Homo sapiens
atctcctgatctcat

SEQ ID NO: 469153 - DNA, 15 bp, Homo sapiens
tatctcctgatctca

SEQ ID NO: 469154 - DNA, 15 bp, Homo sapiens
ttatctcctgatctc

SEQ ID NO: 469155 - DNA, 15 bp, Homo sapiens
tttatctcctgatct

SEQ ID NO: 469156 - DNA, 15 bp, Homo sapiens
ctttatctcctgatc

SEQ ID NO: 469157 - DNA, 15 bp, Homo sapiens
cctttatctcctgat

SEQ ID NO: 469158 - DNA, 15 bp, Homo sapiens
ccctttatctcctga

SEQ ID NO: 469159 - DNA, 15 bp, Homo sapiens
cccctttatctcctg

SEQ ID NO: 469160 - DNA, 15 bp, Homo sapiens
gcccctttatctcct

SEQ ID NO: 469161 - DNA, 15 bp, Homo sapiens
tgcccctttatctcc

SEQ ID NO: 469162 - DNA, 15 bp, Homo sapiens
gtgcccctttatctc

SEQ ID NO: 469163 - DNA, 15 bp, Homo sapiens
ggtgcccctttatct

SEQ ID NO: 469164 - DNA, 15 bp, Homo sapiens
gggtgcccctttatc

SEQ ID NO: 469165 - DNA, 15 bp, Homo sapiens
agggtgcccctttat

SEQ ID NO: 469166 - DNA, 15 bp, Homo sapiens
aagggtgccccttta

SEQ ID NO: 469167 - DNA, 15 bp, Homo sapiens
aaagggtgccccttt

SEQ ID NO: 469168 - DNA, 15 bp, Homo sapiens
caaagggtgcccctt

SEQ ID NO: 469169 - DNA, 15 bp, Homo sapiens
ccaaagggtgcccct

SEQ ID NO: 469170 - DNA, 15 bp, Homo sapiens
accaaagggtgcccc

SEQ ID NO: 469171 - DNA, 15 bp, Homo sapiens
gaccaaagggtgccc

SEQ ID NO: 469172 - DNA, 15 bp, Homo sapiens
agaccaaagggtgcc

SEQ ID NO: 469173 - DNA, 15 bp, Homo sapiens
aagaccaaagggtgc

SEQ ID NO: 469174 - DNA, 15 bp, Homo sapiens
caagaccaaagggtg

SEQ ID NO: 469175 - DNA, 15 bp, Homo sapiens
acaagaccaaagggt

SEQ ID NO: 469176 - DNA, 15 bp, Homo sapiens
tacaagaccaaaggg

SEQ ID NO: 469177 - DNA, 15 bp, Homo sapiens
ttacaagaccaaagg

SEQ ID NO: 469178 - DNA, 15 bp, Homo sapiens
tttacaagaccaaag

SEQ ID NO: 469179 - DNA, 15 bp, Homo sapiens
ctttacaagaccaaa

SEQ ID NO: 469180 - DNA, 15 bp, Homo sapiens
gctttacaagaccaa

SEQ ID NO: 469181 - DNA, 15 bp, Homo sapiens
ggctttacaagacca

SEQ ID NO: 469182 - DNA, 15 bp, Homo sapiens
aggctttacaagacc

SEQ ID NO: 469183 - DNA, 15 bp, Homo sapiens
aaggctttacaagac

SEQ ID NO: 469184 - DNA, 15 bp, Homo sapiens
aaaggctttacaaga

SEQ ID NO: 469185 - DNA, 15 bp, Homo sapiens
aaaaggctttacaag

SEQ ID NO: 469186 - DNA, 15 bp, Homo sapiens
aaaaaggctttacaa

SEQ ID NO: 469187 - DNA, 15 bp, Homo sapiens
aaaaaaggctttaca

SEQ ID NO: 469188 - DNA, 15 bp, Homo sapiens
taaaaaaggctttac

SEQ ID NO: 469189 - DNA, 15 bp, Homo sapiens
ataaaaaaggcttta

SEQ ID NO: 469190 - DNA, 15 bp, Homo sapiens
gataaaaaaggcttt

SEQ ID NO: 469191 - DNA, 15 bp, Homo sapiens
agataaaaaaggctt

SEQ ID NO: 469192 - DNA, 15 bp, Homo sapiens
aagataaaaaaggct

SEQ ID NO: 469193 - DNA, 15 bp, Homo sapiens
taagataaaaaaggc

SEQ ID NO: 469194 - DNA, 15 bp, Homo sapiens
ctaagataaaaaagg

SEQ ID NO: 469195 - DNA, 15 bp, Homo sapiens
tctaagataaaaaag

SEQ ID NO: 469196 - DNA, 15 bp, Homo sapiens
ttctaagataaaaaa

SEQ ID NO: 469197 - DNA, 15 bp, Homo sapiens
cttctaagataaaaa

SEQ ID NO: 469198 - DNA, 15 bp, Homo sapiens
ccttctaagataaaa

SEQ ID NO: 469199 - DNA, 15 bp, Homo sapiens
cccttctaagataaa

SEQ ID NO: 469200 - DNA, 15 bp, Homo sapiens
gcccttctaagataa

SEQ ID NO: 469201 - DNA, 15 bp, Homo sapiens
tgcccttctaagata

SEQ ID NO: 469202 - DNA, 15 bp, Homo sapiens
atgcccttctaagat

SEQ ID NO: 469203 - DNA, 15 bp, Homo sapiens
catgcccttctaaga

SEQ ID NO: 469204 - DNA, 15 bp, Homo sapiens
acatgcccttctaag

SEQ ID NO: 469205 - DNA, 15 bp, Homo sapiens
cacatgcccttctaa

SEQ ID NO: 469206 - DNA, 15 bp, Homo sapiens
ccacatgcccttcta

SEQ ID NO: 469207 - DNA, 15 bp, Homo sapiens
cccacatgcccttct

SEQ ID NO: 469208 - DNA, 15 bp, Homo sapiens
gcccacatgcccttc

SEQ ID NO: 469209 - DNA, 15 bp, Homo sapiens
tgcccacatgccctt

SEQ ID NO: 469210 - DNA, 15 bp, Homo sapiens
ttgcccacatgccct

SEQ ID NO: 469211 - DNA, 15 bp, Homo sapiens
gttgcccacatgccc

SEQ ID NO: 469212 - DNA, 15 bp, Homo sapiens
agttgcccacatgcc

SEQ ID NO: 469213 - DNA, 15 bp, Homo sapiens
cagttgcccacatgc

SEQ ID NO: 469214 - DNA, 15 bp, Homo sapiens
acagttgcccacatg

SEQ ID NO: 469215 - DNA, 15 bp, Homo sapiens
gacagttgcccacat

SEQ ID NO: 469216 - DNA, 15 bp, Homo sapiens
agacagttgcccaca

SEQ ID NO: 469217 - DNA, 15 bp, Homo sapiens
aagacagttgcccac

SEQ ID NO: 469218 - DNA, 15 bp, Homo sapiens
aaagacagttgccca

SEQ ID NO: 469219 - DNA, 15 bp, Homo sapiens
caaagacagttgccc

SEQ ID NO: 469220 - DNA, 15 bp, Homo sapiens
tcaaagacagttgcc

SEQ ID NO: 469221 - DNA, 15 bp, Homo sapiens
gtcaaagacagttgc

SEQ ID NO: 469222 - DNA, 15 bp, Homo sapiens
tgtcaaagacagttg

SEQ ID NO: 469223 - DNA, 15 bp, Homo sapiens
gtgtcaaagacagtt

SEQ ID NO: 469224 - DNA, 15 bp, Homo sapiens
tgtgtcaaagacagt

SEQ ID NO: 469225 - DNA, 15 bp, Homo sapiens
atgtgtcaaagacag

SEQ ID NO: 469226 - DNA, 15 bp, Homo sapiens
aatgtgtcaaagaca

SEQ ID NO: 469227 - DNA, 15 bp, Homo sapiens
caatgtgtcaaagac

SEQ ID NO: 469228 - DNA, 15 bp, Homo sapiens
tcaatgtgtcaaaga

SEQ ID NO: 469229 - DNA, 15 bp, Homo sapiens
ttcaatgtgtcaaag

SEQ ID NO: 469230 - DNA, 15 bp, Homo sapiens
tttcaatgtgtcaaa

SEQ ID NO: 469231 - DNA, 15 bp, Homo sapiens
gtttcaatgtgtcaa

SEQ ID NO: 469232 - DNA, 15 bp, Homo sapiens
ggtttcaatgtgtca

SEQ ID NO: 469233 - DNA, 15 bp, Homo sapiens
cggtttcaatgtgtc

SEQ ID NO: 469234 - DNA, 15 bp, Homo sapiens
gcggtttcaatgtgt

SEQ ID NO: 469235 - DNA, 15 bp, Homo sapiens
ggcggtttcaatgtg

SEQ ID NO: 469236 - DNA, 15 bp, Homo sapiens
aggcggtttcaatgt

SEQ ID NO: 469237 - DNA, 15 bp, Homo sapiens
caggcggtttcaatg

SEQ ID NO: 469238 - DNA, 15 bp, Homo sapiens
acaggcggtttcaat

SEQ ID NO: 469239 - DNA, 15 bp, Homo sapiens
tacaggcggtttcaa

SEQ ID NO: 469240 - DNA, 15 bp, Homo sapiens
atacaggcggtttca

SEQ ID NO: 469241 - DNA, 15 bp, Homo sapiens
catacaggcggtttc

SEQ ID NO: 469242 - DNA, 15 bp, Homo sapiens
ccatacaggcggttt

SEQ ID NO: 469243 - DNA, 15 bp, Homo sapiens
accatacaggcggtt

SEQ ID NO: 469244 - DNA, 15 bp, Homo sapiens
caccatacaggcggt

SEQ ID NO: 469245 - DNA, 15 bp, Homo sapiens
ccaccatacaggcgg

SEQ ID NO: 469246 - DNA, 15 bp, Homo sapiens
accaccatacaggcg

SEQ ID NO: 469247 - DNA, 15 bp, Homo sapiens
caccaccatacaggc

SEQ ID NO: 469248 - DNA, 15 bp, Homo sapiens
ccaccaccatacagg

SEQ ID NO: 469249 - DNA, 15 bp, Homo sapiens
tccaccaccatacag

SEQ ID NO: 469250 - DNA, 15 bp, Homo sapiens
atccaccaccataca

SEQ ID NO: 469251 - DNA, 15 bp, Homo sapiens
catccaccaccatac

SEQ ID NO: 469252 - DNA, 15 bp, Homo sapiens
acatccaccaccata

SEQ ID NO: 469253 - DNA, 15 bp, Homo sapiens
gacatccaccaccat

SEQ ID NO: 469254 - DNA, 15 bp, Homo sapiens
agacatccaccacca

SEQ ID NO: 469255 - DNA, 15 bp, Homo sapiens
aagacatccaccacc

SEQ ID NO: 469256 - DNA, 15 bp, Homo sapiens
caagacatccaccac

SEQ ID NO: 469257 - DNA, 15 bp, Homo sapiens
tcaagacatccacca

SEQ ID NO: 469258 - DNA, 15 bp, Homo sapiens
ttcaagacatccacc

SEQ ID NO: 469259 - DNA, 15 bp, Homo sapiens
cttcaagacatccac

SEQ ID NO: 469260 - DNA, 15 bp, Homo sapiens
ccttcaagacatcca

SEQ ID NO: 469261 - DNA, 15 bp, Homo sapiens
accttcaagacatcc

SEQ ID NO: 469262 - DNA, 15 bp, Homo sapiens
aaccttcaagacatc

SEQ ID NO: 469263 - DNA, 15 bp, Homo sapiens
caaccttcaagacat

SEQ ID NO: 469264 - DNA, 15 bp, Homo sapiens
tcaaccttcaagaca

SEQ ID NO: 469265 - DNA, 15 bp, Homo sapiens
atcaaccttcaagac

SEQ ID NO: 469266 - DNA, 15 bp, Homo sapiens
aatcaaccttcaaga

SEQ ID NO: 469267 - DNA, 15 bp, Homo sapiens
aaatcaaccttcaag

SEQ ID NO: 469268 - DNA, 15 bp, Homo sapiens
caaatcaaccttcaa

SEQ ID NO: 469269 - DNA, 15 bp, Homo sapiens
ccaaatcaaccttca

SEQ ID NO: 469270 - DNA, 15 bp, Homo sapiens
tccaaatcaaccttc

SEQ ID NO: 469271 - DNA, 15 bp, Homo sapiens
gtccaaatcaacctt

SEQ ID NO: 469272 - DNA, 15 bp, Homo sapiens
ggtccaaatcaacct

SEQ ID NO: 469273 - DNA, 15 bp, Homo sapiens
aggtccaaatcaacc

SEQ ID NO: 469274 - DNA, 15 bp, Homo sapiens
gaggtccaaatcaac

SEQ ID NO: 469275 - DNA, 15 bp, Homo sapiens
tgaggtccaaatcaa

SEQ ID NO: 469276 - DNA, 15 bp, Homo sapiens
atgaggtccaaatca

SEQ ID NO: 469277 - DNA, 15 bp, Homo sapiens
aatgaggtccaaatc

SEQ ID NO: 469278 - DNA, 15 bp, Homo sapiens
aaatgaggtccaaat

SEQ ID NO: 469279 - DNA, 15 bp, Homo sapiens
taaatgaggtccaaa

SEQ ID NO: 469280 - DNA, 15 bp, Homo sapiens
gtaaatgaggtccaa

SEQ ID NO: 469281 - DNA, 15 bp, Homo sapiens
agtaaatgaggtcca

SEQ ID NO: 469282 - DNA, 15 bp, Homo sapiens
aagtaaatgaggtcc

SEQ ID NO: 469283 - DNA, 15 bp, Homo sapiens
caagtaaatgaggtc

SEQ ID NO: 469284 - DNA, 15 bp, Homo sapiens
ccaagtaaatgaggt

SEQ ID NO: 469285 - DNA, 15 bp, Homo sapiens
cccaagtaaatgagg

SEQ ID NO: 469286 - DNA, 15 bp, Homo sapiens
gcccaagtaaatgag

SEQ ID NO: 469287 - DNA, 15 bp, Homo sapiens
tgcccaagtaaatga

SEQ ID NO: 469288 - DNA, 15 bp, Homo sapiens
ctgcccaagtaaatg

SEQ ID NO: 469289 - DNA, 15 bp, Homo sapiens
tctgcccaagtaaat

SEQ ID NO: 469290 - DNA, 15 bp, Homo sapiens
atctgcccaagtaaa

SEQ ID NO: 469291 - DNA, 15 bp, Homo sapiens
gatctgcccaagtaa

SEQ ID NO: 469292 - DNA, 15 bp, Homo sapiens
ggatctgcccaagta

SEQ ID NO: 469293 - DNA, 15 bp, Homo sapiens
aggatctgcccaagt

SEQ ID NO: 469294 - DNA, 15 bp, Homo sapiens
gaggatctgcccaag

SEQ ID NO: 469295 - DNA, 15 bp, Homo sapiens
agaggatctgcccaa

SEQ ID NO: 469296 - DNA, 15 bp, Homo sapiens
tagaggatctgccca

SEQ ID NO: 469297 - DNA, 15 bp, Homo sapiens
atagaggatctgccc

SEQ ID NO: 469298 - DNA, 15 bp, Homo sapiens
tatagaggatctgcc

SEQ ID NO: 469299 - DNA, 15 bp, Homo sapiens
atatagaggatctgc

SEQ ID NO: 469300 - DNA, 15 bp, Homo sapiens
tatatagaggatctg

SEQ ID NO: 469301 - DNA, 15 bp, Homo sapiens
atatatagaggatct

SEQ ID NO: 469302 - DNA, 15 bp, Homo sapiens
aatatatagaggatc

SEQ ID NO: 469303 - DNA, 15 bp, Homo sapiens
gaatatatagaggat

SEQ ID NO: 469304 - DNA, 15 bp, Homo sapiens
agaatatatagagga

SEQ ID NO: 469305 - DNA, 15 bp, Homo sapiens
cagaatatatagagg

SEQ ID NO: 469306 - DNA, 15 bp, Homo sapiens
tcagaatatatagag

SEQ ID NO: 469307 - DNA, 15 bp, Homo sapiens
atcagaatatataga

SEQ ID NO: 469308 - DNA, 15 bp, Homo sapiens
tatcagaatatatag

SEQ ID NO: 469309 - DNA, 15 bp, Homo sapiens
ttatcagaatatata

SEQ ID NO: 469310 - DNA, 15 bp, Homo sapiens
attatcagaatatat

SEQ ID NO: 469311 - DNA, 15 bp, Homo sapiens
gattatcagaatata

SEQ ID NO: 469312 - DNA, 15 bp, Homo sapiens
ggattatcagaatat

SEQ ID NO: 469313 - DNA, 15 bp, Homo sapiens
tggattatcagaata

SEQ ID NO: 469314 - DNA, 15 bp, Homo sapiens
ctggattatcagaat

SEQ ID NO: 469315 - DNA, 15 bp, Homo sapiens
actggattatcagaa

SEQ ID NO: 469316 - DNA, 15 bp, Homo sapiens
cactggattatcaga

SEQ ID NO: 469317 - DNA, 15 bp, Homo sapiens
tcactggattatcag

SEQ ID NO: 469318 - DNA, 15 bp, Homo sapiens
atcactggattatca

SEQ ID NO: 469319 - DNA, 15 bp, Homo sapiens
catcactggattatc

SEQ ID NO: 469320 - DNA, 15 bp, Homo sapiens
acatcactggattat

SEQ ID NO: 469321 - DNA, 15 bp, Homo sapiens
cacatcactggatta

SEQ ID NO: 469322 - DNA, 15 bp, Homo sapiens
ccacatcactggatt

SEQ ID NO: 469323 - DNA, 15 bp, Homo sapiens
accacatcactggat

SEQ ID NO: 469324 - DNA, 15 bp, Homo sapiens
taccacatcactgga

SEQ ID NO: 469325 - DNA, 15 bp, Homo sapiens
ctaccacatcactgg

SEQ ID NO: 469326 - DNA, 15 bp, Homo sapiens
tctaccacatcactg

SEQ ID NO: 469327 - DNA, 15 bp, Homo sapiens
gtctaccacatcact

SEQ ID NO: 469328 - DNA, 15 bp, Homo sapiens
tgtctaccacatcac

SEQ ID NO: 469329 - DNA, 15 bp, Homo sapiens
atgtctaccacatca

SEQ ID NO: 469330 - DNA, 15 bp, Homo sapiens
tatgtctaccacatc

SEQ ID NO: 469331 - DNA, 15 bp, Homo sapiens
atatgtctaccacat

SEQ ID NO: 469332 - DNA, 15 bp, Homo sapiens
aatatgtctaccaca

SEQ ID NO: 469333 - DNA, 15 bp, Homo sapiens
aaatatgtctaccac

SEQ ID NO: 469334 - DNA, 15 bp, Homo sapiens
aaaatatgtctacca

SEQ ID NO: 469335 - DNA, 15 bp, Homo sapiens
aaaaatatgtctacc

SEQ ID NO: 469336 - DNA, 15 bp, Homo sapiens
aaaaaatatgtctac

SEQ ID NO: 469337 - DNA, 15 bp, Homo sapiens
gaaaaaatatgtcta

SEQ ID NO: 469338 - DNA, 15 bp, Homo sapiens
agaaaaaatatgtct

SEQ ID NO: 469339 - DNA, 15 bp, Homo sapiens
gagaaaaaatatgtc

SEQ ID NO: 469340 - DNA, 15 bp, Homo sapiens
agagaaaaaatatgt

SEQ ID NO: 469341 - DNA, 15 bp, Homo sapiens
cagagaaaaaatatg

SEQ ID NO: 469342 - DNA, 15 bp, Homo sapiens
tcagagaaaaaatat

SEQ ID NO: 469343 - DNA, 15 bp, Homo sapiens
ttcagagaaaaaata

SEQ ID NO: 469344 - DNA, 15 bp, Homo sapiens
attcagagaaaaaat

SEQ ID NO: 469345 - DNA, 15 bp, Homo sapiens
cattcagagaaaaaa

SEQ ID NO: 469346 - DNA, 15 bp, Homo sapiens
acattcagagaaaaa

SEQ ID NO: 469347 - DNA, 15 bp, Homo sapiens
cacattcagagaaaa

SEQ ID NO: 469348 - DNA, 15 bp, Homo sapiens
tcacattcagagaaa

SEQ ID NO: 469349 - DNA, 15 bp, Homo sapiens
ttcacattcagagaa

SEQ ID NO: 469350 - DNA, 15 bp, Homo sapiens
attcacattcagaga

SEQ ID NO: 469351 - DNA, 15 bp, Homo sapiens
aattcacattcagag

SEQ ID NO: 469352 - DNA, 15 bp, Homo sapiens
gaattcacattcaga

SEQ ID NO: 469353 - DNA, 15 bp, Homo sapiens
agaattcacattcag

SEQ ID NO: 469354 - DNA, 15 bp, Homo sapiens
cagaattcacattca

SEQ ID NO: 469355 - DNA, 15 bp, Homo sapiens
acagaattcacattc

SEQ ID NO: 469356 - DNA, 15 bp, Homo sapiens
gacagaattcacatt

SEQ ID NO: 469357 - DNA, 15 bp, Homo sapiens
tgacagaattcacat

SEQ ID NO: 469358 - DNA, 15 bp, Homo sapiens
atgacagaattcaca

SEQ ID NO: 469359 - DNA, 15 bp, Homo sapiens
tatgacagaattcac

SEQ ID NO: 469360 - DNA, 15 bp, Homo sapiens
ctatgacagaattca

SEQ ID NO: 469361 - DNA, 15 bp, Homo sapiens
gctatgacagaattc

SEQ ID NO: 469362 - DNA, 15 bp, Homo sapiens
agctatgacagaatt

SEQ ID NO: 469363 - DNA, 15 bp, Homo sapiens
tagctatgacagaat

SEQ ID NO: 469364 - DNA, 15 bp, Homo sapiens
ctagctatgacagaa

SEQ ID NO: 469365 - DNA, 15 bp, Homo sapiens
tctagctatgacaga

SEQ ID NO: 469366 - DNA, 15 bp, Homo sapiens
ttctagctatgacag

SEQ ID NO: 469367 - DNA, 15 bp, Homo sapiens
gttctagctatgaca

SEQ ID NO: 469368 - DNA, 15 bp, Homo sapiens
agttctagctatgac

SEQ ID NO: 469369 - DNA, 15 bp, Homo sapiens
aagttctagctatga

SEQ ID NO: 469370 - DNA, 15 bp, Homo sapiens
aaagttctagctatg

SEQ ID NO: 469371 - DNA, 15 bp, Homo sapiens
caaagttctagctat

SEQ ID NO: 469372 - DNA, 15 bp, Homo sapiens
ccaaagttctagcta

SEQ ID NO: 469373 - DNA, 15 bp, Homo sapiens
cccaaagttctagct

SEQ ID NO: 469374 - DNA, 15 bp, Homo sapiens
acccaaagttctagc

SEQ ID NO: 469375 - DNA, 15 bp, Homo sapiens
aacccaaagttctag

SEQ ID NO: 469376 - DNA, 15 bp, Homo sapiens
caacccaaagttcta

SEQ ID NO: 469377 - DNA, 15 bp, Homo sapiens
tcaacccaaagttct

SEQ ID NO: 469378 - DNA, 15 bp, Homo sapiens
atcaacccaaagttc

SEQ ID NO: 469379 - DNA, 15 bp, Homo sapiens
tatcaacccaaagtt

SEQ ID NO: 469380 - DNA, 15 bp, Homo sapiens
gtatcaacccaaagt

SEQ ID NO: 469381 - DNA, 15 bp, Homo sapiens
agtatcaacccaaag

SEQ ID NO: 469382 - DNA, 15 bp, Homo sapiens
aagtatcaacccaaa

SEQ ID NO: 469383 - DNA, 15 bp, Homo sapiens
caagtatcaacccaa

SEQ ID NO: 469384 - DNA, 15 bp, Homo sapiens
acaagtatcaaccca

SEQ ID NO: 469385 - DNA, 15 bp, Homo sapiens
tacaagtatcaaccc

SEQ ID NO: 469386 - DNA, 15 bp, Homo sapiens
ttacaagtatcaacc

SEQ ID NO: 469387 - DNA, 15 bp, Homo sapiens
attacaagtatcaac

SEQ ID NO: 469388 - DNA, 15 bp, Homo sapiens
aattacaagtatcaa

SEQ ID NO: 469389 - DNA, 15 bp, Homo sapiens
gaattacaagtatca

SEQ ID NO: 469390 - DNA, 15 bp, Homo sapiens
ggaattacaagtatc

SEQ ID NO: 469391 - DNA, 15 bp, Homo sapiens
gggaattacaagtat

SEQ ID NO: 469392 - DNA, 15 bp, Homo sapiens
ggggaattacaagta

SEQ ID NO: 469393 - DNA, 15 bp, Homo sapiens
aggggaattacaagt

SEQ ID NO: 469394 - DNA, 15 bp, Homo sapiens
aaggggaattacaag

SEQ ID NO: 469395 - DNA, 15 bp, Homo sapiens
aaaggggaattacaa

SEQ ID NO: 469396 - DNA, 15 bp, Homo sapiens
taaaggggaattaca

SEQ ID NO: 469397 - DNA, 15 bp, Homo sapiens
ctaaaggggaattac

SEQ ID NO: 469398 - DNA, 15 bp, Homo sapiens
actaaaggggaatta

SEQ ID NO: 469399 - DNA, 15 bp, Homo sapiens
aactaaaggggaatt

SEQ ID NO: 469400 - DNA, 15 bp, Homo sapiens
taactaaaggggaat

SEQ ID NO: 469401 - DNA, 15 bp, Homo sapiens
ttaactaaaggggaa

SEQ ID NO: 469402 - DNA, 15 bp, Homo sapiens
tttaactaaagggga

SEQ ID NO: 469403 - DNA, 15 bp, Homo sapiens
ctttaactaaagggg

SEQ ID NO: 469404 - DNA, 15 bp, Homo sapiens
cctttaactaaaggg

SEQ ID NO: 469405 - DNA, 15 bp, Homo sapiens
tcctttaactaaagg

SEQ ID NO: 469406 - DNA, 15 bp, Homo sapiens
ttcctttaactaaag

SEQ ID NO: 469407 - DNA, 15 bp, Homo sapiens
cttcctttaactaaa

SEQ ID NO: 469408 - DNA, 15 bp, Homo sapiens
ccttcctttaactaa

SEQ ID NO: 469409 - DNA, 15 bp, Homo sapiens
tccttcctttaacta

SEQ ID NO: 469410 - DNA, 15 bp, Homo sapiens
ctccttcctttaact

SEQ ID NO: 469411 - DNA, 15 bp, Homo sapiens
gctccttcctttaac

SEQ ID NO: 469412 - DNA, 15 bp, Homo sapiens
ggctccttcctttaa

SEQ ID NO: 469413 - DNA, 15 bp, Homo sapiens
tggctccttccttta

SEQ ID NO: 469414 - DNA, 15 bp, Homo sapiens
gtggctccttccttt

SEQ ID NO: 469415 - DNA, 15 bp, Homo sapiens
tgtggctccttcctt

SEQ ID NO: 469416 - DNA, 15 bp, Homo sapiens
ctgtggctccttcct

SEQ ID NO: 469417 - DNA, 15 bp, Homo sapiens
cctgtggctccttcc

SEQ ID NO: 469418 - DNA, 15 bp, Homo sapiens
ccctgtggctccttc

SEQ ID NO: 469419 - DNA, 15 bp, Homo sapiens
cccctgtggctcctt

SEQ ID NO: 469420 - DNA, 15 bp, Homo sapiens
acccctgtggctcct

SEQ ID NO: 469421 - DNA, 15 bp, Homo sapiens
cacccctgtggctcc

SEQ ID NO: 469422 - DNA, 15 bp, Homo sapiens
acacccctgtggctc

SEQ ID NO: 469423 - DNA, 15 bp, Homo sapiens
tacacccctgtggct

SEQ ID NO: 469424 - DNA, 15 bp, Homo sapiens
atacacccctgtggc

SEQ ID NO: 469425 - DNA, 15 bp, Homo sapiens
aatacacccctgtgg

SEQ ID NO: 469426 - DNA, 15 bp, Homo sapiens
taatacacccctgtg

SEQ ID NO: 469427 - DNA, 15 bp, Homo sapiens
ctaatacacccctgt

SEQ ID NO: 469428 - DNA, 15 bp, Homo sapiens
actaatacacccctg

SEQ ID NO: 469429 - DNA, 15 bp, Homo sapiens
gactaatacacccct

SEQ ID NO: 469430 - DNA, 15 bp, Homo sapiens
agactaatacacccc

SEQ ID NO: 469431 - DNA, 15 bp, Homo sapiens
cagactaatacaccc

SEQ ID NO: 469432 - DNA, 15 bp, Homo sapiens
acagactaatacacc

SEQ ID NO: 469433 - DNA, 15 bp, Homo sapiens
aacagactaatacac

SEQ ID NO: 469434 - DNA, 15 bp, Homo sapiens
gaacagactaataca

SEQ ID NO: 469435 - DNA, 15 bp, Homo sapiens
agaacagactaatac

SEQ ID NO: 469436 - DNA, 15 bp, Homo sapiens
gagaacagactaata

SEQ ID NO: 469437 - DNA, 15 bp, Homo sapiens
tgagaacagactaat

SEQ ID NO: 469438 - DNA, 15 bp, Homo sapiens
ttgagaacagactaa

SEQ ID NO: 469439 - DNA, 15 bp, Homo sapiens
attgagaacagacta

SEQ ID NO: 469440 - DNA, 15 bp, Homo sapiens
aattgagaacagact

SEQ ID NO: 469441 - DNA, 15 bp, Homo sapiens
aaattgagaacagac

SEQ ID NO: 469442 - DNA, 15 bp, Homo sapiens
caaattgagaacaga

SEQ ID NO: 469443 - DNA, 15 bp, Homo sapiens
gcaaattgagaacag

SEQ ID NO: 469444 - DNA, 15 bp, Homo sapiens
agcaaattgagaaca

SEQ ID NO: 469445 - DNA, 15 bp, Homo sapiens
tagcaaattgagaac

SEQ ID NO: 469446 - DNA, 15 bp, Homo sapiens
atagcaaattgagaa

SEQ ID NO: 469447 - DNA, 15 bp, Homo sapiens
tatagcaaattgaga

SEQ ID NO: 469448 - DNA, 15 bp, Homo sapiens
ttatagcaaattgag

SEQ ID NO: 469449 - DNA, 15 bp, Homo sapiens
tttatagcaaattga

SEQ ID NO: 469450 - DNA, 15 bp, Homo sapiens
ctttatagcaaattg

SEQ ID NO: 469451 - DNA, 15 bp, Homo sapiens
tctttatagcaaatt

SEQ ID NO: 469452 - DNA, 15 bp, Homo sapiens
ttctttatagcaaat

SEQ ID NO: 469453 - DNA, 15 bp, Homo sapiens
tttctttatagcaaa

SEQ ID NO: 469454 - DNA, 15 bp, Homo sapiens
atttctttatagcaa

SEQ ID NO: 469455 - DNA, 15 bp, Homo sapiens
tatttctttatagca

SEQ ID NO: 469456 - DNA, 15 bp, Homo sapiens
gtatttctttatagc

SEQ ID NO: 469457 - DNA, 15 bp, Homo sapiens
ggtatttctttatag

SEQ ID NO: 469458 - DNA, 15 bp, Homo sapiens
aggtatttctttata

SEQ ID NO: 469459 - DNA, 15 bp, Homo sapiens
caggtatttctttat

SEQ ID NO: 469460 - DNA, 15 bp, Homo sapiens
tcaggtatttcttta

SEQ ID NO: 469461 - DNA, 15 bp, Homo sapiens
ctcaggtatttcttt

SEQ ID NO: 469462 - DNA, 15 bp, Homo sapiens
tctcaggtatttctt

SEQ ID NO: 469463 - DNA, 15 bp, Homo sapiens
gtctcaggtatttct

SEQ ID NO: 469464 - DNA, 15 bp, Homo sapiens
agtctcaggtatttc

SEQ ID NO: 469465 - DNA, 15 bp, Homo sapiens
cagtctcaggtattt

SEQ ID NO: 469466 - DNA, 15 bp, Homo sapiens
ccagtctcaggtatt

SEQ ID NO: 469467 - DNA, 15 bp, Homo sapiens
cccagtctcaggtat

SEQ ID NO: 469468 - DNA, 15 bp, Homo sapiens
acccagtctcaggta

SEQ ID NO: 469469 - DNA, 15 bp, Homo sapiens
tacccagtctcaggt

SEQ ID NO: 469470 - DNA, 15 bp, Homo sapiens
ttacccagtctcagg

SEQ ID NO: 469471 - DNA, 15 bp, Homo sapiens
attacccagtctcag

SEQ ID NO: 469472 - DNA, 15 bp, Homo sapiens
aattacccagtctca

SEQ ID NO: 469473 - DNA, 15 bp, Homo sapiens
aaattacccagtctc

SEQ ID NO: 469474 - DNA, 15 bp, Homo sapiens
taaattacccagtct

SEQ ID NO: 469475 - DNA, 15 bp, Homo sapiens
ataaattacccagtc

SEQ ID NO: 469476 - DNA, 15 bp, Homo sapiens
tataaattacccagt

SEQ ID NO: 469477 - DNA, 15 bp, Homo sapiens
ttataaattacccag

SEQ ID NO: 469478 - DNA, 15 bp, Homo sapiens
cttataaattaccca

SEQ ID NO: 469479 - DNA, 15 bp, Homo sapiens
tcttataaattaccc

SEQ ID NO: 469480 - DNA, 15 bp, Homo sapiens
ttcttataaattacc

SEQ ID NO: 469481 - DNA, 15 bp, Homo sapiens
tttcttataaattac

SEQ ID NO: 469482 - DNA, 15 bp, Homo sapiens
ttttcttataaatta

SEQ ID NO: 469483 - DNA, 15 bp, Homo sapiens
cttttcttataaatt

SEQ ID NO: 469484 - DNA, 15 bp, Homo sapiens
tcttttcttataaat

SEQ ID NO: 469485 - DNA, 15 bp, Homo sapiens
ctcttttcttataaa

SEQ ID NO: 469486 - DNA, 15 bp, Homo sapiens
cctcttttcttataa

SEQ ID NO: 469487 - DNA, 15 bp, Homo sapiens
acctcttttcttata

SEQ ID NO: 469488 - DNA, 15 bp, Homo sapiens
aacctcttttcttat

SEQ ID NO: 469489 - DNA, 15 bp, Homo sapiens
aaacctcttttctta

SEQ ID NO: 469490 - DNA, 15 bp, Homo sapiens
taaacctcttttctt

SEQ ID NO: 469491 - DNA, 15 bp, Homo sapiens
ttaaacctcttttct

SEQ ID NO: 469492 - DNA, 15 bp, Homo sapiens
attaaacctcttttc

SEQ ID NO: 469493 - DNA, 15 bp, Homo sapiens
gattaaacctctttt

SEQ ID NO: 469494 - DNA, 15 bp, Homo sapiens
cgattaaacctcttt

SEQ ID NO: 469495 - DNA, 15 bp, Homo sapiens
ccgattaaacctctt

SEQ ID NO: 469496 - DNA, 15 bp, Homo sapiens
gccgattaaacctct

SEQ ID NO: 469497 - DNA, 15 bp, Homo sapiens
agccgattaaacctc

SEQ ID NO: 469498 - DNA, 15 bp, Homo sapiens
gagccgattaaacct

SEQ ID NO: 469499 - DNA, 15 bp, Homo sapiens
tgagccgattaaacc

SEQ ID NO: 469500 - DNA, 15 bp, Homo sapiens
atgagccgattaaac

SEQ ID NO: 469501 - DNA, 15 bp, Homo sapiens
tatgagccgattaaa

SEQ ID NO: 469502 - DNA, 15 bp, Homo sapiens
ctatgagccgattaa

SEQ ID NO: 469503 - DNA, 15 bp, Homo sapiens
actatgagccgatta

SEQ ID NO: 469504 - DNA, 15 bp, Homo sapiens
aactatgagccgatt

SEQ ID NO: 469505 - DNA, 15 bp, Homo sapiens
gaactatgagccgat

SEQ ID NO: 469506 - DNA, 15 bp, Homo sapiens
agaactatgagccga

SEQ ID NO: 469507 - DNA, 15 bp, Homo sapiens
cagaactatgagccg

SEQ ID NO: 469508 - DNA, 15 bp, Homo sapiens
gcagaactatgagcc

SEQ ID NO: 469509 - DNA, 15 bp, Homo sapiens
tgcagaactatgagc

SEQ ID NO: 469510 - DNA, 15 bp, Homo sapiens
ctgcagaactatgag

SEQ ID NO: 469511 - DNA, 15 bp, Homo sapiens
cctgcagaactatga

SEQ ID NO: 469512 - DNA, 15 bp, Homo sapiens
gcctgcagaactatg

SEQ ID NO: 469513 - DNA, 15 bp, Homo sapiens
agcctgcagaactat

SEQ ID NO: 469514 - DNA, 15 bp, Homo sapiens
tagcctgcagaacta

SEQ ID NO: 469515 - DNA, 15 bp, Homo sapiens
atagcctgcagaact

SEQ ID NO: 469516 - DNA, 15 bp, Homo sapiens
tatagcctgcagaac

SEQ ID NO: 469517 - DNA, 15 bp, Homo sapiens
atatagcctgcagaa

SEQ ID NO: 469518 - DNA, 15 bp, Homo sapiens
tatatagcctgcaga

SEQ ID NO: 469519 - DNA, 15 bp, Homo sapiens
ctatatagcctgcag

SEQ ID NO: 469520 - DNA, 15 bp, Homo sapiens
cctatatagcctgca

SEQ ID NO: 469521 - DNA, 15 bp, Homo sapiens
tcctatatagcctgc

SEQ ID NO: 469522 - DNA, 15 bp, Homo sapiens
ttcctatatagcctg

SEQ ID NO: 469523 - DNA, 15 bp, Homo sapiens
cttcctatatagcct

SEQ ID NO: 469524 - DNA, 15 bp, Homo sapiens
gcttcctatatagcc

SEQ ID NO: 469525 - DNA, 15 bp, Homo sapiens
tgcttcctatatagc

SEQ ID NO: 469526 - DNA, 15 bp, Homo sapiens
atgcttcctatatag

SEQ ID NO: 469527 - DNA, 15 bp, Homo sapiens
tatgcttcctatata

SEQ ID NO: 469528 - DNA, 15 bp, Homo sapiens
ctatgcttcctatat

SEQ ID NO: 469529 - DNA, 15 bp, Homo sapiens
gctatgcttcctata

SEQ ID NO: 469530 - DNA, 15 bp, Homo sapiens
tgctatgcttcctat

SEQ ID NO: 469531 - DNA, 15 bp, Homo sapiens
ctgctatgcttccta

SEQ ID NO: 469532 - DNA, 15 bp, Homo sapiens
gctgctatgcttcct

SEQ ID NO: 469533 - DNA, 15 bp, Homo sapiens
tgctgctatgcttcc

SEQ ID NO: 469534 - DNA, 15 bp, Homo sapiens
atgctgctatgcttc

SEQ ID NO: 469535 - DNA, 15 bp, Homo sapiens
gatgctgctatgctt

SEQ ID NO: 469536 - DNA, 15 bp, Homo sapiens
agatgctgctatgct

SEQ ID NO: 469537 - DNA, 15 bp, Homo sapiens
cagatgctgctatgc

SEQ ID NO: 469538 - DNA, 15 bp, Homo sapiens
gcagatgctgctatg

SEQ ID NO: 469539 - DNA, 15 bp, Homo sapiens
agcagatgctgctat

SEQ ID NO: 469540 - DNA, 15 bp, Homo sapiens
cagcagatgctgcta

SEQ ID NO: 469541 - DNA, 15 bp, Homo sapiens
gcagcagatgctgct

SEQ ID NO: 469542 - DNA, 15 bp, Homo sapiens
agcagcagatgctgc

SEQ ID NO: 469543 - DNA, 15 bp, Homo sapiens
cagcagcagatgctg

SEQ ID NO: 469544 - DNA, 15 bp, Homo sapiens
ccagcagcagatgct

SEQ ID NO: 469545 - DNA, 15 bp, Homo sapiens
cccagcagcagatgc

SEQ ID NO: 469546 - DNA, 15 bp, Homo sapiens
ccccagcagcagatg

SEQ ID NO: 469547 - DNA, 15 bp, Homo sapiens
tccccagcagcagat

SEQ ID NO: 469548 - DNA, 15 bp, Homo sapiens
ctccccagcagcaga

SEQ ID NO: 469549 - DNA, 15 bp, Homo sapiens
cctccccagcagcag

SEQ ID NO: 469550 - DNA, 15 bp, Homo sapiens
gcctccccagcagca

SEQ ID NO: 469551 - DNA, 15 bp, Homo sapiens
ggcctccccagcagc

SEQ ID NO: 469552 - DNA, 15 bp, Homo sapiens
aggcctccccagcag

SEQ ID NO: 469553 - DNA, 15 bp, Homo sapiens
gaggcctccccagca

SEQ ID NO: 469554 - DNA, 15 bp, Homo sapiens
tgaggcctccccagc

SEQ ID NO: 469555 - DNA, 15 bp, Homo sapiens
ctgaggcctccccag

SEQ ID NO: 469556 - DNA, 15 bp, Homo sapiens
gctgaggcctcccca

SEQ ID NO: 469557 - DNA, 15 bp, Homo sapiens
tgctgaggcctcccc

SEQ ID NO: 469558 - DNA, 15 bp, Homo sapiens
ttgctgaggcctccc

SEQ ID NO: 469559 - DNA, 15 bp, Homo sapiens
cttgctgaggcctcc

SEQ ID NO: 469560 - DNA, 15 bp, Homo sapiens
gcttgctgaggcctc

SEQ ID NO: 469561 - DNA, 15 bp, Homo sapiens
agcttgctgaggcct

SEQ ID NO: 469562 - DNA, 15 bp, Homo sapiens
aagcttgctgaggcc

SEQ ID NO: 469563 - DNA, 15 bp, Homo sapiens
gaagcttgctgaggc

SEQ ID NO: 469564 - DNA, 15 bp, Homo sapiens
ggaagcttgctgagg

SEQ ID NO: 469565 - DNA, 15 bp, Homo sapiens
tggaagcttgctgag

SEQ ID NO: 469566 - DNA, 15 bp, Homo sapiens
ttggaagcttgctga

SEQ ID NO: 469567 - DNA, 15 bp, Homo sapiens
attggaagcttgctg

SEQ ID NO: 469568 - DNA, 15 bp, Homo sapiens
gattggaagcttgct

SEQ ID NO: 469569 - DNA, 15 bp, Homo sapiens
tgattggaagcttgc

SEQ ID NO: 469570 - DNA, 15 bp, Homo sapiens
atgattggaagcttg

SEQ ID NO: 469571 - DNA, 15 bp, Homo sapiens
catgattggaagctt

SEQ ID NO: 469572 - DNA, 15 bp, Homo sapiens
ccatgattggaagct

SEQ ID NO: 469573 - DNA, 15 bp, Homo sapiens
gccatgattggaagc

SEQ ID NO: 469574 - DNA, 15 bp, Homo sapiens
cgccatgattggaag

SEQ ID NO: 469575 - DNA, 15 bp, Homo sapiens
ccgccatgattggaa

SEQ ID NO: 469576 - DNA, 15 bp, Homo sapiens
tccgccatgattgga

SEQ ID NO: 469577 - DNA, 15 bp, Homo sapiens
ttccgccatgattgg

SEQ ID NO: 469578 - DNA, 15 bp, Homo sapiens
cttccgccatgattg

SEQ ID NO: 469579 - DNA, 15 bp, Homo sapiens
ccttccgccatgatt

SEQ ID NO: 469580 - DNA, 15 bp, Homo sapiens
gccttccgccatgat

SEQ ID NO: 469581 - DNA, 15 bp, Homo sapiens
tgccttccgccatga

SEQ ID NO: 469582 - DNA, 15 bp, Homo sapiens
ctgccttccgccatg

SEQ ID NO: 469583 - DNA, 15 bp, Homo sapiens
tctgccttccgccat

SEQ ID NO: 469584 - DNA, 15 bp, Homo sapiens
ctctgccttccgcca

SEQ ID NO: 469585 - DNA, 15 bp, Homo sapiens
tctctgccttccgcc

SEQ ID NO: 469586 - DNA, 15 bp, Homo sapiens
ctctctgccttccgc

SEQ ID NO: 469587 - DNA, 15 bp, Homo sapiens
cctctctgccttccg

SEQ ID NO: 469588 - DNA, 15 bp, Homo sapiens
ccctctctgccttcc

SEQ ID NO: 469589 - DNA, 15 bp, Homo sapiens
tccctctctgccttc

SEQ ID NO: 469590 - DNA, 15 bp, Homo sapiens
ctccctctctgcctt

SEQ ID NO: 469591 - DNA, 15 bp, Homo sapiens
gctccctctctgcct

SEQ ID NO: 469592 - DNA, 15 bp, Homo sapiens
tgctccctctctgcc

SEQ ID NO: 469593 - DNA, 15 bp, Homo sapiens
ctgctccctctctgc

SEQ ID NO: 469594 - DNA, 15 bp, Homo sapiens
cctgctccctctctg

SEQ ID NO: 469595 - DNA, 15 bp, Homo sapiens
gcctgctccctctct

SEQ ID NO: 469596 - DNA, 15 bp, Homo sapiens
tgcctgctccctctc

SEQ ID NO: 469597 - DNA, 15 bp, Homo sapiens
ctgcctgctccctct

SEQ ID NO: 469598 - DNA, 15 bp, Homo sapiens
cctgcctgctccctc

SEQ ID NO: 469599 - DNA, 15 bp, Homo sapiens
acctgcctgctccct

SEQ ID NO: 469600 - DNA, 15 bp, Homo sapiens
gacctgcctgctccc

SEQ ID NO: 469601 - DNA, 15 bp, Homo sapiens
tgacctgcctgctcc

SEQ ID NO: 469602 - DNA, 15 bp, Homo sapiens
gtgacctgcctgctc

SEQ ID NO: 469603 - DNA, 15 bp, Homo sapiens
tgtgacctgcctgct

SEQ ID NO: 469604 - DNA, 15 bp, Homo sapiens
atgtgacctgcctgc

SEQ ID NO: 469605 - DNA, 15 bp, Homo sapiens
catgtgacctgcctg

SEQ ID NO: 469606 - DNA, 15 bp, Homo sapiens
ccatgtgacctgcct

SEQ ID NO: 469607 - DNA, 15 bp, Homo sapiens
gccatgtgacctgcc

SEQ ID NO: 469608 - DNA, 15 bp, Homo sapiens
ggccatgtgacctgc

SEQ ID NO: 469609 - DNA, 15 bp, Homo sapiens
tggccatgtgacctg

SEQ ID NO: 469610 - DNA, 15 bp, Homo sapiens
gtggccatgtgacct

SEQ ID NO: 469611 - DNA, 15 bp, Homo sapiens
tgtggccatgtgacc

SEQ ID NO: 469612 - DNA, 15 bp, Homo sapiens
ctgtggccatgtgac

SEQ ID NO: 469613 - DNA, 15 bp, Homo sapiens
gctgtggccatgtga

SEQ ID NO: 469614 - DNA, 15 bp, Homo sapiens
tgctgtggccatgtg

SEQ ID NO: 469615 - DNA, 15 bp, Homo sapiens
ttgctgtggccatgt

SEQ ID NO: 469616 - DNA, 15 bp, Homo sapiens
cttgctgtggccatg

SEQ ID NO: 469617 - DNA, 15 bp, Homo sapiens
tcttgctgtggccat

SEQ ID NO: 469618 - DNA, 15 bp, Homo sapiens
ctcttgctgtggcca

SEQ ID NO: 469619 - DNA, 15 bp, Homo sapiens
gctcttgctgtggcc

SEQ ID NO: 469620 - DNA, 15 bp, Homo sapiens
tgctcttgctgtggc

SEQ ID NO: 469621 - DNA, 15 bp, Homo sapiens
ttgctcttgctgtgg

SEQ ID NO: 469622 - DNA, 15 bp, Homo sapiens
cttgctcttgctgtg

SEQ ID NO: 469623 - DNA, 15 bp, Homo sapiens
tcttgctcttgctgt

SEQ ID NO: 469624 - DNA, 15 bp, Homo sapiens
ctcttgctcttgctg

SEQ ID NO: 469625 - DNA, 15 bp, Homo sapiens
tctcttgctcttgct

SEQ ID NO: 469626 - DNA, 15 bp, Homo sapiens
ctctcttgctcttgc

SEQ ID NO: 469627 - DNA, 15 bp, Homo sapiens
gctctcttgctcttg

SEQ ID NO: 469628 - DNA, 15 bp, Homo sapiens
tgctctcttgctctt

SEQ ID NO: 469629 - DNA, 15 bp, Homo sapiens
ttgctctcttgctct

SEQ ID NO: 469630 - DNA, 15 bp, Homo sapiens
cttgctctcttgctc

SEQ ID NO: 469631 - DNA, 15 bp, Homo sapiens
ccttgctctcttgct

SEQ ID NO: 469632 - DNA, 15 bp, Homo sapiens
cccttgctctcttgc

SEQ ID NO: 469633 - DNA, 15 bp, Homo sapiens
ccccttgctctcttg

SEQ ID NO: 469634 - DNA, 15 bp, Homo sapiens
cccccttgctctctt

SEQ ID NO: 469635 - DNA, 15 bp, Homo sapiens
tcccccttgctctct

SEQ ID NO: 469636 - DNA, 15 bp, Homo sapiens
ctcccccttgctctc

SEQ ID NO: 469637 - DNA, 15 bp, Homo sapiens
cctcccccttgctct

SEQ ID NO: 469638 - DNA, 15 bp, Homo sapiens
acctcccccttgctc

SEQ ID NO: 469639 - DNA, 15 bp, Homo sapiens
cacctcccccttgct

SEQ ID NO: 469640 - DNA, 15 bp, Homo sapiens
gcacctcccccttgc

SEQ ID NO: 469641 - DNA, 15 bp, Homo sapiens
ggcacctcccccttg

SEQ ID NO: 469642 - DNA, 15 bp, Homo sapiens
tggcacctccccctt

SEQ ID NO: 469643 - DNA, 15 bp, Homo sapiens
gtggcacctccccct

SEQ ID NO: 469644 - DNA, 15 bp, Homo sapiens
tgtggcacctccccc

SEQ ID NO: 469645 - DNA, 15 bp, Homo sapiens
gtgtggcacctcccc

SEQ ID NO: 469646 - DNA, 15 bp, Homo sapiens
tgtgtggcacctccc

SEQ ID NO: 469647 - DNA, 15 bp, Homo sapiens
gtgtgtggcacctcc

SEQ ID NO: 469648 - DNA, 15 bp, Homo sapiens
agtgtgtggcacctc

SEQ ID NO: 469649 - DNA, 15 bp, Homo sapiens
aagtgtgtggcacct

SEQ ID NO: 469650 - DNA, 15 bp, Homo sapiens
aaagtgtgtggcacc

SEQ ID NO: 469651 - DNA, 15 bp, Homo sapiens
aaaagtgtgtggcac

SEQ ID NO: 469652 - DNA, 15 bp, Homo sapiens
taaaagtgtgtggca

SEQ ID NO: 469653 - DNA, 15 bp, Homo sapiens
ttaaaagtgtgtggc

SEQ ID NO: 469654 - DNA, 15 bp, Homo sapiens
tttaaaagtgtgtgg

SEQ ID NO: 469655 - DNA, 15 bp, Homo sapiens
gtttaaaagtgtgtg

SEQ ID NO: 469656 - DNA, 15 bp, Homo sapiens
agtttaaaagtgtgt

SEQ ID NO: 469657 - DNA, 15 bp, Homo sapiens
tagtttaaaagtgtg

SEQ ID NO: 469658 - DNA, 15 bp, Homo sapiens
atagtttaaaagtgt

SEQ ID NO: 469659 - DNA, 15 bp, Homo sapiens
gatagtttaaaagtg

SEQ ID NO: 469660 - DNA, 15 bp, Homo sapiens
tgatagtttaaaagt

SEQ ID NO: 469661 - DNA, 15 bp, Homo sapiens
ctgatagtttaaaag

SEQ ID NO: 469662 - DNA, 15 bp, Homo sapiens
tctgatagtttaaaa

SEQ ID NO: 469663 - DNA, 15 bp, Homo sapiens
atctgatagtttaaa

SEQ ID NO: 469664 - DNA, 15 bp, Homo sapiens
gatctgatagtttaa

SEQ ID NO: 469665 - DNA, 15 bp, Homo sapiens
agatctgatagttta

SEQ ID NO: 469666 - DNA, 15 bp, Homo sapiens
gagatctgatagttt

SEQ ID NO: 469667 - DNA, 15 bp, Homo sapiens
tgagatctgatagtt

SEQ ID NO: 469668 - DNA, 15 bp, Homo sapiens
gtgagatctgatagt

SEQ ID NO: 469669 - DNA, 15 bp, Homo sapiens
tgtgagatctgatag

SEQ ID NO: 469670 - DNA, 15 bp, Homo sapiens
ttgtgagatctgata

SEQ ID NO: 469671 - DNA, 15 bp, Homo sapiens
cttgtgagatctgat

SEQ ID NO: 469672 - DNA, 15 bp, Homo sapiens
tcttgtgagatctga

SEQ ID NO: 469673 - DNA, 15 bp, Homo sapiens
ttcttgtgagatctg

SEQ ID NO: 469674 - DNA, 15 bp, Homo sapiens
gttcttgtgagatct

SEQ ID NO: 469675 - DNA, 15 bp, Homo sapiens
agttcttgtgagatc

SEQ ID NO: 469676 - DNA, 15 bp, Homo sapiens
gagttcttgtgagat

SEQ ID NO: 469677 - DNA, 15 bp, Homo sapiens
tgagttcttgtgaga

SEQ ID NO: 469678 - DNA, 15 bp, Homo sapiens
gtgagttcttgtgag

SEQ ID NO: 469679 - DNA, 15 bp, Homo sapiens
agtgagttcttgtga

SEQ ID NO: 469680 - DNA, 15 bp, Homo sapiens
cagtgagttcttgtg

SEQ ID NO: 469681 - DNA, 15 bp, Homo sapiens
acagtgagttcttgt

SEQ ID NO: 469682 - DNA, 15 bp, Homo sapiens
gacagtgagttcttg

SEQ ID NO: 469683 - DNA, 15 bp, Homo sapiens
agacagtgagttctt

SEQ ID NO: 469684 - DNA, 15 bp, Homo sapiens
gagacagtgagttct

SEQ ID NO: 469685 - DNA, 15 bp, Homo sapiens
cgagacagtgagttc

SEQ ID NO: 469686 - DNA, 15 bp, Homo sapiens
tcgagacagtgagtt

SEQ ID NO: 469687 - DNA, 15 bp, Homo sapiens
ctcgagacagtgagt

SEQ ID NO: 469688 - DNA, 15 bp, Homo sapiens
cctcgagacagtgag

SEQ ID NO: 469689 - DNA, 15 bp, Homo sapiens
tcctcgagacagtga

SEQ ID NO: 469690 - DNA, 15 bp, Homo sapiens
gtcctcgagacagtg

SEQ ID NO: 469691 - DNA, 15 bp, Homo sapiens
tgtcctcgagacagt

SEQ ID NO: 469692 - DNA, 15 bp, Homo sapiens
ctgtcctcgagacag

SEQ ID NO: 469693 - DNA, 15 bp, Homo sapiens
actgtcctcgagaca

SEQ ID NO: 469694 - DNA, 15 bp, Homo sapiens
tactgtcctcgagac

SEQ ID NO: 469695 - DNA, 15 bp, Homo sapiens
atactgtcctcgaga

SEQ ID NO: 469696 - DNA, 15 bp, Homo sapiens
gatactgtcctcgag

SEQ ID NO: 469697 - DNA, 15 bp, Homo sapiens
tgatactgtcctcga

SEQ ID NO: 469698 - DNA, 15 bp, Homo sapiens
ttgatactgtcctcg

SEQ ID NO: 469699 - DNA, 15 bp, Homo sapiens
gttgatactgtcctc

SEQ ID NO: 469700 - DNA, 15 bp, Homo sapiens
tgttgatactgtcct

SEQ ID NO: 469701 - DNA, 15 bp, Homo sapiens
ctgttgatactgtcc

SEQ ID NO: 469702 - DNA, 15 bp, Homo sapiens
cctgttgatactgtc

SEQ ID NO: 469703 - DNA, 15 bp, Homo sapiens
ccctgttgatactgt

SEQ ID NO: 469704 - DNA, 15 bp, Homo sapiens
tccctgttgatactg

SEQ ID NO: 469705 - DNA, 15 bp, Homo sapiens
atccctgttgatact

SEQ ID NO: 469706 - DNA, 15 bp, Homo sapiens
catccctgttgatac

SEQ ID NO: 469707 - DNA, 15 bp, Homo sapiens
ccatccctgttgata

SEQ ID NO: 469708 - DNA, 15 bp, Homo sapiens
accatccctgttgat

SEQ ID NO: 469709 - DNA, 15 bp, Homo sapiens
taccatccctgttga

SEQ ID NO: 469710 - DNA, 15 bp, Homo sapiens
ataccatccctgttg

SEQ ID NO: 469711 - DNA, 15 bp, Homo sapiens
aataccatccctgtt

SEQ ID NO: 469712 - DNA, 15 bp, Homo sapiens
taataccatccctgt

SEQ ID NO: 469713 - DNA, 15 bp, Homo sapiens
ttaataccatccctg

SEQ ID NO: 469714 - DNA, 15 bp, Homo sapiens
tttaataccatccct

SEQ ID NO: 469715 - DNA, 15 bp, Homo sapiens
gtttaataccatccc

SEQ ID NO: 469716 - DNA, 15 bp, Homo sapiens
ggtttaataccatcc

SEQ ID NO: 469717 - DNA, 15 bp, Homo sapiens
tggtttaataccatc

SEQ ID NO: 469718 - DNA, 15 bp, Homo sapiens
atggtttaataccat

SEQ ID NO: 469719 - DNA, 15 bp, Homo sapiens
aatggtttaatacca

SEQ ID NO: 469720 - DNA, 15 bp, Homo sapiens
gaatggtttaatacc

SEQ ID NO: 469721 - DNA, 15 bp, Homo sapiens
tgaatggtttaatac

SEQ ID NO: 469722 - DNA, 15 bp, Homo sapiens
atgaatggtttaata

SEQ ID NO: 469723 - DNA, 15 bp, Homo sapiens
catgaatggtttaat

SEQ ID NO: 469724 - DNA, 15 bp, Homo sapiens
tcatgaatggtttaa

SEQ ID NO: 469725 - DNA, 15 bp, Homo sapiens
ctcatgaatggttta

SEQ ID NO: 469726 - DNA, 15 bp, Homo sapiens
tctcatgaatggttt

SEQ ID NO: 469727 - DNA, 15 bp, Homo sapiens
ttctcatgaatggtt

SEQ ID NO: 469728 - DNA, 15 bp, Homo sapiens
tttctcatgaatggt

SEQ ID NO: 469729 - DNA, 15 bp, Homo sapiens
gtttctcatgaatgg

SEQ ID NO: 469730 - DNA, 15 bp, Homo sapiens
ggtttctcatgaatg

SEQ ID NO: 469731 - DNA, 15 bp, Homo sapiens
gggtttctcatgaat

SEQ ID NO: 469732 - DNA, 15 bp, Homo sapiens
tgggtttctcatgaa

SEQ ID NO: 469733 - DNA, 15 bp, Homo sapiens
gtgggtttctcatga

SEQ ID NO: 469734 - DNA, 15 bp, Homo sapiens
ggtgggtttctcatg

SEQ ID NO: 469735 - DNA, 15 bp, Homo sapiens
gggtgggtttctcat

SEQ ID NO: 469736 - DNA, 15 bp, Homo sapiens
ggggtgggtttctca

SEQ ID NO: 469737 - DNA, 15 bp, Homo sapiens
gggggtgggtttctc

SEQ ID NO: 469738 - DNA, 15 bp, Homo sapiens
tgggggtgggtttct

SEQ ID NO: 469739 - DNA, 15 bp, Homo sapiens
atgggggtgggtttc

SEQ ID NO: 469740 - DNA, 15 bp, Homo sapiens
catgggggtgggttt

SEQ ID NO: 469741 - DNA, 15 bp, Homo sapiens
tcatgggggtgggtt

SEQ ID NO: 469742 - DNA, 15 bp, Homo sapiens
atcatgggggtgggt

SEQ ID NO: 469743 - DNA, 15 bp, Homo sapiens
gatcatgggggtggg

SEQ ID NO: 469744 - DNA, 15 bp, Homo sapiens
ggatcatgggggtgg

SEQ ID NO: 469745 - DNA, 15 bp, Homo sapiens
tggatcatgggggtg

SEQ ID NO: 469746 - DNA, 15 bp, Homo sapiens
ctggatcatgggggt

SEQ ID NO: 469747 - DNA, 15 bp, Homo sapiens
actggatcatggggg

SEQ ID NO: 469748 - DNA, 15 bp, Homo sapiens
gactggatcatgggg

SEQ ID NO: 469749 - DNA, 15 bp, Homo sapiens
tgactggatcatggg

SEQ ID NO: 469750 - DNA, 15 bp, Homo sapiens
gtgactggatcatgg

SEQ ID NO: 469751 - DNA, 15 bp, Homo sapiens
ggtgactggatcatg

SEQ ID NO: 469752 - DNA, 15 bp, Homo sapiens
aggtgactggatcat

SEQ ID NO: 469753 - DNA, 15 bp, Homo sapiens
aaggtgactggatca

SEQ ID NO: 469754 - DNA, 15 bp, Homo sapiens
gaaggtgactggatc

SEQ ID NO: 469755 - DNA, 15 bp, Homo sapiens
ggaaggtgactggat

SEQ ID NO: 469756 - DNA, 15 bp, Homo sapiens
tggaaggtgactgga

SEQ ID NO: 469757 - DNA, 15 bp, Homo sapiens
gtggaaggtgactgg

SEQ ID NO: 469758 - DNA, 15 bp, Homo sapiens
ggtggaaggtgactg

SEQ ID NO: 469759 - DNA, 15 bp, Homo sapiens
tggtggaaggtgact

SEQ ID NO: 469760 - DNA, 15 bp, Homo sapiens
ctggtggaaggtgac

SEQ ID NO: 469761 - DNA, 15 bp, Homo sapiens
cctggtggaaggtga

SEQ ID NO: 469762 - DNA, 15 bp, Homo sapiens
gcctggtggaaggtg

SEQ ID NO: 469763 - DNA, 15 bp, Homo sapiens
ggcctggtggaaggt

SEQ ID NO: 469764 - DNA, 15 bp, Homo sapiens
gggcctggtggaagg

SEQ ID NO: 469765 - DNA, 15 bp, Homo sapiens
ggggcctggtggaag

SEQ ID NO: 469766 - DNA, 15 bp, Homo sapiens
tggggcctggtggaa

SEQ ID NO: 469767 - DNA, 15 bp, Homo sapiens
gtggggcctggtgga

SEQ ID NO: 469768 - DNA, 15 bp, Homo sapiens
ggtggggcctggtgg

SEQ ID NO: 469769 - DNA, 15 bp, Homo sapiens
aggtggggcctggtg

SEQ ID NO: 469770 - DNA, 15 bp, Homo sapiens
gaggtggggcctggt

SEQ ID NO: 469771 - DNA, 15 bp, Homo sapiens
tgaggtggggcctgg

SEQ ID NO: 469772 - DNA, 15 bp, Homo sapiens
ttgaggtggggcctg

SEQ ID NO: 469773 - DNA, 15 bp, Homo sapiens
tttgaggtggggcct

SEQ ID NO: 469774 - DNA, 15 bp, Homo sapiens
gtttgaggtggggcc

SEQ ID NO: 469775 - DNA, 15 bp, Homo sapiens
tgtttgaggtggggc

SEQ ID NO: 469776 - DNA, 15 bp, Homo sapiens
ctgtttgaggtgggg

SEQ ID NO: 469777 - DNA, 15 bp, Homo sapiens
actgtttgaggtggg

SEQ ID NO: 469778 - DNA, 15 bp, Homo sapiens
cactgtttgaggtgg

SEQ ID NO: 469779 - DNA, 15 bp, Homo sapiens
ccactgtttgaggtg

SEQ ID NO: 469780 - DNA, 15 bp, Homo sapiens
cccactgtttgaggt

SEQ ID NO: 469781 - DNA, 15 bp, Homo sapiens
ccccactgtttgagg

SEQ ID NO: 469782 - DNA, 15 bp, Homo sapiens
cccccactgtttgag

SEQ ID NO: 469783 - DNA, 15 bp, Homo sapiens
acccccactgtttga

SEQ ID NO: 469784 - DNA, 15 bp, Homo sapiens
aacccccactgtttg

SEQ ID NO: 469785 - DNA, 15 bp, Homo sapiens
taacccccactgttt

SEQ ID NO: 469786 - DNA, 15 bp, Homo sapiens
gtaacccccactgtt

SEQ ID NO: 469787 - DNA, 15 bp, Homo sapiens
tgtaacccccactgt

SEQ ID NO: 469788 - DNA, 15 bp, Homo sapiens
atgtaacccccactg

SEQ ID NO: 469789 - DNA, 15 bp, Homo sapiens
aatgtaacccccact

SEQ ID NO: 469790 - DNA, 15 bp, Homo sapiens
aaatgtaacccccac

SEQ ID NO: 469791 - DNA, 15 bp, Homo sapiens
gaaatgtaaccccca

SEQ ID NO: 469792 - DNA, 15 bp, Homo sapiens
tgaaatgtaaccccc

SEQ ID NO: 469793 - DNA, 15 bp, Homo sapiens
ctgaaatgtaacccc

SEQ ID NO: 469794 - DNA, 15 bp, Homo sapiens
actgaaatgtaaccc

SEQ ID NO: 469795 - DNA, 15 bp, Homo sapiens
tactgaaatgtaacc

SEQ ID NO: 469796 - DNA, 15 bp, Homo sapiens
atactgaaatgtaac

SEQ ID NO: 469797 - DNA, 15 bp, Homo sapiens
catactgaaatgtaa

SEQ ID NO: 469798 - DNA, 15 bp, Homo sapiens
tcatactgaaatgta

SEQ ID NO: 469799 - DNA, 15 bp, Homo sapiens
ctcatactgaaatgt

SEQ ID NO: 469800 - DNA, 15 bp, Homo sapiens
tctcatactgaaatg

SEQ ID NO: 469801 - DNA, 15 bp, Homo sapiens
atctcatactgaaat

SEQ ID NO: 469802 - DNA, 15 bp, Homo sapiens
aatctcatactgaaa

SEQ ID NO: 469803 - DNA, 15 bp, Homo sapiens
aaatctcatactgaa

SEQ ID NO: 469804 - DNA, 15 bp, Homo sapiens
caaatctcatactga

SEQ ID NO: 469805 - DNA, 15 bp, Homo sapiens
ccaaatctcatactg

SEQ ID NO: 469806 - DNA, 15 bp, Homo sapiens
cccaaatctcatact

SEQ ID NO: 469807 - DNA, 15 bp, Homo sapiens
gcccaaatctcatac

SEQ ID NO: 469808 - DNA, 15 bp, Homo sapiens
tgcccaaatctcata

SEQ ID NO: 469809 - DNA, 15 bp, Homo sapiens
ctgcccaaatctcat

SEQ ID NO: 469810 - DNA, 15 bp, Homo sapiens
cctgcccaaatctca

SEQ ID NO: 469811 - DNA, 15 bp, Homo sapiens
ccctgcccaaatctc

SEQ ID NO: 469812 - DNA, 15 bp, Homo sapiens
tccctgcccaaatct

SEQ ID NO: 469813 - DNA, 15 bp, Homo sapiens
atccctgcccaaatc

SEQ ID NO: 469814 - DNA, 15 bp, Homo sapiens
catccctgcccaaat

SEQ ID NO: 469815 - DNA, 15 bp, Homo sapiens
acatccctgcccaaa

SEQ ID NO: 469816 - DNA, 15 bp, Homo sapiens
tacatccctgcccaa

SEQ ID NO: 469817 - DNA, 15 bp, Homo sapiens
ctacatccctgccca

SEQ ID NO: 469818 - DNA, 15 bp, Homo sapiens
tctacatccctgccc

SEQ ID NO: 469819 - DNA, 15 bp, Homo sapiens
atctacatccctgcc

SEQ ID NO: 469820 - DNA, 15 bp, Homo sapiens
gatctacatccctgc

SEQ ID NO: 469821 - DNA, 15 bp, Homo sapiens
ggatctacatccctg

SEQ ID NO: 469822 - DNA, 15 bp, Homo sapiens
tggatctacatccct

SEQ ID NO: 469823 - DNA, 15 bp, Homo sapiens
ttggatctacatccc

SEQ ID NO: 469824 - DNA, 15 bp, Homo sapiens
tttggatctacatcc

SEQ ID NO: 469825 - DNA, 15 bp, Homo sapiens
gtttggatctacatc

SEQ ID NO: 469826 - DNA, 15 bp, Homo sapiens
agtttggatctacat

SEQ ID NO: 469827 - DNA, 15 bp, Homo sapiens
tagtttggatctaca

SEQ ID NO: 469828 - DNA, 15 bp, Homo sapiens
ctagtttggatctac

SEQ ID NO: 469829 - DNA, 15 bp, Homo sapiens
tctagtttggatcta

SEQ ID NO: 469830 - DNA, 15 bp, Homo sapiens
atctagtttggatct

SEQ ID NO: 469831 - DNA, 15 bp, Homo sapiens
gatctagtttggatc

SEQ ID NO: 469832 - DNA, 15 bp, Homo sapiens
tgatctagtttggat

SEQ ID NO: 469833 - DNA, 15 bp, Homo sapiens
gtgatctagtttgga

SEQ ID NO: 469834 - DNA, 15 bp, Homo sapiens
tgtgatctagtttgg

SEQ ID NO: 469835 - DNA, 15 bp, Homo sapiens
ctgtgatctagtttg

SEQ ID NO: 469836 - DNA, 15 bp, Homo sapiens
cctgtgatctagttt

SEQ ID NO: 469837 - DNA, 15 bp, Homo sapiens
tcctgtgatctagtt

SEQ ID NO: 469838 - DNA, 15 bp, Homo sapiens
ttcccacccgctatc

SEQ ID NO: 469839 - DNA, 15 bp, Homo sapiens
cttcccacccgctat

SEQ ID NO: 469840 - DNA, 15 bp, Homo sapiens
tcttcccacccgcta

SEQ ID NO: 469841 - DNA, 15 bp, Homo sapiens
ctcttcccacccgct

SEQ ID NO: 469842 - DNA, 15 bp, Homo sapiens
tctcttcccacccgc

SEQ ID NO: 469843 - DNA, 15 bp, Homo sapiens
ctctcttcccacccg

SEQ ID NO: 469844 - DNA, 15 bp, Homo sapiens
actctcttcccaccc

SEQ ID NO: 469845 - DNA, 15 bp, Homo sapiens
cactctcttcccacc

SEQ ID NO: 469846 - DNA, 15 bp, Homo sapiens
acactctcttcccac

SEQ ID NO: 469847 - DNA, 15 bp, Homo sapiens
cacactctcttccca

SEQ ID NO: 469848 - DNA, 15 bp, Homo sapiens
ccacactctcttccc

SEQ ID NO: 469849 - DNA, 15 bp, Homo sapiens
tccacactctcttcc

SEQ ID NO: 469850 - DNA, 15 bp, Homo sapiens
ttccacactctcttc

SEQ ID NO: 469851 - DNA, 15 bp, Homo sapiens
tttccacactctctt

SEQ ID NO: 469852 - DNA, 15 bp, Homo sapiens
gtttccacactctct

SEQ ID NO: 469853 - DNA, 15 bp, Homo sapiens
tgtttccacactctc

SEQ ID NO: 469854 - DNA, 15 bp, Homo sapiens
gtgtttccacactct

SEQ ID NO: 469855 - DNA, 15 bp, Homo sapiens
tgtgtttccacactc

SEQ ID NO: 469856 - DNA, 15 bp, Homo sapiens
gtgtgtttccacact

SEQ ID NO: 469857 - DNA, 15 bp, Homo sapiens
agtgtgtttccacac

SEQ ID NO: 469858 - DNA, 15 bp, Homo sapiens
cagtgtgtttccaca

SEQ ID NO: 469859 - DNA, 15 bp, Homo sapiens
gcagtgtgtttccac

SEQ ID NO: 469860 - DNA, 15 bp, Homo sapiens
tgcagtgtgtttcca

SEQ ID NO: 469861 - DNA, 15 bp, Homo sapiens
atgcagtgtgtttcc

SEQ ID NO: 469862 - DNA, 15 bp, Homo sapiens
catgcagtgtgtttc

SEQ ID NO: 469863 - DNA, 15 bp, Homo sapiens
gcatgcagtgtgttt

SEQ ID NO: 469864 - DNA, 15 bp, Homo sapiens
tgcatgcagtgtgtt

SEQ ID NO: 469865 - DNA, 15 bp, Homo sapiens
ctgcatgcagtgtgt

SEQ ID NO: 469866 - DNA, 15 bp, Homo sapiens
cctgcatgcagtgtg

SEQ ID NO: 469867 - DNA, 15 bp, Homo sapiens
ccctgcatgcagtgt

SEQ ID NO: 469868 - DNA, 15 bp, Homo sapiens
tccctgcatgcagtg

SEQ ID NO: 469869 - DNA, 15 bp, Homo sapiens
ttccctgcatgcagt

SEQ ID NO: 469870 - DNA, 15 bp, Homo sapiens
cttccctgcatgcag

SEQ ID NO: 469871 - DNA, 15 bp, Homo sapiens
tcttccctgcatgca

SEQ ID NO: 469872 - DNA, 15 bp, Homo sapiens
ctcttccctgcatgc

SEQ ID NO: 469873 - DNA, 15 bp, Homo sapiens
actcttccctgcatg

SEQ ID NO: 469874 - DNA, 15 bp, Homo sapiens
aactcttccctgcat

SEQ ID NO: 469875 - DNA, 15 bp, Homo sapiens
caactcttccctgca

SEQ ID NO: 469876 - DNA, 15 bp, Homo sapiens
ccaactcttccctgc

SEQ ID NO: 469877 - DNA, 15 bp, Homo sapiens
cccaactcttccctg

SEQ ID NO: 469878 - DNA, 15 bp, Homo sapiens
tcccaactcttccct

SEQ ID NO: 469879 - DNA, 15 bp, Homo sapiens
ctcccaactcttccc

SEQ ID NO: 469880 - DNA, 15 bp, Homo sapiens
actcccaactcttcc

SEQ ID NO: 469881 - DNA, 15 bp, Homo sapiens
gactcccaactcttc

SEQ ID NO: 469882 - DNA, 15 bp, Homo sapiens
agactcccaactctt

SEQ ID NO: 469883 - DNA, 15 bp, Homo sapiens
cagactcccaactct

SEQ ID NO: 469884 - DNA, 15 bp, Homo sapiens
ccagactcccaactc

SEQ ID NO: 469885 - DNA, 15 bp, Homo sapiens
cccagactcccaact

SEQ ID NO: 469886 - DNA, 15 bp, Homo sapiens
ccccagactcccaac

SEQ ID NO: 469887 - DNA, 15 bp, Homo sapiens
accccagactcccaa

SEQ ID NO: 469888 - DNA, 15 bp, Homo sapiens
caccccagactccca

SEQ ID NO: 469889 - DNA, 15 bp, Homo sapiens
tcaccccagactccc

SEQ ID NO: 469890 - DNA, 15 bp, Homo sapiens
gtcaccccagactcc

SEQ ID NO: 469891 - DNA, 15 bp, Homo sapiens
ggtcaccccagactc

SEQ ID NO: 469892 - DNA, 15 bp, Homo sapiens
tggtcaccccagact

SEQ ID NO: 469893 - DNA, 15 bp, Homo sapiens
ttggtcaccccagac

SEQ ID NO: 469894 - DNA, 15 bp, Homo sapiens
cttggtcaccccaga

SEQ ID NO: 469895 - DNA, 15 bp, Homo sapiens
ccttggtcaccccag

SEQ ID NO: 469896 - DNA, 15 bp, Homo sapiens
gccttggtcacccca

SEQ ID NO: 469897 - DNA, 15 bp, Homo sapiens
tgccttggtcacccc

SEQ ID NO: 469898 - DNA, 15 bp, Homo sapiens
gtgccttggtcaccc

SEQ ID NO: 469899 - DNA, 15 bp, Homo sapiens
tgtgccttggtcacc

SEQ ID NO: 469900 - DNA, 15 bp, Homo sapiens
ctgtgccttggtcac

SEQ ID NO: 469901 - DNA, 15 bp, Homo sapiens
cctgtgccttggtca

SEQ ID NO: 469902 - DNA, 15 bp, Homo sapiens
ccctgtgccttggtc

SEQ ID NO: 469903 - DNA, 15 bp, Homo sapiens
tccctgtgccttggt

SEQ ID NO: 469904 - DNA, 15 bp, Homo sapiens
ctccctgtgccttgg

SEQ ID NO: 469905 - DNA, 15 bp, Homo sapiens
cctccctgtgccttg

SEQ ID NO: 469906 - DNA, 15 bp, Homo sapiens
ccctccctgtgcctt

SEQ ID NO: 469907 - DNA, 15 bp, Homo sapiens
tccctccctgtgcct

SEQ ID NO: 469908 - DNA, 15 bp, Homo sapiens
ttccctccctgtgcc

SEQ ID NO: 469909 - DNA, 15 bp, Homo sapiens
tttccctccctgtgc

SEQ ID NO: 469910 - DNA, 15 bp, Homo sapiens
ctttccctccctgtg

SEQ ID NO: 469911 - DNA, 15 bp, Homo sapiens
actttccctccctgt

SEQ ID NO: 469912 - DNA, 15 bp, Homo sapiens
aactttccctccctg

SEQ ID NO: 469913 - DNA, 15 bp, Homo sapiens
caactttccctccct

SEQ ID NO: 469914 - DNA, 15 bp, Homo sapiens
tcaactttccctccc

SEQ ID NO: 469915 - DNA, 15 bp, Homo sapiens
ttcaactttccctcc

SEQ ID NO: 469916 - DNA, 15 bp, Homo sapiens
cttcaactttccctc

SEQ ID NO: 469917 - DNA, 15 bp, Homo sapiens
acttcaactttccct

SEQ ID NO: 469918 - DNA, 15 bp, Homo sapiens
aacttcaactttccc

SEQ ID NO: 469919 - DNA, 15 bp, Homo sapiens
taacttcaactttcc

SEQ ID NO: 469920 - DNA, 15 bp, Homo sapiens
ataacttcaactttc

SEQ ID NO: 469921 - DNA, 15 bp, Homo sapiens
gataacttcaacttt

SEQ ID NO: 469922 - DNA, 15 bp, Homo sapiens
tgataacttcaactt

SEQ ID NO: 469923 - DNA, 15 bp, Homo sapiens
ttgataacttcaact

SEQ ID NO: 469924 - DNA, 15 bp, Homo sapiens
attgataacttcaac

SEQ ID NO: 469925 - DNA, 15 bp, Homo sapiens
aattgataacttcaa

SEQ ID NO: 469926 - DNA, 15 bp, Homo sapiens
caattgataacttca

SEQ ID NO: 469927 - DNA, 15 bp, Homo sapiens
acaattgataacttc

SEQ ID NO: 469928 - DNA, 15 bp, Homo sapiens
cacaattgataactt

SEQ ID NO: 469929 - DNA, 15 bp, Homo sapiens
acacaattgataact

SEQ ID NO: 469930 - DNA, 15 bp, Homo sapiens
cacacaattgataac

SEQ ID NO: 469931 - DNA, 15 bp, Homo sapiens
tcacacaattgataa

SEQ ID NO: 469932 - DNA, 15 bp, Homo sapiens
ttcacacaattgata

SEQ ID NO: 469933 - DNA, 15 bp, Homo sapiens
tttcacacaattgat

SEQ ID NO: 469934 - DNA, 15 bp, Homo sapiens
gtttcacacaattga

SEQ ID NO: 469935 - DNA, 15 bp, Homo sapiens
tgtttcacacaattg

SEQ ID NO: 469936 - DNA, 15 bp, Homo sapiens
ctgtttcacacaatt

SEQ ID NO: 469937 - DNA, 15 bp, Homo sapiens
gctgtttcacacaat

SEQ ID NO: 469938 - DNA, 15 bp, Homo sapiens
agctgtttcacacaa

SEQ ID NO: 469939 - DNA, 15 bp, Homo sapiens
aagctgtttcacaca

SEQ ID NO: 469940 - DNA, 15 bp, Homo sapiens
aaagctgtttcacac

SEQ ID NO: 469941 - DNA, 15 bp, Homo sapiens
gaaagctgtttcaca

SEQ ID NO: 469942 - DNA, 15 bp, Homo sapiens
agaaagctgtttcac

SEQ ID NO: 469943 - DNA, 15 bp, Homo sapiens
cagaaagctgtttca

SEQ ID NO: 469944 - DNA, 15 bp, Homo sapiens
acagaaagctgtttc

SEQ ID NO: 469945 - DNA, 15 bp, Homo sapiens
cacagaaagctgttt

SEQ ID NO: 469946 - DNA, 15 bp, Homo sapiens
acacagaaagctgtt

SEQ ID NO: 469947 - DNA, 15 bp, Homo sapiens
aacacagaaagctgt

SEQ ID NO: 469948 - DNA, 15 bp, Homo sapiens
caacacagaaagctg

SEQ ID NO: 469949 - DNA, 15 bp, Homo sapiens
ccaacacagaaagct

SEQ ID NO: 469950 - DNA, 15 bp, Homo sapiens
gccaacacagaaagc

SEQ ID NO: 469951 - DNA, 15 bp, Homo sapiens
ggccaacacagaaag

SEQ ID NO: 469952 - DNA, 15 bp, Homo sapiens
aggccaacacagaaa

SEQ ID NO: 469953 - DNA, 15 bp, Homo sapiens
caggccaacacagaa

SEQ ID NO: 469954 - DNA, 15 bp, Homo sapiens
tcaggccaacacaga

SEQ ID NO: 469955 - DNA, 15 bp, Homo sapiens
ctcaggccaacacag

SEQ ID NO: 469956 - DNA, 15 bp, Homo sapiens
tctcaggccaacaca

SEQ ID NO: 469957 - DNA, 15 bp, Homo sapiens
atctcaggccaacac

SEQ ID NO: 469958 - DNA, 15 bp, Homo sapiens
catctcaggccaaca

SEQ ID NO: 469959 - DNA, 15 bp, Homo sapiens
acatctcaggccaac

SEQ ID NO: 469960 - DNA, 15 bp, Homo sapiens
aacatctcaggccaa

SEQ ID NO: 469961 - DNA, 15 bp, Homo sapiens
aaacatctcaggcca

SEQ ID NO: 469962 - DNA, 15 bp, Homo sapiens
taaacatctcaggcc

SEQ ID NO: 469963 - DNA, 15 bp, Homo sapiens
ataaacatctcaggc

SEQ ID NO: 469964 - DNA, 15 bp, Homo sapiens
tataaacatctcagg

SEQ ID NO: 469965 - DNA, 15 bp, Homo sapiens
ctataaacatctcag

SEQ ID NO: 469966 - DNA, 15 bp, Homo sapiens
gctataaacatctca

SEQ ID NO: 469967 - DNA, 15 bp, Homo sapiens
agctataaacatctc

SEQ ID NO: 469968 - DNA, 15 bp, Homo sapiens
cagctataaacatct

SEQ ID NO: 469969 - DNA, 15 bp, Homo sapiens
ccagctataaacatc

SEQ ID NO: 469970 - DNA, 15 bp, Homo sapiens
tccagctataaacat

SEQ ID NO: 469971 - DNA, 15 bp, Homo sapiens
ttccagctataaaca

SEQ ID NO: 469972 - DNA, 15 bp, Homo sapiens
cttccagctataaac

SEQ ID NO: 469973 - DNA, 15 bp, Homo sapiens
gcttccagctataaa

SEQ ID NO: 469974 - DNA, 15 bp, Homo sapiens
tgcttccagctataa

SEQ ID NO: 469975 - DNA, 15 bp, Homo sapiens
ctgcttccagctata

SEQ ID NO: 469976 - DNA, 15 bp, Homo sapiens
actgcttccagctat

SEQ ID NO: 469977 - DNA, 15 bp, Homo sapiens
cactgcttccagcta

SEQ ID NO: 469978 - DNA, 15 bp, Homo sapiens
ccactgcttccagct

SEQ ID NO: 469979 - DNA, 15 bp, Homo sapiens
cccactgcttccagc

SEQ ID NO: 469980 - DNA, 15 bp, Homo sapiens
ccccactgcttccag

SEQ ID NO: 469981 - DNA, 15 bp, Homo sapiens
tccccactgcttcca

SEQ ID NO: 469982 - DNA, 15 bp, Homo sapiens
ctccccactgcttcc

SEQ ID NO: 469983 - DNA, 15 bp, Homo sapiens
gctccccactgcttc

SEQ ID NO: 469984 - DNA, 15 bp, Homo sapiens
ggctccccactgctt

SEQ ID NO: 469985 - DNA, 15 bp, Homo sapiens
tggctccccactgct

SEQ ID NO: 469986 - DNA, 15 bp, Homo sapiens
ttggctccccactgc

SEQ ID NO: 469987 - DNA, 15 bp, Homo sapiens
attggctccccactg

SEQ ID NO: 469988 - DNA, 15 bp, Homo sapiens
tattggctccccact

SEQ ID NO: 469989 - DNA, 15 bp, Homo sapiens
gtattggctccccac

SEQ ID NO: 469990 - DNA, 15 bp, Homo sapiens
tgtattggctcccca

SEQ ID NO: 469991 - DNA, 15 bp, Homo sapiens
ctgtattggctcccc

SEQ ID NO: 469992 - DNA, 15 bp, Homo sapiens
actgtattggctccc

SEQ ID NO: 469993 - DNA, 15 bp, Homo sapiens
aactgtattggctcc

SEQ ID NO: 469994 - DNA, 15 bp, Homo sapiens
aaactgtattggctc

SEQ ID NO: 469995 - DNA, 15 bp, Homo sapiens
aaaactgtattggct

SEQ ID NO: 469996 - DNA, 15 bp, Homo sapiens
aaaaactgtattggc

SEQ ID NO: 469997 - DNA, 15 bp, Homo sapiens
aaaaaactgtattgg

SEQ ID NO: 469998 - DNA, 15 bp, Homo sapiens
taaaaaactgtattg

SEQ ID NO: 469999 - DNA, 15 bp, Homo sapiens
gtaaaaaactgtatt

SEQ ID NO: 470000 - DNA, 15 bp, Homo sapiens
cgtaaaaaactgtat

SEQ ID NO: 470001 - DNA, 15 bp, Homo sapiens
tcgtaaaaaactgta

SEQ ID NO: 470002 - DNA, 15 bp, Homo sapiens
ttcgtaaaaaactgt

SEQ ID NO: 470003 - DNA, 15 bp, Homo sapiens
cttcgtaaaaaactg

SEQ ID NO: 470004 - DNA, 15 bp, Homo sapiens
ccttcgtaaaaaact

SEQ ID NO: 470005 - DNA, 15 bp, Homo sapiens
accttcgtaaaaaac

SEQ ID NO: 470006 - DNA, 15 bp, Homo sapiens
taccttcgtaaaaaa

SEQ ID NO: 470007 - DNA, 15 bp, Homo sapiens
ataccttcgtaaaaa

SEQ ID NO: 470008 - DNA, 15 bp, Homo sapiens
aataccttcgtaaaa

SEQ ID NO: 470009 - DNA, 15 bp, Homo sapiens
taataccttcgtaaa

SEQ ID NO: 470010 - DNA, 15 bp, Homo sapiens
ctaataccttcgtaa

SEQ ID NO: 470011 - DNA, 15 bp, Homo sapiens
tctaataccttcgta

SEQ ID NO: 470012 - DNA, 15 bp, Homo sapiens
ctctaataccttcgt

SEQ ID NO: 470013 - DNA, 15 bp, Homo sapiens
cctctaataccttcg

SEQ ID NO: 470014 - DNA, 15 bp, Homo sapiens
acctctaataccttc

SEQ ID NO: 470015 - DNA, 15 bp, Homo sapiens
cacctctaatacctt

SEQ ID NO: 470016 - DNA, 15 bp, Homo sapiens
ccacctctaatacct

SEQ ID NO: 470017 - DNA, 15 bp, Homo sapiens
cccacctctaatacc

SEQ ID NO: 470018 - DNA, 15 bp, Homo sapiens
acccacctctaatac

SEQ ID NO: 470019 - DNA, 15 bp, Homo sapiens
aacccacctctaata

SEQ ID NO: 470020 - DNA, 15 bp, Homo sapiens
aaacccacctctaat

SEQ ID NO: 470021 - DNA, 15 bp, Homo sapiens
gaaacccacctctaa

SEQ ID NO: 470022 - DNA, 15 bp, Homo sapiens
agaaacccacctcta

SEQ ID NO: 470023 - DNA, 15 bp, Homo sapiens
cagaaacccacctct

SEQ ID NO: 470024 - DNA, 15 bp, Homo sapiens
acagaaacccacctc

SEQ ID NO: 470025 - DNA, 15 bp, Homo sapiens
cacagaaacccacct

SEQ ID NO: 470026 - DNA, 15 bp, Homo sapiens
ccacagaaacccacc

SEQ ID NO: 470027 - DNA, 15 bp, Homo sapiens
cccacagaaacccac

SEQ ID NO: 470028 - DNA, 15 bp, Homo sapiens
acccacagaaaccca

SEQ ID NO: 470029 - DNA, 15 bp, Homo sapiens
cacccacagaaaccc

SEQ ID NO: 470030 - DNA, 15 bp, Homo sapiens
tcacccacagaaacc

SEQ ID NO: 470031 - DNA, 15 bp, Homo sapiens
atcacccacagaaac

SEQ ID NO: 470032 - DNA, 15 bp, Homo sapiens
gatcacccacagaaa

SEQ ID NO: 470033 - DNA, 15 bp, Homo sapiens
cgatcacccacagaa

SEQ ID NO: 470034 - DNA, 15 bp, Homo sapiens
acgatcacccacaga

SEQ ID NO: 470035 - DNA, 15 bp, Homo sapiens
aacgatcacccacag

SEQ ID NO: 470036 - DNA, 15 bp, Homo sapiens
taacgatcacccaca

SEQ ID NO: 470037 - DNA, 15 bp, Homo sapiens
ttaacgatcacccac

SEQ ID NO: 470038 - DNA, 15 bp, Homo sapiens
attaacgatcaccca

SEQ ID NO: 470039 - DNA, 15 bp, Homo sapiens
gattaacgatcaccc

SEQ ID NO: 470040 - DNA, 15 bp, Homo sapiens
tgattaacgatcacc

SEQ ID NO: 470041 - DNA, 15 bp, Homo sapiens
atgattaacgatcac

SEQ ID NO: 470042 - DNA, 15 bp, Homo sapiens
catgattaacgatca

SEQ ID NO: 470043 - DNA, 15 bp, Homo sapiens
acatgattaacgatc

SEQ ID NO: 470044 - DNA, 15 bp, Homo sapiens
aacatgattaacgat

SEQ ID NO: 470045 - DNA, 15 bp, Homo sapiens
aaacatgattaacga

SEQ ID NO: 470046 - DNA, 15 bp, Homo sapiens
aaaacatgattaacg

SEQ ID NO: 470047 - DNA, 15 bp, Homo sapiens
gaaaacatgattaac

SEQ ID NO: 470048 - DNA, 15 bp, Homo sapiens
agaaaacatgattaa

SEQ ID NO: 470049 - DNA, 15 bp, Homo sapiens
gagaaaacatgatta

SEQ ID NO: 470050 - DNA, 15 bp, Homo sapiens
ggagaaaacatgatt

SEQ ID NO: 470051 - DNA, 15 bp, Homo sapiens
gggagaaaacatgat

SEQ ID NO: 470052 - DNA, 15 bp, Homo sapiens
agggagaaaacatga

SEQ ID NO: 470053 - DNA, 15 bp, Homo sapiens
aagggagaaaacatg

SEQ ID NO: 470054 - DNA, 15 bp, Homo sapiens
aaagggagaaaacat

SEQ ID NO: 470055 - DNA, 15 bp, Homo sapiens
taaagggagaaaaca

SEQ ID NO: 470056 - DNA, 15 bp, Homo sapiens
ttaaagggagaaaac

SEQ ID NO: 470057 - DNA, 15 bp, Homo sapiens
cttaaagggagaaaa

SEQ ID NO: 470058 - DNA, 15 bp, Homo sapiens
acttaaagggagaaa

SEQ ID NO: 470059 - DNA, 15 bp, Homo sapiens
cacttaaagggagaa

SEQ ID NO: 470060 - DNA, 15 bp, Homo sapiens
acacttaaagggaga

SEQ ID NO: 470061 - DNA, 15 bp, Homo sapiens
tacacttaaagggag

SEQ ID NO: 470062 - DNA, 15 bp, Homo sapiens
ctacacttaaaggga

SEQ ID NO: 470063 - DNA, 15 bp, Homo sapiens
actacacttaaaggg

SEQ ID NO: 470064 - DNA, 15 bp, Homo sapiens
gactacacttaaagg

SEQ ID NO: 470065 - DNA, 15 bp, Homo sapiens
ggactacacttaaag

SEQ ID NO: 470066 - DNA, 15 bp, Homo sapiens
aggactacacttaaa

SEQ ID NO: 470067 - DNA, 15 bp, Homo sapiens
caggactacacttaa

SEQ ID NO: 470068 - DNA, 15 bp, Homo sapiens
gcaggactacactta

SEQ ID NO: 470069 - DNA, 15 bp, Homo sapiens
agcaggactacactt

SEQ ID NO: 470070 - DNA, 15 bp, Homo sapiens
aagcaggactacact

SEQ ID NO: 470071 - DNA, 15 bp, Homo sapiens
caagcaggactacac

SEQ ID NO: 470072 - DNA, 15 bp, Homo sapiens
tcaagcaggactaca

SEQ ID NO: 470073 - DNA, 15 bp, Homo sapiens
ctcaagcaggactac

SEQ ID NO: 470074 - DNA, 15 bp, Homo sapiens
tctcaagcaggacta

SEQ ID NO: 470075 - DNA, 15 bp, Homo sapiens
ttctcaagcaggact

SEQ ID NO: 470076 - DNA, 15 bp, Homo sapiens
tttctcaagcaggac

SEQ ID NO: 470077 - DNA, 15 bp, Homo sapiens
atttctcaagcagga

SEQ ID NO: 470078 - DNA, 15 bp, Homo sapiens
tatttctcaagcagg

SEQ ID NO: 470079 - DNA, 15 bp, Homo sapiens
ctatttctcaagcag

SEQ ID NO: 470080 - DNA, 15 bp, Homo sapiens
tctatttctcaagca

SEQ ID NO: 470081 - DNA, 15 bp, Homo sapiens
gtctatttctcaagc

SEQ ID NO: 470082 - DNA, 15 bp, Homo sapiens
tgtctatttctcaag

SEQ ID NO: 470083 - DNA, 15 bp, Homo sapiens
atgtctatttctcaa

SEQ ID NO: 470084 - DNA, 15 bp, Homo sapiens
catgtctatttctca

SEQ ID NO: 470085 - DNA, 15 bp, Homo sapiens
tcatgtctatttctc

SEQ ID NO: 470086 - DNA, 15 bp, Homo sapiens
ctcatgtctatttct

SEQ ID NO: 470087 - DNA, 15 bp, Homo sapiens
tctcatgtctatttc

SEQ ID NO: 470088 - DNA, 15 bp, Homo sapiens
ttctcatgtctattt

SEQ ID NO: 470089 - DNA, 15 bp, Homo sapiens
tttctcatgtctatt

SEQ ID NO: 470090 - DNA, 15 bp, Homo sapiens
ctttctcatgtctat

SEQ ID NO: 470091 - DNA, 15 bp, Homo sapiens
cctttctcatgtcta

SEQ ID NO: 470092 - DNA, 15 bp, Homo sapiens
tcctttctcatgtct

SEQ ID NO: 470093 - DNA, 15 bp, Homo sapiens
ttcctttctcatgtc

SEQ ID NO: 470094 - DNA, 15 bp, Homo sapiens
attcctttctcatgt

SEQ ID NO: 470095 - DNA, 15 bp, Homo sapiens
cattcctttctcatg

SEQ ID NO: 470096 - DNA, 15 bp, Homo sapiens
tcattcctttctcat

SEQ ID NO: 470097 - DNA, 15 bp, Homo sapiens
ttcattcctttctca

SEQ ID NO: 470098 - DNA, 15 bp, Homo sapiens
cttcattcctttctc

SEQ ID NO: 470099 - DNA, 15 bp, Homo sapiens
ccttcattcctttct

SEQ ID NO: 470100 - DNA, 15 bp, Homo sapiens
accttcattcctttc

SEQ ID NO: 470101 - DNA, 15 bp, Homo sapiens
aaccttcattccttt

SEQ ID NO: 470102 - DNA, 15 bp, Homo sapiens
taaccttcattcctt

SEQ ID NO: 470103 - DNA, 15 bp, Homo sapiens
ttaaccttcattcct

SEQ ID NO: 470104 - DNA, 15 bp, Homo sapiens
tttaaccttcattcc

SEQ ID NO: 470105 - DNA, 15 bp, Homo sapiens
ttttaaccttcattc

SEQ ID NO: 470106 - DNA, 15 bp, Homo sapiens
gttttaaccttcatt

SEQ ID NO: 470107 - DNA, 15 bp, Homo sapiens
tgttttaaccttcat

SEQ ID NO: 470108 - DNA, 15 bp, Homo sapiens
atgttttaaccttca

SEQ ID NO: 470109 - DNA, 15 bp, Homo sapiens
gatgttttaaccttc

SEQ ID NO: 470110 - DNA, 15 bp, Homo sapiens
tgatgttttaacctt

SEQ ID NO: 470111 - DNA, 15 bp, Homo sapiens
ctgatgttttaacct

SEQ ID NO: 470112 - DNA, 15 bp, Homo sapiens
gctgatgttttaacc

SEQ ID NO: 470113 - DNA, 15 bp, Homo sapiens
agctgatgttttaac

SEQ ID NO: 470114 - DNA, 15 bp, Homo sapiens
cagctgatgttttaa

SEQ ID NO: 470115 - DNA, 15 bp, Homo sapiens
acagctgatgtttta

SEQ ID NO: 470116 - DNA, 15 bp, Homo sapiens
tacagctgatgtttt

SEQ ID NO: 470117 - DNA, 15 bp, Homo sapiens
atacagctgatgttt

SEQ ID NO: 470118 - DNA, 15 bp, Homo sapiens
aatacagctgatgtt

SEQ ID NO: 470119 - DNA, 15 bp, Homo sapiens
caatacagctgatgt

SEQ ID NO: 470120 - DNA, 15 bp, Homo sapiens
acaatacagctgatg

SEQ ID NO: 470121 - DNA, 15 bp, Homo sapiens
aacaatacagctgat

SEQ ID NO: 470122 - DNA, 15 bp, Homo sapiens
caacaatacagctga

SEQ ID NO: 470123 - DNA, 15 bp, Homo sapiens
ccaacaatacagctg

SEQ ID NO: 470124 - DNA, 15 bp, Homo sapiens
accaacaatacagct

SEQ ID NO: 470125 - DNA, 15 bp, Homo sapiens
taccaacaatacagc

SEQ ID NO: 470126 - DNA, 15 bp, Homo sapiens
ttaccaacaatacag

SEQ ID NO: 470127 - DNA, 15 bp, Homo sapiens
tttaccaacaataca

SEQ ID NO: 470128 - DNA, 15 bp, Homo sapiens
ttttaccaacaatac

SEQ ID NO: 470129 - DNA, 15 bp, Homo sapiens
gttttaccaacaata

SEQ ID NO: 470130 - DNA, 15 bp, Homo sapiens
agttttaccaacaat

SEQ ID NO: 470131 - DNA, 15 bp, Homo sapiens
tagttttaccaacaa

SEQ ID NO: 470132 - DNA, 15 bp, Homo sapiens
ctagttttaccaaca

SEQ ID NO: 470133 - DNA, 15 bp, Homo sapiens
tctagttttaccaac

SEQ ID NO: 470134 - DNA, 15 bp, Homo sapiens
ttctagttttaccaa

SEQ ID NO: 470135 - DNA, 15 bp, Homo sapiens
attctagttttacca

SEQ ID NO: 470136 - DNA, 15 bp, Homo sapiens
cattctagttttacc

SEQ ID NO: 470137 - DNA, 15 bp, Homo sapiens
ccattctagttttac

SEQ ID NO: 470138 - DNA, 15 bp, Homo sapiens
tccattctagtttta

SEQ ID NO: 470139 - DNA, 15 bp, Homo sapiens
ttccattctagtttt

SEQ ID NO: 470140 - DNA, 15 bp, Homo sapiens
tttccattctagttt

SEQ ID NO: 470141 - DNA, 15 bp, Homo sapiens
ctttccattctagtt

SEQ ID NO: 470142 - DNA, 15 bp, Homo sapiens
actttccattctagt

SEQ ID NO: 470143 - DNA, 15 bp, Homo sapiens
cactttccattctag

SEQ ID NO: 470144 - DNA, 15 bp, Homo sapiens
acactttccattcta

SEQ ID NO: 470145 - DNA, 15 bp, Homo sapiens
cacactttccattct

SEQ ID NO: 470146 - DNA, 15 bp, Homo sapiens
ccacactttccattc

SEQ ID NO: 470147 - DNA, 15 bp, Homo sapiens
gccacactttccatt

SEQ ID NO: 470148 - DNA, 15 bp, Homo sapiens
agccacactttccat

SEQ ID NO: 470149 - DNA, 15 bp, Homo sapiens
aagccacactttcca

SEQ ID NO: 470150 - DNA, 15 bp, Homo sapiens
caagccacactttcc

SEQ ID NO: 470151 - DNA, 15 bp, Homo sapiens
tcaagccacactttc

SEQ ID NO: 470152 - DNA, 15 bp, Homo sapiens
ctcaagccacacttt

SEQ ID NO: 470153 - DNA, 15 bp, Homo sapiens
gctcaagccacactt

SEQ ID NO: 470154 - DNA, 15 bp, Homo sapiens
agctcaagccacact

SEQ ID NO: 470155 - DNA, 15 bp, Homo sapiens
cagctcaagccacac

SEQ ID NO: 470156 - DNA, 15 bp, Homo sapiens
ccagctcaagccaca

SEQ ID NO: 470157 - DNA, 15 bp, Homo sapiens
accagctcaagccac

SEQ ID NO: 470158 - DNA, 15 bp, Homo sapiens
taccagctcaagcca

SEQ ID NO: 470159 - DNA, 15 bp, Homo sapiens
ttaccagctcaagcc

SEQ ID NO: 470160 - DNA, 15 bp, Homo sapiens
gttaccagctcaagc

SEQ ID NO: 470161 - DNA, 15 bp, Homo sapiens
ggttaccagctcaag

SEQ ID NO: 470162 - DNA, 15 bp, Homo sapiens
tggttaccagctcaa

SEQ ID NO: 470163 - DNA, 15 bp, Homo sapiens
atggttaccagctca

SEQ ID NO: 470164 - DNA, 15 bp, Homo sapiens
tatggttaccagctc

SEQ ID NO: 470165 - DNA, 15 bp, Homo sapiens
ctatggttaccagct

SEQ ID NO: 470166 - DNA, 15 bp, Homo sapiens
cctatggttaccagc

SEQ ID NO: 470167 - DNA, 15 bp, Homo sapiens
ccctatggttaccag

SEQ ID NO: 470168 - DNA, 15 bp, Homo sapiens
cccctatggttacca

SEQ ID NO: 470169 - DNA, 15 bp, Homo sapiens
gcccctatggttacc

SEQ ID NO: 470170 - DNA, 15 bp, Homo sapiens
agcccctatggttac

SEQ ID NO: 470171 - DNA, 15 bp, Homo sapiens
aagcccctatggtta

SEQ ID NO: 470172 - DNA, 15 bp, Homo sapiens
aaagcccctatggtt

SEQ ID NO: 470173 - DNA, 15 bp, Homo sapiens
gaaagcccctatggt

SEQ ID NO: 470174 - DNA, 15 bp, Homo sapiens
ggaaagcccctatgg

SEQ ID NO: 470175 - DNA, 15 bp, Homo sapiens
tggaaagcccctatg

SEQ ID NO: 470176 - DNA, 15 bp, Homo sapiens
ttggaaagcccctat

SEQ ID NO: 470177 - DNA, 15 bp, Homo sapiens
attggaaagccccta

SEQ ID NO: 470178 - DNA, 15 bp, Homo sapiens
cattggaaagcccct

SEQ ID NO: 470179 - DNA, 15 bp, Homo sapiens
gcattggaaagcccc

SEQ ID NO: 470180 - DNA, 15 bp, Homo sapiens
ggcattggaaagccc

SEQ ID NO: 470181 - DNA, 15 bp, Homo sapiens
aggcattggaaagcc

SEQ ID NO: 470182 - DNA, 15 bp, Homo sapiens
caggcattggaaagc

SEQ ID NO: 470183 - DNA, 15 bp, Homo sapiens
acaggcattggaaag

SEQ ID NO: 470184 - DNA, 15 bp, Homo sapiens
cacaggcattggaaa

SEQ ID NO: 470185 - DNA, 15 bp, Homo sapiens
gcacaggcattggaa

SEQ ID NO: 470186 - DNA, 15 bp, Homo sapiens
ggcacaggcattgga

SEQ ID NO: 470187 - DNA, 15 bp, Homo sapiens
gggcacaggcattgg

SEQ ID NO: 470188 - DNA, 15 bp, Homo sapiens
agggcacaggcattg

SEQ ID NO: 470189 - DNA, 15 bp, Homo sapiens
cagggcacaggcatt

SEQ ID NO: 470190 - DNA, 15 bp, Homo sapiens
tcagggcacaggcat

SEQ ID NO: 470191 - DNA, 15 bp, Homo sapiens
ctcagggcacaggca

SEQ ID NO: 470192 - DNA, 15 bp, Homo sapiens
actcagggcacaggc

SEQ ID NO: 470193 - DNA, 15 bp, Homo sapiens
aactcagggcacagg

SEQ ID NO: 470194 - DNA, 15 bp, Homo sapiens
taactcagggcacag

SEQ ID NO: 470195 - DNA, 15 bp, Homo sapiens
ctaactcagggcaca

SEQ ID NO: 470196 - DNA, 15 bp, Homo sapiens
tctaactcagggcac

SEQ ID NO: 470197 - DNA, 15 bp, Homo sapiens
atctaactcagggca

SEQ ID NO: 470198 - DNA, 15 bp, Homo sapiens
gatctaactcagggc

SEQ ID NO: 470199 - DNA, 15 bp, Homo sapiens
agatctaactcaggg

SEQ ID NO: 470200 - DNA, 15 bp, Homo sapiens
aagatctaactcagg

SEQ ID NO: 470201 - DNA, 15 bp, Homo sapiens
caagatctaactcag

SEQ ID NO: 470202 - DNA, 15 bp, Homo sapiens
ccaagatctaactca

SEQ ID NO: 470203 - DNA, 15 bp, Homo sapiens
cccaagatctaactc

SEQ ID NO: 470204 - DNA, 15 bp, Homo sapiens
ccccaagatctaact

SEQ ID NO: 470205 - DNA, 15 bp, Homo sapiens
accccaagatctaac

SEQ ID NO: 470206 - DNA, 15 bp, Homo sapiens
taccccaagatctaa

SEQ ID NO: 470207 - DNA, 15 bp, Homo sapiens
ctaccccaagatcta

SEQ ID NO: 470208 - DNA, 15 bp, Homo sapiens
tctaccccaagatct

SEQ ID NO: 470209 - DNA, 15 bp, Homo sapiens
ctctaccccaagatc

SEQ ID NO: 470210 - DNA, 15 bp, Homo sapiens
tctctaccccaagat

SEQ ID NO: 470211 - DNA, 15 bp, Homo sapiens
ctctctaccccaaga

SEQ ID NO: 470212 - DNA, 15 bp, Homo sapiens
tctctctaccccaag

SEQ ID NO: 470213 - DNA, 15 bp, Homo sapiens
gtctctctaccccaa

SEQ ID NO: 470214 - DNA, 15 bp, Homo sapiens
agtctctctacccca

SEQ ID NO: 470215 - DNA, 15 bp, Homo sapiens
cagtctctctacccc

SEQ ID NO: 470216 - DNA, 15 bp, Homo sapiens
ccagtctctctaccc

SEQ ID NO: 470217 - DNA, 15 bp, Homo sapiens
tccagtctctctacc

SEQ ID NO: 470218 - DNA, 15 bp, Homo sapiens
atccagtctctctac

SEQ ID NO: 470219 - DNA, 15 bp, Homo sapiens
catccagtctctcta

SEQ ID NO: 470220 - DNA, 15 bp, Homo sapiens
acatccagtctctct

SEQ ID NO: 470221 - DNA, 15 bp, Homo sapiens
cacatccagtctctc

SEQ ID NO: 470222 - DNA, 15 bp, Homo sapiens
gcacatccagtctct

SEQ ID NO: 470223 - DNA, 15 bp, Homo sapiens
tgcacatccagtctc

SEQ ID NO: 470224 - DNA, 15 bp, Homo sapiens
ctgcacatccagtct

SEQ ID NO: 470225 - DNA, 15 bp, Homo sapiens
tctgcacatccagtc

SEQ ID NO: 470226 - DNA, 15 bp, Homo sapiens
ctctgcacatccagt

SEQ ID NO: 470227 - DNA, 15 bp, Homo sapiens
gctctgcacatccag

SEQ ID NO: 470228 - DNA, 15 bp, Homo sapiens
tgctctgcacatcca

SEQ ID NO: 470229 - DNA, 15 bp, Homo sapiens
ctgctctgcacatcc

SEQ ID NO: 470230 - DNA, 15 bp, Homo sapiens
gctgctctgcacatc

SEQ ID NO: 470231 - DNA, 15 bp, Homo sapiens
tgctgctctgcacat

SEQ ID NO: 470232 - DNA, 15 bp, Homo sapiens
gtgctgctctgcaca

SEQ ID NO: 470233 - DNA, 15 bp, Homo sapiens
ggtgctgctctgcac

SEQ ID NO: 470234 - DNA, 15 bp, Homo sapiens
gggtgctgctctgca

SEQ ID NO: 470235 - DNA, 15 bp, Homo sapiens
ggggtgctgctctgc

SEQ ID NO: 470236 - DNA, 15 bp, Homo sapiens
gggggtgctgctctg

SEQ ID NO: 470237 - DNA, 15 bp, Homo sapiens
tgggggtgctgctct

SEQ ID NO: 470238 - DNA, 15 bp, Homo sapiens
gtgggggtgctgctc

SEQ ID NO: 470239 - DNA, 15 bp, Homo sapiens
ggtgggggtgctgct

SEQ ID NO: 470240 - DNA, 15 bp, Homo sapiens
gggtgggggtgctgc

SEQ ID NO: 470241 - DNA, 15 bp, Homo sapiens
ggggtgggggtgctg

SEQ ID NO: 470242 - DNA, 15 bp, Homo sapiens
tggggtgggggtgct

SEQ ID NO: 470243 - DNA, 15 bp, Homo sapiens
gtggggtgggggtgc

SEQ ID NO: 470244 - DNA, 15 bp, Homo sapiens
ggtggggtgggggtg

SEQ ID NO: 470245 - DNA, 15 bp, Homo sapiens
gggtggggtgggggt

SEQ ID NO: 470246 - DNA, 15 bp, Homo sapiens
ggggtggggtggggg

SEQ ID NO: 470247 - DNA, 15 bp, Homo sapiens
tggggtggggtgggg

SEQ ID NO: 470248 - DNA, 15 bp, Homo sapiens
ctggggtggggtggg

SEQ ID NO: 470249 - DNA, 15 bp, Homo sapiens
gctggggtggggtgg

SEQ ID NO: 470250 - DNA, 15 bp, Homo sapiens
ggctggggtggggtg

SEQ ID NO: 470251 - DNA, 15 bp, Homo sapiens
tggctggggtggggt

SEQ ID NO: 470252 - DNA, 15 bp, Homo sapiens
atggctggggtgggg

SEQ ID NO: 470253 - DNA, 15 bp, Homo sapiens
gatggctggggtggg

SEQ ID NO: 470254 - DNA, 15 bp, Homo sapiens
ggatggctggggtgg

SEQ ID NO: 470255 - DNA, 15 bp, Homo sapiens
tggatggctggggtg

SEQ ID NO: 470256 - DNA, 15 bp, Homo sapiens
atggatggctggggt

SEQ ID NO: 470257 - DNA, 15 bp, Homo sapiens
tatggatggctgggg

SEQ ID NO: 470258 - DNA, 15 bp, Homo sapiens
atatggatggctggg

SEQ ID NO: 470259 - DNA, 15 bp, Homo sapiens
catatggatggctgg

SEQ ID NO: 470260 - DNA, 15 bp, Homo sapiens
ccatatggatggctg

SEQ ID NO: 470261 - DNA, 15 bp, Homo sapiens
tccatatggatggct

SEQ ID NO: 470262 - DNA, 15 bp, Homo sapiens
ctccatatggatggc

SEQ ID NO: 470263 - DNA, 15 bp, Homo sapiens
gctccatatggatgg

SEQ ID NO: 470264 - DNA, 15 bp, Homo sapiens
agctccatatggatg

SEQ ID NO: 470265 - DNA, 15 bp, Homo sapiens
aagctccatatggat

SEQ ID NO: 470266 - DNA, 15 bp, Homo sapiens
gaagctccatatgga

SEQ ID NO: 470267 - DNA, 15 bp, Homo sapiens
tgaagctccatatgg

SEQ ID NO: 470268 - DNA, 15 bp, Homo sapiens
ctgaagctccatatg

SEQ ID NO: 470269 - DNA, 15 bp, Homo sapiens
gctgaagctccatat

SEQ ID NO: 470270 - DNA, 15 bp, Homo sapiens
agctgaagctccata

SEQ ID NO: 470271 - DNA, 15 bp, Homo sapiens
cagctgaagctccat

SEQ ID NO: 470272 - DNA, 15 bp, Homo sapiens
gcagctgaagctcca

SEQ ID NO: 470273 - DNA, 15 bp, Homo sapiens
ggcagctgaagctcc

SEQ ID NO: 470274 - DNA, 15 bp, Homo sapiens
tggcagctgaagctc

SEQ ID NO: 470275 - DNA, 15 bp, Homo sapiens
atggcagctgaagct

SEQ ID NO: 470276 - DNA, 15 bp, Homo sapiens
tatggcagctgaagc

SEQ ID NO: 470277 - DNA, 15 bp, Homo sapiens
ctatggcagctgaag

SEQ ID NO: 470278 - DNA, 15 bp, Homo sapiens
tctatggcagctgaa

SEQ ID NO: 470279 - DNA, 15 bp, Homo sapiens
gtctatggcagctga

SEQ ID NO: 470280 - DNA, 15 bp, Homo sapiens
ggtctatggcagctg

SEQ ID NO: 470281 - DNA, 15 bp, Homo sapiens
tggtctatggcagct

SEQ ID NO: 470282 - DNA, 15 bp, Homo sapiens
ttggtctatggcagc

SEQ ID NO: 470283 - DNA, 15 bp, Homo sapiens
gttggtctatggcag

SEQ ID NO: 470284 - DNA, 15 bp, Homo sapiens
tgttggtctatggca

SEQ ID NO: 470285 - DNA, 15 bp, Homo sapiens
ttgttggtctatggc

SEQ ID NO: 470286 - DNA, 15 bp, Homo sapiens
cttgttggtctatgg

SEQ ID NO: 470287 - DNA, 15 bp, Homo sapiens
ccttgttggtctatg

SEQ ID NO: 470288 - DNA, 15 bp, Homo sapiens
gccttgttggtctat

SEQ ID NO: 470289 - DNA, 15 bp, Homo sapiens
tgccttgttggtcta

SEQ ID NO: 470290 - DNA, 15 bp, Homo sapiens
ctgccttgttggtct

SEQ ID NO: 470291 - DNA, 15 bp, Homo sapiens
tctgccttgttggtc

SEQ ID NO: 470292 - DNA, 15 bp, Homo sapiens
ctctgccttgttggt

SEQ ID NO: 470293 - DNA, 15 bp, Homo sapiens
cctctgccttgttgg

SEQ ID NO: 470294 - DNA, 15 bp, Homo sapiens
ccctctgccttgttg

SEQ ID NO: 470295 - DNA, 15 bp, Homo sapiens
tccctctgccttgtt

SEQ ID NO: 470296 - DNA, 15 bp, Homo sapiens
atccctctgccttgt

SEQ ID NO: 470297 - DNA, 15 bp, Homo sapiens
tatccctctgccttg

SEQ ID NO: 470298 - DNA, 15 bp, Homo sapiens
ctatccctctgcctt

SEQ ID NO: 470299 - DNA, 15 bp, Homo sapiens
cctatccctctgcct

SEQ ID NO: 470300 - DNA, 15 bp, Homo sapiens
gcctatccctctgcc

SEQ ID NO: 470301 - DNA, 15 bp, Homo sapiens
ggcctatccctctgc

SEQ ID NO: 470302 - DNA, 15 bp, Homo sapiens
aggcctatccctctg

SEQ ID NO: 470303 - DNA, 15 bp, Homo sapiens
gaggcctatccctct

SEQ ID NO: 470304 - DNA, 15 bp, Homo sapiens
agaggcctatccctc

SEQ ID NO: 470305 - DNA, 15 bp, Homo sapiens
tagaggcctatccct

SEQ ID NO: 470306 - DNA, 15 bp, Homo sapiens
ctagaggcctatccc

SEQ ID NO: 470307 - DNA, 15 bp, Homo sapiens
tctagaggcctatcc

SEQ ID NO: 470308 - DNA, 15 bp, Homo sapiens
gtctagaggcctatc

SEQ ID NO: 470309 - DNA, 15 bp, Homo sapiens
ggtctagaggcctat

SEQ ID NO: 470310 - DNA, 15 bp, Homo sapiens
aggtctagaggccta

SEQ ID NO: 470311 - DNA, 15 bp, Homo sapiens
caggtctagaggcct

SEQ ID NO: 470312 - DNA, 15 bp, Homo sapiens
gcaggtctagaggcc

SEQ ID NO: 470313 - DNA, 15 bp, Homo sapiens
agcaggtctagaggc

SEQ ID NO: 470314 - DNA, 15 bp, Homo sapiens
aagcaggtctagagg

SEQ ID NO: 470315 - DNA, 15 bp, Homo sapiens
gaagcaggtctagag

SEQ ID NO: 470316 - DNA, 15 bp, Homo sapiens
agaagcaggtctaga

SEQ ID NO: 470317 - DNA, 15 bp, Homo sapiens
tagaagcaggtctag

SEQ ID NO: 470318 - DNA, 15 bp, Homo sapiens
ctagaagcaggtcta

SEQ ID NO: 470319 - DNA, 15 bp, Homo sapiens
tctagaagcaggtct

SEQ ID NO: 470320 - DNA, 15 bp, Homo sapiens
ttctagaagcaggtc

SEQ ID NO: 470321 - DNA, 15 bp, Homo sapiens
tttctagaagcaggt

SEQ ID NO: 470322 - DNA, 15 bp, Homo sapiens
gtttctagaagcagg

SEQ ID NO: 470323 - DNA, 15 bp, Homo sapiens
ggtttctagaagcag

SEQ ID NO: 470324 - DNA, 15 bp, Homo sapiens
tggtttctagaagca

SEQ ID NO: 470325 - DNA, 15 bp, Homo sapiens
ctggtttctagaagc

SEQ ID NO: 470326 - DNA, 15 bp, Homo sapiens
cctggtttctagaag

SEQ ID NO: 470327 - DNA, 15 bp, Homo sapiens
gcctggtttctagaa

SEQ ID NO: 470328 - DNA, 15 bp, Homo sapiens
agcctggtttctaga

SEQ ID NO: 470329 - DNA, 15 bp, Homo sapiens
cagcctggtttctag

SEQ ID NO: 470330 - DNA, 15 bp, Homo sapiens
gcagcctggtttcta

SEQ ID NO: 470331 - DNA, 15 bp, Homo sapiens
agcagcctggtttct

SEQ ID NO: 470332 - DNA, 15 bp, Homo sapiens
cagcagcctggtttc

SEQ ID NO: 470333 - DNA, 15 bp, Homo sapiens
gcagcagcctggttt

SEQ ID NO: 470334 - DNA, 15 bp, Homo sapiens
agcagcagcctggtt

SEQ ID NO: 470335 - DNA, 15 bp, Homo sapiens
gagcagcagcctggt

SEQ ID NO: 470336 - DNA, 15 bp, Homo sapiens
agagcagcagcctgg

SEQ ID NO: 470337 - DNA, 15 bp, Homo sapiens
aagagcagcagcctg

SEQ ID NO: 470338 - DNA, 15 bp, Homo sapiens
caagagcagcagcct

SEQ ID NO: 470339 - DNA, 15 bp, Homo sapiens
gcaagagcagcagcc

SEQ ID NO: 470340 - DNA, 15 bp, Homo sapiens
agcaagagcagcagc

SEQ ID NO: 470341 - DNA, 15 bp, Homo sapiens
aagcaagagcagcag

SEQ ID NO: 470342 - DNA, 15 bp, Homo sapiens
taagcaagagcagca

SEQ ID NO: 470343 - DNA, 15 bp, Homo sapiens
ataagcaagagcagc

SEQ ID NO: 470344 - DNA, 15 bp, Homo sapiens
cataagcaagagcag

SEQ ID NO: 470345 - DNA, 15 bp, Homo sapiens
ccataagcaagagca

SEQ ID NO: 470346 - DNA, 15 bp, Homo sapiens
accataagcaagagc

SEQ ID NO: 470347 - DNA, 15 bp, Homo sapiens
caccataagcaagag

SEQ ID NO: 470348 - DNA, 15 bp, Homo sapiens
ccaccataagcaaga

SEQ ID NO: 470349 - DNA, 15 bp, Homo sapiens
cccaccataagcaag

SEQ ID NO: 470350 - DNA, 15 bp, Homo sapiens
gcccaccataagcaa

SEQ ID NO: 470351 - DNA, 15 bp, Homo sapiens
ggcccaccataagca

SEQ ID NO: 470352 - DNA, 15 bp, Homo sapiens
gggcccaccataagc

SEQ ID NO: 470353 - DNA, 15 bp, Homo sapiens
agggcccaccataag

SEQ ID NO: 470354 - DNA, 15 bp, Homo sapiens
tagggcccaccataa

SEQ ID NO: 470355 - DNA, 15 bp, Homo sapiens
ctagggcccaccata

SEQ ID NO: 470356 - DNA, 15 bp, Homo sapiens
cctagggcccaccat

SEQ ID NO: 470357 - DNA, 15 bp, Homo sapiens
tcctagggcccacca

SEQ ID NO: 470358 - DNA, 15 bp, Homo sapiens
ttcctagggcccacc

SEQ ID NO: 470359 - DNA, 15 bp, Homo sapiens
cttcctagggcccac

SEQ ID NO: 470360 - DNA, 15 bp, Homo sapiens
ccttcctagggccca

SEQ ID NO: 470361 - DNA, 15 bp, Homo sapiens
gccttcctagggccc

SEQ ID NO: 470362 - DNA, 15 bp, Homo sapiens
tgccttcctagggcc

SEQ ID NO: 470363 - DNA, 15 bp, Homo sapiens
ttgccttcctagggc

SEQ ID NO: 470364 - DNA, 15 bp, Homo sapiens
cttgccttcctaggg

SEQ ID NO: 470365 - DNA, 15 bp, Homo sapiens
tcttgccttcctagg

SEQ ID NO: 470366 - DNA, 15 bp, Homo sapiens
ctcttgccttcctag

SEQ ID NO: 470367 - DNA, 15 bp, Homo sapiens
actcttgccttccta

SEQ ID NO: 470368 - DNA, 15 bp, Homo sapiens
cactcttgccttcct

SEQ ID NO: 470369 - DNA, 15 bp, Homo sapiens
tcactcttgccttcc

SEQ ID NO: 470370 - DNA, 15 bp, Homo sapiens
ctcactcttgccttc

SEQ ID NO: 470371 - DNA, 15 bp, Homo sapiens
tctcactcttgcctt

SEQ ID NO: 470372 - DNA, 15 bp, Homo sapiens
ctctcactcttgcct

SEQ ID NO: 470373 - DNA, 15 bp, Homo sapiens
cctctcactcttgcc

SEQ ID NO: 470374 - DNA, 15 bp, Homo sapiens
tcctctcactcttgc

SEQ ID NO: 470375 - DNA, 15 bp, Homo sapiens
ctcctctcactcttg

SEQ ID NO: 470376 - DNA, 15 bp, Homo sapiens
cctcctctcactctt

SEQ ID NO: 470377 - DNA, 15 bp, Homo sapiens
ccctcctctcactct

SEQ ID NO: 470378 - DNA, 15 bp, Homo sapiens
tccctcctctcactc

SEQ ID NO: 470379 - DNA, 15 bp, Homo sapiens
ctccctcctctcact

SEQ ID NO: 470380 - DNA, 15 bp, Homo sapiens
cctccctcctctcac

SEQ ID NO: 470381 - DNA, 15 bp, Homo sapiens
gcctccctcctctca

SEQ ID NO: 470382 - DNA, 15 bp, Homo sapiens
tgcctccctcctctc

SEQ ID NO: 470383 - DNA, 15 bp, Homo sapiens
gtgcctccctcctct

SEQ ID NO: 470384 - DNA, 15 bp, Homo sapiens
ggtgcctccctcctc

SEQ ID NO: 470385 - DNA, 15 bp, Homo sapiens
tggtgcctccctcct

SEQ ID NO: 470386 - DNA, 15 bp, Homo sapiens
ctggtgcctccctcc

SEQ ID NO: 470387 - DNA, 15 bp, Homo sapiens
gctggtgcctccctc

SEQ ID NO: 470388 - DNA, 15 bp, Homo sapiens
agctggtgcctccct

SEQ ID NO: 470389 - DNA, 15 bp, Homo sapiens
aagctggtgcctccc

SEQ ID NO: 470390 - DNA, 15 bp, Homo sapiens
taagctggtgcctcc

SEQ ID NO: 470391 - DNA, 15 bp, Homo sapiens
ctaagctggtgcctc

SEQ ID NO: 470392 - DNA, 15 bp, Homo sapiens
cctaagctggtgcct

SEQ ID NO: 470393 - DNA, 15 bp, Homo sapiens
acctaagctggtgcc

SEQ ID NO: 470394 - DNA, 15 bp, Homo sapiens
cacctaagctggtgc

SEQ ID NO: 470395 - DNA, 15 bp, Homo sapiens
gcacctaagctggtg

SEQ ID NO: 470396 - DNA, 15 bp, Homo sapiens
agcacctaagctggt

SEQ ID NO: 470397 - DNA, 15 bp, Homo sapiens
cagcacctaagctgg

SEQ ID NO: 470398 - DNA, 15 bp, Homo sapiens
ccagcacctaagctg

SEQ ID NO: 470399 - DNA, 15 bp, Homo sapiens
cccagcacctaagct

SEQ ID NO: 470400 - DNA, 15 bp, Homo sapiens
acccagcacctaagc

SEQ ID NO: 470401 - DNA, 15 bp, Homo sapiens
aacccagcacctaag

SEQ ID NO: 470402 - DNA, 15 bp, Homo sapiens
gaacccagcacctaa

SEQ ID NO: 470403 - DNA, 15 bp, Homo sapiens
agaacccagcaccta

SEQ ID NO: 470404 - DNA, 15 bp, Homo sapiens
aagaacccagcacct

SEQ ID NO: 470405 - DNA, 15 bp, Homo sapiens
aaagaacccagcacc

SEQ ID NO: 470406 - DNA, 15 bp, Homo sapiens
caaagaacccagcac

SEQ ID NO: 470407 - DNA, 15 bp, Homo sapiens
tcaaagaacccagca

SEQ ID NO: 470408 - DNA, 15 bp, Homo sapiens
ttcaaagaacccagc

SEQ ID NO: 470409 - DNA, 15 bp, Homo sapiens
cttcaaagaacccag

SEQ ID NO: 470410 - DNA, 15 bp, Homo sapiens
tcttcaaagaaccca

SEQ ID NO: 470411 - DNA, 15 bp, Homo sapiens
atcttcaaagaaccc

SEQ ID NO: 470412 - DNA, 15 bp, Homo sapiens
gatcttcaaagaacc

SEQ ID NO: 470413 - DNA, 15 bp, Homo sapiens
agatcttcaaagaac

SEQ ID NO: 470414 - DNA, 15 bp, Homo sapiens
cagatcttcaaagaa

SEQ ID NO: 470415 - DNA, 15 bp, Homo sapiens
acagatcttcaaaga

SEQ ID NO: 470416 - DNA, 15 bp, Homo sapiens
cacagatcttcaaag

SEQ ID NO: 470417 - DNA, 15 bp, Homo sapiens
acacagatcttcaaa

SEQ ID NO: 470418 - DNA, 15 bp, Homo sapiens
cacacagatcttcaa

SEQ ID NO: 470419 - DNA, 15 bp, Homo sapiens
acacacagatcttca

SEQ ID NO: 470420 - DNA, 15 bp, Homo sapiens
tacacacagatcttc

SEQ ID NO: 470421 - DNA, 15 bp, Homo sapiens
gtacacacagatctt

SEQ ID NO: 470422 - DNA, 15 bp, Homo sapiens
tgtacacacagatct

SEQ ID NO: 470423 - DNA, 15 bp, Homo sapiens
gtgtacacacagatc

SEQ ID NO: 470424 - DNA, 15 bp, Homo sapiens
tgtgtacacacagat

SEQ ID NO: 470425 - DNA, 15 bp, Homo sapiens
ctgtgtacacacaga

SEQ ID NO: 470426 - DNA, 15 bp, Homo sapiens
tctgtgtacacacag

SEQ ID NO: 470427 - DNA, 15 bp, Homo sapiens
ctctgtgtacacaca

SEQ ID NO: 470428 - DNA, 15 bp, Homo sapiens
actctgtgtacacac

SEQ ID NO: 470429 - DNA, 15 bp, Homo sapiens
gactctgtgtacaca

SEQ ID NO: 470430 - DNA, 15 bp, Homo sapiens
agactctgtgtacac

SEQ ID NO: 470431 - DNA, 15 bp, Homo sapiens
aagactctgtgtaca

SEQ ID NO: 470432 - DNA, 15 bp, Homo sapiens
aaagactctgtgtac

SEQ ID NO: 470433 - DNA, 15 bp, Homo sapiens
gaaagactctgtgta

SEQ ID NO: 470434 - DNA, 15 bp, Homo sapiens
agaaagactctgtgt

SEQ ID NO: 470435 - DNA, 15 bp, Homo sapiens
gagaaagactctgtg

SEQ ID NO: 470436 - DNA, 15 bp, Homo sapiens
agagaaagactctgt

SEQ ID NO: 470437 - DNA, 15 bp, Homo sapiens
gagagaaagactctg

SEQ ID NO: 470438 - DNA, 15 bp, Homo sapiens
ggagagaaagactct

SEQ ID NO: 470439 - DNA, 15 bp, Homo sapiens
tggagagaaagactc

SEQ ID NO: 470440 - DNA, 15 bp, Homo sapiens
atggagagaaagact

SEQ ID NO: 470441 - DNA, 15 bp, Homo sapiens
gatggagagaaagac

SEQ ID NO: 470442 - DNA, 15 bp, Homo sapiens
agatggagagaaaga

SEQ ID NO: 470443 - DNA, 15 bp, Homo sapiens
aagatggagagaaag

SEQ ID NO: 470444 - DNA, 15 bp, Homo sapiens
taagatggagagaaa

SEQ ID NO: 470445 - DNA, 15 bp, Homo sapiens
gtaagatggagagaa

SEQ ID NO: 470446 - DNA, 15 bp, Homo sapiens
ggtaagatggagaga

SEQ ID NO: 470447 - DNA, 15 bp, Homo sapiens
tggtaagatggagag

SEQ ID NO: 470448 - DNA, 15 bp, Homo sapiens
ttggtaagatggaga

SEQ ID NO: 470449 - DNA, 15 bp, Homo sapiens
attggtaagatggag

SEQ ID NO: 470450 - DNA, 15 bp, Homo sapiens
gattggtaagatgga

SEQ ID NO: 470451 - DNA, 15 bp, Homo sapiens
tgattggtaagatgg

SEQ ID NO: 470452 - DNA, 15 bp, Homo sapiens
ctgattggtaagatg

SEQ ID NO: 470453 - DNA, 15 bp, Homo sapiens
tctgattggtaagat

SEQ ID NO: 470454 - DNA, 15 bp, Homo sapiens
atctgattggtaaga

SEQ ID NO: 470455 - DNA, 15 bp, Homo sapiens
catctgattggtaag

SEQ ID NO: 470456 - DNA, 15 bp, Homo sapiens
tcatctgattggtaa

SEQ ID NO: 470457 - DNA, 15 bp, Homo sapiens
ctcatctgattggta

SEQ ID NO: 470458 - DNA, 15 bp, Homo sapiens
actcatctgattggt

SEQ ID NO: 470459 - DNA, 15 bp, Homo sapiens
gactcatctgattgg

SEQ ID NO: 470460 - DNA, 15 bp, Homo sapiens
tgactcatctgattg

SEQ ID NO: 470461 - DNA, 15 bp, Homo sapiens
gtgactcatctgatt

SEQ ID NO: 470462 - DNA, 15 bp, Homo sapiens
agtgactcatctgat

SEQ ID NO: 470463 - DNA, 15 bp, Homo sapiens
cagtgactcatctga

SEQ ID NO: 470464 - DNA, 15 bp, Homo sapiens
acagtgactcatctg

SEQ ID NO: 470465 - DNA, 15 bp, Homo sapiens
gacagtgactcatct

SEQ ID NO: 470466 - DNA, 15 bp, Homo sapiens
tgacagtgactcatc

SEQ ID NO: 470467 - DNA, 15 bp, Homo sapiens
gtgacagtgactcat

SEQ ID NO: 470468 - DNA, 15 bp, Homo sapiens
agtgacagtgactca

SEQ ID NO: 470469 - DNA, 15 bp, Homo sapiens
cagtgacagtgactc

SEQ ID NO: 470470 - DNA, 15 bp, Homo sapiens
acagtgacagtgact

SEQ ID NO: 470471 - DNA, 15 bp, Homo sapiens
cacagtgacagtgac

SEQ ID NO: 470472 - DNA, 15 bp, Homo sapiens
ccacagtgacagtga

SEQ ID NO: 470473 - DNA, 15 bp, Homo sapiens
cccacagtgacagtg

SEQ ID NO: 470474 - DNA, 15 bp, Homo sapiens
tcccacagtgacagt

SEQ ID NO: 470475 - DNA, 15 bp, Homo sapiens
ttcccacagtgacag

SEQ ID NO: 470476 - DNA, 15 bp, Homo sapiens
cttcccacagtgaca

SEQ ID NO: 470477 - DNA, 15 bp, Homo sapiens
tcttcccacagtgac

SEQ ID NO: 470478 - DNA, 15 bp, Homo sapiens
ttcttcccacagtga

SEQ ID NO: 470479 - DNA, 15 bp, Homo sapiens
cttcttcccacagtg

SEQ ID NO: 470480 - DNA, 15 bp, Homo sapiens
acttcttcccacagt

SEQ ID NO: 470481 - DNA, 15 bp, Homo sapiens
tacttcttcccacag

SEQ ID NO: 470482 - DNA, 15 bp, Homo sapiens
ctacttcttcccaca

SEQ ID NO: 470483 - DNA, 15 bp, Homo sapiens
cctacttcttcccac

SEQ ID NO: 470484 - DNA, 15 bp, Homo sapiens
ccctacttcttccca

SEQ ID NO: 470485 - DNA, 15 bp, Homo sapiens
cccctacttcttccc

SEQ ID NO: 470486 - DNA, 15 bp, Homo sapiens
gcccctacttcttcc

SEQ ID NO: 470487 - DNA, 15 bp, Homo sapiens
tgcccctacttcttc

SEQ ID NO: 470488 - DNA, 15 bp, Homo sapiens
atgcccctacttctt

SEQ ID NO: 470489 - DNA, 15 bp, Homo sapiens
catgcccctacttct

SEQ ID NO: 470490 - DNA, 15 bp, Homo sapiens
ccatgcccctacttc

SEQ ID NO: 470491 - DNA, 15 bp, Homo sapiens
cccatgcccctactt

SEQ ID NO: 470492 - DNA, 15 bp, Homo sapiens
acccatgcccctact

SEQ ID NO: 470493 - DNA, 15 bp, Homo sapiens
gacccatgcccctac

SEQ ID NO: 470494 - DNA, 15 bp, Homo sapiens
tgacccatgccccta

SEQ ID NO: 470495 - DNA, 15 bp, Homo sapiens
gtgacccatgcccct

SEQ ID NO: 470496 - DNA, 15 bp, Homo sapiens
ggtgacccatgcccc

SEQ ID NO: 470497 - DNA, 15 bp, Homo sapiens
aggtgacccatgccc

SEQ ID NO: 470498 - DNA, 15 bp, Homo sapiens
aaggtgacccatgcc

SEQ ID NO: 470499 - DNA, 15 bp, Homo sapiens
gaaggtgacccatgc

SEQ ID NO: 470500 - DNA, 15 bp, Homo sapiens
ggaaggtgacccatg

SEQ ID NO: 470501 - DNA, 15 bp, Homo sapiens
gggaaggtgacccat

SEQ ID NO: 470502 - DNA, 15 bp, Homo sapiens
tgggaaggtgaccca

SEQ ID NO: 470503 - DNA, 15 bp, Homo sapiens
ttgggaaggtgaccc

SEQ ID NO: 470504 - DNA, 15 bp, Homo sapiens
tttgggaaggtgacc

SEQ ID NO: 470505 - DNA, 15 bp, Homo sapiens
ttttgggaaggtgac

SEQ ID NO: 470506 - DNA, 15 bp, Homo sapiens
gttttgggaaggtga

SEQ ID NO: 470507 - DNA, 15 bp, Homo sapiens
agttttgggaaggtg

SEQ ID NO: 470508 - DNA, 15 bp, Homo sapiens
aagttttgggaaggt

SEQ ID NO: 470509 - DNA, 15 bp, Homo sapiens
gaagttttgggaagg

SEQ ID NO: 470510 - DNA, 15 bp, Homo sapiens
agaagttttgggaag

SEQ ID NO: 470511 - DNA, 15 bp, Homo sapiens
tagaagttttgggaa

SEQ ID NO: 470512 - DNA, 15 bp, Homo sapiens
ttagaagttttggga

SEQ ID NO: 470513 - DNA, 15 bp, Homo sapiens
cttagaagttttggg

SEQ ID NO: 470514 - DNA, 15 bp, Homo sapiens
tcttagaagttttgg

SEQ ID NO: 470515 - DNA, 15 bp, Homo sapiens
ttcttagaagttttg

SEQ ID NO: 470516 - DNA, 15 bp, Homo sapiens
cttcttagaagtttt

SEQ ID NO: 470517 - DNA, 15 bp, Homo sapiens
acttcttagaagttt

SEQ ID NO: 470518 - DNA, 15 bp, Homo sapiens
aacttcttagaagtt

SEQ ID NO: 470519 - DNA, 15 bp, Homo sapiens
aaacttcttagaagt

SEQ ID NO: 470520 - DNA, 15 bp, Homo sapiens
caaacttcttagaag

SEQ ID NO: 470521 - DNA, 15 bp, Homo sapiens
acaaacttcttagaa

SEQ ID NO: 470522 - DNA, 15 bp, Homo sapiens
tacaaacttcttaga

SEQ ID NO: 470523 - DNA, 15 bp, Homo sapiens
atacaaacttcttag

SEQ ID NO: 470524 - DNA, 15 bp, Homo sapiens
aatacaaacttctta

SEQ ID NO: 470525 - DNA, 15 bp, Homo sapiens
gaatacaaacttctt

SEQ ID NO: 470526 - DNA, 15 bp, Homo sapiens
agaatacaaacttct

SEQ ID NO: 470527 - DNA, 15 bp, Homo sapiens
cagaatacaaacttc

SEQ ID NO: 470528 - DNA, 15 bp, Homo sapiens
acagaatacaaactt

SEQ ID NO: 470529 - DNA, 15 bp, Homo sapiens
cacagaatacaaact

SEQ ID NO: 470530 - DNA, 15 bp, Homo sapiens
ccacagaatacaaac

SEQ ID NO: 470531 - DNA, 15 bp, Homo sapiens
cccacagaatacaaa

SEQ ID NO: 470532 - DNA, 15 bp, Homo sapiens
gcccacagaatacaa

SEQ ID NO: 470533 - DNA, 15 bp, Homo sapiens
agcccacagaataca

SEQ ID NO: 470534 - DNA, 15 bp, Homo sapiens
aagcccacagaatac

SEQ ID NO: 470535 - DNA, 15 bp, Homo sapiens
caagcccacagaata

SEQ ID NO: 470536 - DNA, 15 bp, Homo sapiens
ccaagcccacagaat

SEQ ID NO: 470537 - DNA, 15 bp, Homo sapiens
tccaagcccacagaa

SEQ ID NO: 470538 - DNA, 15 bp, Homo sapiens
atccaagcccacaga

SEQ ID NO: 470539 - DNA, 15 bp, Homo sapiens
tatccaagcccacag

SEQ ID NO: 470540 - DNA, 15 bp, Homo sapiens
ctatccaagcccaca

SEQ ID NO: 470541 - DNA, 15 bp, Homo sapiens
cctatccaagcccac

SEQ ID NO: 470542 - DNA, 15 bp, Homo sapiens
ccctatccaagccca

SEQ ID NO: 470543 - DNA, 15 bp, Homo sapiens
tccctatccaagccc

SEQ ID NO: 470544 - DNA, 15 bp, Homo sapiens
gtccctatccaagcc

SEQ ID NO: 470545 - DNA, 15 bp, Homo sapiens
ggtccctatccaagc

SEQ ID NO: 470546 - DNA, 15 bp, Homo sapiens
tggtccctatccaag

SEQ ID NO: 470547 - DNA, 15 bp, Homo sapiens
atggtccctatccaa

SEQ ID NO: 470548 - DNA, 15 bp, Homo sapiens
catggtccctatcca

SEQ ID NO: 470549 - DNA, 15 bp, Homo sapiens
ccatggtccctatcc

SEQ ID NO: 470550 - DNA, 15 bp, Homo sapiens
cccatggtccctatc

SEQ ID NO: 470551 - DNA, 15 bp, Homo sapiens
tcccatggtccctat

SEQ ID NO: 470552 - DNA, 15 bp, Homo sapiens
ttcccatggtcccta

SEQ ID NO: 470553 - DNA, 15 bp, Homo sapiens
tttcccatggtccct

SEQ ID NO: 470554 - DNA, 15 bp, Homo sapiens
ctttcccatggtccc

SEQ ID NO: 470555 - DNA, 15 bp, Homo sapiens
cctttcccatggtcc

SEQ ID NO: 470556 - DNA, 15 bp, Homo sapiens
tcctttcccatggtc

SEQ ID NO: 470557 - DNA, 15 bp, Homo sapiens
ttcctttcccatggt

SEQ ID NO: 470558 - DNA, 15 bp, Homo sapiens
cttcctttcccatgg

SEQ ID NO: 470559 - DNA, 15 bp, Homo sapiens
tcttcctttcccatg

SEQ ID NO: 470560 - DNA, 15 bp, Homo sapiens
ctcttcctttcccat

SEQ ID NO: 470561 - DNA, 15 bp, Homo sapiens
tctcttcctttccca

SEQ ID NO: 470562 - DNA, 15 bp, Homo sapiens
ttctcttcctttccc

SEQ ID NO: 470563 - DNA, 15 bp, Homo sapiens
attctcttcctttcc

SEQ ID NO: 470564 - DNA, 15 bp, Homo sapiens
cattctcttcctttc

SEQ ID NO: 470565 - DNA, 15 bp, Homo sapiens
ccattctcttccttt

SEQ ID NO: 470566 - DNA, 15 bp, Homo sapiens
accattctcttcctt

SEQ ID NO: 470567 - DNA, 15 bp, Homo sapiens
aaccattctcttcct

SEQ ID NO: 470568 - DNA, 15 bp, Homo sapiens
caaccattctcttcc

SEQ ID NO: 470569 - DNA, 15 bp, Homo sapiens
gcaaccattctcttc

SEQ ID NO: 470570 - DNA, 15 bp, Homo sapiens
ggcaaccattctctt

SEQ ID NO: 470571 - DNA, 15 bp, Homo sapiens
gggcaaccattctct

SEQ ID NO: 470572 - DNA, 15 bp, Homo sapiens
tgggcaaccattctc

SEQ ID NO: 470573 - DNA, 15 bp, Homo sapiens
atgggcaaccattct

SEQ ID NO: 470574 - DNA, 15 bp, Homo sapiens
tatgggcaaccattc

SEQ ID NO: 470575 - DNA, 15 bp, Homo sapiens
ttatgggcaaccatt

SEQ ID NO: 470576 - DNA, 15 bp, Homo sapiens
tttatgggcaaccat

SEQ ID NO: 470577 - DNA, 15 bp, Homo sapiens
ttttatgggcaacca

SEQ ID NO: 470578 - DNA, 15 bp, Homo sapiens
gttttatgggcaacc

SEQ ID NO: 470579 - DNA, 15 bp, Homo sapiens
agttttatgggcaac

SEQ ID NO: 470580 - DNA, 15 bp, Homo sapiens
cagttttatgggcaa

SEQ ID NO: 470581 - DNA, 15 bp, Homo sapiens
ccagttttatgggca

SEQ ID NO: 470582 - DNA, 15 bp, Homo sapiens
gccagttttatgggc

SEQ ID NO: 470583 - DNA, 15 bp, Homo sapiens
agccagttttatggg

SEQ ID NO: 470584 - DNA, 15 bp, Homo sapiens
cagccagttttatgg

SEQ ID NO: 470585 - DNA, 15 bp, Homo sapiens
acagccagttttatg

SEQ ID NO: 470586 - DNA, 15 bp, Homo sapiens
tacagccagttttat

SEQ ID NO: 470587 - DNA, 15 bp, Homo sapiens
ctacagccagtttta

SEQ ID NO: 470588 - DNA, 15 bp, Homo sapiens
actacagccagtttt

SEQ ID NO: 470589 - DNA, 15 bp, Homo sapiens
cactacagccagttt

SEQ ID NO: 470590 - DNA, 15 bp, Homo sapiens
acactacagccagtt

SEQ ID NO: 470591 - DNA, 15 bp, Homo sapiens
cacactacagccagt

SEQ ID NO: 470592 - DNA, 15 bp, Homo sapiens
ccacactacagccag

SEQ ID NO: 470593 - DNA, 15 bp, Homo sapiens
gccacactacagcca

SEQ ID NO: 470594 - DNA, 15 bp, Homo sapiens
ggccacactacagcc

SEQ ID NO: 470595 - DNA, 15 bp, Homo sapiens
aggccacactacagc

SEQ ID NO: 470596 - DNA, 15 bp, Homo sapiens
gaggccacactacag

SEQ ID NO: 470597 - DNA, 15 bp, Homo sapiens
tgaggccacactaca

SEQ ID NO: 470598 - DNA, 15 bp, Homo sapiens
ttgaggccacactac

SEQ ID NO: 470599 - DNA, 15 bp, Homo sapiens
tttgaggccacacta

SEQ ID NO: 470600 - DNA, 15 bp, Homo sapiens
gtttgaggccacact

SEQ ID NO: 470601 - DNA, 15 bp, Homo sapiens
agtttgaggccacac

SEQ ID NO: 470602 - DNA, 15 bp, Homo sapiens
aagtttgaggccaca

SEQ ID NO: 470603 - DNA, 15 bp, Homo sapiens
gaagtttgaggccac

SEQ ID NO: 470604 - DNA, 15 bp, Homo sapiens
agaagtttgaggcca

SEQ ID NO: 470605 - DNA, 15 bp, Homo sapiens
cagaagtttgaggcc

SEQ ID NO: 470606 - DNA, 15 bp, Homo sapiens
ccagaagtttgaggc

SEQ ID NO: 470607 - DNA, 15 bp, Homo sapiens
tccagaagtttgagg

SEQ ID NO: 470608 - DNA, 15 bp, Homo sapiens
gtccagaagtttgag

SEQ ID NO: 470609 - DNA, 15 bp, Homo sapiens
agtccagaagtttga

SEQ ID NO: 470610 - DNA, 15 bp, Homo sapiens
aagtccagaagtttg

SEQ ID NO: 470611 - DNA, 15 bp, Homo sapiens
taagtccagaagttt

SEQ ID NO: 470612 - DNA, 15 bp, Homo sapiens
ttaagtccagaagtt

SEQ ID NO: 470613 - DNA, 15 bp, Homo sapiens
tttaagtccagaagt

SEQ ID NO: 470614 - DNA, 15 bp, Homo sapiens
atttaagtccagaag

SEQ ID NO: 470615 - DNA, 15 bp, Homo sapiens
catttaagtccagaa

SEQ ID NO: 470616 - DNA, 15 bp, Homo sapiens
tcatttaagtccaga

SEQ ID NO: 470617 - DNA, 15 bp, Homo sapiens
atcatttaagtccag

SEQ ID NO: 470618 - DNA, 15 bp, Homo sapiens
gatcatttaagtcca

SEQ ID NO: 470619 - DNA, 15 bp, Homo sapiens
ggatcatttaagtcc

SEQ ID NO: 470620 - DNA, 15 bp, Homo sapiens
aggatcatttaagtc

SEQ ID NO: 470621 - DNA, 15 bp, Homo sapiens
gaggatcatttaagt

SEQ ID NO: 470622 - DNA, 15 bp, Homo sapiens
ggaggatcatttaag

SEQ ID NO: 470623 - DNA, 15 bp, Homo sapiens
gggaggatcatttaa

SEQ ID NO: 470624 - DNA, 15 bp, Homo sapiens
tgggaggatcattta

SEQ ID NO: 470625 - DNA, 15 bp, Homo sapiens
gtgggaggatcattt

SEQ ID NO: 470626 - DNA, 15 bp, Homo sapiens
ggtgggaggatcatt

SEQ ID NO: 470627 - DNA, 15 bp, Homo sapiens
tgaggtgggaggatc

SEQ ID NO: 470628 - DNA, 15 bp, Homo sapiens
ctgaggtgggaggat

SEQ ID NO: 470629 - DNA, 15 bp, Homo sapiens
gctgaggtgggagga

SEQ ID NO: 470630 - DNA, 15 bp, Homo sapiens
ggctgaggtgggagg

SEQ ID NO: 470631 - DNA, 15 bp, Homo sapiens
aggctgaggtgggag

SEQ ID NO: 470632 - DNA, 15 bp, Homo sapiens
gaggctgaggtggga

SEQ ID NO: 470633 - DNA, 15 bp, Homo sapiens
tagctacttgggagg

SEQ ID NO: 470634 - DNA, 15 bp, Homo sapiens
ctagctacttgggag

SEQ ID NO: 470635 - DNA, 15 bp, Homo sapiens
tctagctacttggga

SEQ ID NO: 470636 - DNA, 15 bp, Homo sapiens
ttctagctacttggg

SEQ ID NO: 470637 - DNA, 15 bp, Homo sapiens
gttctagctacttgg

SEQ ID NO: 470638 - DNA, 15 bp, Homo sapiens
agttctagctacttg

SEQ ID NO: 470639 - DNA, 15 bp, Homo sapiens
tagttctagctactt

SEQ ID NO: 470640 - DNA, 15 bp, Homo sapiens
gtagttctagctact

SEQ ID NO: 470641 - DNA, 15 bp, Homo sapiens
tgtagttctagctac

SEQ ID NO: 470642 - DNA, 15 bp, Homo sapiens
ctgtagttctagcta

SEQ ID NO: 470643 - DNA, 15 bp, Homo sapiens
cctgtagttctagct

SEQ ID NO: 470644 - DNA, 15 bp, Homo sapiens
acctgtagttctagc

SEQ ID NO: 470645 - DNA, 15 bp, Homo sapiens
tacctgtagttctag

SEQ ID NO: 470646 - DNA, 15 bp, Homo sapiens
atacctgtagttcta

SEQ ID NO: 470647 - DNA, 15 bp, Homo sapiens
tatacctgtagttct

SEQ ID NO: 470648 - DNA, 15 bp, Homo sapiens
atatacctgtagttc

SEQ ID NO: 470649 - DNA, 15 bp, Homo sapiens
catatacctgtagtt

SEQ ID NO: 470650 - DNA, 15 bp, Homo sapiens
gcatatacctgtagt

SEQ ID NO: 470651 - DNA, 15 bp, Homo sapiens
ggcatatacctgtag

SEQ ID NO: 470652 - DNA, 15 bp, Homo sapiens
tggcatatacctgta

SEQ ID NO: 470653 - DNA, 15 bp, Homo sapiens
gtggcatatacctgt

SEQ ID NO: 470654 - DNA, 15 bp, Homo sapiens
ggtggcatatacctg

SEQ ID NO: 470655 - DNA, 15 bp, Homo sapiens
tggtggcatatacct

SEQ ID NO: 470656 - DNA, 15 bp, Homo sapiens
atggtggcatatacc

SEQ ID NO: 470657 - DNA, 15 bp, Homo sapiens
catggtggcatatac

SEQ ID NO: 470658 - DNA, 15 bp, Homo sapiens
gcatggtggcatata

SEQ ID NO: 470659 - DNA, 15 bp, Homo sapiens
ggcatggtggcatat

SEQ ID NO: 470660 - DNA, 15 bp, Homo sapiens
gggcatggtggcata

SEQ ID NO: 470661 - DNA, 15 bp, Homo sapiens
ctagctgggcatggt

SEQ ID NO: 470662 - DNA, 15 bp, Homo sapiens
actagctgggcatgg

SEQ ID NO: 470663 - DNA, 15 bp, Homo sapiens
aactagctgggcatg

SEQ ID NO: 470664 - DNA, 15 bp, Homo sapiens
taactagctgggcat

SEQ ID NO: 470665 - DNA, 15 bp, Homo sapiens
ttaactagctgggca

SEQ ID NO: 470666 - DNA, 15 bp, Homo sapiens
tttaactagctgggc

SEQ ID NO: 470667 - DNA, 15 bp, Homo sapiens
ttttaactagctggg

SEQ ID NO: 470668 - DNA, 15 bp, Homo sapiens
tttttaactagctgg

SEQ ID NO: 470669 - DNA, 15 bp, Homo sapiens
ttttttaactagctg

SEQ ID NO: 470670 - DNA, 15 bp, Homo sapiens
tttttttaactagct

SEQ ID NO: 470671 - DNA, 15 bp, Homo sapiens
ttttttttaactagc

SEQ ID NO: 470672 - DNA, 15 bp, Homo sapiens
tttttttttaactag

SEQ ID NO: 470673 - DNA, 15 bp, Homo sapiens
atttttttttaacta

SEQ ID NO: 470674 - DNA, 15 bp, Homo sapiens
aatttttttttaact

SEQ ID NO: 470675 - DNA, 15 bp, Homo sapiens
aaatttttttttaac

SEQ ID NO: 470676 - DNA, 15 bp, Homo sapiens
aaaatttttttttaa

SEQ ID NO: 470677 - DNA, 15 bp, Homo sapiens
aaaaattttttttta

SEQ ID NO: 470678 - DNA, 15 bp, Homo sapiens
aaaaaattttttttt

SEQ ID NO: 470679 - DNA, 15 bp, Homo sapiens
aaaaaaatttttttt

SEQ ID NO: 470680 - DNA, 15 bp, Homo sapiens
aaaaaaaattttttt

SEQ ID NO: 470681 - DNA, 15 bp, Homo sapiens
aaaaaaaaatttttt

SEQ ID NO: 470682 - DNA, 15 bp, Homo sapiens
aaaaaaaaaattttt

SEQ ID NO: 470683 - DNA, 15 bp, Homo sapiens
aaaaaaaaaaatttt

SEQ ID NO: 470684 - DNA, 15 bp, Homo sapiens
aaaaaaaaaaaattt

SEQ ID NO: 470685 - DNA, 15 bp, Homo sapiens
aaccaaaaaaaaaaa

SEQ ID NO: 470686 - DNA, 15 bp, Homo sapiens
caaccaaaaaaaaaa

SEQ ID NO: 470687 - DNA, 15 bp, Homo sapiens
tcaaccaaaaaaaaa

SEQ ID NO: 470688 - DNA, 15 bp, Homo sapiens
ctcaaccaaaaaaaa

SEQ ID NO: 470689 - DNA, 15 bp, Homo sapiens
tctcaaccaaaaaaa

SEQ ID NO: 470690 - DNA, 15 bp, Homo sapiens
atctcaaccaaaaaa

SEQ ID NO: 470691 - DNA, 15 bp, Homo sapiens
catctcaaccaaaaa

SEQ ID NO: 470692 - DNA, 15 bp, Homo sapiens
tcatctcaaccaaaa

SEQ ID NO: 470693 - DNA, 15 bp, Homo sapiens
ctcatctcaaccaaa

SEQ ID NO: 470694 - DNA, 15 bp, Homo sapiens
cctcatctcaaccaa

SEQ ID NO: 470695 - DNA, 15 bp, Homo sapiens
acctcatctcaacca

SEQ ID NO: 470696 - DNA, 15 bp, Homo sapiens
gacctcatctcaacc

SEQ ID NO: 470697 - DNA, 15 bp, Homo sapiens
agacctcatctcaac

SEQ ID NO: 470698 - DNA, 15 bp, Homo sapiens
gagacctcatctcaa

SEQ ID NO: 470699 - DNA, 15 bp, Homo sapiens
agagacctcatctca

SEQ ID NO: 470700 - DNA, 15 bp, Homo sapiens
aagagacctcatctc

SEQ ID NO: 470701 - DNA, 15 bp, Homo sapiens
aaagagacctcatct

SEQ ID NO: 470702 - DNA, 15 bp, Homo sapiens
gaaagagacctcatc

SEQ ID NO: 470703 - DNA, 15 bp, Homo sapiens
agaaagagacctcat

SEQ ID NO: 470704 - DNA, 15 bp, Homo sapiens
tagaaagagacctca

SEQ ID NO: 470705 - DNA, 15 bp, Homo sapiens
atagaaagagacctc

SEQ ID NO: 470706 - DNA, 15 bp, Homo sapiens
catagaaagagacct

SEQ ID NO: 470707 - DNA, 15 bp, Homo sapiens
acatagaaagagacc

SEQ ID NO: 470708 - DNA, 15 bp, Homo sapiens
aacatagaaagagac

SEQ ID NO: 470709 - DNA, 15 bp, Homo sapiens
gaacatagaaagaga

SEQ ID NO: 470710 - DNA, 15 bp, Homo sapiens
ggaacatagaaagag

SEQ ID NO: 470711 - DNA, 15 bp, Homo sapiens
gggaacatagaaaga

SEQ ID NO: 470712 - DNA, 15 bp, Homo sapiens
agggaacatagaaag

SEQ ID NO: 470713 - DNA, 15 bp, Homo sapiens
cagggaacatagaaa

SEQ ID NO: 470714 - DNA, 15 bp, Homo sapiens
ccagggaacatagaa

SEQ ID NO: 470715 - DNA, 15 bp, Homo sapiens
cccagggaacataga

SEQ ID NO: 470716 - DNA, 15 bp, Homo sapiens
gcccagggaacatag

SEQ ID NO: 470717 - DNA, 15 bp, Homo sapiens
ggcccagggaacata

SEQ ID NO: 470718 - DNA, 15 bp, Homo sapiens
cggcccagggaacat

SEQ ID NO: 470719 - DNA, 15 bp, Homo sapiens
ccggcccagggaaca

SEQ ID NO: 470720 - DNA, 15 bp, Homo sapiens
accggcccagggaac

SEQ ID NO: 470721 - DNA, 15 bp, Homo sapiens
gaccggcccagggaa

SEQ ID NO: 470722 - DNA, 15 bp, Homo sapiens
agaccggcccaggga

SEQ ID NO: 470723 - DNA, 15 bp, Homo sapiens
gagaccggcccaggg

SEQ ID NO: 470724 - DNA, 15 bp, Homo sapiens
tgagaccggcccagg

SEQ ID NO: 470725 - DNA, 15 bp, Homo sapiens
ttgagaccggcccag

SEQ ID NO: 470726 - DNA, 15 bp, Homo sapiens
tttgagaccggccca

SEQ ID NO: 470727 - DNA, 15 bp, Homo sapiens
gtttgagaccggccc

SEQ ID NO: 470728 - DNA, 15 bp, Homo sapiens
agtttgagaccggcc

SEQ ID NO: 470729 - DNA, 15 bp, Homo sapiens
gagtttgagaccggc

SEQ ID NO: 470730 - DNA, 15 bp, Homo sapiens
ggagtttgagaccgg

SEQ ID NO: 470731 - DNA, 15 bp, Homo sapiens
gggagtttgagaccg

SEQ ID NO: 470732 - DNA, 15 bp, Homo sapiens
tgggagtttgagacc

SEQ ID NO: 470733 - DNA, 15 bp, Homo sapiens
ctgggagtttgagac

SEQ ID NO: 470734 - DNA, 15 bp, Homo sapiens
gctgggagtttgaga

SEQ ID NO: 470735 - DNA, 15 bp, Homo sapiens
ggctgggagtttgag

SEQ ID NO: 470736 - DNA, 15 bp, Homo sapiens
aggctgggagtttga

SEQ ID NO: 470737 - DNA, 15 bp, Homo sapiens
gaggctgggagtttg

SEQ ID NO: 470738 - DNA, 15 bp, Homo sapiens
tgaggctgggagttt

SEQ ID NO: 470739 - DNA, 15 bp, Homo sapiens
ttgaggctgggagtt

SEQ ID NO: 470740 - DNA, 15 bp, Homo sapiens
cttgaggctgggagt

SEQ ID NO: 470741 - DNA, 15 bp, Homo sapiens
acttgaggctgggag

SEQ ID NO: 470742 - DNA, 15 bp, Homo sapiens
cacttgaggctggga

SEQ ID NO: 470743 - DNA, 15 bp, Homo sapiens
tcacttgaggctggg

SEQ ID NO: 470744 - DNA, 15 bp, Homo sapiens
atcacttgaggctgg

SEQ ID NO: 470745 - DNA, 15 bp, Homo sapiens
gatcacttgaggctg

SEQ ID NO: 470746 - DNA, 15 bp, Homo sapiens
ggatcacttgaggct

SEQ ID NO: 470747 - DNA, 15 bp, Homo sapiens
aaggcaggaggatca

SEQ ID NO: 470748 - DNA, 15 bp, Homo sapiens
caaggcaggaggatc

SEQ ID NO: 470749 - DNA, 15 bp, Homo sapiens
ccaaggcaggaggat

SEQ ID NO: 470750 - DNA, 15 bp, Homo sapiens
accaaggcaggagga

SEQ ID NO: 470751 - DNA, 15 bp, Homo sapiens
aaccaaggcaggagg

SEQ ID NO: 470752 - DNA, 15 bp, Homo sapiens
aaaccaaggcaggag

SEQ ID NO: 470753 - DNA, 15 bp, Homo sapiens
gaaaccaaggcagga

SEQ ID NO: 470754 - DNA, 15 bp, Homo sapiens
ggaaaccaaggcagg

SEQ ID NO: 470755 - DNA, 15 bp, Homo sapiens
gggaaaccaaggcag

SEQ ID NO: 470756 - DNA, 15 bp, Homo sapiens
tgggaaaccaaggca

SEQ ID NO: 470757 - DNA, 15 bp, Homo sapiens
ttgggaaaccaaggc

SEQ ID NO: 470758 - DNA, 15 bp, Homo sapiens
tttgggaaaccaagg

SEQ ID NO: 470759 - DNA, 15 bp, Homo sapiens
ctttgggaaaccaag

SEQ ID NO: 470760 - DNA, 15 bp, Homo sapiens
actttgggaaaccaa

SEQ ID NO: 470761 - DNA, 15 bp, Homo sapiens
cactttgggaaacca

SEQ ID NO: 470762 - DNA, 15 bp, Homo sapiens
gcactttgggaaacc

SEQ ID NO: 470763 - DNA, 15 bp, Homo sapiens
agcactttgggaaac

SEQ ID NO: 470764 - DNA, 15 bp, Homo sapiens
tagcactttgggaaa

SEQ ID NO: 470765 - DNA, 15 bp, Homo sapiens
ctagcactttgggaa

SEQ ID NO: 470766 - DNA, 15 bp, Homo sapiens
atcctagcactttgg

SEQ ID NO: 470767 - DNA, 15 bp, Homo sapiens
aatcctagcactttg

SEQ ID NO: 470768 - DNA, 15 bp, Homo sapiens
taatcctagcacttt

SEQ ID NO: 470769 - DNA, 15 bp, Homo sapiens
ataatcctagcactt

SEQ ID NO: 470770 - DNA, 15 bp, Homo sapiens
tataatcctagcact

SEQ ID NO: 470771 - DNA, 15 bp, Homo sapiens
ctataatcctagcac

SEQ ID NO: 470772 - DNA, 15 bp, Homo sapiens
cctataatcctagca

SEQ ID NO: 470773 - DNA, 15 bp, Homo sapiens
acctataatcctagc

SEQ ID NO: 470774 - DNA, 15 bp, Homo sapiens
cacctataatcctag

SEQ ID NO: 470775 - DNA, 15 bp, Homo sapiens
ccacctataatccta

SEQ ID NO: 470776 - DNA, 15 bp, Homo sapiens
cccacctataatcct

SEQ ID NO: 470777 - DNA, 15 bp, Homo sapiens
tcccacctataatcc

SEQ ID NO: 470778 - DNA, 15 bp, Homo sapiens
ctcccacctataatc

SEQ ID NO: 470779 - DNA, 15 bp, Homo sapiens
gctcccacctataat

SEQ ID NO: 470780 - DNA, 15 bp, Homo sapiens
agctcccacctataa

SEQ ID NO: 470781 - DNA, 15 bp, Homo sapiens
tagctcccacctata

SEQ ID NO: 470782 - DNA, 15 bp, Homo sapiens
gtagctcccacctat

SEQ ID NO: 470783 - DNA, 15 bp, Homo sapiens
ggtagctcccaccta

SEQ ID NO: 470784 - DNA, 15 bp, Homo sapiens
tggtagctcccacct

SEQ ID NO: 470785 - DNA, 15 bp, Homo sapiens
atggtagctcccacc

SEQ ID NO: 470786 - DNA, 15 bp, Homo sapiens
catggtagctcccac

SEQ ID NO: 470787 - DNA, 15 bp, Homo sapiens
gcatggtagctccca

SEQ ID NO: 470788 - DNA, 15 bp, Homo sapiens
ggcatggtagctccc

SEQ ID NO: 470789 - DNA, 15 bp, Homo sapiens
aggcatggtagctcc

SEQ ID NO: 470790 - DNA, 15 bp, Homo sapiens
taggcatggtagctc

SEQ ID NO: 470791 - DNA, 15 bp, Homo sapiens
ctaggcatggtagct

SEQ ID NO: 470792 - DNA, 15 bp, Homo sapiens
gctaggcatggtagc

SEQ ID NO: 470793 - DNA, 15 bp, Homo sapiens
ggctaggcatggtag

SEQ ID NO: 470794 - DNA, 15 bp, Homo sapiens
gggctaggcatggta

SEQ ID NO: 470795 - DNA, 15 bp, Homo sapiens
tgggctaggcatggt

SEQ ID NO: 470796 - DNA, 15 bp, Homo sapiens
ttgggctaggcatgg

SEQ ID NO: 470797 - DNA, 15 bp, Homo sapiens
cttgggctaggcatg

SEQ ID NO: 470798 - DNA, 15 bp, Homo sapiens
gcttgggctaggcat

SEQ ID NO: 470799 - DNA, 15 bp, Homo sapiens
ggcttgggctaggca

SEQ ID NO: 470800 - DNA, 15 bp, Homo sapiens
aggcttgggctaggc

SEQ ID NO: 470801 - DNA, 15 bp, Homo sapiens
caggcttgggctagg

SEQ ID NO: 470802 - DNA, 15 bp, Homo sapiens
acaggcttgggctag

SEQ ID NO: 470803 - DNA, 15 bp, Homo sapiens
tacaggcttgggcta

SEQ ID NO: 470804 - DNA, 15 bp, Homo sapiens
ttacaggcttgggct

SEQ ID NO: 470805 - DNA, 15 bp, Homo sapiens
attacaggcttgggc

SEQ ID NO: 470806 - DNA, 15 bp, Homo sapiens
aattacaggcttggg

SEQ ID NO: 470807 - DNA, 15 bp, Homo sapiens
aaattacaggcttgg

SEQ ID NO: 470808 - DNA, 15 bp, Homo sapiens
aaaattacaggcttg

SEQ ID NO: 470809 - DNA, 15 bp, Homo sapiens
aaaaattacaggctt

SEQ ID NO: 470810 - DNA, 15 bp, Homo sapiens
aaaaaattacaggct

SEQ ID NO: 470811 - DNA, 15 bp, Homo sapiens
aaaaaaattacaggc

SEQ ID NO: 470812 - DNA, 15 bp, Homo sapiens
aaaaaaaattacagg

SEQ ID NO: 470813 - DNA, 15 bp, Homo sapiens
aaaaaaaaattacag

SEQ ID NO: 470814 - DNA, 15 bp, Homo sapiens
aaaaaaaaaattaca

SEQ ID NO: 470815 - DNA, 15 bp, Homo sapiens
aaaaaaaaaaattac

SEQ ID NO: 470816 - DNA, 15 bp, Homo sapiens
aagtgaaactccatc

SEQ ID NO: 470817 - DNA, 15 bp, Homo sapiens
aaagtgaaactccat

SEQ ID NO: 470818 - DNA, 15 bp, Homo sapiens
aaaagtgaaactcca

SEQ ID NO: 470819 - DNA, 15 bp, Homo sapiens
caaaagtgaaactcc

SEQ ID NO: 470820 - DNA, 15 bp, Homo sapiens
acaaaagtgaaactc

SEQ ID NO: 470821 - DNA, 15 bp, Homo sapiens
aacaaaagtgaaact

SEQ ID NO: 470822 - DNA, 15 bp, Homo sapiens
caacaaaagtgaaac

SEQ ID NO: 470823 - DNA, 15 bp, Homo sapiens
gcaacaaaagtgaaa

SEQ ID NO: 470824 - DNA, 15 bp, Homo sapiens
agcaacaaaagtgaa

SEQ ID NO: 470825 - DNA, 15 bp, Homo sapiens
gagcaacaaaagtga

SEQ ID NO: 470826 - DNA, 15 bp, Homo sapiens
tgagcaacaaaagtg

SEQ ID NO: 470827 - DNA, 15 bp, Homo sapiens
ctgagcaacaaaagt

SEQ ID NO: 470828 - DNA, 15 bp, Homo sapiens
cctgagcaacaaaag

SEQ ID NO: 470829 - DNA, 15 bp, Homo sapiens
gcctgagcaacaaaa

SEQ ID NO: 470830 - DNA, 15 bp, Homo sapiens
agcctgagcaacaaa

SEQ ID NO: 470831 - DNA, 15 bp, Homo sapiens
cagcctgagcaacaa

SEQ ID NO: 470832 - DNA, 15 bp, Homo sapiens
ccagcctgagcaaca

SEQ ID NO: 470833 - DNA, 15 bp, Homo sapiens
tccagcctgagcaac

SEQ ID NO: 470834 - DNA, 15 bp, Homo sapiens
ctccagcctgagcaa

SEQ ID NO: 470835 - DNA, 15 bp, Homo sapiens
actccagcctgagca

SEQ ID NO: 470836 - DNA, 15 bp, Homo sapiens
cactccagcctgagc

SEQ ID NO: 470837 - DNA, 15 bp, Homo sapiens
gcactccagcctgag

SEQ ID NO: 470838 - DNA, 15 bp, Homo sapiens
atgcactccagcctg

SEQ ID NO: 470839 - DNA, 15 bp, Homo sapiens
catgcactccagcct

SEQ ID NO: 470840 - DNA, 15 bp, Homo sapiens
ccatgcactccagcc

SEQ ID NO: 470841 - DNA, 15 bp, Homo sapiens
gccatgcactccagc

SEQ ID NO: 470842 - DNA, 15 bp, Homo sapiens
cgccatgcactccag

SEQ ID NO: 470843 - DNA, 15 bp, Homo sapiens
gcgccatgcactcca

SEQ ID NO: 470844 - DNA, 15 bp, Homo sapiens
tgcgccatgcactcc

SEQ ID NO: 470845 - DNA, 15 bp, Homo sapiens
ctgcgccatgcactc

SEQ ID NO: 470846 - DNA, 15 bp, Homo sapiens
actgcgccatgcact

SEQ ID NO: 470847 - DNA, 15 bp, Homo sapiens
gactgcgccatgcac

SEQ ID NO: 470848 - DNA, 15 bp, Homo sapiens
agactgcgccatgca

SEQ ID NO: 470849 - DNA, 15 bp, Homo sapiens
aagactgcgccatgc

SEQ ID NO: 470850 - DNA, 15 bp, Homo sapiens
caagactgcgccatg

SEQ ID NO: 470851 - DNA, 15 bp, Homo sapiens
ccaagactgcgccat

SEQ ID NO: 470852 - DNA, 15 bp, Homo sapiens
gccaagactgcgcca

SEQ ID NO: 470853 - DNA, 15 bp, Homo sapiens
agccaagactgcgcc

SEQ ID NO: 470854 - DNA, 15 bp, Homo sapiens
gagccaagactgcgc

SEQ ID NO: 470855 - DNA, 15 bp, Homo sapiens
tgagccaagactgcg

SEQ ID NO: 470856 - DNA, 15 bp, Homo sapiens
gtgagccaagactgc

SEQ ID NO: 470857 - DNA, 15 bp, Homo sapiens
ggtgagccaagactg

SEQ ID NO: 470858 - DNA, 15 bp, Homo sapiens
tggtgagccaagact

SEQ ID NO: 470859 - DNA, 15 bp, Homo sapiens
gtggtgagccaagac

SEQ ID NO: 470860 - DNA, 15 bp, Homo sapiens
tgtggtgagccaaga

SEQ ID NO: 470861 - DNA, 15 bp, Homo sapiens
ttgtggtgagccaag

SEQ ID NO: 470862 - DNA, 15 bp, Homo sapiens
gttgtggtgagccaa

SEQ ID NO: 470863 - DNA, 15 bp, Homo sapiens
ggttgtggtgagcca

SEQ ID NO: 470864 - DNA, 15 bp, Homo sapiens
tggaggttgtggtga

SEQ ID NO: 470865 - DNA, 15 bp, Homo sapiens
gtggaggttgtggtg

SEQ ID NO: 470866 - DNA, 15 bp, Homo sapiens
ggtggaggttgtggt

SEQ ID NO: 470867 - DNA, 15 bp, Homo sapiens
aggtggaggttgtgg

SEQ ID NO: 470868 - DNA, 15 bp, Homo sapiens
gaggtggaggttgtg

SEQ ID NO: 470869 - DNA, 15 bp, Homo sapiens
ctgaacccgggaggt

SEQ ID NO: 470870 - DNA, 15 bp, Homo sapiens
cctgaacccgggagg

SEQ ID NO: 470871 - DNA, 15 bp, Homo sapiens
gcctgaacccgggag

SEQ ID NO: 470872 - DNA, 15 bp, Homo sapiens
cgcctgaacccggga

SEQ ID NO: 470873 - DNA, 15 bp, Homo sapiens
tcgcctgaacccggg

SEQ ID NO: 470874 - DNA, 15 bp, Homo sapiens
atcgcctgaacccgg

SEQ ID NO: 470875 - DNA, 15 bp, Homo sapiens
aatcgcctgaacccg

SEQ ID NO: 470876 - DNA, 15 bp, Homo sapiens
gaatcgcctgaaccc

SEQ ID NO: 470877 - DNA, 15 bp, Homo sapiens
agaatcgcctgaacc

SEQ ID NO: 470878 - DNA, 15 bp, Homo sapiens
gagaatcgcctgaac

SEQ ID NO: 470879 - DNA, 15 bp, Homo sapiens
ggagaatcgcctgaa

SEQ ID NO: 470880 - DNA, 15 bp, Homo sapiens
aggagaatcgcctga

SEQ ID NO: 470881 - DNA, 15 bp, Homo sapiens
aaggagaatcgcctg

SEQ ID NO: 470882 - DNA, 15 bp, Homo sapiens
gaaggagaatcgcct

SEQ ID NO: 470883 - DNA, 15 bp, Homo sapiens
ggaaggagaatcgcc

SEQ ID NO: 470884 - DNA, 15 bp, Homo sapiens
aggaaggagaatcgc

SEQ ID NO: 470885 - DNA, 15 bp, Homo sapiens
gaggaaggagaatcg

SEQ ID NO: 470886 - DNA, 15 bp, Homo sapiens
tgaggaaggagaatc

SEQ ID NO: 470887 - DNA, 15 bp, Homo sapiens
ctgaggaaggagaat

SEQ ID NO: 470888 - DNA, 15 bp, Homo sapiens
gctgaggaaggagaa

SEQ ID NO: 470889 - DNA, 15 bp, Homo sapiens
ggctgaggaaggaga

SEQ ID NO: 470890 - DNA, 15 bp, Homo sapiens
aggctgaggaaggag

SEQ ID NO: 470891 - DNA, 15 bp, Homo sapiens
gaggctgaggaagga

SEQ ID NO: 470892 - DNA, 15 bp, Homo sapiens
ggaggctgaggaagg

SEQ ID NO: 470893 - DNA, 15 bp, Homo sapiens
gggaggctgaggaag

SEQ ID NO: 470894 - DNA, 15 bp, Homo sapiens
cgggaggctgaggaa

SEQ ID NO: 470895 - DNA, 15 bp, Homo sapiens
tcgggaggctgagga

SEQ ID NO: 470896 - DNA, 15 bp, Homo sapiens
ttggtggtgcatgcc

SEQ ID NO: 470897 - DNA, 15 bp, Homo sapiens
cttggtggtgcatgc

SEQ ID NO: 470898 - DNA, 15 bp, Homo sapiens
gcttggtggtgcatg

SEQ ID NO: 470899 - DNA, 15 bp, Homo sapiens
agcttggtggtgcat

SEQ ID NO: 470900 - DNA, 15 bp, Homo sapiens
gagcttggtggtgca

SEQ ID NO: 470901 - DNA, 15 bp, Homo sapiens
tgagcttggtggtgc

SEQ ID NO: 470902 - DNA, 15 bp, Homo sapiens
ctgagcttggtggtg

SEQ ID NO: 470903 - DNA, 15 bp, Homo sapiens
gctgagcttggtggt

SEQ ID NO: 470904 - DNA, 15 bp, Homo sapiens
agctgagcttggtgg

SEQ ID NO: 470905 - DNA, 15 bp, Homo sapiens
tagctgagcttggtg

SEQ ID NO: 470906 - DNA, 15 bp, Homo sapiens
ttagctgagcttggt

SEQ ID NO: 470907 - DNA, 15 bp, Homo sapiens
gttagctgagcttgg

SEQ ID NO: 470908 - DNA, 15 bp, Homo sapiens
agttagctgagcttg

SEQ ID NO: 470909 - DNA, 15 bp, Homo sapiens
aagttagctgagctt

SEQ ID NO: 470910 - DNA, 15 bp, Homo sapiens
aaagttagctgagct

SEQ ID NO: 470911 - DNA, 15 bp, Homo sapiens
caaagttagctgagc

SEQ ID NO: 470912 - DNA, 15 bp, Homo sapiens
acaaagttagctgag

SEQ ID NO: 470913 - DNA, 15 bp, Homo sapiens
tacaaagttagctga

SEQ ID NO: 470914 - DNA, 15 bp, Homo sapiens
atacaaagttagctg

SEQ ID NO: 470915 - DNA, 15 bp, Homo sapiens
aatacaaagttagct

SEQ ID NO: 470916 - DNA, 15 bp, Homo sapiens
aaatacaaagttagc

SEQ ID NO: 470917 - DNA, 15 bp, Homo sapiens
aaaatacaaagttag

SEQ ID NO: 470918 - DNA, 15 bp, Homo sapiens
aaaaatacaaagtta

SEQ ID NO: 470919 - DNA, 15 bp, Homo sapiens
taaaaatacaaagtt

SEQ ID NO: 470920 - DNA, 15 bp, Homo sapiens
ctaaaaatacaaagt

SEQ ID NO: 470921 - DNA, 15 bp, Homo sapiens
actaaaaatacaaag

SEQ ID NO: 470922 - DNA, 15 bp, Homo sapiens
acccatctctactaa

SEQ ID NO: 470923 - DNA, 15 bp, Homo sapiens
aacccatctctacta

SEQ ID NO: 470924 - DNA, 15 bp, Homo sapiens
aaacccatctctact

SEQ ID NO: 470925 - DNA, 15 bp, Homo sapiens
gaaacccatctctac

SEQ ID NO: 470926 - DNA, 15 bp, Homo sapiens
agaaacccatctcta

SEQ ID NO: 470927 - DNA, 15 bp, Homo sapiens
gagaaacccatctct

SEQ ID NO: 470928 - DNA, 15 bp, Homo sapiens
ggagaaacccatctc

SEQ ID NO: 470929 - DNA, 15 bp, Homo sapiens
cggagaaacccatct

SEQ ID NO: 470930 - DNA, 15 bp, Homo sapiens
acggagaaacccatc

SEQ ID NO: 470931 - DNA, 15 bp, Homo sapiens
cacggagaaacccat

SEQ ID NO: 470932 - DNA, 15 bp, Homo sapiens
acacggagaaaccca

SEQ ID NO: 470933 - DNA, 15 bp, Homo sapiens
gacacggagaaaccc

SEQ ID NO: 470934 - DNA, 15 bp, Homo sapiens
cgacacggagaaacc

SEQ ID NO: 470935 - DNA, 15 bp, Homo sapiens
ccgacacggagaaac

SEQ ID NO: 470936 - DNA, 15 bp, Homo sapiens
accgacacggagaaa

SEQ ID NO: 470937 - DNA, 15 bp, Homo sapiens
gaccgacacggagaa

SEQ ID NO: 470938 - DNA, 15 bp, Homo sapiens
tgaccgacacggaga

SEQ ID NO: 470939 - DNA, 15 bp, Homo sapiens
ctgaccgacacggag

SEQ ID NO: 470940 - DNA, 15 bp, Homo sapiens
cctgaccgacacgga

SEQ ID NO: 470941 - DNA, 15 bp, Homo sapiens
gcctgaccgacacgg

SEQ ID NO: 470942 - DNA, 15 bp, Homo sapiens
agcctgaccgacacg

SEQ ID NO: 470943 - DNA, 15 bp, Homo sapiens
cagcctgaccgacac

SEQ ID NO: 470944 - DNA, 15 bp, Homo sapiens
ccagcctgaccgaca

SEQ ID NO: 470945 - DNA, 15 bp, Homo sapiens
accagcctgaccgac

SEQ ID NO: 470946 - DNA, 15 bp, Homo sapiens
gaccagcctgaccga

SEQ ID NO: 470947 - DNA, 15 bp, Homo sapiens
agaccagcctgaccg

SEQ ID NO: 470948 - DNA, 15 bp, Homo sapiens
tacctgaggtcagga

SEQ ID NO: 470949 - DNA, 15 bp, Homo sapiens
ttacctgaggtcagg

SEQ ID NO: 470950 - DNA, 15 bp, Homo sapiens
attacctgaggtcag

SEQ ID NO: 470951 - DNA, 15 bp, Homo sapiens
gattacctgaggtca

SEQ ID NO: 470952 - DNA, 15 bp, Homo sapiens
agattacctgaggtc

SEQ ID NO: 470953 - DNA, 15 bp, Homo sapiens
cagattacctgaggt

SEQ ID NO: 470954 - DNA, 15 bp, Homo sapiens
gcagattacctgagg

SEQ ID NO: 470955 - DNA, 15 bp, Homo sapiens
ggcagattacctgag

SEQ ID NO: 470956 - DNA, 15 bp, Homo sapiens
gggcagattacctga

SEQ ID NO: 470957 - DNA, 15 bp, Homo sapiens
tgggcagattacctg

SEQ ID NO: 470958 - DNA, 15 bp, Homo sapiens
gtgggcagattacct

SEQ ID NO: 470959 - DNA, 15 bp, Homo sapiens
ggtgggcagattacc

SEQ ID NO: 470960 - DNA, 15 bp, Homo sapiens
aggtgggcagattac

SEQ ID NO: 470961 - DNA, 15 bp, Homo sapiens
aaggtgggcagatta

SEQ ID NO: 470962 - DNA, 15 bp, Homo sapiens
caaggtgggcagatt

SEQ ID NO: 470963 - DNA, 15 bp, Homo sapiens
ccaaggtgggcagat

SEQ ID NO: 470964 - DNA, 15 bp, Homo sapiens
gccaaggtgggcaga

SEQ ID NO: 470965 - DNA, 15 bp, Homo sapiens
ggccaaggtgggcag

SEQ ID NO: 470966 - DNA, 15 bp, Homo sapiens
gatgcctgtaatccc

SEQ ID NO: 470967 - DNA, 15 bp, Homo sapiens
tgatgcctgtaatcc

SEQ ID NO: 470968 - DNA, 15 bp, Homo sapiens
ctgatgcctgtaatc

SEQ ID NO: 470969 - DNA, 15 bp, Homo sapiens
gctgatgcctgtaat

SEQ ID NO: 470970 - DNA, 15 bp, Homo sapiens
ggctgatgcctgtaa

SEQ ID NO: 470971 - DNA, 15 bp, Homo sapiens
tggctgatgcctgta

SEQ ID NO: 470972 - DNA, 15 bp, Homo sapiens
gtggctgatgcctgt

SEQ ID NO: 470973 - DNA, 15 bp, Homo sapiens
ggtggctgatgcctg

SEQ ID NO: 470974 - DNA, 15 bp, Homo sapiens
cggtggctgatgcct

SEQ ID NO: 470975 - DNA, 15 bp, Homo sapiens
gcggtggctgatgcc

SEQ ID NO: 470976 - DNA, 15 bp, Homo sapiens
tgcggtggctgatgc

SEQ ID NO: 470977 - DNA, 15 bp, Homo sapiens
gtgcggtggctgatg

SEQ ID NO: 470978 - DNA, 15 bp, Homo sapiens
ggtgcggtggctgat

SEQ ID NO: 470979 - DNA, 15 bp, Homo sapiens
aggtgcggtggctga

SEQ ID NO: 470980 - DNA, 15 bp, Homo sapiens
caggtgcggtggctg

SEQ ID NO: 470981 - DNA, 15 bp, Homo sapiens
tgccaggtgcggtgg

SEQ ID NO: 470982 - DNA, 15 bp, Homo sapiens
gtgccaggtgcggtg

SEQ ID NO: 470983 - DNA, 15 bp, Homo sapiens
cgtgccaggtgcggt

SEQ ID NO: 470984 - DNA, 15 bp, Homo sapiens
tcgtgccaggtgcgg

SEQ ID NO: 470985 - DNA, 15 bp, Homo sapiens
ttcgtgccaggtgcg

SEQ ID NO: 470986 - DNA, 15 bp, Homo sapiens
gttcgtgccaggtgc

SEQ ID NO: 470987 - DNA, 15 bp, Homo sapiens
ggttcgtgccaggtg

SEQ ID NO: 470988 - DNA, 15 bp, Homo sapiens
aggttcgtgccaggt

SEQ ID NO: 470989 - DNA, 15 bp, Homo sapiens
caggttcgtgccagg

SEQ ID NO: 470990 - DNA, 15 bp, Homo sapiens
acaggttcgtgccag

SEQ ID NO: 470991 - DNA, 15 bp, Homo sapiens
tacaggttcgtgcca

SEQ ID NO: 470992 - DNA, 15 bp, Homo sapiens
ttacaggttcgtgcc

SEQ ID NO: 470993 - DNA, 15 bp, Homo sapiens
attacaggttcgtgc

SEQ ID NO: 470994 - DNA, 15 bp, Homo sapiens
aattacaggttcgtg

SEQ ID NO: 470995 - DNA, 15 bp, Homo sapiens
aaattacaggttcgt

SEQ ID NO: 470996 - DNA, 15 bp, Homo sapiens
aaaattacaggttcg

SEQ ID NO: 470997 - DNA, 15 bp, Homo sapiens
aaaaattacaggttc

SEQ ID NO: 470998 - DNA, 15 bp, Homo sapiens
taaaaattacaggtt

SEQ ID NO: 470999 - DNA, 15 bp, Homo sapiens
ttaaaaattacaggt

SEQ ID NO: 471000 - DNA, 15 bp, Homo sapiens
cttaaaaattacagg

SEQ ID NO: 471001 - DNA, 15 bp, Homo sapiens
acttaaaaattacag

SEQ ID NO: 471002 - DNA, 15 bp, Homo sapiens
aacttaaaaattaca

SEQ ID NO: 471003 - DNA, 15 bp, Homo sapiens
aaacttaaaaattac

SEQ ID NO: 471004 - DNA, 15 bp, Homo sapiens
gaaacttaaaaatta

SEQ ID NO: 471005 - DNA, 15 bp, Homo sapiens
tgaaacttaaaaatt

SEQ ID NO: 471006 - DNA, 15 bp, Homo sapiens
atgaaacttaaaaat

SEQ ID NO: 471007 - DNA, 15 bp, Homo sapiens
tatgaaacttaaaaa

SEQ ID NO: 471008 - DNA, 15 bp, Homo sapiens
atatgaaacttaaaa

SEQ ID NO: 471009 - DNA, 15 bp, Homo sapiens
catatgaaacttaaa

SEQ ID NO: 471010 - DNA, 15 bp, Homo sapiens
gcatatgaaacttaa

SEQ ID NO: 471011 - DNA, 15 bp, Homo sapiens
agcatatgaaactta

SEQ ID NO: 471012 - DNA, 15 bp, Homo sapiens
tagcatatgaaactt

SEQ ID NO: 471013 - DNA, 15 bp, Homo sapiens
atagcatatgaaact

SEQ ID NO: 471014 - DNA, 15 bp, Homo sapiens
aatagcatatgaaac

SEQ ID NO: 471015 - DNA, 15 bp, Homo sapiens
aaatagcatatgaaa

SEQ ID NO: 471016 - DNA, 15 bp, Homo sapiens
taaatagcatatgaa

SEQ ID NO: 471017 - DNA, 15 bp, Homo sapiens
ataaatagcatatga

SEQ ID NO: 471018 - DNA, 15 bp, Homo sapiens
aataaatagcatatg

SEQ ID NO: 471019 - DNA, 15 bp, Homo sapiens
aaataaatagcatat

SEQ ID NO: 471020 - DNA, 15 bp, Homo sapiens
aaaataaatagcata

SEQ ID NO: 471021 - DNA, 15 bp, Homo sapiens
aaaaataaatagcat

SEQ ID NO: 471022 - DNA, 15 bp, Homo sapiens
aaaaaataaatagca

SEQ ID NO: 471023 - DNA, 15 bp, Homo sapiens
caaaaaataaatagc

SEQ ID NO: 471024 - DNA, 15 bp, Homo sapiens
acaaaaaataaatag

SEQ ID NO: 471025 - DNA, 15 bp, Homo sapiens
aacaaaaaataaata

SEQ ID NO: 471026 - DNA, 15 bp, Homo sapiens
taacaaaaaataaat

SEQ ID NO: 471027 - DNA, 15 bp, Homo sapiens
ataacaaaaaataaa

SEQ ID NO: 471028 - DNA, 15 bp, Homo sapiens
aataacaaaaaataa

SEQ ID NO: 471029 - DNA, 15 bp, Homo sapiens
aaataacaaaaaata

SEQ ID NO: 471030 - DNA, 15 bp, Homo sapiens
gaaataacaaaaaat

SEQ ID NO: 471031 - DNA, 15 bp, Homo sapiens
agaaataacaaaaaa

SEQ ID NO: 471032 - DNA, 15 bp, Homo sapiens
aagaaataacaaaaa

SEQ ID NO: 471033 - DNA, 15 bp, Homo sapiens
aaagaaataacaaaa

SEQ ID NO: 471034 - DNA, 15 bp, Homo sapiens
taaagaaataacaaa

SEQ ID NO: 471035 - DNA, 15 bp, Homo sapiens
ttaaagaaataacaa

SEQ ID NO: 471036 - DNA, 15 bp, Homo sapiens
attaaagaaataaca

SEQ ID NO: 471037 - DNA, 15 bp, Homo sapiens
aattaaagaaataac

SEQ ID NO: 471038 - DNA, 15 bp, Homo sapiens
gaattaaagaaataa

SEQ ID NO: 471039 - DNA, 15 bp, Homo sapiens
tgaattaaagaaata

SEQ ID NO: 471040 - DNA, 15 bp, Homo sapiens
atgaattaaagaaat

SEQ ID NO: 471041 - DNA, 15 bp, Homo sapiens
aatgaattaaagaaa

SEQ ID NO: 471042 - DNA, 15 bp, Homo sapiens
gaatgaattaaagaa

SEQ ID NO: 471043 - DNA, 15 bp, Homo sapiens
tgaatgaattaaaga

SEQ ID NO: 471044 - DNA, 15 bp, Homo sapiens
atgaatgaattaaag

SEQ ID NO: 471045 - DNA, 15 bp, Homo sapiens
aatgaatgaattaaa

SEQ ID NO: 471046 - DNA, 15 bp, Homo sapiens
gaatgaatgaattaa

SEQ ID NO: 471047 - DNA, 15 bp, Homo sapiens
tgaatgaatgaatta

SEQ ID NO: 471048 - DNA, 15 bp, Homo sapiens
atgaatgaatgaatt

SEQ ID NO: 471049 - DNA, 15 bp, Homo sapiens
aatgaatgaatgaat

SEQ ID NO: 471050 - DNA, 15 bp, Homo sapiens
aaatgaatgaatgaa

SEQ ID NO: 471051 - DNA, 15 bp, Homo sapiens
taaatgaatgaatga

SEQ ID NO: 471052 - DNA, 15 bp, Homo sapiens
ataaatgaatgaatg

SEQ ID NO: 471053 - DNA, 15 bp, Homo sapiens
aataaatgaatgaat

SEQ ID NO: 471054 - DNA, 15 bp, Homo sapiens
atgaataaatgaatg

SEQ ID NO: 471055 - DNA, 15 bp, Homo sapiens
aatgaataaatgaat

SEQ ID NO: 471056 - DNA, 15 bp, Homo sapiens
gaatgaataaatgaa

SEQ ID NO: 471057 - DNA, 15 bp, Homo sapiens
cgaatgaataaatga

SEQ ID NO: 471058 - DNA, 15 bp, Homo sapiens
tcgaatgaataaatg

SEQ ID NO: 471059 - DNA, 15 bp, Homo sapiens
ctcgaatgaataaat

SEQ ID NO: 471060 - DNA, 15 bp, Homo sapiens
tctcgaatgaataaa

SEQ ID NO: 471061 - DNA, 15 bp, Homo sapiens
atctcgaatgaataa

SEQ ID NO: 471062 - DNA, 15 bp, Homo sapiens
catctcgaatgaata

SEQ ID NO: 471063 - DNA, 15 bp, Homo sapiens
ccatctcgaatgaat

SEQ ID NO: 471064 - DNA, 15 bp, Homo sapiens
cccatctcgaatgaa

SEQ ID NO: 471065 - DNA, 15 bp, Homo sapiens
ccccatctcgaatga

SEQ ID NO: 471066 - DNA, 15 bp, Homo sapiens
gccccatctcgaatg

SEQ ID NO: 471067 - DNA, 15 bp, Homo sapiens
ggccccatctcgaat

SEQ ID NO: 471068 - DNA, 15 bp, Homo sapiens
aggccccatctcgaa

SEQ ID NO: 471069 - DNA, 15 bp, Homo sapiens
gaggccccatctcga

SEQ ID NO: 471070 - DNA, 15 bp, Homo sapiens
tgaggccccatctcg

SEQ ID NO: 471071 - DNA, 15 bp, Homo sapiens
gtgaggccccatctc

SEQ ID NO: 471072 - DNA, 15 bp, Homo sapiens
agtgaggccccatct

SEQ ID NO: 471073 - DNA, 15 bp, Homo sapiens
tagtgaggccccatc

SEQ ID NO: 471074 - DNA, 15 bp, Homo sapiens
atagtgaggccccat

SEQ ID NO: 471075 - DNA, 15 bp, Homo sapiens
catagtgaggcccca

SEQ ID NO: 471076 - DNA, 15 bp, Homo sapiens
acatagtgaggcccc

SEQ ID NO: 471077 - DNA, 15 bp, Homo sapiens
aacatagtgaggccc

SEQ ID NO: 471078 - DNA, 15 bp, Homo sapiens
caacatagtgaggcc

SEQ ID NO: 471079 - DNA, 15 bp, Homo sapiens
tcaacatagtgaggc

SEQ ID NO: 471080 - DNA, 15 bp, Homo sapiens
gtcaacatagtgagg

SEQ ID NO: 471081 - DNA, 15 bp, Homo sapiens
agtcaacatagtgag

SEQ ID NO: 471082 - DNA, 15 bp, Homo sapiens
tagtcaacatagtga

SEQ ID NO: 471083 - DNA, 15 bp, Homo sapiens
ctagtcaacatagtg

SEQ ID NO: 471084 - DNA, 15 bp, Homo sapiens
cctagtcaacatagt

SEQ ID NO: 471085 - DNA, 15 bp, Homo sapiens
gcctagtcaacatag

SEQ ID NO: 471086 - DNA, 15 bp, Homo sapiens
agcctagtcaacata

SEQ ID NO: 471087 - DNA, 15 bp, Homo sapiens
tagcctagtcaacat

SEQ ID NO: 471088 - DNA, 15 bp, Homo sapiens
ctagcctagtcaaca

SEQ ID NO: 471089 - DNA, 15 bp, Homo sapiens
actagcctagtcaac

SEQ ID NO: 471090 - DNA, 15 bp, Homo sapiens
aactagcctagtcaa

SEQ ID NO: 471091 - DNA, 15 bp, Homo sapiens
aaactagcctagtca

SEQ ID NO: 471092 - DNA, 15 bp, Homo sapiens
aaaactagcctagtc

SEQ ID NO: 471093 - DNA, 15 bp, Homo sapiens
caaaactagcctagt

SEQ ID NO: 471094 - DNA, 15 bp, Homo sapiens
tcaaaactagcctag

SEQ ID NO: 471095 - DNA, 15 bp, Homo sapiens
ttcaaaactagccta

SEQ ID NO: 471096 - DNA, 15 bp, Homo sapiens
gttcaaaactagcct

SEQ ID NO: 471097 - DNA, 15 bp, Homo sapiens
agttcaaaactagcc

SEQ ID NO: 471098 - DNA, 15 bp, Homo sapiens
gagttcaaaactagc

SEQ ID NO: 471099 - DNA, 15 bp, Homo sapiens
ggagttcaaaactag

SEQ ID NO: 471100 - DNA, 15 bp, Homo sapiens
aggagttcaaaacta

SEQ ID NO: 471101 - DNA, 15 bp, Homo sapiens
caggagttcaaaact

SEQ ID NO: 471102 - DNA, 15 bp, Homo sapiens
ccaggagttcaaaac

SEQ ID NO: 471103 - DNA, 15 bp, Homo sapiens
gccaggagttcaaaa

SEQ ID NO: 471104 - DNA, 15 bp, Homo sapiens
ggccaggagttcaaa

SEQ ID NO: 471105 - DNA, 15 bp, Homo sapiens
aggccaggagttcaa

SEQ ID NO: 471106 - DNA, 15 bp, Homo sapiens
gaggccaggagttca

SEQ ID NO: 471107 - DNA, 15 bp, Homo sapiens
cttgaggccaggagt

SEQ ID NO: 471108 - DNA, 15 bp, Homo sapiens
gcttgaggccaggag

SEQ ID NO: 471109 - DNA, 15 bp, Homo sapiens
tgcttgaggccagga

SEQ ID NO: 471110 - DNA, 15 bp, Homo sapiens
ctgcttgaggccagg

SEQ ID NO: 471111 - DNA, 15 bp, Homo sapiens
actgcttgaggccag

SEQ ID NO: 471112 - DNA, 15 bp, Homo sapiens
gactgcttgaggcca

SEQ ID NO: 471113 - DNA, 15 bp, Homo sapiens
ggactgcttgaggcc

SEQ ID NO: 471114 - DNA, 15 bp, Homo sapiens
aggactgcttgaggc

SEQ ID NO: 471115 - DNA, 15 bp, Homo sapiens
gaggactgcttgagg

SEQ ID NO: 471116 - DNA, 15 bp, Homo sapiens
ggaggactgcttgag

SEQ ID NO: 471117 - DNA, 15 bp, Homo sapiens
gggaggactgcttga

SEQ ID NO: 471118 - DNA, 15 bp, Homo sapiens
tgggaggactgcttg

SEQ ID NO: 471119 - DNA, 15 bp, Homo sapiens
gtgggaggactgctt

SEQ ID NO: 471120 - DNA, 15 bp, Homo sapiens
agtgggaggactgct

SEQ ID NO: 471121 - DNA, 15 bp, Homo sapiens
aagtgggaggactgc

SEQ ID NO: 471122 - DNA, 15 bp, Homo sapiens
gaagtgggaggactg

SEQ ID NO: 471123 - DNA, 15 bp, Homo sapiens
tgaagtgggaggact

SEQ ID NO: 471124 - DNA, 15 bp, Homo sapiens
ctgaagtgggaggac

SEQ ID NO: 471125 - DNA, 15 bp, Homo sapiens
gctgaagtgggagga

SEQ ID NO: 471126 - DNA, 15 bp, Homo sapiens
ggctgaagtgggagg

SEQ ID NO: 471127 - DNA, 15 bp, Homo sapiens
aggctgaagtgggag

SEQ ID NO: 471128 - DNA, 15 bp, Homo sapiens
aaggctgaagtggga

SEQ ID NO: 471129 - DNA, 15 bp, Homo sapiens
gaaggctgaagtggg

SEQ ID NO: 471130 - DNA, 15 bp, Homo sapiens
ggaaggctgaagtgg

SEQ ID NO: 471131 - DNA, 15 bp, Homo sapiens
gggaaggctgaagtg

SEQ ID NO: 471132 - DNA, 15 bp, Homo sapiens
tgggaaggctgaagt

SEQ ID NO: 471133 - DNA, 15 bp, Homo sapiens
ttgggaaggctgaag

SEQ ID NO: 471134 - DNA, 15 bp, Homo sapiens
cttgggaaggctgaa

SEQ ID NO: 471135 - DNA, 15 bp, Homo sapiens
acttgggaaggctga

SEQ ID NO: 471136 - DNA, 15 bp, Homo sapiens
cacttgggaaggctg

SEQ ID NO: 471137 - DNA, 15 bp, Homo sapiens
gcacttgggaaggct

SEQ ID NO: 471138 - DNA, 15 bp, Homo sapiens
agcacttgggaaggc

SEQ ID NO: 471139 - DNA, 15 bp, Homo sapiens
cagcacttgggaagg

SEQ ID NO: 471140 - DNA, 15 bp, Homo sapiens
tcagcacttgggaag

SEQ ID NO: 471141 - DNA, 15 bp, Homo sapiens
atcagcacttgggaa

SEQ ID NO: 471142 - DNA, 15 bp, Homo sapiens
tatcagcacttggga

SEQ ID NO: 471143 - DNA, 15 bp, Homo sapiens
atatcagcacttggg

SEQ ID NO: 471144 - DNA, 15 bp, Homo sapiens
aatatcagcacttgg

SEQ ID NO: 471145 - DNA, 15 bp, Homo sapiens
taatatcagcacttg

SEQ ID NO: 471146 - DNA, 15 bp, Homo sapiens
ataatatcagcactt

SEQ ID NO: 471147 - DNA, 15 bp, Homo sapiens
tataatatcagcact

SEQ ID NO: 471148 - DNA, 15 bp, Homo sapiens
ctataatatcagcac

SEQ ID NO: 471149 - DNA, 15 bp, Homo sapiens
cctataatatcagca

SEQ ID NO: 471150 - DNA, 15 bp, Homo sapiens
acctataatatcagc

SEQ ID NO: 471151 - DNA, 15 bp, Homo sapiens
cacctataatatcag

SEQ ID NO: 471152 - DNA, 15 bp, Homo sapiens
acacctataatatca

SEQ ID NO: 471153 - DNA, 15 bp, Homo sapiens
cacacctataatatc

SEQ ID NO: 471154 - DNA, 15 bp, Homo sapiens
tcacacctataatat

SEQ ID NO: 471155 - DNA, 15 bp, Homo sapiens
ctcacacctataata

SEQ ID NO: 471156 - DNA, 15 bp, Homo sapiens
gctcacacctataat

SEQ ID NO: 471157 - DNA, 15 bp, Homo sapiens
agctcacacctataa

SEQ ID NO: 471158 - DNA, 15 bp, Homo sapiens
cagctcacacctata

SEQ ID NO: 471159 - DNA, 15 bp, Homo sapiens
gcagctcacacctat

SEQ ID NO: 471160 - DNA, 15 bp, Homo sapiens
agcagctcacaccta

SEQ ID NO: 471161 - DNA, 15 bp, Homo sapiens
tagcagctcacacct

SEQ ID NO: 471162 - DNA, 15 bp, Homo sapiens
gtagcagctcacacc

SEQ ID NO: 471163 - DNA, 15 bp, Homo sapiens
tgtagcagctcacac

SEQ ID NO: 471164 - DNA, 15 bp, Homo sapiens
atgtagcagctcaca

SEQ ID NO: 471165 - DNA, 15 bp, Homo sapiens
gatgtagcagctcac

SEQ ID NO: 471166 - DNA, 15 bp, Homo sapiens
ggatgtagcagctca

SEQ ID NO: 471167 - DNA, 15 bp, Homo sapiens
tggatgtagcagctc

SEQ ID NO: 471168 - DNA, 15 bp, Homo sapiens
ctggatgtagcagct

SEQ ID NO: 471169 - DNA, 15 bp, Homo sapiens
gctggatgtagcagc

SEQ ID NO: 471170 - DNA, 15 bp, Homo sapiens
ggctggatgtagcag

SEQ ID NO: 471171 - DNA, 15 bp, Homo sapiens
aggctggatgtagca

SEQ ID NO: 471172 - DNA, 15 bp, Homo sapiens
aaggctggatgtagc

SEQ ID NO: 471173 - DNA, 15 bp, Homo sapiens
gaaggctggatgtag

SEQ ID NO: 471174 - DNA, 15 bp, Homo sapiens
agaaggctggatgta

SEQ ID NO: 471175 - DNA, 15 bp, Homo sapiens
aagaaggctggatgt

SEQ ID NO: 471176 - DNA, 15 bp, Homo sapiens
aaagaaggctggatg

SEQ ID NO: 471177 - DNA, 15 bp, Homo sapiens
gaaagaaggctggat

SEQ ID NO: 471178 - DNA, 15 bp, Homo sapiens
agaaagaaggctgga

SEQ ID NO: 471179 - DNA, 15 bp, Homo sapiens
aagaaagaaggctgg

SEQ ID NO: 471180 - DNA, 15 bp, Homo sapiens
gaagaaagaaggctg

SEQ ID NO: 471181 - DNA, 15 bp, Homo sapiens
agaagaaagaaggct

SEQ ID NO: 471182 - DNA, 15 bp, Homo sapiens
aagaagaaagaaggc

SEQ ID NO: 471183 - DNA, 15 bp, Homo sapiens
aaagaagaaagaagg

SEQ ID NO: 471184 - DNA, 15 bp, Homo sapiens
aaaagaagaaagaag

SEQ ID NO: 471185 - DNA, 15 bp, Homo sapiens
aaaaagaagaaagaa

SEQ ID NO: 471186 - DNA, 15 bp, Homo sapiens
gaaaaagaagaaaga

SEQ ID NO: 471187 - DNA, 15 bp, Homo sapiens
agaaaaagaagaaag

SEQ ID NO: 471188 - DNA, 15 bp, Homo sapiens
aagaaaaagaagaaa

SEQ ID NO: 471189 - DNA, 15 bp, Homo sapiens
aaagaaaaagaagaa

SEQ ID NO: 471190 - DNA, 15 bp, Homo sapiens
aaaagaaaaagaaga

SEQ ID NO: 471191 - DNA, 15 bp, Homo sapiens
aaaaagaaaaagaag

SEQ ID NO: 471192 - DNA, 15 bp, Homo sapiens
gaaaaagaaaaagaa

SEQ ID NO: 471193 - DNA, 15 bp, Homo sapiens
ggaaaaagaaaaaga

SEQ ID NO: 471194 - DNA, 15 bp, Homo sapiens
tggaaaaagaaaaag

SEQ ID NO: 471195 - DNA, 15 bp, Homo sapiens
atggaaaaagaaaaa

SEQ ID NO: 471196 - DNA, 15 bp, Homo sapiens
catggaaaaagaaaa

SEQ ID NO: 471197 - DNA, 15 bp, Homo sapiens
acatggaaaaagaaa

SEQ ID NO: 471198 - DNA, 15 bp, Homo sapiens
cacatggaaaaagaa

SEQ ID NO: 471199 - DNA, 15 bp, Homo sapiens
gcacatggaaaaaga

SEQ ID NO: 471200 - DNA, 15 bp, Homo sapiens
agcacatggaaaaag

SEQ ID NO: 471201 - DNA, 15 bp, Homo sapiens
tagcacatggaaaaa

SEQ ID NO: 471202 - DNA, 15 bp, Homo sapiens
atagcacatggaaaa

SEQ ID NO: 471203 - DNA, 15 bp, Homo sapiens
aatagcacatggaaa

SEQ ID NO: 471204 - DNA, 15 bp, Homo sapiens
aaatagcacatggaa

SEQ ID NO: 471205 - DNA, 15 bp, Homo sapiens
caaatagcacatgga

SEQ ID NO: 471206 - DNA, 15 bp, Homo sapiens
tcaaatagcacatgg

SEQ ID NO: 471207 - DNA, 15 bp, Homo sapiens
gtcaaatagcacatg

SEQ ID NO: 471208 - DNA, 15 bp, Homo sapiens
tgtcaaatagcacat

SEQ ID NO: 471209 - DNA, 15 bp, Homo sapiens
atgtcaaatagcaca

SEQ ID NO: 471210 - DNA, 15 bp, Homo sapiens
aatgtcaaatagcac

SEQ ID NO: 471211 - DNA, 15 bp, Homo sapiens
aaatgtcaaatagca

SEQ ID NO: 471212 - DNA, 15 bp, Homo sapiens
aaaatgtcaaatagc

SEQ ID NO: 471213 - DNA, 15 bp, Homo sapiens
gaaaatgtcaaatag

SEQ ID NO: 471214 - DNA, 15 bp, Homo sapiens
ggaaaatgtcaaata

SEQ ID NO: 471215 - DNA, 15 bp, Homo sapiens
tggaaaatgtcaaat

SEQ ID NO: 471216 - DNA, 15 bp, Homo sapiens
ttggaaaatgtcaaa

SEQ ID NO: 471217 - DNA, 15 bp, Homo sapiens
cttggaaaatgtcaa

SEQ ID NO: 471218 - DNA, 15 bp, Homo sapiens
ccttggaaaatgtca

SEQ ID NO: 471219 - DNA, 15 bp, Homo sapiens
accttggaaaatgtc

SEQ ID NO: 471220 - DNA, 15 bp, Homo sapiens
taccttggaaaatgt

SEQ ID NO: 471221 - DNA, 15 bp, Homo sapiens
gtaccttggaaaatg

SEQ ID NO: 471222 - DNA, 15 bp, Homo sapiens
ggtaccttggaaaat

SEQ ID NO: 471223 - DNA, 15 bp, Homo sapiens
tggtaccttggaaaa

SEQ ID NO: 471224 - DNA, 15 bp, Homo sapiens
ctggtaccttggaaa

SEQ ID NO: 471225 - DNA, 15 bp, Homo sapiens
gctggtaccttggaa

SEQ ID NO: 471226 - DNA, 15 bp, Homo sapiens
ggctggtaccttgga

SEQ ID NO: 471227 - DNA, 15 bp, Homo sapiens
aggctggtaccttgg

SEQ ID NO: 471228 - DNA, 15 bp, Homo sapiens
gaggctggtaccttg

SEQ ID NO: 471229 - DNA, 15 bp, Homo sapiens
ggaggctggtacctt

SEQ ID NO: 471230 - DNA, 15 bp, Homo sapiens
gggaggctggtacct

SEQ ID NO: 471231 - DNA, 15 bp, Homo sapiens
ggggaggctggtacc

SEQ ID NO: 471232 - DNA, 15 bp, Homo sapiens
aggggaggctggtac

SEQ ID NO: 471233 - DNA, 15 bp, Homo sapiens
aaggggaggctggta

SEQ ID NO: 471234 - DNA, 15 bp, Homo sapiens
gaaggggaggctggt

SEQ ID NO: 471235 - DNA, 15 bp, Homo sapiens
agaaggggaggctgg

SEQ ID NO: 471236 - DNA, 15 bp, Homo sapiens
gagaaggggaggctg

SEQ ID NO: 471237 - DNA, 15 bp, Homo sapiens
ggagaaggggaggct

SEQ ID NO: 471238 - DNA, 15 bp, Homo sapiens
gggagaaggggaggc

SEQ ID NO: 471239 - DNA, 15 bp, Homo sapiens
ggggagaaggggagg

SEQ ID NO: 471240 - DNA, 15 bp, Homo sapiens
tggggagaaggggag

SEQ ID NO: 471241 - DNA, 15 bp, Homo sapiens
ttggggagaagggga

SEQ ID NO: 471242 - DNA, 15 bp, Homo sapiens
cttggggagaagggg

SEQ ID NO: 471243 - DNA, 15 bp, Homo sapiens
tcttggggagaaggg

SEQ ID NO: 471244 - DNA, 15 bp, Homo sapiens
atcttggggagaagg

SEQ ID NO: 471245 - DNA, 15 bp, Homo sapiens
tatcttggggagaag

SEQ ID NO: 471246 - DNA, 15 bp, Homo sapiens
ttatcttggggagaa

SEQ ID NO: 471247 - DNA, 15 bp, Homo sapiens
attatcttggggaga

SEQ ID NO: 471248 - DNA, 15 bp, Homo sapiens
tattatcttggggag

SEQ ID NO: 471249 - DNA, 15 bp, Homo sapiens
atattatcttgggga

SEQ ID NO: 471250 - DNA, 15 bp, Homo sapiens
gatattatcttgggg

SEQ ID NO: 471251 - DNA, 15 bp, Homo sapiens
agatattatcttggg

SEQ ID NO: 471252 - DNA, 15 bp, Homo sapiens
aagatattatcttgg

SEQ ID NO: 471253 - DNA, 15 bp, Homo sapiens
aaagatattatcttg

SEQ ID NO: 471254 - DNA, 15 bp, Homo sapiens
aaaagatattatctt

SEQ ID NO: 471255 - DNA, 15 bp, Homo sapiens
taaaagatattatct

SEQ ID NO: 471256 - DNA, 15 bp, Homo sapiens
ttaaaagatattatc

SEQ ID NO: 471257 - DNA, 15 bp, Homo sapiens
attaaaagatattat

SEQ ID NO: 471258 - DNA, 15 bp, Homo sapiens
tattaaaagatatta

SEQ ID NO: 471259 - DNA, 15 bp, Homo sapiens
atattaaaagatatt

SEQ ID NO: 471260 - DNA, 15 bp, Homo sapiens
catattaaaagatat

SEQ ID NO: 471261 - DNA, 15 bp, Homo sapiens
ccatattaaaagata

SEQ ID NO: 471262 - DNA, 15 bp, Homo sapiens
tccatattaaaagat

SEQ ID NO: 471263 - DNA, 15 bp, Homo sapiens
ttccatattaaaaga

SEQ ID NO: 471264 - DNA, 15 bp, Homo sapiens
attccatattaaaag

SEQ ID NO: 471265 - DNA, 15 bp, Homo sapiens
aattccatattaaaa

SEQ ID NO: 471266 - DNA, 15 bp, Homo sapiens
aaattccatattaaa

SEQ ID NO: 471267 - DNA, 15 bp, Homo sapiens
gaaattccatattaa

SEQ ID NO: 471268 - DNA, 15 bp, Homo sapiens
tgaaattccatatta

SEQ ID NO: 471269 - DNA, 15 bp, Homo sapiens
atgaaattccatatt

SEQ ID NO: 471270 - DNA, 15 bp, Homo sapiens
gatgaaattccatat

SEQ ID NO: 471271 - DNA, 15 bp, Homo sapiens
ggatgaaattccata

SEQ ID NO: 471272 - DNA, 15 bp, Homo sapiens
gggatgaaattccat

SEQ ID NO: 471273 - DNA, 15 bp, Homo sapiens
agggatgaaattcca

SEQ ID NO: 471274 - DNA, 15 bp, Homo sapiens
tagggatgaaattcc

SEQ ID NO: 471275 - DNA, 15 bp, Homo sapiens
ctagggatgaaattc

SEQ ID NO: 471276 - DNA, 15 bp, Homo sapiens
cctagggatgaaatt

SEQ ID NO: 471277 - DNA, 15 bp, Homo sapiens
ccctagggatgaaat

SEQ ID NO: 471278 - DNA, 15 bp, Homo sapiens
gccctagggatgaaa

SEQ ID NO: 471279 - DNA, 15 bp, Homo sapiens
tgccctagggatgaa

SEQ ID NO: 471280 - DNA, 15 bp, Homo sapiens
ctgccctagggatga

SEQ ID NO: 471281 - DNA, 15 bp, Homo sapiens
cctgccctagggatg

SEQ ID NO: 471282 - DNA, 15 bp, Homo sapiens
tcctgccctagggat

SEQ ID NO: 471283 - DNA, 15 bp, Homo sapiens
gtcctgccctaggga

SEQ ID NO: 471284 - DNA, 15 bp, Homo sapiens
agtcctgccctaggg

SEQ ID NO: 471285 - DNA, 15 bp, Homo sapiens
aagtcctgccctagg

SEQ ID NO: 471286 - DNA, 15 bp, Homo sapiens
aaagtcctgccctag

SEQ ID NO: 471287 - DNA, 15 bp, Homo sapiens
aaaagtcctgcccta

SEQ ID NO: 471288 - DNA, 15 bp, Homo sapiens
aaaaagtcctgccct

SEQ ID NO: 471289 - DNA, 15 bp, Homo sapiens
aaaaaagtcctgccc

SEQ ID NO: 471290 - DNA, 15 bp, Homo sapiens
aaaaaaagtcctgcc

SEQ ID NO: 471291 - DNA, 15 bp, Homo sapiens
aaaaaaaagtcctgc

SEQ ID NO: 471292 - DNA, 15 bp, Homo sapiens
aaaaaaaaagtcctg

SEQ ID NO: 471293 - DNA, 15 bp, Homo sapiens
taaaaaaaaagtcct

SEQ ID NO: 471294 - DNA, 15 bp, Homo sapiens
ataaaaaaaaagtcc

SEQ ID NO: 471295 - DNA, 15 bp, Homo sapiens
aataaaaaaaaagtc

SEQ ID NO: 471296 - DNA, 15 bp, Homo sapiens
taataaaaaaaaagt

SEQ ID NO: 471297 - DNA, 15 bp, Homo sapiens
ataataaaaaaaaag

SEQ ID NO: 471298 - DNA, 15 bp, Homo sapiens
gataataaaaaaaaa

SEQ ID NO: 471299 - DNA, 15 bp, Homo sapiens
ggataataaaaaaaa

SEQ ID NO: 471300 - DNA, 15 bp, Homo sapiens
gggataataaaaaaa

SEQ ID NO: 471301 - DNA, 15 bp, Homo sapiens
agggataataaaaaa

SEQ ID NO: 471302 - DNA, 15 bp, Homo sapiens
gagggataataaaaa

SEQ ID NO: 471303 - DNA, 15 bp, Homo sapiens
tgagggataataaaa

SEQ ID NO: 471304 - DNA, 15 bp, Homo sapiens
ctgagggataataaa

SEQ ID NO: 471305 - DNA, 15 bp, Homo sapiens
tctgagggataataa

SEQ ID NO: 471306 - DNA, 15 bp, Homo sapiens
ttctgagggataata

SEQ ID NO: 471307 - DNA, 15 bp, Homo sapiens
tttctgagggataat

SEQ ID NO: 471308 - DNA, 15 bp, Homo sapiens
atttctgagggataa

SEQ ID NO: 471309 - DNA, 15 bp, Homo sapiens
tatttctgagggata

SEQ ID NO: 471310 - DNA, 15 bp, Homo sapiens
atatttctgagggat

SEQ ID NO: 471311 - DNA, 15 bp, Homo sapiens
tatatttctgaggga

SEQ ID NO: 471312 - DNA, 15 bp, Homo sapiens
gtatatttctgaggg

SEQ ID NO: 471313 - DNA, 15 bp, Homo sapiens
agtatatttctgagg

SEQ ID NO: 471314 - DNA, 15 bp, Homo sapiens
cagtatatttctgag

SEQ ID NO: 471315 - DNA, 15 bp, Homo sapiens
ccagtatatttctga

SEQ ID NO: 471316 - DNA, 15 bp, Homo sapiens
tccagtatatttctg

SEQ ID NO: 471317 - DNA, 15 bp, Homo sapiens
gtccagtatatttct

SEQ ID NO: 471318 - DNA, 15 bp, Homo sapiens
tgtccagtatatttc

SEQ ID NO: 471319 - DNA, 15 bp, Homo sapiens
gtgtccagtatattt

SEQ ID NO: 471320 - DNA, 15 bp, Homo sapiens
ggtgtccagtatatt

SEQ ID NO: 471321 - DNA, 15 bp, Homo sapiens
tggtgtccagtatat

SEQ ID NO: 471322 - DNA, 15 bp, Homo sapiens
gtggtgtccagtata

SEQ ID NO: 471323 - DNA, 15 bp, Homo sapiens
cgtggtgtccagtat

SEQ ID NO: 471324 - DNA, 15 bp, Homo sapiens
acgtggtgtccagta

SEQ ID NO: 471325 - DNA, 15 bp, Homo sapiens
aacgtggtgtccagt

SEQ ID NO: 471326 - DNA, 15 bp, Homo sapiens
aaacgtggtgtccag

SEQ ID NO: 471327 - DNA, 15 bp, Homo sapiens
taaacgtggtgtcca

SEQ ID NO: 471328 - DNA, 15 bp, Homo sapiens
ttaaacgtggtgtcc

SEQ ID NO: 471329 - DNA, 15 bp, Homo sapiens
cttaaacgtggtgtc

SEQ ID NO: 471330 - DNA, 15 bp, Homo sapiens
acttaaacgtggtgt

SEQ ID NO: 471331 - DNA, 15 bp, Homo sapiens
tacttaaacgtggtg

SEQ ID NO: 471332 - DNA, 15 bp, Homo sapiens
ctacttaaacgtggt

SEQ ID NO: 471333 - DNA, 15 bp, Homo sapiens
tctacttaaacgtgg

SEQ ID NO: 471334 - DNA, 15 bp, Homo sapiens
gtctacttaaacgtg

SEQ ID NO: 471335 - DNA, 15 bp, Homo sapiens
tgtctacttaaacgt

SEQ ID NO: 471336 - DNA, 15 bp, Homo sapiens
atgtctacttaaacg

SEQ ID NO: 471337 - DNA, 15 bp, Homo sapiens
gatgtctacttaaac

SEQ ID NO: 471338 - DNA, 15 bp, Homo sapiens
ggatgtctacttaaa

SEQ ID NO: 471339 - DNA, 15 bp, Homo sapiens
tggatgtctacttaa

SEQ ID NO: 471340 - DNA, 15 bp, Homo sapiens
ttggatgtctactta

SEQ ID NO: 471341 - DNA, 15 bp, Homo sapiens
gttggatgtctactt

SEQ ID NO: 471342 - DNA, 15 bp, Homo sapiens
tgttggatgtctact

SEQ ID NO: 471343 - DNA, 15 bp, Homo sapiens
atgttggatgtctac

SEQ ID NO: 471344 - DNA, 15 bp, Homo sapiens
gatgttggatgtcta

SEQ ID NO: 471345 - DNA, 15 bp, Homo sapiens
agatgttggatgtct

SEQ ID NO: 471346 - DNA, 15 bp, Homo sapiens
cagatgttggatgtc

SEQ ID NO: 471347 - DNA, 15 bp, Homo sapiens
gcagatgttggatgt

SEQ ID NO: 471348 - DNA, 15 bp, Homo sapiens
agcagatgttggatg

SEQ ID NO: 471349 - DNA, 15 bp, Homo sapiens
cagcagatgttggat

SEQ ID NO: 471350 - DNA, 15 bp, Homo sapiens
acagcagatgttgga

SEQ ID NO: 471351 - DNA, 15 bp, Homo sapiens
gacagcagatgttgg

SEQ ID NO: 471352 - DNA, 15 bp, Homo sapiens
tgacagcagatgttg

SEQ ID NO: 471353 - DNA, 15 bp, Homo sapiens
atgacagcagatgtt

SEQ ID NO: 471354 - DNA, 15 bp, Homo sapiens
tatgacagcagatgt

SEQ ID NO: 471355 - DNA, 15 bp, Homo sapiens
ttatgacagcagatg

SEQ ID NO: 471356 - DNA, 15 bp, Homo sapiens
tttatgacagcagat

SEQ ID NO: 471357 - DNA, 15 bp, Homo sapiens
atttatgacagcaga

SEQ ID NO: 471358 - DNA, 15 bp, Homo sapiens
aatttatgacagcag

SEQ ID NO: 471359 - DNA, 15 bp, Homo sapiens
caatttatgacagca

SEQ ID NO: 471360 - DNA, 15 bp, Homo sapiens
acaatttatgacagc

SEQ ID NO: 471361 - DNA, 15 bp, Homo sapiens
aacaatttatgacag

SEQ ID NO: 471362 - DNA, 15 bp, Homo sapiens
aaacaatttatgaca

SEQ ID NO: 471363 - DNA, 15 bp, Homo sapiens
aaaacaatttatgac

SEQ ID NO: 471364 - DNA, 15 bp, Homo sapiens
caaaacaatttatga

SEQ ID NO: 471365 - DNA, 15 bp, Homo sapiens
tcaaaacaatttatg

SEQ ID NO: 471366 - DNA, 15 bp, Homo sapiens
ttcaaaacaatttat

SEQ ID NO: 471367 - DNA, 15 bp, Homo sapiens
attcaaaacaattta

SEQ ID NO: 471368 - DNA, 15 bp, Homo sapiens
aattcaaaacaattt

SEQ ID NO: 471369 - DNA, 15 bp, Homo sapiens
aaattcaaaacaatt

SEQ ID NO: 471370 - DNA, 15 bp, Homo sapiens
aaaattcaaaacaat

SEQ ID NO: 471371 - DNA, 15 bp, Homo sapiens
aaaaattcaaaacaa

SEQ ID NO: 471372 - DNA, 15 bp, Homo sapiens
aaaaaattcaaaaca

SEQ ID NO: 471373 - DNA, 15 bp, Homo sapiens
caaaaaattcaaaac

SEQ ID NO: 471374 - DNA, 15 bp, Homo sapiens
tcaaaaaattcaaaa

SEQ ID NO: 471375 - DNA, 15 bp, Homo sapiens
gtcaaaaaattcaaa

SEQ ID NO: 471376 - DNA, 15 bp, Homo sapiens
tgtcaaaaaattcaa

SEQ ID NO: 471377 - DNA, 15 bp, Homo sapiens
atgtcaaaaaattca

SEQ ID NO: 471378 - DNA, 15 bp, Homo sapiens
tatgtcaaaaaattc

SEQ ID NO: 471379 - DNA, 15 bp, Homo sapiens
gtatgtcaaaaaatt

SEQ ID NO: 471380 - DNA, 15 bp, Homo sapiens
agtatgtcaaaaaat

SEQ ID NO: 471381 - DNA, 15 bp, Homo sapiens
aagtatgtcaaaaaa

SEQ ID NO: 471382 - DNA, 15 bp, Homo sapiens
caagtatgtcaaaaa

SEQ ID NO: 471383 - DNA, 15 bp, Homo sapiens
gcaagtatgtcaaaa

SEQ ID NO: 471384 - DNA, 15 bp, Homo sapiens
ggcaagtatgtcaaa

SEQ ID NO: 471385 - DNA, 15 bp, Homo sapiens
gggcaagtatgtcaa

SEQ ID NO: 471386 - DNA, 15 bp, Homo sapiens
tgggcaagtatgtca

SEQ ID NO: 471387 - DNA, 15 bp, Homo sapiens
atgggcaagtatgtc

SEQ ID NO: 471388 - DNA, 15 bp, Homo sapiens
catgggcaagtatgt

SEQ ID NO: 471389 - DNA, 15 bp, Homo sapiens
tcatgggcaagtatg

SEQ ID NO: 471390 - DNA, 15 bp, Homo sapiens
ctcatgggcaagtat

SEQ ID NO: 471391 - DNA, 15 bp, Homo sapiens
cctcatgggcaagta

SEQ ID NO: 471392 - DNA, 15 bp, Homo sapiens
acctcatgggcaagt

SEQ ID NO: 471393 - DNA, 15 bp, Homo sapiens
aacctcatgggcaag

SEQ ID NO: 471394 - DNA, 15 bp, Homo sapiens
aaacctcatgggcaa

SEQ ID NO: 471395 - DNA, 15 bp, Homo sapiens
aaaacctcatgggca

SEQ ID NO: 471396 - DNA, 15 bp, Homo sapiens
aaaaacctcatgggc

SEQ ID NO: 471397 - DNA, 15 bp, Homo sapiens
caaaaacctcatggg

SEQ ID NO: 471398 - DNA, 15 bp, Homo sapiens
tcaaaaacctcatgg

SEQ ID NO: 471399 - DNA, 15 bp, Homo sapiens
ttcaaaaacctcatg

SEQ ID NO: 471400 - DNA, 15 bp, Homo sapiens
cttcaaaaacctcat

SEQ ID NO: 471401 - DNA, 15 bp, Homo sapiens
ccttcaaaaacctca

SEQ ID NO: 471402 - DNA, 15 bp, Homo sapiens
gccttcaaaaacctc

SEQ ID NO: 471403 - DNA, 15 bp, Homo sapiens
tgccttcaaaaacct

SEQ ID NO: 471404 - DNA, 15 bp, Homo sapiens
atgccttcaaaaacc

SEQ ID NO: 471405 - DNA, 15 bp, Homo sapiens
tatgccttcaaaaac

SEQ ID NO: 471406 - DNA, 15 bp, Homo sapiens
ctatgccttcaaaaa

SEQ ID NO: 471407 - DNA, 15 bp, Homo sapiens
tctatgccttcaaaa

SEQ ID NO: 471408 - DNA, 15 bp, Homo sapiens
gtctatgccttcaaa

SEQ ID NO: 471409 - DNA, 15 bp, Homo sapiens
ggtctatgccttcaa

SEQ ID NO: 471410 - DNA, 15 bp, Homo sapiens
tggtctatgccttca

SEQ ID NO: 471411 - DNA, 15 bp, Homo sapiens
atggtctatgccttc

SEQ ID NO: 471412 - DNA, 15 bp, Homo sapiens
catggtctatgcctt

SEQ ID NO: 471413 - DNA, 15 bp, Homo sapiens
acatggtctatgcct

SEQ ID NO: 471414 - DNA, 15 bp, Homo sapiens
gacatggtctatgcc

SEQ ID NO: 471415 - DNA, 15 bp, Homo sapiens
agacatggtctatgc

SEQ ID NO: 471416 - DNA, 15 bp, Homo sapiens
aagacatggtctatg

SEQ ID NO: 471417 - DNA, 15 bp, Homo sapiens
taagacatggtctat

SEQ ID NO: 471418 - DNA, 15 bp, Homo sapiens
ctaagacatggtcta

SEQ ID NO: 471419 - DNA, 15 bp, Homo sapiens
gctaagacatggtct

SEQ ID NO: 471420 - DNA, 15 bp, Homo sapiens
agctaagacatggtc

SEQ ID NO: 471421 - DNA, 15 bp, Homo sapiens
cagctaagacatggt

SEQ ID NO: 471422 - DNA, 15 bp, Homo sapiens
tcagctaagacatgg

SEQ ID NO: 471423 - DNA, 15 bp, Homo sapiens
ttcagctaagacatg

SEQ ID NO: 471424 - DNA, 15 bp, Homo sapiens
gttcagctaagacat

SEQ ID NO: 471425 - DNA, 15 bp, Homo sapiens
tgttcagctaagaca

SEQ ID NO: 471426 - DNA, 15 bp, Homo sapiens
atgttcagctaagac

SEQ ID NO: 471427 - DNA, 15 bp, Homo sapiens
catgttcagctaaga

SEQ ID NO: 471428 - DNA, 15 bp, Homo sapiens
acatgttcagctaag

SEQ ID NO: 471429 - DNA, 15 bp, Homo sapiens
cacatgttcagctaa

SEQ ID NO: 471430 - DNA, 15 bp, Homo sapiens
ccacatgttcagcta

SEQ ID NO: 471431 - DNA, 15 bp, Homo sapiens
accacatgttcagct

SEQ ID NO: 471432 - DNA, 15 bp, Homo sapiens
gaccacatgttcagc

SEQ ID NO: 471433 - DNA, 15 bp, Homo sapiens
agaccacatgttcag

SEQ ID NO: 471434 - DNA, 15 bp, Homo sapiens
gagaccacatgttca

SEQ ID NO: 471435 - DNA, 15 bp, Homo sapiens
agagaccacatgttc

SEQ ID NO: 471436 - DNA, 15 bp, Homo sapiens
aagagaccacatgtt

SEQ ID NO: 471437 - DNA, 15 bp, Homo sapiens
taagagaccacatgt

SEQ ID NO: 471438 - DNA, 15 bp, Homo sapiens
ctaagagaccacatg

SEQ ID NO: 471439 - DNA, 15 bp, Homo sapiens
actaagagaccacat

SEQ ID NO: 471440 - DNA, 15 bp, Homo sapiens
cactaagagaccaca

SEQ ID NO: 471441 - DNA, 15 bp, Homo sapiens
gcactaagagaccac

SEQ ID NO: 471442 - DNA, 15 bp, Homo sapiens
ggcactaagagacca

SEQ ID NO: 471443 - DNA, 15 bp, Homo sapiens
tggcactaagagacc

SEQ ID NO: 471444 - DNA, 15 bp, Homo sapiens
atggcactaagagac

SEQ ID NO: 471445 - DNA, 15 bp, Homo sapiens
tatggcactaagaga

SEQ ID NO: 471446 - DNA, 15 bp, Homo sapiens
ttatggcactaagag

SEQ ID NO: 471447 - DNA, 15 bp, Homo sapiens
tttatggcactaaga

SEQ ID NO: 471448 - DNA, 15 bp, Homo sapiens
ctttatggcactaag

SEQ ID NO: 471449 - DNA, 15 bp, Homo sapiens
cctttatggcactaa

SEQ ID NO: 471450 - DNA, 15 bp, Homo sapiens
ccctttatggcacta

SEQ ID NO: 471451 - DNA, 15 bp, Homo sapiens
cccctttatggcact

SEQ ID NO: 471452 - DNA, 15 bp, Homo sapiens
ccccctttatggcac

SEQ ID NO: 471453 - DNA, 15 bp, Homo sapiens
accccctttatggca

SEQ ID NO: 471454 - DNA, 15 bp, Homo sapiens
aaccccctttatggc

SEQ ID NO: 471455 - DNA, 15 bp, Homo sapiens
aaaccccctttatgg

SEQ ID NO: 471456 - DNA, 15 bp, Homo sapiens
taaaccccctttatg

SEQ ID NO: 471457 - DNA, 15 bp, Homo sapiens
ataaaccccctttat

SEQ ID NO: 471458 - DNA, 15 bp, Homo sapiens
cataaacccccttta

SEQ ID NO: 471459 - DNA, 15 bp, Homo sapiens
ccataaacccccttt

SEQ ID NO: 471460 - DNA, 15 bp, Homo sapiens
accataaaccccctt

SEQ ID NO: 471461 - DNA, 15 bp, Homo sapiens
taccataaaccccct

SEQ ID NO: 471462 - DNA, 15 bp, Homo sapiens
ataccataaaccccc

SEQ ID NO: 471463 - DNA, 15 bp, Homo sapiens
cataccataaacccc

SEQ ID NO: 471464 - DNA, 15 bp, Homo sapiens
tcataccataaaccc

SEQ ID NO: 471465 - DNA, 15 bp, Homo sapiens
gtcataccataaacc

SEQ ID NO: 471466 - DNA, 15 bp, Homo sapiens
ggtcataccataaac

SEQ ID NO: 471467 - DNA, 15 bp, Homo sapiens
aggtcataccataaa

SEQ ID NO: 471468 - DNA, 15 bp, Homo sapiens
caggtcataccataa

SEQ ID NO: 471469 - DNA, 15 bp, Homo sapiens
acaggtcataccata

SEQ ID NO: 471470 - DNA, 15 bp, Homo sapiens
cacaggtcataccat

SEQ ID NO: 471471 - DNA, 15 bp, Homo sapiens
acacaggtcatacca

SEQ ID NO: 471472 - DNA, 15 bp, Homo sapiens
tacacaggtcatacc

SEQ ID NO: 471473 - DNA, 15 bp, Homo sapiens
ctacacaggtcatac

SEQ ID NO: 471474 - DNA, 15 bp, Homo sapiens
actacacaggtcata

SEQ ID NO: 471475 - DNA, 15 bp, Homo sapiens
cactacacaggtcat

SEQ ID NO: 471476 - DNA, 15 bp, Homo sapiens
acactacacaggtca

SEQ ID NO: 471477 - DNA, 15 bp, Homo sapiens
gacactacacaggtc

SEQ ID NO: 471478 - DNA, 15 bp, Homo sapiens
tgacactacacaggt

SEQ ID NO: 471479 - DNA, 15 bp, Homo sapiens
gtgacactacacagg

SEQ ID NO: 471480 - DNA, 15 bp, Homo sapiens
ggtgacactacacag

SEQ ID NO: 471481 - DNA, 15 bp, Homo sapiens
aggtgacactacaca

SEQ ID NO: 471482 - DNA, 15 bp, Homo sapiens
caggtgacactacac

SEQ ID NO: 471483 - DNA, 15 bp, Homo sapiens
acaggtgacactaca

SEQ ID NO: 471484 - DNA, 15 bp, Homo sapiens
cacaggtgacactac

SEQ ID NO: 471485 - DNA, 15 bp, Homo sapiens
acacaggtgacacta

SEQ ID NO: 471486 - DNA, 15 bp, Homo sapiens
tacacaggtgacact

SEQ ID NO: 471487 - DNA, 15 bp, Homo sapiens
ctacacaggtgacac

SEQ ID NO: 471488 - DNA, 15 bp, Homo sapiens
actacacaggtgaca

SEQ ID NO: 471489 - DNA, 15 bp, Homo sapiens
cactacacaggtgac

SEQ ID NO: 471490 - DNA, 15 bp, Homo sapiens
tcactacacaggtga

SEQ ID NO: 471491 - DNA, 15 bp, Homo sapiens
gtcactacacaggtg

SEQ ID NO: 471492 - DNA, 15 bp, Homo sapiens
tgtcactacacaggt

SEQ ID NO: 471493 - DNA, 15 bp, Homo sapiens
ctgtcactacacagg

SEQ ID NO: 471494 - DNA, 15 bp, Homo sapiens
gctgtcactacacag

SEQ ID NO: 471495 - DNA, 15 bp, Homo sapiens
tgctgtcactacaca

SEQ ID NO: 471496 - DNA, 15 bp, Homo sapiens
gtgctgtcactacac

SEQ ID NO: 471497 - DNA, 15 bp, Homo sapiens
ggtgctgtcactaca

SEQ ID NO: 471498 - DNA, 15 bp, Homo sapiens
tggtgctgtcactac

SEQ ID NO: 471499 - DNA, 15 bp, Homo sapiens
gtggtgctgtcacta

SEQ ID NO: 471500 - DNA, 15 bp, Homo sapiens
agtggtgctgtcact

SEQ ID NO: 471501 - DNA, 15 bp, Homo sapiens
cagtggtgctgtcac

SEQ ID NO: 471502 - DNA, 15 bp, Homo sapiens
gcagtggtgctgtca

SEQ ID NO: 471503 - DNA, 15 bp, Homo sapiens
ggcagtggtgctgtc

SEQ ID NO: 471504 - DNA, 15 bp, Homo sapiens
aggcagtggtgctgt

SEQ ID NO: 471505 - DNA, 15 bp, Homo sapiens
gaggcagtggtgctg

SEQ ID NO: 471506 - DNA, 15 bp, Homo sapiens
agaggcagtggtgct

SEQ ID NO: 471507 - DNA, 15 bp, Homo sapiens
cagaggcagtggtgc

SEQ ID NO: 471508 - DNA, 15 bp, Homo sapiens
acagaggcagtggtg

SEQ ID NO: 471509 - DNA, 15 bp, Homo sapiens
aacagaggcagtggt

SEQ ID NO: 471510 - DNA, 15 bp, Homo sapiens
aaacagaggcagtgg

SEQ ID NO: 471511 - DNA, 15 bp, Homo sapiens
gaaacagaggcagtg

SEQ ID NO: 471512 - DNA, 15 bp, Homo sapiens
ggaaacagaggcagt

SEQ ID NO: 471513 - DNA, 15 bp, Homo sapiens
gggaaacagaggcag

SEQ ID NO: 471514 - DNA, 15 bp, Homo sapiens
agggaaacagaggca

SEQ ID NO: 471515 - DNA, 15 bp, Homo sapiens
aagggaaacagaggc

SEQ ID NO: 471516 - DNA, 15 bp, Homo sapiens
gaagggaaacagagg

SEQ ID NO: 471517 - DNA, 15 bp, Homo sapiens
ggaagggaaacagag

SEQ ID NO: 471518 - DNA, 15 bp, Homo sapiens
aggaagggaaacaga

SEQ ID NO: 471519 - DNA, 15 bp, Homo sapiens
gaggaagggaaacag

SEQ ID NO: 471520 - DNA, 15 bp, Homo sapiens
agaggaagggaaaca

SEQ ID NO: 471521 - DNA, 15 bp, Homo sapiens
aagaggaagggaaac

SEQ ID NO: 471522 - DNA, 15 bp, Homo sapiens
caagaggaagggaaa

SEQ ID NO: 471523 - DNA, 15 bp, Homo sapiens
acaagaggaagggaa

SEQ ID NO: 471524 - DNA, 15 bp, Homo sapiens
cacaagaggaaggga

SEQ ID NO: 471525 - DNA, 15 bp, Homo sapiens
tcacaagaggaaggg

SEQ ID NO: 471526 - DNA, 15 bp, Homo sapiens
atcacaagaggaagg

SEQ ID NO: 471527 - DNA, 15 bp, Homo sapiens
catcacaagaggaag

SEQ ID NO: 471528 - DNA, 15 bp, Homo sapiens
ccatcacaagaggaa

SEQ ID NO: 471529 - DNA, 15 bp, Homo sapiens
gccatcacaagagga

SEQ ID NO: 471530 - DNA, 15 bp, Homo sapiens
tgccatcacaagagg

SEQ ID NO: 471531 - DNA, 15 bp, Homo sapiens
ctgccatcacaagag

SEQ ID NO: 471532 - DNA, 15 bp, Homo sapiens
gctgccatcacaaga

SEQ ID NO: 471533 - DNA, 15 bp, Homo sapiens
tgctgccatcacaag

SEQ ID NO: 471534 - DNA, 15 bp, Homo sapiens
ctgctgccatcacaa

SEQ ID NO: 471535 - DNA, 15 bp, Homo sapiens
gctgctgccatcaca

SEQ ID NO: 471536 - DNA, 15 bp, Homo sapiens
cgctgctgccatcac

SEQ ID NO: 471537 - DNA, 15 bp, Homo sapiens
acgctgctgccatca

SEQ ID NO: 471538 - DNA, 15 bp, Homo sapiens
gacgctgctgccatc

SEQ ID NO: 471539 - DNA, 15 bp, Homo sapiens
agacgctgctgccat

SEQ ID NO: 471540 - DNA, 15 bp, Homo sapiens
gagacgctgctgcca

SEQ ID NO: 471541 - DNA, 15 bp, Homo sapiens
tgagacgctgctgcc

SEQ ID NO: 471542 - DNA, 15 bp, Homo sapiens
ttgagacgctgctgc

SEQ ID NO: 471543 - DNA, 15 bp, Homo sapiens
cttgagacgctgctg

SEQ ID NO: 471544 - DNA, 15 bp, Homo sapiens
gcttgagacgctgct

SEQ ID NO: 471545 - DNA, 15 bp, Homo sapiens
ggcttgagacgctgc

SEQ ID NO: 471546 - DNA, 15 bp, Homo sapiens
tggcttgagacgctg

SEQ ID NO: 471547 - DNA, 15 bp, Homo sapiens
ttggcttgagacgct

SEQ ID NO: 471548 - DNA, 15 bp, Homo sapiens
tttggcttgagacgc

SEQ ID NO: 471549 - DNA, 15 bp, Homo sapiens
gtttggcttgagacg

SEQ ID NO: 471550 - DNA, 15 bp, Homo sapiens
tgtttggcttgagac

SEQ ID NO: 471551 - DNA, 15 bp, Homo sapiens
ttgtttggcttgaga

SEQ ID NO: 471552 - DNA, 15 bp, Homo sapiens
cttgtttggcttgag

SEQ ID NO: 471553 - DNA, 15 bp, Homo sapiens
tcttgtttggcttga

SEQ ID NO: 471554 - DNA, 15 bp, Homo sapiens
ttcttgtttggcttg

SEQ ID NO: 471555 - DNA, 15 bp, Homo sapiens
cttcttgtttggctt

SEQ ID NO: 471556 - DNA, 15 bp, Homo sapiens
ccttcttgtttggct

SEQ ID NO: 471557 - DNA, 15 bp, Homo sapiens
cccttcttgtttggc

SEQ ID NO: 471558 - DNA, 15 bp, Homo sapiens
acccttcttgtttgg

SEQ ID NO: 471559 - DNA, 15 bp, Homo sapiens
tacccttcttgtttg

SEQ ID NO: 471560 - DNA, 15 bp, Homo sapiens
ctacccttcttgttt

SEQ ID NO: 471561 - DNA, 15 bp, Homo sapiens
actacccttcttgtt

SEQ ID NO: 471562 - DNA, 15 bp, Homo sapiens
aactacccttcttgt

SEQ ID NO: 471563 - DNA, 15 bp, Homo sapiens
taactacccttcttg

SEQ ID NO: 471564 - DNA, 15 bp, Homo sapiens
ctaactacccttctt

SEQ ID NO: 471565 - DNA, 15 bp, Homo sapiens
cctaactacccttct

SEQ ID NO: 471566 - DNA, 15 bp, Homo sapiens
ccctaactacccttc

SEQ ID NO: 471567 - DNA, 15 bp, Homo sapiens
accctaactaccctt

SEQ ID NO: 471568 - DNA, 15 bp, Homo sapiens
caccctaactaccct

SEQ ID NO: 471569 - DNA, 15 bp, Homo sapiens
ccaccctaactaccc

SEQ ID NO: 471570 - DNA, 15 bp, Homo sapiens
cccaccctaactacc

SEQ ID NO: 471571 - DNA, 15 bp, Homo sapiens
tcccaccctaactac

SEQ ID NO: 471572 - DNA, 15 bp, Homo sapiens
atcccaccctaacta

SEQ ID NO: 471573 - DNA, 15 bp, Homo sapiens
catcccaccctaact

SEQ ID NO: 471574 - DNA, 15 bp, Homo sapiens
ccatcccaccctaac

SEQ ID NO: 471575 - DNA, 15 bp, Homo sapiens
tccatcccaccctaa

SEQ ID NO: 471576 - DNA, 15 bp, Homo sapiens
ttccatcccacccta

SEQ ID NO: 471577 - DNA, 15 bp, Homo sapiens
cttccatcccaccct

SEQ ID NO: 471578 - DNA, 15 bp, Homo sapiens
gcttccatcccaccc

SEQ ID NO: 471579 - DNA, 15 bp, Homo sapiens
agcttccatcccacc

SEQ ID NO: 471580 - DNA, 15 bp, Homo sapiens
cagcttccatcccac

SEQ ID NO: 471581 - DNA, 15 bp, Homo sapiens
ccagcttccatccca

SEQ ID NO: 471582 - DNA, 15 bp, Homo sapiens
cccagcttccatccc

SEQ ID NO: 471583 - DNA, 15 bp, Homo sapiens
acccagcttccatcc

SEQ ID NO: 471584 - DNA, 15 bp, Homo sapiens
tacccagcttccatc

SEQ ID NO: 471585 - DNA, 15 bp, Homo sapiens
ctacccagcttccat

SEQ ID NO: 471586 - DNA, 15 bp, Homo sapiens
tctacccagcttcca

SEQ ID NO: 471587 - DNA, 15 bp, Homo sapiens
ctctacccagcttcc

SEQ ID NO: 471588 - DNA, 15 bp, Homo sapiens
cctctacccagcttc

SEQ ID NO: 471589 - DNA, 15 bp, Homo sapiens
acctctacccagctt

SEQ ID NO: 471590 - DNA, 15 bp, Homo sapiens
tacctctacccagct

SEQ ID NO: 471591 - DNA, 15 bp, Homo sapiens
atacctctacccagc

SEQ ID NO: 471592 - DNA, 15 bp, Homo sapiens
aatacctctacccag

SEQ ID NO: 471593 - DNA, 15 bp, Homo sapiens
gaatacctctaccca

SEQ ID NO: 471594 - DNA, 15 bp, Homo sapiens
ggaatacctctaccc

SEQ ID NO: 471595 - DNA, 15 bp, Homo sapiens
aggaatacctctacc

SEQ ID NO: 471596 - DNA, 15 bp, Homo sapiens
gaggaatacctctac

SEQ ID NO: 471597 - DNA, 15 bp, Homo sapiens
agaggaatacctcta

SEQ ID NO: 471598 - DNA, 15 bp, Homo sapiens
gagaggaatacctct

SEQ ID NO: 471599 - DNA, 15 bp, Homo sapiens
ggagaggaatacctc

SEQ ID NO: 471600 - DNA, 15 bp, Homo sapiens
gggagaggaatacct

SEQ ID NO: 471601 - DNA, 15 bp, Homo sapiens
ggggagaggaatacc

SEQ ID NO: 471602 - DNA, 15 bp, Homo sapiens
tggggagaggaatac

SEQ ID NO: 471603 - DNA, 15 bp, Homo sapiens
atggggagaggaata

SEQ ID NO: 471604 - DNA, 15 bp, Homo sapiens
tatggggagaggaat

SEQ ID NO: 471605 - DNA, 15 bp, Homo sapiens
ctatggggagaggaa

SEQ ID NO: 471606 - DNA, 15 bp, Homo sapiens
actatggggagagga

SEQ ID NO: 471607 - DNA, 15 bp, Homo sapiens
aactatggggagagg

SEQ ID NO: 471608 - DNA, 15 bp, Homo sapiens
gaactatggggagag

SEQ ID NO: 471609 - DNA, 15 bp, Homo sapiens
agaactatggggaga

SEQ ID NO: 471610 - DNA, 15 bp, Homo sapiens
cagaactatggggag

SEQ ID NO: 471611 - DNA, 15 bp, Homo sapiens
acagaactatgggga

SEQ ID NO: 471612 - DNA, 15 bp, Homo sapiens
cacagaactatgggg

SEQ ID NO: 471613 - DNA, 15 bp, Homo sapiens
acacagaactatggg

SEQ ID NO: 471614 - DNA, 15 bp, Homo sapiens
aacacagaactatgg

SEQ ID NO: 471615 - DNA, 15 bp, Homo sapiens
gaacacagaactatg

SEQ ID NO: 471616 - DNA, 15 bp, Homo sapiens
tgaacacagaactat

SEQ ID NO: 471617 - DNA, 15 bp, Homo sapiens
gtgaacacagaacta

SEQ ID NO: 471618 - DNA, 15 bp, Homo sapiens
tgtgaacacagaact

SEQ ID NO: 471619 - DNA, 15 bp, Homo sapiens
atgtgaacacagaac

SEQ ID NO: 471620 - DNA, 15 bp, Homo sapiens
catgtgaacacagaa

SEQ ID NO: 471621 - DNA, 15 bp, Homo sapiens
acatgtgaacacaga

SEQ ID NO: 471622 - DNA, 15 bp, Homo sapiens
cacatgtgaacacag

SEQ ID NO: 471623 - DNA, 15 bp, Homo sapiens
gcacatgtgaacaca

SEQ ID NO: 471624 - DNA, 15 bp, Homo sapiens
tgcacatgtgaacac

SEQ ID NO: 471625 - DNA, 15 bp, Homo sapiens
atgcacatgtgaaca

SEQ ID NO: 471626 - DNA, 15 bp, Homo sapiens
aatgcacatgtgaac

SEQ ID NO: 471627 - DNA, 15 bp, Homo sapiens
caatgcacatgtgaa

SEQ ID NO: 471628 - DNA, 15 bp, Homo sapiens
tcaatgcacatgtga

SEQ ID NO: 471629 - DNA, 15 bp, Homo sapiens
gtcaatgcacatgtg

SEQ ID NO: 471630 - DNA, 15 bp, Homo sapiens
ggtcaatgcacatgt

SEQ ID NO: 471631 - DNA, 15 bp, Homo sapiens
aggtcaatgcacatg

SEQ ID NO: 471632 - DNA, 15 bp, Homo sapiens
gaggtcaatgcacat

SEQ ID NO: 471633 - DNA, 15 bp, Homo sapiens
ggaggtcaatgcaca

SEQ ID NO: 471634 - DNA, 15 bp, Homo sapiens
aggaggtcaatgcac

SEQ ID NO: 471635 - DNA, 15 bp, Homo sapiens
aaggaggtcaatgca

SEQ ID NO: 471636 - DNA, 15 bp, Homo sapiens
aaaggaggtcaatgc

SEQ ID NO: 471637 - DNA, 15 bp, Homo sapiens
aaaaggaggtcaatg

SEQ ID NO: 471638 - DNA, 15 bp, Homo sapiens
aaaaaggaggtcaat

SEQ ID NO: 471639 - DNA, 15 bp, Homo sapiens
caaaaaggaggtcaa

SEQ ID NO: 471640 - DNA, 15 bp, Homo sapiens
ccaaaaaggaggtca

SEQ ID NO: 471641 - DNA, 15 bp, Homo sapiens
gccaaaaaggaggtc

SEQ ID NO: 471642 - DNA, 15 bp, Homo sapiens
tgccaaaaaggaggt

SEQ ID NO: 471643 - DNA, 15 bp, Homo sapiens
ctgccaaaaaggagg

SEQ ID NO: 471644 - DNA, 15 bp, Homo sapiens
gctgccaaaaaggag

SEQ ID NO: 471645 - DNA, 15 bp, Homo sapiens
tgctgccaaaaagga

SEQ ID NO: 471646 - DNA, 15 bp, Homo sapiens
ttgctgccaaaaagg

SEQ ID NO: 471647 - DNA, 15 bp, Homo sapiens
cttgctgccaaaaag

SEQ ID NO: 471648 - DNA, 15 bp, Homo sapiens
ccttgctgccaaaaa

SEQ ID NO: 471649 - DNA, 15 bp, Homo sapiens
cccttgctgccaaaa

SEQ ID NO: 471650 - DNA, 15 bp, Homo sapiens
ccccttgctgccaaa

SEQ ID NO: 471651 - DNA, 15 bp, Homo sapiens
cccccttgctgccaa

SEQ ID NO: 471652 - DNA, 15 bp, Homo sapiens
gcccccttgctgcca

SEQ ID NO: 471653 - DNA, 15 bp, Homo sapiens
ggcccccttgctgcc

SEQ ID NO: 471654 - DNA, 15 bp, Homo sapiens
tggcccccttgctgc

SEQ ID NO: 471655 - DNA, 15 bp, Homo sapiens
ctggcccccttgctg

SEQ ID NO: 471656 - DNA, 15 bp, Homo sapiens
cctggcccccttgct

SEQ ID NO: 471657 - DNA, 15 bp, Homo sapiens
gcctggcccccttgc

SEQ ID NO: 471658 - DNA, 15 bp, Homo sapiens
ggcctggcccccttg

SEQ ID NO: 471659 - DNA, 15 bp, Homo sapiens
tggcctggccccctt

SEQ ID NO: 471660 - DNA, 15 bp, Homo sapiens
ttggcctggccccct

SEQ ID NO: 471661 - DNA, 15 bp, Homo sapiens
gttggcctggccccc

SEQ ID NO: 471662 - DNA, 15 bp, Homo sapiens
ggttggcctggcccc

SEQ ID NO: 471663 - DNA, 15 bp, Homo sapiens
tggttggcctggccc

SEQ ID NO: 471664 - DNA, 15 bp, Homo sapiens
gtggttggcctggcc

SEQ ID NO: 471665 - DNA, 15 bp, Homo sapiens
ggtggttggcctggc

SEQ ID NO: 471666 - DNA, 15 bp, Homo sapiens
gggtggttggcctgg

SEQ ID NO: 471667 - DNA, 15 bp, Homo sapiens
ggggtggttggcctg

SEQ ID NO: 471668 - DNA, 15 bp, Homo sapiens
tggggtggttggcct

SEQ ID NO: 471669 - DNA, 15 bp, Homo sapiens
gtggggtggttggcc

SEQ ID NO: 471670 - DNA, 15 bp, Homo sapiens
tgtggggtggttggc

SEQ ID NO: 471671 - DNA, 15 bp, Homo sapiens
ctgtggggtggttgg

SEQ ID NO: 471672 - DNA, 15 bp, Homo sapiens
gctgtggggtggttg

SEQ ID NO: 471673 - DNA, 15 bp, Homo sapiens
tgctgtggggtggtt

SEQ ID NO: 471674 - DNA, 15 bp, Homo sapiens
ctgctgtggggtggt

SEQ ID NO: 471675 - DNA, 15 bp, Homo sapiens
gctgctgtggggtgg

SEQ ID NO: 471676 - DNA, 15 bp, Homo sapiens
ggctgctgtggggtg

SEQ ID NO: 471677 - DNA, 15 bp, Homo sapiens
cggctgctgtggggt

SEQ ID NO: 471678 - DNA, 15 bp, Homo sapiens
acggctgctgtgggg

SEQ ID NO: 471679 - DNA, 15 bp, Homo sapiens
cacggctgctgtggg

SEQ ID NO: 471680 - DNA, 15 bp, Homo sapiens
ccacggctgctgtgg

SEQ ID NO: 471681 - DNA, 15 bp, Homo sapiens
accacggctgctgtg

SEQ ID NO: 471682 - DNA, 15 bp, Homo sapiens
caccacggctgctgt

SEQ ID NO: 471683 - DNA, 15 bp, Homo sapiens
tcaccacggctgctg

SEQ ID NO: 471684 - DNA, 15 bp, Homo sapiens
gtcaccacggctgct

SEQ ID NO: 471685 - DNA, 15 bp, Homo sapiens
cgtcaccacggctgc

SEQ ID NO: 471686 - DNA, 15 bp, Homo sapiens
ccgtcaccacggctg

SEQ ID NO: 471687 - DNA, 15 bp, Homo sapiens
tccgtcaccacggct

SEQ ID NO: 471688 - DNA, 15 bp, Homo sapiens
ctccgtcaccacggc

SEQ ID NO: 471689 - DNA, 15 bp, Homo sapiens
tctccgtcaccacgg

SEQ ID NO: 471690 - DNA, 15 bp, Homo sapiens
ttctccgtcaccacg

SEQ ID NO: 471691 - DNA, 15 bp, Homo sapiens
cttctccgtcaccac

SEQ ID NO: 471692 - DNA, 15 bp, Homo sapiens
gcttctccgtcacca

SEQ ID NO: 471693 - DNA, 15 bp, Homo sapiens
tgcttctccgtcacc

SEQ ID NO: 471694 - DNA, 15 bp, Homo sapiens
ctgcttctccgtcac

SEQ ID NO: 471695 - DNA, 15 bp, Homo sapiens
gctgcttctccgtca

SEQ ID NO: 471696 - DNA, 15 bp, Homo sapiens
tgctgcttctccgtc

SEQ ID NO: 471697 - DNA, 15 bp, Homo sapiens
ctgctgcttctccgt

SEQ ID NO: 471698 - DNA, 15 bp, Homo sapiens
tctgctgcttctccg

SEQ ID NO: 471699 - DNA, 15 bp, Homo sapiens
atctgctgcttctcc

SEQ ID NO: 471700 - DNA, 15 bp, Homo sapiens
catctgctgcttctc

SEQ ID NO: 471701 - DNA, 15 bp, Homo sapiens
gcatctgctgcttct

SEQ ID NO: 471702 - DNA, 15 bp, Homo sapiens
agcatctgctgcttc

SEQ ID NO: 471703 - DNA, 15 bp, Homo sapiens
cagcatctgctgctt

SEQ ID NO: 471704 - DNA, 15 bp, Homo sapiens
ccagcatctgctgct

SEQ ID NO: 471705 - DNA, 15 bp, Homo sapiens
tccagcatctgctgc

SEQ ID NO: 471706 - DNA, 15 bp, Homo sapiens
ctccagcatctgctg

SEQ ID NO: 471707 - DNA, 15 bp, Homo sapiens
gctccagcatctgct

SEQ ID NO: 471708 - DNA, 15 bp, Homo sapiens
tgctccagcatctgc

SEQ ID NO: 471709 - DNA, 15 bp, Homo sapiens
ctgctccagcatctg

SEQ ID NO: 471710 - DNA, 15 bp, Homo sapiens
gctgctccagcatct

SEQ ID NO: 471711 - DNA, 15 bp, Homo sapiens
tgctgctccagcatc

SEQ ID NO: 471712 - DNA, 15 bp, Homo sapiens
gtgctgctccagcat

SEQ ID NO: 471713 - DNA, 15 bp, Homo sapiens
ggtgctgctccagca

SEQ ID NO: 471714 - DNA, 15 bp, Homo sapiens
aggtgctgctccagc

SEQ ID NO: 471715 - DNA, 15 bp, Homo sapiens
aaggtgctgctccag

SEQ ID NO: 471716 - DNA, 15 bp, Homo sapiens
gaaggtgctgctcca

SEQ ID NO: 471717 - DNA, 15 bp, Homo sapiens
tgaaggtgctgctcc

SEQ ID NO: 471718 - DNA, 15 bp, Homo sapiens
ctgaaggtgctgctc

SEQ ID NO: 471719 - DNA, 15 bp, Homo sapiens
cctgaaggtgctgct

SEQ ID NO: 471720 - DNA, 15 bp, Homo sapiens
tcctgaaggtgctgc

SEQ ID NO: 471721 - DNA, 15 bp, Homo sapiens
atcctgaaggtgctg

SEQ ID NO: 471722 - DNA, 15 bp, Homo sapiens
catcctgaaggtgct

SEQ ID NO: 471723 - DNA, 15 bp, Homo sapiens
acatcctgaaggtgc

SEQ ID NO: 471724 - DNA, 15 bp, Homo sapiens
gacatcctgaaggtg

SEQ ID NO: 471725 - DNA, 15 bp, Homo sapiens
ggacatcctgaaggt

SEQ ID NO: 471726 - DNA, 15 bp, Homo sapiens
cggacatcctgaagg

SEQ ID NO: 471727 - DNA, 15 bp, Homo sapiens
ccggacatcctgaag

SEQ ID NO: 471728 - DNA, 15 bp, Homo sapiens
tccggacatcctgaa

SEQ ID NO: 471729 - DNA, 15 bp, Homo sapiens
ttccggacatcctga

SEQ ID NO: 471730 - DNA, 15 bp, Homo sapiens
cttccggacatcctg

SEQ ID NO: 471731 - DNA, 15 bp, Homo sapiens
tcttccggacatcct

SEQ ID NO: 471732 - DNA, 15 bp, Homo sapiens
ctcttccggacatcc

SEQ ID NO: 471733 - DNA, 15 bp, Homo sapiens
tctcttccggacatc

SEQ ID NO: 471734 - DNA, 15 bp, Homo sapiens
ctctcttccggacat

SEQ ID NO: 471735 - DNA, 15 bp, Homo sapiens
actctcttccggaca

SEQ ID NO: 471736 - DNA, 15 bp, Homo sapiens
cactctcttccggac

SEQ ID NO: 471737 - DNA, 15 bp, Homo sapiens
gcactctcttccgga

SEQ ID NO: 471738 - DNA, 15 bp, Homo sapiens
tgcactctcttccgg

SEQ ID NO: 471739 - DNA, 15 bp, Homo sapiens
ctgcactctcttccg

SEQ ID NO: 471740 - DNA, 15 bp, Homo sapiens
cctgcactctcttcc

SEQ ID NO: 471741 - DNA, 15 bp, Homo sapiens
acctgcactctcttc

SEQ ID NO: 471742 - DNA, 15 bp, Homo sapiens
cacctgcactctctt

SEQ ID NO: 471743 - DNA, 15 bp, Homo sapiens
tcacctgcactctct

SEQ ID NO: 471744 - DNA, 15 bp, Homo sapiens
atcacctgcactctc

SEQ ID NO: 471745 - DNA, 15 bp, Homo sapiens
catcacctgcactct

SEQ ID NO: 471746 - DNA, 15 bp, Homo sapiens
gcatcacctgcactc

SEQ ID NO: 471747 - DNA, 15 bp, Homo sapiens
tgcatcacctgcact

SEQ ID NO: 471748 - DNA, 15 bp, Homo sapiens
ttgcatcacctgcac

SEQ ID NO: 471749 - DNA, 15 bp, Homo sapiens
cttgcatcacctgca

SEQ ID NO: 471750 - DNA, 15 bp, Homo sapiens
acttgcatcacctgc

SEQ ID NO: 471751 - DNA, 15 bp, Homo sapiens
aacttgcatcacctg

SEQ ID NO: 471752 - DNA, 15 bp, Homo sapiens
taacttgcatcacct

SEQ ID NO: 471753 - DNA, 15 bp, Homo sapiens
gtaacttgcatcacc

SEQ ID NO: 471754 - DNA, 15 bp, Homo sapiens
tgtaacttgcatcac

SEQ ID NO: 471755 - DNA, 15 bp, Homo sapiens
ttgtaacttgcatca

SEQ ID NO: 471756 - DNA, 15 bp, Homo sapiens
cttgtaacttgcatc

SEQ ID NO: 471757 - DNA, 15 bp, Homo sapiens
gcttgtaacttgcat

SEQ ID NO: 471758 - DNA, 15 bp, Homo sapiens
ggcttgtaacttgca

SEQ ID NO: 471759 - DNA, 15 bp, Homo sapiens
aggcttgtaacttgc

SEQ ID NO: 471760 - DNA, 15 bp, Homo sapiens
gaggcttgtaacttg

SEQ ID NO: 471761 - DNA, 15 bp, Homo sapiens
cgaggcttgtaactt

SEQ ID NO: 471762 - DNA, 15 bp, Homo sapiens
ccgaggcttgtaact

SEQ ID NO: 471763 - DNA, 15 bp, Homo sapiens
cccgaggcttgtaac

SEQ ID NO: 471764 - DNA, 15 bp, Homo sapiens
gcccgaggcttgtaa

SEQ ID NO: 471765 - DNA, 15 bp, Homo sapiens
tgcccgaggcttgta

SEQ ID NO: 471766 - DNA, 15 bp, Homo sapiens
ctgcccgaggcttgt

SEQ ID NO: 471767 - DNA, 15 bp, Homo sapiens
cctgcccgaggcttg

SEQ ID NO: 471768 - DNA, 15 bp, Homo sapiens
ccctgcccgaggctt

SEQ ID NO: 471769 - DNA, 15 bp, Homo sapiens
tccctgcccgaggct

SEQ ID NO: 471770 - DNA, 15 bp, Homo sapiens
ctccctgcccgaggc

SEQ ID NO: 471771 - DNA, 15 bp, Homo sapiens
gctccctgcccgagg

SEQ ID NO: 471772 - DNA, 15 bp, Homo sapiens
agctccctgcccgag

SEQ ID NO: 471773 - DNA, 15 bp, Homo sapiens
aagctccctgcccga

SEQ ID NO: 471774 - DNA, 15 bp, Homo sapiens
aaagctccctgcccg

SEQ ID NO: 471775 - DNA, 15 bp, Homo sapiens
gaaagctccctgccc

SEQ ID NO: 471776 - DNA, 15 bp, Homo sapiens
tgaaagctccctgcc

SEQ ID NO: 471777 - DNA, 15 bp, Homo sapiens
atgaaagctccctgc

SEQ ID NO: 471778 - DNA, 15 bp, Homo sapiens
aatgaaagctccctg

SEQ ID NO: 471779 - DNA, 15 bp, Homo sapiens
taatgaaagctccct

SEQ ID NO: 471780 - DNA, 15 bp, Homo sapiens
ttaatgaaagctccc

SEQ ID NO: 471781 - DNA, 15 bp, Homo sapiens
attaatgaaagctcc

SEQ ID NO: 471782 - DNA, 15 bp, Homo sapiens
aattaatgaaagctc

SEQ ID NO: 471783 - DNA, 15 bp, Homo sapiens
aaattaatgaaagct

SEQ ID NO: 471784 - DNA, 15 bp, Homo sapiens
aaaattaatgaaagc

SEQ ID NO: 471785 - DNA, 15 bp, Homo sapiens
aaaaattaatgaaag

SEQ ID NO: 471786 - DNA, 15 bp, Homo sapiens
aaaaaattaatgaaa

SEQ ID NO: 471787 - DNA, 15 bp, Homo sapiens
aaaaaaattaatgaa

SEQ ID NO: 471788 - DNA, 15 bp, Homo sapiens
aaaaaaaattaatga

SEQ ID NO: 471789 - DNA, 15 bp, Homo sapiens
aaaaaaaaattaatg

SEQ ID NO: 471790 - DNA, 15 bp, Homo sapiens
ccctgtctcaaaaaa

SEQ ID NO: 471791 - DNA, 15 bp, Homo sapiens
accctgtctcaaaaa

SEQ ID NO: 471792 - DNA, 15 bp, Homo sapiens
gaccctgtctcaaaa

SEQ ID NO: 471793 - DNA, 15 bp, Homo sapiens
agaccctgtctcaaa

SEQ ID NO: 471794 - DNA, 15 bp, Homo sapiens
aagaccctgtctcaa

SEQ ID NO: 471795 - DNA, 15 bp, Homo sapiens
caagaccctgtctca

SEQ ID NO: 471796 - DNA, 15 bp, Homo sapiens
gcaagaccctgtctc

SEQ ID NO: 471797 - DNA, 15 bp, Homo sapiens
agcaagaccctgtct

SEQ ID NO: 471798 - DNA, 15 bp, Homo sapiens
gagcaagaccctgtc

SEQ ID NO: 471799 - DNA, 15 bp, Homo sapiens
agagcaagaccctgt

SEQ ID NO: 471800 - DNA, 15 bp, Homo sapiens
cagagcaagaccctg

SEQ ID NO: 471801 - DNA, 15 bp, Homo sapiens
gcagagcaagaccct

SEQ ID NO: 471802 - DNA, 15 bp, Homo sapiens
ggcagagcaagaccc

SEQ ID NO: 471803 - DNA, 15 bp, Homo sapiens
tggcagagcaagacc

SEQ ID NO: 471804 - DNA, 15 bp, Homo sapiens
gtggcagagcaagac

SEQ ID NO: 471805 - DNA, 15 bp, Homo sapiens
agtggcagagcaaga

SEQ ID NO: 471806 - DNA, 15 bp, Homo sapiens
gagtggcagagcaag

SEQ ID NO: 471807 - DNA, 15 bp, Homo sapiens
tgagtggcagagcaa

SEQ ID NO: 471808 - DNA, 15 bp, Homo sapiens
ctgagtggcagagca

SEQ ID NO: 471809 - DNA, 15 bp, Homo sapiens
cctgagtggcagagc

SEQ ID NO: 471810 - DNA, 15 bp, Homo sapiens
gcctgagtggcagag

SEQ ID NO: 471811 - DNA, 15 bp, Homo sapiens
agcctgagtggcaga

SEQ ID NO: 471812 - DNA, 15 bp, Homo sapiens
cagcctgagtggcag

SEQ ID NO: 471813 - DNA, 15 bp, Homo sapiens
ccagcctgagtggca

SEQ ID NO: 471814 - DNA, 15 bp, Homo sapiens
cccagcctgagtggc

SEQ ID NO: 471815 - DNA, 15 bp, Homo sapiens
gcccagcctgagtgg

SEQ ID NO: 471816 - DNA, 15 bp, Homo sapiens
agcccagcctgagtg

SEQ ID NO: 471817 - DNA, 15 bp, Homo sapiens
cagcccagcctgagt

SEQ ID NO: 471818 - DNA, 15 bp, Homo sapiens
gcagcccagcctgag

SEQ ID NO: 471819 - DNA, 15 bp, Homo sapiens
tgcagcccagcctga

SEQ ID NO: 471820 - DNA, 15 bp, Homo sapiens
ctgcagcccagcctg

SEQ ID NO: 471821 - DNA, 15 bp, Homo sapiens
actgcagcccagcct

SEQ ID NO: 471822 - DNA, 15 bp, Homo sapiens
cactgcagcccagcc

SEQ ID NO: 471823 - DNA, 15 bp, Homo sapiens
ccactgcagcccagc

SEQ ID NO: 471824 - DNA, 15 bp, Homo sapiens
gccactgcagcccag

SEQ ID NO: 471825 - DNA, 15 bp, Homo sapiens
tgccactgcagccca

SEQ ID NO: 471826 - DNA, 15 bp, Homo sapiens
atgccactgcagccc

SEQ ID NO: 471827 - DNA, 15 bp, Homo sapiens
catgccactgcagcc

SEQ ID NO: 471828 - DNA, 15 bp, Homo sapiens
tcatgccactgcagc

SEQ ID NO: 471829 - DNA, 15 bp, Homo sapiens
atcatgccactgcag

SEQ ID NO: 471830 - DNA, 15 bp, Homo sapiens
tgatcatgccactgc

SEQ ID NO: 471831 - DNA, 15 bp, Homo sapiens
gtgatcatgccactg

SEQ ID NO: 471832 - DNA, 15 bp, Homo sapiens
tgtgatcatgccact

SEQ ID NO: 471833 - DNA, 15 bp, Homo sapiens
ctgtgatcatgccac

SEQ ID NO: 471834 - DNA, 15 bp, Homo sapiens
gctgtgatcatgcca

SEQ ID NO: 471835 - DNA, 15 bp, Homo sapiens
agctgtgatcatgcc

SEQ ID NO: 471836 - DNA, 15 bp, Homo sapiens
gagctgtgatcatgc

SEQ ID NO: 471837 - DNA, 15 bp, Homo sapiens
tgagctgtgatcatg

SEQ ID NO: 471838 - DNA, 15 bp, Homo sapiens
cgaggctgcagtgag

SEQ ID NO: 471839 - DNA, 15 bp, Homo sapiens
tcgaggctgcagtga

SEQ ID NO: 471840 - DNA, 15 bp, Homo sapiens
gtcgaggctgcagtg

SEQ ID NO: 471841 - DNA, 15 bp, Homo sapiens
ggtcgaggctgcagt

SEQ ID NO: 471842 - DNA, 15 bp, Homo sapiens
aggtcgaggctgcag

SEQ ID NO: 471843 - DNA, 15 bp, Homo sapiens
gaggtcgaggctgca

SEQ ID NO: 471844 - DNA, 15 bp, Homo sapiens
agaggtcgaggctgc

SEQ ID NO: 471845 - DNA, 15 bp, Homo sapiens
gagaggtcgaggctg

SEQ ID NO: 471846 - DNA, 15 bp, Homo sapiens
tgagaggtcgaggct

SEQ ID NO: 471847 - DNA, 15 bp, Homo sapiens
ctgagaggtcgaggc

SEQ ID NO: 471848 - DNA, 15 bp, Homo sapiens
cctgagaggtcgagg

SEQ ID NO: 471849 - DNA, 15 bp, Homo sapiens
gcctgagaggtcgag

SEQ ID NO: 471850 - DNA, 15 bp, Homo sapiens
ggcctgagaggtcga

SEQ ID NO: 471851 - DNA, 15 bp, Homo sapiens
gggcctgagaggtcg

SEQ ID NO: 471852 - DNA, 15 bp, Homo sapiens
tgggcctgagaggtc

SEQ ID NO: 471853 - DNA, 15 bp, Homo sapiens
ttgggcctgagaggt

SEQ ID NO: 471854 - DNA, 15 bp, Homo sapiens
cttgggcctgagagg

SEQ ID NO: 471855 - DNA, 15 bp, Homo sapiens
gcttgggcctgagag

SEQ ID NO: 471856 - DNA, 15 bp, Homo sapiens
cgcttgggcctgaga

SEQ ID NO: 471857 - DNA, 15 bp, Homo sapiens
tcgcttgggcctgag

SEQ ID NO: 471858 - DNA, 15 bp, Homo sapiens
atcgcttgggcctga

SEQ ID NO: 471859 - DNA, 15 bp, Homo sapiens
gatcgcttgggcctg

SEQ ID NO: 471860 - DNA, 15 bp, Homo sapiens
ggatcgcttgggcct

SEQ ID NO: 471861 - DNA, 15 bp, Homo sapiens
aggatcgcttgggcc

SEQ ID NO: 471862 - DNA, 15 bp, Homo sapiens
gaggatcgcttgggc

SEQ ID NO: 471863 - DNA, 15 bp, Homo sapiens
ggaggatcgcttggg

SEQ ID NO: 471864 - DNA, 15 bp, Homo sapiens
aggaggatcgcttgg

SEQ ID NO: 471865 - DNA, 15 bp, Homo sapiens
taggaggatcgcttg

SEQ ID NO: 471866 - DNA, 15 bp, Homo sapiens
gtaggaggatcgctt

SEQ ID NO: 471867 - DNA, 15 bp, Homo sapiens
ggtaggaggatcgct

SEQ ID NO: 471868 - DNA, 15 bp, Homo sapiens
aggtaggaggatcgc

SEQ ID NO: 471869 - DNA, 15 bp, Homo sapiens
gaggtaggaggatcg

SEQ ID NO: 471870 - DNA, 15 bp, Homo sapiens
tgaggtaggaggatc

SEQ ID NO: 471871 - DNA, 15 bp, Homo sapiens
atgaggtaggaggat

SEQ ID NO: 471872 - DNA, 15 bp, Homo sapiens
gatgaggtaggagga

SEQ ID NO: 471873 - DNA, 15 bp, Homo sapiens
ggatgaggtaggagg

SEQ ID NO: 471874 - DNA, 15 bp, Homo sapiens
aggatgaggtaggag

SEQ ID NO: 471875 - DNA, 15 bp, Homo sapiens
gaggatgaggtagga

SEQ ID NO: 471876 - DNA, 15 bp, Homo sapiens
ggaggatgaggtagg

SEQ ID NO: 471877 - DNA, 15 bp, Homo sapiens
gggaggatgaggtag

SEQ ID NO: 471878 - DNA, 15 bp, Homo sapiens
tgggaggatgaggta

SEQ ID NO: 471879 - DNA, 15 bp, Homo sapiens
ttgggaggatgaggt

SEQ ID NO: 471880 - DNA, 15 bp, Homo sapiens
cttgggaggatgagg

SEQ ID NO: 471881 - DNA, 15 bp, Homo sapiens
acttgggaggatgag

SEQ ID NO: 471882 - DNA, 15 bp, Homo sapiens
tacttgggaggatga

SEQ ID NO: 471883 - DNA, 15 bp, Homo sapiens
ctacttgggaggatg

SEQ ID NO: 471884 - DNA, 15 bp, Homo sapiens
gctacttgggaggat

SEQ ID NO: 471885 - DNA, 15 bp, Homo sapiens
ggctacttgggagga

SEQ ID NO: 471886 - DNA, 15 bp, Homo sapiens
cggctacttgggagg

SEQ ID NO: 471887 - DNA, 15 bp, Homo sapiens
ccggctacttgggag

SEQ ID NO: 471888 - DNA, 15 bp, Homo sapiens
cccggctacttggga

SEQ ID NO: 471889 - DNA, 15 bp, Homo sapiens
tcccggctacttggg

SEQ ID NO: 471890 - DNA, 15 bp, Homo sapiens
gtcccggctacttgg

SEQ ID NO: 471891 - DNA, 15 bp, Homo sapiens
ggtcccggctacttg

SEQ ID NO: 471892 - DNA, 15 bp, Homo sapiens
tggtcccggctactt

SEQ ID NO: 471893 - DNA, 15 bp, Homo sapiens
gtggtcccggctact

SEQ ID NO: 471894 - DNA, 15 bp, Homo sapiens
tgtggtcccggctac

SEQ ID NO: 471895 - DNA, 15 bp, Homo sapiens
ctgtggtcccggcta

SEQ ID NO: 471896 - DNA, 15 bp, Homo sapiens
cctgtggtcccggct

SEQ ID NO: 471897 - DNA, 15 bp, Homo sapiens
gcctgtggtcccggc

SEQ ID NO: 471898 - DNA, 15 bp, Homo sapiens
tgcctgtggtcccgg

SEQ ID NO: 471899 - DNA, 15 bp, Homo sapiens
atgcctgtggtcccg

SEQ ID NO: 471900 - DNA, 15 bp, Homo sapiens
catgcctgtggtccc

SEQ ID NO: 471901 - DNA, 15 bp, Homo sapiens
gcatgcctgtggtcc

SEQ ID NO: 471902 - DNA, 15 bp, Homo sapiens
tgcatgcctgtggtc

SEQ ID NO: 471903 - DNA, 15 bp, Homo sapiens
gtgcatgcctgtggt

SEQ ID NO: 471904 - DNA, 15 bp, Homo sapiens
ggtgcatgcctgtgg

SEQ ID NO: 471905 - DNA, 15 bp, Homo sapiens
tggtgcatgcctgtg

SEQ ID NO: 471906 - DNA, 15 bp, Homo sapiens
gtggtggtgcatgcc

SEQ ID NO: 471907 - DNA, 15 bp, Homo sapiens
cgtggtggtgcatgc

SEQ ID NO: 471908 - DNA, 15 bp, Homo sapiens
gcgtggtggtgcatg

SEQ ID NO: 471909 - DNA, 15 bp, Homo sapiens
ggcgtggtggtgcat

SEQ ID NO: 471910 - DNA, 15 bp, Homo sapiens
gggcgtggtggtgca

SEQ ID NO: 471911 - DNA, 15 bp, Homo sapiens
tgggcgtggtggtgc

SEQ ID NO: 471912 - DNA, 15 bp, Homo sapiens
ctgggcgtggtggtg

SEQ ID NO: 471913 - DNA, 15 bp, Homo sapiens
gctgggcgtggtggt

SEQ ID NO: 471914 - DNA, 15 bp, Homo sapiens
taattagctgggcgt

SEQ ID NO: 471915 - DNA, 15 bp, Homo sapiens
ttaattagctgggcg

SEQ ID NO: 471916 - DNA, 15 bp, Homo sapiens
tttaattagctgggc

SEQ ID NO: 471917 - DNA, 15 bp, Homo sapiens
ttttaattagctggg

SEQ ID NO: 471918 - DNA, 15 bp, Homo sapiens
tttttaattagctgg

SEQ ID NO: 471919 - DNA, 15 bp, Homo sapiens
ttttttaattagctg

SEQ ID NO: 471920 - DNA, 15 bp, Homo sapiens
tttttttaattagct

SEQ ID NO: 471921 - DNA, 15 bp, Homo sapiens
ttttttttaattagc

SEQ ID NO: 471922 - DNA, 15 bp, Homo sapiens
tttttttttaattag

SEQ ID NO: 471923 - DNA, 15 bp, Homo sapiens
ttttttttttaatta

SEQ ID NO: 471924 - DNA, 15 bp, Homo sapiens
tttttttttttaatt

SEQ ID NO: 471925 - DNA, 15 bp, Homo sapiens
ttttttttttttaat

SEQ ID NO: 471926 - DNA, 15 bp, Homo sapiens
attttttttttttaa

SEQ ID NO: 471927 - DNA, 15 bp, Homo sapiens
aatttttttttttta

SEQ ID NO: 471928 - DNA, 15 bp, Homo sapiens
aaatttttttttttt

SEQ ID NO: 471929 - DNA, 15 bp, Homo sapiens
caaattttttttttt

SEQ ID NO: 471930 - DNA, 15 bp, Homo sapiens
acaaatttttttttt

SEQ ID NO: 471931 - DNA, 15 bp, Homo sapiens
tacaaattttttttt

SEQ ID NO: 471932 - DNA, 15 bp, Homo sapiens
ctacaaatttttttt

SEQ ID NO: 471933 - DNA, 15 bp, Homo sapiens
tctacaaattttttt

SEQ ID NO: 471934 - DNA, 15 bp, Homo sapiens
ctctacaaatttttt

SEQ ID NO: 471935 - DNA, 15 bp, Homo sapiens
tctctacaaattttt

SEQ ID NO: 471936 - DNA, 15 bp, Homo sapiens
atctctacaaatttt

SEQ ID NO: 471937 - DNA, 15 bp, Homo sapiens
catctctacaaattt

SEQ ID NO: 471938 - DNA, 15 bp, Homo sapiens
ccatctctacaaatt

SEQ ID NO: 471939 - DNA, 15 bp, Homo sapiens
cccatctctacaaat

SEQ ID NO: 471940 - DNA, 15 bp, Homo sapiens
ccccatctctacaaa

SEQ ID NO: 471941 - DNA, 15 bp, Homo sapiens
cccccatctctacaa

SEQ ID NO: 471942 - DNA, 15 bp, Homo sapiens
acccccatctctaca

SEQ ID NO: 471943 - DNA, 15 bp, Homo sapiens
gacccccatctctac

SEQ ID NO: 471944 - DNA, 15 bp, Homo sapiens
agacccccatctcta

SEQ ID NO: 471945 - DNA, 15 bp, Homo sapiens
gagacccccatctct

SEQ ID NO: 471946 - DNA, 15 bp, Homo sapiens
ggagacccccatctc

SEQ ID NO: 471947 - DNA, 15 bp, Homo sapiens
gggagacccccatct

SEQ ID NO: 471948 - DNA, 15 bp, Homo sapiens
agggagacccccatc

SEQ ID NO: 471949 - DNA, 15 bp, Homo sapiens
cagggagacccccat

SEQ ID NO: 471950 - DNA, 15 bp, Homo sapiens
acagggagaccccca

SEQ ID NO: 471951 - DNA, 15 bp, Homo sapiens
cacagggagaccccc

SEQ ID NO: 471952 - DNA, 15 bp, Homo sapiens
acacagggagacccc

SEQ ID NO: 471953 - DNA, 15 bp, Homo sapiens
aacacagggagaccc

SEQ ID NO: 471954 - DNA, 15 bp, Homo sapiens
caacacagggagacc

SEQ ID NO: 471955 - DNA, 15 bp, Homo sapiens
acaacacagggagac

SEQ ID NO: 471956 - DNA, 15 bp, Homo sapiens
gacaacacagggaga

SEQ ID NO: 471957 - DNA, 15 bp, Homo sapiens
ggacaacacagggag

SEQ ID NO: 471958 - DNA, 15 bp, Homo sapiens
tggacaacacaggga

SEQ ID NO: 471959 - DNA, 15 bp, Homo sapiens
ctggacaacacaggg

SEQ ID NO: 471960 - DNA, 15 bp, Homo sapiens
cctggacaacacagg

SEQ ID NO: 471961 - DNA, 15 bp, Homo sapiens
agcctggacaacaca

SEQ ID NO: 471962 - DNA, 15 bp, Homo sapiens
cagcctggacaacac

SEQ ID NO: 471963 - DNA, 15 bp, Homo sapiens
tcagcctggacaaca

SEQ ID NO: 471964 - DNA, 15 bp, Homo sapiens
atcagcctggacaac

SEQ ID NO: 471965 - DNA, 15 bp, Homo sapiens
gatcagcctggacaa

SEQ ID NO: 471966 - DNA, 15 bp, Homo sapiens
tgatcagcctggaca

SEQ ID NO: 471967 - DNA, 15 bp, Homo sapiens
atgatcagcctggac

SEQ ID NO: 471968 - DNA, 15 bp, Homo sapiens
catgatcagcctgga

SEQ ID NO: 471969 - DNA, 15 bp, Homo sapiens
tcatgatcagcctgg

SEQ ID NO: 471970 - DNA, 15 bp, Homo sapiens
ttcatgatcagcctg

SEQ ID NO: 471971 - DNA, 15 bp, Homo sapiens
gttcatgatcagcct

SEQ ID NO: 471972 - DNA, 15 bp, Homo sapiens
agttcatgatcagcc

SEQ ID NO: 471973 - DNA, 15 bp, Homo sapiens
gagttcatgatcagc

SEQ ID NO: 471974 - DNA, 15 bp, Homo sapiens
ggagttcatgatcag

SEQ ID NO: 471975 - DNA, 15 bp, Homo sapiens
aggagttcatgatca

SEQ ID NO: 471976 - DNA, 15 bp, Homo sapiens
caggagttcatgatc

SEQ ID NO: 471977 - DNA, 15 bp, Homo sapiens
ccaggagttcatgat

SEQ ID NO: 471978 - DNA, 15 bp, Homo sapiens
cccaggagttcatga

SEQ ID NO: 471979 - DNA, 15 bp, Homo sapiens
gcccaggagttcatg

SEQ ID NO: 471980 - DNA, 15 bp, Homo sapiens
agcccaggagttcat

SEQ ID NO: 471981 - DNA, 15 bp, Homo sapiens
ggatcacttgagccc

SEQ ID NO: 471982 - DNA, 15 bp, Homo sapiens
tgggaggatcacttg

SEQ ID NO: 471983 - DNA, 15 bp, Homo sapiens
ttgggaggatcactt

SEQ ID NO: 471984 - DNA, 15 bp, Homo sapiens
gttgggaggatcact

SEQ ID NO: 471985 - DNA, 15 bp, Homo sapiens
agttgggaggatcac

SEQ ID NO: 471986 - DNA, 15 bp, Homo sapiens
gagttgggaggatca

SEQ ID NO: 471987 - DNA, 15 bp, Homo sapiens
tgagttgggaggatc

SEQ ID NO: 471988 - DNA, 15 bp, Homo sapiens
ctgagttgggaggat

SEQ ID NO: 471989 - DNA, 15 bp, Homo sapiens
gctgagttgggagga

SEQ ID NO: 471990 - DNA, 15 bp, Homo sapiens
ggctgagttgggagg

SEQ ID NO: 471991 - DNA, 15 bp, Homo sapiens
aggctgagttgggag

SEQ ID NO: 471992 - DNA, 15 bp, Homo sapiens
gaggctgagttggga

SEQ ID NO: 471993 - DNA, 15 bp, Homo sapiens
agaggctgagttggg

SEQ ID NO: 471994 - DNA, 15 bp, Homo sapiens
gagaggctgagttgg

SEQ ID NO: 471995 - DNA, 15 bp, Homo sapiens
tgagaggctgagttg

SEQ ID NO: 471996 - DNA, 15 bp, Homo sapiens
ttgagaggctgagtt

SEQ ID NO: 471997 - DNA, 15 bp, Homo sapiens
tttgagaggctgagt

SEQ ID NO: 471998 - DNA, 15 bp, Homo sapiens
gcactttgagaggct

SEQ ID NO: 471999 - DNA, 15 bp, Homo sapiens
ccagcactttgagag

SEQ ID NO: 472000 - DNA, 15 bp, Homo sapiens
gccagcactttgaga

SEQ ID NO: 472001 - DNA, 15 bp, Homo sapiens
tgccagcactttgag

SEQ ID NO: 472002 - DNA, 15 bp, Homo sapiens
atgccagcactttga

SEQ ID NO: 472003 - DNA, 15 bp, Homo sapiens
aatgccagcactttg

SEQ ID NO: 472004 - DNA, 15 bp, Homo sapiens
taatgccagcacttt

SEQ ID NO: 472005 - DNA, 15 bp, Homo sapiens
gtaatgccagcactt

SEQ ID NO: 472006 - DNA, 15 bp, Homo sapiens
tgtaatgccagcact

SEQ ID NO: 472007 - DNA, 15 bp, Homo sapiens
ctgtaatgccagcac

SEQ ID NO: 472008 - DNA, 15 bp, Homo sapiens
cctgtaatgccagca

SEQ ID NO: 472009 - DNA, 15 bp, Homo sapiens
gcctgtaatgccagc

SEQ ID NO: 472010 - DNA, 15 bp, Homo sapiens
cgcctgtaatgccag

SEQ ID NO: 472011 - DNA, 15 bp, Homo sapiens
acgcctgtaatgcca

SEQ ID NO: 472012 - DNA, 15 bp, Homo sapiens
cacgcctgtaatgcc

SEQ ID NO: 472013 - DNA, 15 bp, Homo sapiens
tcacgcctgtaatgc

SEQ ID NO: 472014 - DNA, 15 bp, Homo sapiens
ctcacgcctgtaatg

SEQ ID NO: 472015 - DNA, 15 bp, Homo sapiens
ggccaggtgcagtgg

SEQ ID NO: 472016 - DNA, 15 bp, Homo sapiens
tggccaggtgcagtg

SEQ ID NO: 472017 - DNA, 15 bp, Homo sapiens
ttggccaggtgcagt

SEQ ID NO: 472018 - DNA, 15 bp, Homo sapiens
gttggccaggtgcag

SEQ ID NO: 472019 - DNA, 15 bp, Homo sapiens
tgttggccaggtgca

SEQ ID NO: 472020 - DNA, 15 bp, Homo sapiens
ctgttggccaggtgc

SEQ ID NO: 472021 - DNA, 15 bp, Homo sapiens
cctgttggccaggtg

SEQ ID NO: 472022 - DNA, 15 bp, Homo sapiens
ccctgttggccaggt

SEQ ID NO: 472023 - DNA, 15 bp, Homo sapiens
tccctgttggccagg

SEQ ID NO: 472024 - DNA, 15 bp, Homo sapiens
ctccctgttggccag

SEQ ID NO: 472025 - DNA, 15 bp, Homo sapiens
gctccctgttggcca

SEQ ID NO: 472026 - DNA, 15 bp, Homo sapiens
ggctccctgttggcc

SEQ ID NO: 472027 - DNA, 15 bp, Homo sapiens
aggctccctgttggc

SEQ ID NO: 472028 - DNA, 15 bp, Homo sapiens
aaggctccctgttgg

SEQ ID NO: 472029 - DNA, 15 bp, Homo sapiens
gaaggctccctgttg

SEQ ID NO: 472030 - DNA, 15 bp, Homo sapiens
agaaggctccctgtt

SEQ ID NO: 472031 - DNA, 15 bp, Homo sapiens
gagaaggctccctgt

SEQ ID NO: 472032 - DNA, 15 bp, Homo sapiens
agagaaggctccctg

SEQ ID NO: 472033 - DNA, 15 bp, Homo sapiens
aagagaaggctccct

SEQ ID NO: 472034 - DNA, 15 bp, Homo sapiens
caagagaaggctccc

SEQ ID NO: 472035 - DNA, 15 bp, Homo sapiens
ccaagagaaggctcc

SEQ ID NO: 472036 - DNA, 15 bp, Homo sapiens
cccaagagaaggctc

SEQ ID NO: 472037 - DNA, 15 bp, Homo sapiens
ccccaagagaaggct

SEQ ID NO: 472038 - DNA, 15 bp, Homo sapiens
tccccaagagaaggc

SEQ ID NO: 472039 - DNA, 15 bp, Homo sapiens
atccccaagagaagg

SEQ ID NO: 472040 - DNA, 15 bp, Homo sapiens
tatccccaagagaag

SEQ ID NO: 472041 - DNA, 15 bp, Homo sapiens
gtatccccaagagaa

SEQ ID NO: 472042 - DNA, 15 bp, Homo sapiens
agtatccccaagaga

SEQ ID NO: 472043 - DNA, 15 bp, Homo sapiens
cagtatccccaagag

SEQ ID NO: 472044 - DNA, 15 bp, Homo sapiens
gcagtatccccaaga

SEQ ID NO: 472045 - DNA, 15 bp, Homo sapiens
ggcagtatccccaag

SEQ ID NO: 472046 - DNA, 15 bp, Homo sapiens
aggcagtatccccaa

SEQ ID NO: 472047 - DNA, 15 bp, Homo sapiens
caggcagtatcccca

SEQ ID NO: 472048 - DNA, 15 bp, Homo sapiens
gcaggcagtatcccc

SEQ ID NO: 472049 - DNA, 15 bp, Homo sapiens
tgcaggcagtatccc

SEQ ID NO: 472050 - DNA, 15 bp, Homo sapiens
ctgcaggcagtatcc

SEQ ID NO: 472051 - DNA, 15 bp, Homo sapiens
cctgcaggcagtatc

SEQ ID NO: 472052 - DNA, 15 bp, Homo sapiens
acctgcaggcagtat

SEQ ID NO: 472053 - DNA, 15 bp, Homo sapiens
gacctgcaggcagta

SEQ ID NO: 472054 - DNA, 15 bp, Homo sapiens
ggacctgcaggcagt

SEQ ID NO: 472055 - DNA, 15 bp, Homo sapiens
aggacctgcaggcag

SEQ ID NO: 472056 - DNA, 15 bp, Homo sapiens
caggacctgcaggca

SEQ ID NO: 472057 - DNA, 15 bp, Homo sapiens
gcaggacctgcaggc

SEQ ID NO: 472058 - DNA, 15 bp, Homo sapiens
tgcaggacctgcagg

SEQ ID NO: 472059 - DNA, 15 bp, Homo sapiens
atgcaggacctgcag

SEQ ID NO: 472060 - DNA, 15 bp, Homo sapiens
catgcaggacctgca

SEQ ID NO: 472061 - DNA, 15 bp, Homo sapiens
acatgcaggacctgc

SEQ ID NO: 472062 - DNA, 15 bp, Homo sapiens
tacatgcaggacctg

SEQ ID NO: 472063 - DNA, 15 bp, Homo sapiens
atacatgcaggacct

SEQ ID NO: 472064 - DNA, 15 bp, Homo sapiens
gatacatgcaggacc

SEQ ID NO: 472065 - DNA, 15 bp, Homo sapiens
agatacatgcaggac

SEQ ID NO: 472066 - DNA, 15 bp, Homo sapiens
aagatacatgcagga

SEQ ID NO: 472067 - DNA, 15 bp, Homo sapiens
aaagatacatgcagg

SEQ ID NO: 472068 - DNA, 15 bp, Homo sapiens
aaaagatacatgcag

SEQ ID NO: 472069 - DNA, 15 bp, Homo sapiens
aaaaagatacatgca

SEQ ID NO: 472070 - DNA, 15 bp, Homo sapiens
aaaaaagatacatgc

SEQ ID NO: 472071 - DNA, 15 bp, Homo sapiens
caaaaaagatacatg

SEQ ID NO: 472072 - DNA, 15 bp, Homo sapiens
tcaaaaaagatacat

SEQ ID NO: 472073 - DNA, 15 bp, Homo sapiens
ctcaaaaaagataca

SEQ ID NO: 472074 - DNA, 15 bp, Homo sapiens
cctcaaaaaagatac

SEQ ID NO: 472075 - DNA, 15 bp, Homo sapiens
acctcaaaaaagata

SEQ ID NO: 472076 - DNA, 15 bp, Homo sapiens
aacctcaaaaaagat

SEQ ID NO: 472077 - DNA, 15 bp, Homo sapiens
aaacctcaaaaaaga

SEQ ID NO: 472078 - DNA, 15 bp, Homo sapiens
aaaacctcaaaaaag

SEQ ID NO: 472079 - DNA, 15 bp, Homo sapiens
caaaacctcaaaaaa

SEQ ID NO: 472080 - DNA, 15 bp, Homo sapiens
ccaaaacctcaaaaa

SEQ ID NO: 472081 - DNA, 15 bp, Homo sapiens
gccaaaacctcaaaa

SEQ ID NO: 472082 - DNA, 15 bp, Homo sapiens
agccaaaacctcaaa

SEQ ID NO: 472083 - DNA, 15 bp, Homo sapiens
aagccaaaacctcaa

SEQ ID NO: 472084 - DNA, 15 bp, Homo sapiens
gaagccaaaacctca

SEQ ID NO: 472085 - DNA, 15 bp, Homo sapiens
tgaagccaaaacctc

SEQ ID NO: 472086 - DNA, 15 bp, Homo sapiens
atgaagccaaaacct

SEQ ID NO: 472087 - DNA, 15 bp, Homo sapiens
aatgaagccaaaacc

SEQ ID NO: 472088 - DNA, 15 bp, Homo sapiens
aaatgaagccaaaac

SEQ ID NO: 472089 - DNA, 15 bp, Homo sapiens
caaatgaagccaaaa

SEQ ID NO: 472090 - DNA, 15 bp, Homo sapiens
tcaaatgaagccaaa

SEQ ID NO: 472091 - DNA, 15 bp, Homo sapiens
ttcaaatgaagccaa

SEQ ID NO: 472092 - DNA, 15 bp, Homo sapiens
attcaaatgaagcca

SEQ ID NO: 472093 - DNA, 15 bp, Homo sapiens
aattcaaatgaagcc

SEQ ID NO: 472094 - DNA, 15 bp, Homo sapiens
gaattcaaatgaagc

SEQ ID NO: 472095 - DNA, 15 bp, Homo sapiens
agaattcaaatgaag

SEQ ID NO: 472096 - DNA, 15 bp, Homo sapiens
gagaattcaaatgaa

SEQ ID NO: 472097 - DNA, 15 bp, Homo sapiens
ggagaattcaaatga

SEQ ID NO: 472098 - DNA, 15 bp, Homo sapiens
aggagaattcaaatg

SEQ ID NO: 472099 - DNA, 15 bp, Homo sapiens
gaggagaattcaaat

SEQ ID NO: 472100 - DNA, 15 bp, Homo sapiens
tgaggagaattcaaa

SEQ ID NO: 472101 - DNA, 15 bp, Homo sapiens
ctgaggagaattcaa

SEQ ID NO: 472102 - DNA, 15 bp, Homo sapiens
tctgaggagaattca

SEQ ID NO: 472103 - DNA, 15 bp, Homo sapiens
ttctgaggagaattc

SEQ ID NO: 472104 - DNA, 15 bp, Homo sapiens
tttctgaggagaatt

SEQ ID NO: 472105 - DNA, 15 bp, Homo sapiens
gtttctgaggagaat

SEQ ID NO: 472106 - DNA, 15 bp, Homo sapiens
agtttctgaggagaa

SEQ ID NO: 472107 - DNA, 15 bp, Homo sapiens
aagtttctgaggaga

SEQ ID NO: 472108 - DNA, 15 bp, Homo sapiens
aaagtttctgaggag

SEQ ID NO: 472109 - DNA, 15 bp, Homo sapiens
taaagtttctgagga

SEQ ID NO: 472110 - DNA, 15 bp, Homo sapiens
ataaagtttctgagg

SEQ ID NO: 472111 - DNA, 15 bp, Homo sapiens
tataaagtttctgag

SEQ ID NO: 472112 - DNA, 15 bp, Homo sapiens
atataaagtttctga

SEQ ID NO: 472113 - DNA, 15 bp, Homo sapiens
aatataaagtttctg

SEQ ID NO: 472114 - DNA, 15 bp, Homo sapiens
aaatataaagtttct

SEQ ID NO: 472115 - DNA, 15 bp, Homo sapiens
aaaatataaagtttc

SEQ ID NO: 472116 - DNA, 15 bp, Homo sapiens
gaaaatataaagttt

SEQ ID NO: 472117 - DNA, 15 bp, Homo sapiens
agaaaatataaagtt

SEQ ID NO: 472118 - DNA, 15 bp, Homo sapiens
cagaaaatataaagt

SEQ ID NO: 472119 - DNA, 15 bp, Homo sapiens
acagaaaatataaag

SEQ ID NO: 472120 - DNA, 15 bp, Homo sapiens
aacagaaaatataaa

SEQ ID NO: 472121 - DNA, 15 bp, Homo sapiens
gaacagaaaatataa

SEQ ID NO: 472122 - DNA, 15 bp, Homo sapiens
ggaacagaaaatata

SEQ ID NO: 472123 - DNA, 15 bp, Homo sapiens
gggaacagaaaatat

SEQ ID NO: 472124 - DNA, 15 bp, Homo sapiens
tgggaacagaaaata

SEQ ID NO: 472125 - DNA, 15 bp, Homo sapiens
ttgggaacagaaaat

SEQ ID NO: 472126 - DNA, 15 bp, Homo sapiens
cttgggaacagaaaa

SEQ ID NO: 472127 - DNA, 15 bp, Homo sapiens
ccttgggaacagaaa

SEQ ID NO: 472128 - DNA, 15 bp, Homo sapiens
tccttgggaacagaa

SEQ ID NO: 472129 - DNA, 15 bp, Homo sapiens
ttccttgggaacaga

SEQ ID NO: 472130 - DNA, 15 bp, Homo sapiens
tttccttgggaacag

SEQ ID NO: 472131 - DNA, 15 bp, Homo sapiens
atttccttgggaaca

SEQ ID NO: 472132 - DNA, 15 bp, Homo sapiens
gatttccttgggaac

SEQ ID NO: 472133 - DNA, 15 bp, Homo sapiens
agatttccttgggaa

SEQ ID NO: 472134 - DNA, 15 bp, Homo sapiens
aagatttccttggga

SEQ ID NO: 472135 - DNA, 15 bp, Homo sapiens
aaagatttccttggg

SEQ ID NO: 472136 - DNA, 15 bp, Homo sapiens
gaaagatttccttgg

SEQ ID NO: 472137 - DNA, 15 bp, Homo sapiens
agaaagatttccttg

SEQ ID NO: 472138 - DNA, 15 bp, Homo sapiens
aagaaagatttcctt

SEQ ID NO: 472139 - DNA, 15 bp, Homo sapiens
aaagaaagatttcct

SEQ ID NO: 472140 - DNA, 15 bp, Homo sapiens
taaagaaagatttcc

SEQ ID NO: 472141 - DNA, 15 bp, Homo sapiens
gtaaagaaagatttc

SEQ ID NO: 472142 - DNA, 15 bp, Homo sapiens
agtaaagaaagattt

SEQ ID NO: 472143 - DNA, 15 bp, Homo sapiens
aagtaaagaaagatt

SEQ ID NO: 472144 - DNA, 15 bp, Homo sapiens
gaagtaaagaaagat

SEQ ID NO: 472145 - DNA, 15 bp, Homo sapiens
agaagtaaagaaaga

SEQ ID NO: 472146 - DNA, 15 bp, Homo sapiens
cagaagtaaagaaag

SEQ ID NO: 472147 - DNA, 15 bp, Homo sapiens
acagaagtaaagaaa

SEQ ID NO: 472148 - DNA, 15 bp, Homo sapiens
aacagaagtaaagaa

SEQ ID NO: 472149 - DNA, 15 bp, Homo sapiens
aaacagaagtaaaga

SEQ ID NO: 472150 - DNA, 15 bp, Homo sapiens
aaaacagaagtaaag

SEQ ID NO: 472151 - DNA, 15 bp, Homo sapiens
aaaaacagaagtaaa

SEQ ID NO: 472152 - DNA, 15 bp, Homo sapiens
aaaaaacagaagtaa

SEQ ID NO: 472153 - DNA, 15 bp, Homo sapiens
aaaaaaacagaagta

SEQ ID NO: 472154 - DNA, 15 bp, Homo sapiens
caaaaaaacagaagt

SEQ ID NO: 472155 - DNA, 15 bp, Homo sapiens
acaaaaaaacagaag

SEQ ID NO: 472156 - DNA, 15 bp, Homo sapiens
aacaaaaaaacagaa

SEQ ID NO: 472157 - DNA, 15 bp, Homo sapiens
aaacaaaaaaacaga

SEQ ID NO: 472158 - DNA, 15 bp, Homo sapiens
caaacaaaaaaacag

SEQ ID NO: 472159 - DNA, 15 bp, Homo sapiens
gcaaacaaaaaaaca

SEQ ID NO: 472160 - DNA, 15 bp, Homo sapiens
agcaaacaaaaaaac

SEQ ID NO: 472161 - DNA, 15 bp, Homo sapiens
aagcaaacaaaaaaa

SEQ ID NO: 472162 - DNA, 15 bp, Homo sapiens
taagcaaacaaaaaa

SEQ ID NO: 472163 - DNA, 15 bp, Homo sapiens
ataagcaaacaaaaa

SEQ ID NO: 472164 - DNA, 15 bp, Homo sapiens
aataagcaaacaaaa

SEQ ID NO: 472165 - DNA, 15 bp, Homo sapiens
aaataagcaaacaaa

SEQ ID NO: 472166 - DNA, 15 bp, Homo sapiens
aaaataagcaaacaa

SEQ ID NO: 472167 - DNA, 15 bp, Homo sapiens
taaaataagcaaaca

SEQ ID NO: 472168 - DNA, 15 bp, Homo sapiens
ttaaaataagcaaac

SEQ ID NO: 472169 - DNA, 15 bp, Homo sapiens
tttaaaataagcaaa

SEQ ID NO: 472170 - DNA, 15 bp, Homo sapiens
gtttaaaataagcaa

SEQ ID NO: 472171 - DNA, 15 bp, Homo sapiens
tgtttaaaataagca

SEQ ID NO: 472172 - DNA, 15 bp, Homo sapiens
ctgtttaaaataagc

SEQ ID NO: 472173 - DNA, 15 bp, Homo sapiens
cctgtttaaaataag

SEQ ID NO: 472174 - DNA, 15 bp, Homo sapiens
tcctgtttaaaataa

SEQ ID NO: 472175 - DNA, 15 bp, Homo sapiens
atcctgtttaaaata

SEQ ID NO: 472176 - DNA, 15 bp, Homo sapiens
gatcctgtttaaaat

SEQ ID NO: 472177 - DNA, 15 bp, Homo sapiens
agatcctgtttaaaa

SEQ ID NO: 472178 - DNA, 15 bp, Homo sapiens
tagatcctgtttaaa

SEQ ID NO: 472179 - DNA, 15 bp, Homo sapiens
ctagatcctgtttaa

SEQ ID NO: 472180 - DNA, 15 bp, Homo sapiens
tctagatcctgttta

SEQ ID NO: 472181 - DNA, 15 bp, Homo sapiens
ttctagatcctgttt

SEQ ID NO: 472182 - DNA, 15 bp, Homo sapiens
gttctagatcctgtt

SEQ ID NO: 472183 - DNA, 15 bp, Homo sapiens
tgttctagatcctgt

SEQ ID NO: 472184 - DNA, 15 bp, Homo sapiens
ctgttctagatcctg

SEQ ID NO: 472185 - DNA, 15 bp, Homo sapiens
tctgttctagatcct

SEQ ID NO: 472186 - DNA, 15 bp, Homo sapiens
ttctgttctagatcc

SEQ ID NO: 472187 - DNA, 15 bp, Homo sapiens
tttctgttctagatc

SEQ ID NO: 472188 - DNA, 15 bp, Homo sapiens
ttttctgttctagat

SEQ ID NO: 472189 - DNA, 15 bp, Homo sapiens
attttctgttctaga

SEQ ID NO: 472190 - DNA, 15 bp, Homo sapiens
cattttctgttctag

SEQ ID NO: 472191 - DNA, 15 bp, Homo sapiens
tcattttctgttcta

SEQ ID NO: 472192 - DNA, 15 bp, Homo sapiens
ttcattttctgttct

SEQ ID NO: 472193 - DNA, 15 bp, Homo sapiens
tttcattttctgttc

SEQ ID NO: 472194 - DNA, 15 bp, Homo sapiens
ctttcattttctgtt

SEQ ID NO: 472195 - DNA, 15 bp, Homo sapiens
actttcattttctgt

SEQ ID NO: 472196 - DNA, 15 bp, Homo sapiens
cactttcattttctg

SEQ ID NO: 472197 - DNA, 15 bp, Homo sapiens
ccactttcattttct

SEQ ID NO: 472198 - DNA, 15 bp, Homo sapiens
accactttcattttc

SEQ ID NO: 472199 - DNA, 15 bp, Homo sapiens
taccactttcatttt

SEQ ID NO: 472200 - DNA, 15 bp, Homo sapiens
ctaccactttcattt

SEQ ID NO: 472201 - DNA, 15 bp, Homo sapiens
tctaccactttcatt

SEQ ID NO: 472202 - DNA, 15 bp, Homo sapiens
ctctaccactttcat

SEQ ID NO: 472203 - DNA, 15 bp, Homo sapiens
tctctaccactttca

SEQ ID NO: 472204 - DNA, 15 bp, Homo sapiens
ttctctaccactttc

SEQ ID NO: 472205 - DNA, 15 bp, Homo sapiens
attctctaccacttt

SEQ ID NO: 472206 - DNA, 15 bp, Homo sapiens
gattctctaccactt

SEQ ID NO: 472207 - DNA, 15 bp, Homo sapiens
agattctctaccact

SEQ ID NO: 472208 - DNA, 15 bp, Homo sapiens
gagattctctaccac

SEQ ID NO: 472209 - DNA, 15 bp, Homo sapiens
ggagattctctacca

SEQ ID NO: 472210 - DNA, 15 bp, Homo sapiens
tggagattctctacc

SEQ ID NO: 472211 - DNA, 15 bp, Homo sapiens
ctggagattctctac

SEQ ID NO: 472212 - DNA, 15 bp, Homo sapiens
cctggagattctcta

SEQ ID NO: 472213 - DNA, 15 bp, Homo sapiens
tcctggagattctct

SEQ ID NO: 472214 - DNA, 15 bp, Homo sapiens
atcctggagattctc

SEQ ID NO: 472215 - DNA, 15 bp, Homo sapiens
catcctggagattct

SEQ ID NO: 472216 - DNA, 15 bp, Homo sapiens
tcatcctggagattc

SEQ ID NO: 472217 - DNA, 15 bp, Homo sapiens
gtcatcctggagatt

SEQ ID NO: 472218 - DNA, 15 bp, Homo sapiens
agtcatcctggagat

SEQ ID NO: 472219 - DNA, 15 bp, Homo sapiens
aagtcatcctggaga

SEQ ID NO: 472220 - DNA, 15 bp, Homo sapiens
aaagtcatcctggag

SEQ ID NO: 472221 - DNA, 15 bp, Homo sapiens
caaagtcatcctgga

SEQ ID NO: 472222 - DNA, 15 bp, Homo sapiens
tcaaagtcatcctgg

SEQ ID NO: 472223 - DNA, 15 bp, Homo sapiens
atcaaagtcatcctg

SEQ ID NO: 472224 - DNA, 15 bp, Homo sapiens
aatcaaagtcatcct

SEQ ID NO: 472225 - DNA, 15 bp, Homo sapiens
aaatcaaagtcatcc

SEQ ID NO: 472226 - DNA, 15 bp, Homo sapiens
gaaatcaaagtcatc

SEQ ID NO: 472227 - DNA, 15 bp, Homo sapiens
tgaaatcaaagtcat

SEQ ID NO: 472228 - DNA, 15 bp, Homo sapiens
ttgaaatcaaagtca

SEQ ID NO: 472229 - DNA, 15 bp, Homo sapiens
gttgaaatcaaagtc

SEQ ID NO: 472230 - DNA, 15 bp, Homo sapiens
agttgaaatcaaagt

SEQ ID NO: 472231 - DNA, 15 bp, Homo sapiens
tagttgaaatcaaag

SEQ ID NO: 472232 - DNA, 15 bp, Homo sapiens
atagttgaaatcaaa

SEQ ID NO: 472233 - DNA, 15 bp, Homo sapiens
tatagttgaaatcaa

SEQ ID NO: 472234 - DNA, 15 bp, Homo sapiens
ttatagttgaaatca

SEQ ID NO: 472235 - DNA, 15 bp, Homo sapiens
tttatagttgaaatc

SEQ ID NO: 472236 - DNA, 15 bp, Homo sapiens
ttttatagttgaaat

SEQ ID NO: 472237 - DNA, 15 bp, Homo sapiens
gttttatagttgaaa

SEQ ID NO: 472238 - DNA, 15 bp, Homo sapiens
ggttttatagttgaa

SEQ ID NO: 472239 - DNA, 15 bp, Homo sapiens
gggttttatagttga

SEQ ID NO: 472240 - DNA, 15 bp, Homo sapiens
agggttttatagttg

SEQ ID NO: 472241 - DNA, 15 bp, Homo sapiens
gagggttttatagtt

SEQ ID NO: 472242 - DNA, 15 bp, Homo sapiens
tgagggttttatagt

SEQ ID NO: 472243 - DNA, 15 bp, Homo sapiens
ttgagggttttatag

SEQ ID NO: 472244 - DNA, 15 bp, Homo sapiens
cttgagggttttata

SEQ ID NO: 472245 - DNA, 15 bp, Homo sapiens
tcttgagggttttat

SEQ ID NO: 472246 - DNA, 15 bp, Homo sapiens
ctcttgagggtttta

SEQ ID NO: 472247 - DNA, 15 bp, Homo sapiens
actcttgagggtttt

SEQ ID NO: 472248 - DNA, 15 bp, Homo sapiens
gactcttgagggttt

SEQ ID NO: 472249 - DNA, 15 bp, Homo sapiens
tgactcttgagggtt

SEQ ID NO: 472250 - DNA, 15 bp, Homo sapiens
ttgactcttgagggt

SEQ ID NO: 472251 - DNA, 15 bp, Homo sapiens
cttgactcttgaggg

SEQ ID NO: 472252 - DNA, 15 bp, Homo sapiens
ccttgactcttgagg

SEQ ID NO: 472253 - DNA, 15 bp, Homo sapiens
tccttgactcttgag

SEQ ID NO: 472254 - DNA, 15 bp, Homo sapiens
ctccttgactcttga

SEQ ID NO: 472255 - DNA, 15 bp, Homo sapiens
cctccttgactcttg

SEQ ID NO: 472256 - DNA, 15 bp, Homo sapiens
gcctccttgactctt

SEQ ID NO: 472257 - DNA, 15 bp, Homo sapiens
tgcctccttgactct

SEQ ID NO: 472258 - DNA, 15 bp, Homo sapiens
ttgcctccttgactc

SEQ ID NO: 472259 - DNA, 15 bp, Homo sapiens
cttgcctccttgact

SEQ ID NO: 472260 - DNA, 15 bp, Homo sapiens
acttgcctccttgac

SEQ ID NO: 472261 - DNA, 15 bp, Homo sapiens
cacttgcctccttga

SEQ ID NO: 472262 - DNA, 15 bp, Homo sapiens
tcacttgcctccttg

SEQ ID NO: 472263 - DNA, 15 bp, Homo sapiens
ttcacttgcctcctt

SEQ ID NO: 472264 - DNA, 15 bp, Homo sapiens
attcacttgcctcct

SEQ ID NO: 472265 - DNA, 15 bp, Homo sapiens
tattcacttgcctcc

SEQ ID NO: 472266 - DNA, 15 bp, Homo sapiens
atattcacttgcctc

SEQ ID NO: 472267 - DNA, 15 bp, Homo sapiens
aatattcacttgcct

SEQ ID NO: 472268 - DNA, 15 bp, Homo sapiens
taatattcacttgcc

SEQ ID NO: 472269 - DNA, 15 bp, Homo sapiens
ctaatattcacttgc

SEQ ID NO: 472270 - DNA, 15 bp, Homo sapiens
tctaatattcacttg

SEQ ID NO: 472271 - DNA, 15 bp, Homo sapiens
ctctaatattcactt

SEQ ID NO: 472272 - DNA, 15 bp, Homo sapiens
tctctaatattcact

SEQ ID NO: 472273 - DNA, 15 bp, Homo sapiens
atctctaatattcac

SEQ ID NO: 472274 - DNA, 15 bp, Homo sapiens
catctctaatattca

SEQ ID NO: 472275 - DNA, 15 bp, Homo sapiens
acatctctaatattc

SEQ ID NO: 472276 - DNA, 15 bp, Homo sapiens
aacatctctaatatt

SEQ ID NO: 472277 - DNA, 15 bp, Homo sapiens
taacatctctaatat

SEQ ID NO: 472278 - DNA, 15 bp, Homo sapiens
ttaacatctctaata

SEQ ID NO: 472279 - DNA, 15 bp, Homo sapiens
tttaacatctctaat

SEQ ID NO: 472280 - DNA, 15 bp, Homo sapiens
ttttaacatctctaa

SEQ ID NO: 472281 - DNA, 15 bp, Homo sapiens
attttaacatctcta

SEQ ID NO: 472282 - DNA, 15 bp, Homo sapiens
gattttaacatctct

SEQ ID NO: 472283 - DNA, 15 bp, Homo sapiens
agattttaacatctc

SEQ ID NO: 472284 - DNA, 15 bp, Homo sapiens
gagattttaacatct

SEQ ID NO: 472285 - DNA, 15 bp, Homo sapiens
agagattttaacatc

SEQ ID NO: 472286 - DNA, 15 bp, Homo sapiens
tagagattttaacat

SEQ ID NO: 472287 - DNA, 15 bp, Homo sapiens
ctagagattttaaca

SEQ ID NO: 472288 - DNA, 15 bp, Homo sapiens
tctagagattttaac

SEQ ID NO: 472289 - DNA, 15 bp, Homo sapiens
ttctagagattttaa

SEQ ID NO: 472290 - DNA, 15 bp, Homo sapiens
tttctagagatttta

SEQ ID NO: 472291 - DNA, 15 bp, Homo sapiens
ctttctagagatttt

SEQ ID NO: 472292 - DNA, 15 bp, Homo sapiens
actttctagagattt

SEQ ID NO: 472293 - DNA, 15 bp, Homo sapiens
cactttctagagatt

SEQ ID NO: 472294 - DNA, 15 bp, Homo sapiens
tcactttctagagat

SEQ ID NO: 472295 - DNA, 15 bp, Homo sapiens
ctcactttctagaga

SEQ ID NO: 472296 - DNA, 15 bp, Homo sapiens
actcactttctagag

SEQ ID NO: 472297 - DNA, 15 bp, Homo sapiens
aactcactttctaga

SEQ ID NO: 472298 - DNA, 15 bp, Homo sapiens
aaactcactttctag

SEQ ID NO: 472299 - DNA, 15 bp, Homo sapiens
caaactcactttcta

SEQ ID NO: 472300 - DNA, 15 bp, Homo sapiens
acaaactcactttct

SEQ ID NO: 472301 - DNA, 15 bp, Homo sapiens
cacaaactcactttc

SEQ ID NO: 472302 - DNA, 15 bp, Homo sapiens
acacaaactcacttt

SEQ ID NO: 472303 - DNA, 15 bp, Homo sapiens
aacacaaactcactt

SEQ ID NO: 472304 - DNA, 15 bp, Homo sapiens
caacacaaactcact

SEQ ID NO: 472305 - DNA, 15 bp, Homo sapiens
acaacacaaactcac

SEQ ID NO: 472306 - DNA, 15 bp, Homo sapiens
aacaacacaaactca

SEQ ID NO: 472307 - DNA, 15 bp, Homo sapiens
caacaacacaaactc

SEQ ID NO: 472308 - DNA, 15 bp, Homo sapiens
tcaacaacacaaact

SEQ ID NO: 472309 - DNA, 15 bp, Homo sapiens
ctcaacaacacaaac

SEQ ID NO: 472310 - DNA, 15 bp, Homo sapiens
actcaacaacacaaa

SEQ ID NO: 472311 - DNA, 15 bp, Homo sapiens
aactcaacaacacaa

SEQ ID NO: 472312 - DNA, 15 bp, Homo sapiens
caactcaacaacaca

SEQ ID NO: 472313 - DNA, 15 bp, Homo sapiens
tcaactcaacaacac

SEQ ID NO: 472314 - DNA, 15 bp, Homo sapiens
ttcaactcaacaaca

SEQ ID NO: 472315 - DNA, 15 bp, Homo sapiens
tttcaactcaacaac

SEQ ID NO: 472316 - DNA, 15 bp, Homo sapiens
ctttcaactcaacaa

SEQ ID NO: 472317 - DNA, 15 bp, Homo sapiens
tctttcaactcaaca

SEQ ID NO: 472318 - DNA, 15 bp, Homo sapiens
gtctttcaactcaac

SEQ ID NO: 472319 - DNA, 15 bp, Homo sapiens
agtctttcaactcaa

SEQ ID NO: 472320 - DNA, 15 bp, Homo sapiens
gagtctttcaactca

SEQ ID NO: 472321 - DNA, 15 bp, Homo sapiens
tgagtctttcaactc

SEQ ID NO: 472322 - DNA, 15 bp, Homo sapiens
atgagtctttcaact

SEQ ID NO: 472323 - DNA, 15 bp, Homo sapiens
aatgagtctttcaac

SEQ ID NO: 472324 - DNA, 15 bp, Homo sapiens
aaatgagtctttcaa

SEQ ID NO: 472325 - DNA, 15 bp, Homo sapiens
caaatgagtctttca

SEQ ID NO: 472326 - DNA, 15 bp, Homo sapiens
acaaatgagtctttc

SEQ ID NO: 472327 - DNA, 15 bp, Homo sapiens
gacaaatgagtcttt

SEQ ID NO: 472328 - DNA, 15 bp, Homo sapiens
agacaaatgagtctt

SEQ ID NO: 472329 - DNA, 15 bp, Homo sapiens
aagacaaatgagtct

SEQ ID NO: 472330 - DNA, 15 bp, Homo sapiens
taagacaaatgagtc

SEQ ID NO: 472331 - DNA, 15 bp, Homo sapiens
ttaagacaaatgagt

SEQ ID NO: 472332 - DNA, 15 bp, Homo sapiens
gttaagacaaatgag

SEQ ID NO: 472333 - DNA, 15 bp, Homo sapiens
agttaagacaaatga

SEQ ID NO: 472334 - DNA, 15 bp, Homo sapiens
gagttaagacaaatg

SEQ ID NO: 472335 - DNA, 15 bp, Homo sapiens
agagttaagacaaat

SEQ ID NO: 472336 - DNA, 15 bp, Homo sapiens
cagagttaagacaaa

SEQ ID NO: 472337 - DNA, 15 bp, Homo sapiens
acagagttaagacaa

SEQ ID NO: 472338 - DNA, 15 bp, Homo sapiens
aacagagttaagaca

SEQ ID NO: 472339 - DNA, 15 bp, Homo sapiens
aaacagagttaagac

SEQ ID NO: 472340 - DNA, 15 bp, Homo sapiens
taaacagagttaaga

SEQ ID NO: 472341 - DNA, 15 bp, Homo sapiens
ctaaacagagttaag

SEQ ID NO: 472342 - DNA, 15 bp, Homo sapiens
tctaaacagagttaa

SEQ ID NO: 472343 - DNA, 15 bp, Homo sapiens
atctaaacagagtta

SEQ ID NO: 472344 - DNA, 15 bp, Homo sapiens
gatctaaacagagtt

SEQ ID NO: 472345 - DNA, 15 bp, Homo sapiens
agatctaaacagagt

SEQ ID NO: 472346 - DNA, 15 bp, Homo sapiens
aagatctaaacagag

SEQ ID NO: 472347 - DNA, 15 bp, Homo sapiens
taagatctaaacaga

SEQ ID NO: 472348 - DNA, 15 bp, Homo sapiens
ttaagatctaaacag

SEQ ID NO: 472349 - DNA, 15 bp, Homo sapiens
cttaagatctaaaca

SEQ ID NO: 472350 - DNA, 15 bp, Homo sapiens
ccttaagatctaaac

SEQ ID NO: 472351 - DNA, 15 bp, Homo sapiens
gccttaagatctaaa

SEQ ID NO: 472352 - DNA, 15 bp, Homo sapiens
cgccttaagatctaa

SEQ ID NO: 472353 - DNA, 15 bp, Homo sapiens
ccgccttaagatcta

SEQ ID NO: 472354 - DNA, 15 bp, Homo sapiens
cccgccttaagatct

SEQ ID NO: 472355 - DNA, 15 bp, Homo sapiens
gcccgccttaagatc

SEQ ID NO: 472356 - DNA, 15 bp, Homo sapiens
cgcccgccttaagat

SEQ ID NO: 472357 - DNA, 15 bp, Homo sapiens
ccgcccgccttaaga

SEQ ID NO: 472358 - DNA, 15 bp, Homo sapiens
cccgcccgccttaag

SEQ ID NO: 472359 - DNA, 15 bp, Homo sapiens
ccccgcccgccttaa

SEQ ID NO: 472360 - DNA, 15 bp, Homo sapiens
gccccgcccgcctta

SEQ ID NO: 472361 - DNA, 15 bp, Homo sapiens
cgccccgcccgcctt

SEQ ID NO: 472362 - DNA, 15 bp, Homo sapiens
gcgccccgcccgcct

SEQ ID NO: 472363 - DNA, 15 bp, Homo sapiens
tgcgccccgcccgcc

SEQ ID NO: 472364 - DNA, 15 bp, Homo sapiens
ttgcgccccgcccgc

SEQ ID NO: 472365 - DNA, 15 bp, Homo sapiens
cttgcgccccgcccg

SEQ ID NO: 472366 - DNA, 15 bp, Homo sapiens
ccttgcgccccgccc

SEQ ID NO: 472367 - DNA, 15 bp, Homo sapiens
cccttgcgccccgcc

SEQ ID NO: 472368 - DNA, 15 bp, Homo sapiens
tcccttgcgccccgc

SEQ ID NO: 472369 - DNA, 15 bp, Homo sapiens
ctcccttgcgccccg

SEQ ID NO: 472370 - DNA, 15 bp, Homo sapiens
cctcccttgcgcccc

SEQ ID NO: 472371 - DNA, 15 bp, Homo sapiens
acctcccttgcgccc

SEQ ID NO: 472372 - DNA, 15 bp, Homo sapiens
tacctcccttgcgcc

SEQ ID NO: 472373 - DNA, 15 bp, Homo sapiens
gtacctcccttgcgc

SEQ ID NO: 472374 - DNA, 15 bp, Homo sapiens
cgtacctcccttgcg

SEQ ID NO: 472375 - DNA, 15 bp, Homo sapiens
ccgtacctcccttgc

SEQ ID NO: 472376 - DNA, 15 bp, Homo sapiens
cccgtacctcccttg

SEQ ID NO: 472377 - DNA, 15 bp, Homo sapiens
acccgtacctccctt

SEQ ID NO: 472378 - DNA, 15 bp, Homo sapiens
gacccgtacctccct

SEQ ID NO: 472379 - DNA, 15 bp, Homo sapiens
ggacccgtacctccc

SEQ ID NO: 472380 - DNA, 15 bp, Homo sapiens
aggacccgtacctcc

SEQ ID NO: 472381 - DNA, 15 bp, Homo sapiens
gaggacccgtacctc

SEQ ID NO: 472382 - DNA, 15 bp, Homo sapiens
tgaggacccgtacct

SEQ ID NO: 472383 - DNA, 15 bp, Homo sapiens
ttgaggacccgtacc

SEQ ID NO: 472384 - DNA, 15 bp, Homo sapiens
tttgaggacccgtac

SEQ ID NO: 472385 - DNA, 15 bp, Homo sapiens
ctttgaggacccgta

SEQ ID NO: 472386 - DNA, 15 bp, Homo sapiens
cctttgaggacccgt

SEQ ID NO: 472387 - DNA, 15 bp, Homo sapiens
tcctttgaggacccg

SEQ ID NO: 472388 - DNA, 15 bp, Homo sapiens
ctcctttgaggaccc

SEQ ID NO: 472389 - DNA, 15 bp, Homo sapiens
gctcctttgaggacc

SEQ ID NO: 472390 - DNA, 15 bp, Homo sapiens
ggctcctttgaggac

SEQ ID NO: 472391 - DNA, 15 bp, Homo sapiens
aggctcctttgagga

SEQ ID NO: 472392 - DNA, 15 bp, Homo sapiens
caggctcctttgagg

SEQ ID NO: 472393 - DNA, 15 bp, Homo sapiens
ccaggctcctttgag

SEQ ID NO: 472394 - DNA, 15 bp, Homo sapiens
accaggctcctttga

SEQ ID NO: 472395 - DNA, 15 bp, Homo sapiens
gaccaggctcctttg

SEQ ID NO: 472396 - DNA, 15 bp, Homo sapiens
tgaccaggctccttt

SEQ ID NO: 472397 - DNA, 15 bp, Homo sapiens
atgaccaggctcctt

SEQ ID NO: 472398 - DNA, 15 bp, Homo sapiens
aatgaccaggctcct

SEQ ID NO: 472399 - DNA, 15 bp, Homo sapiens
taatgaccaggctcc

SEQ ID NO: 472400 - DNA, 15 bp, Homo sapiens
ttaatgaccaggctc

SEQ ID NO: 472401 - DNA, 15 bp, Homo sapiens
cttaatgaccaggct

SEQ ID NO: 472402 - DNA, 15 bp, Homo sapiens
ccttaatgaccaggc

SEQ ID NO: 472403 - DNA, 15 bp, Homo sapiens
tccttaatgaccagg

SEQ ID NO: 472404 - DNA, 15 bp, Homo sapiens
gtccttaatgaccag

SEQ ID NO: 472405 - DNA, 15 bp, Homo sapiens
tgtccttaatgacca

SEQ ID NO: 472406 - DNA, 15 bp, Homo sapiens
ctgtccttaatgacc

SEQ ID NO: 472407 - DNA, 15 bp, Homo sapiens
cctgtccttaatgac

SEQ ID NO: 472408 - DNA, 15 bp, Homo sapiens
tcctgtccttaatga

SEQ ID NO: 472409 - DNA, 15 bp, Homo sapiens
ctcctgtccttaatg

SEQ ID NO: 472410 - DNA, 15 bp, Homo sapiens
actcctgtccttaat

SEQ ID NO: 472411 - DNA, 15 bp, Homo sapiens
tactcctgtccttaa

SEQ ID NO: 472412 - DNA, 15 bp, Homo sapiens
atactcctgtcctta

SEQ ID NO: 472413 - DNA, 15 bp, Homo sapiens
aatactcctgtcctt

SEQ ID NO: 472414 - DNA, 15 bp, Homo sapiens
gaatactcctgtcct

SEQ ID NO: 472415 - DNA, 15 bp, Homo sapiens
ggaatactcctgtcc

SEQ ID NO: 472416 - DNA, 15 bp, Homo sapiens
gggaatactcctgtc

SEQ ID NO: 472417 - DNA, 15 bp, Homo sapiens
agggaatactcctgt

SEQ ID NO: 472418 - DNA, 15 bp, Homo sapiens
gagggaatactcctg

SEQ ID NO: 472419 - DNA, 15 bp, Homo sapiens
tgagggaatactcct

SEQ ID NO: 472420 - DNA, 15 bp, Homo sapiens
ctgagggaatactcc

SEQ ID NO: 472421 - DNA, 15 bp, Homo sapiens
cctgagggaatactc

SEQ ID NO: 472422 - DNA, 15 bp, Homo sapiens
acctgagggaatact

SEQ ID NO: 472423 - DNA, 15 bp, Homo sapiens
gacctgagggaatac

SEQ ID NO: 472424 - DNA, 15 bp, Homo sapiens
ggacctgagggaata

SEQ ID NO: 472425 - DNA, 15 bp, Homo sapiens
tggacctgagggaat

SEQ ID NO: 472426 - DNA, 15 bp, Homo sapiens
ctggacctgagggaa

SEQ ID NO: 472427 - DNA, 15 bp, Homo sapiens
cctggacctgaggga

SEQ ID NO: 472428 - DNA, 15 bp, Homo sapiens
tcctggacctgaggg

SEQ ID NO: 472429 - DNA, 15 bp, Homo sapiens
ctcctggacctgagg

SEQ ID NO: 472430 - DNA, 15 bp, Homo sapiens
actcctggacctgag

SEQ ID NO: 472431 - DNA, 15 bp, Homo sapiens
tactcctggacctga

SEQ ID NO: 472432 - DNA, 15 bp, Homo sapiens
atactcctggacctg

SEQ ID NO: 472433 - DNA, 15 bp, Homo sapiens
aatactcctggacct

SEQ ID NO: 472434 - DNA, 15 bp, Homo sapiens
gaatactcctggacc

SEQ ID NO: 472435 - DNA, 15 bp, Homo sapiens
ggaatactcctggac

SEQ ID NO: 472436 - DNA, 15 bp, Homo sapiens
gggaatactcctgga

SEQ ID NO: 472437 - DNA, 15 bp, Homo sapiens
agggaatactcctgg

SEQ ID NO: 472438 - DNA, 15 bp, Homo sapiens
tgacctgagggaata

SEQ ID NO: 472439 - DNA, 15 bp, Homo sapiens
ttgacctgagggaat

SEQ ID NO: 472440 - DNA, 15 bp, Homo sapiens
cttgacctgagggaa

SEQ ID NO: 472441 - DNA, 15 bp, Homo sapiens
ccttgacctgaggga

SEQ ID NO: 472442 - DNA, 15 bp, Homo sapiens
tccttgacctgaggg

SEQ ID NO: 472443 - DNA, 15 bp, Homo sapiens
ctccttgacctgagg

SEQ ID NO: 472444 - DNA, 15 bp, Homo sapiens
actccttgacctgag

SEQ ID NO: 472445 - DNA, 15 bp, Homo sapiens
tactccttgacctga

SEQ ID NO: 472446 - DNA, 15 bp, Homo sapiens
atactccttgacctg

SEQ ID NO: 472447 - DNA, 15 bp, Homo sapiens
aatactccttgacct

SEQ ID NO: 472448 - DNA, 15 bp, Homo sapiens
gaatactccttgacc

SEQ ID NO: 472449 - DNA, 15 bp, Homo sapiens
ggaatactccttgac

SEQ ID NO: 472450 - DNA, 15 bp, Homo sapiens
gggaatactccttga

SEQ ID NO: 472451 - DNA, 15 bp, Homo sapiens
agggaatactccttg

SEQ ID NO: 472452 - DNA, 15 bp, Homo sapiens
gagggaatactcctt

SEQ ID NO: 472453 - DNA, 15 bp, Homo sapiens
tcaactccagagcag

SEQ ID NO: 472454 - DNA, 15 bp, Homo sapiens
gtcaactccagagca

SEQ ID NO: 472455 - DNA, 15 bp, Homo sapiens
agtcaactccagagc

SEQ ID NO: 472456 - DNA, 15 bp, Homo sapiens
tagtcaactccagag

SEQ ID NO: 472457 - DNA, 15 bp, Homo sapiens
ttagtcaactccaga

SEQ ID NO: 472458 - DNA, 15 bp, Homo sapiens
tttagtcaactccag

SEQ ID NO: 472459 - DNA, 15 bp, Homo sapiens
ctttagtcaactcca

SEQ ID NO: 472460 - DNA, 15 bp, Homo sapiens
tctttagtcaactcc

SEQ ID NO: 472461 - DNA, 15 bp, Homo sapiens
ttctttagtcaactc

SEQ ID NO: 472462 - DNA, 15 bp, Homo sapiens
attctttagtcaact

SEQ ID NO: 472463 - DNA, 15 bp, Homo sapiens
cattctttagtcaac

SEQ ID NO: 472464 - DNA, 15 bp, Homo sapiens
acattctttagtcaa

SEQ ID NO: 472465 - DNA, 15 bp, Homo sapiens
cacattctttagtca

SEQ ID NO: 472466 - DNA, 15 bp, Homo sapiens
ccacattctttagtc

SEQ ID NO: 472467 - DNA, 15 bp, Homo sapiens
accacattctttagt

SEQ ID NO: 472468 - DNA, 15 bp, Homo sapiens
aaccacattctttag

SEQ ID NO: 472469 - DNA, 15 bp, Homo sapiens
taaccacattcttta

SEQ ID NO: 472470 - DNA, 15 bp, Homo sapiens
ctaaccacattcttt

SEQ ID NO: 472471 - DNA, 15 bp, Homo sapiens
tctaaccacattctt

SEQ ID NO: 472472 - DNA, 15 bp, Homo sapiens
ctctaaccacattct

SEQ ID NO: 472473 - DNA, 15 bp, Homo sapiens
tctctaaccacattc

SEQ ID NO: 472474 - DNA, 15 bp, Homo sapiens
gtctctaaccacatt

SEQ ID NO: 472475 - DNA, 15 bp, Homo sapiens
tgtctctaaccacat

SEQ ID NO: 472476 - DNA, 15 bp, Homo sapiens
ctgtctctaaccaca

SEQ ID NO: 472477 - DNA, 15 bp, Homo sapiens
actgtctctaaccac

SEQ ID NO: 472478 - DNA, 15 bp, Homo sapiens
gactgtctctaacca

SEQ ID NO: 472479 - DNA, 15 bp, Homo sapiens
agactgtctctaacc

SEQ ID NO: 472480 - DNA, 15 bp, Homo sapiens
cagactgtctctaac

SEQ ID NO: 472481 - DNA, 15 bp, Homo sapiens
tcagactgtctctaa

SEQ ID NO: 472482 - DNA, 15 bp, Homo sapiens
ctcagactgtctcta

SEQ ID NO: 472483 - DNA, 15 bp, Homo sapiens
cctcagactgtctct

SEQ ID NO: 472484 - DNA, 15 bp, Homo sapiens
tcctcagactgtctc

SEQ ID NO: 472485 - DNA, 15 bp, Homo sapiens
ttcctcagactgtct

SEQ ID NO: 472486 - DNA, 15 bp, Homo sapiens
tttcctcagactgtc

SEQ ID NO: 472487 - DNA, 15 bp, Homo sapiens
atttcctcagactgt

SEQ ID NO: 472488 - DNA, 15 bp, Homo sapiens
catttcctcagactg

SEQ ID NO: 472489 - DNA, 15 bp, Homo sapiens
acatttcctcagact

SEQ ID NO: 472490 - DNA, 15 bp, Homo sapiens
aacatttcctcagac

SEQ ID NO: 472491 - DNA, 15 bp, Homo sapiens
aaacatttcctcaga

SEQ ID NO: 472492 - DNA, 15 bp, Homo sapiens
aaaacatttcctcag

SEQ ID NO: 472493 - DNA, 15 bp, Homo sapiens
gaaaacatttcctca

SEQ ID NO: 472494 - DNA, 15 bp, Homo sapiens
agaaaacatttcctc

SEQ ID NO: 472495 - DNA, 15 bp, Homo sapiens
cagaaaacatttcct

SEQ ID NO: 472496 - DNA, 15 bp, Homo sapiens
tcagaaaacatttcc

SEQ ID NO: 472497 - DNA, 15 bp, Homo sapiens
gtcagaaaacatttc

SEQ ID NO: 472498 - DNA, 15 bp, Homo sapiens
agtcagaaaacattt

SEQ ID NO: 472499 - DNA, 15 bp, Homo sapiens
aagtcagaaaacatt

SEQ ID NO: 472500 - DNA, 15 bp, Homo sapiens
aaagtcagaaaacat

SEQ ID NO: 472501 - DNA, 15 bp, Homo sapiens
caaagtcagaaaaca

SEQ ID NO: 472502 - DNA, 15 bp, Homo sapiens
acaaagtcagaaaac

SEQ ID NO: 472503 - DNA, 15 bp, Homo sapiens
aacaaagtcagaaaa

SEQ ID NO: 472504 - DNA, 15 bp, Homo sapiens
aaacaaagtcagaaa

SEQ ID NO: 472505 - DNA, 15 bp, Homo sapiens
aaaacaaagtcagaa

SEQ ID NO: 472506 - DNA, 15 bp, Homo sapiens
caaaacaaagtcaga

SEQ ID NO: 472507 - DNA, 15 bp, Homo sapiens
ccaaaacaaagtcag

SEQ ID NO: 472508 - DNA, 15 bp, Homo sapiens
accaaaacaaagtca

SEQ ID NO: 472509 - DNA, 15 bp, Homo sapiens
aaccaaaacaaagtc

SEQ ID NO: 472510 - DNA, 15 bp, Homo sapiens
aaaccaaaacaaagt

SEQ ID NO: 472511 - DNA, 15 bp, Homo sapiens
gaaaccaaaacaaag

SEQ ID NO: 472512 - DNA, 15 bp, Homo sapiens
ggaaaccaaaacaaa

SEQ ID NO: 472513 - DNA, 15 bp, Homo sapiens
tggaaaccaaaacaa

SEQ ID NO: 472514 - DNA, 15 bp, Homo sapiens
ttggaaaccaaaaca

SEQ ID NO: 472515 - DNA, 15 bp, Homo sapiens
gttggaaaccaaaac

SEQ ID NO: 472516 - DNA, 15 bp, Homo sapiens
ggttggaaaccaaaa

SEQ ID NO: 472517 - DNA, 15 bp, Homo sapiens
tggttggaaaccaaa

SEQ ID NO: 472518 - DNA, 15 bp, Homo sapiens
ctggttggaaaccaa

SEQ ID NO: 472519 - DNA, 15 bp, Homo sapiens
tctggttggaaacca

SEQ ID NO: 472520 - DNA, 15 bp, Homo sapiens
ctctggttggaaacc

SEQ ID NO: 472521 - DNA, 15 bp, Homo sapiens
gctctggttggaaac

SEQ ID NO: 472522 - DNA, 15 bp, Homo sapiens
tgctctggttggaaa

SEQ ID NO: 472523 - DNA, 15 bp, Homo sapiens
atgctctggttggaa

SEQ ID NO: 472524 - DNA, 15 bp, Homo sapiens
gatgctctggttgga

SEQ ID NO: 472525 - DNA, 15 bp, Homo sapiens
cgatgctctggttgg

SEQ ID NO: 472526 - DNA, 15 bp, Homo sapiens
acgatgctctggttg

SEQ ID NO: 472527 - DNA, 15 bp, Homo sapiens
cacgatgctctggtt

SEQ ID NO: 472528 - DNA, 15 bp, Homo sapiens
tcacgatgctctggt

SEQ ID NO: 472529 - DNA, 15 bp, Homo sapiens
ctcacgatgctctgg

SEQ ID NO: 472530 - DNA, 15 bp, Homo sapiens
actcacgatgctctg

SEQ ID NO: 472531 - DNA, 15 bp, Homo sapiens
cactcacgatgctct

SEQ ID NO: 472532 - DNA, 15 bp, Homo sapiens
tcactcacgatgctc

SEQ ID NO: 472533 - DNA, 15 bp, Homo sapiens
ctcactcacgatgct

SEQ ID NO: 472534 - DNA, 15 bp, Homo sapiens
gctcactcacgatgc

SEQ ID NO: 472535 - DNA, 15 bp, Homo sapiens
agctcactcacgatg

SEQ ID NO: 472536 - DNA, 15 bp, Homo sapiens
cagctcactcacgat

SEQ ID NO: 472537 - DNA, 15 bp, Homo sapiens
ccagctcactcacga

SEQ ID NO: 472538 - DNA, 15 bp, Homo sapiens
gccagctcactcacg

SEQ ID NO: 472539 - DNA, 15 bp, Homo sapiens
cgccagctcactcac

SEQ ID NO: 472540 - DNA, 15 bp, Homo sapiens
ccgccagctcactca

SEQ ID NO: 472541 - DNA, 15 bp, Homo sapiens
cccgccagctcactc

SEQ ID NO: 472542 - DNA, 15 bp, Homo sapiens
ccccgccagctcact

SEQ ID NO: 472543 - DNA, 15 bp, Homo sapiens
gccccgccagctcac

SEQ ID NO: 472544 - DNA, 15 bp, Homo sapiens
agccccgccagctca

SEQ ID NO: 472545 - DNA, 15 bp, Homo sapiens
aagccccgccagctc

SEQ ID NO: 472546 - DNA, 15 bp, Homo sapiens
aaagccccgccagct

SEQ ID NO: 472547 - DNA, 15 bp, Homo sapiens
aaaagccccgccagc

SEQ ID NO: 472548 - DNA, 15 bp, Homo sapiens
caaaagccccgccag

SEQ ID NO: 472549 - DNA, 15 bp, Homo sapiens
acaaaagccccgcca

SEQ ID NO: 472550 - DNA, 15 bp, Homo sapiens
gacaaaagccccgcc

SEQ ID NO: 472551 - DNA, 15 bp, Homo sapiens
tgacaaaagccccgc

SEQ ID NO: 472552 - DNA, 15 bp, Homo sapiens
ctgacaaaagccccg

SEQ ID NO: 472553 - DNA, 15 bp, Homo sapiens
gctgacaaaagcccc

SEQ ID NO: 472554 - DNA, 15 bp, Homo sapiens
cgctgacaaaagccc

SEQ ID NO: 472555 - DNA, 15 bp, Homo sapiens
tcgctgacaaaagcc

SEQ ID NO: 472556 - DNA, 15 bp, Homo sapiens
atcgctgacaaaagc

SEQ ID NO: 472557 - DNA, 15 bp, Homo sapiens
catcgctgacaaaag

SEQ ID NO: 472558 - DNA, 15 bp, Homo sapiens
ccatcgctgacaaaa

SEQ ID NO: 472559 - DNA, 15 bp, Homo sapiens
tccatcgctgacaaa

SEQ ID NO: 472560 - DNA, 15 bp, Homo sapiens
ctccatcgctgacaa

SEQ ID NO: 472561 - DNA, 15 bp, Homo sapiens
actccatcgctgaca

SEQ ID NO: 472562 - DNA, 15 bp, Homo sapiens
tactccatcgctgac

SEQ ID NO: 472563 - DNA, 15 bp, Homo sapiens
gtactccatcgctga

SEQ ID NO: 472564 - DNA, 15 bp, Homo sapiens
cgtactccatcgctg

SEQ ID NO: 472565 - DNA, 15 bp, Homo sapiens
acgtactccatcgct

SEQ ID NO: 472566 - DNA, 15 bp, Homo sapiens
cacgtactccatcgc

SEQ ID NO: 472567 - DNA, 15 bp, Homo sapiens
gcacgtactccatcg

SEQ ID NO: 472568 - DNA, 15 bp, Homo sapiens
tgcacgtactccatc

SEQ ID NO: 472569 - DNA, 15 bp, Homo sapiens
ctgcacgtactccat

SEQ ID NO: 472570 - DNA, 15 bp, Homo sapiens
tctgcacgtactcca

SEQ ID NO: 472571 - DNA, 15 bp, Homo sapiens
ttctgcacgtactcc

SEQ ID NO: 472572 - DNA, 15 bp, Homo sapiens
tttctgcacgtactc

SEQ ID NO: 472573 - DNA, 15 bp, Homo sapiens
ttttctgcacgtact

SEQ ID NO: 472574 - DNA, 15 bp, Homo sapiens
gttttctgcacgtac

SEQ ID NO: 472575 - DNA, 15 bp, Homo sapiens
agttttctgcacgta

SEQ ID NO: 472576 - DNA, 15 bp, Homo sapiens
gagttttctgcacgt

SEQ ID NO: 472577 - DNA, 15 bp, Homo sapiens
agagttttctgcacg

SEQ ID NO: 472578 - DNA, 15 bp, Homo sapiens
gagagttttctgcac

SEQ ID NO: 472579 - DNA, 15 bp, Homo sapiens
tgagagttttctgca

SEQ ID NO: 472580 - DNA, 15 bp, Homo sapiens
gtgagagttttctgc

SEQ ID NO: 472581 - DNA, 15 bp, Homo sapiens
cgtgagagttttctg

SEQ ID NO: 472582 - DNA, 15 bp, Homo sapiens
ccgtgagagttttct

SEQ ID NO: 472583 - DNA, 15 bp, Homo sapiens
tccgtgagagttttc

SEQ ID NO: 472584 - DNA, 15 bp, Homo sapiens
gtccgtgagagtttt

SEQ ID NO: 472585 - DNA, 15 bp, Homo sapiens
cgtccgtgagagttt

SEQ ID NO: 472586 - DNA, 15 bp, Homo sapiens
tcgtccgtgagagtt

SEQ ID NO: 472587 - DNA, 15 bp, Homo sapiens
ctcgtccgtgagagt

SEQ ID NO: 472588 - DNA, 15 bp, Homo sapiens
cctcgtccgtgagag

SEQ ID NO: 472589 - DNA, 15 bp, Homo sapiens
tcctcgtccgtgaga

SEQ ID NO: 472590 - DNA, 15 bp, Homo sapiens
ctcctcgtccgtgag

SEQ ID NO: 472591 - DNA, 15 bp, Homo sapiens
gctcctcgtccgtga

SEQ ID NO: 472592 - DNA, 15 bp, Homo sapiens
agctcctcgtccgtg

SEQ ID NO: 472593 - DNA, 15 bp, Homo sapiens
cagctcctcgtccgt

SEQ ID NO: 472594 - DNA, 15 bp, Homo sapiens
ccagctcctcgtccg

SEQ ID NO: 472595 - DNA, 15 bp, Homo sapiens
gccagctcctcgtcc

SEQ ID NO: 472596 - DNA, 15 bp, Homo sapiens
agccagctcctcgtc

SEQ ID NO: 472597 - DNA, 15 bp, Homo sapiens
cagccagctcctcgt

SEQ ID NO: 472598 - DNA, 15 bp, Homo sapiens
tcagccagctcctcg

SEQ ID NO: 472599 - DNA, 15 bp, Homo sapiens
gtcagccagctcctc

SEQ ID NO: 472600 - DNA, 15 bp, Homo sapiens
agtcagccagctcct

SEQ ID NO: 472601 - DNA, 15 bp, Homo sapiens
cagtcagccagctcc

SEQ ID NO: 472602 - DNA, 15 bp, Homo sapiens
ccagtcagccagctc

SEQ ID NO: 472603 - DNA, 15 bp, Homo sapiens
tccagtcagccagct

SEQ ID NO: 472604 - DNA, 15 bp, Homo sapiens
ttccagtcagccagc

SEQ ID NO: 472605 - DNA, 15 bp, Homo sapiens
cttccagtcagccag

SEQ ID NO: 472606 - DNA, 15 bp, Homo sapiens
tcttccagtcagcca

SEQ ID NO: 472607 - DNA, 15 bp, Homo sapiens
ctcttccagtcagcc

SEQ ID NO: 472608 - DNA, 15 bp, Homo sapiens
cctcttccagtcagc

SEQ ID NO: 472609 - DNA, 15 bp, Homo sapiens
gcctcttccagtcag

SEQ ID NO: 472610 - DNA, 15 bp, Homo sapiens
cgcctcttccagtca

SEQ ID NO: 472611 - DNA, 15 bp, Homo sapiens
ccgcctcttccagtc

SEQ ID NO: 472612 - DNA, 15 bp, Homo sapiens
gccgcctcttccagt

SEQ ID NO: 472613 - DNA, 15 bp, Homo sapiens
tgccgcctcttccag

SEQ ID NO: 472614 - DNA, 15 bp, Homo sapiens
ttgccgcctcttcca

SEQ ID NO: 472615 - DNA, 15 bp, Homo sapiens
gttgccgcctcttcc

SEQ ID NO: 472616 - DNA, 15 bp, Homo sapiens
tgttgccgcctcttc

SEQ ID NO: 472617 - DNA, 15 bp, Homo sapiens
ctgttgccgcctctt

SEQ ID NO: 472618 - DNA, 15 bp, Homo sapiens
tctgttgccgcctct

SEQ ID NO: 472619 - DNA, 15 bp, Homo sapiens
atctgttgccgcctc

SEQ ID NO: 472620 - DNA, 15 bp, Homo sapiens
aatctgttgccgcct

SEQ ID NO: 472621 - DNA, 15 bp, Homo sapiens
caatctgttgccgcc

SEQ ID NO: 472622 - DNA, 15 bp, Homo sapiens
gcaatctgttgccgc

SEQ ID NO: 472623 - DNA, 15 bp, Homo sapiens
ggcaatctgttgccg

SEQ ID NO: 472624 - DNA, 15 bp, Homo sapiens
aggcaatctgttgcc

SEQ ID NO: 472625 - DNA, 15 bp, Homo sapiens
caggcaatctgttgc

SEQ ID NO: 472626 - DNA, 15 bp, Homo sapiens
gcaggcaatctgttg

SEQ ID NO: 472627 - DNA, 15 bp, Homo sapiens
tgcaggcaatctgtt

SEQ ID NO: 472628 - DNA, 15 bp, Homo sapiens
atgcaggcaatctgt

SEQ ID NO: 472629 - DNA, 15 bp, Homo sapiens
aatgcaggcaatctg

SEQ ID NO: 472630 - DNA, 15 bp, Homo sapiens
caatgcaggcaatct

SEQ ID NO: 472631 - DNA, 15 bp, Homo sapiens
ccaatgcaggcaatc

SEQ ID NO: 472632 - DNA, 15 bp, Homo sapiens
tccaatgcaggcaat

SEQ ID NO: 472633 - DNA, 15 bp, Homo sapiens
ctccaatgcaggcaa

SEQ ID NO: 472634 - DNA, 15 bp, Homo sapiens
cctccaatgcaggca

SEQ ID NO: 472635 - DNA, 15 bp, Homo sapiens
gcctccaatgcaggc

SEQ ID NO: 472636 - DNA, 15 bp, Homo sapiens
ggcctccaatgcagg

SEQ ID NO: 472637 - DNA, 15 bp, Homo sapiens
gggcctccaatgcag

SEQ ID NO: 472638 - DNA, 15 bp, Homo sapiens
cgggcctccaatgca

SEQ ID NO: 472639 - DNA, 15 bp, Homo sapiens
gcgggcctccaatgc

SEQ ID NO: 472640 - DNA, 15 bp, Homo sapiens
ggcgggcctccaatg

SEQ ID NO: 472641 - DNA, 15 bp, Homo sapiens
gggcgggcctccaat

SEQ ID NO: 472642 - DNA, 15 bp, Homo sapiens
tgggcgggcctccaa

SEQ ID NO: 472643 - DNA, 15 bp, Homo sapiens
ttgggcgggcctcca

SEQ ID NO: 472644 - DNA, 15 bp, Homo sapiens
gttgggcgggcctcc

SEQ ID NO: 472645 - DNA, 15 bp, Homo sapiens
tgttgggcgggcctc

SEQ ID NO: 472646 - DNA, 15 bp, Homo sapiens
atgttgggcgggcct

SEQ ID NO: 472647 - DNA, 15 bp, Homo sapiens
gatgttgggcgggcc

SEQ ID NO: 472648 - DNA, 15 bp, Homo sapiens
agatgttgggcgggc

SEQ ID NO: 472649 - DNA, 15 bp, Homo sapiens
cagatgttgggcggg

SEQ ID NO: 472650 - DNA, 15 bp, Homo sapiens
gcagatgttgggcgg

SEQ ID NO: 472651 - DNA, 15 bp, Homo sapiens
ggcagatgttgggcg

SEQ ID NO: 472652 - DNA, 15 bp, Homo sapiens
aggcagatgttgggc

SEQ ID NO: 472653 - DNA, 15 bp, Homo sapiens
taggcagatgttggg

SEQ ID NO: 472654 - DNA, 15 bp, Homo sapiens
ctaggcagatgttgg

SEQ ID NO: 472655 - DNA, 15 bp, Homo sapiens
tctaggcagatgttg

SEQ ID NO: 472656 - DNA, 15 bp, Homo sapiens
atctaggcagatgtt

SEQ ID NO: 472657 - DNA, 15 bp, Homo sapiens
gatctaggcagatgt

SEQ ID NO: 472658 - DNA, 15 bp, Homo sapiens
cgatctaggcagatg

SEQ ID NO: 472659 - DNA, 15 bp, Homo sapiens
ccgatctaggcagat

SEQ ID NO: 472660 - DNA, 15 bp, Homo sapiens
gccgatctaggcaga

SEQ ID NO: 472661 - DNA, 15 bp, Homo sapiens
agccgatctaggcag

SEQ ID NO: 472662 - DNA, 15 bp, Homo sapiens
tagccgatctaggca

SEQ ID NO: 472663 - DNA, 15 bp, Homo sapiens
ctagccgatctaggc

SEQ ID NO: 472664 - DNA, 15 bp, Homo sapiens
tctagccgatctagg

SEQ ID NO: 472665 - DNA, 15 bp, Homo sapiens
ttctagccgatctag

SEQ ID NO: 472666 - DNA, 15 bp, Homo sapiens
tttctagccgatcta

SEQ ID NO: 472667 - DNA, 15 bp, Homo sapiens
ttttctagccgatct

SEQ ID NO: 472668 - DNA, 15 bp, Homo sapiens
gttttctagccgatc

SEQ ID NO: 472669 - DNA, 15 bp, Homo sapiens
agttttctagccgat

SEQ ID NO: 472670 - DNA, 15 bp, Homo sapiens
cagttttctagccga

SEQ ID NO: 472671 - DNA, 15 bp, Homo sapiens
ccagttttctagccg

SEQ ID NO: 472672 - DNA, 15 bp, Homo sapiens
accagttttctagcc

SEQ ID NO: 472673 - DNA, 15 bp, Homo sapiens
taccagttttctagc

SEQ ID NO: 472674 - DNA, 15 bp, Homo sapiens
ttaccagttttctag

SEQ ID NO: 472675 - DNA, 15 bp, Homo sapiens
tttaccagttttcta

SEQ ID NO: 472676 - DNA, 15 bp, Homo sapiens
ctttaccagttttct

SEQ ID NO: 472677 - DNA, 15 bp, Homo sapiens
cctttaccagttttc

SEQ ID NO: 472678 - DNA, 15 bp, Homo sapiens
tcctttaccagtttt

SEQ ID NO: 472679 - DNA, 15 bp, Homo sapiens
atcctttaccagttt

SEQ ID NO: 472680 - DNA, 15 bp, Homo sapiens
catcctttaccagtt

SEQ ID NO: 472681 - DNA, 15 bp, Homo sapiens
tcatcctttaccagt

SEQ ID NO: 472682 - DNA, 15 bp, Homo sapiens
ttcatcctttaccag

SEQ ID NO: 472683 - DNA, 15 bp, Homo sapiens
tttcatcctttacca

SEQ ID NO: 472684 - DNA, 15 bp, Homo sapiens
ctttcatcctttacc

SEQ ID NO: 472685 - DNA, 15 bp, Homo sapiens
tctttcatcctttac

SEQ ID NO: 472686 - DNA, 15 bp, Homo sapiens
ttctttcatccttta

SEQ ID NO: 472687 - DNA, 15 bp, Homo sapiens
cttctttcatccttt

SEQ ID NO: 472688 - DNA, 15 bp, Homo sapiens
gcttctttcatcctt

SEQ ID NO: 472689 - DNA, 15 bp, Homo sapiens
agcttctttcatcct

SEQ ID NO: 472690 - DNA, 15 bp, Homo sapiens
aagcttctttcatcc

SEQ ID NO: 472691 - DNA, 15 bp, Homo sapiens
aaagcttctttcatc

SEQ ID NO: 472692 - DNA, 15 bp, Homo sapiens
aaaagcttctttcat

SEQ ID NO: 472693 - DNA, 15 bp, Homo sapiens
gaaaagcttctttca

SEQ ID NO: 472694 - DNA, 15 bp, Homo sapiens
ggaaaagcttctttc

SEQ ID NO: 472695 - DNA, 15 bp, Homo sapiens
aggaaaagcttcttt

SEQ ID NO: 472696 - DNA, 15 bp, Homo sapiens
aaggaaaagcttctt

SEQ ID NO: 472697 - DNA, 15 bp, Homo sapiens
aaaggaaaagcttct

SEQ ID NO: 472698 - DNA, 15 bp, Homo sapiens
gaaaggaaaagcttc

SEQ ID NO: 472699 - DNA, 15 bp, Homo sapiens
agaaaggaaaagctt

SEQ ID NO: 472700 - DNA, 15 bp, Homo sapiens
aagaaaggaaaagct

SEQ ID NO: 472701 - DNA, 15 bp, Homo sapiens
aaagaaaggaaaagc

SEQ ID NO: 472702 - DNA, 15 bp, Homo sapiens
gaaagaaaggaaaag

SEQ ID NO: 472703 - DNA, 15 bp, Homo sapiens
agaaagaaaggaaaa

SEQ ID NO: 472704 - DNA, 15 bp, Homo sapiens
gagaaagaaaggaaa

SEQ ID NO: 472705 - DNA, 15 bp, Homo sapiens
cgagaaagaaaggaa

SEQ ID NO: 472706 - DNA, 15 bp, Homo sapiens
tcgagaaagaaagga

SEQ ID NO: 472707 - DNA, 15 bp, Homo sapiens
ttcgagaaagaaagg

SEQ ID NO: 472708 - DNA, 15 bp, Homo sapiens
tttcgagaaagaaag

SEQ ID NO: 472709 - DNA, 15 bp, Homo sapiens
ctttcgagaaagaaa

SEQ ID NO: 472710 - DNA, 15 bp, Homo sapiens
gctttcgagaaagaa

SEQ ID NO: 472711 - DNA, 15 bp, Homo sapiens
agctttcgagaaaga

SEQ ID NO: 472712 - DNA, 15 bp, Homo sapiens
tagctttcgagaaag

SEQ ID NO: 472713 - DNA, 15 bp, Homo sapiens
ctagctttcgagaaa

SEQ ID NO: 472714 - DNA, 15 bp, Homo sapiens
tctagctttcgagaa

SEQ ID NO: 472715 - DNA, 15 bp, Homo sapiens
atctagctttcgaga

SEQ ID NO: 472716 - DNA, 15 bp, Homo sapiens
aatctagctttcgag

SEQ ID NO: 472717 - DNA, 15 bp, Homo sapiens
caatctagctttcga

SEQ ID NO: 472718 - DNA, 15 bp, Homo sapiens
tcaatctagctttcg

SEQ ID NO: 472719 - DNA, 15 bp, Homo sapiens
ttcaatctagctttc

SEQ ID NO: 472720 - DNA, 15 bp, Homo sapiens
attcaatctagcttt

SEQ ID NO: 472721 - DNA, 15 bp, Homo sapiens
aattcaatctagctt

SEQ ID NO: 472722 - DNA, 15 bp, Homo sapiens
gaattcaatctagct

SEQ ID NO: 472723 - DNA, 15 bp, Homo sapiens
agaattcaatctagc

SEQ ID NO: 472724 - DNA, 15 bp, Homo sapiens
cagaattcaatctag

SEQ ID NO: 472725 - DNA, 15 bp, Homo sapiens
tcagaattcaatcta

SEQ ID NO: 472726 - DNA, 15 bp, Homo sapiens
atcagaattcaatct

SEQ ID NO: 472727 - DNA, 15 bp, Homo sapiens
gatcagaattcaatc

SEQ ID NO: 472728 - DNA, 15 bp, Homo sapiens
agatcagaattcaat

SEQ ID NO: 472729 - DNA, 15 bp, Homo sapiens
aagatcagaattcaa

SEQ ID NO: 472730 - DNA, 15 bp, Homo sapiens
taagatcagaattca

SEQ ID NO: 472731 - DNA, 15 bp, Homo sapiens
ttaagatcagaattc

SEQ ID NO: 472732 - DNA, 15 bp, Homo sapiens
gttaagatcagaatt

SEQ ID NO: 472733 - DNA, 15 bp, Homo sapiens
agttaagatcagaat

SEQ ID NO: 472734 - DNA, 15 bp, Homo sapiens
cagttaagatcagaa

SEQ ID NO: 472735 - DNA, 15 bp, Homo sapiens
gcagttaagatcaga

SEQ ID NO: 472736 - DNA, 15 bp, Homo sapiens
tgcagttaagatcag

SEQ ID NO: 472737 - DNA, 15 bp, Homo sapiens
ctgcagttaagatca

SEQ ID NO: 472738 - DNA, 15 bp, Homo sapiens
cctgcagttaagatc

SEQ ID NO: 472739 - DNA, 15 bp, Homo sapiens
gcctgcagttaagat

SEQ ID NO: 472740 - DNA, 15 bp, Homo sapiens
ggcctgcagttaaga

SEQ ID NO: 472741 - DNA, 15 bp, Homo sapiens
gggcctgcagttaag

SEQ ID NO: 472742 - DNA, 15 bp, Homo sapiens
tgggcctgcagttaa

SEQ ID NO: 472743 - DNA, 15 bp, Homo sapiens
gtgggcctgcagtta

SEQ ID NO: 472744 - DNA, 15 bp, Homo sapiens
tgtgggcctgcagtt

SEQ ID NO: 472745 - DNA, 15 bp, Homo sapiens
ctgtgggcctgcagt

SEQ ID NO: 472746 - DNA, 15 bp, Homo sapiens
tctgtgggcctgcag

SEQ ID NO: 472747 - DNA, 15 bp, Homo sapiens
ttctgtgggcctgca

SEQ ID NO: 472748 - DNA, 15 bp, Homo sapiens
attctgtgggcctgc

SEQ ID NO: 472749 - DNA, 15 bp, Homo sapiens
aattctgtgggcctg

SEQ ID NO: 472750 - DNA, 15 bp, Homo sapiens
caattctgtgggcct

SEQ ID NO: 472751 - DNA, 15 bp, Homo sapiens
ccaattctgtgggcc

SEQ ID NO: 472752 - DNA, 15 bp, Homo sapiens
accaattctgtgggc

SEQ ID NO: 472753 - DNA, 15 bp, Homo sapiens
taccaattctgtggg

SEQ ID NO: 472754 - DNA, 15 bp, Homo sapiens
gtaccaattctgtgg

SEQ ID NO: 472755 - DNA, 15 bp, Homo sapiens
agtaccaattctgtg

SEQ ID NO: 472756 - DNA, 15 bp, Homo sapiens
tagtaccaattctgt

SEQ ID NO: 472757 - DNA, 15 bp, Homo sapiens
atagtaccaattctg

SEQ ID NO: 472758 - DNA, 15 bp, Homo sapiens
tatagtaccaattct

SEQ ID NO: 472759 - DNA, 15 bp, Homo sapiens
atatagtaccaattc

SEQ ID NO: 472760 - DNA, 15 bp, Homo sapiens
gatatagtaccaatt

SEQ ID NO: 472761 - DNA, 15 bp, Homo sapiens
agatatagtaccaat

SEQ ID NO: 472762 - DNA, 15 bp, Homo sapiens
gagatatagtaccaa

SEQ ID NO: 472763 - DNA, 15 bp, Homo sapiens
ggagatatagtacca

SEQ ID NO: 472764 - DNA, 15 bp, Homo sapiens
tggagatatagtacc

SEQ ID NO: 472765 - DNA, 15 bp, Homo sapiens
ttggagatatagtac

SEQ ID NO: 472766 - DNA, 15 bp, Homo sapiens
gttggagatatagta

SEQ ID NO: 472767 - DNA, 15 bp, Homo sapiens
cgttggagatatagt

SEQ ID NO: 472768 - DNA, 15 bp, Homo sapiens
acgttggagatatag

SEQ ID NO: 472769 - DNA, 15 bp, Homo sapiens
cacgttggagatata

SEQ ID NO: 472770 - DNA, 15 bp, Homo sapiens
ccacgttggagatat

SEQ ID NO: 472771 - DNA, 15 bp, Homo sapiens
cccacgttggagata

SEQ ID NO: 472772 - DNA, 15 bp, Homo sapiens
ccccacgttggagat

SEQ ID NO: 472773 - DNA, 15 bp, Homo sapiens
tccccacgttggaga

SEQ ID NO: 472774 - DNA, 15 bp, Homo sapiens
gtccccacgttggag

SEQ ID NO: 472775 - DNA, 15 bp, Homo sapiens
agtccccacgttgga

SEQ ID NO: 472776 - DNA, 15 bp, Homo sapiens
aagtccccacgttgg

SEQ ID NO: 472777 - DNA, 15 bp, Homo sapiens
aaagtccccacgttg

SEQ ID NO: 472778 - DNA, 15 bp, Homo sapiens
aaaagtccccacgtt

SEQ ID NO: 472779 - DNA, 15 bp, Homo sapiens
gaaaagtccccacgt

SEQ ID NO: 472780 - DNA, 15 bp, Homo sapiens
ggaaaagtccccacg

SEQ ID NO: 472781 - DNA, 15 bp, Homo sapiens
tggaaaagtccccac

SEQ ID NO: 472782 - DNA, 15 bp, Homo sapiens
atggaaaagtcccca

SEQ ID NO: 472783 - DNA, 15 bp, Homo sapiens
tatggaaaagtcccc

SEQ ID NO: 472784 - DNA, 15 bp, Homo sapiens
atatggaaaagtccc

SEQ ID NO: 472785 - DNA, 15 bp, Homo sapiens
aatatggaaaagtcc

SEQ ID NO: 472786 - DNA, 15 bp, Homo sapiens
gaatatggaaaagtc

SEQ ID NO: 472787 - DNA, 15 bp, Homo sapiens
tgaatatggaaaagt

SEQ ID NO: 472788 - DNA, 15 bp, Homo sapiens
ttgaatatggaaaag

SEQ ID NO: 472789 - DNA, 15 bp, Homo sapiens
tttgaatatggaaaa

SEQ ID NO: 472790 - DNA, 15 bp, Homo sapiens
atttgaatatggaaa

SEQ ID NO: 472791 - DNA, 15 bp, Homo sapiens
aatttgaatatggaa

SEQ ID NO: 472792 - DNA, 15 bp, Homo sapiens
aaatttgaatatgga

SEQ ID NO: 472793 - DNA, 15 bp, Homo sapiens
taaatttgaatatgg

SEQ ID NO: 472794 - DNA, 15 bp, Homo sapiens
ctaaatttgaatatg

SEQ ID NO: 472795 - DNA, 15 bp, Homo sapiens
gctaaatttgaatat

SEQ ID NO: 472796 - DNA, 15 bp, Homo sapiens
ggctaaatttgaata

SEQ ID NO: 472797 - DNA, 15 bp, Homo sapiens
gggctaaatttgaat

SEQ ID NO: 472798 - DNA, 15 bp, Homo sapiens
tgggctaaatttgaa

SEQ ID NO: 472799 - DNA, 15 bp, Homo sapiens
ttgggctaaatttga

SEQ ID NO: 472800 - DNA, 15 bp, Homo sapiens
cttgggctaaatttg

SEQ ID NO: 472801 - DNA, 15 bp, Homo sapiens
tcttgggctaaattt

SEQ ID NO: 472802 - DNA, 15 bp, Homo sapiens
ttcttgggctaaatt

SEQ ID NO: 472803 - DNA, 15 bp, Homo sapiens
attcttgggctaaat

SEQ ID NO: 472804 - DNA, 15 bp, Homo sapiens
aattcttgggctaaa

SEQ ID NO: 472805 - DNA, 15 bp, Homo sapiens
taattcttgggctaa

SEQ ID NO: 472806 - DNA, 15 bp, Homo sapiens
ttaattcttgggcta

SEQ ID NO: 472807 - DNA, 15 bp, Homo sapiens
tttaattcttgggct

SEQ ID NO: 472808 - DNA, 15 bp, Homo sapiens
ctttaattcttgggc

SEQ ID NO: 472809 - DNA, 15 bp, Homo sapiens
actttaattcttggg

SEQ ID NO: 472810 - DNA, 15 bp, Homo sapiens
aactttaattcttgg

SEQ ID NO: 472811 - DNA, 15 bp, Homo sapiens
aaactttaattcttg

SEQ ID NO: 472812 - DNA, 15 bp, Homo sapiens
aaaactttaattctt

SEQ ID NO: 472813 - DNA, 15 bp, Homo sapiens
aaaaactttaattct

SEQ ID NO: 472814 - DNA, 15 bp, Homo sapiens
taaaaactttaattc

SEQ ID NO: 472815 - DNA, 15 bp, Homo sapiens
gtaaaaactttaatt

SEQ ID NO: 472816 - DNA, 15 bp, Homo sapiens
agtaaaaactttaat

SEQ ID NO: 472817 - DNA, 15 bp, Homo sapiens
aagtaaaaactttaa

SEQ ID NO: 472818 - DNA, 15 bp, Homo sapiens
aaagtaaaaacttta

SEQ ID NO: 472819 - DNA, 15 bp, Homo sapiens
taaagtaaaaacttt

SEQ ID NO: 472820 - DNA, 15 bp, Homo sapiens
ataaagtaaaaactt

SEQ ID NO: 472821 - DNA, 15 bp, Homo sapiens
aataaagtaaaaact

SEQ ID NO: 472822 - DNA, 15 bp, Homo sapiens
aaataaagtaaaaac

SEQ ID NO: 472823 - DNA, 15 bp, Homo sapiens
gaaataaagtaaaaa

SEQ ID NO: 472824 - DNA, 15 bp, Homo sapiens
cgaaataaagtaaaa

SEQ ID NO: 472825 - DNA, 15 bp, Homo sapiens
ccgaaataaagtaaa

SEQ ID NO: 472826 - DNA, 15 bp, Homo sapiens
gccgaaataaagtaa

SEQ ID NO: 472827 - DNA, 15 bp, Homo sapiens
ggccgaaataaagta

SEQ ID NO: 472828 - DNA, 15 bp, Homo sapiens
tggccgaaataaagt

SEQ ID NO: 472829 - DNA, 15 bp, Homo sapiens
ctggccgaaataaag

SEQ ID NO: 472830 - DNA, 15 bp, Homo sapiens
cctggccgaaataaa

SEQ ID NO: 472831 - DNA, 15 bp, Homo sapiens
gcctggccgaaataa

SEQ ID NO: 472832 - DNA, 15 bp, Homo sapiens
cgcctggccgaaata

SEQ ID NO: 472833 - DNA, 15 bp, Homo sapiens
gcgcctggccgaaat

SEQ ID NO: 472834 - DNA, 15 bp, Homo sapiens
agcgcctggccgaaa

SEQ ID NO: 472835 - DNA, 15 bp, Homo sapiens
cagcgcctggccgaa

SEQ ID NO: 472836 - DNA, 15 bp, Homo sapiens
acagcgcctggccga

SEQ ID NO: 472837 - DNA, 15 bp, Homo sapiens
cacagcgcctggccg

SEQ ID NO: 472838 - DNA, 15 bp, Homo sapiens
ccacagcgcctggcc

SEQ ID NO: 472839 - DNA, 15 bp, Homo sapiens
gccacagcgcctggc

SEQ ID NO: 472840 - DNA, 15 bp, Homo sapiens
agccacagcgcctgg

SEQ ID NO: 472841 - DNA, 15 bp, Homo sapiens
gagccacagcgcctg

SEQ ID NO: 472842 - DNA, 15 bp, Homo sapiens
tgagccacagcgcct

SEQ ID NO: 472843 - DNA, 15 bp, Homo sapiens
gtgagccacagcgcc

SEQ ID NO: 472844 - DNA, 15 bp, Homo sapiens
tgtgagccacagcgc

SEQ ID NO: 472845 - DNA, 15 bp, Homo sapiens
gtgtgagccacagcg

SEQ ID NO: 472846 - DNA, 15 bp, Homo sapiens
ggtgtgagccacagc

SEQ ID NO: 472847 - DNA, 15 bp, Homo sapiens
aggtgtgagccacag

SEQ ID NO: 472848 - DNA, 15 bp, Homo sapiens
caggtgtgagccaca

SEQ ID NO: 472849 - DNA, 15 bp, Homo sapiens
tcttggtctcccaaa

SEQ ID NO: 472850 - DNA, 15 bp, Homo sapiens
atcttggtctcccaa

SEQ ID NO: 472851 - DNA, 15 bp, Homo sapiens
catcttggtctccca

SEQ ID NO: 472852 - DNA, 15 bp, Homo sapiens
ccatcttggtctccc

SEQ ID NO: 472853 - DNA, 15 bp, Homo sapiens
cccatcttggtctcc

SEQ ID NO: 472854 - DNA, 15 bp, Homo sapiens
gcccatcttggtctc

SEQ ID NO: 472855 - DNA, 15 bp, Homo sapiens
cgcccatcttggtct

SEQ ID NO: 472856 - DNA, 15 bp, Homo sapiens
ccgcccatcttggtc

SEQ ID NO: 472857 - DNA, 15 bp, Homo sapiens
tccgcccatcttggt

SEQ ID NO: 472858 - DNA, 15 bp, Homo sapiens
atccgcccatcttgg

SEQ ID NO: 472859 - DNA, 15 bp, Homo sapiens
gatccgcccatcttg

SEQ ID NO: 472860 - DNA, 15 bp, Homo sapiens
tgatccgcccatctt

SEQ ID NO: 472861 - DNA, 15 bp, Homo sapiens
gtgatccgcccatct

SEQ ID NO: 472862 - DNA, 15 bp, Homo sapiens
agtgatccgcccatc

SEQ ID NO: 472863 - DNA, 15 bp, Homo sapiens
aagtgatccgcccat

SEQ ID NO: 472864 - DNA, 15 bp, Homo sapiens
ttttcaccatgttgg

SEQ ID NO: 472865 - DNA, 15 bp, Homo sapiens
gttttcaccatgttg

SEQ ID NO: 472866 - DNA, 15 bp, Homo sapiens
tgttttcaccatgtt

SEQ ID NO: 472867 - DNA, 15 bp, Homo sapiens
gtgttttcaccatgt

SEQ ID NO: 472868 - DNA, 15 bp, Homo sapiens
tgtgttttcaccatg

SEQ ID NO: 472869 - DNA, 15 bp, Homo sapiens
atgtgttttcaccat

SEQ ID NO: 472870 - DNA, 15 bp, Homo sapiens
gatgtgttttcacca

SEQ ID NO: 472871 - DNA, 15 bp, Homo sapiens
agatgtgttttcacc

SEQ ID NO: 472872 - DNA, 15 bp, Homo sapiens
gagatgtgttttcac

SEQ ID NO: 472873 - DNA, 15 bp, Homo sapiens
agagatgtgttttca

SEQ ID NO: 472874 - DNA, 15 bp, Homo sapiens
tagagatgtgttttc

SEQ ID NO: 472875 - DNA, 15 bp, Homo sapiens
gtagagatgtgtttt

SEQ ID NO: 472876 - DNA, 15 bp, Homo sapiens
agtagagatgtgttt

SEQ ID NO: 472877 - DNA, 15 bp, Homo sapiens
tagtagagatgtgtt

SEQ ID NO: 472878 - DNA, 15 bp, Homo sapiens
ttagtagagatgtgt

SEQ ID NO: 472879 - DNA, 15 bp, Homo sapiens
tttagtagagatgtg

SEQ ID NO: 472880 - DNA, 15 bp, Homo sapiens
ttttagtagagatgt

SEQ ID NO: 472881 - DNA, 15 bp, Homo sapiens
gtttttagtagagat

SEQ ID NO: 472882 - DNA, 15 bp, Homo sapiens
atgtttttagtagag

SEQ ID NO: 472883 - DNA, 15 bp, Homo sapiens
tatgtttttagtaga

SEQ ID NO: 472884 - DNA, 15 bp, Homo sapiens
ttatgtttttagtag

SEQ ID NO: 472885 - DNA, 15 bp, Homo sapiens
tttatgtttttagta

SEQ ID NO: 472886 - DNA, 15 bp, Homo sapiens
ttttatgtttttagt

SEQ ID NO: 472887 - DNA, 15 bp, Homo sapiens
tttttatgtttttag

SEQ ID NO: 472888 - DNA, 15 bp, Homo sapiens
ttttttatgttttta

SEQ ID NO: 472889 - DNA, 15 bp, Homo sapiens
tttttttatgttttt

SEQ ID NO: 472890 - DNA, 15 bp, Homo sapiens
atttttttatgtttt

SEQ ID NO: 472891 - DNA, 15 bp, Homo sapiens
aatttttttatgttt

SEQ ID NO: 472892 - DNA, 15 bp, Homo sapiens
taatttttttatgtt

SEQ ID NO: 472893 - DNA, 15 bp, Homo sapiens
ctaatttttttatgt

SEQ ID NO: 472894 - DNA, 15 bp, Homo sapiens
gctaatttttttatg

SEQ ID NO: 472895 - DNA, 15 bp, Homo sapiens
ggctaatttttttat

SEQ ID NO: 472896 - DNA, 15 bp, Homo sapiens
cggctaattttttta

SEQ ID NO: 472897 - DNA, 15 bp, Homo sapiens
ccggctaattttttt

SEQ ID NO: 472898 - DNA, 15 bp, Homo sapiens
gcaccaccacgcccg

SEQ ID NO: 472899 - DNA, 15 bp, Homo sapiens
cgcaccaccacgccc

SEQ ID NO: 472900 - DNA, 15 bp, Homo sapiens
gcgcaccaccacgcc

SEQ ID NO: 472901 - DNA, 15 bp, Homo sapiens
tgcgcaccaccacgc

SEQ ID NO: 472902 - DNA, 15 bp, Homo sapiens
gtgcgcaccaccacg

SEQ ID NO: 472903 - DNA, 15 bp, Homo sapiens
ggtgcgcaccaccac

SEQ ID NO: 472904 - DNA, 15 bp, Homo sapiens
aggtgcgcaccacca

SEQ ID NO: 472905 - DNA, 15 bp, Homo sapiens
caggtgcgcaccacc

SEQ ID NO: 472906 - DNA, 15 bp, Homo sapiens
acaggtgcgcaccac

SEQ ID NO: 472907 - DNA, 15 bp, Homo sapiens
agagtagctgggact

SEQ ID NO: 472908 - DNA, 15 bp, Homo sapiens
cagagtagctgggac

SEQ ID NO: 472909 - DNA, 15 bp, Homo sapiens
cccagagtagctggg

SEQ ID NO: 472910 - DNA, 15 bp, Homo sapiens
gcccagagtagctgg

SEQ ID NO: 472911 - DNA, 15 bp, Homo sapiens
cgcccagagtagctg

SEQ ID NO: 472912 - DNA, 15 bp, Homo sapiens
ccgcccagagtagct

SEQ ID NO: 472913 - DNA, 15 bp, Homo sapiens
gccgcccagagtagc

SEQ ID NO: 472914 - DNA, 15 bp, Homo sapiens
agccgcccagagtag

SEQ ID NO: 472915 - DNA, 15 bp, Homo sapiens
cagccgcccagagta

SEQ ID NO: 472916 - DNA, 15 bp, Homo sapiens
tcagccgcccagagt

SEQ ID NO: 472917 - DNA, 15 bp, Homo sapiens
ctcagccgcccagag

SEQ ID NO: 472918 - DNA, 15 bp, Homo sapiens
cctcagccgcccaga

SEQ ID NO: 472919 - DNA, 15 bp, Homo sapiens
gcctcagccgcccag

SEQ ID NO: 472920 - DNA, 15 bp, Homo sapiens
tgcctcagccgccca

SEQ ID NO: 472921 - DNA, 15 bp, Homo sapiens
ctgcctcagccgccc

SEQ ID NO: 472922 - DNA, 15 bp, Homo sapiens
cctgcctcagccgcc

SEQ ID NO: 472923 - DNA, 15 bp, Homo sapiens
tcctgcctcagccgc

SEQ ID NO: 472924 - DNA, 15 bp, Homo sapiens
ctcctgcctcagccg

SEQ ID NO: 472925 - DNA, 15 bp, Homo sapiens
caagtgattctcctg

SEQ ID NO: 472926 - DNA, 15 bp, Homo sapiens
tcaagtgattctcct

SEQ ID NO: 472927 - DNA, 15 bp, Homo sapiens
aggttcaagtgattc

SEQ ID NO: 472928 - DNA, 15 bp, Homo sapiens
caggttcaagtgatt

SEQ ID NO: 472929 - DNA, 15 bp, Homo sapiens
ccaggttcaagtgat

SEQ ID NO: 472930 - DNA, 15 bp, Homo sapiens
cccaggttcaagtga

SEQ ID NO: 472931 - DNA, 15 bp, Homo sapiens
tcccaggttcaagtg

SEQ ID NO: 472932 - DNA, 15 bp, Homo sapiens
atcccaggttcaagt

SEQ ID NO: 472933 - DNA, 15 bp, Homo sapiens
tatcccaggttcaag

SEQ ID NO: 472934 - DNA, 15 bp, Homo sapiens
atatcccaggttcaa

SEQ ID NO: 472935 - DNA, 15 bp, Homo sapiens
catatcccaggttca

SEQ ID NO: 472936 - DNA, 15 bp, Homo sapiens
ccatatcccaggttc

SEQ ID NO: 472937 - DNA, 15 bp, Homo sapiens
tccatatcccaggtt

SEQ ID NO: 472938 - DNA, 15 bp, Homo sapiens
ttccatatcccaggt

SEQ ID NO: 472939 - DNA, 15 bp, Homo sapiens
cttccatatcccagg

SEQ ID NO: 472940 - DNA, 15 bp, Homo sapiens
acttccatatcccag

SEQ ID NO: 472941 - DNA, 15 bp, Homo sapiens
aacttccatatccca

SEQ ID NO: 472942 - DNA, 15 bp, Homo sapiens
caacttccatatccc

SEQ ID NO: 472943 - DNA, 15 bp, Homo sapiens
gcaacttccatatcc

SEQ ID NO: 472944 - DNA, 15 bp, Homo sapiens
tgcaacttccatatc

SEQ ID NO: 472945 - DNA, 15 bp, Homo sapiens
ctgcaacttccatat

SEQ ID NO: 472946 - DNA, 15 bp, Homo sapiens
actgcaacttccata

SEQ ID NO: 472947 - DNA, 15 bp, Homo sapiens
cactgcaacttccat

SEQ ID NO: 472948 - DNA, 15 bp, Homo sapiens
tcactgcaacttcca

SEQ ID NO: 472949 - DNA, 15 bp, Homo sapiens
ctcactgcaacttcc

SEQ ID NO: 472950 - DNA, 15 bp, Homo sapiens
gctcactgcaacttc

SEQ ID NO: 472951 - DNA, 15 bp, Homo sapiens
cgctcactgcaactt

SEQ ID NO: 472952 - DNA, 15 bp, Homo sapiens
ccgctcactgcaact

SEQ ID NO: 472953 - DNA, 15 bp, Homo sapiens
tccgctcactgcaac

SEQ ID NO: 472954 - DNA, 15 bp, Homo sapiens
ctccgctcactgcaa

SEQ ID NO: 472955 - DNA, 15 bp, Homo sapiens
tctccgctcactgca

SEQ ID NO: 472956 - DNA, 15 bp, Homo sapiens
atctccgctcactgc

SEQ ID NO: 472957 - DNA, 15 bp, Homo sapiens
gatctccgctcactg

SEQ ID NO: 472958 - DNA, 15 bp, Homo sapiens
agatctccgctcact

SEQ ID NO: 472959 - DNA, 15 bp, Homo sapiens
aagatctccgctcac

SEQ ID NO: 472960 - DNA, 15 bp, Homo sapiens
taagatctccgctca

SEQ ID NO: 472961 - DNA, 15 bp, Homo sapiens
gtaagatctccgctc

SEQ ID NO: 472962 - DNA, 15 bp, Homo sapiens
agtaagatctccgct

SEQ ID NO: 472963 - DNA, 15 bp, Homo sapiens
tagtaagatctccgc

SEQ ID NO: 472964 - DNA, 15 bp, Homo sapiens
gtagtaagatctccg

SEQ ID NO: 472965 - DNA, 15 bp, Homo sapiens
ggtagtaagatctcc

SEQ ID NO: 472966 - DNA, 15 bp, Homo sapiens
cggtagtaagatctc

SEQ ID NO: 472967 - DNA, 15 bp, Homo sapiens
gcggtagtaagatct

SEQ ID NO: 472968 - DNA, 15 bp, Homo sapiens
tgcggtagtaagatc

SEQ ID NO: 472969 - DNA, 15 bp, Homo sapiens
gtgcggtagtaagat

SEQ ID NO: 472970 - DNA, 15 bp, Homo sapiens
tgtgcggtagtaaga

SEQ ID NO: 472971 - DNA, 15 bp, Homo sapiens
gtgtgcggtagtaag

SEQ ID NO: 472972 - DNA, 15 bp, Homo sapiens
ggtgtgcggtagtaa

SEQ ID NO: 472973 - DNA, 15 bp, Homo sapiens
tggtgtgcggtagta

SEQ ID NO: 472974 - DNA, 15 bp, Homo sapiens
ttggtgtgcggtagt

SEQ ID NO: 472975 - DNA, 15 bp, Homo sapiens
gttggtgtgcggtag

SEQ ID NO: 472976 - DNA, 15 bp, Homo sapiens
ggttggtgtgcggta

SEQ ID NO: 472977 - DNA, 15 bp, Homo sapiens
tggttggtgtgcggt

SEQ ID NO: 472978 - DNA, 15 bp, Homo sapiens
ctggttggtgtgcgg

SEQ ID NO: 472979 - DNA, 15 bp, Homo sapiens
gctggttggtgtgcg

SEQ ID NO: 472980 - DNA, 15 bp, Homo sapiens
ggctggttggtgtgc

SEQ ID NO: 472981 - DNA, 15 bp, Homo sapiens
aggctggttggtgtg

SEQ ID NO: 472982 - DNA, 15 bp, Homo sapiens
caggctggttggtgt

SEQ ID NO: 472983 - DNA, 15 bp, Homo sapiens
ccaggctggttggtg

SEQ ID NO: 472984 - DNA, 15 bp, Homo sapiens
cccaggctggttggt

SEQ ID NO: 472985 - DNA, 15 bp, Homo sapiens
tcccaggctggttgg

SEQ ID NO: 472986 - DNA, 15 bp, Homo sapiens
ctcccaggctggttg

SEQ ID NO: 472987 - DNA, 15 bp, Homo sapiens
tctcccaggctggtt

SEQ ID NO: 472988 - DNA, 15 bp, Homo sapiens
gtctcccaggctggt

SEQ ID NO: 472989 - DNA, 15 bp, Homo sapiens
actctgtctcccagg

SEQ ID NO: 472990 - DNA, 15 bp, Homo sapiens
cactctgtctcccag

SEQ ID NO: 472991 - DNA, 15 bp, Homo sapiens
tcactctgtctccca

SEQ ID NO: 472992 - DNA, 15 bp, Homo sapiens
ctcactctgtctccc

SEQ ID NO: 472993 - DNA, 15 bp, Homo sapiens
tctcactctgtctcc

SEQ ID NO: 472994 - DNA, 15 bp, Homo sapiens
gtctcactctgtctc

SEQ ID NO: 472995 - DNA, 15 bp, Homo sapiens
agtctcactctgtct

SEQ ID NO: 472996 - DNA, 15 bp, Homo sapiens
ggagtctcactctgt

SEQ ID NO: 472997 - DNA, 15 bp, Homo sapiens
tggagtctcactctg

SEQ ID NO: 472998 - DNA, 15 bp, Homo sapiens
atggagtctcactct

SEQ ID NO: 472999 - DNA, 15 bp, Homo sapiens
gatggagtctcactc

SEQ ID NO: 473000 - DNA, 15 bp, Homo sapiens
agatggagtctcact

SEQ ID NO: 473001 - DNA, 15 bp, Homo sapiens
gagatggagtctcac

SEQ ID NO: 473002 - DNA, 15 bp, Homo sapiens
tgagatggagtctca

SEQ ID NO: 473003 - DNA, 15 bp, Homo sapiens
atttttttgagatgg

SEQ ID NO: 473004 - DNA, 15 bp, Homo sapiens
tatttttttgagatg

SEQ ID NO: 473005 - DNA, 15 bp, Homo sapiens
ttatttttttgagat

SEQ ID NO: 473006 - DNA, 15 bp, Homo sapiens
tttatttttttgaga

SEQ ID NO: 473007 - DNA, 15 bp, Homo sapiens
ttttatttttttgag

SEQ ID NO: 473008 - DNA, 15 bp, Homo sapiens
tttttatttttttga

SEQ ID NO: 473009 - DNA, 15 bp, Homo sapiens
tatttttattttttt

SEQ ID NO: 473010 - DNA, 15 bp, Homo sapiens
ttatttttatttttt

SEQ ID NO: 473011 - DNA, 15 bp, Homo sapiens
tttatttttattttt

SEQ ID NO: 473012 - DNA, 15 bp, Homo sapiens
ttttatttttatttt

SEQ ID NO: 473013 - DNA, 15 bp, Homo sapiens
attttatttttattt

SEQ ID NO: 473014 - DNA, 15 bp, Homo sapiens
tattttatttttatt

SEQ ID NO: 473015 - DNA, 15 bp, Homo sapiens
ttattttatttttat

SEQ ID NO: 473016 - DNA, 15 bp, Homo sapiens
ctttattttattttt

SEQ ID NO: 473017 - DNA, 15 bp, Homo sapiens
actttattttatttt

SEQ ID NO: 473018 - DNA, 15 bp, Homo sapiens
aactttattttattt

SEQ ID NO: 473019 - DNA, 15 bp, Homo sapiens
aaactttattttatt

SEQ ID NO: 473020 - DNA, 15 bp, Homo sapiens
aaaactttattttat

SEQ ID NO: 473021 - DNA, 15 bp, Homo sapiens
aaaaactttatttta

SEQ ID NO: 473022 - DNA, 15 bp, Homo sapiens
taaaaactttatttt

SEQ ID NO: 473023 - DNA, 15 bp, Homo sapiens
gtaaaaactttattt

SEQ ID NO: 473024 - DNA, 15 bp, Homo sapiens
agtaaaaactttatt

SEQ ID NO: 473025 - DNA, 15 bp, Homo sapiens
aagtaaaaactttat

SEQ ID NO: 473026 - DNA, 15 bp, Homo sapiens
caaataaagtaaaaa

SEQ ID NO: 473027 - DNA, 15 bp, Homo sapiens
ccaaataaagtaaaa

SEQ ID NO: 473028 - DNA, 15 bp, Homo sapiens
tccaaataaagtaaa

SEQ ID NO: 473029 - DNA, 15 bp, Homo sapiens
ctccaaataaagtaa

SEQ ID NO: 473030 - DNA, 15 bp, Homo sapiens
tctccaaataaagta

SEQ ID NO: 473031 - DNA, 15 bp, Homo sapiens
ttctccaaataaagt

SEQ ID NO: 473032 - DNA, 15 bp, Homo sapiens
tttctccaaataaag

SEQ ID NO: 473033 - DNA, 15 bp, Homo sapiens
gtttctccaaataaa

SEQ ID NO: 473034 - DNA, 15 bp, Homo sapiens
agtttctccaaataa

SEQ ID NO: 473035 - DNA, 15 bp, Homo sapiens
aagtttctccaaata

SEQ ID NO: 473036 - DNA, 15 bp, Homo sapiens
aaagtttctccaaat

SEQ ID NO: 473037 - DNA, 15 bp, Homo sapiens
caaagtttctccaaa

SEQ ID NO: 473038 - DNA, 15 bp, Homo sapiens
acaaagtttctccaa

SEQ ID NO: 473039 - DNA, 15 bp, Homo sapiens
aacaaagtttctcca

SEQ ID NO: 473040 - DNA, 15 bp, Homo sapiens
aaacaaagtttctcc

SEQ ID NO: 473041 - DNA, 15 bp, Homo sapiens
aaaacaaagtttctc

SEQ ID NO: 473042 - DNA, 15 bp, Homo sapiens
taaaacaaagtttct

SEQ ID NO: 473043 - DNA, 15 bp, Homo sapiens
ttaaaacaaagtttc

SEQ ID NO: 473044 - DNA, 15 bp, Homo sapiens
tttaaaacaaagttt

SEQ ID NO: 473045 - DNA, 15 bp, Homo sapiens
ttttaaaacaaagtt

SEQ ID NO: 473046 - DNA, 15 bp, Homo sapiens
tttttaaaacaaagt

SEQ ID NO: 473047 - DNA, 15 bp, Homo sapiens
ttttttaaaacaaag

SEQ ID NO: 473048 - DNA, 15 bp, Homo sapiens
attttttaaaacaaa

SEQ ID NO: 473049 - DNA, 15 bp, Homo sapiens
cattttttaaaacaa

SEQ ID NO: 473050 - DNA, 15 bp, Homo sapiens
acattttttaaaaca

SEQ ID NO: 473051 - DNA, 15 bp, Homo sapiens
tacattttttaaaac

SEQ ID NO: 473052 - DNA, 15 bp, Homo sapiens
atacattttttaaaa

SEQ ID NO: 473053 - DNA, 15 bp, Homo sapiens
aatacattttttaaa

SEQ ID NO: 473054 - DNA, 15 bp, Homo sapiens
aaatacattttttaa

SEQ ID NO: 473055 - DNA, 15 bp, Homo sapiens
taaatacatttttta

SEQ ID NO: 473056 - DNA, 15 bp, Homo sapiens
ataaatacatttttt

SEQ ID NO: 473057 - DNA, 15 bp, Homo sapiens
tataaatacattttt

SEQ ID NO: 473058 - DNA, 15 bp, Homo sapiens
atataaatacatttt

SEQ ID NO: 473059 - DNA, 15 bp, Homo sapiens
aatataaatacattt

SEQ ID NO: 473060 - DNA, 15 bp, Homo sapiens
taatataaatacatt

SEQ ID NO: 473061 - DNA, 15 bp, Homo sapiens
ataatataaatacat

SEQ ID NO: 473062 - DNA, 15 bp, Homo sapiens
aataatataaataca

SEQ ID NO: 473063 - DNA, 15 bp, Homo sapiens
taataatataaatac

SEQ ID NO: 473064 - DNA, 15 bp, Homo sapiens
ataataatataaata

SEQ ID NO: 473065 - DNA, 15 bp, Homo sapiens
tataataatataaat

SEQ ID NO: 473066 - DNA, 15 bp, Homo sapiens
atataataatataaa

SEQ ID NO: 473067 - DNA, 15 bp, Homo sapiens
aatataataatataa

SEQ ID NO: 473068 - DNA, 15 bp, Homo sapiens
aaatataataatata

SEQ ID NO: 473069 - DNA, 15 bp, Homo sapiens
aaaatataataatat

SEQ ID NO: 473070 - DNA, 15 bp, Homo sapiens
taaaatataataata

SEQ ID NO: 473071 - DNA, 15 bp, Homo sapiens
ttaaaatataataat

SEQ ID NO: 473072 - DNA, 15 bp, Homo sapiens
cttaaaatataataa

SEQ ID NO: 473073 - DNA, 15 bp, Homo sapiens
acttaaaatataata

SEQ ID NO: 473074 - DNA, 15 bp, Homo sapiens
tacttaaaatataat

SEQ ID NO: 473075 - DNA, 15 bp, Homo sapiens
atacttaaaatataa

SEQ ID NO: 473076 - DNA, 15 bp, Homo sapiens
tatacttaaaatata

SEQ ID NO: 473077 - DNA, 15 bp, Homo sapiens
atatacttaaaatat

SEQ ID NO: 473078 - DNA, 15 bp, Homo sapiens
aatatacttaaaata

SEQ ID NO: 473079 - DNA, 15 bp, Homo sapiens
aaatatacttaaaat

SEQ ID NO: 473080 - DNA, 15 bp, Homo sapiens
aaaatatacttaaaa

SEQ ID NO: 473081 - DNA, 15 bp, Homo sapiens
taaaatatacttaaa

SEQ ID NO: 473082 - DNA, 15 bp, Homo sapiens
gtaaaatatacttaa

SEQ ID NO: 473083 - DNA, 15 bp, Homo sapiens
agtaaaatatactta

SEQ ID NO: 473084 - DNA, 15 bp, Homo sapiens
aagtaaaatatactt

SEQ ID NO: 473085 - DNA, 15 bp, Homo sapiens
taagtaaaatatact

SEQ ID NO: 473086 - DNA, 15 bp, Homo sapiens
ttaagtaaaatatac

SEQ ID NO: 473087 - DNA, 15 bp, Homo sapiens
attaagtaaaatata

SEQ ID NO: 473088 - DNA, 15 bp, Homo sapiens
tattaagtaaaatat

SEQ ID NO: 473089 - DNA, 15 bp, Homo sapiens
ttattaagtaaaata

SEQ ID NO: 473090 - DNA, 15 bp, Homo sapiens
attattaagtaaaat

SEQ ID NO: 473091 - DNA, 15 bp, Homo sapiens
aattattaagtaaaa

SEQ ID NO: 473092 - DNA, 15 bp, Homo sapiens
gaattattaagtaaa

SEQ ID NO: 473093 - DNA, 15 bp, Homo sapiens
tgaattattaagtaa

SEQ ID NO: 473094 - DNA, 15 bp, Homo sapiens
ttgaattattaagta

SEQ ID NO: 473095 - DNA, 15 bp, Homo sapiens
attgaattattaagt

SEQ ID NO: 473096 - DNA, 15 bp, Homo sapiens
aattgaattattaag

SEQ ID NO: 473097 - DNA, 15 bp, Homo sapiens
taattgaattattaa

SEQ ID NO: 473098 - DNA, 15 bp, Homo sapiens
ttaattgaattatta

SEQ ID NO: 473099 - DNA, 15 bp, Homo sapiens
cttaattgaattatt

SEQ ID NO: 473100 - DNA, 15 bp, Homo sapiens
ccttaattgaattat

SEQ ID NO: 473101 - DNA, 15 bp, Homo sapiens
gccttaattgaatta

SEQ ID NO: 473102 - DNA, 15 bp, Homo sapiens
agccttaattgaatt

SEQ ID NO: 473103 - DNA, 15 bp, Homo sapiens
aagccttaattgaat

SEQ ID NO: 473104 - DNA, 15 bp, Homo sapiens
aaagccttaattgaa

SEQ ID NO: 473105 - DNA, 15 bp, Homo sapiens
aaaagccttaattga

SEQ ID NO: 473106 - DNA, 15 bp, Homo sapiens
caaaagccttaattg

SEQ ID NO: 473107 - DNA, 15 bp, Homo sapiens
ccaaaagccttaatt

SEQ ID NO: 473108 - DNA, 15 bp, Homo sapiens
accaaaagccttaat

SEQ ID NO: 473109 - DNA, 15 bp, Homo sapiens
aaccaaaagccttaa

SEQ ID NO: 473110 - DNA, 15 bp, Homo sapiens
aaaccaaaagcctta

SEQ ID NO: 473111 - DNA, 15 bp, Homo sapiens
taaaccaaaagcctt

SEQ ID NO: 473112 - DNA, 15 bp, Homo sapiens
ttaaaccaaaagcct

SEQ ID NO: 473113 - DNA, 15 bp, Homo sapiens
gttaaaccaaaagcc

SEQ ID NO: 473114 - DNA, 15 bp, Homo sapiens
agttaaaccaaaagc

SEQ ID NO: 473115 - DNA, 15 bp, Homo sapiens
cagttaaaccaaaag

SEQ ID NO: 473116 - DNA, 15 bp, Homo sapiens
acagttaaaccaaaa

SEQ ID NO: 473117 - DNA, 15 bp, Homo sapiens
tacagttaaaccaaa

SEQ ID NO: 473118 - DNA, 15 bp, Homo sapiens
atacagttaaaccaa

SEQ ID NO: 473119 - DNA, 15 bp, Homo sapiens
aatacagttaaacca

SEQ ID NO: 473120 - DNA, 15 bp, Homo sapiens
aaatacagttaaacc

SEQ ID NO: 473121 - DNA, 15 bp, Homo sapiens
taaatacagttaaac

SEQ ID NO: 473122 - DNA, 15 bp, Homo sapiens
ttaaatacagttaaa

SEQ ID NO: 473123 - DNA, 15 bp, Homo sapiens
gttaaatacagttaa

SEQ ID NO: 473124 - DNA, 15 bp, Homo sapiens
tgttaaatacagtta

SEQ ID NO: 473125 - DNA, 15 bp, Homo sapiens
ctgttaaatacagtt

SEQ ID NO: 473126 - DNA, 15 bp, Homo sapiens
tctgttaaatacagt

SEQ ID NO: 473127 - DNA, 15 bp, Homo sapiens
atctgttaaatacag

SEQ ID NO: 473128 - DNA, 15 bp, Homo sapiens
tatctgttaaataca

SEQ ID NO: 473129 - DNA, 15 bp, Homo sapiens
ctatctgttaaatac

SEQ ID NO: 473130 - DNA, 15 bp, Homo sapiens
tctatctgttaaata

SEQ ID NO: 473131 - DNA, 15 bp, Homo sapiens
gtctatctgttaaat

SEQ ID NO: 473132 - DNA, 15 bp, Homo sapiens
tgtctatctgttaaa

SEQ ID NO: 473133 - DNA, 15 bp, Homo sapiens
ttgtctatctgttaa

SEQ ID NO: 473134 - DNA, 15 bp, Homo sapiens
tttgtctatctgtta

SEQ ID NO: 473135 - DNA, 15 bp, Homo sapiens
gtttgtctatctgtt

SEQ ID NO: 473136 - DNA, 15 bp, Homo sapiens
ggtttgtctatctgt

SEQ ID NO: 473137 - DNA, 15 bp, Homo sapiens
aggtttgtctatctg

SEQ ID NO: 473138 - DNA, 15 bp, Homo sapiens
aaggtttgtctatct

SEQ ID NO: 473139 - DNA, 15 bp, Homo sapiens
aaaggtttgtctatc

SEQ ID NO: 473140 - DNA, 15 bp, Homo sapiens
aaaaggtttgtctat

SEQ ID NO: 473141 - DNA, 15 bp, Homo sapiens
taaaaggtttgtcta

SEQ ID NO: 473142 - DNA, 15 bp, Homo sapiens
ttaaaaggtttgtct

SEQ ID NO: 473143 - DNA, 15 bp, Homo sapiens
attaaaaggtttgtc

SEQ ID NO: 473144 - DNA, 15 bp, Homo sapiens
aattaaaaggtttgt

SEQ ID NO: 473145 - DNA, 15 bp, Homo sapiens
aaattaaaaggtttg

SEQ ID NO: 473146 - DNA, 15 bp, Homo sapiens
aaaattaaaaggttt

SEQ ID NO: 473147 - DNA, 15 bp, Homo sapiens
taaaattaaaaggtt

SEQ ID NO: 473148 - DNA, 15 bp, Homo sapiens
ctaaaattaaaaggt

SEQ ID NO: 473149 - DNA, 15 bp, Homo sapiens
actaaaattaaaagg

SEQ ID NO: 473150 - DNA, 15 bp, Homo sapiens
aactaaaattaaaag

SEQ ID NO: 473151 - DNA, 15 bp, Homo sapiens
taactaaaattaaaa

SEQ ID NO: 473152 - DNA, 15 bp, Homo sapiens
ataactaaaattaaa

SEQ ID NO: 473153 - DNA, 15 bp, Homo sapiens
aataactaaaattaa

SEQ ID NO: 473154 - DNA, 15 bp, Homo sapiens
aaataactaaaatta

SEQ ID NO: 473155 - DNA, 15 bp, Homo sapiens
aaaataactaaaatt

SEQ ID NO: 473156 - DNA, 15 bp, Homo sapiens
taaaataactaaaat

SEQ ID NO: 473157 - DNA, 15 bp, Homo sapiens
ctaaaataactaaaa

SEQ ID NO: 473158 - DNA, 15 bp, Homo sapiens
actaaaataactaaa

SEQ ID NO: 473159 - DNA, 15 bp, Homo sapiens
tactaaaataactaa

SEQ ID NO: 473160 - DNA, 15 bp, Homo sapiens
ttactaaaataacta

SEQ ID NO: 473161 - DNA, 15 bp, Homo sapiens
attactaaaataact

SEQ ID NO: 473162 - DNA, 15 bp, Homo sapiens
gattactaaaataac

SEQ ID NO: 473163 - DNA, 15 bp, Homo sapiens
agattactaaaataa

SEQ ID NO: 473164 - DNA, 15 bp, Homo sapiens
tagattactaaaata

SEQ ID NO: 473165 - DNA, 15 bp, Homo sapiens
ttagattactaaaat

SEQ ID NO: 473166 - DNA, 15 bp, Homo sapiens
tttagattactaaaa

SEQ ID NO: 473167 - DNA, 15 bp, Homo sapiens
ttttagattactaaa

SEQ ID NO: 473168 - DNA, 15 bp, Homo sapiens
attttagattactaa

SEQ ID NO: 473169 - DNA, 15 bp, Homo sapiens
cattttagattacta

SEQ ID NO: 473170 - DNA, 15 bp, Homo sapiens
tcattttagattact

SEQ ID NO: 473171 - DNA, 15 bp, Homo sapiens
gtcattttagattac

SEQ ID NO: 473172 - DNA, 15 bp, Homo sapiens
tgtcattttagatta

SEQ ID NO: 473173 - DNA, 15 bp, Homo sapiens
gtgtcattttagatt

SEQ ID NO: 473174 - DNA, 15 bp, Homo sapiens
tgtgtcattttagat

SEQ ID NO: 473175 - DNA, 15 bp, Homo sapiens
atgtgtcattttaga

SEQ ID NO: 473176 - DNA, 15 bp, Homo sapiens
catgtgtcattttag

SEQ ID NO: 473177 - DNA, 15 bp, Homo sapiens
gcatgtgtcatttta

SEQ ID NO: 473178 - DNA, 15 bp, Homo sapiens
ggcatgtgtcatttt

SEQ ID NO: 473179 - DNA, 15 bp, Homo sapiens
gggcatgtgtcattt

SEQ ID NO: 473180 - DNA, 15 bp, Homo sapiens
agggcatgtgtcatt

SEQ ID NO: 473181 - DNA, 15 bp, Homo sapiens
aagggcatgtgtcat

SEQ ID NO: 473182 - DNA, 15 bp, Homo sapiens
aaagggcatgtgtca

SEQ ID NO: 473183 - DNA, 15 bp, Homo sapiens
aaaagggcatgtgtc

SEQ ID NO: 473184 - DNA, 15 bp, Homo sapiens
aaaaagggcatgtgt

SEQ ID NO: 473185 - DNA, 15 bp, Homo sapiens
taaaaagggcatgtg

SEQ ID NO: 473186 - DNA, 15 bp, Homo sapiens
ttaaaaagggcatgt

SEQ ID NO: 473187 - DNA, 15 bp, Homo sapiens
cttaaaaagggcatg

SEQ ID NO: 473188 - DNA, 15 bp, Homo sapiens
ccttaaaaagggcat

SEQ ID NO: 473189 - DNA, 15 bp, Homo sapiens
cccttaaaaagggca

SEQ ID NO: 473190 - DNA, 15 bp, Homo sapiens
tcccttaaaaagggc

SEQ ID NO: 473191 - DNA, 15 bp, Homo sapiens
ttcccttaaaaaggg

SEQ ID NO: 473192 - DNA, 15 bp, Homo sapiens
tttcccttaaaaagg

SEQ ID NO: 473193 - DNA, 15 bp, Homo sapiens
ttttcccttaaaaag

SEQ ID NO: 473194 - DNA, 15 bp, Homo sapiens
tttttcccttaaaaa

SEQ ID NO: 473195 - DNA, 15 bp, Homo sapiens
ttttttcccttaaaa

SEQ ID NO: 473196 - DNA, 15 bp, Homo sapiens
attttttcccttaaa

SEQ ID NO: 473197 - DNA, 15 bp, Homo sapiens
aattttttcccttaa

SEQ ID NO: 473198 - DNA, 15 bp, Homo sapiens
gaattttttccctta

SEQ ID NO: 473199 - DNA, 15 bp, Homo sapiens
tgaattttttccctt

SEQ ID NO: 473200 - DNA, 15 bp, Homo sapiens
ttgaattttttccct

SEQ ID NO: 473201 - DNA, 15 bp, Homo sapiens
tttgaattttttccc

SEQ ID NO: 473202 - DNA, 15 bp, Homo sapiens
atttgaattttttcc

SEQ ID NO: 473203 - DNA, 15 bp, Homo sapiens
tatttgaattttttc

SEQ ID NO: 473204 - DNA, 15 bp, Homo sapiens
gtatttgaatttttt

SEQ ID NO: 473205 - DNA, 15 bp, Homo sapiens
tgtatttgaattttt

SEQ ID NO: 473206 - DNA, 15 bp, Homo sapiens
ctgtatttgaatttt

SEQ ID NO: 473207 - DNA, 15 bp, Homo sapiens
tctgtatttgaattt

SEQ ID NO: 473208 - DNA, 15 bp, Homo sapiens
ttctgtatttgaatt

SEQ ID NO: 473209 - DNA, 15 bp, Homo sapiens
tttctgtatttgaat

SEQ ID NO: 473210 - DNA, 15 bp, Homo sapiens
ttttctgtatttgaa

SEQ ID NO: 473211 - DNA, 15 bp, Homo sapiens
attttctgtatttga

SEQ ID NO: 473212 - DNA, 15 bp, Homo sapiens
aattttctgtatttg

SEQ ID NO: 473213 - DNA, 15 bp, Homo sapiens
taattttctgtattt

SEQ ID NO: 473214 - DNA, 15 bp, Homo sapiens
ttaattttctgtatt

SEQ ID NO: 473215 - DNA, 15 bp, Homo sapiens
attaattttctgtat

SEQ ID NO: 473216 - DNA, 15 bp, Homo sapiens
gattaattttctgta

SEQ ID NO: 473217 - DNA, 15 bp, Homo sapiens
tgattaattttctgt

SEQ ID NO: 473218 - DNA, 15 bp, Homo sapiens
ttgattaattttctg

SEQ ID NO: 473219 - DNA, 15 bp, Homo sapiens
cttgattaattttct

SEQ ID NO: 473220 - DNA, 15 bp, Homo sapiens
tcttgattaattttc

SEQ ID NO: 473221 - DNA, 15 bp, Homo sapiens
ctcttgattaatttt

SEQ ID NO: 473222 - DNA, 15 bp, Homo sapiens
tctcttgattaattt

SEQ ID NO: 473223 - DNA, 15 bp, Homo sapiens
ttctcttgattaatt

SEQ ID NO: 473224 - DNA, 15 bp, Homo sapiens
cttctcttgattaat

SEQ ID NO: 473225 - DNA, 15 bp, Homo sapiens
tcttctcttgattaa

SEQ ID NO: 473226 - DNA, 15 bp, Homo sapiens
ttcttctcttgatta

SEQ ID NO: 473227 - DNA, 15 bp, Homo sapiens
tttcttctcttgatt

SEQ ID NO: 473228 - DNA, 15 bp, Homo sapiens
ttttcttctcttgat

SEQ ID NO: 473229 - DNA, 15 bp, Homo sapiens
tttttcttctcttga

SEQ ID NO: 473230 - DNA, 15 bp, Homo sapiens
ttttttcttctcttg

SEQ ID NO: 473231 - DNA, 15 bp, Homo sapiens
attttttcttctctt

SEQ ID NO: 473232 - DNA, 15 bp, Homo sapiens
aattttttcttctct

SEQ ID NO: 473233 - DNA, 15 bp, Homo sapiens
aaattttttcttctc

SEQ ID NO: 473234 - DNA, 15 bp, Homo sapiens
aaaattttttcttct

SEQ ID NO: 473235 - DNA, 15 bp, Homo sapiens
aaaaattttttcttc

SEQ ID NO: 473236 - DNA, 15 bp, Homo sapiens
taaaaattttttctt

SEQ ID NO: 473237 - DNA, 15 bp, Homo sapiens
ttaaaaattttttct

SEQ ID NO: 473238 - DNA, 15 bp, Homo sapiens
tttaaaaattttttc

SEQ ID NO: 473239 - DNA, 15 bp, Homo sapiens
atttaaaaatttttt

SEQ ID NO: 473240 - DNA, 15 bp, Homo sapiens
catttaaaaattttt

SEQ ID NO: 473241 - DNA, 15 bp, Homo sapiens
tcatttaaaaatttt

SEQ ID NO: 473242 - DNA, 15 bp, Homo sapiens
ttcatttaaaaattt

SEQ ID NO: 473243 - DNA, 15 bp, Homo sapiens
tttcatttaaaaatt

SEQ ID NO: 473244 - DNA, 15 bp, Homo sapiens
atttcatttaaaaat

SEQ ID NO: 473245 - DNA, 15 bp, Homo sapiens
gatttcatttaaaaa

SEQ ID NO: 473246 - DNA, 15 bp, Homo sapiens
tgatttcatttaaaa

SEQ ID NO: 473247 - DNA, 15 bp, Homo sapiens
atgatttcatttaaa

SEQ ID NO: 473248 - DNA, 15 bp, Homo sapiens
gatgatttcatttaa

SEQ ID NO: 473249 - DNA, 15 bp, Homo sapiens
tgatgatttcattta

SEQ ID NO: 473250 - DNA, 15 bp, Homo sapiens
ctgatgatttcattt

SEQ ID NO: 473251 - DNA, 15 bp, Homo sapiens
gctgatgatttcatt

SEQ ID NO: 473252 - DNA, 15 bp, Homo sapiens
tgctgatgatttcat

SEQ ID NO: 473253 - DNA, 15 bp, Homo sapiens
ctgctgatgatttca

SEQ ID NO: 473254 - DNA, 15 bp, Homo sapiens
actgctgatgatttc

SEQ ID NO: 473255 - DNA, 15 bp, Homo sapiens
tactgctgatgattt

SEQ ID NO: 473256 - DNA, 15 bp, Homo sapiens
gtactgctgatgatt

SEQ ID NO: 473257 - DNA, 15 bp, Homo sapiens
agtactgctgatgat

SEQ ID NO: 473258 - DNA, 15 bp, Homo sapiens
tagtactgctgatga

SEQ ID NO: 473259 - DNA, 15 bp, Homo sapiens
ctagtactgctgatg

SEQ ID NO: 473260 - DNA, 15 bp, Homo sapiens
actagtactgctgat

SEQ ID NO: 473261 - DNA, 15 bp, Homo sapiens
tactagtactgctga

SEQ ID NO: 473262 - DNA, 15 bp, Homo sapiens
ctactagtactgctg

SEQ ID NO: 473263 - DNA, 15 bp, Homo sapiens
actactagtactgct

SEQ ID NO: 473264 - DNA, 15 bp, Homo sapiens
aactactagtactgc

SEQ ID NO: 473265 - DNA, 15 bp, Homo sapiens
taactactagtactg

SEQ ID NO: 473266 - DNA, 15 bp, Homo sapiens
ttaactactagtact

SEQ ID NO: 473267 - DNA, 15 bp, Homo sapiens
tttaactactagtac

SEQ ID NO: 473268 - DNA, 15 bp, Homo sapiens
ttttaactactagta

SEQ ID NO: 473269 - DNA, 15 bp, Homo sapiens
attttaactactagt

SEQ ID NO: 473270 - DNA, 15 bp, Homo sapiens
aattttaactactag

SEQ ID NO: 473271 - DNA, 15 bp, Homo sapiens
aaattttaactacta

SEQ ID NO: 473272 - DNA, 15 bp, Homo sapiens
taaattttaactact

SEQ ID NO: 473273 - DNA, 15 bp, Homo sapiens
ctaaattttaactac

SEQ ID NO: 473274 - DNA, 15 bp, Homo sapiens
actaaattttaacta

SEQ ID NO: 473275 - DNA, 15 bp, Homo sapiens
aactaaattttaact

SEQ ID NO: 473276 - DNA, 15 bp, Homo sapiens
caactaaattttaac

SEQ ID NO: 473277 - DNA, 15 bp, Homo sapiens
tcaactaaattttaa

SEQ ID NO: 473278 - DNA, 15 bp, Homo sapiens
atcaactaaatttta

SEQ ID NO: 473279 - DNA, 15 bp, Homo sapiens
catcaactaaatttt

SEQ ID NO: 473280 - DNA, 15 bp, Homo sapiens
gcatcaactaaattt

SEQ ID NO: 473281 - DNA, 15 bp, Homo sapiens
agcatcaactaaatt

SEQ ID NO: 473282 - DNA, 15 bp, Homo sapiens
gagcatcaactaaat

SEQ ID NO: 473283 - DNA, 15 bp, Homo sapiens
tgagcatcaactaaa

SEQ ID NO: 473284 - DNA, 15 bp, Homo sapiens
ttgagcatcaactaa

SEQ ID NO: 473285 - DNA, 15 bp, Homo sapiens
attgagcatcaacta

SEQ ID NO: 473286 - DNA, 15 bp, Homo sapiens
gattgagcatcaact

SEQ ID NO: 473287 - DNA, 15 bp, Homo sapiens
agattgagcatcaac

SEQ ID NO: 473288 - DNA, 15 bp, Homo sapiens
tagattgagcatcaa

SEQ ID NO: 473289 - DNA, 15 bp, Homo sapiens
ctagattgagcatca

SEQ ID NO: 473290 - DNA, 15 bp, Homo sapiens
tctagattgagcatc

SEQ ID NO: 473291 - DNA, 15 bp, Homo sapiens
gtctagattgagcat

SEQ ID NO: 473292 - DNA, 15 bp, Homo sapiens
tgtctagattgagca

SEQ ID NO: 473293 - DNA, 15 bp, Homo sapiens
atgtctagattgagc

SEQ ID NO: 473294 - DNA, 15 bp, Homo sapiens
gatgtctagattgag

SEQ ID NO: 473295 - DNA, 15 bp, Homo sapiens
agatgtctagattga

SEQ ID NO: 473296 - DNA, 15 bp, Homo sapiens
cagatgtctagattg

SEQ ID NO: 473297 - DNA, 15 bp, Homo sapiens
acagatgtctagatt

SEQ ID NO: 473298 - DNA, 15 bp, Homo sapiens
gacagatgtctagat

SEQ ID NO: 473299 - DNA, 15 bp, Homo sapiens
tgacagatgtctaga

SEQ ID NO: 473300 - DNA, 15 bp, Homo sapiens
atgacagatgtctag

SEQ ID NO: 473301 - DNA, 15 bp, Homo sapiens
aatgacagatgtcta

SEQ ID NO: 473302 - DNA, 15 bp, Homo sapiens
taatgacagatgtct

SEQ ID NO: 473303 - DNA, 15 bp, Homo sapiens
ataatgacagatgtc

SEQ ID NO: 473304 - DNA, 15 bp, Homo sapiens
cataatgacagatgt

SEQ ID NO: 473305 - DNA, 15 bp, Homo sapiens
acataatgacagatg

SEQ ID NO: 473306 - DNA, 15 bp, Homo sapiens
tacataatgacagat

SEQ ID NO: 473307 - DNA, 15 bp, Homo sapiens
atacataatgacaga

SEQ ID NO: 473308 - DNA, 15 bp, Homo sapiens
tatacataatgacag

SEQ ID NO: 473309 - DNA, 15 bp, Homo sapiens
atatacataatgaca

SEQ ID NO: 473310 - DNA, 15 bp, Homo sapiens
tatatacataatgac

SEQ ID NO: 473311 - DNA, 15 bp, Homo sapiens
gtatatacataatga

SEQ ID NO: 473312 - DNA, 15 bp, Homo sapiens
tgtatatacataatg

SEQ ID NO: 473313 - DNA, 15 bp, Homo sapiens
gtgtatatacataat

SEQ ID NO: 473314 - DNA, 15 bp, Homo sapiens
tgtgtatatacataa

SEQ ID NO: 473315 - DNA, 15 bp, Homo sapiens
atgtgtatatacata

SEQ ID NO: 473316 - DNA, 15 bp, Homo sapiens
aatgtgtatatacat

SEQ ID NO: 473317 - DNA, 15 bp, Homo sapiens
taatgtgtatataca

SEQ ID NO: 473318 - DNA, 15 bp, Homo sapiens
ataatgtgtatatac

SEQ ID NO: 473319 - DNA, 15 bp, Homo sapiens
cataatgtgtatata

SEQ ID NO: 473320 - DNA, 15 bp, Homo sapiens
acataatgtgtatat

SEQ ID NO: 473321 - DNA, 15 bp, Homo sapiens
tacataatgtgtata

SEQ ID NO: 473322 - DNA, 15 bp, Homo sapiens
atacataatgtgtat

SEQ ID NO: 473323 - DNA, 15 bp, Homo sapiens
tatacataatgtgta

SEQ ID NO: 473324 - DNA, 15 bp, Homo sapiens
atatacataatgtgt

SEQ ID NO: 473325 - DNA, 15 bp, Homo sapiens
tatatacataatgtg

SEQ ID NO: 473326 - DNA, 15 bp, Homo sapiens
gtatatacataatgt

SEQ ID NO: 473327 - DNA, 15 bp, Homo sapiens
tatgtgtatatacat

SEQ ID NO: 473328 - DNA, 15 bp, Homo sapiens
ttatgtgtatataca

SEQ ID NO: 473329 - DNA, 15 bp, Homo sapiens
tttatgtgtatatac

SEQ ID NO: 473330 - DNA, 15 bp, Homo sapiens
ctttatgtgtatata

SEQ ID NO: 473331 - DNA, 15 bp, Homo sapiens
tctttatgtgtatat

SEQ ID NO: 473332 - DNA, 15 bp, Homo sapiens
atctttatgtgtata

SEQ ID NO: 473333 - DNA, 15 bp, Homo sapiens
tatctttatgtgtat

SEQ ID NO: 473334 - DNA, 15 bp, Homo sapiens
ctatctttatgtgta

SEQ ID NO: 473335 - DNA, 15 bp, Homo sapiens
tctatctttatgtgt

SEQ ID NO: 473336 - DNA, 15 bp, Homo sapiens
ttctatctttatgtg

SEQ ID NO: 473337 - DNA, 15 bp, Homo sapiens
tttctatctttatgt

SEQ ID NO: 473338 - DNA, 15 bp, Homo sapiens
atttctatctttatg

SEQ ID NO: 473339 - DNA, 15 bp, Homo sapiens
aatttctatctttat

SEQ ID NO: 473340 - DNA, 15 bp, Homo sapiens
aaatttctatcttta

SEQ ID NO: 473341 - DNA, 15 bp, Homo sapiens
taaatttctatcttt

SEQ ID NO: 473342 - DNA, 15 bp, Homo sapiens
ataaatttctatctt

SEQ ID NO: 473343 - DNA, 15 bp, Homo sapiens
tataaatttctatct

SEQ ID NO: 473344 - DNA, 15 bp, Homo sapiens
gtataaatttctatc

SEQ ID NO: 473345 - DNA, 15 bp, Homo sapiens
tgtataaatttctat

SEQ ID NO: 473346 - DNA, 15 bp, Homo sapiens
ctgtataaatttcta

SEQ ID NO: 473347 - DNA, 15 bp, Homo sapiens
actgtataaatttct

SEQ ID NO: 473348 - DNA, 15 bp, Homo sapiens
aactgtataaatttc

SEQ ID NO: 473349 - DNA, 15 bp, Homo sapiens
aaactgtataaattt

SEQ ID NO: 473350 - DNA, 15 bp, Homo sapiens
taaactgtataaatt

SEQ ID NO: 473351 - DNA, 15 bp, Homo sapiens
ataaactgtataaat

SEQ ID NO: 473352 - DNA, 15 bp, Homo sapiens
tataaactgtataaa

SEQ ID NO: 473353 - DNA, 15 bp, Homo sapiens
atataaactgtataa

SEQ ID NO: 473354 - DNA, 15 bp, Homo sapiens
aatataaactgtata

SEQ ID NO: 473355 - DNA, 15 bp, Homo sapiens
taatataaactgtat

SEQ ID NO: 473356 - DNA, 15 bp, Homo sapiens
ctaatataaactgta

SEQ ID NO: 473357 - DNA, 15 bp, Homo sapiens
cctaatataaactgt

SEQ ID NO: 473358 - DNA, 15 bp, Homo sapiens
tcctaatataaactg

SEQ ID NO: 473359 - DNA, 15 bp, Homo sapiens
atcctaatataaact

SEQ ID NO: 473360 - DNA, 15 bp, Homo sapiens
gatcctaatataaac

SEQ ID NO: 473361 - DNA, 15 bp, Homo sapiens
tgatcctaatataaa

SEQ ID NO: 473362 - DNA, 15 bp, Homo sapiens
atgatcctaatataa

SEQ ID NO: 473363 - DNA, 15 bp, Homo sapiens
aatgatcctaatata

SEQ ID NO: 473364 - DNA, 15 bp, Homo sapiens
aaatgatcctaatat

SEQ ID NO: 473365 - DNA, 15 bp, Homo sapiens
aaaatgatcctaata

SEQ ID NO: 473366 - DNA, 15 bp, Homo sapiens
aaaaatgatcctaat

SEQ ID NO: 473367 - DNA, 15 bp, Homo sapiens
aaaaaatgatcctaa

SEQ ID NO: 473368 - DNA, 15 bp, Homo sapiens
aaaaaaatgatccta

SEQ ID NO: 473369 - DNA, 15 bp, Homo sapiens
aaaaaaaatgatcct

SEQ ID NO: 473370 - DNA, 15 bp, Homo sapiens
aaaaaaaaatgatcc

SEQ ID NO: 473371 - DNA, 15 bp, Homo sapiens
gaaaaaaaaatgatc

SEQ ID NO: 473372 - DNA, 15 bp, Homo sapiens
agaaaaaaaaatgat

SEQ ID NO: 473373 - DNA, 15 bp, Homo sapiens
aagaaaaaaaaatga

SEQ ID NO: 473374 - DNA, 15 bp, Homo sapiens
aaagaaaaaaaaatg

SEQ ID NO: 473375 - DNA, 15 bp, Homo sapiens
aaaagaaaaaaaaat

SEQ ID NO: 473376 - DNA, 15 bp, Homo sapiens
aaaaagaaaaaaaaa

SEQ ID NO: 473377 - DNA, 15 bp, Homo sapiens
aaaaaagaaaaaaaa

SEQ ID NO: 473378 - DNA, 15 bp, Homo sapiens
aaaaaaagaaaaaaa

SEQ ID NO: 473379 - DNA, 15 bp, Homo sapiens
caaaaaaagaaaaaa

SEQ ID NO: 473380 - DNA, 15 bp, Homo sapiens
ccaaaaaaagaaaaa

SEQ ID NO: 473381 - DNA, 15 bp, Homo sapiens
tccaaaaaaagaaaa

SEQ ID NO: 473382 - DNA, 15 bp, Homo sapiens
ctccaaaaaaagaaa

SEQ ID NO: 473383 - DNA, 15 bp, Homo sapiens
actccaaaaaaagaa

SEQ ID NO: 473384 - DNA, 15 bp, Homo sapiens
gactccaaaaaaaga

SEQ ID NO: 473385 - DNA, 15 bp, Homo sapiens
tgactccaaaaaaag

SEQ ID NO: 473386 - DNA, 15 bp, Homo sapiens
ctgactccaaaaaaa

SEQ ID NO: 473387 - DNA, 15 bp, Homo sapiens
cctgactccaaaaaa

SEQ ID NO: 473388 - DNA, 15 bp, Homo sapiens
ccctgactccaaaaa

SEQ ID NO: 473389 - DNA, 15 bp, Homo sapiens
accctgactccaaaa

SEQ ID NO: 473390 - DNA, 15 bp, Homo sapiens
gaccctgactccaaa

SEQ ID NO: 473391 - DNA, 15 bp, Homo sapiens
agaccctgactccaa

SEQ ID NO: 473392 - DNA, 15 bp, Homo sapiens
gagaccctgactcca

SEQ ID NO: 473393 - DNA, 15 bp, Homo sapiens
tgagaccctgactcc

SEQ ID NO: 473394 - DNA, 15 bp, Homo sapiens
gtgagaccctgactc

SEQ ID NO: 473395 - DNA, 15 bp, Homo sapiens
agtgagaccctgact

SEQ ID NO: 473396 - DNA, 15 bp, Homo sapiens
cagtgagaccctgac

SEQ ID NO: 473397 - DNA, 15 bp, Homo sapiens
acagtgagaccctga

SEQ ID NO: 473398 - DNA, 15 bp, Homo sapiens
cacagtgagaccctg

SEQ ID NO: 473399 - DNA, 15 bp, Homo sapiens
taacacagtgagacc

SEQ ID NO: 473400 - DNA, 15 bp, Homo sapiens
gtaacacagtgagac

SEQ ID NO: 473401 - DNA, 15 bp, Homo sapiens
ggtaacacagtgaga

SEQ ID NO: 473402 - DNA, 15 bp, Homo sapiens
gggtaacacagtgag

SEQ ID NO: 473403 - DNA, 15 bp, Homo sapiens
actgggtaacacagt

SEQ ID NO: 473404 - DNA, 15 bp, Homo sapiens
gactgggtaacacag

SEQ ID NO: 473405 - DNA, 15 bp, Homo sapiens
agactgggtaacaca

SEQ ID NO: 473406 - DNA, 15 bp, Homo sapiens
tagactgggtaacac

SEQ ID NO: 473407 - DNA, 15 bp, Homo sapiens
ctagactgggtaaca

SEQ ID NO: 473408 - DNA, 15 bp, Homo sapiens
tctagactgggtaac

SEQ ID NO: 473409 - DNA, 15 bp, Homo sapiens
ctctagactgggtaa

SEQ ID NO: 473410 - DNA, 15 bp, Homo sapiens
actctagactgggta

SEQ ID NO: 473411 - DNA, 15 bp, Homo sapiens
tactctagactgggt

SEQ ID NO: 473412 - DNA, 15 bp, Homo sapiens
gtactctagactggg

SEQ ID NO: 473413 - DNA, 15 bp, Homo sapiens
tgtactctagactgg

SEQ ID NO: 473414 - DNA, 15 bp, Homo sapiens
ctgtactctagactg

SEQ ID NO: 473415 - DNA, 15 bp, Homo sapiens
actgtactctagact

SEQ ID NO: 473416 - DNA, 15 bp, Homo sapiens
aactgtactctagac

SEQ ID NO: 473417 - DNA, 15 bp, Homo sapiens
taactgtactctaga

SEQ ID NO: 473418 - DNA, 15 bp, Homo sapiens
ataactgtactctag

SEQ ID NO: 473419 - DNA, 15 bp, Homo sapiens
cataactgtactcta

SEQ ID NO: 473420 - DNA, 15 bp, Homo sapiens
gcataactgtactct

SEQ ID NO: 473421 - DNA, 15 bp, Homo sapiens
tgcataactgtactc

SEQ ID NO: 473422 - DNA, 15 bp, Homo sapiens
ctgcataactgtact

SEQ ID NO: 473423 - DNA, 15 bp, Homo sapiens
actgcataactgtac

SEQ ID NO: 473424 - DNA, 15 bp, Homo sapiens
gactgcataactgta

SEQ ID NO: 473425 - DNA, 15 bp, Homo sapiens
tgactgcataactgt

SEQ ID NO: 473426 - DNA, 15 bp, Homo sapiens
atgactgcataactg

SEQ ID NO: 473427 - DNA, 15 bp, Homo sapiens
catgactgcataact

SEQ ID NO: 473428 - DNA, 15 bp, Homo sapiens
ccatgactgcataac

SEQ ID NO: 473429 - DNA, 15 bp, Homo sapiens
gccatgactgcataa

SEQ ID NO: 473430 - DNA, 15 bp, Homo sapiens
agccatgactgcata

SEQ ID NO: 473431 - DNA, 15 bp, Homo sapiens
gagccatgactgcat

SEQ ID NO: 473432 - DNA, 15 bp, Homo sapiens
tgagccatgactgca

SEQ ID NO: 473433 - DNA, 15 bp, Homo sapiens
gtgagccatgactgc

SEQ ID NO: 473434 - DNA, 15 bp, Homo sapiens
agtgagccatgactg

SEQ ID NO: 473435 - DNA, 15 bp, Homo sapiens
cagtgagccatgact

SEQ ID NO: 473436 - DNA, 15 bp, Homo sapiens
ccagtgagccatgac

SEQ ID NO: 473437 - DNA, 15 bp, Homo sapiens
tccagtgagccatga

SEQ ID NO: 473438 - DNA, 15 bp, Homo sapiens
ctccagtgagccatg

SEQ ID NO: 473439 - DNA, 15 bp, Homo sapiens
gctccagtgagccat

SEQ ID NO: 473440 - DNA, 15 bp, Homo sapiens
ggctccagtgagcca

SEQ ID NO: 473441 - DNA, 15 bp, Homo sapiens
aggctccagtgagcc

SEQ ID NO: 473442 - DNA, 15 bp, Homo sapiens
aaggctccagtgagc

SEQ ID NO: 473443 - DNA, 15 bp, Homo sapiens
caaggctccagtgag

SEQ ID NO: 473444 - DNA, 15 bp, Homo sapiens
tcaaggctccagtga

SEQ ID NO: 473445 - DNA, 15 bp, Homo sapiens
gtcaaggctccagtg

SEQ ID NO: 473446 - DNA, 15 bp, Homo sapiens
ggtcaaggctccagt

SEQ ID NO: 473447 - DNA, 15 bp, Homo sapiens
aggtcaaggctccag

SEQ ID NO: 473448 - DNA, 15 bp, Homo sapiens
gaggtcaaggctcca

SEQ ID NO: 473449 - DNA, 15 bp, Homo sapiens
ggaggtcaaggctcc

SEQ ID NO: 473450 - DNA, 15 bp, Homo sapiens
aggaggtcaaggctc

SEQ ID NO: 473451 - DNA, 15 bp, Homo sapiens
caggaggtcaaggct

SEQ ID NO: 473452 - DNA, 15 bp, Homo sapiens
ccaggaggtcaaggc

SEQ ID NO: 473453 - DNA, 15 bp, Homo sapiens
cccaggaggtcaagg

SEQ ID NO: 473454 - DNA, 15 bp, Homo sapiens
gcccaggaggtcaag

SEQ ID NO: 473455 - DNA, 15 bp, Homo sapiens
agcccaggaggtcaa

SEQ ID NO: 473456 - DNA, 15 bp, Homo sapiens
gagcccaggaggtca

SEQ ID NO: 473457 - DNA, 15 bp, Homo sapiens
tgagcccaggaggtc

SEQ ID NO: 473458 - DNA, 15 bp, Homo sapiens
ctgagcccaggaggt

SEQ ID NO: 473459 - DNA, 15 bp, Homo sapiens
cctgagcccaggagg

SEQ ID NO: 473460 - DNA, 15 bp, Homo sapiens
gcctgagcccaggag

SEQ ID NO: 473461 - DNA, 15 bp, Homo sapiens
tgcctgagcccagga

SEQ ID NO: 473462 - DNA, 15 bp, Homo sapiens
ctgcctgagcccagg

SEQ ID NO: 473463 - DNA, 15 bp, Homo sapiens
actgcctgagcccag

SEQ ID NO: 473464 - DNA, 15 bp, Homo sapiens
gactgcctgagccca

SEQ ID NO: 473465 - DNA, 15 bp, Homo sapiens
agactgcctgagccc

SEQ ID NO: 473466 - DNA, 15 bp, Homo sapiens
aagactgcctgagcc

SEQ ID NO: 473467 - DNA, 15 bp, Homo sapiens
gaagactgcctgagc

SEQ ID NO: 473468 - DNA, 15 bp, Homo sapiens
ggaagactgcctgag

SEQ ID NO: 473469 - DNA, 15 bp, Homo sapiens
gggaagactgcctga

SEQ ID NO: 473470 - DNA, 15 bp, Homo sapiens
tgggaagactgcctg

SEQ ID NO: 473471 - DNA, 15 bp, Homo sapiens
gtgggaagactgcct

SEQ ID NO: 473472 - DNA, 15 bp, Homo sapiens
ggtgggaagactgcc

SEQ ID NO: 473473 - DNA, 15 bp, Homo sapiens
aggtgggaagactgc

SEQ ID NO: 473474 - DNA, 15 bp, Homo sapiens
aaggtgggaagactg

SEQ ID NO: 473475 - DNA, 15 bp, Homo sapiens
taaggtgggaagact

SEQ ID NO: 473476 - DNA, 15 bp, Homo sapiens
ctaaggtgggaagac

SEQ ID NO: 473477 - DNA, 15 bp, Homo sapiens
gctaaggtgggaaga

SEQ ID NO: 473478 - DNA, 15 bp, Homo sapiens
ggctaaggtgggaag

SEQ ID NO: 473479 - DNA, 15 bp, Homo sapiens
aggctaaggtgggaa

SEQ ID NO: 473480 - DNA, 15 bp, Homo sapiens
aaggctaaggtggga

SEQ ID NO: 473481 - DNA, 15 bp, Homo sapiens
gaaggctaaggtggg

SEQ ID NO: 473482 - DNA, 15 bp, Homo sapiens
agaaggctaaggtgg

SEQ ID NO: 473483 - DNA, 15 bp, Homo sapiens
gagaaggctaaggtg

SEQ ID NO: 473484 - DNA, 15 bp, Homo sapiens
tgagaaggctaaggt

SEQ ID NO: 473485 - DNA, 15 bp, Homo sapiens
ctgagaaggctaagg

SEQ ID NO: 473486 - DNA, 15 bp, Homo sapiens
actgagaaggctaag

SEQ ID NO: 473487 - DNA, 15 bp, Homo sapiens
tactgagaaggctaa

SEQ ID NO: 473488 - DNA, 15 bp, Homo sapiens
ctactgagaaggcta

SEQ ID NO: 473489 - DNA, 15 bp, Homo sapiens
gctactgagaaggct

SEQ ID NO: 473490 - DNA, 15 bp, Homo sapiens
agctactgagaaggc

SEQ ID NO: 473491 - DNA, 15 bp, Homo sapiens
cagctactgagaagg

SEQ ID NO: 473492 - DNA, 15 bp, Homo sapiens
ccagctactgagaag

SEQ ID NO: 473493 - DNA, 15 bp, Homo sapiens
cccagctactgagaa

SEQ ID NO: 473494 - DNA, 15 bp, Homo sapiens
tcccagctactgaga

SEQ ID NO: 473495 - DNA, 15 bp, Homo sapiens
gtcccagctactgag

SEQ ID NO: 473496 - DNA, 15 bp, Homo sapiens
agtcccagctactga

SEQ ID NO: 473497 - DNA, 15 bp, Homo sapiens
tagtcccagctactg

SEQ ID NO: 473498 - DNA, 15 bp, Homo sapiens
tgcatgcctgtagtc

SEQ ID NO: 473499 - DNA, 15 bp, Homo sapiens
gtgcatgcctgtagt

SEQ ID NO: 473500 - DNA, 15 bp, Homo sapiens
ggtgcatgcctgtag

SEQ ID NO: 473501 - DNA, 15 bp, Homo sapiens
tgtggtggtgcatgc

SEQ ID NO: 473502 - DNA, 15 bp, Homo sapiens
gtgtggtggtgcatg

SEQ ID NO: 473503 - DNA, 15 bp, Homo sapiens
ggtgtggtggtgcat

SEQ ID NO: 473504 - DNA, 15 bp, Homo sapiens
aggtgtggtggtgca

SEQ ID NO: 473505 - DNA, 15 bp, Homo sapiens
caggtgtggtggtgc

SEQ ID NO: 473506 - DNA, 15 bp, Homo sapiens
taaaaattagccagg

SEQ ID NO: 473507 - DNA, 15 bp, Homo sapiens
ttaaaaattagccag

SEQ ID NO: 473508 - DNA, 15 bp, Homo sapiens
tttaaaaattagcca

SEQ ID NO: 473509 - DNA, 15 bp, Homo sapiens
atttaaaaattagcc

SEQ ID NO: 473510 - DNA, 15 bp, Homo sapiens
aatttaaaaattagc

SEQ ID NO: 473511 - DNA, 15 bp, Homo sapiens
aaatttaaaaattag

SEQ ID NO: 473512 - DNA, 15 bp, Homo sapiens
aaaatttaaaaatta

SEQ ID NO: 473513 - DNA, 15 bp, Homo sapiens
aaaaatttaaaaatt

SEQ ID NO: 473514 - DNA, 15 bp, Homo sapiens
aaaaaatttaaaaat

SEQ ID NO: 473515 - DNA, 15 bp, Homo sapiens
taaaaaatttaaaaa

SEQ ID NO: 473516 - DNA, 15 bp, Homo sapiens
ataaaaaatttaaaa

SEQ ID NO: 473517 - DNA, 15 bp, Homo sapiens
tataaaaaatttaaa

SEQ ID NO: 473518 - DNA, 15 bp, Homo sapiens
ctataaaaaatttaa

SEQ ID NO: 473519 - DNA, 15 bp, Homo sapiens
tctataaaaaattta

SEQ ID NO: 473520 - DNA, 15 bp, Homo sapiens
ctctataaaaaattt

SEQ ID NO: 473521 - DNA, 15 bp, Homo sapiens
tctctataaaaaatt

SEQ ID NO: 473522 - DNA, 15 bp, Homo sapiens
gtctctataaaaaat

SEQ ID NO: 473523 - DNA, 15 bp, Homo sapiens
tgtctctataaaaaa

SEQ ID NO: 473524 - DNA, 15 bp, Homo sapiens
ctgtctctataaaaa

SEQ ID NO: 473525 - DNA, 15 bp, Homo sapiens
cctgtctctataaaa

SEQ ID NO: 473526 - DNA, 15 bp, Homo sapiens
ccctgtctctataaa

SEQ ID NO: 473527 - DNA, 15 bp, Homo sapiens
accctgtctctataa

SEQ ID NO: 473528 - DNA, 15 bp, Homo sapiens
gaccctgtctctata

SEQ ID NO: 473529 - DNA, 15 bp, Homo sapiens
agaccctgtctctat

SEQ ID NO: 473530 - DNA, 15 bp, Homo sapiens
aagaccctgtctcta

SEQ ID NO: 473531 - DNA, 15 bp, Homo sapiens
taagaccctgtctct

SEQ ID NO: 473532 - DNA, 15 bp, Homo sapiens
gtaagaccctgtctc

SEQ ID NO: 473533 - DNA, 15 bp, Homo sapiens
agtaagaccctgtct

SEQ ID NO: 473534 - DNA, 15 bp, Homo sapiens
aagtaagaccctgtc

SEQ ID NO: 473535 - DNA, 15 bp, Homo sapiens
aaagtaagaccctgt

SEQ ID NO: 473536 - DNA, 15 bp, Homo sapiens
caaagtaagaccctg

SEQ ID NO: 473537 - DNA, 15 bp, Homo sapiens
acaaagtaagaccct

SEQ ID NO: 473538 - DNA, 15 bp, Homo sapiens
aacaaagtaagaccc

SEQ ID NO: 473539 - DNA, 15 bp, Homo sapiens
caacaaagtaagacc

SEQ ID NO: 473540 - DNA, 15 bp, Homo sapiens
gcaacaaagtaagac

SEQ ID NO: 473541 - DNA, 15 bp, Homo sapiens
ggcaacaaagtaaga

SEQ ID NO: 473542 - DNA, 15 bp, Homo sapiens
aggcaacaaagtaag

SEQ ID NO: 473543 - DNA, 15 bp, Homo sapiens
caggcaacaaagtaa

SEQ ID NO: 473544 - DNA, 15 bp, Homo sapiens
ccaggcaacaaagta

SEQ ID NO: 473545 - DNA, 15 bp, Homo sapiens
accagcccaggcaac

SEQ ID NO: 473546 - DNA, 15 bp, Homo sapiens
gaccagcccaggcaa

SEQ ID NO: 473547 - DNA, 15 bp, Homo sapiens
agaccagcccaggca

SEQ ID NO: 473548 - DNA, 15 bp, Homo sapiens
gagaccagcccaggc

SEQ ID NO: 473549 - DNA, 15 bp, Homo sapiens
tgagaccagcccagg

SEQ ID NO: 473550 - DNA, 15 bp, Homo sapiens
ttgagaccagcccag

SEQ ID NO: 473551 - DNA, 15 bp, Homo sapiens
tttgagaccagccca

SEQ ID NO: 473552 - DNA, 15 bp, Homo sapiens
atttgagaccagccc

SEQ ID NO: 473553 - DNA, 15 bp, Homo sapiens
aatttgagaccagcc

SEQ ID NO: 473554 - DNA, 15 bp, Homo sapiens
gaatttgagaccagc

SEQ ID NO: 473555 - DNA, 15 bp, Homo sapiens
ggaatttgagaccag

SEQ ID NO: 473556 - DNA, 15 bp, Homo sapiens
aggaatttgagacca

SEQ ID NO: 473557 - DNA, 15 bp, Homo sapiens
caggaatttgagacc

SEQ ID NO: 473558 - DNA, 15 bp, Homo sapiens
ccaggaatttgagac

SEQ ID NO: 473559 - DNA, 15 bp, Homo sapiens
cccaggaatttgaga

SEQ ID NO: 473560 - DNA, 15 bp, Homo sapiens
gcccaggaatttgag

SEQ ID NO: 473561 - DNA, 15 bp, Homo sapiens
agcccaggaatttga

SEQ ID NO: 473562 - DNA, 15 bp, Homo sapiens
gagcccaggaatttg

SEQ ID NO: 473563 - DNA, 15 bp, Homo sapiens
tgagcccaggaattt

SEQ ID NO: 473564 - DNA, 15 bp, Homo sapiens
ccttgagcccaggaa

SEQ ID NO: 473565 - DNA, 15 bp, Homo sapiens
cccttgagcccagga

SEQ ID NO: 473566 - DNA, 15 bp, Homo sapiens
tcccttgagcccagg

SEQ ID NO: 473567 - DNA, 15 bp, Homo sapiens
atcccttgagcccag

SEQ ID NO: 473568 - DNA, 15 bp, Homo sapiens
gatcccttgagccca

SEQ ID NO: 473569 - DNA, 15 bp, Homo sapiens
tgatcccttgagccc

SEQ ID NO: 473570 - DNA, 15 bp, Homo sapiens
atgatcccttgagcc

SEQ ID NO: 473571 - DNA, 15 bp, Homo sapiens
gatgatcccttgagc

SEQ ID NO: 473572 - DNA, 15 bp, Homo sapiens
ggatgatcccttgag

SEQ ID NO: 473573 - DNA, 15 bp, Homo sapiens
gggatgatcccttga

SEQ ID NO: 473574 - DNA, 15 bp, Homo sapiens
tgggatgatcccttg

SEQ ID NO: 473575 - DNA, 15 bp, Homo sapiens
gtgggatgatccctt

SEQ ID NO: 473576 - DNA, 15 bp, Homo sapiens
agtgggatgatccct

SEQ ID NO: 473577 - DNA, 15 bp, Homo sapiens
aagtgggatgatccc

SEQ ID NO: 473578 - DNA, 15 bp, Homo sapiens
gaagtgggatgatcc

SEQ ID NO: 473579 - DNA, 15 bp, Homo sapiens
cgaagtgggatgatc

SEQ ID NO: 473580 - DNA, 15 bp, Homo sapiens
ccgaagtgggatgat

SEQ ID NO: 473581 - DNA, 15 bp, Homo sapiens
gccgaagtgggatga

SEQ ID NO: 473582 - DNA, 15 bp, Homo sapiens
ggccgaagtgggatg

SEQ ID NO: 473583 - DNA, 15 bp, Homo sapiens
aggccgaagtgggat

SEQ ID NO: 473584 - DNA, 15 bp, Homo sapiens
gaggccgaagtggga

SEQ ID NO: 473585 - DNA, 15 bp, Homo sapiens
agaggccgaagtggg

SEQ ID NO: 473586 - DNA, 15 bp, Homo sapiens
gagaggccgaagtgg

SEQ ID NO: 473587 - DNA, 15 bp, Homo sapiens
tgagaggccgaagtg

SEQ ID NO: 473588 - DNA, 15 bp, Homo sapiens
ttgagaggccgaagt

SEQ ID NO: 473589 - DNA, 15 bp, Homo sapiens
ttttgagaggccgaa

SEQ ID NO: 473590 - DNA, 15 bp, Homo sapiens
cttttgagaggccga

SEQ ID NO: 473591 - DNA, 15 bp, Homo sapiens
gcttttgagaggccg

SEQ ID NO: 473592 - DNA, 15 bp, Homo sapiens
agcttttgagaggcc

SEQ ID NO: 473593 - DNA, 15 bp, Homo sapiens
gagcttttgagaggc

SEQ ID NO: 473594 - DNA, 15 bp, Homo sapiens
agagcttttgagagg

SEQ ID NO: 473595 - DNA, 15 bp, Homo sapiens
cagagcttttgagag

SEQ ID NO: 473596 - DNA, 15 bp, Homo sapiens
ccagagcttttgaga

SEQ ID NO: 473597 - DNA, 15 bp, Homo sapiens
tccagagcttttgag

SEQ ID NO: 473598 - DNA, 15 bp, Homo sapiens
ttccagagcttttga

SEQ ID NO: 473599 - DNA, 15 bp, Homo sapiens
attccagagcttttg

SEQ ID NO: 473600 - DNA, 15 bp, Homo sapiens
aattccagagctttt

SEQ ID NO: 473601 - DNA, 15 bp, Homo sapiens
taattccagagcttt

SEQ ID NO: 473602 - DNA, 15 bp, Homo sapiens
ataattccagagctt

SEQ ID NO: 473603 - DNA, 15 bp, Homo sapiens
tataattccagagct

SEQ ID NO: 473604 - DNA, 15 bp, Homo sapiens
ctataattccagagc

SEQ ID NO: 473605 - DNA, 15 bp, Homo sapiens
tctataattccagag

SEQ ID NO: 473606 - DNA, 15 bp, Homo sapiens
atctataattccaga

SEQ ID NO: 473607 - DNA, 15 bp, Homo sapiens
catctataattccag

SEQ ID NO: 473608 - DNA, 15 bp, Homo sapiens
acatctataattcca

SEQ ID NO: 473609 - DNA, 15 bp, Homo sapiens
cacatctataattcc

SEQ ID NO: 473610 - DNA, 15 bp, Homo sapiens
tcacatctataattc

SEQ ID NO: 473611 - DNA, 15 bp, Homo sapiens
ctcacatctataatt

SEQ ID NO: 473612 - DNA, 15 bp, Homo sapiens
gctcacatctataat

SEQ ID NO: 473613 - DNA, 15 bp, Homo sapiens
agctcacatctataa

SEQ ID NO: 473614 - DNA, 15 bp, Homo sapiens
cagctcacatctata

SEQ ID NO: 473615 - DNA, 15 bp, Homo sapiens
gcagctcacatctat

SEQ ID NO: 473616 - DNA, 15 bp, Homo sapiens
ggcagctcacatcta

SEQ ID NO: 473617 - DNA, 15 bp, Homo sapiens
cggcagctcacatct

SEQ ID NO: 473618 - DNA, 15 bp, Homo sapiens
acggcagctcacatc

SEQ ID NO: 473619 - DNA, 15 bp, Homo sapiens
cacggcagctcacat

SEQ ID NO: 473620 - DNA, 15 bp, Homo sapiens
gcacggcagctcaca

SEQ ID NO: 473621 - DNA, 15 bp, Homo sapiens
ggcacggcagctcac

SEQ ID NO: 473622 - DNA, 15 bp, Homo sapiens
gggcacggcagctca

SEQ ID NO: 473623 - DNA, 15 bp, Homo sapiens
tgggcacggcagctc

SEQ ID NO: 473624 - DNA, 15 bp, Homo sapiens
ctgggcacggcagct

SEQ ID NO: 473625 - DNA, 15 bp, Homo sapiens
gctgggcacggcagc

SEQ ID NO: 473626 - DNA, 15 bp, Homo sapiens
ggctgggcacggcag

SEQ ID NO: 473627 - DNA, 15 bp, Homo sapiens
gggctgggcacggca

SEQ ID NO: 473628 - DNA, 15 bp, Homo sapiens
tgggctgggcacggc

SEQ ID NO: 473629 - DNA, 15 bp, Homo sapiens
ctgggctgggcacgg

SEQ ID NO: 473630 - DNA, 15 bp, Homo sapiens
cctgggctgggcacg

SEQ ID NO: 473631 - DNA, 15 bp, Homo sapiens
tcctgggctgggcac

SEQ ID NO: 473632 - DNA, 15 bp, Homo sapiens
atcctgggctgggca

SEQ ID NO: 473633 - DNA, 15 bp, Homo sapiens
gatcctgggctgggc

SEQ ID NO: 473634 - DNA, 15 bp, Homo sapiens
agatcctgggctggg

SEQ ID NO: 473635 - DNA, 15 bp, Homo sapiens
aagatcctgggctgg

SEQ ID NO: 473636 - DNA, 15 bp, Homo sapiens
gaagatcctgggctg

SEQ ID NO: 473637 - DNA, 15 bp, Homo sapiens
ggaagatcctgggct

SEQ ID NO: 473638 - DNA, 15 bp, Homo sapiens
aggaagatcctgggc

SEQ ID NO: 473639 - DNA, 15 bp, Homo sapiens
aaggaagatcctggg

SEQ ID NO: 473640 - DNA, 15 bp, Homo sapiens
aaaggaagatcctgg

SEQ ID NO: 473641 - DNA, 15 bp, Homo sapiens
taaaggaagatcctg

SEQ ID NO: 473642 - DNA, 15 bp, Homo sapiens
ataaaggaagatcct

SEQ ID NO: 473643 - DNA, 15 bp, Homo sapiens
tataaaggaagatcc

SEQ ID NO: 473644 - DNA, 15 bp, Homo sapiens
atataaaggaagatc

SEQ ID NO: 473645 - DNA, 15 bp, Homo sapiens
catataaaggaagat

SEQ ID NO: 473646 - DNA, 15 bp, Homo sapiens
gcatataaaggaaga

SEQ ID NO: 473647 - DNA, 15 bp, Homo sapiens
agcatataaaggaag

SEQ ID NO: 473648 - DNA, 15 bp, Homo sapiens
aagcatataaaggaa

SEQ ID NO: 473649 - DNA, 15 bp, Homo sapiens
aaagcatataaagga

SEQ ID NO: 473650 - DNA, 15 bp, Homo sapiens
aaaagcatataaagg

SEQ ID NO: 473651 - DNA, 15 bp, Homo sapiens
gaaaagcatataaag

SEQ ID NO: 473652 - DNA, 15 bp, Homo sapiens
agaaaagcatataaa

SEQ ID NO: 473653 - DNA, 15 bp, Homo sapiens
cagaaaagcatataa

SEQ ID NO: 473654 - DNA, 15 bp, Homo sapiens
acagaaaagcatata

SEQ ID NO: 473655 - DNA, 15 bp, Homo sapiens
tacagaaaagcatat

SEQ ID NO: 473656 - DNA, 15 bp, Homo sapiens
ttacagaaaagcata

SEQ ID NO: 473657 - DNA, 15 bp, Homo sapiens
attacagaaaagcat

SEQ ID NO: 473658 - DNA, 15 bp, Homo sapiens
aattacagaaaagca

SEQ ID NO: 473659 - DNA, 15 bp, Homo sapiens
aaattacagaaaagc

SEQ ID NO: 473660 - DNA, 15 bp, Homo sapiens
caaattacagaaaag

SEQ ID NO: 473661 - DNA, 15 bp, Homo sapiens
gcaaattacagaaaa

SEQ ID NO: 473662 - DNA, 15 bp, Homo sapiens
tgcaaattacagaaa

SEQ ID NO: 473663 - DNA, 15 bp, Homo sapiens
gtgcaaattacagaa

SEQ ID NO: 473664 - DNA, 15 bp, Homo sapiens
agtgcaaattacaga

SEQ ID NO: 473665 - DNA, 15 bp, Homo sapiens
aagtgcaaattacag

SEQ ID NO: 473666 - DNA, 15 bp, Homo sapiens
aaagtgcaaattaca

SEQ ID NO: 473667 - DNA, 15 bp, Homo sapiens
aaaagtgcaaattac

SEQ ID NO: 473668 - DNA, 15 bp, Homo sapiens
taaaagtgcaaatta

SEQ ID NO: 473669 - DNA, 15 bp, Homo sapiens
gtaaaagtgcaaatt

SEQ ID NO: 473670 - DNA, 15 bp, Homo sapiens
ggtaaaagtgcaaat

SEQ ID NO: 473671 - DNA, 15 bp, Homo sapiens
aggtaaaagtgcaaa

SEQ ID NO: 473672 - DNA, 15 bp, Homo sapiens
aaggtaaaagtgcaa

SEQ ID NO: 473673 - DNA, 15 bp, Homo sapiens
gaaggtaaaagtgca

SEQ ID NO: 473674 - DNA, 15 bp, Homo sapiens
tgaaggtaaaagtgc

SEQ ID NO: 473675 - DNA, 15 bp, Homo sapiens
atgaaggtaaaagtg

SEQ ID NO: 473676 - DNA, 15 bp, Homo sapiens
gatgaaggtaaaagt

SEQ ID NO: 473677 - DNA, 15 bp, Homo sapiens
ggatgaaggtaaaag

SEQ ID NO: 473678 - DNA, 15 bp, Homo sapiens
tggatgaaggtaaaa

SEQ ID NO: 473679 - DNA, 15 bp, Homo sapiens
ctggatgaaggtaaa

SEQ ID NO: 473680 - DNA, 15 bp, Homo sapiens
gctggatgaaggtaa

SEQ ID NO: 473681 - DNA, 15 bp, Homo sapiens
tgctggatgaaggta

SEQ ID NO: 473682 - DNA, 15 bp, Homo sapiens
atgctggatgaaggt

SEQ ID NO: 473683 - DNA, 15 bp, Homo sapiens
tatgctggatgaagg

SEQ ID NO: 473684 - DNA, 15 bp, Homo sapiens
atatgctggatgaag

SEQ ID NO: 473685 - DNA, 15 bp, Homo sapiens
gatatgctggatgaa

SEQ ID NO: 473686 - DNA, 15 bp, Homo sapiens
agatatgctggatga

SEQ ID NO: 473687 - DNA, 15 bp, Homo sapiens
aagatatgctggatg

SEQ ID NO: 473688 - DNA, 15 bp, Homo sapiens
taagatatgctggat

SEQ ID NO: 473689 - DNA, 15 bp, Homo sapiens
gtaagatatgctgga

SEQ ID NO: 473690 - DNA, 15 bp, Homo sapiens
agtaagatatgctgg

SEQ ID NO: 473691 - DNA, 15 bp, Homo sapiens
cagtaagatatgctg

SEQ ID NO: 473692 - DNA, 15 bp, Homo sapiens
gcagtaagatatgct

SEQ ID NO: 473693 - DNA, 15 bp, Homo sapiens
tgcagtaagatatgc

SEQ ID NO: 473694 - DNA, 15 bp, Homo sapiens
ttgcagtaagatatg

SEQ ID NO: 473695 - DNA, 15 bp, Homo sapiens
gttgcagtaagatat

SEQ ID NO: 473696 - DNA, 15 bp, Homo sapiens
ggttgcagtaagata

SEQ ID NO: 473697 - DNA, 15 bp, Homo sapiens
gggttgcagtaagat

SEQ ID NO: 473698 - DNA, 15 bp, Homo sapiens
agggttgcagtaaga

SEQ ID NO: 473699 - DNA, 15 bp, Homo sapiens
aagggttgcagtaag

SEQ ID NO: 473700 - DNA, 15 bp, Homo sapiens
gaagggttgcagtaa

SEQ ID NO: 473701 - DNA, 15 bp, Homo sapiens
ggaagggttgcagta

SEQ ID NO: 473702 - DNA, 15 bp, Homo sapiens
aggaagggttgcagt

SEQ ID NO: 473703 - DNA, 15 bp, Homo sapiens
caggaagggttgcag

SEQ ID NO: 473704 - DNA, 15 bp, Homo sapiens
acaggaagggttgca

SEQ ID NO: 473705 - DNA, 15 bp, Homo sapiens
cacaggaagggttgc

SEQ ID NO: 473706 - DNA, 15 bp, Homo sapiens
gcacaggaagggttg

SEQ ID NO: 473707 - DNA, 15 bp, Homo sapiens
tgcacaggaagggtt

SEQ ID NO: 473708 - DNA, 15 bp, Homo sapiens
ttgcacaggaagggt

SEQ ID NO: 473709 - DNA, 15 bp, Homo sapiens
cttgcacaggaaggg

SEQ ID NO: 473710 - DNA, 15 bp, Homo sapiens
ccttgcacaggaagg

SEQ ID NO: 473711 - DNA, 15 bp, Homo sapiens
gccttgcacaggaag

SEQ ID NO: 473712 - DNA, 15 bp, Homo sapiens
ggccttgcacaggaa

SEQ ID NO: 473713 - DNA, 15 bp, Homo sapiens
gggccttgcacagga

SEQ ID NO: 473714 - DNA, 15 bp, Homo sapiens
agggccttgcacagg

SEQ ID NO: 473715 - DNA, 15 bp, Homo sapiens
tagggccttgcacag

SEQ ID NO: 473716 - DNA, 15 bp, Homo sapiens
atagggccttgcaca

SEQ ID NO: 473717 - DNA, 15 bp, Homo sapiens
tatagggccttgcac

SEQ ID NO: 473718 - DNA, 15 bp, Homo sapiens
ctatagggccttgca

SEQ ID NO: 473719 - DNA, 15 bp, Homo sapiens
actatagggccttgc

SEQ ID NO: 473720 - DNA, 15 bp, Homo sapiens
cactatagggccttg

SEQ ID NO: 473721 - DNA, 15 bp, Homo sapiens
tcactatagggcctt

SEQ ID NO: 473722 - DNA, 15 bp, Homo sapiens
ctcactatagggcct

SEQ ID NO: 473723 - DNA, 15 bp, Homo sapiens
gctcactatagggcc

SEQ ID NO: 473724 - DNA, 15 bp, Homo sapiens
tgctcactatagggc

SEQ ID NO: 473725 - DNA, 15 bp, Homo sapiens
atgctcactataggg

SEQ ID NO: 473726 - DNA, 15 bp, Homo sapiens
catgctcactatagg

SEQ ID NO: 473727 - DNA, 15 bp, Homo sapiens
acatgctcactatag

SEQ ID NO: 473728 - DNA, 15 bp, Homo sapiens
aacatgctcactata

SEQ ID NO: 473729 - DNA, 15 bp, Homo sapiens
caacatgctcactat

SEQ ID NO: 473730 - DNA, 15 bp, Homo sapiens
gcaacatgctcacta

SEQ ID NO: 473731 - DNA, 15 bp, Homo sapiens
tgcaacatgctcact

SEQ ID NO: 473732 - DNA, 15 bp, Homo sapiens
gtgcaacatgctcac

SEQ ID NO: 473733 - DNA, 15 bp, Homo sapiens
ggtgcaacatgctca

SEQ ID NO: 473734 - DNA, 15 bp, Homo sapiens
tggtgcaacatgctc

SEQ ID NO: 473735 - DNA, 15 bp, Homo sapiens
ctggtgcaacatgct

SEQ ID NO: 473736 - DNA, 15 bp, Homo sapiens
gctggtgcaacatgc

SEQ ID NO: 473737 - DNA, 15 bp, Homo sapiens
agctggtgcaacatg

SEQ ID NO: 473738 - DNA, 15 bp, Homo sapiens
aagctggtgcaacat

SEQ ID NO: 473739 - DNA, 15 bp, Homo sapiens
caagctggtgcaaca

SEQ ID NO: 473740 - DNA, 15 bp, Homo sapiens
gcaagctggtgcaac

SEQ ID NO: 473741 - DNA, 15 bp, Homo sapiens
ggcaagctggtgcaa

SEQ ID NO: 473742 - DNA, 15 bp, Homo sapiens
aggcaagctggtgca

SEQ ID NO: 473743 - DNA, 15 bp, Homo sapiens
aaggcaagctggtgc

SEQ ID NO: 473744 - DNA, 15 bp, Homo sapiens
taaggcaagctggtg

SEQ ID NO: 473745 - DNA, 15 bp, Homo sapiens
ctaaggcaagctggt

SEQ ID NO: 473746 - DNA, 15 bp, Homo sapiens
cctaaggcaagctgg

SEQ ID NO: 473747 - DNA, 15 bp, Homo sapiens
tcctaaggcaagctg

SEQ ID NO: 473748 - DNA, 15 bp, Homo sapiens
ctcctaaggcaagct

SEQ ID NO: 473749 - DNA, 15 bp, Homo sapiens
tctcctaaggcaagc

SEQ ID NO: 473750 - DNA, 15 bp, Homo sapiens
ttctcctaaggcaag

SEQ ID NO: 473751 - DNA, 15 bp, Homo sapiens
tttctcctaaggcaa

SEQ ID NO: 473752 - DNA, 15 bp, Homo sapiens
gtttctcctaaggca

SEQ ID NO: 473753 - DNA, 15 bp, Homo sapiens
agtttctcctaaggc

SEQ ID NO: 473754 - DNA, 15 bp, Homo sapiens
aagtttctcctaagg

SEQ ID NO: 473755 - DNA, 15 bp, Homo sapiens
caagtttctcctaag

SEQ ID NO: 473756 - DNA, 15 bp, Homo sapiens
tcaagtttctcctaa

SEQ ID NO: 473757 - DNA, 15 bp, Homo sapiens
ctcaagtttctccta

SEQ ID NO: 473758 - DNA, 15 bp, Homo sapiens
tctcaagtttctcct

SEQ ID NO: 473759 - DNA, 15 bp, Homo sapiens
atctcaagtttctcc

SEQ ID NO: 473760 - DNA, 15 bp, Homo sapiens
tatctcaagtttctc

SEQ ID NO: 473761 - DNA, 15 bp, Homo sapiens
gtatctcaagtttct

SEQ ID NO: 473762 - DNA, 15 bp, Homo sapiens
tgtatctcaagtttc

SEQ ID NO: 473763 - DNA, 15 bp, Homo sapiens
ctgtatctcaagttt

SEQ ID NO: 473764 - DNA, 15 bp, Homo sapiens
tctgtatctcaagtt

SEQ ID NO: 473765 - DNA, 15 bp, Homo sapiens
ctctgtatctcaagt

SEQ ID NO: 473766 - DNA, 15 bp, Homo sapiens
gctctgtatctcaag

SEQ ID NO: 473767 - DNA, 15 bp, Homo sapiens
ggctctgtatctcaa

SEQ ID NO: 473768 - DNA, 15 bp, Homo sapiens
aggctctgtatctca

SEQ ID NO: 473769 - DNA, 15 bp, Homo sapiens
caggctctgtatctc

SEQ ID NO: 473770 - DNA, 15 bp, Homo sapiens
gcaggctctgtatct

SEQ ID NO: 473771 - DNA, 15 bp, Homo sapiens
tgcaggctctgtatc

SEQ ID NO: 473772 - DNA, 15 bp, Homo sapiens
gtgcaggctctgtat

SEQ ID NO: 473773 - DNA, 15 bp, Homo sapiens
agtgcaggctctgta

SEQ ID NO: 473774 - DNA, 15 bp, Homo sapiens
cagtgcaggctctgt

SEQ ID NO: 473775 - DNA, 15 bp, Homo sapiens
ccagtgcaggctctg

SEQ ID NO: 473776 - DNA, 15 bp, Homo sapiens
tccagtgcaggctct

SEQ ID NO: 473777 - DNA, 15 bp, Homo sapiens
ttccagtgcaggctc

SEQ ID NO: 473778 - DNA, 15 bp, Homo sapiens
tttccagtgcaggct

SEQ ID NO: 473779 - DNA, 15 bp, Homo sapiens
atttccagtgcaggc

SEQ ID NO: 473780 - DNA, 15 bp, Homo sapiens
aatttccagtgcagg

SEQ ID NO: 473781 - DNA, 15 bp, Homo sapiens
aaatttccagtgcag

SEQ ID NO: 473782 - DNA, 15 bp, Homo sapiens
taaatttccagtgca

SEQ ID NO: 473783 - DNA, 15 bp, Homo sapiens
ctaaatttccagtgc

SEQ ID NO: 473784 - DNA, 15 bp, Homo sapiens
gctaaatttccagtg

SEQ ID NO: 473785 - DNA, 15 bp, Homo sapiens
cgctaaatttccagt

SEQ ID NO: 473786 - DNA, 15 bp, Homo sapiens
gcgctaaatttccag

SEQ ID NO: 473787 - DNA, 15 bp, Homo sapiens
tgcgctaaatttcca

SEQ ID NO: 473788 - DNA, 15 bp, Homo sapiens
ttgcgctaaatttcc

SEQ ID NO: 473789 - DNA, 15 bp, Homo sapiens
gttgcgctaaatttc

SEQ ID NO: 473790 - DNA, 15 bp, Homo sapiens
agttgcgctaaattt

SEQ ID NO: 473791 - DNA, 15 bp, Homo sapiens
gagttgcgctaaatt

SEQ ID NO: 473792 - DNA, 15 bp, Homo sapiens
agagttgcgctaaat

SEQ ID NO: 473793 - DNA, 15 bp, Homo sapiens
tagagttgcgctaaa

SEQ ID NO: 473794 - DNA, 15 bp, Homo sapiens
gtagagttgcgctaa

SEQ ID NO: 473795 - DNA, 15 bp, Homo sapiens
tgtagagttgcgcta

SEQ ID NO: 473796 - DNA, 15 bp, Homo sapiens
atgtagagttgcgct

SEQ ID NO: 473797 - DNA, 15 bp, Homo sapiens
catgtagagttgcgc

SEQ ID NO: 473798 - DNA, 15 bp, Homo sapiens
tcatgtagagttgcg

SEQ ID NO: 473799 - DNA, 15 bp, Homo sapiens
ctcatgtagagttgc

SEQ ID NO: 473800 - DNA, 15 bp, Homo sapiens
tctcatgtagagttg

SEQ ID NO: 473801 - DNA, 15 bp, Homo sapiens
ttctcatgtagagtt

SEQ ID NO: 473802 - DNA, 15 bp, Homo sapiens
attctcatgtagagt

SEQ ID NO: 473803 - DNA, 15 bp, Homo sapiens
cattctcatgtagag

SEQ ID NO: 473804 - DNA, 15 bp, Homo sapiens
gcattctcatgtaga

SEQ ID NO: 473805 - DNA, 15 bp, Homo sapiens
ggcattctcatgtag

SEQ ID NO: 473806 - DNA, 15 bp, Homo sapiens
aggcattctcatgta

SEQ ID NO: 473807 - DNA, 15 bp, Homo sapiens
caggcattctcatgt

SEQ ID NO: 473808 - DNA, 15 bp, Homo sapiens
acaggcattctcatg

SEQ ID NO: 473809 - DNA, 15 bp, Homo sapiens
gacaggcattctcat

SEQ ID NO: 473810 - DNA, 15 bp, Homo sapiens
agacaggcattctca

SEQ ID NO: 473811 - DNA, 15 bp, Homo sapiens
tagacaggcattctc

SEQ ID NO: 473812 - DNA, 15 bp, Homo sapiens
atagacaggcattct

SEQ ID NO: 473813 - DNA, 15 bp, Homo sapiens
aatagacaggcattc

SEQ ID NO: 473814 - DNA, 15 bp, Homo sapiens
gaatagacaggcatt

SEQ ID NO: 473815 - DNA, 15 bp, Homo sapiens
tgaatagacaggcat

SEQ ID NO: 473816 - DNA, 15 bp, Homo sapiens
atgaatagacaggca

SEQ ID NO: 473817 - DNA, 15 bp, Homo sapiens
tatgaatagacaggc

SEQ ID NO: 473818 - DNA, 15 bp, Homo sapiens
atatgaatagacagg

SEQ ID NO: 473819 - DNA, 15 bp, Homo sapiens
gatatgaatagacag

SEQ ID NO: 473820 - DNA, 15 bp, Homo sapiens
ggatatgaatagaca

SEQ ID NO: 473821 - DNA, 15 bp, Homo sapiens
aggatatgaatagac

SEQ ID NO: 473822 - DNA, 15 bp, Homo sapiens
gaggatatgaataga

SEQ ID NO: 473823 - DNA, 15 bp, Homo sapiens
tgaggatatgaatag

SEQ ID NO: 473824 - DNA, 15 bp, Homo sapiens
gtgaggatatgaata

SEQ ID NO: 473825 - DNA, 15 bp, Homo sapiens
agtgaggatatgaat

SEQ ID NO: 473826 - DNA, 15 bp, Homo sapiens
tagtgaggatatgaa

SEQ ID NO: 473827 - DNA, 15 bp, Homo sapiens
ttagtgaggatatga

SEQ ID NO: 473828 - DNA, 15 bp, Homo sapiens
gttagtgaggatatg

SEQ ID NO: 473829 - DNA, 15 bp, Homo sapiens
ggttagtgaggatat

SEQ ID NO: 473830 - DNA, 15 bp, Homo sapiens
gggttagtgaggata

SEQ ID NO: 473831 - DNA, 15 bp, Homo sapiens
agggttagtgaggat

SEQ ID NO: 473832 - DNA, 15 bp, Homo sapiens
cagggttagtgagga

SEQ ID NO: 473833 - DNA, 15 bp, Homo sapiens
tcagggttagtgagg

SEQ ID NO: 473834 - DNA, 15 bp, Homo sapiens
ctcagggttagtgag

SEQ ID NO: 473835 - DNA, 15 bp, Homo sapiens
actcagggttagtga

SEQ ID NO: 473836 - DNA, 15 bp, Homo sapiens
cactcagggttagtg

SEQ ID NO: 473837 - DNA, 15 bp, Homo sapiens
acactcagggttagt

SEQ ID NO: 473838 - DNA, 15 bp, Homo sapiens
aacactcagggttag

SEQ ID NO: 473839 - DNA, 15 bp, Homo sapiens
caacactcagggtta

SEQ ID NO: 473840 - DNA, 15 bp, Homo sapiens
acaacactcagggtt

SEQ ID NO: 473841 - DNA, 15 bp, Homo sapiens
aacaacactcagggt

SEQ ID NO: 473842 - DNA, 15 bp, Homo sapiens
taacaacactcaggg

SEQ ID NO: 473843 - DNA, 15 bp, Homo sapiens
ttaacaacactcagg

SEQ ID NO: 473844 - DNA, 15 bp, Homo sapiens
attaacaacactcag

SEQ ID NO: 473845 - DNA, 15 bp, Homo sapiens
aattaacaacactca

SEQ ID NO: 473846 - DNA, 15 bp, Homo sapiens
aaattaacaacactc

SEQ ID NO: 473847 - DNA, 15 bp, Homo sapiens
taaattaacaacact

SEQ ID NO: 473848 - DNA, 15 bp, Homo sapiens
gtaaattaacaacac

SEQ ID NO: 473849 - DNA, 15 bp, Homo sapiens
agtaaattaacaaca

SEQ ID NO: 473850 - DNA, 15 bp, Homo sapiens
cagtaaattaacaac

SEQ ID NO: 473851 - DNA, 15 bp, Homo sapiens
tcagtaaattaacaa

SEQ ID NO: 473852 - DNA, 15 bp, Homo sapiens
ttcagtaaattaaca

SEQ ID NO: 473853 - DNA, 15 bp, Homo sapiens
tttcagtaaattaac

SEQ ID NO: 473854 - DNA, 15 bp, Homo sapiens
ctttcagtaaattaa

SEQ ID NO: 473855 - DNA, 15 bp, Homo sapiens
gctttcagtaaatta

SEQ ID NO: 473856 - DNA, 15 bp, Homo sapiens
tgctttcagtaaatt

SEQ ID NO: 473857 - DNA, 15 bp, Homo sapiens
ctgctttcagtaaat

SEQ ID NO: 473858 - DNA, 15 bp, Homo sapiens
actgctttcagtaaa

SEQ ID NO: 473859 - DNA, 15 bp, Homo sapiens
aactgctttcagtaa

SEQ ID NO: 473860 - DNA, 15 bp, Homo sapiens
aaactgctttcagta

SEQ ID NO: 473861 - DNA, 15 bp, Homo sapiens
aaaactgctttcagt

SEQ ID NO: 473862 - DNA, 15 bp, Homo sapiens
taaaactgctttcag

SEQ ID NO: 473863 - DNA, 15 bp, Homo sapiens
ttaaaactgctttca

SEQ ID NO: 473864 - DNA, 15 bp, Homo sapiens
tttaaaactgctttc

SEQ ID NO: 473865 - DNA, 15 bp, Homo sapiens
atttaaaactgcttt

SEQ ID NO: 473866 - DNA, 15 bp, Homo sapiens
catttaaaactgctt

SEQ ID NO: 473867 - DNA, 15 bp, Homo sapiens
gcatttaaaactgct

SEQ ID NO: 473868 - DNA, 15 bp, Homo sapiens
agcatttaaaactgc

SEQ ID NO: 473869 - DNA, 15 bp, Homo sapiens
aagcatttaaaactg

SEQ ID NO: 473870 - DNA, 15 bp, Homo sapiens
gaagcatttaaaact

SEQ ID NO: 473871 - DNA, 15 bp, Homo sapiens
ggaagcatttaaaac

SEQ ID NO: 473872 - DNA, 15 bp, Homo sapiens
aggaagcatttaaaa

SEQ ID NO: 473873 - DNA, 15 bp, Homo sapiens
caggaagcatttaaa

SEQ ID NO: 473874 - DNA, 15 bp, Homo sapiens
tcaggaagcatttaa

SEQ ID NO: 473875 - DNA, 15 bp, Homo sapiens
gtcaggaagcattta

SEQ ID NO: 473876 - DNA, 15 bp, Homo sapiens
ggtcaggaagcattt

SEQ ID NO: 473877 - DNA, 15 bp, Homo sapiens
tggtcaggaagcatt

SEQ ID NO: 473878 - DNA, 15 bp, Homo sapiens
ctggtcaggaagcat

SEQ ID NO: 473879 - DNA, 15 bp, Homo sapiens
cctggtcaggaagca

SEQ ID NO: 473880 - DNA, 15 bp, Homo sapiens
ccctggtcaggaagc

SEQ ID NO: 473881 - DNA, 15 bp, Homo sapiens
tccctggtcaggaag

SEQ ID NO: 473882 - DNA, 15 bp, Homo sapiens
ttccctggtcaggaa

SEQ ID NO: 473883 - DNA, 15 bp, Homo sapiens
gttccctggtcagga

SEQ ID NO: 473884 - DNA, 15 bp, Homo sapiens
cgttccctggtcagg

SEQ ID NO: 473885 - DNA, 15 bp, Homo sapiens
tcgttccctggtcag

SEQ ID NO: 473886 - DNA, 15 bp, Homo sapiens
ttcgttccctggtca

SEQ ID NO: 473887 - DNA, 15 bp, Homo sapiens
cttcgttccctggtc

SEQ ID NO: 473888 - DNA, 15 bp, Homo sapiens
tcttcgttccctggt

SEQ ID NO: 473889 - DNA, 15 bp, Homo sapiens
ttcttcgttccctgg

SEQ ID NO: 473890 - DNA, 15 bp, Homo sapiens
cttcttcgttccctg

SEQ ID NO: 473891 - DNA, 15 bp, Homo sapiens
gcttcttcgttccct

SEQ ID NO: 473892 - DNA, 15 bp, Homo sapiens
agcttcttcgttccc

SEQ ID NO: 473893 - DNA, 15 bp, Homo sapiens
aagcttcttcgttcc

SEQ ID NO: 473894 - DNA, 15 bp, Homo sapiens
taagcttcttcgttc

SEQ ID NO: 473895 - DNA, 15 bp, Homo sapiens
ttaagcttcttcgtt

SEQ ID NO: 473896 - DNA, 15 bp, Homo sapiens
cttaagcttcttcgt

SEQ ID NO: 473897 - DNA, 15 bp, Homo sapiens
acttaagcttcttcg

SEQ ID NO: 473898 - DNA, 15 bp, Homo sapiens
aacttaagcttcttc

SEQ ID NO: 473899 - DNA, 15 bp, Homo sapiens
gaacttaagcttctt

SEQ ID NO: 473900 - DNA, 15 bp, Homo sapiens
agaacttaagcttct

SEQ ID NO: 473901 - DNA, 15 bp, Homo sapiens
cagaacttaagcttc

SEQ ID NO: 473902 - DNA, 15 bp, Homo sapiens
ccagaacttaagctt

SEQ ID NO: 473903 - DNA, 15 bp, Homo sapiens
cccagaacttaagct

SEQ ID NO: 473904 - DNA, 15 bp, Homo sapiens
tcccagaacttaagc

SEQ ID NO: 473905 - DNA, 15 bp, Homo sapiens
ttcccagaacttaag

SEQ ID NO: 473906 - DNA, 15 bp, Homo sapiens
attcccagaacttaa

SEQ ID NO: 473907 - DNA, 15 bp, Homo sapiens
cattcccagaactta

SEQ ID NO: 473908 - DNA, 15 bp, Homo sapiens
ccattcccagaactt

SEQ ID NO: 473909 - DNA, 15 bp, Homo sapiens
cccattcccagaact

SEQ ID NO: 473910 - DNA, 15 bp, Homo sapiens
tcccattcccagaac

SEQ ID NO: 473911 - DNA, 15 bp, Homo sapiens
ctcccattcccagaa

SEQ ID NO: 473912 - DNA, 15 bp, Homo sapiens
cctcccattcccaga

SEQ ID NO: 473913 - DNA, 15 bp, Homo sapiens
tcctcccattcccag

SEQ ID NO: 473914 - DNA, 15 bp, Homo sapiens
atcctcccattccca

SEQ ID NO: 473915 - DNA, 15 bp, Homo sapiens
tatcctcccattccc

SEQ ID NO: 473916 - DNA, 15 bp, Homo sapiens
ctatcctcccattcc

SEQ ID NO: 473917 - DNA, 15 bp, Homo sapiens
tctatcctcccattc

SEQ ID NO: 473918 - DNA, 15 bp, Homo sapiens
ttctatcctcccatt

SEQ ID NO: 473919 - DNA, 15 bp, Homo sapiens
cttctatcctcccat

SEQ ID NO: 473920 - DNA, 15 bp, Homo sapiens
acttctatcctccca

SEQ ID NO: 473921 - DNA, 15 bp, Homo sapiens
cacttctatcctccc

SEQ ID NO: 473922 - DNA, 15 bp, Homo sapiens
gcacttctatcctcc

SEQ ID NO: 473923 - DNA, 15 bp, Homo sapiens
ggcacttctatcctc

SEQ ID NO: 473924 - DNA, 15 bp, Homo sapiens
tggcacttctatcct

SEQ ID NO: 473925 - DNA, 15 bp, Homo sapiens
ctggcacttctatcc

SEQ ID NO: 473926 - DNA, 15 bp, Homo sapiens
tctggcacttctatc

SEQ ID NO: 473927 - DNA, 15 bp, Homo sapiens
ttctggcacttctat

SEQ ID NO: 473928 - DNA, 15 bp, Homo sapiens
tttctggcacttcta

SEQ ID NO: 473929 - DNA, 15 bp, Homo sapiens
ttttctggcacttct

SEQ ID NO: 473930 - DNA, 15 bp, Homo sapiens
cttttctggcacttc

SEQ ID NO: 473931 - DNA, 15 bp, Homo sapiens
tcttttctggcactt

SEQ ID NO: 473932 - DNA, 15 bp, Homo sapiens
ctcttttctggcact

SEQ ID NO: 473933 - DNA, 15 bp, Homo sapiens
gctcttttctggcac

SEQ ID NO: 473934 - DNA, 15 bp, Homo sapiens
agctcttttctggca

SEQ ID NO: 473935 - DNA, 15 bp, Homo sapiens
gagctcttttctggc

SEQ ID NO: 473936 - DNA, 15 bp, Homo sapiens
tgagctcttttctgg

SEQ ID NO: 473937 - DNA, 15 bp, Homo sapiens
ctgagctcttttctg

SEQ ID NO: 473938 - DNA, 15 bp, Homo sapiens
cctgagctcttttct

SEQ ID NO: 473939 - DNA, 15 bp, Homo sapiens
tcctgagctcttttc

SEQ ID NO: 473940 - DNA, 15 bp, Homo sapiens
ctcctgagctctttt

SEQ ID NO: 473941 - DNA, 15 bp, Homo sapiens
actcctgagctcttt

SEQ ID NO: 473942 - DNA, 15 bp, Homo sapiens
aactcctgagctctt

SEQ ID NO: 473943 - DNA, 15 bp, Homo sapiens
gaactcctgagctct

SEQ ID NO: 473944 - DNA, 15 bp, Homo sapiens
tgaactcctgagctc

SEQ ID NO: 473945 - DNA, 15 bp, Homo sapiens
ctgaactcctgagct

SEQ ID NO: 473946 - DNA, 15 bp, Homo sapiens
tctgaactcctgagc

SEQ ID NO: 473947 - DNA, 15 bp, Homo sapiens
ttctgaactcctgag

SEQ ID NO: 473948 - DNA, 15 bp, Homo sapiens
tttctgaactcctga

SEQ ID NO: 473949 - DNA, 15 bp, Homo sapiens
atttctgaactcctg

SEQ ID NO: 473950 - DNA, 15 bp, Homo sapiens
gatttctgaactcct

SEQ ID NO: 473951 - DNA, 15 bp, Homo sapiens
ggatttctgaactcc

SEQ ID NO: 473952 - DNA, 15 bp, Homo sapiens
gggatttctgaactc

SEQ ID NO: 473953 - DNA, 15 bp, Homo sapiens
agggatttctgaact

SEQ ID NO: 473954 - DNA, 15 bp, Homo sapiens
cagggatttctgaac

SEQ ID NO: 473955 - DNA, 15 bp, Homo sapiens
gcagggatttctgaa

SEQ ID NO: 473956 - DNA, 15 bp, Homo sapiens
tgcagggatttctga

SEQ ID NO: 473957 - DNA, 15 bp, Homo sapiens
ctgcagggatttctg

SEQ ID NO: 473958 - DNA, 15 bp, Homo sapiens
gctgcagggatttct

SEQ ID NO: 473959 - DNA, 15 bp, Homo sapiens
cgctgcagggatttc

SEQ ID NO: 473960 - DNA, 15 bp, Homo sapiens
ccgctgcagggattt

SEQ ID NO: 473961 - DNA, 15 bp, Homo sapiens
accgctgcagggatt

SEQ ID NO: 473962 - DNA, 15 bp, Homo sapiens
gaccgctgcagggat

SEQ ID NO: 473963 - DNA, 15 bp, Homo sapiens
ggaccgctgcaggga

SEQ ID NO: 473964 - DNA, 15 bp, Homo sapiens
gggaccgctgcaggg

SEQ ID NO: 473965 - DNA, 15 bp, Homo sapiens
ggggaccgctgcagg

SEQ ID NO: 473966 - DNA, 15 bp, Homo sapiens
gggggaccgctgcag

SEQ ID NO: 473967 - DNA, 15 bp, Homo sapiens
agggggaccgctgca

SEQ ID NO: 473968 - DNA, 15 bp, Homo sapiens
gagggggaccgctgc

SEQ ID NO: 473969 - DNA, 15 bp, Homo sapiens
ggagggggaccgctg

SEQ ID NO: 473970 - DNA, 15 bp, Homo sapiens
gggagggggaccgct

SEQ ID NO: 473971 - DNA, 15 bp, Homo sapiens
agggagggggaccgc

SEQ ID NO: 473972 - DNA, 15 bp, Homo sapiens
gagggagggggaccg

SEQ ID NO: 473973 - DNA, 15 bp, Homo sapiens
agagggagggggacc

SEQ ID NO: 473974 - DNA, 15 bp, Homo sapiens
gagagggagggggac

SEQ ID NO: 473975 - DNA, 15 bp, Homo sapiens
ggagagggaggggga

SEQ ID NO: 473976 - DNA, 15 bp, Homo sapiens
aggagagggaggggg

SEQ ID NO: 473977 - DNA, 15 bp, Homo sapiens
aaggagagggagggg

SEQ ID NO: 473978 - DNA, 15 bp, Homo sapiens
aaaggagagggaggg

SEQ ID NO: 473979 - DNA, 15 bp, Homo sapiens
gaaaggagagggagg

SEQ ID NO: 473980 - DNA, 15 bp, Homo sapiens
tgaaaggagagggag

SEQ ID NO: 473981 - DNA, 15 bp, Homo sapiens
gtgaaaggagaggga

SEQ ID NO: 473982 - DNA, 15 bp, Homo sapiens
agtgaaaggagaggg

SEQ ID NO: 473983 - DNA, 15 bp, Homo sapiens
aagtgaaaggagagg

SEQ ID NO: 473984 - DNA, 15 bp, Homo sapiens
aaagtgaaaggagag

SEQ ID NO: 473985 - DNA, 15 bp, Homo sapiens
gaaagtgaaaggaga

SEQ ID NO: 473986 - DNA, 15 bp, Homo sapiens
agaaagtgaaaggag

SEQ ID NO: 473987 - DNA, 15 bp, Homo sapiens
cagaaagtgaaagga

SEQ ID NO: 473988 - DNA, 15 bp, Homo sapiens
acagaaagtgaaagg

SEQ ID NO: 473989 - DNA, 15 bp, Homo sapiens
gacagaaagtgaaag

SEQ ID NO: 473990 - DNA, 15 bp, Homo sapiens
agacagaaagtgaaa

SEQ ID NO: 473991 - DNA, 15 bp, Homo sapiens
aagacagaaagtgaa

SEQ ID NO: 473992 - DNA, 15 bp, Homo sapiens
aaagacagaaagtga

SEQ ID NO: 473993 - DNA, 15 bp, Homo sapiens
gaaagacagaaagtg

SEQ ID NO: 473994 - DNA, 15 bp, Homo sapiens
agaaagacagaaagt

SEQ ID NO: 473995 - DNA, 15 bp, Homo sapiens
cagaaagacagaaag

SEQ ID NO: 473996 - DNA, 15 bp, Homo sapiens
ccagaaagacagaaa

SEQ ID NO: 473997 - DNA, 15 bp, Homo sapiens
accagaaagacagaa

SEQ ID NO: 473998 - DNA, 15 bp, Homo sapiens
gaccagaaagacaga

SEQ ID NO: 473999 - DNA, 15 bp, Homo sapiens
agaccagaaagacag

SEQ ID NO: 474000 - DNA, 15 bp, Homo sapiens
aagaccagaaagaca

SEQ ID NO: 474001 - DNA, 15 bp, Homo sapiens
aaagaccagaaagac

SEQ ID NO: 474002 - DNA, 15 bp, Homo sapiens
aaaagaccagaaaga

SEQ ID NO: 474003 - DNA, 15 bp, Homo sapiens
caaaagaccagaaag

SEQ ID NO: 474004 - DNA, 15 bp, Homo sapiens
ccaaaagaccagaaa

SEQ ID NO: 474005 - DNA, 15 bp, Homo sapiens
accaaaagaccagaa

SEQ ID NO: 474006 - DNA, 15 bp, Homo sapiens
gaccaaaagaccaga

SEQ ID NO: 474007 - DNA, 15 bp, Homo sapiens
agaccaaaagaccag

SEQ ID NO: 474008 - DNA, 15 bp, Homo sapiens
aagaccaaaagacca

SEQ ID NO: 474009 - DNA, 15 bp, Homo sapiens
aaagaccaaaagacc

SEQ ID NO: 474010 - DNA, 15 bp, Homo sapiens
caaagaccaaaagac

SEQ ID NO: 474011 - DNA, 15 bp, Homo sapiens
acaaagaccaaaaga

SEQ ID NO: 474012 - DNA, 15 bp, Homo sapiens
aacaaagaccaaaag

SEQ ID NO: 474013 - DNA, 15 bp, Homo sapiens
taacaaagaccaaaa

SEQ ID NO: 474014 - DNA, 15 bp, Homo sapiens
gtaacaaagaccaaa

SEQ ID NO: 474015 - DNA, 15 bp, Homo sapiens
tgtaacaaagaccaa

SEQ ID NO: 474016 - DNA, 15 bp, Homo sapiens
gtgtaacaaagacca

SEQ ID NO: 474017 - DNA, 15 bp, Homo sapiens
agtgtaacaaagacc

SEQ ID NO: 474018 - DNA, 15 bp, Homo sapiens
tagtgtaacaaagac

SEQ ID NO: 474019 - DNA, 15 bp, Homo sapiens
ctagtgtaacaaaga

SEQ ID NO: 474020 - DNA, 15 bp, Homo sapiens
actagtgtaacaaag

SEQ ID NO: 474021 - DNA, 15 bp, Homo sapiens
cactagtgtaacaaa

SEQ ID NO: 474022 - DNA, 15 bp, Homo sapiens
tcactagtgtaacaa

SEQ ID NO: 474023 - DNA, 15 bp, Homo sapiens
atcactagtgtaaca

SEQ ID NO: 474024 - DNA, 15 bp, Homo sapiens
tatcactagtgtaac

SEQ ID NO: 474025 - DNA, 15 bp, Homo sapiens
ttatcactagtgtaa

SEQ ID NO: 474026 - DNA, 15 bp, Homo sapiens
tttatcactagtgta

SEQ ID NO: 474027 - DNA, 15 bp, Homo sapiens
gtttatcactagtgt

SEQ ID NO: 474028 - DNA, 15 bp, Homo sapiens
ggtttatcactagtg

SEQ ID NO: 474029 - DNA, 15 bp, Homo sapiens
tggtttatcactagt

SEQ ID NO: 474030 - DNA, 15 bp, Homo sapiens
atggtttatcactag

SEQ ID NO: 474031 - DNA, 15 bp, Homo sapiens
gatggtttatcacta

SEQ ID NO: 474032 - DNA, 15 bp, Homo sapiens
tgatggtttatcact

SEQ ID NO: 474033 - DNA, 15 bp, Homo sapiens
ttgatggtttatcac

SEQ ID NO: 474034 - DNA, 15 bp, Homo sapiens
tttgatggtttatca

SEQ ID NO: 474035 - DNA, 15 bp, Homo sapiens
ctttgatggtttatc

SEQ ID NO: 474036 - DNA, 15 bp, Homo sapiens
tctttgatggtttat

SEQ ID NO: 474037 - DNA, 15 bp, Homo sapiens
ttctttgatggttta

SEQ ID NO: 474038 - DNA, 15 bp, Homo sapiens
attctttgatggttt

SEQ ID NO: 474039 - DNA, 15 bp, Homo sapiens
cattctttgatggtt

SEQ ID NO: 474040 - DNA, 15 bp, Homo sapiens
tcattctttgatggt

SEQ ID NO: 474041 - DNA, 15 bp, Homo sapiens
atcattctttgatgg

SEQ ID NO: 474042 - DNA, 15 bp, Homo sapiens
catcattctttgatg

SEQ ID NO: 474043 - DNA, 15 bp, Homo sapiens
ccatcattctttgat

SEQ ID NO: 474044 - DNA, 15 bp, Homo sapiens
tccatcattctttga

SEQ ID NO: 474045 - DNA, 15 bp, Homo sapiens
ttccatcattctttg

SEQ ID NO: 474046 - DNA, 15 bp, Homo sapiens
attccatcattcttt

SEQ ID NO: 474047 - DNA, 15 bp, Homo sapiens
cattccatcattctt

SEQ ID NO: 474048 - DNA, 15 bp, Homo sapiens
tcattccatcattct

SEQ ID NO: 474049 - DNA, 15 bp, Homo sapiens
atcattccatcattc

SEQ ID NO: 474050 - DNA, 15 bp, Homo sapiens
catcattccatcatt

SEQ ID NO: 474051 - DNA, 15 bp, Homo sapiens
gcatcattccatcat

SEQ ID NO: 474052 - DNA, 15 bp, Homo sapiens
agcatcattccatca

SEQ ID NO: 474053 - DNA, 15 bp, Homo sapiens
tagcatcattccatc

SEQ ID NO: 474054 - DNA, 15 bp, Homo sapiens
ttagcatcattccat

SEQ ID NO: 474055 - DNA, 15 bp, Homo sapiens
gttagcatcattcca

SEQ ID NO: 474056 - DNA, 15 bp, Homo sapiens
agttagcatcattcc

SEQ ID NO: 474057 - DNA, 15 bp, Homo sapiens
aagttagcatcattc

SEQ ID NO: 474058 - DNA, 15 bp, Homo sapiens
gaagttagcatcatt

SEQ ID NO: 474059 - DNA, 15 bp, Homo sapiens
agaagttagcatcat

SEQ ID NO: 474060 - DNA, 15 bp, Homo sapiens
gagaagttagcatca

SEQ ID NO: 474061 - DNA, 15 bp, Homo sapiens
agagaagttagcatc

SEQ ID NO: 474062 - DNA, 15 bp, Homo sapiens
gagagaagttagcat

SEQ ID NO: 474063 - DNA, 15 bp, Homo sapiens
agagagaagttagca

SEQ ID NO: 474064 - DNA, 15 bp, Homo sapiens
aagagagaagttagc

SEQ ID NO: 474065 - DNA, 15 bp, Homo sapiens
aaagagagaagttag

SEQ ID NO: 474066 - DNA, 15 bp, Homo sapiens
aaaagagagaagtta

SEQ ID NO: 474067 - DNA, 15 bp, Homo sapiens
aaaaagagagaagtt

SEQ ID NO: 474068 - DNA, 15 bp, Homo sapiens
aaaaaagagagaagt

SEQ ID NO: 474069 - DNA, 15 bp, Homo sapiens
aaaaaaagagagaag

SEQ ID NO: 474070 - DNA, 15 bp, Homo sapiens
taaaaaaagagagaa

SEQ ID NO: 474071 - DNA, 15 bp, Homo sapiens
ttaaaaaaagagaga

SEQ ID NO: 474072 - DNA, 15 bp, Homo sapiens
attaaaaaaagagag

SEQ ID NO: 474073 - DNA, 15 bp, Homo sapiens
aattaaaaaaagaga

SEQ ID NO: 474074 - DNA, 15 bp, Homo sapiens
aaattaaaaaaagag

SEQ ID NO: 474075 - DNA, 15 bp, Homo sapiens
aaaattaaaaaaaga

SEQ ID NO: 474076 - DNA, 15 bp, Homo sapiens
aaaaattaaaaaaag

SEQ ID NO: 474077 - DNA, 15 bp, Homo sapiens
aaaaaattaaaaaaa

SEQ ID NO: 474078 - DNA, 15 bp, Homo sapiens
aaaaaaattaaaaaa

SEQ ID NO: 474079 - DNA, 15 bp, Homo sapiens
caaaaaaattaaaaa

SEQ ID NO: 474080 - DNA, 15 bp, Homo sapiens
tcaaaaaaattaaaa

SEQ ID NO: 474081 - DNA, 15 bp, Homo sapiens
ctcaaaaaaattaaa

SEQ ID NO: 474082 - DNA, 15 bp, Homo sapiens
tctcaaaaaaattaa

SEQ ID NO: 474083 - DNA, 15 bp, Homo sapiens
gtctcaaaaaaatta

SEQ ID NO: 474084 - DNA, 15 bp, Homo sapiens
tgtctcaaaaaaatt

SEQ ID NO: 474085 - DNA, 15 bp, Homo sapiens
ctgtctcaaaaaaat

SEQ ID NO: 474086 - DNA, 15 bp, Homo sapiens
acctgggtgacagag

SEQ ID NO: 474087 - DNA, 15 bp, Homo sapiens
aacctgggtgacaga

SEQ ID NO: 474088 - DNA, 15 bp, Homo sapiens
taacctgggtgacag

SEQ ID NO: 474089 - DNA, 15 bp, Homo sapiens
ctaacctgggtgaca

SEQ ID NO: 474090 - DNA, 15 bp, Homo sapiens
tctaacctgggtgac

SEQ ID NO: 474091 - DNA, 15 bp, Homo sapiens
ctctaacctgggtga

SEQ ID NO: 474092 - DNA, 15 bp, Homo sapiens
actctaacctgggtg

SEQ ID NO: 474093 - DNA, 15 bp, Homo sapiens
cactctaacctgggt

SEQ ID NO: 474094 - DNA, 15 bp, Homo sapiens
gcactctaacctggg

SEQ ID NO: 474095 - DNA, 15 bp, Homo sapiens
tgcactctaacctgg

SEQ ID NO: 474096 - DNA, 15 bp, Homo sapiens
ctgcactctaacctg

SEQ ID NO: 474097 - DNA, 15 bp, Homo sapiens
actgcactctaacct

SEQ ID NO: 474098 - DNA, 15 bp, Homo sapiens
cactgcactctaacc

SEQ ID NO: 474099 - DNA, 15 bp, Homo sapiens
ccactgcactctaac

SEQ ID NO: 474100 - DNA, 15 bp, Homo sapiens
gccactgcactctaa

SEQ ID NO: 474101 - DNA, 15 bp, Homo sapiens
tgccactgcactcta

SEQ ID NO: 474102 - DNA, 15 bp, Homo sapiens
atgccactgcactct

SEQ ID NO: 474103 - DNA, 15 bp, Homo sapiens
aagatcatgccactg

SEQ ID NO: 474104 - DNA, 15 bp, Homo sapiens
caagatcatgccact

SEQ ID NO: 474105 - DNA, 15 bp, Homo sapiens
ccaagatcatgccac

SEQ ID NO: 474106 - DNA, 15 bp, Homo sapiens
gccaagatcatgcca

SEQ ID NO: 474107 - DNA, 15 bp, Homo sapiens
agccaagatcatgcc

SEQ ID NO: 474108 - DNA, 15 bp, Homo sapiens
aagccaagatcatgc

SEQ ID NO: 474109 - DNA, 15 bp, Homo sapiens
taagccaagatcatg

SEQ ID NO: 474110 - DNA, 15 bp, Homo sapiens
gtaagccaagatcat

SEQ ID NO: 474111 - DNA, 15 bp, Homo sapiens
agtaagccaagatca

SEQ ID NO: 474112 - DNA, 15 bp, Homo sapiens
cagtaagccaagatc

SEQ ID NO: 474113 - DNA, 15 bp, Homo sapiens
gcagtaagccaagat

SEQ ID NO: 474114 - DNA, 15 bp, Homo sapiens
tgcagtaagccaaga

SEQ ID NO: 474115 - DNA, 15 bp, Homo sapiens
ttgcagtaagccaag

SEQ ID NO: 474116 - DNA, 15 bp, Homo sapiens
gttgcagtaagccaa

SEQ ID NO: 474117 - DNA, 15 bp, Homo sapiens
ggttgcagtaagcca

SEQ ID NO: 474118 - DNA, 15 bp, Homo sapiens
aggttgcagtaagcc

SEQ ID NO: 474119 - DNA, 15 bp, Homo sapiens
gaggttgcagtaagc

SEQ ID NO: 474120 - DNA, 15 bp, Homo sapiens
ggaggttgcagtaag

SEQ ID NO: 474121 - DNA, 15 bp, Homo sapiens
aggaggttgcagtaa

SEQ ID NO: 474122 - DNA, 15 bp, Homo sapiens
gaggaggttgcagta

SEQ ID NO: 474123 - DNA, 15 bp, Homo sapiens
tgggaggaggaggtt

SEQ ID NO: 474124 - DNA, 15 bp, Homo sapiens
ctgggaggaggaggt

SEQ ID NO: 474125 - DNA, 15 bp, Homo sapiens
cctgggaggaggagg

SEQ ID NO: 474126 - DNA, 15 bp, Homo sapiens
acctgggaggaggag

SEQ ID NO: 474127 - DNA, 15 bp, Homo sapiens
aacctgggaggagga

SEQ ID NO: 474128 - DNA, 15 bp, Homo sapiens
gaacctgggaggagg

SEQ ID NO: 474129 - DNA, 15 bp, Homo sapiens
tgaacctgggaggag

SEQ ID NO: 474130 - DNA, 15 bp, Homo sapiens
ttgaacctgggagga

SEQ ID NO: 474131 - DNA, 15 bp, Homo sapiens
taagaatcgcttgaa

SEQ ID NO: 474132 - DNA, 15 bp, Homo sapiens
ctaagaatcgcttga

SEQ ID NO: 474133 - DNA, 15 bp, Homo sapiens
actaagaatcgcttg

SEQ ID NO: 474134 - DNA, 15 bp, Homo sapiens
gactaagaatcgctt

SEQ ID NO: 474135 - DNA, 15 bp, Homo sapiens
tgactaagaatcgct

SEQ ID NO: 474136 - DNA, 15 bp, Homo sapiens
gtgactaagaatcgc

SEQ ID NO: 474137 - DNA, 15 bp, Homo sapiens
tgtgactaagaatcg

SEQ ID NO: 474138 - DNA, 15 bp, Homo sapiens
ttgtgactaagaatc

SEQ ID NO: 474139 - DNA, 15 bp, Homo sapiens
gttgtgactaagaat

SEQ ID NO: 474140 - DNA, 15 bp, Homo sapiens
ggttgtgactaagaa

SEQ ID NO: 474141 - DNA, 15 bp, Homo sapiens
aggttgtgactaaga

SEQ ID NO: 474142 - DNA, 15 bp, Homo sapiens
aaggttgtgactaag

SEQ ID NO: 474143 - DNA, 15 bp, Homo sapiens
gaaggttgtgactaa

SEQ ID NO: 474144 - DNA, 15 bp, Homo sapiens
ggaaggttgtgacta

SEQ ID NO: 474145 - DNA, 15 bp, Homo sapiens
tggaaggttgtgact

SEQ ID NO: 474146 - DNA, 15 bp, Homo sapiens
ttggaaggttgtgac

SEQ ID NO: 474147 - DNA, 15 bp, Homo sapiens
cttggaaggttgtga

SEQ ID NO: 474148 - DNA, 15 bp, Homo sapiens
acttggaaggttgtg

SEQ ID NO: 474149 - DNA, 15 bp, Homo sapiens
tacttggaaggttgt

SEQ ID NO: 474150 - DNA, 15 bp, Homo sapiens
ctacttggaaggttg

SEQ ID NO: 474151 - DNA, 15 bp, Homo sapiens
gctacttggaaggtt

SEQ ID NO: 474152 - DNA, 15 bp, Homo sapiens
agctacttggaaggt

SEQ ID NO: 474153 - DNA, 15 bp, Homo sapiens
cagctacttggaagg

SEQ ID NO: 474154 - DNA, 15 bp, Homo sapiens
ccagctacttggaag

SEQ ID NO: 474155 - DNA, 15 bp, Homo sapiens
cccagctacttggaa

SEQ ID NO: 474156 - DNA, 15 bp, Homo sapiens
tcccagctacttgga

SEQ ID NO: 474157 - DNA, 15 bp, Homo sapiens
ggcctgtaatcccag

SEQ ID NO: 474158 - DNA, 15 bp, Homo sapiens
gggcctgtaatccca

SEQ ID NO: 474159 - DNA, 15 bp, Homo sapiens
tgggcctgtaatccc

SEQ ID NO: 474160 - DNA, 15 bp, Homo sapiens
atgggcctgtaatcc

SEQ ID NO: 474161 - DNA, 15 bp, Homo sapiens
catgggcctgtaatc

SEQ ID NO: 474162 - DNA, 15 bp, Homo sapiens
gcatgggcctgtaat

SEQ ID NO: 474163 - DNA, 15 bp, Homo sapiens
ggcatgggcctgtaa

SEQ ID NO: 474164 - DNA, 15 bp, Homo sapiens
tggcatgggcctgta

SEQ ID NO: 474165 - DNA, 15 bp, Homo sapiens
gtggcatgggcctgt

SEQ ID NO: 474166 - DNA, 15 bp, Homo sapiens
ggtggcatgggcctg

SEQ ID NO: 474167 - DNA, 15 bp, Homo sapiens
tggtggcatgggcct

SEQ ID NO: 474168 - DNA, 15 bp, Homo sapiens
atggtggcatgggcc

SEQ ID NO: 474169 - DNA, 15 bp, Homo sapiens
catggtggcatgggc

SEQ ID NO: 474170 - DNA, 15 bp, Homo sapiens
gcatggtggcatggg

SEQ ID NO: 474171 - DNA, 15 bp, Homo sapiens
ggcatggtggcatgg

SEQ ID NO: 474172 - DNA, 15 bp, Homo sapiens
aggcatggtggcatg

SEQ ID NO: 474173 - DNA, 15 bp, Homo sapiens
caggcatggtggcat

SEQ ID NO: 474174 - DNA, 15 bp, Homo sapiens
ccaggcatggtggca

SEQ ID NO: 474175 - DNA, 15 bp, Homo sapiens
atagccaggcatggt

SEQ ID NO: 474176 - DNA, 15 bp, Homo sapiens
aatagccaggcatgg

SEQ ID NO: 474177 - DNA, 15 bp, Homo sapiens
aaatagccaggcatg

SEQ ID NO: 474178 - DNA, 15 bp, Homo sapiens
aaaatagccaggcat

SEQ ID NO: 474179 - DNA, 15 bp, Homo sapiens
aaaaatagccaggca

SEQ ID NO: 474180 - DNA, 15 bp, Homo sapiens
aaaaaatagccaggc

SEQ ID NO: 474181 - DNA, 15 bp, Homo sapiens
aaaaaaatagccagg

SEQ ID NO: 474182 - DNA, 15 bp, Homo sapiens
caaaaaaatagccag

SEQ ID NO: 474183 - DNA, 15 bp, Homo sapiens
acaaaaaaatagcca

SEQ ID NO: 474184 - DNA, 15 bp, Homo sapiens
tacaaaaaaatagcc

SEQ ID NO: 474185 - DNA, 15 bp, Homo sapiens
atacaaaaaaatagc

SEQ ID NO: 474186 - DNA, 15 bp, Homo sapiens
aatacaaaaaaatag

SEQ ID NO: 474187 - DNA, 15 bp, Homo sapiens
aaatacaaaaaaata

SEQ ID NO: 474188 - DNA, 15 bp, Homo sapiens
atctactaaaataca

SEQ ID NO: 474189 - DNA, 15 bp, Homo sapiens
gatctactaaaatac

SEQ ID NO: 474190 - DNA, 15 bp, Homo sapiens
cgatctactaaaata

SEQ ID NO: 474191 - DNA, 15 bp, Homo sapiens
tcgatctactaaaat

SEQ ID NO: 474192 - DNA, 15 bp, Homo sapiens
gtcgatctactaaaa

SEQ ID NO: 474193 - DNA, 15 bp, Homo sapiens
ggtcgatctactaaa

SEQ ID NO: 474194 - DNA, 15 bp, Homo sapiens
aggtcgatctactaa

SEQ ID NO: 474195 - DNA, 15 bp, Homo sapiens
caggtcgatctacta

SEQ ID NO: 474196 - DNA, 15 bp, Homo sapiens
gcaggtcgatctact

SEQ ID NO: 474197 - DNA, 15 bp, Homo sapiens
ggcaggtcgatctac

SEQ ID NO: 474198 - DNA, 15 bp, Homo sapiens
aggcaggtcgatcta

SEQ ID NO: 474199 - DNA, 15 bp, Homo sapiens
gaggcaggtcgatct

SEQ ID NO: 474200 - DNA, 15 bp, Homo sapiens
cgaggcaggtcgatc

SEQ ID NO: 474201 - DNA, 15 bp, Homo sapiens
ccgaggcaggtcgat

SEQ ID NO: 474202 - DNA, 15 bp, Homo sapiens
gccgaggcaggtcga

SEQ ID NO: 474203 - DNA, 15 bp, Homo sapiens
ggccgaggcaggtcg

SEQ ID NO: 474204 - DNA, 15 bp, Homo sapiens
aggccgaggcaggtc

SEQ ID NO: 474205 - DNA, 15 bp, Homo sapiens
gaggccgaggcaggt

SEQ ID NO: 474206 - DNA, 15 bp, Homo sapiens
agaggccgaggcagg

SEQ ID NO: 474207 - DNA, 15 bp, Homo sapiens
gagaggccgaggcag

SEQ ID NO: 474208 - DNA, 15 bp, Homo sapiens
tgagaggccgaggca

SEQ ID NO: 474209 - DNA, 15 bp, Homo sapiens
ttgagaggccgaggc

SEQ ID NO: 474210 - DNA, 15 bp, Homo sapiens
tttgagaggccgagg

SEQ ID NO: 474211 - DNA, 15 bp, Homo sapiens
atttgagaggccgag

SEQ ID NO: 474212 - DNA, 15 bp, Homo sapiens
aatttgagaggccga

SEQ ID NO: 474213 - DNA, 15 bp, Homo sapiens
aaatttgagaggccg

SEQ ID NO: 474214 - DNA, 15 bp, Homo sapiens
aaaatttgagaggcc

SEQ ID NO: 474215 - DNA, 15 bp, Homo sapiens
aaaaatttgagaggc

SEQ ID NO: 474216 - DNA, 15 bp, Homo sapiens
caaaaatttgagagg

SEQ ID NO: 474217 - DNA, 15 bp, Homo sapiens
ccaaaaatttgagag

SEQ ID NO: 474218 - DNA, 15 bp, Homo sapiens
cccaaaaatttgaga

SEQ ID NO: 474219 - DNA, 15 bp, Homo sapiens
tcccaaaaatttgag

SEQ ID NO: 474220 - DNA, 15 bp, Homo sapiens
atcccaaaaatttga

SEQ ID NO: 474221 - DNA, 15 bp, Homo sapiens
aatcccaaaaatttg

SEQ ID NO: 474222 - DNA, 15 bp, Homo sapiens
taatcccaaaaattt

SEQ ID NO: 474223 - DNA, 15 bp, Homo sapiens
gtaatcccaaaaatt

SEQ ID NO: 474224 - DNA, 15 bp, Homo sapiens
tgtaatcccaaaaat

SEQ ID NO: 474225 - DNA, 15 bp, Homo sapiens
ctgtaatcccaaaaa

SEQ ID NO: 474226 - DNA, 15 bp, Homo sapiens
cctgtaatcccaaaa

SEQ ID NO: 474227 - DNA, 15 bp, Homo sapiens
acctgtaatcccaaa

SEQ ID NO: 474228 - DNA, 15 bp, Homo sapiens
cacctgtaatcccaa

SEQ ID NO: 474229 - DNA, 15 bp, Homo sapiens
gacacctgtaatccc

SEQ ID NO: 474230 - DNA, 15 bp, Homo sapiens
tgacacctgtaatcc

SEQ ID NO: 474231 - DNA, 15 bp, Homo sapiens
ctgacacctgtaatc

SEQ ID NO: 474232 - DNA, 15 bp, Homo sapiens
gctgacacctgtaat

SEQ ID NO: 474233 - DNA, 15 bp, Homo sapiens
ggctgacacctgtaa

SEQ ID NO: 474234 - DNA, 15 bp, Homo sapiens
tggctgacacctgta

SEQ ID NO: 474235 - DNA, 15 bp, Homo sapiens
gtggctgacacctgt

SEQ ID NO: 474236 - DNA, 15 bp, Homo sapiens
agtggctgacacctg

SEQ ID NO: 474237 - DNA, 15 bp, Homo sapiens
cagtggctgacacct

SEQ ID NO: 474238 - DNA, 15 bp, Homo sapiens
gcagtggctgacacc

SEQ ID NO: 474239 - DNA, 15 bp, Homo sapiens
tgcagtggctgacac

SEQ ID NO: 474240 - DNA, 15 bp, Homo sapiens
gtgcagtggctgaca

SEQ ID NO: 474241 - DNA, 15 bp, Homo sapiens
ggtgcagtggctgac

SEQ ID NO: 474242 - DNA, 15 bp, Homo sapiens
aggtgcagtggctga

SEQ ID NO: 474243 - DNA, 15 bp, Homo sapiens
caggtgcagtggctg

SEQ ID NO: 474244 - DNA, 15 bp, Homo sapiens
aggccaggtgcagtg

SEQ ID NO: 474245 - DNA, 15 bp, Homo sapiens
taggccaggtgcagt

SEQ ID NO: 474246 - DNA, 15 bp, Homo sapiens
ttaggccaggtgcag

SEQ ID NO: 474247 - DNA, 15 bp, Homo sapiens
attaggccaggtgca

SEQ ID NO: 474248 - DNA, 15 bp, Homo sapiens
tattaggccaggtgc

SEQ ID NO: 474249 - DNA, 15 bp, Homo sapiens
atattaggccaggtg

SEQ ID NO: 474250 - DNA, 15 bp, Homo sapiens
gatattaggccaggt

SEQ ID NO: 474251 - DNA, 15 bp, Homo sapiens
agatattaggccagg

SEQ ID NO: 474252 - DNA, 15 bp, Homo sapiens
gagatattaggccag

SEQ ID NO: 474253 - DNA, 15 bp, Homo sapiens
agagatattaggcca

SEQ ID NO: 474254 - DNA, 15 bp, Homo sapiens
tagagatattaggcc

SEQ ID NO: 474255 - DNA, 15 bp, Homo sapiens
atagagatattaggc

SEQ ID NO: 474256 - DNA, 15 bp, Homo sapiens
aatagagatattagg

SEQ ID NO: 474257 - DNA, 15 bp, Homo sapiens
gaatagagatattag

SEQ ID NO: 474258 - DNA, 15 bp, Homo sapiens
agaatagagatatta

SEQ ID NO: 474259 - DNA, 15 bp, Homo sapiens
aagaatagagatatt

SEQ ID NO: 474260 - DNA, 15 bp, Homo sapiens
caagaatagagatat

SEQ ID NO: 474261 - DNA, 15 bp, Homo sapiens
ccaagaatagagata

SEQ ID NO: 474262 - DNA, 15 bp, Homo sapiens
tccaagaatagagat

SEQ ID NO: 474263 - DNA, 15 bp, Homo sapiens
ctccaagaatagaga

SEQ ID NO: 474264 - DNA, 15 bp, Homo sapiens
tctccaagaatagag

SEQ ID NO: 474265 - DNA, 15 bp, Homo sapiens
atctccaagaataga

SEQ ID NO: 474266 - DNA, 15 bp, Homo sapiens
tatctccaagaatag

SEQ ID NO: 474267 - DNA, 15 bp, Homo sapiens
ctatctccaagaata

SEQ ID NO: 474268 - DNA, 15 bp, Homo sapiens
tctatctccaagaat

SEQ ID NO: 474269 - DNA, 15 bp, Homo sapiens
atctatctccaagaa

SEQ ID NO: 474270 - DNA, 15 bp, Homo sapiens
aatctatctccaaga

SEQ ID NO: 474271 - DNA, 15 bp, Homo sapiens
aaatctatctccaag

SEQ ID NO: 474272 - DNA, 15 bp, Homo sapiens
taaatctatctccaa

SEQ ID NO: 474273 - DNA, 15 bp, Homo sapiens
ttaaatctatctcca

SEQ ID NO: 474274 - DNA, 15 bp, Homo sapiens
attaaatctatctcc

SEQ ID NO: 474275 - DNA, 15 bp, Homo sapiens
cattaaatctatctc

SEQ ID NO: 474276 - DNA, 15 bp, Homo sapiens
tcattaaatctatct

SEQ ID NO: 474277 - DNA, 15 bp, Homo sapiens
ctcattaaatctatc

SEQ ID NO: 474278 - DNA, 15 bp, Homo sapiens
gctcattaaatctat

SEQ ID NO: 474279 - DNA, 15 bp, Homo sapiens
agctcattaaatcta

SEQ ID NO: 474280 - DNA, 15 bp, Homo sapiens
aagctcattaaatct

SEQ ID NO: 474281 - DNA, 15 bp, Homo sapiens
aaagctcattaaatc

SEQ ID NO: 474282 - DNA, 15 bp, Homo sapiens
aaaagctcattaaat

SEQ ID NO: 474283 - DNA, 15 bp, Homo sapiens
aaaaagctcattaaa

SEQ ID NO: 474284 - DNA, 15 bp, Homo sapiens
gaaaaagctcattaa

SEQ ID NO: 474285 - DNA, 15 bp, Homo sapiens
agaaaaagctcatta

SEQ ID NO: 474286 - DNA, 15 bp, Homo sapiens
gagaaaaagctcatt

SEQ ID NO: 474287 - DNA, 15 bp, Homo sapiens
ggagaaaaagctcat

SEQ ID NO: 474288 - DNA, 15 bp, Homo sapiens
gggagaaaaagctca

SEQ ID NO: 474289 - DNA, 15 bp, Homo sapiens
agggagaaaaagctc

SEQ ID NO: 474290 - DNA, 15 bp, Homo sapiens
gagggagaaaaagct

SEQ ID NO: 474291 - DNA, 15 bp, Homo sapiens
agagggagaaaaagc

SEQ ID NO: 474292 - DNA, 15 bp, Homo sapiens
gagagggagaaaaag

SEQ ID NO: 474293 - DNA, 15 bp, Homo sapiens
agagagggagaaaaa

SEQ ID NO: 474294 - DNA, 15 bp, Homo sapiens
tagagagggagaaaa

SEQ ID NO: 474295 - DNA, 15 bp, Homo sapiens
atagagagggagaaa

SEQ ID NO: 474296 - DNA, 15 bp, Homo sapiens
aatagagagggagaa

SEQ ID NO: 474297 - DNA, 15 bp, Homo sapiens
gaatagagagggaga

SEQ ID NO: 474298 - DNA, 15 bp, Homo sapiens
tgaatagagagggag

SEQ ID NO: 474299 - DNA, 15 bp, Homo sapiens
gtgaatagagaggga

SEQ ID NO: 474300 - DNA, 15 bp, Homo sapiens
agtgaatagagaggg

SEQ ID NO: 474301 - DNA, 15 bp, Homo sapiens
aagtgaatagagagg

SEQ ID NO: 474302 - DNA, 15 bp, Homo sapiens
taagtgaatagagag

SEQ ID NO: 474303 - DNA, 15 bp, Homo sapiens
ataagtgaatagaga

SEQ ID NO: 474304 - DNA, 15 bp, Homo sapiens
aataagtgaatagag

SEQ ID NO: 474305 - DNA, 15 bp, Homo sapiens
gaataagtgaataga

SEQ ID NO: 474306 - DNA, 15 bp, Homo sapiens
ggaataagtgaatag

SEQ ID NO: 474307 - DNA, 15 bp, Homo sapiens
aggaataagtgaata

SEQ ID NO: 474308 - DNA, 15 bp, Homo sapiens
aaggaataagtgaat

SEQ ID NO: 474309 - DNA, 15 bp, Homo sapiens
caaggaataagtgaa

SEQ ID NO: 474310 - DNA, 15 bp, Homo sapiens
acaaggaataagtga

SEQ ID NO: 474311 - DNA, 15 bp, Homo sapiens
cacaaggaataagtg

SEQ ID NO: 474312 - DNA, 15 bp, Homo sapiens
gcacaaggaataagt

SEQ ID NO: 474313 - DNA, 15 bp, Homo sapiens
tgcacaaggaataag

SEQ ID NO: 474314 - DNA, 15 bp, Homo sapiens
atgcacaaggaataa

SEQ ID NO: 474315 - DNA, 15 bp, Homo sapiens
catgcacaaggaata

SEQ ID NO: 474316 - DNA, 15 bp, Homo sapiens
acatgcacaaggaat

SEQ ID NO: 474317 - DNA, 15 bp, Homo sapiens
aacatgcacaaggaa

SEQ ID NO: 474318 - DNA, 15 bp, Homo sapiens
taacatgcacaagga

SEQ ID NO: 474319 - DNA, 15 bp, Homo sapiens
ataacatgcacaagg

SEQ ID NO: 474320 - DNA, 15 bp, Homo sapiens
gataacatgcacaag

SEQ ID NO: 474321 - DNA, 15 bp, Homo sapiens
tgataacatgcacaa

SEQ ID NO: 474322 - DNA, 15 bp, Homo sapiens
ttgataacatgcaca

SEQ ID NO: 474323 - DNA, 15 bp, Homo sapiens
attgataacatgcac

SEQ ID NO: 474324 - DNA, 15 bp, Homo sapiens
tattgataacatgca

SEQ ID NO: 474325 - DNA, 15 bp, Homo sapiens
atattgataacatgc

SEQ ID NO: 474326 - DNA, 15 bp, Homo sapiens
aatattgataacatg

SEQ ID NO: 474327 - DNA, 15 bp, Homo sapiens
aaatattgataacat

SEQ ID NO: 474328 - DNA, 15 bp, Homo sapiens
aaaatattgataaca

SEQ ID NO: 474329 - DNA, 15 bp, Homo sapiens
caaaatattgataac

SEQ ID NO: 474330 - DNA, 15 bp, Homo sapiens
tcaaaatattgataa

SEQ ID NO: 474331 - DNA, 15 bp, Homo sapiens
ttcaaaatattgata

SEQ ID NO: 474332 - DNA, 15 bp, Homo sapiens
tttcaaaatattgat

SEQ ID NO: 474333 - DNA, 15 bp, Homo sapiens
gtttcaaaatattga

SEQ ID NO: 474334 - DNA, 15 bp, Homo sapiens
tgtttcaaaatattg

SEQ ID NO: 474335 - DNA, 15 bp, Homo sapiens
atgtttcaaaatatt

SEQ ID NO: 474336 - DNA, 15 bp, Homo sapiens
tatgtttcaaaatat

SEQ ID NO: 474337 - DNA, 15 bp, Homo sapiens
ttatgtttcaaaata

SEQ ID NO: 474338 - DNA, 15 bp, Homo sapiens
attatgtttcaaaat

SEQ ID NO: 474339 - DNA, 15 bp, Homo sapiens
cattatgtttcaaaa

SEQ ID NO: 474340 - DNA, 15 bp, Homo sapiens
acattatgtttcaaa

SEQ ID NO: 474341 - DNA, 15 bp, Homo sapiens
gacattatgtttcaa

SEQ ID NO: 474342 - DNA, 15 bp, Homo sapiens
tgacattatgtttca

SEQ ID NO: 474343 - DNA, 15 bp, Homo sapiens
atgacattatgtttc

SEQ ID NO: 474344 - DNA, 15 bp, Homo sapiens
catgacattatgttt

SEQ ID NO: 474345 - DNA, 15 bp, Homo sapiens
acatgacattatgtt

SEQ ID NO: 474346 - DNA, 15 bp, Homo sapiens
gacatgacattatgt

SEQ ID NO: 474347 - DNA, 15 bp, Homo sapiens
ggacatgacattatg

SEQ ID NO: 474348 - DNA, 15 bp, Homo sapiens
aggacatgacattat

SEQ ID NO: 474349 - DNA, 15 bp, Homo sapiens
aaggacatgacatta

SEQ ID NO: 474350 - DNA, 15 bp, Homo sapiens
aaaggacatgacatt

SEQ ID NO: 474351 - DNA, 15 bp, Homo sapiens
caaaggacatgacat

SEQ ID NO: 474352 - DNA, 15 bp, Homo sapiens
tcaaaggacatgaca

SEQ ID NO: 474353 - DNA, 15 bp, Homo sapiens
atcaaaggacatgac

SEQ ID NO: 474354 - DNA, 15 bp, Homo sapiens
gatcaaaggacatga

SEQ ID NO: 474355 - DNA, 15 bp, Homo sapiens
tgatcaaaggacatg

SEQ ID NO: 474356 - DNA, 15 bp, Homo sapiens
ctgatcaaaggacat

SEQ ID NO: 474357 - DNA, 15 bp, Homo sapiens
actgatcaaaggaca

SEQ ID NO: 474358 - DNA, 15 bp, Homo sapiens
aactgatcaaaggac

SEQ ID NO: 474359 - DNA, 15 bp, Homo sapiens
caactgatcaaagga

SEQ ID NO: 474360 - DNA, 15 bp, Homo sapiens
tcaactgatcaaagg

SEQ ID NO: 474361 - DNA, 15 bp, Homo sapiens
ttcaactgatcaaag

SEQ ID NO: 474362 - DNA, 15 bp, Homo sapiens
cttcaactgatcaaa

SEQ ID NO: 474363 - DNA, 15 bp, Homo sapiens
ccttcaactgatcaa

SEQ ID NO: 474364 - DNA, 15 bp, Homo sapiens
gccttcaactgatca

SEQ ID NO: 474365 - DNA, 15 bp, Homo sapiens
agccttcaactgatc

SEQ ID NO: 474366 - DNA, 15 bp, Homo sapiens
cagccttcaactgat

SEQ ID NO: 474367 - DNA, 15 bp, Homo sapiens
tcagccttcaactga

SEQ ID NO: 474368 - DNA, 15 bp, Homo sapiens
gtcagccttcaactg

SEQ ID NO: 474369 - DNA, 15 bp, Homo sapiens
tgtcagccttcaact

SEQ ID NO: 474370 - DNA, 15 bp, Homo sapiens
atgtcagccttcaac

SEQ ID NO: 474371 - DNA, 15 bp, Homo sapiens
aatgtcagccttcaa

SEQ ID NO: 474372 - DNA, 15 bp, Homo sapiens
caatgtcagccttca

SEQ ID NO: 474373 - DNA, 15 bp, Homo sapiens
tcaatgtcagccttc

SEQ ID NO: 474374 - DNA, 15 bp, Homo sapiens
ttcaatgtcagcctt

SEQ ID NO: 474375 - DNA, 15 bp, Homo sapiens
tttcaatgtcagcct

SEQ ID NO: 474376 - DNA, 15 bp, Homo sapiens
ttttcaatgtcagcc

SEQ ID NO: 474377 - DNA, 15 bp, Homo sapiens
cttttcaatgtcagc

SEQ ID NO: 474378 - DNA, 15 bp, Homo sapiens
ccttttcaatgtcag

SEQ ID NO: 474379 - DNA, 15 bp, Homo sapiens
gccttttcaatgtca

SEQ ID NO: 474380 - DNA, 15 bp, Homo sapiens
agccttttcaatgtc

SEQ ID NO: 474381 - DNA, 15 bp, Homo sapiens
aagccttttcaatgt

SEQ ID NO: 474382 - DNA, 15 bp, Homo sapiens
taagccttttcaatg

SEQ ID NO: 474383 - DNA, 15 bp, Homo sapiens
ataagccttttcaat

SEQ ID NO: 474384 - DNA, 15 bp, Homo sapiens
cataagccttttcaa

SEQ ID NO: 474385 - DNA, 15 bp, Homo sapiens
ccataagccttttca

SEQ ID NO: 474386 - DNA, 15 bp, Homo sapiens
cccataagccttttc

SEQ ID NO: 474387 - DNA, 15 bp, Homo sapiens
ccccataagcctttt

SEQ ID NO: 474388 - DNA, 15 bp, Homo sapiens
tccccataagccttt

SEQ ID NO: 474389 - DNA, 15 bp, Homo sapiens
atccccataagcctt

SEQ ID NO: 474390 - DNA, 15 bp, Homo sapiens
aatccccataagcct

SEQ ID NO: 474391 - DNA, 15 bp, Homo sapiens
caatccccataagcc

SEQ ID NO: 474392 - DNA, 15 bp, Homo sapiens
ccaatccccataagc

SEQ ID NO: 474393 - DNA, 15 bp, Homo sapiens
cccaatccccataag

SEQ ID NO: 474394 - DNA, 15 bp, Homo sapiens
acccaatccccataa

SEQ ID NO: 474395 - DNA, 15 bp, Homo sapiens
cacccaatccccata

SEQ ID NO: 474396 - DNA, 15 bp, Homo sapiens
acacccaatccccat

SEQ ID NO: 474397 - DNA, 15 bp, Homo sapiens
aacacccaatcccca

SEQ ID NO: 474398 - DNA, 15 bp, Homo sapiens
caacacccaatcccc

SEQ ID NO: 474399 - DNA, 15 bp, Homo sapiens
acaacacccaatccc

SEQ ID NO: 474400 - DNA, 15 bp, Homo sapiens
cacaacacccaatcc

SEQ ID NO: 474401 - DNA, 15 bp, Homo sapiens
ccacaacacccaatc

SEQ ID NO: 474402 - DNA, 15 bp, Homo sapiens
gccacaacacccaat

SEQ ID NO: 474403 - DNA, 15 bp, Homo sapiens
agccacaacacccaa

SEQ ID NO: 474404 - DNA, 15 bp, Homo sapiens
gagccacaacaccca

SEQ ID NO: 474405 - DNA, 15 bp, Homo sapiens
tgagccacaacaccc

SEQ ID NO: 474406 - DNA, 15 bp, Homo sapiens
gtgagccacaacacc

SEQ ID NO: 474407 - DNA, 15 bp, Homo sapiens
cgtgagccacaacac

SEQ ID NO: 474408 - DNA, 15 bp, Homo sapiens
gcgtgagccacaaca

SEQ ID NO: 474409 - DNA, 15 bp, Homo sapiens
ggcgtgagccacaac

SEQ ID NO: 474410 - DNA, 15 bp, Homo sapiens
aggcgtgagccacaa

SEQ ID NO: 474411 - DNA, 15 bp, Homo sapiens
tttacaggcgtgagc

SEQ ID NO: 474412 - DNA, 15 bp, Homo sapiens
atttacaggcgtgag

SEQ ID NO: 474413 - DNA, 15 bp, Homo sapiens
gatttacaggcgtga

SEQ ID NO: 474414 - DNA, 15 bp, Homo sapiens
ggatttacaggcgtg

SEQ ID NO: 474415 - DNA, 15 bp, Homo sapiens
gggatttacaggcgt

SEQ ID NO: 474416 - DNA, 15 bp, Homo sapiens
tgggatttacaggcg

SEQ ID NO: 474417 - DNA, 15 bp, Homo sapiens
ttgggatttacaggc

SEQ ID NO: 474418 - DNA, 15 bp, Homo sapiens
attgggatttacagg

SEQ ID NO: 474419 - DNA, 15 bp, Homo sapiens
cattgggatttacag

SEQ ID NO: 474420 - DNA, 15 bp, Homo sapiens
gcattgggatttaca

SEQ ID NO: 474421 - DNA, 15 bp, Homo sapiens
agcattgggatttac

SEQ ID NO: 474422 - DNA, 15 bp, Homo sapiens
aagcattgggattta

SEQ ID NO: 474423 - DNA, 15 bp, Homo sapiens
aaagcattgggattt

SEQ ID NO: 474424 - DNA, 15 bp, Homo sapiens
caaagcattgggatt

SEQ ID NO: 474425 - DNA, 15 bp, Homo sapiens
ccaaagcattgggat

SEQ ID NO: 474426 - DNA, 15 bp, Homo sapiens
cccaaagcattggga

SEQ ID NO: 474427 - DNA, 15 bp, Homo sapiens
tcccaaagcattggg

SEQ ID NO: 474428 - DNA, 15 bp, Homo sapiens
ctcccaaagcattgg

SEQ ID NO: 474429 - DNA, 15 bp, Homo sapiens
cctcccaaagcattg

SEQ ID NO: 474430 - DNA, 15 bp, Homo sapiens
gcctcccaaagcatt

SEQ ID NO: 474431 - DNA, 15 bp, Homo sapiens
tgcctcccaaagcat

SEQ ID NO: 474432 - DNA, 15 bp, Homo sapiens
ctgcctcccaaagca

SEQ ID NO: 474433 - DNA, 15 bp, Homo sapiens
tctgcctcccaaagc

SEQ ID NO: 474434 - DNA, 15 bp, Homo sapiens
ctctgcctcccaaag

SEQ ID NO: 474435 - DNA, 15 bp, Homo sapiens
actctgcctcccaaa

SEQ ID NO: 474436 - DNA, 15 bp, Homo sapiens
gactctgcctcccaa

SEQ ID NO: 474437 - DNA, 15 bp, Homo sapiens
cgactctgcctccca

SEQ ID NO: 474438 - DNA, 15 bp, Homo sapiens
ccgactctgcctccc

SEQ ID NO: 474439 - DNA, 15 bp, Homo sapiens
cccgactctgcctcc

SEQ ID NO: 474440 - DNA, 15 bp, Homo sapiens
tcccgactctgcctc

SEQ ID NO: 474441 - DNA, 15 bp, Homo sapiens
ctcccgactctgcct

SEQ ID NO: 474442 - DNA, 15 bp, Homo sapiens
cctcccgactctgcc

SEQ ID NO: 474443 - DNA, 15 bp, Homo sapiens
tcctcccgactctgc

SEQ ID NO: 474444 - DNA, 15 bp, Homo sapiens
atcctcccgactctg

SEQ ID NO: 474445 - DNA, 15 bp, Homo sapiens
gatcctcccgactct

SEQ ID NO: 474446 - DNA, 15 bp, Homo sapiens
tgatcctcccgactc

SEQ ID NO: 474447 - DNA, 15 bp, Homo sapiens
gtgatcctcccgact

SEQ ID NO: 474448 - DNA, 15 bp, Homo sapiens
agtgatcctcccgac

SEQ ID NO: 474449 - DNA, 15 bp, Homo sapiens
aagtgatcctcccga

SEQ ID NO: 474450 - DNA, 15 bp, Homo sapiens
caagtgatcctcccg

SEQ ID NO: 474451 - DNA, 15 bp, Homo sapiens
ttcaagtgatcctcc

SEQ ID NO: 474452 - DNA, 15 bp, Homo sapiens
gttcaagtgatcctc

SEQ ID NO: 474453 - DNA, 15 bp, Homo sapiens
ggttcaagtgatcct

SEQ ID NO: 474454 - DNA, 15 bp, Homo sapiens
gggttcaagtgatcc

SEQ ID NO: 474455 - DNA, 15 bp, Homo sapiens
tgggttcaagtgatc

SEQ ID NO: 474456 - DNA, 15 bp, Homo sapiens
ctgggttcaagtgat

SEQ ID NO: 474457 - DNA, 15 bp, Homo sapiens
cctgggttcaagtga

SEQ ID NO: 474458 - DNA, 15 bp, Homo sapiens
tcctgggttcaagtg

SEQ ID NO: 474459 - DNA, 15 bp, Homo sapiens
ctcctgggttcaagt

SEQ ID NO: 474460 - DNA, 15 bp, Homo sapiens
actcctgggttcaag

SEQ ID NO: 474461 - DNA, 15 bp, Homo sapiens
aactcctgggttcaa

SEQ ID NO: 474462 - DNA, 15 bp, Homo sapiens
aaactcctgggttca

SEQ ID NO: 474463 - DNA, 15 bp, Homo sapiens
caaactcctgggttc

SEQ ID NO: 474464 - DNA, 15 bp, Homo sapiens
tcaaactcctgggtt

SEQ ID NO: 474465 - DNA, 15 bp, Homo sapiens
ctcaaactcctgggt

SEQ ID NO: 474466 - DNA, 15 bp, Homo sapiens
ttgttgcccaggctg

SEQ ID NO: 474467 - DNA, 15 bp, Homo sapiens
tttgttgcccaggct

SEQ ID NO: 474468 - DNA, 15 bp, Homo sapiens
ctttgttgcccaggc

SEQ ID NO: 474469 - DNA, 15 bp, Homo sapiens
actttgttgcccagg

SEQ ID NO: 474470 - DNA, 15 bp, Homo sapiens
cactttgttgcccag

SEQ ID NO: 474471 - DNA, 15 bp, Homo sapiens
tcactttgttgccca

SEQ ID NO: 474472 - DNA, 15 bp, Homo sapiens
ctcactttgttgccc

SEQ ID NO: 474473 - DNA, 15 bp, Homo sapiens
tctcactttgttgcc

SEQ ID NO: 474474 - DNA, 15 bp, Homo sapiens
atctcactttgttgc

SEQ ID NO: 474475 - DNA, 15 bp, Homo sapiens
gatctcactttgttg

SEQ ID NO: 474476 - DNA, 15 bp, Homo sapiens
ggatctcactttgtt

SEQ ID NO: 474477 - DNA, 15 bp, Homo sapiens
gggatctcactttgt

SEQ ID NO: 474478 - DNA, 15 bp, Homo sapiens
tgggatctcactttg

SEQ ID NO: 474479 - DNA, 15 bp, Homo sapiens
atgggatctcacttt

SEQ ID NO: 474480 - DNA, 15 bp, Homo sapiens
gatgggatctcactt

SEQ ID NO: 474481 - DNA, 15 bp, Homo sapiens
ggatgggatctcact

SEQ ID NO: 474482 - DNA, 15 bp, Homo sapiens
gggatgggatctcac

SEQ ID NO: 474483 - DNA, 15 bp, Homo sapiens
agggatgggatctca

SEQ ID NO: 474484 - DNA, 15 bp, Homo sapiens
tagggatgggatctc

SEQ ID NO: 474485 - DNA, 15 bp, Homo sapiens
gtagggatgggatct

SEQ ID NO: 474486 - DNA, 15 bp, Homo sapiens
tgtagggatgggatc

SEQ ID NO: 474487 - DNA, 15 bp, Homo sapiens
ttgtagggatgggat

SEQ ID NO: 474488 - DNA, 15 bp, Homo sapiens
tttgtagggatggga

SEQ ID NO: 474489 - DNA, 15 bp, Homo sapiens
ttttgtagggatggg

SEQ ID NO: 474490 - DNA, 15 bp, Homo sapiens
tttttgtagggatgg

SEQ ID NO: 474491 - DNA, 15 bp, Homo sapiens
atttttgtagggatg

SEQ ID NO: 474492 - DNA, 15 bp, Homo sapiens
aatttttgtagggat

SEQ ID NO: 474493 - DNA, 15 bp, Homo sapiens
aaatttttgtaggga

SEQ ID NO: 474494 - DNA, 15 bp, Homo sapiens
taaatttttgtaggg

SEQ ID NO: 474495 - DNA, 15 bp, Homo sapiens
ttaaatttttgtagg

SEQ ID NO: 474496 - DNA, 15 bp, Homo sapiens
tttaaatttttgtag

SEQ ID NO: 474497 - DNA, 15 bp, Homo sapiens
ttttaaatttttgta

SEQ ID NO: 474498 - DNA, 15 bp, Homo sapiens
tttttaaatttttgt

SEQ ID NO: 474499 - DNA, 15 bp, Homo sapiens
ttttttaaatttttg

SEQ ID NO: 474500 - DNA, 15 bp, Homo sapiens
gttttttaaattttt

SEQ ID NO: 474501 - DNA, 15 bp, Homo sapiens
agttttttaaatttt

SEQ ID NO: 474502 - DNA, 15 bp, Homo sapiens
tagttttttaaattt

SEQ ID NO: 474503 - DNA, 15 bp, Homo sapiens
ctagttttttaaatt

SEQ ID NO: 474504 - DNA, 15 bp, Homo sapiens
tctagttttttaaat

SEQ ID NO: 474505 - DNA, 15 bp, Homo sapiens
gtctagttttttaaa

SEQ ID NO: 474506 - DNA, 15 bp, Homo sapiens
tgtctagttttttaa

SEQ ID NO: 474507 - DNA, 15 bp, Homo sapiens
atgtctagtttttta

SEQ ID NO: 474508 - DNA, 15 bp, Homo sapiens
catgtctagtttttt

SEQ ID NO: 474509 - DNA, 15 bp, Homo sapiens
acatgtctagttttt

SEQ ID NO: 474510 - DNA, 15 bp, Homo sapiens
cacatgtctagtttt

SEQ ID NO: 474511 - DNA, 15 bp, Homo sapiens
gcacatgtctagttt

SEQ ID NO: 474512 - DNA, 15 bp, Homo sapiens
ggcacatgtctagtt

SEQ ID NO: 474513 - DNA, 15 bp, Homo sapiens
tggcacatgtctagt

SEQ ID NO: 474514 - DNA, 15 bp, Homo sapiens
atggcacatgtctag

SEQ ID NO: 474515 - DNA, 15 bp, Homo sapiens
aatggcacatgtcta

SEQ ID NO: 474516 - DNA, 15 bp, Homo sapiens
taatggcacatgtct

SEQ ID NO: 474517 - DNA, 15 bp, Homo sapiens
gtaatggcacatgtc

SEQ ID NO: 474518 - DNA, 15 bp, Homo sapiens
tgtaatggcacatgt

SEQ ID NO: 474519 - DNA, 15 bp, Homo sapiens
gtgtaatggcacatg

SEQ ID NO: 474520 - DNA, 15 bp, Homo sapiens
agtgtaatggcacat

SEQ ID NO: 474521 - DNA, 15 bp, Homo sapiens
aagtgtaatggcaca

SEQ ID NO: 474522 - DNA, 15 bp, Homo sapiens
gaagtgtaatggcac

SEQ ID NO: 474523 - DNA, 15 bp, Homo sapiens
tgaagtgtaatggca

SEQ ID NO: 474524 - DNA, 15 bp, Homo sapiens
ctgaagtgtaatggc

SEQ ID NO: 474525 - DNA, 15 bp, Homo sapiens
gctgaagtgtaatgg

SEQ ID NO: 474526 - DNA, 15 bp, Homo sapiens
ggctgaagtgtaatg

SEQ ID NO: 474527 - DNA, 15 bp, Homo sapiens
aggctgaagtgtaat

SEQ ID NO: 474528 - DNA, 15 bp, Homo sapiens
caggctgaagtgtaa

SEQ ID NO: 474529 - DNA, 15 bp, Homo sapiens
ccaggctgaagtgta

SEQ ID NO: 474530 - DNA, 15 bp, Homo sapiens
cccaggctgaagtgt

SEQ ID NO: 474531 - DNA, 15 bp, Homo sapiens
gttttttgagatgga

SEQ ID NO: 474532 - DNA, 15 bp, Homo sapiens
agttttttgagatgg

SEQ ID NO: 474533 - DNA, 15 bp, Homo sapiens
tagttttttgagatg

SEQ ID NO: 474534 - DNA, 15 bp, Homo sapiens
ttagttttttgagat

SEQ ID NO: 474535 - DNA, 15 bp, Homo sapiens
tttagttttttgaga

SEQ ID NO: 474536 - DNA, 15 bp, Homo sapiens
gtttagttttttgag

SEQ ID NO: 474537 - DNA, 15 bp, Homo sapiens
agtttagttttttga

SEQ ID NO: 474538 - DNA, 15 bp, Homo sapiens
tagtttagttttttg

SEQ ID NO: 474539 - DNA, 15 bp, Homo sapiens
ttagtttagtttttt

SEQ ID NO: 474540 - DNA, 15 bp, Homo sapiens
gtttagtttagtttt

SEQ ID NO: 474541 - DNA, 15 bp, Homo sapiens
agtttagtttagttt

SEQ ID NO: 474542 - DNA, 15 bp, Homo sapiens
tagtttagtttagtt

SEQ ID NO: 474543 - DNA, 15 bp, Homo sapiens
ttagtttagtttagt

SEQ ID NO: 474544 - DNA, 15 bp, Homo sapiens
tttagtttagtttag

SEQ ID NO: 474545 - DNA, 15 bp, Homo sapiens
gtttagtttagttta

SEQ ID NO: 474546 - DNA, 15 bp, Homo sapiens
tgtttagtttagttt

SEQ ID NO: 474547 - DNA, 15 bp, Homo sapiens
ctgtttagtttagtt

SEQ ID NO: 474548 - DNA, 15 bp, Homo sapiens
cctgtttagtttagt

SEQ ID NO: 474549 - DNA, 15 bp, Homo sapiens
gcctgtttagtttag

SEQ ID NO: 474550 - DNA, 15 bp, Homo sapiens
tgcctgtttagttta

SEQ ID NO: 474551 - DNA, 15 bp, Homo sapiens
atgcctgtttagttt

SEQ ID NO: 474552 - DNA, 15 bp, Homo sapiens
catgcctgtttagtt

SEQ ID NO: 474553 - DNA, 15 bp, Homo sapiens
ccatgcctgtttagt

SEQ ID NO: 474554 - DNA, 15 bp, Homo sapiens
accatgcctgtttag

SEQ ID NO: 474555 - DNA, 15 bp, Homo sapiens
caccatgcctgttta

SEQ ID NO: 474556 - DNA, 15 bp, Homo sapiens
ccaccatgcctgttt

SEQ ID NO: 474557 - DNA, 15 bp, Homo sapiens
gccaccatgcctgtt

SEQ ID NO: 474558 - DNA, 15 bp, Homo sapiens
tgccaccatgcctgt

SEQ ID NO: 474559 - DNA, 15 bp, Homo sapiens
gtgccaccatgcctg

SEQ ID NO: 474560 - DNA, 15 bp, Homo sapiens
tgtgccaccatgcct

SEQ ID NO: 474561 - DNA, 15 bp, Homo sapiens
gtgtgccaccatgcc

SEQ ID NO: 474562 - DNA, 15 bp, Homo sapiens
tgtgtgccaccatgc

SEQ ID NO: 474563 - DNA, 15 bp, Homo sapiens
gtgtgtgccaccatg

SEQ ID NO: 474564 - DNA, 15 bp, Homo sapiens
taggtgtgtgccacc

SEQ ID NO: 474565 - DNA, 15 bp, Homo sapiens
ataggtgtgtgccac

SEQ ID NO: 474566 - DNA, 15 bp, Homo sapiens
tataggtgtgtgcca

SEQ ID NO: 474567 - DNA, 15 bp, Homo sapiens
ctataggtgtgtgcc

SEQ ID NO: 474568 - DNA, 15 bp, Homo sapiens
actataggtgtgtgc

SEQ ID NO: 474569 - DNA, 15 bp, Homo sapiens
aactataggtgtgtg

SEQ ID NO: 474570 - DNA, 15 bp, Homo sapiens
gaactataggtgtgt

SEQ ID NO: 474571 - DNA, 15 bp, Homo sapiens
agaactataggtgtg

SEQ ID NO: 474572 - DNA, 15 bp, Homo sapiens
tagaactataggtgt

SEQ ID NO: 474573 - DNA, 15 bp, Homo sapiens
ctagaactataggtg

SEQ ID NO: 474574 - DNA, 15 bp, Homo sapiens
gctagaactataggt

SEQ ID NO: 474575 - DNA, 15 bp, Homo sapiens
agctagaactatagg

SEQ ID NO: 474576 - DNA, 15 bp, Homo sapiens
tagctagaactatag

SEQ ID NO: 474577 - DNA, 15 bp, Homo sapiens
gtagctagaactata

SEQ ID NO: 474578 - DNA, 15 bp, Homo sapiens
agtagctagaactat

SEQ ID NO: 474579 - DNA, 15 bp, Homo sapiens
gagtagctagaacta

SEQ ID NO: 474580 - DNA, 15 bp, Homo sapiens
tgagtagctagaact

SEQ ID NO: 474581 - DNA, 15 bp, Homo sapiens
ctgagtagctagaac

SEQ ID NO: 474582 - DNA, 15 bp, Homo sapiens
cctgagtagctagaa

SEQ ID NO: 474583 - DNA, 15 bp, Homo sapiens
tcctgagtagctaga

SEQ ID NO: 474584 - DNA, 15 bp, Homo sapiens
ttcctgagtagctag

SEQ ID NO: 474585 - DNA, 15 bp, Homo sapiens
cttcctgagtagcta

SEQ ID NO: 474586 - DNA, 15 bp, Homo sapiens
gcttcctgagtagct

SEQ ID NO: 474587 - DNA, 15 bp, Homo sapiens
agcttcctgagtagc

SEQ ID NO: 474588 - DNA, 15 bp, Homo sapiens
cagcttcctgagtag

SEQ ID NO: 474589 - DNA, 15 bp, Homo sapiens
tcagcttcctgagta

SEQ ID NO: 474590 - DNA, 15 bp, Homo sapiens
ctcagcttcctgagt

SEQ ID NO: 474591 - DNA, 15 bp, Homo sapiens
cctcagcttcctgag

SEQ ID NO: 474592 - DNA, 15 bp, Homo sapiens
acctcagcttcctga

SEQ ID NO: 474593 - DNA, 15 bp, Homo sapiens
tacctcagcttcctg

SEQ ID NO: 474594 - DNA, 15 bp, Homo sapiens
ctacctcagcttcct

SEQ ID NO: 474595 - DNA, 15 bp, Homo sapiens
cctacctcagcttcc

SEQ ID NO: 474596 - DNA, 15 bp, Homo sapiens
tcctacctcagcttc

SEQ ID NO: 474597 - DNA, 15 bp, Homo sapiens
ctcctacctcagctt

SEQ ID NO: 474598 - DNA, 15 bp, Homo sapiens
cctcctacctcagct

SEQ ID NO: 474599 - DNA, 15 bp, Homo sapiens
gatcctcctacctca

SEQ ID NO: 474600 - DNA, 15 bp, Homo sapiens
tgatcctcctacctc

SEQ ID NO: 474601 - DNA, 15 bp, Homo sapiens
gtgatcctcctacct

SEQ ID NO: 474602 - DNA, 15 bp, Homo sapiens
agtgatcctcctacc

SEQ ID NO: 474603 - DNA, 15 bp, Homo sapiens
gagtgatcctcctac

SEQ ID NO: 474604 - DNA, 15 bp, Homo sapiens
tgagtgatcctccta

SEQ ID NO: 474605 - DNA, 15 bp, Homo sapiens
atgagtgatcctcct

SEQ ID NO: 474606 - DNA, 15 bp, Homo sapiens
catgagtgatcctcc

SEQ ID NO: 474607 - DNA, 15 bp, Homo sapiens
acatgagtgatcctc

SEQ ID NO: 474608 - DNA, 15 bp, Homo sapiens
gacatgagtgatcct

SEQ ID NO: 474609 - DNA, 15 bp, Homo sapiens
ggacatgagtgatcc

SEQ ID NO: 474610 - DNA, 15 bp, Homo sapiens
tggacatgagtgatc

SEQ ID NO: 474611 - DNA, 15 bp, Homo sapiens
ctggacatgagtgat

SEQ ID NO: 474612 - DNA, 15 bp, Homo sapiens
cctggacatgagtga

SEQ ID NO: 474613 - DNA, 15 bp, Homo sapiens
tcctggacatgagtg

SEQ ID NO: 474614 - DNA, 15 bp, Homo sapiens
ctcctggacatgagt

SEQ ID NO: 474615 - DNA, 15 bp, Homo sapiens
actcctggacatgag

SEQ ID NO: 474616 - DNA, 15 bp, Homo sapiens
aactcctggacatga

SEQ ID NO: 474617 - DNA, 15 bp, Homo sapiens
caactcctggacatg

SEQ ID NO: 474618 - DNA, 15 bp, Homo sapiens
ccaactcctggacat

SEQ ID NO: 474619 - DNA, 15 bp, Homo sapiens
tccaactcctggaca

SEQ ID NO: 474620 - DNA, 15 bp, Homo sapiens
ctccaactcctggac

SEQ ID NO: 474621 - DNA, 15 bp, Homo sapiens
cctccaactcctgga

SEQ ID NO: 474622 - DNA, 15 bp, Homo sapiens
tcctccaactcctgg

SEQ ID NO: 474623 - DNA, 15 bp, Homo sapiens
ctcctccaactcctg

SEQ ID NO: 474624 - DNA, 15 bp, Homo sapiens
cctcctccaactcct

SEQ ID NO: 474625 - DNA, 15 bp, Homo sapiens
gcctcctccaactcc

SEQ ID NO: 474626 - DNA, 15 bp, Homo sapiens
tgcctcctccaactc

SEQ ID NO: 474627 - DNA, 15 bp, Homo sapiens
ctgcctcctccaact

SEQ ID NO: 474628 - DNA, 15 bp, Homo sapiens
actgcctcctccaac

SEQ ID NO: 474629 - DNA, 15 bp, Homo sapiens
cactgcctcctccaa

SEQ ID NO: 474630 - DNA, 15 bp, Homo sapiens
tcactgcctcctcca

SEQ ID NO: 474631 - DNA, 15 bp, Homo sapiens
ctcactgcctcctcc

SEQ ID NO: 474632 - DNA, 15 bp, Homo sapiens
gctcactgcctcctc

SEQ ID NO: 474633 - DNA, 15 bp, Homo sapiens
agctcactgcctcct

SEQ ID NO: 474634 - DNA, 15 bp, Homo sapiens
tagctcactgcctcc

SEQ ID NO: 474635 - DNA, 15 bp, Homo sapiens
atagctcactgcctc

SEQ ID NO: 474636 - DNA, 15 bp, Homo sapiens
catagctcactgcct

SEQ ID NO: 474637 - DNA, 15 bp, Homo sapiens
tcatagctcactgcc

SEQ ID NO: 474638 - DNA, 15 bp, Homo sapiens
atcatagctcactgc

SEQ ID NO: 474639 - DNA, 15 bp, Homo sapiens
gatcatagctcactg

SEQ ID NO: 474640 - DNA, 15 bp, Homo sapiens
tgatcatagctcact

SEQ ID NO: 474641 - DNA, 15 bp, Homo sapiens
atgatcatagctcac

SEQ ID NO: 474642 - DNA, 15 bp, Homo sapiens
catgatcatagctca

SEQ ID NO: 474643 - DNA, 15 bp, Homo sapiens
gcatgatcatagctc

SEQ ID NO: 474644 - DNA, 15 bp, Homo sapiens
ggcatgatcatagct

SEQ ID NO: 474645 - DNA, 15 bp, Homo sapiens
tggcatgatcatagc

SEQ ID NO: 474646 - DNA, 15 bp, Homo sapiens
atggcatgatcatag

SEQ ID NO: 474647 - DNA, 15 bp, Homo sapiens
aatggcatgatcata

SEQ ID NO: 474648 - DNA, 15 bp, Homo sapiens
cagtgcaatggcatg

SEQ ID NO: 474649 - DNA, 15 bp, Homo sapiens
gcagtgcaatggcat

SEQ ID NO: 474650 - DNA, 15 bp, Homo sapiens
tgcagtgcaatggca

SEQ ID NO: 474651 - DNA, 15 bp, Homo sapiens
gtgcagtgcaatggc

SEQ ID NO: 474652 - DNA, 15 bp, Homo sapiens
agtgcagtgcaatgg

SEQ ID NO: 474653 - DNA, 15 bp, Homo sapiens
tagtgcagtgcaatg

SEQ ID NO: 474654 - DNA, 15 bp, Homo sapiens
ctagtgcagtgcaat

SEQ ID NO: 474655 - DNA, 15 bp, Homo sapiens
cctagtgcagtgcaa

SEQ ID NO: 474656 - DNA, 15 bp, Homo sapiens
gcctagtgcagtgca

SEQ ID NO: 474657 - DNA, 15 bp, Homo sapiens
ggcctagtgcagtgc

SEQ ID NO: 474658 - DNA, 15 bp, Homo sapiens
tggcctagtgcagtg

SEQ ID NO: 474659 - DNA, 15 bp, Homo sapiens
gtggcctagtgcagt

SEQ ID NO: 474660 - DNA, 15 bp, Homo sapiens
tgtggcctagtgcag

SEQ ID NO: 474661 - DNA, 15 bp, Homo sapiens
ctgtggcctagtgca

SEQ ID NO: 474662 - DNA, 15 bp, Homo sapiens
tctgtggcctagtgc

SEQ ID NO: 474663 - DNA, 15 bp, Homo sapiens
ctctgtggcctagtg

SEQ ID NO: 474664 - DNA, 15 bp, Homo sapiens
actctgtggcctagt

SEQ ID NO: 474665 - DNA, 15 bp, Homo sapiens
cactctgtggcctag

SEQ ID NO: 474666 - DNA, 15 bp, Homo sapiens
ccactctgtggccta

SEQ ID NO: 474667 - DNA, 15 bp, Homo sapiens
cccactctgtggcct

SEQ ID NO: 474668 - DNA, 15 bp, Homo sapiens
tcccactctgtggcc

SEQ ID NO: 474669 - DNA, 15 bp, Homo sapiens
gtcccactctgtggc

SEQ ID NO: 474670 - DNA, 15 bp, Homo sapiens
ggtcccactctgtgg

SEQ ID NO: 474671 - DNA, 15 bp, Homo sapiens
gggtcccactctgtg

SEQ ID NO: 474672 - DNA, 15 bp, Homo sapiens
agggtcccactctgt

SEQ ID NO: 474673 - DNA, 15 bp, Homo sapiens
cagggtcccactctg

SEQ ID NO: 474674 - DNA, 15 bp, Homo sapiens
acagggtcccactct

SEQ ID NO: 474675 - DNA, 15 bp, Homo sapiens
gacagggtcccactc

SEQ ID NO: 474676 - DNA, 15 bp, Homo sapiens
agacagggtcccact

SEQ ID NO: 474677 - DNA, 15 bp, Homo sapiens
gagacagggtcccac

SEQ ID NO: 474678 - DNA, 15 bp, Homo sapiens
tgagacagggtccca

SEQ ID NO: 474679 - DNA, 15 bp, Homo sapiens
ttgagacagggtccc

SEQ ID NO: 474680 - DNA, 15 bp, Homo sapiens
tttgagacagggtcc

SEQ ID NO: 474681 - DNA, 15 bp, Homo sapiens
ctttttttttttttg

SEQ ID NO: 474682 - DNA, 15 bp, Homo sapiens
ttctttctttttttt

SEQ ID NO: 474683 - DNA, 15 bp, Homo sapiens
tttctttcttttttt

SEQ ID NO: 474684 - DNA, 15 bp, Homo sapiens
ctttctttctttttt

SEQ ID NO: 474685 - DNA, 15 bp, Homo sapiens
tctttctttcttttt

SEQ ID NO: 474686 - DNA, 15 bp, Homo sapiens
ttctttctttctttt

SEQ ID NO: 474687 - DNA, 15 bp, Homo sapiens
tttctttctttcttt

SEQ ID NO: 474688 - DNA, 15 bp, Homo sapiens
ttttctttctttctt

SEQ ID NO: 474689 - DNA, 15 bp, Homo sapiens
cttttctttctttct

SEQ ID NO: 474690 - DNA, 15 bp, Homo sapiens
tcttttctttctttc

SEQ ID NO: 474691 - DNA, 15 bp, Homo sapiens
ttcttttctttcttt

SEQ ID NO: 474692 - DNA, 15 bp, Homo sapiens
tttcttttctttctt

SEQ ID NO: 474693 - DNA, 15 bp, Homo sapiens
ctttcttttctttct

SEQ ID NO: 474694 - DNA, 15 bp, Homo sapiens
cctttcttttctttc

SEQ ID NO: 474695 - DNA, 15 bp, Homo sapiens
ccctttcttttcttt

SEQ ID NO: 474696 - DNA, 15 bp, Homo sapiens
gccctttcttttctt

SEQ ID NO: 474697 - DNA, 15 bp, Homo sapiens
agccctttcttttct

SEQ ID NO: 474698 - DNA, 15 bp, Homo sapiens
gagccctttcttttc

SEQ ID NO: 474699 - DNA, 15 bp, Homo sapiens
tgagccctttctttt

SEQ ID NO: 474700 - DNA, 15 bp, Homo sapiens
atgagccctttcttt

SEQ ID NO: 474701 - DNA, 15 bp, Homo sapiens
catgagccctttctt

SEQ ID NO: 474702 - DNA, 15 bp, Homo sapiens
acatgagccctttct

SEQ ID NO: 474703 - DNA, 15 bp, Homo sapiens
tacatgagccctttc

SEQ ID NO: 474704 - DNA, 15 bp, Homo sapiens
ctacatgagcccttt

SEQ ID NO: 474705 - DNA, 15 bp, Homo sapiens
actacatgagccctt

SEQ ID NO: 474706 - DNA, 15 bp, Homo sapiens
aactacatgagccct

SEQ ID NO: 474707 - DNA, 15 bp, Homo sapiens
gaactacatgagccc

SEQ ID NO: 474708 - DNA, 15 bp, Homo sapiens
tgaactacatgagcc

SEQ ID NO: 474709 - DNA, 15 bp, Homo sapiens
ttgaactacatgagc

SEQ ID NO: 474710 - DNA, 15 bp, Homo sapiens
cttgaactacatgag

SEQ ID NO: 474711 - DNA, 15 bp, Homo sapiens
gcttgaactacatga

SEQ ID NO: 474712 - DNA, 15 bp, Homo sapiens
ggcttgaactacatg

SEQ ID NO: 474713 - DNA, 15 bp, Homo sapiens
gggcttgaactacat

SEQ ID NO: 474714 - DNA, 15 bp, Homo sapiens
agggcttgaactaca

SEQ ID NO: 474715 - DNA, 15 bp, Homo sapiens
aagggcttgaactac

SEQ ID NO: 474716 - DNA, 15 bp, Homo sapiens
gaagggcttgaacta

SEQ ID NO: 474717 - DNA, 15 bp, Homo sapiens
agaagggcttgaact

SEQ ID NO: 474718 - DNA, 15 bp, Homo sapiens
gagaagggcttgaac

SEQ ID NO: 474719 - DNA, 15 bp, Homo sapiens
agagaagggcttgaa

SEQ ID NO: 474720 - DNA, 15 bp, Homo sapiens
aagagaagggcttga

SEQ ID NO: 474721 - DNA, 15 bp, Homo sapiens
gaagagaagggcttg

SEQ ID NO: 474722 - DNA, 15 bp, Homo sapiens
tgaagagaagggctt

SEQ ID NO: 474723 - DNA, 15 bp, Homo sapiens
atgaagagaagggct

SEQ ID NO: 474724 - DNA, 15 bp, Homo sapiens
catgaagagaagggc

SEQ ID NO: 474725 - DNA, 15 bp, Homo sapiens
gcatgaagagaaggg

SEQ ID NO: 474726 - DNA, 15 bp, Homo sapiens
tgcatgaagagaagg

SEQ ID NO: 474727 - DNA, 15 bp, Homo sapiens
ttgcatgaagagaag

SEQ ID NO: 474728 - DNA, 15 bp, Homo sapiens
cttgcatgaagagaa

SEQ ID NO: 474729 - DNA, 15 bp, Homo sapiens
ccttgcatgaagaga

SEQ ID NO: 474730 - DNA, 15 bp, Homo sapiens
cccttgcatgaagag

SEQ ID NO: 474731 - DNA, 15 bp, Homo sapiens
ccccttgcatgaaga

SEQ ID NO: 474732 - DNA, 15 bp, Homo sapiens
tccccttgcatgaag

SEQ ID NO: 474733 - DNA, 15 bp, Homo sapiens
atccccttgcatgaa

SEQ ID NO: 474734 - DNA, 15 bp, Homo sapiens
catccccttgcatga

SEQ ID NO: 474735 - DNA, 15 bp, Homo sapiens
gcatccccttgcatg

SEQ ID NO: 474736 - DNA, 15 bp, Homo sapiens
agcatccccttgcat

SEQ ID NO: 474737 - DNA, 15 bp, Homo sapiens
tagcatccccttgca

SEQ ID NO: 474738 - DNA, 15 bp, Homo sapiens
ttagcatccccttgc

SEQ ID NO: 474739 - DNA, 15 bp, Homo sapiens
cttagcatccccttg

SEQ ID NO: 474740 - DNA, 15 bp, Homo sapiens
ccttagcatcccctt

SEQ ID NO: 474741 - DNA, 15 bp, Homo sapiens
gccttagcatcccct

SEQ ID NO: 474742 - DNA, 15 bp, Homo sapiens
ggccttagcatcccc

SEQ ID NO: 474743 - DNA, 15 bp, Homo sapiens
gggccttagcatccc

SEQ ID NO: 474744 - DNA, 15 bp, Homo sapiens
tgggccttagcatcc

SEQ ID NO: 474745 - DNA, 15 bp, Homo sapiens
atgggccttagcatc

SEQ ID NO: 474746 - DNA, 15 bp, Homo sapiens
catgggccttagcat

SEQ ID NO: 474747 - DNA, 15 bp, Homo sapiens
tcatgggccttagca

SEQ ID NO: 474748 - DNA, 15 bp, Homo sapiens
atcatgggccttagc

SEQ ID NO: 474749 - DNA, 15 bp, Homo sapiens
catcatgggccttag

SEQ ID NO: 474750 - DNA, 15 bp, Homo sapiens
ccatcatgggcctta

SEQ ID NO: 474751 - DNA, 15 bp, Homo sapiens
accatcatgggcctt

SEQ ID NO: 474752 - DNA, 15 bp, Homo sapiens
caccatcatgggcct

SEQ ID NO: 474753 - DNA, 15 bp, Homo sapiens
tcaccatcatgggcc

SEQ ID NO: 474754 - DNA, 15 bp, Homo sapiens
ttcaccatcatgggc

SEQ ID NO: 474755 - DNA, 15 bp, Homo sapiens
cttcaccatcatggg

SEQ ID NO: 474756 - DNA, 15 bp, Homo sapiens
ccttcaccatcatgg

SEQ ID NO: 474757 - DNA, 15 bp, Homo sapiens
cccttcaccatcatg

SEQ ID NO: 474758 - DNA, 15 bp, Homo sapiens
gcccttcaccatcat

SEQ ID NO: 474759 - DNA, 15 bp, Homo sapiens
ggcccttcaccatca

SEQ ID NO: 474760 - DNA, 15 bp, Homo sapiens
aggcccttcaccatc

SEQ ID NO: 474761 - DNA, 15 bp, Homo sapiens
caggcccttcaccat

SEQ ID NO: 474762 - DNA, 15 bp, Homo sapiens
ccaggcccttcacca

SEQ ID NO: 474763 - DNA, 15 bp, Homo sapiens
gccaggcccttcacc

SEQ ID NO: 474764 - DNA, 15 bp, Homo sapiens
tgccaggcccttcac

SEQ ID NO: 474765 - DNA, 15 bp, Homo sapiens
ttgccaggcccttca

SEQ ID NO: 474766 - DNA, 15 bp, Homo sapiens
tttgccaggcccttc

SEQ ID NO: 474767 - DNA, 15 bp, Homo sapiens
ctttgccaggccctt

SEQ ID NO: 474768 - DNA, 15 bp, Homo sapiens
gctttgccaggccct

SEQ ID NO: 474769 - DNA, 15 bp, Homo sapiens
agctttgccaggccc

SEQ ID NO: 474770 - DNA, 15 bp, Homo sapiens
aagctttgccaggcc

SEQ ID NO: 474771 - DNA, 15 bp, Homo sapiens
caagctttgccaggc

SEQ ID NO: 474772 - DNA, 15 bp, Homo sapiens
gcaagctttgccagg

SEQ ID NO: 474773 - DNA, 15 bp, Homo sapiens
tgcaagctttgccag

SEQ ID NO: 474774 - DNA, 15 bp, Homo sapiens
gtgcaagctttgcca

SEQ ID NO: 474775 - DNA, 15 bp, Homo sapiens
tgtgcaagctttgcc

SEQ ID NO: 474776 - DNA, 15 bp, Homo sapiens
ctgtgcaagctttgc

SEQ ID NO: 474777 - DNA, 15 bp, Homo sapiens
tctgtgcaagctttg

SEQ ID NO: 474778 - DNA, 15 bp, Homo sapiens
atctgtgcaagcttt

SEQ ID NO: 474779 - DNA, 15 bp, Homo sapiens
tatctgtgcaagctt

SEQ ID NO: 474780 - DNA, 15 bp, Homo sapiens
ctatctgtgcaagct

SEQ ID NO: 474781 - DNA, 15 bp, Homo sapiens
actatctgtgcaagc

SEQ ID NO: 474782 - DNA, 15 bp, Homo sapiens
cactatctgtgcaag

SEQ ID NO: 474783 - DNA, 15 bp, Homo sapiens
acactatctgtgcaa

SEQ ID NO: 474784 - DNA, 15 bp, Homo sapiens
cacactatctgtgca

SEQ ID NO: 474785 - DNA, 15 bp, Homo sapiens
acacactatctgtgc

SEQ ID NO: 474786 - DNA, 15 bp, Homo sapiens
cacacactatctgtg

SEQ ID NO: 474787 - DNA, 15 bp, Homo sapiens
tcacacactatctgt

SEQ ID NO: 474788 - DNA, 15 bp, Homo sapiens
gtcacacactatctg

SEQ ID NO: 474789 - DNA, 15 bp, Homo sapiens
tgtcacacactatct

SEQ ID NO: 474790 - DNA, 15 bp, Homo sapiens
ctgtcacacactatc

SEQ ID NO: 474791 - DNA, 15 bp, Homo sapiens
tctgtcacacactat

SEQ ID NO: 474792 - DNA, 15 bp, Homo sapiens
ctctgtcacacacta

SEQ ID NO: 474793 - DNA, 15 bp, Homo sapiens
gctctgtcacacact

SEQ ID NO: 474794 - DNA, 15 bp, Homo sapiens
agctctgtcacacac

SEQ ID NO: 474795 - DNA, 15 bp, Homo sapiens
cagctctgtcacaca

SEQ ID NO: 474796 - DNA, 15 bp, Homo sapiens
ccagctctgtcacac

SEQ ID NO: 474797 - DNA, 15 bp, Homo sapiens
gccagctctgtcaca

SEQ ID NO: 474798 - DNA, 15 bp, Homo sapiens
agccagctctgtcac

SEQ ID NO: 474799 - DNA, 15 bp, Homo sapiens
gagccagctctgtca

SEQ ID NO: 474800 - DNA, 15 bp, Homo sapiens
tgagccagctctgtc

SEQ ID NO: 474801 - DNA, 15 bp, Homo sapiens
ttgagccagctctgt

SEQ ID NO: 474802 - DNA, 15 bp, Homo sapiens
tttgagccagctctg

SEQ ID NO: 474803 - DNA, 15 bp, Homo sapiens
gtttgagccagctct

SEQ ID NO: 474804 - DNA, 15 bp, Homo sapiens
ggtttgagccagctc

SEQ ID NO: 474805 - DNA, 15 bp, Homo sapiens
gggtttgagccagct

SEQ ID NO: 474806 - DNA, 15 bp, Homo sapiens
tgggtttgagccagc

SEQ ID NO: 474807 - DNA, 15 bp, Homo sapiens
atgggtttgagccag

SEQ ID NO: 474808 - DNA, 15 bp, Homo sapiens
gatgggtttgagcca

SEQ ID NO: 474809 - DNA, 15 bp, Homo sapiens
agatgggtttgagcc

SEQ ID NO: 474810 - DNA, 15 bp, Homo sapiens
aagatgggtttgagc

SEQ ID NO: 474811 - DNA, 15 bp, Homo sapiens
aaagatgggtttgag

SEQ ID NO: 474812 - DNA, 15 bp, Homo sapiens
caaagatgggtttga

SEQ ID NO: 474813 - DNA, 15 bp, Homo sapiens
ccaaagatgggtttg

SEQ ID NO: 474814 - DNA, 15 bp, Homo sapiens
cccaaagatgggttt

SEQ ID NO: 474815 - DNA, 15 bp, Homo sapiens
tcccaaagatgggtt

SEQ ID NO: 474816 - DNA, 15 bp, Homo sapiens
ctcccaaagatgggt

SEQ ID NO: 474817 - DNA, 15 bp, Homo sapiens
gctcccaaagatggg

SEQ ID NO: 474818 - DNA, 15 bp, Homo sapiens
agctcccaaagatgg

SEQ ID NO: 474819 - DNA, 15 bp, Homo sapiens
cagctcccaaagatg

SEQ ID NO: 474820 - DNA, 15 bp, Homo sapiens
acagctcccaaagat

SEQ ID NO: 474821 - DNA, 15 bp, Homo sapiens
gacagctcccaaaga

SEQ ID NO: 474822 - DNA, 15 bp, Homo sapiens
agacagctcccaaag

SEQ ID NO: 474823 - DNA, 15 bp, Homo sapiens
tagacagctcccaaa

SEQ ID NO: 474824 - DNA, 15 bp, Homo sapiens
ttagacagctcccaa

SEQ ID NO: 474825 - DNA, 15 bp, Homo sapiens
attagacagctccca

SEQ ID NO: 474826 - DNA, 15 bp, Homo sapiens
gattagacagctccc

SEQ ID NO: 474827 - DNA, 15 bp, Homo sapiens
agattagacagctcc

SEQ ID NO: 474828 - DNA, 15 bp, Homo sapiens
gagattagacagctc

SEQ ID NO: 474829 - DNA, 15 bp, Homo sapiens
agagattagacagct

SEQ ID NO: 474830 - DNA, 15 bp, Homo sapiens
aagagattagacagc

SEQ ID NO: 474831 - DNA, 15 bp, Homo sapiens
aaagagattagacag

SEQ ID NO: 474832 - DNA, 15 bp, Homo sapiens
aaaagagattagaca

SEQ ID NO: 474833 - DNA, 15 bp, Homo sapiens
aaaaagagattagac

SEQ ID NO: 474834 - DNA, 15 bp, Homo sapiens
gaaaaagagattaga

SEQ ID NO: 474835 - DNA, 15 bp, Homo sapiens
agaaaaagagattag

SEQ ID NO: 474836 - DNA, 15 bp, Homo sapiens
cagaaaaagagatta

SEQ ID NO: 474837 - DNA, 15 bp, Homo sapiens
tcagaaaaagagatt

SEQ ID NO: 474838 - DNA, 15 bp, Homo sapiens
ctcagaaaaagagat

SEQ ID NO: 474839 - DNA, 15 bp, Homo sapiens
actcagaaaaagaga

SEQ ID NO: 474840 - DNA, 15 bp, Homo sapiens
gactcagaaaaagag

SEQ ID NO: 474841 - DNA, 15 bp, Homo sapiens
agactcagaaaaaga

SEQ ID NO: 474842 - DNA, 15 bp, Homo sapiens
aagactcagaaaaag

SEQ ID NO: 474843 - DNA, 15 bp, Homo sapiens
aaagactcagaaaaa

SEQ ID NO: 474844 - DNA, 15 bp, Homo sapiens
taaagactcagaaaa

SEQ ID NO: 474845 - DNA, 15 bp, Homo sapiens
ataaagactcagaaa

SEQ ID NO: 474846 - DNA, 15 bp, Homo sapiens
cataaagactcagaa

SEQ ID NO: 474847 - DNA, 15 bp, Homo sapiens
acataaagactcaga

SEQ ID NO: 474848 - DNA, 15 bp, Homo sapiens
aacataaagactcag

SEQ ID NO: 474849 - DNA, 15 bp, Homo sapiens
gaacataaagactca

SEQ ID NO: 474850 - DNA, 15 bp, Homo sapiens
tgaacataaagactc

SEQ ID NO: 474851 - DNA, 15 bp, Homo sapiens
atgaacataaagact

SEQ ID NO: 474852 - DNA, 15 bp, Homo sapiens
tatgaacataaagac

SEQ ID NO: 474853 - DNA, 15 bp, Homo sapiens
ctatgaacataaaga

SEQ ID NO: 474854 - DNA, 15 bp, Homo sapiens
tctatgaacataaag

SEQ ID NO: 474855 - DNA, 15 bp, Homo sapiens
gtctatgaacataaa

SEQ ID NO: 474856 - DNA, 15 bp, Homo sapiens
tgtctatgaacataa

SEQ ID NO: 474857 - DNA, 15 bp, Homo sapiens
ttgtctatgaacata

SEQ ID NO: 474858 - DNA, 15 bp, Homo sapiens
cttgtctatgaacat

SEQ ID NO: 474859 - DNA, 15 bp, Homo sapiens
acttgtctatgaaca

SEQ ID NO: 474860 - DNA, 15 bp, Homo sapiens
aacttgtctatgaac

SEQ ID NO: 474861 - DNA, 15 bp, Homo sapiens
taacttgtctatgaa

SEQ ID NO: 474862 - DNA, 15 bp, Homo sapiens
ctaacttgtctatga

SEQ ID NO: 474863 - DNA, 15 bp, Homo sapiens
cctaacttgtctatg

SEQ ID NO: 474864 - DNA, 15 bp, Homo sapiens
tcctaacttgtctat

SEQ ID NO: 474865 - DNA, 15 bp, Homo sapiens
atcctaacttgtcta

SEQ ID NO: 474866 - DNA, 15 bp, Homo sapiens
catcctaacttgtct

SEQ ID NO: 474867 - DNA, 15 bp, Homo sapiens
tcatcctaacttgtc

SEQ ID NO: 474868 - DNA, 15 bp, Homo sapiens
ctcatcctaacttgt

SEQ ID NO: 474869 - DNA, 15 bp, Homo sapiens
actcatcctaacttg

SEQ ID NO: 474870 - DNA, 15 bp, Homo sapiens
tactcatcctaactt

SEQ ID NO: 474871 - DNA, 15 bp, Homo sapiens
ttactcatcctaact

SEQ ID NO: 474872 - DNA, 15 bp, Homo sapiens
tttactcatcctaac

SEQ ID NO: 474873 - DNA, 15 bp, Homo sapiens
ctttactcatcctaa

SEQ ID NO: 474874 - DNA, 15 bp, Homo sapiens
actttactcatccta

SEQ ID NO: 474875 - DNA, 15 bp, Homo sapiens
tactttactcatcct

SEQ ID NO: 474876 - DNA, 15 bp, Homo sapiens
ttactttactcatcc

SEQ ID NO: 474877 - DNA, 15 bp, Homo sapiens
cttactttactcatc

SEQ ID NO: 474878 - DNA, 15 bp, Homo sapiens
acttactttactcat

SEQ ID NO: 474879 - DNA, 15 bp, Homo sapiens
cacttactttactca

SEQ ID NO: 474880 - DNA, 15 bp, Homo sapiens
gcacttactttactc

SEQ ID NO: 474881 - DNA, 15 bp, Homo sapiens
agcacttactttact

SEQ ID NO: 474882 - DNA, 15 bp, Homo sapiens
tagcacttactttac

SEQ ID NO: 474883 - DNA, 15 bp, Homo sapiens
ttagcacttacttta

SEQ ID NO: 474884 - DNA, 15 bp, Homo sapiens
tttagcacttacttt

SEQ ID NO: 474885 - DNA, 15 bp, Homo sapiens
atttagcacttactt

SEQ ID NO: 474886 - DNA, 15 bp, Homo sapiens
aatttagcacttact

SEQ ID NO: 474887 - DNA, 15 bp, Homo sapiens
gaatttagcacttac

SEQ ID NO: 474888 - DNA, 15 bp, Homo sapiens
ggaatttagcactta

SEQ ID NO: 474889 - DNA, 15 bp, Homo sapiens
tggaatttagcactt

SEQ ID NO: 474890 - DNA, 15 bp, Homo sapiens
atggaatttagcact

SEQ ID NO: 474891 - DNA, 15 bp, Homo sapiens
tatggaatttagcac

SEQ ID NO: 474892 - DNA, 15 bp, Homo sapiens
atatggaatttagca

SEQ ID NO: 474893 - DNA, 15 bp, Homo sapiens
aatatggaatttagc

SEQ ID NO: 474894 - DNA, 15 bp, Homo sapiens
aaatatggaatttag

SEQ ID NO: 474895 - DNA, 15 bp, Homo sapiens
gaaatatggaattta

SEQ ID NO: 474896 - DNA, 15 bp, Homo sapiens
cgaaatatggaattt

SEQ ID NO: 474897 - DNA, 15 bp, Homo sapiens
acgaaatatggaatt

SEQ ID NO: 474898 - DNA, 15 bp, Homo sapiens
cacgaaatatggaat

SEQ ID NO: 474899 - DNA, 15 bp, Homo sapiens
acacgaaatatggaa

SEQ ID NO: 474900 - DNA, 15 bp, Homo sapiens
aacacgaaatatgga

SEQ ID NO: 474901 - DNA, 15 bp, Homo sapiens
gaacacgaaatatgg

SEQ ID NO: 474902 - DNA, 15 bp, Homo sapiens
agaacacgaaatatg

SEQ ID NO: 474903 - DNA, 15 bp, Homo sapiens
cagaacacgaaatat

SEQ ID NO: 474904 - DNA, 15 bp, Homo sapiens
gcagaacacgaaata

SEQ ID NO: 474905 - DNA, 15 bp, Homo sapiens
tgcagaacacgaaat

SEQ ID NO: 474906 - DNA, 15 bp, Homo sapiens
atgcagaacacgaaa

SEQ ID NO: 474907 - DNA, 15 bp, Homo sapiens
tatgcagaacacgaa

SEQ ID NO: 474908 - DNA, 15 bp, Homo sapiens
atatgcagaacacga

SEQ ID NO: 474909 - DNA, 15 bp, Homo sapiens
gatatgcagaacacg

SEQ ID NO: 474910 - DNA, 15 bp, Homo sapiens
agatatgcagaacac

SEQ ID NO: 474911 - DNA, 15 bp, Homo sapiens
cagatatgcagaaca

SEQ ID NO: 474912 - DNA, 15 bp, Homo sapiens
ccagatatgcagaac

SEQ ID NO: 474913 - DNA, 15 bp, Homo sapiens
cccagatatgcagaa

SEQ ID NO: 474914 - DNA, 15 bp, Homo sapiens
gcccagatatgcaga

SEQ ID NO: 474915 - DNA, 15 bp, Homo sapiens
agcccagatatgcag

SEQ ID NO: 474916 - DNA, 15 bp, Homo sapiens
gagcccagatatgca

SEQ ID NO: 474917 - DNA, 15 bp, Homo sapiens
tgagcccagatatgc

SEQ ID NO: 474918 - DNA, 15 bp, Homo sapiens
ctgagcccagatatg

SEQ ID NO: 474919 - DNA, 15 bp, Homo sapiens
tctgagcccagatat

SEQ ID NO: 474920 - DNA, 15 bp, Homo sapiens
atctgagcccagata

SEQ ID NO: 474921 - DNA, 15 bp, Homo sapiens
catctgagcccagat

SEQ ID NO: 474922 - DNA, 15 bp, Homo sapiens
gcatctgagcccaga

SEQ ID NO: 474923 - DNA, 15 bp, Homo sapiens
agcatctgagcccag

SEQ ID NO: 474924 - DNA, 15 bp, Homo sapiens
aagcatctgagccca

SEQ ID NO: 474925 - DNA, 15 bp, Homo sapiens
caagcatctgagccc

SEQ ID NO: 474926 - DNA, 15 bp, Homo sapiens
acaagcatctgagcc

SEQ ID NO: 474927 - DNA, 15 bp, Homo sapiens
gacaagcatctgagc

SEQ ID NO: 474928 - DNA, 15 bp, Homo sapiens
tgacaagcatctgag

SEQ ID NO: 474929 - DNA, 15 bp, Homo sapiens
atgacaagcatctga

SEQ ID NO: 474930 - DNA, 15 bp, Homo sapiens
aatgacaagcatctg

SEQ ID NO: 474931 - DNA, 15 bp, Homo sapiens
aaatgacaagcatct

SEQ ID NO: 474932 - DNA, 15 bp, Homo sapiens
aaaatgacaagcatc

SEQ ID NO: 474933 - DNA, 15 bp, Homo sapiens
gaaaatgacaagcat

SEQ ID NO: 474934 - DNA, 15 bp, Homo sapiens
ggaaaatgacaagca

SEQ ID NO: 474935 - DNA, 15 bp, Homo sapiens
tggaaaatgacaagc

SEQ ID NO: 474936 - DNA, 15 bp, Homo sapiens
ctggaaaatgacaag

SEQ ID NO: 474937 - DNA, 15 bp, Homo sapiens
actggaaaatgacaa

SEQ ID NO: 474938 - DNA, 15 bp, Homo sapiens
cactggaaaatgaca

SEQ ID NO: 474939 - DNA, 15 bp, Homo sapiens
tcactggaaaatgac

SEQ ID NO: 474940 - DNA, 15 bp, Homo sapiens
atcactggaaaatga

SEQ ID NO: 474941 - DNA, 15 bp, Homo sapiens
tatcactggaaaatg

SEQ ID NO: 474942 - DNA, 15 bp, Homo sapiens
ttatcactggaaaat

SEQ ID NO: 474943 - DNA, 15 bp, Homo sapiens
gttatcactggaaaa

SEQ ID NO: 474944 - DNA, 15 bp, Homo sapiens
agttatcactggaaa

SEQ ID NO: 474945 - DNA, 15 bp, Homo sapiens
gagttatcactggaa

SEQ ID NO: 474946 - DNA, 15 bp, Homo sapiens
ggagttatcactgga

SEQ ID NO: 474947 - DNA, 15 bp, Homo sapiens
tggagttatcactgg

SEQ ID NO: 474948 - DNA, 15 bp, Homo sapiens
atggagttatcactg

SEQ ID NO: 474949 - DNA, 15 bp, Homo sapiens
gatggagttatcact

SEQ ID NO: 474950 - DNA, 15 bp, Homo sapiens
tgatggagttatcac

SEQ ID NO: 474951 - DNA, 15 bp, Homo sapiens
ttgatggagttatca

SEQ ID NO: 474952 - DNA, 15 bp, Homo sapiens
attgatggagttatc

SEQ ID NO: 474953 - DNA, 15 bp, Homo sapiens
cattgatggagttat

SEQ ID NO: 474954 - DNA, 15 bp, Homo sapiens
gcattgatggagtta

SEQ ID NO: 474955 - DNA, 15 bp, Homo sapiens
ggcattgatggagtt

SEQ ID NO: 474956 - DNA, 15 bp, Homo sapiens
aggcattgatggagt

SEQ ID NO: 474957 - DNA, 15 bp, Homo sapiens
gaggcattgatggag

SEQ ID NO: 474958 - DNA, 15 bp, Homo sapiens
ggaggcattgatgga

SEQ ID NO: 474959 - DNA, 15 bp, Homo sapiens
aggaggcattgatgg

SEQ ID NO: 474960 - DNA, 15 bp, Homo sapiens
taggaggcattgatg

SEQ ID NO: 474961 - DNA, 15 bp, Homo sapiens
ctaggaggcattgat

SEQ ID NO: 474962 - DNA, 15 bp, Homo sapiens
actaggaggcattga

SEQ ID NO: 474963 - DNA, 15 bp, Homo sapiens
cactaggaggcattg

SEQ ID NO: 474964 - DNA, 15 bp, Homo sapiens
ccactaggaggcatt

SEQ ID NO: 474965 - DNA, 15 bp, Homo sapiens
accactaggaggcat

SEQ ID NO: 474966 - DNA, 15 bp, Homo sapiens
taccactaggaggca

SEQ ID NO: 474967 - DNA, 15 bp, Homo sapiens
ataccactaggaggc

SEQ ID NO: 474968 - DNA, 15 bp, Homo sapiens
tataccactaggagg

SEQ ID NO: 474969 - DNA, 15 bp, Homo sapiens
ttataccactaggag

SEQ ID NO: 474970 - DNA, 15 bp, Homo sapiens
tttataccactagga

SEQ ID NO: 474971 - DNA, 15 bp, Homo sapiens
atttataccactagg

SEQ ID NO: 474972 - DNA, 15 bp, Homo sapiens
aatttataccactag

SEQ ID NO: 474973 - DNA, 15 bp, Homo sapiens
aaatttataccacta

SEQ ID NO: 474974 - DNA, 15 bp, Homo sapiens
aaaatttataccact

SEQ ID NO: 474975 - DNA, 15 bp, Homo sapiens
taaaatttataccac

SEQ ID NO: 474976 - DNA, 15 bp, Homo sapiens
ttaaaatttatacca

SEQ ID NO: 474977 - DNA, 15 bp, Homo sapiens
attaaaatttatacc

SEQ ID NO: 474978 - DNA, 15 bp, Homo sapiens
tattaaaatttatac

SEQ ID NO: 474979 - DNA, 15 bp, Homo sapiens
gtattaaaatttata

SEQ ID NO: 474980 - DNA, 15 bp, Homo sapiens
agtattaaaatttat

SEQ ID NO: 474981 - DNA, 15 bp, Homo sapiens
aagtattaaaattta

SEQ ID NO: 474982 - DNA, 15 bp, Homo sapiens
gaagtattaaaattt

SEQ ID NO: 474983 - DNA, 15 bp, Homo sapiens
agaagtattaaaatt

SEQ ID NO: 474984 - DNA, 15 bp, Homo sapiens
aagaagtattaaaat

SEQ ID NO: 474985 - DNA, 15 bp, Homo sapiens
caagaagtattaaaa

SEQ ID NO: 474986 - DNA, 15 bp, Homo sapiens
acaagaagtattaaa

SEQ ID NO: 474987 - DNA, 15 bp, Homo sapiens
cacaagaagtattaa

SEQ ID NO: 474988 - DNA, 15 bp, Homo sapiens
acacaagaagtatta

SEQ ID NO: 474989 - DNA, 15 bp, Homo sapiens
cacacaagaagtatt

SEQ ID NO: 474990 - DNA, 15 bp, Homo sapiens
gcacacaagaagtat

SEQ ID NO: 474991 - DNA, 15 bp, Homo sapiens
ggcacacaagaagta

SEQ ID NO: 474992 - DNA, 15 bp, Homo sapiens
gggcacacaagaagt

SEQ ID NO: 474993 - DNA, 15 bp, Homo sapiens
tgggcacacaagaag

SEQ ID NO: 474994 - DNA, 15 bp, Homo sapiens
ctgggcacacaagaa

SEQ ID NO: 474995 - DNA, 15 bp, Homo sapiens
gctgggcacacaaga

SEQ ID NO: 474996 - DNA, 15 bp, Homo sapiens
ggctgggcacacaag

SEQ ID NO: 474997 - DNA, 15 bp, Homo sapiens
gggctgggcacacaa

SEQ ID NO: 474998 - DNA, 15 bp, Homo sapiens
ggggctgggcacaca

SEQ ID NO: 474999 - DNA, 15 bp, Homo sapiens
gggggctgggcacac

SEQ ID NO: 475000 - DNA, 15 bp, Homo sapiens
agggggctgggcaca

SEQ ID NO: 475001 - DNA, 15 bp, Homo sapiens
gagggggctgggcac

SEQ ID NO: 475002 - DNA, 15 bp, Homo sapiens
agagggggctgggca

SEQ ID NO: 475003 - DNA, 15 bp, Homo sapiens
aagagggggctgggc

SEQ ID NO: 475004 - DNA, 15 bp, Homo sapiens
taagagggggctggg

SEQ ID NO: 475005 - DNA, 15 bp, Homo sapiens
ctaagagggggctgg

SEQ ID NO: 475006 - DNA, 15 bp, Homo sapiens
tctaagagggggctg

SEQ ID NO: 475007 - DNA, 15 bp, Homo sapiens
ttctaagagggggct

SEQ ID NO: 475008 - DNA, 15 bp, Homo sapiens
tttctaagagggggc

SEQ ID NO: 475009 - DNA, 15 bp, Homo sapiens
atttctaagaggggg

SEQ ID NO: 475010 - DNA, 15 bp, Homo sapiens
aatttctaagagggg

SEQ ID NO: 475011 - DNA, 15 bp, Homo sapiens
aaatttctaagaggg

SEQ ID NO: 475012 - DNA, 15 bp, Homo sapiens
caaatttctaagagg

SEQ ID NO: 475013 - DNA, 15 bp, Homo sapiens
tcaaatttctaagag

SEQ ID NO: 475014 - DNA, 15 bp, Homo sapiens
ctcaaatttctaaga

SEQ ID NO: 475015 - DNA, 15 bp, Homo sapiens
tctcaaatttctaag

SEQ ID NO: 475016 - DNA, 15 bp, Homo sapiens
atctcaaatttctaa

SEQ ID NO: 475017 - DNA, 15 bp, Homo sapiens
aatctcaaatttcta

SEQ ID NO: 475018 - DNA, 15 bp, Homo sapiens
aaatctcaaatttct

SEQ ID NO: 475019 - DNA, 15 bp, Homo sapiens
aaaatctcaaatttc

SEQ ID NO: 475020 - DNA, 15 bp, Homo sapiens
taaaatctcaaattt

SEQ ID NO: 475021 - DNA, 15 bp, Homo sapiens
ctaaaatctcaaatt

SEQ ID NO: 475022 - DNA, 15 bp, Homo sapiens
cctaaaatctcaaat

SEQ ID NO: 475023 - DNA, 15 bp, Homo sapiens
tcctaaaatctcaaa

SEQ ID NO: 475024 - DNA, 15 bp, Homo sapiens
ttcctaaaatctcaa

SEQ ID NO: 475025 - DNA, 15 bp, Homo sapiens
cttcctaaaatctca

SEQ ID NO: 475026 - DNA, 15 bp, Homo sapiens
ccttcctaaaatctc

SEQ ID NO: 475027 - DNA, 15 bp, Homo sapiens
cccttcctaaaatct

SEQ ID NO: 475028 - DNA, 15 bp, Homo sapiens
tcccttcctaaaatc

SEQ ID NO: 475029 - DNA, 15 bp, Homo sapiens
gtcccttcctaaaat

SEQ ID NO: 475030 - DNA, 15 bp, Homo sapiens
agtcccttcctaaaa

SEQ ID NO: 475031 - DNA, 15 bp, Homo sapiens
tagtcccttcctaaa

SEQ ID NO: 475032 - DNA, 15 bp, Homo sapiens
ctagtcccttcctaa

SEQ ID NO: 475033 - DNA, 15 bp, Homo sapiens
actagtcccttccta

SEQ ID NO: 475034 - DNA, 15 bp, Homo sapiens
tactagtcccttcct

SEQ ID NO: 475035 - DNA, 15 bp, Homo sapiens
ttactagtcccttcc

SEQ ID NO: 475036 - DNA, 15 bp, Homo sapiens
attactagtcccttc

SEQ ID NO: 475037 - DNA, 15 bp, Homo sapiens
tattactagtccctt

SEQ ID NO: 475038 - DNA, 15 bp, Homo sapiens
ttattactagtccct

SEQ ID NO: 475039 - DNA, 15 bp, Homo sapiens
tttattactagtccc

SEQ ID NO: 475040 - DNA, 15 bp, Homo sapiens
ttttattactagtcc

SEQ ID NO: 475041 - DNA, 15 bp, Homo sapiens
cttttattactagtc

SEQ ID NO: 475042 - DNA, 15 bp, Homo sapiens
ccttttattactagt

SEQ ID NO: 475043 - DNA, 15 bp, Homo sapiens
accttttattactag

SEQ ID NO: 475044 - DNA, 15 bp, Homo sapiens
taccttttattacta

SEQ ID NO: 475045 - DNA, 15 bp, Homo sapiens
ttaccttttattact

SEQ ID NO: 475046 - DNA, 15 bp, Homo sapiens
tttaccttttattac

SEQ ID NO: 475047 - DNA, 15 bp, Homo sapiens
ttttaccttttatta

SEQ ID NO: 475048 - DNA, 15 bp, Homo sapiens
attttaccttttatt

SEQ ID NO: 475049 - DNA, 15 bp, Homo sapiens
tattttaccttttat

SEQ ID NO: 475050 - DNA, 15 bp, Homo sapiens
ttattttacctttta

SEQ ID NO: 475051 - DNA, 15 bp, Homo sapiens
tttattttacctttt

SEQ ID NO: 475052 - DNA, 15 bp, Homo sapiens
atttattttaccttt

SEQ ID NO: 475053 - DNA, 15 bp, Homo sapiens
aatttattttacctt

SEQ ID NO: 475054 - DNA, 15 bp, Homo sapiens
taatttattttacct

SEQ ID NO: 475055 - DNA, 15 bp, Homo sapiens
ataatttattttacc

SEQ ID NO: 475056 - DNA, 15 bp, Homo sapiens
aataatttattttac

SEQ ID NO: 475057 - DNA, 15 bp, Homo sapiens
aaataatttatttta

SEQ ID NO: 475058 - DNA, 15 bp, Homo sapiens
aaaataatttatttt

SEQ ID NO: 475059 - DNA, 15 bp, Homo sapiens
gaaaataatttattt

SEQ ID NO: 475060 - DNA, 15 bp, Homo sapiens
agaaaataatttatt

SEQ ID NO: 475061 - DNA, 15 bp, Homo sapiens
cagaaaataatttat

SEQ ID NO: 475062 - DNA, 15 bp, Homo sapiens
ccagaaaataattta

SEQ ID NO: 475063 - DNA, 15 bp, Homo sapiens
gccagaaaataattt

SEQ ID NO: 475064 - DNA, 15 bp, Homo sapiens
ggccagaaaataatt

SEQ ID NO: 475065 - DNA, 15 bp, Homo sapiens
tggccagaaaataat

SEQ ID NO: 475066 - DNA, 15 bp, Homo sapiens
ctggccagaaaataa

SEQ ID NO: 475067 - DNA, 15 bp, Homo sapiens
cctggccagaaaata

SEQ ID NO: 475068 - DNA, 15 bp, Homo sapiens
gcctggccagaaaat

SEQ ID NO: 475069 - DNA, 15 bp, Homo sapiens
tgcctggccagaaaa

SEQ ID NO: 475070 - DNA, 15 bp, Homo sapiens
atgcctggccagaaa

SEQ ID NO: 475071 - DNA, 15 bp, Homo sapiens
catgcctggccagaa

SEQ ID NO: 475072 - DNA, 15 bp, Homo sapiens
ccatgcctggccaga

SEQ ID NO: 475073 - DNA, 15 bp, Homo sapiens
accatgcctggccag

SEQ ID NO: 475074 - DNA, 15 bp, Homo sapiens
caccatgcctggcca

SEQ ID NO: 475075 - DNA, 15 bp, Homo sapiens
tgtgagccaccatgc

SEQ ID NO: 475076 - DNA, 15 bp, Homo sapiens
gtgtgagccaccatg

SEQ ID NO: 475077 - DNA, 15 bp, Homo sapiens
ggtgtgagccaccat

SEQ ID NO: 475078 - DNA, 15 bp, Homo sapiens
aggtgtgagccacca

SEQ ID NO: 475079 - DNA, 15 bp, Homo sapiens
cattacaggtgtgag

SEQ ID NO: 475080 - DNA, 15 bp, Homo sapiens
gcattacaggtgtga

SEQ ID NO: 475081 - DNA, 15 bp, Homo sapiens
ggcattacaggtgtg

SEQ ID NO: 475082 - DNA, 15 bp, Homo sapiens
tggcattacaggtgt

SEQ ID NO: 475083 - DNA, 15 bp, Homo sapiens
ctggcattacaggtg

SEQ ID NO: 475084 - DNA, 15 bp, Homo sapiens
actggcattacaggt

SEQ ID NO: 475085 - DNA, 15 bp, Homo sapiens
tactggcattacagg

SEQ ID NO: 475086 - DNA, 15 bp, Homo sapiens
gtactggcattacag

SEQ ID NO: 475087 - DNA, 15 bp, Homo sapiens
agtactggcattaca

SEQ ID NO: 475088 - DNA, 15 bp, Homo sapiens
aagtactggcattac

SEQ ID NO: 475089 - DNA, 15 bp, Homo sapiens
gaagtactggcatta

SEQ ID NO: 475090 - DNA, 15 bp, Homo sapiens
cgaagtactggcatt

SEQ ID NO: 475091 - DNA, 15 bp, Homo sapiens
ccgaagtactggcat

SEQ ID NO: 475092 - DNA, 15 bp, Homo sapiens
cccgaagtactggca

SEQ ID NO: 475093 - DNA, 15 bp, Homo sapiens
tcccgaagtactggc

SEQ ID NO: 475094 - DNA, 15 bp, Homo sapiens
ctcccgaagtactgg

SEQ ID NO: 475095 - DNA, 15 bp, Homo sapiens
cctcccgaagtactg

SEQ ID NO: 475096 - DNA, 15 bp, Homo sapiens
acctcccgaagtact

SEQ ID NO: 475097 - DNA, 15 bp, Homo sapiens
gacctcccgaagtac

SEQ ID NO: 475098 - DNA, 15 bp, Homo sapiens
cgacctcccgaagta

SEQ ID NO: 475099 - DNA, 15 bp, Homo sapiens
tcgacctcccgaagt

SEQ ID NO: 475100 - DNA, 15 bp, Homo sapiens
ctcgacctcccgaag

SEQ ID NO: 475101 - DNA, 15 bp, Homo sapiens
cctcgacctcccgaa

SEQ ID NO: 475102 - DNA, 15 bp, Homo sapiens
gcctcgacctcccga

SEQ ID NO: 475103 - DNA, 15 bp, Homo sapiens
tgcctcgacctcccg

SEQ ID NO: 475104 - DNA, 15 bp, Homo sapiens
ctgcctcgacctccc

SEQ ID NO: 475105 - DNA, 15 bp, Homo sapiens
tctgcctcgacctcc

SEQ ID NO: 475106 - DNA, 15 bp, Homo sapiens
atctgcctcgacctc

SEQ ID NO: 475107 - DNA, 15 bp, Homo sapiens
catctgcctcgacct

SEQ ID NO: 475108 - DNA, 15 bp, Homo sapiens
ccatctgcctcgacc

SEQ ID NO: 475109 - DNA, 15 bp, Homo sapiens
tccatctgcctcgac

SEQ ID NO: 475110 - DNA, 15 bp, Homo sapiens
atccatctgcctcga

SEQ ID NO: 475111 - DNA, 15 bp, Homo sapiens
gatccatctgcctcg

SEQ ID NO: 475112 - DNA, 15 bp, Homo sapiens
tgatccatctgcctc

SEQ ID NO: 475113 - DNA, 15 bp, Homo sapiens
gtgatccatctgcct

SEQ ID NO: 475114 - DNA, 15 bp, Homo sapiens
ggtgatccatctgcc

SEQ ID NO: 475115 - DNA, 15 bp, Homo sapiens
aggtgatccatctgc

SEQ ID NO: 475116 - DNA, 15 bp, Homo sapiens
caggtgatccatctg

SEQ ID NO: 475117 - DNA, 15 bp, Homo sapiens
tcaggtgatccatct

SEQ ID NO: 475118 - DNA, 15 bp, Homo sapiens
ctcaggtgatccatc

SEQ ID NO: 475119 - DNA, 15 bp, Homo sapiens
cctcaggtgatccat

SEQ ID NO: 475120 - DNA, 15 bp, Homo sapiens
gccaggctggtcttg

SEQ ID NO: 475121 - DNA, 15 bp, Homo sapiens
ggccaggctggtctt

SEQ ID NO: 475122 - DNA, 15 bp, Homo sapiens
ttgttggccaggctg

SEQ ID NO: 475123 - DNA, 15 bp, Homo sapiens
cttgttggccaggct

SEQ ID NO: 475124 - DNA, 15 bp, Homo sapiens
ccttgttggccaggc

SEQ ID NO: 475125 - DNA, 15 bp, Homo sapiens
gccttgttggccagg

SEQ ID NO: 475126 - DNA, 15 bp, Homo sapiens
tgccttgttggccag

SEQ ID NO: 475127 - DNA, 15 bp, Homo sapiens
ttgccttgttggcca

SEQ ID NO: 475128 - DNA, 15 bp, Homo sapiens
tttgccttgttggcc

SEQ ID NO: 475129 - DNA, 15 bp, Homo sapiens
ttttgccttgttggc

SEQ ID NO: 475130 - DNA, 15 bp, Homo sapiens
attttgccttgttgg

SEQ ID NO: 475131 - DNA, 15 bp, Homo sapiens
gattttgccttgttg

SEQ ID NO: 475132 - DNA, 15 bp, Homo sapiens
ggattttgccttgtt

SEQ ID NO: 475133 - DNA, 15 bp, Homo sapiens
gggattttgccttgt

SEQ ID NO: 475134 - DNA, 15 bp, Homo sapiens
tgggattttgccttg

SEQ ID NO: 475135 - DNA, 15 bp, Homo sapiens
atgggattttgcctt

SEQ ID NO: 475136 - DNA, 15 bp, Homo sapiens
gatgggattttgcct

SEQ ID NO: 475137 - DNA, 15 bp, Homo sapiens
agatgggattttgcc

SEQ ID NO: 475138 - DNA, 15 bp, Homo sapiens
gagatgggattttgc

SEQ ID NO: 475139 - DNA, 15 bp, Homo sapiens
agagatgggattttg

SEQ ID NO: 475140 - DNA, 15 bp, Homo sapiens
tagagatgggatttt

SEQ ID NO: 475141 - DNA, 15 bp, Homo sapiens
ataatttttgcattt

SEQ ID NO: 475142 - DNA, 15 bp, Homo sapiens
gataatttttgcatt

SEQ ID NO: 475143 - DNA, 15 bp, Homo sapiens
ggataatttttgcat

SEQ ID NO: 475144 - DNA, 15 bp, Homo sapiens
cggataatttttgca

SEQ ID NO: 475145 - DNA, 15 bp, Homo sapiens
ccggataatttttgc

SEQ ID NO: 475146 - DNA, 15 bp, Homo sapiens
cccggataatttttg

SEQ ID NO: 475147 - DNA, 15 bp, Homo sapiens
tcccggataattttt

SEQ ID NO: 475148 - DNA, 15 bp, Homo sapiens
ctcccggataatttt

SEQ ID NO: 475149 - DNA, 15 bp, Homo sapiens
actcccggataattt

SEQ ID NO: 475150 - DNA, 15 bp, Homo sapiens
cactcccggataatt

SEQ ID NO: 475151 - DNA, 15 bp, Homo sapiens
ccactcccggataat

SEQ ID NO: 475152 - DNA, 15 bp, Homo sapiens
accactcccggataa

SEQ ID NO: 475153 - DNA, 15 bp, Homo sapiens
caccactcccggata

SEQ ID NO: 475154 - DNA, 15 bp, Homo sapiens
ccaccactcccggat

SEQ ID NO: 475155 - DNA, 15 bp, Homo sapiens
accaccactcccgga

SEQ ID NO: 475156 - DNA, 15 bp, Homo sapiens
caccaccactcccgg

SEQ ID NO: 475157 - DNA, 15 bp, Homo sapiens
ccaccaccactcccg

SEQ ID NO: 475158 - DNA, 15 bp, Homo sapiens
cccaccaccactccc

SEQ ID NO: 475159 - DNA, 15 bp, Homo sapiens
acccaccaccactcc

SEQ ID NO: 475160 - DNA, 15 bp, Homo sapiens
cacccaccaccactc

SEQ ID NO: 475161 - DNA, 15 bp, Homo sapiens
gcacccaccaccact

SEQ ID NO: 475162 - DNA, 15 bp, Homo sapiens
ggcacccaccaccac

SEQ ID NO: 475163 - DNA, 15 bp, Homo sapiens
aagttcaagtgattc

SEQ ID NO: 475164 - DNA, 15 bp, Homo sapiens
caagttcaagtgatt

SEQ ID NO: 475165 - DNA, 15 bp, Homo sapiens
ccaagttcaagtgat

SEQ ID NO: 475166 - DNA, 15 bp, Homo sapiens
cccaagttcaagtga

SEQ ID NO: 475167 - DNA, 15 bp, Homo sapiens
tcccaagttcaagtg

SEQ ID NO: 475168 - DNA, 15 bp, Homo sapiens
ctcccaagttcaagt

SEQ ID NO: 475169 - DNA, 15 bp, Homo sapiens
gtctcagctcactgc

SEQ ID NO: 475170 - DNA, 15 bp, Homo sapiens
agtctcagctcactg

SEQ ID NO: 475171 - DNA, 15 bp, Homo sapiens
cagtctcagctcact

SEQ ID NO: 475172 - DNA, 15 bp, Homo sapiens
acagtctcagctcac

SEQ ID NO: 475173 - DNA, 15 bp, Homo sapiens
cacagtctcagctca

SEQ ID NO: 475174 - DNA, 15 bp, Homo sapiens
gcacagtctcagctc

SEQ ID NO: 475175 - DNA, 15 bp, Homo sapiens
ggcacagtctcagct

SEQ ID NO: 475176 - DNA, 15 bp, Homo sapiens
tggcacagtctcagc

SEQ ID NO: 475177 - DNA, 15 bp, Homo sapiens
gtggcacagtctcag

SEQ ID NO: 475178 - DNA, 15 bp, Homo sapiens
agtggcacagtctca

SEQ ID NO: 475179 - DNA, 15 bp, Homo sapiens
cagtggcacagtctc

SEQ ID NO: 475180 - DNA, 15 bp, Homo sapiens
gcagtggcacagtct

SEQ ID NO: 475181 - DNA, 15 bp, Homo sapiens
tgcagtggcacagtc

SEQ ID NO: 475182 - DNA, 15 bp, Homo sapiens
gtgcagtggcacagt

SEQ ID NO: 475183 - DNA, 15 bp, Homo sapiens
agtgcagtggcacag

SEQ ID NO: 475184 - DNA, 15 bp, Homo sapiens
gagtgcagtggcaca

SEQ ID NO: 475185 - DNA, 15 bp, Homo sapiens
tactctgttgcccag

SEQ ID NO: 475186 - DNA, 15 bp, Homo sapiens
ttactctgttgccca

SEQ ID NO: 475187 - DNA, 15 bp, Homo sapiens
cttactctgttgccc

SEQ ID NO: 475188 - DNA, 15 bp, Homo sapiens
tcttactctgttgcc

SEQ ID NO: 475189 - DNA, 15 bp, Homo sapiens
gtcttactctgttgc

SEQ ID NO: 475190 - DNA, 15 bp, Homo sapiens
agtcttactctgttg

SEQ ID NO: 475191 - DNA, 15 bp, Homo sapiens
gagtcttactctgtt

SEQ ID NO: 475192 - DNA, 15 bp, Homo sapiens
agagtcttactctgt

SEQ ID NO: 475193 - DNA, 15 bp, Homo sapiens
tagagtcttactctg

SEQ ID NO: 475194 - DNA, 15 bp, Homo sapiens
atagagtcttactct

SEQ ID NO: 475195 - DNA, 15 bp, Homo sapiens
gatagagtcttactc

SEQ ID NO: 475196 - DNA, 15 bp, Homo sapiens
agatagagtcttact

SEQ ID NO: 475197 - DNA, 15 bp, Homo sapiens
gagatagagtcttac

SEQ ID NO: 475198 - DNA, 15 bp, Homo sapiens
tgagatagagtctta

SEQ ID NO: 475199 - DNA, 15 bp, Homo sapiens
ttgagatagagtctt

SEQ ID NO: 475200 - DNA, 15 bp, Homo sapiens
tttgagatagagtct

SEQ ID NO: 475201 - DNA, 15 bp, Homo sapiens
ttttgagatagagtc

SEQ ID NO: 475202 - DNA, 15 bp, Homo sapiens
tttttgagatagagt

SEQ ID NO: 475203 - DNA, 15 bp, Homo sapiens
ttttttgagatagag

SEQ ID NO: 475204 - DNA, 15 bp, Homo sapiens
tttttttgagataga

SEQ ID NO: 475205 - DNA, 15 bp, Homo sapiens
ttttttttgagatag

SEQ ID NO: 475206 - DNA, 15 bp, Homo sapiens
tttttttttgagata

SEQ ID NO: 475207 - DNA, 15 bp, Homo sapiens
ggccttttttttttt

SEQ ID NO: 475208 - DNA, 15 bp, Homo sapiens
tggcctttttttttt

SEQ ID NO: 475209 - DNA, 15 bp, Homo sapiens
ctggccttttttttt

SEQ ID NO: 475210 - DNA, 15 bp, Homo sapiens
cctggcctttttttt

SEQ ID NO: 475211 - DNA, 15 bp, Homo sapiens
gcctggccttttttt

SEQ ID NO: 475212 - DNA, 15 bp, Homo sapiens
cgcctggcctttttt

SEQ ID NO: 475213 - DNA, 15 bp, Homo sapiens
gcgcctggccttttt

SEQ ID NO: 475214 - DNA, 15 bp, Homo sapiens
tgcgcctggcctttt

SEQ ID NO: 475215 - DNA, 15 bp, Homo sapiens
ctgcgcctggccttt

SEQ ID NO: 475216 - DNA, 15 bp, Homo sapiens
actgcgcctggcctt

SEQ ID NO: 475217 - DNA, 15 bp, Homo sapiens
aagccactgcgcctg

SEQ ID NO: 475218 - DNA, 15 bp, Homo sapiens
taagccactgcgcct

SEQ ID NO: 475219 - DNA, 15 bp, Homo sapiens
gtaagccactgcgcc

SEQ ID NO: 475220 - DNA, 15 bp, Homo sapiens
tgtaagccactgcgc

SEQ ID NO: 475221 - DNA, 15 bp, Homo sapiens
gtgtaagccactgcg

SEQ ID NO: 475222 - DNA, 15 bp, Homo sapiens
ggtgtaagccactgc

SEQ ID NO: 475223 - DNA, 15 bp, Homo sapiens
aggtgtaagccactg

SEQ ID NO: 475224 - DNA, 15 bp, Homo sapiens
caggtgtaagccact

SEQ ID NO: 475225 - DNA, 15 bp, Homo sapiens
acaggtgtaagccac

SEQ ID NO: 475226 - DNA, 15 bp, Homo sapiens
tacaggtgtaagcca

SEQ ID NO: 475227 - DNA, 15 bp, Homo sapiens
ttacaggtgtaagcc

SEQ ID NO: 475228 - DNA, 15 bp, Homo sapiens
attacaggtgtaagc

SEQ ID NO: 475229 - DNA, 15 bp, Homo sapiens
gattacaggtgtaag

SEQ ID NO: 475230 - DNA, 15 bp, Homo sapiens
agattacaggtgtaa

SEQ ID NO: 475231 - DNA, 15 bp, Homo sapiens
gagattacaggtgta

SEQ ID NO: 475232 - DNA, 15 bp, Homo sapiens
agagattacaggtgt

SEQ ID NO: 475233 - DNA, 15 bp, Homo sapiens
gagagattacaggtg

SEQ ID NO: 475234 - DNA, 15 bp, Homo sapiens
tgagagattacaggt

SEQ ID NO: 475235 - DNA, 15 bp, Homo sapiens
ctgagagattacagg

SEQ ID NO: 475236 - DNA, 15 bp, Homo sapiens
cctgagagattacag

SEQ ID NO: 475237 - DNA, 15 bp, Homo sapiens
tcctgagagattaca

SEQ ID NO: 475238 - DNA, 15 bp, Homo sapiens
ctcctgagagattac

SEQ ID NO: 475239 - DNA, 15 bp, Homo sapiens
cctcctgagagatta

SEQ ID NO: 475240 - DNA, 15 bp, Homo sapiens
gcctcctgagagatt

SEQ ID NO: 475241 - DNA, 15 bp, Homo sapiens
agcctcctgagagat

SEQ ID NO: 475242 - DNA, 15 bp, Homo sapiens
gagcctcctgagaga

SEQ ID NO: 475243 - DNA, 15 bp, Homo sapiens
tgagcctcctgagag

SEQ ID NO: 475244 - DNA, 15 bp, Homo sapiens
ctgagcctcctgaga

SEQ ID NO: 475245 - DNA, 15 bp, Homo sapiens
cctgagcctcctgag

SEQ ID NO: 475246 - DNA, 15 bp, Homo sapiens
gcctgagcctcctga

SEQ ID NO: 475247 - DNA, 15 bp, Homo sapiens
tgcctgagcctcctg

SEQ ID NO: 475248 - DNA, 15 bp, Homo sapiens
ctgcctgagcctcct

SEQ ID NO: 475249 - DNA, 15 bp, Homo sapiens
cctgcctgagcctcc

SEQ ID NO: 475250 - DNA, 15 bp, Homo sapiens
tcctgcctgagcctc

SEQ ID NO: 475251 - DNA, 15 bp, Homo sapiens
ctcctgcctgagcct

SEQ ID NO: 475252 - DNA, 15 bp, Homo sapiens
tctcctgcctgagcc

SEQ ID NO: 475253 - DNA, 15 bp, Homo sapiens
ttctcctgcctgagc

SEQ ID NO: 475254 - DNA, 15 bp, Homo sapiens
attctcctgcctgag

SEQ ID NO: 475255 - DNA, 15 bp, Homo sapiens
gattctcctgcctga

SEQ ID NO: 475256 - DNA, 15 bp, Homo sapiens
tgattctcctgcctg

SEQ ID NO: 475257 - DNA, 15 bp, Homo sapiens
ttcccgggttcaagt

SEQ ID NO: 475258 - DNA, 15 bp, Homo sapiens
tttcccgggttcaag

SEQ ID NO: 475259 - DNA, 15 bp, Homo sapiens
atttcccgggttcaa

SEQ ID NO: 475260 - DNA, 15 bp, Homo sapiens
catttcccgggttca

SEQ ID NO: 475261 - DNA, 15 bp, Homo sapiens
ccatttcccgggttc

SEQ ID NO: 475262 - DNA, 15 bp, Homo sapiens
tccatttcccgggtt

SEQ ID NO: 475263 - DNA, 15 bp, Homo sapiens
ctccatttcccgggt

SEQ ID NO: 475264 - DNA, 15 bp, Homo sapiens
cctccatttcccggg

SEQ ID NO: 475265 - DNA, 15 bp, Homo sapiens
acctccatttcccgg

SEQ ID NO: 475266 - DNA, 15 bp, Homo sapiens
aacctccatttcccg

SEQ ID NO: 475267 - DNA, 15 bp, Homo sapiens
caacctccatttccc

SEQ ID NO: 475268 - DNA, 15 bp, Homo sapiens
gcaacctccatttcc

SEQ ID NO: 475269 - DNA, 15 bp, Homo sapiens
tgcaacctccatttc

SEQ ID NO: 475270 - DNA, 15 bp, Homo sapiens
ctgcaacctccattt

SEQ ID NO: 475271 - DNA, 15 bp, Homo sapiens
actgcaacctccatt

SEQ ID NO: 475272 - DNA, 15 bp, Homo sapiens
aatctcggctcactg

SEQ ID NO: 475273 - DNA, 15 bp, Homo sapiens
caatctcggctcact

SEQ ID NO: 475274 - DNA, 15 bp, Homo sapiens
gcaatctcggctcac

SEQ ID NO: 475275 - DNA, 15 bp, Homo sapiens
tgcaatctcggctca

SEQ ID NO: 475276 - DNA, 15 bp, Homo sapiens
gtgcaatctcggctc

SEQ ID NO: 475277 - DNA, 15 bp, Homo sapiens
ggtgcaatctcggct

SEQ ID NO: 475278 - DNA, 15 bp, Homo sapiens
tggtgcaatctcggc

SEQ ID NO: 475279 - DNA, 15 bp, Homo sapiens
gtggtgcaatctcgg

SEQ ID NO: 475280 - DNA, 15 bp, Homo sapiens
agtggtgcaatctcg

SEQ ID NO: 475281 - DNA, 15 bp, Homo sapiens
agctggagtgcagtg

SEQ ID NO: 475282 - DNA, 15 bp, Homo sapiens
gagctggagtgcagt

SEQ ID NO: 475283 - DNA, 15 bp, Homo sapiens
tgagctggagtgcag

SEQ ID NO: 475284 - DNA, 15 bp, Homo sapiens
ttgagctggagtgca

SEQ ID NO: 475285 - DNA, 15 bp, Homo sapiens
tttgagctggagtgc

SEQ ID NO: 475286 - DNA, 15 bp, Homo sapiens
ttttgagctggagtg

SEQ ID NO: 475287 - DNA, 15 bp, Homo sapiens
tttttgagctggagt

SEQ ID NO: 475288 - DNA, 15 bp, Homo sapiens
ttttttgagctggag

SEQ ID NO: 475289 - DNA, 15 bp, Homo sapiens
attttttgagctgga

SEQ ID NO: 475290 - DNA, 15 bp, Homo sapiens
tattttttgagctgg

SEQ ID NO: 475291 - DNA, 15 bp, Homo sapiens
ttattttttgagctg

SEQ ID NO: 475292 - DNA, 15 bp, Homo sapiens
tttattttttgagct

SEQ ID NO: 475293 - DNA, 15 bp, Homo sapiens
atttattttttgagc

SEQ ID NO: 475294 - DNA, 15 bp, Homo sapiens
tatttattttttgag

SEQ ID NO: 475295 - DNA, 15 bp, Homo sapiens
ttatttattttttga

SEQ ID NO: 475296 - DNA, 15 bp, Homo sapiens
aatttatttatttat

SEQ ID NO: 475297 - DNA, 15 bp, Homo sapiens
taatttatttattta

SEQ ID NO: 475298 - DNA, 15 bp, Homo sapiens
ataatttatttattt

SEQ ID NO: 475299 - DNA, 15 bp, Homo sapiens
aataatttatttatt

SEQ ID NO: 475300 - DNA, 15 bp, Homo sapiens
aaataatttatttat

SEQ ID NO: 475301 - DNA, 15 bp, Homo sapiens
aaaataatttattta

SEQ ID NO: 475302 - DNA, 15 bp, Homo sapiens
aagaaaataatttat

SEQ ID NO: 475303 - DNA, 15 bp, Homo sapiens
aaagaaaataattta

SEQ ID NO: 475304 - DNA, 15 bp, Homo sapiens
aaaagaaaataattt

SEQ ID NO: 475305 - DNA, 15 bp, Homo sapiens
aaaaagaaaataatt

SEQ ID NO: 475306 - DNA, 15 bp, Homo sapiens
aaaaaagaaaataat

SEQ ID NO: 475307 - DNA, 15 bp, Homo sapiens
aaaaaaagaaaataa

SEQ ID NO: 475308 - DNA, 15 bp, Homo sapiens
taaaaaaagaaaata

SEQ ID NO: 475309 - DNA, 15 bp, Homo sapiens
ataaaaaaagaaaat

SEQ ID NO: 475310 - DNA, 15 bp, Homo sapiens
aataaaaaaagaaaa

SEQ ID NO: 475311 - DNA, 15 bp, Homo sapiens
aaataaaaaaagaaa

SEQ ID NO: 475312 - DNA, 15 bp, Homo sapiens
taaataaaaaaagaa

SEQ ID NO: 475313 - DNA, 15 bp, Homo sapiens
ataaataaaaaaaga

SEQ ID NO: 475314 - DNA, 15 bp, Homo sapiens
aataaataaaaaaag

SEQ ID NO: 475315 - DNA, 15 bp, Homo sapiens
aaataaataaaaaaa

SEQ ID NO: 475316 - DNA, 15 bp, Homo sapiens
aaaaaataaataaaa

SEQ ID NO: 475317 - DNA, 15 bp, Homo sapiens
gaaaaaataaataaa

SEQ ID NO: 475318 - DNA, 15 bp, Homo sapiens
tgaaaaaataaataa

SEQ ID NO: 475319 - DNA, 15 bp, Homo sapiens
ctgaaaaaataaata

SEQ ID NO: 475320 - DNA, 15 bp, Homo sapiens
gctgaaaaaataaat

SEQ ID NO: 475321 - DNA, 15 bp, Homo sapiens
tgctgaaaaaataaa

SEQ ID NO: 475322 - DNA, 15 bp, Homo sapiens
atgctgaaaaaataa

SEQ ID NO: 475323 - DNA, 15 bp, Homo sapiens
gatgctgaaaaaata

SEQ ID NO: 475324 - DNA, 15 bp, Homo sapiens
ggatgctgaaaaaat

SEQ ID NO: 475325 - DNA, 15 bp, Homo sapiens
tggatgctgaaaaaa

SEQ ID NO: 475326 - DNA, 15 bp, Homo sapiens
gtggatgctgaaaaa

SEQ ID NO: 475327 - DNA, 15 bp, Homo sapiens
ggtggatgctgaaaa

SEQ ID NO: 475328 - DNA, 15 bp, Homo sapiens
gggtggatgctgaaa

SEQ ID NO: 475329 - DNA, 15 bp, Homo sapiens
tgggtggatgctgaa

SEQ ID NO: 475330 - DNA, 15 bp, Homo sapiens
ttgggtggatgctga

SEQ ID NO: 475331 - DNA, 15 bp, Homo sapiens
gttgggtggatgctg

SEQ ID NO: 475332 - DNA, 15 bp, Homo sapiens
tgttgggtggatgct

SEQ ID NO: 475333 - DNA, 15 bp, Homo sapiens
atgttgggtggatgc

SEQ ID NO: 475334 - DNA, 15 bp, Homo sapiens
catgttgggtggatg

SEQ ID NO: 475335 - DNA, 15 bp, Homo sapiens
ccatgttgggtggat

SEQ ID NO: 475336 - DNA, 15 bp, Homo sapiens
accatgttgggtgga

SEQ ID NO: 475337 - DNA, 15 bp, Homo sapiens
caccatgttgggtgg

SEQ ID NO: 475338 - DNA, 15 bp, Homo sapiens
tcaccatgttgggtg

SEQ ID NO: 475339 - DNA, 15 bp, Homo sapiens
ttcaccatgttgggt

SEQ ID NO: 475340 - DNA, 15 bp, Homo sapiens
tttcaccatgttggg

SEQ ID NO: 475341 - DNA, 15 bp, Homo sapiens
tttttcaccatgttg

SEQ ID NO: 475342 - DNA, 15 bp, Homo sapiens
atttttcaccatgtt

SEQ ID NO: 475343 - DNA, 15 bp, Homo sapiens
aatttttcaccatgt

SEQ ID NO: 475344 - DNA, 15 bp, Homo sapiens
gaatttttcaccatg

SEQ ID NO: 475345 - DNA, 15 bp, Homo sapiens
ggaatttttcaccat

SEQ ID NO: 475346 - DNA, 15 bp, Homo sapiens
aggaatttttcacca

SEQ ID NO: 475347 - DNA, 15 bp, Homo sapiens
gaggaatttttcacc

SEQ ID NO: 475348 - DNA, 15 bp, Homo sapiens
agaggaatttttcac

SEQ ID NO: 475349 - DNA, 15 bp, Homo sapiens
aagaggaatttttca

SEQ ID NO: 475350 - DNA, 15 bp, Homo sapiens
aaagaggaatttttc

SEQ ID NO: 475351 - DNA, 15 bp, Homo sapiens
aaaagaggaattttt

SEQ ID NO: 475352 - DNA, 15 bp, Homo sapiens
gaaaagaggaatttt

SEQ ID NO: 475353 - DNA, 15 bp, Homo sapiens
agaaaagaggaattt

SEQ ID NO: 475354 - DNA, 15 bp, Homo sapiens
aagaaaagaggaatt

SEQ ID NO: 475355 - DNA, 15 bp, Homo sapiens
taagaaaagaggaat

SEQ ID NO: 475356 - DNA, 15 bp, Homo sapiens
ttaagaaaagaggaa

SEQ ID NO: 475357 - DNA, 15 bp, Homo sapiens
attaagaaaagagga

SEQ ID NO: 475358 - DNA, 15 bp, Homo sapiens
cattaagaaaagagg

SEQ ID NO: 475359 - DNA, 15 bp, Homo sapiens
acattaagaaaagag

SEQ ID NO: 475360 - DNA, 15 bp, Homo sapiens
gacattaagaaaaga

SEQ ID NO: 475361 - DNA, 15 bp, Homo sapiens
tgacattaagaaaag

SEQ ID NO: 475362 - DNA, 15 bp, Homo sapiens
gtgacattaagaaaa

SEQ ID NO: 475363 - DNA, 15 bp, Homo sapiens
agtgacattaagaaa

SEQ ID NO: 475364 - DNA, 15 bp, Homo sapiens
cagtgacattaagaa

SEQ ID NO: 475365 - DNA, 15 bp, Homo sapiens
tcagtgacattaaga

SEQ ID NO: 475366 - DNA, 15 bp, Homo sapiens
ttcagtgacattaag

SEQ ID NO: 475367 - DNA, 15 bp, Homo sapiens
gttcagtgacattaa

SEQ ID NO: 475368 - DNA, 15 bp, Homo sapiens
agttcagtgacatta

SEQ ID NO: 475369 - DNA, 15 bp, Homo sapiens
cagttcagtgacatt

SEQ ID NO: 475370 - DNA, 15 bp, Homo sapiens
acagttcagtgacat

SEQ ID NO: 475371 - DNA, 15 bp, Homo sapiens
tacagttcagtgaca

SEQ ID NO: 475372 - DNA, 15 bp, Homo sapiens
ttacagttcagtgac

SEQ ID NO: 475373 - DNA, 15 bp, Homo sapiens
tttacagttcagtga

SEQ ID NO: 475374 - DNA, 15 bp, Homo sapiens
gtttacagttcagtg

SEQ ID NO: 475375 - DNA, 15 bp, Homo sapiens
agtttacagttcagt

SEQ ID NO: 475376 - DNA, 15 bp, Homo sapiens
aagtttacagttcag

SEQ ID NO: 475377 - DNA, 15 bp, Homo sapiens
taagtttacagttca

SEQ ID NO: 475378 - DNA, 15 bp, Homo sapiens
ttaagtttacagttc

SEQ ID NO: 475379 - DNA, 15 bp, Homo sapiens
cttaagtttacagtt

SEQ ID NO: 475380 - DNA, 15 bp, Homo sapiens
tcttaagtttacagt

SEQ ID NO: 475381 - DNA, 15 bp, Homo sapiens
atcttaagtttacag

SEQ ID NO: 475382 - DNA, 15 bp, Homo sapiens
catcttaagtttaca

SEQ ID NO: 475383 - DNA, 15 bp, Homo sapiens
tcatcttaagtttac

SEQ ID NO: 475384 - DNA, 15 bp, Homo sapiens
ttcatcttaagttta

SEQ ID NO: 475385 - DNA, 15 bp, Homo sapiens
tttcatcttaagttt

SEQ ID NO: 475386 - DNA, 15 bp, Homo sapiens
ttttcatcttaagtt

SEQ ID NO: 475387 - DNA, 15 bp, Homo sapiens
tttttcatcttaagt

SEQ ID NO: 475388 - DNA, 15 bp, Homo sapiens
atttttcatcttaag

SEQ ID NO: 475389 - DNA, 15 bp, Homo sapiens
aatttttcatcttaa

SEQ ID NO: 475390 - DNA, 15 bp, Homo sapiens
caatttttcatctta

SEQ ID NO: 475391 - DNA, 15 bp, Homo sapiens
acaatttttcatctt

SEQ ID NO: 475392 - DNA, 15 bp, Homo sapiens
tacaatttttcatct

SEQ ID NO: 475393 - DNA, 15 bp, Homo sapiens
ttacaatttttcatc

SEQ ID NO: 475394 - DNA, 15 bp, Homo sapiens
tttacaatttttcat

SEQ ID NO: 475395 - DNA, 15 bp, Homo sapiens
atttacaatttttca

SEQ ID NO: 475396 - DNA, 15 bp, Homo sapiens
aatttacaatttttc

SEQ ID NO: 475397 - DNA, 15 bp, Homo sapiens
aaatttacaattttt

SEQ ID NO: 475398 - DNA, 15 bp, Homo sapiens
gaaatttacaatttt

SEQ ID NO: 475399 - DNA, 15 bp, Homo sapiens
tgaaatttacaattt

SEQ ID NO: 475400 - DNA, 15 bp, Homo sapiens
atgaaatttacaatt

SEQ ID NO: 475401 - DNA, 15 bp, Homo sapiens
catgaaatttacaat

SEQ ID NO: 475402 - DNA, 15 bp, Homo sapiens
gcatgaaatttacaa

SEQ ID NO: 475403 - DNA, 15 bp, Homo sapiens
agcatgaaatttaca

SEQ ID NO: 475404 - DNA, 15 bp, Homo sapiens
tagcatgaaatttac

SEQ ID NO: 475405 - DNA, 15 bp, Homo sapiens
atagcatgaaattta

SEQ ID NO: 475406 - DNA, 15 bp, Homo sapiens
tatagcatgaaattt

SEQ ID NO: 475407 - DNA, 15 bp, Homo sapiens
atatagcatgaaatt

SEQ ID NO: 475408 - DNA, 15 bp, Homo sapiens
tatatagcatgaaat

SEQ ID NO: 475409 - DNA, 15 bp, Homo sapiens
atatatagcatgaaa

SEQ ID NO: 475410 - DNA, 15 bp, Homo sapiens
tatatatagcatgaa

SEQ ID NO: 475411 - DNA, 15 bp, Homo sapiens
atatatatagcatga

SEQ ID NO: 475412 - DNA, 15 bp, Homo sapiens
aatatatatagcatg

SEQ ID NO: 475413 - DNA, 15 bp, Homo sapiens
aaatatatatagcat

SEQ ID NO: 475414 - DNA, 15 bp, Homo sapiens
gaaatatatatagca

SEQ ID NO: 475415 - DNA, 15 bp, Homo sapiens
tgaaatatatatagc

SEQ ID NO: 475416 - DNA, 15 bp, Homo sapiens
gtgaaatatatatag

SEQ ID NO: 475417 - DNA, 15 bp, Homo sapiens
ggtgaaatatatata

SEQ ID NO: 475418 - DNA, 15 bp, Homo sapiens
tggtgaaatatatat

SEQ ID NO: 475419 - DNA, 15 bp, Homo sapiens
gtggtgaaatatata

SEQ ID NO: 475420 - DNA, 15 bp, Homo sapiens
tgtggtgaaatatat

SEQ ID NO: 475421 - DNA, 15 bp, Homo sapiens
ttgtggtgaaatata

SEQ ID NO: 475422 - DNA, 15 bp, Homo sapiens
attgtggtgaaatat

SEQ ID NO: 475423 - DNA, 15 bp, Homo sapiens
tattgtggtgaaata

SEQ ID NO: 475424 - DNA, 15 bp, Homo sapiens
ttattgtggtgaaat

SEQ ID NO: 475425 - DNA, 15 bp, Homo sapiens
tttattgtggtgaaa

SEQ ID NO: 475426 - DNA, 15 bp, Homo sapiens
ttttattgtggtgaa

SEQ ID NO: 475427 - DNA, 15 bp, Homo sapiens
tttttattgtggtga

SEQ ID NO: 475428 - DNA, 15 bp, Homo sapiens
ttttttattgtggtg

SEQ ID NO: 475429 - DNA, 15 bp, Homo sapiens
tttttttattgtggt

SEQ ID NO: 475430 - DNA, 15 bp, Homo sapiens
atttttttattgtgg

SEQ ID NO: 475431 - DNA, 15 bp, Homo sapiens
aatttttttattgtg

SEQ ID NO: 475432 - DNA, 15 bp, Homo sapiens
gaatttttttattgt

SEQ ID NO: 475433 - DNA, 15 bp, Homo sapiens
ggaatttttttattg

SEQ ID NO: 475434 - DNA, 15 bp, Homo sapiens
aggaatttttttatt

SEQ ID NO: 475435 - DNA, 15 bp, Homo sapiens
aaggaatttttttat

SEQ ID NO: 475436 - DNA, 15 bp, Homo sapiens
caaggaattttttta

SEQ ID NO: 475437 - DNA, 15 bp, Homo sapiens
acaaggaattttttt

SEQ ID NO: 475438 - DNA, 15 bp, Homo sapiens
aacaaggaatttttt

SEQ ID NO: 475439 - DNA, 15 bp, Homo sapiens
gaacaaggaattttt

SEQ ID NO: 475440 - DNA, 15 bp, Homo sapiens
agaacaaggaatttt

SEQ ID NO: 475441 - DNA, 15 bp, Homo sapiens
aagaacaaggaattt

SEQ ID NO: 475442 - DNA, 15 bp, Homo sapiens
taagaacaaggaatt

SEQ ID NO: 475443 - DNA, 15 bp, Homo sapiens
ataagaacaaggaat

SEQ ID NO: 475444 - DNA, 15 bp, Homo sapiens
aataagaacaaggaa

SEQ ID NO: 475445 - DNA, 15 bp, Homo sapiens
caataagaacaagga

SEQ ID NO: 475446 - DNA, 15 bp, Homo sapiens
acaataagaacaagg

SEQ ID NO: 475447 - DNA, 15 bp, Homo sapiens
tacaataagaacaag

SEQ ID NO: 475448 - DNA, 15 bp, Homo sapiens
ctacaataagaacaa

SEQ ID NO: 475449 - DNA, 15 bp, Homo sapiens
actacaataagaaca

SEQ ID NO: 475450 - DNA, 15 bp, Homo sapiens
cactacaataagaac

SEQ ID NO: 475451 - DNA, 15 bp, Homo sapiens
ccactacaataagaa

SEQ ID NO: 475452 - DNA, 15 bp, Homo sapiens
accactacaataaga

SEQ ID NO: 475453 - DNA, 15 bp, Homo sapiens
gaccactacaataag

SEQ ID NO: 475454 - DNA, 15 bp, Homo sapiens
agaccactacaataa

SEQ ID NO: 475455 - DNA, 15 bp, Homo sapiens
gagaccactacaata

SEQ ID NO: 475456 - DNA, 15 bp, Homo sapiens
ggagaccactacaat

SEQ ID NO: 475457 - DNA, 15 bp, Homo sapiens
tggagaccactacaa

SEQ ID NO: 475458 - DNA, 15 bp, Homo sapiens
atggagaccactaca

SEQ ID NO: 475459 - DNA, 15 bp, Homo sapiens
catggagaccactac

SEQ ID NO: 475460 - DNA, 15 bp, Homo sapiens
acatggagaccacta

SEQ ID NO: 475461 - DNA, 15 bp, Homo sapiens
gacatggagaccact

SEQ ID NO: 475462 - DNA, 15 bp, Homo sapiens
agacatggagaccac

SEQ ID NO: 475463 - DNA, 15 bp, Homo sapiens
aagacatggagacca

SEQ ID NO: 475464 - DNA, 15 bp, Homo sapiens
gaagacatggagacc

SEQ ID NO: 475465 - DNA, 15 bp, Homo sapiens
tgaagacatggagac

SEQ ID NO: 475466 - DNA, 15 bp, Homo sapiens
ctgaagacatggaga

SEQ ID NO: 475467 - DNA, 15 bp, Homo sapiens
actgaagacatggag

SEQ ID NO: 475468 - DNA, 15 bp, Homo sapiens
tactgaagacatgga

SEQ ID NO: 475469 - DNA, 15 bp, Homo sapiens
atactgaagacatgg

SEQ ID NO: 475470 - DNA, 15 bp, Homo sapiens
aatactgaagacatg

SEQ ID NO: 475471 - DNA, 15 bp, Homo sapiens
aaatactgaagacat

SEQ ID NO: 475472 - DNA, 15 bp, Homo sapiens
gaaatactgaagaca

SEQ ID NO: 475473 - DNA, 15 bp, Homo sapiens
ggaaatactgaagac

SEQ ID NO: 475474 - DNA, 15 bp, Homo sapiens
aggaaatactgaaga

SEQ ID NO: 475475 - DNA, 15 bp, Homo sapiens
aaggaaatactgaag

SEQ ID NO: 475476 - DNA, 15 bp, Homo sapiens
gaaggaaatactgaa

SEQ ID NO: 475477 - DNA, 15 bp, Homo sapiens
ggaaggaaatactga

SEQ ID NO: 475478 - DNA, 15 bp, Homo sapiens
gggaaggaaatactg

SEQ ID NO: 475479 - DNA, 15 bp, Homo sapiens
ggggaaggaaatact

SEQ ID NO: 475480 - DNA, 15 bp, Homo sapiens
aggggaaggaaatac

SEQ ID NO: 475481 - DNA, 15 bp, Homo sapiens
aaggggaaggaaata

SEQ ID NO: 475482 - DNA, 15 bp, Homo sapiens
gaaggggaaggaaat

SEQ ID NO: 475483 - DNA, 15 bp, Homo sapiens
agaaggggaaggaaa

SEQ ID NO: 475484 - DNA, 15 bp, Homo sapiens
gagaaggggaaggaa

SEQ ID NO: 475485 - DNA, 15 bp, Homo sapiens
ggagaaggggaagga

SEQ ID NO: 475486 - DNA, 15 bp, Homo sapiens
tggagaaggggaagg

SEQ ID NO: 475487 - DNA, 15 bp, Homo sapiens
atggagaaggggaag

SEQ ID NO: 475488 - DNA, 15 bp, Homo sapiens
gatggagaaggggaa

SEQ ID NO: 475489 - DNA, 15 bp, Homo sapiens
agatggagaagggga

SEQ ID NO: 475490 - DNA, 15 bp, Homo sapiens
gagatggagaagggg

SEQ ID NO: 475491 - DNA, 15 bp, Homo sapiens
tgagatggagaaggg

SEQ ID NO: 475492 - DNA, 15 bp, Homo sapiens
gtgagatggagaagg

SEQ ID NO: 475493 - DNA, 15 bp, Homo sapiens
ggtgagatggagaag

SEQ ID NO: 475494 - DNA, 15 bp, Homo sapiens
aggtgagatggagaa

SEQ ID NO: 475495 - DNA, 15 bp, Homo sapiens
caggtgagatggaga

SEQ ID NO: 475496 - DNA, 15 bp, Homo sapiens
acaggtgagatggag

SEQ ID NO: 475497 - DNA, 15 bp, Homo sapiens
tacaggtgagatgga

SEQ ID NO: 475498 - DNA, 15 bp, Homo sapiens
atacaggtgagatgg

SEQ ID NO: 475499 - DNA, 15 bp, Homo sapiens
tatacaggtgagatg

SEQ ID NO: 475500 - DNA, 15 bp, Homo sapiens
gtatacaggtgagat

SEQ ID NO: 475501 - DNA, 15 bp, Homo sapiens
tgtatacaggtgaga

SEQ ID NO: 475502 - DNA, 15 bp, Homo sapiens
atgtatacaggtgag

SEQ ID NO: 475503 - DNA, 15 bp, Homo sapiens
aatgtatacaggtga

SEQ ID NO: 475504 - DNA, 15 bp, Homo sapiens
gaatgtatacaggtg

SEQ ID NO: 475505 - DNA, 15 bp, Homo sapiens
tgaatgtatacaggt

SEQ ID NO: 475506 - DNA, 15 bp, Homo sapiens
gtgaatgtatacagg

SEQ ID NO: 475507 - DNA, 15 bp, Homo sapiens
agtgaatgtatacag

SEQ ID NO: 475508 - DNA, 15 bp, Homo sapiens
aagtgaatgtataca

SEQ ID NO: 475509 - DNA, 15 bp, Homo sapiens
aaagtgaatgtatac

SEQ ID NO: 475510 - DNA, 15 bp, Homo sapiens
caaagtgaatgtata

SEQ ID NO: 475511 - DNA, 15 bp, Homo sapiens
ccaaagtgaatgtat

SEQ ID NO: 475512 - DNA, 15 bp, Homo sapiens
accaaagtgaatgta

SEQ ID NO: 475513 - DNA, 15 bp, Homo sapiens
taccaaagtgaatgt

SEQ ID NO: 475514 - DNA, 15 bp, Homo sapiens
ttaccaaagtgaatg

SEQ ID NO: 475515 - DNA, 15 bp, Homo sapiens
attaccaaagtgaat

SEQ ID NO: 475516 - DNA, 15 bp, Homo sapiens
aattaccaaagtgaa

SEQ ID NO: 475517 - DNA, 15 bp, Homo sapiens
taattaccaaagtga

SEQ ID NO: 475518 - DNA, 15 bp, Homo sapiens
ctaattaccaaagtg

SEQ ID NO: 475519 - DNA, 15 bp, Homo sapiens
gctaattaccaaagt

SEQ ID NO: 475520 - DNA, 15 bp, Homo sapiens
tgctaattaccaaag

SEQ ID NO: 475521 - DNA, 15 bp, Homo sapiens
atgctaattaccaaa

SEQ ID NO: 475522 - DNA, 15 bp, Homo sapiens
gatgctaattaccaa

SEQ ID NO: 475523 - DNA, 15 bp, Homo sapiens
agatgctaattacca

SEQ ID NO: 475524 - DNA, 15 bp, Homo sapiens
aagatgctaattacc

SEQ ID NO: 475525 - DNA, 15 bp, Homo sapiens
aaagatgctaattac

SEQ ID NO: 475526 - DNA, 15 bp, Homo sapiens
gaaagatgctaatta

SEQ ID NO: 475527 - DNA, 15 bp, Homo sapiens
agaaagatgctaatt

SEQ ID NO: 475528 - DNA, 15 bp, Homo sapiens
aagaaagatgctaat

SEQ ID NO: 475529 - DNA, 15 bp, Homo sapiens
taagaaagatgctaa

SEQ ID NO: 475530 - DNA, 15 bp, Homo sapiens
ttaagaaagatgcta

SEQ ID NO: 475531 - DNA, 15 bp, Homo sapiens
attaagaaagatgct

SEQ ID NO: 475532 - DNA, 15 bp, Homo sapiens
aattaagaaagatgc

SEQ ID NO: 475533 - DNA, 15 bp, Homo sapiens
aaattaagaaagatg

SEQ ID NO: 475534 - DNA, 15 bp, Homo sapiens
taaattaagaaagat

SEQ ID NO: 475535 - DNA, 15 bp, Homo sapiens
ataaattaagaaaga

SEQ ID NO: 475536 - DNA, 15 bp, Homo sapiens
aataaattaagaaag

SEQ ID NO: 475537 - DNA, 15 bp, Homo sapiens
caataaattaagaaa

SEQ ID NO: 475538 - DNA, 15 bp, Homo sapiens
ccaataaattaagaa

SEQ ID NO: 475539 - DNA, 15 bp, Homo sapiens
gccaataaattaaga

SEQ ID NO: 475540 - DNA, 15 bp, Homo sapiens
tgccaataaattaag

SEQ ID NO: 475541 - DNA, 15 bp, Homo sapiens
ctgccaataaattaa

SEQ ID NO: 475542 - DNA, 15 bp, Homo sapiens
cctgccaataaatta

SEQ ID NO: 475543 - DNA, 15 bp, Homo sapiens
tcctgccaataaatt

SEQ ID NO: 475544 - DNA, 15 bp, Homo sapiens
atcctgccaataaat

SEQ ID NO: 475545 - DNA, 15 bp, Homo sapiens
tatcctgccaataaa

SEQ ID NO: 475546 - DNA, 15 bp, Homo sapiens
ttatcctgccaataa

SEQ ID NO: 475547 - DNA, 15 bp, Homo sapiens
gttatcctgccaata

SEQ ID NO: 475548 - DNA, 15 bp, Homo sapiens
cgttatcctgccaat

SEQ ID NO: 475549 - DNA, 15 bp, Homo sapiens
acgttatcctgccaa

SEQ ID NO: 475550 - DNA, 15 bp, Homo sapiens
gacgttatcctgcca

SEQ ID NO: 475551 - DNA, 15 bp, Homo sapiens
tgacgttatcctgcc

SEQ ID NO: 475552 - DNA, 15 bp, Homo sapiens
atgacgttatcctgc

SEQ ID NO: 475553 - DNA, 15 bp, Homo sapiens
aatgacgttatcctg

SEQ ID NO: 475554 - DNA, 15 bp, Homo sapiens
taatgacgttatcct

SEQ ID NO: 475555 - DNA, 15 bp, Homo sapiens
ctaatgacgttatcc

SEQ ID NO: 475556 - DNA, 15 bp, Homo sapiens
gctaatgacgttatc

SEQ ID NO: 475557 - DNA, 15 bp, Homo sapiens
tgctaatgacgttat

SEQ ID NO: 475558 - DNA, 15 bp, Homo sapiens
ctgctaatgacgtta

SEQ ID NO: 475559 - DNA, 15 bp, Homo sapiens
tctgctaatgacgtt

SEQ ID NO: 475560 - DNA, 15 bp, Homo sapiens
ttctgctaatgacgt

SEQ ID NO: 475561 - DNA, 15 bp, Homo sapiens
attctgctaatgacg

SEQ ID NO: 475562 - DNA, 15 bp, Homo sapiens
gattctgctaatgac

SEQ ID NO: 475563 - DNA, 15 bp, Homo sapiens
agattctgctaatga

SEQ ID NO: 475564 - DNA, 15 bp, Homo sapiens
gagattctgctaatg

SEQ ID NO: 475565 - DNA, 15 bp, Homo sapiens
tgagattctgctaat

SEQ ID NO: 475566 - DNA, 15 bp, Homo sapiens
ttgagattctgctaa

SEQ ID NO: 475567 - DNA, 15 bp, Homo sapiens
gttgagattctgcta

SEQ ID NO: 475568 - DNA, 15 bp, Homo sapiens
agttgagattctgct

SEQ ID NO: 475569 - DNA, 15 bp, Homo sapiens
aagttgagattctgc

SEQ ID NO: 475570 - DNA, 15 bp, Homo sapiens
gaagttgagattctg

SEQ ID NO: 475571 - DNA, 15 bp, Homo sapiens
tgaagttgagattct

SEQ ID NO: 475572 - DNA, 15 bp, Homo sapiens
ctgaagttgagattc

SEQ ID NO: 475573 - DNA, 15 bp, Homo sapiens
tctgaagttgagatt

SEQ ID NO: 475574 - DNA, 15 bp, Homo sapiens
gtctgaagttgagat

SEQ ID NO: 475575 - DNA, 15 bp, Homo sapiens
ggtctgaagttgaga

SEQ ID NO: 475576 - DNA, 15 bp, Homo sapiens
gggtctgaagttgag

SEQ ID NO: 475577 - DNA, 15 bp, Homo sapiens
cgggtctgaagttga

SEQ ID NO: 475578 - DNA, 15 bp, Homo sapiens
acgggtctgaagttg

SEQ ID NO: 475579 - DNA, 15 bp, Homo sapiens
gacgggtctgaagtt

SEQ ID NO: 475580 - DNA, 15 bp, Homo sapiens
tgacgggtctgaagt

SEQ ID NO: 475581 - DNA, 15 bp, Homo sapiens
ttgacgggtctgaag

SEQ ID NO: 475582 - DNA, 15 bp, Homo sapiens
gttgacgggtctgaa

SEQ ID NO: 475583 - DNA, 15 bp, Homo sapiens
tgttgacgggtctga

SEQ ID NO: 475584 - DNA, 15 bp, Homo sapiens
ttgttgacgggtctg

SEQ ID NO: 475585 - DNA, 15 bp, Homo sapiens
tttgttgacgggtct

SEQ ID NO: 475586 - DNA, 15 bp, Homo sapiens
atttgttgacgggtc

SEQ ID NO: 475587 - DNA, 15 bp, Homo sapiens
aatttgttgacgggt

SEQ ID NO: 475588 - DNA, 15 bp, Homo sapiens
taatttgttgacggg

SEQ ID NO: 475589 - DNA, 15 bp, Homo sapiens
ttaatttgttgacgg

SEQ ID NO: 475590 - DNA, 15 bp, Homo sapiens
cttaatttgttgacg

SEQ ID NO: 475591 - DNA, 15 bp, Homo sapiens
tcttaatttgttgac

SEQ ID NO: 475592 - DNA, 15 bp, Homo sapiens
ttcttaatttgttga

SEQ ID NO: 475593 - DNA, 15 bp, Homo sapiens
tttcttaatttgttg

SEQ ID NO: 475594 - DNA, 15 bp, Homo sapiens
gtttcttaatttgtt

SEQ ID NO: 475595 - DNA, 15 bp, Homo sapiens
agtttcttaatttgt

SEQ ID NO: 475596 - DNA, 15 bp, Homo sapiens
cagtttcttaatttg

SEQ ID NO: 475597 - DNA, 15 bp, Homo sapiens
ccagtttcttaattt

SEQ ID NO: 475598 - DNA, 15 bp, Homo sapiens
tccagtttcttaatt

SEQ ID NO: 475599 - DNA, 15 bp, Homo sapiens
ctccagtttcttaat

SEQ ID NO: 475600 - DNA, 15 bp, Homo sapiens
cctccagtttcttaa

SEQ ID NO: 475601 - DNA, 15 bp, Homo sapiens
tcctccagtttctta

SEQ ID NO: 475602 - DNA, 15 bp, Homo sapiens
ctcctccagtttctt

SEQ ID NO: 475603 - DNA, 15 bp, Homo sapiens
actcctccagtttct

SEQ ID NO: 475604 - DNA, 15 bp, Homo sapiens
aactcctccagtttc

SEQ ID NO: 475605 - DNA, 15 bp, Homo sapiens
caactcctccagttt

SEQ ID NO: 475606 - DNA, 15 bp, Homo sapiens
gcaactcctccagtt

SEQ ID NO: 475607 - DNA, 15 bp, Homo sapiens
tgcaactcctccagt

SEQ ID NO: 475608 - DNA, 15 bp, Homo sapiens
ctgcaactcctccag

SEQ ID NO: 475609 - DNA, 15 bp, Homo sapiens
gctgcaactcctcca

SEQ ID NO: 475610 - DNA, 15 bp, Homo sapiens
tgctgcaactcctcc

SEQ ID NO: 475611 - DNA, 15 bp, Homo sapiens
ttgctgcaactcctc

SEQ ID NO: 475612 - DNA, 15 bp, Homo sapiens
tttgctgcaactcct

SEQ ID NO: 475613 - DNA, 15 bp, Homo sapiens
ttttgctgcaactcc

SEQ ID NO: 475614 - DNA, 15 bp, Homo sapiens
tttttgctgcaactc

SEQ ID NO: 475615 - DNA, 15 bp, Homo sapiens
ctttttgctgcaact

SEQ ID NO: 475616 - DNA, 15 bp, Homo sapiens
actttttgctgcaac

SEQ ID NO: 475617 - DNA, 15 bp, Homo sapiens
aactttttgctgcaa

SEQ ID NO: 475618 - DNA, 15 bp, Homo sapiens
aaactttttgctgca

SEQ ID NO: 475619 - DNA, 15 bp, Homo sapiens
gaaactttttgctgc

SEQ ID NO: 475620 - DNA, 15 bp, Homo sapiens
ggaaactttttgctg

SEQ ID NO: 475621 - DNA, 15 bp, Homo sapiens
aggaaactttttgct

SEQ ID NO: 475622 - DNA, 15 bp, Homo sapiens
taggaaactttttgc

SEQ ID NO: 475623 - DNA, 15 bp, Homo sapiens
gtaggaaactttttg

SEQ ID NO: 475624 - DNA, 15 bp, Homo sapiens
tgtaggaaacttttt

SEQ ID NO: 475625 - DNA, 15 bp, Homo sapiens
ttgtaggaaactttt

SEQ ID NO: 475626 - DNA, 15 bp, Homo sapiens
tttgtaggaaacttt

SEQ ID NO: 475627 - DNA, 15 bp, Homo sapiens
ctttgtaggaaactt

SEQ ID NO: 475628 - DNA, 15 bp, Homo sapiens
cctttgtaggaaact

SEQ ID NO: 475629 - DNA, 15 bp, Homo sapiens
ccctttgtaggaaac

SEQ ID NO: 475630 - DNA, 15 bp, Homo sapiens
cccctttgtaggaaa

SEQ ID NO: 475631 - DNA, 15 bp, Homo sapiens
tcccctttgtaggaa

SEQ ID NO: 475632 - DNA, 15 bp, Homo sapiens
gtcccctttgtagga

SEQ ID NO: 475633 - DNA, 15 bp, Homo sapiens
ggtcccctttgtagg

SEQ ID NO: 475634 - DNA, 15 bp, Homo sapiens
gggtcccctttgtag

SEQ ID NO: 475635 - DNA, 15 bp, Homo sapiens
ggggtcccctttgta

SEQ ID NO: 475636 - DNA, 15 bp, Homo sapiens
tggggtcccctttgt

SEQ ID NO: 475637 - DNA, 15 bp, Homo sapiens
atggggtcccctttg

SEQ ID NO: 475638 - DNA, 15 bp, Homo sapiens
aatggggtccccttt

SEQ ID NO: 475639 - DNA, 15 bp, Homo sapiens
caatggggtcccctt

SEQ ID NO: 475640 - DNA, 15 bp, Homo sapiens
acaatggggtcccct

SEQ ID NO: 475641 - DNA, 15 bp, Homo sapiens
tacaatggggtcccc

SEQ ID NO: 475642 - DNA, 15 bp, Homo sapiens
gtacaatggggtccc

SEQ ID NO: 475643 - DNA, 15 bp, Homo sapiens
tgtacaatggggtcc

SEQ ID NO: 475644 - DNA, 15 bp, Homo sapiens
ctgtacaatggggtc

SEQ ID NO: 475645 - DNA, 15 bp, Homo sapiens
gctgtacaatggggt

SEQ ID NO: 475646 - DNA, 15 bp, Homo sapiens
tgctgtacaatgggg

SEQ ID NO: 475647 - DNA, 15 bp, Homo sapiens
gtgctgtacaatggg

SEQ ID NO: 475648 - DNA, 15 bp, Homo sapiens
ggtgctgtacaatgg

SEQ ID NO: 475649 - DNA, 15 bp, Homo sapiens
cggtgctgtacaatg

SEQ ID NO: 475650 - DNA, 15 bp, Homo sapiens
ccggtgctgtacaat

SEQ ID NO: 475651 - DNA, 15 bp, Homo sapiens
gccggtgctgtacaa

SEQ ID NO: 475652 - DNA, 15 bp, Homo sapiens
ggccggtgctgtaca

SEQ ID NO: 475653 - DNA, 15 bp, Homo sapiens
cggccggtgctgtac

SEQ ID NO: 475654 - DNA, 15 bp, Homo sapiens
tcggccggtgctgta

SEQ ID NO: 475655 - DNA, 15 bp, Homo sapiens
atcggccggtgctgt

SEQ ID NO: 475656 - DNA, 15 bp, Homo sapiens
catcggccggtgctg

SEQ ID NO: 475657 - DNA, 15 bp, Homo sapiens
gcatcggccggtgct

SEQ ID NO: 475658 - DNA, 15 bp, Homo sapiens
agcatcggccggtgc

SEQ ID NO: 475659 - DNA, 15 bp, Homo sapiens
cagcatcggccggtg

SEQ ID NO: 475660 - DNA, 15 bp, Homo sapiens
ccagcatcggccggt

SEQ ID NO: 475661 - DNA, 15 bp, Homo sapiens
tccagcatcggccgg

SEQ ID NO: 475662 - DNA, 15 bp, Homo sapiens
ctccagcatcggccg

SEQ ID NO: 475663 - DNA, 15 bp, Homo sapiens
cctccagcatcggcc

SEQ ID NO: 475664 - DNA, 15 bp, Homo sapiens
tcctccagcatcggc

SEQ ID NO: 475665 - DNA, 15 bp, Homo sapiens
ctcctccagcatcgg

SEQ ID NO: 475666 - DNA, 15 bp, Homo sapiens
tctcctccagcatcg

SEQ ID NO: 475667 - DNA, 15 bp, Homo sapiens
ctctcctccagcatc

SEQ ID NO: 475668 - DNA, 15 bp, Homo sapiens
tctctcctccagcat

SEQ ID NO: 475669 - DNA, 15 bp, Homo sapiens
ttctctcctccagca

SEQ ID NO: 475670 - DNA, 15 bp, Homo sapiens
attctctcctccagc

SEQ ID NO: 475671 - DNA, 15 bp, Homo sapiens
gattctctcctccag

SEQ ID NO: 475672 - DNA, 15 bp, Homo sapiens
cgattctctcctcca

SEQ ID NO: 475673 - DNA, 15 bp, Homo sapiens
acgattctctcctcc

SEQ ID NO: 475674 - DNA, 15 bp, Homo sapiens
cacgattctctcctc

SEQ ID NO: 475675 - DNA, 15 bp, Homo sapiens
ccacgattctctcct

SEQ ID NO: 475676 - DNA, 15 bp, Homo sapiens
tccacgattctctcc

SEQ ID NO: 475677 - DNA, 15 bp, Homo sapiens
ctccacgattctctc

SEQ ID NO: 475678 - DNA, 15 bp, Homo sapiens
gctccacgattctct

SEQ ID NO: 475679 - DNA, 15 bp, Homo sapiens
agctccacgattctc

SEQ ID NO: 475680 - DNA, 15 bp, Homo sapiens
cagctccacgattct

SEQ ID NO: 475681 - DNA, 15 bp, Homo sapiens
acagctccacgattc

SEQ ID NO: 475682 - DNA, 15 bp, Homo sapiens
aacagctccacgatt

SEQ ID NO: 475683 - DNA, 15 bp, Homo sapiens
aaacagctccacgat

SEQ ID NO: 475684 - DNA, 15 bp, Homo sapiens
taaacagctccacga

SEQ ID NO: 475685 - DNA, 15 bp, Homo sapiens
ctaaacagctccacg

SEQ ID NO: 475686 - DNA, 15 bp, Homo sapiens
tctaaacagctccac

SEQ ID NO: 475687 - DNA, 15 bp, Homo sapiens
ttctaaacagctcca

SEQ ID NO: 475688 - DNA, 15 bp, Homo sapiens
tttctaaacagctcc

SEQ ID NO: 475689 - DNA, 15 bp, Homo sapiens
gtttctaaacagctc

SEQ ID NO: 475690 - DNA, 15 bp, Homo sapiens
agtttctaaacagct

SEQ ID NO: 475691 - DNA, 15 bp, Homo sapiens
aagtttctaaacagc

SEQ ID NO: 475692 - DNA, 15 bp, Homo sapiens
taagtttctaaacag

SEQ ID NO: 475693 - DNA, 15 bp, Homo sapiens
ttaagtttctaaaca

SEQ ID NO: 475694 - DNA, 15 bp, Homo sapiens
attaagtttctaaac

SEQ ID NO: 475695 - DNA, 15 bp, Homo sapiens
cattaagtttctaaa

SEQ ID NO: 475696 - DNA, 15 bp, Homo sapiens
tcattaagtttctaa

SEQ ID NO: 475697 - DNA, 15 bp, Homo sapiens
ttcattaagtttcta

SEQ ID NO: 475698 - DNA, 15 bp, Homo sapiens
tttcattaagtttct

SEQ ID NO: 475699 - DNA, 15 bp, Homo sapiens
ttttcattaagtttc

SEQ ID NO: 475700 - DNA, 15 bp, Homo sapiens
cttttcattaagttt

SEQ ID NO: 475701 - DNA, 15 bp, Homo sapiens
ccttttcattaagtt

SEQ ID NO: 475702 - DNA, 15 bp, Homo sapiens
accttttcattaagt

SEQ ID NO: 475703 - DNA, 15 bp, Homo sapiens
taccttttcattaag

SEQ ID NO: 475704 - DNA, 15 bp, Homo sapiens
ttaccttttcattaa

SEQ ID NO: 475705 - DNA, 15 bp, Homo sapiens
attaccttttcatta

SEQ ID NO: 475706 - DNA, 15 bp, Homo sapiens
aattaccttttcatt

SEQ ID NO: 475707 - DNA, 15 bp, Homo sapiens
aaattaccttttcat

SEQ ID NO: 475708 - DNA, 15 bp, Homo sapiens
taaattaccttttca

SEQ ID NO: 475709 - DNA, 15 bp, Homo sapiens
ctaaattaccttttc

SEQ ID NO: 475710 - DNA, 15 bp, Homo sapiens
gctaaattacctttt

SEQ ID NO: 475711 - DNA, 15 bp, Homo sapiens
tgctaaattaccttt

SEQ ID NO: 475712 - DNA, 15 bp, Homo sapiens
atgctaaattacctt

SEQ ID NO: 475713 - DNA, 15 bp, Homo sapiens
gatgctaaattacct

SEQ ID NO: 475714 - DNA, 15 bp, Homo sapiens
ggatgctaaattacc

SEQ ID NO: 475715 - DNA, 15 bp, Homo sapiens
aggatgctaaattac

SEQ ID NO: 475716 - DNA, 15 bp, Homo sapiens
aaggatgctaaatta

SEQ ID NO: 475717 - DNA, 15 bp, Homo sapiens
caaggatgctaaatt

SEQ ID NO: 475718 - DNA, 15 bp, Homo sapiens
acaaggatgctaaat

SEQ ID NO: 475719 - DNA, 15 bp, Homo sapiens
gacaaggatgctaaa

SEQ ID NO: 475720 - DNA, 15 bp, Homo sapiens
ggacaaggatgctaa

SEQ ID NO: 475721 - DNA, 15 bp, Homo sapiens
gggacaaggatgcta

SEQ ID NO: 475722 - DNA, 15 bp, Homo sapiens
agggacaaggatgct

SEQ ID NO: 475723 - DNA, 15 bp, Homo sapiens
aagggacaaggatgc

SEQ ID NO: 475724 - DNA, 15 bp, Homo sapiens
aaagggacaaggatg

SEQ ID NO: 475725 - DNA, 15 bp, Homo sapiens
gaaagggacaaggat

SEQ ID NO: 475726 - DNA, 15 bp, Homo sapiens
ggaaagggacaagga

SEQ ID NO: 475727 - DNA, 15 bp, Homo sapiens
gggaaagggacaagg

SEQ ID NO: 475728 - DNA, 15 bp, Homo sapiens
agggaaagggacaag

SEQ ID NO: 475729 - DNA, 15 bp, Homo sapiens
gagggaaagggacaa

SEQ ID NO: 475730 - DNA, 15 bp, Homo sapiens
tgagggaaagggaca

SEQ ID NO: 475731 - DNA, 15 bp, Homo sapiens
atgagggaaagggac

SEQ ID NO: 475732 - DNA, 15 bp, Homo sapiens
gatgagggaaaggga

SEQ ID NO: 475733 - DNA, 15 bp, Homo sapiens
agatgagggaaaggg

SEQ ID NO: 475734 - DNA, 15 bp, Homo sapiens
tagatgagggaaagg

SEQ ID NO: 475735 - DNA, 15 bp, Homo sapiens
ttagatgagggaaag

SEQ ID NO: 475736 - DNA, 15 bp, Homo sapiens
tttagatgagggaaa

SEQ ID NO: 475737 - DNA, 15 bp, Homo sapiens
ttttagatgagggaa

SEQ ID NO: 475738 - DNA, 15 bp, Homo sapiens
tttttagatgaggga

SEQ ID NO: 475739 - DNA, 15 bp, Homo sapiens
ttttttagatgaggg

SEQ ID NO: 475740 - DNA, 15 bp, Homo sapiens
attttttagatgagg

SEQ ID NO: 475741 - DNA, 15 bp, Homo sapiens
tattttttagatgag

SEQ ID NO: 475742 - DNA, 15 bp, Homo sapiens
gtattttttagatga

SEQ ID NO: 475743 - DNA, 15 bp, Homo sapiens
ggtattttttagatg

SEQ ID NO: 475744 - DNA, 15 bp, Homo sapiens
aggtattttttagat

SEQ ID NO: 475745 - DNA, 15 bp, Homo sapiens
taggtattttttaga

SEQ ID NO: 475746 - DNA, 15 bp, Homo sapiens
ttaggtattttttag

SEQ ID NO: 475747 - DNA, 15 bp, Homo sapiens
tttaggtatttttta

SEQ ID NO: 475748 - DNA, 15 bp, Homo sapiens
ctttaggtatttttt

SEQ ID NO: 475749 - DNA, 15 bp, Homo sapiens
tctttaggtattttt

SEQ ID NO: 475750 - DNA, 15 bp, Homo sapiens
gtctttaggtatttt

SEQ ID NO: 475751 - DNA, 15 bp, Homo sapiens
agtctttaggtattt

SEQ ID NO: 475752 - DNA, 15 bp, Homo sapiens
gagtctttaggtatt

SEQ ID NO: 475753 - DNA, 15 bp, Homo sapiens
tgagtctttaggtat

SEQ ID NO: 475754 - DNA, 15 bp, Homo sapiens
gtgagtctttaggta

SEQ ID NO: 475755 - DNA, 15 bp, Homo sapiens
cgtgagtctttaggt

SEQ ID NO: 475756 - DNA, 15 bp, Homo sapiens
acgtgagtctttagg

SEQ ID NO: 475757 - DNA, 15 bp, Homo sapiens
cacgtgagtctttag

SEQ ID NO: 475758 - DNA, 15 bp, Homo sapiens
ccacgtgagtcttta

SEQ ID NO: 475759 - DNA, 15 bp, Homo sapiens
accacgtgagtcttt

SEQ ID NO: 475760 - DNA, 15 bp, Homo sapiens
taccacgtgagtctt

SEQ ID NO: 475761 - DNA, 15 bp, Homo sapiens
ctaccacgtgagtct

SEQ ID NO: 475762 - DNA, 15 bp, Homo sapiens
tctaccacgtgagtc

SEQ ID NO: 475763 - DNA, 15 bp, Homo sapiens
ctctaccacgtgagt

SEQ ID NO: 475764 - DNA, 15 bp, Homo sapiens
actctaccacgtgag

SEQ ID NO: 475765 - DNA, 15 bp, Homo sapiens
cactctaccacgtga

SEQ ID NO: 475766 - DNA, 15 bp, Homo sapiens
tcactctaccacgtg

SEQ ID NO: 475767 - DNA, 15 bp, Homo sapiens
ctcactctaccacgt

SEQ ID NO: 475768 - DNA, 15 bp, Homo sapiens
tctcactctaccacg

SEQ ID NO: 475769 - DNA, 15 bp, Homo sapiens
ctctcactctaccac

SEQ ID NO: 475770 - DNA, 15 bp, Homo sapiens
cctctcactctacca

SEQ ID NO: 475771 - DNA, 15 bp, Homo sapiens
gcctctcactctacc

SEQ ID NO: 475772 - DNA, 15 bp, Homo sapiens
cgcctctcactctac

SEQ ID NO: 475773 - DNA, 15 bp, Homo sapiens
ccgcctctcactcta

SEQ ID NO: 475774 - DNA, 15 bp, Homo sapiens
cccgcctctcactct

SEQ ID NO: 475775 - DNA, 15 bp, Homo sapiens
gcccgcctctcactc

SEQ ID NO: 475776 - DNA, 15 bp, Homo sapiens
agcccgcctctcact

SEQ ID NO: 475777 - DNA, 15 bp, Homo sapiens
cagcccgcctctcac

SEQ ID NO: 475778 - DNA, 15 bp, Homo sapiens
tcagcccgcctctca

SEQ ID NO: 475779 - DNA, 15 bp, Homo sapiens
gtcagcccgcctctc

SEQ ID NO: 475780 - DNA, 15 bp, Homo sapiens
agtcagcccgcctct

SEQ ID NO: 475781 - DNA, 15 bp, Homo sapiens
aagtcagcccgcctc

SEQ ID NO: 475782 - DNA, 15 bp, Homo sapiens
gaagtcagcccgcct

SEQ ID NO: 475783 - DNA, 15 bp, Homo sapiens
agaagtcagcccgcc

SEQ ID NO: 475784 - DNA, 15 bp, Homo sapiens
cagaagtcagcccgc

SEQ ID NO: 475785 - DNA, 15 bp, Homo sapiens
ccagaagtcagcccg

SEQ ID NO: 475786 - DNA, 15 bp, Homo sapiens
accagaagtcagccc

SEQ ID NO: 475787 - DNA, 15 bp, Homo sapiens
gaccagaagtcagcc

SEQ ID NO: 475788 - DNA, 15 bp, Homo sapiens
tgaccagaagtcagc

SEQ ID NO: 475789 - DNA, 15 bp, Homo sapiens
atgaccagaagtcag

SEQ ID NO: 475790 - DNA, 15 bp, Homo sapiens
catgaccagaagtca

SEQ ID NO: 475791 - DNA, 15 bp, Homo sapiens
ccatgaccagaagtc

SEQ ID NO: 475792 - DNA, 15 bp, Homo sapiens
gccatgaccagaagt

SEQ ID NO: 475793 - DNA, 15 bp, Homo sapiens
ggccatgaccagaag

SEQ ID NO: 475794 - DNA, 15 bp, Homo sapiens
cggccatgaccagaa

SEQ ID NO: 475795 - DNA, 15 bp, Homo sapiens
acggccatgaccaga

SEQ ID NO: 475796 - DNA, 15 bp, Homo sapiens
cacggccatgaccag

SEQ ID NO: 475797 - DNA, 15 bp, Homo sapiens
ccacggccatgacca

SEQ ID NO: 475798 - DNA, 15 bp, Homo sapiens
gccacggccatgacc

SEQ ID NO: 475799 - DNA, 15 bp, Homo sapiens
cgccacggccatgac

SEQ ID NO: 475800 - DNA, 15 bp, Homo sapiens
gcgccacggccatga

SEQ ID NO: 475801 - DNA, 15 bp, Homo sapiens
cgcgccacggccatg

SEQ ID NO: 475802 - DNA, 15 bp, Homo sapiens
acgcgccacggccat

SEQ ID NO: 475803 - DNA, 15 bp, Homo sapiens
cacgcgccacggcca

SEQ ID NO: 475804 - DNA, 15 bp, Homo sapiens
tcacgcgccacggcc

SEQ ID NO: 475805 - DNA, 15 bp, Homo sapiens
ctcacgcgccacggc

SEQ ID NO: 475806 - DNA, 15 bp, Homo sapiens
gctcacgcgccacgg

SEQ ID NO: 475807 - DNA, 15 bp, Homo sapiens
ggctcacgcgccacg

SEQ ID NO: 475808 - DNA, 15 bp, Homo sapiens
gggctcacgcgccac

SEQ ID NO: 475809 - DNA, 15 bp, Homo sapiens
tgggctcacgcgcca

SEQ ID NO: 475810 - DNA, 15 bp, Homo sapiens
atgggctcacgcgcc

SEQ ID NO: 475811 - DNA, 15 bp, Homo sapiens
gatgggctcacgcgc

SEQ ID NO: 475812 - DNA, 15 bp, Homo sapiens
agatgggctcacgcg

SEQ ID NO: 475813 - DNA, 15 bp, Homo sapiens
aagatgggctcacgc

SEQ ID NO: 475814 - DNA, 15 bp, Homo sapiens
gaagatgggctcacg

SEQ ID NO: 475815 - DNA, 15 bp, Homo sapiens
agaagatgggctcac

SEQ ID NO: 475816 - DNA, 15 bp, Homo sapiens
gagaagatgggctca

SEQ ID NO: 475817 - DNA, 15 bp, Homo sapiens
agagaagatgggctc

SEQ ID NO: 475818 - DNA, 15 bp, Homo sapiens
aagagaagatgggct

SEQ ID NO: 475819 - DNA, 15 bp, Homo sapiens
aaagagaagatgggc

SEQ ID NO: 475820 - DNA, 15 bp, Homo sapiens
gaaagagaagatggg

SEQ ID NO: 475821 - DNA, 15 bp, Homo sapiens
ggaaagagaagatgg

SEQ ID NO: 475822 - DNA, 15 bp, Homo sapiens
aggaaagagaagatg

SEQ ID NO: 475823 - DNA, 15 bp, Homo sapiens
gaggaaagagaagat

SEQ ID NO: 475824 - DNA, 15 bp, Homo sapiens
tgaggaaagagaaga

SEQ ID NO: 475825 - DNA, 15 bp, Homo sapiens
ctgaggaaagagaag

SEQ ID NO: 475826 - DNA, 15 bp, Homo sapiens
actgaggaaagagaa

SEQ ID NO: 475827 - DNA, 15 bp, Homo sapiens
cactgaggaaagaga

SEQ ID NO: 475828 - DNA, 15 bp, Homo sapiens
gcactgaggaaagag

SEQ ID NO: 475829 - DNA, 15 bp, Homo sapiens
ggcactgaggaaaga

SEQ ID NO: 475830 - DNA, 15 bp, Homo sapiens
aggcactgaggaaag

SEQ ID NO: 475831 - DNA, 15 bp, Homo sapiens
aaggcactgaggaaa

SEQ ID NO: 475832 - DNA, 15 bp, Homo sapiens
aaaggcactgaggaa

SEQ ID NO: 475833 - DNA, 15 bp, Homo sapiens
caaaggcactgagga

SEQ ID NO: 475834 - DNA, 15 bp, Homo sapiens
acaaaggcactgagg

SEQ ID NO: 475835 - DNA, 15 bp, Homo sapiens
cacaaaggcactgag

SEQ ID NO: 475836 - DNA, 15 bp, Homo sapiens
ccacaaaggcactga

SEQ ID NO: 475837 - DNA, 15 bp, Homo sapiens
accacaaaggcactg

SEQ ID NO: 475838 - DNA, 15 bp, Homo sapiens
caccacaaaggcact

SEQ ID NO: 475839 - DNA, 15 bp, Homo sapiens
ccaccacaaaggcac

SEQ ID NO: 475840 - DNA, 15 bp, Homo sapiens
tccaccacaaaggca

SEQ ID NO: 475841 - DNA, 15 bp, Homo sapiens
ctccaccacaaaggc

SEQ ID NO: 475842 - DNA, 15 bp, Homo sapiens
gctccaccacaaagg

SEQ ID NO: 475843 - DNA, 15 bp, Homo sapiens
cgctccaccacaaag

SEQ ID NO: 475844 - DNA, 15 bp, Homo sapiens
ccgctccaccacaaa

SEQ ID NO: 475845 - DNA, 15 bp, Homo sapiens
gccgctccaccacaa

SEQ ID NO: 475846 - DNA, 15 bp, Homo sapiens
tgccgctccaccaca

SEQ ID NO: 475847 - DNA, 15 bp, Homo sapiens
ctgccgctccaccac

SEQ ID NO: 475848 - DNA, 15 bp, Homo sapiens
gctgccgctccacca

SEQ ID NO: 475849 - DNA, 15 bp, Homo sapiens
ggctgccgctccacc

SEQ ID NO: 475850 - DNA, 15 bp, Homo sapiens
gggctgccgctccac

SEQ ID NO: 475851 - DNA, 15 bp, Homo sapiens
agggctgccgctcca

SEQ ID NO: 475852 - DNA, 15 bp, Homo sapiens
cagggctgccgctcc

SEQ ID NO: 475853 - DNA, 15 bp, Homo sapiens
gcagggctgccgctc

SEQ ID NO: 475854 - DNA, 15 bp, Homo sapiens
tgcagggctgccgct

SEQ ID NO: 475855 - DNA, 15 bp, Homo sapiens
atgcagggctgccgc

SEQ ID NO: 475856 - DNA, 15 bp, Homo sapiens
catgcagggctgccg

SEQ ID NO: 475857 - DNA, 15 bp, Homo sapiens
gcatgcagggctgcc

SEQ ID NO: 475858 - DNA, 15 bp, Homo sapiens
ggcatgcagggctgc

SEQ ID NO: 475859 - DNA, 15 bp, Homo sapiens
gggcatgcagggctg

SEQ ID NO: 475860 - DNA, 15 bp, Homo sapiens
tgggcatgcagggct

SEQ ID NO: 475861 - DNA, 15 bp, Homo sapiens
atgggcatgcagggc

SEQ ID NO: 475862 - DNA, 15 bp, Homo sapiens
catgggcatgcaggg

SEQ ID NO: 475863 - DNA, 15 bp, Homo sapiens
gcatgggcatgcagg

SEQ ID NO: 475864 - DNA, 15 bp, Homo sapiens
tgcatgggcatgcag

SEQ ID NO: 475865 - DNA, 15 bp, Homo sapiens
atgcatgggcatgca

SEQ ID NO: 475866 - DNA, 15 bp, Homo sapiens
gatgcatgggcatgc

SEQ ID NO: 475867 - DNA, 15 bp, Homo sapiens
ggatgcatgggcatg

SEQ ID NO: 475868 - DNA, 15 bp, Homo sapiens
aggatgcatgggcat

SEQ ID NO: 475869 - DNA, 15 bp, Homo sapiens
caggatgcatgggca

SEQ ID NO: 475870 - DNA, 15 bp, Homo sapiens
tcaggatgcatgggc

SEQ ID NO: 475871 - DNA, 15 bp, Homo sapiens
gtcaggatgcatggg

SEQ ID NO: 475872 - DNA, 15 bp, Homo sapiens
ggtcaggatgcatgg

SEQ ID NO: 475873 - DNA, 15 bp, Homo sapiens
cggtcaggatgcatg

SEQ ID NO: 475874 - DNA, 15 bp, Homo sapiens
ccggtcaggatgcat

SEQ ID NO: 475875 - DNA, 15 bp, Homo sapiens
gccggtcaggatgca

SEQ ID NO: 475876 - DNA, 15 bp, Homo sapiens
ggccggtcaggatgc

SEQ ID NO: 475877 - DNA, 15 bp, Homo sapiens
gggccggtcaggatg

SEQ ID NO: 475878 - DNA, 15 bp, Homo sapiens
ggggccggtcaggat

SEQ ID NO: 475879 - DNA, 15 bp, Homo sapiens
aggggccggtcagga

SEQ ID NO: 475880 - DNA, 15 bp, Homo sapiens
gaggggccggtcagg

SEQ ID NO: 475881 - DNA, 15 bp, Homo sapiens
cgaggggccggtcag

SEQ ID NO: 475882 - DNA, 15 bp, Homo sapiens
acgaggggccggtca

SEQ ID NO: 475883 - DNA, 15 bp, Homo sapiens
gacgaggggccggtc

SEQ ID NO: 475884 - DNA, 15 bp, Homo sapiens
tgacgaggggccggt

SEQ ID NO: 475885 - DNA, 15 bp, Homo sapiens
atgacgaggggccgg

SEQ ID NO: 475886 - DNA, 15 bp, Homo sapiens
gatgacgaggggccg

SEQ ID NO: 475887 - DNA, 15 bp, Homo sapiens
tgatgacgaggggcc

SEQ ID NO: 475888 - DNA, 15 bp, Homo sapiens
ttgatgacgaggggc

SEQ ID NO: 475889 - DNA, 15 bp, Homo sapiens
cttgatgacgagggg

SEQ ID NO: 475890 - DNA, 15 bp, Homo sapiens
tcttgatgacgaggg

SEQ ID NO: 475891 - DNA, 15 bp, Homo sapiens
gtcttgatgacgagg

SEQ ID NO: 475892 - DNA, 15 bp, Homo sapiens
ggtcttgatgacgag

SEQ ID NO: 475893 - DNA, 15 bp, Homo sapiens
cggtcttgatgacga

SEQ ID NO: 475894 - DNA, 15 bp, Homo sapiens
ccggtcttgatgacg

SEQ ID NO: 475895 - DNA, 15 bp, Homo sapiens
gccggtcttgatgac

SEQ ID NO: 475896 - DNA, 15 bp, Homo sapiens
cgccggtcttgatga

SEQ ID NO: 475897 - DNA, 15 bp, Homo sapiens
acgccggtcttgatg

SEQ ID NO: 475898 - DNA, 15 bp, Homo sapiens
gacgccggtcttgat

SEQ ID NO: 475899 - DNA, 15 bp, Homo sapiens
ggacgccggtcttga

SEQ ID NO: 475900 - DNA, 15 bp, Homo sapiens
tggacgccggtcttg

SEQ ID NO: 475901 - DNA, 15 bp, Homo sapiens
ctggacgccggtctt

SEQ ID NO: 475902 - DNA, 15 bp, Homo sapiens
actggacgccggtct

SEQ ID NO: 475903 - DNA, 15 bp, Homo sapiens
aactggacgccggtc

SEQ ID NO: 475904 - DNA, 15 bp, Homo sapiens
gaactggacgccggt

SEQ ID NO: 475905 - DNA, 15 bp, Homo sapiens
tgaactggacgccgg

SEQ ID NO: 475906 - DNA, 15 bp, Homo sapiens
gtgaactggacgccg

SEQ ID NO: 475907 - DNA, 15 bp, Homo sapiens
agtgaactggacgcc

SEQ ID NO: 475908 - DNA, 15 bp, Homo sapiens
tagtgaactggacgc

SEQ ID NO: 475909 - DNA, 15 bp, Homo sapiens
gtagtgaactggacg

SEQ ID NO: 475910 - DNA, 15 bp, Homo sapiens
agtagtgaactggac

SEQ ID NO: 475911 - DNA, 15 bp, Homo sapiens
tagtagtgaactgga

SEQ ID NO: 475912 - DNA, 15 bp, Homo sapiens
ttagtagtgaactgg

SEQ ID NO: 475913 - DNA, 15 bp, Homo sapiens
tttagtagtgaactg

SEQ ID NO: 475914 - DNA, 15 bp, Homo sapiens
ctttagtagtgaact

SEQ ID NO: 475915 - DNA, 15 bp, Homo sapiens
actttagtagtgaac

SEQ ID NO: 475916 - DNA, 15 bp, Homo sapiens
gactttagtagtgaa

SEQ ID NO: 475917 - DNA, 15 bp, Homo sapiens
tgactttagtagtga

SEQ ID NO: 475918 - DNA, 15 bp, Homo sapiens
ctgactttagtagtg

SEQ ID NO: 475919 - DNA, 15 bp, Homo sapiens
cctgactttagtagt

SEQ ID NO: 475920 - DNA, 15 bp, Homo sapiens
acctgactttagtag

SEQ ID NO: 475921 - DNA, 15 bp, Homo sapiens
tacctgactttagta

SEQ ID NO: 475922 - DNA, 15 bp, Homo sapiens
ctacctgactttagt

SEQ ID NO: 475923 - DNA, 15 bp, Homo sapiens
cctacctgactttag

SEQ ID NO: 475924 - DNA, 15 bp, Homo sapiens
gcctacctgacttta

SEQ ID NO: 475925 - DNA, 15 bp, Homo sapiens
ggcctacctgacttt

SEQ ID NO: 475926 - DNA, 15 bp, Homo sapiens
tggcctacctgactt

SEQ ID NO: 475927 - DNA, 15 bp, Homo sapiens
atggcctacctgact

SEQ ID NO: 475928 - DNA, 15 bp, Homo sapiens
catggcctacctgac

SEQ ID NO: 475929 - DNA, 15 bp, Homo sapiens
gcatggcctacctga

SEQ ID NO: 475930 - DNA, 15 bp, Homo sapiens
ggcatggcctacctg

SEQ ID NO: 475931 - DNA, 15 bp, Homo sapiens
tggcatggcctacct

SEQ ID NO: 475932 - DNA, 15 bp, Homo sapiens
gtggcatggcctacc

SEQ ID NO: 475933 - DNA, 15 bp, Homo sapiens
agtggcatggcctac

SEQ ID NO: 475934 - DNA, 15 bp, Homo sapiens
aagtggcatggccta

SEQ ID NO: 475935 - DNA, 15 bp, Homo sapiens
gaagtggcatggcct

SEQ ID NO: 475936 - DNA, 15 bp, Homo sapiens
ggaagtggcatggcc

SEQ ID NO: 475937 - DNA, 15 bp, Homo sapiens
tggaagtggcatggc

SEQ ID NO: 475938 - DNA, 15 bp, Homo sapiens
atggaagtggcatgg

SEQ ID NO: 475939 - DNA, 15 bp, Homo sapiens
aatggaagtggcatg

SEQ ID NO: 475940 - DNA, 15 bp, Homo sapiens
aaatggaagtggcat

SEQ ID NO: 475941 - DNA, 15 bp, Homo sapiens
gaaatggaagtggca

SEQ ID NO: 475942 - DNA, 15 bp, Homo sapiens
ggaaatggaagtggc

SEQ ID NO: 475943 - DNA, 15 bp, Homo sapiens
tggaaatggaagtgg

SEQ ID NO: 475944 - DNA, 15 bp, Homo sapiens
ctggaaatggaagtg

SEQ ID NO: 475945 - DNA, 15 bp, Homo sapiens
actggaaatggaagt

SEQ ID NO: 475946 - DNA, 15 bp, Homo sapiens
tactggaaatggaag

SEQ ID NO: 475947 - DNA, 15 bp, Homo sapiens
ctactggaaatggaa

SEQ ID NO: 475948 - DNA, 15 bp, Homo sapiens
tctactggaaatgga

SEQ ID NO: 475949 - DNA, 15 bp, Homo sapiens
ctctactggaaatgg

SEQ ID NO: 475950 - DNA, 15 bp, Homo sapiens
tctctactggaaatg

SEQ ID NO: 475951 - DNA, 15 bp, Homo sapiens
atctctactggaaat

SEQ ID NO: 475952 - DNA, 15 bp, Homo sapiens
aatctctactggaaa

SEQ ID NO: 475953 - DNA, 15 bp, Homo sapiens
aaatctctactggaa

SEQ ID NO: 475954 - DNA, 15 bp, Homo sapiens
aaaatctctactgga

SEQ ID NO: 475955 - DNA, 15 bp, Homo sapiens
taaaatctctactgg

SEQ ID NO: 475956 - DNA, 15 bp, Homo sapiens
gtaaaatctctactg

SEQ ID NO: 475957 - DNA, 15 bp, Homo sapiens
agtaaaatctctact

SEQ ID NO: 475958 - DNA, 15 bp, Homo sapiens
cagtaaaatctctac

SEQ ID NO: 475959 - DNA, 15 bp, Homo sapiens
tcagtaaaatctcta

SEQ ID NO: 475960 - DNA, 15 bp, Homo sapiens
ctcagtaaaatctct

SEQ ID NO: 475961 - DNA, 15 bp, Homo sapiens
cctcagtaaaatctc

SEQ ID NO: 475962 - DNA, 15 bp, Homo sapiens
ccctcagtaaaatct

SEQ ID NO: 475963 - DNA, 15 bp, Homo sapiens
tccctcagtaaaatc

SEQ ID NO: 475964 - DNA, 15 bp, Homo sapiens
gtccctcagtaaaat

SEQ ID NO: 475965 - DNA, 15 bp, Homo sapiens
tgtccctcagtaaaa

SEQ ID NO: 475966 - DNA, 15 bp, Homo sapiens
gtgtccctcagtaaa

SEQ ID NO: 475967 - DNA, 15 bp, Homo sapiens
agtgtccctcagtaa

SEQ ID NO: 475968 - DNA, 15 bp, Homo sapiens
cagtgtccctcagta

SEQ ID NO: 475969 - DNA, 15 bp, Homo sapiens
acagtgtccctcagt

SEQ ID NO: 475970 - DNA, 15 bp, Homo sapiens
aacagtgtccctcag

SEQ ID NO: 475971 - DNA, 15 bp, Homo sapiens
taacagtgtccctca

SEQ ID NO: 475972 - DNA, 15 bp, Homo sapiens
ctaacagtgtccctc

SEQ ID NO: 475973 - DNA, 15 bp, Homo sapiens
cctaacagtgtccct

SEQ ID NO: 475974 - DNA, 15 bp, Homo sapiens
ccctaacagtgtccc

SEQ ID NO: 475975 - DNA, 15 bp, Homo sapiens
accctaacagtgtcc

SEQ ID NO: 475976 - DNA, 15 bp, Homo sapiens
caccctaacagtgtc

SEQ ID NO: 475977 - DNA, 15 bp, Homo sapiens
tcaccctaacagtgt

SEQ ID NO: 475978 - DNA, 15 bp, Homo sapiens
ctcaccctaacagtg

SEQ ID NO: 475979 - DNA, 15 bp, Homo sapiens
cctcaccctaacagt

SEQ ID NO: 475980 - DNA, 15 bp, Homo sapiens
ccctcaccctaacag

SEQ ID NO: 475981 - DNA, 15 bp, Homo sapiens
accctcaccctaaca

SEQ ID NO: 475982 - DNA, 15 bp, Homo sapiens
taccctcaccctaac

SEQ ID NO: 475983 - DNA, 15 bp, Homo sapiens
ctaccctcaccctaa

SEQ ID NO: 475984 - DNA, 15 bp, Homo sapiens
tctaccctcacccta

SEQ ID NO: 475985 - DNA, 15 bp, Homo sapiens
ctctaccctcaccct

SEQ ID NO: 475986 - DNA, 15 bp, Homo sapiens
actctaccctcaccc

SEQ ID NO: 475987 - DNA, 15 bp, Homo sapiens
aactctaccctcacc

SEQ ID NO: 475988 - DNA, 15 bp, Homo sapiens
caactctaccctcac

SEQ ID NO: 475989 - DNA, 15 bp, Homo sapiens
ccaactctaccctca

SEQ ID NO: 475990 - DNA, 15 bp, Homo sapiens
accaactctaccctc

SEQ ID NO: 475991 - DNA, 15 bp, Homo sapiens
caccaactctaccct

SEQ ID NO: 475992 - DNA, 15 bp, Homo sapiens
ccaccaactctaccc

SEQ ID NO: 475993 - DNA, 15 bp, Homo sapiens
gccaccaactctacc

SEQ ID NO: 475994 - DNA, 15 bp, Homo sapiens
ggccaccaactctac

SEQ ID NO: 475995 - DNA, 15 bp, Homo sapiens
tggccaccaactcta

SEQ ID NO: 475996 - DNA, 15 bp, Homo sapiens
ctggccaccaactct

SEQ ID NO: 475997 - DNA, 15 bp, Homo sapiens
cctggccaccaactc

SEQ ID NO: 475998 - DNA, 15 bp, Homo sapiens
ccctggccaccaact

SEQ ID NO: 475999 - DNA, 15 bp, Homo sapiens
accctggccaccaac

SEQ ID NO: 476000 - DNA, 15 bp, Homo sapiens
gaccctggccaccaa

SEQ ID NO: 476001 - DNA, 15 bp, Homo sapiens
tgaccctggccacca

SEQ ID NO: 476002 - DNA, 15 bp, Homo sapiens
atgaccctggccacc

SEQ ID NO: 476003 - DNA, 15 bp, Homo sapiens
aatgaccctggccac

SEQ ID NO: 476004 - DNA, 15 bp, Homo sapiens
gaatgaccctggcca

SEQ ID NO: 476005 - DNA, 15 bp, Homo sapiens
agaatgaccctggcc

SEQ ID NO: 476006 - DNA, 15 bp, Homo sapiens
aagaatgaccctggc

SEQ ID NO: 476007 - DNA, 15 bp, Homo sapiens
aaagaatgaccctgg

SEQ ID NO: 476008 - DNA, 15 bp, Homo sapiens
gaaagaatgaccctg

SEQ ID NO: 476009 - DNA, 15 bp, Homo sapiens
ggaaagaatgaccct

SEQ ID NO: 476010 - DNA, 15 bp, Homo sapiens
tggaaagaatgaccc

SEQ ID NO: 476011 - DNA, 15 bp, Homo sapiens
ctggaaagaatgacc

SEQ ID NO: 476012 - DNA, 15 bp, Homo sapiens
cctggaaagaatgac

SEQ ID NO: 476013 - DNA, 15 bp, Homo sapiens
acctggaaagaatga

SEQ ID NO: 476014 - DNA, 15 bp, Homo sapiens
cacctggaaagaatg

SEQ ID NO: 476015 - DNA, 15 bp, Homo sapiens
acacctggaaagaat

SEQ ID NO: 476016 - DNA, 15 bp, Homo sapiens
cacacctggaaagaa

SEQ ID NO: 476017 - DNA, 15 bp, Homo sapiens
ccacacctggaaaga

SEQ ID NO: 476018 - DNA, 15 bp, Homo sapiens
accacacctggaaag

SEQ ID NO: 476019 - DNA, 15 bp, Homo sapiens
caccacacctggaaa

SEQ ID NO: 476020 - DNA, 15 bp, Homo sapiens
acaccacacctggaa

SEQ ID NO: 476021 - DNA, 15 bp, Homo sapiens
gacaccacacctgga

SEQ ID NO: 476022 - DNA, 15 bp, Homo sapiens
tgacaccacacctgg

SEQ ID NO: 476023 - DNA, 15 bp, Homo sapiens
gtgacaccacacctg

SEQ ID NO: 476024 - DNA, 15 bp, Homo sapiens
tgtgacaccacacct

SEQ ID NO: 476025 - DNA, 15 bp, Homo sapiens
ctgtgacaccacacc

SEQ ID NO: 476026 - DNA, 15 bp, Homo sapiens
cctgtgacaccacac

SEQ ID NO: 476027 - DNA, 15 bp, Homo sapiens
gcctgtgacaccaca

SEQ ID NO: 476028 - DNA, 15 bp, Homo sapiens
tgcctgtgacaccac

SEQ ID NO: 476029 - DNA, 15 bp, Homo sapiens
ctgcctgtgacacca

SEQ ID NO: 476030 - DNA, 15 bp, Homo sapiens
actgcctgtgacacc

SEQ ID NO: 476031 - DNA, 15 bp, Homo sapiens
tactgcctgtgacac

SEQ ID NO: 476032 - DNA, 15 bp, Homo sapiens
gtactgcctgtgaca

SEQ ID NO: 476033 - DNA, 15 bp, Homo sapiens
tgtactgcctgtgac

SEQ ID NO: 476034 - DNA, 15 bp, Homo sapiens
gtgtactgcctgtga

SEQ ID NO: 476035 - DNA, 15 bp, Homo sapiens
agtgtactgcctgtg

SEQ ID NO: 476036 - DNA, 15 bp, Homo sapiens
cagtgtactgcctgt

SEQ ID NO: 476037 - DNA, 15 bp, Homo sapiens
acagtgtactgcctg

SEQ ID NO: 476038 - DNA, 15 bp, Homo sapiens
aacagtgtactgcct

SEQ ID NO: 476039 - DNA, 15 bp, Homo sapiens
caacagtgtactgcc

SEQ ID NO: 476040 - DNA, 15 bp, Homo sapiens
gcaacagtgtactgc

SEQ ID NO: 476041 - DNA, 15 bp, Homo sapiens
cgcaacagtgtactg

SEQ ID NO: 476042 - DNA, 15 bp, Homo sapiens
ccgcaacagtgtact

SEQ ID NO: 476043 - DNA, 15 bp, Homo sapiens
cccgcaacagtgtac

SEQ ID NO: 476044 - DNA, 15 bp, Homo sapiens
ccccgcaacagtgta

SEQ ID NO: 476045 - DNA, 15 bp, Homo sapiens
accccgcaacagtgt

SEQ ID NO: 476046 - DNA, 15 bp, Homo sapiens
aaccccgcaacagtg

SEQ ID NO: 476047 - DNA, 15 bp, Homo sapiens
caaccccgcaacagt

SEQ ID NO: 476048 - DNA, 15 bp, Homo sapiens
tcaaccccgcaacag

SEQ ID NO: 476049 - DNA, 15 bp, Homo sapiens
ttcaaccccgcaaca

SEQ ID NO: 476050 - DNA, 15 bp, Homo sapiens
tttcaaccccgcaac

SEQ ID NO: 476051 - DNA, 15 bp, Homo sapiens
atttcaaccccgcaa

SEQ ID NO: 476052 - DNA, 15 bp, Homo sapiens
aatttcaaccccgca

SEQ ID NO: 476053 - DNA, 15 bp, Homo sapiens
aaatttcaaccccgc

SEQ ID NO: 476054 - DNA, 15 bp, Homo sapiens
caaatttcaaccccg

SEQ ID NO: 476055 - DNA, 15 bp, Homo sapiens
acaaatttcaacccc

SEQ ID NO: 476056 - DNA, 15 bp, Homo sapiens
aacaaatttcaaccc

SEQ ID NO: 476057 - DNA, 15 bp, Homo sapiens
caacaaatttcaacc

SEQ ID NO: 476058 - DNA, 15 bp, Homo sapiens
gcaacaaatttcaac

SEQ ID NO: 476059 - DNA, 15 bp, Homo sapiens
ggcaacaaatttcaa

SEQ ID NO: 476060 - DNA, 15 bp, Homo sapiens
tggcaacaaatttca

SEQ ID NO: 476061 - DNA, 15 bp, Homo sapiens
atggcaacaaatttc

SEQ ID NO: 476062 - DNA, 15 bp, Homo sapiens
tatggcaacaaattt

SEQ ID NO: 476063 - DNA, 15 bp, Homo sapiens
gtatggcaacaaatt

SEQ ID NO: 476064 - DNA, 15 bp, Homo sapiens
agtatggcaacaaat

SEQ ID NO: 476065 - DNA, 15 bp, Homo sapiens
tagtatggcaacaaa

SEQ ID NO: 476066 - DNA, 15 bp, Homo sapiens
atagtatggcaacaa

SEQ ID NO: 476067 - DNA, 15 bp, Homo sapiens
gatagtatggcaaca

SEQ ID NO: 476068 - DNA, 15 bp, Homo sapiens
agatagtatggcaac

SEQ ID NO: 476069 - DNA, 15 bp, Homo sapiens
cagatagtatggcaa

SEQ ID NO: 476070 - DNA, 15 bp, Homo sapiens
gcagatagtatggca

SEQ ID NO: 476071 - DNA, 15 bp, Homo sapiens
agcagatagtatggc

SEQ ID NO: 476072 - DNA, 15 bp, Homo sapiens
aagcagatagtatgg

SEQ ID NO: 476073 - DNA, 15 bp, Homo sapiens
caagcagatagtatg

SEQ ID NO: 476074 - DNA, 15 bp, Homo sapiens
gcaagcagatagtat

SEQ ID NO: 476075 - DNA, 15 bp, Homo sapiens
agcaagcagatagta

SEQ ID NO: 476076 - DNA, 15 bp, Homo sapiens
gagcaagcagatagt

SEQ ID NO: 476077 - DNA, 15 bp, Homo sapiens
agagcaagcagatag

SEQ ID NO: 476078 - DNA, 15 bp, Homo sapiens
gagagcaagcagata

SEQ ID NO: 476079 - DNA, 15 bp, Homo sapiens
agagagcaagcagat

SEQ ID NO: 476080 - DNA, 15 bp, Homo sapiens
cagagagcaagcaga

SEQ ID NO: 476081 - DNA, 15 bp, Homo sapiens
tcagagagcaagcag

SEQ ID NO: 476082 - DNA, 15 bp, Homo sapiens
atcagagagcaagca

SEQ ID NO: 476083 - DNA, 15 bp, Homo sapiens
aatcagagagcaagc

SEQ ID NO: 476084 - DNA, 15 bp, Homo sapiens
gaatcagagagcaag

SEQ ID NO: 476085 - DNA, 15 bp, Homo sapiens
agaatcagagagcaa

SEQ ID NO: 476086 - DNA, 15 bp, Homo sapiens
cagaatcagagagca

SEQ ID NO: 476087 - DNA, 15 bp, Homo sapiens
tcagaatcagagagc

SEQ ID NO: 476088 - DNA, 15 bp, Homo sapiens
atcagaatcagagag

SEQ ID NO: 476089 - DNA, 15 bp, Homo sapiens
catcagaatcagaga

SEQ ID NO: 476090 - DNA, 15 bp, Homo sapiens
acatcagaatcagag

SEQ ID NO: 476091 - DNA, 15 bp, Homo sapiens
gacatcagaatcaga

SEQ ID NO: 476092 - DNA, 15 bp, Homo sapiens
tgacatcagaatcag

SEQ ID NO: 476093 - DNA, 15 bp, Homo sapiens
ttgacatcagaatca

SEQ ID NO: 476094 - DNA, 15 bp, Homo sapiens
tttgacatcagaatc

SEQ ID NO: 476095 - DNA, 15 bp, Homo sapiens
ttttgacatcagaat

SEQ ID NO: 476096 - DNA, 15 bp, Homo sapiens
cttttgacatcagaa

SEQ ID NO: 476097 - DNA, 15 bp, Homo sapiens
gcttttgacatcaga

SEQ ID NO: 476098 - DNA, 15 bp, Homo sapiens
tgcttttgacatcag

SEQ ID NO: 476099 - DNA, 15 bp, Homo sapiens
ttgcttttgacatca

SEQ ID NO: 476100 - DNA, 15 bp, Homo sapiens
tttgcttttgacatc

SEQ ID NO: 476101 - DNA, 15 bp, Homo sapiens
ttttgcttttgacat

SEQ ID NO: 476102 - DNA, 15 bp, Homo sapiens
cttttgcttttgaca

SEQ ID NO: 476103 - DNA, 15 bp, Homo sapiens
tcttttgcttttgac

SEQ ID NO: 476104 - DNA, 15 bp, Homo sapiens
ctcttttgcttttga

SEQ ID NO: 476105 - DNA, 15 bp, Homo sapiens
gctcttttgcttttg

SEQ ID NO: 476106 - DNA, 15 bp, Homo sapiens
tgctcttttgctttt

SEQ ID NO: 476107 - DNA, 15 bp, Homo sapiens
ctgctcttttgcttt

SEQ ID NO: 476108 - DNA, 15 bp, Homo sapiens
actgctcttttgctt

SEQ ID NO: 476109 - DNA, 15 bp, Homo sapiens
gactgctcttttgct

SEQ ID NO: 476110 - DNA, 15 bp, Homo sapiens
tgactgctcttttgc

SEQ ID NO: 476111 - DNA, 15 bp, Homo sapiens
atgactgctcttttg

SEQ ID NO: 476112 - DNA, 15 bp, Homo sapiens
gatgactgctctttt

SEQ ID NO: 476113 - DNA, 15 bp, Homo sapiens
agatgactgctcttt

SEQ ID NO: 476114 - DNA, 15 bp, Homo sapiens
aagatgactgctctt

SEQ ID NO: 476115 - DNA, 15 bp, Homo sapiens
aaagatgactgctct

SEQ ID NO: 476116 - DNA, 15 bp, Homo sapiens
aaaagatgactgctc

SEQ ID NO: 476117 - DNA, 15 bp, Homo sapiens
aaaaagatgactgct

SEQ ID NO: 476118 - DNA, 15 bp, Homo sapiens
caaaaagatgactgc

SEQ ID NO: 476119 - DNA, 15 bp, Homo sapiens
tcaaaaagatgactg

SEQ ID NO: 476120 - DNA, 15 bp, Homo sapiens
ttcaaaaagatgact

SEQ ID NO: 476121 - DNA, 15 bp, Homo sapiens
cttcaaaaagatgac

SEQ ID NO: 476122 - DNA, 15 bp, Homo sapiens
ccttcaaaaagatga

SEQ ID NO: 476123 - DNA, 15 bp, Homo sapiens
accttcaaaaagatg

SEQ ID NO: 476124 - DNA, 15 bp, Homo sapiens
taccttcaaaaagat

SEQ ID NO: 476125 - DNA, 15 bp, Homo sapiens
gtaccttcaaaaaga

SEQ ID NO: 476126 - DNA, 15 bp, Homo sapiens
ggtaccttcaaaaag

SEQ ID NO: 476127 - DNA, 15 bp, Homo sapiens
aggtaccttcaaaaa

SEQ ID NO: 476128 - DNA, 15 bp, Homo sapiens
caggtaccttcaaaa

SEQ ID NO: 476129 - DNA, 15 bp, Homo sapiens
ccaggtaccttcaaa

SEQ ID NO: 476130 - DNA, 15 bp, Homo sapiens
cccaggtaccttcaa

SEQ ID NO: 476131 - DNA, 15 bp, Homo sapiens
gcccaggtaccttca

SEQ ID NO: 476132 - DNA, 15 bp, Homo sapiens
tgcccaggtaccttc

SEQ ID NO: 476133 - DNA, 15 bp, Homo sapiens
atgcccaggtacctt

SEQ ID NO: 476134 - DNA, 15 bp, Homo sapiens
tatgcccaggtacct

SEQ ID NO: 476135 - DNA, 15 bp, Homo sapiens
atatgcccaggtacc

SEQ ID NO: 476136 - DNA, 15 bp, Homo sapiens
aatatgcccaggtac

SEQ ID NO: 476137 - DNA, 15 bp, Homo sapiens
gaatatgcccaggta

SEQ ID NO: 476138 - DNA, 15 bp, Homo sapiens
ggaatatgcccaggt

SEQ ID NO: 476139 - DNA, 15 bp, Homo sapiens
aggaatatgcccagg

SEQ ID NO: 476140 - DNA, 15 bp, Homo sapiens
taggaatatgcccag

SEQ ID NO: 476141 - DNA, 15 bp, Homo sapiens
ataggaatatgccca

SEQ ID NO: 476142 - DNA, 15 bp, Homo sapiens
cataggaatatgccc

SEQ ID NO: 476143 - DNA, 15 bp, Homo sapiens
tcataggaatatgcc

SEQ ID NO: 476144 - DNA, 15 bp, Homo sapiens
atcataggaatatgc

SEQ ID NO: 476145 - DNA, 15 bp, Homo sapiens
aatcataggaatatg

SEQ ID NO: 476146 - DNA, 15 bp, Homo sapiens
caatcataggaatat

SEQ ID NO: 476147 - DNA, 15 bp, Homo sapiens
acaatcataggaata

SEQ ID NO: 476148 - DNA, 15 bp, Homo sapiens
tacaatcataggaat

SEQ ID NO: 476149 - DNA, 15 bp, Homo sapiens
ctacaatcataggaa

SEQ ID NO: 476150 - DNA, 15 bp, Homo sapiens
tctacaatcatagga

SEQ ID NO: 476151 - DNA, 15 bp, Homo sapiens
gtctacaatcatagg

SEQ ID NO: 476152 - DNA, 15 bp, Homo sapiens
ggtctacaatcatag

SEQ ID NO: 476153 - DNA, 15 bp, Homo sapiens
aggtctacaatcata

SEQ ID NO: 476154 - DNA, 15 bp, Homo sapiens
caggtctacaatcat

SEQ ID NO: 476155 - DNA, 15 bp, Homo sapiens
ccaggtctacaatca

SEQ ID NO: 476156 - DNA, 15 bp, Homo sapiens
tccaggtctacaatc

SEQ ID NO: 476157 - DNA, 15 bp, Homo sapiens
ctccaggtctacaat

SEQ ID NO: 476158 - DNA, 15 bp, Homo sapiens
actccaggtctacaa

SEQ ID NO: 476159 - DNA, 15 bp, Homo sapiens
gactccaggtctaca

SEQ ID NO: 476160 - DNA, 15 bp, Homo sapiens
agactccaggtctac

SEQ ID NO: 476161 - DNA, 15 bp, Homo sapiens
gagactccaggtcta

SEQ ID NO: 476162 - DNA, 15 bp, Homo sapiens
tgagactccaggtct

SEQ ID NO: 476163 - DNA, 15 bp, Homo sapiens
ctgagactccaggtc

SEQ ID NO: 476164 - DNA, 15 bp, Homo sapiens
cctgagactccaggt

SEQ ID NO: 476165 - DNA, 15 bp, Homo sapiens
gcctgagactccagg

SEQ ID NO: 476166 - DNA, 15 bp, Homo sapiens
ggcctgagactccag

SEQ ID NO: 476167 - DNA, 15 bp, Homo sapiens
tggcctgagactcca

SEQ ID NO: 476168 - DNA, 15 bp, Homo sapiens
gtggcctgagactcc

SEQ ID NO: 476169 - DNA, 15 bp, Homo sapiens
tgtggcctgagactc

SEQ ID NO: 476170 - DNA, 15 bp, Homo sapiens
ctgtggcctgagact

SEQ ID NO: 476171 - DNA, 15 bp, Homo sapiens
gctgtggcctgagac

SEQ ID NO: 476172 - DNA, 15 bp, Homo sapiens
agctgtggcctgaga

SEQ ID NO: 476173 - DNA, 15 bp, Homo sapiens
aagctgtggcctgag

SEQ ID NO: 476174 - DNA, 15 bp, Homo sapiens
gaagctgtggcctga

SEQ ID NO: 476175 - DNA, 15 bp, Homo sapiens
agaagctgtggcctg

SEQ ID NO: 476176 - DNA, 15 bp, Homo sapiens
gagaagctgtggcct

SEQ ID NO: 476177 - DNA, 15 bp, Homo sapiens
ggagaagctgtggcc

SEQ ID NO: 476178 - DNA, 15 bp, Homo sapiens
aggagaagctgtggc

SEQ ID NO: 476179 - DNA, 15 bp, Homo sapiens
aaggagaagctgtgg

SEQ ID NO: 476180 - DNA, 15 bp, Homo sapiens
gaaggagaagctgtg

SEQ ID NO: 476181 - DNA, 15 bp, Homo sapiens
agaaggagaagctgt

SEQ ID NO: 476182 - DNA, 15 bp, Homo sapiens
cagaaggagaagctg

SEQ ID NO: 476183 - DNA, 15 bp, Homo sapiens
gcagaaggagaagct

SEQ ID NO: 476184 - DNA, 15 bp, Homo sapiens
ggcagaaggagaagc

SEQ ID NO: 476185 - DNA, 15 bp, Homo sapiens
gggcagaaggagaag

SEQ ID NO: 476186 - DNA, 15 bp, Homo sapiens
tgggcagaaggagaa

SEQ ID NO: 476187 - DNA, 15 bp, Homo sapiens
ttgggcagaaggaga

SEQ ID NO: 476188 - DNA, 15 bp, Homo sapiens
cttgggcagaaggag

SEQ ID NO: 476189 - DNA, 15 bp, Homo sapiens
ccttgggcagaagga

SEQ ID NO: 476190 - DNA, 15 bp, Homo sapiens
cccttgggcagaagg

SEQ ID NO: 476191 - DNA, 15 bp, Homo sapiens
tcccttgggcagaag

SEQ ID NO: 476192 - DNA, 15 bp, Homo sapiens
gtcccttgggcagaa

SEQ ID NO: 476193 - DNA, 15 bp, Homo sapiens
tgtcccttgggcaga

SEQ ID NO: 476194 - DNA, 15 bp, Homo sapiens
ttgtcccttgggcag

SEQ ID NO: 476195 - DNA, 15 bp, Homo sapiens
tttgtcccttgggca

SEQ ID NO: 476196 - DNA, 15 bp, Homo sapiens
ttttgtcccttgggc

SEQ ID NO: 476197 - DNA, 15 bp, Homo sapiens
attttgtcccttggg

SEQ ID NO: 476198 - DNA, 15 bp, Homo sapiens
tattttgtcccttgg

SEQ ID NO: 476199 - DNA, 15 bp, Homo sapiens
ttattttgtcccttg

SEQ ID NO: 476200 - DNA, 15 bp, Homo sapiens
attattttgtccctt

SEQ ID NO: 476201 - DNA, 15 bp, Homo sapiens
cattattttgtccct

SEQ ID NO: 476202 - DNA, 15 bp, Homo sapiens
acattattttgtccc

SEQ ID NO: 476203 - DNA, 15 bp, Homo sapiens
gacattattttgtcc

SEQ ID NO: 476204 - DNA, 15 bp, Homo sapiens
tgacattattttgtc

SEQ ID NO: 476205 - DNA, 15 bp, Homo sapiens
atgacattattttgt

SEQ ID NO: 476206 - DNA, 15 bp, Homo sapiens
gatgacattattttg

SEQ ID NO: 476207 - DNA, 15 bp, Homo sapiens
agatgacattatttt

SEQ ID NO: 476208 - DNA, 15 bp, Homo sapiens
tagatgacattattt

SEQ ID NO: 476209 - DNA, 15 bp, Homo sapiens
atagatgacattatt

SEQ ID NO: 476210 - DNA, 15 bp, Homo sapiens
aatagatgacattat

SEQ ID NO: 476211 - DNA, 15 bp, Homo sapiens
aaatagatgacatta

SEQ ID NO: 476212 - DNA, 15 bp, Homo sapiens
aaaatagatgacatt

SEQ ID NO: 476213 - DNA, 15 bp, Homo sapiens
gaaaatagatgacat

SEQ ID NO: 476214 - DNA, 15 bp, Homo sapiens
agaaaatagatgaca

SEQ ID NO: 476215 - DNA, 15 bp, Homo sapiens
cagaaaatagatgac

SEQ ID NO: 476216 - DNA, 15 bp, Homo sapiens
acagaaaatagatga

SEQ ID NO: 476217 - DNA, 15 bp, Homo sapiens
aacagaaaatagatg

SEQ ID NO: 476218 - DNA, 15 bp, Homo sapiens
gaacagaaaatagat

SEQ ID NO: 476219 - DNA, 15 bp, Homo sapiens
agaacagaaaataga

SEQ ID NO: 476220 - DNA, 15 bp, Homo sapiens
aagaacagaaaatag

SEQ ID NO: 476221 - DNA, 15 bp, Homo sapiens
aaagaacagaaaata

SEQ ID NO: 476222 - DNA, 15 bp, Homo sapiens
caaagaacagaaaat

SEQ ID NO: 476223 - DNA, 15 bp, Homo sapiens
tcaaagaacagaaaa

SEQ ID NO: 476224 - DNA, 15 bp, Homo sapiens
ctcaaagaacagaaa

SEQ ID NO: 476225 - DNA, 15 bp, Homo sapiens
cctcaaagaacagaa

SEQ ID NO: 476226 - DNA, 15 bp, Homo sapiens
gcctcaaagaacaga

SEQ ID NO: 476227 - DNA, 15 bp, Homo sapiens
agcctcaaagaacag

SEQ ID NO: 476228 - DNA, 15 bp, Homo sapiens
tagcctcaaagaaca

SEQ ID NO: 476229 - DNA, 15 bp, Homo sapiens
gtagcctcaaagaac

SEQ ID NO: 476230 - DNA, 15 bp, Homo sapiens
agtagcctcaaagaa

SEQ ID NO: 476231 - DNA, 15 bp, Homo sapiens
gagtagcctcaaaga

SEQ ID NO: 476232 - DNA, 15 bp, Homo sapiens
agagtagcctcaaag

SEQ ID NO: 476233 - DNA, 15 bp, Homo sapiens
aagagtagcctcaaa

SEQ ID NO: 476234 - DNA, 15 bp, Homo sapiens
gaagagtagcctcaa

SEQ ID NO: 476235 - DNA, 15 bp, Homo sapiens
ggaagagtagcctca

SEQ ID NO: 476236 - DNA, 15 bp, Homo sapiens
gggaagagtagcctc

SEQ ID NO: 476237 - DNA, 15 bp, Homo sapiens
agggaagagtagcct

SEQ ID NO: 476238 - DNA, 15 bp, Homo sapiens
cagggaagagtagcc

SEQ ID NO: 476239 - DNA, 15 bp, Homo sapiens
acagggaagagtagc

SEQ ID NO: 476240 - DNA, 15 bp, Homo sapiens
cacagggaagagtag

SEQ ID NO: 476241 - DNA, 15 bp, Homo sapiens
ccacagggaagagta

SEQ ID NO: 476242 - DNA, 15 bp, Homo sapiens
tccacagggaagagt

SEQ ID NO: 476243 - DNA, 15 bp, Homo sapiens
atccacagggaagag

SEQ ID NO: 476244 - DNA, 15 bp, Homo sapiens
aatccacagggaaga

SEQ ID NO: 476245 - DNA, 15 bp, Homo sapiens
aaatccacagggaag

SEQ ID NO: 476246 - DNA, 15 bp, Homo sapiens
aaaatccacagggaa

SEQ ID NO: 476247 - DNA, 15 bp, Homo sapiens
taaaatccacaggga

SEQ ID NO: 476248 - DNA, 15 bp, Homo sapiens
ttaaaatccacaggg

SEQ ID NO: 476249 - DNA, 15 bp, Homo sapiens
cttaaaatccacagg

SEQ ID NO: 476250 - DNA, 15 bp, Homo sapiens
ccttaaaatccacag

SEQ ID NO: 476251 - DNA, 15 bp, Homo sapiens
cccttaaaatccaca

SEQ ID NO: 476252 - DNA, 15 bp, Homo sapiens
tcccttaaaatccac

SEQ ID NO: 476253 - DNA, 15 bp, Homo sapiens
ttcccttaaaatcca

SEQ ID NO: 476254 - DNA, 15 bp, Homo sapiens
tttcccttaaaatcc

SEQ ID NO: 476255 - DNA, 15 bp, Homo sapiens
ctttcccttaaaatc

SEQ ID NO: 476256 - DNA, 15 bp, Homo sapiens
tctttcccttaaaat

SEQ ID NO: 476257 - DNA, 15 bp, Homo sapiens
ctctttcccttaaaa

SEQ ID NO: 476258 - DNA, 15 bp, Homo sapiens
actctttcccttaaa

SEQ ID NO: 476259 - DNA, 15 bp, Homo sapiens
tactctttcccttaa

SEQ ID NO: 476260 - DNA, 15 bp, Homo sapiens
ttactctttccctta

SEQ ID NO: 476261 - DNA, 15 bp, Homo sapiens
cttactctttccctt

SEQ ID NO: 476262 - DNA, 15 bp, Homo sapiens
ccttactctttccct

SEQ ID NO: 476263 - DNA, 15 bp, Homo sapiens
gccttactctttccc

SEQ ID NO: 476264 - DNA, 15 bp, Homo sapiens
agccttactctttcc

SEQ ID NO: 476265 - DNA, 15 bp, Homo sapiens
aagccttactctttc

SEQ ID NO: 476266 - DNA, 15 bp, Homo sapiens
taagccttactcttt

SEQ ID NO: 476267 - DNA, 15 bp, Homo sapiens
ctaagccttactctt

SEQ ID NO: 476268 - DNA, 15 bp, Homo sapiens
actaagccttactct

SEQ ID NO: 476269 - DNA, 15 bp, Homo sapiens
cactaagccttactc

SEQ ID NO: 476270 - DNA, 15 bp, Homo sapiens
tcactaagccttact

SEQ ID NO: 476271 - DNA, 15 bp, Homo sapiens
atcactaagccttac

SEQ ID NO: 476272 - DNA, 15 bp, Homo sapiens
catcactaagcctta

SEQ ID NO: 476273 - DNA, 15 bp, Homo sapiens
ccatcactaagcctt

SEQ ID NO: 476274 - DNA, 15 bp, Homo sapiens
cccatcactaagcct

SEQ ID NO: 476275 - DNA, 15 bp, Homo sapiens
ccccatcactaagcc

SEQ ID NO: 476276 - DNA, 15 bp, Homo sapiens
tccccatcactaagc

SEQ ID NO: 476277 - DNA, 15 bp, Homo sapiens
ttccccatcactaag

SEQ ID NO: 476278 - DNA, 15 bp, Homo sapiens
cttccccatcactaa

SEQ ID NO: 476279 - DNA, 15 bp, Homo sapiens
gcttccccatcacta

SEQ ID NO: 476280 - DNA, 15 bp, Homo sapiens
agcttccccatcact

SEQ ID NO: 476281 - DNA, 15 bp, Homo sapiens
cagcttccccatcac

SEQ ID NO: 476282 - DNA, 15 bp, Homo sapiens
tcagcttccccatca

SEQ ID NO: 476283 - DNA, 15 bp, Homo sapiens
ctcagcttccccatc

SEQ ID NO: 476284 - DNA, 15 bp, Homo sapiens
tctcagcttccccat

SEQ ID NO: 476285 - DNA, 15 bp, Homo sapiens
ctctcagcttcccca

SEQ ID NO: 476286 - DNA, 15 bp, Homo sapiens
cctctcagcttcccc

SEQ ID NO: 476287 - DNA, 15 bp, Homo sapiens
gcctctcagcttccc

SEQ ID NO: 476288 - DNA, 15 bp, Homo sapiens
ggcctctcagcttcc

SEQ ID NO: 476289 - DNA, 15 bp, Homo sapiens
gggcctctcagcttc

SEQ ID NO: 476290 - DNA, 15 bp, Homo sapiens
ggggcctctcagctt

SEQ ID NO: 476291 - DNA, 15 bp, Homo sapiens
tggggcctctcagct

SEQ ID NO: 476292 - DNA, 15 bp, Homo sapiens
ctggggcctctcagc

SEQ ID NO: 476293 - DNA, 15 bp, Homo sapiens
cctggggcctctcag

SEQ ID NO: 476294 - DNA, 15 bp, Homo sapiens
ccctggggcctctca

SEQ ID NO: 476295 - DNA, 15 bp, Homo sapiens
gccctggggcctctc

SEQ ID NO: 476296 - DNA, 15 bp, Homo sapiens
tgccctggggcctct

SEQ ID NO: 476297 - DNA, 15 bp, Homo sapiens
ctgccctggggcctc

SEQ ID NO: 476298 - DNA, 15 bp, Homo sapiens
cctgccctggggcct

SEQ ID NO: 476299 - DNA, 15 bp, Homo sapiens
acctgccctggggcc

SEQ ID NO: 476300 - DNA, 15 bp, Homo sapiens
cacctgccctggggc

SEQ ID NO: 476301 - DNA, 15 bp, Homo sapiens
ccacctgccctgggg

SEQ ID NO: 476302 - DNA, 15 bp, Homo sapiens
cccacctgccctggg

SEQ ID NO: 476303 - DNA, 15 bp, Homo sapiens
acccacctgccctgg

SEQ ID NO: 476304 - DNA, 15 bp, Homo sapiens
cacccacctgccctg

SEQ ID NO: 476305 - DNA, 15 bp, Homo sapiens
ccacccacctgccct

SEQ ID NO: 476306 - DNA, 15 bp, Homo sapiens
accacccacctgccc

SEQ ID NO: 476307 - DNA, 15 bp, Homo sapiens
caccacccacctgcc

SEQ ID NO: 476308 - DNA, 15 bp, Homo sapiens
ccaccacccacctgc

SEQ ID NO: 476309 - DNA, 15 bp, Homo sapiens
cccaccacccacctg

SEQ ID NO: 476310 - DNA, 15 bp, Homo sapiens
gcccaccacccacct

SEQ ID NO: 476311 - DNA, 15 bp, Homo sapiens
ggcccaccacccacc

SEQ ID NO: 476312 - DNA, 15 bp, Homo sapiens
aggcccaccacccac

SEQ ID NO: 476313 - DNA, 15 bp, Homo sapiens
caggcccaccaccca

SEQ ID NO: 476314 - DNA, 15 bp, Homo sapiens
acaggcccaccaccc

SEQ ID NO: 476315 - DNA, 15 bp, Homo sapiens
tacaggcccaccacc

SEQ ID NO: 476316 - DNA, 15 bp, Homo sapiens
ctacaggcccaccac

SEQ ID NO: 476317 - DNA, 15 bp, Homo sapiens
cctacaggcccacca

SEQ ID NO: 476318 - DNA, 15 bp, Homo sapiens
ccctacaggcccacc

SEQ ID NO: 476319 - DNA, 15 bp, Homo sapiens
accctacaggcccac

SEQ ID NO: 476320 - DNA, 15 bp, Homo sapiens
caccctacaggccca

SEQ ID NO: 476321 - DNA, 15 bp, Homo sapiens
tcaccctacaggccc

SEQ ID NO: 476322 - DNA, 15 bp, Homo sapiens
ctcaccctacaggcc

SEQ ID NO: 476323 - DNA, 15 bp, Homo sapiens
cctcaccctacaggc

SEQ ID NO: 476324 - DNA, 15 bp, Homo sapiens
acctcaccctacagg

SEQ ID NO: 476325 - DNA, 15 bp, Homo sapiens
cacctcaccctacag

SEQ ID NO: 476326 - DNA, 15 bp, Homo sapiens
acacctcaccctaca

SEQ ID NO: 476327 - DNA, 15 bp, Homo sapiens
aacacctcaccctac

SEQ ID NO: 476328 - DNA, 15 bp, Homo sapiens
taacacctcacccta

SEQ ID NO: 476329 - DNA, 15 bp, Homo sapiens
gtaacacctcaccct

SEQ ID NO: 476330 - DNA, 15 bp, Homo sapiens
agtaacacctcaccc

SEQ ID NO: 476331 - DNA, 15 bp, Homo sapiens
aagtaacacctcacc

SEQ ID NO: 476332 - DNA, 15 bp, Homo sapiens
aaagtaacacctcac

SEQ ID NO: 476333 - DNA, 15 bp, Homo sapiens
gaaagtaacacctca

SEQ ID NO: 476334 - DNA, 15 bp, Homo sapiens
tgaaagtaacacctc

SEQ ID NO: 476335 - DNA, 15 bp, Homo sapiens
gtgaaagtaacacct

SEQ ID NO: 476336 - DNA, 15 bp, Homo sapiens
tgtgaaagtaacacc

SEQ ID NO: 476337 - DNA, 15 bp, Homo sapiens
gtgtgaaagtaacac

SEQ ID NO: 476338 - DNA, 15 bp, Homo sapiens
agtgtgaaagtaaca

SEQ ID NO: 476339 - DNA, 15 bp, Homo sapiens
gagtgtgaaagtaac

SEQ ID NO: 476340 - DNA, 15 bp, Homo sapiens
tgagtgtgaaagtaa

SEQ ID NO: 476341 - DNA, 15 bp, Homo sapiens
ttgagtgtgaaagta

SEQ ID NO: 476342 - DNA, 15 bp, Homo sapiens
cttgagtgtgaaagt

SEQ ID NO: 476343 - DNA, 15 bp, Homo sapiens
acttgagtgtgaaag

SEQ ID NO: 476344 - DNA, 15 bp, Homo sapiens
gacttgagtgtgaaa

SEQ ID NO: 476345 - DNA, 15 bp, Homo sapiens
tgacttgagtgtgaa

SEQ ID NO: 476346 - DNA, 15 bp, Homo sapiens
ctgacttgagtgtga

SEQ ID NO: 476347 - DNA, 15 bp, Homo sapiens
tctgacttgagtgtg

SEQ ID NO: 476348 - DNA, 15 bp, Homo sapiens
ttctgacttgagtgt

SEQ ID NO: 476349 - DNA, 15 bp, Homo sapiens
gttctgacttgagtg

SEQ ID NO: 476350 - DNA, 15 bp, Homo sapiens
tgttctgacttgagt

SEQ ID NO: 476351 - DNA, 15 bp, Homo sapiens
ctgttctgacttgag

SEQ ID NO: 476352 - DNA, 15 bp, Homo sapiens
cctgttctgacttga

SEQ ID NO: 476353 - DNA, 15 bp, Homo sapiens
acctgttctgacttg

SEQ ID NO: 476354 - DNA, 15 bp, Homo sapiens
cacctgttctgactt

SEQ ID NO: 476355 - DNA, 15 bp, Homo sapiens
acacctgttctgact

SEQ ID NO: 476356 - DNA, 15 bp, Homo sapiens
cacacctgttctgac

SEQ ID NO: 476357 - DNA, 15 bp, Homo sapiens
gcacacctgttctga

SEQ ID NO: 476358 - DNA, 15 bp, Homo sapiens
agcacacctgttctg

SEQ ID NO: 476359 - DNA, 15 bp, Homo sapiens
cagcacacctgttct

SEQ ID NO: 476360 - DNA, 15 bp, Homo sapiens
ccagcacacctgttc

SEQ ID NO: 476361 - DNA, 15 bp, Homo sapiens
cccagcacacctgtt

SEQ ID NO: 476362 - DNA, 15 bp, Homo sapiens
ccccagcacacctgt

SEQ ID NO: 476363 - DNA, 15 bp, Homo sapiens
accccagcacacctg

SEQ ID NO: 476364 - DNA, 15 bp, Homo sapiens
aaccccagcacacct

SEQ ID NO: 476365 - DNA, 15 bp, Homo sapiens
aaaccccagcacacc

SEQ ID NO: 476366 - DNA, 15 bp, Homo sapiens
aaaaccccagcacac

SEQ ID NO: 476367 - DNA, 15 bp, Homo sapiens
caaaaccccagcaca

SEQ ID NO: 476368 - DNA, 15 bp, Homo sapiens
tcaaaaccccagcac

SEQ ID NO: 476369 - DNA, 15 bp, Homo sapiens
gtcaaaaccccagca

SEQ ID NO: 476370 - DNA, 15 bp, Homo sapiens
ggtcaaaaccccagc

SEQ ID NO: 476371 - DNA, 15 bp, Homo sapiens
aggtcaaaaccccag

SEQ ID NO: 476372 - DNA, 15 bp, Homo sapiens
aaggtcaaaacccca

SEQ ID NO: 476373 - DNA, 15 bp, Homo sapiens
gaaggtcaaaacccc

SEQ ID NO: 476374 - DNA, 15 bp, Homo sapiens
agaaggtcaaaaccc

SEQ ID NO: 476375 - DNA, 15 bp, Homo sapiens
cagaaggtcaaaacc

SEQ ID NO: 476376 - DNA, 15 bp, Homo sapiens
gcagaaggtcaaaac

SEQ ID NO: 476377 - DNA, 15 bp, Homo sapiens
tgcagaaggtcaaaa

SEQ ID NO: 476378 - DNA, 15 bp, Homo sapiens
ctgcagaaggtcaaa

SEQ ID NO: 476379 - DNA, 15 bp, Homo sapiens
gctgcagaaggtcaa

SEQ ID NO: 476380 - DNA, 15 bp, Homo sapiens
tgctgcagaaggtca

SEQ ID NO: 476381 - DNA, 15 bp, Homo sapiens
ttgctgcagaaggtc

SEQ ID NO: 476382 - DNA, 15 bp, Homo sapiens
tttgctgcagaaggt

SEQ ID NO: 476383 - DNA, 15 bp, Homo sapiens
ttttgctgcagaagg

SEQ ID NO: 476384 - DNA, 15 bp, Homo sapiens
attttgctgcagaag

SEQ ID NO: 476385 - DNA, 15 bp, Homo sapiens
aattttgctgcagaa

SEQ ID NO: 476386 - DNA, 15 bp, Homo sapiens
aaattttgctgcaga

SEQ ID NO: 476387 - DNA, 15 bp, Homo sapiens
gaaattttgctgcag

SEQ ID NO: 476388 - DNA, 15 bp, Homo sapiens
ggaaattttgctgca

SEQ ID NO: 476389 - DNA, 15 bp, Homo sapiens
gggaaattttgctgc

SEQ ID NO: 476390 - DNA, 15 bp, Homo sapiens
agggaaattttgctg

SEQ ID NO: 476391 - DNA, 15 bp, Homo sapiens
gagggaaattttgct

SEQ ID NO: 476392 - DNA, 15 bp, Homo sapiens
ggagggaaattttgc

SEQ ID NO: 476393 - DNA, 15 bp, Homo sapiens
aggagggaaattttg

SEQ ID NO: 476394 - DNA, 15 bp, Homo sapiens
gaggagggaaatttt

SEQ ID NO: 476395 - DNA, 15 bp, Homo sapiens
tgaggagggaaattt

SEQ ID NO: 476396 - DNA, 15 bp, Homo sapiens
ctgaggagggaaatt

SEQ ID NO: 476397 - DNA, 15 bp, Homo sapiens
tctgaggagggaaat

SEQ ID NO: 476398 - DNA, 15 bp, Homo sapiens
ttctgaggagggaaa

SEQ ID NO: 476399 - DNA, 15 bp, Homo sapiens
tttctgaggagggaa

SEQ ID NO: 476400 - DNA, 15 bp, Homo sapiens
gtttctgaggaggga

SEQ ID NO: 476401 - DNA, 15 bp, Homo sapiens
agtttctgaggaggg

SEQ ID NO: 476402 - DNA, 15 bp, Homo sapiens
aagtttctgaggagg

SEQ ID NO: 476403 - DNA, 15 bp, Homo sapiens
taagtttctgaggag

SEQ ID NO: 476404 - DNA, 15 bp, Homo sapiens
ctaagtttctgagga

SEQ ID NO: 476405 - DNA, 15 bp, Homo sapiens
actaagtttctgagg

SEQ ID NO: 476406 - DNA, 15 bp, Homo sapiens
tactaagtttctgag

SEQ ID NO: 476407 - DNA, 15 bp, Homo sapiens
atactaagtttctga

SEQ ID NO: 476408 - DNA, 15 bp, Homo sapiens
catactaagtttctg

SEQ ID NO: 476409 - DNA, 15 bp, Homo sapiens
ccatactaagtttct

SEQ ID NO: 476410 - DNA, 15 bp, Homo sapiens
accatactaagtttc

SEQ ID NO: 476411 - DNA, 15 bp, Homo sapiens
caccatactaagttt

SEQ ID NO: 476412 - DNA, 15 bp, Homo sapiens
acaccatactaagtt

SEQ ID NO: 476413 - DNA, 15 bp, Homo sapiens
aacaccatactaagt

SEQ ID NO: 476414 - DNA, 15 bp, Homo sapiens
gaacaccatactaag

SEQ ID NO: 476415 - DNA, 15 bp, Homo sapiens
cgaacaccatactaa

SEQ ID NO: 476416 - DNA, 15 bp, Homo sapiens
ccgaacaccatacta

SEQ ID NO: 476417 - DNA, 15 bp, Homo sapiens
accgaacaccatact

SEQ ID NO: 476418 - DNA, 15 bp, Homo sapiens
aaccgaacaccatac

SEQ ID NO: 476419 - DNA, 15 bp, Homo sapiens
aaaccgaacaccata

SEQ ID NO: 476420 - DNA, 15 bp, Homo sapiens
gaaaccgaacaccat

SEQ ID NO: 476421 - DNA, 15 bp, Homo sapiens
tgaaaccgaacacca

SEQ ID NO: 476422 - DNA, 15 bp, Homo sapiens
ctgaaaccgaacacc

SEQ ID NO: 476423 - DNA, 15 bp, Homo sapiens
cctgaaaccgaacac

SEQ ID NO: 476424 - DNA, 15 bp, Homo sapiens
tcctgaaaccgaaca

SEQ ID NO: 476425 - DNA, 15 bp, Homo sapiens
atcctgaaaccgaac

SEQ ID NO: 476426 - DNA, 15 bp, Homo sapiens
aatcctgaaaccgaa

SEQ ID NO: 476427 - DNA, 15 bp, Homo sapiens
taatcctgaaaccga

SEQ ID NO: 476428 - DNA, 15 bp, Homo sapiens
ttaatcctgaaaccg

SEQ ID NO: 476429 - DNA, 15 bp, Homo sapiens
attaatcctgaaacc

SEQ ID NO: 476430 - DNA, 15 bp, Homo sapiens
tattaatcctgaaac

SEQ ID NO: 476431 - DNA, 15 bp, Homo sapiens
ctattaatcctgaaa

SEQ ID NO: 476432 - DNA, 15 bp, Homo sapiens
tctattaatcctgaa

SEQ ID NO: 476433 - DNA, 15 bp, Homo sapiens
ttctattaatcctga

SEQ ID NO: 476434 - DNA, 15 bp, Homo sapiens
gttctattaatcctg

SEQ ID NO: 476435 - DNA, 15 bp, Homo sapiens
tgttctattaatcct

SEQ ID NO: 476436 - DNA, 15 bp, Homo sapiens
ttgttctattaatcc

SEQ ID NO: 476437 - DNA, 15 bp, Homo sapiens
tttgttctattaatc

SEQ ID NO: 476438 - DNA, 15 bp, Homo sapiens
ttttgttctattaat

SEQ ID NO: 476439 - DNA, 15 bp, Homo sapiens
attttgttctattaa

SEQ ID NO: 476440 - DNA, 15 bp, Homo sapiens
cattttgttctatta

SEQ ID NO: 476441 - DNA, 15 bp, Homo sapiens
gcattttgttctatt

SEQ ID NO: 476442 - DNA, 15 bp, Homo sapiens
ggcattttgttctat

SEQ ID NO: 476443 - DNA, 15 bp, Homo sapiens
tggcattttgttcta

SEQ ID NO: 476444 - DNA, 15 bp, Homo sapiens
ctggcattttgttct

SEQ ID NO: 476445 - DNA, 15 bp, Homo sapiens
gctggcattttgttc

SEQ ID NO: 476446 - DNA, 15 bp, Homo sapiens
agctggcattttgtt

SEQ ID NO: 476447 - DNA, 15 bp, Homo sapiens
cagctggcattttgt

SEQ ID NO: 476448 - DNA, 15 bp, Homo sapiens
gcagctggcattttg

SEQ ID NO: 476449 - DNA, 15 bp, Homo sapiens
tgcagctggcatttt

SEQ ID NO: 476450 - DNA, 15 bp, Homo sapiens
gtgcagctggcattt

SEQ ID NO: 476451 - DNA, 15 bp, Homo sapiens
tgtgcagctggcatt

SEQ ID NO: 476452 - DNA, 15 bp, Homo sapiens
ctgtgcagctggcat

SEQ ID NO: 476453 - DNA, 15 bp, Homo sapiens
gctgtgcagctggca

SEQ ID NO: 476454 - DNA, 15 bp, Homo sapiens
tgctgtgcagctggc

SEQ ID NO: 476455 - DNA, 15 bp, Homo sapiens
atgctgtgcagctgg

SEQ ID NO: 476456 - DNA, 15 bp, Homo sapiens
catgctgtgcagctg

SEQ ID NO: 476457 - DNA, 15 bp, Homo sapiens
acatgctgtgcagct

SEQ ID NO: 476458 - DNA, 15 bp, Homo sapiens
cacatgctgtgcagc

SEQ ID NO: 476459 - DNA, 15 bp, Homo sapiens
acacatgctgtgcag

SEQ ID NO: 476460 - DNA, 15 bp, Homo sapiens
aacacatgctgtgca

SEQ ID NO: 476461 - DNA, 15 bp, Homo sapiens
gaacacatgctgtgc

SEQ ID NO: 476462 - DNA, 15 bp, Homo sapiens
ggaacacatgctgtg

SEQ ID NO: 476463 - DNA, 15 bp, Homo sapiens
aggaacacatgctgt

SEQ ID NO: 476464 - DNA, 15 bp, Homo sapiens
caggaacacatgctg

SEQ ID NO: 476465 - DNA, 15 bp, Homo sapiens
acaggaacacatgct

SEQ ID NO: 476466 - DNA, 15 bp, Homo sapiens
tacaggaacacatgc

SEQ ID NO: 476467 - DNA, 15 bp, Homo sapiens
ttacaggaacacatg

SEQ ID NO: 476468 - DNA, 15 bp, Homo sapiens
attacaggaacacat

SEQ ID NO: 476469 - DNA, 15 bp, Homo sapiens
tattacaggaacaca

SEQ ID NO: 476470 - DNA, 15 bp, Homo sapiens
atattacaggaacac

SEQ ID NO: 476471 - DNA, 15 bp, Homo sapiens
aatattacaggaaca

SEQ ID NO: 476472 - DNA, 15 bp, Homo sapiens
aaatattacaggaac

SEQ ID NO: 476473 - DNA, 15 bp, Homo sapiens
aaaatattacaggaa

SEQ ID NO: 476474 - DNA, 15 bp, Homo sapiens
aaaaatattacagga

SEQ ID NO: 476475 - DNA, 15 bp, Homo sapiens
gaaaaatattacagg

SEQ ID NO: 476476 - DNA, 15 bp, Homo sapiens
tgaaaaatattacag

SEQ ID NO: 476477 - DNA, 15 bp, Homo sapiens
atgaaaaatattaca

SEQ ID NO: 476478 - DNA, 15 bp, Homo sapiens
aatgaaaaatattac

SEQ ID NO: 476479 - DNA, 15 bp, Homo sapiens
taatgaaaaatatta

SEQ ID NO: 476480 - DNA, 15 bp, Homo sapiens
ataatgaaaaatatt

SEQ ID NO: 476481 - DNA, 15 bp, Homo sapiens
tataatgaaaaatat

SEQ ID NO: 476482 - DNA, 15 bp, Homo sapiens
atataatgaaaaata

SEQ ID NO: 476483 - DNA, 15 bp, Homo sapiens
catataatgaaaaat

SEQ ID NO: 476484 - DNA, 15 bp, Homo sapiens
ccatataatgaaaaa

SEQ ID NO: 476485 - DNA, 15 bp, Homo sapiens
gccatataatgaaaa

SEQ ID NO: 476486 - DNA, 15 bp, Homo sapiens
agccatataatgaaa

SEQ ID NO: 476487 - DNA, 15 bp, Homo sapiens
aagccatataatgaa

SEQ ID NO: 476488 - DNA, 15 bp, Homo sapiens
aaagccatataatga

SEQ ID NO: 476489 - DNA, 15 bp, Homo sapiens
caaagccatataatg

SEQ ID NO: 476490 - DNA, 15 bp, Homo sapiens
tcaaagccatataat

SEQ ID NO: 476491 - DNA, 15 bp, Homo sapiens
atcaaagccatataa

SEQ ID NO: 476492 - DNA, 15 bp, Homo sapiens
aatcaaagccatata

SEQ ID NO: 476493 - DNA, 15 bp, Homo sapiens
taatcaaagccatat

SEQ ID NO: 476494 - DNA, 15 bp, Homo sapiens
ataatcaaagccata

SEQ ID NO: 476495 - DNA, 15 bp, Homo sapiens
gataatcaaagccat

SEQ ID NO: 476496 - DNA, 15 bp, Homo sapiens
ggataatcaaagcca

SEQ ID NO: 476497 - DNA, 15 bp, Homo sapiens
aggataatcaaagcc

SEQ ID NO: 476498 - DNA, 15 bp, Homo sapiens
aaggataatcaaagc

SEQ ID NO: 476499 - DNA, 15 bp, Homo sapiens
aaaggataatcaaag

SEQ ID NO: 476500 - DNA, 15 bp, Homo sapiens
aaaaggataatcaaa

SEQ ID NO: 476501 - DNA, 15 bp, Homo sapiens
caaaaggataatcaa

SEQ ID NO: 476502 - DNA, 15 bp, Homo sapiens
acaaaaggataatca

SEQ ID NO: 476503 - DNA, 15 bp, Homo sapiens
cacaaaaggataatc

SEQ ID NO: 476504 - DNA, 15 bp, Homo sapiens
tcacaaaaggataat

SEQ ID NO: 476505 - DNA, 15 bp, Homo sapiens
ttcacaaaaggataa

SEQ ID NO: 476506 - DNA, 15 bp, Homo sapiens
attcacaaaaggata

SEQ ID NO: 476507 - DNA, 15 bp, Homo sapiens
gattcacaaaaggat

SEQ ID NO: 476508 - DNA, 15 bp, Homo sapiens
agattcacaaaagga

SEQ ID NO: 476509 - DNA, 15 bp, Homo sapiens
gagattcacaaaagg

SEQ ID NO: 476510 - DNA, 15 bp, Homo sapiens
agagattcacaaaag

SEQ ID NO: 476511 - DNA, 15 bp, Homo sapiens
gagagattcacaaaa

SEQ ID NO: 476512 - DNA, 15 bp, Homo sapiens
tgagagattcacaaa

SEQ ID NO: 476513 - DNA, 15 bp, Homo sapiens
gtgagagattcacaa

SEQ ID NO: 476514 - DNA, 15 bp, Homo sapiens
tgtgagagattcaca

SEQ ID NO: 476515 - DNA, 15 bp, Homo sapiens
ttgtgagagattcac

SEQ ID NO: 476516 - DNA, 15 bp, Homo sapiens
gttgtgagagattca

SEQ ID NO: 476517 - DNA, 15 bp, Homo sapiens
agttgtgagagattc

SEQ ID NO: 476518 - DNA, 15 bp, Homo sapiens
aagttgtgagagatt

SEQ ID NO: 476519 - DNA, 15 bp, Homo sapiens
aaagttgtgagagat

SEQ ID NO: 476520 - DNA, 15 bp, Homo sapiens
taaagttgtgagaga

SEQ ID NO: 476521 - DNA, 15 bp, Homo sapiens
ttaaagttgtgagag

SEQ ID NO: 476522 - DNA, 15 bp, Homo sapiens
cttaaagttgtgaga

SEQ ID NO: 476523 - DNA, 15 bp, Homo sapiens
acttaaagttgtgag

SEQ ID NO: 476524 - DNA, 15 bp, Homo sapiens
aacttaaagttgtga

SEQ ID NO: 476525 - DNA, 15 bp, Homo sapiens
caacttaaagttgtg

SEQ ID NO: 476526 - DNA, 15 bp, Homo sapiens
acaacttaaagttgt

SEQ ID NO: 476527 - DNA, 15 bp, Homo sapiens
aacaacttaaagttg

SEQ ID NO: 476528 - DNA, 15 bp, Homo sapiens
taacaacttaaagtt

SEQ ID NO: 476529 - DNA, 15 bp, Homo sapiens
ctaacaacttaaagt

SEQ ID NO: 476530 - DNA, 15 bp, Homo sapiens
actaacaacttaaag

SEQ ID NO: 476531 - DNA, 15 bp, Homo sapiens
aactaacaacttaaa

SEQ ID NO: 476532 - DNA, 15 bp, Homo sapiens
gaactaacaacttaa

SEQ ID NO: 476533 - DNA, 15 bp, Homo sapiens
agaactaacaactta

SEQ ID NO: 476534 - DNA, 15 bp, Homo sapiens
aagaactaacaactt

SEQ ID NO: 476535 - DNA, 15 bp, Homo sapiens
taagaactaacaact

SEQ ID NO: 476536 - DNA, 15 bp, Homo sapiens
ctaagaactaacaac

SEQ ID NO: 476537 - DNA, 15 bp, Homo sapiens
tctaagaactaacaa

SEQ ID NO: 476538 - DNA, 15 bp, Homo sapiens
atctaagaactaaca

SEQ ID NO: 476539 - DNA, 15 bp, Homo sapiens
catctaagaactaac

SEQ ID NO: 476540 - DNA, 15 bp, Homo sapiens
acatctaagaactaa

SEQ ID NO: 476541 - DNA, 15 bp, Homo sapiens
aacatctaagaacta

SEQ ID NO: 476542 - DNA, 15 bp, Homo sapiens
aaacatctaagaact

SEQ ID NO: 476543 - DNA, 15 bp, Homo sapiens
aaaacatctaagaac

SEQ ID NO: 476544 - DNA, 15 bp, Homo sapiens
gaaaacatctaagaa

SEQ ID NO: 476545 - DNA, 15 bp, Homo sapiens
agaaaacatctaaga

SEQ ID NO: 476546 - DNA, 15 bp, Homo sapiens
gagaaaacatctaag

SEQ ID NO: 476547 - DNA, 15 bp, Homo sapiens
tgagaaaacatctaa

SEQ ID NO: 476548 - DNA, 15 bp, Homo sapiens
ctgagaaaacatcta

SEQ ID NO: 476549 - DNA, 15 bp, Homo sapiens
actgagaaaacatct

SEQ ID NO: 476550 - DNA, 15 bp, Homo sapiens
tactgagaaaacatc

SEQ ID NO: 476551 - DNA, 15 bp, Homo sapiens
gtactgagaaaacat

SEQ ID NO: 476552 - DNA, 15 bp, Homo sapiens
ggtactgagaaaaca

SEQ ID NO: 476553 - DNA, 15 bp, Homo sapiens
aggtactgagaaaac

SEQ ID NO: 476554 - DNA, 15 bp, Homo sapiens
aaggtactgagaaaa

SEQ ID NO: 476555 - DNA, 15 bp, Homo sapiens
aaaggtactgagaaa

SEQ ID NO: 476556 - DNA, 15 bp, Homo sapiens
caaaggtactgagaa

SEQ ID NO: 476557 - DNA, 15 bp, Homo sapiens
ccaaaggtactgaga

SEQ ID NO: 476558 - DNA, 15 bp, Homo sapiens
gccaaaggtactgag

SEQ ID NO: 476559 - DNA, 15 bp, Homo sapiens
agccaaaggtactga

SEQ ID NO: 476560 - DNA, 15 bp, Homo sapiens
aagccaaaggtactg

SEQ ID NO: 476561 - DNA, 15 bp, Homo sapiens
caagccaaaggtact

SEQ ID NO: 476562 - DNA, 15 bp, Homo sapiens
tcaagccaaaggtac

SEQ ID NO: 476563 - DNA, 15 bp, Homo sapiens
ttcaagccaaaggta

SEQ ID NO: 476564 - DNA, 15 bp, Homo sapiens
cttcaagccaaaggt

SEQ ID NO: 476565 - DNA, 15 bp, Homo sapiens
ccttcaagccaaagg

SEQ ID NO: 476566 - DNA, 15 bp, Homo sapiens
tccttcaagccaaag

SEQ ID NO: 476567 - DNA, 15 bp, Homo sapiens
ctccttcaagccaaa

SEQ ID NO: 476568 - DNA, 15 bp, Homo sapiens
actccttcaagccaa

SEQ ID NO: 476569 - DNA, 15 bp, Homo sapiens
cactccttcaagcca

SEQ ID NO: 476570 - DNA, 15 bp, Homo sapiens
tcactccttcaagcc

SEQ ID NO: 476571 - DNA, 15 bp, Homo sapiens
atcactccttcaagc

SEQ ID NO: 476572 - DNA, 15 bp, Homo sapiens
tatcactccttcaag

SEQ ID NO: 476573 - DNA, 15 bp, Homo sapiens
gtatcactccttcaa

SEQ ID NO: 476574 - DNA, 15 bp, Homo sapiens
agtatcactccttca

SEQ ID NO: 476575 - DNA, 15 bp, Homo sapiens
gagtatcactccttc

SEQ ID NO: 476576 - DNA, 15 bp, Homo sapiens
tgagtatcactcctt

SEQ ID NO: 476577 - DNA, 15 bp, Homo sapiens
atgagtatcactcct

SEQ ID NO: 476578 - DNA, 15 bp, Homo sapiens
gatgagtatcactcc

SEQ ID NO: 476579 - DNA, 15 bp, Homo sapiens
agatgagtatcactc

SEQ ID NO: 476580 - DNA, 15 bp, Homo sapiens
aagatgagtatcact

SEQ ID NO: 476581 - DNA, 15 bp, Homo sapiens
aaagatgagtatcac

SEQ ID NO: 476582 - DNA, 15 bp, Homo sapiens
aaaagatgagtatca

SEQ ID NO: 476583 - DNA, 15 bp, Homo sapiens
caaaagatgagtatc

SEQ ID NO: 476584 - DNA, 15 bp, Homo sapiens
acaaaagatgagtat

SEQ ID NO: 476585 - DNA, 15 bp, Homo sapiens
aacaaaagatgagta

SEQ ID NO: 476586 - DNA, 15 bp, Homo sapiens
aaacaaaagatgagt

SEQ ID NO: 476587 - DNA, 15 bp, Homo sapiens
aaaacaaaagatgag

SEQ ID NO: 476588 - DNA, 15 bp, Homo sapiens
aaaaacaaaagatga

SEQ ID NO: 476589 - DNA, 15 bp, Homo sapiens
caaaaacaaaagatg

SEQ ID NO: 476590 - DNA, 15 bp, Homo sapiens
acaaaaacaaaagat

SEQ ID NO: 476591 - DNA, 15 bp, Homo sapiens
aacaaaaacaaaaga

SEQ ID NO: 476592 - DNA, 15 bp, Homo sapiens
aaacaaaaacaaaag

SEQ ID NO: 476593 - DNA, 15 bp, Homo sapiens
caaacaaaaacaaaa

SEQ ID NO: 476594 - DNA, 15 bp, Homo sapiens
tcaaacaaaaacaaa

SEQ ID NO: 476595 - DNA, 15 bp, Homo sapiens
ctcaaacaaaaacaa

SEQ ID NO: 476596 - DNA, 15 bp, Homo sapiens
tctcaaacaaaaaca

SEQ ID NO: 476597 - DNA, 15 bp, Homo sapiens
gtctcaaacaaaaac

SEQ ID NO: 476598 - DNA, 15 bp, Homo sapiens
tgtctcaaacaaaaa

SEQ ID NO: 476599 - DNA, 15 bp, Homo sapiens
ctgtctcaaacaaaa

SEQ ID NO: 476600 - DNA, 15 bp, Homo sapiens
cctgtctcaaacaaa

SEQ ID NO: 476601 - DNA, 15 bp, Homo sapiens
ccctgtctcaaacaa

SEQ ID NO: 476602 - DNA, 15 bp, Homo sapiens
accctgtctcaaaca

SEQ ID NO: 476603 - DNA, 15 bp, Homo sapiens
gaccctgtctcaaac

SEQ ID NO: 476604 - DNA, 15 bp, Homo sapiens
gagaccctgtctcaa

SEQ ID NO: 476605 - DNA, 15 bp, Homo sapiens
tgagaccctgtctca

SEQ ID NO: 476606 - DNA, 15 bp, Homo sapiens
gtgagaccctgtctc

SEQ ID NO: 476607 - DNA, 15 bp, Homo sapiens
agtgagaccctgtct

SEQ ID NO: 476608 - DNA, 15 bp, Homo sapiens
gagtgagaccctgtc

SEQ ID NO: 476609 - DNA, 15 bp, Homo sapiens
agagtgagaccctgt

SEQ ID NO: 476610 - DNA, 15 bp, Homo sapiens
gagagtgagaccctg

SEQ ID NO: 476611 - DNA, 15 bp, Homo sapiens
tgagagtgagaccct

SEQ ID NO: 476612 - DNA, 15 bp, Homo sapiens
gtgagagtgagaccc

SEQ ID NO: 476613 - DNA, 15 bp, Homo sapiens
ggtgagagtgagacc

SEQ ID NO: 476614 - DNA, 15 bp, Homo sapiens
gggtgagagtgagac

SEQ ID NO: 476615 - DNA, 15 bp, Homo sapiens
tgggtgagagtgaga

SEQ ID NO: 476616 - DNA, 15 bp, Homo sapiens
ctgggtgagagtgag

SEQ ID NO: 476617 - DNA, 15 bp, Homo sapiens
cctgggtgagagtga

SEQ ID NO: 476618 - DNA, 15 bp, Homo sapiens
gcctgggtgagagtg

SEQ ID NO: 476619 - DNA, 15 bp, Homo sapiens
acaccagcctgggtg

SEQ ID NO: 476620 - DNA, 15 bp, Homo sapiens
cacaccagcctgggt

SEQ ID NO: 476621 - DNA, 15 bp, Homo sapiens
gcacaccagcctggg

SEQ ID NO: 476622 - DNA, 15 bp, Homo sapiens
tgcacaccagcctgg

SEQ ID NO: 476623 - DNA, 15 bp, Homo sapiens
ctgcacaccagcctg

SEQ ID NO: 476624 - DNA, 15 bp, Homo sapiens
actgcacaccagcct

SEQ ID NO: 476625 - DNA, 15 bp, Homo sapiens
cactgcacaccagcc

SEQ ID NO: 476626 - DNA, 15 bp, Homo sapiens
ccactgcacaccagc

SEQ ID NO: 476627 - DNA, 15 bp, Homo sapiens
gccactgcacaccag

SEQ ID NO: 476628 - DNA, 15 bp, Homo sapiens
tgccactgcacacca

SEQ ID NO: 476629 - DNA, 15 bp, Homo sapiens
atgccactgcacacc

SEQ ID NO: 476630 - DNA, 15 bp, Homo sapiens
catgccactgcacac

SEQ ID NO: 476631 - DNA, 15 bp, Homo sapiens
tcatgccactgcaca

SEQ ID NO: 476632 - DNA, 15 bp, Homo sapiens
tgagatcatgccact

SEQ ID NO: 476633 - DNA, 15 bp, Homo sapiens
ctgagatcatgccac

SEQ ID NO: 476634 - DNA, 15 bp, Homo sapiens
gatggaggttgcagt

SEQ ID NO: 476635 - DNA, 15 bp, Homo sapiens
agatggaggttgcag

SEQ ID NO: 476636 - DNA, 15 bp, Homo sapiens
gagatggaggttgca

SEQ ID NO: 476637 - DNA, 15 bp, Homo sapiens
ggagatggaggttgc

SEQ ID NO: 476638 - DNA, 15 bp, Homo sapiens
gggagatggaggttg

SEQ ID NO: 476639 - DNA, 15 bp, Homo sapiens
tgggagatggaggtt

SEQ ID NO: 476640 - DNA, 15 bp, Homo sapiens
ctgggagatggaggt

SEQ ID NO: 476641 - DNA, 15 bp, Homo sapiens
cctgggagatggagg

SEQ ID NO: 476642 - DNA, 15 bp, Homo sapiens
acctgggagatggag

SEQ ID NO: 476643 - DNA, 15 bp, Homo sapiens
aacctgggagatgga

SEQ ID NO: 476644 - DNA, 15 bp, Homo sapiens
gaacctgggagatgg

SEQ ID NO: 476645 - DNA, 15 bp, Homo sapiens
tgaacctgggagatg

SEQ ID NO: 476646 - DNA, 15 bp, Homo sapiens
ttgaacctgggagat

SEQ ID NO: 476647 - DNA, 15 bp, Homo sapiens
cttgaacctgggaga

SEQ ID NO: 476648 - DNA, 15 bp, Homo sapiens
aagaatcacttgaac

SEQ ID NO: 476649 - DNA, 15 bp, Homo sapiens
caagaatcacttgaa

SEQ ID NO: 476650 - DNA, 15 bp, Homo sapiens
acaagaatcacttga

SEQ ID NO: 476651 - DNA, 15 bp, Homo sapiens
cacaagaatcacttg

SEQ ID NO: 476652 - DNA, 15 bp, Homo sapiens
gcacaagaatcactt

SEQ ID NO: 476653 - DNA, 15 bp, Homo sapiens
ggcacaagaatcact

SEQ ID NO: 476654 - DNA, 15 bp, Homo sapiens
aggcacaagaatcac

SEQ ID NO: 476655 - DNA, 15 bp, Homo sapiens
gaggcacaagaatca

SEQ ID NO: 476656 - DNA, 15 bp, Homo sapiens
tgaggcacaagaatc

SEQ ID NO: 476657 - DNA, 15 bp, Homo sapiens
ctgaggcacaagaat

SEQ ID NO: 476658 - DNA, 15 bp, Homo sapiens
gctgaggcacaagaa

SEQ ID NO: 476659 - DNA, 15 bp, Homo sapiens
ggctgaggcacaaga

SEQ ID NO: 476660 - DNA, 15 bp, Homo sapiens
aggctgaggcacaag

SEQ ID NO: 476661 - DNA, 15 bp, Homo sapiens
gaggctgaggcacaa

SEQ ID NO: 476662 - DNA, 15 bp, Homo sapiens
ggaggctgaggcaca

SEQ ID NO: 476663 - DNA, 15 bp, Homo sapiens
aggaggctgaggcac

SEQ ID NO: 476664 - DNA, 15 bp, Homo sapiens
ttactcaggaggctg

SEQ ID NO: 476665 - DNA, 15 bp, Homo sapiens
gttactcaggaggct

SEQ ID NO: 476666 - DNA, 15 bp, Homo sapiens
agttactcaggaggc

SEQ ID NO: 476667 - DNA, 15 bp, Homo sapiens
cagttactcaggagg

SEQ ID NO: 476668 - DNA, 15 bp, Homo sapiens
ccagttactcaggag

SEQ ID NO: 476669 - DNA, 15 bp, Homo sapiens
cccagttactcagga

SEQ ID NO: 476670 - DNA, 15 bp, Homo sapiens
tcccagttactcagg

SEQ ID NO: 476671 - DNA, 15 bp, Homo sapiens
ttcccagttactcag

SEQ ID NO: 476672 - DNA, 15 bp, Homo sapiens
attcccagttactca

SEQ ID NO: 476673 - DNA, 15 bp, Homo sapiens
tattcccagttactc

SEQ ID NO: 476674 - DNA, 15 bp, Homo sapiens
ctattcccagttact

SEQ ID NO: 476675 - DNA, 15 bp, Homo sapiens
tctattcccagttac

SEQ ID NO: 476676 - DNA, 15 bp, Homo sapiens
ctctattcccagtta

SEQ ID NO: 476677 - DNA, 15 bp, Homo sapiens
cctctattcccagtt

SEQ ID NO: 476678 - DNA, 15 bp, Homo sapiens
acctctattcccagt

SEQ ID NO: 476679 - DNA, 15 bp, Homo sapiens
cacctctattcccag

SEQ ID NO: 476680 - DNA, 15 bp, Homo sapiens
gcacctctattccca

SEQ ID NO: 476681 - DNA, 15 bp, Homo sapiens
cgcacctctattccc

SEQ ID NO: 476682 - DNA, 15 bp, Homo sapiens
acgcacctctattcc

SEQ ID NO: 476683 - DNA, 15 bp, Homo sapiens
cacgcacctctattc

SEQ ID NO: 476684 - DNA, 15 bp, Homo sapiens
gcacgcacctctatt

SEQ ID NO: 476685 - DNA, 15 bp, Homo sapiens
ggcacgcacctctat

SEQ ID NO: 476686 - DNA, 15 bp, Homo sapiens
tggcacgcacctcta

SEQ ID NO: 476687 - DNA, 15 bp, Homo sapiens
gtggcacgcacctct

SEQ ID NO: 476688 - DNA, 15 bp, Homo sapiens
ggtggcacgcacctc

SEQ ID NO: 476689 - DNA, 15 bp, Homo sapiens
tggtggcacgcacct

SEQ ID NO: 476690 - DNA, 15 bp, Homo sapiens
gtggtggcacgcacc

SEQ ID NO: 476691 - DNA, 15 bp, Homo sapiens
tgtggtggcacgcac

SEQ ID NO: 476692 - DNA, 15 bp, Homo sapiens
gtgtggtggcacgca

SEQ ID NO: 476693 - DNA, 15 bp, Homo sapiens
ggtgtggtggcacgc

SEQ ID NO: 476694 - DNA, 15 bp, Homo sapiens
gggtgtggtggcacg

SEQ ID NO: 476695 - DNA, 15 bp, Homo sapiens
ccgggtgtggtggca

SEQ ID NO: 476696 - DNA, 15 bp, Homo sapiens
gccgggtgtggtggc

SEQ ID NO: 476697 - DNA, 15 bp, Homo sapiens
agccgggtgtggtgg

SEQ ID NO: 476698 - DNA, 15 bp, Homo sapiens
tagccgggtgtggtg

SEQ ID NO: 476699 - DNA, 15 bp, Homo sapiens
ttagccgggtgtggt

SEQ ID NO: 476700 - DNA, 15 bp, Homo sapiens
attagccgggtgtgg

SEQ ID NO: 476701 - DNA, 15 bp, Homo sapiens
aattagccgggtgtg

SEQ ID NO: 476702 - DNA, 15 bp, Homo sapiens
aaattagccgggtgt

SEQ ID NO: 476703 - DNA, 15 bp, Homo sapiens
aaaattagccgggtg

SEQ ID NO: 476704 - DNA, 15 bp, Homo sapiens
aaaaattagccgggt

SEQ ID NO: 476705 - DNA, 15 bp, Homo sapiens
aaaaaaattagccgg

SEQ ID NO: 476706 - DNA, 15 bp, Homo sapiens
aaaaaaaattagccg

SEQ ID NO: 476707 - DNA, 15 bp, Homo sapiens
caaaaaaaaaaaaat

SEQ ID NO: 476708 - DNA, 15 bp, Homo sapiens
cgagactctgtctca

SEQ ID NO: 476709 - DNA, 15 bp, Homo sapiens
aagagcgagactctg

SEQ ID NO: 476710 - DNA, 15 bp, Homo sapiens
aaagagcgagactct

SEQ ID NO: 476711 - DNA, 15 bp, Homo sapiens
gaaagagcgagactc

SEQ ID NO: 476712 - DNA, 15 bp, Homo sapiens
cgaaagagcgagact

SEQ ID NO: 476713 - DNA, 15 bp, Homo sapiens
ccgaaagagcgagac

SEQ ID NO: 476714 - DNA, 15 bp, Homo sapiens
gccgaaagagcgaga

SEQ ID NO: 476715 - DNA, 15 bp, Homo sapiens
ggccgaaagagcgag

SEQ ID NO: 476716 - DNA, 15 bp, Homo sapiens
tggccgaaagagcga

SEQ ID NO: 476717 - DNA, 15 bp, Homo sapiens
ctggccgaaagagcg

SEQ ID NO: 476718 - DNA, 15 bp, Homo sapiens
cctggccgaaagagc

SEQ ID NO: 476719 - DNA, 15 bp, Homo sapiens
gcctggccgaaagag

SEQ ID NO: 476720 - DNA, 15 bp, Homo sapiens
ggcctggccgaaaga

SEQ ID NO: 476721 - DNA, 15 bp, Homo sapiens
tggcctggccgaaag

SEQ ID NO: 476722 - DNA, 15 bp, Homo sapiens
ctggcctggccgaaa

SEQ ID NO: 476723 - DNA, 15 bp, Homo sapiens
tctggcctggccgaa

SEQ ID NO: 476724 - DNA, 15 bp, Homo sapiens
ctctggcctggccga

SEQ ID NO: 476725 - DNA, 15 bp, Homo sapiens
actctggcctggccg

SEQ ID NO: 476726 - DNA, 15 bp, Homo sapiens
cactctggcctggcc

SEQ ID NO: 476727 - DNA, 15 bp, Homo sapiens
gcactctggcctggc

SEQ ID NO: 476728 - DNA, 15 bp, Homo sapiens
cgcactctggcctgg

SEQ ID NO: 476729 - DNA, 15 bp, Homo sapiens
acgcactctggcctg

SEQ ID NO: 476730 - DNA, 15 bp, Homo sapiens
cacgcactctggcct

SEQ ID NO: 476731 - DNA, 15 bp, Homo sapiens
acacgcactctggcc

SEQ ID NO: 476732 - DNA, 15 bp, Homo sapiens
aacacgcactctggc

SEQ ID NO: 476733 - DNA, 15 bp, Homo sapiens
caacacgcactctgg

SEQ ID NO: 476734 - DNA, 15 bp, Homo sapiens
gcaacacgcactctg

SEQ ID NO: 476735 - DNA, 15 bp, Homo sapiens
tgcaacacgcactct

SEQ ID NO: 476736 - DNA, 15 bp, Homo sapiens
ttgcaacacgcactc

SEQ ID NO: 476737 - DNA, 15 bp, Homo sapiens
attgcaacacgcact

SEQ ID NO: 476738 - DNA, 15 bp, Homo sapiens
gattgcaacacgcac

SEQ ID NO: 476739 - DNA, 15 bp, Homo sapiens
agattgcaacacgca

SEQ ID NO: 476740 - DNA, 15 bp, Homo sapiens
gagattgcaacacgc

SEQ ID NO: 476741 - DNA, 15 bp, Homo sapiens
tgagattgcaacacg

SEQ ID NO: 476742 - DNA, 15 bp, Homo sapiens
ttgagattgcaacac

SEQ ID NO: 476743 - DNA, 15 bp, Homo sapiens
gttgagattgcaaca

SEQ ID NO: 476744 - DNA, 15 bp, Homo sapiens
agttgagattgcaac

SEQ ID NO: 476745 - DNA, 15 bp, Homo sapiens
gagttgagattgcaa

SEQ ID NO: 476746 - DNA, 15 bp, Homo sapiens
tgagttgagattgca

SEQ ID NO: 476747 - DNA, 15 bp, Homo sapiens
gtgagttgagattgc

SEQ ID NO: 476748 - DNA, 15 bp, Homo sapiens
agtgagttgagattg

SEQ ID NO: 476749 - DNA, 15 bp, Homo sapiens
cagtgagttgagatt

SEQ ID NO: 476750 - DNA, 15 bp, Homo sapiens
gcagtgagttgagat

SEQ ID NO: 476751 - DNA, 15 bp, Homo sapiens
tgcagtgagttgaga

SEQ ID NO: 476752 - DNA, 15 bp, Homo sapiens
ttgcagtgagttgag

SEQ ID NO: 476753 - DNA, 15 bp, Homo sapiens
gttgcagtgagttga

SEQ ID NO: 476754 - DNA, 15 bp, Homo sapiens
ggttgcagtgagttg

SEQ ID NO: 476755 - DNA, 15 bp, Homo sapiens
aggttgcagtgagtt

SEQ ID NO: 476756 - DNA, 15 bp, Homo sapiens
gaggttgcagtgagt

SEQ ID NO: 476757 - DNA, 15 bp, Homo sapiens
tgaacctgggaggtg

SEQ ID NO: 476758 - DNA, 15 bp, Homo sapiens
ttgaacctgggaggt

SEQ ID NO: 476759 - DNA, 15 bp, Homo sapiens
aaggcaggagaatcg

SEQ ID NO: 476760 - DNA, 15 bp, Homo sapiens
taaggcaggagaatc

SEQ ID NO: 476761 - DNA, 15 bp, Homo sapiens
gggaggctaaggcag

SEQ ID NO: 476762 - DNA, 15 bp, Homo sapiens
agggaggctaaggca

SEQ ID NO: 476763 - DNA, 15 bp, Homo sapiens
cagggaggctaaggc

SEQ ID NO: 476764 - DNA, 15 bp, Homo sapiens
tcagggaggctaagg

SEQ ID NO: 476765 - DNA, 15 bp, Homo sapiens
ctcagggaggctaag

SEQ ID NO: 476766 - DNA, 15 bp, Homo sapiens
actcagggaggctaa

SEQ ID NO: 476767 - DNA, 15 bp, Homo sapiens
tactcagggaggcta

SEQ ID NO: 476768 - DNA, 15 bp, Homo sapiens
ctactcagggaggct

SEQ ID NO: 476769 - DNA, 15 bp, Homo sapiens
gctactcagggaggc

SEQ ID NO: 476770 - DNA, 15 bp, Homo sapiens
agctactcagggagg

SEQ ID NO: 476771 - DNA, 15 bp, Homo sapiens
cagctactcagggag

SEQ ID NO: 476772 - DNA, 15 bp, Homo sapiens
ccagctactcaggga

SEQ ID NO: 476773 - DNA, 15 bp, Homo sapiens
tccagctactcaggg

SEQ ID NO: 476774 - DNA, 15 bp, Homo sapiens
gtccagctactcagg

SEQ ID NO: 476775 - DNA, 15 bp, Homo sapiens
ggtccagctactcag

SEQ ID NO: 476776 - DNA, 15 bp, Homo sapiens
cggtccagctactca

SEQ ID NO: 476777 - DNA, 15 bp, Homo sapiens
ccggtccagctactc

SEQ ID NO: 476778 - DNA, 15 bp, Homo sapiens
gccggtccagctact

SEQ ID NO: 476779 - DNA, 15 bp, Homo sapiens
tgccggtccagctac

SEQ ID NO: 476780 - DNA, 15 bp, Homo sapiens
gtgccggtccagcta

SEQ ID NO: 476781 - DNA, 15 bp, Homo sapiens
tgtgccggtccagct

SEQ ID NO: 476782 - DNA, 15 bp, Homo sapiens
gtgtgccggtccagc

SEQ ID NO: 476783 - DNA, 15 bp, Homo sapiens
agtgtgccggtccag

SEQ ID NO: 476784 - DNA, 15 bp, Homo sapiens
gagtgtgccggtcca

SEQ ID NO: 476785 - DNA, 15 bp, Homo sapiens
ggagtgtgccggtcc

SEQ ID NO: 476786 - DNA, 15 bp, Homo sapiens
tggagtgtgccggtc

SEQ ID NO: 476787 - DNA, 15 bp, Homo sapiens
gtggagtgtgccggt

SEQ ID NO: 476788 - DNA, 15 bp, Homo sapiens
ggtggagtgtgccgg

SEQ ID NO: 476789 - DNA, 15 bp, Homo sapiens
tggtggagtgtgccg

SEQ ID NO: 476790 - DNA, 15 bp, Homo sapiens
atggtggagtgtgcc

SEQ ID NO: 476791 - DNA, 15 bp, Homo sapiens
catggtggagtgtgc

SEQ ID NO: 476792 - DNA, 15 bp, Homo sapiens
gcatggtggagtgtg

SEQ ID NO: 476793 - DNA, 15 bp, Homo sapiens
ggcatggtggagtgt

SEQ ID NO: 476794 - DNA, 15 bp, Homo sapiens
gggcatggtggagtg

SEQ ID NO: 476795 - DNA, 15 bp, Homo sapiens
cgggcatggtggagt

SEQ ID NO: 476796 - DNA, 15 bp, Homo sapiens
ccgggcatggtggag

SEQ ID NO: 476797 - DNA, 15 bp, Homo sapiens
gccgggcatggtgga

SEQ ID NO: 476798 - DNA, 15 bp, Homo sapiens
ggccaacatggagaa

SEQ ID NO: 476799 - DNA, 15 bp, Homo sapiens
tggccaacatggaga

SEQ ID NO: 476800 - DNA, 15 bp, Homo sapiens
ctggccaacatggag

SEQ ID NO: 476801 - DNA, 15 bp, Homo sapiens
cctggccaacatgga

SEQ ID NO: 476802 - DNA, 15 bp, Homo sapiens
ttttgagaccagcct

SEQ ID NO: 476803 - DNA, 15 bp, Homo sapiens
gttttgagaccagcc

SEQ ID NO: 476804 - DNA, 15 bp, Homo sapiens
agttttgagaccagc

SEQ ID NO: 476805 - DNA, 15 bp, Homo sapiens
gagttttgagaccag

SEQ ID NO: 476806 - DNA, 15 bp, Homo sapiens
ggagttttgagacca

SEQ ID NO: 476807 - DNA, 15 bp, Homo sapiens
aggagttttgagacc

SEQ ID NO: 476808 - DNA, 15 bp, Homo sapiens
caggagttttgagac

SEQ ID NO: 476809 - DNA, 15 bp, Homo sapiens
tcaggagttttgaga

SEQ ID NO: 476810 - DNA, 15 bp, Homo sapiens
gtcaggagttttgag

SEQ ID NO: 476811 - DNA, 15 bp, Homo sapiens
ggtcaggagttttga

SEQ ID NO: 476812 - DNA, 15 bp, Homo sapiens
aggtcaggagttttg

SEQ ID NO: 476813 - DNA, 15 bp, Homo sapiens
gaggtcaggagtttt

SEQ ID NO: 476814 - DNA, 15 bp, Homo sapiens
actgaggtcaggagt

SEQ ID NO: 476815 - DNA, 15 bp, Homo sapiens
tactgaggtcaggag

SEQ ID NO: 476816 - DNA, 15 bp, Homo sapiens
ttactgaggtcagga

SEQ ID NO: 476817 - DNA, 15 bp, Homo sapiens
attactgaggtcagg

SEQ ID NO: 476818 - DNA, 15 bp, Homo sapiens
gattactgaggtcag

SEQ ID NO: 476819 - DNA, 15 bp, Homo sapiens
ggattactgaggtca

SEQ ID NO: 476820 - DNA, 15 bp, Homo sapiens
tggattactgaggtc

SEQ ID NO: 476821 - DNA, 15 bp, Homo sapiens
gtggattactgaggt

SEQ ID NO: 476822 - DNA, 15 bp, Homo sapiens
ggtggattactgagg

SEQ ID NO: 476823 - DNA, 15 bp, Homo sapiens
gggtggattactgag

SEQ ID NO: 476824 - DNA, 15 bp, Homo sapiens
tgggtggattactga

SEQ ID NO: 476825 - DNA, 15 bp, Homo sapiens
gtgggtggattactg

SEQ ID NO: 476826 - DNA, 15 bp, Homo sapiens
ggtgggtggattact

SEQ ID NO: 476827 - DNA, 15 bp, Homo sapiens
gggtgggtggattac

SEQ ID NO: 476828 - DNA, 15 bp, Homo sapiens
ggggtgggtggatta

SEQ ID NO: 476829 - DNA, 15 bp, Homo sapiens
cggggtgggtggatt

SEQ ID NO: 476830 - DNA, 15 bp, Homo sapiens
ccggggtgggtggat

SEQ ID NO: 476831 - DNA, 15 bp, Homo sapiens
gccggggtgggtgga

SEQ ID NO: 476832 - DNA, 15 bp, Homo sapiens
ggccggggtgggtgg

SEQ ID NO: 476833 - DNA, 15 bp, Homo sapiens
aggccggggtgggtg

SEQ ID NO: 476834 - DNA, 15 bp, Homo sapiens
gaggccggggtgggt

SEQ ID NO: 476835 - DNA, 15 bp, Homo sapiens
ggaggccggggtggg

SEQ ID NO: 476836 - DNA, 15 bp, Homo sapiens
tggaggccggggtgg

SEQ ID NO: 476837 - DNA, 15 bp, Homo sapiens
ttggaggccggggtg

SEQ ID NO: 476838 - DNA, 15 bp, Homo sapiens
tttggaggccggggt

SEQ ID NO: 476839 - DNA, 15 bp, Homo sapiens
ttttggaggccgggg

SEQ ID NO: 476840 - DNA, 15 bp, Homo sapiens
cttttggaggccggg

SEQ ID NO: 476841 - DNA, 15 bp, Homo sapiens
acttttggaggccgg

SEQ ID NO: 476842 - DNA, 15 bp, Homo sapiens
cacttttggaggccg

SEQ ID NO: 476843 - DNA, 15 bp, Homo sapiens
gcacttttggaggcc

SEQ ID NO: 476844 - DNA, 15 bp, Homo sapiens
agcacttttggaggc

SEQ ID NO: 476845 - DNA, 15 bp, Homo sapiens
cagcacttttggagg

SEQ ID NO: 476846 - DNA, 15 bp, Homo sapiens
ccagcacttttggag

SEQ ID NO: 476847 - DNA, 15 bp, Homo sapiens
cccagcacttttgga

SEQ ID NO: 476848 - DNA, 15 bp, Homo sapiens
tcccagcacttttgg

SEQ ID NO: 476849 - DNA, 15 bp, Homo sapiens
atcccagcacttttg

SEQ ID NO: 476850 - DNA, 15 bp, Homo sapiens
aatcccagcactttt

SEQ ID NO: 476851 - DNA, 15 bp, Homo sapiens
tctgtaatcccagca

SEQ ID NO: 476852 - DNA, 15 bp, Homo sapiens
atctgtaatcccagc

SEQ ID NO: 476853 - DNA, 15 bp, Homo sapiens
catctgtaatcccag

SEQ ID NO: 476854 - DNA, 15 bp, Homo sapiens
acatctgtaatccca

SEQ ID NO: 476855 - DNA, 15 bp, Homo sapiens
cacatctgtaatccc

SEQ ID NO: 476856 - DNA, 15 bp, Homo sapiens
tcacatctgtaatcc

SEQ ID NO: 476857 - DNA, 15 bp, Homo sapiens
ctcacatctgtaatc

SEQ ID NO: 476858 - DNA, 15 bp, Homo sapiens
gctcacatctgtaat

SEQ ID NO: 476859 - DNA, 15 bp, Homo sapiens
ggctcacatctgtaa

SEQ ID NO: 476860 - DNA, 15 bp, Homo sapiens
tggctcacatctgta

SEQ ID NO: 476861 - DNA, 15 bp, Homo sapiens
gtggctcacatctgt

SEQ ID NO: 476862 - DNA, 15 bp, Homo sapiens
ggtggctcacatctg

SEQ ID NO: 476863 - DNA, 15 bp, Homo sapiens
tggtggctcacatct

SEQ ID NO: 476864 - DNA, 15 bp, Homo sapiens
gtggtggctcacatc

SEQ ID NO: 476865 - DNA, 15 bp, Homo sapiens
cgtggtggctcacat

SEQ ID NO: 476866 - DNA, 15 bp, Homo sapiens
gcgtggtggctcaca

SEQ ID NO: 476867 - DNA, 15 bp, Homo sapiens
agcgtggtggctcac

SEQ ID NO: 476868 - DNA, 15 bp, Homo sapiens
gagcgtggtggctca

SEQ ID NO: 476869 - DNA, 15 bp, Homo sapiens
cgagcgtggtggctc

SEQ ID NO: 476870 - DNA, 15 bp, Homo sapiens
ccgagcgtggtggct

SEQ ID NO: 476871 - DNA, 15 bp, Homo sapiens
gccgagcgtggtggc

SEQ ID NO: 476872 - DNA, 15 bp, Homo sapiens
ggccgagcgtggtgg

SEQ ID NO: 476873 - DNA, 15 bp, Homo sapiens
aggccgagcgtggtg

SEQ ID NO: 476874 - DNA, 15 bp, Homo sapiens
aaggccgagcgtggt

SEQ ID NO: 476875 - DNA, 15 bp, Homo sapiens
aaaggccgagcgtgg

SEQ ID NO: 476876 - DNA, 15 bp, Homo sapiens
aaaaggccgagcgtg

SEQ ID NO: 476877 - DNA, 15 bp, Homo sapiens
aaaaaggccgagcgt

SEQ ID NO: 476878 - DNA, 15 bp, Homo sapiens
aaaaaaggccgagcg

SEQ ID NO: 476879 - DNA, 15 bp, Homo sapiens
aaaaaaaggccgagc

SEQ ID NO: 476880 - DNA, 15 bp, Homo sapiens
aaaaaaaaggccgag

SEQ ID NO: 476881 - DNA, 15 bp, Homo sapiens
aaaaaaaaaggccga

SEQ ID NO: 476882 - DNA, 15 bp, Homo sapiens
aaaaaaaaaaggccg

SEQ ID NO: 476883 - DNA, 15 bp, Homo sapiens
aaaaaaaaaaaggcc

SEQ ID NO: 476884 - DNA, 15 bp, Homo sapiens
aaagactccatctca

SEQ ID NO: 476885 - DNA, 15 bp, Homo sapiens
gaaagactccatctc

SEQ ID NO: 476886 - DNA, 15 bp, Homo sapiens
agaaagactccatct

SEQ ID NO: 476887 - DNA, 15 bp, Homo sapiens
gagaaagactccatc

SEQ ID NO: 476888 - DNA, 15 bp, Homo sapiens
agagaaagactccat

SEQ ID NO: 476889 - DNA, 15 bp, Homo sapiens
tagagaaagactcca

SEQ ID NO: 476890 - DNA, 15 bp, Homo sapiens
atagagaaagactcc

SEQ ID NO: 476891 - DNA, 15 bp, Homo sapiens
gatagagaaagactc

SEQ ID NO: 476892 - DNA, 15 bp, Homo sapiens
tgatagagaaagact

SEQ ID NO: 476893 - DNA, 15 bp, Homo sapiens
gtgatagagaaagac

SEQ ID NO: 476894 - DNA, 15 bp, Homo sapiens
ggtgatagagaaaga

SEQ ID NO: 476895 - DNA, 15 bp, Homo sapiens
gggtgatagagaaag

SEQ ID NO: 476896 - DNA, 15 bp, Homo sapiens
tgggtgatagagaaa

SEQ ID NO: 476897 - DNA, 15 bp, Homo sapiens
ctgggtgatagagaa

SEQ ID NO: 476898 - DNA, 15 bp, Homo sapiens
cctgggtgatagaga

SEQ ID NO: 476899 - DNA, 15 bp, Homo sapiens
tagcctgggtgatag

SEQ ID NO: 476900 - DNA, 15 bp, Homo sapiens
ctagcctgggtgata

SEQ ID NO: 476901 - DNA, 15 bp, Homo sapiens
tctagcctgggtgat

SEQ ID NO: 476902 - DNA, 15 bp, Homo sapiens
ctctagcctgggtga

SEQ ID NO: 476903 - DNA, 15 bp, Homo sapiens
actctagcctgggtg

SEQ ID NO: 476904 - DNA, 15 bp, Homo sapiens
agcactctagcctgg

SEQ ID NO: 476905 - DNA, 15 bp, Homo sapiens
cagcactctagcctg

SEQ ID NO: 476906 - DNA, 15 bp, Homo sapiens
tcagcactctagcct

SEQ ID NO: 476907 - DNA, 15 bp, Homo sapiens
ctcagcactctagcc

SEQ ID NO: 476908 - DNA, 15 bp, Homo sapiens
cctcagcactctagc

SEQ ID NO: 476909 - DNA, 15 bp, Homo sapiens
acctcagcactctag

SEQ ID NO: 476910 - DNA, 15 bp, Homo sapiens
cacctcagcactcta

SEQ ID NO: 476911 - DNA, 15 bp, Homo sapiens
acacctcagcactct

SEQ ID NO: 476912 - DNA, 15 bp, Homo sapiens
cacacctcagcactc

SEQ ID NO: 476913 - DNA, 15 bp, Homo sapiens
tcacacctcagcact

SEQ ID NO: 476914 - DNA, 15 bp, Homo sapiens
atcacacctcagcac

SEQ ID NO: 476915 - DNA, 15 bp, Homo sapiens
gatcacacctcagca

SEQ ID NO: 476916 - DNA, 15 bp, Homo sapiens
agatcacacctcagc

SEQ ID NO: 476917 - DNA, 15 bp, Homo sapiens
gagatcacacctcag

SEQ ID NO: 476918 - DNA, 15 bp, Homo sapiens
cgagatcacacctca

SEQ ID NO: 476919 - DNA, 15 bp, Homo sapiens
ccgagatcacacctc

SEQ ID NO: 476920 - DNA, 15 bp, Homo sapiens
tccgagatcacacct

SEQ ID NO: 476921 - DNA, 15 bp, Homo sapiens
atccgagatcacacc

SEQ ID NO: 476922 - DNA, 15 bp, Homo sapiens
gatccgagatcacac

SEQ ID NO: 476923 - DNA, 15 bp, Homo sapiens
tgatccgagatcaca

SEQ ID NO: 476924 - DNA, 15 bp, Homo sapiens
gtgatccgagatcac

SEQ ID NO: 476925 - DNA, 15 bp, Homo sapiens
agtgatccgagatca

SEQ ID NO: 476926 - DNA, 15 bp, Homo sapiens
cagtgatccgagatc

SEQ ID NO: 476927 - DNA, 15 bp, Homo sapiens
gcagtgatccgagat

SEQ ID NO: 476928 - DNA, 15 bp, Homo sapiens
tgcagtgatccgaga

SEQ ID NO: 476929 - DNA, 15 bp, Homo sapiens
ctgcagtgatccgag

SEQ ID NO: 476930 - DNA, 15 bp, Homo sapiens
gctgcagtgatccga

SEQ ID NO: 476931 - DNA, 15 bp, Homo sapiens
ggctgcagtgatccg

SEQ ID NO: 476932 - DNA, 15 bp, Homo sapiens
aggctgcagtgatcc

SEQ ID NO: 476933 - DNA, 15 bp, Homo sapiens
gaggctgcagtgatc

SEQ ID NO: 476934 - DNA, 15 bp, Homo sapiens
agaggctgcagtgat

SEQ ID NO: 476935 - DNA, 15 bp, Homo sapiens
cagaggctgcagtga

SEQ ID NO: 476936 - DNA, 15 bp, Homo sapiens
gcagaggctgcagtg

SEQ ID NO: 476937 - DNA, 15 bp, Homo sapiens
ggcagaggctgcagt

SEQ ID NO: 476938 - DNA, 15 bp, Homo sapiens
aggcagaggctgcag

SEQ ID NO: 476939 - DNA, 15 bp, Homo sapiens
gaggcagaggctgca

SEQ ID NO: 476940 - DNA, 15 bp, Homo sapiens
ggaggcagaggctgc

SEQ ID NO: 476941 - DNA, 15 bp, Homo sapiens
aggaggcagaggctg

SEQ ID NO: 476942 - DNA, 15 bp, Homo sapiens
caggaggcagaggct

SEQ ID NO: 476943 - DNA, 15 bp, Homo sapiens
ccaggaggcagaggc

SEQ ID NO: 476944 - DNA, 15 bp, Homo sapiens
acttgaacccaggag

SEQ ID NO: 476945 - DNA, 15 bp, Homo sapiens
cacttgaacccagga

SEQ ID NO: 476946 - DNA, 15 bp, Homo sapiens
tcacttgaacccagg

SEQ ID NO: 476947 - DNA, 15 bp, Homo sapiens
atcacttgaacccag

SEQ ID NO: 476948 - DNA, 15 bp, Homo sapiens
aatcacttgaaccca

SEQ ID NO: 476949 - DNA, 15 bp, Homo sapiens
ggtacctgtaatccc

SEQ ID NO: 476950 - DNA, 15 bp, Homo sapiens
aggtacctgtaatcc

SEQ ID NO: 476951 - DNA, 15 bp, Homo sapiens
caggtacctgtaatc

SEQ ID NO: 476952 - DNA, 15 bp, Homo sapiens
gcaggtacctgtaat

SEQ ID NO: 476953 - DNA, 15 bp, Homo sapiens
ggcaggtacctgtaa

SEQ ID NO: 476954 - DNA, 15 bp, Homo sapiens
tggcaggtacctgta

SEQ ID NO: 476955 - DNA, 15 bp, Homo sapiens
gtggcaggtacctgt

SEQ ID NO: 476956 - DNA, 15 bp, Homo sapiens
ggtggcaggtacctg

SEQ ID NO: 476957 - DNA, 15 bp, Homo sapiens
tggtggcaggtacct

SEQ ID NO: 476958 - DNA, 15 bp, Homo sapiens
atggtggcaggtacc

SEQ ID NO: 476959 - DNA, 15 bp, Homo sapiens
catggtggcaggtac

SEQ ID NO: 476960 - DNA, 15 bp, Homo sapiens
gcatggtggcaggta

SEQ ID NO: 476961 - DNA, 15 bp, Homo sapiens
ggcatggtggcaggt

SEQ ID NO: 476962 - DNA, 15 bp, Homo sapiens
gggcatggtggcagg

SEQ ID NO: 476963 - DNA, 15 bp, Homo sapiens
cgggcatggtggcag

SEQ ID NO: 476964 - DNA, 15 bp, Homo sapiens
ccgggcatggtggca

SEQ ID NO: 476965 - DNA, 15 bp, Homo sapiens
gccgggcatggtggc

SEQ ID NO: 476966 - DNA, 15 bp, Homo sapiens
cagccgggcatggtg

SEQ ID NO: 476967 - DNA, 15 bp, Homo sapiens
tcagccgggcatggt

SEQ ID NO: 476968 - DNA, 15 bp, Homo sapiens
atcagccgggcatgg

SEQ ID NO: 476969 - DNA, 15 bp, Homo sapiens
aatcagccgggcatg

SEQ ID NO: 476970 - DNA, 15 bp, Homo sapiens
aaatcagccgggcat

SEQ ID NO: 476971 - DNA, 15 bp, Homo sapiens
aaaatcagccgggca

SEQ ID NO: 476972 - DNA, 15 bp, Homo sapiens
aaaaatcagccgggc

SEQ ID NO: 476973 - DNA, 15 bp, Homo sapiens
caaaaatcagccggg

SEQ ID NO: 476974 - DNA, 15 bp, Homo sapiens
acaaaaatcagccgg

SEQ ID NO: 476975 - DNA, 15 bp, Homo sapiens
tacaaaaatcagccg

SEQ ID NO: 476976 - DNA, 15 bp, Homo sapiens
gatggtgaaaccccg

SEQ ID NO: 476977 - DNA, 15 bp, Homo sapiens
agatggtgaaacccc

SEQ ID NO: 476978 - DNA, 15 bp, Homo sapiens
aagatggtgaaaccc

SEQ ID NO: 476979 - DNA, 15 bp, Homo sapiens
caagatggtgaaacc

SEQ ID NO: 476980 - DNA, 15 bp, Homo sapiens
ccaagatggtgaaac

SEQ ID NO: 476981 - DNA, 15 bp, Homo sapiens
gccaagatggtgaaa

SEQ ID NO: 476982 - DNA, 15 bp, Homo sapiens
ggccaagatggtgaa

SEQ ID NO: 476983 - DNA, 15 bp, Homo sapiens
tggccaagatggtga

SEQ ID NO: 476984 - DNA, 15 bp, Homo sapiens
ctggccaagatggtg

SEQ ID NO: 476985 - DNA, 15 bp, Homo sapiens
cctggccaagatggt

SEQ ID NO: 476986 - DNA, 15 bp, Homo sapiens
gcctggccaagatgg

SEQ ID NO: 476987 - DNA, 15 bp, Homo sapiens
agcctggccaagatg

SEQ ID NO: 476988 - DNA, 15 bp, Homo sapiens
cagcctggccaagat

SEQ ID NO: 476989 - DNA, 15 bp, Homo sapiens
ccagcctggccaaga

SEQ ID NO: 476990 - DNA, 15 bp, Homo sapiens
accagcctggccaag

SEQ ID NO: 476991 - DNA, 15 bp, Homo sapiens
aggtggatcacaagg

SEQ ID NO: 476992 - DNA, 15 bp, Homo sapiens
caggtggatcacaag

SEQ ID NO: 476993 - DNA, 15 bp, Homo sapiens
gcaggtggatcacaa

SEQ ID NO: 476994 - DNA, 15 bp, Homo sapiens
ggcaggtggatcaca

SEQ ID NO: 476995 - DNA, 15 bp, Homo sapiens
aaggcaggtggatca

SEQ ID NO: 476996 - DNA, 15 bp, Homo sapiens
caaggcaggtggatc

SEQ ID NO: 476997 - DNA, 15 bp, Homo sapiens
ccaaggcaggtggat

SEQ ID NO: 476998 - DNA, 15 bp, Homo sapiens
gccaaggcaggtgga

SEQ ID NO: 476999 - DNA, 15 bp, Homo sapiens
ggccaaggcaggtgg

SEQ ID NO: 477000 - DNA, 15 bp, Homo sapiens
aggccaaggcaggtg

SEQ ID NO: 477001 - DNA, 15 bp, Homo sapiens
gaggccaaggcaggt

SEQ ID NO: 477002 - DNA, 15 bp, Homo sapiens
actcacacctgtaat

SEQ ID NO: 477003 - DNA, 15 bp, Homo sapiens
gactcacacctgtaa

SEQ ID NO: 477004 - DNA, 15 bp, Homo sapiens
tgactcacacctgta

SEQ ID NO: 477005 - DNA, 15 bp, Homo sapiens
gtgactcacacctgt

SEQ ID NO: 477006 - DNA, 15 bp, Homo sapiens
ggtgactcacacctg

SEQ ID NO: 477007 - DNA, 15 bp, Homo sapiens
cggtgactcacacct

SEQ ID NO: 477008 - DNA, 15 bp, Homo sapiens
gcggtgactcacacc

SEQ ID NO: 477009 - DNA, 15 bp, Homo sapiens
tgcggtgactcacac

SEQ ID NO: 477010 - DNA, 15 bp, Homo sapiens
gtgcggtgactcaca

SEQ ID NO: 477011 - DNA, 15 bp, Homo sapiens
ggtgcggtgactcac

SEQ ID NO: 477012 - DNA, 15 bp, Homo sapiens
gggtgcggtgactca

SEQ ID NO: 477013 - DNA, 15 bp, Homo sapiens
tgggtgcggtgactc

SEQ ID NO: 477014 - DNA, 15 bp, Homo sapiens
ctgggtgcggtgact

SEQ ID NO: 477015 - DNA, 15 bp, Homo sapiens
gctgggtgcggtgac

SEQ ID NO: 477016 - DNA, 15 bp, Homo sapiens
ggctgggtgcggtga

SEQ ID NO: 477017 - DNA, 15 bp, Homo sapiens
agggctgggtgcggt

SEQ ID NO: 477018 - DNA, 15 bp, Homo sapiens
tagggctgggtgcgg

SEQ ID NO: 477019 - DNA, 15 bp, Homo sapiens
atagggctgggtgcg

SEQ ID NO: 477020 - DNA, 15 bp, Homo sapiens
aatagggctgggtgc

SEQ ID NO: 477021 - DNA, 15 bp, Homo sapiens
aaatagggctgggtg

SEQ ID NO: 477022 - DNA, 15 bp, Homo sapiens
aaaatagggctgggt

SEQ ID NO: 477023 - DNA, 15 bp, Homo sapiens
taaaatagggctggg

SEQ ID NO: 477024 - DNA, 15 bp, Homo sapiens
ttaaaatagggctgg

SEQ ID NO: 477025 - DNA, 15 bp, Homo sapiens
attaaaatagggctg

SEQ ID NO: 477026 - DNA, 15 bp, Homo sapiens
aattaaaatagggct

SEQ ID NO: 477027 - DNA, 15 bp, Homo sapiens
aaattaaaatagggc

SEQ ID NO: 477028 - DNA, 15 bp, Homo sapiens
aaaattaaaataggg

SEQ ID NO: 477029 - DNA, 15 bp, Homo sapiens
aaaaattaaaatagg

SEQ ID NO: 477030 - DNA, 15 bp, Homo sapiens
aaaaaattaaaatag

SEQ ID NO: 477031 - DNA, 15 bp, Homo sapiens
aaaaaaattaaaata

SEQ ID NO: 477032 - DNA, 15 bp, Homo sapiens
taaaaaaattaaaat

SEQ ID NO: 477033 - DNA, 15 bp, Homo sapiens
ttaaaaaaattaaaa

SEQ ID NO: 477034 - DNA, 15 bp, Homo sapiens
tttaaaaaaattaaa

SEQ ID NO: 477035 - DNA, 15 bp, Homo sapiens
ctttaaaaaaattaa

SEQ ID NO: 477036 - DNA, 15 bp, Homo sapiens
tctttaaaaaaatta

SEQ ID NO: 477037 - DNA, 15 bp, Homo sapiens
ctctttaaaaaaatt

SEQ ID NO: 477038 - DNA, 15 bp, Homo sapiens
tctctttaaaaaaat

SEQ ID NO: 477039 - DNA, 15 bp, Homo sapiens
ctctctttaaaaaaa

SEQ ID NO: 477040 - DNA, 15 bp, Homo sapiens
tctctctttaaaaaa

SEQ ID NO: 477041 - DNA, 15 bp, Homo sapiens
ctctctctttaaaaa

SEQ ID NO: 477042 - DNA, 15 bp, Homo sapiens
tctctctctttaaaa

SEQ ID NO: 477043 - DNA, 15 bp, Homo sapiens
atctctctctttaaa

SEQ ID NO: 477044 - DNA, 15 bp, Homo sapiens
tatctctctctttaa

SEQ ID NO: 477045 - DNA, 15 bp, Homo sapiens
ctatctctctcttta

SEQ ID NO: 477046 - DNA, 15 bp, Homo sapiens
cctatctctctcttt

SEQ ID NO: 477047 - DNA, 15 bp, Homo sapiens
ccctatctctctctt

SEQ ID NO: 477048 - DNA, 15 bp, Homo sapiens
cccctatctctctct

SEQ ID NO: 477049 - DNA, 15 bp, Homo sapiens
gcccctatctctctc

SEQ ID NO: 477050 - DNA, 15 bp, Homo sapiens
ggcccctatctctct

SEQ ID NO: 477051 - DNA, 15 bp, Homo sapiens
tggcccctatctctc

SEQ ID NO: 477052 - DNA, 15 bp, Homo sapiens
ctggcccctatctct

SEQ ID NO: 477053 - DNA, 15 bp, Homo sapiens
cctggcccctatctc

SEQ ID NO: 477054 - DNA, 15 bp, Homo sapiens
gcctggcccctatct

SEQ ID NO: 477055 - DNA, 15 bp, Homo sapiens
tgcctggcccctatc

SEQ ID NO: 477056 - DNA, 15 bp, Homo sapiens
gtgcctggcccctat

SEQ ID NO: 477057 - DNA, 15 bp, Homo sapiens
cgtgcctggccccta

SEQ ID NO: 477058 - DNA, 15 bp, Homo sapiens
ccgtgcctggcccct

SEQ ID NO: 477059 - DNA, 15 bp, Homo sapiens
accgtgcctggcccc

SEQ ID NO: 477060 - DNA, 15 bp, Homo sapiens
caccgtgcctggccc

SEQ ID NO: 477061 - DNA, 15 bp, Homo sapiens
ccaccgtgcctggcc

SEQ ID NO: 477062 - DNA, 15 bp, Homo sapiens
gccaccgtgcctggc

SEQ ID NO: 477063 - DNA, 15 bp, Homo sapiens
agccaccgtgcctgg

SEQ ID NO: 477064 - DNA, 15 bp, Homo sapiens
gagccaccgtgcctg

SEQ ID NO: 477065 - DNA, 15 bp, Homo sapiens
agagccaccgtgcct

SEQ ID NO: 477066 - DNA, 15 bp, Homo sapiens
gagagccaccgtgcc

SEQ ID NO: 477067 - DNA, 15 bp, Homo sapiens
cgagagccaccgtgc

SEQ ID NO: 477068 - DNA, 15 bp, Homo sapiens
gcgagagccaccgtg

SEQ ID NO: 477069 - DNA, 15 bp, Homo sapiens
ggcgagagccaccgt

SEQ ID NO: 477070 - DNA, 15 bp, Homo sapiens
aggcgagagccaccg

SEQ ID NO: 477071 - DNA, 15 bp, Homo sapiens
caggcgagagccacc

SEQ ID NO: 477072 - DNA, 15 bp, Homo sapiens
acaggcgagagccac

SEQ ID NO: 477073 - DNA, 15 bp, Homo sapiens
tacaggcgagagcca

SEQ ID NO: 477074 - DNA, 15 bp, Homo sapiens
ttacaggcgagagcc

SEQ ID NO: 477075 - DNA, 15 bp, Homo sapiens
attacaggcgagagc

SEQ ID NO: 477076 - DNA, 15 bp, Homo sapiens
gattacaggcgagag

SEQ ID NO: 477077 - DNA, 15 bp, Homo sapiens
ggattacaggcgaga

SEQ ID NO: 477078 - DNA, 15 bp, Homo sapiens
gggattacaggcgag

SEQ ID NO: 477079 - DNA, 15 bp, Homo sapiens
tgggattacaggcga

SEQ ID NO: 477080 - DNA, 15 bp, Homo sapiens
cgacctcaggtgatc

SEQ ID NO: 477081 - DNA, 15 bp, Homo sapiens
ccgacctcaggtgat

SEQ ID NO: 477082 - DNA, 15 bp, Homo sapiens
cccgacctcaggtga

SEQ ID NO: 477083 - DNA, 15 bp, Homo sapiens
tcccgacctcaggtg

SEQ ID NO: 477084 - DNA, 15 bp, Homo sapiens
ctcccgacctcaggt

SEQ ID NO: 477085 - DNA, 15 bp, Homo sapiens
actcccgacctcagg

SEQ ID NO: 477086 - DNA, 15 bp, Homo sapiens
aactcccgacctcag

SEQ ID NO: 477087 - DNA, 15 bp, Homo sapiens
gaactcccgacctca

SEQ ID NO: 477088 - DNA, 15 bp, Homo sapiens
cgaactcccgacctc

SEQ ID NO: 477089 - DNA, 15 bp, Homo sapiens
tcgaactcccgacct

SEQ ID NO: 477090 - DNA, 15 bp, Homo sapiens
ctcgaactcccgacc

SEQ ID NO: 477091 - DNA, 15 bp, Homo sapiens
tctcgaactcccgac

SEQ ID NO: 477092 - DNA, 15 bp, Homo sapiens
gtctcgaactcccga

SEQ ID NO: 477093 - DNA, 15 bp, Homo sapiens
ggtctcgaactcccg

SEQ ID NO: 477094 - DNA, 15 bp, Homo sapiens
tggtctcgaactccc

SEQ ID NO: 477095 - DNA, 15 bp, Homo sapiens
tcaggatggtctcga

SEQ ID NO: 477096 - DNA, 15 bp, Homo sapiens
gtcaggatggtctcg

SEQ ID NO: 477097 - DNA, 15 bp, Homo sapiens
ggtcaggatggtctc

SEQ ID NO: 477098 - DNA, 15 bp, Homo sapiens
tggtcaggatggtct

SEQ ID NO: 477099 - DNA, 15 bp, Homo sapiens
ttggtcaggatggtc

SEQ ID NO: 477100 - DNA, 15 bp, Homo sapiens
gttggtcaggatggt

SEQ ID NO: 477101 - DNA, 15 bp, Homo sapiens
tgttggtcaggatgg

SEQ ID NO: 477102 - DNA, 15 bp, Homo sapiens
atgttggtcaggatg

SEQ ID NO: 477103 - DNA, 15 bp, Homo sapiens
catgttggtcaggat

SEQ ID NO: 477104 - DNA, 15 bp, Homo sapiens
ccatgttggtcagga

SEQ ID NO: 477105 - DNA, 15 bp, Homo sapiens
agtttctccatgttg

SEQ ID NO: 477106 - DNA, 15 bp, Homo sapiens
gagtttctccatgtt

SEQ ID NO: 477107 - DNA, 15 bp, Homo sapiens
agagtttctccatgt

SEQ ID NO: 477108 - DNA, 15 bp, Homo sapiens
cagagtttctccatg

SEQ ID NO: 477109 - DNA, 15 bp, Homo sapiens
acagagtttctccat

SEQ ID NO: 477110 - DNA, 15 bp, Homo sapiens
gacagagtttctcca

SEQ ID NO: 477111 - DNA, 15 bp, Homo sapiens
agacagagtttctcc

SEQ ID NO: 477112 - DNA, 15 bp, Homo sapiens
gagacagagtttctc

SEQ ID NO: 477113 - DNA, 15 bp, Homo sapiens
agagacagagtttct

SEQ ID NO: 477114 - DNA, 15 bp, Homo sapiens
tagagacagagtttc

SEQ ID NO: 477115 - DNA, 15 bp, Homo sapiens
gtagagacagagttt

SEQ ID NO: 477116 - DNA, 15 bp, Homo sapiens
agtagagacagagtt

SEQ ID NO: 477117 - DNA, 15 bp, Homo sapiens
tagtagagacagagt

SEQ ID NO: 477118 - DNA, 15 bp, Homo sapiens
ttagtagagacagag

SEQ ID NO: 477119 - DNA, 15 bp, Homo sapiens
tttagtagagacaga

SEQ ID NO: 477120 - DNA, 15 bp, Homo sapiens
agctaattttgtatt

SEQ ID NO: 477121 - DNA, 15 bp, Homo sapiens
cagctaattttgtat

SEQ ID NO: 477122 - DNA, 15 bp, Homo sapiens
tcagctaattttgta

SEQ ID NO: 477123 - DNA, 15 bp, Homo sapiens
ctcagctaattttgt

SEQ ID NO: 477124 - DNA, 15 bp, Homo sapiens
gctcagctaattttg

SEQ ID NO: 477125 - DNA, 15 bp, Homo sapiens
cgctcagctaatttt

SEQ ID NO: 477126 - DNA, 15 bp, Homo sapiens
acgctcagctaattt

SEQ ID NO: 477127 - DNA, 15 bp, Homo sapiens
cacgctcagctaatt

SEQ ID NO: 477128 - DNA, 15 bp, Homo sapiens
ccacgctcagctaat

SEQ ID NO: 477129 - DNA, 15 bp, Homo sapiens
accacgctcagctaa

SEQ ID NO: 477130 - DNA, 15 bp, Homo sapiens
caccacgctcagcta

SEQ ID NO: 477131 - DNA, 15 bp, Homo sapiens
ccaccacgctcagct

SEQ ID NO: 477132 - DNA, 15 bp, Homo sapiens
gccaccacgctcagc

SEQ ID NO: 477133 - DNA, 15 bp, Homo sapiens
cgccaccacgctcag

SEQ ID NO: 477134 - DNA, 15 bp, Homo sapiens
gcgccaccacgctca

SEQ ID NO: 477135 - DNA, 15 bp, Homo sapiens
cgcgccaccacgctc

SEQ ID NO: 477136 - DNA, 15 bp, Homo sapiens
gcgcgccaccacgct

SEQ ID NO: 477137 - DNA, 15 bp, Homo sapiens
cgcgcgccaccacgc

SEQ ID NO: 477138 - DNA, 15 bp, Homo sapiens
gcgcgcgccaccacg

SEQ ID NO: 477139 - DNA, 15 bp, Homo sapiens
ggcgcgcgccaccac

SEQ ID NO: 477140 - DNA, 15 bp, Homo sapiens
aggcgcgcgccacca

SEQ ID NO: 477141 - DNA, 15 bp, Homo sapiens
caggcgcgcgccacc

SEQ ID NO: 477142 - DNA, 15 bp, Homo sapiens
acaggcgcgcgccac

SEQ ID NO: 477143 - DNA, 15 bp, Homo sapiens
tacaggcgcgcgcca

SEQ ID NO: 477144 - DNA, 15 bp, Homo sapiens
ttacaggcgcgcgcc

SEQ ID NO: 477145 - DNA, 15 bp, Homo sapiens
attacaggcgcgcgc

SEQ ID NO: 477146 - DNA, 15 bp, Homo sapiens
gattacaggcgcgcg

SEQ ID NO: 477147 - DNA, 15 bp, Homo sapiens
ggattacaggcgcgc

SEQ ID NO: 477148 - DNA, 15 bp, Homo sapiens
gggattacaggcgcg

SEQ ID NO: 477149 - DNA, 15 bp, Homo sapiens
tcaagtagctgggat

SEQ ID NO: 477150 - DNA, 15 bp, Homo sapiens
ctcaagtagctggga

SEQ ID NO: 477151 - DNA, 15 bp, Homo sapiens
tctcaagtagctggg

SEQ ID NO: 477152 - DNA, 15 bp, Homo sapiens
ctctcaagtagctgg

SEQ ID NO: 477153 - DNA, 15 bp, Homo sapiens
cctctcaagtagctg

SEQ ID NO: 477154 - DNA, 15 bp, Homo sapiens
gcctctcaagtagct

SEQ ID NO: 477155 - DNA, 15 bp, Homo sapiens
agcctctcaagtagc

SEQ ID NO: 477156 - DNA, 15 bp, Homo sapiens
cagcctctcaagtag

SEQ ID NO: 477157 - DNA, 15 bp, Homo sapiens
gcctcagcctctcaa

SEQ ID NO: 477158 - DNA, 15 bp, Homo sapiens
tgcctcagcctctca

SEQ ID NO: 477159 - DNA, 15 bp, Homo sapiens
ctgcctcagcctctc

SEQ ID NO: 477160 - DNA, 15 bp, Homo sapiens
cctgcctcagcctct

SEQ ID NO: 477161 - DNA, 15 bp, Homo sapiens
tgggttcaagtgatt

SEQ ID NO: 477162 - DNA, 15 bp, Homo sapiens
cctcctgggttcaag

SEQ ID NO: 477163 - DNA, 15 bp, Homo sapiens
gcctcctgggttcaa

SEQ ID NO: 477164 - DNA, 15 bp, Homo sapiens
cgcctcctgggttca

SEQ ID NO: 477165 - DNA, 15 bp, Homo sapiens
ccgcctcctgggttc

SEQ ID NO: 477166 - DNA, 15 bp, Homo sapiens
tccgcctcctgggtt

SEQ ID NO: 477167 - DNA, 15 bp, Homo sapiens
ctccgcctcctgggt

SEQ ID NO: 477168 - DNA, 15 bp, Homo sapiens
cctccgcctcctggg

SEQ ID NO: 477169 - DNA, 15 bp, Homo sapiens
acctccgcctcctgg

SEQ ID NO: 477170 - DNA, 15 bp, Homo sapiens
cgttcaccgcaacct

SEQ ID NO: 477171 - DNA, 15 bp, Homo sapiens
ccgttcaccgcaacc

SEQ ID NO: 477172 - DNA, 15 bp, Homo sapiens
tccgttcaccgcaac

SEQ ID NO: 477173 - DNA, 15 bp, Homo sapiens
ctccgttcaccgcaa

SEQ ID NO: 477174 - DNA, 15 bp, Homo sapiens
tctccgttcaccgca

SEQ ID NO: 477175 - DNA, 15 bp, Homo sapiens
atctccgttcaccgc

SEQ ID NO: 477176 - DNA, 15 bp, Homo sapiens
aatctccgttcaccg

SEQ ID NO: 477177 - DNA, 15 bp, Homo sapiens
caatctccgttcacc

SEQ ID NO: 477178 - DNA, 15 bp, Homo sapiens
gcaatctccgttcac

SEQ ID NO: 477179 - DNA, 15 bp, Homo sapiens
cgcaatctccgttca

SEQ ID NO: 477180 - DNA, 15 bp, Homo sapiens
gcgcaatctccgttc

SEQ ID NO: 477181 - DNA, 15 bp, Homo sapiens
ggcgcaatctccgtt

SEQ ID NO: 477182 - DNA, 15 bp, Homo sapiens
tggcgcaatctccgt

SEQ ID NO: 477183 - DNA, 15 bp, Homo sapiens
atggcgcaatctccg

SEQ ID NO: 477184 - DNA, 15 bp, Homo sapiens
aatggcgcaatctcc

SEQ ID NO: 477185 - DNA, 15 bp, Homo sapiens
caatggcgcaatctc

SEQ ID NO: 477186 - DNA, 15 bp, Homo sapiens
gcaatggcgcaatct

SEQ ID NO: 477187 - DNA, 15 bp, Homo sapiens
tgcaatggcgcaatc

SEQ ID NO: 477188 - DNA, 15 bp, Homo sapiens
gtgcaatggcgcaat

SEQ ID NO: 477189 - DNA, 15 bp, Homo sapiens
agtgcaatggcgcaa

SEQ ID NO: 477190 - DNA, 15 bp, Homo sapiens
gagtgcaatggcgca

SEQ ID NO: 477191 - DNA, 15 bp, Homo sapiens
cgttacccaggctgg

SEQ ID NO: 477192 - DNA, 15 bp, Homo sapiens
tcgttacccaggctg

SEQ ID NO: 477193 - DNA, 15 bp, Homo sapiens
ctcgttacccaggct

SEQ ID NO: 477194 - DNA, 15 bp, Homo sapiens
tctcgttacccaggc

SEQ ID NO: 477195 - DNA, 15 bp, Homo sapiens
ctctcgttacccagg

SEQ ID NO: 477196 - DNA, 15 bp, Homo sapiens
tctctcgttacccag

SEQ ID NO: 477197 - DNA, 15 bp, Homo sapiens
ttctctcgttaccca

SEQ ID NO: 477198 - DNA, 15 bp, Homo sapiens
tttctctcgttaccc

SEQ ID NO: 477199 - DNA, 15 bp, Homo sapiens
gtttctctcgttacc

SEQ ID NO: 477200 - DNA, 15 bp, Homo sapiens
agtttctctcgttac

SEQ ID NO: 477201 - DNA, 15 bp, Homo sapiens
cagtttctctcgtta

SEQ ID NO: 477202 - DNA, 15 bp, Homo sapiens
acagtttctctcgtt

SEQ ID NO: 477203 - DNA, 15 bp, Homo sapiens
gacagtttctctcgt

SEQ ID NO: 477204 - DNA, 15 bp, Homo sapiens
agacagtttctctcg

SEQ ID NO: 477205 - DNA, 15 bp, Homo sapiens
gagacagtttctctc

SEQ ID NO: 477206 - DNA, 15 bp, Homo sapiens
tgagacagtttctct

SEQ ID NO: 477207 - DNA, 15 bp, Homo sapiens
ttgagacagtttctc

SEQ ID NO: 477208 - DNA, 15 bp, Homo sapiens
tttgagacagtttct

SEQ ID NO: 477209 - DNA, 15 bp, Homo sapiens
ttttgagacagtttc

SEQ ID NO: 477210 - DNA, 15 bp, Homo sapiens
tttttgagacagttt

SEQ ID NO: 477211 - DNA, 15 bp, Homo sapiens
ttttttgagacagtt

SEQ ID NO: 477212 - DNA, 15 bp, Homo sapiens
tttttttgagacagt

SEQ ID NO: 477213 - DNA, 15 bp, Homo sapiens
ctctttttttttttt

SEQ ID NO: 477214 - DNA, 15 bp, Homo sapiens
tctcttttttttttt

SEQ ID NO: 477215 - DNA, 15 bp, Homo sapiens
ttctctttttttttt

SEQ ID NO: 477216 - DNA, 15 bp, Homo sapiens
tttctcttttttttt

SEQ ID NO: 477217 - DNA, 15 bp, Homo sapiens
ctttctctttttttt

SEQ ID NO: 477218 - DNA, 15 bp, Homo sapiens
tctttctcttttttt

SEQ ID NO: 477219 - DNA, 15 bp, Homo sapiens
ctctttctctttttt

SEQ ID NO: 477220 - DNA, 15 bp, Homo sapiens
tctctttctcttttt

SEQ ID NO: 477221 - DNA, 15 bp, Homo sapiens
ctctctttctctttt

SEQ ID NO: 477222 - DNA, 15 bp, Homo sapiens
tctctctttctcttt

SEQ ID NO: 477223 - DNA, 15 bp, Homo sapiens
atctctctttctctt

SEQ ID NO: 477224 - DNA, 15 bp, Homo sapiens
tatctctctttctct

SEQ ID NO: 477225 - DNA, 15 bp, Homo sapiens
ctatctctctttctc

SEQ ID NO: 477226 - DNA, 15 bp, Homo sapiens
cctatctctctttct

SEQ ID NO: 477227 - DNA, 15 bp, Homo sapiens
tcctatctctctttc

SEQ ID NO: 477228 - DNA, 15 bp, Homo sapiens
atcctatctctcttt

SEQ ID NO: 477229 - DNA, 15 bp, Homo sapiens
gatcctatctctctt

SEQ ID NO: 477230 - DNA, 15 bp, Homo sapiens
agatcctatctctct

SEQ ID NO: 477231 - DNA, 15 bp, Homo sapiens
gagatcctatctctc

SEQ ID NO: 477232 - DNA, 15 bp, Homo sapiens
cgagatcctatctct

SEQ ID NO: 477233 - DNA, 15 bp, Homo sapiens
gcgagatcctatctc

SEQ ID NO: 477234 - DNA, 15 bp, Homo sapiens
agcgagatcctatct

SEQ ID NO: 477235 - DNA, 15 bp, Homo sapiens
gagcgagatcctatc

SEQ ID NO: 477236 - DNA, 15 bp, Homo sapiens
agagcgagatcctat

SEQ ID NO: 477237 - DNA, 15 bp, Homo sapiens
cagagcgagatccta

SEQ ID NO: 477238 - DNA, 15 bp, Homo sapiens
acagagcgagatcct

SEQ ID NO: 477239 - DNA, 15 bp, Homo sapiens
gacagagcgagatcc

SEQ ID NO: 477240 - DNA, 15 bp, Homo sapiens
tgacagagcgagatc

SEQ ID NO: 477241 - DNA, 15 bp, Homo sapiens
atgacagagcgagat

SEQ ID NO: 477242 - DNA, 15 bp, Homo sapiens
gatgacagagcgaga

SEQ ID NO: 477243 - DNA, 15 bp, Homo sapiens
agatgacagagcgag

SEQ ID NO: 477244 - DNA, 15 bp, Homo sapiens
tagatgacagagcga

SEQ ID NO: 477245 - DNA, 15 bp, Homo sapiens
ctagatgacagagcg

SEQ ID NO: 477246 - DNA, 15 bp, Homo sapiens
cctagatgacagagc

SEQ ID NO: 477247 - DNA, 15 bp, Homo sapiens
gcctagatgacagag

SEQ ID NO: 477248 - DNA, 15 bp, Homo sapiens
agcctagatgacaga

SEQ ID NO: 477249 - DNA, 15 bp, Homo sapiens
tagcctagatgacag

SEQ ID NO: 477250 - DNA, 15 bp, Homo sapiens
ctagcctagatgaca

SEQ ID NO: 477251 - DNA, 15 bp, Homo sapiens
tctagcctagatgac

SEQ ID NO: 477252 - DNA, 15 bp, Homo sapiens
ctctagcctagatga

SEQ ID NO: 477253 - DNA, 15 bp, Homo sapiens
actctagcctagatg

SEQ ID NO: 477254 - DNA, 15 bp, Homo sapiens
cactctagcctagat

SEQ ID NO: 477255 - DNA, 15 bp, Homo sapiens
gcactctagcctaga

SEQ ID NO: 477256 - DNA, 15 bp, Homo sapiens
tgcactctagcctag

SEQ ID NO: 477257 - DNA, 15 bp, Homo sapiens
ctgcactctagccta

SEQ ID NO: 477258 - DNA, 15 bp, Homo sapiens
atgatcatgccactg

SEQ ID NO: 477259 - DNA, 15 bp, Homo sapiens
tatgatcatgccact

SEQ ID NO: 477260 - DNA, 15 bp, Homo sapiens
ctatgatcatgccac

SEQ ID NO: 477261 - DNA, 15 bp, Homo sapiens
tctatgatcatgcca

SEQ ID NO: 477262 - DNA, 15 bp, Homo sapiens
atctatgatcatgcc

SEQ ID NO: 477263 - DNA, 15 bp, Homo sapiens
gatctatgatcatgc

SEQ ID NO: 477264 - DNA, 15 bp, Homo sapiens
tgatctatgatcatg

SEQ ID NO: 477265 - DNA, 15 bp, Homo sapiens
gtgatctatgatcat

SEQ ID NO: 477266 - DNA, 15 bp, Homo sapiens
agtgatctatgatca

SEQ ID NO: 477267 - DNA, 15 bp, Homo sapiens
cagtgatctatgatc

SEQ ID NO: 477268 - DNA, 15 bp, Homo sapiens
acagtgatctatgat

SEQ ID NO: 477269 - DNA, 15 bp, Homo sapiens
tacagtgatctatga

SEQ ID NO: 477270 - DNA, 15 bp, Homo sapiens
ctacagtgatctatg

SEQ ID NO: 477271 - DNA, 15 bp, Homo sapiens
gctacagtgatctat

SEQ ID NO: 477272 - DNA, 15 bp, Homo sapiens
ggctacagtgatcta

SEQ ID NO: 477273 - DNA, 15 bp, Homo sapiens
aggctacagtgatct

SEQ ID NO: 477274 - DNA, 15 bp, Homo sapiens
aaggctacagtgatc

SEQ ID NO: 477275 - DNA, 15 bp, Homo sapiens
caaggctacagtgat

SEQ ID NO: 477276 - DNA, 15 bp, Homo sapiens
tcaaggctacagtga

SEQ ID NO: 477277 - DNA, 15 bp, Homo sapiens
ttcaaggctacagtg

SEQ ID NO: 477278 - DNA, 15 bp, Homo sapiens
gttcaaggctacagt

SEQ ID NO: 477279 - DNA, 15 bp, Homo sapiens
agttcaaggctacag

SEQ ID NO: 477280 - DNA, 15 bp, Homo sapiens
gagttcaaggctaca

SEQ ID NO: 477281 - DNA, 15 bp, Homo sapiens
ggagttcaaggctac

SEQ ID NO: 477282 - DNA, 15 bp, Homo sapiens
aggagttcaaggcta

SEQ ID NO: 477283 - DNA, 15 bp, Homo sapiens
caggagttcaaggct

SEQ ID NO: 477284 - DNA, 15 bp, Homo sapiens
ccaggagttcaaggc

SEQ ID NO: 477285 - DNA, 15 bp, Homo sapiens
cccaggagttcaagg

SEQ ID NO: 477286 - DNA, 15 bp, Homo sapiens
gcccaggagttcaag

SEQ ID NO: 477287 - DNA, 15 bp, Homo sapiens
tgcccaggagttcaa

SEQ ID NO: 477288 - DNA, 15 bp, Homo sapiens
gtgcccaggagttca

SEQ ID NO: 477289 - DNA, 15 bp, Homo sapiens
tgtgcccaggagttc

SEQ ID NO: 477290 - DNA, 15 bp, Homo sapiens
ttgtgcccaggagtt

SEQ ID NO: 477291 - DNA, 15 bp, Homo sapiens
cttgtgcccaggagt

SEQ ID NO: 477292 - DNA, 15 bp, Homo sapiens
acttgtgcccaggag

SEQ ID NO: 477293 - DNA, 15 bp, Homo sapiens
cacttgtgcccagga

SEQ ID NO: 477294 - DNA, 15 bp, Homo sapiens
tcacttgtgcccagg

SEQ ID NO: 477295 - DNA, 15 bp, Homo sapiens
atcacttgtgcccag

SEQ ID NO: 477296 - DNA, 15 bp, Homo sapiens
gatcacttgtgccca

SEQ ID NO: 477297 - DNA, 15 bp, Homo sapiens
ggatcacttgtgccc

SEQ ID NO: 477298 - DNA, 15 bp, Homo sapiens
aggatcacttgtgcc

SEQ ID NO: 477299 - DNA, 15 bp, Homo sapiens
gaggatcacttgtgc

SEQ ID NO: 477300 - DNA, 15 bp, Homo sapiens
agaggatcacttgtg

SEQ ID NO: 477301 - DNA, 15 bp, Homo sapiens
aagaggatcacttgt

SEQ ID NO: 477302 - DNA, 15 bp, Homo sapiens
caagaggatcacttg

SEQ ID NO: 477303 - DNA, 15 bp, Homo sapiens
gcaagaggatcactt

SEQ ID NO: 477304 - DNA, 15 bp, Homo sapiens
ggcaagaggatcact

SEQ ID NO: 477305 - DNA, 15 bp, Homo sapiens
aggcaagaggatcac

SEQ ID NO: 477306 - DNA, 15 bp, Homo sapiens
gaggcaagaggatca

SEQ ID NO: 477307 - DNA, 15 bp, Homo sapiens
tgaggcaagaggatc

SEQ ID NO: 477308 - DNA, 15 bp, Homo sapiens
ctgaggcaagaggat

SEQ ID NO: 477309 - DNA, 15 bp, Homo sapiens
gctgaggcaagagga

SEQ ID NO: 477310 - DNA, 15 bp, Homo sapiens
ggctgaggcaagagg

SEQ ID NO: 477311 - DNA, 15 bp, Homo sapiens
ttactcgggaggctg

SEQ ID NO: 477312 - DNA, 15 bp, Homo sapiens
gttactcgggaggct

SEQ ID NO: 477313 - DNA, 15 bp, Homo sapiens
agttactcgggaggc

SEQ ID NO: 477314 - DNA, 15 bp, Homo sapiens
cagttactcgggagg

SEQ ID NO: 477315 - DNA, 15 bp, Homo sapiens
gcagttactcgggag

SEQ ID NO: 477316 - DNA, 15 bp, Homo sapiens
cgcagttactcggga

SEQ ID NO: 477317 - DNA, 15 bp, Homo sapiens
tcgcagttactcggg

SEQ ID NO: 477318 - DNA, 15 bp, Homo sapiens
gtcgcagttactcgg

SEQ ID NO: 477319 - DNA, 15 bp, Homo sapiens
agtcgcagttactcg

SEQ ID NO: 477320 - DNA, 15 bp, Homo sapiens
tagtcgcagttactc

SEQ ID NO: 477321 - DNA, 15 bp, Homo sapiens
gtagtcgcagttact

SEQ ID NO: 477322 - DNA, 15 bp, Homo sapiens
tgtagtcgcagttac

SEQ ID NO: 477323 - DNA, 15 bp, Homo sapiens
ctgtagtcgcagtta

SEQ ID NO: 477324 - DNA, 15 bp, Homo sapiens
cctgtagtcgcagtt

SEQ ID NO: 477325 - DNA, 15 bp, Homo sapiens
acctgtagtcgcagt

SEQ ID NO: 477326 - DNA, 15 bp, Homo sapiens
tacctgtagtcgcag

SEQ ID NO: 477327 - DNA, 15 bp, Homo sapiens
gtacctgtagtcgca

SEQ ID NO: 477328 - DNA, 15 bp, Homo sapiens
tgtacctgtagtcgc

SEQ ID NO: 477329 - DNA, 15 bp, Homo sapiens
atgtacctgtagtcg

SEQ ID NO: 477330 - DNA, 15 bp, Homo sapiens
catgtacctgtagtc

SEQ ID NO: 477331 - DNA, 15 bp, Homo sapiens
gcatgtacctgtagt

SEQ ID NO: 477332 - DNA, 15 bp, Homo sapiens
agcatgtacctgtag

SEQ ID NO: 477333 - DNA, 15 bp, Homo sapiens
tagcatgtacctgta

SEQ ID NO: 477334 - DNA, 15 bp, Homo sapiens
gtagcatgtacctgt

SEQ ID NO: 477335 - DNA, 15 bp, Homo sapiens
ggtagcatgtacctg

SEQ ID NO: 477336 - DNA, 15 bp, Homo sapiens
tggtagcatgtacct

SEQ ID NO: 477337 - DNA, 15 bp, Homo sapiens
gtggtagcatgtacc

SEQ ID NO: 477338 - DNA, 15 bp, Homo sapiens
tgtggtagcatgtac

SEQ ID NO: 477339 - DNA, 15 bp, Homo sapiens
gtgtggtagcatgta

SEQ ID NO: 477340 - DNA, 15 bp, Homo sapiens
ggtgtggtagcatgt

SEQ ID NO: 477341 - DNA, 15 bp, Homo sapiens
gggtgtggtagcatg

SEQ ID NO: 477342 - DNA, 15 bp, Homo sapiens
ggggtgtggtagcat

SEQ ID NO: 477343 - DNA, 15 bp, Homo sapiens
cggggtgtggtagca

SEQ ID NO: 477344 - DNA, 15 bp, Homo sapiens
gcggggtgtggtagc

SEQ ID NO: 477345 - DNA, 15 bp, Homo sapiens
agcggggtgtggtag

SEQ ID NO: 477346 - DNA, 15 bp, Homo sapiens
tagcggggtgtggta

SEQ ID NO: 477347 - DNA, 15 bp, Homo sapiens
ttagcggggtgtggt

SEQ ID NO: 477348 - DNA, 15 bp, Homo sapiens
attagcggggtgtgg

SEQ ID NO: 477349 - DNA, 15 bp, Homo sapiens
aattagcggggtgtg

SEQ ID NO: 477350 - DNA, 15 bp, Homo sapiens
aaattagcggggtgt

SEQ ID NO: 477351 - DNA, 15 bp, Homo sapiens
aaaattagcggggtg

SEQ ID NO: 477352 - DNA, 15 bp, Homo sapiens
aaaaattagcggggt

SEQ ID NO: 477353 - DNA, 15 bp, Homo sapiens
taaaaattagcgggg

SEQ ID NO: 477354 - DNA, 15 bp, Homo sapiens
ttaaaaattagcggg

SEQ ID NO: 477355 - DNA, 15 bp, Homo sapiens
tttaaaaattagcgg

SEQ ID NO: 477356 - DNA, 15 bp, Homo sapiens
atttaaaaattagcg

SEQ ID NO: 477357 - DNA, 15 bp, Homo sapiens
atctataaaaaattt

SEQ ID NO: 477358 - DNA, 15 bp, Homo sapiens
catctataaaaaatt

SEQ ID NO: 477359 - DNA, 15 bp, Homo sapiens
acatctataaaaaat

SEQ ID NO: 477360 - DNA, 15 bp, Homo sapiens
cacatctataaaaaa

SEQ ID NO: 477361 - DNA, 15 bp, Homo sapiens
ccacatctataaaaa

SEQ ID NO: 477362 - DNA, 15 bp, Homo sapiens
cccacatctataaaa

SEQ ID NO: 477363 - DNA, 15 bp, Homo sapiens
gcccacatctataaa

SEQ ID NO: 477364 - DNA, 15 bp, Homo sapiens
agcccacatctataa

SEQ ID NO: 477365 - DNA, 15 bp, Homo sapiens
gagcccacatctata

SEQ ID NO: 477366 - DNA, 15 bp, Homo sapiens
agagcccacatctat

SEQ ID NO: 477367 - DNA, 15 bp, Homo sapiens
gagagcccacatcta

SEQ ID NO: 477368 - DNA, 15 bp, Homo sapiens
tgagagcccacatct

SEQ ID NO: 477369 - DNA, 15 bp, Homo sapiens
gtgagagcccacatc

SEQ ID NO: 477370 - DNA, 15 bp, Homo sapiens
agtgagagcccacat

SEQ ID NO: 477371 - DNA, 15 bp, Homo sapiens
aagtgagagcccaca

SEQ ID NO: 477372 - DNA, 15 bp, Homo sapiens
aaagtgagagcccac

SEQ ID NO: 477373 - DNA, 15 bp, Homo sapiens
caaagtgagagccca

SEQ ID NO: 477374 - DNA, 15 bp, Homo sapiens
acaaagtgagagccc

SEQ ID NO: 477375 - DNA, 15 bp, Homo sapiens
aacaaagtgagagcc

SEQ ID NO: 477376 - DNA, 15 bp, Homo sapiens
caacaaagtgagagc

SEQ ID NO: 477377 - DNA, 15 bp, Homo sapiens
gcaacaaagtgagag

SEQ ID NO: 477378 - DNA, 15 bp, Homo sapiens
gggcaacaaagtgag

SEQ ID NO: 477379 - DNA, 15 bp, Homo sapiens
tgggcaacaaagtga

SEQ ID NO: 477380 - DNA, 15 bp, Homo sapiens
ctgggcaacaaagtg

SEQ ID NO: 477381 - DNA, 15 bp, Homo sapiens
tctgggcaacaaagt

SEQ ID NO: 477382 - DNA, 15 bp, Homo sapiens
gtctgggcaacaaag

SEQ ID NO: 477383 - DNA, 15 bp, Homo sapiens
agtctgggcaacaaa

SEQ ID NO: 477384 - DNA, 15 bp, Homo sapiens
cagtctgggcaacaa

SEQ ID NO: 477385 - DNA, 15 bp, Homo sapiens
acagtctgggcaaca

SEQ ID NO: 477386 - DNA, 15 bp, Homo sapiens
aacagtctgggcaac

SEQ ID NO: 477387 - DNA, 15 bp, Homo sapiens
taacagtctgggcaa

SEQ ID NO: 477388 - DNA, 15 bp, Homo sapiens
ataacagtctgggca

SEQ ID NO: 477389 - DNA, 15 bp, Homo sapiens
cataacagtctgggc

SEQ ID NO: 477390 - DNA, 15 bp, Homo sapiens
ccataacagtctggg

SEQ ID NO: 477391 - DNA, 15 bp, Homo sapiens
tccataacagtctgg

SEQ ID NO: 477392 - DNA, 15 bp, Homo sapiens
ttccataacagtctg

SEQ ID NO: 477393 - DNA, 15 bp, Homo sapiens
gttccataacagtct

SEQ ID NO: 477394 - DNA, 15 bp, Homo sapiens
agttccataacagtc

SEQ ID NO: 477395 - DNA, 15 bp, Homo sapiens
gagttccataacagt

SEQ ID NO: 477396 - DNA, 15 bp, Homo sapiens
ggagttccataacag

SEQ ID NO: 477397 - DNA, 15 bp, Homo sapiens
aggagttccataaca

SEQ ID NO: 477398 - DNA, 15 bp, Homo sapiens
caggagttccataac

SEQ ID NO: 477399 - DNA, 15 bp, Homo sapiens
ccaggagttccataa

SEQ ID NO: 477400 - DNA, 15 bp, Homo sapiens
cccaggagttccata

SEQ ID NO: 477401 - DNA, 15 bp, Homo sapiens
gcccaggagttccat

SEQ ID NO: 477402 - DNA, 15 bp, Homo sapiens
agcccaggagttcca

SEQ ID NO: 477403 - DNA, 15 bp, Homo sapiens
gagcccaggagttcc

SEQ ID NO: 477404 - DNA, 15 bp, Homo sapiens
ccttgagcccaggag

SEQ ID NO: 477405 - DNA, 15 bp, Homo sapiens
ggatcccttgagccc

SEQ ID NO: 477406 - DNA, 15 bp, Homo sapiens
aggatcccttgagcc

SEQ ID NO: 477407 - DNA, 15 bp, Homo sapiens
gaggatcccttgagc

SEQ ID NO: 477408 - DNA, 15 bp, Homo sapiens
ggaggatcccttgag

SEQ ID NO: 477409 - DNA, 15 bp, Homo sapiens
gggaggatcccttga

SEQ ID NO: 477410 - DNA, 15 bp, Homo sapiens
tgggaggatcccttg

SEQ ID NO: 477411 - DNA, 15 bp, Homo sapiens
ctgggaggatccctt

SEQ ID NO: 477412 - DNA, 15 bp, Homo sapiens
gctgggaggatccct

SEQ ID NO: 477413 - DNA, 15 bp, Homo sapiens
agctgggaggatccc

SEQ ID NO: 477414 - DNA, 15 bp, Homo sapiens
aagctgggaggatcc

SEQ ID NO: 477415 - DNA, 15 bp, Homo sapiens
caagctgggaggatc

SEQ ID NO: 477416 - DNA, 15 bp, Homo sapiens
ccaagctgggaggat

SEQ ID NO: 477417 - DNA, 15 bp, Homo sapiens
gccaagctgggagga

SEQ ID NO: 477418 - DNA, 15 bp, Homo sapiens
ggccaagctgggagg

SEQ ID NO: 477419 - DNA, 15 bp, Homo sapiens
aggccaagctgggag

SEQ ID NO: 477420 - DNA, 15 bp, Homo sapiens
gaggccaagctggga

SEQ ID NO: 477421 - DNA, 15 bp, Homo sapiens
ggaggccaagctggg

SEQ ID NO: 477422 - DNA, 15 bp, Homo sapiens
gggaggccaagctgg

SEQ ID NO: 477423 - DNA, 15 bp, Homo sapiens
tgggaggccaagctg

SEQ ID NO: 477424 - DNA, 15 bp, Homo sapiens
gtgggaggccaagct

SEQ ID NO: 477425 - DNA, 15 bp, Homo sapiens
tgtgggaggccaagc

SEQ ID NO: 477426 - DNA, 15 bp, Homo sapiens
ctgtgggaggccaag

SEQ ID NO: 477427 - DNA, 15 bp, Homo sapiens
actgtgggaggccaa

SEQ ID NO: 477428 - DNA, 15 bp, Homo sapiens
cactgtgggaggcca

SEQ ID NO: 477429 - DNA, 15 bp, Homo sapiens
gcactgtgggaggcc

SEQ ID NO: 477430 - DNA, 15 bp, Homo sapiens
tcagcactgtgggag

SEQ ID NO: 477431 - DNA, 15 bp, Homo sapiens
ctcagcactgtggga

SEQ ID NO: 477432 - DNA, 15 bp, Homo sapiens
tctcagcactgtggg

SEQ ID NO: 477433 - DNA, 15 bp, Homo sapiens
atctcagcactgtgg

SEQ ID NO: 477434 - DNA, 15 bp, Homo sapiens
aatctcagcactgtg

SEQ ID NO: 477435 - DNA, 15 bp, Homo sapiens
taatctcagcactgt

SEQ ID NO: 477436 - DNA, 15 bp, Homo sapiens
ataatctcagcactg

SEQ ID NO: 477437 - DNA, 15 bp, Homo sapiens
tataatctcagcact

SEQ ID NO: 477438 - DNA, 15 bp, Homo sapiens
ctataatctcagcac

SEQ ID NO: 477439 - DNA, 15 bp, Homo sapiens
tctataatctcagca

SEQ ID NO: 477440 - DNA, 15 bp, Homo sapiens
atctataatctcagc

SEQ ID NO: 477441 - DNA, 15 bp, Homo sapiens
catctataatctcag

SEQ ID NO: 477442 - DNA, 15 bp, Homo sapiens
acatctataatctca

SEQ ID NO: 477443 - DNA, 15 bp, Homo sapiens
cacatctataatctc

SEQ ID NO: 477444 - DNA, 15 bp, Homo sapiens
tcacatctataatct

SEQ ID NO: 477445 - DNA, 15 bp, Homo sapiens
ctcacatctataatc

SEQ ID NO: 477446 - DNA, 15 bp, Homo sapiens
ggctcacatctataa

SEQ ID NO: 477447 - DNA, 15 bp, Homo sapiens
aggctcacatctata

SEQ ID NO: 477448 - DNA, 15 bp, Homo sapiens
caggctcacatctat

SEQ ID NO: 477449 - DNA, 15 bp, Homo sapiens
acaggctcacatcta

SEQ ID NO: 477450 - DNA, 15 bp, Homo sapiens
tacaggctcacatct

SEQ ID NO: 477451 - DNA, 15 bp, Homo sapiens
ttacaggctcacatc

SEQ ID NO: 477452 - DNA, 15 bp, Homo sapiens
attacaggctcacat

SEQ ID NO: 477453 - DNA, 15 bp, Homo sapiens
aattacaggctcaca

SEQ ID NO: 477454 - DNA, 15 bp, Homo sapiens
taattacaggctcac

SEQ ID NO: 477455 - DNA, 15 bp, Homo sapiens
ataattacaggctca

SEQ ID NO: 477456 - DNA, 15 bp, Homo sapiens
tataattacaggctc

SEQ ID NO: 477457 - DNA, 15 bp, Homo sapiens
ctataattacaggct

SEQ ID NO: 477458 - DNA, 15 bp, Homo sapiens
tctataattacaggc

SEQ ID NO: 477459 - DNA, 15 bp, Homo sapiens
gtctataattacagg

SEQ ID NO: 477460 - DNA, 15 bp, Homo sapiens
tgtctataattacag

SEQ ID NO: 477461 - DNA, 15 bp, Homo sapiens
ctgtctataattaca

SEQ ID NO: 477462 - DNA, 15 bp, Homo sapiens
gctgtctataattac

SEQ ID NO: 477463 - DNA, 15 bp, Homo sapiens
agctgtctataatta

SEQ ID NO: 477464 - DNA, 15 bp, Homo sapiens
aagctgtctataatt

SEQ ID NO: 477465 - DNA, 15 bp, Homo sapiens
caagctgtctataat

SEQ ID NO: 477466 - DNA, 15 bp, Homo sapiens
ccaagctgtctataa

SEQ ID NO: 477467 - DNA, 15 bp, Homo sapiens
gccaagctgtctata

SEQ ID NO: 477468 - DNA, 15 bp, Homo sapiens
ggccaagctgtctat

SEQ ID NO: 477469 - DNA, 15 bp, Homo sapiens
aggccaagctgtcta

SEQ ID NO: 477470 - DNA, 15 bp, Homo sapiens
taggccaagctgtct

SEQ ID NO: 477471 - DNA, 15 bp, Homo sapiens
ataggccaagctgtc

SEQ ID NO: 477472 - DNA, 15 bp, Homo sapiens
aataggccaagctgt

SEQ ID NO: 477473 - DNA, 15 bp, Homo sapiens
aaataggccaagctg

SEQ ID NO: 477474 - DNA, 15 bp, Homo sapiens
taaataggccaagct

SEQ ID NO: 477475 - DNA, 15 bp, Homo sapiens
gtaaataggccaagc

SEQ ID NO: 477476 - DNA, 15 bp, Homo sapiens
ggtaaataggccaag

SEQ ID NO: 477477 - DNA, 15 bp, Homo sapiens
aggtaaataggccaa

SEQ ID NO: 477478 - DNA, 15 bp, Homo sapiens
caggtaaataggcca

SEQ ID NO: 477479 - DNA, 15 bp, Homo sapiens
acaggtaaataggcc

SEQ ID NO: 477480 - DNA, 15 bp, Homo sapiens
aacaggtaaataggc

SEQ ID NO: 477481 - DNA, 15 bp, Homo sapiens
caacaggtaaatagg

SEQ ID NO: 477482 - DNA, 15 bp, Homo sapiens
ccaacaggtaaatag

SEQ ID NO: 477483 - DNA, 15 bp, Homo sapiens
tccaacaggtaaata

SEQ ID NO: 477484 - DNA, 15 bp, Homo sapiens
ttccaacaggtaaat

SEQ ID NO: 477485 - DNA, 15 bp, Homo sapiens
tttccaacaggtaaa

SEQ ID NO: 477486 - DNA, 15 bp, Homo sapiens
atttccaacaggtaa

SEQ ID NO: 477487 - DNA, 15 bp, Homo sapiens
catttccaacaggta

SEQ ID NO: 477488 - DNA, 15 bp, Homo sapiens
tcatttccaacaggt

SEQ ID NO: 477489 - DNA, 15 bp, Homo sapiens
ttcatttccaacagg

SEQ ID NO: 477490 - DNA, 15 bp, Homo sapiens
cttcatttccaacag

SEQ ID NO: 477491 - DNA, 15 bp, Homo sapiens
tcttcatttccaaca

SEQ ID NO: 477492 - DNA, 15 bp, Homo sapiens
ttcttcatttccaac

SEQ ID NO: 477493 - DNA, 15 bp, Homo sapiens
attcttcatttccaa

SEQ ID NO: 477494 - DNA, 15 bp, Homo sapiens
aattcttcatttcca

SEQ ID NO: 477495 - DNA, 15 bp, Homo sapiens
taattcttcatttcc

SEQ ID NO: 477496 - DNA, 15 bp, Homo sapiens
ataattcttcatttc

SEQ ID NO: 477497 - DNA, 15 bp, Homo sapiens
cataattcttcattt

SEQ ID NO: 477498 - DNA, 15 bp, Homo sapiens
tcataattcttcatt

SEQ ID NO: 477499 - DNA, 15 bp, Homo sapiens
ttcataattcttcat

SEQ ID NO: 477500 - DNA, 15 bp, Homo sapiens
attcataattcttca

SEQ ID NO: 477501 - DNA, 15 bp, Homo sapiens
aattcataattcttc

SEQ ID NO: 477502 - DNA, 15 bp, Homo sapiens
aaattcataattctt

SEQ ID NO: 477503 - DNA, 15 bp, Homo sapiens
aaaattcataattct

SEQ ID NO: 477504 - DNA, 15 bp, Homo sapiens
taaaattcataattc

SEQ ID NO: 477505 - DNA, 15 bp, Homo sapiens
gtaaaattcataatt

SEQ ID NO: 477506 - DNA, 15 bp, Homo sapiens
tgtaaaattcataat

SEQ ID NO: 477507 - DNA, 15 bp, Homo sapiens
atgtaaaattcataa

SEQ ID NO: 477508 - DNA, 15 bp, Homo sapiens
aatgtaaaattcata

SEQ ID NO: 477509 - DNA, 15 bp, Homo sapiens
aaatgtaaaattcat

SEQ ID NO: 477510 - DNA, 15 bp, Homo sapiens
gaaatgtaaaattca

SEQ ID NO: 477511 - DNA, 15 bp, Homo sapiens
agaaatgtaaaattc

SEQ ID NO: 477512 - DNA, 15 bp, Homo sapiens
aagaaatgtaaaatt

SEQ ID NO: 477513 - DNA, 15 bp, Homo sapiens
gaagaaatgtaaaat

SEQ ID NO: 477514 - DNA, 15 bp, Homo sapiens
tgaagaaatgtaaaa

SEQ ID NO: 477515 - DNA, 15 bp, Homo sapiens
ttgaagaaatgtaaa

SEQ ID NO: 477516 - DNA, 15 bp, Homo sapiens
cttgaagaaatgtaa

SEQ ID NO: 477517 - DNA, 15 bp, Homo sapiens
tcttgaagaaatgta

SEQ ID NO: 477518 - DNA, 15 bp, Homo sapiens
ttcttgaagaaatgt

SEQ ID NO: 477519 - DNA, 15 bp, Homo sapiens
tttcttgaagaaatg

SEQ ID NO: 477520 - DNA, 15 bp, Homo sapiens
ttttcttgaagaaat

SEQ ID NO: 477521 - DNA, 15 bp, Homo sapiens
cttttcttgaagaaa

SEQ ID NO: 477522 - DNA, 15 bp, Homo sapiens
ccttttcttgaagaa

SEQ ID NO: 477523 - DNA, 15 bp, Homo sapiens
accttttcttgaaga

SEQ ID NO: 477524 - DNA, 15 bp, Homo sapiens
aaccttttcttgaag

SEQ ID NO: 477525 - DNA, 15 bp, Homo sapiens
taaccttttcttgaa

SEQ ID NO: 477526 - DNA, 15 bp, Homo sapiens
ataaccttttcttga

SEQ ID NO: 477527 - DNA, 15 bp, Homo sapiens
cataaccttttcttg

SEQ ID NO: 477528 - DNA, 15 bp, Homo sapiens
ccataaccttttctt

SEQ ID NO: 477529 - DNA, 15 bp, Homo sapiens
cccataaccttttct

SEQ ID NO: 477530 - DNA, 15 bp, Homo sapiens
tcccataaccttttc

SEQ ID NO: 477531 - DNA, 15 bp, Homo sapiens
ctcccataacctttt

SEQ ID NO: 477532 - DNA, 15 bp, Homo sapiens
tctcccataaccttt

SEQ ID NO: 477533 - DNA, 15 bp, Homo sapiens
ctctcccataacctt

SEQ ID NO: 477534 - DNA, 15 bp, Homo sapiens
actctcccataacct

SEQ ID NO: 477535 - DNA, 15 bp, Homo sapiens
aactctcccataacc

SEQ ID NO: 477536 - DNA, 15 bp, Homo sapiens
taactctcccataac

SEQ ID NO: 477537 - DNA, 15 bp, Homo sapiens
gtaactctcccataa

SEQ ID NO: 477538 - DNA, 15 bp, Homo sapiens
agtaactctcccata

SEQ ID NO: 477539 - DNA, 15 bp, Homo sapiens
cagtaactctcccat

SEQ ID NO: 477540 - DNA, 15 bp, Homo sapiens
tcagtaactctccca

SEQ ID NO: 477541 - DNA, 15 bp, Homo sapiens
gtcagtaactctccc

SEQ ID NO: 477542 - DNA, 15 bp, Homo sapiens
agtcagtaactctcc

SEQ ID NO: 477543 - DNA, 15 bp, Homo sapiens
aagtcagtaactctc

SEQ ID NO: 477544 - DNA, 15 bp, Homo sapiens
aaagtcagtaactct

SEQ ID NO: 477545 - DNA, 15 bp, Homo sapiens
aaaagtcagtaactc

SEQ ID NO: 477546 - DNA, 15 bp, Homo sapiens
aaaaagtcagtaact

SEQ ID NO: 477547 - DNA, 15 bp, Homo sapiens
aaaaaagtcagtaac

SEQ ID NO: 477548 - DNA, 15 bp, Homo sapiens
aaaaaaagtcagtaa

SEQ ID NO: 477549 - DNA, 15 bp, Homo sapiens
gaaaaaaagtcagta

SEQ ID NO: 477550 - DNA, 15 bp, Homo sapiens
ggaaaaaaagtcagt

SEQ ID NO: 477551 - DNA, 15 bp, Homo sapiens
aggaaaaaaagtcag

SEQ ID NO: 477552 - DNA, 15 bp, Homo sapiens
aaggaaaaaaagtca

SEQ ID NO: 477553 - DNA, 15 bp, Homo sapiens
caaggaaaaaaagtc

SEQ ID NO: 477554 - DNA, 15 bp, Homo sapiens
ccaaggaaaaaaagt

SEQ ID NO: 477555 - DNA, 15 bp, Homo sapiens
tccaaggaaaaaaag

SEQ ID NO: 477556 - DNA, 15 bp, Homo sapiens
atccaaggaaaaaaa

SEQ ID NO: 477557 - DNA, 15 bp, Homo sapiens
aatccaaggaaaaaa

SEQ ID NO: 477558 - DNA, 15 bp, Homo sapiens
aaatccaaggaaaaa

SEQ ID NO: 477559 - DNA, 15 bp, Homo sapiens
aaaatccaaggaaaa

SEQ ID NO: 477560 - DNA, 15 bp, Homo sapiens
aaaaatccaaggaaa

SEQ ID NO: 477561 - DNA, 15 bp, Homo sapiens
aaaaaatccaaggaa

SEQ ID NO: 477562 - DNA, 15 bp, Homo sapiens
gaaaaaatccaagga

SEQ ID NO: 477563 - DNA, 15 bp, Homo sapiens
agaaaaaatccaagg

SEQ ID NO: 477564 - DNA, 15 bp, Homo sapiens
aagaaaaaatccaag

SEQ ID NO: 477565 - DNA, 15 bp, Homo sapiens
aaagaaaaaatccaa

SEQ ID NO: 477566 - DNA, 15 bp, Homo sapiens
aaaagaaaaaatcca

SEQ ID NO: 477567 - DNA, 15 bp, Homo sapiens
aaaaagaaaaaatcc

SEQ ID NO: 477568 - DNA, 15 bp, Homo sapiens
taaaaagaaaaaatc

SEQ ID NO: 477569 - DNA, 15 bp, Homo sapiens
ttaaaaagaaaaaat

SEQ ID NO: 477570 - DNA, 15 bp, Homo sapiens
tttaaaaagaaaaaa

SEQ ID NO: 477571 - DNA, 15 bp, Homo sapiens
atttaaaaagaaaaa

SEQ ID NO: 477572 - DNA, 15 bp, Homo sapiens
tatttaaaaagaaaa

SEQ ID NO: 477573 - DNA, 15 bp, Homo sapiens
ctatttaaaaagaaa

SEQ ID NO: 477574 - DNA, 15 bp, Homo sapiens
cctatttaaaaagaa

SEQ ID NO: 477575 - DNA, 15 bp, Homo sapiens
acctatttaaaaaga

SEQ ID NO: 477576 - DNA, 15 bp, Homo sapiens
aacctatttaaaaag

SEQ ID NO: 477577 - DNA, 15 bp, Homo sapiens
caacctatttaaaaa

SEQ ID NO: 477578 - DNA, 15 bp, Homo sapiens
gcaacctatttaaaa

SEQ ID NO: 477579 - DNA, 15 bp, Homo sapiens
agcaacctatttaaa

SEQ ID NO: 477580 - DNA, 15 bp, Homo sapiens
cagcaacctatttaa

SEQ ID NO: 477581 - DNA, 15 bp, Homo sapiens
ccagcaacctattta

SEQ ID NO: 477582 - DNA, 15 bp, Homo sapiens
accagcaacctattt

SEQ ID NO: 477583 - DNA, 15 bp, Homo sapiens
gaccagcaacctatt

SEQ ID NO: 477584 - DNA, 15 bp, Homo sapiens
tgaccagcaacctat

SEQ ID NO: 477585 - DNA, 15 bp, Homo sapiens
ttgaccagcaaccta

SEQ ID NO: 477586 - DNA, 15 bp, Homo sapiens
tttgaccagcaacct

SEQ ID NO: 477587 - DNA, 15 bp, Homo sapiens
atttgaccagcaacc

SEQ ID NO: 477588 - DNA, 15 bp, Homo sapiens
aatttgaccagcaac

SEQ ID NO: 477589 - DNA, 15 bp, Homo sapiens
gaatttgaccagcaa

SEQ ID NO: 477590 - DNA, 15 bp, Homo sapiens
ggaatttgaccagca

SEQ ID NO: 477591 - DNA, 15 bp, Homo sapiens
gggaatttgaccagc

SEQ ID NO: 477592 - DNA, 15 bp, Homo sapiens
agggaatttgaccag

SEQ ID NO: 477593 - DNA, 15 bp, Homo sapiens
cagggaatttgacca

SEQ ID NO: 477594 - DNA, 15 bp, Homo sapiens
tcagggaatttgacc

SEQ ID NO: 477595 - DNA, 15 bp, Homo sapiens
ctcagggaatttgac

SEQ ID NO: 477596 - DNA, 15 bp, Homo sapiens
actcagggaatttga

SEQ ID NO: 477597 - DNA, 15 bp, Homo sapiens
aactcagggaatttg

SEQ ID NO: 477598 - DNA, 15 bp, Homo sapiens
caactcagggaattt

SEQ ID NO: 477599 - DNA, 15 bp, Homo sapiens
tcaactcagggaatt

SEQ ID NO: 477600 - DNA, 15 bp, Homo sapiens
ttcaactcagggaat

SEQ ID NO: 477601 - DNA, 15 bp, Homo sapiens
attcaactcagggaa

SEQ ID NO: 477602 - DNA, 15 bp, Homo sapiens
aattcaactcaggga

SEQ ID NO: 477603 - DNA, 15 bp, Homo sapiens
taattcaactcaggg

SEQ ID NO: 477604 - DNA, 15 bp, Homo sapiens
ataattcaactcagg

SEQ ID NO: 477605 - DNA, 15 bp, Homo sapiens
gataattcaactcag

SEQ ID NO: 477606 - DNA, 15 bp, Homo sapiens
tgataattcaactca

SEQ ID NO: 477607 - DNA, 15 bp, Homo sapiens
ctgataattcaactc

SEQ ID NO: 477608 - DNA, 15 bp, Homo sapiens
gctgataattcaact

SEQ ID NO: 477609 - DNA, 15 bp, Homo sapiens
agctgataattcaac

SEQ ID NO: 477610 - DNA, 15 bp, Homo sapiens
aagctgataattcaa

SEQ ID NO: 477611 - DNA, 15 bp, Homo sapiens
taagctgataattca

SEQ ID NO: 477612 - DNA, 15 bp, Homo sapiens
ttaagctgataattc

SEQ ID NO: 477613 - DNA, 15 bp, Homo sapiens
tttaagctgataatt

SEQ ID NO: 477614 - DNA, 15 bp, Homo sapiens
ttttaagctgataat

SEQ ID NO: 477615 - DNA, 15 bp, Homo sapiens
attttaagctgataa

SEQ ID NO: 477616 - DNA, 15 bp, Homo sapiens
aattttaagctgata

SEQ ID NO: 477617 - DNA, 15 bp, Homo sapiens
taattttaagctgat

SEQ ID NO: 477618 - DNA, 15 bp, Homo sapiens
ttaattttaagctga

SEQ ID NO: 477619 - DNA, 15 bp, Homo sapiens
tttaattttaagctg

SEQ ID NO: 477620 - DNA, 15 bp, Homo sapiens
ctttaattttaagct

SEQ ID NO: 477621 - DNA, 15 bp, Homo sapiens
actttaattttaagc

SEQ ID NO: 477622 - DNA, 15 bp, Homo sapiens
cactttaattttaag

SEQ ID NO: 477623 - DNA, 15 bp, Homo sapiens
acactttaattttaa

SEQ ID NO: 477624 - DNA, 15 bp, Homo sapiens
cacactttaatttta

SEQ ID NO: 477625 - DNA, 15 bp, Homo sapiens
gcacactttaatttt

SEQ ID NO: 477626 - DNA, 15 bp, Homo sapiens
tgcacactttaattt

SEQ ID NO: 477627 - DNA, 15 bp, Homo sapiens
atgcacactttaatt

SEQ ID NO: 477628 - DNA, 15 bp, Homo sapiens
aatgcacactttaat

SEQ ID NO: 477629 - DNA, 15 bp, Homo sapiens
caatgcacactttaa

SEQ ID NO: 477630 - DNA, 15 bp, Homo sapiens
tcaatgcacacttta

SEQ ID NO: 477631 - DNA, 15 bp, Homo sapiens
gtcaatgcacacttt

SEQ ID NO: 477632 - DNA, 15 bp, Homo sapiens
tgtcaatgcacactt

SEQ ID NO: 477633 - DNA, 15 bp, Homo sapiens
ttgtcaatgcacact

SEQ ID NO: 477634 - DNA, 15 bp, Homo sapiens
cttgtcaatgcacac

SEQ ID NO: 477635 - DNA, 15 bp, Homo sapiens
acttgtcaatgcaca

SEQ ID NO: 477636 - DNA, 15 bp, Homo sapiens
tacttgtcaatgcac

SEQ ID NO: 477637 - DNA, 15 bp, Homo sapiens
ttacttgtcaatgca

SEQ ID NO: 477638 - DNA, 15 bp, Homo sapiens
cttacttgtcaatgc

SEQ ID NO: 477639 - DNA, 15 bp, Homo sapiens
acttacttgtcaatg

SEQ ID NO: 477640 - DNA, 15 bp, Homo sapiens
tacttacttgtcaat

SEQ ID NO: 477641 - DNA, 15 bp, Homo sapiens
gtacttacttgtcaa

SEQ ID NO: 477642 - DNA, 15 bp, Homo sapiens
agtacttacttgtca

SEQ ID NO: 477643 - DNA, 15 bp, Homo sapiens
gagtacttacttgtc

SEQ ID NO: 477644 - DNA, 15 bp, Homo sapiens
ggagtacttacttgt

SEQ ID NO: 477645 - DNA, 15 bp, Homo sapiens
aggagtacttacttg

SEQ ID NO: 477646 - DNA, 15 bp, Homo sapiens
taggagtacttactt

SEQ ID NO: 477647 - DNA, 15 bp, Homo sapiens
ataggagtacttact

SEQ ID NO: 477648 - DNA, 15 bp, Homo sapiens
gataggagtacttac

SEQ ID NO: 477649 - DNA, 15 bp, Homo sapiens
agataggagtactta

SEQ ID NO: 477650 - DNA, 15 bp, Homo sapiens
aagataggagtactt

SEQ ID NO: 477651 - DNA, 15 bp, Homo sapiens
taagataggagtact

SEQ ID NO: 477652 - DNA, 15 bp, Homo sapiens
ctaagataggagtac

SEQ ID NO: 477653 - DNA, 15 bp, Homo sapiens
gctaagataggagta

SEQ ID NO: 477654 - DNA, 15 bp, Homo sapiens
agctaagataggagt

SEQ ID NO: 477655 - DNA, 15 bp, Homo sapiens
gagctaagataggag

SEQ ID NO: 477656 - DNA, 15 bp, Homo sapiens
agagctaagatagga

SEQ ID NO: 477657 - DNA, 15 bp, Homo sapiens
cagagctaagatagg

SEQ ID NO: 477658 - DNA, 15 bp, Homo sapiens
acagagctaagatag

SEQ ID NO: 477659 - DNA, 15 bp, Homo sapiens
aacagagctaagata

SEQ ID NO: 477660 - DNA, 15 bp, Homo sapiens
aaacagagctaagat

SEQ ID NO: 477661 - DNA, 15 bp, Homo sapiens
aaaacagagctaaga

SEQ ID NO: 477662 - DNA, 15 bp, Homo sapiens
aaaaacagagctaag

SEQ ID NO: 477663 - DNA, 15 bp, Homo sapiens
gaaaaacagagctaa

SEQ ID NO: 477664 - DNA, 15 bp, Homo sapiens
tgaaaaacagagcta

SEQ ID NO: 477665 - DNA, 15 bp, Homo sapiens
ttgaaaaacagagct

SEQ ID NO: 477666 - DNA, 15 bp, Homo sapiens
tttgaaaaacagagc

SEQ ID NO: 477667 - DNA, 15 bp, Homo sapiens
atttgaaaaacagag

SEQ ID NO: 477668 - DNA, 15 bp, Homo sapiens
catttgaaaaacaga

SEQ ID NO: 477669 - DNA, 15 bp, Homo sapiens
tcatttgaaaaacag

SEQ ID NO: 477670 - DNA, 15 bp, Homo sapiens
ctcatttgaaaaaca

SEQ ID NO: 477671 - DNA, 15 bp, Homo sapiens
cctcatttgaaaaac

SEQ ID NO: 477672 - DNA, 15 bp, Homo sapiens
tcctcatttgaaaaa

SEQ ID NO: 477673 - DNA, 15 bp, Homo sapiens
ttcctcatttgaaaa

SEQ ID NO: 477674 - DNA, 15 bp, Homo sapiens
attcctcatttgaaa

SEQ ID NO: 477675 - DNA, 15 bp, Homo sapiens
tattcctcatttgaa

SEQ ID NO: 477676 - DNA, 15 bp, Homo sapiens
ctattcctcatttga

SEQ ID NO: 477677 - DNA, 15 bp, Homo sapiens
tctattcctcatttg

SEQ ID NO: 477678 - DNA, 15 bp, Homo sapiens
ttctattcctcattt

SEQ ID NO: 477679 - DNA, 15 bp, Homo sapiens
tttctattcctcatt

SEQ ID NO: 477680 - DNA, 15 bp, Homo sapiens
ttttctattcctcat

SEQ ID NO: 477681 - DNA, 15 bp, Homo sapiens
tttttctattcctca

SEQ ID NO: 477682 - DNA, 15 bp, Homo sapiens
atttttctattcctc

SEQ ID NO: 477683 - DNA, 15 bp, Homo sapiens
catttttctattcct

SEQ ID NO: 477684 - DNA, 15 bp, Homo sapiens
tcatttttctattcc

SEQ ID NO: 477685 - DNA, 15 bp, Homo sapiens
ctcatttttctattc

SEQ ID NO: 477686 - DNA, 15 bp, Homo sapiens
tctcatttttctatt

SEQ ID NO: 477687 - DNA, 15 bp, Homo sapiens
ttctcatttttctat

SEQ ID NO: 477688 - DNA, 15 bp, Homo sapiens
gttctcatttttcta

SEQ ID NO: 477689 - DNA, 15 bp, Homo sapiens
agttctcatttttct

SEQ ID NO: 477690 - DNA, 15 bp, Homo sapiens
aagttctcatttttc

SEQ ID NO: 477691 - DNA, 15 bp, Homo sapiens
aaagttctcattttt

SEQ ID NO: 477692 - DNA, 15 bp, Homo sapiens
caaagttctcatttt

SEQ ID NO: 477693 - DNA, 15 bp, Homo sapiens
tcaaagttctcattt

SEQ ID NO: 477694 - DNA, 15 bp, Homo sapiens
gtcaaagttctcatt

SEQ ID NO: 477695 - DNA, 15 bp, Homo sapiens
tgtcaaagttctcat

SEQ ID NO: 477696 - DNA, 15 bp, Homo sapiens
ctgtcaaagttctca

SEQ ID NO: 477697 - DNA, 15 bp, Homo sapiens
tctgtcaaagttctc

SEQ ID NO: 477698 - DNA, 15 bp, Homo sapiens
gtctgtcaaagttct

SEQ ID NO: 477699 - DNA, 15 bp, Homo sapiens
tgtctgtcaaagttc

SEQ ID NO: 477700 - DNA, 15 bp, Homo sapiens
atgtctgtcaaagtt

SEQ ID NO: 477701 - DNA, 15 bp, Homo sapiens
gatgtctgtcaaagt

SEQ ID NO: 477702 - DNA, 15 bp, Homo sapiens
tgatgtctgtcaaag

SEQ ID NO: 477703 - DNA, 15 bp, Homo sapiens
atgatgtctgtcaaa

SEQ ID NO: 477704 - DNA, 15 bp, Homo sapiens
aatgatgtctgtcaa

SEQ ID NO: 477705 - DNA, 15 bp, Homo sapiens
aaatgatgtctgtca

SEQ ID NO: 477706 - DNA, 15 bp, Homo sapiens
caaatgatgtctgtc

SEQ ID NO: 477707 - DNA, 15 bp, Homo sapiens
tcaaatgatgtctgt

SEQ ID NO: 477708 - DNA, 15 bp, Homo sapiens
ttcaaatgatgtctg

SEQ ID NO: 477709 - DNA, 15 bp, Homo sapiens
gttcaaatgatgtct

SEQ ID NO: 477710 - DNA, 15 bp, Homo sapiens
agttcaaatgatgtc

SEQ ID NO: 477711 - DNA, 15 bp, Homo sapiens
tagttcaaatgatgt

SEQ ID NO: 477712 - DNA, 15 bp, Homo sapiens
ctagttcaaatgatg

SEQ ID NO: 477713 - DNA, 15 bp, Homo sapiens
tctagttcaaatgat

SEQ ID NO: 477714 - DNA, 15 bp, Homo sapiens
ctctagttcaaatga

SEQ ID NO: 477715 - DNA, 15 bp, Homo sapiens
tctctagttcaaatg

SEQ ID NO: 477716 - DNA, 15 bp, Homo sapiens
gtctctagttcaaat

SEQ ID NO: 477717 - DNA, 15 bp, Homo sapiens
agtctctagttcaaa

SEQ ID NO: 477718 - DNA, 15 bp, Homo sapiens
gagtctctagttcaa

SEQ ID NO: 477719 - DNA, 15 bp, Homo sapiens
agagtctctagttca

SEQ ID NO: 477720 - DNA, 15 bp, Homo sapiens
cagagtctctagttc

SEQ ID NO: 477721 - DNA, 15 bp, Homo sapiens
acagagtctctagtt

SEQ ID NO: 477722 - DNA, 15 bp, Homo sapiens
gacagagtctctagt

SEQ ID NO: 477723 - DNA, 15 bp, Homo sapiens
agacagagtctctag

SEQ ID NO: 477724 - DNA, 15 bp, Homo sapiens
aagacagagtctcta

SEQ ID NO: 477725 - DNA, 15 bp, Homo sapiens
aaagacagagtctct

SEQ ID NO: 477726 - DNA, 15 bp, Homo sapiens
taaagacagagtctc

SEQ ID NO: 477727 - DNA, 15 bp, Homo sapiens
ataaagacagagtct

SEQ ID NO: 477728 - DNA, 15 bp, Homo sapiens
aataaagacagagtc

SEQ ID NO: 477729 - DNA, 15 bp, Homo sapiens
gaataaagacagagt

SEQ ID NO: 477730 - DNA, 15 bp, Homo sapiens
tgaataaagacagag

SEQ ID NO: 477731 - DNA, 15 bp, Homo sapiens
ctgaataaagacaga

SEQ ID NO: 477732 - DNA, 15 bp, Homo sapiens
tctgaataaagacag

SEQ ID NO: 477733 - DNA, 15 bp, Homo sapiens
ctctgaataaagaca

SEQ ID NO: 477734 - DNA, 15 bp, Homo sapiens
tctctgaataaagac

SEQ ID NO: 477735 - DNA, 15 bp, Homo sapiens
atctctgaataaaga

SEQ ID NO: 477736 - DNA, 15 bp, Homo sapiens
gatctctgaataaag

SEQ ID NO: 477737 - DNA, 15 bp, Homo sapiens
agatctctgaataaa

SEQ ID NO: 477738 - DNA, 15 bp, Homo sapiens
aagatctctgaataa

SEQ ID NO: 477739 - DNA, 15 bp, Homo sapiens
gaagatctctgaata

SEQ ID NO: 477740 - DNA, 15 bp, Homo sapiens
tgaagatctctgaat

SEQ ID NO: 477741 - DNA, 15 bp, Homo sapiens
atgaagatctctgaa

SEQ ID NO: 477742 - DNA, 15 bp, Homo sapiens
aatgaagatctctga

SEQ ID NO: 477743 - DNA, 15 bp, Homo sapiens
aaatgaagatctctg

SEQ ID NO: 477744 - DNA, 15 bp, Homo sapiens
aaaatgaagatctct

SEQ ID NO: 477745 - DNA, 15 bp, Homo sapiens
caaaatgaagatctc

SEQ ID NO: 477746 - DNA, 15 bp, Homo sapiens
acaaaatgaagatct

SEQ ID NO: 477747 - DNA, 15 bp, Homo sapiens
cacaaaatgaagatc

SEQ ID NO: 477748 - DNA, 15 bp, Homo sapiens
ccacaaaatgaagat

SEQ ID NO: 477749 - DNA, 15 bp, Homo sapiens
tccacaaaatgaaga

SEQ ID NO: 477750 - DNA, 15 bp, Homo sapiens
gtccacaaaatgaag

SEQ ID NO: 477751 - DNA, 15 bp, Homo sapiens
tgtccacaaaatgaa

SEQ ID NO: 477752 - DNA, 15 bp, Homo sapiens
ttgtccacaaaatga

SEQ ID NO: 477753 - DNA, 15 bp, Homo sapiens
tttgtccacaaaatg

SEQ ID NO: 477754 - DNA, 15 bp, Homo sapiens
ttttgtccacaaaat

SEQ ID NO: 477755 - DNA, 15 bp, Homo sapiens
cttttgtccacaaaa

SEQ ID NO: 477756 - DNA, 15 bp, Homo sapiens
acttttgtccacaaa

SEQ ID NO: 477757 - DNA, 15 bp, Homo sapiens
aacttttgtccacaa

SEQ ID NO: 477758 - DNA, 15 bp, Homo sapiens
aaacttttgtccaca

SEQ ID NO: 477759 - DNA, 15 bp, Homo sapiens
aaaacttttgtccac

SEQ ID NO: 477760 - DNA, 15 bp, Homo sapiens
gaaaacttttgtcca

SEQ ID NO: 477761 - DNA, 15 bp, Homo sapiens
tgaaaacttttgtcc

SEQ ID NO: 477762 - DNA, 15 bp, Homo sapiens
ttgaaaacttttgtc

SEQ ID NO: 477763 - DNA, 15 bp, Homo sapiens
tttgaaaacttttgt

SEQ ID NO: 477764 - DNA, 15 bp, Homo sapiens
ttttgaaaacttttg

SEQ ID NO: 477765 - DNA, 15 bp, Homo sapiens
cttttgaaaactttt

SEQ ID NO: 477766 - DNA, 15 bp, Homo sapiens
gcttttgaaaacttt

SEQ ID NO: 477767 - DNA, 15 bp, Homo sapiens
ggcttttgaaaactt

SEQ ID NO: 477768 - DNA, 15 bp, Homo sapiens
aggcttttgaaaact

SEQ ID NO: 477769 - DNA, 15 bp, Homo sapiens
aaggcttttgaaaac

SEQ ID NO: 477770 - DNA, 15 bp, Homo sapiens
caaggcttttgaaaa

SEQ ID NO: 477771 - DNA, 15 bp, Homo sapiens
ccaaggcttttgaaa

SEQ ID NO: 477772 - DNA, 15 bp, Homo sapiens
cccaaggcttttgaa

SEQ ID NO: 477773 - DNA, 15 bp, Homo sapiens
ccccaaggcttttga

SEQ ID NO: 477774 - DNA, 15 bp, Homo sapiens
accccaaggcttttg

SEQ ID NO: 477775 - DNA, 15 bp, Homo sapiens
caccccaaggctttt

SEQ ID NO: 477776 - DNA, 15 bp, Homo sapiens
gcaccccaaggcttt

SEQ ID NO: 477777 - DNA, 15 bp, Homo sapiens
tgcaccccaaggctt

SEQ ID NO: 477778 - DNA, 15 bp, Homo sapiens
atgcaccccaaggct

SEQ ID NO: 477779 - DNA, 15 bp, Homo sapiens
aatgcaccccaaggc

SEQ ID NO: 477780 - DNA, 15 bp, Homo sapiens
caatgcaccccaagg

SEQ ID NO: 477781 - DNA, 15 bp, Homo sapiens
acaatgcaccccaag

SEQ ID NO: 477782 - DNA, 15 bp, Homo sapiens
gacaatgcaccccaa

SEQ ID NO: 477783 - DNA, 15 bp, Homo sapiens
tgacaatgcacccca

SEQ ID NO: 477784 - DNA, 15 bp, Homo sapiens
atgacaatgcacccc

SEQ ID NO: 477785 - DNA, 15 bp, Homo sapiens
aatgacaatgcaccc

SEQ ID NO: 477786 - DNA, 15 bp, Homo sapiens
aaatgacaatgcacc

SEQ ID NO: 477787 - DNA, 15 bp, Homo sapiens
taaatgacaatgcac

SEQ ID NO: 477788 - DNA, 15 bp, Homo sapiens
gtaaatgacaatgca

SEQ ID NO: 477789 - DNA, 15 bp, Homo sapiens
cgtaaatgacaatgc

SEQ ID NO: 477790 - DNA, 15 bp, Homo sapiens
acgtaaatgacaatg

SEQ ID NO: 477791 - DNA, 15 bp, Homo sapiens
cacgtaaatgacaat

SEQ ID NO: 477792 - DNA, 15 bp, Homo sapiens
acacgtaaatgacaa

SEQ ID NO: 477793 - DNA, 15 bp, Homo sapiens
gacacgtaaatgaca

SEQ ID NO: 477794 - DNA, 15 bp, Homo sapiens
agacacgtaaatgac

SEQ ID NO: 477795 - DNA, 15 bp, Homo sapiens
cagacacgtaaatga

SEQ ID NO: 477796 - DNA, 15 bp, Homo sapiens
tcagacacgtaaatg

SEQ ID NO: 477797 - DNA, 15 bp, Homo sapiens
ttcagacacgtaaat

SEQ ID NO: 477798 - DNA, 15 bp, Homo sapiens
gttcagacacgtaaa

SEQ ID NO: 477799 - DNA, 15 bp, Homo sapiens
tgttcagacacgtaa

SEQ ID NO: 477800 - DNA, 15 bp, Homo sapiens
ttgttcagacacgta

SEQ ID NO: 477801 - DNA, 15 bp, Homo sapiens
tttgttcagacacgt

SEQ ID NO: 477802 - DNA, 15 bp, Homo sapiens
ctttgttcagacacg

SEQ ID NO: 477803 - DNA, 15 bp, Homo sapiens
gctttgttcagacac

SEQ ID NO: 477804 - DNA, 15 bp, Homo sapiens
ggctttgttcagaca

SEQ ID NO: 477805 - DNA, 15 bp, Homo sapiens
tggctttgttcagac

SEQ ID NO: 477806 - DNA, 15 bp, Homo sapiens
gtggctttgttcaga

SEQ ID NO: 477807 - DNA, 15 bp, Homo sapiens
tgtggctttgttcag

SEQ ID NO: 477808 - DNA, 15 bp, Homo sapiens
ttgtggctttgttca

SEQ ID NO: 477809 - DNA, 15 bp, Homo sapiens
tttgtggctttgttc

SEQ ID NO: 477810 - DNA, 15 bp, Homo sapiens
ctttgtggctttgtt

SEQ ID NO: 477811 - DNA, 15 bp, Homo sapiens
gctttgtggctttgt

SEQ ID NO: 477812 - DNA, 15 bp, Homo sapiens
agctttgtggctttg

SEQ ID NO: 477813 - DNA, 15 bp, Homo sapiens
cagctttgtggcttt

SEQ ID NO: 477814 - DNA, 15 bp, Homo sapiens
ccagctttgtggctt

SEQ ID NO: 477815 - DNA, 15 bp, Homo sapiens
cccagctttgtggct

SEQ ID NO: 477816 - DNA, 15 bp, Homo sapiens
ccccagctttgtggc

SEQ ID NO: 477817 - DNA, 15 bp, Homo sapiens
cccccagctttgtgg

SEQ ID NO: 477818 - DNA, 15 bp, Homo sapiens
acccccagctttgtg

SEQ ID NO: 477819 - DNA, 15 bp, Homo sapiens
tacccccagctttgt

SEQ ID NO: 477820 - DNA, 15 bp, Homo sapiens
gtacccccagctttg

SEQ ID NO: 477821 - DNA, 15 bp, Homo sapiens
tgtacccccagcttt

SEQ ID NO: 477822 - DNA, 15 bp, Homo sapiens
ctgtacccccagctt

SEQ ID NO: 477823 - DNA, 15 bp, Homo sapiens
tctgtacccccagct

SEQ ID NO: 477824 - DNA, 15 bp, Homo sapiens
atctgtacccccagc

SEQ ID NO: 477825 - DNA, 15 bp, Homo sapiens
aatctgtacccccag

SEQ ID NO: 477826 - DNA, 15 bp, Homo sapiens
aaatctgtaccccca

SEQ ID NO: 477827 - DNA, 15 bp, Homo sapiens
caaatctgtaccccc

SEQ ID NO: 477828 - DNA, 15 bp, Homo sapiens
tcaaatctgtacccc

SEQ ID NO: 477829 - DNA, 15 bp, Homo sapiens
atcaaatctgtaccc

SEQ ID NO: 477830 - DNA, 15 bp, Homo sapiens
aatcaaatctgtacc

SEQ ID NO: 477831 - DNA, 15 bp, Homo sapiens
aaatcaaatctgtac

SEQ ID NO: 477832 - DNA, 15 bp, Homo sapiens
caaatcaaatctgta

SEQ ID NO: 477833 - DNA, 15 bp, Homo sapiens
acaaatcaaatctgt

SEQ ID NO: 477834 - DNA, 15 bp, Homo sapiens
cacaaatcaaatctg

SEQ ID NO: 477835 - DNA, 15 bp, Homo sapiens
ccacaaatcaaatct

SEQ ID NO: 477836 - DNA, 15 bp, Homo sapiens
accacaaatcaaatc

SEQ ID NO: 477837 - DNA, 15 bp, Homo sapiens
aaccacaaatcaaat

SEQ ID NO: 477838 - DNA, 15 bp, Homo sapiens
caaccacaaatcaaa

SEQ ID NO: 477839 - DNA, 15 bp, Homo sapiens
gcaaccacaaatcaa

SEQ ID NO: 477840 - DNA, 15 bp, Homo sapiens
agcaaccacaaatca

SEQ ID NO: 477841 - DNA, 15 bp, Homo sapiens
tagcaaccacaaatc

SEQ ID NO: 477842 - DNA, 15 bp, Homo sapiens
atagcaaccacaaat

SEQ ID NO: 477843 - DNA, 15 bp, Homo sapiens
aatagcaaccacaaa

SEQ ID NO: 477844 - DNA, 15 bp, Homo sapiens
caatagcaaccacaa

SEQ ID NO: 477845 - DNA, 15 bp, Homo sapiens
acaatagcaaccaca

SEQ ID NO: 477846 - DNA, 15 bp, Homo sapiens
cacaatagcaaccac

SEQ ID NO: 477847 - DNA, 15 bp, Homo sapiens
tcacaatagcaacca

SEQ ID NO: 477848 - DNA, 15 bp, Homo sapiens
gtcacaatagcaacc

SEQ ID NO: 477849 - DNA, 15 bp, Homo sapiens
tgtcacaatagcaac

SEQ ID NO: 477850 - DNA, 15 bp, Homo sapiens
ttgtcacaatagcaa

SEQ ID NO: 477851 - DNA, 15 bp, Homo sapiens
gttgtcacaatagca

SEQ ID NO: 477852 - DNA, 15 bp, Homo sapiens
ggttgtcacaatagc

SEQ ID NO: 477853 - DNA, 15 bp, Homo sapiens
tggttgtcacaatag

SEQ ID NO: 477854 - DNA, 15 bp, Homo sapiens
ctggttgtcacaata

SEQ ID NO: 477855 - DNA, 15 bp, Homo sapiens
actggttgtcacaat

SEQ ID NO: 477856 - DNA, 15 bp, Homo sapiens
gactggttgtcacaa

SEQ ID NO: 477857 - DNA, 15 bp, Homo sapiens
ggactggttgtcaca

SEQ ID NO: 477858 - DNA, 15 bp, Homo sapiens
gggactggttgtcac

SEQ ID NO: 477859 - DNA, 15 bp, Homo sapiens
agggactggttgtca

SEQ ID NO: 477860 - DNA, 15 bp, Homo sapiens
gagggactggttgtc

SEQ ID NO: 477861 - DNA, 15 bp, Homo sapiens
agagggactggttgt

SEQ ID NO: 477862 - DNA, 15 bp, Homo sapiens
aagagggactggttg

SEQ ID NO: 477863 - DNA, 15 bp, Homo sapiens
aaagagggactggtt

SEQ ID NO: 477864 - DNA, 15 bp, Homo sapiens
aaaagagggactggt

SEQ ID NO: 477865 - DNA, 15 bp, Homo sapiens
gaaaagagggactgg

SEQ ID NO: 477866 - DNA, 15 bp, Homo sapiens
ggaaaagagggactg

SEQ ID NO: 477867 - DNA, 15 bp, Homo sapiens
aggaaaagagggact

SEQ ID NO: 477868 - DNA, 15 bp, Homo sapiens
aaggaaaagagggac

SEQ ID NO: 477869 - DNA, 15 bp, Homo sapiens
caaggaaaagaggga

SEQ ID NO: 477870 - DNA, 15 bp, Homo sapiens
acaaggaaaagaggg

SEQ ID NO: 477871 - DNA, 15 bp, Homo sapiens
aacaaggaaaagagg

SEQ ID NO: 477872 - DNA, 15 bp, Homo sapiens
aaacaaggaaaagag

SEQ ID NO: 477873 - DNA, 15 bp, Homo sapiens
taaacaaggaaaaga

SEQ ID NO: 477874 - DNA, 15 bp, Homo sapiens
ctaaacaaggaaaag

SEQ ID NO: 477875 - DNA, 15 bp, Homo sapiens
actaaacaaggaaaa

SEQ ID NO: 477876 - DNA, 15 bp, Homo sapiens
aactaaacaaggaaa

SEQ ID NO: 477877 - DNA, 15 bp, Homo sapiens
aaactaaacaaggaa

SEQ ID NO: 477878 - DNA, 15 bp, Homo sapiens
aaaactaaacaagga

SEQ ID NO: 477879 - DNA, 15 bp, Homo sapiens
aaaaactaaacaagg

SEQ ID NO: 477880 - DNA, 15 bp, Homo sapiens
aaaaaactaaacaag

SEQ ID NO: 477881 - DNA, 15 bp, Homo sapiens
taaaaaactaaacaa

SEQ ID NO: 477882 - DNA, 15 bp, Homo sapiens
gtaaaaaactaaaca

SEQ ID NO: 477883 - DNA, 15 bp, Homo sapiens
agtaaaaaactaaac

SEQ ID NO: 477884 - DNA, 15 bp, Homo sapiens
aagtaaaaaactaaa

SEQ ID NO: 477885 - DNA, 15 bp, Homo sapiens
caagtaaaaaactaa

SEQ ID NO: 477886 - DNA, 15 bp, Homo sapiens
acaagtaaaaaacta

SEQ ID NO: 477887 - DNA, 15 bp, Homo sapiens
tacaagtaaaaaact

SEQ ID NO: 477888 - DNA, 15 bp, Homo sapiens
gtacaagtaaaaaac

SEQ ID NO: 477889 - DNA, 15 bp, Homo sapiens
tgtacaagtaaaaaa

SEQ ID NO: 477890 - DNA, 15 bp, Homo sapiens
atgtacaagtaaaaa

SEQ ID NO: 477891 - DNA, 15 bp, Homo sapiens
catgtacaagtaaaa

SEQ ID NO: 477892 - DNA, 15 bp, Homo sapiens
acatgtacaagtaaa

SEQ ID NO: 477893 - DNA, 15 bp, Homo sapiens
gacatgtacaagtaa

SEQ ID NO: 477894 - DNA, 15 bp, Homo sapiens
tgacatgtacaagta

SEQ ID NO: 477895 - DNA, 15 bp, Homo sapiens
atgacatgtacaagt

SEQ ID NO: 477896 - DNA, 15 bp, Homo sapiens
aatgacatgtacaag

SEQ ID NO: 477897 - DNA, 15 bp, Homo sapiens
gaatgacatgtacaa

SEQ ID NO: 477898 - DNA, 15 bp, Homo sapiens
tgaatgacatgtaca

SEQ ID NO: 477899 - DNA, 15 bp, Homo sapiens
atgaatgacatgtac

SEQ ID NO: 477900 - DNA, 15 bp, Homo sapiens
catgaatgacatgta

SEQ ID NO: 477901 - DNA, 15 bp, Homo sapiens
gcatgaatgacatgt

SEQ ID NO: 477902 - DNA, 15 bp, Homo sapiens
tgcatgaatgacatg

SEQ ID NO: 477903 - DNA, 15 bp, Homo sapiens
atgcatgaatgacat

SEQ ID NO: 477904 - DNA, 15 bp, Homo sapiens
tatgcatgaatgaca

SEQ ID NO: 477905 - DNA, 15 bp, Homo sapiens
atatgcatgaatgac

SEQ ID NO: 477906 - DNA, 15 bp, Homo sapiens
aatatgcatgaatga

SEQ ID NO: 477907 - DNA, 15 bp, Homo sapiens
taatatgcatgaatg

SEQ ID NO: 477908 - DNA, 15 bp, Homo sapiens
ataatatgcatgaat

SEQ ID NO: 477909 - DNA, 15 bp, Homo sapiens
tataatatgcatgaa

SEQ ID NO: 477910 - DNA, 15 bp, Homo sapiens
atataatatgcatga

SEQ ID NO: 477911 - DNA, 15 bp, Homo sapiens
tatataatatgcatg

SEQ ID NO: 477912 - DNA, 15 bp, Homo sapiens
atatataatatgcat

SEQ ID NO: 477913 - DNA, 15 bp, Homo sapiens
tatatataatatgca

SEQ ID NO: 477914 - DNA, 15 bp, Homo sapiens
ttatatataatatgc

SEQ ID NO: 477915 - DNA, 15 bp, Homo sapiens
cttatatataatatg

SEQ ID NO: 477916 - DNA, 15 bp, Homo sapiens
tcttatatataatat

SEQ ID NO: 477917 - DNA, 15 bp, Homo sapiens
gtcttatatataata

SEQ ID NO: 477918 - DNA, 15 bp, Homo sapiens
agtcttatatataat

SEQ ID NO: 477919 - DNA, 15 bp, Homo sapiens
cagtcttatatataa

SEQ ID NO: 477920 - DNA, 15 bp, Homo sapiens
tcagtcttatatata

SEQ ID NO: 477921 - DNA, 15 bp, Homo sapiens
ctcagtcttatatat

SEQ ID NO: 477922 - DNA, 15 bp, Homo sapiens
tctcagtcttatata

SEQ ID NO: 477923 - DNA, 15 bp, Homo sapiens
atctcagtcttatat

SEQ ID NO: 477924 - DNA, 15 bp, Homo sapiens
gatctcagtcttata

SEQ ID NO: 477925 - DNA, 15 bp, Homo sapiens
tgatctcagtcttat

SEQ ID NO: 477926 - DNA, 15 bp, Homo sapiens
atgatctcagtctta

SEQ ID NO: 477927 - DNA, 15 bp, Homo sapiens
catgatctcagtctt

SEQ ID NO: 477928 - DNA, 15 bp, Homo sapiens
acatgatctcagtct

SEQ ID NO: 477929 - DNA, 15 bp, Homo sapiens
cacatgatctcagtc

SEQ ID NO: 477930 - DNA, 15 bp, Homo sapiens
acacatgatctcagt

SEQ ID NO: 477931 - DNA, 15 bp, Homo sapiens
aacacatgatctcag

SEQ ID NO: 477932 - DNA, 15 bp, Homo sapiens
taacacatgatctca

SEQ ID NO: 477933 - DNA, 15 bp, Homo sapiens
ttaacacatgatctc

SEQ ID NO: 477934 - DNA, 15 bp, Homo sapiens
attaacacatgatct

SEQ ID NO: 477935 - DNA, 15 bp, Homo sapiens
aattaacacatgatc

SEQ ID NO: 477936 - DNA, 15 bp, Homo sapiens
taattaacacatgat

SEQ ID NO: 477937 - DNA, 15 bp, Homo sapiens
ttaattaacacatga

SEQ ID NO: 477938 - DNA, 15 bp, Homo sapiens
gttaattaacacatg

SEQ ID NO: 477939 - DNA, 15 bp, Homo sapiens
cgttaattaacacat

SEQ ID NO: 477940 - DNA, 15 bp, Homo sapiens
tcgttaattaacaca

SEQ ID NO: 477941 - DNA, 15 bp, Homo sapiens
gtcgttaattaacac

SEQ ID NO: 477942 - DNA, 15 bp, Homo sapiens
agtcgttaattaaca

SEQ ID NO: 477943 - DNA, 15 bp, Homo sapiens
cagtcgttaattaac

SEQ ID NO: 477944 - DNA, 15 bp, Homo sapiens
ccagtcgttaattaa

SEQ ID NO: 477945 - DNA, 15 bp, Homo sapiens
cccagtcgttaatta

SEQ ID NO: 477946 - DNA, 15 bp, Homo sapiens
tcccagtcgttaatt

SEQ ID NO: 477947 - DNA, 15 bp, Homo sapiens
atcccagtcgttaat

SEQ ID NO: 477948 - DNA, 15 bp, Homo sapiens
tatcccagtcgttaa

SEQ ID NO: 477949 - DNA, 15 bp, Homo sapiens
gtatcccagtcgtta

SEQ ID NO: 477950 - DNA, 15 bp, Homo sapiens
cgtatcccagtcgtt

SEQ ID NO: 477951 - DNA, 15 bp, Homo sapiens
acgtatcccagtcgt

SEQ ID NO: 477952 - DNA, 15 bp, Homo sapiens
aacgtatcccagtcg

SEQ ID NO: 477953 - DNA, 15 bp, Homo sapiens
gaacgtatcccagtc

SEQ ID NO: 477954 - DNA, 15 bp, Homo sapiens
agaacgtatcccagt

SEQ ID NO: 477955 - DNA, 15 bp, Homo sapiens
cagaacgtatcccag

SEQ ID NO: 477956 - DNA, 15 bp, Homo sapiens
gcagaacgtatccca

SEQ ID NO: 477957 - DNA, 15 bp, Homo sapiens
tgcagaacgtatccc

SEQ ID NO: 477958 - DNA, 15 bp, Homo sapiens
ttgcagaacgtatcc

SEQ ID NO: 477959 - DNA, 15 bp, Homo sapiens
tttgcagaacgtatc

SEQ ID NO: 477960 - DNA, 15 bp, Homo sapiens
ttttgcagaacgtat

SEQ ID NO: 477961 - DNA, 15 bp, Homo sapiens
attttgcagaacgta

SEQ ID NO: 477962 - DNA, 15 bp, Homo sapiens
cattttgcagaacgt

SEQ ID NO: 477963 - DNA, 15 bp, Homo sapiens
acattttgcagaacg

SEQ ID NO: 477964 - DNA, 15 bp, Homo sapiens
tacattttgcagaac

SEQ ID NO: 477965 - DNA, 15 bp, Homo sapiens
atacattttgcagaa

SEQ ID NO: 477966 - DNA, 15 bp, Homo sapiens
gatacattttgcaga

SEQ ID NO: 477967 - DNA, 15 bp, Homo sapiens
tgatacattttgcag

SEQ ID NO: 477968 - DNA, 15 bp, Homo sapiens
atgatacattttgca

SEQ ID NO: 477969 - DNA, 15 bp, Homo sapiens
aatgatacattttgc

SEQ ID NO: 477970 - DNA, 15 bp, Homo sapiens
taatgatacattttg

SEQ ID NO: 477971 - DNA, 15 bp, Homo sapiens
ctaatgatacatttt

SEQ ID NO: 477972 - DNA, 15 bp, Homo sapiens
cctaatgatacattt

SEQ ID NO: 477973 - DNA, 15 bp, Homo sapiens
gcctaatgatacatt

SEQ ID NO: 477974 - DNA, 15 bp, Homo sapiens
tgcctaatgatacat

SEQ ID NO: 477975 - DNA, 15 bp, Homo sapiens
ttgcctaatgataca

SEQ ID NO: 477976 - DNA, 15 bp, Homo sapiens
attgcctaatgatac

SEQ ID NO: 477977 - DNA, 15 bp, Homo sapiens
aattgcctaatgata

SEQ ID NO: 477978 - DNA, 15 bp, Homo sapiens
aaattgcctaatgat

SEQ ID NO: 477979 - DNA, 15 bp, Homo sapiens
aaaattgcctaatga

SEQ ID NO: 477980 - DNA, 15 bp, Homo sapiens
caaaattgcctaatg

SEQ ID NO: 477981 - DNA, 15 bp, Homo sapiens
acaaaattgcctaat

SEQ ID NO: 477982 - DNA, 15 bp, Homo sapiens
aacaaaattgcctaa

SEQ ID NO: 477983 - DNA, 15 bp, Homo sapiens
caacaaaattgccta

SEQ ID NO: 477984 - DNA, 15 bp, Homo sapiens
acaacaaaattgcct

SEQ ID NO: 477985 - DNA, 15 bp, Homo sapiens
cacaacaaaattgcc

SEQ ID NO: 477986 - DNA, 15 bp, Homo sapiens
gcacaacaaaattgc

SEQ ID NO: 477987 - DNA, 15 bp, Homo sapiens
tgcacaacaaaattg

SEQ ID NO: 477988 - DNA, 15 bp, Homo sapiens
ttgcacaacaaaatt

SEQ ID NO: 477989 - DNA, 15 bp, Homo sapiens
tttgcacaacaaaat

SEQ ID NO: 477990 - DNA, 15 bp, Homo sapiens
atttgcacaacaaaa

SEQ ID NO: 477991 - DNA, 15 bp, Homo sapiens
catttgcacaacaaa

SEQ ID NO: 477992 - DNA, 15 bp, Homo sapiens
acatttgcacaacaa

SEQ ID NO: 477993 - DNA, 15 bp, Homo sapiens
aacatttgcacaaca

SEQ ID NO: 477994 - DNA, 15 bp, Homo sapiens
caacatttgcacaac

SEQ ID NO: 477995 - DNA, 15 bp, Homo sapiens
acaacatttgcacaa

SEQ ID NO: 477996 - DNA, 15 bp, Homo sapiens
tacaacatttgcaca

SEQ ID NO: 477997 - DNA, 15 bp, Homo sapiens
ctacaacatttgcac

SEQ ID NO: 477998 - DNA, 15 bp, Homo sapiens
tctacaacatttgca

SEQ ID NO: 477999 - DNA, 15 bp, Homo sapiens
ctctacaacatttgc

SEQ ID NO: 478000 - DNA, 15 bp, Homo sapiens
actctacaacatttg

SEQ ID NO: 478001 - DNA, 15 bp, Homo sapiens
tactctacaacattt

SEQ ID NO: 478002 - DNA, 15 bp, Homo sapiens
atactctacaacatt

SEQ ID NO: 478003 - DNA, 15 bp, Homo sapiens
tatactctacaacat

SEQ ID NO: 478004 - DNA, 15 bp, Homo sapiens
atatactctacaaca

SEQ ID NO: 478005 - DNA, 15 bp, Homo sapiens
tatatactctacaac

SEQ ID NO: 478006 - DNA, 15 bp, Homo sapiens
ctatatactctacaa

SEQ ID NO: 478007 - DNA, 15 bp, Homo sapiens
actatatactctaca

SEQ ID NO: 478008 - DNA, 15 bp, Homo sapiens
gactatatactctac

SEQ ID NO: 478009 - DNA, 15 bp, Homo sapiens
ggactatatactcta

SEQ ID NO: 478010 - DNA, 15 bp, Homo sapiens
aggactatatactct

SEQ ID NO: 478011 - DNA, 15 bp, Homo sapiens
aaggactatatactc

SEQ ID NO: 478012 - DNA, 15 bp, Homo sapiens
taaggactatatact

SEQ ID NO: 478013 - DNA, 15 bp, Homo sapiens
gtaaggactatatac

SEQ ID NO: 478014 - DNA, 15 bp, Homo sapiens
tgtaaggactatata

SEQ ID NO: 478015 - DNA, 15 bp, Homo sapiens
gtgtaaggactatat

SEQ ID NO: 478016 - DNA, 15 bp, Homo sapiens
tgtgtaaggactata

SEQ ID NO: 478017 - DNA, 15 bp, Homo sapiens
ttgtgtaaggactat

SEQ ID NO: 478018 - DNA, 15 bp, Homo sapiens
tttgtgtaaggacta

SEQ ID NO: 478019 - DNA, 15 bp, Homo sapiens
gtttgtgtaaggact

SEQ ID NO: 478020 - DNA, 15 bp, Homo sapiens
ggtttgtgtaaggac

SEQ ID NO: 478021 - DNA, 15 bp, Homo sapiens
aggtttgtgtaagga

SEQ ID NO: 478022 - DNA, 15 bp, Homo sapiens
caggtttgtgtaagg

SEQ ID NO: 478023 - DNA, 15 bp, Homo sapiens
ccaggtttgtgtaag

SEQ ID NO: 478024 - DNA, 15 bp, Homo sapiens
cccaggtttgtgtaa

SEQ ID NO: 478025 - DNA, 15 bp, Homo sapiens
acccaggtttgtgta

SEQ ID NO: 478026 - DNA, 15 bp, Homo sapiens
cacccaggtttgtgt

SEQ ID NO: 478027 - DNA, 15 bp, Homo sapiens
ccacccaggtttgtg

SEQ ID NO: 478028 - DNA, 15 bp, Homo sapiens
gccacccaggtttgt

SEQ ID NO: 478029 - DNA, 15 bp, Homo sapiens
tgccacccaggtttg

SEQ ID NO: 478030 - DNA, 15 bp, Homo sapiens
ctgccacccaggttt

SEQ ID NO: 478031 - DNA, 15 bp, Homo sapiens
tctgccacccaggtt

SEQ ID NO: 478032 - DNA, 15 bp, Homo sapiens
ttctgccacccaggt

SEQ ID NO: 478033 - DNA, 15 bp, Homo sapiens
gttctgccacccagg

SEQ ID NO: 478034 - DNA, 15 bp, Homo sapiens
ggttctgccacccag

SEQ ID NO: 478035 - DNA, 15 bp, Homo sapiens
aggttctgccaccca

SEQ ID NO: 478036 - DNA, 15 bp, Homo sapiens
taggttctgccaccc

SEQ ID NO: 478037 - DNA, 15 bp, Homo sapiens
gtaggttctgccacc

SEQ ID NO: 478038 - DNA, 15 bp, Homo sapiens
agtaggttctgccac

SEQ ID NO: 478039 - DNA, 15 bp, Homo sapiens
cagtaggttctgcca

SEQ ID NO: 478040 - DNA, 15 bp, Homo sapiens
gcagtaggttctgcc

SEQ ID NO: 478041 - DNA, 15 bp, Homo sapiens
tgcagtaggttctgc

SEQ ID NO: 478042 - DNA, 15 bp, Homo sapiens
gtgcagtaggttctg

SEQ ID NO: 478043 - DNA, 15 bp, Homo sapiens
tgtgcagtaggttct

SEQ ID NO: 478044 - DNA, 15 bp, Homo sapiens
gtgtgcagtaggttc

SEQ ID NO: 478045 - DNA, 15 bp, Homo sapiens
ggtgtgcagtaggtt

SEQ ID NO: 478046 - DNA, 15 bp, Homo sapiens
aggtgtgcagtaggt

SEQ ID NO: 478047 - DNA, 15 bp, Homo sapiens
taggtgtgcagtagg

SEQ ID NO: 478048 - DNA, 15 bp, Homo sapiens
gtaggtgtgcagtag

SEQ ID NO: 478049 - DNA, 15 bp, Homo sapiens
cgtaggtgtgcagta

SEQ ID NO: 478050 - DNA, 15 bp, Homo sapiens
gcgtaggtgtgcagt

SEQ ID NO: 478051 - DNA, 15 bp, Homo sapiens
agcgtaggtgtgcag

SEQ ID NO: 478052 - DNA, 15 bp, Homo sapiens
tagcgtaggtgtgca

SEQ ID NO: 478053 - DNA, 15 bp, Homo sapiens
atagcgtaggtgtgc

SEQ ID NO: 478054 - DNA, 15 bp, Homo sapiens
catagcgtaggtgtg

SEQ ID NO: 478055 - DNA, 15 bp, Homo sapiens
acatagcgtaggtgt

SEQ ID NO: 478056 - DNA, 15 bp, Homo sapiens
cacatagcgtaggtg

SEQ ID NO: 478057 - DNA, 15 bp, Homo sapiens
ccacatagcgtaggt

SEQ ID NO: 478058 - DNA, 15 bp, Homo sapiens
gccacatagcgtagg

SEQ ID NO: 478059 - DNA, 15 bp, Homo sapiens
tgccacatagcgtag

SEQ ID NO: 478060 - DNA, 15 bp, Homo sapiens
ctgccacatagcgta

SEQ ID NO: 478061 - DNA, 15 bp, Homo sapiens
tctgccacatagcgt

SEQ ID NO: 478062 - DNA, 15 bp, Homo sapiens
ctctgccacatagcg

SEQ ID NO: 478063 - DNA, 15 bp, Homo sapiens
gctctgccacatagc

SEQ ID NO: 478064 - DNA, 15 bp, Homo sapiens
ggctctgccacatag

SEQ ID NO: 478065 - DNA, 15 bp, Homo sapiens
aggctctgccacata

SEQ ID NO: 478066 - DNA, 15 bp, Homo sapiens
taggctctgccacat

SEQ ID NO: 478067 - DNA, 15 bp, Homo sapiens
gtaggctctgccaca

SEQ ID NO: 478068 - DNA, 15 bp, Homo sapiens
agtaggctctgccac

SEQ ID NO: 478069 - DNA, 15 bp, Homo sapiens
cagtaggctctgcca

SEQ ID NO: 478070 - DNA, 15 bp, Homo sapiens
ccagtaggctctgcc

SEQ ID NO: 478071 - DNA, 15 bp, Homo sapiens
accagtaggctctgc

SEQ ID NO: 478072 - DNA, 15 bp, Homo sapiens
gaccagtaggctctg

SEQ ID NO: 478073 - DNA, 15 bp, Homo sapiens
cgaccagtaggctct

SEQ ID NO: 478074 - DNA, 15 bp, Homo sapiens
acgaccagtaggctc

SEQ ID NO: 478075 - DNA, 15 bp, Homo sapiens
tacgaccagtaggct

SEQ ID NO: 478076 - DNA, 15 bp, Homo sapiens
ctacgaccagtaggc

SEQ ID NO: 478077 - DNA, 15 bp, Homo sapiens
cctacgaccagtagg

SEQ ID NO: 478078 - DNA, 15 bp, Homo sapiens
gcctacgaccagtag

SEQ ID NO: 478079 - DNA, 15 bp, Homo sapiens
agcctacgaccagta

SEQ ID NO: 478080 - DNA, 15 bp, Homo sapiens
cagcctacgaccagt

SEQ ID NO: 478081 - DNA, 15 bp, Homo sapiens
acagcctacgaccag

SEQ ID NO: 478082 - DNA, 15 bp, Homo sapiens
tacagcctacgacca

SEQ ID NO: 478083 - DNA, 15 bp, Homo sapiens
ttacagcctacgacc

SEQ ID NO: 478084 - DNA, 15 bp, Homo sapiens
tttacagcctacgac

SEQ ID NO: 478085 - DNA, 15 bp, Homo sapiens
gtttacagcctacga

SEQ ID NO: 478086 - DNA, 15 bp, Homo sapiens
ggtttacagcctacg

SEQ ID NO: 478087 - DNA, 15 bp, Homo sapiens
aggtttacagcctac

SEQ ID NO: 478088 - DNA, 15 bp, Homo sapiens
caggtttacagccta

SEQ ID NO: 478089 - DNA, 15 bp, Homo sapiens
acaggtttacagcct

SEQ ID NO: 478090 - DNA, 15 bp, Homo sapiens
tacaggtttacagcc

SEQ ID NO: 478091 - DNA, 15 bp, Homo sapiens
gtacaggtttacagc

SEQ ID NO: 478092 - DNA, 15 bp, Homo sapiens
tgtacaggtttacag

SEQ ID NO: 478093 - DNA, 15 bp, Homo sapiens
ctgtacaggtttaca

SEQ ID NO: 478094 - DNA, 15 bp, Homo sapiens
actgtacaggtttac

SEQ ID NO: 478095 - DNA, 15 bp, Homo sapiens
tactgtacaggttta

SEQ ID NO: 478096 - DNA, 15 bp, Homo sapiens
atactgtacaggttt

SEQ ID NO: 478097 - DNA, 15 bp, Homo sapiens
catactgtacaggtt

SEQ ID NO: 478098 - DNA, 15 bp, Homo sapiens
acatactgtacaggt

SEQ ID NO: 478099 - DNA, 15 bp, Homo sapiens
aacatactgtacagg

SEQ ID NO: 478100 - DNA, 15 bp, Homo sapiens
taacatactgtacag

SEQ ID NO: 478101 - DNA, 15 bp, Homo sapiens
gtaacatactgtaca

SEQ ID NO: 478102 - DNA, 15 bp, Homo sapiens
agtaacatactgtac

SEQ ID NO: 478103 - DNA, 15 bp, Homo sapiens
cagtaacatactgta

SEQ ID NO: 478104 - DNA, 15 bp, Homo sapiens
acagtaacatactgt

SEQ ID NO: 478105 - DNA, 15 bp, Homo sapiens
cacagtaacatactg

SEQ ID NO: 478106 - DNA, 15 bp, Homo sapiens
gcacagtaacatact

SEQ ID NO: 478107 - DNA, 15 bp, Homo sapiens
agcacagtaacatac

SEQ ID NO: 478108 - DNA, 15 bp, Homo sapiens
cagcacagtaacata

SEQ ID NO: 478109 - DNA, 15 bp, Homo sapiens
tcagcacagtaacat

SEQ ID NO: 478110 - DNA, 15 bp, Homo sapiens
ttcagcacagtaaca

SEQ ID NO: 478111 - DNA, 15 bp, Homo sapiens
attcagcacagtaac

SEQ ID NO: 478112 - DNA, 15 bp, Homo sapiens
tattcagcacagtaa

SEQ ID NO: 478113 - DNA, 15 bp, Homo sapiens
gtattcagcacagta

SEQ ID NO: 478114 - DNA, 15 bp, Homo sapiens
ggtattcagcacagt

SEQ ID NO: 478115 - DNA, 15 bp, Homo sapiens
cggtattcagcacag

SEQ ID NO: 478116 - DNA, 15 bp, Homo sapiens
acggtattcagcaca

SEQ ID NO: 478117 - DNA, 15 bp, Homo sapiens
tacggtattcagcac

SEQ ID NO: 478118 - DNA, 15 bp, Homo sapiens
ctacggtattcagca

SEQ ID NO: 478119 - DNA, 15 bp, Homo sapiens
cctacggtattcagc

SEQ ID NO: 478120 - DNA, 15 bp, Homo sapiens
gcctacggtattcag

SEQ ID NO: 478121 - DNA, 15 bp, Homo sapiens
tgcctacggtattca

SEQ ID NO: 478122 - DNA, 15 bp, Homo sapiens
ttgcctacggtattc

SEQ ID NO: 478123 - DNA, 15 bp, Homo sapiens
attgcctacggtatt

SEQ ID NO: 478124 - DNA, 15 bp, Homo sapiens
aattgcctacggtat

SEQ ID NO: 478125 - DNA, 15 bp, Homo sapiens
caattgcctacggta

SEQ ID NO: 478126 - DNA, 15 bp, Homo sapiens
acaattgcctacggt

SEQ ID NO: 478127 - DNA, 15 bp, Homo sapiens
tacaattgcctacgg

SEQ ID NO: 478128 - DNA, 15 bp, Homo sapiens
ttacaattgcctacg

SEQ ID NO: 478129 - DNA, 15 bp, Homo sapiens
gttacaattgcctac

SEQ ID NO: 478130 - DNA, 15 bp, Homo sapiens
tgttacaattgccta

SEQ ID NO: 478131 - DNA, 15 bp, Homo sapiens
gtgttacaattgcct

SEQ ID NO: 478132 - DNA, 15 bp, Homo sapiens
tgtgttacaattgcc

SEQ ID NO: 478133 - DNA, 15 bp, Homo sapiens
atgtgttacaattgc

SEQ ID NO: 478134 - DNA, 15 bp, Homo sapiens
gatgtgttacaattg

SEQ ID NO: 478135 - DNA, 15 bp, Homo sapiens
agatgtgttacaatt

SEQ ID NO: 478136 - DNA, 15 bp, Homo sapiens
gagatgtgttacaat

SEQ ID NO: 478137 - DNA, 15 bp, Homo sapiens
tgagatgtgttacaa

SEQ ID NO: 478138 - DNA, 15 bp, Homo sapiens
ttgagatgtgttaca

SEQ ID NO: 478139 - DNA, 15 bp, Homo sapiens
attgagatgtgttac

SEQ ID NO: 478140 - DNA, 15 bp, Homo sapiens
cattgagatgtgtta

SEQ ID NO: 478141 - DNA, 15 bp, Homo sapiens
tcattgagatgtgtt

SEQ ID NO: 478142 - DNA, 15 bp, Homo sapiens
ttcattgagatgtgt

SEQ ID NO: 478143 - DNA, 15 bp, Homo sapiens
cttcattgagatgtg

SEQ ID NO: 478144 - DNA, 15 bp, Homo sapiens
acttcattgagatgt

SEQ ID NO: 478145 - DNA, 15 bp, Homo sapiens
tacttcattgagatg

SEQ ID NO: 478146 - DNA, 15 bp, Homo sapiens
ctacttcattgagat

SEQ ID NO: 478147 - DNA, 15 bp, Homo sapiens
cctacttcattgaga

SEQ ID NO: 478148 - DNA, 15 bp, Homo sapiens
tcctacttcattgag

SEQ ID NO: 478149 - DNA, 15 bp, Homo sapiens
ttcctacttcattga

SEQ ID NO: 478150 - DNA, 15 bp, Homo sapiens
attcctacttcattg

SEQ ID NO: 478151 - DNA, 15 bp, Homo sapiens
aattcctacttcatt

SEQ ID NO: 478152 - DNA, 15 bp, Homo sapiens
aaattcctacttcat

SEQ ID NO: 478153 - DNA, 15 bp, Homo sapiens
aaaattcctacttca

SEQ ID NO: 478154 - DNA, 15 bp, Homo sapiens
aaaaattcctacttc

SEQ ID NO: 478155 - DNA, 15 bp, Homo sapiens
gaaaaattcctactt

SEQ ID NO: 478156 - DNA, 15 bp, Homo sapiens
tgaaaaattcctact

SEQ ID NO: 478157 - DNA, 15 bp, Homo sapiens
ctgaaaaattcctac

SEQ ID NO: 478158 - DNA, 15 bp, Homo sapiens
gctgaaaaattccta

SEQ ID NO: 478159 - DNA, 15 bp, Homo sapiens
agctgaaaaattcct

SEQ ID NO: 478160 - DNA, 15 bp, Homo sapiens
gagctgaaaaattcc

SEQ ID NO: 478161 - DNA, 15 bp, Homo sapiens
ggagctgaaaaattc

SEQ ID NO: 478162 - DNA, 15 bp, Homo sapiens
tggagctgaaaaatt

SEQ ID NO: 478163 - DNA, 15 bp, Homo sapiens
atggagctgaaaaat

SEQ ID NO: 478164 - DNA, 15 bp, Homo sapiens
catggagctgaaaaa

SEQ ID NO: 478165 - DNA, 15 bp, Homo sapiens
tcatggagctgaaaa

SEQ ID NO: 478166 - DNA, 15 bp, Homo sapiens
atcatggagctgaaa

SEQ ID NO: 478167 - DNA, 15 bp, Homo sapiens
tatcatggagctgaa

SEQ ID NO: 478168 - DNA, 15 bp, Homo sapiens
ttatcatggagctga

SEQ ID NO: 478169 - DNA, 15 bp, Homo sapiens
attatcatggagctg

SEQ ID NO: 478170 - DNA, 15 bp, Homo sapiens
gattatcatggagct

SEQ ID NO: 478171 - DNA, 15 bp, Homo sapiens
agattatcatggagc

SEQ ID NO: 478172 - DNA, 15 bp, Homo sapiens
aagattatcatggag

SEQ ID NO: 478173 - DNA, 15 bp, Homo sapiens
taagattatcatgga

SEQ ID NO: 478174 - DNA, 15 bp, Homo sapiens
ataagattatcatgg

SEQ ID NO: 478175 - DNA, 15 bp, Homo sapiens
cataagattatcatg

SEQ ID NO: 478176 - DNA, 15 bp, Homo sapiens
ccataagattatcat

SEQ ID NO: 478177 - DNA, 15 bp, Homo sapiens
cccataagattatca

SEQ ID NO: 478178 - DNA, 15 bp, Homo sapiens
tcccataagattatc

SEQ ID NO: 478179 - DNA, 15 bp, Homo sapiens
gtcccataagattat

SEQ ID NO: 478180 - DNA, 15 bp, Homo sapiens
ggtcccataagatta

SEQ ID NO: 478181 - DNA, 15 bp, Homo sapiens
tggtcccataagatt

SEQ ID NO: 478182 - DNA, 15 bp, Homo sapiens
gtggtcccataagat

SEQ ID NO: 478183 - DNA, 15 bp, Homo sapiens
ggtggtcccataaga

SEQ ID NO: 478184 - DNA, 15 bp, Homo sapiens
tggtggtcccataag

SEQ ID NO: 478185 - DNA, 15 bp, Homo sapiens
atggtggtcccataa

SEQ ID NO: 478186 - DNA, 15 bp, Homo sapiens
gatggtggtcccata

SEQ ID NO: 478187 - DNA, 15 bp, Homo sapiens
tgatggtggtcccat

SEQ ID NO: 478188 - DNA, 15 bp, Homo sapiens
atgatggtggtccca

SEQ ID NO: 478189 - DNA, 15 bp, Homo sapiens
tatgatggtggtccc

SEQ ID NO: 478190 - DNA, 15 bp, Homo sapiens
atatgatggtggtcc

SEQ ID NO: 478191 - DNA, 15 bp, Homo sapiens
tatatgatggtggtc

SEQ ID NO: 478192 - DNA, 15 bp, Homo sapiens
atatatgatggtggt

SEQ ID NO: 478193 - DNA, 15 bp, Homo sapiens
catatatgatggtgg

SEQ ID NO: 478194 - DNA, 15 bp, Homo sapiens
gcatatatgatggtg

SEQ ID NO: 478195 - DNA, 15 bp, Homo sapiens
tgcatatatgatggt

SEQ ID NO: 478196 - DNA, 15 bp, Homo sapiens
atgcatatatgatgg

SEQ ID NO: 478197 - DNA, 15 bp, Homo sapiens
aatgcatatatgatg

SEQ ID NO: 478198 - DNA, 15 bp, Homo sapiens
aaatgcatatatgat

SEQ ID NO: 478199 - DNA, 15 bp, Homo sapiens
aaaatgcatatatga

SEQ ID NO: 478200 - DNA, 15 bp, Homo sapiens
caaaatgcatatatg

SEQ ID NO: 478201 - DNA, 15 bp, Homo sapiens
acaaaatgcatatat

SEQ ID NO: 478202 - DNA, 15 bp, Homo sapiens
aacaaaatgcatata

SEQ ID NO: 478203 - DNA, 15 bp, Homo sapiens
caacaaaatgcatat

SEQ ID NO: 478204 - DNA, 15 bp, Homo sapiens
acaacaaaatgcata

SEQ ID NO: 478205 - DNA, 15 bp, Homo sapiens
aacaacaaaatgcat

SEQ ID NO: 478206 - DNA, 15 bp, Homo sapiens
caacaacaaaatgca

SEQ ID NO: 478207 - DNA, 15 bp, Homo sapiens
tcaacaacaaaatgc

SEQ ID NO: 478208 - DNA, 15 bp, Homo sapiens
gtcaacaacaaaatg

SEQ ID NO: 478209 - DNA, 15 bp, Homo sapiens
ggtcaacaacaaaat

SEQ ID NO: 478210 - DNA, 15 bp, Homo sapiens
cggtcaacaacaaaa

SEQ ID NO: 478211 - DNA, 15 bp, Homo sapiens
tcggtcaacaacaaa

SEQ ID NO: 478212 - DNA, 15 bp, Homo sapiens
ttcggtcaacaacaa

SEQ ID NO: 478213 - DNA, 15 bp, Homo sapiens
tttcggtcaacaaca

SEQ ID NO: 478214 - DNA, 15 bp, Homo sapiens
gtttcggtcaacaac

SEQ ID NO: 478215 - DNA, 15 bp, Homo sapiens
cgtttcggtcaacaa

SEQ ID NO: 478216 - DNA, 15 bp, Homo sapiens
acgtttcggtcaaca

SEQ ID NO: 478217 - DNA, 15 bp, Homo sapiens
gacgtttcggtcaac

SEQ ID NO: 478218 - DNA, 15 bp, Homo sapiens
cgacgtttcggtcaa

SEQ ID NO: 478219 - DNA, 15 bp, Homo sapiens
acgacgtttcggtca

SEQ ID NO: 478220 - DNA, 15 bp, Homo sapiens
aacgacgtttcggtc

SEQ ID NO: 478221 - DNA, 15 bp, Homo sapiens
taacgacgtttcggt

SEQ ID NO: 478222 - DNA, 15 bp, Homo sapiens
ataacgacgtttcgg

SEQ ID NO: 478223 - DNA, 15 bp, Homo sapiens
tataacgacgtttcg

SEQ ID NO: 478224 - DNA, 15 bp, Homo sapiens
atataacgacgtttc

SEQ ID NO: 478225 - DNA, 15 bp, Homo sapiens
tatataacgacgttt

SEQ ID NO: 478226 - DNA, 15 bp, Homo sapiens
atatataacgacgtt

SEQ ID NO: 478227 - DNA, 15 bp, Homo sapiens
aatatataacgacgt

SEQ ID NO: 478228 - DNA, 15 bp, Homo sapiens
gaatatataacgacg

SEQ ID NO: 478229 - DNA, 15 bp, Homo sapiens
agaatatataacgac

SEQ ID NO: 478230 - DNA, 15 bp, Homo sapiens
aagaatatataacga

SEQ ID NO: 478231 - DNA, 15 bp, Homo sapiens
aaagaatatataacg

SEQ ID NO: 478232 - DNA, 15 bp, Homo sapiens
gaaagaatatataac

SEQ ID NO: 478233 - DNA, 15 bp, Homo sapiens
ggaaagaatatataa

SEQ ID NO: 478234 - DNA, 15 bp, Homo sapiens
tggaaagaatatata

SEQ ID NO: 478235 - DNA, 15 bp, Homo sapiens
atggaaagaatatat

SEQ ID NO: 478236 - DNA, 15 bp, Homo sapiens
tatggaaagaatata

SEQ ID NO: 478237 - DNA, 15 bp, Homo sapiens
gtatggaaagaatat

SEQ ID NO: 478238 - DNA, 15 bp, Homo sapiens
tgtatggaaagaata

SEQ ID NO: 478239 - DNA, 15 bp, Homo sapiens
atgtatggaaagaat

SEQ ID NO: 478240 - DNA, 15 bp, Homo sapiens
tatgtatggaaagaa

SEQ ID NO: 478241 - DNA, 15 bp, Homo sapiens
ctatgtatggaaaga

SEQ ID NO: 478242 - DNA, 15 bp, Homo sapiens
gctatgtatggaaag

SEQ ID NO: 478243 - DNA, 15 bp, Homo sapiens
tgctatgtatggaaa

SEQ ID NO: 478244 - DNA, 15 bp, Homo sapiens
atgctatgtatggaa

SEQ ID NO: 478245 - DNA, 15 bp, Homo sapiens
catgctatgtatgga

SEQ ID NO: 478246 - DNA, 15 bp, Homo sapiens
acatgctatgtatgg

SEQ ID NO: 478247 - DNA, 15 bp, Homo sapiens
cacatgctatgtatg

SEQ ID NO: 478248 - DNA, 15 bp, Homo sapiens
ccacatgctatgtat

SEQ ID NO: 478249 - DNA, 15 bp, Homo sapiens
tccacatgctatgta

SEQ ID NO: 478250 - DNA, 15 bp, Homo sapiens
ttccacatgctatgt

SEQ ID NO: 478251 - DNA, 15 bp, Homo sapiens
tttccacatgctatg

SEQ ID NO: 478252 - DNA, 15 bp, Homo sapiens
ctttccacatgctat

SEQ ID NO: 478253 - DNA, 15 bp, Homo sapiens
tctttccacatgcta

SEQ ID NO: 478254 - DNA, 15 bp, Homo sapiens
ttctttccacatgct

SEQ ID NO: 478255 - DNA, 15 bp, Homo sapiens
attctttccacatgc

SEQ ID NO: 478256 - DNA, 15 bp, Homo sapiens
tattctttccacatg

SEQ ID NO: 478257 - DNA, 15 bp, Homo sapiens
ctattctttccacat

SEQ ID NO: 478258 - DNA, 15 bp, Homo sapiens
tctattctttccaca

SEQ ID NO: 478259 - DNA, 15 bp, Homo sapiens
atctattctttccac

SEQ ID NO: 478260 - DNA, 15 bp, Homo sapiens
gatctattctttcca

SEQ ID NO: 478261 - DNA, 15 bp, Homo sapiens
agatctattctttcc

SEQ ID NO: 478262 - DNA, 15 bp, Homo sapiens
gagatctattctttc

SEQ ID NO: 478263 - DNA, 15 bp, Homo sapiens
agagatctattcttt

SEQ ID NO: 478264 - DNA, 15 bp, Homo sapiens
aagagatctattctt

SEQ ID NO: 478265 - DNA, 15 bp, Homo sapiens
aaagagatctattct

SEQ ID NO: 478266 - DNA, 15 bp, Homo sapiens
aaaagagatctattc

SEQ ID NO: 478267 - DNA, 15 bp, Homo sapiens
aaaaagagatctatt

SEQ ID NO: 478268 - DNA, 15 bp, Homo sapiens
aaaaaagagatctat

SEQ ID NO: 478269 - DNA, 15 bp, Homo sapiens
aaaaaaagagatcta

SEQ ID NO: 478270 - DNA, 15 bp, Homo sapiens
aaaaaaaagagatct

SEQ ID NO: 478271 - DNA, 15 bp, Homo sapiens
taaaaaaaagagatc

SEQ ID NO: 478272 - DNA, 15 bp, Homo sapiens
ttaaaaaaaagagat

SEQ ID NO: 478273 - DNA, 15 bp, Homo sapiens
attaaaaaaaagaga

SEQ ID NO: 478274 - DNA, 15 bp, Homo sapiens
aattaaaaaaaagag

SEQ ID NO: 478275 - DNA, 15 bp, Homo sapiens
caattaaaaaaaaga

SEQ ID NO: 478276 - DNA, 15 bp, Homo sapiens
acaattaaaaaaaag

SEQ ID NO: 478277 - DNA, 15 bp, Homo sapiens
aacaattaaaaaaaa

SEQ ID NO: 478278 - DNA, 15 bp, Homo sapiens
gaacaattaaaaaaa

SEQ ID NO: 478279 - DNA, 15 bp, Homo sapiens
ggaacaattaaaaaa

SEQ ID NO: 478280 - DNA, 15 bp, Homo sapiens
tggaacaattaaaaa

SEQ ID NO: 478281 - DNA, 15 bp, Homo sapiens
gtggaacaattaaaa

SEQ ID NO: 478282 - DNA, 15 bp, Homo sapiens
tgtggaacaattaaa

SEQ ID NO: 478283 - DNA, 15 bp, Homo sapiens
gtgtggaacaattaa

SEQ ID NO: 478284 - DNA, 15 bp, Homo sapiens
agtgtggaacaatta

SEQ ID NO: 478285 - DNA, 15 bp, Homo sapiens
aagtgtggaacaatt

SEQ ID NO: 478286 - DNA, 15 bp, Homo sapiens
aaagtgtggaacaat

SEQ ID NO: 478287 - DNA, 15 bp, Homo sapiens
taaagtgtggaacaa

SEQ ID NO: 478288 - DNA, 15 bp, Homo sapiens
gtaaagtgtggaaca

SEQ ID NO: 478289 - DNA, 15 bp, Homo sapiens
ggtaaagtgtggaac

SEQ ID NO: 478290 - DNA, 15 bp, Homo sapiens
tggtaaagtgtggaa

SEQ ID NO: 478291 - DNA, 15 bp, Homo sapiens
atggtaaagtgtgga

SEQ ID NO: 478292 - DNA, 15 bp, Homo sapiens
tatggtaaagtgtgg

SEQ ID NO: 478293 - DNA, 15 bp, Homo sapiens
atatggtaaagtgtg

SEQ ID NO: 478294 - DNA, 15 bp, Homo sapiens
tatatggtaaagtgt

SEQ ID NO: 478295 - DNA, 15 bp, Homo sapiens
ttatatggtaaagtg

SEQ ID NO: 478296 - DNA, 15 bp, Homo sapiens
attatatggtaaagt

SEQ ID NO: 478297 - DNA, 15 bp, Homo sapiens
cattatatggtaaag

SEQ ID NO: 478298 - DNA, 15 bp, Homo sapiens
ccattatatggtaaa

SEQ ID NO: 478299 - DNA, 15 bp, Homo sapiens
tccattatatggtaa

SEQ ID NO: 478300 - DNA, 15 bp, Homo sapiens
ttccattatatggta

SEQ ID NO: 478301 - DNA, 15 bp, Homo sapiens
attccattatatggt

SEQ ID NO: 478302 - DNA, 15 bp, Homo sapiens
tattccattatatgg

SEQ ID NO: 478303 - DNA, 15 bp, Homo sapiens
gtattccattatatg

SEQ ID NO: 478304 - DNA, 15 bp, Homo sapiens
cgtattccattatat

SEQ ID NO: 478305 - DNA, 15 bp, Homo sapiens
gcgtattccattata

SEQ ID NO: 478306 - DNA, 15 bp, Homo sapiens
tgcgtattccattat

SEQ ID NO: 478307 - DNA, 15 bp, Homo sapiens
ttgcgtattccatta

SEQ ID NO: 478308 - DNA, 15 bp, Homo sapiens
tttgcgtattccatt

SEQ ID NO: 478309 - DNA, 15 bp, Homo sapiens
ttttgcgtattccat

SEQ ID NO: 478310 - DNA, 15 bp, Homo sapiens
attttgcgtattcca

SEQ ID NO: 478311 - DNA, 15 bp, Homo sapiens
aattttgcgtattcc

SEQ ID NO: 478312 - DNA, 15 bp, Homo sapiens
aaattttgcgtattc

SEQ ID NO: 478313 - DNA, 15 bp, Homo sapiens
gaaattttgcgtatt

SEQ ID NO: 478314 - DNA, 15 bp, Homo sapiens
tgaaattttgcgtat

SEQ ID NO: 478315 - DNA, 15 bp, Homo sapiens
gtgaaattttgcgta

SEQ ID NO: 478316 - DNA, 15 bp, Homo sapiens
tgtgaaattttgcgt

SEQ ID NO: 478317 - DNA, 15 bp, Homo sapiens
ttgtgaaattttgcg

SEQ ID NO: 478318 - DNA, 15 bp, Homo sapiens
attgtgaaattttgc

SEQ ID NO: 478319 - DNA, 15 bp, Homo sapiens
tattgtgaaattttg

SEQ ID NO: 478320 - DNA, 15 bp, Homo sapiens
gtattgtgaaatttt

SEQ ID NO: 478321 - DNA, 15 bp, Homo sapiens
ggtattgtgaaattt

SEQ ID NO: 478322 - DNA, 15 bp, Homo sapiens
aggtattgtgaaatt

SEQ ID NO: 478323 - DNA, 15 bp, Homo sapiens
aaggtattgtgaaat

SEQ ID NO: 478324 - DNA, 15 bp, Homo sapiens
aaaggtattgtgaaa

SEQ ID NO: 478325 - DNA, 15 bp, Homo sapiens
gaaaggtattgtgaa

SEQ ID NO: 478326 - DNA, 15 bp, Homo sapiens
tgaaaggtattgtga

SEQ ID NO: 478327 - DNA, 15 bp, Homo sapiens
ctgaaaggtattgtg

SEQ ID NO: 478328 - DNA, 15 bp, Homo sapiens
cctgaaaggtattgt

SEQ ID NO: 478329 - DNA, 15 bp, Homo sapiens
tcctgaaaggtattg

SEQ ID NO: 478330 - DNA, 15 bp, Homo sapiens
atcctgaaaggtatt

SEQ ID NO: 478331 - DNA, 15 bp, Homo sapiens
catcctgaaaggtat

SEQ ID NO: 478332 - DNA, 15 bp, Homo sapiens
acatcctgaaaggta

SEQ ID NO: 478333 - DNA, 15 bp, Homo sapiens
tacatcctgaaaggt

SEQ ID NO: 478334 - DNA, 15 bp, Homo sapiens
ttacatcctgaaagg

SEQ ID NO: 478335 - DNA, 15 bp, Homo sapiens
tttacatcctgaaag

SEQ ID NO: 478336 - DNA, 15 bp, Homo sapiens
ttttacatcctgaaa

SEQ ID NO: 478337 - DNA, 15 bp, Homo sapiens
attttacatcctgaa

SEQ ID NO: 478338 - DNA, 15 bp, Homo sapiens
tattttacatcctga

SEQ ID NO: 478339 - DNA, 15 bp, Homo sapiens
gtattttacatcctg

SEQ ID NO: 478340 - DNA, 15 bp, Homo sapiens
tgtattttacatcct

SEQ ID NO: 478341 - DNA, 15 bp, Homo sapiens
atgtattttacatcc

SEQ ID NO: 478342 - DNA, 15 bp, Homo sapiens
tatgtattttacatc

SEQ ID NO: 478343 - DNA, 15 bp, Homo sapiens
atatgtattttacat

SEQ ID NO: 478344 - DNA, 15 bp, Homo sapiens
tatatgtattttaca

SEQ ID NO: 478345 - DNA, 15 bp, Homo sapiens
gtatatgtattttac

SEQ ID NO: 478346 - DNA, 15 bp, Homo sapiens
ggtatatgtatttta

SEQ ID NO: 478347 - DNA, 15 bp, Homo sapiens
gggtatatgtatttt

SEQ ID NO: 478348 - DNA, 15 bp, Homo sapiens
agggtatatgtattt

SEQ ID NO: 478349 - DNA, 15 bp, Homo sapiens
aagggtatatgtatt

SEQ ID NO: 478350 - DNA, 15 bp, Homo sapiens
aaagggtatatgtat

SEQ ID NO: 478351 - DNA, 15 bp, Homo sapiens
caaagggtatatgta

SEQ ID NO: 478352 - DNA, 15 bp, Homo sapiens
tcaaagggtatatgt

SEQ ID NO: 478353 - DNA, 15 bp, Homo sapiens
gtcaaagggtatatg

SEQ ID NO: 478354 - DNA, 15 bp, Homo sapiens
cgtcaaagggtatat

SEQ ID NO: 478355 - DNA, 15 bp, Homo sapiens
tcgtcaaagggtata

SEQ ID NO: 478356 - DNA, 15 bp, Homo sapiens
gtcgtcaaagggtat

SEQ ID NO: 478357 - DNA, 15 bp, Homo sapiens
tgtcgtcaaagggta

SEQ ID NO: 478358 - DNA, 15 bp, Homo sapiens
atgtcgtcaaagggt

SEQ ID NO: 478359 - DNA, 15 bp, Homo sapiens
aatgtcgtcaaaggg

SEQ ID NO: 478360 - DNA, 15 bp, Homo sapiens
taatgtcgtcaaagg

SEQ ID NO: 478361 - DNA, 15 bp, Homo sapiens
ctaatgtcgtcaaag

SEQ ID NO: 478362 - DNA, 15 bp, Homo sapiens
tctaatgtcgtcaaa

SEQ ID NO: 478363 - DNA, 15 bp, Homo sapiens
ttctaatgtcgtcaa

SEQ ID NO: 478364 - DNA, 15 bp, Homo sapiens
tttctaatgtcgtca

SEQ ID NO: 478365 - DNA, 15 bp, Homo sapiens
ttttctaatgtcgtc

SEQ ID NO: 478366 - DNA, 15 bp, Homo sapiens
cttttctaatgtcgt

SEQ ID NO: 478367 - DNA, 15 bp, Homo sapiens
tcttttctaatgtcg

SEQ ID NO: 478368 - DNA, 15 bp, Homo sapiens
ctcttttctaatgtc

SEQ ID NO: 478369 - DNA, 15 bp, Homo sapiens
tctcttttctaatgt

SEQ ID NO: 478370 - DNA, 15 bp, Homo sapiens
ttctcttttctaatg

SEQ ID NO: 478371 - DNA, 15 bp, Homo sapiens
tttctcttttctaat

SEQ ID NO: 478372 - DNA, 15 bp, Homo sapiens
ttttctcttttctaa

SEQ ID NO: 478373 - DNA, 15 bp, Homo sapiens
attttctcttttcta

SEQ ID NO: 478374 - DNA, 15 bp, Homo sapiens
cattttctcttttct

SEQ ID NO: 478375 - DNA, 15 bp, Homo sapiens
acattttctcttttc

SEQ ID NO: 478376 - DNA, 15 bp, Homo sapiens
cacattttctctttt

SEQ ID NO: 478377 - DNA, 15 bp, Homo sapiens
ccacattttctcttt

SEQ ID NO: 478378 - DNA, 15 bp, Homo sapiens
cccacattttctctt

SEQ ID NO: 478379 - DNA, 15 bp, Homo sapiens
gcccacattttctct

SEQ ID NO: 478380 - DNA, 15 bp, Homo sapiens
ggcccacattttctc

SEQ ID NO: 478381 - DNA, 15 bp, Homo sapiens
cggcccacattttct

SEQ ID NO: 478382 - DNA, 15 bp, Homo sapiens
ccggcccacattttc

SEQ ID NO: 478383 - DNA, 15 bp, Homo sapiens
cccggcccacatttt

SEQ ID NO: 478384 - DNA, 15 bp, Homo sapiens
gcccggcccacattt

SEQ ID NO: 478385 - DNA, 15 bp, Homo sapiens
cgcccggcccacatt

SEQ ID NO: 478386 - DNA, 15 bp, Homo sapiens
gcgcccggcccacat

SEQ ID NO: 478387 - DNA, 15 bp, Homo sapiens
cgcgcccggcccaca

SEQ ID NO: 478388 - DNA, 15 bp, Homo sapiens
ccgcgcccggcccac

SEQ ID NO: 478389 - DNA, 15 bp, Homo sapiens
accgcgcccggccca

SEQ ID NO: 478390 - DNA, 15 bp, Homo sapiens
caccgcgcccggccc

SEQ ID NO: 478391 - DNA, 15 bp, Homo sapiens
atgagccaccgcgcc

SEQ ID NO: 478392 - DNA, 15 bp, Homo sapiens
catgagccaccgcgc

SEQ ID NO: 478393 - DNA, 15 bp, Homo sapiens
gcatgagccaccgcg

SEQ ID NO: 478394 - DNA, 15 bp, Homo sapiens
ggcatgagccaccgc

SEQ ID NO: 478395 - DNA, 15 bp, Homo sapiens
acccaggatggtctc

SEQ ID NO: 478396 - DNA, 15 bp, Homo sapiens
tacccaggatggtct

SEQ ID NO: 478397 - DNA, 15 bp, Homo sapiens
ttacccaggatggtc

SEQ ID NO: 478398 - DNA, 15 bp, Homo sapiens
gttacccaggatggt

SEQ ID NO: 478399 - DNA, 15 bp, Homo sapiens
tgttacccaggatgg

SEQ ID NO: 478400 - DNA, 15 bp, Homo sapiens
gtgttacccaggatg

SEQ ID NO: 478401 - DNA, 15 bp, Homo sapiens
cgtgttacccaggat

SEQ ID NO: 478402 - DNA, 15 bp, Homo sapiens
ccgtgttacccagga

SEQ ID NO: 478403 - DNA, 15 bp, Homo sapiens
accgtgttacccagg

SEQ ID NO: 478404 - DNA, 15 bp, Homo sapiens
caccgtgttacccag

SEQ ID NO: 478405 - DNA, 15 bp, Homo sapiens
tcaccgtgttaccca

SEQ ID NO: 478406 - DNA, 15 bp, Homo sapiens
ttcaccgtgttaccc

SEQ ID NO: 478407 - DNA, 15 bp, Homo sapiens
tttcaccgtgttacc

SEQ ID NO: 478408 - DNA, 15 bp, Homo sapiens
gtttcaccgtgttac

SEQ ID NO: 478409 - DNA, 15 bp, Homo sapiens
cggggtttcaccgtg

SEQ ID NO: 478410 - DNA, 15 bp, Homo sapiens
acggggtttcaccgt

SEQ ID NO: 478411 - DNA, 15 bp, Homo sapiens
gacggggtttcaccg

SEQ ID NO: 478412 - DNA, 15 bp, Homo sapiens
gtttttttgtatttt

SEQ ID NO: 478413 - DNA, 15 bp, Homo sapiens
agtttttttgtattt

SEQ ID NO: 478414 - DNA, 15 bp, Homo sapiens
tagtttttttgtatt

SEQ ID NO: 478415 - DNA, 15 bp, Homo sapiens
ctagtttttttgtat

SEQ ID NO: 478416 - DNA, 15 bp, Homo sapiens
gctagtttttttgta

SEQ ID NO: 478417 - DNA, 15 bp, Homo sapiens
agctagtttttttgt

SEQ ID NO: 478418 - DNA, 15 bp, Homo sapiens
cagctagtttttttg

SEQ ID NO: 478419 - DNA, 15 bp, Homo sapiens
ccagctagttttttt

SEQ ID NO: 478420 - DNA, 15 bp, Homo sapiens
gcccagctagttttt

SEQ ID NO: 478421 - DNA, 15 bp, Homo sapiens
cgcccagctagtttt

SEQ ID NO: 478422 - DNA, 15 bp, Homo sapiens
acgcccagctagttt

SEQ ID NO: 478423 - DNA, 15 bp, Homo sapiens
cacgcccagctagtt

SEQ ID NO: 478424 - DNA, 15 bp, Homo sapiens
ccacgcccagctagt

SEQ ID NO: 478425 - DNA, 15 bp, Homo sapiens
accacgcccagctag

SEQ ID NO: 478426 - DNA, 15 bp, Homo sapiens
gccaccacgcccagc

SEQ ID NO: 478427 - DNA, 15 bp, Homo sapiens
cgccaccacgcccag

SEQ ID NO: 478428 - DNA, 15 bp, Homo sapiens
ccgccaccacgccca

SEQ ID NO: 478429 - DNA, 15 bp, Homo sapiens
cccgccaccacgccc

SEQ ID NO: 478430 - DNA, 15 bp, Homo sapiens
gcccgccaccacgcc

SEQ ID NO: 478431 - DNA, 15 bp, Homo sapiens
tgcccgccaccacgc

SEQ ID NO: 478432 - DNA, 15 bp, Homo sapiens
gtgcccgccaccacg

SEQ ID NO: 478433 - DNA, 15 bp, Homo sapiens
ctacaggtgcccgcc

SEQ ID NO: 478434 - DNA, 15 bp, Homo sapiens
actacaggtgcccgc

SEQ ID NO: 478435 - DNA, 15 bp, Homo sapiens
ttcatgccattctcc

SEQ ID NO: 478436 - DNA, 15 bp, Homo sapiens
gttcatgccattctc

SEQ ID NO: 478437 - DNA, 15 bp, Homo sapiens
ggttcatgccattct

SEQ ID NO: 478438 - DNA, 15 bp, Homo sapiens
aggttcatgccattc

SEQ ID NO: 478439 - DNA, 15 bp, Homo sapiens
caggttcatgccatt

SEQ ID NO: 478440 - DNA, 15 bp, Homo sapiens
ccaggttcatgccat

SEQ ID NO: 478441 - DNA, 15 bp, Homo sapiens
cccaggttcatgcca

SEQ ID NO: 478442 - DNA, 15 bp, Homo sapiens
tcccaggttcatgcc

SEQ ID NO: 478443 - DNA, 15 bp, Homo sapiens
ctcccaggttcatgc

SEQ ID NO: 478444 - DNA, 15 bp, Homo sapiens
cctcccaggttcatg

SEQ ID NO: 478445 - DNA, 15 bp, Homo sapiens
acctcccaggttcat

SEQ ID NO: 478446 - DNA, 15 bp, Homo sapiens
actccacctcccagg

SEQ ID NO: 478447 - DNA, 15 bp, Homo sapiens
aactccacctcccag

SEQ ID NO: 478448 - DNA, 15 bp, Homo sapiens
aaactccacctccca

SEQ ID NO: 478449 - DNA, 15 bp, Homo sapiens
caaactccacctccc

SEQ ID NO: 478450 - DNA, 15 bp, Homo sapiens
gcaaactccacctcc

SEQ ID NO: 478451 - DNA, 15 bp, Homo sapiens
tgcaaactccacctc

SEQ ID NO: 478452 - DNA, 15 bp, Homo sapiens
ctgcaaactccacct

SEQ ID NO: 478453 - DNA, 15 bp, Homo sapiens
actgcaaactccacc

SEQ ID NO: 478454 - DNA, 15 bp, Homo sapiens
cactgcaaactccac

SEQ ID NO: 478455 - DNA, 15 bp, Homo sapiens
tcactgcaaactcca

SEQ ID NO: 478456 - DNA, 15 bp, Homo sapiens
ctcactgcaaactcc

SEQ ID NO: 478457 - DNA, 15 bp, Homo sapiens
gctcactgcaaactc

SEQ ID NO: 478458 - DNA, 15 bp, Homo sapiens
ggctcactgcaaact

SEQ ID NO: 478459 - DNA, 15 bp, Homo sapiens
tggctcactgcaaac

SEQ ID NO: 478460 - DNA, 15 bp, Homo sapiens
ttggctcactgcaaa

SEQ ID NO: 478461 - DNA, 15 bp, Homo sapiens
tgtgatcttggctca

SEQ ID NO: 478462 - DNA, 15 bp, Homo sapiens
gtgtgatcttggctc

SEQ ID NO: 478463 - DNA, 15 bp, Homo sapiens
ggtgtgatcttggct

SEQ ID NO: 478464 - DNA, 15 bp, Homo sapiens
tggtgtgatcttggc

SEQ ID NO: 478465 - DNA, 15 bp, Homo sapiens
gtggtgtgatcttgg

SEQ ID NO: 478466 - DNA, 15 bp, Homo sapiens
agtggtgtgatcttg

SEQ ID NO: 478467 - DNA, 15 bp, Homo sapiens
cagtggtgtgatctt

SEQ ID NO: 478468 - DNA, 15 bp, Homo sapiens
gcagtggtgtgatct

SEQ ID NO: 478469 - DNA, 15 bp, Homo sapiens
tgcagtggtgtgatc

SEQ ID NO: 478470 - DNA, 15 bp, Homo sapiens
gtgcagtggtgtgat

SEQ ID NO: 478471 - DNA, 15 bp, Homo sapiens
agtgcagtggtgtga

SEQ ID NO: 478472 - DNA, 15 bp, Homo sapiens
ggagtgcagtggtgt

SEQ ID NO: 478473 - DNA, 15 bp, Homo sapiens
tctctgtcgcccagg

SEQ ID NO: 478474 - DNA, 15 bp, Homo sapiens
gtctctgtcgcccag

SEQ ID NO: 478475 - DNA, 15 bp, Homo sapiens
agtctctgtcgccca

SEQ ID NO: 478476 - DNA, 15 bp, Homo sapiens
gagtctctgtcgccc

SEQ ID NO: 478477 - DNA, 15 bp, Homo sapiens
ggagtctctgtcgcc

SEQ ID NO: 478478 - DNA, 15 bp, Homo sapiens
tggagtctctgtcgc

SEQ ID NO: 478479 - DNA, 15 bp, Homo sapiens
atggagtctctgtcg

SEQ ID NO: 478480 - DNA, 15 bp, Homo sapiens
gatggagtctctgtc

SEQ ID NO: 478481 - DNA, 15 bp, Homo sapiens
agatggagtctctgt

SEQ ID NO: 478482 - DNA, 15 bp, Homo sapiens
gagatggagtctctg

SEQ ID NO: 478483 - DNA, 15 bp, Homo sapiens
tgagatggagtctct

SEQ ID NO: 478484 - DNA, 15 bp, Homo sapiens
cttttcttttttttt

SEQ ID NO: 478485 - DNA, 15 bp, Homo sapiens
tcttttctttttttt

SEQ ID NO: 478486 - DNA, 15 bp, Homo sapiens
ttcttttcttttttt

SEQ ID NO: 478487 - DNA, 15 bp, Homo sapiens
tttcttttctttttt

SEQ ID NO: 478488 - DNA, 15 bp, Homo sapiens
ttttcttttcttttt

SEQ ID NO: 478489 - DNA, 15 bp, Homo sapiens
cttttcttttctttt

SEQ ID NO: 478490 - DNA, 15 bp, Homo sapiens
tcttttcttttcttt

SEQ ID NO: 478491 - DNA, 15 bp, Homo sapiens
ctcttttcttttctt

SEQ ID NO: 478492 - DNA, 15 bp, Homo sapiens
tctcttttcttttct

SEQ ID NO: 478493 - DNA, 15 bp, Homo sapiens
ttctcttttcttttc

SEQ ID NO: 478494 - DNA, 15 bp, Homo sapiens
tttctcttttctttt

SEQ ID NO: 478495 - DNA, 15 bp, Homo sapiens
ttttctcttttcttt

SEQ ID NO: 478496 - DNA, 15 bp, Homo sapiens
attttctcttttctt

SEQ ID NO: 478497 - DNA, 15 bp, Homo sapiens
gccacattttctctt

SEQ ID NO: 478498 - DNA, 15 bp, Homo sapiens
agccacattttctct

SEQ ID NO: 478499 - DNA, 15 bp, Homo sapiens
cagccacattttctc

SEQ ID NO: 478500 - DNA, 15 bp, Homo sapiens
ccagccacattttct

SEQ ID NO: 478501 - DNA, 15 bp, Homo sapiens
cccagccacattttc

SEQ ID NO: 478502 - DNA, 15 bp, Homo sapiens
gcccagccacatttt

SEQ ID NO: 478503 - DNA, 15 bp, Homo sapiens
cgcccagccacattt

SEQ ID NO: 478504 - DNA, 15 bp, Homo sapiens
gcgcccagccacatt

SEQ ID NO: 478505 - DNA, 15 bp, Homo sapiens
cgcgcccagccacat

SEQ ID NO: 478506 - DNA, 15 bp, Homo sapiens
ccgcgcccagccaca

SEQ ID NO: 478507 - DNA, 15 bp, Homo sapiens
accgcgcccagccac

SEQ ID NO: 478508 - DNA, 15 bp, Homo sapiens
tgcccacctcagcct

SEQ ID NO: 478509 - DNA, 15 bp, Homo sapiens
ctgcccacctcagcc

SEQ ID NO: 478510 - DNA, 15 bp, Homo sapiens
tctgcccacctcagc

SEQ ID NO: 478511 - DNA, 15 bp, Homo sapiens
atctgcccacctcag

SEQ ID NO: 478512 - DNA, 15 bp, Homo sapiens
gatctgcccacctca

SEQ ID NO: 478513 - DNA, 15 bp, Homo sapiens
ggtgatctgcccacc

SEQ ID NO: 478514 - DNA, 15 bp, Homo sapiens
aggtgatctgcccac

SEQ ID NO: 478515 - DNA, 15 bp, Homo sapiens
caggtgatctgccca

SEQ ID NO: 478516 - DNA, 15 bp, Homo sapiens
tcaggtgatctgccc

SEQ ID NO: 478517 - DNA, 15 bp, Homo sapiens
tcgacctcaggtgat

SEQ ID NO: 478518 - DNA, 15 bp, Homo sapiens
ctcgacctcaggtga

SEQ ID NO: 478519 - DNA, 15 bp, Homo sapiens
tctcgacctcaggtg

SEQ ID NO: 478520 - DNA, 15 bp, Homo sapiens
ctctcgacctcaggt

SEQ ID NO: 478521 - DNA, 15 bp, Homo sapiens
actctcgacctcagg

SEQ ID NO: 478522 - DNA, 15 bp, Homo sapiens
aactctcgacctcag

SEQ ID NO: 478523 - DNA, 15 bp, Homo sapiens
gaactctcgacctca

SEQ ID NO: 478524 - DNA, 15 bp, Homo sapiens
cgaactctcgacctc

SEQ ID NO: 478525 - DNA, 15 bp, Homo sapiens
tcgaactctcgacct

SEQ ID NO: 478526 - DNA, 15 bp, Homo sapiens
ttcgaactctcgacc

SEQ ID NO: 478527 - DNA, 15 bp, Homo sapiens
tttcgaactctcgac

SEQ ID NO: 478528 - DNA, 15 bp, Homo sapiens
gtttcgaactctcga

SEQ ID NO: 478529 - DNA, 15 bp, Homo sapiens
ggtttcgaactctcg

SEQ ID NO: 478530 - DNA, 15 bp, Homo sapiens
tggtttcgaactctc

SEQ ID NO: 478531 - DNA, 15 bp, Homo sapiens
ctggtttcgaactct

SEQ ID NO: 478532 - DNA, 15 bp, Homo sapiens
gctggtttcgaactc

SEQ ID NO: 478533 - DNA, 15 bp, Homo sapiens
ggctggtttcgaact

SEQ ID NO: 478534 - DNA, 15 bp, Homo sapiens
gggctggtttcgaac

SEQ ID NO: 478535 - DNA, 15 bp, Homo sapiens
cgggctggtttcgaa

SEQ ID NO: 478536 - DNA, 15 bp, Homo sapiens
tcgggctggtttcga

SEQ ID NO: 478537 - DNA, 15 bp, Homo sapiens
gtcgggctggtttcg

SEQ ID NO: 478538 - DNA, 15 bp, Homo sapiens
ggtcgggctggtttc

SEQ ID NO: 478539 - DNA, 15 bp, Homo sapiens
tggtcgggctggttt

SEQ ID NO: 478540 - DNA, 15 bp, Homo sapiens
ttggtcgggctggtt

SEQ ID NO: 478541 - DNA, 15 bp, Homo sapiens
gttggtcgggctggt

SEQ ID NO: 478542 - DNA, 15 bp, Homo sapiens
tgttggtcgggctgg

SEQ ID NO: 478543 - DNA, 15 bp, Homo sapiens
atgttggtcgggctg

SEQ ID NO: 478544 - DNA, 15 bp, Homo sapiens
catgttggtcgggct

SEQ ID NO: 478545 - DNA, 15 bp, Homo sapiens
ccatgttggtcgggc

SEQ ID NO: 478546 - DNA, 15 bp, Homo sapiens
tccatgttggtcggg

SEQ ID NO: 478547 - DNA, 15 bp, Homo sapiens
ctccatgttggtcgg

SEQ ID NO: 478548 - DNA, 15 bp, Homo sapiens
tctccatgttggtcg

SEQ ID NO: 478549 - DNA, 15 bp, Homo sapiens
aggtttctccatgtt

SEQ ID NO: 478550 - DNA, 15 bp, Homo sapiens
aaggtttctccatgt

SEQ ID NO: 478551 - DNA, 15 bp, Homo sapiens
caaggtttctccatg

SEQ ID NO: 478552 - DNA, 15 bp, Homo sapiens
acaaggtttctccat

SEQ ID NO: 478553 - DNA, 15 bp, Homo sapiens
gacaaggtttctcca

SEQ ID NO: 478554 - DNA, 15 bp, Homo sapiens
agacaaggtttctcc

SEQ ID NO: 478555 - DNA, 15 bp, Homo sapiens
gagacaaggtttctc

SEQ ID NO: 478556 - DNA, 15 bp, Homo sapiens
agagacaaggtttct

SEQ ID NO: 478557 - DNA, 15 bp, Homo sapiens
tagagacaaggtttc

SEQ ID NO: 478558 - DNA, 15 bp, Homo sapiens
gtagagacaaggttt

SEQ ID NO: 478559 - DNA, 15 bp, Homo sapiens
agtagagacaaggtt

SEQ ID NO: 478560 - DNA, 15 bp, Homo sapiens
tagtagagacaaggt

SEQ ID NO: 478561 - DNA, 15 bp, Homo sapiens
ttagtagagacaagg

SEQ ID NO: 478562 - DNA, 15 bp, Homo sapiens
tttagtagagacaag

SEQ ID NO: 478563 - DNA, 15 bp, Homo sapiens
ttttagtagagacaa

SEQ ID NO: 478564 - DNA, 15 bp, Homo sapiens
tggctaattttgtat

SEQ ID NO: 478565 - DNA, 15 bp, Homo sapiens
ctggctaattttgta

SEQ ID NO: 478566 - DNA, 15 bp, Homo sapiens
cctggctaattttgt

SEQ ID NO: 478567 - DNA, 15 bp, Homo sapiens
acctggctaattttg

SEQ ID NO: 478568 - DNA, 15 bp, Homo sapiens
acacacctggctaat

SEQ ID NO: 478569 - DNA, 15 bp, Homo sapiens
aacacacctggctaa

SEQ ID NO: 478570 - DNA, 15 bp, Homo sapiens
caacacacctggcta

SEQ ID NO: 478571 - DNA, 15 bp, Homo sapiens
ccaacacacctggct

SEQ ID NO: 478572 - DNA, 15 bp, Homo sapiens
gccaacacacctggc

SEQ ID NO: 478573 - DNA, 15 bp, Homo sapiens
cgccaacacacctgg

SEQ ID NO: 478574 - DNA, 15 bp, Homo sapiens
gcgccaacacacctg

SEQ ID NO: 478575 - DNA, 15 bp, Homo sapiens
tgcgccaacacacct

SEQ ID NO: 478576 - DNA, 15 bp, Homo sapiens
atgcgccaacacacc

SEQ ID NO: 478577 - DNA, 15 bp, Homo sapiens
catgcgccaacacac

SEQ ID NO: 478578 - DNA, 15 bp, Homo sapiens
gcatgcgccaacaca

SEQ ID NO: 478579 - DNA, 15 bp, Homo sapiens
ggcatgcgccaacac

SEQ ID NO: 478580 - DNA, 15 bp, Homo sapiens
gggcatgcgccaaca

SEQ ID NO: 478581 - DNA, 15 bp, Homo sapiens
cgggcatgcgccaac

SEQ ID NO: 478582 - DNA, 15 bp, Homo sapiens
acgggcatgcgccaa

SEQ ID NO: 478583 - DNA, 15 bp, Homo sapiens
tacgggcatgcgcca

SEQ ID NO: 478584 - DNA, 15 bp, Homo sapiens
ttacgggcatgcgcc

SEQ ID NO: 478585 - DNA, 15 bp, Homo sapiens
attacgggcatgcgc

SEQ ID NO: 478586 - DNA, 15 bp, Homo sapiens
gattacgggcatgcg

SEQ ID NO: 478587 - DNA, 15 bp, Homo sapiens
ggattacgggcatgc

SEQ ID NO: 478588 - DNA, 15 bp, Homo sapiens
gggattacgggcatg

SEQ ID NO: 478589 - DNA, 15 bp, Homo sapiens
tgggattacgggcat

SEQ ID NO: 478590 - DNA, 15 bp, Homo sapiens
ctgggattacgggca

SEQ ID NO: 478591 - DNA, 15 bp, Homo sapiens
gctgggattacgggc

SEQ ID NO: 478592 - DNA, 15 bp, Homo sapiens
agctgggattacggg

SEQ ID NO: 478593 - DNA, 15 bp, Homo sapiens
tagctgggattacgg

SEQ ID NO: 478594 - DNA, 15 bp, Homo sapiens
gtagctgggattacg

SEQ ID NO: 478595 - DNA, 15 bp, Homo sapiens
tgtagctgggattac

SEQ ID NO: 478596 - DNA, 15 bp, Homo sapiens
gtgtagctgggatta

SEQ ID NO: 478597 - DNA, 15 bp, Homo sapiens
cgtgtagctgggatt

SEQ ID NO: 478598 - DNA, 15 bp, Homo sapiens
ccgtgtagctgggat

SEQ ID NO: 478599 - DNA, 15 bp, Homo sapiens
cccgtgtagctggga

SEQ ID NO: 478600 - DNA, 15 bp, Homo sapiens
tcccgtgtagctggg

SEQ ID NO: 478601 - DNA, 15 bp, Homo sapiens
ctcccgtgtagctgg

SEQ ID NO: 478602 - DNA, 15 bp, Homo sapiens
cctcccgtgtagctg

SEQ ID NO: 478603 - DNA, 15 bp, Homo sapiens
gcctcccgtgtagct

SEQ ID NO: 478604 - DNA, 15 bp, Homo sapiens
agcctcccgtgtagc

SEQ ID NO: 478605 - DNA, 15 bp, Homo sapiens
cagcctcccgtgtag

SEQ ID NO: 478606 - DNA, 15 bp, Homo sapiens
tcagcctcccgtgta

SEQ ID NO: 478607 - DNA, 15 bp, Homo sapiens
ctcagcctcccgtgt

SEQ ID NO: 478608 - DNA, 15 bp, Homo sapiens
cctcagcctcccgtg

SEQ ID NO: 478609 - DNA, 15 bp, Homo sapiens
gcctcagcctcccgt

SEQ ID NO: 478610 - DNA, 15 bp, Homo sapiens
acctcctgagttcaa

SEQ ID NO: 478611 - DNA, 15 bp, Homo sapiens
cacctcctgagttca

SEQ ID NO: 478612 - DNA, 15 bp, Homo sapiens
ccacctcctgagttc

SEQ ID NO: 478613 - DNA, 15 bp, Homo sapiens
tccacctcctgagtt

SEQ ID NO: 478614 - DNA, 15 bp, Homo sapiens
ctccacctcctgagt

SEQ ID NO: 478615 - DNA, 15 bp, Homo sapiens
cctccacctcctgag

SEQ ID NO: 478616 - DNA, 15 bp, Homo sapiens
acctccacctcctga

SEQ ID NO: 478617 - DNA, 15 bp, Homo sapiens
cacaacctccacctc

SEQ ID NO: 478618 - DNA, 15 bp, Homo sapiens
ccacaacctccacct

SEQ ID NO: 478619 - DNA, 15 bp, Homo sapiens
accacaacctccacc

SEQ ID NO: 478620 - DNA, 15 bp, Homo sapiens
caccacaacctccac

SEQ ID NO: 478621 - DNA, 15 bp, Homo sapiens
tcaccacaacctcca

SEQ ID NO: 478622 - DNA, 15 bp, Homo sapiens
ctcaccacaacctcc

SEQ ID NO: 478623 - DNA, 15 bp, Homo sapiens
gctcaccacaacctc

SEQ ID NO: 478624 - DNA, 15 bp, Homo sapiens
ggctcaccacaacct

SEQ ID NO: 478625 - DNA, 15 bp, Homo sapiens
cggctcaccacaacc

SEQ ID NO: 478626 - DNA, 15 bp, Homo sapiens
tcggctcaccacaac

SEQ ID NO: 478627 - DNA, 15 bp, Homo sapiens
ctcggctcaccacaa

SEQ ID NO: 478628 - DNA, 15 bp, Homo sapiens
tctcggctcaccaca

SEQ ID NO: 478629 - DNA, 15 bp, Homo sapiens
atctcggctcaccac

SEQ ID NO: 478630 - DNA, 15 bp, Homo sapiens
gatctcggctcacca

SEQ ID NO: 478631 - DNA, 15 bp, Homo sapiens
tgatctcggctcacc

SEQ ID NO: 478632 - DNA, 15 bp, Homo sapiens
gtgatctcggctcac

SEQ ID NO: 478633 - DNA, 15 bp, Homo sapiens
tgtgatctcggctca

SEQ ID NO: 478634 - DNA, 15 bp, Homo sapiens
gtgtgatctcggctc

SEQ ID NO: 478635 - DNA, 15 bp, Homo sapiens
ggtgtgatctcggct

SEQ ID NO: 478636 - DNA, 15 bp, Homo sapiens
tggtgtgatctcggc

SEQ ID NO: 478637 - DNA, 15 bp, Homo sapiens
atggtgtgatctcgg

SEQ ID NO: 478638 - DNA, 15 bp, Homo sapiens
aatggtgtgatctcg

SEQ ID NO: 478639 - DNA, 15 bp, Homo sapiens
caatggtgtgatctc

SEQ ID NO: 478640 - DNA, 15 bp, Homo sapiens
gcaatggtgtgatct

SEQ ID NO: 478641 - DNA, 15 bp, Homo sapiens
tgcaatggtgtgatc

SEQ ID NO: 478642 - DNA, 15 bp, Homo sapiens
gtgcaatggtgtgat

SEQ ID NO: 478643 - DNA, 15 bp, Homo sapiens
agtgcaatggtgtga

SEQ ID NO: 478644 - DNA, 15 bp, Homo sapiens
gagtgcaatggtgtg

SEQ ID NO: 478645 - DNA, 15 bp, Homo sapiens
ggagtgcaatggtgt

SEQ ID NO: 478646 - DNA, 15 bp, Homo sapiens
cttgttgcccaggct

SEQ ID NO: 478647 - DNA, 15 bp, Homo sapiens
tcttgttgcccaggc

SEQ ID NO: 478648 - DNA, 15 bp, Homo sapiens
ctcttgttgcccagg

SEQ ID NO: 478649 - DNA, 15 bp, Homo sapiens
gctcttgttgcccag

SEQ ID NO: 478650 - DNA, 15 bp, Homo sapiens
cgctcttgttgccca

SEQ ID NO: 478651 - DNA, 15 bp, Homo sapiens
tcgctcttgttgccc

SEQ ID NO: 478652 - DNA, 15 bp, Homo sapiens
ttcgctcttgttgcc

SEQ ID NO: 478653 - DNA, 15 bp, Homo sapiens
tttcgctcttgttgc

SEQ ID NO: 478654 - DNA, 15 bp, Homo sapiens
gtttcgctcttgttg

SEQ ID NO: 478655 - DNA, 15 bp, Homo sapiens
agtttcgctcttgtt

SEQ ID NO: 478656 - DNA, 15 bp, Homo sapiens
tagtttcgctcttgt

SEQ ID NO: 478657 - DNA, 15 bp, Homo sapiens
atagtttcgctcttg

SEQ ID NO: 478658 - DNA, 15 bp, Homo sapiens
gatagtttcgctctt

SEQ ID NO: 478659 - DNA, 15 bp, Homo sapiens
agatagtttcgctct

SEQ ID NO: 478660 - DNA, 15 bp, Homo sapiens
gagatagtttcgctc

SEQ ID NO: 478661 - DNA, 15 bp, Homo sapiens
tgagatagtttcgct

SEQ ID NO: 478662 - DNA, 15 bp, Homo sapiens
ttgagatagtttcgc

SEQ ID NO: 478663 - DNA, 15 bp, Homo sapiens
tttgagatagtttcg

SEQ ID NO: 478664 - DNA, 15 bp, Homo sapiens
ttttgagatagtttc

SEQ ID NO: 478665 - DNA, 15 bp, Homo sapiens
tttttgagatagttt

SEQ ID NO: 478666 - DNA, 15 bp, Homo sapiens
ttttttgagatagtt

SEQ ID NO: 478667 - DNA, 15 bp, Homo sapiens
tttttttgagatagt

SEQ ID NO: 478668 - DNA, 15 bp, Homo sapiens
cttttttcttttttt

SEQ ID NO: 478669 - DNA, 15 bp, Homo sapiens
tcttttttctttttt

SEQ ID NO: 478670 - DNA, 15 bp, Homo sapiens
ttcttttttcttttt

SEQ ID NO: 478671 - DNA, 15 bp, Homo sapiens
tttcttttttctttt

SEQ ID NO: 478672 - DNA, 15 bp, Homo sapiens
ttttcttttttcttt

SEQ ID NO: 478673 - DNA, 15 bp, Homo sapiens
cttttcttttttctt

SEQ ID NO: 478674 - DNA, 15 bp, Homo sapiens
tcttttcttttttct

SEQ ID NO: 478675 - DNA, 15 bp, Homo sapiens
atcttttcttttttc

SEQ ID NO: 478676 - DNA, 15 bp, Homo sapiens
tatcttttctttttt

SEQ ID NO: 478677 - DNA, 15 bp, Homo sapiens
ttatcttttcttttt

SEQ ID NO: 478678 - DNA, 15 bp, Homo sapiens
tttatcttttctttt

SEQ ID NO: 478679 - DNA, 15 bp, Homo sapiens
ttttatcttttcttt

SEQ ID NO: 478680 - DNA, 15 bp, Homo sapiens
attttatcttttctt

SEQ ID NO: 478681 - DNA, 15 bp, Homo sapiens
cattttatcttttct

SEQ ID NO: 478682 - DNA, 15 bp, Homo sapiens
gcattttatcttttc

SEQ ID NO: 478683 - DNA, 15 bp, Homo sapiens
tgcattttatctttt

SEQ ID NO: 478684 - DNA, 15 bp, Homo sapiens
atgcattttatcttt

SEQ ID NO: 478685 - DNA, 15 bp, Homo sapiens
aatgcattttatctt

SEQ ID NO: 478686 - DNA, 15 bp, Homo sapiens
gaatgcattttatct

SEQ ID NO: 478687 - DNA, 15 bp, Homo sapiens
agaatgcattttatc

SEQ ID NO: 478688 - DNA, 15 bp, Homo sapiens
aagaatgcattttat

SEQ ID NO: 478689 - DNA, 15 bp, Homo sapiens
taagaatgcatttta

SEQ ID NO: 478690 - DNA, 15 bp, Homo sapiens
ataagaatgcatttt

SEQ ID NO: 478691 - DNA, 15 bp, Homo sapiens
aataagaatgcattt

SEQ ID NO: 478692 - DNA, 15 bp, Homo sapiens
aaataagaatgcatt

SEQ ID NO: 478693 - DNA, 15 bp, Homo sapiens
aaaataagaatgcat

SEQ ID NO: 478694 - DNA, 15 bp, Homo sapiens
aaaaataagaatgca

SEQ ID NO: 478695 - DNA, 15 bp, Homo sapiens
taaaaataagaatgc

SEQ ID NO: 478696 - DNA, 15 bp, Homo sapiens
ctaaaaataagaatg

SEQ ID NO: 478697 - DNA, 15 bp, Homo sapiens
actaaaaataagaat

SEQ ID NO: 478698 - DNA, 15 bp, Homo sapiens
aactaaaaataagaa

SEQ ID NO: 478699 - DNA, 15 bp, Homo sapiens
caactaaaaataaga

SEQ ID NO: 478700 - DNA, 15 bp, Homo sapiens
tcaactaaaaataag

SEQ ID NO: 478701 - DNA, 15 bp, Homo sapiens
atcaactaaaaataa

SEQ ID NO: 478702 - DNA, 15 bp, Homo sapiens
catcaactaaaaata

SEQ ID NO: 478703 - DNA, 15 bp, Homo sapiens
acatcaactaaaaat

SEQ ID NO: 478704 - DNA, 15 bp, Homo sapiens
tacatcaactaaaaa

SEQ ID NO: 478705 - DNA, 15 bp, Homo sapiens
ttacatcaactaaaa

SEQ ID NO: 478706 - DNA, 15 bp, Homo sapiens
attacatcaactaaa

SEQ ID NO: 478707 - DNA, 15 bp, Homo sapiens
aattacatcaactaa

SEQ ID NO: 478708 - DNA, 15 bp, Homo sapiens
taattacatcaacta

SEQ ID NO: 478709 - DNA, 15 bp, Homo sapiens
ataattacatcaact

SEQ ID NO: 478710 - DNA, 15 bp, Homo sapiens
cataattacatcaac

SEQ ID NO: 478711 - DNA, 15 bp, Homo sapiens
acataattacatcaa

SEQ ID NO: 478712 - DNA, 15 bp, Homo sapiens
cacataattacatca

SEQ ID NO: 478713 - DNA, 15 bp, Homo sapiens
ccacataattacatc

SEQ ID NO: 478714 - DNA, 15 bp, Homo sapiens
tccacataattacat

SEQ ID NO: 478715 - DNA, 15 bp, Homo sapiens
ttccacataattaca

SEQ ID NO: 478716 - DNA, 15 bp, Homo sapiens
tttccacataattac

SEQ ID NO: 478717 - DNA, 15 bp, Homo sapiens
atttccacataatta

SEQ ID NO: 478718 - DNA, 15 bp, Homo sapiens
aatttccacataatt

SEQ ID NO: 478719 - DNA, 15 bp, Homo sapiens
aaatttccacataat

SEQ ID NO: 478720 - DNA, 15 bp, Homo sapiens
gaaatttccacataa

SEQ ID NO: 478721 - DNA, 15 bp, Homo sapiens
tgaaatttccacata

SEQ ID NO: 478722 - DNA, 15 bp, Homo sapiens
atgaaatttccacat

SEQ ID NO: 478723 - DNA, 15 bp, Homo sapiens
catgaaatttccaca

SEQ ID NO: 478724 - DNA, 15 bp, Homo sapiens
tcatgaaatttccac

SEQ ID NO: 478725 - DNA, 15 bp, Homo sapiens
ctcatgaaatttcca

SEQ ID NO: 478726 - DNA, 15 bp, Homo sapiens
cctcatgaaatttcc

SEQ ID NO: 478727 - DNA, 15 bp, Homo sapiens
tcctcatgaaatttc

SEQ ID NO: 478728 - DNA, 15 bp, Homo sapiens
atcctcatgaaattt

SEQ ID NO: 478729 - DNA, 15 bp, Homo sapiens
catcctcatgaaatt

SEQ ID NO: 478730 - DNA, 15 bp, Homo sapiens
gcatcctcatgaaat

SEQ ID NO: 478731 - DNA, 15 bp, Homo sapiens
tgcatcctcatgaaa

SEQ ID NO: 478732 - DNA, 15 bp, Homo sapiens
gtgcatcctcatgaa

SEQ ID NO: 478733 - DNA, 15 bp, Homo sapiens
agtgcatcctcatga

SEQ ID NO: 478734 - DNA, 15 bp, Homo sapiens
cagtgcatcctcatg

SEQ ID NO: 478735 - DNA, 15 bp, Homo sapiens
ccagtgcatcctcat

SEQ ID NO: 478736 - DNA, 15 bp, Homo sapiens
tccagtgcatcctca

SEQ ID NO: 478737 - DNA, 15 bp, Homo sapiens
ttccagtgcatcctc

SEQ ID NO: 478738 - DNA, 15 bp, Homo sapiens
tttccagtgcatcct

SEQ ID NO: 478739 - DNA, 15 bp, Homo sapiens
ttttccagtgcatcc

SEQ ID NO: 478740 - DNA, 15 bp, Homo sapiens
attttccagtgcatc

SEQ ID NO: 478741 - DNA, 15 bp, Homo sapiens
tattttccagtgcat

SEQ ID NO: 478742 - DNA, 15 bp, Homo sapiens
ttattttccagtgca

SEQ ID NO: 478743 - DNA, 15 bp, Homo sapiens
attattttccagtgc

SEQ ID NO: 478744 - DNA, 15 bp, Homo sapiens
cattattttccagtg

SEQ ID NO: 478745 - DNA, 15 bp, Homo sapiens
tcattattttccagt

SEQ ID NO: 478746 - DNA, 15 bp, Homo sapiens
ttcattattttccag

SEQ ID NO: 478747 - DNA, 15 bp, Homo sapiens
tttcattattttcca

SEQ ID NO: 478748 - DNA, 15 bp, Homo sapiens
atttcattattttcc

SEQ ID NO: 478749 - DNA, 15 bp, Homo sapiens
tatttcattattttc

SEQ ID NO: 478750 - DNA, 15 bp, Homo sapiens
ttatttcattatttt

SEQ ID NO: 478751 - DNA, 15 bp, Homo sapiens
cttatttcattattt

SEQ ID NO: 478752 - DNA, 15 bp, Homo sapiens
ccttatttcattatt

SEQ ID NO: 478753 - DNA, 15 bp, Homo sapiens
cccttatttcattat

SEQ ID NO: 478754 - DNA, 15 bp, Homo sapiens
tcccttatttcatta

SEQ ID NO: 478755 - DNA, 15 bp, Homo sapiens
ctcccttatttcatt

SEQ ID NO: 478756 - DNA, 15 bp, Homo sapiens
actcccttatttcat

SEQ ID NO: 478757 - DNA, 15 bp, Homo sapiens
aactcccttatttca

SEQ ID NO: 478758 - DNA, 15 bp, Homo sapiens
caactcccttatttc

SEQ ID NO: 478759 - DNA, 15 bp, Homo sapiens
tcaactcccttattt

SEQ ID NO: 478760 - DNA, 15 bp, Homo sapiens
gtcaactcccttatt

SEQ ID NO: 478761 - DNA, 15 bp, Homo sapiens
cgtcaactcccttat

SEQ ID NO: 478762 - DNA, 15 bp, Homo sapiens
tcgtcaactccctta

SEQ ID NO: 478763 - DNA, 15 bp, Homo sapiens
ttcgtcaactccctt

SEQ ID NO: 478764 - DNA, 15 bp, Homo sapiens
cttcgtcaactccct

SEQ ID NO: 478765 - DNA, 15 bp, Homo sapiens
ccttcgtcaactccc

SEQ ID NO: 478766 - DNA, 15 bp, Homo sapiens
accttcgtcaactcc

SEQ ID NO: 478767 - DNA, 15 bp, Homo sapiens
caccttcgtcaactc

SEQ ID NO: 478768 - DNA, 15 bp, Homo sapiens
ccaccttcgtcaact

SEQ ID NO: 478769 - DNA, 15 bp, Homo sapiens
accaccttcgtcaac

SEQ ID NO: 478770 - DNA, 15 bp, Homo sapiens
taccaccttcgtcaa

SEQ ID NO: 478771 - DNA, 15 bp, Homo sapiens
ctaccaccttcgtca

SEQ ID NO: 478772 - DNA, 15 bp, Homo sapiens
cctaccaccttcgtc

SEQ ID NO: 478773 - DNA, 15 bp, Homo sapiens
acctaccaccttcgt

SEQ ID NO: 478774 - DNA, 15 bp, Homo sapiens
aacctaccaccttcg

SEQ ID NO: 478775 - DNA, 15 bp, Homo sapiens
aaacctaccaccttc

SEQ ID NO: 478776 - DNA, 15 bp, Homo sapiens
taaacctaccacctt

SEQ ID NO: 478777 - DNA, 15 bp, Homo sapiens
ttaaacctaccacct

SEQ ID NO: 478778 - DNA, 15 bp, Homo sapiens
attaaacctaccacc

SEQ ID NO: 478779 - DNA, 15 bp, Homo sapiens
tattaaacctaccac

SEQ ID NO: 478780 - DNA, 15 bp, Homo sapiens
ttattaaacctacca

SEQ ID NO: 478781 - DNA, 15 bp, Homo sapiens
cttattaaacctacc

SEQ ID NO: 478782 - DNA, 15 bp, Homo sapiens
acttattaaacctac

SEQ ID NO: 478783 - DNA, 15 bp, Homo sapiens
tacttattaaaccta

SEQ ID NO: 478784 - DNA, 15 bp, Homo sapiens
gtacttattaaacct

SEQ ID NO: 478785 - DNA, 15 bp, Homo sapiens
tgtacttattaaacc

SEQ ID NO: 478786 - DNA, 15 bp, Homo sapiens
atgtacttattaaac

SEQ ID NO: 478787 - DNA, 15 bp, Homo sapiens
tatgtacttattaaa

SEQ ID NO: 478788 - DNA, 15 bp, Homo sapiens
atatgtacttattaa

SEQ ID NO: 478789 - DNA, 15 bp, Homo sapiens
catatgtacttatta

SEQ ID NO: 478790 - DNA, 15 bp, Homo sapiens
gcatatgtacttatt

SEQ ID NO: 478791 - DNA, 15 bp, Homo sapiens
tgcatatgtacttat

SEQ ID NO: 478792 - DNA, 15 bp, Homo sapiens
ttgcatatgtactta

SEQ ID NO: 478793 - DNA, 15 bp, Homo sapiens
attgcatatgtactt

SEQ ID NO: 478794 - DNA, 15 bp, Homo sapiens
tattgcatatgtact

SEQ ID NO: 478795 - DNA, 15 bp, Homo sapiens
atattgcatatgtac

SEQ ID NO: 478796 - DNA, 15 bp, Homo sapiens
catattgcatatgta

SEQ ID NO: 478797 - DNA, 15 bp, Homo sapiens
tcatattgcatatgt

SEQ ID NO: 478798 - DNA, 15 bp, Homo sapiens
ttcatattgcatatg

SEQ ID NO: 478799 - DNA, 15 bp, Homo sapiens
tttcatattgcatat

SEQ ID NO: 478800 - DNA, 15 bp, Homo sapiens
gtttcatattgcata

SEQ ID NO: 478801 - DNA, 15 bp, Homo sapiens
tgtttcatattgcat

SEQ ID NO: 478802 - DNA, 15 bp, Homo sapiens
atgtttcatattgca

SEQ ID NO: 478803 - DNA, 15 bp, Homo sapiens
tatgtttcatattgc

SEQ ID NO: 478804 - DNA, 15 bp, Homo sapiens
ctatgtttcatattg

SEQ ID NO: 478805 - DNA, 15 bp, Homo sapiens
cctatgtttcatatt

SEQ ID NO: 478806 - DNA, 15 bp, Homo sapiens
acctatgtttcatat

SEQ ID NO: 478807 - DNA, 15 bp, Homo sapiens
aacctatgtttcata

SEQ ID NO: 478808 - DNA, 15 bp, Homo sapiens
gaacctatgtttcat

SEQ ID NO: 478809 - DNA, 15 bp, Homo sapiens
ggaacctatgtttca

SEQ ID NO: 478810 - DNA, 15 bp, Homo sapiens
gggaacctatgtttc

SEQ ID NO: 478811 - DNA, 15 bp, Homo sapiens
ggggaacctatgttt

SEQ ID NO: 478812 - DNA, 15 bp, Homo sapiens
aggggaacctatgtt

SEQ ID NO: 478813 - DNA, 15 bp, Homo sapiens
aaggggaacctatgt

SEQ ID NO: 478814 - DNA, 15 bp, Homo sapiens
gaaggggaacctatg

SEQ ID NO: 478815 - DNA, 15 bp, Homo sapiens
ggaaggggaacctat

SEQ ID NO: 478816 - DNA, 15 bp, Homo sapiens
aggaaggggaaccta

SEQ ID NO: 478817 - DNA, 15 bp, Homo sapiens
taggaaggggaacct

SEQ ID NO: 478818 - DNA, 15 bp, Homo sapiens
ataggaaggggaacc

SEQ ID NO: 478819 - DNA, 15 bp, Homo sapiens
cataggaaggggaac

SEQ ID NO: 478820 - DNA, 15 bp, Homo sapiens
ccataggaaggggaa

SEQ ID NO: 478821 - DNA, 15 bp, Homo sapiens
cccataggaagggga

SEQ ID NO: 478822 - DNA, 15 bp, Homo sapiens
ccccataggaagggg

SEQ ID NO: 478823 - DNA, 15 bp, Homo sapiens
tccccataggaaggg

SEQ ID NO: 478824 - DNA, 15 bp, Homo sapiens
ctccccataggaagg

SEQ ID NO: 478825 - DNA, 15 bp, Homo sapiens
cctccccataggaag

SEQ ID NO: 478826 - DNA, 15 bp, Homo sapiens
gcctccccataggaa

SEQ ID NO: 478827 - DNA, 15 bp, Homo sapiens
tgcctccccatagga

SEQ ID NO: 478828 - DNA, 15 bp, Homo sapiens
ttgcctccccatagg

SEQ ID NO: 478829 - DNA, 15 bp, Homo sapiens
gttgcctccccatag

SEQ ID NO: 478830 - DNA, 15 bp, Homo sapiens
ggttgcctccccata

SEQ ID NO: 478831 - DNA, 15 bp, Homo sapiens
tggttgcctccccat

SEQ ID NO: 478832 - DNA, 15 bp, Homo sapiens
ttggttgcctcccca

SEQ ID NO: 478833 - DNA, 15 bp, Homo sapiens
gttggttgcctcccc

SEQ ID NO: 478834 - DNA, 15 bp, Homo sapiens
agttggttgcctccc

SEQ ID NO: 478835 - DNA, 15 bp, Homo sapiens
cagttggttgcctcc

SEQ ID NO: 478836 - DNA, 15 bp, Homo sapiens
acagttggttgcctc

SEQ ID NO: 478837 - DNA, 15 bp, Homo sapiens
cacagttggttgcct

SEQ ID NO: 478838 - DNA, 15 bp, Homo sapiens
gcacagttggttgcc

SEQ ID NO: 478839 - DNA, 15 bp, Homo sapiens
ggcacagttggttgc

SEQ ID NO: 478840 - DNA, 15 bp, Homo sapiens
aggcacagttggttg

SEQ ID NO: 478841 - DNA, 15 bp, Homo sapiens
caggcacagttggtt

SEQ ID NO: 478842 - DNA, 15 bp, Homo sapiens
gcaggcacagttggt

SEQ ID NO: 478843 - DNA, 15 bp, Homo sapiens
agcaggcacagttgg

SEQ ID NO: 478844 - DNA, 15 bp, Homo sapiens
tagcaggcacagttg

SEQ ID NO: 478845 - DNA, 15 bp, Homo sapiens
gtagcaggcacagtt

SEQ ID NO: 478846 - DNA, 15 bp, Homo sapiens
cgtagcaggcacagt

SEQ ID NO: 478847 - DNA, 15 bp, Homo sapiens
gcgtagcaggcacag

SEQ ID NO: 478848 - DNA, 15 bp, Homo sapiens
tgcgtagcaggcaca

SEQ ID NO: 478849 - DNA, 15 bp, Homo sapiens
ctgcgtagcaggcac

SEQ ID NO: 478850 - DNA, 15 bp, Homo sapiens
tctgcgtagcaggca

SEQ ID NO: 478851 - DNA, 15 bp, Homo sapiens
ctctgcgtagcaggc

SEQ ID NO: 478852 - DNA, 15 bp, Homo sapiens
cctctgcgtagcagg

SEQ ID NO: 478853 - DNA, 15 bp, Homo sapiens
acctctgcgtagcag

SEQ ID NO: 478854 - DNA, 15 bp, Homo sapiens
cacctctgcgtagca

SEQ ID NO: 478855 - DNA, 15 bp, Homo sapiens
acacctctgcgtagc

SEQ ID NO: 478856 - DNA, 15 bp, Homo sapiens
aacacctctgcgtag

SEQ ID NO: 478857 - DNA, 15 bp, Homo sapiens
taacacctctgcgta

SEQ ID NO: 478858 - DNA, 15 bp, Homo sapiens
ataacacctctgcgt

SEQ ID NO: 478859 - DNA, 15 bp, Homo sapiens
cataacacctctgcg

SEQ ID NO: 478860 - DNA, 15 bp, Homo sapiens
acataacacctctgc

SEQ ID NO: 478861 - DNA, 15 bp, Homo sapiens
aacataacacctctg

SEQ ID NO: 478862 - DNA, 15 bp, Homo sapiens
caacataacacctct

SEQ ID NO: 478863 - DNA, 15 bp, Homo sapiens
gcaacataacacctc

SEQ ID NO: 478864 - DNA, 15 bp, Homo sapiens
cgcaacataacacct

SEQ ID NO: 478865 - DNA, 15 bp, Homo sapiens
gcgcaacataacacc

SEQ ID NO: 478866 - DNA, 15 bp, Homo sapiens
agcgcaacataacac

SEQ ID NO: 478867 - DNA, 15 bp, Homo sapiens
cagcgcaacataaca

SEQ ID NO: 478868 - DNA, 15 bp, Homo sapiens
tcagcgcaacataac

SEQ ID NO: 478869 - DNA, 15 bp, Homo sapiens
atcagcgcaacataa

SEQ ID NO: 478870 - DNA, 15 bp, Homo sapiens
gatcagcgcaacata

SEQ ID NO: 478871 - DNA, 15 bp, Homo sapiens
tgatcagcgcaacat

SEQ ID NO: 478872 - DNA, 15 bp, Homo sapiens
ttgatcagcgcaaca

SEQ ID NO: 478873 - DNA, 15 bp, Homo sapiens
gttgatcagcgcaac

SEQ ID NO: 478874 - DNA, 15 bp, Homo sapiens
agttgatcagcgcaa

SEQ ID NO: 478875 - DNA, 15 bp, Homo sapiens
cagttgatcagcgca

SEQ ID NO: 478876 - DNA, 15 bp, Homo sapiens
acagttgatcagcgc

SEQ ID NO: 478877 - DNA, 15 bp, Homo sapiens
tacagttgatcagcg

SEQ ID NO: 478878 - DNA, 15 bp, Homo sapiens
ttacagttgatcagc

SEQ ID NO: 478879 - DNA, 15 bp, Homo sapiens
gttacagttgatcag

SEQ ID NO: 478880 - DNA, 15 bp, Homo sapiens
agttacagttgatca

SEQ ID NO: 478881 - DNA, 15 bp, Homo sapiens
cagttacagttgatc

SEQ ID NO: 478882 - DNA, 15 bp, Homo sapiens
tcagttacagttgat

SEQ ID NO: 478883 - DNA, 15 bp, Homo sapiens
ttcagttacagttga

SEQ ID NO: 478884 - DNA, 15 bp, Homo sapiens
attcagttacagttg

SEQ ID NO: 478885 - DNA, 15 bp, Homo sapiens
tattcagttacagtt

SEQ ID NO: 478886 - DNA, 15 bp, Homo sapiens
ctattcagttacagt

SEQ ID NO: 478887 - DNA, 15 bp, Homo sapiens
actattcagttacag

SEQ ID NO: 478888 - DNA, 15 bp, Homo sapiens
aactattcagttaca

SEQ ID NO: 478889 - DNA, 15 bp, Homo sapiens
aaactattcagttac

SEQ ID NO: 478890 - DNA, 15 bp, Homo sapiens
taaactattcagtta

SEQ ID NO: 478891 - DNA, 15 bp, Homo sapiens
ttaaactattcagtt

SEQ ID NO: 478892 - DNA, 15 bp, Homo sapiens
tttaaactattcagt

SEQ ID NO: 478893 - DNA, 15 bp, Homo sapiens
ctttaaactattcag

SEQ ID NO: 478894 - DNA, 15 bp, Homo sapiens
tctttaaactattca

SEQ ID NO: 478895 - DNA, 15 bp, Homo sapiens
ttctttaaactattc

SEQ ID NO: 478896 - DNA, 15 bp, Homo sapiens
tttctttaaactatt

SEQ ID NO: 478897 - DNA, 15 bp, Homo sapiens
atttctttaaactat

SEQ ID NO: 478898 - DNA, 15 bp, Homo sapiens
catttctttaaacta

SEQ ID NO: 478899 - DNA, 15 bp, Homo sapiens
gcatttctttaaact

SEQ ID NO: 478900 - DNA, 15 bp, Homo sapiens
ggcatttctttaaac

SEQ ID NO: 478901 - DNA, 15 bp, Homo sapiens
gggcatttctttaaa

SEQ ID NO: 478902 - DNA, 15 bp, Homo sapiens
tgggcatttctttaa

SEQ ID NO: 478903 - DNA, 15 bp, Homo sapiens
ctgggcatttcttta

SEQ ID NO: 478904 - DNA, 15 bp, Homo sapiens
cctgggcatttcttt

SEQ ID NO: 478905 - DNA, 15 bp, Homo sapiens
tcctgggcatttctt

SEQ ID NO: 478906 - DNA, 15 bp, Homo sapiens
ctcctgggcatttct

SEQ ID NO: 478907 - DNA, 15 bp, Homo sapiens
gctcctgggcatttc

SEQ ID NO: 478908 - DNA, 15 bp, Homo sapiens
tgctcctgggcattt

SEQ ID NO: 478909 - DNA, 15 bp, Homo sapiens
gtgctcctgggcatt

SEQ ID NO: 478910 - DNA, 15 bp, Homo sapiens
tgtgctcctgggcat

SEQ ID NO: 478911 - DNA, 15 bp, Homo sapiens
ctgtgctcctgggca

SEQ ID NO: 478912 - DNA, 15 bp, Homo sapiens
tctgtgctcctgggc

SEQ ID NO: 478913 - DNA, 15 bp, Homo sapiens
ctctgtgctcctggg

SEQ ID NO: 478914 - DNA, 15 bp, Homo sapiens
cctctgtgctcctgg

SEQ ID NO: 478915 - DNA, 15 bp, Homo sapiens
acctctgtgctcctg

SEQ ID NO: 478916 - DNA, 15 bp, Homo sapiens
aacctctgtgctcct

SEQ ID NO: 478917 - DNA, 15 bp, Homo sapiens
aaacctctgtgctcc

SEQ ID NO: 478918 - DNA, 15 bp, Homo sapiens
aaaacctctgtgctc

SEQ ID NO: 478919 - DNA, 15 bp, Homo sapiens
aaaaacctctgtgct

SEQ ID NO: 478920 - DNA, 15 bp, Homo sapiens
aaaaaacctctgtgc

SEQ ID NO: 478921 - DNA, 15 bp, Homo sapiens
gaaaaaacctctgtg

SEQ ID NO: 478922 - DNA, 15 bp, Homo sapiens
tgaaaaaacctctgt

SEQ ID NO: 478923 - DNA, 15 bp, Homo sapiens
atgaaaaaacctctg

SEQ ID NO: 478924 - DNA, 15 bp, Homo sapiens
catgaaaaaacctct

SEQ ID NO: 478925 - DNA, 15 bp, Homo sapiens
tcatgaaaaaacctc

SEQ ID NO: 478926 - DNA, 15 bp, Homo sapiens
gtcatgaaaaaacct

SEQ ID NO: 478927 - DNA, 15 bp, Homo sapiens
tgtcatgaaaaaacc

SEQ ID NO: 478928 - DNA, 15 bp, Homo sapiens
ctgtcatgaaaaaac

SEQ ID NO: 478929 - DNA, 15 bp, Homo sapiens
actgtcatgaaaaaa

SEQ ID NO: 478930 - DNA, 15 bp, Homo sapiens
tactgtcatgaaaaa

SEQ ID NO: 478931 - DNA, 15 bp, Homo sapiens
ttactgtcatgaaaa

SEQ ID NO: 478932 - DNA, 15 bp, Homo sapiens
tttactgtcatgaaa

SEQ ID NO: 478933 - DNA, 15 bp, Homo sapiens
atttactgtcatgaa

SEQ ID NO: 478934 - DNA, 15 bp, Homo sapiens
tatttactgtcatga

SEQ ID NO: 478935 - DNA, 15 bp, Homo sapiens
ttatttactgtcatg

SEQ ID NO: 478936 - DNA, 15 bp, Homo sapiens
gttatttactgtcat

SEQ ID NO: 478937 - DNA, 15 bp, Homo sapiens
tgttatttactgtca

SEQ ID NO: 478938 - DNA, 15 bp, Homo sapiens
ctgttatttactgtc

SEQ ID NO: 478939 - DNA, 15 bp, Homo sapiens
cctgttatttactgt

SEQ ID NO: 478940 - DNA, 15 bp, Homo sapiens
acctgttatttactg

SEQ ID NO: 478941 - DNA, 15 bp, Homo sapiens
cacctgttatttact

SEQ ID NO: 478942 - DNA, 15 bp, Homo sapiens
ccacctgttatttac

SEQ ID NO: 478943 - DNA, 15 bp, Homo sapiens
accacctgttattta

SEQ ID NO: 478944 - DNA, 15 bp, Homo sapiens
gaccacctgttattt

SEQ ID NO: 478945 - DNA, 15 bp, Homo sapiens
tgaccacctgttatt

SEQ ID NO: 478946 - DNA, 15 bp, Homo sapiens
ttgaccacctgttat

SEQ ID NO: 478947 - DNA, 15 bp, Homo sapiens
tttgaccacctgtta

SEQ ID NO: 478948 - DNA, 15 bp, Homo sapiens
ctttgaccacctgtt

SEQ ID NO: 478949 - DNA, 15 bp, Homo sapiens
actttgaccacctgt

SEQ ID NO: 478950 - DNA, 15 bp, Homo sapiens
tactttgaccacctg

SEQ ID NO: 478951 - DNA, 15 bp, Homo sapiens
ctactttgaccacct

SEQ ID NO: 478952 - DNA, 15 bp, Homo sapiens
cctactttgaccacc

SEQ ID NO: 478953 - DNA, 15 bp, Homo sapiens
gcctactttgaccac

SEQ ID NO: 478954 - DNA, 15 bp, Homo sapiens
agcctactttgacca

SEQ ID NO: 478955 - DNA, 15 bp, Homo sapiens
aagcctactttgacc

SEQ ID NO: 478956 - DNA, 15 bp, Homo sapiens
aaagcctactttgac

SEQ ID NO: 478957 - DNA, 15 bp, Homo sapiens
aaaagcctactttga

SEQ ID NO: 478958 - DNA, 15 bp, Homo sapiens
aaaaagcctactttg

SEQ ID NO: 478959 - DNA, 15 bp, Homo sapiens
caaaaagcctacttt

SEQ ID NO: 478960 - DNA, 15 bp, Homo sapiens
tcaaaaagcctactt

SEQ ID NO: 478961 - DNA, 15 bp, Homo sapiens
ttcaaaaagcctact

SEQ ID NO: 478962 - DNA, 15 bp, Homo sapiens
cttcaaaaagcctac

SEQ ID NO: 478963 - DNA, 15 bp, Homo sapiens
tcttcaaaaagccta

SEQ ID NO: 478964 - DNA, 15 bp, Homo sapiens
ttcttcaaaaagcct

SEQ ID NO: 478965 - DNA, 15 bp, Homo sapiens
tttcttcaaaaagcc

SEQ ID NO: 478966 - DNA, 15 bp, Homo sapiens
gtttcttcaaaaagc

SEQ ID NO: 478967 - DNA, 15 bp, Homo sapiens
tgtttcttcaaaaag

SEQ ID NO: 478968 - DNA, 15 bp, Homo sapiens
gtgtttcttcaaaaa

SEQ ID NO: 478969 - DNA, 15 bp, Homo sapiens
tgtgtttcttcaaaa

SEQ ID NO: 478970 - DNA, 15 bp, Homo sapiens
ctgtgtttcttcaaa

SEQ ID NO: 478971 - DNA, 15 bp, Homo sapiens
tctgtgtttcttcaa

SEQ ID NO: 478972 - DNA, 15 bp, Homo sapiens
ctctgtgtttcttca

SEQ ID NO: 478973 - DNA, 15 bp, Homo sapiens
gctctgtgtttcttc

SEQ ID NO: 478974 - DNA, 15 bp, Homo sapiens
ggctctgtgtttctt

SEQ ID NO: 478975 - DNA, 15 bp, Homo sapiens
aggctctgtgtttct

SEQ ID NO: 478976 - DNA, 15 bp, Homo sapiens
taggctctgtgtttc

SEQ ID NO: 478977 - DNA, 15 bp, Homo sapiens
ataggctctgtgttt

SEQ ID NO: 478978 - DNA, 15 bp, Homo sapiens
aataggctctgtgtt

SEQ ID NO: 478979 - DNA, 15 bp, Homo sapiens
aaataggctctgtgt

SEQ ID NO: 478980 - DNA, 15 bp, Homo sapiens
aaaataggctctgtg

SEQ ID NO: 478981 - DNA, 15 bp, Homo sapiens
taaaataggctctgt

SEQ ID NO: 478982 - DNA, 15 bp, Homo sapiens
ataaaataggctctg

SEQ ID NO: 478983 - DNA, 15 bp, Homo sapiens
aataaaataggctct

SEQ ID NO: 478984 - DNA, 15 bp, Homo sapiens
taataaaataggctc

SEQ ID NO: 478985 - DNA, 15 bp, Homo sapiens
ttaataaaataggct

SEQ ID NO: 478986 - DNA, 15 bp, Homo sapiens
gttaataaaataggc

SEQ ID NO: 478987 - DNA, 15 bp, Homo sapiens
tgttaataaaatagg

SEQ ID NO: 478988 - DNA, 15 bp, Homo sapiens
ttgttaataaaatag

SEQ ID NO: 478989 - DNA, 15 bp, Homo sapiens
gttgttaataaaata

SEQ ID NO: 478990 - DNA, 15 bp, Homo sapiens
tgttgttaataaaat

SEQ ID NO: 478991 - DNA, 15 bp, Homo sapiens
ctgttgttaataaaa

SEQ ID NO: 478992 - DNA, 15 bp, Homo sapiens
actgttgttaataaa

SEQ ID NO: 478993 - DNA, 15 bp, Homo sapiens
gactgttgttaataa

SEQ ID NO: 478994 - DNA, 15 bp, Homo sapiens
agactgttgttaata

SEQ ID NO: 478995 - DNA, 15 bp, Homo sapiens
cagactgttgttaat

SEQ ID NO: 478996 - DNA, 15 bp, Homo sapiens
acagactgttgttaa

SEQ ID NO: 478997 - DNA, 15 bp, Homo sapiens
cacagactgttgtta

SEQ ID NO: 478998 - DNA, 15 bp, Homo sapiens
acacagactgttgtt

SEQ ID NO: 478999 - DNA, 15 bp, Homo sapiens
aacacagactgttgt

SEQ ID NO: 479000 - DNA, 15 bp, Homo sapiens
gaacacagactgttg

SEQ ID NO: 479001 - DNA, 15 bp, Homo sapiens
agaacacagactgtt

SEQ ID NO: 479002 - DNA, 15 bp, Homo sapiens
aagaacacagactgt

SEQ ID NO: 479003 - DNA, 15 bp, Homo sapiens
taagaacacagactg

SEQ ID NO: 479004 - DNA, 15 bp, Homo sapiens
gtaagaacacagact

SEQ ID NO: 479005 - DNA, 15 bp, Homo sapiens
tgtaagaacacagac

SEQ ID NO: 479006 - DNA, 15 bp, Homo sapiens
ctgtaagaacacaga

SEQ ID NO: 479007 - DNA, 15 bp, Homo sapiens
tctgtaagaacacag

SEQ ID NO: 479008 - DNA, 15 bp, Homo sapiens
ctctgtaagaacaca

SEQ ID NO: 479009 - DNA, 15 bp, Homo sapiens
tctctgtaagaacac

SEQ ID NO: 479010 - DNA, 15 bp, Homo sapiens
gtctctgtaagaaca

SEQ ID NO: 479011 - DNA, 15 bp, Homo sapiens
agtctctgtaagaac

SEQ ID NO: 479012 - DNA, 15 bp, Homo sapiens
gagtctctgtaagaa

SEQ ID NO: 479013 - DNA, 15 bp, Homo sapiens
agagtctctgtaaga

SEQ ID NO: 479014 - DNA, 15 bp, Homo sapiens
cagagtctctgtaag

SEQ ID NO: 479015 - DNA, 15 bp, Homo sapiens
ccagagtctctgtaa

SEQ ID NO: 479016 - DNA, 15 bp, Homo sapiens
cccagagtctctgta

SEQ ID NO: 479017 - DNA, 15 bp, Homo sapiens
ccccagagtctctgt

SEQ ID NO: 479018 - DNA, 15 bp, Homo sapiens
tccccagagtctctg

SEQ ID NO: 479019 - DNA, 15 bp, Homo sapiens
gtccccagagtctct

SEQ ID NO: 479020 - DNA, 15 bp, Homo sapiens
cgtccccagagtctc

SEQ ID NO: 479021 - DNA, 15 bp, Homo sapiens
acgtccccagagtct

SEQ ID NO: 479022 - DNA, 15 bp, Homo sapiens
aacgtccccagagtc

SEQ ID NO: 479023 - DNA, 15 bp, Homo sapiens
caacgtccccagagt

SEQ ID NO: 479024 - DNA, 15 bp, Homo sapiens
gcaacgtccccagag

SEQ ID NO: 479025 - DNA, 15 bp, Homo sapiens
tgcaacgtccccaga

SEQ ID NO: 479026 - DNA, 15 bp, Homo sapiens
ctgcaacgtccccag

SEQ ID NO: 479027 - DNA, 15 bp, Homo sapiens
gctgcaacgtcccca

SEQ ID NO: 479028 - DNA, 15 bp, Homo sapiens
agctgcaacgtcccc

SEQ ID NO: 479029 - DNA, 15 bp, Homo sapiens
gagctgcaacgtccc

SEQ ID NO: 479030 - DNA, 15 bp, Homo sapiens
agagctgcaacgtcc

SEQ ID NO: 479031 - DNA, 15 bp, Homo sapiens
gagagctgcaacgtc

SEQ ID NO: 479032 - DNA, 15 bp, Homo sapiens
tgagagctgcaacgt

SEQ ID NO: 479033 - DNA, 15 bp, Homo sapiens
ctgagagctgcaacg

SEQ ID NO: 479034 - DNA, 15 bp, Homo sapiens
tctgagagctgcaac

SEQ ID NO: 479035 - DNA, 15 bp, Homo sapiens
ctctgagagctgcaa

SEQ ID NO: 479036 - DNA, 15 bp, Homo sapiens
cctctgagagctgca

SEQ ID NO: 479037 - DNA, 15 bp, Homo sapiens
ccctctgagagctgc

SEQ ID NO: 479038 - DNA, 15 bp, Homo sapiens
accctctgagagctg

SEQ ID NO: 479039 - DNA, 15 bp, Homo sapiens
taccctctgagagct

SEQ ID NO: 479040 - DNA, 15 bp, Homo sapiens
ttaccctctgagagc

SEQ ID NO: 479041 - DNA, 15 bp, Homo sapiens
cttaccctctgagag

SEQ ID NO: 479042 - DNA, 15 bp, Homo sapiens
acttaccctctgaga

SEQ ID NO: 479043 - DNA, 15 bp, Homo sapiens
aacttaccctctgag

SEQ ID NO: 479044 - DNA, 15 bp, Homo sapiens
gaacttaccctctga

SEQ ID NO: 479045 - DNA, 15 bp, Homo sapiens
tgaacttaccctctg

SEQ ID NO: 479046 - DNA, 15 bp, Homo sapiens
ctgaacttaccctct

SEQ ID NO: 479047 - DNA, 15 bp, Homo sapiens
gctgaacttaccctc

SEQ ID NO: 479048 - DNA, 15 bp, Homo sapiens
ggctgaacttaccct

SEQ ID NO: 479049 - DNA, 15 bp, Homo sapiens
aggctgaacttaccc

SEQ ID NO: 479050 - DNA, 15 bp, Homo sapiens
taggctgaacttacc

SEQ ID NO: 479051 - DNA, 15 bp, Homo sapiens
ctaggctgaacttac

SEQ ID NO: 479052 - DNA, 15 bp, Homo sapiens
tctaggctgaactta

SEQ ID NO: 479053 - DNA, 15 bp, Homo sapiens
ctctaggctgaactt

SEQ ID NO: 479054 - DNA, 15 bp, Homo sapiens
cctctaggctgaact

SEQ ID NO: 479055 - DNA, 15 bp, Homo sapiens
gcctctaggctgaac

SEQ ID NO: 479056 - DNA, 15 bp, Homo sapiens
agcctctaggctgaa

SEQ ID NO: 479057 - DNA, 15 bp, Homo sapiens
aagcctctaggctga

SEQ ID NO: 479058 - DNA, 15 bp, Homo sapiens
gaagcctctaggctg

SEQ ID NO: 479059 - DNA, 15 bp, Homo sapiens
ggaagcctctaggct

SEQ ID NO: 479060 - DNA, 15 bp, Homo sapiens
aggaagcctctaggc

SEQ ID NO: 479061 - DNA, 15 bp, Homo sapiens
aaggaagcctctagg

SEQ ID NO: 479062 - DNA, 15 bp, Homo sapiens
aaaggaagcctctag

SEQ ID NO: 479063 - DNA, 15 bp, Homo sapiens
aaaaggaagcctcta

SEQ ID NO: 479064 - DNA, 15 bp, Homo sapiens
caaaaggaagcctct

SEQ ID NO: 479065 - DNA, 15 bp, Homo sapiens
acaaaaggaagcctc

SEQ ID NO: 479066 - DNA, 15 bp, Homo sapiens
aacaaaaggaagcct

SEQ ID NO: 479067 - DNA, 15 bp, Homo sapiens
gaacaaaaggaagcc

SEQ ID NO: 479068 - DNA, 15 bp, Homo sapiens
ggaacaaaaggaagc

SEQ ID NO: 479069 - DNA, 15 bp, Homo sapiens
cggaacaaaaggaag

SEQ ID NO: 479070 - DNA, 15 bp, Homo sapiens
acggaacaaaaggaa

SEQ ID NO: 479071 - DNA, 15 bp, Homo sapiens
aacggaacaaaagga

SEQ ID NO: 479072 - DNA, 15 bp, Homo sapiens
aaacggaacaaaagg

SEQ ID NO: 479073 - DNA, 15 bp, Homo sapiens
taaacggaacaaaag

SEQ ID NO: 479074 - DNA, 15 bp, Homo sapiens
ttaaacggaacaaaa

SEQ ID NO: 479075 - DNA, 15 bp, Homo sapiens
gttaaacggaacaaa

SEQ ID NO: 479076 - DNA, 15 bp, Homo sapiens
ggttaaacggaacaa

SEQ ID NO: 479077 - DNA, 15 bp, Homo sapiens
aggttaaacggaaca

SEQ ID NO: 479078 - DNA, 15 bp, Homo sapiens
taggttaaacggaac

SEQ ID NO: 479079 - DNA, 15 bp, Homo sapiens
ttaggttaaacggaa

SEQ ID NO: 479080 - DNA, 15 bp, Homo sapiens
gttaggttaaacgga

SEQ ID NO: 479081 - DNA, 15 bp, Homo sapiens
agttaggttaaacgg

SEQ ID NO: 479082 - DNA, 15 bp, Homo sapiens
aagttaggttaaacg

SEQ ID NO: 479083 - DNA, 15 bp, Homo sapiens
gaagttaggttaaac

SEQ ID NO: 479084 - DNA, 15 bp, Homo sapiens
tgaagttaggttaaa

SEQ ID NO: 479085 - DNA, 15 bp, Homo sapiens
atgaagttaggttaa

SEQ ID NO: 479086 - DNA, 15 bp, Homo sapiens
gatgaagttaggtta

SEQ ID NO: 479087 - DNA, 15 bp, Homo sapiens
ggatgaagttaggtt

SEQ ID NO: 479088 - DNA, 15 bp, Homo sapiens
aggatgaagttaggt

SEQ ID NO: 479089 - DNA, 15 bp, Homo sapiens
gaggatgaagttagg

SEQ ID NO: 479090 - DNA, 15 bp, Homo sapiens
ggaggatgaagttag

SEQ ID NO: 479091 - DNA, 15 bp, Homo sapiens
cggaggatgaagtta

SEQ ID NO: 479092 - DNA, 15 bp, Homo sapiens
ccggaggatgaagtt

SEQ ID NO: 479093 - DNA, 15 bp, Homo sapiens
gccggaggatgaagt

SEQ ID NO: 479094 - DNA, 15 bp, Homo sapiens
agccggaggatgaag

SEQ ID NO: 479095 - DNA, 15 bp, Homo sapiens
tagccggaggatgaa

SEQ ID NO: 479096 - DNA, 15 bp, Homo sapiens
gtagccggaggatga

SEQ ID NO: 479097 - DNA, 15 bp, Homo sapiens
agtagccggaggatg

SEQ ID NO: 479098 - DNA, 15 bp, Homo sapiens
aagtagccggaggat

SEQ ID NO: 479099 - DNA, 15 bp, Homo sapiens
caagtagccggagga

SEQ ID NO: 479100 - DNA, 15 bp, Homo sapiens
ccaagtagccggagg

SEQ ID NO: 479101 - DNA, 15 bp, Homo sapiens
accaagtagccggag

SEQ ID NO: 479102 - DNA, 15 bp, Homo sapiens
gaccaagtagccgga

SEQ ID NO: 479103 - DNA, 15 bp, Homo sapiens
tgaccaagtagccgg

SEQ ID NO: 479104 - DNA, 15 bp, Homo sapiens
gtgaccaagtagccg

SEQ ID NO: 479105 - DNA, 15 bp, Homo sapiens
ggtgaccaagtagcc

SEQ ID NO: 479106 - DNA, 15 bp, Homo sapiens
aggtgaccaagtagc

SEQ ID NO: 479107 - DNA, 15 bp, Homo sapiens
taggtgaccaagtag

SEQ ID NO: 479108 - DNA, 15 bp, Homo sapiens
gtaggtgaccaagta

SEQ ID NO: 479109 - DNA, 15 bp, Homo sapiens
tgtaggtgaccaagt

SEQ ID NO: 479110 - DNA, 15 bp, Homo sapiens
atgtaggtgaccaag

SEQ ID NO: 479111 - DNA, 15 bp, Homo sapiens
tatgtaggtgaccaa

SEQ ID NO: 479112 - DNA, 15 bp, Homo sapiens
ctatgtaggtgacca

SEQ ID NO: 479113 - DNA, 15 bp, Homo sapiens
actatgtaggtgacc

SEQ ID NO: 479114 - DNA, 15 bp, Homo sapiens
aactatgtaggtgac

SEQ ID NO: 479115 - DNA, 15 bp, Homo sapiens
caactatgtaggtga

SEQ ID NO: 479116 - DNA, 15 bp, Homo sapiens
tcaactatgtaggtg

SEQ ID NO: 479117 - DNA, 15 bp, Homo sapiens
atcaactatgtaggt

SEQ ID NO: 479118 - DNA, 15 bp, Homo sapiens
aatcaactatgtagg

SEQ ID NO: 479119 - DNA, 15 bp, Homo sapiens
caatcaactatgtag

SEQ ID NO: 479120 - DNA, 15 bp, Homo sapiens
acaatcaactatgta

SEQ ID NO: 479121 - DNA, 15 bp, Homo sapiens
aacaatcaactatgt

SEQ ID NO: 479122 - DNA, 15 bp, Homo sapiens
gaacaatcaactatg

SEQ ID NO: 479123 - DNA, 15 bp, Homo sapiens
ggaacaatcaactat

SEQ ID NO: 479124 - DNA, 15 bp, Homo sapiens
gggaacaatcaacta

SEQ ID NO: 479125 - DNA, 15 bp, Homo sapiens
ggggaacaatcaact

SEQ ID NO: 479126 - DNA, 15 bp, Homo sapiens
aggggaacaatcaac

SEQ ID NO: 479127 - DNA, 15 bp, Homo sapiens
caggggaacaatcaa

SEQ ID NO: 479128 - DNA, 15 bp, Homo sapiens
acaggggaacaatca

SEQ ID NO: 479129 - DNA, 15 bp, Homo sapiens
cacaggggaacaatc

SEQ ID NO: 479130 - DNA, 15 bp, Homo sapiens
tcacaggggaacaat

SEQ ID NO: 479131 - DNA, 15 bp, Homo sapiens
atcacaggggaacaa

SEQ ID NO: 479132 - DNA, 15 bp, Homo sapiens
aatcacaggggaaca

SEQ ID NO: 479133 - DNA, 15 bp, Homo sapiens
gaatcacaggggaac

SEQ ID NO: 479134 - DNA, 15 bp, Homo sapiens
tgaatcacaggggaa

SEQ ID NO: 479135 - DNA, 15 bp, Homo sapiens
ctgaatcacagggga

SEQ ID NO: 479136 - DNA, 15 bp, Homo sapiens
tctgaatcacagggg

SEQ ID NO: 479137 - DNA, 15 bp, Homo sapiens
atctgaatcacaggg

SEQ ID NO: 479138 - DNA, 15 bp, Homo sapiens
gatctgaatcacagg

SEQ ID NO: 479139 - DNA, 15 bp, Homo sapiens
ggatctgaatcacag

SEQ ID NO: 479140 - DNA, 15 bp, Homo sapiens
gggatctgaatcaca

SEQ ID NO: 479141 - DNA, 15 bp, Homo sapiens
cgggatctgaatcac

SEQ ID NO: 479142 - DNA, 15 bp, Homo sapiens
ccgggatctgaatca

SEQ ID NO: 479143 - DNA, 15 bp, Homo sapiens
tccgggatctgaatc

SEQ ID NO: 479144 - DNA, 15 bp, Homo sapiens
ttccgggatctgaat

SEQ ID NO: 479145 - DNA, 15 bp, Homo sapiens
tttccgggatctgaa

SEQ ID NO: 479146 - DNA, 15 bp, Homo sapiens
atttccgggatctga

SEQ ID NO: 479147 - DNA, 15 bp, Homo sapiens
aatttccgggatctg

SEQ ID NO: 479148 - DNA, 15 bp, Homo sapiens
aaatttccgggatct

SEQ ID NO: 479149 - DNA, 15 bp, Homo sapiens
taaatttccgggatc

SEQ ID NO: 479150 - DNA, 15 bp, Homo sapiens
ttaaatttccgggat

SEQ ID NO: 479151 - DNA, 15 bp, Homo sapiens
gttaaatttccggga

SEQ ID NO: 479152 - DNA, 15 bp, Homo sapiens
tgttaaatttccggg

SEQ ID NO: 479153 - DNA, 15 bp, Homo sapiens
atgttaaatttccgg

SEQ ID NO: 479154 - DNA, 15 bp, Homo sapiens
aatgttaaatttccg

SEQ ID NO: 479155 - DNA, 15 bp, Homo sapiens
gaatgttaaatttcc

SEQ ID NO: 479156 - DNA, 15 bp, Homo sapiens
agaatgttaaatttc

SEQ ID NO: 479157 - DNA, 15 bp, Homo sapiens
cagaatgttaaattt

SEQ ID NO: 479158 - DNA, 15 bp, Homo sapiens
ccagaatgttaaatt

SEQ ID NO: 479159 - DNA, 15 bp, Homo sapiens
cccagaatgttaaat

SEQ ID NO: 479160 - DNA, 15 bp, Homo sapiens
gcccagaatgttaaa

SEQ ID NO: 479161 - DNA, 15 bp, Homo sapiens
tgcccagaatgttaa

SEQ ID NO: 479162 - DNA, 15 bp, Homo sapiens
gtgcccagaatgtta

SEQ ID NO: 479163 - DNA, 15 bp, Homo sapiens
tgtgcccagaatgtt

SEQ ID NO: 479164 - DNA, 15 bp, Homo sapiens
ttgtgcccagaatgt

SEQ ID NO: 479165 - DNA, 15 bp, Homo sapiens
tttgtgcccagaatg

SEQ ID NO: 479166 - DNA, 15 bp, Homo sapiens
gtttgtgcccagaat

SEQ ID NO: 479167 - DNA, 15 bp, Homo sapiens
tgtttgtgcccagaa

SEQ ID NO: 479168 - DNA, 15 bp, Homo sapiens
gtgtttgtgcccaga

SEQ ID NO: 479169 - DNA, 15 bp, Homo sapiens
tgtgtttgtgcccag

SEQ ID NO: 479170 - DNA, 15 bp, Homo sapiens
ttgtgtttgtgccca

SEQ ID NO: 479171 - DNA, 15 bp, Homo sapiens
tttgtgtttgtgccc

SEQ ID NO: 479172 - DNA, 15 bp, Homo sapiens
ttttgtgtttgtgcc

SEQ ID NO: 479173 - DNA, 15 bp, Homo sapiens
cttttgtgtttgtgc

SEQ ID NO: 479174 - DNA, 15 bp, Homo sapiens
acttttgtgtttgtg

SEQ ID NO: 479175 - DNA, 15 bp, Homo sapiens
cacttttgtgtttgt

SEQ ID NO: 479176 - DNA, 15 bp, Homo sapiens
tcacttttgtgtttg

SEQ ID NO: 479177 - DNA, 15 bp, Homo sapiens
atcacttttgtgttt

SEQ ID NO: 479178 - DNA, 15 bp, Homo sapiens
catcacttttgtgtt

SEQ ID NO: 479179 - DNA, 15 bp, Homo sapiens
tcatcacttttgtgt

SEQ ID NO: 479180 - DNA, 15 bp, Homo sapiens
ttcatcacttttgtg

SEQ ID NO: 479181 - DNA, 15 bp, Homo sapiens
gttcatcacttttgt

SEQ ID NO: 479182 - DNA, 15 bp, Homo sapiens
tgttcatcacttttg

SEQ ID NO: 479183 - DNA, 15 bp, Homo sapiens
atgttcatcactttt

SEQ ID NO: 479184 - DNA, 15 bp, Homo sapiens
catgttcatcacttt

SEQ ID NO: 479185 - DNA, 15 bp, Homo sapiens
ccatgttcatcactt

SEQ ID NO: 479186 - DNA, 15 bp, Homo sapiens
tccatgttcatcact

SEQ ID NO: 479187 - DNA, 15 bp, Homo sapiens
ttccatgttcatcac

SEQ ID NO: 479188 - DNA, 15 bp, Homo sapiens
cttccatgttcatca

SEQ ID NO: 479189 - DNA, 15 bp, Homo sapiens
tcttccatgttcatc

SEQ ID NO: 479190 - DNA, 15 bp, Homo sapiens
ttcttccatgttcat

SEQ ID NO: 479191 - DNA, 15 bp, Homo sapiens
attcttccatgttca

SEQ ID NO: 479192 - DNA, 15 bp, Homo sapiens
gattcttccatgttc

SEQ ID NO: 479193 - DNA, 15 bp, Homo sapiens
ggattcttccatgtt

SEQ ID NO: 479194 - DNA, 15 bp, Homo sapiens
tggattcttccatgt

SEQ ID NO: 479195 - DNA, 15 bp, Homo sapiens
ttggattcttccatg

SEQ ID NO: 479196 - DNA, 15 bp, Homo sapiens
gttggattcttccat

SEQ ID NO: 479197 - DNA, 15 bp, Homo sapiens
tgttggattcttcca

SEQ ID NO: 479198 - DNA, 15 bp, Homo sapiens
ttgttggattcttcc

SEQ ID NO: 479199 - DNA, 15 bp, Homo sapiens
gttgttggattcttc

SEQ ID NO: 479200 - DNA, 15 bp, Homo sapiens
cgttgttggattctt

SEQ ID NO: 479201 - DNA, 15 bp, Homo sapiens
ccgttgttggattct

SEQ ID NO: 479202 - DNA, 15 bp, Homo sapiens
gccgttgttggattc

SEQ ID NO: 479203 - DNA, 15 bp, Homo sapiens
tgccgttgttggatt

SEQ ID NO: 479204 - DNA, 15 bp, Homo sapiens
ctgccgttgttggat

SEQ ID NO: 479205 - DNA, 15 bp, Homo sapiens
gctgccgttgttgga

SEQ ID NO: 479206 - DNA, 15 bp, Homo sapiens
ggctgccgttgttgg

SEQ ID NO: 479207 - DNA, 15 bp, Homo sapiens
aggctgccgttgttg

SEQ ID NO: 479208 - DNA, 15 bp, Homo sapiens
gaggctgccgttgtt

SEQ ID NO: 479209 - DNA, 15 bp, Homo sapiens
agaggctgccgttgt

SEQ ID NO: 479210 - DNA, 15 bp, Homo sapiens
gagaggctgccgttg

SEQ ID NO: 479211 - DNA, 15 bp, Homo sapiens
agagaggctgccgtt

SEQ ID NO: 479212 - DNA, 15 bp, Homo sapiens
cagagaggctgccgt

SEQ ID NO: 479213 - DNA, 15 bp, Homo sapiens
gcagagaggctgccg

SEQ ID NO: 479214 - DNA, 15 bp, Homo sapiens
tgcagagaggctgcc

SEQ ID NO: 479215 - DNA, 15 bp, Homo sapiens
ctgcagagaggctgc

SEQ ID NO: 479216 - DNA, 15 bp, Homo sapiens
tctgcagagaggctg

SEQ ID NO: 479217 - DNA, 15 bp, Homo sapiens
ttctgcagagaggct

SEQ ID NO: 479218 - DNA, 15 bp, Homo sapiens
attctgcagagaggc

SEQ ID NO: 479219 - DNA, 15 bp, Homo sapiens
aattctgcagagagg

SEQ ID NO: 479220 - DNA, 15 bp, Homo sapiens
gaattctgcagagag

SEQ ID NO: 479221 - DNA, 15 bp, Homo sapiens
tgaattctgcagaga

SEQ ID NO: 479222 - DNA, 15 bp, Homo sapiens
ttgaattctgcagag

SEQ ID NO: 479223 - DNA, 15 bp, Homo sapiens
tttgaattctgcaga

SEQ ID NO: 479224 - DNA, 15 bp, Homo sapiens
gtttgaattctgcag

SEQ ID NO: 479225 - DNA, 15 bp, Homo sapiens
tgtttgaattctgca

SEQ ID NO: 479226 - DNA, 15 bp, Homo sapiens
gtgtttgaattctgc

SEQ ID NO: 479227 - DNA, 15 bp, Homo sapiens
agtgtttgaattctg

SEQ ID NO: 479228 - DNA, 15 bp, Homo sapiens
aagtgtttgaattct

SEQ ID NO: 479229 - DNA, 15 bp, Homo sapiens
caagtgtttgaattc

SEQ ID NO: 479230 - DNA, 15 bp, Homo sapiens
ccaagtgtttgaatt

SEQ ID NO: 479231 - DNA, 15 bp, Homo sapiens
accaagtgtttgaat

SEQ ID NO: 479232 - DNA, 15 bp, Homo sapiens
taccaagtgtttgaa

SEQ ID NO: 479233 - DNA, 15 bp, Homo sapiens
ataccaagtgtttga

SEQ ID NO: 479234 - DNA, 15 bp, Homo sapiens
cataccaagtgtttg

SEQ ID NO: 479235 - DNA, 15 bp, Homo sapiens
acataccaagtgttt

SEQ ID NO: 479236 - DNA, 15 bp, Homo sapiens
cacataccaagtgtt

SEQ ID NO: 479237 - DNA, 15 bp, Homo sapiens
ccacataccaagtgt

SEQ ID NO: 479238 - DNA, 15 bp, Homo sapiens
cccacataccaagtg

SEQ ID NO: 479239 - DNA, 15 bp, Homo sapiens
tcccacataccaagt

SEQ ID NO: 479240 - DNA, 15 bp, Homo sapiens
ctcccacataccaag

SEQ ID NO: 479241 - DNA, 15 bp, Homo sapiens
cctcccacataccaa

SEQ ID NO: 479242 - DNA, 15 bp, Homo sapiens
tcctcccacatacca

SEQ ID NO: 479243 - DNA, 15 bp, Homo sapiens
ctcctcccacatacc

SEQ ID NO: 479244 - DNA, 15 bp, Homo sapiens
gctcctcccacatac

SEQ ID NO: 479245 - DNA, 15 bp, Homo sapiens
agctcctcccacata

SEQ ID NO: 479246 - DNA, 15 bp, Homo sapiens
gagctcctcccacat

SEQ ID NO: 479247 - DNA, 15 bp, Homo sapiens
ggagctcctcccaca

SEQ ID NO: 479248 - DNA, 15 bp, Homo sapiens
gggagctcctcccac

SEQ ID NO: 479249 - DNA, 15 bp, Homo sapiens
ggggagctcctccca

SEQ ID NO: 479250 - DNA, 15 bp, Homo sapiens
aggggagctcctccc

SEQ ID NO: 479251 - DNA, 15 bp, Homo sapiens
aaggggagctcctcc

SEQ ID NO: 479252 - DNA, 15 bp, Homo sapiens
gaaggggagctcctc

SEQ ID NO: 479253 - DNA, 15 bp, Homo sapiens
tgaaggggagctcct

SEQ ID NO: 479254 - DNA, 15 bp, Homo sapiens
gtgaaggggagctcc

SEQ ID NO: 479255 - DNA, 15 bp, Homo sapiens
tgtgaaggggagctc

SEQ ID NO: 479256 - DNA, 15 bp, Homo sapiens
ttgtgaaggggagct

SEQ ID NO: 479257 - DNA, 15 bp, Homo sapiens
tttgtgaaggggagc

SEQ ID NO: 479258 - DNA, 15 bp, Homo sapiens
ctttgtgaaggggag

SEQ ID NO: 479259 - DNA, 15 bp, Homo sapiens
cctttgtgaagggga

SEQ ID NO: 479260 - DNA, 15 bp, Homo sapiens
ccctttgtgaagggg

SEQ ID NO: 479261 - DNA, 15 bp, Homo sapiens
gccctttgtgaaggg

SEQ ID NO: 479262 - DNA, 15 bp, Homo sapiens
ggccctttgtgaagg

SEQ ID NO: 479263 - DNA, 15 bp, Homo sapiens
aggccctttgtgaag

SEQ ID NO: 479264 - DNA, 15 bp, Homo sapiens
gaggccctttgtgaa

SEQ ID NO: 479265 - DNA, 15 bp, Homo sapiens
agaggccctttgtga

SEQ ID NO: 479266 - DNA, 15 bp, Homo sapiens
cagaggccctttgtg

SEQ ID NO: 479267 - DNA, 15 bp, Homo sapiens
ccagaggccctttgt

SEQ ID NO: 479268 - DNA, 15 bp, Homo sapiens
gccagaggccctttg

SEQ ID NO: 479269 - DNA, 15 bp, Homo sapiens
agccagaggcccttt

SEQ ID NO: 479270 - DNA, 15 bp, Homo sapiens
cagccagaggccctt

SEQ ID NO: 479271 - DNA, 15 bp, Homo sapiens
gcagccagaggccct

SEQ ID NO: 479272 - DNA, 15 bp, Homo sapiens
ggcagccagaggccc

SEQ ID NO: 479273 - DNA, 15 bp, Homo sapiens
cggcagccagaggcc

SEQ ID NO: 479274 - DNA, 15 bp, Homo sapiens
ccggcagccagaggc

SEQ ID NO: 479275 - DNA, 15 bp, Homo sapiens
tccggcagccagagg

SEQ ID NO: 479276 - DNA, 15 bp, Homo sapiens
ctccggcagccagag

SEQ ID NO: 479277 - DNA, 15 bp, Homo sapiens
tctccggcagccaga

SEQ ID NO: 479278 - DNA, 15 bp, Homo sapiens
ctctccggcagccag

SEQ ID NO: 479279 - DNA, 15 bp, Homo sapiens
cctctccggcagcca

SEQ ID NO: 479280 - DNA, 15 bp, Homo sapiens
ccctctccggcagcc

SEQ ID NO: 479281 - DNA, 15 bp, Homo sapiens
gccctctccggcagc

SEQ ID NO: 479282 - DNA, 15 bp, Homo sapiens
agccctctccggcag

SEQ ID NO: 479283 - DNA, 15 bp, Homo sapiens
tagccctctccggca

SEQ ID NO: 479284 - DNA, 15 bp, Homo sapiens
ctagccctctccggc

SEQ ID NO: 479285 - DNA, 15 bp, Homo sapiens
cctagccctctccgg

SEQ ID NO: 479286 - DNA, 15 bp, Homo sapiens
ccctagccctctccg

SEQ ID NO: 479287 - DNA, 15 bp, Homo sapiens
tccctagccctctcc

SEQ ID NO: 479288 - DNA, 15 bp, Homo sapiens
ctccctagccctctc

SEQ ID NO: 479289 - DNA, 15 bp, Homo sapiens
tctccctagccctct

SEQ ID NO: 479290 - DNA, 15 bp, Homo sapiens
ctctccctagccctc

SEQ ID NO: 479291 - DNA, 15 bp, Homo sapiens
gctctccctagccct

SEQ ID NO: 479292 - DNA, 15 bp, Homo sapiens
ggctctccctagccc

SEQ ID NO: 479293 - DNA, 15 bp, Homo sapiens
aggctctccctagcc

SEQ ID NO: 479294 - DNA, 15 bp, Homo sapiens
gaggctctccctagc

SEQ ID NO: 479295 - DNA, 15 bp, Homo sapiens
tgaggctctccctag

SEQ ID NO: 479296 - DNA, 15 bp, Homo sapiens
gtgaggctctcccta

SEQ ID NO: 479297 - DNA, 15 bp, Homo sapiens
tgtgaggctctccct

SEQ ID NO: 479298 - DNA, 15 bp, Homo sapiens
ctgtgaggctctccc

SEQ ID NO: 479299 - DNA, 15 bp, Homo sapiens
cctgtgaggctctcc

SEQ ID NO: 479300 - DNA, 15 bp, Homo sapiens
tcctgtgaggctctc

SEQ ID NO: 479301 - DNA, 15 bp, Homo sapiens
gtcctgtgaggctct

SEQ ID NO: 479302 - DNA, 15 bp, Homo sapiens
tgtcctgtgaggctc

SEQ ID NO: 479303 - DNA, 15 bp, Homo sapiens
gtgtcctgtgaggct

SEQ ID NO: 479304 - DNA, 15 bp, Homo sapiens
ggtgtcctgtgaggc

SEQ ID NO: 479305 - DNA, 15 bp, Homo sapiens
aggtgtcctgtgagg

SEQ ID NO: 479306 - DNA, 15 bp, Homo sapiens
caggtgtcctgtgag

SEQ ID NO: 479307 - DNA, 15 bp, Homo sapiens
gcaggtgtcctgtga

SEQ ID NO: 479308 - DNA, 15 bp, Homo sapiens
ggcaggtgtcctgtg

SEQ ID NO: 479309 - DNA, 15 bp, Homo sapiens
aggcaggtgtcctgt

SEQ ID NO: 479310 - DNA, 15 bp, Homo sapiens
aaggcaggtgtcctg

SEQ ID NO: 479311 - DNA, 15 bp, Homo sapiens
aaaggcaggtgtcct

SEQ ID NO: 479312 - DNA, 15 bp, Homo sapiens
aaaaggcaggtgtcc

SEQ ID NO: 479313 - DNA, 15 bp, Homo sapiens
aaaaaggcaggtgtc

SEQ ID NO: 479314 - DNA, 15 bp, Homo sapiens
gaaaaaggcaggtgt

SEQ ID NO: 479315 - DNA, 15 bp, Homo sapiens
agaaaaaggcaggtg

SEQ ID NO: 479316 - DNA, 15 bp, Homo sapiens
aagaaaaaggcaggt

SEQ ID NO: 479317 - DNA, 15 bp, Homo sapiens
aaagaaaaaggcagg

SEQ ID NO: 479318 - DNA, 15 bp, Homo sapiens
aaaagaaaaaggcag

SEQ ID NO: 479319 - DNA, 15 bp, Homo sapiens
gaaaagaaaaaggca

SEQ ID NO: 479320 - DNA, 15 bp, Homo sapiens
agaaaagaaaaaggc

SEQ ID NO: 479321 - DNA, 15 bp, Homo sapiens
aagaaaagaaaaagg

SEQ ID NO: 479322 - DNA, 15 bp, Homo sapiens
taagaaaagaaaaag

SEQ ID NO: 479323 - DNA, 15 bp, Homo sapiens
gtaagaaaagaaaaa

SEQ ID NO: 479324 - DNA, 15 bp, Homo sapiens
tgtaagaaaagaaaa

SEQ ID NO: 479325 - DNA, 15 bp, Homo sapiens
ctgtaagaaaagaaa

SEQ ID NO: 479326 - DNA, 15 bp, Homo sapiens
tctgtaagaaaagaa

SEQ ID NO: 479327 - DNA, 15 bp, Homo sapiens
gtctgtaagaaaaga

SEQ ID NO: 479328 - DNA, 15 bp, Homo sapiens
ggtctgtaagaaaag

SEQ ID NO: 479329 - DNA, 15 bp, Homo sapiens
gggtctgtaagaaaa

SEQ ID NO: 479330 - DNA, 15 bp, Homo sapiens
agggtctgtaagaaa

SEQ ID NO: 479331 - DNA, 15 bp, Homo sapiens
cagggtctgtaagaa

SEQ ID NO: 479332 - DNA, 15 bp, Homo sapiens
tcagggtctgtaaga

SEQ ID NO: 479333 - DNA, 15 bp, Homo sapiens
ctcagggtctgtaag

SEQ ID NO: 479334 - DNA, 15 bp, Homo sapiens
cctcagggtctgtaa

SEQ ID NO: 479335 - DNA, 15 bp, Homo sapiens
ccctcagggtctgta

SEQ ID NO: 479336 - DNA, 15 bp, Homo sapiens
tccctcagggtctgt

SEQ ID NO: 479337 - DNA, 15 bp, Homo sapiens
ctccctcagggtctg

SEQ ID NO: 479338 - DNA, 15 bp, Homo sapiens
gctccctcagggtct

SEQ ID NO: 479339 - DNA, 15 bp, Homo sapiens
tgctccctcagggtc

SEQ ID NO: 479340 - DNA, 15 bp, Homo sapiens
ctgctccctcagggt

SEQ ID NO: 479341 - DNA, 15 bp, Homo sapiens
tctgctccctcaggg

SEQ ID NO: 479342 - DNA, 15 bp, Homo sapiens
ctctgctccctcagg

SEQ ID NO: 479343 - DNA, 15 bp, Homo sapiens
tctctgctccctcag

SEQ ID NO: 479344 - DNA, 15 bp, Homo sapiens
atctctgctccctca

SEQ ID NO: 479345 - DNA, 15 bp, Homo sapiens
catctctgctccctc

SEQ ID NO: 479346 - DNA, 15 bp, Homo sapiens
acatctctgctccct

SEQ ID NO: 479347 - DNA, 15 bp, Homo sapiens
cacatctctgctccc

SEQ ID NO: 479348 - DNA, 15 bp, Homo sapiens
ccacatctctgctcc

SEQ ID NO: 479349 - DNA, 15 bp, Homo sapiens
cccacatctctgctc

SEQ ID NO: 479350 - DNA, 15 bp, Homo sapiens
tcccacatctctgct

SEQ ID NO: 479351 - DNA, 15 bp, Homo sapiens
ttcccacatctctgc

SEQ ID NO: 479352 - DNA, 15 bp, Homo sapiens
attcccacatctctg

SEQ ID NO: 479353 - DNA, 15 bp, Homo sapiens
cattcccacatctct

SEQ ID NO: 479354 - DNA, 15 bp, Homo sapiens
catcagtacagcaac

SEQ ID NO: 479355 - DNA, 15 bp, Homo sapiens
acatcagtacagcaa

SEQ ID NO: 479356 - DNA, 15 bp, Homo sapiens
cacatcagtacagca

SEQ ID NO: 479357 - DNA, 15 bp, Homo sapiens
tcacatcagtacagc

SEQ ID NO: 479358 - DNA, 15 bp, Homo sapiens
ctcacatcagtacag

SEQ ID NO: 479359 - DNA, 15 bp, Homo sapiens
tctcacatcagtaca

SEQ ID NO: 479360 - DNA, 15 bp, Homo sapiens
gtctcacatcagtac

SEQ ID NO: 479361 - DNA, 15 bp, Homo sapiens
tgtctcacatcagta

SEQ ID NO: 479362 - DNA, 15 bp, Homo sapiens
atgtctcacatcagt

SEQ ID NO: 479363 - DNA, 15 bp, Homo sapiens
aatgtctcacatcag

SEQ ID NO: 479364 - DNA, 15 bp, Homo sapiens
caatgtctcacatca

SEQ ID NO: 479365 - DNA, 15 bp, Homo sapiens
acaatgtctcacatc

SEQ ID NO: 479366 - DNA, 15 bp, Homo sapiens
aacaatgtctcacat

SEQ ID NO: 479367 - DNA, 15 bp, Homo sapiens
caacaatgtctcaca

SEQ ID NO: 479368 - DNA, 15 bp, Homo sapiens
acaacaatgtctcac

SEQ ID NO: 479369 - DNA, 15 bp, Homo sapiens
tacaacaatgtctca

SEQ ID NO: 479370 - DNA, 15 bp, Homo sapiens
ctacaacaatgtctc

SEQ ID NO: 479371 - DNA, 15 bp, Homo sapiens
actacaacaatgtct

SEQ ID NO: 479372 - DNA, 15 bp, Homo sapiens
gactacaacaatgtc

SEQ ID NO: 479373 - DNA, 15 bp, Homo sapiens
tgactacaacaatgt

SEQ ID NO: 479374 - DNA, 15 bp, Homo sapiens
ctgactacaacaatg

SEQ ID NO: 479375 - DNA, 15 bp, Homo sapiens
actgactacaacaat

SEQ ID NO: 479376 - DNA, 15 bp, Homo sapiens
aactgactacaacaa

SEQ ID NO: 479377 - DNA, 15 bp, Homo sapiens
aaactgactacaaca

SEQ ID NO: 479378 - DNA, 15 bp, Homo sapiens
caaactgactacaac

SEQ ID NO: 479379 - DNA, 15 bp, Homo sapiens
ccaaactgactacaa

SEQ ID NO: 479380 - DNA, 15 bp, Homo sapiens
tccaaactgactaca

SEQ ID NO: 479381 - DNA, 15 bp, Homo sapiens
ttccaaactgactac

SEQ ID NO: 479382 - DNA, 15 bp, Homo sapiens
tttccaaactgacta

SEQ ID NO: 479383 - DNA, 15 bp, Homo sapiens
ttttccaaactgact

SEQ ID NO: 479384 - DNA, 15 bp, Homo sapiens
gttttccaaactgac

SEQ ID NO: 479385 - DNA, 15 bp, Homo sapiens
tgttttccaaactga

SEQ ID NO: 479386 - DNA, 15 bp, Homo sapiens
ttgttttccaaactg

SEQ ID NO: 479387 - DNA, 15 bp, Homo sapiens
attgttttccaaact

SEQ ID NO: 479388 - DNA, 15 bp, Homo sapiens
aattgttttccaaac

SEQ ID NO: 479389 - DNA, 15 bp, Homo sapiens
aaattgttttccaaa

SEQ ID NO: 479390 - DNA, 15 bp, Homo sapiens
caaattgttttccaa

SEQ ID NO: 479391 - DNA, 15 bp, Homo sapiens
ccaaattgttttcca

SEQ ID NO: 479392 - DNA, 15 bp, Homo sapiens
gccaaattgttttcc

SEQ ID NO: 479393 - DNA, 15 bp, Homo sapiens
tgccaaattgttttc

SEQ ID NO: 479394 - DNA, 15 bp, Homo sapiens
ctgccaaattgtttt

SEQ ID NO: 479395 - DNA, 15 bp, Homo sapiens
actgccaaattgttt

SEQ ID NO: 479396 - DNA, 15 bp, Homo sapiens
tactgccaaattgtt

SEQ ID NO: 479397 - DNA, 15 bp, Homo sapiens
atactgccaaattgt

SEQ ID NO: 479398 - DNA, 15 bp, Homo sapiens
tatactgccaaattg

SEQ ID NO: 479399 - DNA, 15 bp, Homo sapiens
ttatactgccaaatt

SEQ ID NO: 479400 - DNA, 15 bp, Homo sapiens
tttatactgccaaat

SEQ ID NO: 479401 - DNA, 15 bp, Homo sapiens
ttttatactgccaaa

SEQ ID NO: 479402 - DNA, 15 bp, Homo sapiens
tttttatactgccaa

SEQ ID NO: 479403 - DNA, 15 bp, Homo sapiens
atttttatactgcca

SEQ ID NO: 479404 - DNA, 15 bp, Homo sapiens
catttttatactgcc

SEQ ID NO: 479405 - DNA, 15 bp, Homo sapiens
tcatttttatactgc

SEQ ID NO: 479406 - DNA, 15 bp, Homo sapiens
ttcatttttatactg

SEQ ID NO: 479407 - DNA, 15 bp, Homo sapiens
gttcatttttatact

SEQ ID NO: 479408 - DNA, 15 bp, Homo sapiens
tgttcatttttatac

SEQ ID NO: 479409 - DNA, 15 bp, Homo sapiens
atgttcatttttata

SEQ ID NO: 479410 - DNA, 15 bp, Homo sapiens
tatgttcatttttat

SEQ ID NO: 479411 - DNA, 15 bp, Homo sapiens
gtatgttcattttta

SEQ ID NO: 479412 - DNA, 15 bp, Homo sapiens
ggtatgttcattttt

SEQ ID NO: 479413 - DNA, 15 bp, Homo sapiens
aggtatgttcatttt

SEQ ID NO: 479414 - DNA, 15 bp, Homo sapiens
caggtatgttcattt

SEQ ID NO: 479415 - DNA, 15 bp, Homo sapiens
acaggtatgttcatt

SEQ ID NO: 479416 - DNA, 15 bp, Homo sapiens
tacaggtatgttcat

SEQ ID NO: 479417 - DNA, 15 bp, Homo sapiens
ttacaggtatgttca

SEQ ID NO: 479418 - DNA, 15 bp, Homo sapiens
tttacaggtatgttc

SEQ ID NO: 479419 - DNA, 15 bp, Homo sapiens
gtttacaggtatgtt

SEQ ID NO: 479420 - DNA, 15 bp, Homo sapiens
ggtttacaggtatgt

SEQ ID NO: 479421 - DNA, 15 bp, Homo sapiens
tggtttacaggtatg

SEQ ID NO: 479422 - DNA, 15 bp, Homo sapiens
ttggtttacaggtat

SEQ ID NO: 479423 - DNA, 15 bp, Homo sapiens
gttggtttacaggta

SEQ ID NO: 479424 - DNA, 15 bp, Homo sapiens
cgttggtttacaggt

SEQ ID NO: 479425 - DNA, 15 bp, Homo sapiens
ccgttggtttacagg

SEQ ID NO: 479426 - DNA, 15 bp, Homo sapiens
accgttggtttacag

SEQ ID NO: 479427 - DNA, 15 bp, Homo sapiens
caccgttggtttaca

SEQ ID NO: 479428 - DNA, 15 bp, Homo sapiens
gcaccgttggtttac

SEQ ID NO: 479429 - DNA, 15 bp, Homo sapiens
ggcaccgttggttta

SEQ ID NO: 479430 - DNA, 15 bp, Homo sapiens
tggcaccgttggttt

SEQ ID NO: 479431 - DNA, 15 bp, Homo sapiens
atggcaccgttggtt

SEQ ID NO: 479432 - DNA, 15 bp, Homo sapiens
aatggcaccgttggt

SEQ ID NO: 479433 - DNA, 15 bp, Homo sapiens
gaatggcaccgttgg

SEQ ID NO: 479434 - DNA, 15 bp, Homo sapiens
ggaatggcaccgttg

SEQ ID NO: 479435 - DNA, 15 bp, Homo sapiens
gggaatggcaccgtt

SEQ ID NO: 479436 - DNA, 15 bp, Homo sapiens
tgggaatggcaccgt

SEQ ID NO: 479437 - DNA, 15 bp, Homo sapiens
ctgggaatggcaccg

SEQ ID NO: 479438 - DNA, 15 bp, Homo sapiens
cctgggaatggcacc

SEQ ID NO: 479439 - DNA, 15 bp, Homo sapiens
tcctgggaatggcac

SEQ ID NO: 479440 - DNA, 15 bp, Homo sapiens
atcctgggaatggca

SEQ ID NO: 479441 - DNA, 15 bp, Homo sapiens
aatcctgggaatggc

SEQ ID NO: 479442 - DNA, 15 bp, Homo sapiens
aaatcctgggaatgg

SEQ ID NO: 479443 - DNA, 15 bp, Homo sapiens
taaatcctgggaatg

SEQ ID NO: 479444 - DNA, 15 bp, Homo sapiens
ttaaatcctgggaat

SEQ ID NO: 479445 - DNA, 15 bp, Homo sapiens
attaaatcctgggaa

SEQ ID NO: 479446 - DNA, 15 bp, Homo sapiens
tattaaatcctggga

SEQ ID NO: 479447 - DNA, 15 bp, Homo sapiens
ctattaaatcctggg

SEQ ID NO: 479448 - DNA, 15 bp, Homo sapiens
gctattaaatcctgg

SEQ ID NO: 479449 - DNA, 15 bp, Homo sapiens
tgctattaaatcctg

SEQ ID NO: 479450 - DNA, 15 bp, Homo sapiens
ctgctattaaatcct

SEQ ID NO: 479451 - DNA, 15 bp, Homo sapiens
tctgctattaaatcc

SEQ ID NO: 479452 - DNA, 15 bp, Homo sapiens
ctctgctattaaatc

SEQ ID NO: 479453 - DNA, 15 bp, Homo sapiens
tctctgctattaaat

SEQ ID NO: 479454 - DNA, 15 bp, Homo sapiens
ttctctgctattaaa

SEQ ID NO: 479455 - DNA, 15 bp, Homo sapiens
tttctctgctattaa

SEQ ID NO: 479456 - DNA, 15 bp, Homo sapiens
atttctctgctatta

SEQ ID NO: 479457 - DNA, 15 bp, Homo sapiens
gatttctctgctatt

SEQ ID NO: 479458 - DNA, 15 bp, Homo sapiens
agatttctctgctat

SEQ ID NO: 479459 - DNA, 15 bp, Homo sapiens
aagatttctctgcta

SEQ ID NO: 479460 - DNA, 15 bp, Homo sapiens
aaagatttctctgct

SEQ ID NO: 479461 - DNA, 15 bp, Homo sapiens
caaagatttctctgc

SEQ ID NO: 479462 - DNA, 15 bp, Homo sapiens
gcaaagatttctctg

SEQ ID NO: 479463 - DNA, 15 bp, Homo sapiens
tgcaaagatttctct

SEQ ID NO: 479464 - DNA, 15 bp, Homo sapiens
atgcaaagatttctc

SEQ ID NO: 479465 - DNA, 15 bp, Homo sapiens
tatgcaaagatttct

SEQ ID NO: 479466 - DNA, 15 bp, Homo sapiens
atatgcaaagatttc

SEQ ID NO: 479467 - DNA, 15 bp, Homo sapiens
tatatgcaaagattt

SEQ ID NO: 479468 - DNA, 15 bp, Homo sapiens
atatatgcaaagatt

SEQ ID NO: 479469 - DNA, 15 bp, Homo sapiens
catatatgcaaagat

SEQ ID NO: 479470 - DNA, 15 bp, Homo sapiens
acatatatgcaaaga

SEQ ID NO: 479471 - DNA, 15 bp, Homo sapiens
gacatatatgcaaag

SEQ ID NO: 479472 - DNA, 15 bp, Homo sapiens
ggacatatatgcaaa

SEQ ID NO: 479473 - DNA, 15 bp, Homo sapiens
gggacatatatgcaa

SEQ ID NO: 479474 - DNA, 15 bp, Homo sapiens
tgggacatatatgca

SEQ ID NO: 479475 - DNA, 15 bp, Homo sapiens
ctgggacatatatgc

SEQ ID NO: 479476 - DNA, 15 bp, Homo sapiens
cctgggacatatatg

SEQ ID NO: 479477 - DNA, 15 bp, Homo sapiens
tcctgggacatatat

SEQ ID NO: 479478 - DNA, 15 bp, Homo sapiens
ctcctgggacatata

SEQ ID NO: 479479 - DNA, 15 bp, Homo sapiens
tctcctgggacatat

SEQ ID NO: 479480 - DNA, 15 bp, Homo sapiens
gtctcctgggacata

SEQ ID NO: 479481 - DNA, 15 bp, Homo sapiens
tgtctcctgggacat

SEQ ID NO: 479482 - DNA, 15 bp, Homo sapiens
atgtctcctgggaca

SEQ ID NO: 479483 - DNA, 15 bp, Homo sapiens
tatgtctcctgggac

SEQ ID NO: 479484 - DNA, 15 bp, Homo sapiens
atatgtctcctggga

SEQ ID NO: 479485 - DNA, 15 bp, Homo sapiens
tatatgtctcctggg

SEQ ID NO: 479486 - DNA, 15 bp, Homo sapiens
atatatgtctcctgg

SEQ ID NO: 479487 - DNA, 15 bp, Homo sapiens
tatatatgtctcctg

SEQ ID NO: 479488 - DNA, 15 bp, Homo sapiens
ttatatatgtctcct

SEQ ID NO: 479489 - DNA, 15 bp, Homo sapiens
tttatatatgtctcc

SEQ ID NO: 479490 - DNA, 15 bp, Homo sapiens
ctttatatatgtctc

SEQ ID NO: 479491 - DNA, 15 bp, Homo sapiens
actttatatatgtct

SEQ ID NO: 479492 - DNA, 15 bp, Homo sapiens
cactttatatatgtc

SEQ ID NO: 479493 - DNA, 15 bp, Homo sapiens
ccactttatatatgt

SEQ ID NO: 479494 - DNA, 15 bp, Homo sapiens
tccactttatatatg

SEQ ID NO: 479495 - DNA, 15 bp, Homo sapiens
gtccactttatatat

SEQ ID NO: 479496 - DNA, 15 bp, Homo sapiens
tgtccactttatata

SEQ ID NO: 479497 - DNA, 15 bp, Homo sapiens
atgtccactttatat

SEQ ID NO: 479498 - DNA, 15 bp, Homo sapiens
gatgtccactttata

SEQ ID NO: 479499 - DNA, 15 bp, Homo sapiens
tgatgtccactttat

SEQ ID NO: 479500 - DNA, 15 bp, Homo sapiens
ctgatgtccacttta

SEQ ID NO: 479501 - DNA, 15 bp, Homo sapiens
gctgatgtccacttt

SEQ ID NO: 479502 - DNA, 15 bp, Homo sapiens
ggctgatgtccactt

SEQ ID NO: 479503 - DNA, 15 bp, Homo sapiens
aggctgatgtccact

SEQ ID NO: 479504 - DNA, 15 bp, Homo sapiens
caggctgatgtccac

SEQ ID NO: 479505 - DNA, 15 bp, Homo sapiens
tcaggctgatgtcca

SEQ ID NO: 479506 - DNA, 15 bp, Homo sapiens
atcaggctgatgtcc

SEQ ID NO: 479507 - DNA, 15 bp, Homo sapiens
aatcaggctgatgtc

SEQ ID NO: 479508 - DNA, 15 bp, Homo sapiens
taatcaggctgatgt

SEQ ID NO: 479509 - DNA, 15 bp, Homo sapiens
ataatcaggctgatg

SEQ ID NO: 479510 - DNA, 15 bp, Homo sapiens
tataatcaggctgat

SEQ ID NO: 479511 - DNA, 15 bp, Homo sapiens
ttataatcaggctga

SEQ ID NO: 479512 - DNA, 15 bp, Homo sapiens
cttataatcaggctg

SEQ ID NO: 479513 - DNA, 15 bp, Homo sapiens
gcttataatcaggct

SEQ ID NO: 479514 - DNA, 15 bp, Homo sapiens
agcttataatcaggc

SEQ ID NO: 479515 - DNA, 15 bp, Homo sapiens
gagcttataatcagg

SEQ ID NO: 479516 - DNA, 15 bp, Homo sapiens
agagcttataatcag

SEQ ID NO: 479517 - DNA, 15 bp, Homo sapiens
tagagcttataatca

SEQ ID NO: 479518 - DNA, 15 bp, Homo sapiens
ttagagcttataatc

SEQ ID NO: 479519 - DNA, 15 bp, Homo sapiens
tttagagcttataat

SEQ ID NO: 479520 - DNA, 15 bp, Homo sapiens
atttagagcttataa

SEQ ID NO: 479521 - DNA, 15 bp, Homo sapiens
catttagagcttata

SEQ ID NO: 479522 - DNA, 15 bp, Homo sapiens
gcatttagagcttat

SEQ ID NO: 479523 - DNA, 15 bp, Homo sapiens
tgcatttagagctta

SEQ ID NO: 479524 - DNA, 15 bp, Homo sapiens
ttgcatttagagctt

SEQ ID NO: 479525 - DNA, 15 bp, Homo sapiens
gttgcatttagagct

SEQ ID NO: 479526 - DNA, 15 bp, Homo sapiens
ggttgcatttagagc

SEQ ID NO: 479527 - DNA, 15 bp, Homo sapiens
gggttgcatttagag

SEQ ID NO: 479528 - DNA, 15 bp, Homo sapiens
tgggttgcatttaga

SEQ ID NO: 479529 - DNA, 15 bp, Homo sapiens
ttgggttgcatttag

SEQ ID NO: 479530 - DNA, 15 bp, Homo sapiens
tttgggttgcattta

SEQ ID NO: 479531 - DNA, 15 bp, Homo sapiens
atttgggttgcattt

SEQ ID NO: 479532 - DNA, 15 bp, Homo sapiens
tatttgggttgcatt

SEQ ID NO: 479533 - DNA, 15 bp, Homo sapiens
ttatttgggttgcat

SEQ ID NO: 479534 - DNA, 15 bp, Homo sapiens
tttatttgggttgca

SEQ ID NO: 479535 - DNA, 15 bp, Homo sapiens
atttatttgggttgc

SEQ ID NO: 479536 - DNA, 15 bp, Homo sapiens
tatttatttgggttg

SEQ ID NO: 479537 - DNA, 15 bp, Homo sapiens
gtatttatttgggtt

SEQ ID NO: 479538 - DNA, 15 bp, Homo sapiens
ggtatttatttgggt

SEQ ID NO: 479539 - DNA, 15 bp, Homo sapiens
gggtatttatttggg

SEQ ID NO: 479540 - DNA, 15 bp, Homo sapiens
tgggtatttatttgg

SEQ ID NO: 479541 - DNA, 15 bp, Homo sapiens
atgggtatttatttg

SEQ ID NO: 479542 - DNA, 15 bp, Homo sapiens
gatgggtatttattt

SEQ ID NO: 479543 - DNA, 15 bp, Homo sapiens
tgatgggtatttatt

SEQ ID NO: 479544 - DNA, 15 bp, Homo sapiens
ttgatgggtatttat

SEQ ID NO: 479545 - DNA, 15 bp, Homo sapiens
gttgatgggtattta

SEQ ID NO: 479546 - DNA, 15 bp, Homo sapiens
tgttgatgggtattt

SEQ ID NO: 479547 - DNA, 15 bp, Homo sapiens
atgttgatgggtatt

SEQ ID NO: 479548 - DNA, 15 bp, Homo sapiens
aatgttgatgggtat

SEQ ID NO: 479549 - DNA, 15 bp, Homo sapiens
taatgttgatgggta

SEQ ID NO: 479550 - DNA, 15 bp, Homo sapiens
ctaatgttgatgggt

SEQ ID NO: 479551 - DNA, 15 bp, Homo sapiens
tctaatgttgatggg

SEQ ID NO: 479552 - DNA, 15 bp, Homo sapiens
ttctaatgttgatgg

SEQ ID NO: 479553 - DNA, 15 bp, Homo sapiens
attctaatgttgatg

SEQ ID NO: 479554 - DNA, 15 bp, Homo sapiens
cattctaatgttgat

SEQ ID NO: 479555 - DNA, 15 bp, Homo sapiens
tcattctaatgttga

SEQ ID NO: 479556 - DNA, 15 bp, Homo sapiens
ttcattctaatgttg

SEQ ID NO: 479557 - DNA, 15 bp, Homo sapiens
attcattctaatgtt

SEQ ID NO: 479558 - DNA, 15 bp, Homo sapiens
tattcattctaatgt

SEQ ID NO: 479559 - DNA, 15 bp, Homo sapiens
gtattcattctaatg

SEQ ID NO: 479560 - DNA, 15 bp, Homo sapiens
tgtattcattctaat

SEQ ID NO: 479561 - DNA, 15 bp, Homo sapiens
atgtattcattctaa

SEQ ID NO: 479562 - DNA, 15 bp, Homo sapiens
aatgtattcattcta

SEQ ID NO: 479563 - DNA, 15 bp, Homo sapiens
taatgtattcattct

SEQ ID NO: 479564 - DNA, 15 bp, Homo sapiens
ataatgtattcattc

SEQ ID NO: 479565 - DNA, 15 bp, Homo sapiens
aataatgtattcatt

SEQ ID NO: 479566 - DNA, 15 bp, Homo sapiens
aaataatgtattcat

SEQ ID NO: 479567 - DNA, 15 bp, Homo sapiens
caaataatgtattca

SEQ ID NO: 479568 - DNA, 15 bp, Homo sapiens
acaaataatgtattc

SEQ ID NO: 479569 - DNA, 15 bp, Homo sapiens
cacaaataatgtatt

SEQ ID NO: 479570 - DNA, 15 bp, Homo sapiens
ccacaaataatgtat

SEQ ID NO: 479571 - DNA, 15 bp, Homo sapiens
accacaaataatgta

SEQ ID NO: 479572 - DNA, 15 bp, Homo sapiens
taccacaaataatgt

SEQ ID NO: 479573 - DNA, 15 bp, Homo sapiens
ataccacaaataatg

SEQ ID NO: 479574 - DNA, 15 bp, Homo sapiens
tataccacaaataat

SEQ ID NO: 479575 - DNA, 15 bp, Homo sapiens
ctataccacaaataa

SEQ ID NO: 479576 - DNA, 15 bp, Homo sapiens
tctataccacaaata

SEQ ID NO: 479577 - DNA, 15 bp, Homo sapiens
gtctataccacaaat

SEQ ID NO: 479578 - DNA, 15 bp, Homo sapiens
tgtctataccacaaa

SEQ ID NO: 479579 - DNA, 15 bp, Homo sapiens
gtgtctataccacaa

SEQ ID NO: 479580 - DNA, 15 bp, Homo sapiens
tgtgtctataccaca

SEQ ID NO: 479581 - DNA, 15 bp, Homo sapiens
ttgtgtctataccac

SEQ ID NO: 479582 - DNA, 15 bp, Homo sapiens
attgtgtctatacca

SEQ ID NO: 479583 - DNA, 15 bp, Homo sapiens
cattgtgtctatacc

SEQ ID NO: 479584 - DNA, 15 bp, Homo sapiens
ccattgtgtctatac

SEQ ID NO: 479585 - DNA, 15 bp, Homo sapiens
tccattgtgtctata

SEQ ID NO: 479586 - DNA, 15 bp, Homo sapiens
ttccattgtgtctat

SEQ ID NO: 479587 - DNA, 15 bp, Homo sapiens
attccattgtgtcta

SEQ ID NO: 479588 - DNA, 15 bp, Homo sapiens
tattccattgtgtct

SEQ ID NO: 479589 - DNA, 15 bp, Homo sapiens
gtattccattgtgtc

SEQ ID NO: 479590 - DNA, 15 bp, Homo sapiens
agtattccattgtgt

SEQ ID NO: 479591 - DNA, 15 bp, Homo sapiens
gagtattccattgtg

SEQ ID NO: 479592 - DNA, 15 bp, Homo sapiens
ggagtattccattgt

SEQ ID NO: 479593 - DNA, 15 bp, Homo sapiens
cggagtattccattg

SEQ ID NO: 479594 - DNA, 15 bp, Homo sapiens
gcggagtattccatt

SEQ ID NO: 479595 - DNA, 15 bp, Homo sapiens
tgcggagtattccat

SEQ ID NO: 479596 - DNA, 15 bp, Homo sapiens
ctgcggagtattcca

SEQ ID NO: 479597 - DNA, 15 bp, Homo sapiens
gctgcggagtattcc

SEQ ID NO: 479598 - DNA, 15 bp, Homo sapiens
agctgcggagtattc

SEQ ID NO: 479599 - DNA, 15 bp, Homo sapiens
cagctgcggagtatt

SEQ ID NO: 479600 - DNA, 15 bp, Homo sapiens
acagctgcggagtat

SEQ ID NO: 479601 - DNA, 15 bp, Homo sapiens
cacagctgcggagta

SEQ ID NO: 479602 - DNA, 15 bp, Homo sapiens
tcacagctgcggagt

SEQ ID NO: 479603 - DNA, 15 bp, Homo sapiens
ttcacagctgcggag

SEQ ID NO: 479604 - DNA, 15 bp, Homo sapiens
tttcacagctgcgga

SEQ ID NO: 479605 - DNA, 15 bp, Homo sapiens
ttttcacagctgcgg

SEQ ID NO: 479606 - DNA, 15 bp, Homo sapiens
cttttcacagctgcg

SEQ ID NO: 479607 - DNA, 15 bp, Homo sapiens
ccttttcacagctgc

SEQ ID NO: 479608 - DNA, 15 bp, Homo sapiens
tccttttcacagctg

SEQ ID NO: 479609 - DNA, 15 bp, Homo sapiens
ttccttttcacagct

SEQ ID NO: 479610 - DNA, 15 bp, Homo sapiens
attccttttcacagc

SEQ ID NO: 479611 - DNA, 15 bp, Homo sapiens
tattccttttcacag

SEQ ID NO: 479612 - DNA, 15 bp, Homo sapiens
gtattccttttcaca

SEQ ID NO: 479613 - DNA, 15 bp, Homo sapiens
tgtattccttttcac

SEQ ID NO: 479614 - DNA, 15 bp, Homo sapiens
gtgtattccttttca

SEQ ID NO: 479615 - DNA, 15 bp, Homo sapiens
agtgtattccttttc

SEQ ID NO: 479616 - DNA, 15 bp, Homo sapiens
cagtgtattcctttt

SEQ ID NO: 479617 - DNA, 15 bp, Homo sapiens
gcagtgtattccttt

SEQ ID NO: 479618 - DNA, 15 bp, Homo sapiens
tgcagtgtattcctt

SEQ ID NO: 479619 - DNA, 15 bp, Homo sapiens
ctgcagtgtattcct

SEQ ID NO: 479620 - DNA, 15 bp, Homo sapiens
tctgcagtgtattcc

SEQ ID NO: 479621 - DNA, 15 bp, Homo sapiens
atctgcagtgtattc

SEQ ID NO: 479622 - DNA, 15 bp, Homo sapiens
tatctgcagtgtatt

SEQ ID NO: 479623 - DNA, 15 bp, Homo sapiens
gtatctgcagtgtat

SEQ ID NO: 479624 - DNA, 15 bp, Homo sapiens
tgtatctgcagtgta

SEQ ID NO: 479625 - DNA, 15 bp, Homo sapiens
gtgtatctgcagtgt

SEQ ID NO: 479626 - DNA, 15 bp, Homo sapiens
tgtgtatctgcagtg

SEQ ID NO: 479627 - DNA, 15 bp, Homo sapiens
atgtgtatctgcagt

SEQ ID NO: 479628 - DNA, 15 bp, Homo sapiens
tatgtgtatctgcag

SEQ ID NO: 479629 - DNA, 15 bp, Homo sapiens
ttatgtgtatctgca

SEQ ID NO: 479630 - DNA, 15 bp, Homo sapiens
gttatgtgtatctgc

SEQ ID NO: 479631 - DNA, 15 bp, Homo sapiens
ggttatgtgtatctg

SEQ ID NO: 479632 - DNA, 15 bp, Homo sapiens
tggttatgtgtatct

SEQ ID NO: 479633 - DNA, 15 bp, Homo sapiens
atggttatgtgtatc

SEQ ID NO: 479634 - DNA, 15 bp, Homo sapiens
catggttatgtgtat

SEQ ID NO: 479635 - DNA, 15 bp, Homo sapiens
acatggttatgtgta

SEQ ID NO: 479636 - DNA, 15 bp, Homo sapiens
cacatggttatgtgt

SEQ ID NO: 479637 - DNA, 15 bp, Homo sapiens
ccacatggttatgtg

SEQ ID NO: 479638 - DNA, 15 bp, Homo sapiens
tccacatggttatgt

SEQ ID NO: 479639 - DNA, 15 bp, Homo sapiens
atccacatggttatg

SEQ ID NO: 479640 - DNA, 15 bp, Homo sapiens
aatccacatggttat

SEQ ID NO: 479641 - DNA, 15 bp, Homo sapiens
gaatccacatggtta

SEQ ID NO: 479642 - DNA, 15 bp, Homo sapiens
tgaatccacatggtt

SEQ ID NO: 479643 - DNA, 15 bp, Homo sapiens
atgaatccacatggt

SEQ ID NO: 479644 - DNA, 15 bp, Homo sapiens
aatgaatccacatgg

SEQ ID NO: 479645 - DNA, 15 bp, Homo sapiens
aaatgaatccacatg

SEQ ID NO: 479646 - DNA, 15 bp, Homo sapiens
gaaatgaatccacat

SEQ ID NO: 479647 - DNA, 15 bp, Homo sapiens
tgaaatgaatccaca

SEQ ID NO: 479648 - DNA, 15 bp, Homo sapiens
gtgaaatgaatccac

SEQ ID NO: 479649 - DNA, 15 bp, Homo sapiens
tgtgaaatgaatcca

SEQ ID NO: 479650 - DNA, 15 bp, Homo sapiens
atgtgaaatgaatcc

SEQ ID NO: 479651 - DNA, 15 bp, Homo sapiens
gatgtgaaatgaatc

SEQ ID NO: 479652 - DNA, 15 bp, Homo sapiens
tgatgtgaaatgaat

SEQ ID NO: 479653 - DNA, 15 bp, Homo sapiens
ttgatgtgaaatgaa

SEQ ID NO: 479654 - DNA, 15 bp, Homo sapiens
cttgatgtgaaatga

SEQ ID NO: 479655 - DNA, 15 bp, Homo sapiens
acttgatgtgaaatg

SEQ ID NO: 479656 - DNA, 15 bp, Homo sapiens
cacttgatgtgaaat

SEQ ID NO: 479657 - DNA, 15 bp, Homo sapiens
tcacttgatgtgaaa

SEQ ID NO: 479658 - DNA, 15 bp, Homo sapiens
ttcacttgatgtgaa

SEQ ID NO: 479659 - DNA, 15 bp, Homo sapiens
tttcacttgatgtga

SEQ ID NO: 479660 - DNA, 15 bp, Homo sapiens
ttttcacttgatgtg

SEQ ID NO: 479661 - DNA, 15 bp, Homo sapiens
cttttcacttgatgt

SEQ ID NO: 479662 - DNA, 15 bp, Homo sapiens
acttttcacttgatg

SEQ ID NO: 479663 - DNA, 15 bp, Homo sapiens
cacttttcacttgat

SEQ ID NO: 479664 - DNA, 15 bp, Homo sapiens
tcacttttcacttga

SEQ ID NO: 479665 - DNA, 15 bp, Homo sapiens
ttcacttttcacttg

SEQ ID NO: 479666 - DNA, 15 bp, Homo sapiens
attcacttttcactt

SEQ ID NO: 479667 - DNA, 15 bp, Homo sapiens
gattcacttttcact

SEQ ID NO: 479668 - DNA, 15 bp, Homo sapiens
ggattcacttttcac

SEQ ID NO: 479669 - DNA, 15 bp, Homo sapiens
gggattcacttttca

SEQ ID NO: 479670 - DNA, 15 bp, Homo sapiens
tgggattcacttttc

SEQ ID NO: 479671 - DNA, 15 bp, Homo sapiens
ttgggattcactttt

SEQ ID NO: 479672 - DNA, 15 bp, Homo sapiens
tttgggattcacttt

SEQ ID NO: 479673 - DNA, 15 bp, Homo sapiens
ttttgggattcactt

SEQ ID NO: 479674 - DNA, 15 bp, Homo sapiens
cttttgggattcact

SEQ ID NO: 479675 - DNA, 15 bp, Homo sapiens
tcttttgggattcac

SEQ ID NO: 479676 - DNA, 15 bp, Homo sapiens
ttcttttgggattca

SEQ ID NO: 479677 - DNA, 15 bp, Homo sapiens
attcttttgggattc

SEQ ID NO: 479678 - DNA, 15 bp, Homo sapiens
aattcttttgggatt

SEQ ID NO: 479679 - DNA, 15 bp, Homo sapiens
gaattcttttgggat

SEQ ID NO: 479680 - DNA, 15 bp, Homo sapiens
tgaattcttttggga

SEQ ID NO: 479681 - DNA, 15 bp, Homo sapiens
atgaattcttttggg

SEQ ID NO: 479682 - DNA, 15 bp, Homo sapiens
aatgaattcttttgg

SEQ ID NO: 479683 - DNA, 15 bp, Homo sapiens
caatgaattcttttg

SEQ ID NO: 479684 - DNA, 15 bp, Homo sapiens
ccaatgaattctttt

SEQ ID NO: 479685 - DNA, 15 bp, Homo sapiens
tccaatgaattcttt

SEQ ID NO: 479686 - DNA, 15 bp, Homo sapiens
ctccaatgaattctt

SEQ ID NO: 479687 - DNA, 15 bp, Homo sapiens
actccaatgaattct

SEQ ID NO: 479688 - DNA, 15 bp, Homo sapiens
gactccaatgaattc

SEQ ID NO: 479689 - DNA, 15 bp, Homo sapiens
ggactccaatgaatt

SEQ ID NO: 479690 - DNA, 15 bp, Homo sapiens
tggactccaatgaat

SEQ ID NO: 479691 - DNA, 15 bp, Homo sapiens
atggactccaatgaa

SEQ ID NO: 479692 - DNA, 15 bp, Homo sapiens
tatggactccaatga

SEQ ID NO: 479693 - DNA, 15 bp, Homo sapiens
ttatggactccaatg

SEQ ID NO: 479694 - DNA, 15 bp, Homo sapiens
cttatggactccaat

SEQ ID NO: 479695 - DNA, 15 bp, Homo sapiens
acttatggactccaa

SEQ ID NO: 479696 - DNA, 15 bp, Homo sapiens
cacttatggactcca

SEQ ID NO: 479697 - DNA, 15 bp, Homo sapiens
acacttatggactcc

SEQ ID NO: 479698 - DNA, 15 bp, Homo sapiens
tacacttatggactc

SEQ ID NO: 479699 - DNA, 15 bp, Homo sapiens
ttacacttatggact

SEQ ID NO: 479700 - DNA, 15 bp, Homo sapiens
cttacacttatggac

SEQ ID NO: 479701 - DNA, 15 bp, Homo sapiens
ccttacacttatgga

SEQ ID NO: 479702 - DNA, 15 bp, Homo sapiens
accttacacttatgg

SEQ ID NO: 479703 - DNA, 15 bp, Homo sapiens
aaccttacacttatg

SEQ ID NO: 479704 - DNA, 15 bp, Homo sapiens
gaaccttacacttat

SEQ ID NO: 479705 - DNA, 15 bp, Homo sapiens
tgaaccttacactta

SEQ ID NO: 479706 - DNA, 15 bp, Homo sapiens
gtgaaccttacactt

SEQ ID NO: 479707 - DNA, 15 bp, Homo sapiens
tgtgaaccttacact

SEQ ID NO: 479708 - DNA, 15 bp, Homo sapiens
ttgtgaaccttacac

SEQ ID NO: 479709 - DNA, 15 bp, Homo sapiens
tttgtgaaccttaca

SEQ ID NO: 479710 - DNA, 15 bp, Homo sapiens
atttgtgaaccttac

SEQ ID NO: 479711 - DNA, 15 bp, Homo sapiens
catttgtgaacctta

SEQ ID NO: 479712 - DNA, 15 bp, Homo sapiens
acatttgtgaacctt

SEQ ID NO: 479713 - DNA, 15 bp, Homo sapiens
gacatttgtgaacct

SEQ ID NO: 479714 - DNA, 15 bp, Homo sapiens
ggacatttgtgaacc

SEQ ID NO: 479715 - DNA, 15 bp, Homo sapiens
gggacatttgtgaac

SEQ ID NO: 479716 - DNA, 15 bp, Homo sapiens
tgggacatttgtgaa

SEQ ID NO: 479717 - DNA, 15 bp, Homo sapiens
ttgggacatttgtga

SEQ ID NO: 479718 - DNA, 15 bp, Homo sapiens
tttgggacatttgtg

SEQ ID NO: 479719 - DNA, 15 bp, Homo sapiens
gtttgggacatttgt

SEQ ID NO: 479720 - DNA, 15 bp, Homo sapiens
agtttgggacatttg

SEQ ID NO: 479721 - DNA, 15 bp, Homo sapiens
tagtttgggacattt

SEQ ID NO: 479722 - DNA, 15 bp, Homo sapiens
ttagtttgggacatt

SEQ ID NO: 479723 - DNA, 15 bp, Homo sapiens
tttagtttgggacat

SEQ ID NO: 479724 - DNA, 15 bp, Homo sapiens
gtttagtttgggaca

SEQ ID NO: 479725 - DNA, 15 bp, Homo sapiens
tgtttagtttgggac

SEQ ID NO: 479726 - DNA, 15 bp, Homo sapiens
ttgtttagtttggga

SEQ ID NO: 479727 - DNA, 15 bp, Homo sapiens
attgtttagtttggg

SEQ ID NO: 479728 - DNA, 15 bp, Homo sapiens
tattgtttagtttgg

SEQ ID NO: 479729 - DNA, 15 bp, Homo sapiens
gtattgtttagtttg

SEQ ID NO: 479730 - DNA, 15 bp, Homo sapiens
ggtattgtttagttt

SEQ ID NO: 479731 - DNA, 15 bp, Homo sapiens
aggtattgtttagtt

SEQ ID NO: 479732 - DNA, 15 bp, Homo sapiens
caggtattgtttagt

SEQ ID NO: 479733 - DNA, 15 bp, Homo sapiens
gcaggtattgtttag

SEQ ID NO: 479734 - DNA, 15 bp, Homo sapiens
tgcaggtattgttta

SEQ ID NO: 479735 - DNA, 15 bp, Homo sapiens
atgcaggtattgttt

SEQ ID NO: 479736 - DNA, 15 bp, Homo sapiens
aatgcaggtattgtt

SEQ ID NO: 479737 - DNA, 15 bp, Homo sapiens
caatgcaggtattgt

SEQ ID NO: 479738 - DNA, 15 bp, Homo sapiens
gcaatgcaggtattg

SEQ ID NO: 479739 - DNA, 15 bp, Homo sapiens
agcaatgcaggtatt

SEQ ID NO: 479740 - DNA, 15 bp, Homo sapiens
aagcaatgcaggtat

SEQ ID NO: 479741 - DNA, 15 bp, Homo sapiens
taagcaatgcaggta

SEQ ID NO: 479742 - DNA, 15 bp, Homo sapiens
ctaagcaatgcaggt

SEQ ID NO: 479743 - DNA, 15 bp, Homo sapiens
tctaagcaatgcagg

SEQ ID NO: 479744 - DNA, 15 bp, Homo sapiens
atctaagcaatgcag

SEQ ID NO: 479745 - DNA, 15 bp, Homo sapiens
tatctaagcaatgca

SEQ ID NO: 479746 - DNA, 15 bp, Homo sapiens
ttatctaagcaatgc

SEQ ID NO: 479747 - DNA, 15 bp, Homo sapiens
tttatctaagcaatg

SEQ ID NO: 479748 - DNA, 15 bp, Homo sapiens
gtttatctaagcaat

SEQ ID NO: 479749 - DNA, 15 bp, Homo sapiens
tgtttatctaagcaa

SEQ ID NO: 479750 - DNA, 15 bp, Homo sapiens
ttgtttatctaagca

SEQ ID NO: 479751 - DNA, 15 bp, Homo sapiens
tttgtttatctaagc

SEQ ID NO: 479752 - DNA, 15 bp, Homo sapiens
atttgtttatctaag

SEQ ID NO: 479753 - DNA, 15 bp, Homo sapiens
tatttgtttatctaa

SEQ ID NO: 479754 - DNA, 15 bp, Homo sapiens
atatttgtttatcta

SEQ ID NO: 479755 - DNA, 15 bp, Homo sapiens
catatttgtttatct

SEQ ID NO: 479756 - DNA, 15 bp, Homo sapiens
ccatatttgtttatc

SEQ ID NO: 479757 - DNA, 15 bp, Homo sapiens
accatatttgtttat

SEQ ID NO: 479758 - DNA, 15 bp, Homo sapiens
taccatatttgttta

SEQ ID NO: 479759 - DNA, 15 bp, Homo sapiens
ttaccatatttgttt

SEQ ID NO: 479760 - DNA, 15 bp, Homo sapiens
tttaccatatttgtt

SEQ ID NO: 479761 - DNA, 15 bp, Homo sapiens
ttttaccatatttgt

SEQ ID NO: 479762 - DNA, 15 bp, Homo sapiens
gttttaccatatttg

SEQ ID NO: 479763 - DNA, 15 bp, Homo sapiens
agttttaccatattt

SEQ ID NO: 479764 - DNA, 15 bp, Homo sapiens
cagttttaccatatt

SEQ ID NO: 479765 - DNA, 15 bp, Homo sapiens
acagttttaccatat

SEQ ID NO: 479766 - DNA, 15 bp, Homo sapiens
tacagttttaccata

SEQ ID NO: 479767 - DNA, 15 bp, Homo sapiens
ttacagttttaccat

SEQ ID NO: 479768 - DNA, 15 bp, Homo sapiens
tttacagttttacca

SEQ ID NO: 479769 - DNA, 15 bp, Homo sapiens
ttttacagttttacc

SEQ ID NO: 479770 - DNA, 15 bp, Homo sapiens
tttttacagttttac

SEQ ID NO: 479771 - DNA, 15 bp, Homo sapiens
ttttttacagtttta

SEQ ID NO: 479772 - DNA, 15 bp, Homo sapiens
tttttttacagtttt

SEQ ID NO: 479773 - DNA, 15 bp, Homo sapiens
gtttttttacagttt

SEQ ID NO: 479774 - DNA, 15 bp, Homo sapiens
tgtttttttacagtt

SEQ ID NO: 479775 - DNA, 15 bp, Homo sapiens
ttgtttttttacagt

SEQ ID NO: 479776 - DNA, 15 bp, Homo sapiens
tttgtttttttacag

SEQ ID NO: 479777 - DNA, 15 bp, Homo sapiens
ttttgtttttttaca

SEQ ID NO: 479778 - DNA, 15 bp, Homo sapiens
gttttgtttttttac

SEQ ID NO: 479779 - DNA, 15 bp, Homo sapiens
tgttttgttttttta

SEQ ID NO: 479780 - DNA, 15 bp, Homo sapiens
ttgttttgttttttt

SEQ ID NO: 479781 - DNA, 15 bp, Homo sapiens
cttgttttgttttgt

SEQ ID NO: 479782 - DNA, 15 bp, Homo sapiens
tcttgttttgttttg

SEQ ID NO: 479783 - DNA, 15 bp, Homo sapiens
gtcttgttttgtttt

SEQ ID NO: 479784 - DNA, 15 bp, Homo sapiens
tgtcttgttttgttt

SEQ ID NO: 479785 - DNA, 15 bp, Homo sapiens
ttgtcttgttttgtt

SEQ ID NO: 479786 - DNA, 15 bp, Homo sapiens
tttgtcttgttttgt

SEQ ID NO: 479787 - DNA, 15 bp, Homo sapiens
ttttgtcttgttttg

SEQ ID NO: 479788 - DNA, 15 bp, Homo sapiens
tttttgtcttgtttt

SEQ ID NO: 479789 - DNA, 15 bp, Homo sapiens
ctttttgtcttgttt

SEQ ID NO: 479790 - DNA, 15 bp, Homo sapiens
cctttttgtcttgtt

SEQ ID NO: 479791 - DNA, 15 bp, Homo sapiens
ccctttttgtcttgt

SEQ ID NO: 479792 - DNA, 15 bp, Homo sapiens
gccctttttgtcttg

SEQ ID NO: 479793 - DNA, 15 bp, Homo sapiens
agccctttttgtctt

SEQ ID NO: 479794 - DNA, 15 bp, Homo sapiens
tagccctttttgtct

SEQ ID NO: 479795 - DNA, 15 bp, Homo sapiens
ctagccctttttgtc

SEQ ID NO: 479796 - DNA, 15 bp, Homo sapiens
cctagccctttttgt

SEQ ID NO: 479797 - DNA, 15 bp, Homo sapiens
tcctagccctttttg

SEQ ID NO: 479798 - DNA, 15 bp, Homo sapiens
ttcctagcccttttt

SEQ ID NO: 479799 - DNA, 15 bp, Homo sapiens
tttcctagccctttt

SEQ ID NO: 479800 - DNA, 15 bp, Homo sapiens
atttcctagcccttt

SEQ ID NO: 479801 - DNA, 15 bp, Homo sapiens
catttcctagccctt

SEQ ID NO: 479802 - DNA, 15 bp, Homo sapiens
tcatttcctagccct

SEQ ID NO: 479803 - DNA, 15 bp, Homo sapiens
atcatttcctagccc

SEQ ID NO: 479804 - DNA, 15 bp, Homo sapiens
tatcatttcctagcc

SEQ ID NO: 479805 - DNA, 15 bp, Homo sapiens
ttatcatttcctagc

SEQ ID NO: 479806 - DNA, 15 bp, Homo sapiens
tttatcatttcctag

SEQ ID NO: 479807 - DNA, 15 bp, Homo sapiens
gtttatcatttccta

SEQ ID NO: 479808 - DNA, 15 bp, Homo sapiens
ggtttatcatttcct

SEQ ID NO: 479809 - DNA, 15 bp, Homo sapiens
gggtttatcatttcc

SEQ ID NO: 479810 - DNA, 15 bp, Homo sapiens
tgggtttatcatttc

SEQ ID NO: 479811 - DNA, 15 bp, Homo sapiens
ttgggtttatcattt

SEQ ID NO: 479812 - DNA, 15 bp, Homo sapiens
tttgggtttatcatt

SEQ ID NO: 479813 - DNA, 15 bp, Homo sapiens
ttttgggtttatcat

SEQ ID NO: 479814 - DNA, 15 bp, Homo sapiens
cttttgggtttatca

SEQ ID NO: 479815 - DNA, 15 bp, Homo sapiens
tcttttgggtttatc

SEQ ID NO: 479816 - DNA, 15 bp, Homo sapiens
gtcttttgggtttat

SEQ ID NO: 479817 - DNA, 15 bp, Homo sapiens
tgtcttttgggttta

SEQ ID NO: 479818 - DNA, 15 bp, Homo sapiens
ttgtcttttgggttt

SEQ ID NO: 479819 - DNA, 15 bp, Homo sapiens
tttgtcttttgggtt

SEQ ID NO: 479820 - DNA, 15 bp, Homo sapiens
ttttgtcttttgggt

SEQ ID NO: 479821 - DNA, 15 bp, Homo sapiens
attttgtcttttggg

SEQ ID NO: 479822 - DNA, 15 bp, Homo sapiens
tattttgtcttttgg

SEQ ID NO: 479823 - DNA, 15 bp, Homo sapiens
ctattttgtcttttg

SEQ ID NO: 479824 - DNA, 15 bp, Homo sapiens
gctattttgtctttt

SEQ ID NO: 479825 - DNA, 15 bp, Homo sapiens
tgctattttgtcttt

SEQ ID NO: 479826 - DNA, 15 bp, Homo sapiens
ctgctattttgtctt

SEQ ID NO: 479827 - DNA, 15 bp, Homo sapiens
actgctattttgtct

SEQ ID NO: 479828 - DNA, 15 bp, Homo sapiens
aactgctattttgtc

SEQ ID NO: 479829 - DNA, 15 bp, Homo sapiens
taactgctattttgt

SEQ ID NO: 479830 - DNA, 15 bp, Homo sapiens
ataactgctattttg

SEQ ID NO: 479831 - DNA, 15 bp, Homo sapiens
aataactgctatttt

SEQ ID NO: 479832 - DNA, 15 bp, Homo sapiens
aaataactgctattt

SEQ ID NO: 479833 - DNA, 15 bp, Homo sapiens
gaaataactgctatt

SEQ ID NO: 479834 - DNA, 15 bp, Homo sapiens
agaaataactgctat

SEQ ID NO: 479835 - DNA, 15 bp, Homo sapiens
cagaaataactgcta

SEQ ID NO: 479836 - DNA, 15 bp, Homo sapiens
tcagaaataactgct

SEQ ID NO: 479837 - DNA, 15 bp, Homo sapiens
ctcagaaataactgc

SEQ ID NO: 479838 - DNA, 15 bp, Homo sapiens
cctcagaaataactg

SEQ ID NO: 479839 - DNA, 15 bp, Homo sapiens
ccctcagaaataact

SEQ ID NO: 479840 - DNA, 15 bp, Homo sapiens
tccctcagaaataac

SEQ ID NO: 479841 - DNA, 15 bp, Homo sapiens
ctccctcagaaataa

SEQ ID NO: 479842 - DNA, 15 bp, Homo sapiens
cctccctcagaaata

SEQ ID NO: 479843 - DNA, 15 bp, Homo sapiens
tcctccctcagaaat

SEQ ID NO: 479844 - DNA, 15 bp, Homo sapiens
ctcctccctcagaaa

SEQ ID NO: 479845 - DNA, 15 bp, Homo sapiens
cctcctccctcagaa

SEQ ID NO: 479846 - DNA, 15 bp, Homo sapiens
ccctcctccctcaga

SEQ ID NO: 479847 - DNA, 15 bp, Homo sapiens
tccctcctccctcag

SEQ ID NO: 479848 - DNA, 15 bp, Homo sapiens
ttccctcctccctca

SEQ ID NO: 479849 - DNA, 15 bp, Homo sapiens
cttccctcctccctc

SEQ ID NO: 479850 - DNA, 15 bp, Homo sapiens
ccttccctcctccct

SEQ ID NO: 479851 - DNA, 15 bp, Homo sapiens
cccttccctcctccc

SEQ ID NO: 479852 - DNA, 15 bp, Homo sapiens
ccccttccctcctcc

SEQ ID NO: 479853 - DNA, 15 bp, Homo sapiens
tccccttccctcctc

SEQ ID NO: 479854 - DNA, 15 bp, Homo sapiens
atccccttccctcct

SEQ ID NO: 479855 - DNA, 15 bp, Homo sapiens
catccccttccctcc

SEQ ID NO: 479856 - DNA, 15 bp, Homo sapiens
ccatccccttccctc

SEQ ID NO: 479857 - DNA, 15 bp, Homo sapiens
cccatccccttccct

SEQ ID NO: 479858 - DNA, 15 bp, Homo sapiens
ccccatccccttccc

SEQ ID NO: 479859 - DNA, 15 bp, Homo sapiens
accccatccccttcc

SEQ ID NO: 479860 - DNA, 15 bp, Homo sapiens
aaccccatccccttc

SEQ ID NO: 479861 - DNA, 15 bp, Homo sapiens
caaccccatcccctt

SEQ ID NO: 479862 - DNA, 15 bp, Homo sapiens
ccaaccccatcccct

SEQ ID NO: 479863 - DNA, 15 bp, Homo sapiens
cccaaccccatcccc

SEQ ID NO: 479864 - DNA, 15 bp, Homo sapiens
ccccaaccccatccc

SEQ ID NO: 479865 - DNA, 15 bp, Homo sapiens
tccccaaccccatcc

SEQ ID NO: 479866 - DNA, 15 bp, Homo sapiens
ttccccaaccccatc

SEQ ID NO: 479867 - DNA, 15 bp, Homo sapiens
cttccccaaccccat

SEQ ID NO: 479868 - DNA, 15 bp, Homo sapiens
ccttccccaacccca

SEQ ID NO: 479869 - DNA, 15 bp, Homo sapiens
cccttccccaacccc

SEQ ID NO: 479870 - DNA, 15 bp, Homo sapiens
gcccttccccaaccc

SEQ ID NO: 479871 - DNA, 15 bp, Homo sapiens
tgcccttccccaacc

SEQ ID NO: 479872 - DNA, 15 bp, Homo sapiens
gtgcccttccccaac

SEQ ID NO: 479873 - DNA, 15 bp, Homo sapiens
ggtgcccttccccaa

SEQ ID NO: 479874 - DNA, 15 bp, Homo sapiens
gggtgcccttcccca

SEQ ID NO: 479875 - DNA, 15 bp, Homo sapiens
tgggtgcccttcccc

SEQ ID NO: 479876 - DNA, 15 bp, Homo sapiens
ctgggtgcccttccc

SEQ ID NO: 479877 - DNA, 15 bp, Homo sapiens
tctgggtgcccttcc

SEQ ID NO: 479878 - DNA, 15 bp, Homo sapiens
ctctgggtgcccttc

SEQ ID NO: 479879 - DNA, 15 bp, Homo sapiens
tctctgggtgccctt

SEQ ID NO: 479880 - DNA, 15 bp, Homo sapiens
ttctctgggtgccct

SEQ ID NO: 479881 - DNA, 15 bp, Homo sapiens
attctctgggtgccc

SEQ ID NO: 479882 - DNA, 15 bp, Homo sapiens
aattctctgggtgcc

SEQ ID NO: 479883 - DNA, 15 bp, Homo sapiens
aaattctctgggtgc

SEQ ID NO: 479884 - DNA, 15 bp, Homo sapiens
aaaattctctgggtg

SEQ ID NO: 479885 - DNA, 15 bp, Homo sapiens
taaaattctctgggt

SEQ ID NO: 479886 - DNA, 15 bp, Homo sapiens
ctaaaattctctggg

SEQ ID NO: 479887 - DNA, 15 bp, Homo sapiens
cctaaaattctctgg

SEQ ID NO: 479888 - DNA, 15 bp, Homo sapiens
tcctaaaattctctg

SEQ ID NO: 479889 - DNA, 15 bp, Homo sapiens
ctcctaaaattctct

SEQ ID NO: 479890 - DNA, 15 bp, Homo sapiens
actcctaaaattctc

SEQ ID NO: 479891 - DNA, 15 bp, Homo sapiens
cactcctaaaattct

SEQ ID NO: 479892 - DNA, 15 bp, Homo sapiens
tcactcctaaaattc

SEQ ID NO: 479893 - DNA, 15 bp, Homo sapiens
atcactcctaaaatt

SEQ ID NO: 479894 - DNA, 15 bp, Homo sapiens
catcactcctaaaat

SEQ ID NO: 479895 - DNA, 15 bp, Homo sapiens
ccatcactcctaaaa

SEQ ID NO: 479896 - DNA, 15 bp, Homo sapiens
tccatcactcctaaa

SEQ ID NO: 479897 - DNA, 15 bp, Homo sapiens
gtccatcactcctaa

SEQ ID NO: 479898 - DNA, 15 bp, Homo sapiens
agtccatcactccta

SEQ ID NO: 479899 - DNA, 15 bp, Homo sapiens
aagtccatcactcct

SEQ ID NO: 479900 - DNA, 15 bp, Homo sapiens
aaagtccatcactcc

SEQ ID NO: 479901 - DNA, 15 bp, Homo sapiens
aaaagtccatcactc

SEQ ID NO: 479902 - DNA, 15 bp, Homo sapiens
gaaaagtccatcact

SEQ ID NO: 479903 - DNA, 15 bp, Homo sapiens
ggaaaagtccatcac

SEQ ID NO: 479904 - DNA, 15 bp, Homo sapiens
aggaaaagtccatca

SEQ ID NO: 479905 - DNA, 15 bp, Homo sapiens
aaggaaaagtccatc

SEQ ID NO: 479906 - DNA, 15 bp, Homo sapiens
taaggaaaagtccat

SEQ ID NO: 479907 - DNA, 15 bp, Homo sapiens
ttaaggaaaagtcca

SEQ ID NO: 479908 - DNA, 15 bp, Homo sapiens
tttaaggaaaagtcc

SEQ ID NO: 479909 - DNA, 15 bp, Homo sapiens
atttaaggaaaagtc

SEQ ID NO: 479910 - DNA, 15 bp, Homo sapiens
aatttaaggaaaagt

SEQ ID NO: 479911 - DNA, 15 bp, Homo sapiens
caatttaaggaaaag

SEQ ID NO: 479912 - DNA, 15 bp, Homo sapiens
tcaatttaaggaaaa

SEQ ID NO: 479913 - DNA, 15 bp, Homo sapiens
ttcaatttaaggaaa

SEQ ID NO: 479914 - DNA, 15 bp, Homo sapiens
attcaatttaaggaa

SEQ ID NO: 479915 - DNA, 15 bp, Homo sapiens
cattcaatttaagga

SEQ ID NO: 479916 - DNA, 15 bp, Homo sapiens
ccattcaatttaagg

SEQ ID NO: 479917 - DNA, 15 bp, Homo sapiens
accattcaatttaag

SEQ ID NO: 479918 - DNA, 15 bp, Homo sapiens
caccattcaatttaa

SEQ ID NO: 479919 - DNA, 15 bp, Homo sapiens
ccaccattcaattta

SEQ ID NO: 479920 - DNA, 15 bp, Homo sapiens
cccaccattcaattt

SEQ ID NO: 479921 - DNA, 15 bp, Homo sapiens
acccaccattcaatt

SEQ ID NO: 479922 - DNA, 15 bp, Homo sapiens
aacccaccattcaat

SEQ ID NO: 479923 - DNA, 15 bp, Homo sapiens
gaacccaccattcaa

SEQ ID NO: 479924 - DNA, 15 bp, Homo sapiens
tgaacccaccattca

SEQ ID NO: 479925 - DNA, 15 bp, Homo sapiens
atgaacccaccattc

SEQ ID NO: 479926 - DNA, 15 bp, Homo sapiens
tatgaacccaccatt

SEQ ID NO: 479927 - DNA, 15 bp, Homo sapiens
atatgaacccaccat

SEQ ID NO: 479928 - DNA, 15 bp, Homo sapiens
aatatgaacccacca

SEQ ID NO: 479929 - DNA, 15 bp, Homo sapiens
caatatgaacccacc

SEQ ID NO: 479930 - DNA, 15 bp, Homo sapiens
acaatatgaacccac

SEQ ID NO: 479931 - DNA, 15 bp, Homo sapiens
aacaatatgaaccca

SEQ ID NO: 479932 - DNA, 15 bp, Homo sapiens
aaacaatatgaaccc

SEQ ID NO: 479933 - DNA, 15 bp, Homo sapiens
aaaacaatatgaacc

SEQ ID NO: 479934 - DNA, 15 bp, Homo sapiens
caaaacaatatgaac

SEQ ID NO: 479935 - DNA, 15 bp, Homo sapiens
acaaaacaatatgaa

SEQ ID NO: 479936 - DNA, 15 bp, Homo sapiens
aacaaaacaatatga

SEQ ID NO: 479937 - DNA, 15 bp, Homo sapiens
taacaaaacaatatg

SEQ ID NO: 479938 - DNA, 15 bp, Homo sapiens
ataacaaaacaatat

SEQ ID NO: 479939 - DNA, 15 bp, Homo sapiens
aataacaaaacaata

SEQ ID NO: 479940 - DNA, 15 bp, Homo sapiens
gaataacaaaacaat

SEQ ID NO: 479941 - DNA, 15 bp, Homo sapiens
agaataacaaaacaa

SEQ ID NO: 479942 - DNA, 15 bp, Homo sapiens
aagaataacaaaaca

SEQ ID NO: 479943 - DNA, 15 bp, Homo sapiens
aaagaataacaaaac

SEQ ID NO: 479944 - DNA, 15 bp, Homo sapiens
caaagaataacaaaa

SEQ ID NO: 479945 - DNA, 15 bp, Homo sapiens
acaaagaataacaaa

SEQ ID NO: 479946 - DNA, 15 bp, Homo sapiens
cacaaagaataacaa

SEQ ID NO: 479947 - DNA, 15 bp, Homo sapiens
gcacaaagaataaca

SEQ ID NO: 479948 - DNA, 15 bp, Homo sapiens
ggcacaaagaataac

SEQ ID NO: 479949 - DNA, 15 bp, Homo sapiens
aggcacaaagaataa

SEQ ID NO: 479950 - DNA, 15 bp, Homo sapiens
aaggcacaaagaata

SEQ ID NO: 479951 - DNA, 15 bp, Homo sapiens
taaggcacaaagaat

SEQ ID NO: 479952 - DNA, 15 bp, Homo sapiens
gtaaggcacaaagaa

SEQ ID NO: 479953 - DNA, 15 bp, Homo sapiens
cgtaaggcacaaaga

SEQ ID NO: 479954 - DNA, 15 bp, Homo sapiens
acgtaaggcacaaag

SEQ ID NO: 479955 - DNA, 15 bp, Homo sapiens
tacgtaaggcacaaa

SEQ ID NO: 479956 - DNA, 15 bp, Homo sapiens
atacgtaaggcacaa

SEQ ID NO: 479957 - DNA, 15 bp, Homo sapiens
aatacgtaaggcaca

SEQ ID NO: 479958 - DNA, 15 bp, Homo sapiens
aaatacgtaaggcac

SEQ ID NO: 479959 - DNA, 15 bp, Homo sapiens
aaaatacgtaaggca

SEQ ID NO: 479960 - DNA, 15 bp, Homo sapiens
taaaatacgtaaggc

SEQ ID NO: 479961 - DNA, 15 bp, Homo sapiens
gtaaaatacgtaagg

SEQ ID NO: 479962 - DNA, 15 bp, Homo sapiens
tgtaaaatacgtaag

SEQ ID NO: 479963 - DNA, 15 bp, Homo sapiens
ttgtaaaatacgtaa

SEQ ID NO: 479964 - DNA, 15 bp, Homo sapiens
tttgtaaaatacgta

SEQ ID NO: 479965 - DNA, 15 bp, Homo sapiens
atttgtaaaatacgt

SEQ ID NO: 479966 - DNA, 15 bp, Homo sapiens
tatttgtaaaatacg

SEQ ID NO: 479967 - DNA, 15 bp, Homo sapiens
ttatttgtaaaatac

SEQ ID NO: 479968 - DNA, 15 bp, Homo sapiens
gttatttgtaaaata

SEQ ID NO: 479969 - DNA, 15 bp, Homo sapiens
ggttatttgtaaaat

SEQ ID NO: 479970 - DNA, 15 bp, Homo sapiens
tggttatttgtaaaa

SEQ ID NO: 479971 - DNA, 15 bp, Homo sapiens
ttggttatttgtaaa

SEQ ID NO: 479972 - DNA, 15 bp, Homo sapiens
attggttatttgtaa

SEQ ID NO: 479973 - DNA, 15 bp, Homo sapiens
aattggttatttgta

SEQ ID NO: 479974 - DNA, 15 bp, Homo sapiens
caattggttatttgt

SEQ ID NO: 479975 - DNA, 15 bp, Homo sapiens
ccaattggttatttg

SEQ ID NO: 479976 - DNA, 15 bp, Homo sapiens
tccaattggttattt

SEQ ID NO: 479977 - DNA, 15 bp, Homo sapiens
atccaattggttatt

SEQ ID NO: 479978 - DNA, 15 bp, Homo sapiens
gatccaattggttat

SEQ ID NO: 479979 - DNA, 15 bp, Homo sapiens
agatccaattggtta

SEQ ID NO: 479980 - DNA, 15 bp, Homo sapiens
tagatccaattggtt

SEQ ID NO: 479981 - DNA, 15 bp, Homo sapiens
atagatccaattggt

SEQ ID NO: 479982 - DNA, 15 bp, Homo sapiens
catagatccaattgg

SEQ ID NO: 479983 - DNA, 15 bp, Homo sapiens
acatagatccaattg

SEQ ID NO: 479984 - DNA, 15 bp, Homo sapiens
tacatagatccaatt

SEQ ID NO: 479985 - DNA, 15 bp, Homo sapiens
ttacatagatccaat

SEQ ID NO: 479986 - DNA, 15 bp, Homo sapiens
attacatagatccaa

SEQ ID NO: 479987 - DNA, 15 bp, Homo sapiens
tattacatagatcca

SEQ ID NO: 479988 - DNA, 15 bp, Homo sapiens
atattacatagatcc

SEQ ID NO: 479989 - DNA, 15 bp, Homo sapiens
aatattacatagatc

SEQ ID NO: 479990 - DNA, 15 bp, Homo sapiens
taatattacatagat

SEQ ID NO: 479991 - DNA, 15 bp, Homo sapiens
ataatattacataga

SEQ ID NO: 479992 - DNA, 15 bp, Homo sapiens
tataatattacatag

SEQ ID NO: 479993 - DNA, 15 bp, Homo sapiens
ttataatattacata

SEQ ID NO: 479994 - DNA, 15 bp, Homo sapiens
attataatattacat

SEQ ID NO: 479995 - DNA, 15 bp, Homo sapiens
tattataatattaca

SEQ ID NO: 479996 - DNA, 15 bp, Homo sapiens
gtattataatattac

SEQ ID NO: 479997 - DNA, 15 bp, Homo sapiens
tgtattataatatta

SEQ ID NO: 479998 - DNA, 15 bp, Homo sapiens
ttgtattataatatt

SEQ ID NO: 479999 - DNA, 15 bp, Homo sapiens
tttgtattataatat

SEQ ID NO: 480000 - DNA, 15 bp, Homo sapiens
gtttgtattataata

SEQ ID NO: 480001 - DNA, 15 bp, Homo sapiens
agtttgtattataat

SEQ ID NO: 480002 - DNA, 15 bp, Homo sapiens
cagtttgtattataa

SEQ ID NO: 480003 - DNA, 15 bp, Homo sapiens
tcagtttgtattata

SEQ ID NO: 480004 - DNA, 15 bp, Homo sapiens
ctcagtttgtattat

SEQ ID NO: 480005 - DNA, 15 bp, Homo sapiens
actcagtttgtatta

SEQ ID NO: 480006 - DNA, 15 bp, Homo sapiens
tactcagtttgtatt

SEQ ID NO: 480007 - DNA, 15 bp, Homo sapiens
ttactcagtttgtat

SEQ ID NO: 480008 - DNA, 15 bp, Homo sapiens
tttactcagtttgta

SEQ ID NO: 480009 - DNA, 15 bp, Homo sapiens
ctttactcagtttgt

SEQ ID NO: 480010 - DNA, 15 bp, Homo sapiens
cctttactcagtttg

SEQ ID NO: 480011 - DNA, 15 bp, Homo sapiens
tcctttactcagttt

SEQ ID NO: 480012 - DNA, 15 bp, Homo sapiens
atcctttactcagtt

SEQ ID NO: 480013 - DNA, 15 bp, Homo sapiens
aatcctttactcagt

SEQ ID NO: 480014 - DNA, 15 bp, Homo sapiens
taatcctttactcag

SEQ ID NO: 480015 - DNA, 15 bp, Homo sapiens
ctaatcctttactca

SEQ ID NO: 480016 - DNA, 15 bp, Homo sapiens
cctaatcctttactc

SEQ ID NO: 480017 - DNA, 15 bp, Homo sapiens
acctaatcctttact

SEQ ID NO: 480018 - DNA, 15 bp, Homo sapiens
aacctaatcctttac

SEQ ID NO: 480019 - DNA, 15 bp, Homo sapiens
caacctaatccttta

SEQ ID NO: 480020 - DNA, 15 bp, Homo sapiens
tcaacctaatccttt

SEQ ID NO: 480021 - DNA, 15 bp, Homo sapiens
ctcaacctaatcctt

SEQ ID NO: 480022 - DNA, 15 bp, Homo sapiens
cctcaacctaatcct

SEQ ID NO: 480023 - DNA, 15 bp, Homo sapiens
tcctcaacctaatcc

SEQ ID NO: 480024 - DNA, 15 bp, Homo sapiens
atcctcaacctaatc

SEQ ID NO: 480025 - DNA, 15 bp, Homo sapiens
gatcctcaacctaat

SEQ ID NO: 480026 - DNA, 15 bp, Homo sapiens
tgatcctcaacctaa

SEQ ID NO: 480027 - DNA, 15 bp, Homo sapiens
gtgatcctcaaccta

SEQ ID NO: 480028 - DNA, 15 bp, Homo sapiens
tgtgatcctcaacct

SEQ ID NO: 480029 - DNA, 15 bp, Homo sapiens
ctgtgatcctcaacc

SEQ ID NO: 480030 - DNA, 15 bp, Homo sapiens
gctgtgatcctcaac

SEQ ID NO: 480031 - DNA, 15 bp, Homo sapiens
tgctgtgatcctcaa

SEQ ID NO: 480032 - DNA, 15 bp, Homo sapiens
atgctgtgatcctca

SEQ ID NO: 480033 - DNA, 15 bp, Homo sapiens
aatgctgtgatcctc

SEQ ID NO: 480034 - DNA, 15 bp, Homo sapiens
caatgctgtgatcct

SEQ ID NO: 480035 - DNA, 15 bp, Homo sapiens
ccaatgctgtgatcc

SEQ ID NO: 480036 - DNA, 15 bp, Homo sapiens
tccaatgctgtgatc

SEQ ID NO: 480037 - DNA, 15 bp, Homo sapiens
ttccaatgctgtgat

SEQ ID NO: 480038 - DNA, 15 bp, Homo sapiens
cttccaatgctgtga

SEQ ID NO: 480039 - DNA, 15 bp, Homo sapiens
acttccaatgctgtg

SEQ ID NO: 480040 - DNA, 15 bp, Homo sapiens
aacttccaatgctgt

SEQ ID NO: 480041 - DNA, 15 bp, Homo sapiens
gaacttccaatgctg

SEQ ID NO: 480042 - DNA, 15 bp, Homo sapiens
agaacttccaatgct

SEQ ID NO: 480043 - DNA, 15 bp, Homo sapiens
aagaacttccaatgc

SEQ ID NO: 480044 - DNA, 15 bp, Homo sapiens
caagaacttccaatg

SEQ ID NO: 480045 - DNA, 15 bp, Homo sapiens
ccaagaacttccaat

SEQ ID NO: 480046 - DNA, 15 bp, Homo sapiens
accaagaacttccaa

SEQ ID NO: 480047 - DNA, 15 bp, Homo sapiens
caccaagaacttcca

SEQ ID NO: 480048 - DNA, 15 bp, Homo sapiens
acaccaagaacttcc

SEQ ID NO: 480049 - DNA, 15 bp, Homo sapiens
aacaccaagaacttc

SEQ ID NO: 480050 - DNA, 15 bp, Homo sapiens
caacaccaagaactt

SEQ ID NO: 480051 - DNA, 15 bp, Homo sapiens
tcaacaccaagaact

SEQ ID NO: 480052 - DNA, 15 bp, Homo sapiens
ttcaacaccaagaac

SEQ ID NO: 480053 - DNA, 15 bp, Homo sapiens
cttcaacaccaagaa

SEQ ID NO: 480054 - DNA, 15 bp, Homo sapiens
tcttcaacaccaaga

SEQ ID NO: 480055 - DNA, 15 bp, Homo sapiens
ctcttcaacaccaag

SEQ ID NO: 480056 - DNA, 15 bp, Homo sapiens
tctcttcaacaccaa

SEQ ID NO: 480057 - DNA, 15 bp, Homo sapiens
ctctcttcaacacca

SEQ ID NO: 480058 - DNA, 15 bp, Homo sapiens
actctcttcaacacc

SEQ ID NO: 480059 - DNA, 15 bp, Homo sapiens
tactctcttcaacac

SEQ ID NO: 480060 - DNA, 15 bp, Homo sapiens
ttactctcttcaaca

SEQ ID NO: 480061 - DNA, 15 bp, Homo sapiens
cttactctcttcaac

SEQ ID NO: 480062 - DNA, 15 bp, Homo sapiens
acttactctcttcaa

SEQ ID NO: 480063 - DNA, 15 bp, Homo sapiens
cacttactctcttca

SEQ ID NO: 480064 - DNA, 15 bp, Homo sapiens
gcacttactctcttc

SEQ ID NO: 480065 - DNA, 15 bp, Homo sapiens
ggcacttactctctt

SEQ ID NO: 480066 - DNA, 15 bp, Homo sapiens
cggcacttactctct

SEQ ID NO: 480067 - DNA, 15 bp, Homo sapiens
tcggcacttactctc

SEQ ID NO: 480068 - DNA, 15 bp, Homo sapiens
ctcggcacttactct

SEQ ID NO: 480069 - DNA, 15 bp, Homo sapiens
gctcggcacttactc

SEQ ID NO: 480070 - DNA, 15 bp, Homo sapiens
tgctcggcacttact

SEQ ID NO: 480071 - DNA, 15 bp, Homo sapiens
ttgctcggcacttac

SEQ ID NO: 480072 - DNA, 15 bp, Homo sapiens
cttgctcggcactta

SEQ ID NO: 480073 - DNA, 15 bp, Homo sapiens
acttgctcggcactt

SEQ ID NO: 480074 - DNA, 15 bp, Homo sapiens
aacttgctcggcact

SEQ ID NO: 480075 - DNA, 15 bp, Homo sapiens
caacttgctcggcac

SEQ ID NO: 480076 - DNA, 15 bp, Homo sapiens
acaacttgctcggca

SEQ ID NO: 480077 - DNA, 15 bp, Homo sapiens
cacaacttgctcggc

SEQ ID NO: 480078 - DNA, 15 bp, Homo sapiens
acacaacttgctcgg

SEQ ID NO: 480079 - DNA, 15 bp, Homo sapiens
gacacaacttgctcg

SEQ ID NO: 480080 - DNA, 15 bp, Homo sapiens
ggacacaacttgctc

SEQ ID NO: 480081 - DNA, 15 bp, Homo sapiens
gggacacaacttgct

SEQ ID NO: 480082 - DNA, 15 bp, Homo sapiens
agggacacaacttgc

SEQ ID NO: 480083 - DNA, 15 bp, Homo sapiens
cagggacacaacttg

SEQ ID NO: 480084 - DNA, 15 bp, Homo sapiens
ccagggacacaactt

SEQ ID NO: 480085 - DNA, 15 bp, Homo sapiens
gccagggacacaact

SEQ ID NO: 480086 - DNA, 15 bp, Homo sapiens
tgccagggacacaac

SEQ ID NO: 480087 - DNA, 15 bp, Homo sapiens
ctgccagggacacaa

SEQ ID NO: 480088 - DNA, 15 bp, Homo sapiens
actgccagggacaca

SEQ ID NO: 480089 - DNA, 15 bp, Homo sapiens
aactgccagggacac

SEQ ID NO: 480090 - DNA, 15 bp, Homo sapiens
aaactgccagggaca

SEQ ID NO: 480091 - DNA, 15 bp, Homo sapiens
caaactgccagggac

SEQ ID NO: 480092 - DNA, 15 bp, Homo sapiens
acaaactgccaggga

SEQ ID NO: 480093 - DNA, 15 bp, Homo sapiens
aacaaactgccaggg

SEQ ID NO: 480094 - DNA, 15 bp, Homo sapiens
aaacaaactgccagg

SEQ ID NO: 480095 - DNA, 15 bp, Homo sapiens
caaacaaactgccag

SEQ ID NO: 480096 - DNA, 15 bp, Homo sapiens
acaaacaaactgcca

SEQ ID NO: 480097 - DNA, 15 bp, Homo sapiens
cacaaacaaactgcc

SEQ ID NO: 480098 - DNA, 15 bp, Homo sapiens
tcacaaacaaactgc

SEQ ID NO: 480099 - DNA, 15 bp, Homo sapiens
gtcacaaacaaactg

SEQ ID NO: 480100 - DNA, 15 bp, Homo sapiens
ggtcacaaacaaact

SEQ ID NO: 480101 - DNA, 15 bp, Homo sapiens
tggtcacaaacaaac

SEQ ID NO: 480102 - DNA, 15 bp, Homo sapiens
gtggtcacaaacaaa

SEQ ID NO: 480103 - DNA, 15 bp, Homo sapiens
ggtggtcacaaacaa

SEQ ID NO: 480104 - DNA, 15 bp, Homo sapiens
aggtggtcacaaaca

SEQ ID NO: 480105 - DNA, 15 bp, Homo sapiens
caggtggtcacaaac

SEQ ID NO: 480106 - DNA, 15 bp, Homo sapiens
ccaggtggtcacaaa

SEQ ID NO: 480107 - DNA, 15 bp, Homo sapiens
accaggtggtcacaa

SEQ ID NO: 480108 - DNA, 15 bp, Homo sapiens
caccaggtggtcaca

SEQ ID NO: 480109 - DNA, 15 bp, Homo sapiens
ccaccaggtggtcac

SEQ ID NO: 480110 - DNA, 15 bp, Homo sapiens
gccaccaggtggtca

SEQ ID NO: 480111 - DNA, 15 bp, Homo sapiens
agccaccaggtggtc

SEQ ID NO: 480112 - DNA, 15 bp, Homo sapiens
aagccaccaggtggt

SEQ ID NO: 480113 - DNA, 15 bp, Homo sapiens
taagccaccaggtgg

SEQ ID NO: 480114 - DNA, 15 bp, Homo sapiens
gtaagccaccaggtg

SEQ ID NO: 480115 - DNA, 15 bp, Homo sapiens
ggtaagccaccaggt

SEQ ID NO: 480116 - DNA, 15 bp, Homo sapiens
gggtaagccaccagg

SEQ ID NO: 480117 - DNA, 15 bp, Homo sapiens
agggtaagccaccag

SEQ ID NO: 480118 - DNA, 15 bp, Homo sapiens
aagggtaagccacca

SEQ ID NO: 480119 - DNA, 15 bp, Homo sapiens
gaagggtaagccacc

SEQ ID NO: 480120 - DNA, 15 bp, Homo sapiens
agaagggtaagccac

SEQ ID NO: 480121 - DNA, 15 bp, Homo sapiens
aagaagggtaagcca

SEQ ID NO: 480122 - DNA, 15 bp, Homo sapiens
caagaagggtaagcc

SEQ ID NO: 480123 - DNA, 15 bp, Homo sapiens
ccaagaagggtaagc

SEQ ID NO: 480124 - DNA, 15 bp, Homo sapiens
accaagaagggtaag

SEQ ID NO: 480125 - DNA, 15 bp, Homo sapiens
caccaagaagggtaa

SEQ ID NO: 480126 - DNA, 15 bp, Homo sapiens
acaccaagaagggta

SEQ ID NO: 480127 - DNA, 15 bp, Homo sapiens
cacaccaagaagggt

SEQ ID NO: 480128 - DNA, 15 bp, Homo sapiens
ccacaccaagaaggg

SEQ ID NO: 480129 - DNA, 15 bp, Homo sapiens
accacaccaagaagg

SEQ ID NO: 480130 - DNA, 15 bp, Homo sapiens
caccacaccaagaag

SEQ ID NO: 480131 - DNA, 15 bp, Homo sapiens
tcaccacaccaagaa

SEQ ID NO: 480132 - DNA, 15 bp, Homo sapiens
ctcaccacaccaaga

SEQ ID NO: 480133 - DNA, 15 bp, Homo sapiens
cctcaccacaccaag

SEQ ID NO: 480134 - DNA, 15 bp, Homo sapiens
gcctcaccacaccaa

SEQ ID NO: 480135 - DNA, 15 bp, Homo sapiens
agcctcaccacacca

SEQ ID NO: 480136 - DNA, 15 bp, Homo sapiens
aagcctcaccacacc

SEQ ID NO: 480137 - DNA, 15 bp, Homo sapiens
caagcctcaccacac

SEQ ID NO: 480138 - DNA, 15 bp, Homo sapiens
ccaagcctcaccaca

SEQ ID NO: 480139 - DNA, 15 bp, Homo sapiens
gccaagcctcaccac

SEQ ID NO: 480140 - DNA, 15 bp, Homo sapiens
tgccaagcctcacca

SEQ ID NO: 480141 - DNA, 15 bp, Homo sapiens
atgccaagcctcacc

SEQ ID NO: 480142 - DNA, 15 bp, Homo sapiens
catgccaagcctcac

SEQ ID NO: 480143 - DNA, 15 bp, Homo sapiens
acatgccaagcctca

SEQ ID NO: 480144 - DNA, 15 bp, Homo sapiens
gacatgccaagcctc

SEQ ID NO: 480145 - DNA, 15 bp, Homo sapiens
tgacatgccaagcct

SEQ ID NO: 480146 - DNA, 15 bp, Homo sapiens
gtgacatgccaagcc

SEQ ID NO: 480147 - DNA, 15 bp, Homo sapiens
agtgacatgccaagc

SEQ ID NO: 480148 - DNA, 15 bp, Homo sapiens
aagtgacatgccaag

SEQ ID NO: 480149 - DNA, 15 bp, Homo sapiens
aaagtgacatgccaa

SEQ ID NO: 480150 - DNA, 15 bp, Homo sapiens
gaaagtgacatgcca

SEQ ID NO: 480151 - DNA, 15 bp, Homo sapiens
ggaaagtgacatgcc

SEQ ID NO: 480152 - DNA, 15 bp, Homo sapiens
aggaaagtgacatgc

SEQ ID NO: 480153 - DNA, 15 bp, Homo sapiens
aaggaaagtgacatg

SEQ ID NO: 480154 - DNA, 15 bp, Homo sapiens
caaggaaagtgacat

SEQ ID NO: 480155 - DNA, 15 bp, Homo sapiens
ccaaggaaagtgaca

SEQ ID NO: 480156 - DNA, 15 bp, Homo sapiens
gccaaggaaagtgac

SEQ ID NO: 480157 - DNA, 15 bp, Homo sapiens
agccaaggaaagtga

SEQ ID NO: 480158 - DNA, 15 bp, Homo sapiens
cagccaaggaaagtg

SEQ ID NO: 480159 - DNA, 15 bp, Homo sapiens
acagccaaggaaagt

SEQ ID NO: 480160 - DNA, 15 bp, Homo sapiens
cacagccaaggaaag

SEQ ID NO: 480161 - DNA, 15 bp, Homo sapiens
ccacagccaaggaaa

SEQ ID NO: 480162 - DNA, 15 bp, Homo sapiens
gccacagccaaggaa

SEQ ID NO: 480163 - DNA, 15 bp, Homo sapiens
agccacagccaagga

SEQ ID NO: 480164 - DNA, 15 bp, Homo sapiens
cagccacagccaagg

SEQ ID NO: 480165 - DNA, 15 bp, Homo sapiens
acagccacagccaag

SEQ ID NO: 480166 - DNA, 15 bp, Homo sapiens
aacagccacagccaa

SEQ ID NO: 480167 - DNA, 15 bp, Homo sapiens
taacagccacagcca

SEQ ID NO: 480168 - DNA, 15 bp, Homo sapiens
ctaacagccacagcc

SEQ ID NO: 480169 - DNA, 15 bp, Homo sapiens
actaacagccacagc

SEQ ID NO: 480170 - DNA, 15 bp, Homo sapiens
tactaacagccacag

SEQ ID NO: 480171 - DNA, 15 bp, Homo sapiens
gtactaacagccaca

SEQ ID NO: 480172 - DNA, 15 bp, Homo sapiens
agtactaacagccac

SEQ ID NO: 480173 - DNA, 15 bp, Homo sapiens
cagtactaacagcca

SEQ ID NO: 480174 - DNA, 15 bp, Homo sapiens
tcagtactaacagcc

SEQ ID NO: 480175 - DNA, 15 bp, Homo sapiens
ttcagtactaacagc

SEQ ID NO: 480176 - DNA, 15 bp, Homo sapiens
attcagtactaacag

SEQ ID NO: 480177 - DNA, 15 bp, Homo sapiens
cattcagtactaaca

SEQ ID NO: 480178 - DNA, 15 bp, Homo sapiens
gcattcagtactaac

SEQ ID NO: 480179 - DNA, 15 bp, Homo sapiens
ggcattcagtactaa

SEQ ID NO: 480180 - DNA, 15 bp, Homo sapiens
tggcattcagtacta

SEQ ID NO: 480181 - DNA, 15 bp, Homo sapiens
atggcattcagtact

SEQ ID NO: 480182 - DNA, 15 bp, Homo sapiens
aatggcattcagtac

SEQ ID NO: 480183 - DNA, 15 bp, Homo sapiens
gaatggcattcagta

SEQ ID NO: 480184 - DNA, 15 bp, Homo sapiens
agaatggcattcagt

SEQ ID NO: 480185 - DNA, 15 bp, Homo sapiens
gagaatggcattcag

SEQ ID NO: 480186 - DNA, 15 bp, Homo sapiens
agagaatggcattca

SEQ ID NO: 480187 - DNA, 15 bp, Homo sapiens
gagagaatggcattc

SEQ ID NO: 480188 - DNA, 15 bp, Homo sapiens
agagagaatggcatt

SEQ ID NO: 480189 - DNA, 15 bp, Homo sapiens
cagagagaatggcat

SEQ ID NO: 480190 - DNA, 15 bp, Homo sapiens
tcagagagaatggca

SEQ ID NO: 480191 - DNA, 15 bp, Homo sapiens
ctcagagagaatggc

SEQ ID NO: 480192 - DNA, 15 bp, Homo sapiens
cctcagagagaatgg

SEQ ID NO: 480193 - DNA, 15 bp, Homo sapiens
tcctcagagagaatg

SEQ ID NO: 480194 - DNA, 15 bp, Homo sapiens
ttcctcagagagaat

SEQ ID NO: 480195 - DNA, 15 bp, Homo sapiens
tttcctcagagagaa

SEQ ID NO: 480196 - DNA, 15 bp, Homo sapiens
ttttcctcagagaga

SEQ ID NO: 480197 - DNA, 15 bp, Homo sapiens
cttttcctcagagag

SEQ ID NO: 480198 - DNA, 15 bp, Homo sapiens
acttttcctcagaga

SEQ ID NO: 480199 - DNA, 15 bp, Homo sapiens
cacttttcctcagag

SEQ ID NO: 480200 - DNA, 15 bp, Homo sapiens
acacttttcctcaga

SEQ ID NO: 480201 - DNA, 15 bp, Homo sapiens
gacacttttcctcag

SEQ ID NO: 480202 - DNA, 15 bp, Homo sapiens
ggacacttttcctca

SEQ ID NO: 480203 - DNA, 15 bp, Homo sapiens
aggacacttttcctc

SEQ ID NO: 480204 - DNA, 15 bp, Homo sapiens
aaggacacttttcct

SEQ ID NO: 480205 - DNA, 15 bp, Homo sapiens
gaaggacacttttcc

SEQ ID NO: 480206 - DNA, 15 bp, Homo sapiens
agaaggacacttttc

SEQ ID NO: 480207 - DNA, 15 bp, Homo sapiens
gagaaggacactttt

SEQ ID NO: 480208 - DNA, 15 bp, Homo sapiens
agagaaggacacttt

SEQ ID NO: 480209 - DNA, 15 bp, Homo sapiens
aagagaaggacactt

SEQ ID NO: 480210 - DNA, 15 bp, Homo sapiens
aaagagaaggacact

SEQ ID NO: 480211 - DNA, 15 bp, Homo sapiens
aaaagagaaggacac

SEQ ID NO: 480212 - DNA, 15 bp, Homo sapiens
aaaaagagaaggaca

SEQ ID NO: 480213 - DNA, 15 bp, Homo sapiens
aaaaaagagaaggac

SEQ ID NO: 480214 - DNA, 15 bp, Homo sapiens
taaaaaagagaagga

SEQ ID NO: 480215 - DNA, 15 bp, Homo sapiens
ataaaaaagagaagg

SEQ ID NO: 480216 - DNA, 15 bp, Homo sapiens
aataaaaaagagaag

SEQ ID NO: 480217 - DNA, 15 bp, Homo sapiens
caataaaaaagagaa

SEQ ID NO: 480218 - DNA, 15 bp, Homo sapiens
tcaataaaaaagaga

SEQ ID NO: 480219 - DNA, 15 bp, Homo sapiens
atcaataaaaaagag

SEQ ID NO: 480220 - DNA, 15 bp, Homo sapiens
aatcaataaaaaaga

SEQ ID NO: 480221 - DNA, 15 bp, Homo sapiens
caatcaataaaaaag

SEQ ID NO: 480222 - DNA, 15 bp, Homo sapiens
tcaatcaataaaaaa

SEQ ID NO: 480223 - DNA, 15 bp, Homo sapiens
gtcaatcaataaaaa

SEQ ID NO: 480224 - DNA, 15 bp, Homo sapiens
agtcaatcaataaaa

SEQ ID NO: 480225 - DNA, 15 bp, Homo sapiens
cagtcaatcaataaa

SEQ ID NO: 480226 - DNA, 15 bp, Homo sapiens
tcagtcaatcaataa

SEQ ID NO: 480227 - DNA, 15 bp, Homo sapiens
atcagtcaatcaata

SEQ ID NO: 480228 - DNA, 15 bp, Homo sapiens
aatcagtcaatcaat

SEQ ID NO: 480229 - DNA, 15 bp, Homo sapiens
caatcagtcaatcaa

SEQ ID NO: 480230 - DNA, 15 bp, Homo sapiens
tcaatcagtcaatca

SEQ ID NO: 480231 - DNA, 15 bp, Homo sapiens
atcaatcagtcaatc

SEQ ID NO: 480232 - DNA, 15 bp, Homo sapiens
aatcaatcagtcaat

SEQ ID NO: 480233 - DNA, 15 bp, Homo sapiens
caatcaatcagtcaa

SEQ ID NO: 480234 - DNA, 15 bp, Homo sapiens
tcaatcaatcagtca

SEQ ID NO: 480235 - DNA, 15 bp, Homo sapiens
ctcaatcaatcagtc

SEQ ID NO: 480236 - DNA, 15 bp, Homo sapiens
tctcaatcaatcagt

SEQ ID NO: 480237 - DNA, 15 bp, Homo sapiens
gtctcaatcaatcag

SEQ ID NO: 480238 - DNA, 15 bp, Homo sapiens
tgtctcaatcaatca

SEQ ID NO: 480239 - DNA, 15 bp, Homo sapiens
ctgtctcaatcaatc

SEQ ID NO: 480240 - DNA, 15 bp, Homo sapiens
tctgtctcaatcaat

SEQ ID NO: 480241 - DNA, 15 bp, Homo sapiens
ctctgtctcaatcaa

SEQ ID NO: 480242 - DNA, 15 bp, Homo sapiens
actctgtctcaatca

SEQ ID NO: 480243 - DNA, 15 bp, Homo sapiens
gactctgtctcaatc

SEQ ID NO: 480244 - DNA, 15 bp, Homo sapiens
agactctgtctcaat

SEQ ID NO: 480245 - DNA, 15 bp, Homo sapiens
cgagatcacgccact

SEQ ID NO: 480246 - DNA, 15 bp, Homo sapiens
ccgagatcacgccac

SEQ ID NO: 480247 - DNA, 15 bp, Homo sapiens
gccgagatcacgcca

SEQ ID NO: 480248 - DNA, 15 bp, Homo sapiens
agccgagatcacgcc

SEQ ID NO: 480249 - DNA, 15 bp, Homo sapiens
gagccgagatcacgc

SEQ ID NO: 480250 - DNA, 15 bp, Homo sapiens
tgagccgagatcacg

SEQ ID NO: 480251 - DNA, 15 bp, Homo sapiens
gtgagccgagatcac

SEQ ID NO: 480252 - DNA, 15 bp, Homo sapiens
atgcagtgagccgag

SEQ ID NO: 480253 - DNA, 15 bp, Homo sapiens
gatgcagtgagccga

SEQ ID NO: 480254 - DNA, 15 bp, Homo sapiens
ggatgcagtgagccg

SEQ ID NO: 480255 - DNA, 15 bp, Homo sapiens
aggatgcagtgagcc

SEQ ID NO: 480256 - DNA, 15 bp, Homo sapiens
gaggatgcagtgagc

SEQ ID NO: 480257 - DNA, 15 bp, Homo sapiens
agaggatgcagtgag

SEQ ID NO: 480258 - DNA, 15 bp, Homo sapiens
cagaggatgcagtga

SEQ ID NO: 480259 - DNA, 15 bp, Homo sapiens
gcagaggatgcagtg

SEQ ID NO: 480260 - DNA, 15 bp, Homo sapiens
ggcagaggatgcagt

SEQ ID NO: 480261 - DNA, 15 bp, Homo sapiens
aggcagaggatgcag

SEQ ID NO: 480262 - DNA, 15 bp, Homo sapiens
gaggcagaggatgca

SEQ ID NO: 480263 - DNA, 15 bp, Homo sapiens
ggaggcagaggatgc

SEQ ID NO: 480264 - DNA, 15 bp, Homo sapiens
aggaggcagaggatg

SEQ ID NO: 480265 - DNA, 15 bp, Homo sapiens
caggaggcagaggat

SEQ ID NO: 480266 - DNA, 15 bp, Homo sapiens
ccaggaggcagagga

SEQ ID NO: 480267 - DNA, 15 bp, Homo sapiens
agtgggcgcctgtag

SEQ ID NO: 480268 - DNA, 15 bp, Homo sapiens
tagtgggcgcctgta

SEQ ID NO: 480269 - DNA, 15 bp, Homo sapiens
gtagtgggcgcctgt

SEQ ID NO: 480270 - DNA, 15 bp, Homo sapiens
ggtagtgggcgcctg

SEQ ID NO: 480271 - DNA, 15 bp, Homo sapiens
tggtagtgggcgcct

SEQ ID NO: 480272 - DNA, 15 bp, Homo sapiens
gtggtagtgggcgcc

SEQ ID NO: 480273 - DNA, 15 bp, Homo sapiens
tgtggtagtgggcgc

SEQ ID NO: 480274 - DNA, 15 bp, Homo sapiens
gtgtggtagtgggcg

SEQ ID NO: 480275 - DNA, 15 bp, Homo sapiens
ggtgtggtagtgggc

SEQ ID NO: 480276 - DNA, 15 bp, Homo sapiens
gggtgtggtagtggg

SEQ ID NO: 480277 - DNA, 15 bp, Homo sapiens
tgggtgtggtagtgg

SEQ ID NO: 480278 - DNA, 15 bp, Homo sapiens
ctgggtgtggtagtg

SEQ ID NO: 480279 - DNA, 15 bp, Homo sapiens
gctgggtgtggtagt

SEQ ID NO: 480280 - DNA, 15 bp, Homo sapiens
agctgggtgtggtag

SEQ ID NO: 480281 - DNA, 15 bp, Homo sapiens
tagctgggtgtggta

SEQ ID NO: 480282 - DNA, 15 bp, Homo sapiens
gaatacaaaaattag

SEQ ID NO: 480283 - DNA, 15 bp, Homo sapiens
agaatacaaaaatta

SEQ ID NO: 480284 - DNA, 15 bp, Homo sapiens
aagaatacaaaaatt

SEQ ID NO: 480285 - DNA, 15 bp, Homo sapiens
taagaatacaaaaat

SEQ ID NO: 480286 - DNA, 15 bp, Homo sapiens
ctaagaatacaaaaa

SEQ ID NO: 480287 - DNA, 15 bp, Homo sapiens
actaagaatacaaaa

SEQ ID NO: 480288 - DNA, 15 bp, Homo sapiens
tactaagaatacaaa

SEQ ID NO: 480289 - DNA, 15 bp, Homo sapiens
ctactaagaatacaa

SEQ ID NO: 480290 - DNA, 15 bp, Homo sapiens
tctactaagaataca

SEQ ID NO: 480291 - DNA, 15 bp, Homo sapiens
ttctactaagaatac

SEQ ID NO: 480292 - DNA, 15 bp, Homo sapiens
tttctactaagaata

SEQ ID NO: 480293 - DNA, 15 bp, Homo sapiens
gtttctactaagaat

SEQ ID NO: 480294 - DNA, 15 bp, Homo sapiens
cgtttctactaagaa

SEQ ID NO: 480295 - DNA, 15 bp, Homo sapiens
ccgtttctactaaga

SEQ ID NO: 480296 - DNA, 15 bp, Homo sapiens
cccgtttctactaag

SEQ ID NO: 480297 - DNA, 15 bp, Homo sapiens
ccccgtttctactaa

SEQ ID NO: 480298 - DNA, 15 bp, Homo sapiens
accccgtttctacta

SEQ ID NO: 480299 - DNA, 15 bp, Homo sapiens
aaccccgtttctact

SEQ ID NO: 480300 - DNA, 15 bp, Homo sapiens
aaaccccgtttctac

SEQ ID NO: 480301 - DNA, 15 bp, Homo sapiens
gaaaccccgtttcta

SEQ ID NO: 480302 - DNA, 15 bp, Homo sapiens
tgaaaccccgtttct

SEQ ID NO: 480303 - DNA, 15 bp, Homo sapiens
gtgaaaccccgtttc

SEQ ID NO: 480304 - DNA, 15 bp, Homo sapiens
ggtgaaaccccgttt

SEQ ID NO: 480305 - DNA, 15 bp, Homo sapiens
tggtgaaaccccgtt

SEQ ID NO: 480306 - DNA, 15 bp, Homo sapiens
ttggtgaaaccccgt

SEQ ID NO: 480307 - DNA, 15 bp, Homo sapiens
tttggtgaaaccccg

SEQ ID NO: 480308 - DNA, 15 bp, Homo sapiens
atttggtgaaacccc

SEQ ID NO: 480309 - DNA, 15 bp, Homo sapiens
aatttggtgaaaccc

SEQ ID NO: 480310 - DNA, 15 bp, Homo sapiens
taatttggtgaaacc

SEQ ID NO: 480311 - DNA, 15 bp, Homo sapiens
ataatttggtgaaac

SEQ ID NO: 480312 - DNA, 15 bp, Homo sapiens
aataatttggtgaaa

SEQ ID NO: 480313 - DNA, 15 bp, Homo sapiens
caataatttggtgaa

SEQ ID NO: 480314 - DNA, 15 bp, Homo sapiens
ccaataatttggtga

SEQ ID NO: 480315 - DNA, 15 bp, Homo sapiens
gccaataatttggtg

SEQ ID NO: 480316 - DNA, 15 bp, Homo sapiens
ggccaataatttggt

SEQ ID NO: 480317 - DNA, 15 bp, Homo sapiens
tggccaataatttgg

SEQ ID NO: 480318 - DNA, 15 bp, Homo sapiens
ctggccaataatttg

SEQ ID NO: 480319 - DNA, 15 bp, Homo sapiens
cctggccaataattt

SEQ ID NO: 480320 - DNA, 15 bp, Homo sapiens
gcctggccaataatt

SEQ ID NO: 480321 - DNA, 15 bp, Homo sapiens
agcctggccaataat

SEQ ID NO: 480322 - DNA, 15 bp, Homo sapiens
cagcctggccaataa

SEQ ID NO: 480323 - DNA, 15 bp, Homo sapiens
tggtcaggagttcga

SEQ ID NO: 480324 - DNA, 15 bp, Homo sapiens
atggtcaggagttcg

SEQ ID NO: 480325 - DNA, 15 bp, Homo sapiens
catggtcaggagttc

SEQ ID NO: 480326 - DNA, 15 bp, Homo sapiens
acatggtcaggagtt

SEQ ID NO: 480327 - DNA, 15 bp, Homo sapiens
cacatggtcaggagt

SEQ ID NO: 480328 - DNA, 15 bp, Homo sapiens
tcacatggtcaggag

SEQ ID NO: 480329 - DNA, 15 bp, Homo sapiens
atcacatggtcagga

SEQ ID NO: 480330 - DNA, 15 bp, Homo sapiens
gatcacatggtcagg

SEQ ID NO: 480331 - DNA, 15 bp, Homo sapiens
ggatcacatggtcag

SEQ ID NO: 480332 - DNA, 15 bp, Homo sapiens
tggatcacatggtca

SEQ ID NO: 480333 - DNA, 15 bp, Homo sapiens
gtggatcacatggtc

SEQ ID NO: 480334 - DNA, 15 bp, Homo sapiens
ggtggatcacatggt

SEQ ID NO: 480335 - DNA, 15 bp, Homo sapiens
aggtggatcacatgg

SEQ ID NO: 480336 - DNA, 15 bp, Homo sapiens
caggtggatcacatg

SEQ ID NO: 480337 - DNA, 15 bp, Homo sapiens
gcaggtggatcacat

SEQ ID NO: 480338 - DNA, 15 bp, Homo sapiens
cgaggcaggtggatc

SEQ ID NO: 480339 - DNA, 15 bp, Homo sapiens
ccgaggcaggtggat

SEQ ID NO: 480340 - DNA, 15 bp, Homo sapiens
gccgaggcaggtgga

SEQ ID NO: 480341 - DNA, 15 bp, Homo sapiens
ggccgaggcaggtgg

SEQ ID NO: 480342 - DNA, 15 bp, Homo sapiens
aggccgaggcaggtg

SEQ ID NO: 480343 - DNA, 15 bp, Homo sapiens
caatcccagcatttt

SEQ ID NO: 480344 - DNA, 15 bp, Homo sapiens
acaatcccagcattt

SEQ ID NO: 480345 - DNA, 15 bp, Homo sapiens
tacaatcccagcatt

SEQ ID NO: 480346 - DNA, 15 bp, Homo sapiens
ctacaatcccagcat

SEQ ID NO: 480347 - DNA, 15 bp, Homo sapiens
cctacaatcccagca

SEQ ID NO: 480348 - DNA, 15 bp, Homo sapiens
acctacaatcccagc

SEQ ID NO: 480349 - DNA, 15 bp, Homo sapiens
cacctacaatcccag

SEQ ID NO: 480350 - DNA, 15 bp, Homo sapiens
acacctacaatccca

SEQ ID NO: 480351 - DNA, 15 bp, Homo sapiens
cacacctacaatccc

SEQ ID NO: 480352 - DNA, 15 bp, Homo sapiens
tcacacctacaatcc

SEQ ID NO: 480353 - DNA, 15 bp, Homo sapiens
ctcacacctacaatc

SEQ ID NO: 480354 - DNA, 15 bp, Homo sapiens
gctcacacctacaat

SEQ ID NO: 480355 - DNA, 15 bp, Homo sapiens
ggctcacacctacaa

SEQ ID NO: 480356 - DNA, 15 bp, Homo sapiens
tggctcacacctaca

SEQ ID NO: 480357 - DNA, 15 bp, Homo sapiens
atggctcacacctac

SEQ ID NO: 480358 - DNA, 15 bp, Homo sapiens
gatggctcacaccta

SEQ ID NO: 480359 - DNA, 15 bp, Homo sapiens
tgatggctcacacct

SEQ ID NO: 480360 - DNA, 15 bp, Homo sapiens
gtgatggctcacacc

SEQ ID NO: 480361 - DNA, 15 bp, Homo sapiens
cgtgatggctcacac

SEQ ID NO: 480362 - DNA, 15 bp, Homo sapiens
gcgtgatggctcaca

SEQ ID NO: 480363 - DNA, 15 bp, Homo sapiens
agcgtgatggctcac

SEQ ID NO: 480364 - DNA, 15 bp, Homo sapiens
gagcgtgatggctca

SEQ ID NO: 480365 - DNA, 15 bp, Homo sapiens
tgagcgtgatggctc

SEQ ID NO: 480366 - DNA, 15 bp, Homo sapiens
ctgagcgtgatggct

SEQ ID NO: 480367 - DNA, 15 bp, Homo sapiens
gctgagcgtgatggc

SEQ ID NO: 480368 - DNA, 15 bp, Homo sapiens
ggctgagcgtgatgg

SEQ ID NO: 480369 - DNA, 15 bp, Homo sapiens
aggctgagcgtgatg

SEQ ID NO: 480370 - DNA, 15 bp, Homo sapiens
aaggctgagcgtgat

SEQ ID NO: 480371 - DNA, 15 bp, Homo sapiens
aaaggctgagcgtga

SEQ ID NO: 480372 - DNA, 15 bp, Homo sapiens
aaaaggctgagcgtg

SEQ ID NO: 480373 - DNA, 15 bp, Homo sapiens
aaaaaggctgagcgt

SEQ ID NO: 480374 - DNA, 15 bp, Homo sapiens
aaaaaaggctgagcg

SEQ ID NO: 480375 - DNA, 15 bp, Homo sapiens
aaaaaaaggctgagc

SEQ ID NO: 480376 - DNA, 15 bp, Homo sapiens
aaaaaaaaggctgag

SEQ ID NO: 480377 - DNA, 15 bp, Homo sapiens
aaaaaaaaaggctga

SEQ ID NO: 480378 - DNA, 15 bp, Homo sapiens
taaaaaaaaaggctg

SEQ ID NO: 480379 - DNA, 15 bp, Homo sapiens
ataaaaaaaaaggct

SEQ ID NO: 480380 - DNA, 15 bp, Homo sapiens
aataaaaaaaaaggc

SEQ ID NO: 480381 - DNA, 15 bp, Homo sapiens
aaataaaaaaaaagg

SEQ ID NO: 480382 - DNA, 15 bp, Homo sapiens
taaataaaaaaaaag

SEQ ID NO: 480383 - DNA, 15 bp, Homo sapiens
ttaaataaaaaaaaa

SEQ ID NO: 480384 - DNA, 15 bp, Homo sapiens
attaaataaaaaaaa

SEQ ID NO: 480385 - DNA, 15 bp, Homo sapiens
aattaaataaaaaaa

SEQ ID NO: 480386 - DNA, 15 bp, Homo sapiens
aaattaaataaaaaa

SEQ ID NO: 480387 - DNA, 15 bp, Homo sapiens
taaattaaataaaaa

SEQ ID NO: 480388 - DNA, 15 bp, Homo sapiens
ttaaattaaataaaa

SEQ ID NO: 480389 - DNA, 15 bp, Homo sapiens
attaaattaaataaa

SEQ ID NO: 480390 - DNA, 15 bp, Homo sapiens
aattaaattaaataa

SEQ ID NO: 480391 - DNA, 15 bp, Homo sapiens
aaattaaattaaata

SEQ ID NO: 480392 - DNA, 15 bp, Homo sapiens
aaaattaaattaaat

SEQ ID NO: 480393 - DNA, 15 bp, Homo sapiens
aaaaattaaattaaa

SEQ ID NO: 480394 - DNA, 15 bp, Homo sapiens
aaaaaattaaattaa

SEQ ID NO: 480395 - DNA, 15 bp, Homo sapiens
aaaaaaattaaatta

SEQ ID NO: 480396 - DNA, 15 bp, Homo sapiens
aaaaaaaattaaatt

SEQ ID NO: 480397 - DNA, 15 bp, Homo sapiens
aaaaaaaaattaaat

SEQ ID NO: 480398 - DNA, 15 bp, Homo sapiens
taaaaaaaaattaaa

SEQ ID NO: 480399 - DNA, 15 bp, Homo sapiens
ttaaaaaaaaattaa

SEQ ID NO: 480400 - DNA, 15 bp, Homo sapiens
cttaaaaaaaaatta

SEQ ID NO: 480401 - DNA, 15 bp, Homo sapiens
tcttaaaaaaaaatt

SEQ ID NO: 480402 - DNA, 15 bp, Homo sapiens
gtcttaaaaaaaaat

SEQ ID NO: 480403 - DNA, 15 bp, Homo sapiens
tgtcttaaaaaaaaa

SEQ ID NO: 480404 - DNA, 15 bp, Homo sapiens
ctgtcttaaaaaaaa

SEQ ID NO: 480405 - DNA, 15 bp, Homo sapiens
cctgtcttaaaaaaa

SEQ ID NO: 480406 - DNA, 15 bp, Homo sapiens
ccctgtcttaaaaaa

SEQ ID NO: 480407 - DNA, 15 bp, Homo sapiens
accctgtcttaaaaa

SEQ ID NO: 480408 - DNA, 15 bp, Homo sapiens
gaccctgtcttaaaa

SEQ ID NO: 480409 - DNA, 15 bp, Homo sapiens
agaccctgtcttaaa

SEQ ID NO: 480410 - DNA, 15 bp, Homo sapiens
gagaccctgtcttaa

SEQ ID NO: 480411 - DNA, 15 bp, Homo sapiens
tgagaccctgtctta

SEQ ID NO: 480412 - DNA, 15 bp, Homo sapiens
gtgagaccctgtctt

SEQ ID NO: 480413 - DNA, 15 bp, Homo sapiens
cagagtgagaccctg

SEQ ID NO: 480414 - DNA, 15 bp, Homo sapiens
acagagtgagaccct

SEQ ID NO: 480415 - DNA, 15 bp, Homo sapiens
gacagagtgagaccc

SEQ ID NO: 480416 - DNA, 15 bp, Homo sapiens
tgacagagtgagacc

SEQ ID NO: 480417 - DNA, 15 bp, Homo sapiens
ggggtgacagagtga

SEQ ID NO: 480418 - DNA, 15 bp, Homo sapiens
tggggtgacagagtg

SEQ ID NO: 480419 - DNA, 15 bp, Homo sapiens
ctggggtgacagagt

SEQ ID NO: 480420 - DNA, 15 bp, Homo sapiens
gctggggtgacagag

SEQ ID NO: 480421 - DNA, 15 bp, Homo sapiens
agctggggtgacaga

SEQ ID NO: 480422 - DNA, 15 bp, Homo sapiens
tagctggggtgacag

SEQ ID NO: 480423 - DNA, 15 bp, Homo sapiens
ctagctggggtgaca

SEQ ID NO: 480424 - DNA, 15 bp, Homo sapiens
tctagctggggtgac

SEQ ID NO: 480425 - DNA, 15 bp, Homo sapiens
ctctagctggggtga

SEQ ID NO: 480426 - DNA, 15 bp, Homo sapiens
actctagctggggtg

SEQ ID NO: 480427 - DNA, 15 bp, Homo sapiens
cactctagctggggt

SEQ ID NO: 480428 - DNA, 15 bp, Homo sapiens
gcactctagctgggg

SEQ ID NO: 480429 - DNA, 15 bp, Homo sapiens
tgcactctagctggg

SEQ ID NO: 480430 - DNA, 15 bp, Homo sapiens
ctgcactctagctgg

SEQ ID NO: 480431 - DNA, 15 bp, Homo sapiens
actgcactctagctg

SEQ ID NO: 480432 - DNA, 15 bp, Homo sapiens
cactgcactctagct

SEQ ID NO: 480433 - DNA, 15 bp, Homo sapiens
gtgccactgcactct

SEQ ID NO: 480434 - DNA, 15 bp, Homo sapiens
tgattgtgccactgc

SEQ ID NO: 480435 - DNA, 15 bp, Homo sapiens
atgattgtgccactg

SEQ ID NO: 480436 - DNA, 15 bp, Homo sapiens
tatgattgtgccact

SEQ ID NO: 480437 - DNA, 15 bp, Homo sapiens
ctatgattgtgccac

SEQ ID NO: 480438 - DNA, 15 bp, Homo sapiens
gctatgattgtgcca

SEQ ID NO: 480439 - DNA, 15 bp, Homo sapiens
agctatgattgtgcc

SEQ ID NO: 480440 - DNA, 15 bp, Homo sapiens
gagctatgattgtgc

SEQ ID NO: 480441 - DNA, 15 bp, Homo sapiens
cgagctatgattgtg

SEQ ID NO: 480442 - DNA, 15 bp, Homo sapiens
gcgagctatgattgt

SEQ ID NO: 480443 - DNA, 15 bp, Homo sapiens
agcgagctatgattg

SEQ ID NO: 480444 - DNA, 15 bp, Homo sapiens
cagcgagctatgatt

SEQ ID NO: 480445 - DNA, 15 bp, Homo sapiens
gcagcgagctatgat

SEQ ID NO: 480446 - DNA, 15 bp, Homo sapiens
tgcagcgagctatga

SEQ ID NO: 480447 - DNA, 15 bp, Homo sapiens
ctgcagcgagctatg

SEQ ID NO: 480448 - DNA, 15 bp, Homo sapiens
gctgcagcgagctat

SEQ ID NO: 480449 - DNA, 15 bp, Homo sapiens
ggctgcagcgagcta

SEQ ID NO: 480450 - DNA, 15 bp, Homo sapiens
aggctgcagcgagct

SEQ ID NO: 480451 - DNA, 15 bp, Homo sapiens
gaggctgcagcgagc

SEQ ID NO: 480452 - DNA, 15 bp, Homo sapiens
ggaggctgcagcgag

SEQ ID NO: 480453 - DNA, 15 bp, Homo sapiens
tggaggctgcagcga

SEQ ID NO: 480454 - DNA, 15 bp, Homo sapiens
atggaggctgcagcg

SEQ ID NO: 480455 - DNA, 15 bp, Homo sapiens
gatggaggctgcagc

SEQ ID NO: 480456 - DNA, 15 bp, Homo sapiens
agatggaggctgcag

SEQ ID NO: 480457 - DNA, 15 bp, Homo sapiens
gagatggaggctgca

SEQ ID NO: 480458 - DNA, 15 bp, Homo sapiens
ggagatggaggctgc

SEQ ID NO: 480459 - DNA, 15 bp, Homo sapiens
aggagatggaggctg

SEQ ID NO: 480460 - DNA, 15 bp, Homo sapiens
taggagatggaggct

SEQ ID NO: 480461 - DNA, 15 bp, Homo sapiens
ctaggagatggaggc

SEQ ID NO: 480462 - DNA, 15 bp, Homo sapiens
cctaggagatggagg

SEQ ID NO: 480463 - DNA, 15 bp, Homo sapiens
gcctaggagatggag

SEQ ID NO: 480464 - DNA, 15 bp, Homo sapiens
agcctaggagatgga

SEQ ID NO: 480465 - DNA, 15 bp, Homo sapiens
gagcctaggagatgg

SEQ ID NO: 480466 - DNA, 15 bp, Homo sapiens
tgagcctaggagatg

SEQ ID NO: 480467 - DNA, 15 bp, Homo sapiens
ttgagcctaggagat

SEQ ID NO: 480468 - DNA, 15 bp, Homo sapiens
cttgagcctaggaga

SEQ ID NO: 480469 - DNA, 15 bp, Homo sapiens
gcttgagcctaggag

SEQ ID NO: 480470 - DNA, 15 bp, Homo sapiens
ggcttgagcctagga

SEQ ID NO: 480471 - DNA, 15 bp, Homo sapiens
tggcttgagcctagg

SEQ ID NO: 480472 - DNA, 15 bp, Homo sapiens
atggcttgagcctag

SEQ ID NO: 480473 - DNA, 15 bp, Homo sapiens
gatggcttgagccta

SEQ ID NO: 480474 - DNA, 15 bp, Homo sapiens
ggatggcttgagcct

SEQ ID NO: 480475 - DNA, 15 bp, Homo sapiens
aggatggcttgagcc

SEQ ID NO: 480476 - DNA, 15 bp, Homo sapiens
gaggatggcttgagc

SEQ ID NO: 480477 - DNA, 15 bp, Homo sapiens
ggaggatggcttgag

SEQ ID NO: 480478 - DNA, 15 bp, Homo sapiens
gggaggatggcttga

SEQ ID NO: 480479 - DNA, 15 bp, Homo sapiens
tgggaggatggcttg

SEQ ID NO: 480480 - DNA, 15 bp, Homo sapiens
gtgggaggatggctt

SEQ ID NO: 480481 - DNA, 15 bp, Homo sapiens
ggtgggaggatggct

SEQ ID NO: 480482 - DNA, 15 bp, Homo sapiens
aggtgggaggatggc

SEQ ID NO: 480483 - DNA, 15 bp, Homo sapiens
gaggtgggaggatgg

SEQ ID NO: 480484 - DNA, 15 bp, Homo sapiens
tgaggtgggaggatg

SEQ ID NO: 480485 - DNA, 15 bp, Homo sapiens
agaggctgaggtggg

SEQ ID NO: 480486 - DNA, 15 bp, Homo sapiens
gagaggctgaggtgg

SEQ ID NO: 480487 - DNA, 15 bp, Homo sapiens
cgagaggctgaggtg

SEQ ID NO: 480488 - DNA, 15 bp, Homo sapiens
tcgagaggctgaggt

SEQ ID NO: 480489 - DNA, 15 bp, Homo sapiens
ctcgagaggctgagg

SEQ ID NO: 480490 - DNA, 15 bp, Homo sapiens
actcgagaggctgag

SEQ ID NO: 480491 - DNA, 15 bp, Homo sapiens
tactcgagaggctga

SEQ ID NO: 480492 - DNA, 15 bp, Homo sapiens
ctactcgagaggctg

SEQ ID NO: 480493 - DNA, 15 bp, Homo sapiens
gctactcgagaggct

SEQ ID NO: 480494 - DNA, 15 bp, Homo sapiens
agctactcgagaggc

SEQ ID NO: 480495 - DNA, 15 bp, Homo sapiens
cagctactcgagagg

SEQ ID NO: 480496 - DNA, 15 bp, Homo sapiens
ccagctactcgagag

SEQ ID NO: 480497 - DNA, 15 bp, Homo sapiens
cccagctactcgaga

SEQ ID NO: 480498 - DNA, 15 bp, Homo sapiens
ccccagctactcgag

SEQ ID NO: 480499 - DNA, 15 bp, Homo sapiens
gccccagctactcga

SEQ ID NO: 480500 - DNA, 15 bp, Homo sapiens
agccccagctactcg

SEQ ID NO: 480501 - DNA, 15 bp, Homo sapiens
tagccccagctactc

SEQ ID NO: 480502 - DNA, 15 bp, Homo sapiens
atagccccagctact

SEQ ID NO: 480503 - DNA, 15 bp, Homo sapiens
tatagccccagctac

SEQ ID NO: 480504 - DNA, 15 bp, Homo sapiens
ctatagccccagcta

SEQ ID NO: 480505 - DNA, 15 bp, Homo sapiens
cctatagccccagct

SEQ ID NO: 480506 - DNA, 15 bp, Homo sapiens
acctatagccccagc

SEQ ID NO: 480507 - DNA, 15 bp, Homo sapiens
cacctatagccccag

SEQ ID NO: 480508 - DNA, 15 bp, Homo sapiens
acacctatagcccca

SEQ ID NO: 480509 - DNA, 15 bp, Homo sapiens
cacacctatagcccc

SEQ ID NO: 480510 - DNA, 15 bp, Homo sapiens
gcacacctatagccc

SEQ ID NO: 480511 - DNA, 15 bp, Homo sapiens
tgcacacctatagcc

SEQ ID NO: 480512 - DNA, 15 bp, Homo sapiens
gtgcacacctatagc

SEQ ID NO: 480513 - DNA, 15 bp, Homo sapiens
ggtgcacacctatag

SEQ ID NO: 480514 - DNA, 15 bp, Homo sapiens
tggtgcacacctata

SEQ ID NO: 480515 - DNA, 15 bp, Homo sapiens
gtggtgcacacctat

SEQ ID NO: 480516 - DNA, 15 bp, Homo sapiens
ggtggtgcacaccta

SEQ ID NO: 480517 - DNA, 15 bp, Homo sapiens
tggtggtgcacacct

SEQ ID NO: 480518 - DNA, 15 bp, Homo sapiens
gtggtggtgcacacc

SEQ ID NO: 480519 - DNA, 15 bp, Homo sapiens
tgtggtggtgcacac

SEQ ID NO: 480520 - DNA, 15 bp, Homo sapiens
gtgtggtggtgcaca

SEQ ID NO: 480521 - DNA, 15 bp, Homo sapiens
ggtgtggtggtgcac

SEQ ID NO: 480522 - DNA, 15 bp, Homo sapiens
gggtgtggtggtgca

SEQ ID NO: 480523 - DNA, 15 bp, Homo sapiens
tgggtgtggtggtgc

SEQ ID NO: 480524 - DNA, 15 bp, Homo sapiens
ctgggtgtggtggtg

SEQ ID NO: 480525 - DNA, 15 bp, Homo sapiens
gctgggtgtggtggt

SEQ ID NO: 480526 - DNA, 15 bp, Homo sapiens
aaaaaatacaaaaat

SEQ ID NO: 480527 - DNA, 15 bp, Homo sapiens
caaaaaatacaaaaa

SEQ ID NO: 480528 - DNA, 15 bp, Homo sapiens
gcaaaaaatacaaaa

SEQ ID NO: 480529 - DNA, 15 bp, Homo sapiens
tgcaaaaaatacaaa

SEQ ID NO: 480530 - DNA, 15 bp, Homo sapiens
ctgcaaaaaatacaa

SEQ ID NO: 480531 - DNA, 15 bp, Homo sapiens
tctgcaaaaaataca

SEQ ID NO: 480532 - DNA, 15 bp, Homo sapiens
ctctgcaaaaaatac

SEQ ID NO: 480533 - DNA, 15 bp, Homo sapiens
tctctgcaaaaaata

SEQ ID NO: 480534 - DNA, 15 bp, Homo sapiens
atctctgcaaaaaat

SEQ ID NO: 480535 - DNA, 15 bp, Homo sapiens
catctctgcaaaaaa

SEQ ID NO: 480536 - DNA, 15 bp, Homo sapiens
ccatctctgcaaaaa

SEQ ID NO: 480537 - DNA, 15 bp, Homo sapiens
tccatctctgcaaaa

SEQ ID NO: 480538 - DNA, 15 bp, Homo sapiens
ctccatctctgcaaa

SEQ ID NO: 480539 - DNA, 15 bp, Homo sapiens
actccatctctgcaa

SEQ ID NO: 480540 - DNA, 15 bp, Homo sapiens
aactccatctctgca

SEQ ID NO: 480541 - DNA, 15 bp, Homo sapiens
aaactccatctctgc

SEQ ID NO: 480542 - DNA, 15 bp, Homo sapiens
aaaactccatctctg

SEQ ID NO: 480543 - DNA, 15 bp, Homo sapiens
caaaactccatctct

SEQ ID NO: 480544 - DNA, 15 bp, Homo sapiens
cagcaaaactccatc

SEQ ID NO: 480545 - DNA, 15 bp, Homo sapiens
acagcaaaactccat

SEQ ID NO: 480546 - DNA, 15 bp, Homo sapiens
cacagcaaaactcca

SEQ ID NO: 480547 - DNA, 15 bp, Homo sapiens
gcacagcaaaactcc

SEQ ID NO: 480548 - DNA, 15 bp, Homo sapiens
agcacagcaaaactc

SEQ ID NO: 480549 - DNA, 15 bp, Homo sapiens
cagcacagcaaaact

SEQ ID NO: 480550 - DNA, 15 bp, Homo sapiens
gcagcacagcaaaac

SEQ ID NO: 480551 - DNA, 15 bp, Homo sapiens
agcagcacagcaaaa

SEQ ID NO: 480552 - DNA, 15 bp, Homo sapiens
aagcagcacagcaaa

SEQ ID NO: 480553 - DNA, 15 bp, Homo sapiens
taagcagcacagcaa

SEQ ID NO: 480554 - DNA, 15 bp, Homo sapiens
ctaagcagcacagca

SEQ ID NO: 480555 - DNA, 15 bp, Homo sapiens
tctaagcagcacagc

SEQ ID NO: 480556 - DNA, 15 bp, Homo sapiens
gtctaagcagcacag

SEQ ID NO: 480557 - DNA, 15 bp, Homo sapiens
agtctaagcagcaca

SEQ ID NO: 480558 - DNA, 15 bp, Homo sapiens
cagtctaagcagcac

SEQ ID NO: 480559 - DNA, 15 bp, Homo sapiens
ccagtctaagcagca

SEQ ID NO: 480560 - DNA, 15 bp, Homo sapiens
accagtctaagcagc

SEQ ID NO: 480561 - DNA, 15 bp, Homo sapiens
gaccagtctaagcag

SEQ ID NO: 480562 - DNA, 15 bp, Homo sapiens
agaccagtctaagca

SEQ ID NO: 480563 - DNA, 15 bp, Homo sapiens
gagaccagtctaagc

SEQ ID NO: 480564 - DNA, 15 bp, Homo sapiens
cgagaccagtctaag

SEQ ID NO: 480565 - DNA, 15 bp, Homo sapiens
tcgagaccagtctaa

SEQ ID NO: 480566 - DNA, 15 bp, Homo sapiens
ttcgagaccagtcta

SEQ ID NO: 480567 - DNA, 15 bp, Homo sapiens
gttcgagaccagtct

SEQ ID NO: 480568 - DNA, 15 bp, Homo sapiens
agttcgagaccagtc

SEQ ID NO: 480569 - DNA, 15 bp, Homo sapiens
gagttcgagaccagt

SEQ ID NO: 480570 - DNA, 15 bp, Homo sapiens
ccaggagttcgagac

SEQ ID NO: 480571 - DNA, 15 bp, Homo sapiens
cccaggagttcgaga

SEQ ID NO: 480572 - DNA, 15 bp, Homo sapiens
gcccaggagttcgag

SEQ ID NO: 480573 - DNA, 15 bp, Homo sapiens
agcccaggagttcga

SEQ ID NO: 480574 - DNA, 15 bp, Homo sapiens
gagcccaggagttcg

SEQ ID NO: 480575 - DNA, 15 bp, Homo sapiens
ctgagcccaggagtt

SEQ ID NO: 480576 - DNA, 15 bp, Homo sapiens
cctgagcccaggagt

SEQ ID NO: 480577 - DNA, 15 bp, Homo sapiens
ttgcctgagcccagg

SEQ ID NO: 480578 - DNA, 15 bp, Homo sapiens
attgcctgagcccag

SEQ ID NO: 480579 - DNA, 15 bp, Homo sapiens
gattgcctgagccca

SEQ ID NO: 480580 - DNA, 15 bp, Homo sapiens
ggattgcctgagccc

SEQ ID NO: 480581 - DNA, 15 bp, Homo sapiens
aggattgcctgagcc

SEQ ID NO: 480582 - DNA, 15 bp, Homo sapiens
gaggattgcctgagc

SEQ ID NO: 480583 - DNA, 15 bp, Homo sapiens
ggaggattgcctgag

SEQ ID NO: 480584 - DNA, 15 bp, Homo sapiens
aggaggattgcctga

SEQ ID NO: 480585 - DNA, 15 bp, Homo sapiens
caggaggattgcctg

SEQ ID NO: 480586 - DNA, 15 bp, Homo sapiens
gcaggaggattgcct

SEQ ID NO: 480587 - DNA, 15 bp, Homo sapiens
ggcaggaggattgcc

SEQ ID NO: 480588 - DNA, 15 bp, Homo sapiens
aaggcaggaggattg

SEQ ID NO: 480589 - DNA, 15 bp, Homo sapiens
caaggcaggaggatt

SEQ ID NO: 480590 - DNA, 15 bp, Homo sapiens
gccaaggcaggagga

SEQ ID NO: 480591 - DNA, 15 bp, Homo sapiens
ggccaaggcaggagg

SEQ ID NO: 480592 - DNA, 15 bp, Homo sapiens
aggccaaggcaggag

SEQ ID NO: 480593 - DNA, 15 bp, Homo sapiens
gaggccaaggcagga

SEQ ID NO: 480594 - DNA, 15 bp, Homo sapiens
ttaggccaggtgtgg

SEQ ID NO: 480595 - DNA, 15 bp, Homo sapiens
cttaggccaggtgtg

SEQ ID NO: 480596 - DNA, 15 bp, Homo sapiens
tcttaggccaggtgt

SEQ ID NO: 480597 - DNA, 15 bp, Homo sapiens
ctcttaggccaggtg

SEQ ID NO: 480598 - DNA, 15 bp, Homo sapiens
actcttaggccaggt

SEQ ID NO: 480599 - DNA, 15 bp, Homo sapiens
cactcttaggccagg

SEQ ID NO: 480600 - DNA, 15 bp, Homo sapiens
acactcttaggccag

SEQ ID NO: 480601 - DNA, 15 bp, Homo sapiens
gacactcttaggcca

SEQ ID NO: 480602 - DNA, 15 bp, Homo sapiens
ggacactcttaggcc

SEQ ID NO: 480603 - DNA, 15 bp, Homo sapiens
aggacactcttaggc

SEQ ID NO: 480604 - DNA, 15 bp, Homo sapiens
aaggacactcttagg

SEQ ID NO: 480605 - DNA, 15 bp, Homo sapiens
gaaggacactcttag

SEQ ID NO: 480606 - DNA, 15 bp, Homo sapiens
agaaggacactctta

SEQ ID NO: 480607 - DNA, 15 bp, Homo sapiens
gagaaggacactctt

SEQ ID NO: 480608 - DNA, 15 bp, Homo sapiens
cgagaaggacactct

SEQ ID NO: 480609 - DNA, 15 bp, Homo sapiens
acgagaaggacactc

SEQ ID NO: 480610 - DNA, 15 bp, Homo sapiens
aacgagaaggacact

SEQ ID NO: 480611 - DNA, 15 bp, Homo sapiens
taacgagaaggacac

SEQ ID NO: 480612 - DNA, 15 bp, Homo sapiens
gtaacgagaaggaca

SEQ ID NO: 480613 - DNA, 15 bp, Homo sapiens
agtaacgagaaggac

SEQ ID NO: 480614 - DNA, 15 bp, Homo sapiens
cagtaacgagaagga

SEQ ID NO: 480615 - DNA, 15 bp, Homo sapiens
acagtaacgagaagg

SEQ ID NO: 480616 - DNA, 15 bp, Homo sapiens
tacagtaacgagaag

SEQ ID NO: 480617 - DNA, 15 bp, Homo sapiens
ctacagtaacgagaa

SEQ ID NO: 480618 - DNA, 15 bp, Homo sapiens
cctacagtaacgaga

SEQ ID NO: 480619 - DNA, 15 bp, Homo sapiens
gcctacagtaacgag

SEQ ID NO: 480620 - DNA, 15 bp, Homo sapiens
agcctacagtaacga

SEQ ID NO: 480621 - DNA, 15 bp, Homo sapiens
aagcctacagtaacg

SEQ ID NO: 480622 - DNA, 15 bp, Homo sapiens
gaagcctacagtaac

SEQ ID NO: 480623 - DNA, 15 bp, Homo sapiens
ggaagcctacagtaa

SEQ ID NO: 480624 - DNA, 15 bp, Homo sapiens
gggaagcctacagta

SEQ ID NO: 480625 - DNA, 15 bp, Homo sapiens
agggaagcctacagt

SEQ ID NO: 480626 - DNA, 15 bp, Homo sapiens
cagggaagcctacag

SEQ ID NO: 480627 - DNA, 15 bp, Homo sapiens
tcagggaagcctaca

SEQ ID NO: 480628 - DNA, 15 bp, Homo sapiens
atcagggaagcctac

SEQ ID NO: 480629 - DNA, 15 bp, Homo sapiens
aatcagggaagccta

SEQ ID NO: 480630 - DNA, 15 bp, Homo sapiens
caatcagggaagcct

SEQ ID NO: 480631 - DNA, 15 bp, Homo sapiens
acaatcagggaagcc

SEQ ID NO: 480632 - DNA, 15 bp, Homo sapiens
cacaatcagggaagc

SEQ ID NO: 480633 - DNA, 15 bp, Homo sapiens
tcacaatcagggaag

SEQ ID NO: 480634 - DNA, 15 bp, Homo sapiens
gtcacaatcagggaa

SEQ ID NO: 480635 - DNA, 15 bp, Homo sapiens
agtcacaatcaggga

SEQ ID NO: 480636 - DNA, 15 bp, Homo sapiens
cagtcacaatcaggg

SEQ ID NO: 480637 - DNA, 15 bp, Homo sapiens
tcagtcacaatcagg

SEQ ID NO: 480638 - DNA, 15 bp, Homo sapiens
ctcagtcacaatcag

SEQ ID NO: 480639 - DNA, 15 bp, Homo sapiens
cctcagtcacaatca

SEQ ID NO: 480640 - DNA, 15 bp, Homo sapiens
tcctcagtcacaatc

SEQ ID NO: 480641 - DNA, 15 bp, Homo sapiens
ctcctcagtcacaat

SEQ ID NO: 480642 - DNA, 15 bp, Homo sapiens
gctcctcagtcacaa

SEQ ID NO: 480643 - DNA, 15 bp, Homo sapiens
agctcctcagtcaca

SEQ ID NO: 480644 - DNA, 15 bp, Homo sapiens
cagctcctcagtcac

SEQ ID NO: 480645 - DNA, 15 bp, Homo sapiens
gcagctcctcagtca

SEQ ID NO: 480646 - DNA, 15 bp, Homo sapiens
tgcagctcctcagtc

SEQ ID NO: 480647 - DNA, 15 bp, Homo sapiens
gtgcagctcctcagt

SEQ ID NO: 480648 - DNA, 15 bp, Homo sapiens
ggtgcagctcctcag

SEQ ID NO: 480649 - DNA, 15 bp, Homo sapiens
aggtgcagctcctca

SEQ ID NO: 480650 - DNA, 15 bp, Homo sapiens
caggtgcagctcctc

SEQ ID NO: 480651 - DNA, 15 bp, Homo sapiens
tcaggtgcagctcct

SEQ ID NO: 480652 - DNA, 15 bp, Homo sapiens
atcaggtgcagctcc

SEQ ID NO: 480653 - DNA, 15 bp, Homo sapiens
gatcaggtgcagctc

SEQ ID NO: 480654 - DNA, 15 bp, Homo sapiens
tgatcaggtgcagct

SEQ ID NO: 480655 - DNA, 15 bp, Homo sapiens
gtgatcaggtgcagc

SEQ ID NO: 480656 - DNA, 15 bp, Homo sapiens
ggtgatcaggtgcag

SEQ ID NO: 480657 - DNA, 15 bp, Homo sapiens
aggtgatcaggtgca

SEQ ID NO: 480658 - DNA, 15 bp, Homo sapiens
aaggtgatcaggtgc

SEQ ID NO: 480659 - DNA, 15 bp, Homo sapiens
aaaggtgatcaggtg

SEQ ID NO: 480660 - DNA, 15 bp, Homo sapiens
caaaggtgatcaggt

SEQ ID NO: 480661 - DNA, 15 bp, Homo sapiens
tcaaaggtgatcagg

SEQ ID NO: 480662 - DNA, 15 bp, Homo sapiens
ctcaaaggtgatcag

SEQ ID NO: 480663 - DNA, 15 bp, Homo sapiens
tctcaaaggtgatca

SEQ ID NO: 480664 - DNA, 15 bp, Homo sapiens
gtctcaaaggtgatc

SEQ ID NO: 480665 - DNA, 15 bp, Homo sapiens
ggtctcaaaggtgat

SEQ ID NO: 480666 - DNA, 15 bp, Homo sapiens
cggtctcaaaggtga

SEQ ID NO: 480667 - DNA, 15 bp, Homo sapiens
tcggtctcaaaggtg

SEQ ID NO: 480668 - DNA, 15 bp, Homo sapiens
ctcggtctcaaaggt

SEQ ID NO: 480669 - DNA, 15 bp, Homo sapiens
cctcggtctcaaagg

SEQ ID NO: 480670 - DNA, 15 bp, Homo sapiens
acctcggtctcaaag

SEQ ID NO: 480671 - DNA, 15 bp, Homo sapiens
cacctcggtctcaaa

SEQ ID NO: 480672 - DNA, 15 bp, Homo sapiens
acacctcggtctcaa

SEQ ID NO: 480673 - DNA, 15 bp, Homo sapiens
tacacctcggtctca

SEQ ID NO: 480674 - DNA, 15 bp, Homo sapiens
atacacctcggtctc

SEQ ID NO: 480675 - DNA, 15 bp, Homo sapiens
gatacacctcggtct

SEQ ID NO: 480676 - DNA, 15 bp, Homo sapiens
tgatacacctcggtc

SEQ ID NO: 480677 - DNA, 15 bp, Homo sapiens
gtgatacacctcggt

SEQ ID NO: 480678 - DNA, 15 bp, Homo sapiens
ggtgatacacctcgg

SEQ ID NO: 480679 - DNA, 15 bp, Homo sapiens
tggtgatacacctcg

SEQ ID NO: 480680 - DNA, 15 bp, Homo sapiens
ttggtgatacacctc

SEQ ID NO: 480681 - DNA, 15 bp, Homo sapiens
cttggtgatacacct

SEQ ID NO: 480682 - DNA, 15 bp, Homo sapiens
ccttggtgatacacc

SEQ ID NO: 480683 - DNA, 15 bp, Homo sapiens
gccttggtgatacac

SEQ ID NO: 480684 - DNA, 15 bp, Homo sapiens
ggccttggtgataca

SEQ ID NO: 480685 - DNA, 15 bp, Homo sapiens
aggccttggtgatac

SEQ ID NO: 480686 - DNA, 15 bp, Homo sapiens
gaggccttggtgata

SEQ ID NO: 480687 - DNA, 15 bp, Homo sapiens
tgaggccttggtgat

SEQ ID NO: 480688 - DNA, 15 bp, Homo sapiens
ttgaggccttggtga

SEQ ID NO: 480689 - DNA, 15 bp, Homo sapiens
cttgaggccttggtg

SEQ ID NO: 480690 - DNA, 15 bp, Homo sapiens
tcttgaggccttggt

SEQ ID NO: 480691 - DNA, 15 bp, Homo sapiens
atcttgaggccttgg

SEQ ID NO: 480692 - DNA, 15 bp, Homo sapiens
aatcttgaggccttg

SEQ ID NO: 480693 - DNA, 15 bp, Homo sapiens
caatcttgaggcctt

SEQ ID NO: 480694 - DNA, 15 bp, Homo sapiens
tcaatcttgaggcct

SEQ ID NO: 480695 - DNA, 15 bp, Homo sapiens
gtcaatcttgaggcc

SEQ ID NO: 480696 - DNA, 15 bp, Homo sapiens
ggtcaatcttgaggc

SEQ ID NO: 480697 - DNA, 15 bp, Homo sapiens
aggtcaatcttgagg

SEQ ID NO: 480698 - DNA, 15 bp, Homo sapiens
taggtcaatcttgag

SEQ ID NO: 480699 - DNA, 15 bp, Homo sapiens
ctaggtcaatcttga

SEQ ID NO: 480700 - DNA, 15 bp, Homo sapiens
tctaggtcaatcttg

SEQ ID NO: 480701 - DNA, 15 bp, Homo sapiens
ctctaggtcaatctt

SEQ ID NO: 480702 - DNA, 15 bp, Homo sapiens
cctctaggtcaatct

SEQ ID NO: 480703 - DNA, 15 bp, Homo sapiens
acctctaggtcaatc

SEQ ID NO: 480704 - DNA, 15 bp, Homo sapiens
tacctctaggtcaat

SEQ ID NO: 480705 - DNA, 15 bp, Homo sapiens
ttacctctaggtcaa

SEQ ID NO: 480706 - DNA, 15 bp, Homo sapiens
cttacctctaggtca

SEQ ID NO: 480707 - DNA, 15 bp, Homo sapiens
acttacctctaggtc

SEQ ID NO: 480708 - DNA, 15 bp, Homo sapiens
aacttacctctaggt

SEQ ID NO: 480709 - DNA, 15 bp, Homo sapiens
gaacttacctctagg

SEQ ID NO: 480710 - DNA, 15 bp, Homo sapiens
agaacttacctctag

SEQ ID NO: 480711 - DNA, 15 bp, Homo sapiens
cagaacttacctcta

SEQ ID NO: 480712 - DNA, 15 bp, Homo sapiens
gcagaacttacctct

SEQ ID NO: 480713 - DNA, 15 bp, Homo sapiens
tgcagaacttacctc

SEQ ID NO: 480714 - DNA, 15 bp, Homo sapiens
ctgcagaacttacct

SEQ ID NO: 480715 - DNA, 15 bp, Homo sapiens
gctgcagaacttacc

SEQ ID NO: 480716 - DNA, 15 bp, Homo sapiens
tgctgcagaacttac

SEQ ID NO: 480717 - DNA, 15 bp, Homo sapiens
ctgctgcagaactta

SEQ ID NO: 480718 - DNA, 15 bp, Homo sapiens
tctgctgcagaactt

SEQ ID NO: 480719 - DNA, 15 bp, Homo sapiens
ttctgctgcagaact

SEQ ID NO: 480720 - DNA, 15 bp, Homo sapiens
attctgctgcagaac

SEQ ID NO: 480721 - DNA, 15 bp, Homo sapiens
gattctgctgcagaa

SEQ ID NO: 480722 - DNA, 15 bp, Homo sapiens
cgattctgctgcaga

SEQ ID NO: 480723 - DNA, 15 bp, Homo sapiens
ccgattctgctgcag

SEQ ID NO: 480724 - DNA, 15 bp, Homo sapiens
accgattctgctgca

SEQ ID NO: 480725 - DNA, 15 bp, Homo sapiens
caccgattctgctgc

SEQ ID NO: 480726 - DNA, 15 bp, Homo sapiens
tcaccgattctgctg

SEQ ID NO: 480727 - DNA, 15 bp, Homo sapiens
ctcaccgattctgct

SEQ ID NO: 480728 - DNA, 15 bp, Homo sapiens
tctcaccgattctgc

SEQ ID NO: 480729 - DNA, 15 bp, Homo sapiens
ctctcaccgattctg

SEQ ID NO: 480730 - DNA, 15 bp, Homo sapiens
cctctcaccgattct

SEQ ID NO: 480731 - DNA, 15 bp, Homo sapiens
gcctctcaccgattc

SEQ ID NO: 480732 - DNA, 15 bp, Homo sapiens
agcctctcaccgatt

SEQ ID NO: 480733 - DNA, 15 bp, Homo sapiens
tagcctctcaccgat

SEQ ID NO: 480734 - DNA, 15 bp, Homo sapiens
gtagcctctcaccga

SEQ ID NO: 480735 - DNA, 15 bp, Homo sapiens
cgtagcctctcaccg

SEQ ID NO: 480736 - DNA, 15 bp, Homo sapiens
acgtagcctctcacc

SEQ ID NO: 480737 - DNA, 15 bp, Homo sapiens
tacgtagcctctcac

SEQ ID NO: 480738 - DNA, 15 bp, Homo sapiens
gtacgtagcctctca

SEQ ID NO: 480739 - DNA, 15 bp, Homo sapiens
tgtacgtagcctctc

SEQ ID NO: 480740 - DNA, 15 bp, Homo sapiens
ctgtacgtagcctct

SEQ ID NO: 480741 - DNA, 15 bp, Homo sapiens
cctgtacgtagcctc

SEQ ID NO: 480742 - DNA, 15 bp, Homo sapiens
ccctgtacgtagcct

SEQ ID NO: 480743 - DNA, 15 bp, Homo sapiens
cccctgtacgtagcc

SEQ ID NO: 480744 - DNA, 15 bp, Homo sapiens
acccctgtacgtagc

SEQ ID NO: 480745 - DNA, 15 bp, Homo sapiens
cacccctgtacgtag

SEQ ID NO: 480746 - DNA, 15 bp, Homo sapiens
tcacccctgtacgta

SEQ ID NO: 480747 - DNA, 15 bp, Homo sapiens
gtcacccctgtacgt

SEQ ID NO: 480748 - DNA, 15 bp, Homo sapiens
agtcacccctgtacg

SEQ ID NO: 480749 - DNA, 15 bp, Homo sapiens
gagtcacccctgtac

SEQ ID NO: 480750 - DNA, 15 bp, Homo sapiens
tgagtcacccctgta

SEQ ID NO: 480751 - DNA, 15 bp, Homo sapiens
ctgagtcacccctgt

SEQ ID NO: 480752 - DNA, 15 bp, Homo sapiens
cctgagtcacccctg

SEQ ID NO: 480753 - DNA, 15 bp, Homo sapiens
tcctgagtcacccct

SEQ ID NO: 480754 - DNA, 15 bp, Homo sapiens
gtcctgagtcacccc

SEQ ID NO: 480755 - DNA, 15 bp, Homo sapiens
tgtcctgagtcaccc

SEQ ID NO: 480756 - DNA, 15 bp, Homo sapiens
ttgtcctgagtcacc

SEQ ID NO: 480757 - DNA, 15 bp, Homo sapiens
tttgtcctgagtcac

SEQ ID NO: 480758 - DNA, 15 bp, Homo sapiens
ttttgtcctgagtca

SEQ ID NO: 480759 - DNA, 15 bp, Homo sapiens
tttttgtcctgagtc

SEQ ID NO: 480760 - DNA, 15 bp, Homo sapiens
gtttttgtcctgagt

SEQ ID NO: 480761 - DNA, 15 bp, Homo sapiens
agtttttgtcctgag

SEQ ID NO: 480762 - DNA, 15 bp, Homo sapiens
aagtttttgtcctga

SEQ ID NO: 480763 - DNA, 15 bp, Homo sapiens
gaagtttttgtcctg

SEQ ID NO: 480764 - DNA, 15 bp, Homo sapiens
ggaagtttttgtcct

SEQ ID NO: 480765 - DNA, 15 bp, Homo sapiens
tggaagtttttgtcc

SEQ ID NO: 480766 - DNA, 15 bp, Homo sapiens
gtggaagtttttgtc

SEQ ID NO: 480767 - DNA, 15 bp, Homo sapiens
agtggaagtttttgt

SEQ ID NO: 480768 - DNA, 15 bp, Homo sapiens
cagtggaagtttttg

SEQ ID NO: 480769 - DNA, 15 bp, Homo sapiens
ccagtggaagttttt

SEQ ID NO: 480770 - DNA, 15 bp, Homo sapiens
cccagtggaagtttt

SEQ ID NO: 480771 - DNA, 15 bp, Homo sapiens
tcccagtggaagttt

SEQ ID NO: 480772 - DNA, 15 bp, Homo sapiens
atcccagtggaagtt

SEQ ID NO: 480773 - DNA, 15 bp, Homo sapiens
aatcccagtggaagt

SEQ ID NO: 480774 - DNA, 15 bp, Homo sapiens
aaatcccagtggaag

SEQ ID NO: 480775 - DNA, 15 bp, Homo sapiens
aaaatcccagtggaa

SEQ ID NO: 480776 - DNA, 15 bp, Homo sapiens
aaaaatcccagtgga

SEQ ID NO: 480777 - DNA, 15 bp, Homo sapiens
taaaaatcccagtgg

SEQ ID NO: 480778 - DNA, 15 bp, Homo sapiens
gtaaaaatcccagtg

SEQ ID NO: 480779 - DNA, 15 bp, Homo sapiens
tgtaaaaatcccagt

SEQ ID NO: 480780 - DNA, 15 bp, Homo sapiens
ttgtaaaaatcccag

SEQ ID NO: 480781 - DNA, 15 bp, Homo sapiens
cttgtaaaaatccca

SEQ ID NO: 480782 - DNA, 15 bp, Homo sapiens
tcttgtaaaaatccc

SEQ ID NO: 480783 - DNA, 15 bp, Homo sapiens
ctcttgtaaaaatcc

SEQ ID NO: 480784 - DNA, 15 bp, Homo sapiens
tctcttgtaaaaatc

SEQ ID NO: 480785 - DNA, 15 bp, Homo sapiens
ttctcttgtaaaaat

SEQ ID NO: 480786 - DNA, 15 bp, Homo sapiens
cttctcttgtaaaaa

SEQ ID NO: 480787 - DNA, 15 bp, Homo sapiens
ccttctcttgtaaaa

SEQ ID NO: 480788 - DNA, 15 bp, Homo sapiens
accttctcttgtaaa

SEQ ID NO: 480789 - DNA, 15 bp, Homo sapiens
caccttctcttgtaa

SEQ ID NO: 480790 - DNA, 15 bp, Homo sapiens
ccaccttctcttgta

SEQ ID NO: 480791 - DNA, 15 bp, Homo sapiens
tccaccttctcttgt

SEQ ID NO: 480792 - DNA, 15 bp, Homo sapiens
ttccaccttctcttg

SEQ ID NO: 480793 - DNA, 15 bp, Homo sapiens
attccaccttctctt

SEQ ID NO: 480794 - DNA, 15 bp, Homo sapiens
cattccaccttctct

SEQ ID NO: 480795 - DNA, 15 bp, Homo sapiens
tcattccaccttctc

SEQ ID NO: 480796 - DNA, 15 bp, Homo sapiens
atcattccaccttct

SEQ ID NO: 480797 - DNA, 15 bp, Homo sapiens
aatcattccaccttc

SEQ ID NO: 480798 - DNA, 15 bp, Homo sapiens
taatcattccacctt

SEQ ID NO: 480799 - DNA, 15 bp, Homo sapiens
gtaatcattccacct

SEQ ID NO: 480800 - DNA, 15 bp, Homo sapiens
agtaatcattccacc

SEQ ID NO: 480801 - DNA, 15 bp, Homo sapiens
cagtaatcattccac

SEQ ID NO: 480802 - DNA, 15 bp, Homo sapiens
acagtaatcattcca

SEQ ID NO: 480803 - DNA, 15 bp, Homo sapiens
aacagtaatcattcc

SEQ ID NO: 480804 - DNA, 15 bp, Homo sapiens
aaacagtaatcattc

SEQ ID NO: 480805 - DNA, 15 bp, Homo sapiens
caaacagtaatcatt

SEQ ID NO: 480806 - DNA, 15 bp, Homo sapiens
gcaaacagtaatcat

SEQ ID NO: 480807 - DNA, 15 bp, Homo sapiens
agcaaacagtaatca

SEQ ID NO: 480808 - DNA, 15 bp, Homo sapiens
aagcaaacagtaatc

SEQ ID NO: 480809 - DNA, 15 bp, Homo sapiens
taagcaaacagtaat

SEQ ID NO: 480810 - DNA, 15 bp, Homo sapiens
ttaagcaaacagtaa

SEQ ID NO: 480811 - DNA, 15 bp, Homo sapiens
gttaagcaaacagta

SEQ ID NO: 480812 - DNA, 15 bp, Homo sapiens
tgttaagcaaacagt

SEQ ID NO: 480813 - DNA, 15 bp, Homo sapiens
gtgttaagcaaacag

SEQ ID NO: 480814 - DNA, 15 bp, Homo sapiens
agtgttaagcaaaca

SEQ ID NO: 480815 - DNA, 15 bp, Homo sapiens
cagtgttaagcaaac

SEQ ID NO: 480816 - DNA, 15 bp, Homo sapiens
acagtgttaagcaaa

SEQ ID NO: 480817 - DNA, 15 bp, Homo sapiens
cacagtgttaagcaa

SEQ ID NO: 480818 - DNA, 15 bp, Homo sapiens
acacagtgttaagca

SEQ ID NO: 480819 - DNA, 15 bp, Homo sapiens
aacacagtgttaagc

SEQ ID NO: 480820 - DNA, 15 bp, Homo sapiens
aaacacagtgttaag

SEQ ID NO: 480821 - DNA, 15 bp, Homo sapiens
taaacacagtgttaa

SEQ ID NO: 480822 - DNA, 15 bp, Homo sapiens
ataaacacagtgtta

SEQ ID NO: 480823 - DNA, 15 bp, Homo sapiens
aataaacacagtgtt

SEQ ID NO: 480824 - DNA, 15 bp, Homo sapiens
aaataaacacagtgt

SEQ ID NO: 480825 - DNA, 15 bp, Homo sapiens
aaaataaacacagtg

SEQ ID NO: 480826 - DNA, 15 bp, Homo sapiens
aaaaataaacacagt

SEQ ID NO: 480827 - DNA, 15 bp, Homo sapiens
caaaaataaacacag

SEQ ID NO: 480828 - DNA, 15 bp, Homo sapiens
gcaaaaataaacaca

SEQ ID NO: 480829 - DNA, 15 bp, Homo sapiens
agcaaaaataaacac

SEQ ID NO: 480830 - DNA, 15 bp, Homo sapiens
aagcaaaaataaaca

SEQ ID NO: 480831 - DNA, 15 bp, Homo sapiens
taagcaaaaataaac

SEQ ID NO: 480832 - DNA, 15 bp, Homo sapiens
gtaagcaaaaataaa

SEQ ID NO: 480833 - DNA, 15 bp, Homo sapiens
agtaagcaaaaataa

SEQ ID NO: 480834 - DNA, 15 bp, Homo sapiens
aagtaagcaaaaata

SEQ ID NO: 480835 - DNA, 15 bp, Homo sapiens
aaagtaagcaaaaat

SEQ ID NO: 480836 - DNA, 15 bp, Homo sapiens
aaaagtaagcaaaaa

SEQ ID NO: 480837 - DNA, 15 bp, Homo sapiens
gaaaagtaagcaaaa

SEQ ID NO: 480838 - DNA, 15 bp, Homo sapiens
agaaaagtaagcaaa

SEQ ID NO: 480839 - DNA, 15 bp, Homo sapiens
gagaaaagtaagcaa

SEQ ID NO: 480840 - DNA, 15 bp, Homo sapiens
ggagaaaagtaagca

SEQ ID NO: 480841 - DNA, 15 bp, Homo sapiens
tggagaaaagtaagc

SEQ ID NO: 480842 - DNA, 15 bp, Homo sapiens
ttggagaaaagtaag

SEQ ID NO: 480843 - DNA, 15 bp, Homo sapiens
tttggagaaaagtaa

SEQ ID NO: 480844 - DNA, 15 bp, Homo sapiens
ttttggagaaaagta

SEQ ID NO: 480845 - DNA, 15 bp, Homo sapiens
tttttggagaaaagt

SEQ ID NO: 480846 - DNA, 15 bp, Homo sapiens
ttttttggagaaaag

SEQ ID NO: 480847 - DNA, 15 bp, Homo sapiens
tttttttggagaaaa

SEQ ID NO: 480848 - DNA, 15 bp, Homo sapiens
atttttttggagaaa

SEQ ID NO: 480849 - DNA, 15 bp, Homo sapiens
gatttttttggagaa

SEQ ID NO: 480850 - DNA, 15 bp, Homo sapiens
ggatttttttggaga

SEQ ID NO: 480851 - DNA, 15 bp, Homo sapiens
aggatttttttggag

SEQ ID NO: 480852 - DNA, 15 bp, Homo sapiens
aaggatttttttgga

SEQ ID NO: 480853 - DNA, 15 bp, Homo sapiens
caaggatttttttgg

SEQ ID NO: 480854 - DNA, 15 bp, Homo sapiens
ccaaggatttttttg

SEQ ID NO: 480855 - DNA, 15 bp, Homo sapiens
gccaaggattttttt

SEQ ID NO: 480856 - DNA, 15 bp, Homo sapiens
tgccaaggatttttt

SEQ ID NO: 480857 - DNA, 15 bp, Homo sapiens
atgccaaggattttt

SEQ ID NO: 480858 - DNA, 15 bp, Homo sapiens
gatgccaaggatttt

SEQ ID NO: 480859 - DNA, 15 bp, Homo sapiens
ggatgccaaggattt

SEQ ID NO: 480860 - DNA, 15 bp, Homo sapiens
gggatgccaaggatt

SEQ ID NO: 480861 - DNA, 15 bp, Homo sapiens
tgggatgccaaggat

SEQ ID NO: 480862 - DNA, 15 bp, Homo sapiens
atgggatgccaagga

SEQ ID NO: 480863 - DNA, 15 bp, Homo sapiens
gatgggatgccaagg

SEQ ID NO: 480864 - DNA, 15 bp, Homo sapiens
agatgggatgccaag

SEQ ID NO: 480865 - DNA, 15 bp, Homo sapiens
cagatgggatgccaa

SEQ ID NO: 480866 - DNA, 15 bp, Homo sapiens
ccagatgggatgcca

SEQ ID NO: 480867 - DNA, 15 bp, Homo sapiens
gccagatgggatgcc

SEQ ID NO: 480868 - DNA, 15 bp, Homo sapiens
tgccagatgggatgc

SEQ ID NO: 480869 - DNA, 15 bp, Homo sapiens
ttgccagatgggatg

SEQ ID NO: 480870 - DNA, 15 bp, Homo sapiens
attgccagatgggat

SEQ ID NO: 480871 - DNA, 15 bp, Homo sapiens
tattgccagatggga

SEQ ID NO: 480872 - DNA, 15 bp, Homo sapiens
ttattgccagatggg

SEQ ID NO: 480873 - DNA, 15 bp, Homo sapiens
tttattgccagatgg

SEQ ID NO: 480874 - DNA, 15 bp, Homo sapiens
ctttattgccagatg

SEQ ID NO: 480875 - DNA, 15 bp, Homo sapiens
actttattgccagat

SEQ ID NO: 480876 - DNA, 15 bp, Homo sapiens
gactttattgccaga

SEQ ID NO: 480877 - DNA, 15 bp, Homo sapiens
agactttattgccag

SEQ ID NO: 480878 - DNA, 15 bp, Homo sapiens
aagactttattgcca

SEQ ID NO: 480879 - DNA, 15 bp, Homo sapiens
caagactttattgcc

SEQ ID NO: 480880 - DNA, 15 bp, Homo sapiens
gcaagactttattgc

SEQ ID NO: 480881 - DNA, 15 bp, Homo sapiens
agcaagactttattg

SEQ ID NO: 480882 - DNA, 15 bp, Homo sapiens
aagcaagactttatt

SEQ ID NO: 480883 - DNA, 15 bp, Homo sapiens
caagcaagactttat

SEQ ID NO: 480884 - DNA, 15 bp, Homo sapiens
tcaagcaagacttta

SEQ ID NO: 480885 - DNA, 15 bp, Homo sapiens
ttcaagcaagacttt

SEQ ID NO: 480886 - DNA, 15 bp, Homo sapiens
attcaagcaagactt

SEQ ID NO: 480887 - DNA, 15 bp, Homo sapiens
cattcaagcaagact

SEQ ID NO: 480888 - DNA, 15 bp, Homo sapiens
gcattcaagcaagac

SEQ ID NO: 480889 - DNA, 15 bp, Homo sapiens
agcattcaagcaaga

SEQ ID NO: 480890 - DNA, 15 bp, Homo sapiens
aagcattcaagcaag

SEQ ID NO: 480891 - DNA, 15 bp, Homo sapiens
taagcattcaagcaa

SEQ ID NO: 480892 - DNA, 15 bp, Homo sapiens
ctaagcattcaagca

SEQ ID NO: 480893 - DNA, 15 bp, Homo sapiens
tctaagcattcaagc

SEQ ID NO: 480894 - DNA, 15 bp, Homo sapiens
ttctaagcattcaag

SEQ ID NO: 480895 - DNA, 15 bp, Homo sapiens
cttctaagcattcaa

SEQ ID NO: 480896 - DNA, 15 bp, Homo sapiens
tcttctaagcattca

SEQ ID NO: 480897 - DNA, 15 bp, Homo sapiens
atcttctaagcattc

SEQ ID NO: 480898 - DNA, 15 bp, Homo sapiens
catcttctaagcatt

SEQ ID NO: 480899 - DNA, 15 bp, Homo sapiens
acatcttctaagcat

SEQ ID NO: 480900 - DNA, 15 bp, Homo sapiens
cacatcttctaagca

SEQ ID NO: 480901 - DNA, 15 bp, Homo sapiens
acacatcttctaagc

SEQ ID NO: 480902 - DNA, 15 bp, Homo sapiens
cacacatcttctaag

SEQ ID NO: 480903 - DNA, 15 bp, Homo sapiens
acacacatcttctaa

SEQ ID NO: 480904 - DNA, 15 bp, Homo sapiens
tacacacatcttcta

SEQ ID NO: 480905 - DNA, 15 bp, Homo sapiens
atacacacatcttct

SEQ ID NO: 480906 - DNA, 15 bp, Homo sapiens
tatacacacatcttc

SEQ ID NO: 480907 - DNA, 15 bp, Homo sapiens
atatacacacatctt

SEQ ID NO: 480908 - DNA, 15 bp, Homo sapiens
aatatacacacatct

SEQ ID NO: 480909 - DNA, 15 bp, Homo sapiens
gaatatacacacatc

SEQ ID NO: 480910 - DNA, 15 bp, Homo sapiens
tgaatatacacacat

SEQ ID NO: 480911 - DNA, 15 bp, Homo sapiens
ctgaatatacacaca

SEQ ID NO: 480912 - DNA, 15 bp, Homo sapiens
gctgaatatacacac

SEQ ID NO: 480913 - DNA, 15 bp, Homo sapiens
agctgaatatacaca

SEQ ID NO: 480914 - DNA, 15 bp, Homo sapiens
aagctgaatatacac

SEQ ID NO: 480915 - DNA, 15 bp, Homo sapiens
aaagctgaatataca

SEQ ID NO: 480916 - DNA, 15 bp, Homo sapiens
gaaagctgaatatac

SEQ ID NO: 480917 - DNA, 15 bp, Homo sapiens
tgaaagctgaatata

SEQ ID NO: 480918 - DNA, 15 bp, Homo sapiens
ctgaaagctgaatat

SEQ ID NO: 480919 - DNA, 15 bp, Homo sapiens
gctgaaagctgaata

SEQ ID NO: 480920 - DNA, 15 bp, Homo sapiens
tgctgaaagctgaat

SEQ ID NO: 480921 - DNA, 15 bp, Homo sapiens
ttgctgaaagctgaa

SEQ ID NO: 480922 - DNA, 15 bp, Homo sapiens
tttgctgaaagctga

SEQ ID NO: 480923 - DNA, 15 bp, Homo sapiens
gtttgctgaaagctg

SEQ ID NO: 480924 - DNA, 15 bp, Homo sapiens
agtttgctgaaagct

SEQ ID NO: 480925 - DNA, 15 bp, Homo sapiens
aagtttgctgaaagc

SEQ ID NO: 480926 - DNA, 15 bp, Homo sapiens
caagtttgctgaaag

SEQ ID NO: 480927 - DNA, 15 bp, Homo sapiens
tcaagtttgctgaaa

SEQ ID NO: 480928 - DNA, 15 bp, Homo sapiens
atcaagtttgctgaa

SEQ ID NO: 480929 - DNA, 15 bp, Homo sapiens
tatcaagtttgctga

SEQ ID NO: 480930 - DNA, 15 bp, Homo sapiens
atatcaagtttgctg

SEQ ID NO: 480931 - DNA, 15 bp, Homo sapiens
catatcaagtttgct

SEQ ID NO: 480932 - DNA, 15 bp, Homo sapiens
tcatatcaagtttgc

SEQ ID NO: 480933 - DNA, 15 bp, Homo sapiens
ttcatatcaagtttg

SEQ ID NO: 480934 - DNA, 15 bp, Homo sapiens
tttcatatcaagttt

SEQ ID NO: 480935 - DNA, 15 bp, Homo sapiens
ttttcatatcaagtt

SEQ ID NO: 480936 - DNA, 15 bp, Homo sapiens
attttcatatcaagt

SEQ ID NO: 480937 - DNA, 15 bp, Homo sapiens
gattttcatatcaag

SEQ ID NO: 480938 - DNA, 15 bp, Homo sapiens
agattttcatatcaa

SEQ ID NO: 480939 - DNA, 15 bp, Homo sapiens
gagattttcatatca

SEQ ID NO: 480940 - DNA, 15 bp, Homo sapiens
agagattttcatatc

SEQ ID NO: 480941 - DNA, 15 bp, Homo sapiens
tagagattttcatat

SEQ ID NO: 480942 - DNA, 15 bp, Homo sapiens
atagagattttcata

SEQ ID NO: 480943 - DNA, 15 bp, Homo sapiens
aatagagattttcat

SEQ ID NO: 480944 - DNA, 15 bp, Homo sapiens
aaatagagattttca

SEQ ID NO: 480945 - DNA, 15 bp, Homo sapiens
taaatagagattttc

SEQ ID NO: 480946 - DNA, 15 bp, Homo sapiens
ctaaatagagatttt

SEQ ID NO: 480947 - DNA, 15 bp, Homo sapiens
tctaaatagagattt

SEQ ID NO: 480948 - DNA, 15 bp, Homo sapiens
ttctaaatagagatt

SEQ ID NO: 480949 - DNA, 15 bp, Homo sapiens
tttctaaatagagat

SEQ ID NO: 480950 - DNA, 15 bp, Homo sapiens
atttctaaatagaga

SEQ ID NO: 480951 - DNA, 15 bp, Homo sapiens
aatttctaaatagag

SEQ ID NO: 480952 - DNA, 15 bp, Homo sapiens
caatttctaaataga

SEQ ID NO: 480953 - DNA, 15 bp, Homo sapiens
tcaatttctaaatag

SEQ ID NO: 480954 - DNA, 15 bp, Homo sapiens
atcaatttctaaata

SEQ ID NO: 480955 - DNA, 15 bp, Homo sapiens
aatcaatttctaaat

SEQ ID NO: 480956 - DNA, 15 bp, Homo sapiens
caatcaatttctaaa

SEQ ID NO: 480957 - DNA, 15 bp, Homo sapiens
ccaatcaatttctaa

SEQ ID NO: 480958 - DNA, 15 bp, Homo sapiens
gccaatcaatttcta

SEQ ID NO: 480959 - DNA, 15 bp, Homo sapiens
ggccaatcaatttct

SEQ ID NO: 480960 - DNA, 15 bp, Homo sapiens
cggccaatcaatttc

SEQ ID NO: 480961 - DNA, 15 bp, Homo sapiens
ccggccaatcaattt

SEQ ID NO: 480962 - DNA, 15 bp, Homo sapiens
cccggccaatcaatt

SEQ ID NO: 480963 - DNA, 15 bp, Homo sapiens
gcccggccaatcaat

SEQ ID NO: 480964 - DNA, 15 bp, Homo sapiens
cgcccggccaatcaa

SEQ ID NO: 480965 - DNA, 15 bp, Homo sapiens
gcgcccggccaatca

SEQ ID NO: 480966 - DNA, 15 bp, Homo sapiens
cgcgcccggccaatc

SEQ ID NO: 480967 - DNA, 15 bp, Homo sapiens
ccgcgcccggccaat

SEQ ID NO: 480968 - DNA, 15 bp, Homo sapiens
accgcgcccggccaa

SEQ ID NO: 480969 - DNA, 15 bp, Homo sapiens
caccgcgcccggcca

SEQ ID NO: 480970 - DNA, 15 bp, Homo sapiens
cgcctcagcctccca

SEQ ID NO: 480971 - DNA, 15 bp, Homo sapiens
ccgcctcagcctccc

SEQ ID NO: 480972 - DNA, 15 bp, Homo sapiens
cccgcctcagcctcc

SEQ ID NO: 480973 - DNA, 15 bp, Homo sapiens
acccgcctcagcctc

SEQ ID NO: 480974 - DNA, 15 bp, Homo sapiens
cacccgcctcagcct

SEQ ID NO: 480975 - DNA, 15 bp, Homo sapiens
ccacccgcctcagcc

SEQ ID NO: 480976 - DNA, 15 bp, Homo sapiens
tccacccgcctcagc

SEQ ID NO: 480977 - DNA, 15 bp, Homo sapiens
atccacccgcctcag

SEQ ID NO: 480978 - DNA, 15 bp, Homo sapiens
gatccacccgcctca

SEQ ID NO: 480979 - DNA, 15 bp, Homo sapiens
tgatccacccgcctc

SEQ ID NO: 480980 - DNA, 15 bp, Homo sapiens
cgtgatccacccgcc

SEQ ID NO: 480981 - DNA, 15 bp, Homo sapiens
tcgtgatccacccgc

SEQ ID NO: 480982 - DNA, 15 bp, Homo sapiens
ctcgtgatccacccg

SEQ ID NO: 480983 - DNA, 15 bp, Homo sapiens
cctcgtgatccaccc

SEQ ID NO: 480984 - DNA, 15 bp, Homo sapiens
cgaactcctgacctc

SEQ ID NO: 480985 - DNA, 15 bp, Homo sapiens
tcgaactcctgacct

SEQ ID NO: 480986 - DNA, 15 bp, Homo sapiens
ctcgaactcctgacc

SEQ ID NO: 480987 - DNA, 15 bp, Homo sapiens
tctcgaactcctgac

SEQ ID NO: 480988 - DNA, 15 bp, Homo sapiens
tcatgttggccaggc

SEQ ID NO: 480989 - DNA, 15 bp, Homo sapiens
gtcatgttggccagg

SEQ ID NO: 480990 - DNA, 15 bp, Homo sapiens
cgtcatgttggccag

SEQ ID NO: 480991 - DNA, 15 bp, Homo sapiens
tcgtcatgttggcca

SEQ ID NO: 480992 - DNA, 15 bp, Homo sapiens
ttcgtcatgttggcc

SEQ ID NO: 480993 - DNA, 15 bp, Homo sapiens
tttcgtcatgttggc

SEQ ID NO: 480994 - DNA, 15 bp, Homo sapiens
gtttcgtcatgttgg

SEQ ID NO: 480995 - DNA, 15 bp, Homo sapiens
ggtttcgtcatgttg

SEQ ID NO: 480996 - DNA, 15 bp, Homo sapiens
gggtttcgtcatgtt

SEQ ID NO: 480997 - DNA, 15 bp, Homo sapiens
ggggtttcgtcatgt

SEQ ID NO: 480998 - DNA, 15 bp, Homo sapiens
cggggtttcgtcatg

SEQ ID NO: 480999 - DNA, 15 bp, Homo sapiens
acggggtttcgtcat

SEQ ID NO: 481000 - DNA, 15 bp, Homo sapiens
gacggggtttcgtca

SEQ ID NO: 481001 - DNA, 15 bp, Homo sapiens
agacggggtttcgtc

SEQ ID NO: 481002 - DNA, 15 bp, Homo sapiens
gagacggggtttcgt

SEQ ID NO: 481003 - DNA, 15 bp, Homo sapiens
agagacggggtttcg

SEQ ID NO: 481004 - DNA, 15 bp, Homo sapiens
attttagtagagacg

SEQ ID NO: 481005 - DNA, 15 bp, Homo sapiens
tattttagtagagac

SEQ ID NO: 481006 - DNA, 15 bp, Homo sapiens
gtattttagtagaga

SEQ ID NO: 481007 - DNA, 15 bp, Homo sapiens
tgtattttagtagag

SEQ ID NO: 481008 - DNA, 15 bp, Homo sapiens
ttgtattttagtaga

SEQ ID NO: 481009 - DNA, 15 bp, Homo sapiens
tttgtattttagtag

SEQ ID NO: 481010 - DNA, 15 bp, Homo sapiens
ttttgtattttagta

SEQ ID NO: 481011 - DNA, 15 bp, Homo sapiens
tttttgtattttagt

SEQ ID NO: 481012 - DNA, 15 bp, Homo sapiens
atttttgtattttag

SEQ ID NO: 481013 - DNA, 15 bp, Homo sapiens
aatttttgtatttta

SEQ ID NO: 481014 - DNA, 15 bp, Homo sapiens
tacccagctaatttt

SEQ ID NO: 481015 - DNA, 15 bp, Homo sapiens
atacccagctaattt

SEQ ID NO: 481016 - DNA, 15 bp, Homo sapiens
catacccagctaatt

SEQ ID NO: 481017 - DNA, 15 bp, Homo sapiens
ccatacccagctaat

SEQ ID NO: 481018 - DNA, 15 bp, Homo sapiens
accatacccagctaa

SEQ ID NO: 481019 - DNA, 15 bp, Homo sapiens
caccatacccagcta

SEQ ID NO: 481020 - DNA, 15 bp, Homo sapiens
ccaccatacccagct

SEQ ID NO: 481021 - DNA, 15 bp, Homo sapiens
gccaccatacccagc

SEQ ID NO: 481022 - DNA, 15 bp, Homo sapiens
cgccaccatacccag

SEQ ID NO: 481023 - DNA, 15 bp, Homo sapiens
ccgccaccataccca

SEQ ID NO: 481024 - DNA, 15 bp, Homo sapiens
tccgccaccataccc

SEQ ID NO: 481025 - DNA, 15 bp, Homo sapiens
gtccgccaccatacc

SEQ ID NO: 481026 - DNA, 15 bp, Homo sapiens
cgtccgccaccatac

SEQ ID NO: 481027 - DNA, 15 bp, Homo sapiens
gcgtccgccaccata

SEQ ID NO: 481028 - DNA, 15 bp, Homo sapiens
ggcgtccgccaccat

SEQ ID NO: 481029 - DNA, 15 bp, Homo sapiens
aggcgtccgccacca

SEQ ID NO: 481030 - DNA, 15 bp, Homo sapiens
taggcgtccgccacc

SEQ ID NO: 481031 - DNA, 15 bp, Homo sapiens
ataggcgtccgccac

SEQ ID NO: 481032 - DNA, 15 bp, Homo sapiens
tataggcgtccgcca

SEQ ID NO: 481033 - DNA, 15 bp, Homo sapiens
ttataggcgtccgcc

SEQ ID NO: 481034 - DNA, 15 bp, Homo sapiens
attataggcgtccgc

SEQ ID NO: 481035 - DNA, 15 bp, Homo sapiens
gattataggcgtccg

SEQ ID NO: 481036 - DNA, 15 bp, Homo sapiens
ggattataggcgtcc

SEQ ID NO: 481037 - DNA, 15 bp, Homo sapiens
gggattataggcgtc

SEQ ID NO: 481038 - DNA, 15 bp, Homo sapiens
tgggattataggcgt

SEQ ID NO: 481039 - DNA, 15 bp, Homo sapiens
ctgggattataggcg

SEQ ID NO: 481040 - DNA, 15 bp, Homo sapiens
ctcccaggttcaagt

SEQ ID NO: 481041 - DNA, 15 bp, Homo sapiens
atggcacaatctcag

SEQ ID NO: 481042 - DNA, 15 bp, Homo sapiens
aatggcacaatctca

SEQ ID NO: 481043 - DNA, 15 bp, Homo sapiens
caatggcacaatctc

SEQ ID NO: 481044 - DNA, 15 bp, Homo sapiens
gcaatggcacaatct

SEQ ID NO: 481045 - DNA, 15 bp, Homo sapiens
tgcaatggcacaatc

SEQ ID NO: 481046 - DNA, 15 bp, Homo sapiens
gtgcaatggcacaat

SEQ ID NO: 481047 - DNA, 15 bp, Homo sapiens
agtgcaatggcacaa

SEQ ID NO: 481048 - DNA, 15 bp, Homo sapiens
gagtgcaatggcaca

SEQ ID NO: 481049 - DNA, 15 bp, Homo sapiens
cggagtctcactctg

SEQ ID NO: 481050 - DNA, 15 bp, Homo sapiens
acggagtctcactct

SEQ ID NO: 481051 - DNA, 15 bp, Homo sapiens
gacggagtctcactc

SEQ ID NO: 481052 - DNA, 15 bp, Homo sapiens
agacggagtctcact

SEQ ID NO: 481053 - DNA, 15 bp, Homo sapiens
gagacggagtctcac

SEQ ID NO: 481054 - DNA, 15 bp, Homo sapiens
atttctttttttttt

SEQ ID NO: 481055 - DNA, 15 bp, Homo sapiens
aatttcttttttttt

SEQ ID NO: 481056 - DNA, 15 bp, Homo sapiens
taatttctttttttt

SEQ ID NO: 481057 - DNA, 15 bp, Homo sapiens
ctaatttcttttttt

SEQ ID NO: 481058 - DNA, 15 bp, Homo sapiens
tctaatttctttttt

SEQ ID NO: 481059 - DNA, 15 bp, Homo sapiens
ttctaatttcttttt

SEQ ID NO: 481060 - DNA, 15 bp, Homo sapiens
gttctaatttctttt

SEQ ID NO: 481061 - DNA, 15 bp, Homo sapiens
agttctaatttcttt

SEQ ID NO: 481062 - DNA, 15 bp, Homo sapiens
cagttctaatttctt

SEQ ID NO: 481063 - DNA, 15 bp, Homo sapiens
tcagttctaatttct

SEQ ID NO: 481064 - DNA, 15 bp, Homo sapiens
gtcagttctaatttc

SEQ ID NO: 481065 - DNA, 15 bp, Homo sapiens
agtcagttctaattt

SEQ ID NO: 481066 - DNA, 15 bp, Homo sapiens
aagtcagttctaatt

SEQ ID NO: 481067 - DNA, 15 bp, Homo sapiens
aaagtcagttctaat

SEQ ID NO: 481068 - DNA, 15 bp, Homo sapiens
taaagtcagttctaa

SEQ ID NO: 481069 - DNA, 15 bp, Homo sapiens
ataaagtcagttcta

SEQ ID NO: 481070 - DNA, 15 bp, Homo sapiens
tataaagtcagttct

SEQ ID NO: 481071 - DNA, 15 bp, Homo sapiens
ttataaagtcagttc

SEQ ID NO: 481072 - DNA, 15 bp, Homo sapiens
tttataaagtcagtt

SEQ ID NO: 481073 - DNA, 15 bp, Homo sapiens
ctttataaagtcagt

SEQ ID NO: 481074 - DNA, 15 bp, Homo sapiens
actttataaagtcag

SEQ ID NO: 481075 - DNA, 15 bp, Homo sapiens
aactttataaagtca

SEQ ID NO: 481076 - DNA, 15 bp, Homo sapiens
aaactttataaagtc

SEQ ID NO: 481077 - DNA, 15 bp, Homo sapiens
caaactttataaagt

SEQ ID NO: 481078 - DNA, 15 bp, Homo sapiens
ccaaactttataaag

SEQ ID NO: 481079 - DNA, 15 bp, Homo sapiens
cccaaactttataaa

SEQ ID NO: 481080 - DNA, 15 bp, Homo sapiens
gcccaaactttataa

SEQ ID NO: 481081 - DNA, 15 bp, Homo sapiens
tgcccaaactttata

SEQ ID NO: 481082 - DNA, 15 bp, Homo sapiens
atgcccaaactttat

SEQ ID NO: 481083 - DNA, 15 bp, Homo sapiens
tatgcccaaacttta

SEQ ID NO: 481084 - DNA, 15 bp, Homo sapiens
ttatgcccaaacttt

SEQ ID NO: 481085 - DNA, 15 bp, Homo sapiens
cttatgcccaaactt

SEQ ID NO: 481086 - DNA, 15 bp, Homo sapiens
tcttatgcccaaact

SEQ ID NO: 481087 - DNA, 15 bp, Homo sapiens
ctcttatgcccaaac

SEQ ID NO: 481088 - DNA, 15 bp, Homo sapiens
actcttatgcccaaa

SEQ ID NO: 481089 - DNA, 15 bp, Homo sapiens
gactcttatgcccaa

SEQ ID NO: 481090 - DNA, 15 bp, Homo sapiens
agactcttatgccca

SEQ ID NO: 481091 - DNA, 15 bp, Homo sapiens
aagactcttatgccc

SEQ ID NO: 481092 - DNA, 15 bp, Homo sapiens
taagactcttatgcc

SEQ ID NO: 481093 - DNA, 15 bp, Homo sapiens
ctaagactcttatgc

SEQ ID NO: 481094 - DNA, 15 bp, Homo sapiens
gctaagactcttatg

SEQ ID NO: 481095 - DNA, 15 bp, Homo sapiens
tgctaagactcttat

SEQ ID NO: 481096 - DNA, 15 bp, Homo sapiens
ctgctaagactctta

SEQ ID NO: 481097 - DNA, 15 bp, Homo sapiens
gctgctaagactctt

SEQ ID NO: 481098 - DNA, 15 bp, Homo sapiens
ggctgctaagactct

SEQ ID NO: 481099 - DNA, 15 bp, Homo sapiens
tggctgctaagactc

SEQ ID NO: 481100 - DNA, 15 bp, Homo sapiens
ctggctgctaagact

SEQ ID NO: 481101 - DNA, 15 bp, Homo sapiens
actggctgctaagac

SEQ ID NO: 481102 - DNA, 15 bp, Homo sapiens
cactggctgctaaga

SEQ ID NO: 481103 - DNA, 15 bp, Homo sapiens
acactggctgctaag

SEQ ID NO: 481104 - DNA, 15 bp, Homo sapiens
cacactggctgctaa

SEQ ID NO: 481105 - DNA, 15 bp, Homo sapiens
acacactggctgcta

SEQ ID NO: 481106 - DNA, 15 bp, Homo sapiens
aacacactggctgct

SEQ ID NO: 481107 - DNA, 15 bp, Homo sapiens
aaacacactggctgc

SEQ ID NO: 481108 - DNA, 15 bp, Homo sapiens
taaacacactggctg

SEQ ID NO: 481109 - DNA, 15 bp, Homo sapiens
ctaaacacactggct

SEQ ID NO: 481110 - DNA, 15 bp, Homo sapiens
actaaacacactggc

SEQ ID NO: 481111 - DNA, 15 bp, Homo sapiens
tactaaacacactgg

SEQ ID NO: 481112 - DNA, 15 bp, Homo sapiens
atactaaacacactg

SEQ ID NO: 481113 - DNA, 15 bp, Homo sapiens
tatactaaacacact

SEQ ID NO: 481114 - DNA, 15 bp, Homo sapiens
gtatactaaacacac

SEQ ID NO: 481115 - DNA, 15 bp, Homo sapiens
tgtatactaaacaca

SEQ ID NO: 481116 - DNA, 15 bp, Homo sapiens
ctgtatactaaacac

SEQ ID NO: 481117 - DNA, 15 bp, Homo sapiens
tctgtatactaaaca

SEQ ID NO: 481118 - DNA, 15 bp, Homo sapiens
ttctgtatactaaac

SEQ ID NO: 481119 - DNA, 15 bp, Homo sapiens
tttctgtatactaaa

SEQ ID NO: 481120 - DNA, 15 bp, Homo sapiens
ttttctgtatactaa

SEQ ID NO: 481121 - DNA, 15 bp, Homo sapiens
attttctgtatacta

SEQ ID NO: 481122 - DNA, 15 bp, Homo sapiens
aattttctgtatact

SEQ ID NO: 481123 - DNA, 15 bp, Homo sapiens
caattttctgtatac

SEQ ID NO: 481124 - DNA, 15 bp, Homo sapiens
acaattttctgtata

SEQ ID NO: 481125 - DNA, 15 bp, Homo sapiens
cacaattttctgtat

SEQ ID NO: 481126 - DNA, 15 bp, Homo sapiens
ccacaattttctgta

SEQ ID NO: 481127 - DNA, 15 bp, Homo sapiens
gccacaattttctgt

SEQ ID NO: 481128 - DNA, 15 bp, Homo sapiens
tgccacaattttctg

SEQ ID NO: 481129 - DNA, 15 bp, Homo sapiens
ttgccacaattttct

SEQ ID NO: 481130 - DNA, 15 bp, Homo sapiens
attgccacaattttc

SEQ ID NO: 481131 - DNA, 15 bp, Homo sapiens
cattgccacaatttt

SEQ ID NO: 481132 - DNA, 15 bp, Homo sapiens
tcattgccacaattt

SEQ ID NO: 481133 - DNA, 15 bp, Homo sapiens
gtcattgccacaatt

SEQ ID NO: 481134 - DNA, 15 bp, Homo sapiens
tgtcattgccacaat

SEQ ID NO: 481135 - DNA, 15 bp, Homo sapiens
atgtcattgccacaa

SEQ ID NO: 481136 - DNA, 15 bp, Homo sapiens
aatgtcattgccaca

SEQ ID NO: 481137 - DNA, 15 bp, Homo sapiens
gaatgtcattgccac

SEQ ID NO: 481138 - DNA, 15 bp, Homo sapiens
agaatgtcattgcca

SEQ ID NO: 481139 - DNA, 15 bp, Homo sapiens
gagaatgtcattgcc

SEQ ID NO: 481140 - DNA, 15 bp, Homo sapiens
ggagaatgtcattgc

SEQ ID NO: 481141 - DNA, 15 bp, Homo sapiens
aggagaatgtcattg

SEQ ID NO: 481142 - DNA, 15 bp, Homo sapiens
aaggagaatgtcatt

SEQ ID NO: 481143 - DNA, 15 bp, Homo sapiens
aaaggagaatgtcat

SEQ ID NO: 481144 - DNA, 15 bp, Homo sapiens
gaaaggagaatgtca

SEQ ID NO: 481145 - DNA, 15 bp, Homo sapiens
ggaaaggagaatgtc

SEQ ID NO: 481146 - DNA, 15 bp, Homo sapiens
gggaaaggagaatgt

SEQ ID NO: 481147 - DNA, 15 bp, Homo sapiens
tgggaaaggagaatg

SEQ ID NO: 481148 - DNA, 15 bp, Homo sapiens
ttgggaaaggagaat

SEQ ID NO: 481149 - DNA, 15 bp, Homo sapiens
gttgggaaaggagaa

SEQ ID NO: 481150 - DNA, 15 bp, Homo sapiens
agttgggaaaggaga

SEQ ID NO: 481151 - DNA, 15 bp, Homo sapiens
aagttgggaaaggag

SEQ ID NO: 481152 - DNA, 15 bp, Homo sapiens
aaagttgggaaagga

SEQ ID NO: 481153 - DNA, 15 bp, Homo sapiens
gaaagttgggaaagg

SEQ ID NO: 481154 - DNA, 15 bp, Homo sapiens
agaaagttgggaaag

SEQ ID NO: 481155 - DNA, 15 bp, Homo sapiens
aagaaagttgggaaa

SEQ ID NO: 481156 - DNA, 15 bp, Homo sapiens
caagaaagttgggaa

SEQ ID NO: 481157 - DNA, 15 bp, Homo sapiens
tcaagaaagttggga

SEQ ID NO: 481158 - DNA, 15 bp, Homo sapiens
atcaagaaagttggg

SEQ ID NO: 481159 - DNA, 15 bp, Homo sapiens
aatcaagaaagttgg

SEQ ID NO: 481160 - DNA, 15 bp, Homo sapiens
aaatcaagaaagttg

SEQ ID NO: 481161 - DNA, 15 bp, Homo sapiens
aaaatcaagaaagtt

SEQ ID NO: 481162 - DNA, 15 bp, Homo sapiens
aaaaatcaagaaagt

SEQ ID NO: 481163 - DNA, 15 bp, Homo sapiens
taaaaatcaagaaag

SEQ ID NO: 481164 - DNA, 15 bp, Homo sapiens
ttaaaaatcaagaaa

SEQ ID NO: 481165 - DNA, 15 bp, Homo sapiens
tttaaaaatcaagaa

SEQ ID NO: 481166 - DNA, 15 bp, Homo sapiens
atttaaaaatcaaga

SEQ ID NO: 481167 - DNA, 15 bp, Homo sapiens
aatttaaaaatcaag

SEQ ID NO: 481168 - DNA, 15 bp, Homo sapiens
taatttaaaaatcaa

SEQ ID NO: 481169 - DNA, 15 bp, Homo sapiens
ttaatttaaaaatca

SEQ ID NO: 481170 - DNA, 15 bp, Homo sapiens
cttaatttaaaaatc

SEQ ID NO: 481171 - DNA, 15 bp, Homo sapiens
tcttaatttaaaaat

SEQ ID NO: 481172 - DNA, 15 bp, Homo sapiens
atcttaatttaaaaa

SEQ ID NO: 481173 - DNA, 15 bp, Homo sapiens
tatcttaatttaaaa

SEQ ID NO: 481174 - DNA, 15 bp, Homo sapiens
atatcttaatttaaa

SEQ ID NO: 481175 - DNA, 15 bp, Homo sapiens
tatatcttaatttaa

SEQ ID NO: 481176 - DNA, 15 bp, Homo sapiens
gtatatcttaattta

SEQ ID NO: 481177 - DNA, 15 bp, Homo sapiens
ggtatatcttaattt

SEQ ID NO: 481178 - DNA, 15 bp, Homo sapiens
aggtatatcttaatt

SEQ ID NO: 481179 - DNA, 15 bp, Homo sapiens
taggtatatcttaat

SEQ ID NO: 481180 - DNA, 15 bp, Homo sapiens
ctaggtatatcttaa

SEQ ID NO: 481181 - DNA, 15 bp, Homo sapiens
tctaggtatatctta

SEQ ID NO: 481182 - DNA, 15 bp, Homo sapiens
ttctaggtatatctt

SEQ ID NO: 481183 - DNA, 15 bp, Homo sapiens
tttctaggtatatct

SEQ ID NO: 481184 - DNA, 15 bp, Homo sapiens
ttttctaggtatatc

SEQ ID NO: 481185 - DNA, 15 bp, Homo sapiens
cttttctaggtatat

SEQ ID NO: 481186 - DNA, 15 bp, Homo sapiens
gcttttctaggtata

SEQ ID NO: 481187 - DNA, 15 bp, Homo sapiens
tgcttttctaggtat

SEQ ID NO: 481188 - DNA, 15 bp, Homo sapiens
ctgcttttctaggta

SEQ ID NO: 481189 - DNA, 15 bp, Homo sapiens
cctgcttttctaggt

SEQ ID NO: 481190 - DNA, 15 bp, Homo sapiens
tcctgcttttctagg

SEQ ID NO: 481191 - DNA, 15 bp, Homo sapiens
ttcctgcttttctag

SEQ ID NO: 481192 - DNA, 15 bp, Homo sapiens
attcctgcttttcta

SEQ ID NO: 481193 - DNA, 15 bp, Homo sapiens
gattcctgcttttct

SEQ ID NO: 481194 - DNA, 15 bp, Homo sapiens
ggattcctgcttttc

SEQ ID NO: 481195 - DNA, 15 bp, Homo sapiens
aggattcctgctttt

SEQ ID NO: 481196 - DNA, 15 bp, Homo sapiens
caggattcctgcttt

SEQ ID NO: 481197 - DNA, 15 bp, Homo sapiens
ccaggattcctgctt

SEQ ID NO: 481198 - DNA, 15 bp, Homo sapiens
accaggattcctgct

SEQ ID NO: 481199 - DNA, 15 bp, Homo sapiens
gaccaggattcctgc

SEQ ID NO: 481200 - DNA, 15 bp, Homo sapiens
agaccaggattcctg

SEQ ID NO: 481201 - DNA, 15 bp, Homo sapiens
aagaccaggattcct

SEQ ID NO: 481202 - DNA, 15 bp, Homo sapiens
aaagaccaggattcc

SEQ ID NO: 481203 - DNA, 15 bp, Homo sapiens
caaagaccaggattc

SEQ ID NO: 481204 - DNA, 15 bp, Homo sapiens
tcaaagaccaggatt

SEQ ID NO: 481205 - DNA, 15 bp, Homo sapiens
atcaaagaccaggat

SEQ ID NO: 481206 - DNA, 15 bp, Homo sapiens
aatcaaagaccagga

SEQ ID NO: 481207 - DNA, 15 bp, Homo sapiens
gaatcaaagaccagg

SEQ ID NO: 481208 - DNA, 15 bp, Homo sapiens
ggaatcaaagaccag

SEQ ID NO: 481209 - DNA, 15 bp, Homo sapiens
aggaatcaaagacca

SEQ ID NO: 481210 - DNA, 15 bp, Homo sapiens
caggaatcaaagacc

SEQ ID NO: 481211 - DNA, 15 bp, Homo sapiens
tcaggaatcaaagac

SEQ ID NO: 481212 - DNA, 15 bp, Homo sapiens
ctcaggaatcaaaga

SEQ ID NO: 481213 - DNA, 15 bp, Homo sapiens
tctcaggaatcaaag

SEQ ID NO: 481214 - DNA, 15 bp, Homo sapiens
gtctcaggaatcaaa

SEQ ID NO: 481215 - DNA, 15 bp, Homo sapiens
ggtctcaggaatcaa

SEQ ID NO: 481216 - DNA, 15 bp, Homo sapiens
aggtctcaggaatca

SEQ ID NO: 481217 - DNA, 15 bp, Homo sapiens
gaggtctcaggaatc

SEQ ID NO: 481218 - DNA, 15 bp, Homo sapiens
ggaggtctcaggaat

SEQ ID NO: 481219 - DNA, 15 bp, Homo sapiens
gggaggtctcaggaa

SEQ ID NO: 481220 - DNA, 15 bp, Homo sapiens
agggaggtctcagga

SEQ ID NO: 481221 - DNA, 15 bp, Homo sapiens
cagggaggtctcagg

SEQ ID NO: 481222 - DNA, 15 bp, Homo sapiens
acagggaggtctcag

SEQ ID NO: 481223 - DNA, 15 bp, Homo sapiens
aacagggaggtctca

SEQ ID NO: 481224 - DNA, 15 bp, Homo sapiens
aaacagggaggtctc

SEQ ID NO: 481225 - DNA, 15 bp, Homo sapiens
gaaacagggaggtct

SEQ ID NO: 481226 - DNA, 15 bp, Homo sapiens
tgaaacagggaggtc

SEQ ID NO: 481227 - DNA, 15 bp, Homo sapiens
atgaaacagggaggt

SEQ ID NO: 481228 - DNA, 15 bp, Homo sapiens
catgaaacagggagg

SEQ ID NO: 481229 - DNA, 15 bp, Homo sapiens
acatgaaacagggag

SEQ ID NO: 481230 - DNA, 15 bp, Homo sapiens
cacatgaaacaggga

SEQ ID NO: 481231 - DNA, 15 bp, Homo sapiens
tcacatgaaacaggg

SEQ ID NO: 481232 - DNA, 15 bp, Homo sapiens
ttcacatgaaacagg

SEQ ID NO: 481233 - DNA, 15 bp, Homo sapiens
cttcacatgaaacag

SEQ ID NO: 481234 - DNA, 15 bp, Homo sapiens
tcttcacatgaaaca

SEQ ID NO: 481235 - DNA, 15 bp, Homo sapiens
atcttcacatgaaac

SEQ ID NO: 481236 - DNA, 15 bp, Homo sapiens
tatcttcacatgaaa

SEQ ID NO: 481237 - DNA, 15 bp, Homo sapiens
gtatcttcacatgaa

SEQ ID NO: 481238 - DNA, 15 bp, Homo sapiens
tgtatcttcacatga

SEQ ID NO: 481239 - DNA, 15 bp, Homo sapiens
ctgtatcttcacatg

SEQ ID NO: 481240 - DNA, 15 bp, Homo sapiens
gctgtatcttcacat

SEQ ID NO: 481241 - DNA, 15 bp, Homo sapiens
agctgtatcttcaca

SEQ ID NO: 481242 - DNA, 15 bp, Homo sapiens
aagctgtatcttcac

SEQ ID NO: 481243 - DNA, 15 bp, Homo sapiens
gaagctgtatcttca

SEQ ID NO: 481244 - DNA, 15 bp, Homo sapiens
tgaagctgtatcttc

SEQ ID NO: 481245 - DNA, 15 bp, Homo sapiens
ttgaagctgtatctt

SEQ ID NO: 481246 - DNA, 15 bp, Homo sapiens
cttgaagctgtatct

SEQ ID NO: 481247 - DNA, 15 bp, Homo sapiens
acttgaagctgtatc

SEQ ID NO: 481248 - DNA, 15 bp, Homo sapiens
gacttgaagctgtat

SEQ ID NO: 481249 - DNA, 15 bp, Homo sapiens
agacttgaagctgta

SEQ ID NO: 481250 - DNA, 15 bp, Homo sapiens
aagacttgaagctgt

SEQ ID NO: 481251 - DNA, 15 bp, Homo sapiens
caagacttgaagctg

SEQ ID NO: 481252 - DNA, 15 bp, Homo sapiens
ccaagacttgaagct

SEQ ID NO: 481253 - DNA, 15 bp, Homo sapiens
tccaagacttgaagc

SEQ ID NO: 481254 - DNA, 15 bp, Homo sapiens
ctccaagacttgaag

SEQ ID NO: 481255 - DNA, 15 bp, Homo sapiens
tctccaagacttgaa

SEQ ID NO: 481256 - DNA, 15 bp, Homo sapiens
ttctccaagacttga

SEQ ID NO: 481257 - DNA, 15 bp, Homo sapiens
attctccaagacttg

SEQ ID NO: 481258 - DNA, 15 bp, Homo sapiens
cattctccaagactt

SEQ ID NO: 481259 - DNA, 15 bp, Homo sapiens
gcattctccaagact

SEQ ID NO: 481260 - DNA, 15 bp, Homo sapiens
ggcattctccaagac

SEQ ID NO: 481261 - DNA, 15 bp, Homo sapiens
aggcattctccaaga

SEQ ID NO: 481262 - DNA, 15 bp, Homo sapiens
gaggcattctccaag

SEQ ID NO: 481263 - DNA, 15 bp, Homo sapiens
ggaggcattctccaa

SEQ ID NO: 481264 - DNA, 15 bp, Homo sapiens
tggaggcattctcca

SEQ ID NO: 481265 - DNA, 15 bp, Homo sapiens
ttggaggcattctcc

SEQ ID NO: 481266 - DNA, 15 bp, Homo sapiens
cttggaggcattctc

SEQ ID NO: 481267 - DNA, 15 bp, Homo sapiens
ccttggaggcattct

SEQ ID NO: 481268 - DNA, 15 bp, Homo sapiens
accttggaggcattc

SEQ ID NO: 481269 - DNA, 15 bp, Homo sapiens
gaccttggaggcatt

SEQ ID NO: 481270 - DNA, 15 bp, Homo sapiens
agaccttggaggcat

SEQ ID NO: 481271 - DNA, 15 bp, Homo sapiens
aagaccttggaggca

SEQ ID NO: 481272 - DNA, 15 bp, Homo sapiens
taagaccttggaggc

SEQ ID NO: 481273 - DNA, 15 bp, Homo sapiens
ttaagaccttggagg

SEQ ID NO: 481274 - DNA, 15 bp, Homo sapiens
tttaagaccttggag

SEQ ID NO: 481275 - DNA, 15 bp, Homo sapiens
ttttaagaccttgga

SEQ ID NO: 481276 - DNA, 15 bp, Homo sapiens
tttttaagaccttgg

SEQ ID NO: 481277 - DNA, 15 bp, Homo sapiens
atttttaagaccttg

SEQ ID NO: 481278 - DNA, 15 bp, Homo sapiens
catttttaagacctt

SEQ ID NO: 481279 - DNA, 15 bp, Homo sapiens
ccatttttaagacct

SEQ ID NO: 481280 - DNA, 15 bp, Homo sapiens
cccatttttaagacc

SEQ ID NO: 481281 - DNA, 15 bp, Homo sapiens
ccccatttttaagac

SEQ ID NO: 481282 - DNA, 15 bp, Homo sapiens
tccccatttttaaga

SEQ ID NO: 481283 - DNA, 15 bp, Homo sapiens
ttccccatttttaag

SEQ ID NO: 481284 - DNA, 15 bp, Homo sapiens
attccccatttttaa

SEQ ID NO: 481285 - DNA, 15 bp, Homo sapiens
gattccccattttta

SEQ ID NO: 481286 - DNA, 15 bp, Homo sapiens
agattccccattttt

SEQ ID NO: 481287 - DNA, 15 bp, Homo sapiens
cagattccccatttt

SEQ ID NO: 481288 - DNA, 15 bp, Homo sapiens
acagattccccattt

SEQ ID NO: 481289 - DNA, 15 bp, Homo sapiens
cacagattccccatt

SEQ ID NO: 481290 - DNA, 15 bp, Homo sapiens
ccacagattccccat

SEQ ID NO: 481291 - DNA, 15 bp, Homo sapiens
tccacagattcccca

SEQ ID NO: 481292 - DNA, 15 bp, Homo sapiens
atccacagattcccc

SEQ ID NO: 481293 - DNA, 15 bp, Homo sapiens
aatccacagattccc

SEQ ID NO: 481294 - DNA, 15 bp, Homo sapiens
caatccacagattcc

SEQ ID NO: 481295 - DNA, 15 bp, Homo sapiens
acaatccacagattc

SEQ ID NO: 481296 - DNA, 15 bp, Homo sapiens
cacaatccacagatt

SEQ ID NO: 481297 - DNA, 15 bp, Homo sapiens
tcacaatccacagat

SEQ ID NO: 481298 - DNA, 15 bp, Homo sapiens
ctcacaatccacaga

SEQ ID NO: 481299 - DNA, 15 bp, Homo sapiens
actcacaatccacag

SEQ ID NO: 481300 - DNA, 15 bp, Homo sapiens
gactcacaatccaca

SEQ ID NO: 481301 - DNA, 15 bp, Homo sapiens
tgactcacaatccac

SEQ ID NO: 481302 - DNA, 15 bp, Homo sapiens
ttgactcacaatcca

SEQ ID NO: 481303 - DNA, 15 bp, Homo sapiens
cttgactcacaatcc

SEQ ID NO: 481304 - DNA, 15 bp, Homo sapiens
gcttgactcacaatc

SEQ ID NO: 481305 - DNA, 15 bp, Homo sapiens
agcttgactcacaat

SEQ ID NO: 481306 - DNA, 15 bp, Homo sapiens
aagcttgactcacaa

SEQ ID NO: 481307 - DNA, 15 bp, Homo sapiens
aaagcttgactcaca

SEQ ID NO: 481308 - DNA, 15 bp, Homo sapiens
caaagcttgactcac

SEQ ID NO: 481309 - DNA, 15 bp, Homo sapiens
tcaaagcttgactca

SEQ ID NO: 481310 - DNA, 15 bp, Homo sapiens
ctcaaagcttgactc

SEQ ID NO: 481311 - DNA, 15 bp, Homo sapiens
gctcaaagcttgact

SEQ ID NO: 481312 - DNA, 15 bp, Homo sapiens
tgctcaaagcttgac

SEQ ID NO: 481313 - DNA, 15 bp, Homo sapiens
ttgctcaaagcttga

SEQ ID NO: 481314 - DNA, 15 bp, Homo sapiens
cttgctcaaagcttg

SEQ ID NO: 481315 - DNA, 15 bp, Homo sapiens
acttgctcaaagctt

SEQ ID NO: 481316 - DNA, 15 bp, Homo sapiens
gacttgctcaaagct

SEQ ID NO: 481317 - DNA, 15 bp, Homo sapiens
tgacttgctcaaagc

SEQ ID NO: 481318 - DNA, 15 bp, Homo sapiens
ctgacttgctcaaag

SEQ ID NO: 481319 - DNA, 15 bp, Homo sapiens
cctgacttgctcaaa

SEQ ID NO: 481320 - DNA, 15 bp, Homo sapiens
acctgacttgctcaa

SEQ ID NO: 481321 - DNA, 15 bp, Homo sapiens
aacctgacttgctca

SEQ ID NO: 481322 - DNA, 15 bp, Homo sapiens
aaacctgacttgctc

SEQ ID NO: 481323 - DNA, 15 bp, Homo sapiens
aaaacctgacttgct

SEQ ID NO: 481324 - DNA, 15 bp, Homo sapiens
taaaacctgacttgc

SEQ ID NO: 481325 - DNA, 15 bp, Homo sapiens
gtaaaacctgacttg

SEQ ID NO: 481326 - DNA, 15 bp, Homo sapiens
tgtaaaacctgactt

SEQ ID NO: 481327 - DNA, 15 bp, Homo sapiens
ttgtaaaacctgact

SEQ ID NO: 481328 - DNA, 15 bp, Homo sapiens
cttgtaaaacctgac

SEQ ID NO: 481329 - DNA, 15 bp, Homo sapiens
ccttgtaaaacctga

SEQ ID NO: 481330 - DNA, 15 bp, Homo sapiens
cccttgtaaaacctg

SEQ ID NO: 481331 - DNA, 15 bp, Homo sapiens
tcccttgtaaaacct

SEQ ID NO: 481332 - DNA, 15 bp, Homo sapiens
gtcccttgtaaaacc

SEQ ID NO: 481333 - DNA, 15 bp, Homo sapiens
ggtcccttgtaaaac

SEQ ID NO: 481334 - DNA, 15 bp, Homo sapiens
cggtcccttgtaaaa

SEQ ID NO: 481335 - DNA, 15 bp, Homo sapiens
ccggtcccttgtaaa

SEQ ID NO: 481336 - DNA, 15 bp, Homo sapiens
accggtcccttgtaa

SEQ ID NO: 481337 - DNA, 15 bp, Homo sapiens
taccggtcccttgta

SEQ ID NO: 481338 - DNA, 15 bp, Homo sapiens
ataccggtcccttgt

SEQ ID NO: 481339 - DNA, 15 bp, Homo sapiens
tataccggtcccttg

SEQ ID NO: 481340 - DNA, 15 bp, Homo sapiens
atataccggtccctt

SEQ ID NO: 481341 - DNA, 15 bp, Homo sapiens
aatataccggtccct

SEQ ID NO: 481342 - DNA, 15 bp, Homo sapiens
gaatataccggtccc

SEQ ID NO: 481343 - DNA, 15 bp, Homo sapiens
ggaatataccggtcc

SEQ ID NO: 481344 - DNA, 15 bp, Homo sapiens
cggaatataccggtc

SEQ ID NO: 481345 - DNA, 15 bp, Homo sapiens
tcggaatataccggt

SEQ ID NO: 481346 - DNA, 15 bp, Homo sapiens
gtcggaatataccgg

SEQ ID NO: 481347 - DNA, 15 bp, Homo sapiens
agtcggaatataccg

SEQ ID NO: 481348 - DNA, 15 bp, Homo sapiens
cagtcggaatatacc

SEQ ID NO: 481349 - DNA, 15 bp, Homo sapiens
gcagtcggaatatac

SEQ ID NO: 481350 - DNA, 15 bp, Homo sapiens
tgcagtcggaatata

SEQ ID NO: 481351 - DNA, 15 bp, Homo sapiens
ctgcagtcggaatat

SEQ ID NO: 481352 - DNA, 15 bp, Homo sapiens
gctgcagtcggaata

SEQ ID NO: 481353 - DNA, 15 bp, Homo sapiens
ggctgcagtcggaat

SEQ ID NO: 481354 - DNA, 15 bp, Homo sapiens
aggctgcagtcggaa

SEQ ID NO: 481355 - DNA, 15 bp, Homo sapiens
caggctgcagtcgga

SEQ ID NO: 481356 - DNA, 15 bp, Homo sapiens
tcaggctgcagtcgg

SEQ ID NO: 481357 - DNA, 15 bp, Homo sapiens
ctcaggctgcagtcg

SEQ ID NO: 481358 - DNA, 15 bp, Homo sapiens
actcaggctgcagtc

SEQ ID NO: 481359 - DNA, 15 bp, Homo sapiens
aactcaggctgcagt

SEQ ID NO: 481360 - DNA, 15 bp, Homo sapiens
caactcaggctgcag

SEQ ID NO: 481361 - DNA, 15 bp, Homo sapiens
acaactcaggctgca

SEQ ID NO: 481362 - DNA, 15 bp, Homo sapiens
cacaactcaggctgc

SEQ ID NO: 481363 - DNA, 15 bp, Homo sapiens
acacaactcaggctg

SEQ ID NO: 481364 - DNA, 15 bp, Homo sapiens
cacacaactcaggct

SEQ ID NO: 481365 - DNA, 15 bp, Homo sapiens
ccacacaactcaggc

SEQ ID NO: 481366 - DNA, 15 bp, Homo sapiens
gccacacaactcagg

SEQ ID NO: 481367 - DNA, 15 bp, Homo sapiens
ggccacacaactcag

SEQ ID NO: 481368 - DNA, 15 bp, Homo sapiens
tggccacacaactca

SEQ ID NO: 481369 - DNA, 15 bp, Homo sapiens
gtggccacacaactc

SEQ ID NO: 481370 - DNA, 15 bp, Homo sapiens
cgtggccacacaact

SEQ ID NO: 481371 - DNA, 15 bp, Homo sapiens
gcgtggccacacaac

SEQ ID NO: 481372 - DNA, 15 bp, Homo sapiens
agcgtggccacacaa

SEQ ID NO: 481373 - DNA, 15 bp, Homo sapiens
cagcgtggccacaca

SEQ ID NO: 481374 - DNA, 15 bp, Homo sapiens
ccagcgtggccacac

SEQ ID NO: 481375 - DNA, 15 bp, Homo sapiens
cccagcgtggccaca

SEQ ID NO: 481376 - DNA, 15 bp, Homo sapiens
gcccagcgtggccac

SEQ ID NO: 481377 - DNA, 15 bp, Homo sapiens
tgcccagcgtggcca

SEQ ID NO: 481378 - DNA, 15 bp, Homo sapiens
atgcccagcgtggcc

SEQ ID NO: 481379 - DNA, 15 bp, Homo sapiens
aatgcccagcgtggc

SEQ ID NO: 481380 - DNA, 15 bp, Homo sapiens
gaatgcccagcgtgg

SEQ ID NO: 481381 - DNA, 15 bp, Homo sapiens
agaatgcccagcgtg

SEQ ID NO: 481382 - DNA, 15 bp, Homo sapiens
aagaatgcccagcgt

SEQ ID NO: 481383 - DNA, 15 bp, Homo sapiens
aaagaatgcccagcg

SEQ ID NO: 481384 - DNA, 15 bp, Homo sapiens
gaaagaatgcccagc

SEQ ID NO: 481385 - DNA, 15 bp, Homo sapiens
ggaaagaatgcccag

SEQ ID NO: 481386 - DNA, 15 bp, Homo sapiens
tggaaagaatgccca

SEQ ID NO: 481387 - DNA, 15 bp, Homo sapiens
gtggaaagaatgccc

SEQ ID NO: 481388 - DNA, 15 bp, Homo sapiens
agtggaaagaatgcc

SEQ ID NO: 481389 - DNA, 15 bp, Homo sapiens
tagtggaaagaatgc

SEQ ID NO: 481390 - DNA, 15 bp, Homo sapiens
atagtggaaagaatg

SEQ ID NO: 481391 - DNA, 15 bp, Homo sapiens
catagtggaaagaat

SEQ ID NO: 481392 - DNA, 15 bp, Homo sapiens
tcatagtggaaagaa

SEQ ID NO: 481393 - DNA, 15 bp, Homo sapiens
ctcatagtggaaaga

SEQ ID NO: 481394 - DNA, 15 bp, Homo sapiens
actcatagtggaaag

SEQ ID NO: 481395 - DNA, 15 bp, Homo sapiens
cactcatagtggaaa

SEQ ID NO: 481396 - DNA, 15 bp, Homo sapiens
gcactcatagtggaa

SEQ ID NO: 481397 - DNA, 15 bp, Homo sapiens
agcactcatagtgga

SEQ ID NO: 481398 - DNA, 15 bp, Homo sapiens
gagcactcatagtgg

SEQ ID NO: 481399 - DNA, 15 bp, Homo sapiens
tgagcactcatagtg

SEQ ID NO: 481400 - DNA, 15 bp, Homo sapiens
gtgagcactcatagt

SEQ ID NO: 481401 - DNA, 15 bp, Homo sapiens
agtgagcactcatag

SEQ ID NO: 481402 - DNA, 15 bp, Homo sapiens
cagtgagcactcata

SEQ ID NO: 481403 - DNA, 15 bp, Homo sapiens
tcagtgagcactcat

SEQ ID NO: 481404 - DNA, 15 bp, Homo sapiens
ctcagtgagcactca

SEQ ID NO: 481405 - DNA, 15 bp, Homo sapiens
gctcagtgagcactc

SEQ ID NO: 481406 - DNA, 15 bp, Homo sapiens
agctcagtgagcact

SEQ ID NO: 481407 - DNA, 15 bp, Homo sapiens
cagctcagtgagcac

SEQ ID NO: 481408 - DNA, 15 bp, Homo sapiens
tcagctcagtgagca

SEQ ID NO: 481409 - DNA, 15 bp, Homo sapiens
gtcagctcagtgagc

SEQ ID NO: 481410 - DNA, 15 bp, Homo sapiens
agtcagctcagtgag

SEQ ID NO: 481411 - DNA, 15 bp, Homo sapiens
gagtcagctcagtga

SEQ ID NO: 481412 - DNA, 15 bp, Homo sapiens
tgagtcagctcagtg

SEQ ID NO: 481413 - DNA, 15 bp, Homo sapiens
gtgagtcagctcagt

SEQ ID NO: 481414 - DNA, 15 bp, Homo sapiens
agtgagtcagctcag

SEQ ID NO: 481415 - DNA, 15 bp, Homo sapiens
gagtgagtcagctca

SEQ ID NO: 481416 - DNA, 15 bp, Homo sapiens
tgagtgagtcagctc

SEQ ID NO: 481417 - DNA, 15 bp, Homo sapiens
gtgagtgagtcagct

SEQ ID NO: 481418 - DNA, 15 bp, Homo sapiens
tgtgagtgagtcagc

SEQ ID NO: 481419 - DNA, 15 bp, Homo sapiens
gtgtgagtgagtcag

SEQ ID NO: 481420 - DNA, 15 bp, Homo sapiens
agtgtgagtgagtca

SEQ ID NO: 481421 - DNA, 15 bp, Homo sapiens
gagtgtgagtgagtc

SEQ ID NO: 481422 - DNA, 15 bp, Homo sapiens
ggagtgtgagtgagt

SEQ ID NO: 481423 - DNA, 15 bp, Homo sapiens
aggagtgtgagtgag

SEQ ID NO: 481424 - DNA, 15 bp, Homo sapiens
gaggagtgtgagtga

SEQ ID NO: 481425 - DNA, 15 bp, Homo sapiens
cgaggagtgtgagtg

SEQ ID NO: 481426 - DNA, 15 bp, Homo sapiens
gcgaggagtgtgagt

SEQ ID NO: 481427 - DNA, 15 bp, Homo sapiens
ggcgaggagtgtgag

SEQ ID NO: 481428 - DNA, 15 bp, Homo sapiens
aggcgaggagtgtga

SEQ ID NO: 481429 - DNA, 15 bp, Homo sapiens
taggcgaggagtgtg

SEQ ID NO: 481430 - DNA, 15 bp, Homo sapiens
ctaggcgaggagtgt

SEQ ID NO: 481431 - DNA, 15 bp, Homo sapiens
tctaggcgaggagtg

SEQ ID NO: 481432 - DNA, 15 bp, Homo sapiens
ctctaggcgaggagt

SEQ ID NO: 481433 - DNA, 15 bp, Homo sapiens
actctaggcgaggag

SEQ ID NO: 481434 - DNA, 15 bp, Homo sapiens
aactctaggcgagga

SEQ ID NO: 481435 - DNA, 15 bp, Homo sapiens
caactctaggcgagg

SEQ ID NO: 481436 - DNA, 15 bp, Homo sapiens
ccaactctaggcgag

SEQ ID NO: 481437 - DNA, 15 bp, Homo sapiens
gccaactctaggcga

SEQ ID NO: 481438 - DNA, 15 bp, Homo sapiens
tgccaactctaggcg

SEQ ID NO: 481439 - DNA, 15 bp, Homo sapiens
ctgccaactctaggc

SEQ ID NO: 481440 - DNA, 15 bp, Homo sapiens
gctgccaactctagg

SEQ ID NO: 481441 - DNA, 15 bp, Homo sapiens
tgctgccaactctag

SEQ ID NO: 481442 - DNA, 15 bp, Homo sapiens
ctgctgccaactcta

SEQ ID NO: 481443 - DNA, 15 bp, Homo sapiens
cctgctgccaactct

SEQ ID NO: 481444 - DNA, 15 bp, Homo sapiens
acctgctgccaactc

SEQ ID NO: 481445 - DNA, 15 bp, Homo sapiens
cacctgctgccaact

SEQ ID NO: 481446 - DNA, 15 bp, Homo sapiens
acacctgctgccaac

SEQ ID NO: 481447 - DNA, 15 bp, Homo sapiens
cacacctgctgccaa

SEQ ID NO: 481448 - DNA, 15 bp, Homo sapiens
ccacacctgctgcca

SEQ ID NO: 481449 - DNA, 15 bp, Homo sapiens
accacacctgctgcc

SEQ ID NO: 481450 - DNA, 15 bp, Homo sapiens
aaccacacctgctgc

SEQ ID NO: 481451 - DNA, 15 bp, Homo sapiens
aaaccacacctgctg

SEQ ID NO: 481452 - DNA, 15 bp, Homo sapiens
taaaccacacctgct

SEQ ID NO: 481453 - DNA, 15 bp, Homo sapiens
ataaaccacacctgc

SEQ ID NO: 481454 - DNA, 15 bp, Homo sapiens
cataaaccacacctg

SEQ ID NO: 481455 - DNA, 15 bp, Homo sapiens
ccataaaccacacct

SEQ ID NO: 481456 - DNA, 15 bp, Homo sapiens
gccataaaccacacc

SEQ ID NO: 481457 - DNA, 15 bp, Homo sapiens
tgccataaaccacac

SEQ ID NO: 481458 - DNA, 15 bp, Homo sapiens
atgccataaaccaca

SEQ ID NO: 481459 - DNA, 15 bp, Homo sapiens
catgccataaaccac

SEQ ID NO: 481460 - DNA, 15 bp, Homo sapiens
acatgccataaacca

SEQ ID NO: 481461 - DNA, 15 bp, Homo sapiens
gacatgccataaacc

SEQ ID NO: 481462 - DNA, 15 bp, Homo sapiens
ggacatgccataaac

SEQ ID NO: 481463 - DNA, 15 bp, Homo sapiens
aggacatgccataaa

SEQ ID NO: 481464 - DNA, 15 bp, Homo sapiens
aaggacatgccataa

SEQ ID NO: 481465 - DNA, 15 bp, Homo sapiens
aaaggacatgccata

SEQ ID NO: 481466 - DNA, 15 bp, Homo sapiens
gaaaggacatgccat

SEQ ID NO: 481467 - DNA, 15 bp, Homo sapiens
tgaaaggacatgcca

SEQ ID NO: 481468 - DNA, 15 bp, Homo sapiens
atgaaaggacatgcc

SEQ ID NO: 481469 - DNA, 15 bp, Homo sapiens
aatgaaaggacatgc

SEQ ID NO: 481470 - DNA, 15 bp, Homo sapiens
gaatgaaaggacatg

SEQ ID NO: 481471 - DNA, 15 bp, Homo sapiens
agaatgaaaggacat

SEQ ID NO: 481472 - DNA, 15 bp, Homo sapiens
cagaatgaaaggaca

SEQ ID NO: 481473 - DNA, 15 bp, Homo sapiens
tcagaatgaaaggac

SEQ ID NO: 481474 - DNA, 15 bp, Homo sapiens
ctcagaatgaaagga

SEQ ID NO: 481475 - DNA, 15 bp, Homo sapiens
gctcagaatgaaagg

SEQ ID NO: 481476 - DNA, 15 bp, Homo sapiens
ggctcagaatgaaag

SEQ ID NO: 481477 - DNA, 15 bp, Homo sapiens
gggctcagaatgaaa

SEQ ID NO: 481478 - DNA, 15 bp, Homo sapiens
ggggctcagaatgaa

SEQ ID NO: 481479 - DNA, 15 bp, Homo sapiens
cggggctcagaatga

SEQ ID NO: 481480 - DNA, 15 bp, Homo sapiens
acggggctcagaatg

SEQ ID NO: 481481 - DNA, 15 bp, Homo sapiens
cacggggctcagaat

SEQ ID NO: 481482 - DNA, 15 bp, Homo sapiens
tcacggggctcagaa

SEQ ID NO: 481483 - DNA, 15 bp, Homo sapiens
ctcacggggctcaga

SEQ ID NO: 481484 - DNA, 15 bp, Homo sapiens
tctcacggggctcag

SEQ ID NO: 481485 - DNA, 15 bp, Homo sapiens
atctcacggggctca

SEQ ID NO: 481486 - DNA, 15 bp, Homo sapiens
catctcacggggctc

SEQ ID NO: 481487 - DNA, 15 bp, Homo sapiens
gcatctcacggggct

SEQ ID NO: 481488 - DNA, 15 bp, Homo sapiens
cgcatctcacggggc

SEQ ID NO: 481489 - DNA, 15 bp, Homo sapiens
ccgcatctcacgggg

SEQ ID NO: 481490 - DNA, 15 bp, Homo sapiens
cccgcatctcacggg

SEQ ID NO: 481491 - DNA, 15 bp, Homo sapiens
acccgcatctcacgg

SEQ ID NO: 481492 - DNA, 15 bp, Homo sapiens
cacccgcatctcacg

SEQ ID NO: 481493 - DNA, 15 bp, Homo sapiens
tcacccgcatctcac

SEQ ID NO: 481494 - DNA, 15 bp, Homo sapiens
ttcacccgcatctca

SEQ ID NO: 481495 - DNA, 15 bp, Homo sapiens
cttcacccgcatctc

SEQ ID NO: 481496 - DNA, 15 bp, Homo sapiens
tcttcacccgcatct

SEQ ID NO: 481497 - DNA, 15 bp, Homo sapiens
ctcttcacccgcatc

SEQ ID NO: 481498 - DNA, 15 bp, Homo sapiens
tctcttcacccgcat

SEQ ID NO: 481499 - DNA, 15 bp, Homo sapiens
atctcttcacccgca

SEQ ID NO: 481500 - DNA, 15 bp, Homo sapiens
aatctcttcacccgc

SEQ ID NO: 481501 - DNA, 15 bp, Homo sapiens
aaatctcttcacccg

SEQ ID NO: 481502 - DNA, 15 bp, Homo sapiens
gaaatctcttcaccc

SEQ ID NO: 481503 - DNA, 15 bp, Homo sapiens
ggaaatctcttcacc

SEQ ID NO: 481504 - DNA, 15 bp, Homo sapiens
tggaaatctcttcac

SEQ ID NO: 481505 - DNA, 15 bp, Homo sapiens
ttggaaatctcttca

SEQ ID NO: 481506 - DNA, 15 bp, Homo sapiens
cttggaaatctcttc

SEQ ID NO: 481507 - DNA, 15 bp, Homo sapiens
ccttggaaatctctt

SEQ ID NO: 481508 - DNA, 15 bp, Homo sapiens
gccttggaaatctct

SEQ ID NO: 481509 - DNA, 15 bp, Homo sapiens
agccttggaaatctc

SEQ ID NO: 481510 - DNA, 15 bp, Homo sapiens
cagccttggaaatct

SEQ ID NO: 481511 - DNA, 15 bp, Homo sapiens
acagccttggaaatc

SEQ ID NO: 481512 - DNA, 15 bp, Homo sapiens
cacagccttggaaat

SEQ ID NO: 481513 - DNA, 15 bp, Homo sapiens
tcacagccttggaaa

SEQ ID NO: 481514 - DNA, 15 bp, Homo sapiens
ctcacagccttggaa

SEQ ID NO: 481515 - DNA, 15 bp, Homo sapiens
tctcacagccttgga

SEQ ID NO: 481516 - DNA, 15 bp, Homo sapiens
ctctcacagccttgg

SEQ ID NO: 481517 - DNA, 15 bp, Homo sapiens
gctctcacagccttg

SEQ ID NO: 481518 - DNA, 15 bp, Homo sapiens
ggctctcacagcctt

SEQ ID NO: 481519 - DNA, 15 bp, Homo sapiens
gggctctcacagcct

SEQ ID NO: 481520 - DNA, 15 bp, Homo sapiens
ggggctctcacagcc

SEQ ID NO: 481521 - DNA, 15 bp, Homo sapiens
aggggctctcacagc

SEQ ID NO: 481522 - DNA, 15 bp, Homo sapiens
gaggggctctcacag

SEQ ID NO: 481523 - DNA, 15 bp, Homo sapiens
agaggggctctcaca

SEQ ID NO: 481524 - DNA, 15 bp, Homo sapiens
cagaggggctctcac

SEQ ID NO: 481525 - DNA, 15 bp, Homo sapiens
gcagaggggctctca

SEQ ID NO: 481526 - DNA, 15 bp, Homo sapiens
ggcagaggggctctc

SEQ ID NO: 481527 - DNA, 15 bp, Homo sapiens
aggcagaggggctct

SEQ ID NO: 481528 - DNA, 15 bp, Homo sapiens
gaggcagaggggctc

SEQ ID NO: 481529 - DNA, 15 bp, Homo sapiens
ggaggcagaggggct

SEQ ID NO: 481530 - DNA, 15 bp, Homo sapiens
gggaggcagaggggc

SEQ ID NO: 481531 - DNA, 15 bp, Homo sapiens
ggggaggcagagggg

SEQ ID NO: 481532 - DNA, 15 bp, Homo sapiens
tggggaggcagaggg

SEQ ID NO: 481533 - DNA, 15 bp, Homo sapiens
ctggggaggcagagg

SEQ ID NO: 481534 - DNA, 15 bp, Homo sapiens
gctggggaggcagag

SEQ ID NO: 481535 - DNA, 15 bp, Homo sapiens
agctggggaggcaga

SEQ ID NO: 481536 - DNA, 15 bp, Homo sapiens
gagctggggaggcag

SEQ ID NO: 481537 - DNA, 15 bp, Homo sapiens
tgagctggggaggca

SEQ ID NO: 481538 - DNA, 15 bp, Homo sapiens
ctgagctggggaggc

SEQ ID NO: 481539 - DNA, 15 bp, Homo sapiens
actgagctggggagg

SEQ ID NO: 481540 - DNA, 15 bp, Homo sapiens
gactgagctggggag

SEQ ID NO: 481541 - DNA, 15 bp, Homo sapiens
ggactgagctgggga

SEQ ID NO: 481542 - DNA, 15 bp, Homo sapiens
gggactgagctgggg

SEQ ID NO: 481543 - DNA, 15 bp, Homo sapiens
ggggactgagctggg

SEQ ID NO: 481544 - DNA, 15 bp, Homo sapiens
tggggactgagctgg

SEQ ID NO: 481545 - DNA, 15 bp, Homo sapiens
gtggggactgagctg

SEQ ID NO: 481546 - DNA, 15 bp, Homo sapiens
agtggggactgagct

SEQ ID NO: 481547 - DNA, 15 bp, Homo sapiens
gagtggggactgagc

SEQ ID NO: 481548 - DNA, 15 bp, Homo sapiens
ggagtggggactgag

SEQ ID NO: 481549 - DNA, 15 bp, Homo sapiens
gggagtggggactga

SEQ ID NO: 481550 - DNA, 15 bp, Homo sapiens
agggagtggggactg

SEQ ID NO: 481551 - DNA, 15 bp, Homo sapiens
gagggagtggggact

SEQ ID NO: 481552 - DNA, 15 bp, Homo sapiens
ggagggagtggggac

SEQ ID NO: 481553 - DNA, 15 bp, Homo sapiens
cggagggagtgggga

SEQ ID NO: 481554 - DNA, 15 bp, Homo sapiens
gcggagggagtgggg

SEQ ID NO: 481555 - DNA, 15 bp, Homo sapiens
tgcggagggagtggg

SEQ ID NO: 481556 - DNA, 15 bp, Homo sapiens
ctgcggagggagtgg

SEQ ID NO: 481557 - DNA, 15 bp, Homo sapiens
tctgcggagggagtg

SEQ ID NO: 481558 - DNA, 15 bp, Homo sapiens
gtctgcggagggagt

SEQ ID NO: 481559 - DNA, 15 bp, Homo sapiens
ggtctgcggagggag

SEQ ID NO: 481560 - DNA, 15 bp, Homo sapiens
gggtctgcggaggga

SEQ ID NO: 481561 - DNA, 15 bp, Homo sapiens
tgggtctgcggaggg

SEQ ID NO: 481562 - DNA, 15 bp, Homo sapiens
gtgggtctgcggagg

SEQ ID NO: 481563 - DNA, 15 bp, Homo sapiens
agtgggtctgcggag

SEQ ID NO: 481564 - DNA, 15 bp, Homo sapiens
gagtgggtctgcgga

SEQ ID NO: 481565 - DNA, 15 bp, Homo sapiens
ggagtgggtctgcgg

SEQ ID NO: 481566 - DNA, 15 bp, Homo sapiens
aggagtgggtctgcg

SEQ ID NO: 481567 - DNA, 15 bp, Homo sapiens
aaggagtgggtctgc

SEQ ID NO: 481568 - DNA, 15 bp, Homo sapiens
caaggagtgggtctg

SEQ ID NO: 481569 - DNA, 15 bp, Homo sapiens
gcaaggagtgggtct

SEQ ID NO: 481570 - DNA, 15 bp, Homo sapiens
ggcaaggagtgggtc

SEQ ID NO: 481571 - DNA, 15 bp, Homo sapiens
tggcaaggagtgggt

SEQ ID NO: 481572 - DNA, 15 bp, Homo sapiens
ctggcaaggagtggg

SEQ ID NO: 481573 - DNA, 15 bp, Homo sapiens
actggcaaggagtgg

SEQ ID NO: 481574 - DNA, 15 bp, Homo sapiens
aactggcaaggagtg

SEQ ID NO: 481575 - DNA, 15 bp, Homo sapiens
caactggcaaggagt

SEQ ID NO: 481576 - DNA, 15 bp, Homo sapiens
acaactggcaaggag

SEQ ID NO: 481577 - DNA, 15 bp, Homo sapiens
cacaactggcaagga

SEQ ID NO: 481578 - DNA, 15 bp, Homo sapiens
ccacaactggcaagg

SEQ ID NO: 481579 - DNA, 15 bp, Homo sapiens
accacaactggcaag

SEQ ID NO: 481580 - DNA, 15 bp, Homo sapiens
caccacaactggcaa

SEQ ID NO: 481581 - DNA, 15 bp, Homo sapiens
tcaccacaactggca

SEQ ID NO: 481582 - DNA, 15 bp, Homo sapiens
atcaccacaactggc

SEQ ID NO: 481583 - DNA, 15 bp, Homo sapiens
gatcaccacaactgg

SEQ ID NO: 481584 - DNA, 15 bp, Homo sapiens
agatcaccacaactg

SEQ ID NO: 481585 - DNA, 15 bp, Homo sapiens
gagatcaccacaact

SEQ ID NO: 481586 - DNA, 15 bp, Homo sapiens
ggagatcaccacaac

SEQ ID NO: 481587 - DNA, 15 bp, Homo sapiens
tggagatcaccacaa

SEQ ID NO: 481588 - DNA, 15 bp, Homo sapiens
ttggagatcaccaca

SEQ ID NO: 481589 - DNA, 15 bp, Homo sapiens
gttggagatcaccac

SEQ ID NO: 481590 - DNA, 15 bp, Homo sapiens
tgttggagatcacca

SEQ ID NO: 481591 - DNA, 15 bp, Homo sapiens
atgttggagatcacc

SEQ ID NO: 481592 - DNA, 15 bp, Homo sapiens
gatgttggagatcac

SEQ ID NO: 481593 - DNA, 15 bp, Homo sapiens
agatgttggagatca

SEQ ID NO: 481594 - DNA, 15 bp, Homo sapiens
cagatgttggagatc

SEQ ID NO: 481595 - DNA, 15 bp, Homo sapiens
acagatgttggagat

SEQ ID NO: 481596 - DNA, 15 bp, Homo sapiens
gacagatgttggaga

SEQ ID NO: 481597 - DNA, 15 bp, Homo sapiens
tgacagatgttggag

SEQ ID NO: 481598 - DNA, 15 bp, Homo sapiens
ctgacagatgttgga

SEQ ID NO: 481599 - DNA, 15 bp, Homo sapiens
tctgacagatgttgg

SEQ ID NO: 481600 - DNA, 15 bp, Homo sapiens
atctgacagatgttg

SEQ ID NO: 481601 - DNA, 15 bp, Homo sapiens
catctgacagatgtt

SEQ ID NO: 481602 - DNA, 15 bp, Homo sapiens
gcatctgacagatgt

SEQ ID NO: 481603 - DNA, 15 bp, Homo sapiens
ggcatctgacagatg

SEQ ID NO: 481604 - DNA, 15 bp, Homo sapiens
tggcatctgacagat

SEQ ID NO: 481605 - DNA, 15 bp, Homo sapiens
ttggcatctgacaga

SEQ ID NO: 481606 - DNA, 15 bp, Homo sapiens
tttggcatctgacag

SEQ ID NO: 481607 - DNA, 15 bp, Homo sapiens
atttggcatctgaca

SEQ ID NO: 481608 - DNA, 15 bp, Homo sapiens
catttggcatctgac

SEQ ID NO: 481609 - DNA, 15 bp, Homo sapiens
gcatttggcatctga

SEQ ID NO: 481610 - DNA, 15 bp, Homo sapiens
ggcatttggcatctg

SEQ ID NO: 481611 - DNA, 15 bp, Homo sapiens
aggcatttggcatct

SEQ ID NO: 481612 - DNA, 15 bp, Homo sapiens
caggcatttggcatc

SEQ ID NO: 481613 - DNA, 15 bp, Homo sapiens
ccaggcatttggcat

SEQ ID NO: 481614 - DNA, 15 bp, Homo sapiens
cccaggcatttggca

SEQ ID NO: 481615 - DNA, 15 bp, Homo sapiens
gcccaggcatttggc

SEQ ID NO: 481616 - DNA, 15 bp, Homo sapiens
cgcccaggcatttgg

SEQ ID NO: 481617 - DNA, 15 bp, Homo sapiens
acgcccaggcatttg

SEQ ID NO: 481618 - DNA, 15 bp, Homo sapiens
gacgcccaggcattt

SEQ ID NO: 481619 - DNA, 15 bp, Homo sapiens
ggacgcccaggcatt

SEQ ID NO: 481620 - DNA, 15 bp, Homo sapiens
tggacgcccaggcat

SEQ ID NO: 481621 - DNA, 15 bp, Homo sapiens
atggacgcccaggca

SEQ ID NO: 481622 - DNA, 15 bp, Homo sapiens
gatggacgcccaggc

SEQ ID NO: 481623 - DNA, 15 bp, Homo sapiens
ggatggacgcccagg

SEQ ID NO: 481624 - DNA, 15 bp, Homo sapiens
aggatggacgcccag

SEQ ID NO: 481625 - DNA, 15 bp, Homo sapiens
caggatggacgccca

SEQ ID NO: 481626 - DNA, 15 bp, Homo sapiens
acaggatggacgccc

SEQ ID NO: 481627 - DNA, 15 bp, Homo sapiens
cacaggatggacgcc

SEQ ID NO: 481628 - DNA, 15 bp, Homo sapiens
ccacaggatggacgc

SEQ ID NO: 481629 - DNA, 15 bp, Homo sapiens
accacaggatggacg

SEQ ID NO: 481630 - DNA, 15 bp, Homo sapiens
taccacaggatggac

SEQ ID NO: 481631 - DNA, 15 bp, Homo sapiens
gtaccacaggatgga

SEQ ID NO: 481632 - DNA, 15 bp, Homo sapiens
tgtaccacaggatgg

SEQ ID NO: 481633 - DNA, 15 bp, Homo sapiens
ttgtaccacaggatg

SEQ ID NO: 481634 - DNA, 15 bp, Homo sapiens
gttgtaccacaggat

SEQ ID NO: 481635 - DNA, 15 bp, Homo sapiens
tgttgtaccacagga

SEQ ID NO: 481636 - DNA, 15 bp, Homo sapiens
atgttgtaccacagg

SEQ ID NO: 481637 - DNA, 15 bp, Homo sapiens
catgttgtaccacag

SEQ ID NO: 481638 - DNA, 15 bp, Homo sapiens
gcatgttgtaccaca

SEQ ID NO: 481639 - DNA, 15 bp, Homo sapiens
agcatgttgtaccac

SEQ ID NO: 481640 - DNA, 15 bp, Homo sapiens
cagcatgttgtacca

SEQ ID NO: 481641 - DNA, 15 bp, Homo sapiens
tcagcatgttgtacc

SEQ ID NO: 481642 - DNA, 15 bp, Homo sapiens
gtcagcatgttgtac

SEQ ID NO: 481643 - DNA, 15 bp, Homo sapiens
ggtcagcatgttgta

SEQ ID NO: 481644 - DNA, 15 bp, Homo sapiens
tggtcagcatgttgt

SEQ ID NO: 481645 - DNA, 15 bp, Homo sapiens
ttggtcagcatgttg

SEQ ID NO: 481646 - DNA, 15 bp, Homo sapiens
gttggtcagcatgtt

SEQ ID NO: 481647 - DNA, 15 bp, Homo sapiens
tgttggtcagcatgt

SEQ ID NO: 481648 - DNA, 15 bp, Homo sapiens
ttgttggtcagcatg

SEQ ID NO: 481649 - DNA, 15 bp, Homo sapiens
attgttggtcagcat

SEQ ID NO: 481650 - DNA, 15 bp, Homo sapiens
gattgttggtcagca

SEQ ID NO: 481651 - DNA, 15 bp, Homo sapiens
ggattgttggtcagc

SEQ ID NO: 481652 - DNA, 15 bp, Homo sapiens
gggattgttggtcag

SEQ ID NO: 481653 - DNA, 15 bp, Homo sapiens
tgggattgttggtca

SEQ ID NO: 481654 - DNA, 15 bp, Homo sapiens
ttgggattgttggtc

SEQ ID NO: 481655 - DNA, 15 bp, Homo sapiens
cttgggattgttggt

SEQ ID NO: 481656 - DNA, 15 bp, Homo sapiens
ccttgggattgttgg

SEQ ID NO: 481657 - DNA, 15 bp, Homo sapiens
accttgggattgttg

SEQ ID NO: 481658 - DNA, 15 bp, Homo sapiens
aaccttgggattgtt

SEQ ID NO: 481659 - DNA, 15 bp, Homo sapiens
taaccttgggattgt

SEQ ID NO: 481660 - DNA, 15 bp, Homo sapiens
ctaaccttgggattg

SEQ ID NO: 481661 - DNA, 15 bp, Homo sapiens
actaaccttgggatt

SEQ ID NO: 481662 - DNA, 15 bp, Homo sapiens
cactaaccttgggat

SEQ ID NO: 481663 - DNA, 15 bp, Homo sapiens
gcactaaccttggga

SEQ ID NO: 481664 - DNA, 15 bp, Homo sapiens
ggcactaaccttggg

SEQ ID NO: 481665 - DNA, 15 bp, Homo sapiens
gggcactaaccttgg

SEQ ID NO: 481666 - DNA, 15 bp, Homo sapiens
ggggcactaaccttg

SEQ ID NO: 481667 - DNA, 15 bp, Homo sapiens
gggggcactaacctt

SEQ ID NO: 481668 - DNA, 15 bp, Homo sapiens
agggggcactaacct

SEQ ID NO: 481669 - DNA, 15 bp, Homo sapiens
gagggggcactaacc

SEQ ID NO: 481670 - DNA, 15 bp, Homo sapiens
ggagggggcactaac

SEQ ID NO: 481671 - DNA, 15 bp, Homo sapiens
aggagggggcactaa

SEQ ID NO: 481672 - DNA, 15 bp, Homo sapiens
aaggagggggcacta

SEQ ID NO: 481673 - DNA, 15 bp, Homo sapiens
aaaggagggggcact

SEQ ID NO: 481674 - DNA, 15 bp, Homo sapiens
aaaaggagggggcac

SEQ ID NO: 481675 - DNA, 15 bp, Homo sapiens
taaaaggagggggca

SEQ ID NO: 481676 - DNA, 15 bp, Homo sapiens
ctaaaaggagggggc

SEQ ID NO: 481677 - DNA, 15 bp, Homo sapiens
actaaaaggaggggg

SEQ ID NO: 481678 - DNA, 15 bp, Homo sapiens
aactaaaaggagggg

SEQ ID NO: 481679 - DNA, 15 bp, Homo sapiens
caactaaaaggaggg

SEQ ID NO: 481680 - DNA, 15 bp, Homo sapiens
ccaactaaaaggagg

SEQ ID NO: 481681 - DNA, 15 bp, Homo sapiens
accaactaaaaggag

SEQ ID NO: 481682 - DNA, 15 bp, Homo sapiens
caccaactaaaagga

SEQ ID NO: 481683 - DNA, 15 bp, Homo sapiens
gcaccaactaaaagg

SEQ ID NO: 481684 - DNA, 15 bp, Homo sapiens
ggcaccaactaaaag

SEQ ID NO: 481685 - DNA, 15 bp, Homo sapiens
gggcaccaactaaaa

SEQ ID NO: 481686 - DNA, 15 bp, Homo sapiens
ggggcaccaactaaa

SEQ ID NO: 481687 - DNA, 15 bp, Homo sapiens
cggggcaccaactaa

SEQ ID NO: 481688 - DNA, 15 bp, Homo sapiens
ccggggcaccaacta

SEQ ID NO: 481689 - DNA, 15 bp, Homo sapiens
cccggggcaccaact

SEQ ID NO: 481690 - DNA, 15 bp, Homo sapiens
tcccggggcaccaac

SEQ ID NO: 481691 - DNA, 15 bp, Homo sapiens
atcccggggcaccaa

SEQ ID NO: 481692 - DNA, 15 bp, Homo sapiens
gatcccggggcacca

SEQ ID NO: 481693 - DNA, 15 bp, Homo sapiens
agatcccggggcacc

SEQ ID NO: 481694 - DNA, 15 bp, Homo sapiens
gagatcccggggcac

SEQ ID NO: 481695 - DNA, 15 bp, Homo sapiens
agagatcccggggca

SEQ ID NO: 481696 - DNA, 15 bp, Homo sapiens
aagagatcccggggc

SEQ ID NO: 481697 - DNA, 15 bp, Homo sapiens
caagagatcccgggg

SEQ ID NO: 481698 - DNA, 15 bp, Homo sapiens
gcaagagatcccggg

SEQ ID NO: 481699 - DNA, 15 bp, Homo sapiens
cgcaagagatcccgg

SEQ ID NO: 481700 - DNA, 15 bp, Homo sapiens
tcgcaagagatcccg

SEQ ID NO: 481701 - DNA, 15 bp, Homo sapiens
gtcgcaagagatccc

SEQ ID NO: 481702 - DNA, 15 bp, Homo sapiens
agtcgcaagagatcc

SEQ ID NO: 481703 - DNA, 15 bp, Homo sapiens
aagtcgcaagagatc

SEQ ID NO: 481704 - DNA, 15 bp, Homo sapiens
taagtcgcaagagat

SEQ ID NO: 481705 - DNA, 15 bp, Homo sapiens
ctaagtcgcaagaga

SEQ ID NO: 481706 - DNA, 15 bp, Homo sapiens
cctaagtcgcaagag

SEQ ID NO: 481707 - DNA, 15 bp, Homo sapiens
ccctaagtcgcaaga

SEQ ID NO: 481708 - DNA, 15 bp, Homo sapiens
cccctaagtcgcaag

SEQ ID NO: 481709 - DNA, 15 bp, Homo sapiens
acccctaagtcgcaa

SEQ ID NO: 481710 - DNA, 15 bp, Homo sapiens
tacccctaagtcgca

SEQ ID NO: 481711 - DNA, 15 bp, Homo sapiens
gtacccctaagtcgc

SEQ ID NO: 481712 - DNA, 15 bp, Homo sapiens
ggtacccctaagtcg

SEQ ID NO: 481713 - DNA, 15 bp, Homo sapiens
aggtacccctaagtc

SEQ ID NO: 481714 - DNA, 15 bp, Homo sapiens
taggtacccctaagt

SEQ ID NO: 481715 - DNA, 15 bp, Homo sapiens
ctaggtacccctaag

SEQ ID NO: 481716 - DNA, 15 bp, Homo sapiens
actaggtacccctaa

SEQ ID NO: 481717 - DNA, 15 bp, Homo sapiens
tactaggtaccccta

SEQ ID NO: 481718 - DNA, 15 bp, Homo sapiens
atactaggtacccct

SEQ ID NO: 481719 - DNA, 15 bp, Homo sapiens
tatactaggtacccc

SEQ ID NO: 481720 - DNA, 15 bp, Homo sapiens
ctatactaggtaccc

SEQ ID NO: 481721 - DNA, 15 bp, Homo sapiens
tctatactaggtacc

SEQ ID NO: 481722 - DNA, 15 bp, Homo sapiens
gtctatactaggtac

SEQ ID NO: 481723 - DNA, 15 bp, Homo sapiens
tgtctatactaggta

SEQ ID NO: 481724 - DNA, 15 bp, Homo sapiens
ttgtctatactaggt

SEQ ID NO: 481725 - DNA, 15 bp, Homo sapiens
attgtctatactagg

SEQ ID NO: 481726 - DNA, 15 bp, Homo sapiens
cattgtctatactag

SEQ ID NO: 481727 - DNA, 15 bp, Homo sapiens
tcattgtctatacta

SEQ ID NO: 481728 - DNA, 15 bp, Homo sapiens
ctcattgtctatact

SEQ ID NO: 481729 - DNA, 15 bp, Homo sapiens
gctcattgtctatac

SEQ ID NO: 481730 - DNA, 15 bp, Homo sapiens
tgctcattgtctata

SEQ ID NO: 481731 - DNA, 15 bp, Homo sapiens
gtgctcattgtctat

SEQ ID NO: 481732 - DNA, 15 bp, Homo sapiens
ggtgctcattgtcta

SEQ ID NO: 481733 - DNA, 15 bp, Homo sapiens
tggtgctcattgtct

SEQ ID NO: 481734 - DNA, 15 bp, Homo sapiens
atggtgctcattgtc

SEQ ID NO: 481735 - DNA, 15 bp, Homo sapiens
gatggtgctcattgt

SEQ ID NO: 481736 - DNA, 15 bp, Homo sapiens
ggatggtgctcattg

SEQ ID NO: 481737 - DNA, 15 bp, Homo sapiens
gggatggtgctcatt

SEQ ID NO: 481738 - DNA, 15 bp, Homo sapiens
agggatggtgctcat

SEQ ID NO: 481739 - DNA, 15 bp, Homo sapiens
gagggatggtgctca

SEQ ID NO: 481740 - DNA, 15 bp, Homo sapiens
tgagggatggtgctc

SEQ ID NO: 481741 - DNA, 15 bp, Homo sapiens
atgagggatggtgct

SEQ ID NO: 481742 - DNA, 15 bp, Homo sapiens
gatgagggatggtgc

SEQ ID NO: 481743 - DNA, 15 bp, Homo sapiens
agatgagggatggtg

SEQ ID NO: 481744 - DNA, 15 bp, Homo sapiens
tagatgagggatggt

SEQ ID NO: 481745 - DNA, 15 bp, Homo sapiens
ttagatgagggatgg

SEQ ID NO: 481746 - DNA, 15 bp, Homo sapiens
tttagatgagggatg

SEQ ID NO: 481747 - DNA, 15 bp, Homo sapiens
gtttagatgagggat

SEQ ID NO: 481748 - DNA, 15 bp, Homo sapiens
tgtttagatgaggga

SEQ ID NO: 481749 - DNA, 15 bp, Homo sapiens
ttgtttagatgaggg

SEQ ID NO: 481750 - DNA, 15 bp, Homo sapiens
cttgtttagatgagg

SEQ ID NO: 481751 - DNA, 15 bp, Homo sapiens
gcttgtttagatgag

SEQ ID NO: 481752 - DNA, 15 bp, Homo sapiens
tgcttgtttagatga

SEQ ID NO: 481753 - DNA, 15 bp, Homo sapiens
ttgcttgtttagatg

SEQ ID NO: 481754 - DNA, 15 bp, Homo sapiens
tttgcttgtttagat

SEQ ID NO: 481755 - DNA, 15 bp, Homo sapiens
atttgcttgtttaga

SEQ ID NO: 481756 - DNA, 15 bp, Homo sapiens
catttgcttgtttag

SEQ ID NO: 481757 - DNA, 15 bp, Homo sapiens
acatttgcttgttta

SEQ ID NO: 481758 - DNA, 15 bp, Homo sapiens
cacatttgcttgttt

SEQ ID NO: 481759 - DNA, 15 bp, Homo sapiens
acacatttgcttgtt

SEQ ID NO: 481760 - DNA, 15 bp, Homo sapiens
aacacatttgcttgt

SEQ ID NO: 481761 - DNA, 15 bp, Homo sapiens
gaacacatttgcttg

SEQ ID NO: 481762 - DNA, 15 bp, Homo sapiens
agaacacatttgctt

SEQ ID NO: 481763 - DNA, 15 bp, Homo sapiens
aagaacacatttgct

SEQ ID NO: 481764 - DNA, 15 bp, Homo sapiens
aaagaacacatttgc

SEQ ID NO: 481765 - DNA, 15 bp, Homo sapiens
gaaagaacacatttg

SEQ ID NO: 481766 - DNA, 15 bp, Homo sapiens
ggaaagaacacattt

SEQ ID NO: 481767 - DNA, 15 bp, Homo sapiens
tggaaagaacacatt

SEQ ID NO: 481768 - DNA, 15 bp, Homo sapiens
ttggaaagaacacat

SEQ ID NO: 481769 - DNA, 15 bp, Homo sapiens
attggaaagaacaca

SEQ ID NO: 481770 - DNA, 15 bp, Homo sapiens
tattggaaagaacac

SEQ ID NO: 481771 - DNA, 15 bp, Homo sapiens
ctattggaaagaaca

SEQ ID NO: 481772 - DNA, 15 bp, Homo sapiens
tctattggaaagaac

SEQ ID NO: 481773 - DNA, 15 bp, Homo sapiens
ttctattggaaagaa

SEQ ID NO: 481774 - DNA, 15 bp, Homo sapiens
attctattggaaaga

SEQ ID NO: 481775 - DNA, 15 bp, Homo sapiens
cattctattggaaag

SEQ ID NO: 481776 - DNA, 15 bp, Homo sapiens
acattctattggaaa

SEQ ID NO: 481777 - DNA, 15 bp, Homo sapiens
tacattctattggaa

SEQ ID NO: 481778 - DNA, 15 bp, Homo sapiens
ttacattctattgga

SEQ ID NO: 481779 - DNA, 15 bp, Homo sapiens
tttacattctattgg

SEQ ID NO: 481780 - DNA, 15 bp, Homo sapiens
gtttacattctattg

SEQ ID NO: 481781 - DNA, 15 bp, Homo sapiens
agtttacattctatt

SEQ ID NO: 481782 - DNA, 15 bp, Homo sapiens
aagtttacattctat

SEQ ID NO: 481783 - DNA, 15 bp, Homo sapiens
aaagtttacattcta

SEQ ID NO: 481784 - DNA, 15 bp, Homo sapiens
aaaagtttacattct

SEQ ID NO: 481785 - DNA, 15 bp, Homo sapiens
aaaaagtttacattc

SEQ ID NO: 481786 - DNA, 15 bp, Homo sapiens
aaaaaagtttacatt

SEQ ID NO: 481787 - DNA, 15 bp, Homo sapiens
taaaaaagtttacat

SEQ ID NO: 481788 - DNA, 15 bp, Homo sapiens
gtaaaaaagtttaca

SEQ ID NO: 481789 - DNA, 15 bp, Homo sapiens
ggtaaaaaagtttac

SEQ ID NO: 481790 - DNA, 15 bp, Homo sapiens
tggtaaaaaagttta

SEQ ID NO: 481791 - DNA, 15 bp, Homo sapiens
ttggtaaaaaagttt

SEQ ID NO: 481792 - DNA, 15 bp, Homo sapiens
cttggtaaaaaagtt

SEQ ID NO: 481793 - DNA, 15 bp, Homo sapiens
gcttggtaaaaaagt

SEQ ID NO: 481794 - DNA, 15 bp, Homo sapiens
ggcttggtaaaaaag

SEQ ID NO: 481795 - DNA, 15 bp, Homo sapiens
gggcttggtaaaaaa

SEQ ID NO: 481796 - DNA, 15 bp, Homo sapiens
ggggcttggtaaaaa

SEQ ID NO: 481797 - DNA, 15 bp, Homo sapiens
gggggcttggtaaaa

SEQ ID NO: 481798 - DNA, 15 bp, Homo sapiens
tgggggcttggtaaa

SEQ ID NO: 481799 - DNA, 15 bp, Homo sapiens
ttgggggcttggtaa

SEQ ID NO: 481800 - DNA, 15 bp, Homo sapiens
attgggggcttggta

SEQ ID NO: 481801 - DNA, 15 bp, Homo sapiens
aattgggggcttggt

SEQ ID NO: 481802 - DNA, 15 bp, Homo sapiens
caattgggggcttgg

SEQ ID NO: 481803 - DNA, 15 bp, Homo sapiens
ccaattgggggcttg

SEQ ID NO: 481804 - DNA, 15 bp, Homo sapiens
tccaattgggggctt

SEQ ID NO: 481805 - DNA, 15 bp, Homo sapiens
ttccaattgggggct

SEQ ID NO: 481806 - DNA, 15 bp, Homo sapiens
gttccaattgggggc

SEQ ID NO: 481807 - DNA, 15 bp, Homo sapiens
ggttccaattggggg

SEQ ID NO: 481808 - DNA, 15 bp, Homo sapiens
aggttccaattgggg

SEQ ID NO: 481809 - DNA, 15 bp, Homo sapiens
caggttccaattggg

SEQ ID NO: 481810 - DNA, 15 bp, Homo sapiens
ccaggttccaattgg

SEQ ID NO: 481811 - DNA, 15 bp, Homo sapiens
cccaggttccaattg

SEQ ID NO: 481812 - DNA, 15 bp, Homo sapiens
tcccaggttccaatt

SEQ ID NO: 481813 - DNA, 15 bp, Homo sapiens
atcccaggttccaat

SEQ ID NO: 481814 - DNA, 15 bp, Homo sapiens
gatcccaggttccaa

SEQ ID NO: 481815 - DNA, 15 bp, Homo sapiens
tgatcccaggttcca

SEQ ID NO: 481816 - DNA, 15 bp, Homo sapiens
ttgatcccaggttcc

SEQ ID NO: 481817 - DNA, 15 bp, Homo sapiens
cttgatcccaggttc

SEQ ID NO: 481818 - DNA, 15 bp, Homo sapiens
acttgatcccaggtt

SEQ ID NO: 481819 - DNA, 15 bp, Homo sapiens
cacttgatcccaggt

SEQ ID NO: 481820 - DNA, 15 bp, Homo sapiens
ccacttgatcccagg

SEQ ID NO: 481821 - DNA, 15 bp, Homo sapiens
gccacttgatcccag

SEQ ID NO: 481822 - DNA, 15 bp, Homo sapiens
ggccacttgatccca

SEQ ID NO: 481823 - DNA, 15 bp, Homo sapiens
cggccacttgatccc

SEQ ID NO: 481824 - DNA, 15 bp, Homo sapiens
tcggccacttgatcc

SEQ ID NO: 481825 - DNA, 15 bp, Homo sapiens
ctcggccacttgatc

SEQ ID NO: 481826 - DNA, 15 bp, Homo sapiens
cctcggccacttgat

SEQ ID NO: 481827 - DNA, 15 bp, Homo sapiens
acctcggccacttga

SEQ ID NO: 481828 - DNA, 15 bp, Homo sapiens
gacctcggccacttg

SEQ ID NO: 481829 - DNA, 15 bp, Homo sapiens
ggacctcggccactt

SEQ ID NO: 481830 - DNA, 15 bp, Homo sapiens
aggacctcggccact

SEQ ID NO: 481831 - DNA, 15 bp, Homo sapiens
caggacctcggccac

SEQ ID NO: 481832 - DNA, 15 bp, Homo sapiens
tcaggacctcggcca

SEQ ID NO: 481833 - DNA, 15 bp, Homo sapiens
ctcaggacctcggcc

SEQ ID NO: 481834 - DNA, 15 bp, Homo sapiens
gctcaggacctcggc

SEQ ID NO: 481835 - DNA, 15 bp, Homo sapiens
agctcaggacctcgg

SEQ ID NO: 481836 - DNA, 15 bp, Homo sapiens
cagctcaggacctcg

SEQ ID NO: 481837 - DNA, 15 bp, Homo sapiens
ccagctcaggacctc

SEQ ID NO: 481838 - DNA, 15 bp, Homo sapiens
gccagctcaggacct

SEQ ID NO: 481839 - DNA, 15 bp, Homo sapiens
tgccagctcaggacc

SEQ ID NO: 481840 - DNA, 15 bp, Homo sapiens
ctgccagctcaggac

SEQ ID NO: 481841 - DNA, 15 bp, Homo sapiens
actgccagctcagga

SEQ ID NO: 481842 - DNA, 15 bp, Homo sapiens
aactgccagctcagg

SEQ ID NO: 481843 - DNA, 15 bp, Homo sapiens
gaactgccagctcag

SEQ ID NO: 481844 - DNA, 15 bp, Homo sapiens
agaactgccagctca

SEQ ID NO: 481845 - DNA, 15 bp, Homo sapiens
gagaactgccagctc

SEQ ID NO: 481846 - DNA, 15 bp, Homo sapiens
ggagaactgccagct

SEQ ID NO: 481847 - DNA, 15 bp, Homo sapiens
aggagaactgccagc

SEQ ID NO: 481848 - DNA, 15 bp, Homo sapiens
gaggagaactgccag

SEQ ID NO: 481849 - DNA, 15 bp, Homo sapiens
ggaggagaactgcca

SEQ ID NO: 481850 - DNA, 15 bp, Homo sapiens
tggaggagaactgcc

SEQ ID NO: 481851 - DNA, 15 bp, Homo sapiens
gtggaggagaactgc

SEQ ID NO: 481852 - DNA, 15 bp, Homo sapiens
ggtggaggagaactg

SEQ ID NO: 481853 - DNA, 15 bp, Homo sapiens
tggtggaggagaact

SEQ ID NO: 481854 - DNA, 15 bp, Homo sapiens
gtggtggaggagaac

SEQ ID NO: 481855 - DNA, 15 bp, Homo sapiens
ggtggtggaggagaa

SEQ ID NO: 481856 - DNA, 15 bp, Homo sapiens
tggtggtggaggaga

SEQ ID NO: 481857 - DNA, 15 bp, Homo sapiens
ttggtggtggaggag

SEQ ID NO: 481858 - DNA, 15 bp, Homo sapiens
cttggtggtggagga

SEQ ID NO: 481859 - DNA, 15 bp, Homo sapiens
gcttggtggtggagg

SEQ ID NO: 481860 - DNA, 15 bp, Homo sapiens
cgcttggtggtggag

SEQ ID NO: 481861 - DNA, 15 bp, Homo sapiens
tcgcttggtggtgga

SEQ ID NO: 481862 - DNA, 15 bp, Homo sapiens
ctcgcttggtggtgg

SEQ ID NO: 481863 - DNA, 15 bp, Homo sapiens
cctcgcttggtggtg

SEQ ID NO: 481864 - DNA, 15 bp, Homo sapiens
tcctcgcttggtggt

SEQ ID NO: 481865 - DNA, 15 bp, Homo sapiens
gtcctcgcttggtgg

SEQ ID NO: 481866 - DNA, 15 bp, Homo sapiens
agtcctcgcttggtg

SEQ ID NO: 481867 - DNA, 15 bp, Homo sapiens
cagtcctcgcttggt

SEQ ID NO: 481868 - DNA, 15 bp, Homo sapiens
tcagtcctcgcttgg

SEQ ID NO: 481869 - DNA, 15 bp, Homo sapiens
ctcagtcctcgcttg

SEQ ID NO: 481870 - DNA, 15 bp, Homo sapiens
gctcagtcctcgctt

SEQ ID NO: 481871 - DNA, 15 bp, Homo sapiens
tgctcagtcctcgct

SEQ ID NO: 481872 - DNA, 15 bp, Homo sapiens
atgctcagtcctcgc

SEQ ID NO: 481873 - DNA, 15 bp, Homo sapiens
gatgctcagtcctcg

SEQ ID NO: 481874 - DNA, 15 bp, Homo sapiens
cgatgctcagtcctc

SEQ ID NO: 481875 - DNA, 15 bp, Homo sapiens
tcgatgctcagtcct

SEQ ID NO: 481876 - DNA, 15 bp, Homo sapiens
ctcgatgctcagtcc

SEQ ID NO: 481877 - DNA, 15 bp, Homo sapiens
gctcgatgctcagtc

SEQ ID NO: 481878 - DNA, 15 bp, Homo sapiens
tgctcgatgctcagt

SEQ ID NO: 481879 - DNA, 15 bp, Homo sapiens
ctgctcgatgctcag

SEQ ID NO: 481880 - DNA, 15 bp, Homo sapiens
gctgctcgatgctca

SEQ ID NO: 481881 - DNA, 15 bp, Homo sapiens
agctgctcgatgctc

SEQ ID NO: 481882 - DNA, 15 bp, Homo sapiens
cagctgctcgatgct

SEQ ID NO: 481883 - DNA, 15 bp, Homo sapiens
tcagctgctcgatgc

SEQ ID NO: 481884 - DNA, 15 bp, Homo sapiens
gtcagctgctcgatg

SEQ ID NO: 481885 - DNA, 15 bp, Homo sapiens
agtcagctgctcgat

SEQ ID NO: 481886 - DNA, 15 bp, Homo sapiens
tagtcagctgctcga

SEQ ID NO: 481887 - DNA, 15 bp, Homo sapiens
gtagtcagctgctcg

SEQ ID NO: 481888 - DNA, 15 bp, Homo sapiens
tgtagtcagctgctc

SEQ ID NO: 481889 - DNA, 15 bp, Homo sapiens
gtgtagtcagctgct

SEQ ID NO: 481890 - DNA, 15 bp, Homo sapiens
agtgtagtcagctgc

SEQ ID NO: 481891 - DNA, 15 bp, Homo sapiens
cagtgtagtcagctg

SEQ ID NO: 481892 - DNA, 15 bp, Homo sapiens
ccagtgtagtcagct

SEQ ID NO: 481893 - DNA, 15 bp, Homo sapiens
gccagtgtagtcagc

SEQ ID NO: 481894 - DNA, 15 bp, Homo sapiens
tgccagtgtagtcag

SEQ ID NO: 481895 - DNA, 15 bp, Homo sapiens
ctgccagtgtagtca

SEQ ID NO: 481896 - DNA, 15 bp, Homo sapiens
tctgccagtgtagtc

SEQ ID NO: 481897 - DNA, 15 bp, Homo sapiens
ctctgccagtgtagt

SEQ ID NO: 481898 - DNA, 15 bp, Homo sapiens
tctctgccagtgtag

SEQ ID NO: 481899 - DNA, 15 bp, Homo sapiens
ttctctgccagtgta

SEQ ID NO: 481900 - DNA, 15 bp, Homo sapiens
tttctctgccagtgt

SEQ ID NO: 481901 - DNA, 15 bp, Homo sapiens
gtttctctgccagtg

SEQ ID NO: 481902 - DNA, 15 bp, Homo sapiens
agtttctctgccagt

SEQ ID NO: 481903 - DNA, 15 bp, Homo sapiens
gagtttctctgccag

SEQ ID NO: 481904 - DNA, 15 bp, Homo sapiens
agagtttctctgcca

SEQ ID NO: 481905 - DNA, 15 bp, Homo sapiens
aagagtttctctgcc

SEQ ID NO: 481906 - DNA, 15 bp, Homo sapiens
caagagtttctctgc

SEQ ID NO: 481907 - DNA, 15 bp, Homo sapiens
ccaagagtttctctg

SEQ ID NO: 481908 - DNA, 15 bp, Homo sapiens
cccaagagtttctct

SEQ ID NO: 481909 - DNA, 15 bp, Homo sapiens
acccaagagtttctc

SEQ ID NO: 481910 - DNA, 15 bp, Homo sapiens
gacccaagagtttct

SEQ ID NO: 481911 - DNA, 15 bp, Homo sapiens
ggacccaagagtttc

SEQ ID NO: 481912 - DNA, 15 bp, Homo sapiens
cggacccaagagttt

SEQ ID NO: 481913 - DNA, 15 bp, Homo sapiens
gcggacccaagagtt

SEQ ID NO: 481914 - DNA, 15 bp, Homo sapiens
tgcggacccaagagt

SEQ ID NO: 481915 - DNA, 15 bp, Homo sapiens
atgcggacccaagag

SEQ ID NO: 481916 - DNA, 15 bp, Homo sapiens
aatgcggacccaaga

SEQ ID NO: 481917 - DNA, 15 bp, Homo sapiens
aaatgcggacccaag

SEQ ID NO: 481918 - DNA, 15 bp, Homo sapiens
gaaatgcggacccaa

SEQ ID NO: 481919 - DNA, 15 bp, Homo sapiens
tgaaatgcggaccca

SEQ ID NO: 481920 - DNA, 15 bp, Homo sapiens
gtgaaatgcggaccc

SEQ ID NO: 481921 - DNA, 15 bp, Homo sapiens
ggtgaaatgcggacc

SEQ ID NO: 481922 - DNA, 15 bp, Homo sapiens
gggtgaaatgcggac

SEQ ID NO: 481923 - DNA, 15 bp, Homo sapiens
ggggtgaaatgcgga

SEQ ID NO: 481924 - DNA, 15 bp, Homo sapiens
aggggtgaaatgcgg

SEQ ID NO: 481925 - DNA, 15 bp, Homo sapiens
aaggggtgaaatgcg

SEQ ID NO: 481926 - DNA, 15 bp, Homo sapiens
gaaggggtgaaatgc

SEQ ID NO: 481927 - DNA, 15 bp, Homo sapiens
agaaggggtgaaatg

SEQ ID NO: 481928 - DNA, 15 bp, Homo sapiens
gagaaggggtgaaat

SEQ ID NO: 481929 - DNA, 15 bp, Homo sapiens
ggagaaggggtgaaa

SEQ ID NO: 481930 - DNA, 15 bp, Homo sapiens
gggagaaggggtgaa

SEQ ID NO: 481931 - DNA, 15 bp, Homo sapiens
agggagaaggggtga

SEQ ID NO: 481932 - DNA, 15 bp, Homo sapiens
gagggagaaggggtg

SEQ ID NO: 481933 - DNA, 15 bp, Homo sapiens
ggagggagaaggggt

SEQ ID NO: 481934 - DNA, 15 bp, Homo sapiens
gggagggagaagggg

SEQ ID NO: 481935 - DNA, 15 bp, Homo sapiens
cgggagggagaaggg

SEQ ID NO: 481936 - DNA, 15 bp, Homo sapiens
gcgggagggagaagg

SEQ ID NO: 481937 - DNA, 15 bp, Homo sapiens
ggcgggagggagaag

SEQ ID NO: 481938 - DNA, 15 bp, Homo sapiens
gggcgggagggagaa

SEQ ID NO: 481939 - DNA, 15 bp, Homo sapiens
tgggcgggagggaga

SEQ ID NO: 481940 - DNA, 15 bp, Homo sapiens
gtgggcgggagggag

SEQ ID NO: 481941 - DNA, 15 bp, Homo sapiens
ggtgggcgggaggga

SEQ ID NO: 481942 - DNA, 15 bp, Homo sapiens
gggtgggcgggaggg

SEQ ID NO: 481943 - DNA, 15 bp, Homo sapiens
cgggtgggcgggagg

SEQ ID NO: 481944 - DNA, 15 bp, Homo sapiens
gcgggtgggcgggag

SEQ ID NO: 481945 - DNA, 15 bp, Homo sapiens
ggcgggtgggcggga

SEQ ID NO: 481946 - DNA, 15 bp, Homo sapiens
gggcgggtgggcggg

SEQ ID NO: 481947 - DNA, 15 bp, Homo sapiens
tgggcgggtgggcgg

SEQ ID NO: 481948 - DNA, 15 bp, Homo sapiens
ctgggcgggtgggcg

SEQ ID NO: 481949 - DNA, 15 bp, Homo sapiens
tctgggcgggtgggc

SEQ ID NO: 481950 - DNA, 15 bp, Homo sapiens
ttctgggcgggtggg

SEQ ID NO: 481951 - DNA, 15 bp, Homo sapiens
tttctgggcgggtgg

SEQ ID NO: 481952 - DNA, 15 bp, Homo sapiens
ttttctgggcgggtg

SEQ ID NO: 481953 - DNA, 15 bp, Homo sapiens
cttttctgggcgggt

SEQ ID NO: 481954 - DNA, 15 bp, Homo sapiens
ccttttctgggcggg

SEQ ID NO: 481955 - DNA, 15 bp, Homo sapiens
cccttttctgggcgg

SEQ ID NO: 481956 - DNA, 15 bp, Homo sapiens
tcccttttctgggcg

SEQ ID NO: 481957 - DNA, 15 bp, Homo sapiens
atcccttttctgggc

SEQ ID NO: 481958 - DNA, 15 bp, Homo sapiens
gatcccttttctggg

SEQ ID NO: 481959 - DNA, 15 bp, Homo sapiens
ggatcccttttctgg

SEQ ID NO: 481960 - DNA, 15 bp, Homo sapiens
cggatcccttttctg

SEQ ID NO: 481961 - DNA, 15 bp, Homo sapiens
ccggatcccttttct

SEQ ID NO: 481962 - DNA, 15 bp, Homo sapiens
gccggatcccttttc

SEQ ID NO: 481963 - DNA, 15 bp, Homo sapiens
ggccggatccctttt

SEQ ID NO: 481964 - DNA, 15 bp, Homo sapiens
gggccggatcccttt

SEQ ID NO: 481965 - DNA, 15 bp, Homo sapiens
tgggccggatccctt

SEQ ID NO: 481966 - DNA, 15 bp, Homo sapiens
atgggccggatccct

SEQ ID NO: 481967 - DNA, 15 bp, Homo sapiens
tatgggccggatccc

SEQ ID NO: 481968 - DNA, 15 bp, Homo sapiens
ctatgggccggatcc

SEQ ID NO: 481969 - DNA, 15 bp, Homo sapiens
cctatgggccggatc

SEQ ID NO: 481970 - DNA, 15 bp, Homo sapiens
ccctatgggccggat

SEQ ID NO: 481971 - DNA, 15 bp, Homo sapiens
gccctatgggccgga

SEQ ID NO: 481972 - DNA, 15 bp, Homo sapiens
agccctatgggccgg

SEQ ID NO: 481973 - DNA, 15 bp, Homo sapiens
cagccctatgggccg

SEQ ID NO: 481974 - DNA, 15 bp, Homo sapiens
acagccctatgggcc

SEQ ID NO: 481975 - DNA, 15 bp, Homo sapiens
aacagccctatgggc

SEQ ID NO: 481976 - DNA, 15 bp, Homo sapiens
gaacagccctatggg

SEQ ID NO: 481977 - DNA, 15 bp, Homo sapiens
tgaacagccctatgg

SEQ ID NO: 481978 - DNA, 15 bp, Homo sapiens
atgaacagccctatg

SEQ ID NO: 481979 - DNA, 15 bp, Homo sapiens
aatgaacagccctat

SEQ ID NO: 481980 - DNA, 15 bp, Homo sapiens
aaatgaacagcccta

SEQ ID NO: 481981 - DNA, 15 bp, Homo sapiens
caaatgaacagccct

SEQ ID NO: 481982 - DNA, 15 bp, Homo sapiens
ccaaatgaacagccc

SEQ ID NO: 481983 - DNA, 15 bp, Homo sapiens
cccaaatgaacagcc

SEQ ID NO: 481984 - DNA, 15 bp, Homo sapiens
gcccaaatgaacagc

SEQ ID NO: 481985 - DNA, 15 bp, Homo sapiens
ggcccaaatgaacag

SEQ ID NO: 481986 - DNA, 15 bp, Homo sapiens
tggcccaaatgaaca

SEQ ID NO: 481987 - DNA, 15 bp, Homo sapiens
atggcccaaatgaac

SEQ ID NO: 481988 - DNA, 15 bp, Homo sapiens
catggcccaaatgaa

SEQ ID NO: 481989 - DNA, 15 bp, Homo sapiens
acatggcccaaatga

SEQ ID NO: 481990 - DNA, 15 bp, Homo sapiens
gacatggcccaaatg

SEQ ID NO: 481991 - DNA, 15 bp, Homo sapiens
agacatggcccaaat

SEQ ID NO: 481992 - DNA, 15 bp, Homo sapiens
tagacatggcccaaa

SEQ ID NO: 481993 - DNA, 15 bp, Homo sapiens
gtagacatggcccaa

SEQ ID NO: 481994 - DNA, 15 bp, Homo sapiens
agtagacatggccca

SEQ ID NO: 481995 - DNA, 15 bp, Homo sapiens
cagtagacatggccc

SEQ ID NO: 481996 - DNA, 15 bp, Homo sapiens
tcagtagacatggcc

SEQ ID NO: 481997 - DNA, 15 bp, Homo sapiens
ctcagtagacatggc

SEQ ID NO: 481998 - DNA, 15 bp, Homo sapiens
gctcagtagacatgg

SEQ ID NO: 481999 - DNA, 15 bp, Homo sapiens
tgctcagtagacatg

SEQ ID NO: 482000 - DNA, 15 bp, Homo sapiens
atgctcagtagacat

SEQ ID NO: 482001 - DNA, 15 bp, Homo sapiens
aatgctcagtagaca

SEQ ID NO: 482002 - DNA, 15 bp, Homo sapiens
taatgctcagtagac

SEQ ID NO: 482003 - DNA, 15 bp, Homo sapiens
ctaatgctcagtaga

SEQ ID NO: 482004 - DNA, 15 bp, Homo sapiens
cctaatgctcagtag

SEQ ID NO: 482005 - DNA, 15 bp, Homo sapiens
gcctaatgctcagta

SEQ ID NO: 482006 - DNA, 15 bp, Homo sapiens
ggcctaatgctcagt

SEQ ID NO: 482007 - DNA, 15 bp, Homo sapiens
tggcctaatgctcag

SEQ ID NO: 482008 - DNA, 15 bp, Homo sapiens
atggcctaatgctca

SEQ ID NO: 482009 - DNA, 15 bp, Homo sapiens
catggcctaatgctc

SEQ ID NO: 482010 - DNA, 15 bp, Homo sapiens
acatggcctaatgct

SEQ ID NO: 482011 - DNA, 15 bp, Homo sapiens
aacatggcctaatgc

SEQ ID NO: 482012 - DNA, 15 bp, Homo sapiens
aaacatggcctaatg

SEQ ID NO: 482013 - DNA, 15 bp, Homo sapiens
gaaacatggcctaat

SEQ ID NO: 482014 - DNA, 15 bp, Homo sapiens
agaaacatggcctaa

SEQ ID NO: 482015 - DNA, 15 bp, Homo sapiens
aagaaacatggccta

SEQ ID NO: 482016 - DNA, 15 bp, Homo sapiens
aaagaaacatggcct

SEQ ID NO: 482017 - DNA, 15 bp, Homo sapiens
gaaagaaacatggcc

SEQ ID NO: 482018 - DNA, 15 bp, Homo sapiens
ggaaagaaacatggc

SEQ ID NO: 482019 - DNA, 15 bp, Homo sapiens
aggaaagaaacatgg

SEQ ID NO: 482020 - DNA, 15 bp, Homo sapiens
caggaaagaaacatg

SEQ ID NO: 482021 - DNA, 15 bp, Homo sapiens
tcaggaaagaaacat

SEQ ID NO: 482022 - DNA, 15 bp, Homo sapiens
ctcaggaaagaaaca

SEQ ID NO: 482023 - DNA, 15 bp, Homo sapiens
gctcaggaaagaaac

SEQ ID NO: 482024 - DNA, 15 bp, Homo sapiens
tgctcaggaaagaaa

SEQ ID NO: 482025 - DNA, 15 bp, Homo sapiens
ttgctcaggaaagaa

SEQ ID NO: 482026 - DNA, 15 bp, Homo sapiens
cttgctcaggaaaga

SEQ ID NO: 482027 - DNA, 15 bp, Homo sapiens
ccttgctcaggaaag

SEQ ID NO: 482028 - DNA, 15 bp, Homo sapiens
gccttgctcaggaaa

SEQ ID NO: 482029 - DNA, 15 bp, Homo sapiens
cgccttgctcaggaa

SEQ ID NO: 482030 - DNA, 15 bp, Homo sapiens
gcgccttgctcagga

SEQ ID NO: 482031 - DNA, 15 bp, Homo sapiens
agcgccttgctcagg

SEQ ID NO: 482032 - DNA, 15 bp, Homo sapiens
cagcgccttgctcag

SEQ ID NO: 482033 - DNA, 15 bp, Homo sapiens
acagcgccttgctca

SEQ ID NO: 482034 - DNA, 15 bp, Homo sapiens
cacagcgccttgctc

SEQ ID NO: 482035 - DNA, 15 bp, Homo sapiens
gcacagcgccttgct

SEQ ID NO: 482036 - DNA, 15 bp, Homo sapiens
agcacagcgccttgc

SEQ ID NO: 482037 - DNA, 15 bp, Homo sapiens
cagcacagcgccttg

SEQ ID NO: 482038 - DNA, 15 bp, Homo sapiens
ccagcacagcgcctt

SEQ ID NO: 482039 - DNA, 15 bp, Homo sapiens
accagcacagcgcct

SEQ ID NO: 482040 - DNA, 15 bp, Homo sapiens
caccagcacagcgcc

SEQ ID NO: 482041 - DNA, 15 bp, Homo sapiens
gcaccagcacagcgc

SEQ ID NO: 482042 - DNA, 15 bp, Homo sapiens
ggcaccagcacagcg

SEQ ID NO: 482043 - DNA, 15 bp, Homo sapiens
tggcaccagcacagc

SEQ ID NO: 482044 - DNA, 15 bp, Homo sapiens
ctggcaccagcacag

SEQ ID NO: 482045 - DNA, 15 bp, Homo sapiens
cctggcaccagcaca

SEQ ID NO: 482046 - DNA, 15 bp, Homo sapiens
tcctggcaccagcac

SEQ ID NO: 482047 - DNA, 15 bp, Homo sapiens
ttcctggcaccagca

SEQ ID NO: 482048 - DNA, 15 bp, Homo sapiens
tttcctggcaccagc

SEQ ID NO: 482049 - DNA, 15 bp, Homo sapiens
gtttcctggcaccag

SEQ ID NO: 482050 - DNA, 15 bp, Homo sapiens
tgtttcctggcacca

SEQ ID NO: 482051 - DNA, 15 bp, Homo sapiens
ctgtttcctggcacc

SEQ ID NO: 482052 - DNA, 15 bp, Homo sapiens
cctgtttcctggcac

SEQ ID NO: 482053 - DNA, 15 bp, Homo sapiens
ccctgtttcctggca

SEQ ID NO: 482054 - DNA, 15 bp, Homo sapiens
cccctgtttcctggc

SEQ ID NO: 482055 - DNA, 15 bp, Homo sapiens
tcccctgtttcctgg

SEQ ID NO: 482056 - DNA, 15 bp, Homo sapiens
ctcccctgtttcctg

SEQ ID NO: 482057 - DNA, 15 bp, Homo sapiens
actcccctgtttcct

SEQ ID NO: 482058 - DNA, 15 bp, Homo sapiens
aactcccctgtttcc

SEQ ID NO: 482059 - DNA, 15 bp, Homo sapiens
caactcccctgtttc

SEQ ID NO: 482060 - DNA, 15 bp, Homo sapiens
ccaactcccctgttt

SEQ ID NO: 482061 - DNA, 15 bp, Homo sapiens
cccaactcccctgtt

SEQ ID NO: 482062 - DNA, 15 bp, Homo sapiens
ccccaactcccctgt

SEQ ID NO: 482063 - DNA, 15 bp, Homo sapiens
tccccaactcccctg

SEQ ID NO: 482064 - DNA, 15 bp, Homo sapiens
ctccccaactcccct

SEQ ID NO: 482065 - DNA, 15 bp, Homo sapiens
actccccaactcccc

SEQ ID NO: 482066 - DNA, 15 bp, Homo sapiens
aactccccaactccc

SEQ ID NO: 482067 - DNA, 15 bp, Homo sapiens
caactccccaactcc

SEQ ID NO: 482068 - DNA, 15 bp, Homo sapiens
ccaactccccaactc

SEQ ID NO: 482069 - DNA, 15 bp, Homo sapiens
cccaactccccaact

SEQ ID NO: 482070 - DNA, 15 bp, Homo sapiens
ccccaactccccaac

SEQ ID NO: 482071 - DNA, 15 bp, Homo sapiens
accccaactccccaa

SEQ ID NO: 482072 - DNA, 15 bp, Homo sapiens
caccccaactcccca

SEQ ID NO: 482073 - DNA, 15 bp, Homo sapiens
gcaccccaactcccc

SEQ ID NO: 482074 - DNA, 15 bp, Homo sapiens
tgcaccccaactccc

SEQ ID NO: 482075 - DNA, 15 bp, Homo sapiens
ctgcaccccaactcc

SEQ ID NO: 482076 - DNA, 15 bp, Homo sapiens
tctgcaccccaactc

SEQ ID NO: 482077 - DNA, 15 bp, Homo sapiens
ctctgcaccccaact

SEQ ID NO: 482078 - DNA, 15 bp, Homo sapiens
tctctgcaccccaac

SEQ ID NO: 482079 - DNA, 15 bp, Homo sapiens
gtctctgcaccccaa

SEQ ID NO: 482080 - DNA, 15 bp, Homo sapiens
tgtctctgcacccca

SEQ ID NO: 482081 - DNA, 15 bp, Homo sapiens
ctgtctctgcacccc

SEQ ID NO: 482082 - DNA, 15 bp, Homo sapiens
actgtctctgcaccc

SEQ ID NO: 482083 - DNA, 15 bp, Homo sapiens
aactgtctctgcacc

SEQ ID NO: 482084 - DNA, 15 bp, Homo sapiens
aaactgtctctgcac

SEQ ID NO: 482085 - DNA, 15 bp, Homo sapiens
caaactgtctctgca

SEQ ID NO: 482086 - DNA, 15 bp, Homo sapiens
gcaaactgtctctgc

SEQ ID NO: 482087 - DNA, 15 bp, Homo sapiens
tgcaaactgtctctg

SEQ ID NO: 482088 - DNA, 15 bp, Homo sapiens
ctgcaaactgtctct

SEQ ID NO: 482089 - DNA, 15 bp, Homo sapiens
actgcaaactgtctc

SEQ ID NO: 482090 - DNA, 15 bp, Homo sapiens
aactgcaaactgtct

SEQ ID NO: 482091 - DNA, 15 bp, Homo sapiens
aaactgcaaactgtc

SEQ ID NO: 482092 - DNA, 15 bp, Homo sapiens
aaaactgcaaactgt

SEQ ID NO: 482093 - DNA, 15 bp, Homo sapiens
gaaaactgcaaactg

SEQ ID NO: 482094 - DNA, 15 bp, Homo sapiens
tgaaaactgcaaact

SEQ ID NO: 482095 - DNA, 15 bp, Homo sapiens
ctgaaaactgcaaac

SEQ ID NO: 482096 - DNA, 15 bp, Homo sapiens
actgaaaactgcaaa

SEQ ID NO: 482097 - DNA, 15 bp, Homo sapiens
gactgaaaactgcaa

SEQ ID NO: 482098 - DNA, 15 bp, Homo sapiens
cgactgaaaactgca

SEQ ID NO: 482099 - DNA, 15 bp, Homo sapiens
tcgactgaaaactgc

SEQ ID NO: 482100 - DNA, 15 bp, Homo sapiens
ctcgactgaaaactg

SEQ ID NO: 482101 - DNA, 15 bp, Homo sapiens
cctcgactgaaaact

SEQ ID NO: 482102 - DNA, 15 bp, Homo sapiens
acctcgactgaaaac

SEQ ID NO: 482103 - DNA, 15 bp, Homo sapiens
cacctcgactgaaaa

SEQ ID NO: 482104 - DNA, 15 bp, Homo sapiens
tcacctcgactgaaa

SEQ ID NO: 482105 - DNA, 15 bp, Homo sapiens
atcacctcgactgaa

SEQ ID NO: 482106 - DNA, 15 bp, Homo sapiens
gatcacctcgactga

SEQ ID NO: 482107 - DNA, 15 bp, Homo sapiens
tgatcacctcgactg

SEQ ID NO: 482108 - DNA, 15 bp, Homo sapiens
atgatcacctcgact

SEQ ID NO: 482109 - DNA, 15 bp, Homo sapiens
aatgatcacctcgac

SEQ ID NO: 482110 - DNA, 15 bp, Homo sapiens
aaatgatcacctcga

SEQ ID NO: 482111 - DNA, 15 bp, Homo sapiens
aaaatgatcacctcg

SEQ ID NO: 482112 - DNA, 15 bp, Homo sapiens
aaaaatgatcacctc

SEQ ID NO: 482113 - DNA, 15 bp, Homo sapiens
caaaaatgatcacct

SEQ ID NO: 482114 - DNA, 15 bp, Homo sapiens
tcaaaaatgatcacc

SEQ ID NO: 482115 - DNA, 15 bp, Homo sapiens
ctcaaaaatgatcac

SEQ ID NO: 482116 - DNA, 15 bp, Homo sapiens
cctcaaaaatgatca

SEQ ID NO: 482117 - DNA, 15 bp, Homo sapiens
acctcaaaaatgatc

SEQ ID NO: 482118 - DNA, 15 bp, Homo sapiens
cacctcaaaaatgat

SEQ ID NO: 482119 - DNA, 15 bp, Homo sapiens
ccacctcaaaaatga

SEQ ID NO: 482120 - DNA, 15 bp, Homo sapiens
cccacctcaaaaatg

SEQ ID NO: 482121 - DNA, 15 bp, Homo sapiens
tcccacctcaaaaat

SEQ ID NO: 482122 - DNA, 15 bp, Homo sapiens
ctcccacctcaaaaa

SEQ ID NO: 482123 - DNA, 15 bp, Homo sapiens
cctcccacctcaaaa

SEQ ID NO: 482124 - DNA, 15 bp, Homo sapiens
acctcccacctcaaa

SEQ ID NO: 482125 - DNA, 15 bp, Homo sapiens
tacctcccacctcaa

SEQ ID NO: 482126 - DNA, 15 bp, Homo sapiens
ctacctcccacctca

SEQ ID NO: 482127 - DNA, 15 bp, Homo sapiens
tctacctcccacctc

SEQ ID NO: 482128 - DNA, 15 bp, Homo sapiens
atctacctcccacct

SEQ ID NO: 482129 - DNA, 15 bp, Homo sapiens
aatctacctcccacc

SEQ ID NO: 482130 - DNA, 15 bp, Homo sapiens
aaatctacctcccac

SEQ ID NO: 482131 - DNA, 15 bp, Homo sapiens
gaaatctacctccca

SEQ ID NO: 482132 - DNA, 15 bp, Homo sapiens
agaaatctacctccc

SEQ ID NO: 482133 - DNA, 15 bp, Homo sapiens
aagaaatctacctcc

SEQ ID NO: 482134 - DNA, 15 bp, Homo sapiens
aaagaaatctacctc

SEQ ID NO: 482135 - DNA, 15 bp, Homo sapiens
aaaagaaatctacct

SEQ ID NO: 482136 - DNA, 15 bp, Homo sapiens
gaaaagaaatctacc

SEQ ID NO: 482137 - DNA, 15 bp, Homo sapiens
agaaaagaaatctac

SEQ ID NO: 482138 - DNA, 15 bp, Homo sapiens
gagaaaagaaatcta

SEQ ID NO: 482139 - DNA, 15 bp, Homo sapiens
ggagaaaagaaatct

SEQ ID NO: 482140 - DNA, 15 bp, Homo sapiens
aggagaaaagaaatc

SEQ ID NO: 482141 - DNA, 15 bp, Homo sapiens
caggagaaaagaaat

SEQ ID NO: 482142 - DNA, 15 bp, Homo sapiens
ccaggagaaaagaaa

SEQ ID NO: 482143 - DNA, 15 bp, Homo sapiens
accaggagaaaagaa

SEQ ID NO: 482144 - DNA, 15 bp, Homo sapiens
aaccaggagaaaaga

SEQ ID NO: 482145 - DNA, 15 bp, Homo sapiens
caaccaggagaaaag

SEQ ID NO: 482146 - DNA, 15 bp, Homo sapiens
gcaaccaggagaaaa

SEQ ID NO: 482147 - DNA, 15 bp, Homo sapiens
agcaaccaggagaaa

SEQ ID NO: 482148 - DNA, 15 bp, Homo sapiens
cagcaaccaggagaa

SEQ ID NO: 482149 - DNA, 15 bp, Homo sapiens
acagcaaccaggaga

SEQ ID NO: 482150 - DNA, 15 bp, Homo sapiens
gacagcaaccaggag

SEQ ID NO: 482151 - DNA, 15 bp, Homo sapiens
agacagcaaccagga

SEQ ID NO: 482152 - DNA, 15 bp, Homo sapiens
gagacagcaaccagg

SEQ ID NO: 482153 - DNA, 15 bp, Homo sapiens
tgagacagcaaccag

SEQ ID NO: 482154 - DNA, 15 bp, Homo sapiens
atgagacagcaacca

SEQ ID NO: 482155 - DNA, 15 bp, Homo sapiens
aatgagacagcaacc

SEQ ID NO: 482156 - DNA, 15 bp, Homo sapiens
gaatgagacagcaac

SEQ ID NO: 482157 - DNA, 15 bp, Homo sapiens
tgaatgagacagcaa

SEQ ID NO: 482158 - DNA, 15 bp, Homo sapiens
gtgaatgagacagca

SEQ ID NO: 482159 - DNA, 15 bp, Homo sapiens
ggtgaatgagacagc

SEQ ID NO: 482160 - DNA, 15 bp, Homo sapiens
gggtgaatgagacag

SEQ ID NO: 482161 - DNA, 15 bp, Homo sapiens
tgggtgaatgagaca

SEQ ID NO: 482162 - DNA, 15 bp, Homo sapiens
gtgggtgaatgagac

SEQ ID NO: 482163 - DNA, 15 bp, Homo sapiens
agtgggtgaatgaga

SEQ ID NO: 482164 - DNA, 15 bp, Homo sapiens
gagtgggtgaatgag

SEQ ID NO: 482165 - DNA, 15 bp, Homo sapiens
agagtgggtgaatga

SEQ ID NO: 482166 - DNA, 15 bp, Homo sapiens
tagagtgggtgaatg

SEQ ID NO: 482167 - DNA, 15 bp, Homo sapiens
atagagtgggtgaat

SEQ ID NO: 482168 - DNA, 15 bp, Homo sapiens
gatagagtgggtgaa

SEQ ID NO: 482169 - DNA, 15 bp, Homo sapiens
agatagagtgggtga

SEQ ID NO: 482170 - DNA, 15 bp, Homo sapiens
tagatagagtgggtg

SEQ ID NO: 482171 - DNA, 15 bp, Homo sapiens
ttagatagagtgggt

SEQ ID NO: 482172 - DNA, 15 bp, Homo sapiens
gttagatagagtggg

SEQ ID NO: 482173 - DNA, 15 bp, Homo sapiens
agttagatagagtgg

SEQ ID NO: 482174 - DNA, 15 bp, Homo sapiens
aagttagatagagtg

SEQ ID NO: 482175 - DNA, 15 bp, Homo sapiens
aaagttagatagagt

SEQ ID NO: 482176 - DNA, 15 bp, Homo sapiens
taaagttagatagag

SEQ ID NO: 482177 - DNA, 15 bp, Homo sapiens
ctaaagttagataga

SEQ ID NO: 482178 - DNA, 15 bp, Homo sapiens
tctaaagttagatag

SEQ ID NO: 482179 - DNA, 15 bp, Homo sapiens
ttctaaagttagata

SEQ ID NO: 482180 - DNA, 15 bp, Homo sapiens
cttctaaagttagat

SEQ ID NO: 482181 - DNA, 15 bp, Homo sapiens
tcttctaaagttaga

SEQ ID NO: 482182 - DNA, 15 bp, Homo sapiens
atcttctaaagttag

SEQ ID NO: 482183 - DNA, 15 bp, Homo sapiens
gatcttctaaagtta

SEQ ID NO: 482184 - DNA, 15 bp, Homo sapiens
agatcttctaaagtt

SEQ ID NO: 482185 - DNA, 15 bp, Homo sapiens
aagatcttctaaagt

SEQ ID NO: 482186 - DNA, 15 bp, Homo sapiens
aaagatcttctaaag

SEQ ID NO: 482187 - DNA, 15 bp, Homo sapiens
aaaagatcttctaaa

SEQ ID NO: 482188 - DNA, 15 bp, Homo sapiens
taaaagatcttctaa

SEQ ID NO: 482189 - DNA, 15 bp, Homo sapiens
ttaaaagatcttcta

SEQ ID NO: 482190 - DNA, 15 bp, Homo sapiens
cttaaaagatcttct

SEQ ID NO: 482191 - DNA, 15 bp, Homo sapiens
acttaaaagatcttc

SEQ ID NO: 482192 - DNA, 15 bp, Homo sapiens
cacttaaaagatctt

SEQ ID NO: 482193 - DNA, 15 bp, Homo sapiens
acacttaaaagatct

SEQ ID NO: 482194 - DNA, 15 bp, Homo sapiens
cacacttaaaagatc

SEQ ID NO: 482195 - DNA, 15 bp, Homo sapiens
acacacttaaaagat

SEQ ID NO: 482196 - DNA, 15 bp, Homo sapiens
cacacacttaaaaga

SEQ ID NO: 482197 - DNA, 15 bp, Homo sapiens
acacacacttaaaag

SEQ ID NO: 482198 - DNA, 15 bp, Homo sapiens
aacacacacttaaaa

SEQ ID NO: 482199 - DNA, 15 bp, Homo sapiens
caacacacacttaaa

SEQ ID NO: 482200 - DNA, 15 bp, Homo sapiens
ccaacacacacttaa

SEQ ID NO: 482201 - DNA, 15 bp, Homo sapiens
tccaacacacactta

SEQ ID NO: 482202 - DNA, 15 bp, Homo sapiens
ttccaacacacactt

SEQ ID NO: 482203 - DNA, 15 bp, Homo sapiens
cttccaacacacact

SEQ ID NO: 482204 - DNA, 15 bp, Homo sapiens
ccttccaacacacac

SEQ ID NO: 482205 - DNA, 15 bp, Homo sapiens
accttccaacacaca

SEQ ID NO: 482206 - DNA, 15 bp, Homo sapiens
caccttccaacacac

SEQ ID NO: 482207 - DNA, 15 bp, Homo sapiens
ccaccttccaacaca

SEQ ID NO: 482208 - DNA, 15 bp, Homo sapiens
gccaccttccaacac

SEQ ID NO: 482209 - DNA, 15 bp, Homo sapiens
tgccaccttccaaca

SEQ ID NO: 482210 - DNA, 15 bp, Homo sapiens
gtgccaccttccaac

SEQ ID NO: 482211 - DNA, 15 bp, Homo sapiens
agtgccaccttccaa

SEQ ID NO: 482212 - DNA, 15 bp, Homo sapiens
tagtgccaccttcca

SEQ ID NO: 482213 - DNA, 15 bp, Homo sapiens
ttagtgccaccttcc

SEQ ID NO: 482214 - DNA, 15 bp, Homo sapiens
tttagtgccaccttc

SEQ ID NO: 482215 - DNA, 15 bp, Homo sapiens
ctttagtgccacctt

SEQ ID NO: 482216 - DNA, 15 bp, Homo sapiens
cctttagtgccacct

SEQ ID NO: 482217 - DNA, 15 bp, Homo sapiens
gcctttagtgccacc

SEQ ID NO: 482218 - DNA, 15 bp, Homo sapiens
agcctttagtgccac

SEQ ID NO: 482219 - DNA, 15 bp, Homo sapiens
aagcctttagtgcca

SEQ ID NO: 482220 - DNA, 15 bp, Homo sapiens
caagcctttagtgcc

SEQ ID NO: 482221 - DNA, 15 bp, Homo sapiens
tcaagcctttagtgc

SEQ ID NO: 482222 - DNA, 15 bp, Homo sapiens
gtcaagcctttagtg

SEQ ID NO: 482223 - DNA, 15 bp, Homo sapiens
tgtcaagcctttagt

SEQ ID NO: 482224 - DNA, 15 bp, Homo sapiens
atgtcaagcctttag

SEQ ID NO: 482225 - DNA, 15 bp, Homo sapiens
aatgtcaagccttta

SEQ ID NO: 482226 - DNA, 15 bp, Homo sapiens
gaatgtcaagccttt

SEQ ID NO: 482227 - DNA, 15 bp, Homo sapiens
ggaatgtcaagcctt

SEQ ID NO: 482228 - DNA, 15 bp, Homo sapiens
gggaatgtcaagcct

SEQ ID NO: 482229 - DNA, 15 bp, Homo sapiens
agggaatgtcaagcc

SEQ ID NO: 482230 - DNA, 15 bp, Homo sapiens
cagggaatgtcaagc

SEQ ID NO: 482231 - DNA, 15 bp, Homo sapiens
acagggaatgtcaag

SEQ ID NO: 482232 - DNA, 15 bp, Homo sapiens
gacagggaatgtcaa

SEQ ID NO: 482233 - DNA, 15 bp, Homo sapiens
ggacagggaatgtca

SEQ ID NO: 482234 - DNA, 15 bp, Homo sapiens
tggacagggaatgtc

SEQ ID NO: 482235 - DNA, 15 bp, Homo sapiens
atggacagggaatgt

SEQ ID NO: 482236 - DNA, 15 bp, Homo sapiens
aatggacagggaatg

SEQ ID NO: 482237 - DNA, 15 bp, Homo sapiens
aaatggacagggaat

SEQ ID NO: 482238 - DNA, 15 bp, Homo sapiens
aaaatggacagggaa

SEQ ID NO: 482239 - DNA, 15 bp, Homo sapiens
aaaaatggacaggga

SEQ ID NO: 482240 - DNA, 15 bp, Homo sapiens
aaaaaatggacaggg

SEQ ID NO: 482241 - DNA, 15 bp, Homo sapiens
aaaaaaatggacagg

SEQ ID NO: 482242 - DNA, 15 bp, Homo sapiens
taaaaaaatggacag

SEQ ID NO: 482243 - DNA, 15 bp, Homo sapiens
ttaaaaaaatggaca

SEQ ID NO: 482244 - DNA, 15 bp, Homo sapiens
attaaaaaaatggac

SEQ ID NO: 482245 - DNA, 15 bp, Homo sapiens
tattaaaaaaatgga

SEQ ID NO: 482246 - DNA, 15 bp, Homo sapiens
ttattaaaaaaatgg

SEQ ID NO: 482247 - DNA, 15 bp, Homo sapiens
tttattaaaaaaatg

SEQ ID NO: 482248 - DNA, 15 bp, Homo sapiens
gtttattaaaaaaat

SEQ ID NO: 482249 - DNA, 15 bp, Homo sapiens
agtttattaaaaaaa

SEQ ID NO: 482250 - DNA, 15 bp, Homo sapiens
tagtttattaaaaaa

SEQ ID NO: 482251 - DNA, 15 bp, Homo sapiens
atagtttattaaaaa

SEQ ID NO: 482252 - DNA, 15 bp, Homo sapiens
tatagtttattaaaa

SEQ ID NO: 482253 - DNA, 15 bp, Homo sapiens
ctatagtttattaaa

SEQ ID NO: 482254 - DNA, 15 bp, Homo sapiens
cctatagtttattaa

SEQ ID NO: 482255 - DNA, 15 bp, Homo sapiens
gcctatagtttatta

SEQ ID NO: 482256 - DNA, 15 bp, Homo sapiens
agcctatagtttatt

SEQ ID NO: 482257 - DNA, 15 bp, Homo sapiens
tagcctatagtttat

SEQ ID NO: 482258 - DNA, 15 bp, Homo sapiens
ctagcctatagttta

SEQ ID NO: 482259 - DNA, 15 bp, Homo sapiens
actagcctatagttt

SEQ ID NO: 482260 - DNA, 15 bp, Homo sapiens
aactagcctatagtt

SEQ ID NO: 482261 - DNA, 15 bp, Homo sapiens
caactagcctatagt

SEQ ID NO: 482262 - DNA, 15 bp, Homo sapiens
ccaactagcctatag

SEQ ID NO: 482263 - DNA, 15 bp, Homo sapiens
accaactagcctata

SEQ ID NO: 482264 - DNA, 15 bp, Homo sapiens
aaccaactagcctat

SEQ ID NO: 482265 - DNA, 15 bp, Homo sapiens
aaaccaactagccta

SEQ ID NO: 482266 - DNA, 15 bp, Homo sapiens
aaaaccaactagcct

SEQ ID NO: 482267 - DNA, 15 bp, Homo sapiens
aaaaaccaactagcc

SEQ ID NO: 482268 - DNA, 15 bp, Homo sapiens
aaaaaaccaactagc

SEQ ID NO: 482269 - DNA, 15 bp, Homo sapiens
aaaaaaaccaactag

SEQ ID NO: 482270 - DNA, 15 bp, Homo sapiens
aaaaaaaaccaacta

SEQ ID NO: 482271 - DNA, 15 bp, Homo sapiens
caaaaaaaaccaact

SEQ ID NO: 482272 - DNA, 15 bp, Homo sapiens
acaaaaaaaaccaac

SEQ ID NO: 482273 - DNA, 15 bp, Homo sapiens
gacaaaaaaaaccaa

SEQ ID NO: 482274 - DNA, 15 bp, Homo sapiens
agacaaaaaaaacca

SEQ ID NO: 482275 - DNA, 15 bp, Homo sapiens
aagacaaaaaaaacc

SEQ ID NO: 482276 - DNA, 15 bp, Homo sapiens
taagacaaaaaaaac

SEQ ID NO: 482277 - DNA, 15 bp, Homo sapiens
ataagacaaaaaaaa

SEQ ID NO: 482278 - DNA, 15 bp, Homo sapiens
aataagacaaaaaaa

SEQ ID NO: 482279 - DNA, 15 bp, Homo sapiens
aaataagacaaaaaa

SEQ ID NO: 482280 - DNA, 15 bp, Homo sapiens
aaaataagacaaaaa

SEQ ID NO: 482281 - DNA, 15 bp, Homo sapiens
taaaataagacaaaa

SEQ ID NO: 482282 - DNA, 15 bp, Homo sapiens
ataaaataagacaaa

SEQ ID NO: 482283 - DNA, 15 bp, Homo sapiens
aataaaataagacaa

SEQ ID NO: 482284 - DNA, 15 bp, Homo sapiens
aaataaaataagaca

SEQ ID NO: 482285 - DNA, 15 bp, Homo sapiens
taaataaaataagac

SEQ ID NO: 482286 - DNA, 15 bp, Homo sapiens
ataaataaaataaga

SEQ ID NO: 482287 - DNA, 15 bp, Homo sapiens
aataaataaaataag

SEQ ID NO: 482288 - DNA, 15 bp, Homo sapiens
aaataaataaaataa

SEQ ID NO: 482289 - DNA, 15 bp, Homo sapiens
taaataaataaaata

SEQ ID NO: 482290 - DNA, 15 bp, Homo sapiens
ataaataaataaaat

SEQ ID NO: 482291 - DNA, 15 bp, Homo sapiens
aataaataaataaaa

SEQ ID NO: 482292 - DNA, 15 bp, Homo sapiens
aaaataaataaataa

SEQ ID NO: 482293 - DNA, 15 bp, Homo sapiens
aaaaataaataaata

SEQ ID NO: 482294 - DNA, 15 bp, Homo sapiens
aaaaaataaataaat

SEQ ID NO: 482295 - DNA, 15 bp, Homo sapiens
caaaaaaataaataa

SEQ ID NO: 482296 - DNA, 15 bp, Homo sapiens
tcaaaaaaataaata

SEQ ID NO: 482297 - DNA, 15 bp, Homo sapiens
ctcaaaaaaataaat

SEQ ID NO: 482298 - DNA, 15 bp, Homo sapiens
tctcaaaaaaataaa

SEQ ID NO: 482299 - DNA, 15 bp, Homo sapiens
gtctcaaaaaaataa

SEQ ID NO: 482300 - DNA, 15 bp, Homo sapiens
cgtctcaaaaaaata

SEQ ID NO: 482301 - DNA, 15 bp, Homo sapiens
tcgtctcaaaaaaat

SEQ ID NO: 482302 - DNA, 15 bp, Homo sapiens
ctcgtctcaaaaaaa

SEQ ID NO: 482303 - DNA, 15 bp, Homo sapiens
actcgtctcaaaaaa

SEQ ID NO: 482304 - DNA, 15 bp, Homo sapiens
gactcgtctcaaaaa

SEQ ID NO: 482305 - DNA, 15 bp, Homo sapiens
agactcgtctcaaaa

SEQ ID NO: 482306 - DNA, 15 bp, Homo sapiens
aagactcgtctcaaa

SEQ ID NO: 482307 - DNA, 15 bp, Homo sapiens
caagactcgtctcaa

SEQ ID NO: 482308 - DNA, 15 bp, Homo sapiens
gcaagactcgtctca

SEQ ID NO: 482309 - DNA, 15 bp, Homo sapiens
agcaagactcgtctc

SEQ ID NO: 482310 - DNA, 15 bp, Homo sapiens
gagcaagactcgtct

SEQ ID NO: 482311 - DNA, 15 bp, Homo sapiens
agagcaagactcgtc

SEQ ID NO: 482312 - DNA, 15 bp, Homo sapiens
cagagcaagactcgt

SEQ ID NO: 482313 - DNA, 15 bp, Homo sapiens
acagagcaagactcg

SEQ ID NO: 482314 - DNA, 15 bp, Homo sapiens
tactgcactccagcc

SEQ ID NO: 482315 - DNA, 15 bp, Homo sapiens
ctactgcactccagc

SEQ ID NO: 482316 - DNA, 15 bp, Homo sapiens
actactgcactccag

SEQ ID NO: 482317 - DNA, 15 bp, Homo sapiens
cactactgcactcca

SEQ ID NO: 482318 - DNA, 15 bp, Homo sapiens
acactactgcactcc

SEQ ID NO: 482319 - DNA, 15 bp, Homo sapiens
cacactactgcactc

SEQ ID NO: 482320 - DNA, 15 bp, Homo sapiens
tcacactactgcact

SEQ ID NO: 482321 - DNA, 15 bp, Homo sapiens
atcacactactgcac

SEQ ID NO: 482322 - DNA, 15 bp, Homo sapiens
gatcacactactgca

SEQ ID NO: 482323 - DNA, 15 bp, Homo sapiens
agatcacactactgc

SEQ ID NO: 482324 - DNA, 15 bp, Homo sapiens
gagatcacactactg

SEQ ID NO: 482325 - DNA, 15 bp, Homo sapiens
cgagatcacactact

SEQ ID NO: 482326 - DNA, 15 bp, Homo sapiens
ccgagatcacactac

SEQ ID NO: 482327 - DNA, 15 bp, Homo sapiens
gccgagatcacacta

SEQ ID NO: 482328 - DNA, 15 bp, Homo sapiens
agccgagatcacact

SEQ ID NO: 482329 - DNA, 15 bp, Homo sapiens
gagccgagatcacac

SEQ ID NO: 482330 - DNA, 15 bp, Homo sapiens
tgagccgagatcaca

SEQ ID NO: 482331 - DNA, 15 bp, Homo sapiens
aaggcggaggttgca

SEQ ID NO: 482332 - DNA, 15 bp, Homo sapiens
gaaggcggaggttgc

SEQ ID NO: 482333 - DNA, 15 bp, Homo sapiens
agaaggcggaggttg

SEQ ID NO: 482334 - DNA, 15 bp, Homo sapiens
cagaaggcggaggtt

SEQ ID NO: 482335 - DNA, 15 bp, Homo sapiens
ccagaaggcggaggt

SEQ ID NO: 482336 - DNA, 15 bp, Homo sapiens
cccagaaggcggagg

SEQ ID NO: 482337 - DNA, 15 bp, Homo sapiens
acccagaaggcggag

SEQ ID NO: 482338 - DNA, 15 bp, Homo sapiens
aacccagaaggcgga

SEQ ID NO: 482339 - DNA, 15 bp, Homo sapiens
gaacccagaaggcgg

SEQ ID NO: 482340 - DNA, 15 bp, Homo sapiens
tgaacccagaaggcg

SEQ ID NO: 482341 - DNA, 15 bp, Homo sapiens
ttgaacccagaaggc

SEQ ID NO: 482342 - DNA, 15 bp, Homo sapiens
cttgaacccagaagg

SEQ ID NO: 482343 - DNA, 15 bp, Homo sapiens
gcttgaacccagaag

SEQ ID NO: 482344 - DNA, 15 bp, Homo sapiens
cgcttgaacccagaa

SEQ ID NO: 482345 - DNA, 15 bp, Homo sapiens
tcgcttgaacccaga

SEQ ID NO: 482346 - DNA, 15 bp, Homo sapiens
cgaggcagaagaatc

SEQ ID NO: 482347 - DNA, 15 bp, Homo sapiens
ccgaggcagaagaat

SEQ ID NO: 482348 - DNA, 15 bp, Homo sapiens
gccgaggcagaagaa

SEQ ID NO: 482349 - DNA, 15 bp, Homo sapiens
ggccgaggcagaaga

SEQ ID NO: 482350 - DNA, 15 bp, Homo sapiens
aggccgaggcagaag

SEQ ID NO: 482351 - DNA, 15 bp, Homo sapiens
gaggccgaggcagaa

SEQ ID NO: 482352 - DNA, 15 bp, Homo sapiens
ggaggccgaggcaga

SEQ ID NO: 482353 - DNA, 15 bp, Homo sapiens
cgggaggccgaggca

SEQ ID NO: 482354 - DNA, 15 bp, Homo sapiens
tcgggaggccgaggc

SEQ ID NO: 482355 - DNA, 15 bp, Homo sapiens
ctcgggaggccgagg

SEQ ID NO: 482356 - DNA, 15 bp, Homo sapiens
actcgggaggccgag

SEQ ID NO: 482357 - DNA, 15 bp, Homo sapiens
tactcgggaggccga

SEQ ID NO: 482358 - DNA, 15 bp, Homo sapiens
ctactcgggaggccg

SEQ ID NO: 482359 - DNA, 15 bp, Homo sapiens
gctactcgggaggcc

SEQ ID NO: 482360 - DNA, 15 bp, Homo sapiens
gtctcagctactcgg

SEQ ID NO: 482361 - DNA, 15 bp, Homo sapiens
agtctcagctactcg

SEQ ID NO: 482362 - DNA, 15 bp, Homo sapiens
tagtctcagctactc

SEQ ID NO: 482363 - DNA, 15 bp, Homo sapiens
acctgtagtctcagc

SEQ ID NO: 482364 - DNA, 15 bp, Homo sapiens
cacctgtagtctcag

SEQ ID NO: 482365 - DNA, 15 bp, Homo sapiens
gcacctgtagtctca

SEQ ID NO: 482366 - DNA, 15 bp, Homo sapiens
agcacctgtagtctc

SEQ ID NO: 482367 - DNA, 15 bp, Homo sapiens
gagcacctgtagtct

SEQ ID NO: 482368 - DNA, 15 bp, Homo sapiens
tgagcacctgtagtc

SEQ ID NO: 482369 - DNA, 15 bp, Homo sapiens
gtgagcacctgtagt

SEQ ID NO: 482370 - DNA, 15 bp, Homo sapiens
ggtgagcacctgtag

SEQ ID NO: 482371 - DNA, 15 bp, Homo sapiens
tggtgagcacctgta

SEQ ID NO: 482372 - DNA, 15 bp, Homo sapiens
gtggtgagcacctgt

SEQ ID NO: 482373 - DNA, 15 bp, Homo sapiens
ggtggtgagcacctg

SEQ ID NO: 482374 - DNA, 15 bp, Homo sapiens
tggtggtgagcacct

SEQ ID NO: 482375 - DNA, 15 bp, Homo sapiens
gtggtggtgagcacc

SEQ ID NO: 482376 - DNA, 15 bp, Homo sapiens
cgtggtggtgagcac

SEQ ID NO: 482377 - DNA, 15 bp, Homo sapiens
gcgtggtggtgagca

SEQ ID NO: 482378 - DNA, 15 bp, Homo sapiens
ggcgtggtggtgagc

SEQ ID NO: 482379 - DNA, 15 bp, Homo sapiens
gggcgtggtggtgag

SEQ ID NO: 482380 - DNA, 15 bp, Homo sapiens
tgggcgtggtggtga

SEQ ID NO: 482381 - DNA, 15 bp, Homo sapiens
aaaaccccgtctcta

SEQ ID NO: 482382 - DNA, 15 bp, Homo sapiens
taaaaccccgtctct

SEQ ID NO: 482383 - DNA, 15 bp, Homo sapiens
gtaaaaccccgtctc

SEQ ID NO: 482384 - DNA, 15 bp, Homo sapiens
ggtaaaaccccgtct

SEQ ID NO: 482385 - DNA, 15 bp, Homo sapiens
tggtaaaaccccgtc

SEQ ID NO: 482386 - DNA, 15 bp, Homo sapiens
atggtaaaaccccgt

SEQ ID NO: 482387 - DNA, 15 bp, Homo sapiens
catggtaaaaccccg

SEQ ID NO: 482388 - DNA, 15 bp, Homo sapiens
acatggtaaaacccc

SEQ ID NO: 482389 - DNA, 15 bp, Homo sapiens
tcctggccaacatgg

SEQ ID NO: 482390 - DNA, 15 bp, Homo sapiens
atcctggccaacatg

SEQ ID NO: 482391 - DNA, 15 bp, Homo sapiens
tatcctggccaacat

SEQ ID NO: 482392 - DNA, 15 bp, Homo sapiens
ctatcctggccaaca

SEQ ID NO: 482393 - DNA, 15 bp, Homo sapiens
actatcctggccaac

SEQ ID NO: 482394 - DNA, 15 bp, Homo sapiens
gactatcctggccaa

SEQ ID NO: 482395 - DNA, 15 bp, Homo sapiens
agactatcctggcca

SEQ ID NO: 482396 - DNA, 15 bp, Homo sapiens
gagactatcctggcc

SEQ ID NO: 482397 - DNA, 15 bp, Homo sapiens
ggagactatcctggc

SEQ ID NO: 482398 - DNA, 15 bp, Homo sapiens
cggagactatcctgg

SEQ ID NO: 482399 - DNA, 15 bp, Homo sapiens
acggagactatcctg

SEQ ID NO: 482400 - DNA, 15 bp, Homo sapiens
gacggagactatcct

SEQ ID NO: 482401 - DNA, 15 bp, Homo sapiens
agacggagactatcc

SEQ ID NO: 482402 - DNA, 15 bp, Homo sapiens
gagacggagactatc

SEQ ID NO: 482403 - DNA, 15 bp, Homo sapiens
agagacggagactat

SEQ ID NO: 482404 - DNA, 15 bp, Homo sapiens
aagagacggagacta

SEQ ID NO: 482405 - DNA, 15 bp, Homo sapiens
gaagagacggagact

SEQ ID NO: 482406 - DNA, 15 bp, Homo sapiens
tgaagagacggagac

SEQ ID NO: 482407 - DNA, 15 bp, Homo sapiens
gtgaagagacggaga

SEQ ID NO: 482408 - DNA, 15 bp, Homo sapiens
ggtgaagagacggag

SEQ ID NO: 482409 - DNA, 15 bp, Homo sapiens
aggtgaagagacgga

SEQ ID NO: 482410 - DNA, 15 bp, Homo sapiens
gaggtgaagagacgg

SEQ ID NO: 482411 - DNA, 15 bp, Homo sapiens
cgaggtgaagagacg

SEQ ID NO: 482412 - DNA, 15 bp, Homo sapiens
acgaggtgaagagac

SEQ ID NO: 482413 - DNA, 15 bp, Homo sapiens
cacgaggtgaagaga

SEQ ID NO: 482414 - DNA, 15 bp, Homo sapiens
tcacgaggtgaagag

SEQ ID NO: 482415 - DNA, 15 bp, Homo sapiens
atcacgaggtgaaga

SEQ ID NO: 482416 - DNA, 15 bp, Homo sapiens
gatcacgaggtgaag

SEQ ID NO: 482417 - DNA, 15 bp, Homo sapiens
ggatcacgaggtgaa

SEQ ID NO: 482418 - DNA, 15 bp, Homo sapiens
cggatcacgaggtga

SEQ ID NO: 482419 - DNA, 15 bp, Homo sapiens
gcggatcacgaggtg

SEQ ID NO: 482420 - DNA, 15 bp, Homo sapiens
tgggcggatcacgag

SEQ ID NO: 482421 - DNA, 15 bp, Homo sapiens
gtgggcggatcacga

SEQ ID NO: 482422 - DNA, 15 bp, Homo sapiens
ggtgggcggatcacg

SEQ ID NO: 482423 - DNA, 15 bp, Homo sapiens
cgaggtgggcggatc

SEQ ID NO: 482424 - DNA, 15 bp, Homo sapiens
ccgaggtgggcggat

SEQ ID NO: 482425 - DNA, 15 bp, Homo sapiens
gccgaggtgggcgga

SEQ ID NO: 482426 - DNA, 15 bp, Homo sapiens
ggccgaggtgggcgg

SEQ ID NO: 482427 - DNA, 15 bp, Homo sapiens
aggccgaggtgggcg

SEQ ID NO: 482428 - DNA, 15 bp, Homo sapiens
gaggccgaggtgggc

SEQ ID NO: 482429 - DNA, 15 bp, Homo sapiens
aggaggccgaggtgg

SEQ ID NO: 482430 - DNA, 15 bp, Homo sapiens
taggaggccgaggtg

SEQ ID NO: 482431 - DNA, 15 bp, Homo sapiens
ttaggaggccgaggt

SEQ ID NO: 482432 - DNA, 15 bp, Homo sapiens
tttaggaggccgagg

SEQ ID NO: 482433 - DNA, 15 bp, Homo sapiens
ctttaggaggccgag

SEQ ID NO: 482434 - DNA, 15 bp, Homo sapiens
actttaggaggccga

SEQ ID NO: 482435 - DNA, 15 bp, Homo sapiens
cactttaggaggccg

SEQ ID NO: 482436 - DNA, 15 bp, Homo sapiens
gcactttaggaggcc

SEQ ID NO: 482437 - DNA, 15 bp, Homo sapiens
agcctgtaatcccag

SEQ ID NO: 482438 - DNA, 15 bp, Homo sapiens
aagcctgtaatccca

SEQ ID NO: 482439 - DNA, 15 bp, Homo sapiens
caagcctgtaatccc

SEQ ID NO: 482440 - DNA, 15 bp, Homo sapiens
tcaagcctgtaatcc

SEQ ID NO: 482441 - DNA, 15 bp, Homo sapiens
ctcaagcctgtaatc

SEQ ID NO: 482442 - DNA, 15 bp, Homo sapiens
gctcaagcctgtaat

SEQ ID NO: 482443 - DNA, 15 bp, Homo sapiens
ggctcaagcctgtaa

SEQ ID NO: 482444 - DNA, 15 bp, Homo sapiens
tggctcaagcctgta

SEQ ID NO: 482445 - DNA, 15 bp, Homo sapiens
gtggctcaagcctgt

SEQ ID NO: 482446 - DNA, 15 bp, Homo sapiens
agtggctcaagcctg

SEQ ID NO: 482447 - DNA, 15 bp, Homo sapiens
cagtggctcaagcct

SEQ ID NO: 482448 - DNA, 15 bp, Homo sapiens
acagtggctcaagcc

SEQ ID NO: 482449 - DNA, 15 bp, Homo sapiens
cacagtggctcaagc

SEQ ID NO: 482450 - DNA, 15 bp, Homo sapiens
gcacagtggctcaag

SEQ ID NO: 482451 - DNA, 15 bp, Homo sapiens
ggcacagtggctcaa

SEQ ID NO: 482452 - DNA, 15 bp, Homo sapiens
tgggcacagtggctc

SEQ ID NO: 482453 - DNA, 15 bp, Homo sapiens
cgctgggcacagtgg

SEQ ID NO: 482454 - DNA, 15 bp, Homo sapiens
acgctgggcacagtg

SEQ ID NO: 482455 - DNA, 15 bp, Homo sapiens
tacgctgggcacagt

SEQ ID NO: 482456 - DNA, 15 bp, Homo sapiens
ctacgctgggcacag

SEQ ID NO: 482457 - DNA, 15 bp, Homo sapiens
cctacgctgggcaca

SEQ ID NO: 482458 - DNA, 15 bp, Homo sapiens
gcctacgctgggcac

SEQ ID NO: 482459 - DNA, 15 bp, Homo sapiens
agcctacgctgggca

SEQ ID NO: 482460 - DNA, 15 bp, Homo sapiens
tagcctacgctgggc

SEQ ID NO: 482461 - DNA, 15 bp, Homo sapiens
ctagcctacgctggg

SEQ ID NO: 482462 - DNA, 15 bp, Homo sapiens
actagcctacgctgg

SEQ ID NO: 482463 - DNA, 15 bp, Homo sapiens
aactagcctacgctg

SEQ ID NO: 482464 - DNA, 15 bp, Homo sapiens
aaactagcctacgct

SEQ ID NO: 482465 - DNA, 15 bp, Homo sapiens
aaaactagcctacgc

SEQ ID NO: 482466 - DNA, 15 bp, Homo sapiens
aaaaactagcctacg

SEQ ID NO: 482467 - DNA, 15 bp, Homo sapiens
taaaaactagcctac

SEQ ID NO: 482468 - DNA, 15 bp, Homo sapiens
ttaaaaactagccta

SEQ ID NO: 482469 - DNA, 15 bp, Homo sapiens
tttaaaaactagcct

SEQ ID NO: 482470 - DNA, 15 bp, Homo sapiens
ttttaaaaactagcc

SEQ ID NO: 482471 - DNA, 15 bp, Homo sapiens
tttttaaaaactagc

SEQ ID NO: 482472 - DNA, 15 bp, Homo sapiens
ttttttaaaaactag

SEQ ID NO: 482473 - DNA, 15 bp, Homo sapiens
cttttttaaaaacta

SEQ ID NO: 482474 - DNA, 15 bp, Homo sapiens
tcttttttaaaaact

SEQ ID NO: 482475 - DNA, 15 bp, Homo sapiens
ttcttttttaaaaac

SEQ ID NO: 482476 - DNA, 15 bp, Homo sapiens
attcttttttaaaaa

SEQ ID NO: 482477 - DNA, 15 bp, Homo sapiens
aattcttttttaaaa

SEQ ID NO: 482478 - DNA, 15 bp, Homo sapiens
taattcttttttaaa

SEQ ID NO: 482479 - DNA, 15 bp, Homo sapiens
ctaattcttttttaa

SEQ ID NO: 482480 - DNA, 15 bp, Homo sapiens
actaattctttttta

SEQ ID NO: 482481 - DNA, 15 bp, Homo sapiens
cactaattctttttt

SEQ ID NO: 482482 - DNA, 15 bp, Homo sapiens
ccactaattcttttt

SEQ ID NO: 482483 - DNA, 15 bp, Homo sapiens
tccactaattctttt

SEQ ID NO: 482484 - DNA, 15 bp, Homo sapiens
ttccactaattcttt

SEQ ID NO: 482485 - DNA, 15 bp, Homo sapiens
attccactaattctt

SEQ ID NO: 482486 - DNA, 15 bp, Homo sapiens
tattccactaattct

SEQ ID NO: 482487 - DNA, 15 bp, Homo sapiens
atattccactaattc

SEQ ID NO: 482488 - DNA, 15 bp, Homo sapiens
aatattccactaatt

SEQ ID NO: 482489 - DNA, 15 bp, Homo sapiens
aaatattccactaat

SEQ ID NO: 482490 - DNA, 15 bp, Homo sapiens
aaaatattccactaa

SEQ ID NO: 482491 - DNA, 15 bp, Homo sapiens
taaaatattccacta

SEQ ID NO: 482492 - DNA, 15 bp, Homo sapiens
ataaaatattccact

SEQ ID NO: 482493 - DNA, 15 bp, Homo sapiens
cataaaatattccac

SEQ ID NO: 482494 - DNA, 15 bp, Homo sapiens
acataaaatattcca

SEQ ID NO: 482495 - DNA, 15 bp, Homo sapiens
cacataaaatattcc

SEQ ID NO: 482496 - DNA, 15 bp, Homo sapiens
gcacataaaatattc

SEQ ID NO: 482497 - DNA, 15 bp, Homo sapiens
ggcacataaaatatt

SEQ ID NO: 482498 - DNA, 15 bp, Homo sapiens
tggcacataaaatat

SEQ ID NO: 482499 - DNA, 15 bp, Homo sapiens
gtggcacataaaata

SEQ ID NO: 482500 - DNA, 15 bp, Homo sapiens
ggtggcacataaaat

SEQ ID NO: 482501 - DNA, 15 bp, Homo sapiens
aggtggcacataaaa

SEQ ID NO: 482502 - DNA, 15 bp, Homo sapiens
caggtggcacataaa

SEQ ID NO: 482503 - DNA, 15 bp, Homo sapiens
ccaggtggcacataa

SEQ ID NO: 482504 - DNA, 15 bp, Homo sapiens
cccaggtggcacata

SEQ ID NO: 482505 - DNA, 15 bp, Homo sapiens
gcccaggtggcacat

SEQ ID NO: 482506 - DNA, 15 bp, Homo sapiens
agcccaggtggcaca

SEQ ID NO: 482507 - DNA, 15 bp, Homo sapiens
tagcccaggtggcac

SEQ ID NO: 482508 - DNA, 15 bp, Homo sapiens
ctagcccaggtggca

SEQ ID NO: 482509 - DNA, 15 bp, Homo sapiens
tctagcccaggtggc

SEQ ID NO: 482510 - DNA, 15 bp, Homo sapiens
ttctagcccaggtgg

SEQ ID NO: 482511 - DNA, 15 bp, Homo sapiens
cttctagcccaggtg

SEQ ID NO: 482512 - DNA, 15 bp, Homo sapiens
acttctagcccaggt

SEQ ID NO: 482513 - DNA, 15 bp, Homo sapiens
tacttctagcccagg

SEQ ID NO: 482514 - DNA, 15 bp, Homo sapiens
ctacttctagcccag

SEQ ID NO: 482515 - DNA, 15 bp, Homo sapiens
gctacttctagccca

SEQ ID NO: 482516 - DNA, 15 bp, Homo sapiens
agctacttctagccc

SEQ ID NO: 482517 - DNA, 15 bp, Homo sapiens
aagctacttctagcc

SEQ ID NO: 482518 - DNA, 15 bp, Homo sapiens
aaagctacttctagc

SEQ ID NO: 482519 - DNA, 15 bp, Homo sapiens
caaagctacttctag

SEQ ID NO: 482520 - DNA, 15 bp, Homo sapiens
acaaagctacttcta

SEQ ID NO: 482521 - DNA, 15 bp, Homo sapiens
aacaaagctacttct

SEQ ID NO: 482522 - DNA, 15 bp, Homo sapiens
gaacaaagctacttc

SEQ ID NO: 482523 - DNA, 15 bp, Homo sapiens
agaacaaagctactt

SEQ ID NO: 482524 - DNA, 15 bp, Homo sapiens
tagaacaaagctact

SEQ ID NO: 482525 - DNA, 15 bp, Homo sapiens
ttagaacaaagctac

SEQ ID NO: 482526 - DNA, 15 bp, Homo sapiens
attagaacaaagcta

SEQ ID NO: 482527 - DNA, 15 bp, Homo sapiens
tattagaacaaagct

SEQ ID NO: 482528 - DNA, 15 bp, Homo sapiens
ttattagaacaaagc

SEQ ID NO: 482529 - DNA, 15 bp, Homo sapiens
tttattagaacaaag

SEQ ID NO: 482530 - DNA, 15 bp, Homo sapiens
ctttattagaacaaa

SEQ ID NO: 482531 - DNA, 15 bp, Homo sapiens
gctttattagaacaa

SEQ ID NO: 482532 - DNA, 15 bp, Homo sapiens
agctttattagaaca

SEQ ID NO: 482533 - DNA, 15 bp, Homo sapiens
cagctttattagaac

SEQ ID NO: 482534 - DNA, 15 bp, Homo sapiens
acagctttattagaa

SEQ ID NO: 482535 - DNA, 15 bp, Homo sapiens
aacagctttattaga

SEQ ID NO: 482536 - DNA, 15 bp, Homo sapiens
caacagctttattag

SEQ ID NO: 482537 - DNA, 15 bp, Homo sapiens
gcaacagctttatta

SEQ ID NO: 482538 - DNA, 15 bp, Homo sapiens
ggcaacagctttatt

SEQ ID NO: 482539 - DNA, 15 bp, Homo sapiens
tggcaacagctttat

SEQ ID NO: 482540 - DNA, 15 bp, Homo sapiens
gtggcaacagcttta

SEQ ID NO: 482541 - DNA, 15 bp, Homo sapiens
ggtggcaacagcttt

SEQ ID NO: 482542 - DNA, 15 bp, Homo sapiens
tggtggcaacagctt

SEQ ID NO: 482543 - DNA, 15 bp, Homo sapiens
ttggtggcaacagct

SEQ ID NO: 482544 - DNA, 15 bp, Homo sapiens
tttggtggcaacagc

SEQ ID NO: 482545 - DNA, 15 bp, Homo sapiens
atttggtggcaacag

SEQ ID NO: 482546 - DNA, 15 bp, Homo sapiens
tatttggtggcaaca

SEQ ID NO: 482547 - DNA, 15 bp, Homo sapiens
gtatttggtggcaac

SEQ ID NO: 482548 - DNA, 15 bp, Homo sapiens
tgtatttggtggcaa

SEQ ID NO: 482549 - DNA, 15 bp, Homo sapiens
gtgtatttggtggca

SEQ ID NO: 482550 - DNA, 15 bp, Homo sapiens
ggtgtatttggtggc

SEQ ID NO: 482551 - DNA, 15 bp, Homo sapiens
aggtgtatttggtgg

SEQ ID NO: 482552 - DNA, 15 bp, Homo sapiens
caggtgtatttggtg

SEQ ID NO: 482553 - DNA, 15 bp, Homo sapiens
acaggtgtatttggt

SEQ ID NO: 482554 - DNA, 15 bp, Homo sapiens
gacaggtgtatttgg

SEQ ID NO: 482555 - DNA, 15 bp, Homo sapiens
agacaggtgtatttg

SEQ ID NO: 482556 - DNA, 15 bp, Homo sapiens
cagacaggtgtattt

SEQ ID NO: 482557 - DNA, 15 bp, Homo sapiens
tcagacaggtgtatt

SEQ ID NO: 482558 - DNA, 15 bp, Homo sapiens
gtcagacaggtgtat

SEQ ID NO: 482559 - DNA, 15 bp, Homo sapiens
tgtcagacaggtgta

SEQ ID NO: 482560 - DNA, 15 bp, Homo sapiens
gtgtcagacaggtgt

SEQ ID NO: 482561 - DNA, 15 bp, Homo sapiens
ggtgtcagacaggtg

SEQ ID NO: 482562 - DNA, 15 bp, Homo sapiens
gggtgtcagacaggt

SEQ ID NO: 482563 - DNA, 15 bp, Homo sapiens
cgggtgtcagacagg

SEQ ID NO: 482564 - DNA, 15 bp, Homo sapiens
tcgggtgtcagacag

SEQ ID NO: 482565 - DNA, 15 bp, Homo sapiens
atcgggtgtcagaca

SEQ ID NO: 482566 - DNA, 15 bp, Homo sapiens
catcgggtgtcagac

SEQ ID NO: 482567 - DNA, 15 bp, Homo sapiens
acatcgggtgtcaga

SEQ ID NO: 482568 - DNA, 15 bp, Homo sapiens
gacatcgggtgtcag

SEQ ID NO: 482569 - DNA, 15 bp, Homo sapiens
tgacatcgggtgtca

SEQ ID NO: 482570 - DNA, 15 bp, Homo sapiens
ctgacatcgggtgtc

SEQ ID NO: 482571 - DNA, 15 bp, Homo sapiens
gctgacatcgggtgt

SEQ ID NO: 482572 - DNA, 15 bp, Homo sapiens
agctgacatcgggtg

SEQ ID NO: 482573 - DNA, 15 bp, Homo sapiens
aagctgacatcgggt

SEQ ID NO: 482574 - DNA, 15 bp, Homo sapiens
caagctgacatcggg

SEQ ID NO: 482575 - DNA, 15 bp, Homo sapiens
acaagctgacatcgg

SEQ ID NO: 482576 - DNA, 15 bp, Homo sapiens
aacaagctgacatcg

SEQ ID NO: 482577 - DNA, 15 bp, Homo sapiens
taacaagctgacatc

SEQ ID NO: 482578 - DNA, 15 bp, Homo sapiens
ctaacaagctgacat

SEQ ID NO: 482579 - DNA, 15 bp, Homo sapiens
actaacaagctgaca

SEQ ID NO: 482580 - DNA, 15 bp, Homo sapiens
cactaacaagctgac

SEQ ID NO: 482581 - DNA, 15 bp, Homo sapiens
tcactaacaagctga

SEQ ID NO: 482582 - DNA, 15 bp, Homo sapiens
ctcactaacaagctg

SEQ ID NO: 482583 - DNA, 15 bp, Homo sapiens
actcactaacaagct

SEQ ID NO: 482584 - DNA, 15 bp, Homo sapiens
cactcactaacaagc

SEQ ID NO: 482585 - DNA, 15 bp, Homo sapiens
gcactcactaacaag

SEQ ID NO: 482586 - DNA, 15 bp, Homo sapiens
agcactcactaacaa

SEQ ID NO: 482587 - DNA, 15 bp, Homo sapiens
cagcactcactaaca

SEQ ID NO: 482588 - DNA, 15 bp, Homo sapiens
gcagcactcactaac

SEQ ID NO: 482589 - DNA, 15 bp, Homo sapiens
agcagcactcactaa

SEQ ID NO: 482590 - DNA, 15 bp, Homo sapiens
cagcagcactcacta

SEQ ID NO: 482591 - DNA, 15 bp, Homo sapiens
acagcagcactcact

SEQ ID NO: 482592 - DNA, 15 bp, Homo sapiens
aacagcagcactcac

SEQ ID NO: 482593 - DNA, 15 bp, Homo sapiens
caacagcagcactca

SEQ ID NO: 482594 - DNA, 15 bp, Homo sapiens
ccaacagcagcactc

SEQ ID NO: 482595 - DNA, 15 bp, Homo sapiens
aaccaacagcagcac

SEQ ID NO: 482596 - DNA, 15 bp, Homo sapiens
gaaccaacagcagca

SEQ ID NO: 482597 - DNA, 15 bp, Homo sapiens
ggaaccaacagcagc

SEQ ID NO: 482598 - DNA, 15 bp, Homo sapiens
gggaaccaacagcag

SEQ ID NO: 482599 - DNA, 15 bp, Homo sapiens
tgggaaccaacagca

SEQ ID NO: 482600 - DNA, 15 bp, Homo sapiens
ctgggaaccaacagc

SEQ ID NO: 482601 - DNA, 15 bp, Homo sapiens
gctgggaaccaacag

SEQ ID NO: 482602 - DNA, 15 bp, Homo sapiens
ggctgggaaccaaca

SEQ ID NO: 482603 - DNA, 15 bp, Homo sapiens
aggctgggaaccaac

SEQ ID NO: 482604 - DNA, 15 bp, Homo sapiens
taggctgggaaccaa

SEQ ID NO: 482605 - DNA, 15 bp, Homo sapiens
gtaggctgggaacca

SEQ ID NO: 482606 - DNA, 15 bp, Homo sapiens
ggtaggctgggaacc

SEQ ID NO: 482607 - DNA, 15 bp, Homo sapiens
tggtaggctgggaac

SEQ ID NO: 482608 - DNA, 15 bp, Homo sapiens
gtggtaggctgggaa

SEQ ID NO: 482609 - DNA, 15 bp, Homo sapiens
ggtggtaggctggga

SEQ ID NO: 482610 - DNA, 15 bp, Homo sapiens
gggtggtaggctggg

SEQ ID NO: 482611 - DNA, 15 bp, Homo sapiens
cgggtggtaggctgg

SEQ ID NO: 482612 - DNA, 15 bp, Homo sapiens
tcgggtggtaggctg

SEQ ID NO: 482613 - DNA, 15 bp, Homo sapiens
ctcgggtggtaggct

SEQ ID NO: 482614 - DNA, 15 bp, Homo sapiens
cctcgggtggtaggc

SEQ ID NO: 482615 - DNA, 15 bp, Homo sapiens
acctcgggtggtagg

SEQ ID NO: 482616 - DNA, 15 bp, Homo sapiens
aacctcgggtggtag

SEQ ID NO: 482617 - DNA, 15 bp, Homo sapiens
caacctcgggtggta

SEQ ID NO: 482618 - DNA, 15 bp, Homo sapiens
ccaacctcgggtggt

SEQ ID NO: 482619 - DNA, 15 bp, Homo sapiens
cccaacctcgggtgg

SEQ ID NO: 482620 - DNA, 15 bp, Homo sapiens
tcccaacctcgggtg

SEQ ID NO: 482621 - DNA, 15 bp, Homo sapiens
ttcccaacctcgggt

SEQ ID NO: 482622 - DNA, 15 bp, Homo sapiens
cttcccaacctcggg

SEQ ID NO: 482623 - DNA, 15 bp, Homo sapiens
tcttcccaacctcgg

SEQ ID NO: 482624 - DNA, 15 bp, Homo sapiens
ctcttcccaacctcg

SEQ ID NO: 482625 - DNA, 15 bp, Homo sapiens
gctcttcccaacctc

SEQ ID NO: 482626 - DNA, 15 bp, Homo sapiens
tgctcttcccaacct

SEQ ID NO: 482627 - DNA, 15 bp, Homo sapiens
ctgctcttcccaacc

SEQ ID NO: 482628 - DNA, 15 bp, Homo sapiens
cctgctcttcccaac

SEQ ID NO: 482629 - DNA, 15 bp, Homo sapiens
ccctgctcttcccaa

SEQ ID NO: 482630 - DNA, 15 bp, Homo sapiens
cccctgctcttccca

SEQ ID NO: 482631 - DNA, 15 bp, Homo sapiens
ccccctgctcttccc

SEQ ID NO: 482632 - DNA, 15 bp, Homo sapiens
tccccctgctcttcc

SEQ ID NO: 482633 - DNA, 15 bp, Homo sapiens
gtccccctgctcttc

SEQ ID NO: 482634 - DNA, 15 bp, Homo sapiens
agtccccctgctctt

SEQ ID NO: 482635 - DNA, 15 bp, Homo sapiens
aagtccccctgctct

SEQ ID NO: 482636 - DNA, 15 bp, Homo sapiens
caagtccccctgctc

SEQ ID NO: 482637 - DNA, 15 bp, Homo sapiens
acaagtccccctgct

SEQ ID NO: 482638 - DNA, 15 bp, Homo sapiens
aacaagtccccctgc

SEQ ID NO: 482639 - DNA, 15 bp, Homo sapiens
taacaagtccccctg

SEQ ID NO: 482640 - DNA, 15 bp, Homo sapiens
ataacaagtccccct

SEQ ID NO: 482641 - DNA, 15 bp, Homo sapiens
tataacaagtccccc

SEQ ID NO: 482642 - DNA, 15 bp, Homo sapiens
atataacaagtcccc

SEQ ID NO: 482643 - DNA, 15 bp, Homo sapiens
gatataacaagtccc

SEQ ID NO: 482644 - DNA, 15 bp, Homo sapiens
tgatataacaagtcc

SEQ ID NO: 482645 - DNA, 15 bp, Homo sapiens
gtgatataacaagtc

SEQ ID NO: 482646 - DNA, 15 bp, Homo sapiens
ggtgatataacaagt

SEQ ID NO: 482647 - DNA, 15 bp, Homo sapiens
gggtgatataacaag

SEQ ID NO: 482648 - DNA, 15 bp, Homo sapiens
agggtgatataacaa

SEQ ID NO: 482649 - DNA, 15 bp, Homo sapiens
gagggtgatataaca

SEQ ID NO: 482650 - DNA, 15 bp, Homo sapiens
ggagggtgatataac

SEQ ID NO: 482651 - DNA, 15 bp, Homo sapiens
tggagggtgatataa

SEQ ID NO: 482652 - DNA, 15 bp, Homo sapiens
atggagggtgatata

SEQ ID NO: 482653 - DNA, 15 bp, Homo sapiens
gatggagggtgatat

SEQ ID NO: 482654 - DNA, 15 bp, Homo sapiens
ggatggagggtgata

SEQ ID NO: 482655 - DNA, 15 bp, Homo sapiens
gggatggagggtgat

SEQ ID NO: 482656 - DNA, 15 bp, Homo sapiens
agggatggagggtga

SEQ ID NO: 482657 - DNA, 15 bp, Homo sapiens
cagggatggagggtg

SEQ ID NO: 482658 - DNA, 15 bp, Homo sapiens
gcagggatggagggt

SEQ ID NO: 482659 - DNA, 15 bp, Homo sapiens
agcagggatggaggg

SEQ ID NO: 482660 - DNA, 15 bp, Homo sapiens
cagcagggatggagg

SEQ ID NO: 482661 - DNA, 15 bp, Homo sapiens
ccagcagggatggag

SEQ ID NO: 482662 - DNA, 15 bp, Homo sapiens
cccagcagggatgga

SEQ ID NO: 482663 - DNA, 15 bp, Homo sapiens
gcccagcagggatgg

SEQ ID NO: 482664 - DNA, 15 bp, Homo sapiens
agcccagcagggatg

SEQ ID NO: 482665 - DNA, 15 bp, Homo sapiens
tagcccagcagggat

SEQ ID NO: 482666 - DNA, 15 bp, Homo sapiens
gtagcccagcaggga

SEQ ID NO: 482667 - DNA, 15 bp, Homo sapiens
ggtagcccagcaggg

SEQ ID NO: 482668 - DNA, 15 bp, Homo sapiens
gggtagcccagcagg

SEQ ID NO: 482669 - DNA, 15 bp, Homo sapiens
tgggtagcccagcag

SEQ ID NO: 482670 - DNA, 15 bp, Homo sapiens
ctgggtagcccagca

SEQ ID NO: 482671 - DNA, 15 bp, Homo sapiens
gctgggtagcccagc

SEQ ID NO: 482672 - DNA, 15 bp, Homo sapiens
tgctgggtagcccag

SEQ ID NO: 482673 - DNA, 15 bp, Homo sapiens
ttgctgggtagccca

SEQ ID NO: 482674 - DNA, 15 bp, Homo sapiens
gttgctgggtagccc

SEQ ID NO: 482675 - DNA, 15 bp, Homo sapiens
tgttgctgggtagcc

SEQ ID NO: 482676 - DNA, 15 bp, Homo sapiens
gtgttgctgggtagc

SEQ ID NO: 482677 - DNA, 15 bp, Homo sapiens
tgtgttgctgggtag

SEQ ID NO: 482678 - DNA, 15 bp, Homo sapiens
ttgtgttgctgggta

SEQ ID NO: 482679 - DNA, 15 bp, Homo sapiens
cttgtgttgctgggt

SEQ ID NO: 482680 - DNA, 15 bp, Homo sapiens
acttgtgttgctggg

SEQ ID NO: 482681 - DNA, 15 bp, Homo sapiens
cacttgtgttgctgg

SEQ ID NO: 482682 - DNA, 15 bp, Homo sapiens
tcacttgtgttgctg

SEQ ID NO: 482683 - DNA, 15 bp, Homo sapiens
ctcacttgtgttgct

SEQ ID NO: 482684 - DNA, 15 bp, Homo sapiens
actcacttgtgttgc

SEQ ID NO: 482685 - DNA, 15 bp, Homo sapiens
gactcacttgtgttg

SEQ ID NO: 482686 - DNA, 15 bp, Homo sapiens
tgactcacttgtgtt

SEQ ID NO: 482687 - DNA, 15 bp, Homo sapiens
ttgactcacttgtgt

SEQ ID NO: 482688 - DNA, 15 bp, Homo sapiens
tttgactcacttgtg

SEQ ID NO: 482689 - DNA, 15 bp, Homo sapiens
atttgactcacttgt

SEQ ID NO: 482690 - DNA, 15 bp, Homo sapiens
catttgactcacttg

SEQ ID NO: 482691 - DNA, 15 bp, Homo sapiens
tcatttgactcactt

SEQ ID NO: 482692 - DNA, 15 bp, Homo sapiens
atcatttgactcact

SEQ ID NO: 482693 - DNA, 15 bp, Homo sapiens
catcatttgactcac

SEQ ID NO: 482694 - DNA, 15 bp, Homo sapiens
ccatcatttgactca

SEQ ID NO: 482695 - DNA, 15 bp, Homo sapiens
cccatcatttgactc

SEQ ID NO: 482696 - DNA, 15 bp, Homo sapiens
tcccatcatttgact

SEQ ID NO: 482697 - DNA, 15 bp, Homo sapiens
atcccatcatttgac

SEQ ID NO: 482698 - DNA, 15 bp, Homo sapiens
tatcccatcatttga

SEQ ID NO: 482699 - DNA, 15 bp, Homo sapiens
ctatcccatcatttg

SEQ ID NO: 482700 - DNA, 15 bp, Homo sapiens
actatcccatcattt

SEQ ID NO: 482701 - DNA, 15 bp, Homo sapiens
cactatcccatcatt

SEQ ID NO: 482702 - DNA, 15 bp, Homo sapiens
acactatcccatcat

SEQ ID NO: 482703 - DNA, 15 bp, Homo sapiens
aacactatcccatca

SEQ ID NO: 482704 - DNA, 15 bp, Homo sapiens
aaacactatcccatc

SEQ ID NO: 482705 - DNA, 15 bp, Homo sapiens
caaacactatcccat

SEQ ID NO: 482706 - DNA, 15 bp, Homo sapiens
acaaacactatccca

SEQ ID NO: 482707 - DNA, 15 bp, Homo sapiens
gacaaacactatccc

SEQ ID NO: 482708 - DNA, 15 bp, Homo sapiens
ggacaaacactatcc

SEQ ID NO: 482709 - DNA, 15 bp, Homo sapiens
aggacaaacactatc

SEQ ID NO: 482710 - DNA, 15 bp, Homo sapiens
gaggacaaacactat

SEQ ID NO: 482711 - DNA, 15 bp, Homo sapiens
tgaggacaaacacta

SEQ ID NO: 482712 - DNA, 15 bp, Homo sapiens
atgaggacaaacact

SEQ ID NO: 482713 - DNA, 15 bp, Homo sapiens
catgaggacaaacac

SEQ ID NO: 482714 - DNA, 15 bp, Homo sapiens
acatgaggacaaaca

SEQ ID NO: 482715 - DNA, 15 bp, Homo sapiens
cacatgaggacaaac

SEQ ID NO: 482716 - DNA, 15 bp, Homo sapiens
gcacatgaggacaaa

SEQ ID NO: 482717 - DNA, 15 bp, Homo sapiens
tgcacatgaggacaa

SEQ ID NO: 482718 - DNA, 15 bp, Homo sapiens
gtgcacatgaggaca

SEQ ID NO: 482719 - DNA, 15 bp, Homo sapiens
tgtgcacatgaggac

SEQ ID NO: 482720 - DNA, 15 bp, Homo sapiens
gtgtgcacatgagga

SEQ ID NO: 482721 - DNA, 15 bp, Homo sapiens
tgtgtgcacatgagg

SEQ ID NO: 482722 - DNA, 15 bp, Homo sapiens
gtgtgtgcacatgag

SEQ ID NO: 482723 - DNA, 15 bp, Homo sapiens
tgtgtgtgcacatga

SEQ ID NO: 482724 - DNA, 15 bp, Homo sapiens
gtgtgtgtgcacatg

SEQ ID NO: 482725 - DNA, 15 bp, Homo sapiens
tgtgtgtgtgcacat

SEQ ID NO: 482726 - DNA, 15 bp, Homo sapiens
ttgtgtgtgtgcaca

SEQ ID NO: 482727 - DNA, 15 bp, Homo sapiens
gttgtgtgtgtgcac

SEQ ID NO: 482728 - DNA, 15 bp, Homo sapiens
tgttgtgtgtgtgca

SEQ ID NO: 482729 - DNA, 15 bp, Homo sapiens
ctgttgtgtgtgtgc

SEQ ID NO: 482730 - DNA, 15 bp, Homo sapiens
actgttgtgtgtgtg

SEQ ID NO: 482731 - DNA, 15 bp, Homo sapiens
cactgttgtgtgtgt

SEQ ID NO: 482732 - DNA, 15 bp, Homo sapiens
gcactgttgtgtgtg

SEQ ID NO: 482733 - DNA, 15 bp, Homo sapiens
ggcactgttgtgtgt

SEQ ID NO: 482734 - DNA, 15 bp, Homo sapiens
aggcactgttgtgtg

SEQ ID NO: 482735 - DNA, 15 bp, Homo sapiens
taggcactgttgtgt

SEQ ID NO: 482736 - DNA, 15 bp, Homo sapiens
gtaggcactgttgtg

SEQ ID NO: 482737 - DNA, 15 bp, Homo sapiens
ggtaggcactgttgt

SEQ ID NO: 482738 - DNA, 15 bp, Homo sapiens
aggtaggcactgttg

SEQ ID NO: 482739 - DNA, 15 bp, Homo sapiens
aaggtaggcactgtt

SEQ ID NO: 482740 - DNA, 15 bp, Homo sapiens
gaaggtaggcactgt

SEQ ID NO: 482741 - DNA, 15 bp, Homo sapiens
tgaaggtaggcactg

SEQ ID NO: 482742 - DNA, 15 bp, Homo sapiens
ttgaaggtaggcact

SEQ ID NO: 482743 - DNA, 15 bp, Homo sapiens
tttgaaggtaggcac

SEQ ID NO: 482744 - DNA, 15 bp, Homo sapiens
ctttgaaggtaggca

SEQ ID NO: 482745 - DNA, 15 bp, Homo sapiens
tctttgaaggtaggc

SEQ ID NO: 482746 - DNA, 15 bp, Homo sapiens
atctttgaaggtagg

SEQ ID NO: 482747 - DNA, 15 bp, Homo sapiens
catctttgaaggtag

SEQ ID NO: 482748 - DNA, 15 bp, Homo sapiens
acatctttgaaggta

SEQ ID NO: 482749 - DNA, 15 bp, Homo sapiens
cacatctttgaaggt

SEQ ID NO: 482750 - DNA, 15 bp, Homo sapiens
tcacatctttgaagg

SEQ ID NO: 482751 - DNA, 15 bp, Homo sapiens
ttcacatctttgaag

SEQ ID NO: 482752 - DNA, 15 bp, Homo sapiens
tttcacatctttgaa

SEQ ID NO: 482753 - DNA, 15 bp, Homo sapiens
ctttcacatctttga

SEQ ID NO: 482754 - DNA, 15 bp, Homo sapiens
gctttcacatctttg

SEQ ID NO: 482755 - DNA, 15 bp, Homo sapiens
agctttcacatcttt

SEQ ID NO: 482756 - DNA, 15 bp, Homo sapiens
cagctttcacatctt

SEQ ID NO: 482757 - DNA, 15 bp, Homo sapiens
tcagctttcacatct

SEQ ID NO: 482758 - DNA, 15 bp, Homo sapiens
atcagctttcacatc

SEQ ID NO: 482759 - DNA, 15 bp, Homo sapiens
aatcagctttcacat

SEQ ID NO: 482760 - DNA, 15 bp, Homo sapiens
taatcagctttcaca

SEQ ID NO: 482761 - DNA, 15 bp, Homo sapiens
ataatcagctttcac

SEQ ID NO: 482762 - DNA, 15 bp, Homo sapiens
aataatcagctttca

SEQ ID NO: 482763 - DNA, 15 bp, Homo sapiens
aaataatcagctttc

SEQ ID NO: 482764 - DNA, 15 bp, Homo sapiens
aaaataatcagcttt

SEQ ID NO: 482765 - DNA, 15 bp, Homo sapiens
caaaataatcagctt

SEQ ID NO: 482766 - DNA, 15 bp, Homo sapiens
acaaaataatcagct

SEQ ID NO: 482767 - DNA, 15 bp, Homo sapiens
cacaaaataatcagc

SEQ ID NO: 482768 - DNA, 15 bp, Homo sapiens
ccacaaaataatcag

SEQ ID NO: 482769 - DNA, 15 bp, Homo sapiens
gccacaaaataatca

SEQ ID NO: 482770 - DNA, 15 bp, Homo sapiens
ggccacaaaataatc

SEQ ID NO: 482771 - DNA, 15 bp, Homo sapiens
gggccacaaaataat

SEQ ID NO: 482772 - DNA, 15 bp, Homo sapiens
tgggccacaaaataa

SEQ ID NO: 482773 - DNA, 15 bp, Homo sapiens
atgggccacaaaata

SEQ ID NO: 482774 - DNA, 15 bp, Homo sapiens
aatgggccacaaaat

SEQ ID NO: 482775 - DNA, 15 bp, Homo sapiens
caatgggccacaaaa

SEQ ID NO: 482776 - DNA, 15 bp, Homo sapiens
acaatgggccacaaa

SEQ ID NO: 482777 - DNA, 15 bp, Homo sapiens
cacaatgggccacaa

SEQ ID NO: 482778 - DNA, 15 bp, Homo sapiens
ccacaatgggccaca

SEQ ID NO: 482779 - DNA, 15 bp, Homo sapiens
cccacaatgggccac

SEQ ID NO: 482780 - DNA, 15 bp, Homo sapiens
tcccacaatgggcca

SEQ ID NO: 482781 - DNA, 15 bp, Homo sapiens
atcccacaatgggcc

SEQ ID NO: 482782 - DNA, 15 bp, Homo sapiens
catcccacaatgggc

SEQ ID NO: 482783 - DNA, 15 bp, Homo sapiens
tcatcccacaatggg

SEQ ID NO: 482784 - DNA, 15 bp, Homo sapiens
ttcatcccacaatgg

SEQ ID NO: 482785 - DNA, 15 bp, Homo sapiens
attcatcccacaatg

SEQ ID NO: 482786 - DNA, 15 bp, Homo sapiens
cattcatcccacaat

SEQ ID NO: 482787 - DNA, 15 bp, Homo sapiens
acattcatcccacaa

SEQ ID NO: 482788 - DNA, 15 bp, Homo sapiens
cacattcatcccaca

SEQ ID NO: 482789 - DNA, 15 bp, Homo sapiens
acacattcatcccac

SEQ ID NO: 482790 - DNA, 15 bp, Homo sapiens
cacacattcatccca

SEQ ID NO: 482791 - DNA, 15 bp, Homo sapiens
acacacattcatccc

SEQ ID NO: 482792 - DNA, 15 bp, Homo sapiens
cacacacattcatcc

SEQ ID NO: 482793 - DNA, 15 bp, Homo sapiens
acacacacattcatc

SEQ ID NO: 482794 - DNA, 15 bp, Homo sapiens
cacacacacattcat

SEQ ID NO: 482795 - DNA, 15 bp, Homo sapiens
acacacacacattca

SEQ ID NO: 482796 - DNA, 15 bp, Homo sapiens
aacacacacacattc

SEQ ID NO: 482797 - DNA, 15 bp, Homo sapiens
gaacacacacacatt

SEQ ID NO: 482798 - DNA, 15 bp, Homo sapiens
agaacacacacacat

SEQ ID NO: 482799 - DNA, 15 bp, Homo sapiens
cagaacacacacaca

SEQ ID NO: 482800 - DNA, 15 bp, Homo sapiens
acagaacacacacac

SEQ ID NO: 482801 - DNA, 15 bp, Homo sapiens
aacagaacacacaca

SEQ ID NO: 482802 - DNA, 15 bp, Homo sapiens
aaacagaacacacac

SEQ ID NO: 482803 - DNA, 15 bp, Homo sapiens
aaaacagaacacaca

SEQ ID NO: 482804 - DNA, 15 bp, Homo sapiens
taaaacagaacacac

SEQ ID NO: 482805 - DNA, 15 bp, Homo sapiens
ttaaaacagaacaca

SEQ ID NO: 482806 - DNA, 15 bp, Homo sapiens
cttaaaacagaacac

SEQ ID NO: 482807 - DNA, 15 bp, Homo sapiens
tcttaaaacagaaca

SEQ ID NO: 482808 - DNA, 15 bp, Homo sapiens
ttcttaaaacagaac

SEQ ID NO: 482809 - DNA, 15 bp, Homo sapiens
ggttatttcttaaaa

SEQ ID NO: 482810 - DNA, 15 bp, Homo sapiens
aggttatttcttaaa

SEQ ID NO: 482811 - DNA, 15 bp, Homo sapiens
gaggttatttcttaa

SEQ ID NO: 482812 - DNA, 15 bp, Homo sapiens
agaggttatttctta

SEQ ID NO: 482813 - DNA, 15 bp, Homo sapiens
aagaggttatttctt

SEQ ID NO: 482814 - DNA, 15 bp, Homo sapiens
caagaggttatttct

SEQ ID NO: 482815 - DNA, 15 bp, Homo sapiens
tcaagaggttatttc

SEQ ID NO: 482816 - DNA, 15 bp, Homo sapiens
gtcaagaggttattt

SEQ ID NO: 482817 - DNA, 15 bp, Homo sapiens
ggtcaagaggttatt

SEQ ID NO: 482818 - DNA, 15 bp, Homo sapiens
gggtcaagaggttat

SEQ ID NO: 482819 - DNA, 15 bp, Homo sapiens
ggggtcaagaggtta

SEQ ID NO: 482820 - DNA, 15 bp, Homo sapiens
tggggtcaagaggtt

SEQ ID NO: 482821 - DNA, 15 bp, Homo sapiens
ttggggtcaagaggt

SEQ ID NO: 482822 - DNA, 15 bp, Homo sapiens
cttggggtcaagagg

SEQ ID NO: 482823 - DNA, 15 bp, Homo sapiens
gcttggggtcaagag

SEQ ID NO: 482824 - DNA, 15 bp, Homo sapiens
agcttggggtcaaga

SEQ ID NO: 482825 - DNA, 15 bp, Homo sapiens
cagcttggggtcaag

SEQ ID NO: 482826 - DNA, 15 bp, Homo sapiens
tcagcttggggtcaa

SEQ ID NO: 482827 - DNA, 15 bp, Homo sapiens
ttcagcttggggtca

SEQ ID NO: 482828 - DNA, 15 bp, Homo sapiens
tttcagcttggggtc

SEQ ID NO: 482829 - DNA, 15 bp, Homo sapiens
ttttcagcttggggt

SEQ ID NO: 482830 - DNA, 15 bp, Homo sapiens
attttcagcttgggg

SEQ ID NO: 482831 - DNA, 15 bp, Homo sapiens
cattttcagcttggg

SEQ ID NO: 482832 - DNA, 15 bp, Homo sapiens
acattttcagcttgg

SEQ ID NO: 482833 - DNA, 15 bp, Homo sapiens
tacattttcagcttg

SEQ ID NO: 482834 - DNA, 15 bp, Homo sapiens
gtacattttcagctt

SEQ ID NO: 482835 - DNA, 15 bp, Homo sapiens
agtacattttcagct

SEQ ID NO: 482836 - DNA, 15 bp, Homo sapiens
tagtacattttcagc

SEQ ID NO: 482837 - DNA, 15 bp, Homo sapiens
gtagtacattttcag

SEQ ID NO: 482838 - DNA, 15 bp, Homo sapiens
agtagtacattttca

SEQ ID NO: 482839 - DNA, 15 bp, Homo sapiens
aagtagtacattttc

SEQ ID NO: 482840 - DNA, 15 bp, Homo sapiens
caagtagtacatttt

SEQ ID NO: 482841 - DNA, 15 bp, Homo sapiens
tcaagtagtacattt

SEQ ID NO: 482842 - DNA, 15 bp, Homo sapiens
gtcaagtagtacatt

SEQ ID NO: 482843 - DNA, 15 bp, Homo sapiens
agtcaagtagtacat

SEQ ID NO: 482844 - DNA, 15 bp, Homo sapiens
gagtcaagtagtaca

SEQ ID NO: 482845 - DNA, 15 bp, Homo sapiens
agagtcaagtagtac

SEQ ID NO: 482846 - DNA, 15 bp, Homo sapiens
aagagtcaagtagta

SEQ ID NO: 482847 - DNA, 15 bp, Homo sapiens
aaagagtcaagtagt

SEQ ID NO: 482848 - DNA, 15 bp, Homo sapiens
aaaagagtcaagtag

SEQ ID NO: 482849 - DNA, 15 bp, Homo sapiens
aaaaagagtcaagta

SEQ ID NO: 482850 - DNA, 15 bp, Homo sapiens
gaaaaagagtcaagt

SEQ ID NO: 482851 - DNA, 15 bp, Homo sapiens
agaaaaagagtcaag

SEQ ID NO: 482852 - DNA, 15 bp, Homo sapiens
aagaaaaagagtcaa

SEQ ID NO: 482853 - DNA, 15 bp, Homo sapiens
aaagaaaaagagtca

SEQ ID NO: 482854 - DNA, 15 bp, Homo sapiens
gaaagaaaaagagtc

SEQ ID NO: 482855 - DNA, 15 bp, Homo sapiens
ggaaagaaaaagagt

SEQ ID NO: 482856 - DNA, 15 bp, Homo sapiens
aggaaagaaaaagag

SEQ ID NO: 482857 - DNA, 15 bp, Homo sapiens
aaggaaagaaaaaga

SEQ ID NO: 482858 - DNA, 15 bp, Homo sapiens
gaaggaaagaaaaag

SEQ ID NO: 482859 - DNA, 15 bp, Homo sapiens
tgaaggaaagaaaaa

SEQ ID NO: 482860 - DNA, 15 bp, Homo sapiens
ctgaaggaaagaaaa

SEQ ID NO: 482861 - DNA, 15 bp, Homo sapiens
cctgaaggaaagaaa

SEQ ID NO: 482862 - DNA, 15 bp, Homo sapiens
tcctgaaggaaagaa

SEQ ID NO: 482863 - DNA, 15 bp, Homo sapiens
gtcctgaaggaaaga

SEQ ID NO: 482864 - DNA, 15 bp, Homo sapiens
ggtcctgaaggaaag

SEQ ID NO: 482865 - DNA, 15 bp, Homo sapiens
aggtcctgaaggaaa

SEQ ID NO: 482866 - DNA, 15 bp, Homo sapiens
caggtcctgaaggaa

SEQ ID NO: 482867 - DNA, 15 bp, Homo sapiens
ccaggtcctgaagga

SEQ ID NO: 482868 - DNA, 15 bp, Homo sapiens
accaggtcctgaagg

SEQ ID NO: 482869 - DNA, 15 bp, Homo sapiens
caccaggtcctgaag

SEQ ID NO: 482870 - DNA, 15 bp, Homo sapiens
acaccaggtcctgaa

SEQ ID NO: 482871 - DNA, 15 bp, Homo sapiens
cacaccaggtcctga

SEQ ID NO: 482872 - DNA, 15 bp, Homo sapiens
tcacaccaggtcctg

SEQ ID NO: 482873 - DNA, 15 bp, Homo sapiens
ttcacaccaggtcct

SEQ ID NO: 482874 - DNA, 15 bp, Homo sapiens
attcacaccaggtcc

SEQ ID NO: 482875 - DNA, 15 bp, Homo sapiens
aattcacaccaggtc

SEQ ID NO: 482876 - DNA, 15 bp, Homo sapiens
taattcacaccaggt

SEQ ID NO: 482877 - DNA, 15 bp, Homo sapiens
ataattcacaccagg

SEQ ID NO: 482878 - DNA, 15 bp, Homo sapiens
aataattcacaccag

SEQ ID NO: 482879 - DNA, 15 bp, Homo sapiens
gaataattcacacca

SEQ ID NO: 482880 - DNA, 15 bp, Homo sapiens
tgaataattcacacc

SEQ ID NO: 482881 - DNA, 15 bp, Homo sapiens
ctgaataattcacac

SEQ ID NO: 482882 - DNA, 15 bp, Homo sapiens
cctgaataattcaca

SEQ ID NO: 482883 - DNA, 15 bp, Homo sapiens
ccctgaataattcac

SEQ ID NO: 482884 - DNA, 15 bp, Homo sapiens
accctgaataattca

SEQ ID NO: 482885 - DNA, 15 bp, Homo sapiens
caccctgaataattc

SEQ ID NO: 482886 - DNA, 15 bp, Homo sapiens
acaccctgaataatt

SEQ ID NO: 482887 - DNA, 15 bp, Homo sapiens
gacaccctgaataat

SEQ ID NO: 482888 - DNA, 15 bp, Homo sapiens
tgacaccctgaataa

SEQ ID NO: 482889 - DNA, 15 bp, Homo sapiens
ctgacaccctgaata

SEQ ID NO: 482890 - DNA, 15 bp, Homo sapiens
tctgacaccctgaat

SEQ ID NO: 482891 - DNA, 15 bp, Homo sapiens
atctgacaccctgaa

SEQ ID NO: 482892 - DNA, 15 bp, Homo sapiens
gatctgacaccctga

SEQ ID NO: 482893 - DNA, 15 bp, Homo sapiens
tgatctgacaccctg

SEQ ID NO: 482894 - DNA, 15 bp, Homo sapiens
gtgatctgacaccct

SEQ ID NO: 482895 - DNA, 15 bp, Homo sapiens
tgtgatctgacaccc

SEQ ID NO: 482896 - DNA, 15 bp, Homo sapiens
atgtgatctgacacc

SEQ ID NO: 482897 - DNA, 15 bp, Homo sapiens
catgtgatctgacac

SEQ ID NO: 482898 - DNA, 15 bp, Homo sapiens
ccatgtgatctgaca

SEQ ID NO: 482899 - DNA, 15 bp, Homo sapiens
cccatgtgatctgac

SEQ ID NO: 482900 - DNA, 15 bp, Homo sapiens
gcccatgtgatctga

SEQ ID NO: 482901 - DNA, 15 bp, Homo sapiens
agcccatgtgatctg

SEQ ID NO: 482902 - DNA, 15 bp, Homo sapiens
tagcccatgtgatct

SEQ ID NO: 482903 - DNA, 15 bp, Homo sapiens
ttagcccatgtgatc

SEQ ID NO: 482904 - DNA, 15 bp, Homo sapiens
tttagcccatgtgat

SEQ ID NO: 482905 - DNA, 15 bp, Homo sapiens
atttagcccatgtga

SEQ ID NO: 482906 - DNA, 15 bp, Homo sapiens
aatttagcccatgtg

SEQ ID NO: 482907 - DNA, 15 bp, Homo sapiens
aaatttagcccatgt

SEQ ID NO: 482908 - DNA, 15 bp, Homo sapiens
aaaatttagcccatg

SEQ ID NO: 482909 - DNA, 15 bp, Homo sapiens
caaaatttagcccat

SEQ ID NO: 482910 - DNA, 15 bp, Homo sapiens
gcaaaatttagccca

SEQ ID NO: 482911 - DNA, 15 bp, Homo sapiens
tgcaaaatttagccc

SEQ ID NO: 482912 - DNA, 15 bp, Homo sapiens
ttgcaaaatttagcc

SEQ ID NO: 482913 - DNA, 15 bp, Homo sapiens
tttgcaaaatttagc

SEQ ID NO: 482914 - DNA, 15 bp, Homo sapiens
ctttgcaaaatttag

SEQ ID NO: 482915 - DNA, 15 bp, Homo sapiens
actttgcaaaattta

SEQ ID NO: 482916 - DNA, 15 bp, Homo sapiens
tactttgcaaaattt

SEQ ID NO: 482917 - DNA, 15 bp, Homo sapiens
ttactttgcaaaatt

SEQ ID NO: 482918 - DNA, 15 bp, Homo sapiens
cttactttgcaaaat

SEQ ID NO: 482919 - DNA, 15 bp, Homo sapiens
gcttactttgcaaaa

SEQ ID NO: 482920 - DNA, 15 bp, Homo sapiens
tgcttactttgcaaa

SEQ ID NO: 482921 - DNA, 15 bp, Homo sapiens
ttgcttactttgcaa

SEQ ID NO: 482922 - DNA, 15 bp, Homo sapiens
attgcttactttgca

SEQ ID NO: 482923 - DNA, 15 bp, Homo sapiens
gattgcttactttgc

SEQ ID NO: 482924 - DNA, 15 bp, Homo sapiens
agattgcttactttg

SEQ ID NO: 482925 - DNA, 15 bp, Homo sapiens
aagattgcttacttt

SEQ ID NO: 482926 - DNA, 15 bp, Homo sapiens
caagattgcttactt

SEQ ID NO: 482927 - DNA, 15 bp, Homo sapiens
acaagattgcttact

SEQ ID NO: 482928 - DNA, 15 bp, Homo sapiens
aacaagattgcttac

SEQ ID NO: 482929 - DNA, 15 bp, Homo sapiens
taacaagattgctta

SEQ ID NO: 482930 - DNA, 15 bp, Homo sapiens
ttaacaagattgctt

SEQ ID NO: 482931 - DNA, 15 bp, Homo sapiens
tttaacaagattgct

SEQ ID NO: 482932 - DNA, 15 bp, Homo sapiens
atttaacaagattgc

SEQ ID NO: 482933 - DNA, 15 bp, Homo sapiens
aatttaacaagattg

SEQ ID NO: 482934 - DNA, 15 bp, Homo sapiens
gaatttaacaagatt

SEQ ID NO: 482935 - DNA, 15 bp, Homo sapiens
agaatttaacaagat

SEQ ID NO: 482936 - DNA, 15 bp, Homo sapiens
gagaatttaacaaga

SEQ ID NO: 482937 - DNA, 15 bp, Homo sapiens
cgagaatttaacaag

SEQ ID NO: 482938 - DNA, 15 bp, Homo sapiens
acgagaatttaacaa

SEQ ID NO: 482939 - DNA, 15 bp, Homo sapiens
cacgagaatttaaca

SEQ ID NO: 482940 - DNA, 15 bp, Homo sapiens
ccacgagaatttaac

SEQ ID NO: 482941 - DNA, 15 bp, Homo sapiens
cccacgagaatttaa

SEQ ID NO: 482942 - DNA, 15 bp, Homo sapiens
tcccacgagaattta

SEQ ID NO: 482943 - DNA, 15 bp, Homo sapiens
ttcccacgagaattt

SEQ ID NO: 482944 - DNA, 15 bp, Homo sapiens
attcccacgagaatt

SEQ ID NO: 482945 - DNA, 15 bp, Homo sapiens
cattcccacgagaat

SEQ ID NO: 482946 - DNA, 15 bp, Homo sapiens
ccattcccacgagaa

SEQ ID NO: 482947 - DNA, 15 bp, Homo sapiens
cccattcccacgaga

SEQ ID NO: 482948 - DNA, 15 bp, Homo sapiens
tcccattcccacgag

SEQ ID NO: 482949 - DNA, 15 bp, Homo sapiens
ttcccattcccacga

SEQ ID NO: 482950 - DNA, 15 bp, Homo sapiens
attcccattcccacg

SEQ ID NO: 482951 - DNA, 15 bp, Homo sapiens
cattcccattcccac

SEQ ID NO: 482952 - DNA, 15 bp, Homo sapiens
gcattcccattccca

SEQ ID NO: 482953 - DNA, 15 bp, Homo sapiens
agcattcccattccc

SEQ ID NO: 482954 - DNA, 15 bp, Homo sapiens
gagcattcccattcc

SEQ ID NO: 482955 - DNA, 15 bp, Homo sapiens
tgagcattcccattc

SEQ ID NO: 482956 - DNA, 15 bp, Homo sapiens
gtgagcattcccatt

SEQ ID NO: 482957 - DNA, 15 bp, Homo sapiens
ggtgagcattcccat

SEQ ID NO: 482958 - DNA, 15 bp, Homo sapiens
aggtgagcattccca

SEQ ID NO: 482959 - DNA, 15 bp, Homo sapiens
caggtgagcattccc

SEQ ID NO: 482960 - DNA, 15 bp, Homo sapiens
gcaggtgagcattcc

SEQ ID NO: 482961 - DNA, 15 bp, Homo sapiens
tgcaggtgagcattc

SEQ ID NO: 482962 - DNA, 15 bp, Homo sapiens
gtgcaggtgagcatt

SEQ ID NO: 482963 - DNA, 15 bp, Homo sapiens
cgtgcaggtgagcat

SEQ ID NO: 482964 - DNA, 15 bp, Homo sapiens
ccgtgcaggtgagca

SEQ ID NO: 482965 - DNA, 15 bp, Homo sapiens
gccgtgcaggtgagc

SEQ ID NO: 482966 - DNA, 15 bp, Homo sapiens
agccgtgcaggtgag

SEQ ID NO: 482967 - DNA, 15 bp, Homo sapiens
cagccgtgcaggtga

SEQ ID NO: 482968 - DNA, 15 bp, Homo sapiens
acagccgtgcaggtg

SEQ ID NO: 482969 - DNA, 15 bp, Homo sapiens
gacagccgtgcaggt

SEQ ID NO: 482970 - DNA, 15 bp, Homo sapiens
cgacagccgtgcagg

SEQ ID NO: 482971 - DNA, 15 bp, Homo sapiens
acgacagccgtgcag

SEQ ID NO: 482972 - DNA, 15 bp, Homo sapiens
aacgacagccgtgca

SEQ ID NO: 482973 - DNA, 15 bp, Homo sapiens
caacgacagccgtgc

SEQ ID NO: 482974 - DNA, 15 bp, Homo sapiens
tcaacgacagccgtg

SEQ ID NO: 482975 - DNA, 15 bp, Homo sapiens
ctcaacgacagccgt

SEQ ID NO: 482976 - DNA, 15 bp, Homo sapiens
cctcaacgacagccg

SEQ ID NO: 482977 - DNA, 15 bp, Homo sapiens
ccctcaacgacagcc

SEQ ID NO: 482978 - DNA, 15 bp, Homo sapiens
gccctcaacgacagc

SEQ ID NO: 482979 - DNA, 15 bp, Homo sapiens
agccctcaacgacag

SEQ ID NO: 482980 - DNA, 15 bp, Homo sapiens
gagccctcaacgaca

SEQ ID NO: 482981 - DNA, 15 bp, Homo sapiens
agagccctcaacgac

SEQ ID NO: 482982 - DNA, 15 bp, Homo sapiens
cagagccctcaacga

SEQ ID NO: 482983 - DNA, 15 bp, Homo sapiens
ccagagccctcaacg

SEQ ID NO: 482984 - DNA, 15 bp, Homo sapiens
gccagagccctcaac

SEQ ID NO: 482985 - DNA, 15 bp, Homo sapiens
agccagagccctcaa

SEQ ID NO: 482986 - DNA, 15 bp, Homo sapiens
aagccagagccctca

SEQ ID NO: 482987 - DNA, 15 bp, Homo sapiens
caagccagagccctc

SEQ ID NO: 482988 - DNA, 15 bp, Homo sapiens
tcaagccagagccct

SEQ ID NO: 482989 - DNA, 15 bp, Homo sapiens
ttcaagccagagccc

SEQ ID NO: 482990 - DNA, 15 bp, Homo sapiens
cttcaagccagagcc

SEQ ID NO: 482991 - DNA, 15 bp, Homo sapiens
ccttcaagccagagc

SEQ ID NO: 482992 - DNA, 15 bp, Homo sapiens
gccttcaagccagag

SEQ ID NO: 482993 - DNA, 15 bp, Homo sapiens
ggccttcaagccaga

SEQ ID NO: 482994 - DNA, 15 bp, Homo sapiens
gggccttcaagccag

SEQ ID NO: 482995 - DNA, 15 bp, Homo sapiens
agggccttcaagcca

SEQ ID NO: 482996 - DNA, 15 bp, Homo sapiens
cagggccttcaagcc

SEQ ID NO: 482997 - DNA, 15 bp, Homo sapiens
tcagggccttcaagc

SEQ ID NO: 482998 - DNA, 15 bp, Homo sapiens
ttcagggccttcaag

SEQ ID NO: 482999 - DNA, 15 bp, Homo sapiens
gttcagggccttcaa

SEQ ID NO: 483000 - DNA, 15 bp, Homo sapiens
agttcagggccttca

SEQ ID NO: 483001 - DNA, 15 bp, Homo sapiens
gagttcagggccttc

SEQ ID NO: 483002 - DNA, 15 bp, Homo sapiens
agagttcagggcctt

SEQ ID NO: 483003 - DNA, 15 bp, Homo sapiens
aagagttcagggcct

SEQ ID NO: 483004 - DNA, 15 bp, Homo sapiens
caagagttcagggcc

SEQ ID NO: 483005 - DNA, 15 bp, Homo sapiens
ccaagagttcagggc

SEQ ID NO: 483006 - DNA, 15 bp, Homo sapiens
accaagagttcaggg

SEQ ID NO: 483007 - DNA, 15 bp, Homo sapiens
gaccaagagttcagg

SEQ ID NO: 483008 - DNA, 15 bp, Homo sapiens
ggaccaagagttcag

SEQ ID NO: 483009 - DNA, 15 bp, Homo sapiens
tggaccaagagttca

SEQ ID NO: 483010 - DNA, 15 bp, Homo sapiens
ctggaccaagagttc

SEQ ID NO: 483011 - DNA, 15 bp, Homo sapiens
gctggaccaagagtt

SEQ ID NO: 483012 - DNA, 15 bp, Homo sapiens
cgctggaccaagagt

SEQ ID NO: 483013 - DNA, 15 bp, Homo sapiens
ccgctggaccaagag

SEQ ID NO: 483014 - DNA, 15 bp, Homo sapiens
gccgctggaccaaga

SEQ ID NO: 483015 - DNA, 15 bp, Homo sapiens
ggccgctggaccaag

SEQ ID NO: 483016 - DNA, 15 bp, Homo sapiens
tggccgctggaccaa

SEQ ID NO: 483017 - DNA, 15 bp, Homo sapiens
ctggccgctggacca

SEQ ID NO: 483018 - DNA, 15 bp, Homo sapiens
actggccgctggacc

SEQ ID NO: 483019 - DNA, 15 bp, Homo sapiens
tactggccgctggac

SEQ ID NO: 483020 - DNA, 15 bp, Homo sapiens
ctactggccgctgga

SEQ ID NO: 483021 - DNA, 15 bp, Homo sapiens
cctactggccgctgg

SEQ ID NO: 483022 - DNA, 15 bp, Homo sapiens
tcctactggccgctg

SEQ ID NO: 483023 - DNA, 15 bp, Homo sapiens
gtcctactggccgct

SEQ ID NO: 483024 - DNA, 15 bp, Homo sapiens
ggtcctactggccgc

SEQ ID NO: 483025 - DNA, 15 bp, Homo sapiens
aggtcctactggccg

SEQ ID NO: 483026 - DNA, 15 bp, Homo sapiens
caggtcctactggcc

SEQ ID NO: 483027 - DNA, 15 bp, Homo sapiens
gcaggtcctactggc

SEQ ID NO: 483028 - DNA, 15 bp, Homo sapiens
ggcaggtcctactgg

SEQ ID NO: 483029 - DNA, 15 bp, Homo sapiens
aggcaggtcctactg

SEQ ID NO: 483030 - DNA, 15 bp, Homo sapiens
caggcaggtcctact

SEQ ID NO: 483031 - DNA, 15 bp, Homo sapiens
tcaggcaggtcctac

SEQ ID NO: 483032 - DNA, 15 bp, Homo sapiens
ttcaggcaggtccta

SEQ ID NO: 483033 - DNA, 15 bp, Homo sapiens
cttcaggcaggtcct

SEQ ID NO: 483034 - DNA, 15 bp, Homo sapiens
ccttcaggcaggtcc

SEQ ID NO: 483035 - DNA, 15 bp, Homo sapiens
accttcaggcaggtc

SEQ ID NO: 483036 - DNA, 15 bp, Homo sapiens
taccttcaggcaggt

SEQ ID NO: 483037 - DNA, 15 bp, Homo sapiens
ctaccttcaggcagg

SEQ ID NO: 483038 - DNA, 15 bp, Homo sapiens
tctaccttcaggcag

SEQ ID NO: 483039 - DNA, 15 bp, Homo sapiens
gtctaccttcaggca

SEQ ID NO: 483040 - DNA, 15 bp, Homo sapiens
cgtctaccttcaggc

SEQ ID NO: 483041 - DNA, 15 bp, Homo sapiens
ccgtctaccttcagg

SEQ ID NO: 483042 - DNA, 15 bp, Homo sapiens
cccgtctaccttcag

SEQ ID NO: 483043 - DNA, 15 bp, Homo sapiens
gcccgtctaccttca

SEQ ID NO: 483044 - DNA, 15 bp, Homo sapiens
ggcccgtctaccttc

SEQ ID NO: 483045 - DNA, 15 bp, Homo sapiens
aggcccgtctacctt

SEQ ID NO: 483046 - DNA, 15 bp, Homo sapiens
caggcccgtctacct

SEQ ID NO: 483047 - DNA, 15 bp, Homo sapiens
tcaggcccgtctacc

SEQ ID NO: 483048 - DNA, 15 bp, Homo sapiens
ctcaggcccgtctac

SEQ ID NO: 483049 - DNA, 15 bp, Homo sapiens
cctcaggcccgtcta

SEQ ID NO: 483050 - DNA, 15 bp, Homo sapiens
tcctcaggcccgtct

SEQ ID NO: 483051 - DNA, 15 bp, Homo sapiens
atcctcaggcccgtc

SEQ ID NO: 483052 - DNA, 15 bp, Homo sapiens
aatcctcaggcccgt

SEQ ID NO: 483053 - DNA, 15 bp, Homo sapiens
aaatcctcaggcccg

SEQ ID NO: 483054 - DNA, 15 bp, Homo sapiens
caaatcctcaggccc

SEQ ID NO: 483055 - DNA, 15 bp, Homo sapiens
ccaaatcctcaggcc

SEQ ID NO: 483056 - DNA, 15 bp, Homo sapiens
cccaaatcctcaggc

SEQ ID NO: 483057 - DNA, 15 bp, Homo sapiens
acccaaatcctcagg

SEQ ID NO: 483058 - DNA, 15 bp, Homo sapiens
cacccaaatcctcag

SEQ ID NO: 483059 - DNA, 15 bp, Homo sapiens
tcacccaaatcctca

SEQ ID NO: 483060 - DNA, 15 bp, Homo sapiens
atcacccaaatcctc

SEQ ID NO: 483061 - DNA, 15 bp, Homo sapiens
catcacccaaatcct

SEQ ID NO: 483062 - DNA, 15 bp, Homo sapiens
gcatcacccaaatcc

SEQ ID NO: 483063 - DNA, 15 bp, Homo sapiens
tgcatcacccaaatc

SEQ ID NO: 483064 - DNA, 15 bp, Homo sapiens
gtgcatcacccaaat

SEQ ID NO: 483065 - DNA, 15 bp, Homo sapiens
agtgcatcacccaaa

SEQ ID NO: 483066 - DNA, 15 bp, Homo sapiens
cagtgcatcacccaa

SEQ ID NO: 483067 - DNA, 15 bp, Homo sapiens
gcagtgcatcaccca

SEQ ID NO: 483068 - DNA, 15 bp, Homo sapiens
tgcagtgcatcaccc

SEQ ID NO: 483069 - DNA, 15 bp, Homo sapiens
gtgcagtgcatcacc

SEQ ID NO: 483070 - DNA, 15 bp, Homo sapiens
ggtgcagtgcatcac

SEQ ID NO: 483071 - DNA, 15 bp, Homo sapiens
gggtgcagtgcatca

SEQ ID NO: 483072 - DNA, 15 bp, Homo sapiens
ggggtgcagtgcatc

SEQ ID NO: 483073 - DNA, 15 bp, Homo sapiens
aggggtgcagtgcat

SEQ ID NO: 483074 - DNA, 15 bp, Homo sapiens
taggggtgcagtgca

SEQ ID NO: 483075 - DNA, 15 bp, Homo sapiens
ctaggggtgcagtgc

SEQ ID NO: 483076 - DNA, 15 bp, Homo sapiens
cctaggggtgcagtg

SEQ ID NO: 483077 - DNA, 15 bp, Homo sapiens
tcctaggggtgcagt

SEQ ID NO: 483078 - DNA, 15 bp, Homo sapiens
ttcctaggggtgcag

SEQ ID NO: 483079 - DNA, 15 bp, Homo sapiens
cttcctaggggtgca

SEQ ID NO: 483080 - DNA, 15 bp, Homo sapiens
ccttcctaggggtgc

SEQ ID NO: 483081 - DNA, 15 bp, Homo sapiens
cccttcctaggggtg

SEQ ID NO: 483082 - DNA, 15 bp, Homo sapiens
tcccttcctaggggt

SEQ ID NO: 483083 - DNA, 15 bp, Homo sapiens
ttcccttcctagggg

SEQ ID NO: 483084 - DNA, 15 bp, Homo sapiens
cttcccttcctaggg

SEQ ID NO: 483085 - DNA, 15 bp, Homo sapiens
ccttcccttcctagg

SEQ ID NO: 483086 - DNA, 15 bp, Homo sapiens
cccttcccttcctag

SEQ ID NO: 483087 - DNA, 15 bp, Homo sapiens
gcccttcccttccta

SEQ ID NO: 483088 - DNA, 15 bp, Homo sapiens
agcccttcccttcct

SEQ ID NO: 483089 - DNA, 15 bp, Homo sapiens
cagcccttcccttcc

SEQ ID NO: 483090 - DNA, 15 bp, Homo sapiens
ccagcccttcccttc

SEQ ID NO: 483091 - DNA, 15 bp, Homo sapiens
cccagcccttccctt

SEQ ID NO: 483092 - DNA, 15 bp, Homo sapiens
tcccagcccttccct

SEQ ID NO: 483093 - DNA, 15 bp, Homo sapiens
atcccagcccttccc

SEQ ID NO: 483094 - DNA, 15 bp, Homo sapiens
catcccagcccttcc

SEQ ID NO: 483095 - DNA, 15 bp, Homo sapiens
ccatcccagcccttc

SEQ ID NO: 483096 - DNA, 15 bp, Homo sapiens
gccatcccagccctt

SEQ ID NO: 483097 - DNA, 15 bp, Homo sapiens
tgccatcccagccct

SEQ ID NO: 483098 - DNA, 15 bp, Homo sapiens
ctgccatcccagccc

SEQ ID NO: 483099 - DNA, 15 bp, Homo sapiens
actgccatcccagcc

SEQ ID NO: 483100 - DNA, 15 bp, Homo sapiens
tactgccatcccagc

SEQ ID NO: 483101 - DNA, 15 bp, Homo sapiens
ctactgccatcccag

SEQ ID NO: 483102 - DNA, 15 bp, Homo sapiens
tctactgccatccca

SEQ ID NO: 483103 - DNA, 15 bp, Homo sapiens
gtctactgccatccc

SEQ ID NO: 483104 - DNA, 15 bp, Homo sapiens
agtctactgccatcc

SEQ ID NO: 483105 - DNA, 15 bp, Homo sapiens
aagtctactgccatc

SEQ ID NO: 483106 - DNA, 15 bp, Homo sapiens
caagtctactgccat

SEQ ID NO: 483107 - DNA, 15 bp, Homo sapiens
ccaagtctactgcca

SEQ ID NO: 483108 - DNA, 15 bp, Homo sapiens
gccaagtctactgcc

SEQ ID NO: 483109 - DNA, 15 bp, Homo sapiens
agccaagtctactgc

SEQ ID NO: 483110 - DNA, 15 bp, Homo sapiens
aagccaagtctactg

SEQ ID NO: 483111 - DNA, 15 bp, Homo sapiens
aaagccaagtctact

SEQ ID NO: 483112 - DNA, 15 bp, Homo sapiens
gaaagccaagtctac

SEQ ID NO: 483113 - DNA, 15 bp, Homo sapiens
ggaaagccaagtcta

SEQ ID NO: 483114 - DNA, 15 bp, Homo sapiens
gggaaagccaagtct

SEQ ID NO: 483115 - DNA, 15 bp, Homo sapiens
tgggaaagccaagtc

SEQ ID NO: 483116 - DNA, 15 bp, Homo sapiens
atgggaaagccaagt

SEQ ID NO: 483117 - DNA, 15 bp, Homo sapiens
aatgggaaagccaag

SEQ ID NO: 483118 - DNA, 15 bp, Homo sapiens
taatgggaaagccaa

SEQ ID NO: 483119 - DNA, 15 bp, Homo sapiens
gtaatgggaaagcca

SEQ ID NO: 483120 - DNA, 15 bp, Homo sapiens
agtaatgggaaagcc

SEQ ID NO: 483121 - DNA, 15 bp, Homo sapiens
gagtaatgggaaagc

SEQ ID NO: 483122 - DNA, 15 bp, Homo sapiens
agagtaatgggaaag

SEQ ID NO: 483123 - DNA, 15 bp, Homo sapiens
aagagtaatgggaaa

SEQ ID NO: 483124 - DNA, 15 bp, Homo sapiens
aaagagtaatgggaa

SEQ ID NO: 483125 - DNA, 15 bp, Homo sapiens
aaaagagtaatggga

SEQ ID NO: 483126 - DNA, 15 bp, Homo sapiens
gaaaagagtaatggg

SEQ ID NO: 483127 - DNA, 15 bp, Homo sapiens
agaaaagagtaatgg

SEQ ID NO: 483128 - DNA, 15 bp, Homo sapiens
gagaaaagagtaatg

SEQ ID NO: 483129 - DNA, 15 bp, Homo sapiens
ggagaaaagagtaat

SEQ ID NO: 483130 - DNA, 15 bp, Homo sapiens
tggagaaaagagtaa

SEQ ID NO: 483131 - DNA, 15 bp, Homo sapiens
ctggagaaaagagta

SEQ ID NO: 483132 - DNA, 15 bp, Homo sapiens
cctggagaaaagagt

SEQ ID NO: 483133 - DNA, 15 bp, Homo sapiens
tcctggagaaaagag

SEQ ID NO: 483134 - DNA, 15 bp, Homo sapiens
ttcctggagaaaaga

SEQ ID NO: 483135 - DNA, 15 bp, Homo sapiens
tttcctggagaaaag

SEQ ID NO: 483136 - DNA, 15 bp, Homo sapiens
ttttcctggagaaaa

SEQ ID NO: 483137 - DNA, 15 bp, Homo sapiens
gttttcctggagaaa

SEQ ID NO: 483138 - DNA, 15 bp, Homo sapiens
tgttttcctggagaa

SEQ ID NO: 483139 - DNA, 15 bp, Homo sapiens
atgttttcctggaga

SEQ ID NO: 483140 - DNA, 15 bp, Homo sapiens
catgttttcctggag

SEQ ID NO: 483141 - DNA, 15 bp, Homo sapiens
ccatgttttcctgga

SEQ ID NO: 483142 - DNA, 15 bp, Homo sapiens
gccatgttttcctgg

SEQ ID NO: 483143 - DNA, 15 bp, Homo sapiens
agccatgttttcctg

SEQ ID NO: 483144 - DNA, 15 bp, Homo sapiens
cagccatgttttcct

SEQ ID NO: 483145 - DNA, 15 bp, Homo sapiens
ccagccatgttttcc

SEQ ID NO: 483146 - DNA, 15 bp, Homo sapiens
gccagccatgttttc

SEQ ID NO: 483147 - DNA, 15 bp, Homo sapiens
tgccagccatgtttt

SEQ ID NO: 483148 - DNA, 15 bp, Homo sapiens
ttgccagccatgttt

SEQ ID NO: 483149 - DNA, 15 bp, Homo sapiens
cttgccagccatgtt

SEQ ID NO: 483150 - DNA, 15 bp, Homo sapiens
ccttgccagccatgt

SEQ ID NO: 483151 - DNA, 15 bp, Homo sapiens
cccttgccagccatg

SEQ ID NO: 483152 - DNA, 15 bp, Homo sapiens
gcccttgccagccat

SEQ ID NO: 483153 - DNA, 15 bp, Homo sapiens
agcccttgccagcca

SEQ ID NO: 483154 - DNA, 15 bp, Homo sapiens
aagcccttgccagcc

SEQ ID NO: 483155 - DNA, 15 bp, Homo sapiens
gaagcccttgccagc

SEQ ID NO: 483156 - DNA, 15 bp, Homo sapiens
agaagcccttgccag

SEQ ID NO: 483157 - DNA, 15 bp, Homo sapiens
gagaagcccttgcca

SEQ ID NO: 483158 - DNA, 15 bp, Homo sapiens
ggagaagcccttgcc

SEQ ID NO: 483159 - DNA, 15 bp, Homo sapiens
aggagaagcccttgc

SEQ ID NO: 483160 - DNA, 15 bp, Homo sapiens
aaggagaagcccttg

SEQ ID NO: 483161 - DNA, 15 bp, Homo sapiens
gaaggagaagccctt

SEQ ID NO: 483162 - DNA, 15 bp, Homo sapiens
agaaggagaagccct

SEQ ID NO: 483163 - DNA, 15 bp, Homo sapiens
cagaaggagaagccc

SEQ ID NO: 483164 - DNA, 15 bp, Homo sapiens
ccagaaggagaagcc

SEQ ID NO: 483165 - DNA, 15 bp, Homo sapiens
cccagaaggagaagc

SEQ ID NO: 483166 - DNA, 15 bp, Homo sapiens
acccagaaggagaag

SEQ ID NO: 483167 - DNA, 15 bp, Homo sapiens
gacccagaaggagaa

SEQ ID NO: 483168 - DNA, 15 bp, Homo sapiens
agacccagaaggaga

SEQ ID NO: 483169 - DNA, 15 bp, Homo sapiens
cagacccagaaggag

SEQ ID NO: 483170 - DNA, 15 bp, Homo sapiens
ccagacccagaagga

SEQ ID NO: 483171 - DNA, 15 bp, Homo sapiens
gccagacccagaagg

SEQ ID NO: 483172 - DNA, 15 bp, Homo sapiens
agccagacccagaag

SEQ ID NO: 483173 - DNA, 15 bp, Homo sapiens
cagccagacccagaa

SEQ ID NO: 483174 - DNA, 15 bp, Homo sapiens
ccagccagacccaga

SEQ ID NO: 483175 - DNA, 15 bp, Homo sapiens
tccagccagacccag

SEQ ID NO: 483176 - DNA, 15 bp, Homo sapiens
gtccagccagaccca

SEQ ID NO: 483177 - DNA, 15 bp, Homo sapiens
tgtccagccagaccc

SEQ ID NO: 483178 - DNA, 15 bp, Homo sapiens
ttgtccagccagacc

SEQ ID NO: 483179 - DNA, 15 bp, Homo sapiens
attgtccagccagac

SEQ ID NO: 483180 - DNA, 15 bp, Homo sapiens
tattgtccagccaga

SEQ ID NO: 483181 - DNA, 15 bp, Homo sapiens
atattgtccagccag

SEQ ID NO: 483182 - DNA, 15 bp, Homo sapiens
gatattgtccagcca

SEQ ID NO: 483183 - DNA, 15 bp, Homo sapiens
tgatattgtccagcc

SEQ ID NO: 483184 - DNA, 15 bp, Homo sapiens
atgatattgtccagc

SEQ ID NO: 483185 - DNA, 15 bp, Homo sapiens
aatgatattgtccag

SEQ ID NO: 483186 - DNA, 15 bp, Homo sapiens
caatgatattgtcca

SEQ ID NO: 483187 - DNA, 15 bp, Homo sapiens
tcaatgatattgtcc

SEQ ID NO: 483188 - DNA, 15 bp, Homo sapiens
gtcaatgatattgtc

SEQ ID NO: 483189 - DNA, 15 bp, Homo sapiens
ggtcaatgatattgt

SEQ ID NO: 483190 - DNA, 15 bp, Homo sapiens
aggtcaatgatattg

SEQ ID NO: 483191 - DNA, 15 bp, Homo sapiens
aaggtcaatgatatt

SEQ ID NO: 483192 - DNA, 15 bp, Homo sapiens
caaggtcaatgatat

SEQ ID NO: 483193 - DNA, 15 bp, Homo sapiens
acaaggtcaatgata

SEQ ID NO: 483194 - DNA, 15 bp, Homo sapiens
cacaaggtcaatgat

SEQ ID NO: 483195 - DNA, 15 bp, Homo sapiens
tcacaaggtcaatga

SEQ ID NO: 483196 - DNA, 15 bp, Homo sapiens
ttcacaaggtcaatg

SEQ ID NO: 483197 - DNA, 15 bp, Homo sapiens
tttcacaaggtcaat

SEQ ID NO: 483198 - DNA, 15 bp, Homo sapiens
ttttcacaaggtcaa

SEQ ID NO: 483199 - DNA, 15 bp, Homo sapiens
tttttcacaaggtca

SEQ ID NO: 483200 - DNA, 15 bp, Homo sapiens
ctttttcacaaggtc

SEQ ID NO: 483201 - DNA, 15 bp, Homo sapiens
actttttcacaaggt

SEQ ID NO: 483202 - DNA, 15 bp, Homo sapiens
tactttttcacaagg

SEQ ID NO: 483203 - DNA, 15 bp, Homo sapiens
gtactttttcacaag

SEQ ID NO: 483204 - DNA, 15 bp, Homo sapiens
tgtactttttcacaa

SEQ ID NO: 483205 - DNA, 15 bp, Homo sapiens
atgtactttttcaca

SEQ ID NO: 483206 - DNA, 15 bp, Homo sapiens
gatgtactttttcac

SEQ ID NO: 483207 - DNA, 15 bp, Homo sapiens
ggatgtactttttca

SEQ ID NO: 483208 - DNA, 15 bp, Homo sapiens
aggatgtactttttc

SEQ ID NO: 483209 - DNA, 15 bp, Homo sapiens
caggatgtacttttt

SEQ ID NO: 483210 - DNA, 15 bp, Homo sapiens
ccaggatgtactttt

SEQ ID NO: 483211 - DNA, 15 bp, Homo sapiens
gccaggatgtacttt

SEQ ID NO: 483212 - DNA, 15 bp, Homo sapiens
ggccaggatgtactt

SEQ ID NO: 483213 - DNA, 15 bp, Homo sapiens
gggccaggatgtact

SEQ ID NO: 483214 - DNA, 15 bp, Homo sapiens
agggccaggatgtac

SEQ ID NO: 483215 - DNA, 15 bp, Homo sapiens
aagggccaggatgta

SEQ ID NO: 483216 - DNA, 15 bp, Homo sapiens
aaagggccaggatgt

SEQ ID NO: 483217 - DNA, 15 bp, Homo sapiens
caaagggccaggatg

SEQ ID NO: 483218 - DNA, 15 bp, Homo sapiens
ccaaagggccaggat

SEQ ID NO: 483219 - DNA, 15 bp, Homo sapiens
tccaaagggccagga

SEQ ID NO: 483220 - DNA, 15 bp, Homo sapiens
ttccaaagggccagg

SEQ ID NO: 483221 - DNA, 15 bp, Homo sapiens
gttccaaagggccag

SEQ ID NO: 483222 - DNA, 15 bp, Homo sapiens
cgttccaaagggcca

SEQ ID NO: 483223 - DNA, 15 bp, Homo sapiens
tcgttccaaagggcc

SEQ ID NO: 483224 - DNA, 15 bp, Homo sapiens
ttcgttccaaagggc

SEQ ID NO: 483225 - DNA, 15 bp, Homo sapiens
cttcgttccaaaggg

SEQ ID NO: 483226 - DNA, 15 bp, Homo sapiens
ccttcgttccaaagg

SEQ ID NO: 483227 - DNA, 15 bp, Homo sapiens
cccttcgttccaaag

SEQ ID NO: 483228 - DNA, 15 bp, Homo sapiens
acccttcgttccaaa

SEQ ID NO: 483229 - DNA, 15 bp, Homo sapiens
tacccttcgttccaa

SEQ ID NO: 483230 - DNA, 15 bp, Homo sapiens
ctacccttcgttcca

SEQ ID NO: 483231 - DNA, 15 bp, Homo sapiens
cctacccttcgttcc

SEQ ID NO: 483232 - DNA, 15 bp, Homo sapiens
acctacccttcgttc

SEQ ID NO: 483233 - DNA, 15 bp, Homo sapiens
aacctacccttcgtt

SEQ ID NO: 483234 - DNA, 15 bp, Homo sapiens
caacctacccttcgt

SEQ ID NO: 483235 - DNA, 15 bp, Homo sapiens
ccaacctacccttcg

SEQ ID NO: 483236 - DNA, 15 bp, Homo sapiens
tccaacctacccttc

SEQ ID NO: 483237 - DNA, 15 bp, Homo sapiens
gtccaacctaccctt

SEQ ID NO: 483238 - DNA, 15 bp, Homo sapiens
tgtccaacctaccct

SEQ ID NO: 483239 - DNA, 15 bp, Homo sapiens
ctgtccaacctaccc

SEQ ID NO: 483240 - DNA, 15 bp, Homo sapiens
tctgtccaacctacc

SEQ ID NO: 483241 - DNA, 15 bp, Homo sapiens
ctctgtccaacctac

SEQ ID NO: 483242 - DNA, 15 bp, Homo sapiens
actctgtccaaccta

SEQ ID NO: 483243 - DNA, 15 bp, Homo sapiens
cactctgtccaacct

SEQ ID NO: 483244 - DNA, 15 bp, Homo sapiens
acactctgtccaacc

SEQ ID NO: 483245 - DNA, 15 bp, Homo sapiens
cacactctgtccaac

SEQ ID NO: 483246 - DNA, 15 bp, Homo sapiens
gcacactctgtccaa

SEQ ID NO: 483247 - DNA, 15 bp, Homo sapiens
tgcacactctgtcca

SEQ ID NO: 483248 - DNA, 15 bp, Homo sapiens
gtgcacactctgtcc

SEQ ID NO: 483249 - DNA, 15 bp, Homo sapiens
tgtgcacactctgtc

SEQ ID NO: 483250 - DNA, 15 bp, Homo sapiens
ctgtgcacactctgt

SEQ ID NO: 483251 - DNA, 15 bp, Homo sapiens
tctgtgcacactctg

SEQ ID NO: 483252 - DNA, 15 bp, Homo sapiens
atctgtgcacactct

SEQ ID NO: 483253 - DNA, 15 bp, Homo sapiens
catctgtgcacactc

SEQ ID NO: 483254 - DNA, 15 bp, Homo sapiens
acatctgtgcacact

SEQ ID NO: 483255 - DNA, 15 bp, Homo sapiens
tacatctgtgcacac

SEQ ID NO: 483256 - DNA, 15 bp, Homo sapiens
ttacatctgtgcaca

SEQ ID NO: 483257 - DNA, 15 bp, Homo sapiens
gttacatctgtgcac

SEQ ID NO: 483258 - DNA, 15 bp, Homo sapiens
ggttacatctgtgca

SEQ ID NO: 483259 - DNA, 15 bp, Homo sapiens
tggttacatctgtgc

SEQ ID NO: 483260 - DNA, 15 bp, Homo sapiens
ttggttacatctgtg

SEQ ID NO: 483261 - DNA, 15 bp, Homo sapiens
cttggttacatctgt

SEQ ID NO: 483262 - DNA, 15 bp, Homo sapiens
acttggttacatctg

SEQ ID NO: 483263 - DNA, 15 bp, Homo sapiens
gacttggttacatct

SEQ ID NO: 483264 - DNA, 15 bp, Homo sapiens
ggacttggttacatc

SEQ ID NO: 483265 - DNA, 15 bp, Homo sapiens
gggacttggttacat

SEQ ID NO: 483266 - DNA, 15 bp, Homo sapiens
ggggacttggttaca

SEQ ID NO: 483267 - DNA, 15 bp, Homo sapiens
aggggacttggttac

SEQ ID NO: 483268 - DNA, 15 bp, Homo sapiens
caggggacttggtta

SEQ ID NO: 483269 - DNA, 15 bp, Homo sapiens
gcaggggacttggtt

SEQ ID NO: 483270 - DNA, 15 bp, Homo sapiens
agcaggggacttggt

SEQ ID NO: 483271 - DNA, 15 bp, Homo sapiens
gagcaggggacttgg

SEQ ID NO: 483272 - DNA, 15 bp, Homo sapiens
agagcaggggacttg

SEQ ID NO: 483273 - DNA, 15 bp, Homo sapiens
gagagcaggggactt

SEQ ID NO: 483274 - DNA, 15 bp, Homo sapiens
tgagagcaggggact

SEQ ID NO: 483275 - DNA, 15 bp, Homo sapiens
ctgagagcaggggac

SEQ ID NO: 483276 - DNA, 15 bp, Homo sapiens
gctgagagcagggga

SEQ ID NO: 483277 - DNA, 15 bp, Homo sapiens
tgctgagagcagggg

SEQ ID NO: 483278 - DNA, 15 bp, Homo sapiens
ttgctgagagcaggg

SEQ ID NO: 483279 - DNA, 15 bp, Homo sapiens
cttgctgagagcagg

SEQ ID NO: 483280 - DNA, 15 bp, Homo sapiens
gcttgctgagagcag

SEQ ID NO: 483281 - DNA, 15 bp, Homo sapiens
ggcttgctgagagca

SEQ ID NO: 483282 - DNA, 15 bp, Homo sapiens
tggcttgctgagagc

SEQ ID NO: 483283 - DNA, 15 bp, Homo sapiens
ctggcttgctgagag

SEQ ID NO: 483284 - DNA, 15 bp, Homo sapiens
actggcttgctgaga

SEQ ID NO: 483285 - DNA, 15 bp, Homo sapiens
cactggcttgctgag

SEQ ID NO: 483286 - DNA, 15 bp, Homo sapiens
ccactggcttgctga

SEQ ID NO: 483287 - DNA, 15 bp, Homo sapiens
gccactggcttgctg

SEQ ID NO: 483288 - DNA, 15 bp, Homo sapiens
tgccactggcttgct

SEQ ID NO: 483289 - DNA, 15 bp, Homo sapiens
ctgccactggcttgc

SEQ ID NO: 483290 - DNA, 15 bp, Homo sapiens
cctgccactggcttg

SEQ ID NO: 483291 - DNA, 15 bp, Homo sapiens
ccctgccactggctt

SEQ ID NO: 483292 - DNA, 15 bp, Homo sapiens
cccctgccactggct

SEQ ID NO: 483293 - DNA, 15 bp, Homo sapiens
tcccctgccactggc

SEQ ID NO: 483294 - DNA, 15 bp, Homo sapiens
atcccctgccactgg

SEQ ID NO: 483295 - DNA, 15 bp, Homo sapiens
catcccctgccactg

SEQ ID NO: 483296 - DNA, 15 bp, Homo sapiens
ccatcccctgccact

SEQ ID NO: 483297 - DNA, 15 bp, Homo sapiens
tccatcccctgccac

SEQ ID NO: 483298 - DNA, 15 bp, Homo sapiens
atccatcccctgcca

SEQ ID NO: 483299 - DNA, 15 bp, Homo sapiens
catccatcccctgcc

SEQ ID NO: 483300 - DNA, 15 bp, Homo sapiens
gcatccatcccctgc

SEQ ID NO: 483301 - DNA, 15 bp, Homo sapiens
ggcatccatcccctg

SEQ ID NO: 483302 - DNA, 15 bp, Homo sapiens
gggcatccatcccct

SEQ ID NO: 483303 - DNA, 15 bp, Homo sapiens
agggcatccatcccc

SEQ ID NO: 483304 - DNA, 15 bp, Homo sapiens
cagggcatccatccc

SEQ ID NO: 483305 - DNA, 15 bp, Homo sapiens
acagggcatccatcc

SEQ ID NO: 483306 - DNA, 15 bp, Homo sapiens
aacagggcatccatc

SEQ ID NO: 483307 - DNA, 15 bp, Homo sapiens
taacagggcatccat

SEQ ID NO: 483308 - DNA, 15 bp, Homo sapiens
ctaacagggcatcca

SEQ ID NO: 483309 - DNA, 15 bp, Homo sapiens
gctaacagggcatcc

SEQ ID NO: 483310 - DNA, 15 bp, Homo sapiens
tgctaacagggcatc

SEQ ID NO: 483311 - DNA, 15 bp, Homo sapiens
ttgctaacagggcat

SEQ ID NO: 483312 - DNA, 15 bp, Homo sapiens
attgctaacagggca

SEQ ID NO: 483313 - DNA, 15 bp, Homo sapiens
tattgctaacagggc

SEQ ID NO: 483314 - DNA, 15 bp, Homo sapiens
ttattgctaacaggg

SEQ ID NO: 483315 - DNA, 15 bp, Homo sapiens
gttattgctaacagg

SEQ ID NO: 483316 - DNA, 15 bp, Homo sapiens
tgttattgctaacag

SEQ ID NO: 483317 - DNA, 15 bp, Homo sapiens
ttgttattgctaaca

SEQ ID NO: 483318 - DNA, 15 bp, Homo sapiens
gttgttattgctaac

SEQ ID NO: 483319 - DNA, 15 bp, Homo sapiens
tgttgttattgctaa

SEQ ID NO: 483320 - DNA, 15 bp, Homo sapiens
atgttgttattgcta

SEQ ID NO: 483321 - DNA, 15 bp, Homo sapiens
aatgttgttattgct

SEQ ID NO: 483322 - DNA, 15 bp, Homo sapiens
caatgttgttattgc

SEQ ID NO: 483323 - DNA, 15 bp, Homo sapiens
acaatgttgttattg

SEQ ID NO: 483324 - DNA, 15 bp, Homo sapiens
aacaatgttgttatt

SEQ ID NO: 483325 - DNA, 15 bp, Homo sapiens
gaacaatgttgttat

SEQ ID NO: 483326 - DNA, 15 bp, Homo sapiens
ggaacaatgttgtta

SEQ ID NO: 483327 - DNA, 15 bp, Homo sapiens
aggaacaatgttgtt

SEQ ID NO: 483328 - DNA, 15 bp, Homo sapiens
gaggaacaatgttgt

SEQ ID NO: 483329 - DNA, 15 bp, Homo sapiens
ggaggaacaatgttg

SEQ ID NO: 483330 - DNA, 15 bp, Homo sapiens
aggaggaacaatgtt

SEQ ID NO: 483331 - DNA, 15 bp, Homo sapiens
gaggaggaacaatgt

SEQ ID NO: 483332 - DNA, 15 bp, Homo sapiens
ggaggaggaacaatg

SEQ ID NO: 483333 - DNA, 15 bp, Homo sapiens
aggaggaggaacaat

SEQ ID NO: 483334 - DNA, 15 bp, Homo sapiens
aaggaggaggaacaa

SEQ ID NO: 483335 - DNA, 15 bp, Homo sapiens
caaggaggaggaaca

SEQ ID NO: 483336 - DNA, 15 bp, Homo sapiens
ccaaggaggaggaac

SEQ ID NO: 483337 - DNA, 15 bp, Homo sapiens
gccaaggaggaggaa

SEQ ID NO: 483338 - DNA, 15 bp, Homo sapiens
agccaaggaggagga

SEQ ID NO: 483339 - DNA, 15 bp, Homo sapiens
gagccaaggaggagg

SEQ ID NO: 483340 - DNA, 15 bp, Homo sapiens
ggagccaaggaggag

SEQ ID NO: 483341 - DNA, 15 bp, Homo sapiens
tggagccaaggagga

SEQ ID NO: 483342 - DNA, 15 bp, Homo sapiens
ctggagccaaggagg

SEQ ID NO: 483343 - DNA, 15 bp, Homo sapiens
cctggagccaaggag

SEQ ID NO: 483344 - DNA, 15 bp, Homo sapiens
acctggagccaagga

SEQ ID NO: 483345 - DNA, 15 bp, Homo sapiens
tacctggagccaagg

SEQ ID NO: 483346 - DNA, 15 bp, Homo sapiens
gtacctggagccaag

SEQ ID NO: 483347 - DNA, 15 bp, Homo sapiens
tgtacctggagccaa

SEQ ID NO: 483348 - DNA, 15 bp, Homo sapiens
atgtacctggagcca

SEQ ID NO: 483349 - DNA, 15 bp, Homo sapiens
gatgtacctggagcc

SEQ ID NO: 483350 - DNA, 15 bp, Homo sapiens
tgatgtacctggagc

SEQ ID NO: 483351 - DNA, 15 bp, Homo sapiens
atgatgtacctggag

SEQ ID NO: 483352 - DNA, 15 bp, Homo sapiens
catgatgtacctgga

SEQ ID NO: 483353 - DNA, 15 bp, Homo sapiens
ccatgatgtacctgg

SEQ ID NO: 483354 - DNA, 15 bp, Homo sapiens
cccatgatgtacctg

SEQ ID NO: 483355 - DNA, 15 bp, Homo sapiens
gcccatgatgtacct

SEQ ID NO: 483356 - DNA, 15 bp, Homo sapiens
agcccatgatgtacc

SEQ ID NO: 483357 - DNA, 15 bp, Homo sapiens
aagcccatgatgtac

SEQ ID NO: 483358 - DNA, 15 bp, Homo sapiens
aaagcccatgatgta

SEQ ID NO: 483359 - DNA, 15 bp, Homo sapiens
taaagcccatgatgt

SEQ ID NO: 483360 - DNA, 15 bp, Homo sapiens
ataaagcccatgatg

SEQ ID NO: 483361 - DNA, 15 bp, Homo sapiens
gataaagcccatgat

SEQ ID NO: 483362 - DNA, 15 bp, Homo sapiens
tgataaagcccatga

SEQ ID NO: 483363 - DNA, 15 bp, Homo sapiens
ctgataaagcccatg

SEQ ID NO: 483364 - DNA, 15 bp, Homo sapiens
actgataaagcccat

SEQ ID NO: 483365 - DNA, 15 bp, Homo sapiens
tactgataaagccca

SEQ ID NO: 483366 - DNA, 15 bp, Homo sapiens
ttactgataaagccc

SEQ ID NO: 483367 - DNA, 15 bp, Homo sapiens
cttactgataaagcc

SEQ ID NO: 483368 - DNA, 15 bp, Homo sapiens
ccttactgataaagc

SEQ ID NO: 483369 - DNA, 15 bp, Homo sapiens
tccttactgataaag

SEQ ID NO: 483370 - DNA, 15 bp, Homo sapiens
ctccttactgataaa

SEQ ID NO: 483371 - DNA, 15 bp, Homo sapiens
gctccttactgataa

SEQ ID NO: 483372 - DNA, 15 bp, Homo sapiens
cgctccttactgata

SEQ ID NO: 483373 - DNA, 15 bp, Homo sapiens
ccgctccttactgat

SEQ ID NO: 483374 - DNA, 15 bp, Homo sapiens
cccgctccttactga

SEQ ID NO: 483375 - DNA, 15 bp, Homo sapiens
tcccgctccttactg

SEQ ID NO: 483376 - DNA, 15 bp, Homo sapiens
ctcccgctccttact

SEQ ID NO: 483377 - DNA, 15 bp, Homo sapiens
gctcccgctccttac

SEQ ID NO: 483378 - DNA, 15 bp, Homo sapiens
cgctcccgctcctta

SEQ ID NO: 483379 - DNA, 15 bp, Homo sapiens
ccgctcccgctcctt

SEQ ID NO: 483380 - DNA, 15 bp, Homo sapiens
cccgctcccgctcct

SEQ ID NO: 483381 - DNA, 15 bp, Homo sapiens
gcccgctcccgctcc

SEQ ID NO: 483382 - DNA, 15 bp, Homo sapiens
ggcccgctcccgctc

SEQ ID NO: 483383 - DNA, 15 bp, Homo sapiens
tggcccgctcccgct

SEQ ID NO: 483384 - DNA, 15 bp, Homo sapiens
atggcccgctcccgc

SEQ ID NO: 483385 - DNA, 15 bp, Homo sapiens
gatggcccgctcccg

SEQ ID NO: 483386 - DNA, 15 bp, Homo sapiens
agatggcccgctccc

SEQ ID NO: 483387 - DNA, 15 bp, Homo sapiens
aagatggcccgctcc

SEQ ID NO: 483388 - DNA, 15 bp, Homo sapiens
caagatggcccgctc

SEQ ID NO: 483389 - DNA, 15 bp, Homo sapiens
tcaagatggcccgct

SEQ ID NO: 483390 - DNA, 15 bp, Homo sapiens
ctcaagatggcccgc

SEQ ID NO: 483391 - DNA, 15 bp, Homo sapiens
gctcaagatggcccg

SEQ ID NO: 483392 - DNA, 15 bp, Homo sapiens
tgctcaagatggccc

SEQ ID NO: 483393 - DNA, 15 bp, Homo sapiens
gtgctcaagatggcc

SEQ ID NO: 483394 - DNA, 15 bp, Homo sapiens
agtgctcaagatggc

SEQ ID NO: 483395 - DNA, 15 bp, Homo sapiens
tagtgctcaagatgg

SEQ ID NO: 483396 - DNA, 15 bp, Homo sapiens
ttagtgctcaagatg

SEQ ID NO: 483397 - DNA, 15 bp, Homo sapiens
cttagtgctcaagat

SEQ ID NO: 483398 - DNA, 15 bp, Homo sapiens
gcttagtgctcaaga

SEQ ID NO: 483399 - DNA, 15 bp, Homo sapiens
ggcttagtgctcaag

SEQ ID NO: 483400 - DNA, 15 bp, Homo sapiens
aggcttagtgctcaa

SEQ ID NO: 483401 - DNA, 15 bp, Homo sapiens
gaggcttagtgctca

SEQ ID NO: 483402 - DNA, 15 bp, Homo sapiens
ggaggcttagtgctc

SEQ ID NO: 483403 - DNA, 15 bp, Homo sapiens
tggaggcttagtgct

SEQ ID NO: 483404 - DNA, 15 bp, Homo sapiens
ctggaggcttagtgc

SEQ ID NO: 483405 - DNA, 15 bp, Homo sapiens
cctggaggcttagtg

SEQ ID NO: 483406 - DNA, 15 bp, Homo sapiens
gcctggaggcttagt

SEQ ID NO: 483407 - DNA, 15 bp, Homo sapiens
tgcctggaggcttag

SEQ ID NO: 483408 - DNA, 15 bp, Homo sapiens
gtgcctggaggctta

SEQ ID NO: 483409 - DNA, 15 bp, Homo sapiens
ggtgcctggaggctt

SEQ ID NO: 483410 - DNA, 15 bp, Homo sapiens
aggtgcctggaggct

SEQ ID NO: 483411 - DNA, 15 bp, Homo sapiens
aaggtgcctggaggc

SEQ ID NO: 483412 - DNA, 15 bp, Homo sapiens
gaaggtgcctggagg

SEQ ID NO: 483413 - DNA, 15 bp, Homo sapiens
ggaaggtgcctggag

SEQ ID NO: 483414 - DNA, 15 bp, Homo sapiens
aggaaggtgcctgga

SEQ ID NO: 483415 - DNA, 15 bp, Homo sapiens
caggaaggtgcctgg

SEQ ID NO: 483416 - DNA, 15 bp, Homo sapiens
gcaggaaggtgcctg

SEQ ID NO: 483417 - DNA, 15 bp, Homo sapiens
agcaggaaggtgcct

SEQ ID NO: 483418 - DNA, 15 bp, Homo sapiens
tagcaggaaggtgcc

SEQ ID NO: 483419 - DNA, 15 bp, Homo sapiens
ttagcaggaaggtgc

SEQ ID NO: 483420 - DNA, 15 bp, Homo sapiens
cttagcaggaaggtg

SEQ ID NO: 483421 - DNA, 15 bp, Homo sapiens
tcttagcaggaaggt

SEQ ID NO: 483422 - DNA, 15 bp, Homo sapiens
atcttagcaggaagg

SEQ ID NO: 483423 - DNA, 15 bp, Homo sapiens
aatcttagcaggaag

SEQ ID NO: 483424 - DNA, 15 bp, Homo sapiens
gaatcttagcaggaa

SEQ ID NO: 483425 - DNA, 15 bp, Homo sapiens
tgaatcttagcagga

SEQ ID NO: 483426 - DNA, 15 bp, Homo sapiens
ctgaatcttagcagg

SEQ ID NO: 483427 - DNA, 15 bp, Homo sapiens
actgaatcttagcag

SEQ ID NO: 483428 - DNA, 15 bp, Homo sapiens
cactgaatcttagca

SEQ ID NO: 483429 - DNA, 15 bp, Homo sapiens
tcactgaatcttagc

SEQ ID NO: 483430 - DNA, 15 bp, Homo sapiens
ttcactgaatcttag

SEQ ID NO: 483431 - DNA, 15 bp, Homo sapiens
tttcactgaatctta

SEQ ID NO: 483432 - DNA, 15 bp, Homo sapiens
ctttcactgaatctt

SEQ ID NO: 483433 - DNA, 15 bp, Homo sapiens
gctttcactgaatct

SEQ ID NO: 483434 - DNA, 15 bp, Homo sapiens
tgctttcactgaatc

SEQ ID NO: 483435 - DNA, 15 bp, Homo sapiens
ctgctttcactgaat

SEQ ID NO: 483436 - DNA, 15 bp, Homo sapiens
gctgctttcactgaa

SEQ ID NO: 483437 - DNA, 15 bp, Homo sapiens
tgctgctttcactga

SEQ ID NO: 483438 - DNA, 15 bp, Homo sapiens
ttgctgctttcactg

SEQ ID NO: 483439 - DNA, 15 bp, Homo sapiens
tttgctgctttcact

SEQ ID NO: 483440 - DNA, 15 bp, Homo sapiens
ctttgctgctttcac

SEQ ID NO: 483441 - DNA, 15 bp, Homo sapiens
tctttgctgctttca

SEQ ID NO: 483442 - DNA, 15 bp, Homo sapiens
ttctttgctgctttc

SEQ ID NO: 483443 - DNA, 15 bp, Homo sapiens
cttctttgctgcttt

SEQ ID NO: 483444 - DNA, 15 bp, Homo sapiens
ccttctttgctgctt

SEQ ID NO: 483445 - DNA, 15 bp, Homo sapiens
tccttctttgctgct

SEQ ID NO: 483446 - DNA, 15 bp, Homo sapiens
ctccttctttgctgc

SEQ ID NO: 483447 - DNA, 15 bp, Homo sapiens
cctccttctttgctg

SEQ ID NO: 483448 - DNA, 15 bp, Homo sapiens
gcctccttctttgct

SEQ ID NO: 483449 - DNA, 15 bp, Homo sapiens
cgcctccttctttgc

SEQ ID NO: 483450 - DNA, 15 bp, Homo sapiens
acgcctccttctttg

SEQ ID NO: 483451 - DNA, 15 bp, Homo sapiens
gacgcctccttcttt

SEQ ID NO: 483452 - DNA, 15 bp, Homo sapiens
tgacgcctccttctt

SEQ ID NO: 483453 - DNA, 15 bp, Homo sapiens
gtgacgcctccttct

SEQ ID NO: 483454 - DNA, 15 bp, Homo sapiens
agtgacgcctccttc

SEQ ID NO: 483455 - DNA, 15 bp, Homo sapiens
aagtgacgcctcctt

SEQ ID NO: 483456 - DNA, 15 bp, Homo sapiens
aaagtgacgcctcct

SEQ ID NO: 483457 - DNA, 15 bp, Homo sapiens
gaaagtgacgcctcc

SEQ ID NO: 483458 - DNA, 15 bp, Homo sapiens
tgaaagtgacgcctc

SEQ ID NO: 483459 - DNA, 15 bp, Homo sapiens
gtgaaagtgacgcct

SEQ ID NO: 483460 - DNA, 15 bp, Homo sapiens
agtgaaagtgacgcc

SEQ ID NO: 483461 - DNA, 15 bp, Homo sapiens
aagtgaaagtgacgc

SEQ ID NO: 483462 - DNA, 15 bp, Homo sapiens
caagtgaaagtgacg

SEQ ID NO: 483463 - DNA, 15 bp, Homo sapiens
ccaagtgaaagtgac

SEQ ID NO: 483464 - DNA, 15 bp, Homo sapiens
cccaagtgaaagtga

SEQ ID NO: 483465 - DNA, 15 bp, Homo sapiens
acccaagtgaaagtg

SEQ ID NO: 483466 - DNA, 15 bp, Homo sapiens
cacccaagtgaaagt

SEQ ID NO: 483467 - DNA, 15 bp, Homo sapiens
ccacccaagtgaaag

SEQ ID NO: 483468 - DNA, 15 bp, Homo sapiens
tccacccaagtgaaa

SEQ ID NO: 483469 - DNA, 15 bp, Homo sapiens
ctccacccaagtgaa

SEQ ID NO: 483470 - DNA, 15 bp, Homo sapiens
tctccacccaagtga

SEQ ID NO: 483471 - DNA, 15 bp, Homo sapiens
ttctccacccaagtg

SEQ ID NO: 483472 - DNA, 15 bp, Homo sapiens
cttctccacccaagt

SEQ ID NO: 483473 - DNA, 15 bp, Homo sapiens
ccttctccacccaag

SEQ ID NO: 483474 - DNA, 15 bp, Homo sapiens
tccttctccacccaa

SEQ ID NO: 483475 - DNA, 15 bp, Homo sapiens
gtccttctccaccca

SEQ ID NO: 483476 - DNA, 15 bp, Homo sapiens
tgtccttctccaccc

SEQ ID NO: 483477 - DNA, 15 bp, Homo sapiens
atgtccttctccacc

SEQ ID NO: 483478 - DNA, 15 bp, Homo sapiens
gatgtccttctccac

SEQ ID NO: 483479 - DNA, 15 bp, Homo sapiens
tgatgtccttctcca

SEQ ID NO: 483480 - DNA, 15 bp, Homo sapiens
ctgatgtccttctcc

SEQ ID NO: 483481 - DNA, 15 bp, Homo sapiens
gctgatgtccttctc

SEQ ID NO: 483482 - DNA, 15 bp, Homo sapiens
cgctgatgtccttct

SEQ ID NO: 483483 - DNA, 15 bp, Homo sapiens
ccgctgatgtccttc

SEQ ID NO: 483484 - DNA, 15 bp, Homo sapiens
accgctgatgtcctt

SEQ ID NO: 483485 - DNA, 15 bp, Homo sapiens
taccgctgatgtcct

SEQ ID NO: 483486 - DNA, 15 bp, Homo sapiens
ttaccgctgatgtcc

SEQ ID NO: 483487 - DNA, 15 bp, Homo sapiens
cttaccgctgatgtc

SEQ ID NO: 483488 - DNA, 15 bp, Homo sapiens
ccttaccgctgatgt

SEQ ID NO: 483489 - DNA, 15 bp, Homo sapiens
cccttaccgctgatg

SEQ ID NO: 483490 - DNA, 15 bp, Homo sapiens
tcccttaccgctgat

SEQ ID NO: 483491 - DNA, 15 bp, Homo sapiens
ctcccttaccgctga

SEQ ID NO: 483492 - DNA, 15 bp, Homo sapiens
cctcccttaccgctg

SEQ ID NO: 483493 - DNA, 15 bp, Homo sapiens
gcctcccttaccgct

SEQ ID NO: 483494 - DNA, 15 bp, Homo sapiens
agcctcccttaccgc

SEQ ID NO: 483495 - DNA, 15 bp, Homo sapiens
gagcctcccttaccg

SEQ ID NO: 483496 - DNA, 15 bp, Homo sapiens
ggagcctcccttacc

SEQ ID NO: 483497 - DNA, 15 bp, Homo sapiens
gggagcctcccttac

SEQ ID NO: 483498 - DNA, 15 bp, Homo sapiens
tgggagcctccctta

SEQ ID NO: 483499 - DNA, 15 bp, Homo sapiens
gtgggagcctccctt

SEQ ID NO: 483500 - DNA, 15 bp, Homo sapiens
ggtgggagcctccct

SEQ ID NO: 483501 - DNA, 15 bp, Homo sapiens
gggtgggagcctccc

SEQ ID NO: 483502 - DNA, 15 bp, Homo sapiens
tgggtgggagcctcc

SEQ ID NO: 483503 - DNA, 15 bp, Homo sapiens
gtgggtgggagcctc

SEQ ID NO: 483504 - DNA, 15 bp, Homo sapiens
ggtgggtgggagcct

SEQ ID NO: 483505 - DNA, 15 bp, Homo sapiens
gggtgggtgggagcc

SEQ ID NO: 483506 - DNA, 15 bp, Homo sapiens
ggggtgggtgggagc

SEQ ID NO: 483507 - DNA, 15 bp, Homo sapiens
tggggtgggtgggag

SEQ ID NO: 483508 - DNA, 15 bp, Homo sapiens
gtggggtgggtggga

SEQ ID NO: 483509 - DNA, 15 bp, Homo sapiens
ggtggggtgggtggg

SEQ ID NO: 483510 - DNA, 15 bp, Homo sapiens
aggtggggtgggtgg

SEQ ID NO: 483511 - DNA, 15 bp, Homo sapiens
caggtggggtgggtg

SEQ ID NO: 483512 - DNA, 15 bp, Homo sapiens
gcaggtggggtgggt

SEQ ID NO: 483513 - DNA, 15 bp, Homo sapiens
agcaggtggggtggg

SEQ ID NO: 483514 - DNA, 15 bp, Homo sapiens
cagcaggtggggtgg

SEQ ID NO: 483515 - DNA, 15 bp, Homo sapiens
ccagcaggtggggtg

SEQ ID NO: 483516 - DNA, 15 bp, Homo sapiens
accagcaggtggggt

SEQ ID NO: 483517 - DNA, 15 bp, Homo sapiens
caccagcaggtgggg

SEQ ID NO: 483518 - DNA, 15 bp, Homo sapiens
ccaccagcaggtggg

SEQ ID NO: 483519 - DNA, 15 bp, Homo sapiens
gccaccagcaggtgg

SEQ ID NO: 483520 - DNA, 15 bp, Homo sapiens
agccaccagcaggtg

SEQ ID NO: 483521 - DNA, 15 bp, Homo sapiens
cagccaccagcaggt

SEQ ID NO: 483522 - DNA, 15 bp, Homo sapiens
gcagccaccagcagg

SEQ ID NO: 483523 - DNA, 15 bp, Homo sapiens
agcagccaccagcag

SEQ ID NO: 483524 - DNA, 15 bp, Homo sapiens
cagcagccaccagca

SEQ ID NO: 483525 - DNA, 15 bp, Homo sapiens
tcagcagccaccagc

SEQ ID NO: 483526 - DNA, 15 bp, Homo sapiens
ctcagcagccaccag

SEQ ID NO: 483527 - DNA, 15 bp, Homo sapiens
cctcagcagccacca

SEQ ID NO: 483528 - DNA, 15 bp, Homo sapiens
gcctcagcagccacc

SEQ ID NO: 483529 - DNA, 15 bp, Homo sapiens
ggcctcagcagccac

SEQ ID NO: 483530 - DNA, 15 bp, Homo sapiens
aggcctcagcagcca

SEQ ID NO: 483531 - DNA, 15 bp, Homo sapiens
gaggcctcagcagcc

SEQ ID NO: 483532 - DNA, 15 bp, Homo sapiens
tgaggcctcagcagc

SEQ ID NO: 483533 - DNA, 15 bp, Homo sapiens
atgaggcctcagcag

SEQ ID NO: 483534 - DNA, 15 bp, Homo sapiens
gatgaggcctcagca

SEQ ID NO: 483535 - DNA, 15 bp, Homo sapiens
tgatgaggcctcagc

SEQ ID NO: 483536 - DNA, 15 bp, Homo sapiens
gtgatgaggcctcag

SEQ ID NO: 483537 - DNA, 15 bp, Homo sapiens
agtgatgaggcctca

SEQ ID NO: 483538 - DNA, 15 bp, Homo sapiens
cagtgatgaggcctc

SEQ ID NO: 483539 - DNA, 15 bp, Homo sapiens
gcagtgatgaggcct

SEQ ID NO: 483540 - DNA, 15 bp, Homo sapiens
agcagtgatgaggcc

SEQ ID NO: 483541 - DNA, 15 bp, Homo sapiens
aagcagtgatgaggc

SEQ ID NO: 483542 - DNA, 15 bp, Homo sapiens
gaagcagtgatgagg

SEQ ID NO: 483543 - DNA, 15 bp, Homo sapiens
agaagcagtgatgag

SEQ ID NO: 483544 - DNA, 15 bp, Homo sapiens
tagaagcagtgatga

SEQ ID NO: 483545 - DNA, 15 bp, Homo sapiens
ctagaagcagtgatg

SEQ ID NO: 483546 - DNA, 15 bp, Homo sapiens
actagaagcagtgat

SEQ ID NO: 483547 - DNA, 15 bp, Homo sapiens
aactagaagcagtga

SEQ ID NO: 483548 - DNA, 15 bp, Homo sapiens
caactagaagcagtg

SEQ ID NO: 483549 - DNA, 15 bp, Homo sapiens
gcaactagaagcagt

SEQ ID NO: 483550 - DNA, 15 bp, Homo sapiens
tgcaactagaagcag

SEQ ID NO: 483551 - DNA, 15 bp, Homo sapiens
ttgcaactagaagca

SEQ ID NO: 483552 - DNA, 15 bp, Homo sapiens
cttgcaactagaagc

SEQ ID NO: 483553 - DNA, 15 bp, Homo sapiens
gcttgcaactagaag

SEQ ID NO: 483554 - DNA, 15 bp, Homo sapiens
tgcttgcaactagaa

SEQ ID NO: 483555 - DNA, 15 bp, Homo sapiens
gtgcttgcaactaga

SEQ ID NO: 483556 - DNA, 15 bp, Homo sapiens
ggtgcttgcaactag

SEQ ID NO: 483557 - DNA, 15 bp, Homo sapiens
aggtgcttgcaacta

SEQ ID NO: 483558 - DNA, 15 bp, Homo sapiens
taggtgcttgcaact

SEQ ID NO: 483559 - DNA, 15 bp, Homo sapiens
gtaggtgcttgcaac

SEQ ID NO: 483560 - DNA, 15 bp, Homo sapiens
agtaggtgcttgcaa

SEQ ID NO: 483561 - DNA, 15 bp, Homo sapiens
cagtaggtgcttgca

SEQ ID NO: 483562 - DNA, 15 bp, Homo sapiens
gcagtaggtgcttgc

SEQ ID NO: 483563 - DNA, 15 bp, Homo sapiens
ggcagtaggtgcttg

SEQ ID NO: 483564 - DNA, 15 bp, Homo sapiens
gggcagtaggtgctt

SEQ ID NO: 483565 - DNA, 15 bp, Homo sapiens
ggggcagtaggtgct

SEQ ID NO: 483566 - DNA, 15 bp, Homo sapiens
gggggcagtaggtgc

SEQ ID NO: 483567 - DNA, 15 bp, Homo sapiens
agggggcagtaggtg

SEQ ID NO: 483568 - DNA, 15 bp, Homo sapiens
cagggggcagtaggt

SEQ ID NO: 483569 - DNA, 15 bp, Homo sapiens
ccagggggcagtagg

SEQ ID NO: 483570 - DNA, 15 bp, Homo sapiens
accagggggcagtag

SEQ ID NO: 483571 - DNA, 15 bp, Homo sapiens
caccagggggcagta

SEQ ID NO: 483572 - DNA, 15 bp, Homo sapiens
ccaccagggggcagt

SEQ ID NO: 483573 - DNA, 15 bp, Homo sapiens
cccaccagggggcag

SEQ ID NO: 483574 - DNA, 15 bp, Homo sapiens
acccaccagggggca

SEQ ID NO: 483575 - DNA, 15 bp, Homo sapiens
cacccaccagggggc

SEQ ID NO: 483576 - DNA, 15 bp, Homo sapiens
ccacccaccaggggg

SEQ ID NO: 483577 - DNA, 15 bp, Homo sapiens
tccacccaccagggg

SEQ ID NO: 483578 - DNA, 15 bp, Homo sapiens
ctccacccaccaggg

SEQ ID NO: 483579 - DNA, 15 bp, Homo sapiens
tctccacccaccagg

SEQ ID NO: 483580 - DNA, 15 bp, Homo sapiens
atctccacccaccag

SEQ ID NO: 483581 - DNA, 15 bp, Homo sapiens
catctccacccacca

SEQ ID NO: 483582 - DNA, 15 bp, Homo sapiens
ccatctccacccacc

SEQ ID NO: 483583 - DNA, 15 bp, Homo sapiens
gccatctccacccac

SEQ ID NO: 483584 - DNA, 15 bp, Homo sapiens
ggccatctccaccca

SEQ ID NO: 483585 - DNA, 15 bp, Homo sapiens
aggccatctccaccc

SEQ ID NO: 483586 - DNA, 15 bp, Homo sapiens
aaggccatctccacc

SEQ ID NO: 483587 - DNA, 15 bp, Homo sapiens
caaggccatctccac

SEQ ID NO: 483588 - DNA, 15 bp, Homo sapiens
tcaaggccatctcca

SEQ ID NO: 483589 - DNA, 15 bp, Homo sapiens
gtcaaggccatctcc

SEQ ID NO: 483590 - DNA, 15 bp, Homo sapiens
agtcaaggccatctc

SEQ ID NO: 483591 - DNA, 15 bp, Homo sapiens
gagtcaaggccatct

SEQ ID NO: 483592 - DNA, 15 bp, Homo sapiens
ggagtcaaggccatc

SEQ ID NO: 483593 - DNA, 15 bp, Homo sapiens
gggagtcaaggccat

SEQ ID NO: 483594 - DNA, 15 bp, Homo sapiens
agggagtcaaggcca

SEQ ID NO: 483595 - DNA, 15 bp, Homo sapiens
cagggagtcaaggcc

SEQ ID NO: 483596 - DNA, 15 bp, Homo sapiens
acagggagtcaaggc

SEQ ID NO: 483597 - DNA, 15 bp, Homo sapiens
aacagggagtcaagg

SEQ ID NO: 483598 - DNA, 15 bp, Homo sapiens
aaacagggagtcaag

SEQ ID NO: 483599 - DNA, 15 bp, Homo sapiens
gaaacagggagtcaa

SEQ ID NO: 483600 - DNA, 15 bp, Homo sapiens
tgaaacagggagtca

SEQ ID NO: 483601 - DNA, 15 bp, Homo sapiens
gtgaaacagggagtc

SEQ ID NO: 483602 - DNA, 15 bp, Homo sapiens
agtgaaacagggagt

SEQ ID NO: 483603 - DNA, 15 bp, Homo sapiens
gagtgaaacagggag

SEQ ID NO: 483604 - DNA, 15 bp, Homo sapiens
tgagtgaaacaggga

SEQ ID NO: 483605 - DNA, 15 bp, Homo sapiens
ctgagtgaaacaggg

SEQ ID NO: 483606 - DNA, 15 bp, Homo sapiens
tctgagtgaaacagg

SEQ ID NO: 483607 - DNA, 15 bp, Homo sapiens
gtctgagtgaaacag

SEQ ID NO: 483608 - DNA, 15 bp, Homo sapiens
agtctgagtgaaaca

SEQ ID NO: 483609 - DNA, 15 bp, Homo sapiens
gagtctgagtgaaac

SEQ ID NO: 483610 - DNA, 15 bp, Homo sapiens
cgagtctgagtgaaa

SEQ ID NO: 483611 - DNA, 15 bp, Homo sapiens
gcgagtctgagtgaa

SEQ ID NO: 483612 - DNA, 15 bp, Homo sapiens
tgcgagtctgagtga

SEQ ID NO: 483613 - DNA, 15 bp, Homo sapiens
ttgcgagtctgagtg

SEQ ID NO: 483614 - DNA, 15 bp, Homo sapiens
tttgcgagtctgagt

SEQ ID NO: 483615 - DNA, 15 bp, Homo sapiens
ttttgcgagtctgag

SEQ ID NO: 483616 - DNA, 15 bp, Homo sapiens
gttttgcgagtctga

SEQ ID NO: 483617 - DNA, 15 bp, Homo sapiens
tgttttgcgagtctg

SEQ ID NO: 483618 - DNA, 15 bp, Homo sapiens
gtgttttgcgagtct

SEQ ID NO: 483619 - DNA, 15 bp, Homo sapiens
tgtgttttgcgagtc

SEQ ID NO: 483620 - DNA, 15 bp, Homo sapiens
atgtgttttgcgagt

SEQ ID NO: 483621 - DNA, 15 bp, Homo sapiens
aatgtgttttgcgag

SEQ ID NO: 483622 - DNA, 15 bp, Homo sapiens
aaatgtgttttgcga

SEQ ID NO: 483623 - DNA, 15 bp, Homo sapiens
caaatgtgttttgcg

SEQ ID NO: 483624 - DNA, 15 bp, Homo sapiens
gcaaatgtgttttgc

SEQ ID NO: 483625 - DNA, 15 bp, Homo sapiens
cgcaaatgtgttttg

SEQ ID NO: 483626 - DNA, 15 bp, Homo sapiens
acgcaaatgtgtttt

SEQ ID NO: 483627 - DNA, 15 bp, Homo sapiens
cacgcaaatgtgttt

SEQ ID NO: 483628 - DNA, 15 bp, Homo sapiens
tcacgcaaatgtgtt

SEQ ID NO: 483629 - DNA, 15 bp, Homo sapiens
gtcacgcaaatgtgt

SEQ ID NO: 483630 - DNA, 15 bp, Homo sapiens
agtcacgcaaatgtg

SEQ ID NO: 483631 - DNA, 15 bp, Homo sapiens
aagtcacgcaaatgt

SEQ ID NO: 483632 - DNA, 15 bp, Homo sapiens
gaagtcacgcaaatg

SEQ ID NO: 483633 - DNA, 15 bp, Homo sapiens
agaagtcacgcaaat

SEQ ID NO: 483634 - DNA, 15 bp, Homo sapiens
tagaagtcacgcaaa

SEQ ID NO: 483635 - DNA, 15 bp, Homo sapiens
ttagaagtcacgcaa

SEQ ID NO: 483636 - DNA, 15 bp, Homo sapiens
tttagaagtcacgca

SEQ ID NO: 483637 - DNA, 15 bp, Homo sapiens
atttagaagtcacgc

SEQ ID NO: 483638 - DNA, 15 bp, Homo sapiens
gatttagaagtcacg

SEQ ID NO: 483639 - DNA, 15 bp, Homo sapiens
ggatttagaagtcac

SEQ ID NO: 483640 - DNA, 15 bp, Homo sapiens
aggatttagaagtca

SEQ ID NO: 483641 - DNA, 15 bp, Homo sapiens
aaggatttagaagtc

SEQ ID NO: 483642 - DNA, 15 bp, Homo sapiens
gaaggatttagaagt

SEQ ID NO: 483643 - DNA, 15 bp, Homo sapiens
ggaaggatttagaag

SEQ ID NO: 483644 - DNA, 15 bp, Homo sapiens
tggaaggatttagaa

SEQ ID NO: 483645 - DNA, 15 bp, Homo sapiens
ctggaaggatttaga

SEQ ID NO: 483646 - DNA, 15 bp, Homo sapiens
gctggaaggatttag

SEQ ID NO: 483647 - DNA, 15 bp, Homo sapiens
agctggaaggattta

SEQ ID NO: 483648 - DNA, 15 bp, Homo sapiens
cagctggaaggattt

SEQ ID NO: 483649 - DNA, 15 bp, Homo sapiens
tcagctggaaggatt

SEQ ID NO: 483650 - DNA, 15 bp, Homo sapiens
ttcagctggaaggat

SEQ ID NO: 483651 - DNA, 15 bp, Homo sapiens
cttcagctggaagga

SEQ ID NO: 483652 - DNA, 15 bp, Homo sapiens
ccttcagctggaagg

SEQ ID NO: 483653 - DNA, 15 bp, Homo sapiens
tccttcagctggaag

SEQ ID NO: 483654 - DNA, 15 bp, Homo sapiens
atccttcagctggaa

SEQ ID NO: 483655 - DNA, 15 bp, Homo sapiens
aatccttcagctgga

SEQ ID NO: 483656 - DNA, 15 bp, Homo sapiens
caatccttcagctgg

SEQ ID NO: 483657 - DNA, 15 bp, Homo sapiens
ccaatccttcagctg

SEQ ID NO: 483658 - DNA, 15 bp, Homo sapiens
accaatccttcagct

SEQ ID NO: 483659 - DNA, 15 bp, Homo sapiens
aaccaatccttcagc

SEQ ID NO: 483660 - DNA, 15 bp, Homo sapiens
aaaccaatccttcag

SEQ ID NO: 483661 - DNA, 15 bp, Homo sapiens
caaaccaatccttca

SEQ ID NO: 483662 - DNA, 15 bp, Homo sapiens
gcaaaccaatccttc

SEQ ID NO: 483663 - DNA, 15 bp, Homo sapiens
agcaaaccaatcctt

SEQ ID NO: 483664 - DNA, 15 bp, Homo sapiens
aagcaaaccaatcct

SEQ ID NO: 483665 - DNA, 15 bp, Homo sapiens
aaagcaaaccaatcc

SEQ ID NO: 483666 - DNA, 15 bp, Homo sapiens
caaagcaaaccaatc

SEQ ID NO: 483667 - DNA, 15 bp, Homo sapiens
acaaagcaaaccaat

SEQ ID NO: 483668 - DNA, 15 bp, Homo sapiens
aacaaagcaaaccaa

SEQ ID NO: 483669 - DNA, 15 bp, Homo sapiens
aaacaaagcaaacca

SEQ ID NO: 483670 - DNA, 15 bp, Homo sapiens
caaaacaaagcaaac

SEQ ID NO: 483671 - DNA, 15 bp, Homo sapiens
gcaaaacaaagcaaa

SEQ ID NO: 483672 - DNA, 15 bp, Homo sapiens
agcaaaacaaagcaa

SEQ ID NO: 483673 - DNA, 15 bp, Homo sapiens
aagcaaaacaaagca

SEQ ID NO: 483674 - DNA, 15 bp, Homo sapiens
caagcaaaacaaagc

SEQ ID NO: 483675 - DNA, 15 bp, Homo sapiens
gcaagcaaaacaaag

SEQ ID NO: 483676 - DNA, 15 bp, Homo sapiens
agcaagcaaaacaaa

SEQ ID NO: 483677 - DNA, 15 bp, Homo sapiens
gagcaagcaaaacaa

SEQ ID NO: 483678 - DNA, 15 bp, Homo sapiens
ggagcaagcaaaaca

SEQ ID NO: 483679 - DNA, 15 bp, Homo sapiens
tggagcaagcaaaac

SEQ ID NO: 483680 - DNA, 15 bp, Homo sapiens
ctggagcaagcaaaa

SEQ ID NO: 483681 - DNA, 15 bp, Homo sapiens
actggagcaagcaaa

SEQ ID NO: 483682 - DNA, 15 bp, Homo sapiens
cactggagcaagcaa

SEQ ID NO: 483683 - DNA, 15 bp, Homo sapiens
tcactggagcaagca

SEQ ID NO: 483684 - DNA, 15 bp, Homo sapiens
gtcactggagcaagc

SEQ ID NO: 483685 - DNA, 15 bp, Homo sapiens
agtcactggagcaag

SEQ ID NO: 483686 - DNA, 15 bp, Homo sapiens
tagtcactggagcaa

SEQ ID NO: 483687 - DNA, 15 bp, Homo sapiens
atagtcactggagca

SEQ ID NO: 483688 - DNA, 15 bp, Homo sapiens
aatagtcactggagc

SEQ ID NO: 483689 - DNA, 15 bp, Homo sapiens
aaatagtcactggag

SEQ ID NO: 483690 - DNA, 15 bp, Homo sapiens
caaatagtcactgga

SEQ ID NO: 483691 - DNA, 15 bp, Homo sapiens
acaaatagtcactgg

SEQ ID NO: 483692 - DNA, 15 bp, Homo sapiens
aacaaatagtcactg

SEQ ID NO: 483693 - DNA, 15 bp, Homo sapiens
caacaaatagtcact

SEQ ID NO: 483694 - DNA, 15 bp, Homo sapiens
tcaacaaatagtcac

SEQ ID NO: 483695 - DNA, 15 bp, Homo sapiens
ctcaacaaatagtca

SEQ ID NO: 483696 - DNA, 15 bp, Homo sapiens
tctcaacaaatagtc

SEQ ID NO: 483697 - DNA, 15 bp, Homo sapiens
ttctcaacaaatagt

SEQ ID NO: 483698 - DNA, 15 bp, Homo sapiens
attctcaacaaatag

SEQ ID NO: 483699 - DNA, 15 bp, Homo sapiens
aattctcaacaaata

SEQ ID NO: 483700 - DNA, 15 bp, Homo sapiens
aaattctcaacaaat

SEQ ID NO: 483701 - DNA, 15 bp, Homo sapiens
aaaattctcaacaaa

SEQ ID NO: 483702 - DNA, 15 bp, Homo sapiens
caaaattctcaacaa

SEQ ID NO: 483703 - DNA, 15 bp, Homo sapiens
gcaaaattctcaaca

SEQ ID NO: 483704 - DNA, 15 bp, Homo sapiens
tgcaaaattctcaac

SEQ ID NO: 483705 - DNA, 15 bp, Homo sapiens
ttgcaaaattctcaa

SEQ ID NO: 483706 - DNA, 15 bp, Homo sapiens
attgcaaaattctca

SEQ ID NO: 483707 - DNA, 15 bp, Homo sapiens
aattgcaaaattctc

SEQ ID NO: 483708 - DNA, 15 bp, Homo sapiens
aaattgcaaaattct

SEQ ID NO: 483709 - DNA, 15 bp, Homo sapiens
taaattgcaaaattc

SEQ ID NO: 483710 - DNA, 15 bp, Homo sapiens
ttaaattgcaaaatt

SEQ ID NO: 483711 - DNA, 15 bp, Homo sapiens
tttaaattgcaaaat

SEQ ID NO: 483712 - DNA, 15 bp, Homo sapiens
atttaaattgcaaaa

SEQ ID NO: 483713 - DNA, 15 bp, Homo sapiens
aatttaaattgcaaa

SEQ ID NO: 483714 - DNA, 15 bp, Homo sapiens
caatttaaattgcaa

SEQ ID NO: 483715 - DNA, 15 bp, Homo sapiens
acaatttaaattgca

SEQ ID NO: 483716 - DNA, 15 bp, Homo sapiens
tacaatttaaattgc

SEQ ID NO: 483717 - DNA, 15 bp, Homo sapiens
atacaatttaaattg

SEQ ID NO: 483718 - DNA, 15 bp, Homo sapiens
aatacaatttaaatt

SEQ ID NO: 483719 - DNA, 15 bp, Homo sapiens
gaatacaatttaaat

SEQ ID NO: 483720 - DNA, 15 bp, Homo sapiens
agaatacaatttaaa

SEQ ID NO: 483721 - DNA, 15 bp, Homo sapiens
aagaatacaatttaa

SEQ ID NO: 483722 - DNA, 15 bp, Homo sapiens
gaagaatacaattta

SEQ ID NO: 483723 - DNA, 15 bp, Homo sapiens
tgaagaatacaattt

SEQ ID NO: 483724 - DNA, 15 bp, Homo sapiens
atgaagaatacaatt

SEQ ID NO: 483725 - DNA, 15 bp, Homo sapiens
gatgaagaatacaat

SEQ ID NO: 483726 - DNA, 15 bp, Homo sapiens
agatgaagaatacaa

SEQ ID NO: 483727 - DNA, 15 bp, Homo sapiens
gagatgaagaataca

SEQ ID NO: 483728 - DNA, 15 bp, Homo sapiens
agagatgaagaatac

SEQ ID NO: 483729 - DNA, 15 bp, Homo sapiens
aagagatgaagaata

SEQ ID NO: 483730 - DNA, 15 bp, Homo sapiens
aaagagatgaagaat

SEQ ID NO: 483731 - DNA, 15 bp, Homo sapiens
aaaagagatgaagaa

SEQ ID NO: 483732 - DNA, 15 bp, Homo sapiens
aaaaagagatgaaga

SEQ ID NO: 483733 - DNA, 15 bp, Homo sapiens
gaaaaagagatgaag

SEQ ID NO: 483734 - DNA, 15 bp, Homo sapiens
agaaaaagagatgaa

SEQ ID NO: 483735 - DNA, 15 bp, Homo sapiens
tagaaaaagagatga

SEQ ID NO: 483736 - DNA, 15 bp, Homo sapiens
gtagaaaaagagatg

SEQ ID NO: 483737 - DNA, 15 bp, Homo sapiens
agtagaaaaagagat

SEQ ID NO: 483738 - DNA, 15 bp, Homo sapiens
aagtagaaaaagaga

SEQ ID NO: 483739 - DNA, 15 bp, Homo sapiens
taagtagaaaaagag

SEQ ID NO: 483740 - DNA, 15 bp, Homo sapiens
ttaagtagaaaaaga

SEQ ID NO: 483741 - DNA, 15 bp, Homo sapiens
gttaagtagaaaaag

SEQ ID NO: 483742 - DNA, 15 bp, Homo sapiens
ggttaagtagaaaaa

SEQ ID NO: 483743 - DNA, 15 bp, Homo sapiens
gggttaagtagaaaa

SEQ ID NO: 483744 - DNA, 15 bp, Homo sapiens
agggttaagtagaaa

SEQ ID NO: 483745 - DNA, 15 bp, Homo sapiens
cagggttaagtagaa

SEQ ID NO: 483746 - DNA, 15 bp, Homo sapiens
acagggttaagtaga

SEQ ID NO: 483747 - DNA, 15 bp, Homo sapiens
aacagggttaagtag

SEQ ID NO: 483748 - DNA, 15 bp, Homo sapiens
taacagggttaagta

SEQ ID NO: 483749 - DNA, 15 bp, Homo sapiens
ttaacagggttaagt

SEQ ID NO: 483750 - DNA, 15 bp, Homo sapiens
attaacagggttaag

SEQ ID NO: 483751 - DNA, 15 bp, Homo sapiens
tattaacagggttaa

SEQ ID NO: 483752 - DNA, 15 bp, Homo sapiens
atattaacagggtta

SEQ ID NO: 483753 - DNA, 15 bp, Homo sapiens
tatattaacagggtt

SEQ ID NO: 483754 - DNA, 15 bp, Homo sapiens
atatattaacagggt

SEQ ID NO: 483755 - DNA, 15 bp, Homo sapiens
gatatattaacaggg

SEQ ID NO: 483756 - DNA, 15 bp, Homo sapiens
agatatattaacagg

SEQ ID NO: 483757 - DNA, 15 bp, Homo sapiens
aagatatattaacag

SEQ ID NO: 483758 - DNA, 15 bp, Homo sapiens
taagatatattaaca

SEQ ID NO: 483759 - DNA, 15 bp, Homo sapiens
gtaagatatattaac

SEQ ID NO: 483760 - DNA, 15 bp, Homo sapiens
cgtaagatatattaa

SEQ ID NO: 483761 - DNA, 15 bp, Homo sapiens
gcgtaagatatatta

SEQ ID NO: 483762 - DNA, 15 bp, Homo sapiens
tgcgtaagatatatt

SEQ ID NO: 483763 - DNA, 15 bp, Homo sapiens
ttgcgtaagatatat

SEQ ID NO: 483764 - DNA, 15 bp, Homo sapiens
cttgcgtaagatata

SEQ ID NO: 483765 - DNA, 15 bp, Homo sapiens
acttgcgtaagatat

SEQ ID NO: 483766 - DNA, 15 bp, Homo sapiens
tacttgcgtaagata

SEQ ID NO: 483767 - DNA, 15 bp, Homo sapiens
ctacttgcgtaagat

SEQ ID NO: 483768 - DNA, 15 bp, Homo sapiens
actacttgcgtaaga

SEQ ID NO: 483769 - DNA, 15 bp, Homo sapiens
aactacttgcgtaag

SEQ ID NO: 483770 - DNA, 15 bp, Homo sapiens
taactacttgcgtaa

SEQ ID NO: 483771 - DNA, 15 bp, Homo sapiens
ataactacttgcgta

SEQ ID NO: 483772 - DNA, 15 bp, Homo sapiens
tataactacttgcgt

SEQ ID NO: 483773 - DNA, 15 bp, Homo sapiens
atataactacttgcg

SEQ ID NO: 483774 - DNA, 15 bp, Homo sapiens
aatataactacttgc

SEQ ID NO: 483775 - DNA, 15 bp, Homo sapiens
gaatataactacttg

SEQ ID NO: 483776 - DNA, 15 bp, Homo sapiens
tgaatataactactt

SEQ ID NO: 483777 - DNA, 15 bp, Homo sapiens
ttgaatataactact

SEQ ID NO: 483778 - DNA, 15 bp, Homo sapiens
cttgaatataactac

SEQ ID NO: 483779 - DNA, 15 bp, Homo sapiens
acttgaatataacta

SEQ ID NO: 483780 - DNA, 15 bp, Homo sapiens
aacttgaatataact

SEQ ID NO: 483781 - DNA, 15 bp, Homo sapiens
aaacttgaatataac

SEQ ID NO: 483782 - DNA, 15 bp, Homo sapiens
taaacttgaatataa

SEQ ID NO: 483783 - DNA, 15 bp, Homo sapiens
ataaacttgaatata

SEQ ID NO: 483784 - DNA, 15 bp, Homo sapiens
aataaacttgaatat

SEQ ID NO: 483785 - DNA, 15 bp, Homo sapiens
aaataaacttgaata

SEQ ID NO: 483786 - DNA, 15 bp, Homo sapiens
aaaataaacttgaat

SEQ ID NO: 483787 - DNA, 15 bp, Homo sapiens
gaaaataaacttgaa

SEQ ID NO: 483788 - DNA, 15 bp, Homo sapiens
agaaaataaacttga

SEQ ID NO: 483789 - DNA, 15 bp, Homo sapiens
tagaaaataaacttg

SEQ ID NO: 483790 - DNA, 15 bp, Homo sapiens
atagaaaataaactt

SEQ ID NO: 483791 - DNA, 15 bp, Homo sapiens
catagaaaataaact

SEQ ID NO: 483792 - DNA, 15 bp, Homo sapiens
tcatagaaaataaac

SEQ ID NO: 483793 - DNA, 15 bp, Homo sapiens
gtcatagaaaataaa

SEQ ID NO: 483794 - DNA, 15 bp, Homo sapiens
ggtcatagaaaataa

SEQ ID NO: 483795 - DNA, 15 bp, Homo sapiens
gggtcatagaaaata

SEQ ID NO: 483796 - DNA, 15 bp, Homo sapiens
tgggtcatagaaaat

SEQ ID NO: 483797 - DNA, 15 bp, Homo sapiens
ttgggtcatagaaaa

SEQ ID NO: 483798 - DNA, 15 bp, Homo sapiens
gttgggtcatagaaa

SEQ ID NO: 483799 - DNA, 15 bp, Homo sapiens
agttgggtcatagaa

SEQ ID NO: 483800 - DNA, 15 bp, Homo sapiens
tagttgggtcataga

SEQ ID NO: 483801 - DNA, 15 bp, Homo sapiens
ctagttgggtcatag

SEQ ID NO: 483802 - DNA, 15 bp, Homo sapiens
actagttgggtcata

SEQ ID NO: 483803 - DNA, 15 bp, Homo sapiens
tactagttgggtcat

SEQ ID NO: 483804 - DNA, 15 bp, Homo sapiens
ctactagttgggtca

SEQ ID NO: 483805 - DNA, 15 bp, Homo sapiens
gctactagttgggtc

SEQ ID NO: 483806 - DNA, 15 bp, Homo sapiens
ggctactagttgggt

SEQ ID NO: 483807 - DNA, 15 bp, Homo sapiens
aggctactagttggg

SEQ ID NO: 483808 - DNA, 15 bp, Homo sapiens
gaggctactagttgg

SEQ ID NO: 483809 - DNA, 15 bp, Homo sapiens
agaggctactagttg

SEQ ID NO: 483810 - DNA, 15 bp, Homo sapiens
aagaggctactagtt

SEQ ID NO: 483811 - DNA, 15 bp, Homo sapiens
gaagaggctactagt

SEQ ID NO: 483812 - DNA, 15 bp, Homo sapiens
agaagaggctactag

SEQ ID NO: 483813 - DNA, 15 bp, Homo sapiens
aagaagaggctacta

SEQ ID NO: 483814 - DNA, 15 bp, Homo sapiens
taagaagaggctact

SEQ ID NO: 483815 - DNA, 15 bp, Homo sapiens
ttaagaagaggctac

SEQ ID NO: 483816 - DNA, 15 bp, Homo sapiens
attaagaagaggcta

SEQ ID NO: 483817 - DNA, 15 bp, Homo sapiens
aattaagaagaggct

SEQ ID NO: 483818 - DNA, 15 bp, Homo sapiens
taattaagaagaggc

SEQ ID NO: 483819 - DNA, 15 bp, Homo sapiens
ctaattaagaagagg

SEQ ID NO: 483820 - DNA, 15 bp, Homo sapiens
tctaattaagaagag

SEQ ID NO: 483821 - DNA, 15 bp, Homo sapiens
ttctaattaagaaga

SEQ ID NO: 483822 - DNA, 15 bp, Homo sapiens
cttctaattaagaag

SEQ ID NO: 483823 - DNA, 15 bp, Homo sapiens
gcttctaattaagaa

SEQ ID NO: 483824 - DNA, 15 bp, Homo sapiens
ggcttctaattaaga

SEQ ID NO: 483825 - DNA, 15 bp, Homo sapiens
tggcttctaattaag

SEQ ID NO: 483826 - DNA, 15 bp, Homo sapiens
ctggcttctaattaa

SEQ ID NO: 483827 - DNA, 15 bp, Homo sapiens
gctggcttctaatta

SEQ ID NO: 483828 - DNA, 15 bp, Homo sapiens
ggctggcttctaatt

SEQ ID NO: 483829 - DNA, 15 bp, Homo sapiens
aggctggcttctaat

SEQ ID NO: 483830 - DNA, 15 bp, Homo sapiens
caggctggcttctaa

SEQ ID NO: 483831 - DNA, 15 bp, Homo sapiens
tcaggctggcttcta

SEQ ID NO: 483832 - DNA, 15 bp, Homo sapiens
ttcaggctggcttct

SEQ ID NO: 483833 - DNA, 15 bp, Homo sapiens
attcaggctggcttc

SEQ ID NO: 483834 - DNA, 15 bp, Homo sapiens
tattcaggctggctt

SEQ ID NO: 483835 - DNA, 15 bp, Homo sapiens
atattcaggctggct

SEQ ID NO: 483836 - DNA, 15 bp, Homo sapiens
aatattcaggctggc

SEQ ID NO: 483837 - DNA, 15 bp, Homo sapiens
aaatattcaggctgg

SEQ ID NO: 483838 - DNA, 15 bp, Homo sapiens
gaaatattcaggctg

SEQ ID NO: 483839 - DNA, 15 bp, Homo sapiens
ggaaatattcaggct

SEQ ID NO: 483840 - DNA, 15 bp, Homo sapiens
tggaaatattcaggc

SEQ ID NO: 483841 - DNA, 15 bp, Homo sapiens
gtggaaatattcagg

SEQ ID NO: 483842 - DNA, 15 bp, Homo sapiens
tgtggaaatattcag

SEQ ID NO: 483843 - DNA, 15 bp, Homo sapiens
ctgtggaaatattca

SEQ ID NO: 483844 - DNA, 15 bp, Homo sapiens
actgtggaaatattc

SEQ ID NO: 483845 - DNA, 15 bp, Homo sapiens
cactgtggaaatatt

SEQ ID NO: 483846 - DNA, 15 bp, Homo sapiens
gcactgtggaaatat

SEQ ID NO: 483847 - DNA, 15 bp, Homo sapiens
ggcactgtggaaata

SEQ ID NO: 483848 - DNA, 15 bp, Homo sapiens
tggcactgtggaaat

SEQ ID NO: 483849 - DNA, 15 bp, Homo sapiens
ctggcactgtggaaa

SEQ ID NO: 483850 - DNA, 15 bp, Homo sapiens
cctggcactgtggaa

SEQ ID NO: 483851 - DNA, 15 bp, Homo sapiens
ggcctggcactgtgg

SEQ ID NO: 483852 - DNA, 15 bp, Homo sapiens
tggcctggcactgtg

SEQ ID NO: 483853 - DNA, 15 bp, Homo sapiens
gtggcctggcactgt

SEQ ID NO: 483854 - DNA, 15 bp, Homo sapiens
agtggcctggcactg

SEQ ID NO: 483855 - DNA, 15 bp, Homo sapiens
cagtggcctggcact

SEQ ID NO: 483856 - DNA, 15 bp, Homo sapiens
tcagtggcctggcac

SEQ ID NO: 483857 - DNA, 15 bp, Homo sapiens
ttcagtggcctggca

SEQ ID NO: 483858 - DNA, 15 bp, Homo sapiens
gttcagtggcctggc

SEQ ID NO: 483859 - DNA, 15 bp, Homo sapiens
tgttcagtggcctgg

SEQ ID NO: 483860 - DNA, 15 bp, Homo sapiens
ctgttcagtggcctg

SEQ ID NO: 483861 - DNA, 15 bp, Homo sapiens
cctgttcagtggcct

SEQ ID NO: 483862 - DNA, 15 bp, Homo sapiens
ccctgttcagtggcc

SEQ ID NO: 483863 - DNA, 15 bp, Homo sapiens
accctgttcagtggc

SEQ ID NO: 483864 - DNA, 15 bp, Homo sapiens
caccctgttcagtgg

SEQ ID NO: 483865 - DNA, 15 bp, Homo sapiens
acaccctgttcagtg

SEQ ID NO: 483866 - DNA, 15 bp, Homo sapiens
aacaccctgttcagt

SEQ ID NO: 483867 - DNA, 15 bp, Homo sapiens
gaacaccctgttcag

SEQ ID NO: 483868 - DNA, 15 bp, Homo sapiens
tgaacaccctgttca

SEQ ID NO: 483869 - DNA, 15 bp, Homo sapiens
ctgaacaccctgttc

SEQ ID NO: 483870 - DNA, 15 bp, Homo sapiens
cctgaacaccctgtt

SEQ ID NO: 483871 - DNA, 15 bp, Homo sapiens
ccctgaacaccctgt

SEQ ID NO: 483872 - DNA, 15 bp, Homo sapiens
accctgaacaccctg

SEQ ID NO: 483873 - DNA, 15 bp, Homo sapiens
gaccctgaacaccct

SEQ ID NO: 483874 - DNA, 15 bp, Homo sapiens
agaccctgaacaccc

SEQ ID NO: 483875 - DNA, 15 bp, Homo sapiens
gagaccctgaacacc

SEQ ID NO: 483876 - DNA, 15 bp, Homo sapiens
tgagaccctgaacac

SEQ ID NO: 483877 - DNA, 15 bp, Homo sapiens
ttgagaccctgaaca

SEQ ID NO: 483878 - DNA, 15 bp, Homo sapiens
gttgagaccctgaac

SEQ ID NO: 483879 - DNA, 15 bp, Homo sapiens
tgttgagaccctgaa

SEQ ID NO: 483880 - DNA, 15 bp, Homo sapiens
gtgttgagaccctga

SEQ ID NO: 483881 - DNA, 15 bp, Homo sapiens
agtgttgagaccctg

SEQ ID NO: 483882 - DNA, 15 bp, Homo sapiens
tagtgttgagaccct

SEQ ID NO: 483883 - DNA, 15 bp, Homo sapiens
ctagtgttgagaccc

SEQ ID NO: 483884 - DNA, 15 bp, Homo sapiens
cctagtgttgagacc

SEQ ID NO: 483885 - DNA, 15 bp, Homo sapiens
ccctagtgttgagac

SEQ ID NO: 483886 - DNA, 15 bp, Homo sapiens
accctagtgttgaga

SEQ ID NO: 483887 - DNA, 15 bp, Homo sapiens
caccctagtgttgag

SEQ ID NO: 483888 - DNA, 15 bp, Homo sapiens
ccaccctagtgttga

SEQ ID NO: 483889 - DNA, 15 bp, Homo sapiens
gccaccctagtgttg

SEQ ID NO: 483890 - DNA, 15 bp, Homo sapiens
agccaccctagtgtt

SEQ ID NO: 483891 - DNA, 15 bp, Homo sapiens
aagccaccctagtgt

SEQ ID NO: 483892 - DNA, 15 bp, Homo sapiens
taagccaccctagtg

SEQ ID NO: 483893 - DNA, 15 bp, Homo sapiens
ttaagccaccctagt

SEQ ID NO: 483894 - DNA, 15 bp, Homo sapiens
cttaagccaccctag

SEQ ID NO: 483895 - DNA, 15 bp, Homo sapiens
acttaagccacccta

SEQ ID NO: 483896 - DNA, 15 bp, Homo sapiens
gacttaagccaccct

SEQ ID NO: 483897 - DNA, 15 bp, Homo sapiens
agacttaagccaccc

SEQ ID NO: 483898 - DNA, 15 bp, Homo sapiens
aagacttaagccacc

SEQ ID NO: 483899 - DNA, 15 bp, Homo sapiens
aaagacttaagccac

SEQ ID NO: 483900 - DNA, 15 bp, Homo sapiens
aaaagacttaagcca

SEQ ID NO: 483901 - DNA, 15 bp, Homo sapiens
gaaaagacttaagcc

SEQ ID NO: 483902 - DNA, 15 bp, Homo sapiens
ggaaaagacttaagc

SEQ ID NO: 483903 - DNA, 15 bp, Homo sapiens
gggaaaagacttaag

SEQ ID NO: 483904 - DNA, 15 bp, Homo sapiens
ggggaaaagacttaa

SEQ ID NO: 483905 - DNA, 15 bp, Homo sapiens
aggggaaaagactta

SEQ ID NO: 483906 - DNA, 15 bp, Homo sapiens
aaggggaaaagactt

SEQ ID NO: 483907 - DNA, 15 bp, Homo sapiens
gaaggggaaaagact

SEQ ID NO: 483908 - DNA, 15 bp, Homo sapiens
cgaaggggaaaagac

SEQ ID NO: 483909 - DNA, 15 bp, Homo sapiens
tcgaaggggaaaaga

SEQ ID NO: 483910 - DNA, 15 bp, Homo sapiens
ctcgaaggggaaaag

SEQ ID NO: 483911 - DNA, 15 bp, Homo sapiens
cctcgaaggggaaaa

SEQ ID NO: 483912 - DNA, 15 bp, Homo sapiens
tcctcgaaggggaaa

SEQ ID NO: 483913 - DNA, 15 bp, Homo sapiens
ttcctcgaaggggaa

SEQ ID NO: 483914 - DNA, 15 bp, Homo sapiens
tttcctcgaagggga

SEQ ID NO: 483915 - DNA, 15 bp, Homo sapiens
ctttcctcgaagggg

SEQ ID NO: 483916 - DNA, 15 bp, Homo sapiens
tctttcctcgaaggg

SEQ ID NO: 483917 - DNA, 15 bp, Homo sapiens
ttctttcctcgaagg

SEQ ID NO: 483918 - DNA, 15 bp, Homo sapiens
tttctttcctcgaag

SEQ ID NO: 483919 - DNA, 15 bp, Homo sapiens
ttttctttcctcgaa

SEQ ID NO: 483920 - DNA, 15 bp, Homo sapiens
tttttctttcctcga

SEQ ID NO: 483921 - DNA, 15 bp, Homo sapiens
ttttttctttcctcg

SEQ ID NO: 483922 - DNA, 15 bp, Homo sapiens
attttttctttcctc

SEQ ID NO: 483923 - DNA, 15 bp, Homo sapiens
cattttttctttcct

SEQ ID NO: 483924 - DNA, 15 bp, Homo sapiens
ccattttttctttcc

SEQ ID NO: 483925 - DNA, 15 bp, Homo sapiens
cccattttttctttc

SEQ ID NO: 483926 - DNA, 15 bp, Homo sapiens
gcccattttttcttt

SEQ ID NO: 483927 - DNA, 15 bp, Homo sapiens
tgcccattttttctt

SEQ ID NO: 483928 - DNA, 15 bp, Homo sapiens
ctgcccattttttct

SEQ ID NO: 483929 - DNA, 15 bp, Homo sapiens
actgcccattttttc

SEQ ID NO: 483930 - DNA, 15 bp, Homo sapiens
aactgcccatttttt

SEQ ID NO: 483931 - DNA, 15 bp, Homo sapiens
aaactgcccattttt

SEQ ID NO: 483932 - DNA, 15 bp, Homo sapiens
aaaactgcccatttt

SEQ ID NO: 483933 - DNA, 15 bp, Homo sapiens
gaaaactgcccattt

SEQ ID NO: 483934 - DNA, 15 bp, Homo sapiens
agaaaactgcccatt

SEQ ID NO: 483935 - DNA, 15 bp, Homo sapiens
gagaaaactgcccat

SEQ ID NO: 483936 - DNA, 15 bp, Homo sapiens
agagaaaactgccca

SEQ ID NO: 483937 - DNA, 15 bp, Homo sapiens
cagagaaaactgccc

SEQ ID NO: 483938 - DNA, 15 bp, Homo sapiens
tcagagaaaactgcc

SEQ ID NO: 483939 - DNA, 15 bp, Homo sapiens
ctcagagaaaactgc

SEQ ID NO: 483940 - DNA, 15 bp, Homo sapiens
tctcagagaaaactg

SEQ ID NO: 483941 - DNA, 15 bp, Homo sapiens
atctcagagaaaact

SEQ ID NO: 483942 - DNA, 15 bp, Homo sapiens
catctcagagaaaac

SEQ ID NO: 483943 - DNA, 15 bp, Homo sapiens
tcatctcagagaaaa

SEQ ID NO: 483944 - DNA, 15 bp, Homo sapiens
gtcatctcagagaaa

SEQ ID NO: 483945 - DNA, 15 bp, Homo sapiens
ggtcatctcagagaa

SEQ ID NO: 483946 - DNA, 15 bp, Homo sapiens
aggtcatctcagaga

SEQ ID NO: 483947 - DNA, 15 bp, Homo sapiens
taggtcatctcagag

SEQ ID NO: 483948 - DNA, 15 bp, Homo sapiens
ctaggtcatctcaga

SEQ ID NO: 483949 - DNA, 15 bp, Homo sapiens
gctaggtcatctcag

SEQ ID NO: 483950 - DNA, 15 bp, Homo sapiens
agctaggtcatctca

SEQ ID NO: 483951 - DNA, 15 bp, Homo sapiens
cagctaggtcatctc

SEQ ID NO: 483952 - DNA, 15 bp, Homo sapiens
acagctaggtcatct

SEQ ID NO: 483953 - DNA, 15 bp, Homo sapiens
tacagctaggtcatc

SEQ ID NO: 483954 - DNA, 15 bp, Homo sapiens
ctacagctaggtcat

SEQ ID NO: 483955 - DNA, 15 bp, Homo sapiens
cctacagctaggtca

SEQ ID NO: 483956 - DNA, 15 bp, Homo sapiens
acctacagctaggtc

SEQ ID NO: 483957 - DNA, 15 bp, Homo sapiens
aacctacagctaggt

SEQ ID NO: 483958 - DNA, 15 bp, Homo sapiens
gaacctacagctagg

SEQ ID NO: 483959 - DNA, 15 bp, Homo sapiens
ggaacctacagctag

SEQ ID NO: 483960 - DNA, 15 bp, Homo sapiens
tggaacctacagcta

SEQ ID NO: 483961 - DNA, 15 bp, Homo sapiens
atggaacctacagct

SEQ ID NO: 483962 - DNA, 15 bp, Homo sapiens
catggaacctacagc

SEQ ID NO: 483963 - DNA, 15 bp, Homo sapiens
tcatggaacctacag

SEQ ID NO: 483964 - DNA, 15 bp, Homo sapiens
atcatggaacctaca

SEQ ID NO: 483965 - DNA, 15 bp, Homo sapiens
gatcatggaacctac

SEQ ID NO: 483966 - DNA, 15 bp, Homo sapiens
agatcatggaaccta

SEQ ID NO: 483967 - DNA, 15 bp, Homo sapiens
aagatcatggaacct

SEQ ID NO: 483968 - DNA, 15 bp, Homo sapiens
aaagatcatggaacc

SEQ ID NO: 483969 - DNA, 15 bp, Homo sapiens
gaaagatcatggaac

SEQ ID NO: 483970 - DNA, 15 bp, Homo sapiens
ggaaagatcatggaa

SEQ ID NO: 483971 - DNA, 15 bp, Homo sapiens
aggaaagatcatgga

SEQ ID NO: 483972 - DNA, 15 bp, Homo sapiens
aaggaaagatcatgg

SEQ ID NO: 483973 - DNA, 15 bp, Homo sapiens
gaaggaaagatcatg

SEQ ID NO: 483974 - DNA, 15 bp, Homo sapiens
ggaaggaaagatcat

SEQ ID NO: 483975 - DNA, 15 bp, Homo sapiens
gggaaggaaagatca

SEQ ID NO: 483976 - DNA, 15 bp, Homo sapiens
tgggaaggaaagatc

SEQ ID NO: 483977 - DNA, 15 bp, Homo sapiens
atgggaaggaaagat

SEQ ID NO: 483978 - DNA, 15 bp, Homo sapiens
catgggaaggaaaga

SEQ ID NO: 483979 - DNA, 15 bp, Homo sapiens
acatgggaaggaaag

SEQ ID NO: 483980 - DNA, 15 bp, Homo sapiens
gacatgggaaggaaa

SEQ ID NO: 483981 - DNA, 15 bp, Homo sapiens
ggacatgggaaggaa

SEQ ID NO: 483982 - DNA, 15 bp, Homo sapiens
aggacatgggaagga

SEQ ID NO: 483983 - DNA, 15 bp, Homo sapiens
caggacatgggaagg

SEQ ID NO: 483984 - DNA, 15 bp, Homo sapiens
acaggacatgggaag

SEQ ID NO: 483985 - DNA, 15 bp, Homo sapiens
cacaggacatgggaa

SEQ ID NO: 483986 - DNA, 15 bp, Homo sapiens
tcacaggacatggga

SEQ ID NO: 483987 - DNA, 15 bp, Homo sapiens
gtcacaggacatggg

SEQ ID NO: 483988 - DNA, 15 bp, Homo sapiens
tgtcacaggacatgg

SEQ ID NO: 483989 - DNA, 15 bp, Homo sapiens
ctgtcacaggacatg

SEQ ID NO: 483990 - DNA, 15 bp, Homo sapiens
cctgtcacaggacat

SEQ ID NO: 483991 - DNA, 15 bp, Homo sapiens
acctgtcacaggaca

SEQ ID NO: 483992 - DNA, 15 bp, Homo sapiens
tacctgtcacaggac

SEQ ID NO: 483993 - DNA, 15 bp, Homo sapiens
ttacctgtcacagga

SEQ ID NO: 483994 - DNA, 15 bp, Homo sapiens
cttacctgtcacagg

SEQ ID NO: 483995 - DNA, 15 bp, Homo sapiens
tcttacctgtcacag

SEQ ID NO: 483996 - DNA, 15 bp, Homo sapiens
gtcttacctgtcaca

SEQ ID NO: 483997 - DNA, 15 bp, Homo sapiens
ggtcttacctgtcac

SEQ ID NO: 483998 - DNA, 15 bp, Homo sapiens
gggtcttacctgtca

SEQ ID NO: 483999 - DNA, 15 bp, Homo sapiens
tgggtcttacctgtc

SEQ ID NO: 484000 - DNA, 15 bp, Homo sapiens
ctgggtcttacctgt

SEQ ID NO: 484001 - DNA, 15 bp, Homo sapiens
tctgggtcttacctg

SEQ ID NO: 484002 - DNA, 15 bp, Homo sapiens
atctgggtcttacct

SEQ ID NO: 484003 - DNA, 15 bp, Homo sapiens
gatctgggtcttacc

SEQ ID NO: 484004 - DNA, 15 bp, Homo sapiens
ggatctgggtcttac

SEQ ID NO: 484005 - DNA, 15 bp, Homo sapiens
tggatctgggtctta

SEQ ID NO: 484006 - DNA, 15 bp, Homo sapiens
ctggatctgggtctt

SEQ ID NO: 484007 - DNA, 15 bp, Homo sapiens
actggatctgggtct

SEQ ID NO: 484008 - DNA, 15 bp, Homo sapiens
gactggatctgggtc

SEQ ID NO: 484009 - DNA, 15 bp, Homo sapiens
ggactggatctgggt

SEQ ID NO: 484010 - DNA, 15 bp, Homo sapiens
cggactggatctggg

SEQ ID NO: 484011 - DNA, 15 bp, Homo sapiens
acggactggatctgg

SEQ ID NO: 484012 - DNA, 15 bp, Homo sapiens
cacggactggatctg

SEQ ID NO: 484013 - DNA, 15 bp, Homo sapiens
ccacggactggatct

SEQ ID NO: 484014 - DNA, 15 bp, Homo sapiens
tccacggactggatc

SEQ ID NO: 484015 - DNA, 15 bp, Homo sapiens
ttccacggactggat

SEQ ID NO: 484016 - DNA, 15 bp, Homo sapiens
gttccacggactgga

SEQ ID NO: 484017 - DNA, 15 bp, Homo sapiens
ggttccacggactgg

SEQ ID NO: 484018 - DNA, 15 bp, Homo sapiens
tggttccacggactg

SEQ ID NO: 484019 - DNA, 15 bp, Homo sapiens
atggttccacggact

SEQ ID NO: 484020 - DNA, 15 bp, Homo sapiens
tatggttccacggac

SEQ ID NO: 484021 - DNA, 15 bp, Homo sapiens
gtatggttccacgga

SEQ ID NO: 484022 - DNA, 15 bp, Homo sapiens
tgtatggttccacgg

SEQ ID NO: 484023 - DNA, 15 bp, Homo sapiens
gtgtatggttccacg

SEQ ID NO: 484024 - DNA, 15 bp, Homo sapiens
tgtgtatggttccac

SEQ ID NO: 484025 - DNA, 15 bp, Homo sapiens
ttgtgtatggttcca

SEQ ID NO: 484026 - DNA, 15 bp, Homo sapiens
tttgtgtatggttcc

SEQ ID NO: 484027 - DNA, 15 bp, Homo sapiens
ctttgtgtatggttc

SEQ ID NO: 484028 - DNA, 15 bp, Homo sapiens
gctttgtgtatggtt

SEQ ID NO: 484029 - DNA, 15 bp, Homo sapiens
tgctttgtgtatggt

SEQ ID NO: 484030 - DNA, 15 bp, Homo sapiens
ctgctttgtgtatgg

SEQ ID NO: 484031 - DNA, 15 bp, Homo sapiens
gctgctttgtgtatg

SEQ ID NO: 484032 - DNA, 15 bp, Homo sapiens
tgctgctttgtgtat

SEQ ID NO: 484033 - DNA, 15 bp, Homo sapiens
ctgctgctttgtgta

SEQ ID NO: 484034 - DNA, 15 bp, Homo sapiens
gctgctgctttgtgt

SEQ ID NO: 484035 - DNA, 15 bp, Homo sapiens
agctgctgctttgtg

SEQ ID NO: 484036 - DNA, 15 bp, Homo sapiens
cagctgctgctttgt

SEQ ID NO: 484037 - DNA, 15 bp, Homo sapiens
tcagctgctgctttg

SEQ ID NO: 484038 - DNA, 15 bp, Homo sapiens
ttcagctgctgcttt

SEQ ID NO: 484039 - DNA, 15 bp, Homo sapiens
gttcagctgctgctt

SEQ ID NO: 484040 - DNA, 15 bp, Homo sapiens
tgttcagctgctgct

SEQ ID NO: 484041 - DNA, 15 bp, Homo sapiens
ttgttcagctgctgc

SEQ ID NO: 484042 - DNA, 15 bp, Homo sapiens
gttgttcagctgctg

SEQ ID NO: 484043 - DNA, 15 bp, Homo sapiens
tgttgttcagctgct

SEQ ID NO: 484044 - DNA, 15 bp, Homo sapiens
atgttgttcagctgc

SEQ ID NO: 484045 - DNA, 15 bp, Homo sapiens
catgttgttcagctg

SEQ ID NO: 484046 - DNA, 15 bp, Homo sapiens
acatgttgttcagct

SEQ ID NO: 484047 - DNA, 15 bp, Homo sapiens
gacatgttgttcagc

SEQ ID NO: 484048 - DNA, 15 bp, Homo sapiens
tgacatgttgttcag

SEQ ID NO: 484049 - DNA, 15 bp, Homo sapiens
atgacatgttgttca

SEQ ID NO: 484050 - DNA, 15 bp, Homo sapiens
aatgacatgttgttc

SEQ ID NO: 484051 - DNA, 15 bp, Homo sapiens
aaatgacatgttgtt

SEQ ID NO: 484052 - DNA, 15 bp, Homo sapiens
caaatgacatgttgt

SEQ ID NO: 484053 - DNA, 15 bp, Homo sapiens
gcaaatgacatgttg

SEQ ID NO: 484054 - DNA, 15 bp, Homo sapiens
agcaaatgacatgtt

SEQ ID NO: 484055 - DNA, 15 bp, Homo sapiens
cagcaaatgacatgt

SEQ ID NO: 484056 - DNA, 15 bp, Homo sapiens
tcagcaaatgacatg

SEQ ID NO: 484057 - DNA, 15 bp, Homo sapiens
ttcagcaaatgacat

SEQ ID NO: 484058 - DNA, 15 bp, Homo sapiens
tttcagcaaatgaca

SEQ ID NO: 484059 - DNA, 15 bp, Homo sapiens
atttcagcaaatgac

SEQ ID NO: 484060 - DNA, 15 bp, Homo sapiens
gatttcagcaaatga

SEQ ID NO: 484061 - DNA, 15 bp, Homo sapiens
tgatttcagcaaatg

SEQ ID NO: 484062 - DNA, 15 bp, Homo sapiens
atgatttcagcaaat

SEQ ID NO: 484063 - DNA, 15 bp, Homo sapiens
gatgatttcagcaaa

SEQ ID NO: 484064 - DNA, 15 bp, Homo sapiens
tgatgatttcagcaa

SEQ ID NO: 484065 - DNA, 15 bp, Homo sapiens
atgatgatttcagca

SEQ ID NO: 484066 - DNA, 15 bp, Homo sapiens
catgatgatttcagc

SEQ ID NO: 484067 - DNA, 15 bp, Homo sapiens
ccatgatgatttcag

SEQ ID NO: 484068 - DNA, 15 bp, Homo sapiens
cccatgatgatttca

SEQ ID NO: 484069 - DNA, 15 bp, Homo sapiens
gcccatgatgatttc

SEQ ID NO: 484070 - DNA, 15 bp, Homo sapiens
agcccatgatgattt

SEQ ID NO: 484071 - DNA, 15 bp, Homo sapiens
tagcccatgatgatt

SEQ ID NO: 484072 - DNA, 15 bp, Homo sapiens
atagcccatgatgat

SEQ ID NO: 484073 - DNA, 15 bp, Homo sapiens
tatagcccatgatga

SEQ ID NO: 484074 - DNA, 15 bp, Homo sapiens
ttatagcccatgatg

SEQ ID NO: 484075 - DNA, 15 bp, Homo sapiens
cttatagcccatgat

SEQ ID NO: 484076 - DNA, 15 bp, Homo sapiens
tcttatagcccatga

SEQ ID NO: 484077 - DNA, 15 bp, Homo sapiens
atcttatagcccatg

SEQ ID NO: 484078 - DNA, 15 bp, Homo sapiens
gatcttatagcccat

SEQ ID NO: 484079 - DNA, 15 bp, Homo sapiens
tgatcttatagccca

SEQ ID NO: 484080 - DNA, 15 bp, Homo sapiens
atgatcttatagccc

SEQ ID NO: 484081 - DNA, 15 bp, Homo sapiens
catgatcttatagcc

SEQ ID NO: 484082 - DNA, 15 bp, Homo sapiens
ccatgatcttatagc

SEQ ID NO: 484083 - DNA, 15 bp, Homo sapiens
tccatgatcttatag

SEQ ID NO: 484084 - DNA, 15 bp, Homo sapiens
atccatgatcttata

SEQ ID NO: 484085 - DNA, 15 bp, Homo sapiens
catccatgatcttat

SEQ ID NO: 484086 - DNA, 15 bp, Homo sapiens
gcatccatgatctta

SEQ ID NO: 484087 - DNA, 15 bp, Homo sapiens
agcatccatgatctt

SEQ ID NO: 484088 - DNA, 15 bp, Homo sapiens
tagcatccatgatct

SEQ ID NO: 484089 - DNA, 15 bp, Homo sapiens
gtagcatccatgatc

SEQ ID NO: 484090 - DNA, 15 bp, Homo sapiens
ggtagcatccatgat

SEQ ID NO: 484091 - DNA, 15 bp, Homo sapiens
tggtagcatccatga

SEQ ID NO: 484092 - DNA, 15 bp, Homo sapiens
ttggtagcatccatg

SEQ ID NO: 484093 - DNA, 15 bp, Homo sapiens
attggtagcatccat

SEQ ID NO: 484094 - DNA, 15 bp, Homo sapiens
tattggtagcatcca

SEQ ID NO: 484095 - DNA, 15 bp, Homo sapiens
atattggtagcatcc

SEQ ID NO: 484096 - DNA, 15 bp, Homo sapiens
gatattggtagcatc

SEQ ID NO: 484097 - DNA, 15 bp, Homo sapiens
ggatattggtagcat

SEQ ID NO: 484098 - DNA, 15 bp, Homo sapiens
aggatattggtagca

SEQ ID NO: 484099 - DNA, 15 bp, Homo sapiens
caggatattggtagc

SEQ ID NO: 484100 - DNA, 15 bp, Homo sapiens
ccaggatattggtag

SEQ ID NO: 484101 - DNA, 15 bp, Homo sapiens
accaggatattggta

SEQ ID NO: 484102 - DNA, 15 bp, Homo sapiens
caccaggatattggt

SEQ ID NO: 484103 - DNA, 15 bp, Homo sapiens
acaccaggatattgg

SEQ ID NO: 484104 - DNA, 15 bp, Homo sapiens
gacaccaggatattg

SEQ ID NO: 484105 - DNA, 15 bp, Homo sapiens
agacaccaggatatt

SEQ ID NO: 484106 - DNA, 15 bp, Homo sapiens
gagacaccaggatat

SEQ ID NO: 484107 - DNA, 15 bp, Homo sapiens
ggagacaccaggata

SEQ ID NO: 484108 - DNA, 15 bp, Homo sapiens
tggagacaccaggat

SEQ ID NO: 484109 - DNA, 15 bp, Homo sapiens
gtggagacaccagga

SEQ ID NO: 484110 - DNA, 15 bp, Homo sapiens
agtggagacaccagg

SEQ ID NO: 484111 - DNA, 15 bp, Homo sapiens
cagtggagacaccag

SEQ ID NO: 484112 - DNA, 15 bp, Homo sapiens
ccagtggagacacca

SEQ ID NO: 484113 - DNA, 15 bp, Homo sapiens
accagtggagacacc

SEQ ID NO: 484114 - DNA, 15 bp, Homo sapiens
gaccagtggagacac

SEQ ID NO: 484115 - DNA, 15 bp, Homo sapiens
agaccagtggagaca

SEQ ID NO: 484116 - DNA, 15 bp, Homo sapiens
tagaccagtggagac

SEQ ID NO: 484117 - DNA, 15 bp, Homo sapiens
atagaccagtggaga

SEQ ID NO: 484118 - DNA, 15 bp, Homo sapiens
gatagaccagtggag

SEQ ID NO: 484119 - DNA, 15 bp, Homo sapiens
agatagaccagtgga

SEQ ID NO: 484120 - DNA, 15 bp, Homo sapiens
gagatagaccagtgg

SEQ ID NO: 484121 - DNA, 15 bp, Homo sapiens
agagatagaccagtg

SEQ ID NO: 484122 - DNA, 15 bp, Homo sapiens
tagagatagaccagt

SEQ ID NO: 484123 - DNA, 15 bp, Homo sapiens
atagagatagaccag

SEQ ID NO: 484124 - DNA, 15 bp, Homo sapiens
gatagagatagacca

SEQ ID NO: 484125 - DNA, 15 bp, Homo sapiens
ggatagagatagacc

SEQ ID NO: 484126 - DNA, 15 bp, Homo sapiens
aggatagagatagac

SEQ ID NO: 484127 - DNA, 15 bp, Homo sapiens
caggatagagataga

SEQ ID NO: 484128 - DNA, 15 bp, Homo sapiens
tcaggatagagatag

SEQ ID NO: 484129 - DNA, 15 bp, Homo sapiens
gtcaggatagagata

SEQ ID NO: 484130 - DNA, 15 bp, Homo sapiens
tgtcaggatagagat

SEQ ID NO: 484131 - DNA, 15 bp, Homo sapiens
atgtcaggatagaga

SEQ ID NO: 484132 - DNA, 15 bp, Homo sapiens
aatgtcaggatagag

SEQ ID NO: 484133 - DNA, 15 bp, Homo sapiens
gaatgtcaggataga

SEQ ID NO: 484134 - DNA, 15 bp, Homo sapiens
ggaatgtcaggatag

SEQ ID NO: 484135 - DNA, 15 bp, Homo sapiens
gggaatgtcaggata

SEQ ID NO: 484136 - DNA, 15 bp, Homo sapiens
tgggaatgtcaggat

SEQ ID NO: 484137 - DNA, 15 bp, Homo sapiens
ttgggaatgtcagga

SEQ ID NO: 484138 - DNA, 15 bp, Homo sapiens
cttgggaatgtcagg

SEQ ID NO: 484139 - DNA, 15 bp, Homo sapiens
ccttgggaatgtcag

SEQ ID NO: 484140 - DNA, 15 bp, Homo sapiens
tccttgggaatgtca

SEQ ID NO: 484141 - DNA, 15 bp, Homo sapiens
ctccttgggaatgtc

SEQ ID NO: 484142 - DNA, 15 bp, Homo sapiens
cctccttgggaatgt

SEQ ID NO: 484143 - DNA, 15 bp, Homo sapiens
tcctccttgggaatg

SEQ ID NO: 484144 - DNA, 15 bp, Homo sapiens
ctcctccttgggaat

SEQ ID NO: 484145 - DNA, 15 bp, Homo sapiens
cctcctccttgggaa

SEQ ID NO: 484146 - DNA, 15 bp, Homo sapiens
gcctcctccttggga

SEQ ID NO: 484147 - DNA, 15 bp, Homo sapiens
tgcctcctccttggg

SEQ ID NO: 484148 - DNA, 15 bp, Homo sapiens
atgcctcctccttgg

SEQ ID NO: 484149 - DNA, 15 bp, Homo sapiens
aatgcctcctccttg

SEQ ID NO: 484150 - DNA, 15 bp, Homo sapiens
gaatgcctcctcctt

SEQ ID NO: 484151 - DNA, 15 bp, Homo sapiens
cgaatgcctcctcct

SEQ ID NO: 484152 - DNA, 15 bp, Homo sapiens
ccgaatgcctcctcc

SEQ ID NO: 484153 - DNA, 15 bp, Homo sapiens
tccgaatgcctcctc

SEQ ID NO: 484154 - DNA, 15 bp, Homo sapiens
ttccgaatgcctcct

SEQ ID NO: 484155 - DNA, 15 bp, Homo sapiens
tttccgaatgcctcc

SEQ ID NO: 484156 - DNA, 15 bp, Homo sapiens
ctttccgaatgcctc

SEQ ID NO: 484157 - DNA, 15 bp, Homo sapiens
actttccgaatgcct

SEQ ID NO: 484158 - DNA, 15 bp, Homo sapiens
tactttccgaatgcc

SEQ ID NO: 484159 - DNA, 15 bp, Homo sapiens
atactttccgaatgc

SEQ ID NO: 484160 - DNA, 15 bp, Homo sapiens
aatactttccgaatg

SEQ ID NO: 484161 - DNA, 15 bp, Homo sapiens
caatactttccgaat

SEQ ID NO: 484162 - DNA, 15 bp, Homo sapiens
acaatactttccgaa

SEQ ID NO: 484163 - DNA, 15 bp, Homo sapiens
gacaatactttccga

SEQ ID NO: 484164 - DNA, 15 bp, Homo sapiens
cgacaatactttccg

SEQ ID NO: 484165 - DNA, 15 bp, Homo sapiens
ccgacaatactttcc

SEQ ID NO: 484166 - DNA, 15 bp, Homo sapiens
gccgacaatactttc

SEQ ID NO: 484167 - DNA, 15 bp, Homo sapiens
ggccgacaatacttt

SEQ ID NO: 484168 - DNA, 15 bp, Homo sapiens
tggccgacaatactt

SEQ ID NO: 484169 - DNA, 15 bp, Homo sapiens
ctggccgacaatact

SEQ ID NO: 484170 - DNA, 15 bp, Homo sapiens
tctggccgacaatac

SEQ ID NO: 484171 - DNA, 15 bp, Homo sapiens
ctctggccgacaata

SEQ ID NO: 484172 - DNA, 15 bp, Homo sapiens
tctctggccgacaat

SEQ ID NO: 484173 - DNA, 15 bp, Homo sapiens
ctctctggccgacaa

SEQ ID NO: 484174 - DNA, 15 bp, Homo sapiens
gctctctggccgaca

SEQ ID NO: 484175 - DNA, 15 bp, Homo sapiens
ggctctctggccgac

SEQ ID NO: 484176 - DNA, 15 bp, Homo sapiens
tggctctctggccga

SEQ ID NO: 484177 - DNA, 15 bp, Homo sapiens
ctggctctctggccg

SEQ ID NO: 484178 - DNA, 15 bp, Homo sapiens
cctggctctctggcc

SEQ ID NO: 484179 - DNA, 15 bp, Homo sapiens
tcctggctctctggc

SEQ ID NO: 484180 - DNA, 15 bp, Homo sapiens
ctcctggctctctgg

SEQ ID NO: 484181 - DNA, 15 bp, Homo sapiens
gctcctggctctctg

SEQ ID NO: 484182 - DNA, 15 bp, Homo sapiens
tgctcctggctctct

SEQ ID NO: 484183 - DNA, 15 bp, Homo sapiens
atgctcctggctctc

SEQ ID NO: 484184 - DNA, 15 bp, Homo sapiens
gatgctcctggctct

SEQ ID NO: 484185 - DNA, 15 bp, Homo sapiens
ggatgctcctggctc

SEQ ID NO: 484186 - DNA, 15 bp, Homo sapiens
aggatgctcctggct

SEQ ID NO: 484187 - DNA, 15 bp, Homo sapiens
caggatgctcctggc

SEQ ID NO: 484188 - DNA, 15 bp, Homo sapiens
tcaggatgctcctgg

SEQ ID NO: 484189 - DNA, 15 bp, Homo sapiens
ttcaggatgctcctg

SEQ ID NO: 484190 - DNA, 15 bp, Homo sapiens
cttcaggatgctcct

SEQ ID NO: 484191 - DNA, 15 bp, Homo sapiens
gcttcaggatgctcc

SEQ ID NO: 484192 - DNA, 15 bp, Homo sapiens
agcttcaggatgctc

SEQ ID NO: 484193 - DNA, 15 bp, Homo sapiens
cagcttcaggatgct

SEQ ID NO: 484194 - DNA, 15 bp, Homo sapiens
tcagcttcaggatgc

SEQ ID NO: 484195 - DNA, 15 bp, Homo sapiens
gtcagcttcaggatg

SEQ ID NO: 484196 - DNA, 15 bp, Homo sapiens
ggtcagcttcaggat

SEQ ID NO: 484197 - DNA, 15 bp, Homo sapiens
gggtcagcttcagga

SEQ ID NO: 484198 - DNA, 15 bp, Homo sapiens
tgggtcagcttcagg

SEQ ID NO: 484199 - DNA, 15 bp, Homo sapiens
ctgggtcagcttcag

SEQ ID NO: 484200 - DNA, 15 bp, Homo sapiens
cctgggtcagcttca

SEQ ID NO: 484201 - DNA, 15 bp, Homo sapiens
acctgggtcagcttc

SEQ ID NO: 484202 - DNA, 15 bp, Homo sapiens
tacctgggtcagctt

SEQ ID NO: 484203 - DNA, 15 bp, Homo sapiens
ctacctgggtcagct

SEQ ID NO: 484204 - DNA, 15 bp, Homo sapiens
actacctgggtcagc

SEQ ID NO: 484205 - DNA, 15 bp, Homo sapiens
aactacctgggtcag

SEQ ID NO: 484206 - DNA, 15 bp, Homo sapiens
caactacctgggtca

SEQ ID NO: 484207 - DNA, 15 bp, Homo sapiens
acaactacctgggtc

SEQ ID NO: 484208 - DNA, 15 bp, Homo sapiens
aacaactacctgggt

SEQ ID NO: 484209 - DNA, 15 bp, Homo sapiens
caacaactacctggg

SEQ ID NO: 484210 - DNA, 15 bp, Homo sapiens
tcaacaactacctgg

SEQ ID NO: 484211 - DNA, 15 bp, Homo sapiens
atcaacaactacctg

SEQ ID NO: 484212 - DNA, 15 bp, Homo sapiens
aatcaacaactacct

SEQ ID NO: 484213 - DNA, 15 bp, Homo sapiens
aaatcaacaactacc

SEQ ID NO: 484214 - DNA, 15 bp, Homo sapiens
aaaatcaacaactac

SEQ ID NO: 484215 - DNA, 15 bp, Homo sapiens
gaaaatcaacaacta

SEQ ID NO: 484216 - DNA, 15 bp, Homo sapiens
ggaaaatcaacaact

SEQ ID NO: 484217 - DNA, 15 bp, Homo sapiens
tggaaaatcaacaac

SEQ ID NO: 484218 - DNA, 15 bp, Homo sapiens
atggaaaatcaacaa

SEQ ID NO: 484219 - DNA, 15 bp, Homo sapiens
catggaaaatcaaca

SEQ ID NO: 484220 - DNA, 15 bp, Homo sapiens
acatggaaaatcaac

SEQ ID NO: 484221 - DNA, 15 bp, Homo sapiens
aacatggaaaatcaa

SEQ ID NO: 484222 - DNA, 15 bp, Homo sapiens
gaacatggaaaatca

SEQ ID NO: 484223 - DNA, 15 bp, Homo sapiens
ggaacatggaaaatc

SEQ ID NO: 484224 - DNA, 15 bp, Homo sapiens
aggaacatggaaaat

SEQ ID NO: 484225 - DNA, 15 bp, Homo sapiens
caggaacatggaaaa

SEQ ID NO: 484226 - DNA, 15 bp, Homo sapiens
ccaggaacatggaaa

SEQ ID NO: 484227 - DNA, 15 bp, Homo sapiens
gccaggaacatggaa

SEQ ID NO: 484228 - DNA, 15 bp, Homo sapiens
tgccaggaacatgga

SEQ ID NO: 484229 - DNA, 15 bp, Homo sapiens
atgccaggaacatgg

SEQ ID NO: 484230 - DNA, 15 bp, Homo sapiens
aatgccaggaacatg

SEQ ID NO: 484231 - DNA, 15 bp, Homo sapiens
aaatgccaggaacat

SEQ ID NO: 484232 - DNA, 15 bp, Homo sapiens
taaatgccaggaaca

SEQ ID NO: 484233 - DNA, 15 bp, Homo sapiens
ttaaatgccaggaac

SEQ ID NO: 484234 - DNA, 15 bp, Homo sapiens
attaaatgccaggaa

SEQ ID NO: 484235 - DNA, 15 bp, Homo sapiens
aattaaatgccagga

SEQ ID NO: 484236 - DNA, 15 bp, Homo sapiens
aaattaaatgccagg

SEQ ID NO: 484237 - DNA, 15 bp, Homo sapiens
aaaattaaatgccag

SEQ ID NO: 484238 - DNA, 15 bp, Homo sapiens
aaaaattaaatgcca

SEQ ID NO: 484239 - DNA, 15 bp, Homo sapiens
caaaaattaaatgcc

SEQ ID NO: 484240 - DNA, 15 bp, Homo sapiens
ccaaaaattaaatgc

SEQ ID NO: 484241 - DNA, 15 bp, Homo sapiens
cccaaaaattaaatg

SEQ ID NO: 484242 - DNA, 15 bp, Homo sapiens
tcccaaaaattaaat

SEQ ID NO: 484243 - DNA, 15 bp, Homo sapiens
ttcccaaaaattaaa

SEQ ID NO: 484244 - DNA, 15 bp, Homo sapiens
tttcccaaaaattaa

SEQ ID NO: 484245 - DNA, 15 bp, Homo sapiens
ttttcccaaaaatta

SEQ ID NO: 484246 - DNA, 15 bp, Homo sapiens
cttttcccaaaaatt

SEQ ID NO: 484247 - DNA, 15 bp, Homo sapiens
acttttcccaaaaat

SEQ ID NO: 484248 - DNA, 15 bp, Homo sapiens
aacttttcccaaaaa

SEQ ID NO: 484249 - DNA, 15 bp, Homo sapiens
caacttttcccaaaa

SEQ ID NO: 484250 - DNA, 15 bp, Homo sapiens
ccaacttttcccaaa

SEQ ID NO: 484251 - DNA, 15 bp, Homo sapiens
tccaacttttcccaa

SEQ ID NO: 484252 - DNA, 15 bp, Homo sapiens
ttccaacttttccca

SEQ ID NO: 484253 - DNA, 15 bp, Homo sapiens
tttccaacttttccc

SEQ ID NO: 484254 - DNA, 15 bp, Homo sapiens
atttccaacttttcc

SEQ ID NO: 484255 - DNA, 15 bp, Homo sapiens
aatttccaacttttc

SEQ ID NO: 484256 - DNA, 15 bp, Homo sapiens
aaatttccaactttt

SEQ ID NO: 484257 - DNA, 15 bp, Homo sapiens
aaaatttccaacttt

SEQ ID NO: 484258 - DNA, 15 bp, Homo sapiens
caaaatttccaactt

SEQ ID NO: 484259 - DNA, 15 bp, Homo sapiens
ccaaaatttccaact

SEQ ID NO: 484260 - DNA, 15 bp, Homo sapiens
cccaaaatttccaac

SEQ ID NO: 484261 - DNA, 15 bp, Homo sapiens
tcccaaaatttccaa

SEQ ID NO: 484262 - DNA, 15 bp, Homo sapiens
atcccaaaatttcca

SEQ ID NO: 484263 - DNA, 15 bp, Homo sapiens
gatcccaaaatttcc

SEQ ID NO: 484264 - DNA, 15 bp, Homo sapiens
ggatcccaaaatttc

SEQ ID NO: 484265 - DNA, 15 bp, Homo sapiens
aggatcccaaaattt

SEQ ID NO: 484266 - DNA, 15 bp, Homo sapiens
aaggatcccaaaatt

SEQ ID NO: 484267 - DNA, 15 bp, Homo sapiens
caaggatcccaaaat

SEQ ID NO: 484268 - DNA, 15 bp, Homo sapiens
ccaaggatcccaaaa

SEQ ID NO: 484269 - DNA, 15 bp, Homo sapiens
tccaaggatcccaaa

SEQ ID NO: 484270 - DNA, 15 bp, Homo sapiens
ctccaaggatcccaa

SEQ ID NO: 484271 - DNA, 15 bp, Homo sapiens
cctccaaggatccca

SEQ ID NO: 484272 - DNA, 15 bp, Homo sapiens
tcctccaaggatccc

SEQ ID NO: 484273 - DNA, 15 bp, Homo sapiens
atcctccaaggatcc

SEQ ID NO: 484274 - DNA, 15 bp, Homo sapiens
tatcctccaaggatc

SEQ ID NO: 484275 - DNA, 15 bp, Homo sapiens
ctatcctccaaggat

SEQ ID NO: 484276 - DNA, 15 bp, Homo sapiens
tctatcctccaagga

SEQ ID NO: 484277 - DNA, 15 bp, Homo sapiens
atctatcctccaagg

SEQ ID NO: 484278 - DNA, 15 bp, Homo sapiens
tatctatcctccaag

SEQ ID NO: 484279 - DNA, 15 bp, Homo sapiens
ctatctatcctccaa

SEQ ID NO: 484280 - DNA, 15 bp, Homo sapiens
cctatctatcctcca

SEQ ID NO: 484281 - DNA, 15 bp, Homo sapiens
gcctatctatcctcc

SEQ ID NO: 484282 - DNA, 15 bp, Homo sapiens
tgcctatctatcctc

SEQ ID NO: 484283 - DNA, 15 bp, Homo sapiens
ttgcctatctatcct

SEQ ID NO: 484284 - DNA, 15 bp, Homo sapiens
tttgcctatctatcc

SEQ ID NO: 484285 - DNA, 15 bp, Homo sapiens
atttgcctatctatc

SEQ ID NO: 484286 - DNA, 15 bp, Homo sapiens
catttgcctatctat

SEQ ID NO: 484287 - DNA, 15 bp, Homo sapiens
gcatttgcctatcta

SEQ ID NO: 484288 - DNA, 15 bp, Homo sapiens
ggcatttgcctatct

SEQ ID NO: 484289 - DNA, 15 bp, Homo sapiens
aggcatttgcctatc

SEQ ID NO: 484290 - DNA, 15 bp, Homo sapiens
caggcatttgcctat

SEQ ID NO: 484291 - DNA, 15 bp, Homo sapiens
tcaggcatttgccta

SEQ ID NO: 484292 - DNA, 15 bp, Homo sapiens
ttcaggcatttgcct

SEQ ID NO: 484293 - DNA, 15 bp, Homo sapiens
attcaggcatttgcc

SEQ ID NO: 484294 - DNA, 15 bp, Homo sapiens
tattcaggcatttgc

SEQ ID NO: 484295 - DNA, 15 bp, Homo sapiens
ttattcaggcatttg

SEQ ID NO: 484296 - DNA, 15 bp, Homo sapiens
gttattcaggcattt

SEQ ID NO: 484297 - DNA, 15 bp, Homo sapiens
ggttattcaggcatt

SEQ ID NO: 484298 - DNA, 15 bp, Homo sapiens
aggttattcaggcat

SEQ ID NO: 484299 - DNA, 15 bp, Homo sapiens
caggttattcaggca

SEQ ID NO: 484300 - DNA, 15 bp, Homo sapiens
ccaggttattcaggc

SEQ ID NO: 484301 - DNA, 15 bp, Homo sapiens
cccaggttattcagg

SEQ ID NO: 484302 - DNA, 15 bp, Homo sapiens
ccccaggttattcag

SEQ ID NO: 484303 - DNA, 15 bp, Homo sapiens
cccccaggttattca

SEQ ID NO: 484304 - DNA, 15 bp, Homo sapiens
tcccccaggttattc

SEQ ID NO: 484305 - DNA, 15 bp, Homo sapiens
atcccccaggttatt

SEQ ID NO: 484306 - DNA, 15 bp, Homo sapiens
tatcccccaggttat

SEQ ID NO: 484307 - DNA, 15 bp, Homo sapiens
ttatcccccaggtta

SEQ ID NO: 484308 - DNA, 15 bp, Homo sapiens
attatcccccaggtt

SEQ ID NO: 484309 - DNA, 15 bp, Homo sapiens
aattatcccccaggt

SEQ ID NO: 484310 - DNA, 15 bp, Homo sapiens
taattatcccccagg

SEQ ID NO: 484311 - DNA, 15 bp, Homo sapiens
ataattatcccccag

SEQ ID NO: 484312 - DNA, 15 bp, Homo sapiens
aataattatccccca

SEQ ID NO: 484313 - DNA, 15 bp, Homo sapiens
aaataattatccccc

SEQ ID NO: 484314 - DNA, 15 bp, Homo sapiens
gaaataattatcccc

SEQ ID NO: 484315 - DNA, 15 bp, Homo sapiens
agaaataattatccc

SEQ ID NO: 484316 - DNA, 15 bp, Homo sapiens
gagaaataattatcc

SEQ ID NO: 484317 - DNA, 15 bp, Homo sapiens
ggagaaataattatc

SEQ ID NO: 484318 - DNA, 15 bp, Homo sapiens
aggagaaataattat

SEQ ID NO: 484319 - DNA, 15 bp, Homo sapiens
aaggagaaataatta

SEQ ID NO: 484320 - DNA, 15 bp, Homo sapiens
taaggagaaataatt

SEQ ID NO: 484321 - DNA, 15 bp, Homo sapiens
ataaggagaaataat

SEQ ID NO: 484322 - DNA, 15 bp, Homo sapiens
cataaggagaaataa

SEQ ID NO: 484323 - DNA, 15 bp, Homo sapiens
ccataaggagaaata

SEQ ID NO: 484324 - DNA, 15 bp, Homo sapiens
cccataaggagaaat

SEQ ID NO: 484325 - DNA, 15 bp, Homo sapiens
tcccataaggagaaa

SEQ ID NO: 484326 - DNA, 15 bp, Homo sapiens
ttcccataaggagaa

SEQ ID NO: 484327 - DNA, 15 bp, Homo sapiens
tttcccataaggaga

SEQ ID NO: 484328 - DNA, 15 bp, Homo sapiens
ctttcccataaggag

SEQ ID NO: 484329 - DNA, 15 bp, Homo sapiens
tctttcccataagga

SEQ ID NO: 484330 - DNA, 15 bp, Homo sapiens
ttctttcccataagg

SEQ ID NO: 484331 - DNA, 15 bp, Homo sapiens
attctttcccataag

SEQ ID NO: 484332 - DNA, 15 bp, Homo sapiens
aattctttcccataa

SEQ ID NO: 484333 - DNA, 15 bp, Homo sapiens
caattctttcccata

SEQ ID NO: 484334 - DNA, 15 bp, Homo sapiens
acaattctttcccat

SEQ ID NO: 484335 - DNA, 15 bp, Homo sapiens
tacaattctttccca

SEQ ID NO: 484336 - DNA, 15 bp, Homo sapiens
ctacaattctttccc

SEQ ID NO: 484337 - DNA, 15 bp, Homo sapiens
actacaattctttcc

SEQ ID NO: 484338 - DNA, 15 bp, Homo sapiens
cactacaattctttc

SEQ ID NO: 484339 - DNA, 15 bp, Homo sapiens
tcactacaattcttt

SEQ ID NO: 484340 - DNA, 15 bp, Homo sapiens
ctcactacaattctt

SEQ ID NO: 484341 - DNA, 15 bp, Homo sapiens
actcactacaattct

SEQ ID NO: 484342 - DNA, 15 bp, Homo sapiens
cactcactacaattc

SEQ ID NO: 484343 - DNA, 15 bp, Homo sapiens
gcactcactacaatt

SEQ ID NO: 484344 - DNA, 15 bp, Homo sapiens
agcactcactacaat

SEQ ID NO: 484345 - DNA, 15 bp, Homo sapiens
aagcactcactacaa

SEQ ID NO: 484346 - DNA, 15 bp, Homo sapiens
aaagcactcactaca

SEQ ID NO: 484347 - DNA, 15 bp, Homo sapiens
aaaagcactcactac

SEQ ID NO: 484348 - DNA, 15 bp, Homo sapiens
caaaagcactcacta

SEQ ID NO: 484349 - DNA, 15 bp, Homo sapiens
acaaaagcactcact

SEQ ID NO: 484350 - DNA, 15 bp, Homo sapiens
aacaaaagcactcac

SEQ ID NO: 484351 - DNA, 15 bp, Homo sapiens
caacaaaagcactca

SEQ ID NO: 484352 - DNA, 15 bp, Homo sapiens
ccaacaaaagcactc

SEQ ID NO: 484353 - DNA, 15 bp, Homo sapiens
cccaacaaaagcact

SEQ ID NO: 484354 - DNA, 15 bp, Homo sapiens
ccccaacaaaagcac

SEQ ID NO: 484355 - DNA, 15 bp, Homo sapiens
accccaacaaaagca

SEQ ID NO: 484356 - DNA, 15 bp, Homo sapiens
caccccaacaaaagc

SEQ ID NO: 484357 - DNA, 15 bp, Homo sapiens
tcaccccaacaaaag

SEQ ID NO: 484358 - DNA, 15 bp, Homo sapiens
gtcaccccaacaaaa

SEQ ID NO: 484359 - DNA, 15 bp, Homo sapiens
ggtcaccccaacaaa

SEQ ID NO: 484360 - DNA, 15 bp, Homo sapiens
cggtcaccccaacaa

SEQ ID NO: 484361 - DNA, 15 bp, Homo sapiens
tcggtcaccccaaca

SEQ ID NO: 484362 - DNA, 15 bp, Homo sapiens
atcggtcaccccaac

SEQ ID NO: 484363 - DNA, 15 bp, Homo sapiens
catcggtcaccccaa

SEQ ID NO: 484364 - DNA, 15 bp, Homo sapiens
ccatcggtcacccca

SEQ ID NO: 484365 - DNA, 15 bp, Homo sapiens
cccatcggtcacccc

SEQ ID NO: 484366 - DNA, 15 bp, Homo sapiens
tcccatcggtcaccc

SEQ ID NO: 484367 - DNA, 15 bp, Homo sapiens
atcccatcggtcacc

SEQ ID NO: 484368 - DNA, 15 bp, Homo sapiens
aatcccatcggtcac

SEQ ID NO: 484369 - DNA, 15 bp, Homo sapiens
aaatcccatcggtca

SEQ ID NO: 484370 - DNA, 15 bp, Homo sapiens
caaatcccatcggtc

SEQ ID NO: 484371 - DNA, 15 bp, Homo sapiens
tcaaatcccatcggt

SEQ ID NO: 484372 - DNA, 15 bp, Homo sapiens
ctcaaatcccatcgg

SEQ ID NO: 484373 - DNA, 15 bp, Homo sapiens
tctcaaatcccatcg

SEQ ID NO: 484374 - DNA, 15 bp, Homo sapiens
ctctcaaatcccatc

SEQ ID NO: 484375 - DNA, 15 bp, Homo sapiens
cctctcaaatcccat

SEQ ID NO: 484376 - DNA, 15 bp, Homo sapiens
tcctctcaaatccca

SEQ ID NO: 484377 - DNA, 15 bp, Homo sapiens
ctcctctcaaatccc

SEQ ID NO: 484378 - DNA, 15 bp, Homo sapiens
tctcctctcaaatcc

SEQ ID NO: 484379 - DNA, 15 bp, Homo sapiens
ttctcctctcaaatc

SEQ ID NO: 484380 - DNA, 15 bp, Homo sapiens
attctcctctcaaat

SEQ ID NO: 484381 - DNA, 15 bp, Homo sapiens
gattctcctctcaaa

SEQ ID NO: 484382 - DNA, 15 bp, Homo sapiens
tgattctcctctcaa

SEQ ID NO: 484383 - DNA, 15 bp, Homo sapiens
ctgattctcctctca

SEQ ID NO: 484384 - DNA, 15 bp, Homo sapiens
tctgattctcctctc

SEQ ID NO: 484385 - DNA, 15 bp, Homo sapiens
ttctgattctcctct

SEQ ID NO: 484386 - DNA, 15 bp, Homo sapiens
attctgattctcctc

SEQ ID NO: 484387 - DNA, 15 bp, Homo sapiens
gattctgattctcct

SEQ ID NO: 484388 - DNA, 15 bp, Homo sapiens
tgattctgattctcc

SEQ ID NO: 484389 - DNA, 15 bp, Homo sapiens
gtgattctgattctc

SEQ ID NO: 484390 - DNA, 15 bp, Homo sapiens
agtgattctgattct

SEQ ID NO: 484391 - DNA, 15 bp, Homo sapiens
aagtgattctgattc

SEQ ID NO: 484392 - DNA, 15 bp, Homo sapiens
taagtgattctgatt

SEQ ID NO: 484393 - DNA, 15 bp, Homo sapiens
ctaagtgattctgat

SEQ ID NO: 484394 - DNA, 15 bp, Homo sapiens
tctaagtgattctga

SEQ ID NO: 484395 - DNA, 15 bp, Homo sapiens
ctctaagtgattctg

SEQ ID NO: 484396 - DNA, 15 bp, Homo sapiens
actctaagtgattct

SEQ ID NO: 484397 - DNA, 15 bp, Homo sapiens
tactctaagtgattc

SEQ ID NO: 484398 - DNA, 15 bp, Homo sapiens
ctactctaagtgatt

SEQ ID NO: 484399 - DNA, 15 bp, Homo sapiens
actactctaagtgat

SEQ ID NO: 484400 - DNA, 15 bp, Homo sapiens
cactactctaagtga

SEQ ID NO: 484401 - DNA, 15 bp, Homo sapiens
acactactctaagtg

SEQ ID NO: 484402 - DNA, 15 bp, Homo sapiens
tacactactctaagt

SEQ ID NO: 484403 - DNA, 15 bp, Homo sapiens
ctacactactctaag

SEQ ID NO: 484404 - DNA, 15 bp, Homo sapiens
actacactactctaa

SEQ ID NO: 484405 - DNA, 15 bp, Homo sapiens
aactacactactcta

SEQ ID NO: 484406 - DNA, 15 bp, Homo sapiens
gaactacactactct

SEQ ID NO: 484407 - DNA, 15 bp, Homo sapiens
ggaactacactactc

SEQ ID NO: 484408 - DNA, 15 bp, Homo sapiens
aggaactacactact

SEQ ID NO: 484409 - DNA, 15 bp, Homo sapiens
caggaactacactac

SEQ ID NO: 484410 - DNA, 15 bp, Homo sapiens
gcaggaactacacta

SEQ ID NO: 484411 - DNA, 15 bp, Homo sapiens
agcaggaactacact

SEQ ID NO: 484412 - DNA, 15 bp, Homo sapiens
gagcaggaactacac

SEQ ID NO: 484413 - DNA, 15 bp, Homo sapiens
ggagcaggaactaca

SEQ ID NO: 484414 - DNA, 15 bp, Homo sapiens
tggagcaggaactac

SEQ ID NO: 484415 - DNA, 15 bp, Homo sapiens
gtggagcaggaacta

SEQ ID NO: 484416 - DNA, 15 bp, Homo sapiens
tgtggagcaggaact

SEQ ID NO: 484417 - DNA, 15 bp, Homo sapiens
ctgtggagcaggaac

SEQ ID NO: 484418 - DNA, 15 bp, Homo sapiens
tctgtggagcaggaa

SEQ ID NO: 484419 - DNA, 15 bp, Homo sapiens
ctctgtggagcagga

SEQ ID NO: 484420 - DNA, 15 bp, Homo sapiens
tctctgtggagcagg

SEQ ID NO: 484421 - DNA, 15 bp, Homo sapiens
ctctctgtggagcag

SEQ ID NO: 484422 - DNA, 15 bp, Homo sapiens
actctctgtggagca

SEQ ID NO: 484423 - DNA, 15 bp, Homo sapiens
cactctctgtggagc

SEQ ID NO: 484424 - DNA, 15 bp, Homo sapiens
gcactctctgtggag

SEQ ID NO: 484425 - DNA, 15 bp, Homo sapiens
tgcactctctgtgga

SEQ ID NO: 484426 - DNA, 15 bp, Homo sapiens
atgcactctctgtgg

SEQ ID NO: 484427 - DNA, 15 bp, Homo sapiens
catgcactctctgtg

SEQ ID NO: 484428 - DNA, 15 bp, Homo sapiens
tcatgcactctctgt

SEQ ID NO: 484429 - DNA, 15 bp, Homo sapiens
ctcatgcactctctg

SEQ ID NO: 484430 - DNA, 15 bp, Homo sapiens
actcatgcactctct

SEQ ID NO: 484431 - DNA, 15 bp, Homo sapiens
gactcatgcactctc

SEQ ID NO: 484432 - DNA, 15 bp, Homo sapiens
agactcatgcactct

SEQ ID NO: 484433 - DNA, 15 bp, Homo sapiens
tagactcatgcactc

SEQ ID NO: 484434 - DNA, 15 bp, Homo sapiens
ttagactcatgcact

SEQ ID NO: 484435 - DNA, 15 bp, Homo sapiens
tttagactcatgcac

SEQ ID NO: 484436 - DNA, 15 bp, Homo sapiens
ctttagactcatgca

SEQ ID NO: 484437 - DNA, 15 bp, Homo sapiens
tctttagactcatgc

SEQ ID NO: 484438 - DNA, 15 bp, Homo sapiens
ctctttagactcatg

SEQ ID NO: 484439 - DNA, 15 bp, Homo sapiens
cctctttagactcat

SEQ ID NO: 484440 - DNA, 15 bp, Homo sapiens
ccctctttagactca

SEQ ID NO: 484441 - DNA, 15 bp, Homo sapiens
cccctctttagactc

SEQ ID NO: 484442 - DNA, 15 bp, Homo sapiens
tcccctctttagact

SEQ ID NO: 484443 - DNA, 15 bp, Homo sapiens
atcccctctttagac

SEQ ID NO: 484444 - DNA, 15 bp, Homo sapiens
tatcccctctttaga

SEQ ID NO: 484445 - DNA, 15 bp, Homo sapiens
gtatcccctctttag

SEQ ID NO: 484446 - DNA, 15 bp, Homo sapiens
tgtatcccctcttta

SEQ ID NO: 484447 - DNA, 15 bp, Homo sapiens
ctgtatcccctcttt

SEQ ID NO: 484448 - DNA, 15 bp, Homo sapiens
gctgtatcccctctt

SEQ ID NO: 484449 - DNA, 15 bp, Homo sapiens
ggctgtatcccctct

SEQ ID NO: 484450 - DNA, 15 bp, Homo sapiens
aggctgtatcccctc

SEQ ID NO: 484451 - DNA, 15 bp, Homo sapiens
caggctgtatcccct

SEQ ID NO: 484452 - DNA, 15 bp, Homo sapiens
ccaggctgtatcccc

SEQ ID NO: 484453 - DNA, 15 bp, Homo sapiens
cccaggctgtatccc

SEQ ID NO: 484454 - DNA, 15 bp, Homo sapiens
gcccaggctgtatcc

SEQ ID NO: 484455 - DNA, 15 bp, Homo sapiens
tgcccaggctgtatc

SEQ ID NO: 484456 - DNA, 15 bp, Homo sapiens
ttgcccaggctgtat

SEQ ID NO: 484457 - DNA, 15 bp, Homo sapiens
attgcccaggctgta

SEQ ID NO: 484458 - DNA, 15 bp, Homo sapiens
tattgcccaggctgt

SEQ ID NO: 484459 - DNA, 15 bp, Homo sapiens
atattgcccaggctg

SEQ ID NO: 484460 - DNA, 15 bp, Homo sapiens
catattgcccaggct

SEQ ID NO: 484461 - DNA, 15 bp, Homo sapiens
ccatattgcccaggc

SEQ ID NO: 484462 - DNA, 15 bp, Homo sapiens
accatattgcccagg

SEQ ID NO: 484463 - DNA, 15 bp, Homo sapiens
caccatattgcccag

SEQ ID NO: 484464 - DNA, 15 bp, Homo sapiens
tcaccatattgccca

SEQ ID NO: 484465 - DNA, 15 bp, Homo sapiens
ttcaccatattgccc

SEQ ID NO: 484466 - DNA, 15 bp, Homo sapiens
tttcaccatattgcc

SEQ ID NO: 484467 - DNA, 15 bp, Homo sapiens
gtttcaccatattgc

SEQ ID NO: 484468 - DNA, 15 bp, Homo sapiens
aggtttcaccatatt

SEQ ID NO: 484469 - DNA, 15 bp, Homo sapiens
gaggtttcaccatat

SEQ ID NO: 484470 - DNA, 15 bp, Homo sapiens
cgaggtttcaccata

SEQ ID NO: 484471 - DNA, 15 bp, Homo sapiens
acgaggtttcaccat

SEQ ID NO: 484472 - DNA, 15 bp, Homo sapiens
gacgaggtttcacca

SEQ ID NO: 484473 - DNA, 15 bp, Homo sapiens
agacgaggtttcacc

SEQ ID NO: 484474 - DNA, 15 bp, Homo sapiens
gagacgaggtttcac

SEQ ID NO: 484475 - DNA, 15 bp, Homo sapiens
agagacgaggtttca

SEQ ID NO: 484476 - DNA, 15 bp, Homo sapiens
tagagacgaggtttc

SEQ ID NO: 484477 - DNA, 15 bp, Homo sapiens
gtagagacgaggttt

SEQ ID NO: 484478 - DNA, 15 bp, Homo sapiens
tgtagagacgaggtt

SEQ ID NO: 484479 - DNA, 15 bp, Homo sapiens
ttgtagagacgaggt

SEQ ID NO: 484480 - DNA, 15 bp, Homo sapiens
tttgtagagacgagg

SEQ ID NO: 484481 - DNA, 15 bp, Homo sapiens
ttttgtagagacgag

SEQ ID NO: 484482 - DNA, 15 bp, Homo sapiens
tttttgtagagacga

SEQ ID NO: 484483 - DNA, 15 bp, Homo sapiens
ttttttgtagagacg

SEQ ID NO: 484484 - DNA, 15 bp, Homo sapiens
attttttgtagagac

SEQ ID NO: 484485 - DNA, 15 bp, Homo sapiens
gattttttgtagaga

SEQ ID NO: 484486 - DNA, 15 bp, Homo sapiens
ggattttttgtagag

SEQ ID NO: 484487 - DNA, 15 bp, Homo sapiens
tggattttttgtaga

SEQ ID NO: 484488 - DNA, 15 bp, Homo sapiens
ttggattttttgtag

SEQ ID NO: 484489 - DNA, 15 bp, Homo sapiens
tttggattttttgta

SEQ ID NO: 484490 - DNA, 15 bp, Homo sapiens
ttttggattttttgt

SEQ ID NO: 484491 - DNA, 15 bp, Homo sapiens
tttttggattttttg

SEQ ID NO: 484492 - DNA, 15 bp, Homo sapiens
ttttttggatttttt

SEQ ID NO: 484493 - DNA, 15 bp, Homo sapiens
tttttttggattttt

SEQ ID NO: 484494 - DNA, 15 bp, Homo sapiens
atttttttggatttt

SEQ ID NO: 484495 - DNA, 15 bp, Homo sapiens
aatttttttggattt

SEQ ID NO: 484496 - DNA, 15 bp, Homo sapiens
taatttttttggatt

SEQ ID NO: 484497 - DNA, 15 bp, Homo sapiens
gtaatttttttggat

SEQ ID NO: 484498 - DNA, 15 bp, Homo sapiens
ggtaatttttttgga

SEQ ID NO: 484499 - DNA, 15 bp, Homo sapiens
gggtaatttttttgg

SEQ ID NO: 484500 - DNA, 15 bp, Homo sapiens
cgggtaatttttttg

SEQ ID NO: 484501 - DNA, 15 bp, Homo sapiens
ccgggtaattttttt

SEQ ID NO: 484502 - DNA, 15 bp, Homo sapiens
accgggtaatttttt

SEQ ID NO: 484503 - DNA, 15 bp, Homo sapiens
caccgggtaattttt

SEQ ID NO: 484504 - DNA, 15 bp, Homo sapiens
acaccgggtaatttt

SEQ ID NO: 484505 - DNA, 15 bp, Homo sapiens
cacaccgggtaattt

SEQ ID NO: 484506 - DNA, 15 bp, Homo sapiens
ccacaccgggtaatt

SEQ ID NO: 484507 - DNA, 15 bp, Homo sapiens
accacaccgggtaat

SEQ ID NO: 484508 - DNA, 15 bp, Homo sapiens
caccacaccgggtaa

SEQ ID NO: 484509 - DNA, 15 bp, Homo sapiens
ccaccacaccgggta

SEQ ID NO: 484510 - DNA, 15 bp, Homo sapiens
gccaccacaccgggt

SEQ ID NO: 484511 - DNA, 15 bp, Homo sapiens
tgccaccacaccggg

SEQ ID NO: 484512 - DNA, 15 bp, Homo sapiens
gtgccaccacaccgg

SEQ ID NO: 484513 - DNA, 15 bp, Homo sapiens
cgtgccaccacaccg

SEQ ID NO: 484514 - DNA, 15 bp, Homo sapiens
gcgtgccaccacacc

SEQ ID NO: 484515 - DNA, 15 bp, Homo sapiens
tgcgtgccaccacac

SEQ ID NO: 484516 - DNA, 15 bp, Homo sapiens
atgcgtgccaccaca

SEQ ID NO: 484517 - DNA, 15 bp, Homo sapiens
aatgcgtgccaccac

SEQ ID NO: 484518 - DNA, 15 bp, Homo sapiens
aaatgcgtgccacca

SEQ ID NO: 484519 - DNA, 15 bp, Homo sapiens
caaatgcgtgccacc

SEQ ID NO: 484520 - DNA, 15 bp, Homo sapiens
acaaatgcgtgccac

SEQ ID NO: 484521 - DNA, 15 bp, Homo sapiens
tacaaatgcgtgcca

SEQ ID NO: 484522 - DNA, 15 bp, Homo sapiens
ctacaaatgcgtgcc

SEQ ID NO: 484523 - DNA, 15 bp, Homo sapiens
actacaaatgcgtgc

SEQ ID NO: 484524 - DNA, 15 bp, Homo sapiens
gactacaaatgcgtg

SEQ ID NO: 484525 - DNA, 15 bp, Homo sapiens
cgactacaaatgcgt

SEQ ID NO: 484526 - DNA, 15 bp, Homo sapiens
acgactacaaatgcg

SEQ ID NO: 484527 - DNA, 15 bp, Homo sapiens
tacgactacaaatgc

SEQ ID NO: 484528 - DNA, 15 bp, Homo sapiens
ctacgactacaaatg

SEQ ID NO: 484529 - DNA, 15 bp, Homo sapiens
gctacgactacaaat

SEQ ID NO: 484530 - DNA, 15 bp, Homo sapiens
agctacgactacaaa

SEQ ID NO: 484531 - DNA, 15 bp, Homo sapiens
tagctacgactacaa

SEQ ID NO: 484532 - DNA, 15 bp, Homo sapiens
gtagctacgactaca

SEQ ID NO: 484533 - DNA, 15 bp, Homo sapiens
agtagctacgactac

SEQ ID NO: 484534 - DNA, 15 bp, Homo sapiens
aagtagctacgacta

SEQ ID NO: 484535 - DNA, 15 bp, Homo sapiens
caagtagctacgact

SEQ ID NO: 484536 - DNA, 15 bp, Homo sapiens
ccaagtagctacgac

SEQ ID NO: 484537 - DNA, 15 bp, Homo sapiens
cccaagtagctacga

SEQ ID NO: 484538 - DNA, 15 bp, Homo sapiens
tcccaagtagctacg

SEQ ID NO: 484539 - DNA, 15 bp, Homo sapiens
ctcccaagtagctac

SEQ ID NO: 484540 - DNA, 15 bp, Homo sapiens
aggtgatcctcccac

SEQ ID NO: 484541 - DNA, 15 bp, Homo sapiens
caggtgatcctccca

SEQ ID NO: 484542 - DNA, 15 bp, Homo sapiens
tcaggtgatcctccc

SEQ ID NO: 484543 - DNA, 15 bp, Homo sapiens
ctcaggtgatcctcc

SEQ ID NO: 484544 - DNA, 15 bp, Homo sapiens
gctcaggtgatcctc

SEQ ID NO: 484545 - DNA, 15 bp, Homo sapiens
ggctcaggtgatcct

SEQ ID NO: 484546 - DNA, 15 bp, Homo sapiens
tggctcaggtgatcc

SEQ ID NO: 484547 - DNA, 15 bp, Homo sapiens
ttggctcaggtgatc

SEQ ID NO: 484548 - DNA, 15 bp, Homo sapiens
cttggctcaggtgat

SEQ ID NO: 484549 - DNA, 15 bp, Homo sapiens
ccttggctcaggtga

SEQ ID NO: 484550 - DNA, 15 bp, Homo sapiens
tccttggctcaggtg

SEQ ID NO: 484551 - DNA, 15 bp, Homo sapiens
ctccttggctcaggt

SEQ ID NO: 484552 - DNA, 15 bp, Homo sapiens
actccttggctcagg

SEQ ID NO: 484553 - DNA, 15 bp, Homo sapiens
aactccttggctcag

SEQ ID NO: 484554 - DNA, 15 bp, Homo sapiens
gaactccttggctca

SEQ ID NO: 484555 - DNA, 15 bp, Homo sapiens
tgaactccttggctc

SEQ ID NO: 484556 - DNA, 15 bp, Homo sapiens
ttgaactccttggct

SEQ ID NO: 484557 - DNA, 15 bp, Homo sapiens
cttgaactccttggc

SEQ ID NO: 484558 - DNA, 15 bp, Homo sapiens
ccttgaactccttgg

SEQ ID NO: 484559 - DNA, 15 bp, Homo sapiens
gccttgaactccttg

SEQ ID NO: 484560 - DNA, 15 bp, Homo sapiens
agccttgaactcctt

SEQ ID NO: 484561 - DNA, 15 bp, Homo sapiens
cagccttgaactcct

SEQ ID NO: 484562 - DNA, 15 bp, Homo sapiens
acagccttgaactcc

SEQ ID NO: 484563 - DNA, 15 bp, Homo sapiens
tacagccttgaactc

SEQ ID NO: 484564 - DNA, 15 bp, Homo sapiens
ctacagccttgaact

SEQ ID NO: 484565 - DNA, 15 bp, Homo sapiens
actacagccttgaac

SEQ ID NO: 484566 - DNA, 15 bp, Homo sapiens
cactacagccttgaa

SEQ ID NO: 484567 - DNA, 15 bp, Homo sapiens
tcactacagccttga

SEQ ID NO: 484568 - DNA, 15 bp, Homo sapiens
ctcactacagccttg

SEQ ID NO: 484569 - DNA, 15 bp, Homo sapiens
gctcactacagcctt

SEQ ID NO: 484570 - DNA, 15 bp, Homo sapiens
cgctcactacagcct

SEQ ID NO: 484571 - DNA, 15 bp, Homo sapiens
ccgctcactacagcc

SEQ ID NO: 484572 - DNA, 15 bp, Homo sapiens
accgctcactacagc

SEQ ID NO: 484573 - DNA, 15 bp, Homo sapiens
caccgctcactacag

SEQ ID NO: 484574 - DNA, 15 bp, Homo sapiens
tcaccgctcactaca

SEQ ID NO: 484575 - DNA, 15 bp, Homo sapiens
atcaccgctcactac

SEQ ID NO: 484576 - DNA, 15 bp, Homo sapiens
gatcaccgctcacta

SEQ ID NO: 484577 - DNA, 15 bp, Homo sapiens
tgatcaccgctcact

SEQ ID NO: 484578 - DNA, 15 bp, Homo sapiens
atgatcaccgctcac

SEQ ID NO: 484579 - DNA, 15 bp, Homo sapiens
catgatcaccgctca

SEQ ID NO: 484580 - DNA, 15 bp, Homo sapiens
gcatgatcaccgctc

SEQ ID NO: 484581 - DNA, 15 bp, Homo sapiens
ggcatgatcaccgct

SEQ ID NO: 484582 - DNA, 15 bp, Homo sapiens
tggcatgatcaccgc

SEQ ID NO: 484583 - DNA, 15 bp, Homo sapiens
gtggcatgatcaccg

SEQ ID NO: 484584 - DNA, 15 bp, Homo sapiens
ggtggcatgatcacc

SEQ ID NO: 484585 - DNA, 15 bp, Homo sapiens
cggtggcatgatcac

SEQ ID NO: 484586 - DNA, 15 bp, Homo sapiens
gcggtggcatgatca

SEQ ID NO: 484587 - DNA, 15 bp, Homo sapiens
tgcggtggcatgatc

SEQ ID NO: 484588 - DNA, 15 bp, Homo sapiens
gtgcggtggcatgat

SEQ ID NO: 484589 - DNA, 15 bp, Homo sapiens
agtgcggtggcatga

SEQ ID NO: 484590 - DNA, 15 bp, Homo sapiens
gagtgcggtggcatg

SEQ ID NO: 484591 - DNA, 15 bp, Homo sapiens
ggagtgcggtggcat

SEQ ID NO: 484592 - DNA, 15 bp, Homo sapiens
tggagtgcggtggca

SEQ ID NO: 484593 - DNA, 15 bp, Homo sapiens
agccaggctggagtg

SEQ ID NO: 484594 - DNA, 15 bp, Homo sapiens
cagccaggctggagt

SEQ ID NO: 484595 - DNA, 15 bp, Homo sapiens
tcagccaggctggag

SEQ ID NO: 484596 - DNA, 15 bp, Homo sapiens
atcagccaggctgga

SEQ ID NO: 484597 - DNA, 15 bp, Homo sapiens
tatcagccaggctgg

SEQ ID NO: 484598 - DNA, 15 bp, Homo sapiens
ctatcagccaggctg

SEQ ID NO: 484599 - DNA, 15 bp, Homo sapiens
tctatcagccaggct

SEQ ID NO: 484600 - DNA, 15 bp, Homo sapiens
ctctatcagccaggc

SEQ ID NO: 484601 - DNA, 15 bp, Homo sapiens
actctatcagccagg

SEQ ID NO: 484602 - DNA, 15 bp, Homo sapiens
cactctatcagccag

SEQ ID NO: 484603 - DNA, 15 bp, Homo sapiens
tcactctatcagcca

SEQ ID NO: 484604 - DNA, 15 bp, Homo sapiens
ctcactctatcagcc

SEQ ID NO: 484605 - DNA, 15 bp, Homo sapiens
tctcactctatcagc

SEQ ID NO: 484606 - DNA, 15 bp, Homo sapiens
atctcactctatcag

SEQ ID NO: 484607 - DNA, 15 bp, Homo sapiens
tatctcactctatca

SEQ ID NO: 484608 - DNA, 15 bp, Homo sapiens
gtatctcactctatc

SEQ ID NO: 484609 - DNA, 15 bp, Homo sapiens
agtatctcactctat

SEQ ID NO: 484610 - DNA, 15 bp, Homo sapiens
cagtatctcactcta

SEQ ID NO: 484611 - DNA, 15 bp, Homo sapiens
acagtatctcactct

SEQ ID NO: 484612 - DNA, 15 bp, Homo sapiens
cacagtatctcactc

SEQ ID NO: 484613 - DNA, 15 bp, Homo sapiens
acacagtatctcact

SEQ ID NO: 484614 - DNA, 15 bp, Homo sapiens
gacacagtatctcac

SEQ ID NO: 484615 - DNA, 15 bp, Homo sapiens
tgacacagtatctca

SEQ ID NO: 484616 - DNA, 15 bp, Homo sapiens
ttgacacagtatctc

SEQ ID NO: 484617 - DNA, 15 bp, Homo sapiens
tttgacacagtatct

SEQ ID NO: 484618 - DNA, 15 bp, Homo sapiens
ttttgacacagtatc

SEQ ID NO: 484619 - DNA, 15 bp, Homo sapiens
tttttgacacagtat

SEQ ID NO: 484620 - DNA, 15 bp, Homo sapiens
ttttttgacacagta

SEQ ID NO: 484621 - DNA, 15 bp, Homo sapiens
attttttgacacagt

SEQ ID NO: 484622 - DNA, 15 bp, Homo sapiens
tattttttgacacag

SEQ ID NO: 484623 - DNA, 15 bp, Homo sapiens
ttattttttgacaca

SEQ ID NO: 484624 - DNA, 15 bp, Homo sapiens
tttattttttgacac

SEQ ID NO: 484625 - DNA, 15 bp, Homo sapiens
ttttattttttgaca

SEQ ID NO: 484626 - DNA, 15 bp, Homo sapiens
tttttattttttgac

SEQ ID NO: 484627 - DNA, 15 bp, Homo sapiens
atttttattttttga

SEQ ID NO: 484628 - DNA, 15 bp, Homo sapiens
tatttttattttttg

SEQ ID NO: 484629 - DNA, 15 bp, Homo sapiens
ctttatttttatttt

SEQ ID NO: 484630 - DNA, 15 bp, Homo sapiens
tctttatttttattt

SEQ ID NO: 484631 - DNA, 15 bp, Homo sapiens
ctctttatttttatt

SEQ ID NO: 484632 - DNA, 15 bp, Homo sapiens
cctctttatttttat

SEQ ID NO: 484633 - DNA, 15 bp, Homo sapiens
ccctctttattttta

SEQ ID NO: 484634 - DNA, 15 bp, Homo sapiens
cccctctttattttt

SEQ ID NO: 484635 - DNA, 15 bp, Homo sapiens
tcccctctttatttt

SEQ ID NO: 484636 - DNA, 15 bp, Homo sapiens
atcccctctttattt

SEQ ID NO: 484637 - DNA, 15 bp, Homo sapiens
gatcccctctttatt

SEQ ID NO: 484638 - DNA, 15 bp, Homo sapiens
tgatcccctctttat

SEQ ID NO: 484639 - DNA, 15 bp, Homo sapiens
ttgatcccctcttta

SEQ ID NO: 484640 - DNA, 15 bp, Homo sapiens
attgatcccctcttt

SEQ ID NO: 484641 - DNA, 15 bp, Homo sapiens
tattgatcccctctt

SEQ ID NO: 484642 - DNA, 15 bp, Homo sapiens
gtattgatcccctct

SEQ ID NO: 484643 - DNA, 15 bp, Homo sapiens
tgtattgatcccctc

SEQ ID NO: 484644 - DNA, 15 bp, Homo sapiens
gtgtattgatcccct

SEQ ID NO: 484645 - DNA, 15 bp, Homo sapiens
tgtgtattgatcccc

SEQ ID NO: 484646 - DNA, 15 bp, Homo sapiens
atgtgtattgatccc

SEQ ID NO: 484647 - DNA, 15 bp, Homo sapiens
tatgtgtattgatcc

SEQ ID NO: 484648 - DNA, 15 bp, Homo sapiens
gtatgtgtattgatc

SEQ ID NO: 484649 - DNA, 15 bp, Homo sapiens
cgtatgtgtattgat

SEQ ID NO: 484650 - DNA, 15 bp, Homo sapiens
acgtatgtgtattga

SEQ ID NO: 484651 - DNA, 15 bp, Homo sapiens
gacgtatgtgtattg

SEQ ID NO: 484652 - DNA, 15 bp, Homo sapiens
ggacgtatgtgtatt

SEQ ID NO: 484653 - DNA, 15 bp, Homo sapiens
gggacgtatgtgtat

SEQ ID NO: 484654 - DNA, 15 bp, Homo sapiens
ggggacgtatgtgta

SEQ ID NO: 484655 - DNA, 15 bp, Homo sapiens
gggggacgtatgtgt

SEQ ID NO: 484656 - DNA, 15 bp, Homo sapiens
tgggggacgtatgtg

SEQ ID NO: 484657 - DNA, 15 bp, Homo sapiens
ttgggggacgtatgt

SEQ ID NO: 484658 - DNA, 15 bp, Homo sapiens
tttgggggacgtatg

SEQ ID NO: 484659 - DNA, 15 bp, Homo sapiens
ttttgggggacgtat

SEQ ID NO: 484660 - DNA, 15 bp, Homo sapiens
gttttgggggacgta

SEQ ID NO: 484661 - DNA, 15 bp, Homo sapiens
tgttttgggggacgt

SEQ ID NO: 484662 - DNA, 15 bp, Homo sapiens
atgttttgggggacg

SEQ ID NO: 484663 - DNA, 15 bp, Homo sapiens
catgttttgggggac

SEQ ID NO: 484664 - DNA, 15 bp, Homo sapiens
gcatgttttggggga

SEQ ID NO: 484665 - DNA, 15 bp, Homo sapiens
ggcatgttttggggg

SEQ ID NO: 484666 - DNA, 15 bp, Homo sapiens
aggcatgttttgggg

SEQ ID NO: 484667 - DNA, 15 bp, Homo sapiens
caggcatgttttggg

SEQ ID NO: 484668 - DNA, 15 bp, Homo sapiens
tcaggcatgttttgg

SEQ ID NO: 484669 - DNA, 15 bp, Homo sapiens
ttcaggcatgttttg

SEQ ID NO: 484670 - DNA, 15 bp, Homo sapiens
tttcaggcatgtttt

SEQ ID NO: 484671 - DNA, 15 bp, Homo sapiens
gtttcaggcatgttt

SEQ ID NO: 484672 - DNA, 15 bp, Homo sapiens
tgtttcaggcatgtt

SEQ ID NO: 484673 - DNA, 15 bp, Homo sapiens
gtgtttcaggcatgt

SEQ ID NO: 484674 - DNA, 15 bp, Homo sapiens
cgtgtttcaggcatg

SEQ ID NO: 484675 - DNA, 15 bp, Homo sapiens
tcgtgtttcaggcat

SEQ ID NO: 484676 - DNA, 15 bp, Homo sapiens
ctcgtgtttcaggca

SEQ ID NO: 484677 - DNA, 15 bp, Homo sapiens
tctcgtgtttcaggc

SEQ ID NO: 484678 - DNA, 15 bp, Homo sapiens
ttctcgtgtttcagg

SEQ ID NO: 484679 - DNA, 15 bp, Homo sapiens
cttctcgtgtttcag

SEQ ID NO: 484680 - DNA, 15 bp, Homo sapiens
ccttctcgtgtttca

SEQ ID NO: 484681 - DNA, 15 bp, Homo sapiens
cccttctcgtgtttc

SEQ ID NO: 484682 - DNA, 15 bp, Homo sapiens
tcccttctcgtgttt

SEQ ID NO: 484683 - DNA, 15 bp, Homo sapiens
ttcccttctcgtgtt

SEQ ID NO: 484684 - DNA, 15 bp, Homo sapiens
tttcccttctcgtgt

SEQ ID NO: 484685 - DNA, 15 bp, Homo sapiens
ctttcccttctcgtg

SEQ ID NO: 484686 - DNA, 15 bp, Homo sapiens
actttcccttctcgt

SEQ ID NO: 484687 - DNA, 15 bp, Homo sapiens
cactttcccttctcg

SEQ ID NO: 484688 - DNA, 15 bp, Homo sapiens
tcactttcccttctc

SEQ ID NO: 484689 - DNA, 15 bp, Homo sapiens
ctcactttcccttct

SEQ ID NO: 484690 - DNA, 15 bp, Homo sapiens
cctcactttcccttc

SEQ ID NO: 484691 - DNA, 15 bp, Homo sapiens
ccctcactttccctt

SEQ ID NO: 484692 - DNA, 15 bp, Homo sapiens
gccctcactttccct

SEQ ID NO: 484693 - DNA, 15 bp, Homo sapiens
tgccctcactttccc

SEQ ID NO: 484694 - DNA, 15 bp, Homo sapiens
ctgccctcactttcc

SEQ ID NO: 484695 - DNA, 15 bp, Homo sapiens
actgccctcactttc

SEQ ID NO: 484696 - DNA, 15 bp, Homo sapiens
aactgccctcacttt

SEQ ID NO: 484697 - DNA, 15 bp, Homo sapiens
taactgccctcactt

SEQ ID NO: 484698 - DNA, 15 bp, Homo sapiens
ttaactgccctcact

SEQ ID NO: 484699 - DNA, 15 bp, Homo sapiens
gttaactgccctcac

SEQ ID NO: 484700 - DNA, 15 bp, Homo sapiens
tgttaactgccctca

SEQ ID NO: 484701 - DNA, 15 bp, Homo sapiens
ctgttaactgccctc

SEQ ID NO: 484702 - DNA, 15 bp, Homo sapiens
cctgttaactgccct

SEQ ID NO: 484703 - DNA, 15 bp, Homo sapiens
tcctgttaactgccc

SEQ ID NO: 484704 - DNA, 15 bp, Homo sapiens
atcctgttaactgcc

SEQ ID NO: 484705 - DNA, 15 bp, Homo sapiens
catcctgttaactgc

SEQ ID NO: 484706 - DNA, 15 bp, Homo sapiens
gcatcctgttaactg

SEQ ID NO: 484707 - DNA, 15 bp, Homo sapiens
ggcatcctgttaact

SEQ ID NO: 484708 - DNA, 15 bp, Homo sapiens
gggcatcctgttaac

SEQ ID NO: 484709 - DNA, 15 bp, Homo sapiens
agggcatcctgttaa

SEQ ID NO: 484710 - DNA, 15 bp, Homo sapiens
cagggcatcctgtta

SEQ ID NO: 484711 - DNA, 15 bp, Homo sapiens
gcagggcatcctgtt

SEQ ID NO: 484712 - DNA, 15 bp, Homo sapiens
agcagggcatcctgt

SEQ ID NO: 484713 - DNA, 15 bp, Homo sapiens
cagcagggcatcctg

SEQ ID NO: 484714 - DNA, 15 bp, Homo sapiens
ccagcagggcatcct

SEQ ID NO: 484715 - DNA, 15 bp, Homo sapiens
gccagcagggcatcc

SEQ ID NO: 484716 - DNA, 15 bp, Homo sapiens
tgccagcagggcatc

SEQ ID NO: 484717 - DNA, 15 bp, Homo sapiens
gtgccagcagggcat

SEQ ID NO: 484718 - DNA, 15 bp, Homo sapiens
tgtgccagcagggca

SEQ ID NO: 484719 - DNA, 15 bp, Homo sapiens
ctgtgccagcagggc

SEQ ID NO: 484720 - DNA, 15 bp, Homo sapiens
actgtgccagcaggg

SEQ ID NO: 484721 - DNA, 15 bp, Homo sapiens
cactgtgccagcagg

SEQ ID NO: 484722 - DNA, 15 bp, Homo sapiens
gcactgtgccagcag

SEQ ID NO: 484723 - DNA, 15 bp, Homo sapiens
agcactgtgccagca

SEQ ID NO: 484724 - DNA, 15 bp, Homo sapiens
aagcactgtgccagc

SEQ ID NO: 484725 - DNA, 15 bp, Homo sapiens
gaagcactgtgccag

SEQ ID NO: 484726 - DNA, 15 bp, Homo sapiens
agaagcactgtgcca

SEQ ID NO: 484727 - DNA, 15 bp, Homo sapiens
aagaagcactgtgcc

SEQ ID NO: 484728 - DNA, 15 bp, Homo sapiens
taagaagcactgtgc

SEQ ID NO: 484729 - DNA, 15 bp, Homo sapiens
ctaagaagcactgtg

SEQ ID NO: 484730 - DNA, 15 bp, Homo sapiens
actaagaagcactgt

SEQ ID NO: 484731 - DNA, 15 bp, Homo sapiens
tactaagaagcactg

SEQ ID NO: 484732 - DNA, 15 bp, Homo sapiens
ctactaagaagcact

SEQ ID NO: 484733 - DNA, 15 bp, Homo sapiens
tctactaagaagcac

SEQ ID NO: 484734 - DNA, 15 bp, Homo sapiens
atctactaagaagca

SEQ ID NO: 484735 - DNA, 15 bp, Homo sapiens
catctactaagaagc

SEQ ID NO: 484736 - DNA, 15 bp, Homo sapiens
gcatctactaagaag

SEQ ID NO: 484737 - DNA, 15 bp, Homo sapiens
agcatctactaagaa

SEQ ID NO: 484738 - DNA, 15 bp, Homo sapiens
tagcatctactaaga

SEQ ID NO: 484739 - DNA, 15 bp, Homo sapiens
ctagcatctactaag

SEQ ID NO: 484740 - DNA, 15 bp, Homo sapiens
tctagcatctactaa

SEQ ID NO: 484741 - DNA, 15 bp, Homo sapiens
ttctagcatctacta

SEQ ID NO: 484742 - DNA, 15 bp, Homo sapiens
cttctagcatctact

SEQ ID NO: 484743 - DNA, 15 bp, Homo sapiens
ccttctagcatctac

SEQ ID NO: 484744 - DNA, 15 bp, Homo sapiens
accttctagcatcta

SEQ ID NO: 484745 - DNA, 15 bp, Homo sapiens
aaccttctagcatct

SEQ ID NO: 484746 - DNA, 15 bp, Homo sapiens
aaaccttctagcatc

SEQ ID NO: 484747 - DNA, 15 bp, Homo sapiens
caaaccttctagcat

SEQ ID NO: 484748 - DNA, 15 bp, Homo sapiens
tcaaaccttctagca

SEQ ID NO: 484749 - DNA, 15 bp, Homo sapiens
ctcaaaccttctagc

SEQ ID NO: 484750 - DNA, 15 bp, Homo sapiens
cctcaaaccttctag

SEQ ID NO: 484751 - DNA, 15 bp, Homo sapiens
gcctcaaaccttcta

SEQ ID NO: 484752 - DNA, 15 bp, Homo sapiens
ggcctcaaaccttct

SEQ ID NO: 484753 - DNA, 15 bp, Homo sapiens
gggcctcaaaccttc

SEQ ID NO: 484754 - DNA, 15 bp, Homo sapiens
tgggcctcaaacctt

SEQ ID NO: 484755 - DNA, 15 bp, Homo sapiens
ctgggcctcaaacct

SEQ ID NO: 484756 - DNA, 15 bp, Homo sapiens
tctgggcctcaaacc

SEQ ID NO: 484757 - DNA, 15 bp, Homo sapiens
atctgggcctcaaac

SEQ ID NO: 484758 - DNA, 15 bp, Homo sapiens
aatctgggcctcaaa

SEQ ID NO: 484759 - DNA, 15 bp, Homo sapiens
aaatctgggcctcaa

SEQ ID NO: 484760 - DNA, 15 bp, Homo sapiens
gaaatctgggcctca

SEQ ID NO: 484761 - DNA, 15 bp, Homo sapiens
tgaaatctgggcctc

SEQ ID NO: 484762 - DNA, 15 bp, Homo sapiens
ctgaaatctgggcct

SEQ ID NO: 484763 - DNA, 15 bp, Homo sapiens
gctgaaatctgggcc

SEQ ID NO: 484764 - DNA, 15 bp, Homo sapiens
ggctgaaatctgggc

SEQ ID NO: 484765 - DNA, 15 bp, Homo sapiens
gggctgaaatctggg

SEQ ID NO: 484766 - DNA, 15 bp, Homo sapiens
tgggctgaaatctgg

SEQ ID NO: 484767 - DNA, 15 bp, Homo sapiens
ctgggctgaaatctg

SEQ ID NO: 484768 - DNA, 15 bp, Homo sapiens
gctgggctgaaatct

SEQ ID NO: 484769 - DNA, 15 bp, Homo sapiens
tgctgggctgaaatc

SEQ ID NO: 484770 - DNA, 15 bp, Homo sapiens
atgctgggctgaaat

SEQ ID NO: 484771 - DNA, 15 bp, Homo sapiens
tatgctgggctgaaa

SEQ ID NO: 484772 - DNA, 15 bp, Homo sapiens
atatgctgggctgaa

SEQ ID NO: 484773 - DNA, 15 bp, Homo sapiens
catatgctgggctga

SEQ ID NO: 484774 - DNA, 15 bp, Homo sapiens
ccatatgctgggctg

SEQ ID NO: 484775 - DNA, 15 bp, Homo sapiens
gccatatgctgggct

SEQ ID NO: 484776 - DNA, 15 bp, Homo sapiens
agccatatgctgggc

SEQ ID NO: 484777 - DNA, 15 bp, Homo sapiens
aagccatatgctggg

SEQ ID NO: 484778 - DNA, 15 bp, Homo sapiens
aaagccatatgctgg

SEQ ID NO: 484779 - DNA, 15 bp, Homo sapiens
aaaagccatatgctg

SEQ ID NO: 484780 - DNA, 15 bp, Homo sapiens
aaaaagccatatgct

SEQ ID NO: 484781 - DNA, 15 bp, Homo sapiens
caaaaagccatatgc

SEQ ID NO: 484782 - DNA, 15 bp, Homo sapiens
gcaaaaagccatatg

SEQ ID NO: 484783 - DNA, 15 bp, Homo sapiens
ggcaaaaagccatat

SEQ ID NO: 484784 - DNA, 15 bp, Homo sapiens
aggcaaaaagccata

SEQ ID NO: 484785 - DNA, 15 bp, Homo sapiens
caggcaaaaagccat

SEQ ID NO: 484786 - DNA, 15 bp, Homo sapiens
acaggcaaaaagcca

SEQ ID NO: 484787 - DNA, 15 bp, Homo sapiens
tacaggcaaaaagcc

SEQ ID NO: 484788 - DNA, 15 bp, Homo sapiens
ttacaggcaaaaagc

SEQ ID NO: 484789 - DNA, 15 bp, Homo sapiens
gttacaggcaaaaag

SEQ ID NO: 484790 - DNA, 15 bp, Homo sapiens
agttacaggcaaaaa

SEQ ID NO: 484791 - DNA, 15 bp, Homo sapiens
cagttacaggcaaaa

SEQ ID NO: 484792 - DNA, 15 bp, Homo sapiens
tcagttacaggcaaa

SEQ ID NO: 484793 - DNA, 15 bp, Homo sapiens
ttcagttacaggcaa

SEQ ID NO: 484794 - DNA, 15 bp, Homo sapiens
gttcagttacaggca

SEQ ID NO: 484795 - DNA, 15 bp, Homo sapiens
ggttcagttacaggc

SEQ ID NO: 484796 - DNA, 15 bp, Homo sapiens
tggttcagttacagg

SEQ ID NO: 484797 - DNA, 15 bp, Homo sapiens
atggttcagttacag

SEQ ID NO: 484798 - DNA, 15 bp, Homo sapiens
catggttcagttaca

SEQ ID NO: 484799 - DNA, 15 bp, Homo sapiens
acatggttcagttac

SEQ ID NO: 484800 - DNA, 15 bp, Homo sapiens
gacatggttcagtta

SEQ ID NO: 484801 - DNA, 15 bp, Homo sapiens
tgacatggttcagtt

SEQ ID NO: 484802 - DNA, 15 bp, Homo sapiens
ctgacatggttcagt

SEQ ID NO: 484803 - DNA, 15 bp, Homo sapiens
actgacatggttcag

SEQ ID NO: 484804 - DNA, 15 bp, Homo sapiens
cactgacatggttca

SEQ ID NO: 484805 - DNA, 15 bp, Homo sapiens
acactgacatggttc

SEQ ID NO: 484806 - DNA, 15 bp, Homo sapiens
cacactgacatggtt

SEQ ID NO: 484807 - DNA, 15 bp, Homo sapiens
gcacactgacatggt

SEQ ID NO: 484808 - DNA, 15 bp, Homo sapiens
ggcacactgacatgg

SEQ ID NO: 484809 - DNA, 15 bp, Homo sapiens
tggcacactgacatg

SEQ ID NO: 484810 - DNA, 15 bp, Homo sapiens
ctggcacactgacat

SEQ ID NO: 484811 - DNA, 15 bp, Homo sapiens
tctggcacactgaca

SEQ ID NO: 484812 - DNA, 15 bp, Homo sapiens
atctggcacactgac

SEQ ID NO: 484813 - DNA, 15 bp, Homo sapiens
catctggcacactga

SEQ ID NO: 484814 - DNA, 15 bp, Homo sapiens
ccatctggcacactg

SEQ ID NO: 484815 - DNA, 15 bp, Homo sapiens
accatctggcacact

SEQ ID NO: 484816 - DNA, 15 bp, Homo sapiens
gaccatctggcacac

SEQ ID NO: 484817 - DNA, 15 bp, Homo sapiens
agaccatctggcaca

SEQ ID NO: 484818 - DNA, 15 bp, Homo sapiens
cagaccatctggcac

SEQ ID NO: 484819 - DNA, 15 bp, Homo sapiens
tcagaccatctggca

SEQ ID NO: 484820 - DNA, 15 bp, Homo sapiens
ttcagaccatctggc

SEQ ID NO: 484821 - DNA, 15 bp, Homo sapiens
cttcagaccatctgg

SEQ ID NO: 484822 - DNA, 15 bp, Homo sapiens
tcttcagaccatctg

SEQ ID NO: 484823 - DNA, 15 bp, Homo sapiens
ttcttcagaccatct

SEQ ID NO: 484824 - DNA, 15 bp, Homo sapiens
tttcttcagaccatc

SEQ ID NO: 484825 - DNA, 15 bp, Homo sapiens
ctttcttcagaccat

SEQ ID NO: 484826 - DNA, 15 bp, Homo sapiens
cctttcttcagacca

SEQ ID NO: 484827 - DNA, 15 bp, Homo sapiens
ccctttcttcagacc

SEQ ID NO: 484828 - DNA, 15 bp, Homo sapiens
accctttcttcagac

SEQ ID NO: 484829 - DNA, 15 bp, Homo sapiens
aaccctttcttcaga

SEQ ID NO: 484830 - DNA, 15 bp, Homo sapiens
aaaccctttcttcag

SEQ ID NO: 484831 - DNA, 15 bp, Homo sapiens
gaaaccctttcttca

SEQ ID NO: 484832 - DNA, 15 bp, Homo sapiens
agaaaccctttcttc

SEQ ID NO: 484833 - DNA, 15 bp, Homo sapiens
cagaaaccctttctt

SEQ ID NO: 484834 - DNA, 15 bp, Homo sapiens
ccagaaaccctttct

SEQ ID NO: 484835 - DNA, 15 bp, Homo sapiens
tccagaaaccctttc

SEQ ID NO: 484836 - DNA, 15 bp, Homo sapiens
ctccagaaacccttt

SEQ ID NO: 484837 - DNA, 15 bp, Homo sapiens
cctccagaaaccctt

SEQ ID NO: 484838 - DNA, 15 bp, Homo sapiens
tcctccagaaaccct

SEQ ID NO: 484839 - DNA, 15 bp, Homo sapiens
ttcctccagaaaccc

SEQ ID NO: 484840 - DNA, 15 bp, Homo sapiens
tttcctccagaaacc

SEQ ID NO: 484841 - DNA, 15 bp, Homo sapiens
atttcctccagaaac

SEQ ID NO: 484842 - DNA, 15 bp, Homo sapiens
aatttcctccagaaa

SEQ ID NO: 484843 - DNA, 15 bp, Homo sapiens
taatttcctccagaa

SEQ ID NO: 484844 - DNA, 15 bp, Homo sapiens
ataatttcctccaga

SEQ ID NO: 484845 - DNA, 15 bp, Homo sapiens
aataatttcctccag

SEQ ID NO: 484846 - DNA, 15 bp, Homo sapiens
taataatttcctcca

SEQ ID NO: 484847 - DNA, 15 bp, Homo sapiens
ataataatttcctcc

SEQ ID NO: 484848 - DNA, 15 bp, Homo sapiens
aataataatttcctc

SEQ ID NO: 484849 - DNA, 15 bp, Homo sapiens
taataataatttcct

SEQ ID NO: 484850 - DNA, 15 bp, Homo sapiens
ctaataataatttcc

SEQ ID NO: 484851 - DNA, 15 bp, Homo sapiens
gctaataataatttc

SEQ ID NO: 484852 - DNA, 15 bp, Homo sapiens
agctaataataattt

SEQ ID NO: 484853 - DNA, 15 bp, Homo sapiens
cagctaataataatt

SEQ ID NO: 484854 - DNA, 15 bp, Homo sapiens
gcagctaataataat

SEQ ID NO: 484855 - DNA, 15 bp, Homo sapiens
tgcagctaataataa

SEQ ID NO: 484856 - DNA, 15 bp, Homo sapiens
atgcagctaataata

SEQ ID NO: 484857 - DNA, 15 bp, Homo sapiens
catgcagctaataat

SEQ ID NO: 484858 - DNA, 15 bp, Homo sapiens
ccatgcagctaataa

SEQ ID NO: 484859 - DNA, 15 bp, Homo sapiens
cccatgcagctaata

SEQ ID NO: 484860 - DNA, 15 bp, Homo sapiens
tcccatgcagctaat

SEQ ID NO: 484861 - DNA, 15 bp, Homo sapiens
ctcccatgcagctaa

SEQ ID NO: 484862 - DNA, 15 bp, Homo sapiens
actcccatgcagcta

SEQ ID NO: 484863 - DNA, 15 bp, Homo sapiens
tactcccatgcagct

SEQ ID NO: 484864 - DNA, 15 bp, Homo sapiens
atactcccatgcagc

SEQ ID NO: 484865 - DNA, 15 bp, Homo sapiens
catactcccatgcag

SEQ ID NO: 484866 - DNA, 15 bp, Homo sapiens
ccatactcccatgca

SEQ ID NO: 484867 - DNA, 15 bp, Homo sapiens
accatactcccatgc

SEQ ID NO: 484868 - DNA, 15 bp, Homo sapiens
aaccatactcccatg

SEQ ID NO: 484869 - DNA, 15 bp, Homo sapiens
aaaccatactcccat

SEQ ID NO: 484870 - DNA, 15 bp, Homo sapiens
taaaccatactccca

SEQ ID NO: 484871 - DNA, 15 bp, Homo sapiens
gtaaaccatactccc

SEQ ID NO: 484872 - DNA, 15 bp, Homo sapiens
tgtaaaccatactcc

SEQ ID NO: 484873 - DNA, 15 bp, Homo sapiens
gtgtaaaccatactc

SEQ ID NO: 484874 - DNA, 15 bp, Homo sapiens
agtgtaaaccatact

SEQ ID NO: 484875 - DNA, 15 bp, Homo sapiens
tagtgtaaaccatac

SEQ ID NO: 484876 - DNA, 15 bp, Homo sapiens
ctagtgtaaaccata

SEQ ID NO: 484877 - DNA, 15 bp, Homo sapiens
tctagtgtaaaccat

SEQ ID NO: 484878 - DNA, 15 bp, Homo sapiens
ctctagtgtaaacca

SEQ ID NO: 484879 - DNA, 15 bp, Homo sapiens
actctagtgtaaacc

SEQ ID NO: 484880 - DNA, 15 bp, Homo sapiens
tactctagtgtaaac

SEQ ID NO: 484881 - DNA, 15 bp, Homo sapiens
ctactctagtgtaaa

SEQ ID NO: 484882 - DNA, 15 bp, Homo sapiens
tctactctagtgtaa

SEQ ID NO: 484883 - DNA, 15 bp, Homo sapiens
ttctactctagtgta

SEQ ID NO: 484884 - DNA, 15 bp, Homo sapiens
cttctactctagtgt

SEQ ID NO: 484885 - DNA, 15 bp, Homo sapiens
tcttctactctagtg

SEQ ID NO: 484886 - DNA, 15 bp, Homo sapiens
ctcttctactctagt

SEQ ID NO: 484887 - DNA, 15 bp, Homo sapiens
gctcttctactctag

SEQ ID NO: 484888 - DNA, 15 bp, Homo sapiens
agctcttctactcta

SEQ ID NO: 484889 - DNA, 15 bp, Homo sapiens
cagctcttctactct

SEQ ID NO: 484890 - DNA, 15 bp, Homo sapiens
ccagctcttctactc

SEQ ID NO: 484891 - DNA, 15 bp, Homo sapiens
cccagctcttctact

SEQ ID NO: 484892 - DNA, 15 bp, Homo sapiens
tcccagctcttctac

SEQ ID NO: 484893 - DNA, 15 bp, Homo sapiens
ctcccagctcttcta

SEQ ID NO: 484894 - DNA, 15 bp, Homo sapiens
gctcccagctcttct

SEQ ID NO: 484895 - DNA, 15 bp, Homo sapiens
tgctcccagctcttc

SEQ ID NO: 484896 - DNA, 15 bp, Homo sapiens
atgctcccagctctt

SEQ ID NO: 484897 - DNA, 15 bp, Homo sapiens
gatgctcccagctct

SEQ ID NO: 484898 - DNA, 15 bp, Homo sapiens
tgatgctcccagctc

SEQ ID NO: 484899 - DNA, 15 bp, Homo sapiens
gtgatgctcccagct

SEQ ID NO: 484900 - DNA, 15 bp, Homo sapiens
cgtgatgctcccagc

SEQ ID NO: 484901 - DNA, 15 bp, Homo sapiens
acgtgatgctcccag

SEQ ID NO: 484902 - DNA, 15 bp, Homo sapiens
aacgtgatgctccca

SEQ ID NO: 484903 - DNA, 15 bp, Homo sapiens
aaacgtgatgctccc

SEQ ID NO: 484904 - DNA, 15 bp, Homo sapiens
caaacgtgatgctcc

SEQ ID NO: 484905 - DNA, 15 bp, Homo sapiens
tcaaacgtgatgctc

SEQ ID NO: 484906 - DNA, 15 bp, Homo sapiens
ttcaaacgtgatgct

SEQ ID NO: 484907 - DNA, 15 bp, Homo sapiens
cttcaaacgtgatgc

SEQ ID NO: 484908 - DNA, 15 bp, Homo sapiens
ccttcaaacgtgatg

SEQ ID NO: 484909 - DNA, 15 bp, Homo sapiens
cccttcaaacgtgat

SEQ ID NO: 484910 - DNA, 15 bp, Homo sapiens
ccccttcaaacgtga

SEQ ID NO: 484911 - DNA, 15 bp, Homo sapiens
tccccttcaaacgtg

SEQ ID NO: 484912 - DNA, 15 bp, Homo sapiens
ttccccttcaaacgt

SEQ ID NO: 484913 - DNA, 15 bp, Homo sapiens
cttccccttcaaacg

SEQ ID NO: 484914 - DNA, 15 bp, Homo sapiens
tcttccccttcaaac

SEQ ID NO: 484915 - DNA, 15 bp, Homo sapiens
gtcttccccttcaaa

SEQ ID NO: 484916 - DNA, 15 bp, Homo sapiens
tgtcttccccttcaa

SEQ ID NO: 484917 - DNA, 15 bp, Homo sapiens
ctgtcttccccttca

SEQ ID NO: 484918 - DNA, 15 bp, Homo sapiens
actgtcttccccttc

SEQ ID NO: 484919 - DNA, 15 bp, Homo sapiens
cactgtcttcccctt

SEQ ID NO: 484920 - DNA, 15 bp, Homo sapiens
tcactgtcttcccct

SEQ ID NO: 484921 - DNA, 15 bp, Homo sapiens
gtcactgtcttcccc

SEQ ID NO: 484922 - DNA, 15 bp, Homo sapiens
agtcactgtcttccc

SEQ ID NO: 484923 - DNA, 15 bp, Homo sapiens
cagtcactgtcttcc

SEQ ID NO: 484924 - DNA, 15 bp, Homo sapiens
ccagtcactgtcttc

SEQ ID NO: 484925 - DNA, 15 bp, Homo sapiens
cccagtcactgtctt

SEQ ID NO: 484926 - DNA, 15 bp, Homo sapiens
acccagtcactgtct

SEQ ID NO: 484927 - DNA, 15 bp, Homo sapiens
cacccagtcactgtc

SEQ ID NO: 484928 - DNA, 15 bp, Homo sapiens
ccacccagtcactgt

SEQ ID NO: 484929 - DNA, 15 bp, Homo sapiens
tccacccagtcactg

SEQ ID NO: 484930 - DNA, 15 bp, Homo sapiens
ctccacccagtcact

SEQ ID NO: 484931 - DNA, 15 bp, Homo sapiens
cctccacccagtcac

SEQ ID NO: 484932 - DNA, 15 bp, Homo sapiens
ccctccacccagtca

SEQ ID NO: 484933 - DNA, 15 bp, Homo sapiens
cccctccacccagtc

SEQ ID NO: 484934 - DNA, 15 bp, Homo sapiens
gcccctccacccagt

SEQ ID NO: 484935 - DNA, 15 bp, Homo sapiens
tgcccctccacccag

SEQ ID NO: 484936 - DNA, 15 bp, Homo sapiens
ttgcccctccaccca

SEQ ID NO: 484937 - DNA, 15 bp, Homo sapiens
cttgcccctccaccc

SEQ ID NO: 484938 - DNA, 15 bp, Homo sapiens
ccttgcccctccacc

SEQ ID NO: 484939 - DNA, 15 bp, Homo sapiens
cccttgcccctccac

SEQ ID NO: 484940 - DNA, 15 bp, Homo sapiens
tcccttgcccctcca

SEQ ID NO: 484941 - DNA, 15 bp, Homo sapiens
atcccttgcccctcc

SEQ ID NO: 484942 - DNA, 15 bp, Homo sapiens
aatcccttgcccctc

SEQ ID NO: 484943 - DNA, 15 bp, Homo sapiens
taatcccttgcccct

SEQ ID NO: 484944 - DNA, 15 bp, Homo sapiens
ctaatcccttgcccc

SEQ ID NO: 484945 - DNA, 15 bp, Homo sapiens
actaatcccttgccc

SEQ ID NO: 484946 - DNA, 15 bp, Homo sapiens
tactaatcccttgcc

SEQ ID NO: 484947 - DNA, 15 bp, Homo sapiens
atactaatcccttgc

SEQ ID NO: 484948 - DNA, 15 bp, Homo sapiens
aatactaatcccttg

SEQ ID NO: 484949 - DNA, 15 bp, Homo sapiens
aaatactaatccctt

SEQ ID NO: 484950 - DNA, 15 bp, Homo sapiens
taaatactaatccct

SEQ ID NO: 484951 - DNA, 15 bp, Homo sapiens
ctaaatactaatccc

SEQ ID NO: 484952 - DNA, 15 bp, Homo sapiens
tctaaatactaatcc

SEQ ID NO: 484953 - DNA, 15 bp, Homo sapiens
ctctaaatactaatc

SEQ ID NO: 484954 - DNA, 15 bp, Homo sapiens
actctaaatactaat

SEQ ID NO: 484955 - DNA, 15 bp, Homo sapiens
cactctaaatactaa

SEQ ID NO: 484956 - DNA, 15 bp, Homo sapiens
acactctaaatacta

SEQ ID NO: 484957 - DNA, 15 bp, Homo sapiens
cacactctaaatact

SEQ ID NO: 484958 - DNA, 15 bp, Homo sapiens
gcacactctaaatac

SEQ ID NO: 484959 - DNA, 15 bp, Homo sapiens
tgcacactctaaata

SEQ ID NO: 484960 - DNA, 15 bp, Homo sapiens
ttgcacactctaaat

SEQ ID NO: 484961 - DNA, 15 bp, Homo sapiens
gttgcacactctaaa

SEQ ID NO: 484962 - DNA, 15 bp, Homo sapiens
agttgcacactctaa

SEQ ID NO: 484963 - DNA, 15 bp, Homo sapiens
tagttgcacactcta

SEQ ID NO: 484964 - DNA, 15 bp, Homo sapiens
atagttgcacactct

SEQ ID NO: 484965 - DNA, 15 bp, Homo sapiens
aatagttgcacactc

SEQ ID NO: 484966 - DNA, 15 bp, Homo sapiens
caatagttgcacact

SEQ ID NO: 484967 - DNA, 15 bp, Homo sapiens
tcaatagttgcacac

SEQ ID NO: 484968 - DNA, 15 bp, Homo sapiens
ttcaatagttgcaca

SEQ ID NO: 484969 - DNA, 15 bp, Homo sapiens
tttcaatagttgcac

SEQ ID NO: 484970 - DNA, 15 bp, Homo sapiens
ttttcaatagttgca

SEQ ID NO: 484971 - DNA, 15 bp, Homo sapiens
attttcaatagttgc

SEQ ID NO: 484972 - DNA, 15 bp, Homo sapiens
tattttcaatagttg

SEQ ID NO: 484973 - DNA, 15 bp, Homo sapiens
ttattttcaatagtt

SEQ ID NO: 484974 - DNA, 15 bp, Homo sapiens
cttattttcaatagt

SEQ ID NO: 484975 - DNA, 15 bp, Homo sapiens
ccttattttcaatag

SEQ ID NO: 484976 - DNA, 15 bp, Homo sapiens
accttattttcaata

SEQ ID NO: 484977 - DNA, 15 bp, Homo sapiens
taccttattttcaat

SEQ ID NO: 484978 - DNA, 15 bp, Homo sapiens
ataccttattttcaa

SEQ ID NO: 484979 - DNA, 15 bp, Homo sapiens
tataccttattttca

SEQ ID NO: 484980 - DNA, 15 bp, Homo sapiens
atataccttattttc

SEQ ID NO: 484981 - DNA, 15 bp, Homo sapiens
aatataccttatttt

SEQ ID NO: 484982 - DNA, 15 bp, Homo sapiens
aaatataccttattt

SEQ ID NO: 484983 - DNA, 15 bp, Homo sapiens
aaaatataccttatt

SEQ ID NO: 484984 - DNA, 15 bp, Homo sapiens
taaaatataccttat

SEQ ID NO: 484985 - DNA, 15 bp, Homo sapiens
ttaaaatatacctta

SEQ ID NO: 484986 - DNA, 15 bp, Homo sapiens
attaaaatatacctt

SEQ ID NO: 484987 - DNA, 15 bp, Homo sapiens
cattaaaatatacct

SEQ ID NO: 484988 - DNA, 15 bp, Homo sapiens
acattaaaatatacc

SEQ ID NO: 484989 - DNA, 15 bp, Homo sapiens
cacattaaaatatac

SEQ ID NO: 484990 - DNA, 15 bp, Homo sapiens
acacattaaaatata

SEQ ID NO: 484991 - DNA, 15 bp, Homo sapiens
tacacattaaaatat

SEQ ID NO: 484992 - DNA, 15 bp, Homo sapiens
ttacacattaaaata

SEQ ID NO: 484993 - DNA, 15 bp, Homo sapiens
cttacacattaaaat

SEQ ID NO: 484994 - DNA, 15 bp, Homo sapiens
tcttacacattaaaa

SEQ ID NO: 484995 - DNA, 15 bp, Homo sapiens
ctcttacacattaaa

SEQ ID NO: 484996 - DNA, 15 bp, Homo sapiens
cctcttacacattaa

SEQ ID NO: 484997 - DNA, 15 bp, Homo sapiens
tcctcttacacatta

SEQ ID NO: 484998 - DNA, 15 bp, Homo sapiens
gtcctcttacacatt

SEQ ID NO: 484999 - DNA, 15 bp, Homo sapiens
tgtcctcttacacat

SEQ ID NO: 485000 - DNA, 15 bp, Homo sapiens
atgtcctcttacaca

SEQ ID NO: 485001 - DNA, 15 bp, Homo sapiens
catgtcctcttacac

SEQ ID NO: 485002 - DNA, 15 bp, Homo sapiens
acatgtcctcttaca

SEQ ID NO: 485003 - DNA, 15 bp, Homo sapiens
tacatgtcctcttac

SEQ ID NO: 485004 - DNA, 15 bp, Homo sapiens
gtacatgtcctctta

SEQ ID NO: 485005 - DNA, 15 bp, Homo sapiens
agtacatgtcctctt

SEQ ID NO: 485006 - DNA, 15 bp, Homo sapiens
aagtacatgtcctct

SEQ ID NO: 485007 - DNA, 15 bp, Homo sapiens
taagtacatgtcctc

SEQ ID NO: 485008 - DNA, 15 bp, Homo sapiens
ataagtacatgtcct

SEQ ID NO: 485009 - DNA, 15 bp, Homo sapiens
tataagtacatgtcc

SEQ ID NO: 485010 - DNA, 15 bp, Homo sapiens
atataagtacatgtc

SEQ ID NO: 485011 - DNA, 15 bp, Homo sapiens
catataagtacatgt

SEQ ID NO: 485012 - DNA, 15 bp, Homo sapiens
acatataagtacatg

SEQ ID NO: 485013 - DNA, 15 bp, Homo sapiens
aacatataagtacat

SEQ ID NO: 485014 - DNA, 15 bp, Homo sapiens
taacatataagtaca

SEQ ID NO: 485015 - DNA, 15 bp, Homo sapiens
ataacatataagtac

SEQ ID NO: 485016 - DNA, 15 bp, Homo sapiens
tataacatataagta

SEQ ID NO: 485017 - DNA, 15 bp, Homo sapiens
atataacatataagt

SEQ ID NO: 485018 - DNA, 15 bp, Homo sapiens
tatataacatataag

SEQ ID NO: 485019 - DNA, 15 bp, Homo sapiens
atatataacatataa

SEQ ID NO: 485020 - DNA, 15 bp, Homo sapiens
tatatataacatata

SEQ ID NO: 485021 - DNA, 15 bp, Homo sapiens
ttatatataacatat

SEQ ID NO: 485022 - DNA, 15 bp, Homo sapiens
tttatatataacata

SEQ ID NO: 485023 - DNA, 15 bp, Homo sapiens
atttatatataacat

SEQ ID NO: 485024 - DNA, 15 bp, Homo sapiens
aatttatatataaca

SEQ ID NO: 485025 - DNA, 15 bp, Homo sapiens
taatttatatataac

SEQ ID NO: 485026 - DNA, 15 bp, Homo sapiens
ataatttatatataa

SEQ ID NO: 485027 - DNA, 15 bp, Homo sapiens
aataatttatatata

SEQ ID NO: 485028 - DNA, 15 bp, Homo sapiens
aaataatttatatat

SEQ ID NO: 485029 - DNA, 15 bp, Homo sapiens
aaaataatttatata

SEQ ID NO: 485030 - DNA, 15 bp, Homo sapiens
taaaataatttatat

SEQ ID NO: 485031 - DNA, 15 bp, Homo sapiens
ctaaaataatttata

SEQ ID NO: 485032 - DNA, 15 bp, Homo sapiens
gctaaaataatttat

SEQ ID NO: 485033 - DNA, 15 bp, Homo sapiens
agctaaaataattta

SEQ ID NO: 485034 - DNA, 15 bp, Homo sapiens
cagctaaaataattt

SEQ ID NO: 485035 - DNA, 15 bp, Homo sapiens
ccagctaaaataatt

SEQ ID NO: 485036 - DNA, 15 bp, Homo sapiens
cccagctaaaataat

SEQ ID NO: 485037 - DNA, 15 bp, Homo sapiens
acccagctaaaataa

SEQ ID NO: 485038 - DNA, 15 bp, Homo sapiens
cacccagctaaaata

SEQ ID NO: 485039 - DNA, 15 bp, Homo sapiens
tcacccagctaaaat

SEQ ID NO: 485040 - DNA, 15 bp, Homo sapiens
ttcacccagctaaaa

SEQ ID NO: 485041 - DNA, 15 bp, Homo sapiens
cttcacccagctaaa

SEQ ID NO: 485042 - DNA, 15 bp, Homo sapiens
acttcacccagctaa

SEQ ID NO: 485043 - DNA, 15 bp, Homo sapiens
cacttcacccagcta

SEQ ID NO: 485044 - DNA, 15 bp, Homo sapiens
ccacttcacccagct

SEQ ID NO: 485045 - DNA, 15 bp, Homo sapiens
gccacttcacccagc

SEQ ID NO: 485046 - DNA, 15 bp, Homo sapiens
agccacttcacccag

SEQ ID NO: 485047 - DNA, 15 bp, Homo sapiens
gagccacttcaccca

SEQ ID NO: 485048 - DNA, 15 bp, Homo sapiens
tgagccacttcaccc

SEQ ID NO: 485049 - DNA, 15 bp, Homo sapiens
atgagccacttcacc

SEQ ID NO: 485050 - DNA, 15 bp, Homo sapiens
catgagccacttcac

SEQ ID NO: 485051 - DNA, 15 bp, Homo sapiens
gcatgagccacttca

SEQ ID NO: 485052 - DNA, 15 bp, Homo sapiens
ggcatgagccacttc

SEQ ID NO: 485053 - DNA, 15 bp, Homo sapiens
aggcatgagccactt

SEQ ID NO: 485054 - DNA, 15 bp, Homo sapiens
ctataggcatgagcc

SEQ ID NO: 485055 - DNA, 15 bp, Homo sapiens
actataggcatgagc

SEQ ID NO: 485056 - DNA, 15 bp, Homo sapiens
gactataggcatgag

SEQ ID NO: 485057 - DNA, 15 bp, Homo sapiens
ggactataggcatga

SEQ ID NO: 485058 - DNA, 15 bp, Homo sapiens
aggactataggcatg

SEQ ID NO: 485059 - DNA, 15 bp, Homo sapiens
taggactataggcat

SEQ ID NO: 485060 - DNA, 15 bp, Homo sapiens
ctaggactataggca

SEQ ID NO: 485061 - DNA, 15 bp, Homo sapiens
gctaggactataggc

SEQ ID NO: 485062 - DNA, 15 bp, Homo sapiens
tgctaggactatagg

SEQ ID NO: 485063 - DNA, 15 bp, Homo sapiens
gtgctaggactatag

SEQ ID NO: 485064 - DNA, 15 bp, Homo sapiens
agtgctaggactata

SEQ ID NO: 485065 - DNA, 15 bp, Homo sapiens
aagtgctaggactat

SEQ ID NO: 485066 - DNA, 15 bp, Homo sapiens
aaagtgctaggacta

SEQ ID NO: 485067 - DNA, 15 bp, Homo sapiens
caaagtgctaggact

SEQ ID NO: 485068 - DNA, 15 bp, Homo sapiens
ccaaagtgctaggac

SEQ ID NO: 485069 - DNA, 15 bp, Homo sapiens
cctgggcctcccaaa

SEQ ID NO: 485070 - DNA, 15 bp, Homo sapiens
gcctgggcctcccaa

SEQ ID NO: 485071 - DNA, 15 bp, Homo sapiens
cgcctgggcctccca

SEQ ID NO: 485072 - DNA, 15 bp, Homo sapiens
ccgcctgggcctccc

SEQ ID NO: 485073 - DNA, 15 bp, Homo sapiens
cccgcctgggcctcc

SEQ ID NO: 485074 - DNA, 15 bp, Homo sapiens
tcccgcctgggcctc

SEQ ID NO: 485075 - DNA, 15 bp, Homo sapiens
ctcccgcctgggcct

SEQ ID NO: 485076 - DNA, 15 bp, Homo sapiens
cctcccgcctgggcc

SEQ ID NO: 485077 - DNA, 15 bp, Homo sapiens
tcctcccgcctgggc

SEQ ID NO: 485078 - DNA, 15 bp, Homo sapiens
atcctcccgcctggg

SEQ ID NO: 485079 - DNA, 15 bp, Homo sapiens
gatcctcccgcctgg

SEQ ID NO: 485080 - DNA, 15 bp, Homo sapiens
tgatcctcccgcctg

SEQ ID NO: 485081 - DNA, 15 bp, Homo sapiens
gtgatcctcccgcct

SEQ ID NO: 485082 - DNA, 15 bp, Homo sapiens
agtgatcctcccgcc

SEQ ID NO: 485083 - DNA, 15 bp, Homo sapiens
aagtgatcctcccgc

SEQ ID NO: 485084 - DNA, 15 bp, Homo sapiens
gctcaagtgatcctc

SEQ ID NO: 485085 - DNA, 15 bp, Homo sapiens
ggctcaagtgatcct

SEQ ID NO: 485086 - DNA, 15 bp, Homo sapiens
aggctcaagtgatcc

SEQ ID NO: 485087 - DNA, 15 bp, Homo sapiens
caggctcaagtgatc

SEQ ID NO: 485088 - DNA, 15 bp, Homo sapiens
ccaggctcaagtgat

SEQ ID NO: 485089 - DNA, 15 bp, Homo sapiens
cccaggctcaagtga

SEQ ID NO: 485090 - DNA, 15 bp, Homo sapiens
tcccaggctcaagtg

SEQ ID NO: 485091 - DNA, 15 bp, Homo sapiens
ctcccaggctcaagt

SEQ ID NO: 485092 - DNA, 15 bp, Homo sapiens
caaactcccaggctc

SEQ ID NO: 485093 - DNA, 15 bp, Homo sapiens
ctcaaactcccaggc

SEQ ID NO: 485094 - DNA, 15 bp, Homo sapiens
tctcaaactcccagg

SEQ ID NO: 485095 - DNA, 15 bp, Homo sapiens
ttctcaaactcccag

SEQ ID NO: 485096 - DNA, 15 bp, Homo sapiens
gttctcaaactccca

SEQ ID NO: 485097 - DNA, 15 bp, Homo sapiens
tgttctcaaactccc

SEQ ID NO: 485098 - DNA, 15 bp, Homo sapiens
ctgttctcaaactcc

SEQ ID NO: 485099 - DNA, 15 bp, Homo sapiens
gctgttctcaaactc

SEQ ID NO: 485100 - DNA, 15 bp, Homo sapiens
ggctgttctcaaact

SEQ ID NO: 485101 - DNA, 15 bp, Homo sapiens
aggctgttctcaaac

SEQ ID NO: 485102 - DNA, 15 bp, Homo sapiens
taggctgttctcaaa

SEQ ID NO: 485103 - DNA, 15 bp, Homo sapiens
ctaggctgttctcaa

SEQ ID NO: 485104 - DNA, 15 bp, Homo sapiens
tctaggctgttctca

SEQ ID NO: 485105 - DNA, 15 bp, Homo sapiens
gtctaggctgttctc

SEQ ID NO: 485106 - DNA, 15 bp, Homo sapiens
tgtctaggctgttct

SEQ ID NO: 485107 - DNA, 15 bp, Homo sapiens
ttgtctaggctgttc

SEQ ID NO: 485108 - DNA, 15 bp, Homo sapiens
gttgtctaggctgtt

SEQ ID NO: 485109 - DNA, 15 bp, Homo sapiens
tgttgtctaggctgt

SEQ ID NO: 485110 - DNA, 15 bp, Homo sapiens
atgttgtctaggctg

SEQ ID NO: 485111 - DNA, 15 bp, Homo sapiens
tatgttgtctaggct

SEQ ID NO: 485112 - DNA, 15 bp, Homo sapiens
ctatgttgtctaggc

SEQ ID NO: 485113 - DNA, 15 bp, Homo sapiens
actatgttgtctagg

SEQ ID NO: 485114 - DNA, 15 bp, Homo sapiens
cactatgttgtctag

SEQ ID NO: 485115 - DNA, 15 bp, Homo sapiens
tcactatgttgtcta

SEQ ID NO: 485116 - DNA, 15 bp, Homo sapiens
ctcactatgttgtct

SEQ ID NO: 485117 - DNA, 15 bp, Homo sapiens
tctcactatgttgtc

SEQ ID NO: 485118 - DNA, 15 bp, Homo sapiens
gtctcactatgttgt

SEQ ID NO: 485119 - DNA, 15 bp, Homo sapiens
agggtctcactatgt

SEQ ID NO: 485120 - DNA, 15 bp, Homo sapiens
tagggtctcactatg

SEQ ID NO: 485121 - DNA, 15 bp, Homo sapiens
atagggtctcactat

SEQ ID NO: 485122 - DNA, 15 bp, Homo sapiens
gatagggtctcacta

SEQ ID NO: 485123 - DNA, 15 bp, Homo sapiens
agatagggtctcact

SEQ ID NO: 485124 - DNA, 15 bp, Homo sapiens
tagatagggtctcac

SEQ ID NO: 485125 - DNA, 15 bp, Homo sapiens
atagatagggtctca

SEQ ID NO: 485126 - DNA, 15 bp, Homo sapiens
tatagatagggtctc

SEQ ID NO: 485127 - DNA, 15 bp, Homo sapiens
gtatagatagggtct

SEQ ID NO: 485128 - DNA, 15 bp, Homo sapiens
tgtatagatagggtc

SEQ ID NO: 485129 - DNA, 15 bp, Homo sapiens
ttgtatagatagggt

SEQ ID NO: 485130 - DNA, 15 bp, Homo sapiens
tttgtatagataggg

SEQ ID NO: 485131 - DNA, 15 bp, Homo sapiens
ttttgtatagatagg

SEQ ID NO: 485132 - DNA, 15 bp, Homo sapiens
tttttgtatagatag

SEQ ID NO: 485133 - DNA, 15 bp, Homo sapiens
atttttgtatagata

SEQ ID NO: 485134 - DNA, 15 bp, Homo sapiens
tatttttgtatagat

SEQ ID NO: 485135 - DNA, 15 bp, Homo sapiens
ttatttttgtataga

SEQ ID NO: 485136 - DNA, 15 bp, Homo sapiens
attatttttgtatag

SEQ ID NO: 485137 - DNA, 15 bp, Homo sapiens
aattatttttgtata

SEQ ID NO: 485138 - DNA, 15 bp, Homo sapiens
aaattatttttgtat

SEQ ID NO: 485139 - DNA, 15 bp, Homo sapiens
aaaattatttttgta

SEQ ID NO: 485140 - DNA, 15 bp, Homo sapiens
aaaaattatttttgt

SEQ ID NO: 485141 - DNA, 15 bp, Homo sapiens
aaaaaattatttttg

SEQ ID NO: 485142 - DNA, 15 bp, Homo sapiens
aaaaaaattattttt

SEQ ID NO: 485143 - DNA, 15 bp, Homo sapiens
aaaaaaaattatttt

SEQ ID NO: 485144 - DNA, 15 bp, Homo sapiens
taaaaaaaattattt

SEQ ID NO: 485145 - DNA, 15 bp, Homo sapiens
ttaaaaaaaattatt

SEQ ID NO: 485146 - DNA, 15 bp, Homo sapiens
tttaaaaaaaattat

SEQ ID NO: 485147 - DNA, 15 bp, Homo sapiens
atttaaaaaaaatta

SEQ ID NO: 485148 - DNA, 15 bp, Homo sapiens
aatttaaaaaaaatt

SEQ ID NO: 485149 - DNA, 15 bp, Homo sapiens
taatttaaaaaaaat

SEQ ID NO: 485150 - DNA, 15 bp, Homo sapiens
ctaatttaaaaaaaa

SEQ ID NO: 485151 - DNA, 15 bp, Homo sapiens
gctaatttaaaaaaa

SEQ ID NO: 485152 - DNA, 15 bp, Homo sapiens
ggctaatttaaaaaa

SEQ ID NO: 485153 - DNA, 15 bp, Homo sapiens
tggctaatttaaaaa

SEQ ID NO: 485154 - DNA, 15 bp, Homo sapiens
gtggctaatttaaaa

SEQ ID NO: 485155 - DNA, 15 bp, Homo sapiens
cgtggctaatttaaa

SEQ ID NO: 485156 - DNA, 15 bp, Homo sapiens
acgtggctaatttaa

SEQ ID NO: 485157 - DNA, 15 bp, Homo sapiens
cacgtggctaattta

SEQ ID NO: 485158 - DNA, 15 bp, Homo sapiens
acacgtggctaattt

SEQ ID NO: 485159 - DNA, 15 bp, Homo sapiens
cacacgtggctaatt

SEQ ID NO: 485160 - DNA, 15 bp, Homo sapiens
ccacacgtggctaat

SEQ ID NO: 485161 - DNA, 15 bp, Homo sapiens
accacacgtggctaa

SEQ ID NO: 485162 - DNA, 15 bp, Homo sapiens
caccacacgtggcta

SEQ ID NO: 485163 - DNA, 15 bp, Homo sapiens
ccaccacacgtggct

SEQ ID NO: 485164 - DNA, 15 bp, Homo sapiens
accaccacacgtggc

SEQ ID NO: 485165 - DNA, 15 bp, Homo sapiens
aaccaccacacgtgg

SEQ ID NO: 485166 - DNA, 15 bp, Homo sapiens
aaaccaccacacgtg

SEQ ID NO: 485167 - DNA, 15 bp, Homo sapiens
caaaccaccacacgt

SEQ ID NO: 485168 - DNA, 15 bp, Homo sapiens
acaaaccaccacacg

SEQ ID NO: 485169 - DNA, 15 bp, Homo sapiens
cacaaaccaccacac

SEQ ID NO: 485170 - DNA, 15 bp, Homo sapiens
gcacaaaccaccaca

SEQ ID NO: 485171 - DNA, 15 bp, Homo sapiens
ggcacaaaccaccac

SEQ ID NO: 485172 - DNA, 15 bp, Homo sapiens
aggcacaaaccacca

SEQ ID NO: 485173 - DNA, 15 bp, Homo sapiens
caggcacaaaccacc

SEQ ID NO: 485174 - DNA, 15 bp, Homo sapiens
acaggcacaaaccac

SEQ ID NO: 485175 - DNA, 15 bp, Homo sapiens
tacaggcacaaacca

SEQ ID NO: 485176 - DNA, 15 bp, Homo sapiens
ctacaggcacaaacc

SEQ ID NO: 485177 - DNA, 15 bp, Homo sapiens
actacaggcacaaac

SEQ ID NO: 485178 - DNA, 15 bp, Homo sapiens
gactacaggcacaaa

SEQ ID NO: 485179 - DNA, 15 bp, Homo sapiens
ggactacaggcacaa

SEQ ID NO: 485180 - DNA, 15 bp, Homo sapiens
aggactacaggcaca

SEQ ID NO: 485181 - DNA, 15 bp, Homo sapiens
taggactacaggcac

SEQ ID NO: 485182 - DNA, 15 bp, Homo sapiens
ctaggactacaggca

SEQ ID NO: 485183 - DNA, 15 bp, Homo sapiens
gctaggactacaggc

SEQ ID NO: 485184 - DNA, 15 bp, Homo sapiens
cgagtagctaggact

SEQ ID NO: 485185 - DNA, 15 bp, Homo sapiens
ccgagtagctaggac

SEQ ID NO: 485186 - DNA, 15 bp, Homo sapiens
cccgagtagctagga

SEQ ID NO: 485187 - DNA, 15 bp, Homo sapiens
tcccgagtagctagg

SEQ ID NO: 485188 - DNA, 15 bp, Homo sapiens
ctcccgagtagctag

SEQ ID NO: 485189 - DNA, 15 bp, Homo sapiens
cctcccgagtagcta

SEQ ID NO: 485190 - DNA, 15 bp, Homo sapiens
taagcaatcctccca

SEQ ID NO: 485191 - DNA, 15 bp, Homo sapiens
ttaagcaatcctccc

SEQ ID NO: 485192 - DNA, 15 bp, Homo sapiens
cctcctgggcttaag

SEQ ID NO: 485193 - DNA, 15 bp, Homo sapiens
acctcctgggcttaa

SEQ ID NO: 485194 - DNA, 15 bp, Homo sapiens
aacctcctgggctta

SEQ ID NO: 485195 - DNA, 15 bp, Homo sapiens
caacctcctgggctt

SEQ ID NO: 485196 - DNA, 15 bp, Homo sapiens
atggctcactgcagc

SEQ ID NO: 485197 - DNA, 15 bp, Homo sapiens
catggctcactgcag

SEQ ID NO: 485198 - DNA, 15 bp, Homo sapiens
tcatggctcactgca

SEQ ID NO: 485199 - DNA, 15 bp, Homo sapiens
atcatggctcactgc

SEQ ID NO: 485200 - DNA, 15 bp, Homo sapiens
gatcatggctcactg

SEQ ID NO: 485201 - DNA, 15 bp, Homo sapiens
cgatcatggctcact

SEQ ID NO: 485202 - DNA, 15 bp, Homo sapiens
gcgatcatggctcac

SEQ ID NO: 485203 - DNA, 15 bp, Homo sapiens
tgcgatcatggctca

SEQ ID NO: 485204 - DNA, 15 bp, Homo sapiens
gtgcgatcatggctc

SEQ ID NO: 485205 - DNA, 15 bp, Homo sapiens
ggtgcgatcatggct

SEQ ID NO: 485206 - DNA, 15 bp, Homo sapiens
tggtgcgatcatggc

SEQ ID NO: 485207 - DNA, 15 bp, Homo sapiens
gtggtgcgatcatgg

SEQ ID NO: 485208 - DNA, 15 bp, Homo sapiens
agtggtgcgatcatg

SEQ ID NO: 485209 - DNA, 15 bp, Homo sapiens
cagtggtgcgatcat

SEQ ID NO: 485210 - DNA, 15 bp, Homo sapiens
gcagtggtgcgatca

SEQ ID NO: 485211 - DNA, 15 bp, Homo sapiens
tgcagtggtgcgatc

SEQ ID NO: 485212 - DNA, 15 bp, Homo sapiens
ttgctctgtcaccca

SEQ ID NO: 485213 - DNA, 15 bp, Homo sapiens
cttgctctgtcaccc

SEQ ID NO: 485214 - DNA, 15 bp, Homo sapiens
tcttgctctgtcacc

SEQ ID NO: 485215 - DNA, 15 bp, Homo sapiens
gtcttgctctgtcac

SEQ ID NO: 485216 - DNA, 15 bp, Homo sapiens
ggtcttgctctgtca

SEQ ID NO: 485217 - DNA, 15 bp, Homo sapiens
aggtcttgctctgtc

SEQ ID NO: 485218 - DNA, 15 bp, Homo sapiens
aaggtcttgctctgt

SEQ ID NO: 485219 - DNA, 15 bp, Homo sapiens
caaggtcttgctctg

SEQ ID NO: 485220 - DNA, 15 bp, Homo sapiens
tcaaggtcttgctct

SEQ ID NO: 485221 - DNA, 15 bp, Homo sapiens
gtcaaggtcttgctc

SEQ ID NO: 485222 - DNA, 15 bp, Homo sapiens
agtcaaggtcttgct

SEQ ID NO: 485223 - DNA, 15 bp, Homo sapiens
gagtcaaggtcttgc

SEQ ID NO: 485224 - DNA, 15 bp, Homo sapiens
tgagtcaaggtcttg

SEQ ID NO: 485225 - DNA, 15 bp, Homo sapiens
gtgagtcaaggtctt

SEQ ID NO: 485226 - DNA, 15 bp, Homo sapiens
ggtgagtcaaggtct

SEQ ID NO: 485227 - DNA, 15 bp, Homo sapiens
tggtgagtcaaggtc

SEQ ID NO: 485228 - DNA, 15 bp, Homo sapiens
ttggtgagtcaaggt

SEQ ID NO: 485229 - DNA, 15 bp, Homo sapiens
tttggtgagtcaagg

SEQ ID NO: 485230 - DNA, 15 bp, Homo sapiens
ttttggtgagtcaag

SEQ ID NO: 485231 - DNA, 15 bp, Homo sapiens
tttttggtgagtcaa

SEQ ID NO: 485232 - DNA, 15 bp, Homo sapiens
ttttttggtgagtca

SEQ ID NO: 485233 - DNA, 15 bp, Homo sapiens
tttttttggtgagtc

SEQ ID NO: 485234 - DNA, 15 bp, Homo sapiens
ttttttttggtgagt

SEQ ID NO: 485235 - DNA, 15 bp, Homo sapiens
tttttttttggtgag

SEQ ID NO: 485236 - DNA, 15 bp, Homo sapiens
tttttttttttggtg

SEQ ID NO: 485237 - DNA, 15 bp, Homo sapiens
ctctctttttttttt

SEQ ID NO: 485238 - DNA, 15 bp, Homo sapiens
tctctcttttttttt

SEQ ID NO: 485239 - DNA, 15 bp, Homo sapiens
ctctctctttttttt

SEQ ID NO: 485240 - DNA, 15 bp, Homo sapiens
atttctctctctttt

SEQ ID NO: 485241 - DNA, 15 bp, Homo sapiens
aatttctctctcttt

SEQ ID NO: 485242 - DNA, 15 bp, Homo sapiens
taatttctctctctt

SEQ ID NO: 485243 - DNA, 15 bp, Homo sapiens
ttaatttctctctct

SEQ ID NO: 485244 - DNA, 15 bp, Homo sapiens
tttaatttctctctc

SEQ ID NO: 485245 - DNA, 15 bp, Homo sapiens
ttttaatttctctct

SEQ ID NO: 485246 - DNA, 15 bp, Homo sapiens
tttttaatttctctc

SEQ ID NO: 485247 - DNA, 15 bp, Homo sapiens
atttttaatttctct

SEQ ID NO: 485248 - DNA, 15 bp, Homo sapiens
tatttttaatttctc

SEQ ID NO: 485249 - DNA, 15 bp, Homo sapiens
gtatttttaatttct

SEQ ID NO: 485250 - DNA, 15 bp, Homo sapiens
agtatttttaatttc

SEQ ID NO: 485251 - DNA, 15 bp, Homo sapiens
cagtatttttaattt

SEQ ID NO: 485252 - DNA, 15 bp, Homo sapiens
acagtatttttaatt

SEQ ID NO: 485253 - DNA, 15 bp, Homo sapiens
tacagtatttttaat

SEQ ID NO: 485254 - DNA, 15 bp, Homo sapiens
ttacagtatttttaa

SEQ ID NO: 485255 - DNA, 15 bp, Homo sapiens
attacagtattttta

SEQ ID NO: 485256 - DNA, 15 bp, Homo sapiens
gattacagtattttt

SEQ ID NO: 485257 - DNA, 15 bp, Homo sapiens
agattacagtatttt

SEQ ID NO: 485258 - DNA, 15 bp, Homo sapiens
gagattacagtattt

SEQ ID NO: 485259 - DNA, 15 bp, Homo sapiens
tgagattacagtatt

SEQ ID NO: 485260 - DNA, 15 bp, Homo sapiens
ctgagattacagtat

SEQ ID NO: 485261 - DNA, 15 bp, Homo sapiens
gctgagattacagta

SEQ ID NO: 485262 - DNA, 15 bp, Homo sapiens
agctgagattacagt

SEQ ID NO: 485263 - DNA, 15 bp, Homo sapiens
cagctgagattacag

SEQ ID NO: 485264 - DNA, 15 bp, Homo sapiens
ccagctgagattaca

SEQ ID NO: 485265 - DNA, 15 bp, Homo sapiens
cccagctgagattac

SEQ ID NO: 485266 - DNA, 15 bp, Homo sapiens
gcccagctgagatta

SEQ ID NO: 485267 - DNA, 15 bp, Homo sapiens
tgcccagctgagatt

SEQ ID NO: 485268 - DNA, 15 bp, Homo sapiens
atgcccagctgagat

SEQ ID NO: 485269 - DNA, 15 bp, Homo sapiens
catgcccagctgaga

SEQ ID NO: 485270 - DNA, 15 bp, Homo sapiens
ccatgcccagctgag

SEQ ID NO: 485271 - DNA, 15 bp, Homo sapiens
cccatgcccagctga

SEQ ID NO: 485272 - DNA, 15 bp, Homo sapiens
ccccatgcccagctg

SEQ ID NO: 485273 - DNA, 15 bp, Homo sapiens
cccccatgcccagct

SEQ ID NO: 485274 - DNA, 15 bp, Homo sapiens
acccccatgcccagc

SEQ ID NO: 485275 - DNA, 15 bp, Homo sapiens
aacccccatgcccag

SEQ ID NO: 485276 - DNA, 15 bp, Homo sapiens
gaacccccatgccca

SEQ ID NO: 485277 - DNA, 15 bp, Homo sapiens
tgaacccccatgccc

SEQ ID NO: 485278 - DNA, 15 bp, Homo sapiens
gtgaacccccatgcc

SEQ ID NO: 485279 - DNA, 15 bp, Homo sapiens
tgtgaacccccatgc

SEQ ID NO: 485280 - DNA, 15 bp, Homo sapiens
gtgtgaacccccatg

SEQ ID NO: 485281 - DNA, 15 bp, Homo sapiens
ggtgtgaacccccat

SEQ ID NO: 485282 - DNA, 15 bp, Homo sapiens
aggtgtgaaccccca

SEQ ID NO: 485283 - DNA, 15 bp, Homo sapiens
caggtgtgaaccccc

SEQ ID NO: 485284 - DNA, 15 bp, Homo sapiens
gcaggtgtgaacccc

SEQ ID NO: 485285 - DNA, 15 bp, Homo sapiens
tgcaggtgtgaaccc

SEQ ID NO: 485286 - DNA, 15 bp, Homo sapiens
ctgcaggtgtgaacc

SEQ ID NO: 485287 - DNA, 15 bp, Homo sapiens
actgcaggtgtgaac

SEQ ID NO: 485288 - DNA, 15 bp, Homo sapiens
gactgcaggtgtgaa

SEQ ID NO: 485289 - DNA, 15 bp, Homo sapiens
ggactgcaggtgtga

SEQ ID NO: 485290 - DNA, 15 bp, Homo sapiens
aggactgcaggtgtg

SEQ ID NO: 485291 - DNA, 15 bp, Homo sapiens
taggactgcaggtgt

SEQ ID NO: 485292 - DNA, 15 bp, Homo sapiens
ctaggactgcaggtg

SEQ ID NO: 485293 - DNA, 15 bp, Homo sapiens
gctaggactgcaggt

SEQ ID NO: 485294 - DNA, 15 bp, Homo sapiens
tgctaggactgcagg

SEQ ID NO: 485295 - DNA, 15 bp, Homo sapiens
gtgctaggactgcag

SEQ ID NO: 485296 - DNA, 15 bp, Homo sapiens
agtgctaggactgca

SEQ ID NO: 485297 - DNA, 15 bp, Homo sapiens
aagtgctaggactgc

SEQ ID NO: 485298 - DNA, 15 bp, Homo sapiens
aaagtgctaggactg

SEQ ID NO: 485299 - DNA, 15 bp, Homo sapiens
ttcagcctcccaaag

SEQ ID NO: 485300 - DNA, 15 bp, Homo sapiens
cttcagcctcccaaa

SEQ ID NO: 485301 - DNA, 15 bp, Homo sapiens
gcttcagcctcccaa

SEQ ID NO: 485302 - DNA, 15 bp, Homo sapiens
tgcttcagcctccca

SEQ ID NO: 485303 - DNA, 15 bp, Homo sapiens
cctcctgcttcagcc

SEQ ID NO: 485304 - DNA, 15 bp, Homo sapiens
tcctcctgcttcagc

SEQ ID NO: 485305 - DNA, 15 bp, Homo sapiens
atcctcctgcttcag

SEQ ID NO: 485306 - DNA, 15 bp, Homo sapiens
gatcctcctgcttca

SEQ ID NO: 485307 - DNA, 15 bp, Homo sapiens
tgatcctcctgcttc

SEQ ID NO: 485308 - DNA, 15 bp, Homo sapiens
gtgatcctcctgctt

SEQ ID NO: 485309 - DNA, 15 bp, Homo sapiens
agtgatcctcctgct

SEQ ID NO: 485310 - DNA, 15 bp, Homo sapiens
aagtgatcctcctgc

SEQ ID NO: 485311 - DNA, 15 bp, Homo sapiens
caagtgatcctcctg

SEQ ID NO: 485312 - DNA, 15 bp, Homo sapiens
tcaagtgatcctcct

SEQ ID NO: 485313 - DNA, 15 bp, Homo sapiens
cctcaagtgatcctc

SEQ ID NO: 485314 - DNA, 15 bp, Homo sapiens
gcctcaagtgatcct

SEQ ID NO: 485315 - DNA, 15 bp, Homo sapiens
gttcctggcctcaag

SEQ ID NO: 485316 - DNA, 15 bp, Homo sapiens
agttcctggcctcaa

SEQ ID NO: 485317 - DNA, 15 bp, Homo sapiens
gagttcctggcctca

SEQ ID NO: 485318 - DNA, 15 bp, Homo sapiens
tgagttcctggcctc

SEQ ID NO: 485319 - DNA, 15 bp, Homo sapiens
ttgagttcctggcct

SEQ ID NO: 485320 - DNA, 15 bp, Homo sapiens
cttgagttcctggcc

SEQ ID NO: 485321 - DNA, 15 bp, Homo sapiens
tcttgagttcctggc

SEQ ID NO: 485322 - DNA, 15 bp, Homo sapiens
gtcttgagttcctgg

SEQ ID NO: 485323 - DNA, 15 bp, Homo sapiens
ggtcttgagttcctg

SEQ ID NO: 485324 - DNA, 15 bp, Homo sapiens
tggtcttgagttcct

SEQ ID NO: 485325 - DNA, 15 bp, Homo sapiens
ctggtcttgagttcc

SEQ ID NO: 485326 - DNA, 15 bp, Homo sapiens
gctggtcttgagttc

SEQ ID NO: 485327 - DNA, 15 bp, Homo sapiens
ggctggtcttgagtt

SEQ ID NO: 485328 - DNA, 15 bp, Homo sapiens
aggctggtcttgagt

SEQ ID NO: 485329 - DNA, 15 bp, Homo sapiens
caggctggtcttgag

SEQ ID NO: 485330 - DNA, 15 bp, Homo sapiens
tgccaggctggtctt

SEQ ID NO: 485331 - DNA, 15 bp, Homo sapiens
ttgccaggctggtct

SEQ ID NO: 485332 - DNA, 15 bp, Homo sapiens
gttgccaggctggtc

SEQ ID NO: 485333 - DNA, 15 bp, Homo sapiens
tgttgccaggctggt

SEQ ID NO: 485334 - DNA, 15 bp, Homo sapiens
atgttgccaggctgg

SEQ ID NO: 485335 - DNA, 15 bp, Homo sapiens
tatgttgccaggctg

SEQ ID NO: 485336 - DNA, 15 bp, Homo sapiens
ctatgttgccaggct

SEQ ID NO: 485337 - DNA, 15 bp, Homo sapiens
gctatgttgccaggc

SEQ ID NO: 485338 - DNA, 15 bp, Homo sapiens
tgctatgttgccagg

SEQ ID NO: 485339 - DNA, 15 bp, Homo sapiens
ttgctatgttgccag

SEQ ID NO: 485340 - DNA, 15 bp, Homo sapiens
cttgctatgttgcca

SEQ ID NO: 485341 - DNA, 15 bp, Homo sapiens
tcttgctatgttgcc

SEQ ID NO: 485342 - DNA, 15 bp, Homo sapiens
gtcttgctatgttgc

SEQ ID NO: 485343 - DNA, 15 bp, Homo sapiens
ggtcttgctatgttg

SEQ ID NO: 485344 - DNA, 15 bp, Homo sapiens
gggtcttgctatgtt

SEQ ID NO: 485345 - DNA, 15 bp, Homo sapiens
ggggtcttgctatgt

SEQ ID NO: 485346 - DNA, 15 bp, Homo sapiens
tggggtcttgctatg

SEQ ID NO: 485347 - DNA, 15 bp, Homo sapiens
gtggggtcttgctat

SEQ ID NO: 485348 - DNA, 15 bp, Homo sapiens
agtggggtcttgcta

SEQ ID NO: 485349 - DNA, 15 bp, Homo sapiens
tagtggggtcttgct

SEQ ID NO: 485350 - DNA, 15 bp, Homo sapiens
gtagtggggtcttgc

SEQ ID NO: 485351 - DNA, 15 bp, Homo sapiens
tgtagtggggtcttg

SEQ ID NO: 485352 - DNA, 15 bp, Homo sapiens
gtgtagtggggtctt

SEQ ID NO: 485353 - DNA, 15 bp, Homo sapiens
tgtgtagtggggtct

SEQ ID NO: 485354 - DNA, 15 bp, Homo sapiens
gtgtgtagtggggtc

SEQ ID NO: 485355 - DNA, 15 bp, Homo sapiens
tgtgtgtagtggggt

SEQ ID NO: 485356 - DNA, 15 bp, Homo sapiens
gtgtgtgtagtgggg

SEQ ID NO: 485357 - DNA, 15 bp, Homo sapiens
tgtgtgtgtagtggg

SEQ ID NO: 485358 - DNA, 15 bp, Homo sapiens
gtgtgtgtgtagtgg

SEQ ID NO: 485359 - DNA, 15 bp, Homo sapiens
tgtgtgtgtgtagtg

SEQ ID NO: 485360 - DNA, 15 bp, Homo sapiens
gtgtgtgtgtgtagt

SEQ ID NO: 485361 - DNA, 15 bp, Homo sapiens
tgtgtgtgtgtgtag

SEQ ID NO: 485362 - DNA, 15 bp, Homo sapiens
gtgtgtgtgtgtgta

SEQ ID NO: 485363 - DNA, 15 bp, Homo sapiens
tgtgtgtgtgtgtgt

SEQ ID NO: 485364 - DNA, 15 bp, Homo sapiens
gtgtgtgtgtgtgtg

SEQ ID NO: 485365 - DNA, 15 bp, Homo sapiens
ttgtgtgtgtgtgtg

SEQ ID NO: 485366 - DNA, 15 bp, Homo sapiens
tttgtgtgtgtgtgt

SEQ ID NO: 485367 - DNA, 15 bp, Homo sapiens
ctttgtgtgtgtgtg

SEQ ID NO: 485368 - DNA, 15 bp, Homo sapiens
tctttgtgtgtgtgt

SEQ ID NO: 485369 - DNA, 15 bp, Homo sapiens
ttctttgtgtgtgtg

SEQ ID NO: 485370 - DNA, 15 bp, Homo sapiens
cttctttgtgtgtgt

SEQ ID NO: 485371 - DNA, 15 bp, Homo sapiens
tcttctttgtgtgtg

SEQ ID NO: 485372 - DNA, 15 bp, Homo sapiens
ctcttctttgtgtgt

SEQ ID NO: 485373 - DNA, 15 bp, Homo sapiens
tctcttctttgtgtg

SEQ ID NO: 485374 - DNA, 15 bp, Homo sapiens
ttctcttctttgtgt

SEQ ID NO: 485375 - DNA, 15 bp, Homo sapiens
tttctcttctttgtg

SEQ ID NO: 485376 - DNA, 15 bp, Homo sapiens
ctttctcttctttgt

SEQ ID NO: 485377 - DNA, 15 bp, Homo sapiens
tctttctcttctttg

SEQ ID NO: 485378 - DNA, 15 bp, Homo sapiens
ttctttctcttcttt

SEQ ID NO: 485379 - DNA, 15 bp, Homo sapiens
tttctttctcttctt

SEQ ID NO: 485380 - DNA, 15 bp, Homo sapiens
ttttctttctcttct

SEQ ID NO: 485381 - DNA, 15 bp, Homo sapiens
tttttctttctcttc

SEQ ID NO: 485382 - DNA, 15 bp, Homo sapiens
ttttttctttctctt

SEQ ID NO: 485383 - DNA, 15 bp, Homo sapiens
tttttttctttctct

SEQ ID NO: 485384 - DNA, 15 bp, Homo sapiens
gtttttttctttctc

SEQ ID NO: 485385 - DNA, 15 bp, Homo sapiens
cgtttttttctttct

SEQ ID NO: 485386 - DNA, 15 bp, Homo sapiens
tcgtttttttctttc

SEQ ID NO: 485387 - DNA, 15 bp, Homo sapiens
ttcgtttttttcttt

SEQ ID NO: 485388 - DNA, 15 bp, Homo sapiens
tttcgtttttttctt

SEQ ID NO: 485389 - DNA, 15 bp, Homo sapiens
gtttcgtttttttct

SEQ ID NO: 485390 - DNA, 15 bp, Homo sapiens
tgtttcgtttttttc

SEQ ID NO: 485391 - DNA, 15 bp, Homo sapiens
ttgtttcgttttttt

SEQ ID NO: 485392 - DNA, 15 bp, Homo sapiens
tttgtttcgtttttt

SEQ ID NO: 485393 - DNA, 15 bp, Homo sapiens
ttttgtttcgttttt

SEQ ID NO: 485394 - DNA, 15 bp, Homo sapiens
gttttgtttcgtttt

SEQ ID NO: 485395 - DNA, 15 bp, Homo sapiens
agttttgtttcgttt

SEQ ID NO: 485396 - DNA, 15 bp, Homo sapiens
cagttttgtttcgtt

SEQ ID NO: 485397 - DNA, 15 bp, Homo sapiens
acagttttgtttcgt

SEQ ID NO: 485398 - DNA, 15 bp, Homo sapiens
tacagttttgtttcg

SEQ ID NO: 485399 - DNA, 15 bp, Homo sapiens
ttacagttttgtttc

SEQ ID NO: 485400 - DNA, 15 bp, Homo sapiens
attacagttttgttt

SEQ ID NO: 485401 - DNA, 15 bp, Homo sapiens
gattacagttttgtt

SEQ ID NO: 485402 - DNA, 15 bp, Homo sapiens
agattacagttttgt

SEQ ID NO: 485403 - DNA, 15 bp, Homo sapiens
gagattacagttttg

SEQ ID NO: 485404 - DNA, 15 bp, Homo sapiens
agagattacagtttt

SEQ ID NO: 485405 - DNA, 15 bp, Homo sapiens
cagagattacagttt

SEQ ID NO: 485406 - DNA, 15 bp, Homo sapiens
gcagagattacagtt

SEQ ID NO: 485407 - DNA, 15 bp, Homo sapiens
tgcagagattacagt

SEQ ID NO: 485408 - DNA, 15 bp, Homo sapiens
ctgcagagattacag

SEQ ID NO: 485409 - DNA, 15 bp, Homo sapiens
gctgcagagattaca

SEQ ID NO: 485410 - DNA, 15 bp, Homo sapiens
agctgcagagattac

SEQ ID NO: 485411 - DNA, 15 bp, Homo sapiens
cagctgcagagatta

SEQ ID NO: 485412 - DNA, 15 bp, Homo sapiens
acagctgcagagatt

SEQ ID NO: 485413 - DNA, 15 bp, Homo sapiens
gacagctgcagagat

SEQ ID NO: 485414 - DNA, 15 bp, Homo sapiens
ggacagctgcagaga

SEQ ID NO: 485415 - DNA, 15 bp, Homo sapiens
aggacagctgcagag

SEQ ID NO: 485416 - DNA, 15 bp, Homo sapiens
gaggacagctgcaga

SEQ ID NO: 485417 - DNA, 15 bp, Homo sapiens
tgaggacagctgcag

SEQ ID NO: 485418 - DNA, 15 bp, Homo sapiens
ctgaggacagctgca

SEQ ID NO: 485419 - DNA, 15 bp, Homo sapiens
actgaggacagctgc

SEQ ID NO: 485420 - DNA, 15 bp, Homo sapiens
cactgaggacagctg

SEQ ID NO: 485421 - DNA, 15 bp, Homo sapiens
acactgaggacagct

SEQ ID NO: 485422 - DNA, 15 bp, Homo sapiens
cacactgaggacagc

SEQ ID NO: 485423 - DNA, 15 bp, Homo sapiens
ccacactgaggacag

SEQ ID NO: 485424 - DNA, 15 bp, Homo sapiens
tccacactgaggaca

SEQ ID NO: 485425 - DNA, 15 bp, Homo sapiens
ctccacactgaggac

SEQ ID NO: 485426 - DNA, 15 bp, Homo sapiens
cctccacactgagga

SEQ ID NO: 485427 - DNA, 15 bp, Homo sapiens
ccctccacactgagg

SEQ ID NO: 485428 - DNA, 15 bp, Homo sapiens
cccctccacactgag

SEQ ID NO: 485429 - DNA, 15 bp, Homo sapiens
ccccctccacactga

SEQ ID NO: 485430 - DNA, 15 bp, Homo sapiens
accccctccacactg

SEQ ID NO: 485431 - DNA, 15 bp, Homo sapiens
taccccctccacact

SEQ ID NO: 485432 - DNA, 15 bp, Homo sapiens
ctaccccctccacac

SEQ ID NO: 485433 - DNA, 15 bp, Homo sapiens
gctaccccctccaca

SEQ ID NO: 485434 - DNA, 15 bp, Homo sapiens
ggctaccccctccac

SEQ ID NO: 485435 - DNA, 15 bp, Homo sapiens
gggctaccccctcca

SEQ ID NO: 485436 - DNA, 15 bp, Homo sapiens
agggctaccccctcc

SEQ ID NO: 485437 - DNA, 15 bp, Homo sapiens
cagggctaccccctc

SEQ ID NO: 485438 - DNA, 15 bp, Homo sapiens
acagggctaccccct

SEQ ID NO: 485439 - DNA, 15 bp, Homo sapiens
gacagggctaccccc

SEQ ID NO: 485440 - DNA, 15 bp, Homo sapiens
agacagggctacccc

SEQ ID NO: 485441 - DNA, 15 bp, Homo sapiens
cagacagggctaccc

SEQ ID NO: 485442 - DNA, 15 bp, Homo sapiens
acagacagggctacc

SEQ ID NO: 485443 - DNA, 15 bp, Homo sapiens
aacagacagggctac

SEQ ID NO: 485444 - DNA, 15 bp, Homo sapiens
gaacagacagggcta

SEQ ID NO: 485445 - DNA, 15 bp, Homo sapiens
ggaacagacagggct

SEQ ID NO: 485446 - DNA, 15 bp, Homo sapiens
gggaacagacagggc

SEQ ID NO: 485447 - DNA, 15 bp, Homo sapiens
ggggaacagacaggg

SEQ ID NO: 485448 - DNA, 15 bp, Homo sapiens
aggggaacagacagg

SEQ ID NO: 485449 - DNA, 15 bp, Homo sapiens
aaggggaacagacag

SEQ ID NO: 485450 - DNA, 15 bp, Homo sapiens
gaaggggaacagaca

SEQ ID NO: 485451 - DNA, 15 bp, Homo sapiens
tgaaggggaacagac

SEQ ID NO: 485452 - DNA, 15 bp, Homo sapiens
ctgaaggggaacaga

SEQ ID NO: 485453 - DNA, 15 bp, Homo sapiens
gctgaaggggaacag

SEQ ID NO: 485454 - DNA, 15 bp, Homo sapiens
tgctgaaggggaaca

SEQ ID NO: 485455 - DNA, 15 bp, Homo sapiens
gtgctgaaggggaac

SEQ ID NO: 485456 - DNA, 15 bp, Homo sapiens
agtgctgaaggggaa

SEQ ID NO: 485457 - DNA, 15 bp, Homo sapiens
aagtgctgaagggga

SEQ ID NO: 485458 - DNA, 15 bp, Homo sapiens
caagtgctgaagggg

SEQ ID NO: 485459 - DNA, 15 bp, Homo sapiens
gcaagtgctgaaggg

SEQ ID NO: 485460 - DNA, 15 bp, Homo sapiens
agcaagtgctgaagg

SEQ ID NO: 485461 - DNA, 15 bp, Homo sapiens
cagcaagtgctgaag

SEQ ID NO: 485462 - DNA, 15 bp, Homo sapiens
acagcaagtgctgaa

SEQ ID NO: 485463 - DNA, 15 bp, Homo sapiens
aacagcaagtgctga

SEQ ID NO: 485464 - DNA, 15 bp, Homo sapiens
aaacagcaagtgctg

SEQ ID NO: 485465 - DNA, 15 bp, Homo sapiens
aaaacagcaagtgct

SEQ ID NO: 485466 - DNA, 15 bp, Homo sapiens
caaaacagcaagtgc

SEQ ID NO: 485467 - DNA, 15 bp, Homo sapiens
tcaaaacagcaagtg

SEQ ID NO: 485468 - DNA, 15 bp, Homo sapiens
gtcaaaacagcaagt

SEQ ID NO: 485469 - DNA, 15 bp, Homo sapiens
agtcaaaacagcaag

SEQ ID NO: 485470 - DNA, 15 bp, Homo sapiens
gagtcaaaacagcaa

SEQ ID NO: 485471 - DNA, 15 bp, Homo sapiens
agagtcaaaacagca

SEQ ID NO: 485472 - DNA, 15 bp, Homo sapiens
gagagtcaaaacagc

SEQ ID NO: 485473 - DNA, 15 bp, Homo sapiens
agagagtcaaaacag

SEQ ID NO: 485474 - DNA, 15 bp, Homo sapiens
cagagagtcaaaaca

SEQ ID NO: 485475 - DNA, 15 bp, Homo sapiens
ccagagagtcaaaac

SEQ ID NO: 485476 - DNA, 15 bp, Homo sapiens
cccagagagtcaaaa

SEQ ID NO: 485477 - DNA, 15 bp, Homo sapiens
acccagagagtcaaa

SEQ ID NO: 485478 - DNA, 15 bp, Homo sapiens
aacccagagagtcaa

SEQ ID NO: 485479 - DNA, 15 bp, Homo sapiens
gaacccagagagtca

SEQ ID NO: 485480 - DNA, 15 bp, Homo sapiens
agaacccagagagtc

SEQ ID NO: 485481 - DNA, 15 bp, Homo sapiens
aagaacccagagagt

SEQ ID NO: 485482 - DNA, 15 bp, Homo sapiens
aaagaacccagagag

SEQ ID NO: 485483 - DNA, 15 bp, Homo sapiens
caaagaacccagaga

SEQ ID NO: 485484 - DNA, 15 bp, Homo sapiens
acaaagaacccagag

SEQ ID NO: 485485 - DNA, 15 bp, Homo sapiens
cacaaagaacccaga

SEQ ID NO: 485486 - DNA, 15 bp, Homo sapiens
gcacaaagaacccag

SEQ ID NO: 485487 - DNA, 15 bp, Homo sapiens
tgcacaaagaaccca

SEQ ID NO: 485488 - DNA, 15 bp, Homo sapiens
ctgcacaaagaaccc

SEQ ID NO: 485489 - DNA, 15 bp, Homo sapiens
cctgcacaaagaacc

SEQ ID NO: 485490 - DNA, 15 bp, Homo sapiens
acctgcacaaagaac

SEQ ID NO: 485491 - DNA, 15 bp, Homo sapiens
gacctgcacaaagaa

SEQ ID NO: 485492 - DNA, 15 bp, Homo sapiens
agacctgcacaaaga

SEQ ID NO: 485493 - DNA, 15 bp, Homo sapiens
aagacctgcacaaag

SEQ ID NO: 485494 - DNA, 15 bp, Homo sapiens
caagacctgcacaaa

SEQ ID NO: 485495 - DNA, 15 bp, Homo sapiens
tcaagacctgcacaa

SEQ ID NO: 485496 - DNA, 15 bp, Homo sapiens
atcaagacctgcaca

SEQ ID NO: 485497 - DNA, 15 bp, Homo sapiens
catcaagacctgcac

SEQ ID NO: 485498 - DNA, 15 bp, Homo sapiens
ccatcaagacctgca

SEQ ID NO: 485499 - DNA, 15 bp, Homo sapiens
cccatcaagacctgc

SEQ ID NO: 485500 - DNA, 15 bp, Homo sapiens
ccccatcaagacctg

SEQ ID NO: 485501 - DNA, 15 bp, Homo sapiens
tccccatcaagacct

SEQ ID NO: 485502 - DNA, 15 bp, Homo sapiens
ctccccatcaagacc

SEQ ID NO: 485503 - DNA, 15 bp, Homo sapiens
actccccatcaagac

SEQ ID NO: 485504 - DNA, 15 bp, Homo sapiens
gactccccatcaaga

SEQ ID NO: 485505 - DNA, 15 bp, Homo sapiens
agactccccatcaag

SEQ ID NO: 485506 - DNA, 15 bp, Homo sapiens
gagactccccatcaa

SEQ ID NO: 485507 - DNA, 15 bp, Homo sapiens
agagactccccatca

SEQ ID NO: 485508 - DNA, 15 bp, Homo sapiens
cagagactccccatc

SEQ ID NO: 485509 - DNA, 15 bp, Homo sapiens
ccagagactccccat

SEQ ID NO: 485510 - DNA, 15 bp, Homo sapiens
accagagactcccca

SEQ ID NO: 485511 - DNA, 15 bp, Homo sapiens
aaccagagactcccc

SEQ ID NO: 485512 - DNA, 15 bp, Homo sapiens
aaaccagagactccc

SEQ ID NO: 485513 - DNA, 15 bp, Homo sapiens
caaaccagagactcc

SEQ ID NO: 485514 - DNA, 15 bp, Homo sapiens
gcaaaccagagactc

SEQ ID NO: 485515 - DNA, 15 bp, Homo sapiens
ggcaaaccagagact

SEQ ID NO: 485516 - DNA, 15 bp, Homo sapiens
tggcaaaccagagac

SEQ ID NO: 485517 - DNA, 15 bp, Homo sapiens
atggcaaaccagaga

SEQ ID NO: 485518 - DNA, 15 bp, Homo sapiens
aatggcaaaccagag

SEQ ID NO: 485519 - DNA, 15 bp, Homo sapiens
gaatggcaaaccaga

SEQ ID NO: 485520 - DNA, 15 bp, Homo sapiens
agaatggcaaaccag

SEQ ID NO: 485521 - DNA, 15 bp, Homo sapiens
aagaatggcaaacca

SEQ ID NO: 485522 - DNA, 15 bp, Homo sapiens
aaagaatggcaaacc

SEQ ID NO: 485523 - DNA, 15 bp, Homo sapiens
caaagaatggcaaac

SEQ ID NO: 485524 - DNA, 15 bp, Homo sapiens
acaaagaatggcaaa

SEQ ID NO: 485525 - DNA, 15 bp, Homo sapiens
aacaaagaatggcaa

SEQ ID NO: 485526 - DNA, 15 bp, Homo sapiens
aaacaaagaatggca

SEQ ID NO: 485527 - DNA, 15 bp, Homo sapiens
caaacaaagaatggc

SEQ ID NO: 485528 - DNA, 15 bp, Homo sapiens
tcaaacaaagaatgg

SEQ ID NO: 485529 - DNA, 15 bp, Homo sapiens
atcaaacaaagaatg

SEQ ID NO: 485530 - DNA, 15 bp, Homo sapiens
aatcaaacaaagaat

SEQ ID NO: 485531 - DNA, 15 bp, Homo sapiens
aaatcaaacaaagaa

SEQ ID NO: 485532 - DNA, 15 bp, Homo sapiens
taaatcaaacaaaga

SEQ ID NO: 485533 - DNA, 15 bp, Homo sapiens
ttaaatcaaacaaag

SEQ ID NO: 485534 - DNA, 15 bp, Homo sapiens
gttaaatcaaacaaa

SEQ ID NO: 485535 - DNA, 15 bp, Homo sapiens
agttaaatcaaacaa

SEQ ID NO: 485536 - DNA, 15 bp, Homo sapiens
aagttaaatcaaaca

SEQ ID NO: 485537 - DNA, 15 bp, Homo sapiens
aaagttaaatcaaac

SEQ ID NO: 485538 - DNA, 15 bp, Homo sapiens
gaaagttaaatcaaa

SEQ ID NO: 485539 - DNA, 15 bp, Homo sapiens
agaaagttaaatcaa

SEQ ID NO: 485540 - DNA, 15 bp, Homo sapiens
cagaaagttaaatca

SEQ ID NO: 485541 - DNA, 15 bp, Homo sapiens
acagaaagttaaatc

SEQ ID NO: 485542 - DNA, 15 bp, Homo sapiens
tacagaaagttaaat

SEQ ID NO: 485543 - DNA, 15 bp, Homo sapiens
ttacagaaagttaaa

SEQ ID NO: 485544 - DNA, 15 bp, Homo sapiens
attacagaaagttaa

SEQ ID NO: 485545 - DNA, 15 bp, Homo sapiens
gattacagaaagtta

SEQ ID NO: 485546 - DNA, 15 bp, Homo sapiens
tgattacagaaagtt

SEQ ID NO: 485547 - DNA, 15 bp, Homo sapiens
atgattacagaaagt

SEQ ID NO: 485548 - DNA, 15 bp, Homo sapiens
tatgattacagaaag

SEQ ID NO: 485549 - DNA, 15 bp, Homo sapiens
ttatgattacagaaa

SEQ ID NO: 485550 - DNA, 15 bp, Homo sapiens
tttatgattacagaa

SEQ ID NO: 485551 - DNA, 15 bp, Homo sapiens
ctttatgattacaga

SEQ ID NO: 485552 - DNA, 15 bp, Homo sapiens
gctttatgattacag

SEQ ID NO: 485553 - DNA, 15 bp, Homo sapiens
ggctttatgattaca

SEQ ID NO: 485554 - DNA, 15 bp, Homo sapiens
tggctttatgattac

SEQ ID NO: 485555 - DNA, 15 bp, Homo sapiens
ttggctttatgatta

SEQ ID NO: 485556 - DNA, 15 bp, Homo sapiens
attggctttatgatt

SEQ ID NO: 485557 - DNA, 15 bp, Homo sapiens
cattggctttatgat

SEQ ID NO: 485558 - DNA, 15 bp, Homo sapiens
tcattggctttatga

SEQ ID NO: 485559 - DNA, 15 bp, Homo sapiens
atcattggctttatg

SEQ ID NO: 485560 - DNA, 15 bp, Homo sapiens
catcattggctttat

SEQ ID NO: 485561 - DNA, 15 bp, Homo sapiens
ccatcattggcttta

SEQ ID NO: 485562 - DNA, 15 bp, Homo sapiens
cccatcattggcttt

SEQ ID NO: 485563 - DNA, 15 bp, Homo sapiens
gcccatcattggctt

SEQ ID NO: 485564 - DNA, 15 bp, Homo sapiens
agcccatcattggct

SEQ ID NO: 485565 - DNA, 15 bp, Homo sapiens
aagcccatcattggc

SEQ ID NO: 485566 - DNA, 15 bp, Homo sapiens
aaagcccatcattgg

SEQ ID NO: 485567 - DNA, 15 bp, Homo sapiens
aaaagcccatcattg

SEQ ID NO: 485568 - DNA, 15 bp, Homo sapiens
aaaaagcccatcatt

SEQ ID NO: 485569 - DNA, 15 bp, Homo sapiens
aaaaaagcccatcat

SEQ ID NO: 485570 - DNA, 15 bp, Homo sapiens
aaaaaaagcccatca

SEQ ID NO: 485571 - DNA, 15 bp, Homo sapiens
aaaaaaaagcccatc

SEQ ID NO: 485572 - DNA, 15 bp, Homo sapiens
aaaaaaaaagcccat

SEQ ID NO: 485573 - DNA, 15 bp, Homo sapiens
aaaaaaaaaagccca

SEQ ID NO: 485574 - DNA, 15 bp, Homo sapiens
aaaaaaaaaaagccc

SEQ ID NO: 485575 - DNA, 15 bp, Homo sapiens
aaaaaaaaaaaagcc

SEQ ID NO: 485576 - DNA, 15 bp, Homo sapiens
aaaaaaaaaaaaagc

SEQ ID NO: 485577 - DNA, 15 bp, Homo sapiens
ctaaaaaaaaaaaaa

SEQ ID NO: 485578 - DNA, 15 bp, Homo sapiens
tctaaaaaaaaaaaa

SEQ ID NO: 485579 - DNA, 15 bp, Homo sapiens
gtctaaaaaaaaaaa

SEQ ID NO: 485580 - DNA, 15 bp, Homo sapiens
agtctaaaaaaaaaa

SEQ ID NO: 485581 - DNA, 15 bp, Homo sapiens
tagtctaaaaaaaaa

SEQ ID NO: 485582 - DNA, 15 bp, Homo sapiens
ttagtctaaaaaaaa

SEQ ID NO: 485583 - DNA, 15 bp, Homo sapiens
cttagtctaaaaaaa

SEQ ID NO: 485584 - DNA, 15 bp, Homo sapiens
acttagtctaaaaaa

SEQ ID NO: 485585 - DNA, 15 bp, Homo sapiens
gacttagtctaaaaa

SEQ ID NO: 485586 - DNA, 15 bp, Homo sapiens
agacttagtctaaaa

SEQ ID NO: 485587 - DNA, 15 bp, Homo sapiens
aagacttagtctaaa

SEQ ID NO: 485588 - DNA, 15 bp, Homo sapiens
caagacttagtctaa

SEQ ID NO: 485589 - DNA, 15 bp, Homo sapiens
gcaagacttagtcta

SEQ ID NO: 485590 - DNA, 15 bp, Homo sapiens
agcaagacttagtct

SEQ ID NO: 485591 - DNA, 15 bp, Homo sapiens
gagcaagacttagtc

SEQ ID NO: 485592 - DNA, 15 bp, Homo sapiens
agagcaagacttagt

SEQ ID NO: 485593 - DNA, 15 bp, Homo sapiens
tagagcaagacttag

SEQ ID NO: 485594 - DNA, 15 bp, Homo sapiens
atagagcaagactta

SEQ ID NO: 485595 - DNA, 15 bp, Homo sapiens
gatagagcaagactt

SEQ ID NO: 485596 - DNA, 15 bp, Homo sapiens
tgatagagcaagact

SEQ ID NO: 485597 - DNA, 15 bp, Homo sapiens
gtgatagagcaagac

SEQ ID NO: 485598 - DNA, 15 bp, Homo sapiens
ggtgatagagcaaga

SEQ ID NO: 485599 - DNA, 15 bp, Homo sapiens
gggtgatagagcaag

SEQ ID NO: 485600 - DNA, 15 bp, Homo sapiens
tgggtgatagagcaa

SEQ ID NO: 485601 - DNA, 15 bp, Homo sapiens
ttgggtgatagagca

SEQ ID NO: 485602 - DNA, 15 bp, Homo sapiens
cttgggtgatagagc

SEQ ID NO: 485603 - DNA, 15 bp, Homo sapiens
gcttgggtgatagag

SEQ ID NO: 485604 - DNA, 15 bp, Homo sapiens
agcttgggtgataga

SEQ ID NO: 485605 - DNA, 15 bp, Homo sapiens
cagcttgggtgatag

SEQ ID NO: 485606 - DNA, 15 bp, Homo sapiens
ccagcttgggtgata

SEQ ID NO: 485607 - DNA, 15 bp, Homo sapiens
tccagcttgggtgat

SEQ ID NO: 485608 - DNA, 15 bp, Homo sapiens
cactccagcttgggt

SEQ ID NO: 485609 - DNA, 15 bp, Homo sapiens
gcactccagcttggg

SEQ ID NO: 485610 - DNA, 15 bp, Homo sapiens
tgcactccagcttgg

SEQ ID NO: 485611 - DNA, 15 bp, Homo sapiens
ctgcactccagcttg

SEQ ID NO: 485612 - DNA, 15 bp, Homo sapiens
actgcactccagctt

SEQ ID NO: 485613 - DNA, 15 bp, Homo sapiens
cactgcactccagct

SEQ ID NO: 485614 - DNA, 15 bp, Homo sapiens
ggtgccactgcactc

SEQ ID NO: 485615 - DNA, 15 bp, Homo sapiens
tggtgccactgcact

SEQ ID NO: 485616 - DNA, 15 bp, Homo sapiens
atggtgccactgcac

SEQ ID NO: 485617 - DNA, 15 bp, Homo sapiens
gatggtgccactgca

SEQ ID NO: 485618 - DNA, 15 bp, Homo sapiens
agatggtgccactgc

SEQ ID NO: 485619 - DNA, 15 bp, Homo sapiens
gagatggtgccactg

SEQ ID NO: 485620 - DNA, 15 bp, Homo sapiens
cgagatggtgccact

SEQ ID NO: 485621 - DNA, 15 bp, Homo sapiens
ccgagatggtgccac

SEQ ID NO: 485622 - DNA, 15 bp, Homo sapiens
gccgagatggtgcca

SEQ ID NO: 485623 - DNA, 15 bp, Homo sapiens
agccgagatggtgcc

SEQ ID NO: 485624 - DNA, 15 bp, Homo sapiens
gagccgagatggtgc

SEQ ID NO: 485625 - DNA, 15 bp, Homo sapiens
tgagccgagatggtg

SEQ ID NO: 485626 - DNA, 15 bp, Homo sapiens
gtgagccgagatggt

SEQ ID NO: 485627 - DNA, 15 bp, Homo sapiens
agtgagccgagatgg

SEQ ID NO: 485628 - DNA, 15 bp, Homo sapiens
cagtgagccgagatg

SEQ ID NO: 485629 - DNA, 15 bp, Homo sapiens
accgggaggtggagg

SEQ ID NO: 485630 - DNA, 15 bp, Homo sapiens
aaccgggaggtggag

SEQ ID NO: 485631 - DNA, 15 bp, Homo sapiens
gaaccgggaggtgga

SEQ ID NO: 485632 - DNA, 15 bp, Homo sapiens
tgaaccgggaggtgg

SEQ ID NO: 485633 - DNA, 15 bp, Homo sapiens
ttgaaccgggaggtg

SEQ ID NO: 485634 - DNA, 15 bp, Homo sapiens
cttgaaccgggaggt

SEQ ID NO: 485635 - DNA, 15 bp, Homo sapiens
gcttgaaccgggagg

SEQ ID NO: 485636 - DNA, 15 bp, Homo sapiens
tgcttgaaccgggag

SEQ ID NO: 485637 - DNA, 15 bp, Homo sapiens
ttgcttgaaccggga

SEQ ID NO: 485638 - DNA, 15 bp, Homo sapiens
attgcttgaaccggg

SEQ ID NO: 485639 - DNA, 15 bp, Homo sapiens
aattgcttgaaccgg

SEQ ID NO: 485640 - DNA, 15 bp, Homo sapiens
gaattgcttgaaccg

SEQ ID NO: 485641 - DNA, 15 bp, Homo sapiens
cataatcccagctac

SEQ ID NO: 485642 - DNA, 15 bp, Homo sapiens
ccataatcccagcta

SEQ ID NO: 485643 - DNA, 15 bp, Homo sapiens
cccataatcccagct

SEQ ID NO: 485644 - DNA, 15 bp, Homo sapiens
gcccataatcccagc

SEQ ID NO: 485645 - DNA, 15 bp, Homo sapiens
agcccataatcccag

SEQ ID NO: 485646 - DNA, 15 bp, Homo sapiens
aagcccataatccca

SEQ ID NO: 485647 - DNA, 15 bp, Homo sapiens
caagcccataatccc

SEQ ID NO: 485648 - DNA, 15 bp, Homo sapiens
acaagcccataatcc

SEQ ID NO: 485649 - DNA, 15 bp, Homo sapiens
cacaagcccataatc

SEQ ID NO: 485650 - DNA, 15 bp, Homo sapiens
gcacaagcccataat

SEQ ID NO: 485651 - DNA, 15 bp, Homo sapiens
ggcacaagcccataa

SEQ ID NO: 485652 - DNA, 15 bp, Homo sapiens
tggcacaagcccata

SEQ ID NO: 485653 - DNA, 15 bp, Homo sapiens
gtggcacaagcccat

SEQ ID NO: 485654 - DNA, 15 bp, Homo sapiens
ggtggcacaagccca

SEQ ID NO: 485655 - DNA, 15 bp, Homo sapiens
tggtggcacaagccc

SEQ ID NO: 485656 - DNA, 15 bp, Homo sapiens
atggtggcacaagcc

SEQ ID NO: 485657 - DNA, 15 bp, Homo sapiens
catggtggcacaagc

SEQ ID NO: 485658 - DNA, 15 bp, Homo sapiens
gcatggtggcacaag

SEQ ID NO: 485659 - DNA, 15 bp, Homo sapiens
ggcatggtggcacaa

SEQ ID NO: 485660 - DNA, 15 bp, Homo sapiens
gggcatggtggcaca

SEQ ID NO: 485661 - DNA, 15 bp, Homo sapiens
tgggcatggtggcac

SEQ ID NO: 485662 - DNA, 15 bp, Homo sapiens
cagctgggcatggtg

SEQ ID NO: 485663 - DNA, 15 bp, Homo sapiens
tcagctgggcatggt

SEQ ID NO: 485664 - DNA, 15 bp, Homo sapiens
atcagctgggcatgg

SEQ ID NO: 485665 - DNA, 15 bp, Homo sapiens
aatcagctgggcatg

SEQ ID NO: 485666 - DNA, 15 bp, Homo sapiens
aaatcagctgggcat

SEQ ID NO: 485667 - DNA, 15 bp, Homo sapiens
aaaatcagctgggca

SEQ ID NO: 485668 - DNA, 15 bp, Homo sapiens
aaaaatcagctgggc

SEQ ID NO: 485669 - DNA, 15 bp, Homo sapiens
caaaaatcagctggg

SEQ ID NO: 485670 - DNA, 15 bp, Homo sapiens
acaaaaatcagctgg

SEQ ID NO: 485671 - DNA, 15 bp, Homo sapiens
tacaaaaatcagctg

SEQ ID NO: 485672 - DNA, 15 bp, Homo sapiens
atacaaaaatcagct

SEQ ID NO: 485673 - DNA, 15 bp, Homo sapiens
acaaaaaatacaaaa

SEQ ID NO: 485674 - DNA, 15 bp, Homo sapiens
tacaaaaaatacaaa

SEQ ID NO: 485675 - DNA, 15 bp, Homo sapiens
ctacaaaaaatacaa

SEQ ID NO: 485676 - DNA, 15 bp, Homo sapiens
tctacaaaaaataca

SEQ ID NO: 485677 - DNA, 15 bp, Homo sapiens
ctctacaaaaaatac

SEQ ID NO: 485678 - DNA, 15 bp, Homo sapiens
tctctacaaaaaata

SEQ ID NO: 485679 - DNA, 15 bp, Homo sapiens
ttctctacaaaaaat

SEQ ID NO: 485680 - DNA, 15 bp, Homo sapiens
tttctctacaaaaaa

SEQ ID NO: 485681 - DNA, 15 bp, Homo sapiens
ctttctctacaaaaa

SEQ ID NO: 485682 - DNA, 15 bp, Homo sapiens
cctttctctacaaaa

SEQ ID NO: 485683 - DNA, 15 bp, Homo sapiens
ccctttctctacaaa

SEQ ID NO: 485684 - DNA, 15 bp, Homo sapiens
accctttctctacaa

SEQ ID NO: 485685 - DNA, 15 bp, Homo sapiens
aaccctttctctaca

SEQ ID NO: 485686 - DNA, 15 bp, Homo sapiens
aaaccctttctctac

SEQ ID NO: 485687 - DNA, 15 bp, Homo sapiens
gaaaccctttctcta

SEQ ID NO: 485688 - DNA, 15 bp, Homo sapiens
cgaaaccctttctct

SEQ ID NO: 485689 - DNA, 15 bp, Homo sapiens
gcgaaaccctttctc

SEQ ID NO: 485690 - DNA, 15 bp, Homo sapiens
ggcgaaaccctttct

SEQ ID NO: 485691 - DNA, 15 bp, Homo sapiens
tggcgaaaccctttc

SEQ ID NO: 485692 - DNA, 15 bp, Homo sapiens
atggcgaaacccttt

SEQ ID NO: 485693 - DNA, 15 bp, Homo sapiens
catggcgaaaccctt

SEQ ID NO: 485694 - DNA, 15 bp, Homo sapiens
acatggcgaaaccct

SEQ ID NO: 485695 - DNA, 15 bp, Homo sapiens
aacatggcgaaaccc

SEQ ID NO: 485696 - DNA, 15 bp, Homo sapiens
caacatggcgaaacc

SEQ ID NO: 485697 - DNA, 15 bp, Homo sapiens
ccaacatggcgaaac

SEQ ID NO: 485698 - DNA, 15 bp, Homo sapiens
gccaacatggcgaaa

SEQ ID NO: 485699 - DNA, 15 bp, Homo sapiens
ggccaacatggcgaa

SEQ ID NO: 485700 - DNA, 15 bp, Homo sapiens
tggccaacatggcga

SEQ ID NO: 485701 - DNA, 15 bp, Homo sapiens
ctggccaacatggcg

SEQ ID NO: 485702 - DNA, 15 bp, Homo sapiens
cctggccaacatggc

SEQ ID NO: 485703 - DNA, 15 bp, Homo sapiens
gccagcctggccaac

SEQ ID NO: 485704 - DNA, 15 bp, Homo sapiens
ggccagcctggccaa

SEQ ID NO: 485705 - DNA, 15 bp, Homo sapiens
aggccagcctggcca

SEQ ID NO: 485706 - DNA, 15 bp, Homo sapiens
gaggccagcctggcc

SEQ ID NO: 485707 - DNA, 15 bp, Homo sapiens
cgaggccagcctggc

SEQ ID NO: 485708 - DNA, 15 bp, Homo sapiens
tcgaggccagcctgg

SEQ ID NO: 485709 - DNA, 15 bp, Homo sapiens
ttcgaggccagcctg

SEQ ID NO: 485710 - DNA, 15 bp, Homo sapiens
gttcgaggccagcct

SEQ ID NO: 485711 - DNA, 15 bp, Homo sapiens
agttcgaggccagcc

SEQ ID NO: 485712 - DNA, 15 bp, Homo sapiens
gagttcgaggccagc

SEQ ID NO: 485713 - DNA, 15 bp, Homo sapiens
ggagttcgaggccag

SEQ ID NO: 485714 - DNA, 15 bp, Homo sapiens
aggagttcgaggcca

SEQ ID NO: 485715 - DNA, 15 bp, Homo sapiens
caggagttcgaggcc

SEQ ID NO: 485716 - DNA, 15 bp, Homo sapiens
tcaggagttcgaggc

SEQ ID NO: 485717 - DNA, 15 bp, Homo sapiens
gtcaggagttcgagg

SEQ ID NO: 485718 - DNA, 15 bp, Homo sapiens
tgggcagatcacctg

SEQ ID NO: 485719 - DNA, 15 bp, Homo sapiens
gtgggcagatcacct

SEQ ID NO: 485720 - DNA, 15 bp, Homo sapiens
agtgggcagatcacc

SEQ ID NO: 485721 - DNA, 15 bp, Homo sapiens
aagtgggcagatcac

SEQ ID NO: 485722 - DNA, 15 bp, Homo sapiens
gaagtgggcagatca

SEQ ID NO: 485723 - DNA, 15 bp, Homo sapiens
tgaagtgggcagatc

SEQ ID NO: 485724 - DNA, 15 bp, Homo sapiens
ctgaagtgggcagat

SEQ ID NO: 485725 - DNA, 15 bp, Homo sapiens
gctgaagtgggcaga

SEQ ID NO: 485726 - DNA, 15 bp, Homo sapiens
ggctgaagtgggcag

SEQ ID NO: 485727 - DNA, 15 bp, Homo sapiens
aggctgaagtgggca

SEQ ID NO: 485728 - DNA, 15 bp, Homo sapiens
gaggctgaagtgggc

SEQ ID NO: 485729 - DNA, 15 bp, Homo sapiens
ggaggctgaagtggg

SEQ ID NO: 485730 - DNA, 15 bp, Homo sapiens
gggaggctgaagtgg

SEQ ID NO: 485731 - DNA, 15 bp, Homo sapiens
tgggaggctgaagtg

SEQ ID NO: 485732 - DNA, 15 bp, Homo sapiens
ttgggaggctgaagt

SEQ ID NO: 485733 - DNA, 15 bp, Homo sapiens
tttgggaggctgaag

SEQ ID NO: 485734 - DNA, 15 bp, Homo sapiens
ctttgggaggctgaa

SEQ ID NO: 485735 - DNA, 15 bp, Homo sapiens
gccaggcacagtggc

SEQ ID NO: 485736 - DNA, 15 bp, Homo sapiens
ggccaggcacagtgg

SEQ ID NO: 485737 - DNA, 15 bp, Homo sapiens
aggccaggcacagtg

SEQ ID NO: 485738 - DNA, 15 bp, Homo sapiens
taggccaggcacagt

SEQ ID NO: 485739 - DNA, 15 bp, Homo sapiens
ttaggccaggcacag

SEQ ID NO: 485740 - DNA, 15 bp, Homo sapiens
attaggccaggcaca

SEQ ID NO: 485741 - DNA, 15 bp, Homo sapiens
cattaggccaggcac

SEQ ID NO: 485742 - DNA, 15 bp, Homo sapiens
tcattaggccaggca

SEQ ID NO: 485743 - DNA, 15 bp, Homo sapiens
atcattaggccaggc

SEQ ID NO: 485744 - DNA, 15 bp, Homo sapiens
catcattaggccagg

SEQ ID NO: 485745 - DNA, 15 bp, Homo sapiens
ccatcattaggccag

SEQ ID NO: 485746 - DNA, 15 bp, Homo sapiens
cccatcattaggcca

SEQ ID NO: 485747 - DNA, 15 bp, Homo sapiens
gcccatcattaggcc

SEQ ID NO: 485748 - DNA, 15 bp, Homo sapiens
agcccatcattaggc

SEQ ID NO: 485749 - DNA, 15 bp, Homo sapiens
gagcccatcattagg

SEQ ID NO: 485750 - DNA, 15 bp, Homo sapiens
agagcccatcattag

SEQ ID NO: 485751 - DNA, 15 bp, Homo sapiens
aagagcccatcatta

SEQ ID NO: 485752 - DNA, 15 bp, Homo sapiens
aaagagcccatcatt

SEQ ID NO: 485753 - DNA, 15 bp, Homo sapiens
taaagagcccatcat

SEQ ID NO: 485754 - DNA, 15 bp, Homo sapiens
ttaaagagcccatca

SEQ ID NO: 485755 - DNA, 15 bp, Homo sapiens
attaaagagcccatc

SEQ ID NO: 485756 - DNA, 15 bp, Homo sapiens
cattaaagagcccat

SEQ ID NO: 485757 - DNA, 15 bp, Homo sapiens
acattaaagagccca

SEQ ID NO: 485758 - DNA, 15 bp, Homo sapiens
cacattaaagagccc

SEQ ID NO: 485759 - DNA, 15 bp, Homo sapiens
tcacattaaagagcc

SEQ ID NO: 485760 - DNA, 15 bp, Homo sapiens
atcacattaaagagc

SEQ ID NO: 485761 - DNA, 15 bp, Homo sapiens
gatcacattaaagag

SEQ ID NO: 485762 - DNA, 15 bp, Homo sapiens
ggatcacattaaaga

SEQ ID NO: 485763 - DNA, 15 bp, Homo sapiens
aggatcacattaaag

SEQ ID NO: 485764 - DNA, 15 bp, Homo sapiens
aaggatcacattaaa

SEQ ID NO: 485765 - DNA, 15 bp, Homo sapiens
aaaggatcacattaa

SEQ ID NO: 485766 - DNA, 15 bp, Homo sapiens
taaaggatcacatta

SEQ ID NO: 485767 - DNA, 15 bp, Homo sapiens
ctaaaggatcacatt

SEQ ID NO: 485768 - DNA, 15 bp, Homo sapiens
cctaaaggatcacat

SEQ ID NO: 485769 - DNA, 15 bp, Homo sapiens
ccctaaaggatcaca

SEQ ID NO: 485770 - DNA, 15 bp, Homo sapiens
accctaaaggatcac

SEQ ID NO: 485771 - DNA, 15 bp, Homo sapiens
aaccctaaaggatca

SEQ ID NO: 485772 - DNA, 15 bp, Homo sapiens
caaccctaaaggatc

SEQ ID NO: 485773 - DNA, 15 bp, Homo sapiens
ccaaccctaaaggat

SEQ ID NO: 485774 - DNA, 15 bp, Homo sapiens
gccaaccctaaagga

SEQ ID NO: 485775 - DNA, 15 bp, Homo sapiens
cgccaaccctaaagg

SEQ ID NO: 485776 - DNA, 15 bp, Homo sapiens
gcgccaaccctaaag

SEQ ID NO: 485777 - DNA, 15 bp, Homo sapiens
ggcgccaaccctaaa

SEQ ID NO: 485778 - DNA, 15 bp, Homo sapiens
aggcgccaaccctaa

SEQ ID NO: 485779 - DNA, 15 bp, Homo sapiens
aaggcgccaacccta

SEQ ID NO: 485780 - DNA, 15 bp, Homo sapiens
caaggcgccaaccct

SEQ ID NO: 485781 - DNA, 15 bp, Homo sapiens
gcaaggcgccaaccc

SEQ ID NO: 485782 - DNA, 15 bp, Homo sapiens
ggcaaggcgccaacc

SEQ ID NO: 485783 - DNA, 15 bp, Homo sapiens
gggcaaggcgccaac

SEQ ID NO: 485784 - DNA, 15 bp, Homo sapiens
agggcaaggcgccaa

SEQ ID NO: 485785 - DNA, 15 bp, Homo sapiens
tagggcaaggcgcca

SEQ ID NO: 485786 - DNA, 15 bp, Homo sapiens
ctagggcaaggcgcc

SEQ ID NO: 485787 - DNA, 15 bp, Homo sapiens
actagggcaaggcgc

SEQ ID NO: 485788 - DNA, 15 bp, Homo sapiens
aactagggcaaggcg

SEQ ID NO: 485789 - DNA, 15 bp, Homo sapiens
caactagggcaaggc

SEQ ID NO: 485790 - DNA, 15 bp, Homo sapiens
gcaactagggcaagg

SEQ ID NO: 485791 - DNA, 15 bp, Homo sapiens
agcaactagggcaag

SEQ ID NO: 485792 - DNA, 15 bp, Homo sapiens
cagcaactagggcaa

SEQ ID NO: 485793 - DNA, 15 bp, Homo sapiens
acagcaactagggca

SEQ ID NO: 485794 - DNA, 15 bp, Homo sapiens
aacagcaactagggc

SEQ ID NO: 485795 - DNA, 15 bp, Homo sapiens
caacagcaactaggg

SEQ ID NO: 485796 - DNA, 15 bp, Homo sapiens
tcaacagcaactagg

SEQ ID NO: 485797 - DNA, 15 bp, Homo sapiens
ttcaacagcaactag

SEQ ID NO: 485798 - DNA, 15 bp, Homo sapiens
tttcaacagcaacta

SEQ ID NO: 485799 - DNA, 15 bp, Homo sapiens
ttttcaacagcaact

SEQ ID NO: 485800 - DNA, 15 bp, Homo sapiens
tttttcaacagcaac

SEQ ID NO: 485801 - DNA, 15 bp, Homo sapiens
ttttttcaacagcaa

SEQ ID NO: 485802 - DNA, 15 bp, Homo sapiens
gttttttcaacagca

SEQ ID NO: 485803 - DNA, 15 bp, Homo sapiens
agttttttcaacagc

SEQ ID NO: 485804 - DNA, 15 bp, Homo sapiens
tagttttttcaacag

SEQ ID NO: 485805 - DNA, 15 bp, Homo sapiens
atagttttttcaaca

SEQ ID NO: 485806 - DNA, 15 bp, Homo sapiens
aatagttttttcaac

SEQ ID NO: 485807 - DNA, 15 bp, Homo sapiens
aaatagttttttcaa

SEQ ID NO: 485808 - DNA, 15 bp, Homo sapiens
aaaatagttttttca

SEQ ID NO: 485809 - DNA, 15 bp, Homo sapiens
aaaaatagttttttc

SEQ ID NO: 485810 - DNA, 15 bp, Homo sapiens
caaaaatagtttttt

SEQ ID NO: 485811 - DNA, 15 bp, Homo sapiens
acaaaaatagttttt

SEQ ID NO: 485812 - DNA, 15 bp, Homo sapiens
gacaaaaatagtttt

SEQ ID NO: 485813 - DNA, 15 bp, Homo sapiens
ggacaaaaatagttt

SEQ ID NO: 485814 - DNA, 15 bp, Homo sapiens
tggacaaaaatagtt

SEQ ID NO: 485815 - DNA, 15 bp, Homo sapiens
ttggacaaaaatagt

SEQ ID NO: 485816 - DNA, 15 bp, Homo sapiens
tttggacaaaaatag

SEQ ID NO: 485817 - DNA, 15 bp, Homo sapiens
atttggacaaaaata

SEQ ID NO: 485818 - DNA, 15 bp, Homo sapiens
tatttggacaaaaat

SEQ ID NO: 485819 - DNA, 15 bp, Homo sapiens
ctatttggacaaaaa

SEQ ID NO: 485820 - DNA, 15 bp, Homo sapiens
gctatttggacaaaa

SEQ ID NO: 485821 - DNA, 15 bp, Homo sapiens
tgctatttggacaaa

SEQ ID NO: 485822 - DNA, 15 bp, Homo sapiens
gtgctatttggacaa

SEQ ID NO: 485823 - DNA, 15 bp, Homo sapiens
tgtgctatttggaca

SEQ ID NO: 485824 - DNA, 15 bp, Homo sapiens
gtgtgctatttggac

SEQ ID NO: 485825 - DNA, 15 bp, Homo sapiens
tgtgtgctatttgga

SEQ ID NO: 485826 - DNA, 15 bp, Homo sapiens
gtgtgtgctatttgg

SEQ ID NO: 485827 - DNA, 15 bp, Homo sapiens
tgtgtgtgctatttg

SEQ ID NO: 485828 - DNA, 15 bp, Homo sapiens
gtgtgtgtgctattt

SEQ ID NO: 485829 - DNA, 15 bp, Homo sapiens
tgtgtgtgtgctatt

SEQ ID NO: 485830 - DNA, 15 bp, Homo sapiens
ctgtgtgtgtgctat

SEQ ID NO: 485831 - DNA, 15 bp, Homo sapiens
tctgtgtgtgtgcta

SEQ ID NO: 485832 - DNA, 15 bp, Homo sapiens
ttctgtgtgtgtgct

SEQ ID NO: 485833 - DNA, 15 bp, Homo sapiens
tttctgtgtgtgtgc

SEQ ID NO: 485834 - DNA, 15 bp, Homo sapiens
gtttctgtgtgtgtg

SEQ ID NO: 485835 - DNA, 15 bp, Homo sapiens
ggtttctgtgtgtgt

SEQ ID NO: 485836 - DNA, 15 bp, Homo sapiens
aggtttctgtgtgtg

SEQ ID NO: 485837 - DNA, 15 bp, Homo sapiens
taggtttctgtgtgt

SEQ ID NO: 485838 - DNA, 15 bp, Homo sapiens
gtaggtttctgtgtg

SEQ ID NO: 485839 - DNA, 15 bp, Homo sapiens
ggtaggtttctgtgt

SEQ ID NO: 485840 - DNA, 15 bp, Homo sapiens
tggtaggtttctgtg

SEQ ID NO: 485841 - DNA, 15 bp, Homo sapiens
ttggtaggtttctgt

SEQ ID NO: 485842 - DNA, 15 bp, Homo sapiens
gttggtaggtttctg

SEQ ID NO: 485843 - DNA, 15 bp, Homo sapiens
agttggtaggtttct

SEQ ID NO: 485844 - DNA, 15 bp, Homo sapiens
aagttggtaggtttc

SEQ ID NO: 485845 - DNA, 15 bp, Homo sapiens
gaagttggtaggttt

SEQ ID NO: 485846 - DNA, 15 bp, Homo sapiens
ggaagttggtaggtt

SEQ ID NO: 485847 - DNA, 15 bp, Homo sapiens
gggaagttggtaggt

SEQ ID NO: 485848 - DNA, 15 bp, Homo sapiens
agggaagttggtagg

SEQ ID NO: 485849 - DNA, 15 bp, Homo sapiens
gagggaagttggtag

SEQ ID NO: 485850 - DNA, 15 bp, Homo sapiens
ggagggaagttggta

SEQ ID NO: 485851 - DNA, 15 bp, Homo sapiens
gggagggaagttggt

SEQ ID NO: 485852 - DNA, 15 bp, Homo sapiens
tgggagggaagttgg

SEQ ID NO: 485853 - DNA, 15 bp, Homo sapiens
gtgggagggaagttg

SEQ ID NO: 485854 - DNA, 15 bp, Homo sapiens
agtgggagggaagtt

SEQ ID NO: 485855 - DNA, 15 bp, Homo sapiens
aagtgggagggaagt

SEQ ID NO: 485856 - DNA, 15 bp, Homo sapiens
aaagtgggagggaag

SEQ ID NO: 485857 - DNA, 15 bp, Homo sapiens
aaaagtgggagggaa

SEQ ID NO: 485858 - DNA, 15 bp, Homo sapiens
aaaaagtgggaggga

SEQ ID NO: 485859 - DNA, 15 bp, Homo sapiens
gaaaaagtgggaggg

SEQ ID NO: 485860 - DNA, 15 bp, Homo sapiens
ggaaaaagtgggagg

SEQ ID NO: 485861 - DNA, 15 bp, Homo sapiens
aggaaaaagtgggag

SEQ ID NO: 485862 - DNA, 15 bp, Homo sapiens
taggaaaaagtggga

SEQ ID NO: 485863 - DNA, 15 bp, Homo sapiens
ctaggaaaaagtggg

SEQ ID NO: 485864 - DNA, 15 bp, Homo sapiens
cctaggaaaaagtgg

SEQ ID NO: 485865 - DNA, 15 bp, Homo sapiens
tcctaggaaaaagtg

SEQ ID NO: 485866 - DNA, 15 bp, Homo sapiens
ttcctaggaaaaagt

SEQ ID NO: 485867 - DNA, 15 bp, Homo sapiens
attcctaggaaaaag

SEQ ID NO: 485868 - DNA, 15 bp, Homo sapiens
aattcctaggaaaaa

SEQ ID NO: 485869 - DNA, 15 bp, Homo sapiens
gaattcctaggaaaa

SEQ ID NO: 485870 - DNA, 15 bp, Homo sapiens
ggaattcctaggaaa

SEQ ID NO: 485871 - DNA, 15 bp, Homo sapiens
aggaattcctaggaa

SEQ ID NO: 485872 - DNA, 15 bp, Homo sapiens
aaggaattcctagga

SEQ ID NO: 485873 - DNA, 15 bp, Homo sapiens
gaaggaattcctagg

SEQ ID NO: 485874 - DNA, 15 bp, Homo sapiens
agaaggaattcctag

SEQ ID NO: 485875 - DNA, 15 bp, Homo sapiens
cagaaggaattccta

SEQ ID NO: 485876 - DNA, 15 bp, Homo sapiens
tcagaaggaattcct

SEQ ID NO: 485877 - DNA, 15 bp, Homo sapiens
ctcagaaggaattcc

SEQ ID NO: 485878 - DNA, 15 bp, Homo sapiens
cctcagaaggaattc

SEQ ID NO: 485879 - DNA, 15 bp, Homo sapiens
ccctcagaaggaatt

SEQ ID NO: 485880 - DNA, 15 bp, Homo sapiens
tccctcagaaggaat

SEQ ID NO: 485881 - DNA, 15 bp, Homo sapiens
atccctcagaaggaa

SEQ ID NO: 485882 - DNA, 15 bp, Homo sapiens
aatccctcagaagga

SEQ ID NO: 485883 - DNA, 15 bp, Homo sapiens
aaatccctcagaagg

SEQ ID NO: 485884 - DNA, 15 bp, Homo sapiens
gaaatccctcagaag

SEQ ID NO: 485885 - DNA, 15 bp, Homo sapiens
agaaatccctcagaa

SEQ ID NO: 485886 - DNA, 15 bp, Homo sapiens
aagaaatccctcaga

SEQ ID NO: 485887 - DNA, 15 bp, Homo sapiens
caagaaatccctcag

SEQ ID NO: 485888 - DNA, 15 bp, Homo sapiens
tcaagaaatccctca

SEQ ID NO: 485889 - DNA, 15 bp, Homo sapiens
ctcaagaaatccctc

SEQ ID NO: 485890 - DNA, 15 bp, Homo sapiens
tctcaagaaatccct

SEQ ID NO: 485891 - DNA, 15 bp, Homo sapiens
atctcaagaaatccc

SEQ ID NO: 485892 - DNA, 15 bp, Homo sapiens
catctcaagaaatcc

SEQ ID NO: 485893 - DNA, 15 bp, Homo sapiens
ccatctcaagaaatc

SEQ ID NO: 485894 - DNA, 15 bp, Homo sapiens
cccatctcaagaaat

SEQ ID NO: 485895 - DNA, 15 bp, Homo sapiens
ccccatctcaagaaa

SEQ ID NO: 485896 - DNA, 15 bp, Homo sapiens
gccccatctcaagaa

SEQ ID NO: 485897 - DNA, 15 bp, Homo sapiens
tgccccatctcaaga

SEQ ID NO: 485898 - DNA, 15 bp, Homo sapiens
ctgccccatctcaag

SEQ ID NO: 485899 - DNA, 15 bp, Homo sapiens
tctgccccatctcaa

SEQ ID NO: 485900 - DNA, 15 bp, Homo sapiens
ttctgccccatctca

SEQ ID NO: 485901 - DNA, 15 bp, Homo sapiens
attctgccccatctc

SEQ ID NO: 485902 - DNA, 15 bp, Homo sapiens
cattctgccccatct

SEQ ID NO: 485903 - DNA, 15 bp, Homo sapiens
ccattctgccccatc

SEQ ID NO: 485904 - DNA, 15 bp, Homo sapiens
cccattctgccccat

SEQ ID NO: 485905 - DNA, 15 bp, Homo sapiens
ccccattctgcccca

SEQ ID NO: 485906 - DNA, 15 bp, Homo sapiens
gccccattctgcccc

SEQ ID NO: 485907 - DNA, 15 bp, Homo sapiens
agccccattctgccc

SEQ ID NO: 485908 - DNA, 15 bp, Homo sapiens
aagccccattctgcc

SEQ ID NO: 485909 - DNA, 15 bp, Homo sapiens
caagccccattctgc

SEQ ID NO: 485910 - DNA, 15 bp, Homo sapiens
ccaagccccattctg

SEQ ID NO: 485911 - DNA, 15 bp, Homo sapiens
tccaagccccattct

SEQ ID NO: 485912 - DNA, 15 bp, Homo sapiens
ttccaagccccattc

SEQ ID NO: 485913 - DNA, 15 bp, Homo sapiens
cttccaagccccatt

SEQ ID NO: 485914 - DNA, 15 bp, Homo sapiens
tcttccaagccccat

SEQ ID NO: 485915 - DNA, 15 bp, Homo sapiens
ctcttccaagcccca

SEQ ID NO: 485916 - DNA, 15 bp, Homo sapiens
cctcttccaagcccc

SEQ ID NO: 485917 - DNA, 15 bp, Homo sapiens
ccctcttccaagccc

SEQ ID NO: 485918 - DNA, 15 bp, Homo sapiens
tccctcttccaagcc

SEQ ID NO: 485919 - DNA, 15 bp, Homo sapiens
ctccctcttccaagc

SEQ ID NO: 485920 - DNA, 15 bp, Homo sapiens
actccctcttccaag

SEQ ID NO: 485921 - DNA, 15 bp, Homo sapiens
aactccctcttccaa

SEQ ID NO: 485922 - DNA, 15 bp, Homo sapiens
caactccctcttcca

SEQ ID NO: 485923 - DNA, 15 bp, Homo sapiens
ccaactccctcttcc

SEQ ID NO: 485924 - DNA, 15 bp, Homo sapiens
tccaactccctcttc

SEQ ID NO: 485925 - DNA, 15 bp, Homo sapiens
ctccaactccctctt

SEQ ID NO: 485926 - DNA, 15 bp, Homo sapiens
gctccaactccctct

SEQ ID NO: 485927 - DNA, 15 bp, Homo sapiens
agctccaactccctc

SEQ ID NO: 485928 - DNA, 15 bp, Homo sapiens
tagctccaactccct

SEQ ID NO: 485929 - DNA, 15 bp, Homo sapiens
ttagctccaactccc

SEQ ID NO: 485930 - DNA, 15 bp, Homo sapiens
attagctccaactcc

SEQ ID NO: 485931 - DNA, 15 bp, Homo sapiens
aattagctccaactc

SEQ ID NO: 485932 - DNA, 15 bp, Homo sapiens
caattagctccaact

SEQ ID NO: 485933 - DNA, 15 bp, Homo sapiens
tcaattagctccaac

SEQ ID NO: 485934 - DNA, 15 bp, Homo sapiens
gtcaattagctccaa

SEQ ID NO: 485935 - DNA, 15 bp, Homo sapiens
ggtcaattagctcca

SEQ ID NO: 485936 - DNA, 15 bp, Homo sapiens
cggtcaattagctcc

SEQ ID NO: 485937 - DNA, 15 bp, Homo sapiens
acggtcaattagctc

SEQ ID NO: 485938 - DNA, 15 bp, Homo sapiens
aacggtcaattagct

SEQ ID NO: 485939 - DNA, 15 bp, Homo sapiens
caacggtcaattagc

SEQ ID NO: 485940 - DNA, 15 bp, Homo sapiens
gcaacggtcaattag

SEQ ID NO: 485941 - DNA, 15 bp, Homo sapiens
ggcaacggtcaatta

SEQ ID NO: 485942 - DNA, 15 bp, Homo sapiens
aggcaacggtcaatt

SEQ ID NO: 485943 - DNA, 15 bp, Homo sapiens
aaggcaacggtcaat

SEQ ID NO: 485944 - DNA, 15 bp, Homo sapiens
aaaggcaacggtcaa

SEQ ID NO: 485945 - DNA, 15 bp, Homo sapiens
gaaaggcaacggtca

SEQ ID NO: 485946 - DNA, 15 bp, Homo sapiens
agaaaggcaacggtc

SEQ ID NO: 485947 - DNA, 15 bp, Homo sapiens
gagaaaggcaacggt

SEQ ID NO: 485948 - DNA, 15 bp, Homo sapiens
ggagaaaggcaacgg

SEQ ID NO: 485949 - DNA, 15 bp, Homo sapiens
aggagaaaggcaacg

SEQ ID NO: 485950 - DNA, 15 bp, Homo sapiens
aaggagaaaggcaac

SEQ ID NO: 485951 - DNA, 15 bp, Homo sapiens
aaaggagaaaggcaa

SEQ ID NO: 485952 - DNA, 15 bp, Homo sapiens
caaaggagaaaggca

SEQ ID NO: 485953 - DNA, 15 bp, Homo sapiens
acaaaggagaaaggc

SEQ ID NO: 485954 - DNA, 15 bp, Homo sapiens
aacaaaggagaaagg

SEQ ID NO: 485955 - DNA, 15 bp, Homo sapiens
caacaaaggagaaag

SEQ ID NO: 485956 - DNA, 15 bp, Homo sapiens
ccaacaaaggagaaa

SEQ ID NO: 485957 - DNA, 15 bp, Homo sapiens
cccaacaaaggagaa

SEQ ID NO: 485958 - DNA, 15 bp, Homo sapiens
ccccaacaaaggaga

SEQ ID NO: 485959 - DNA, 15 bp, Homo sapiens
accccaacaaaggag

SEQ ID NO: 485960 - DNA, 15 bp, Homo sapiens
gaccccaacaaagga

SEQ ID NO: 485961 - DNA, 15 bp, Homo sapiens
ggaccccaacaaagg

SEQ ID NO: 485962 - DNA, 15 bp, Homo sapiens
aggaccccaacaaag

SEQ ID NO: 485963 - DNA, 15 bp, Homo sapiens
caggaccccaacaaa

SEQ ID NO: 485964 - DNA, 15 bp, Homo sapiens
tcaggaccccaacaa

SEQ ID NO: 485965 - DNA, 15 bp, Homo sapiens
ctcaggaccccaaca

SEQ ID NO: 485966 - DNA, 15 bp, Homo sapiens
actcaggaccccaac

SEQ ID NO: 485967 - DNA, 15 bp, Homo sapiens
gactcaggaccccaa

SEQ ID NO: 485968 - DNA, 15 bp, Homo sapiens
agactcaggacccca

SEQ ID NO: 485969 - DNA, 15 bp, Homo sapiens
aagactcaggacccc

SEQ ID NO: 485970 - DNA, 15 bp, Homo sapiens
caagactcaggaccc

SEQ ID NO: 485971 - DNA, 15 bp, Homo sapiens
acaagactcaggacc

SEQ ID NO: 485972 - DNA, 15 bp, Homo sapiens
aacaagactcaggac

SEQ ID NO: 485973 - DNA, 15 bp, Homo sapiens
gaacaagactcagga

SEQ ID NO: 485974 - DNA, 15 bp, Homo sapiens
ggaacaagactcagg

SEQ ID NO: 485975 - DNA, 15 bp, Homo sapiens
aggaacaagactcag

SEQ ID NO: 485976 - DNA, 15 bp, Homo sapiens
caggaacaagactca

SEQ ID NO: 485977 - DNA, 15 bp, Homo sapiens
gcaggaacaagactc

SEQ ID NO: 485978 - DNA, 15 bp, Homo sapiens
agcaggaacaagact

SEQ ID NO: 485979 - DNA, 15 bp, Homo sapiens
cagcaggaacaagac

SEQ ID NO: 485980 - DNA, 15 bp, Homo sapiens
acagcaggaacaaga

SEQ ID NO: 485981 - DNA, 15 bp, Homo sapiens
tacagcaggaacaag

SEQ ID NO: 485982 - DNA, 15 bp, Homo sapiens
ttacagcaggaacaa

SEQ ID NO: 485983 - DNA, 15 bp, Homo sapiens
cttacagcaggaaca

SEQ ID NO: 485984 - DNA, 15 bp, Homo sapiens
tcttacagcaggaac

SEQ ID NO: 485985 - DNA, 15 bp, Homo sapiens
ctcttacagcaggaa

SEQ ID NO: 485986 - DNA, 15 bp, Homo sapiens
actcttacagcagga

SEQ ID NO: 485987 - DNA, 15 bp, Homo sapiens
aactcttacagcagg

SEQ ID NO: 485988 - DNA, 15 bp, Homo sapiens
taactcttacagcag

SEQ ID NO: 485989 - DNA, 15 bp, Homo sapiens
gtaactcttacagca

SEQ ID NO: 485990 - DNA, 15 bp, Homo sapiens
agtaactcttacagc

SEQ ID NO: 485991 - DNA, 15 bp, Homo sapiens
gagtaactcttacag

SEQ ID NO: 485992 - DNA, 15 bp, Homo sapiens
tgagtaactcttaca

SEQ ID NO: 485993 - DNA, 15 bp, Homo sapiens
gtgagtaactcttac

SEQ ID NO: 485994 - DNA, 15 bp, Homo sapiens
agtgagtaactctta

SEQ ID NO: 485995 - DNA, 15 bp, Homo sapiens
aagtgagtaactctt

SEQ ID NO: 485996 - DNA, 15 bp, Homo sapiens
gaagtgagtaactct

SEQ ID NO: 485997 - DNA, 15 bp, Homo sapiens
ggaagtgagtaactc

SEQ ID NO: 485998 - DNA, 15 bp, Homo sapiens
aggaagtgagtaact

SEQ ID NO: 485999 - DNA, 15 bp, Homo sapiens
caggaagtgagtaac

SEQ ID NO: 486000 - DNA, 15 bp, Homo sapiens
acaggaagtgagtaa

SEQ ID NO: 486001 - DNA, 15 bp, Homo sapiens
gacaggaagtgagta

SEQ ID NO: 486002 - DNA, 15 bp, Homo sapiens
agacaggaagtgagt

SEQ ID NO: 486003 - DNA, 15 bp, Homo sapiens
cagacaggaagtgag

SEQ ID NO: 486004 - DNA, 15 bp, Homo sapiens
gcagacaggaagtga

SEQ ID NO: 486005 - DNA, 15 bp, Homo sapiens
ggcagacaggaagtg

SEQ ID NO: 486006 - DNA, 15 bp, Homo sapiens
tggcagacaggaagt

SEQ ID NO: 486007 - DNA, 15 bp, Homo sapiens
gtggcagacaggaag

SEQ ID NO: 486008 - DNA, 15 bp, Homo sapiens
ggtggcagacaggaa

SEQ ID NO: 486009 - DNA, 15 bp, Homo sapiens
aggtggcagacagga

SEQ ID NO: 486010 - DNA, 15 bp, Homo sapiens
taggtggcagacagg

SEQ ID NO: 486011 - DNA, 15 bp, Homo sapiens
ataggtggcagacag

SEQ ID NO: 486012 - DNA, 15 bp, Homo sapiens
gataggtggcagaca

SEQ ID NO: 486013 - DNA, 15 bp, Homo sapiens
agataggtggcagac

SEQ ID NO: 486014 - DNA, 15 bp, Homo sapiens
gagataggtggcaga

SEQ ID NO: 486015 - DNA, 15 bp, Homo sapiens
ggagataggtggcag

SEQ ID NO: 486016 - DNA, 15 bp, Homo sapiens
gggagataggtggca

SEQ ID NO: 486017 - DNA, 15 bp, Homo sapiens
agggagataggtggc

SEQ ID NO: 486018 - DNA, 15 bp, Homo sapiens
aagggagataggtgg

SEQ ID NO: 486019 - DNA, 15 bp, Homo sapiens
aaagggagataggtg

SEQ ID NO: 486020 - DNA, 15 bp, Homo sapiens
caaagggagataggt

SEQ ID NO: 486021 - DNA, 15 bp, Homo sapiens
gcaaagggagatagg

SEQ ID NO: 486022 - DNA, 15 bp, Homo sapiens
tgcaaagggagatag

SEQ ID NO: 486023 - DNA, 15 bp, Homo sapiens
atgcaaagggagata

SEQ ID NO: 486024 - DNA, 15 bp, Homo sapiens
catgcaaagggagat

SEQ ID NO: 486025 - DNA, 15 bp, Homo sapiens
acatgcaaagggaga

SEQ ID NO: 486026 - DNA, 15 bp, Homo sapiens
cacatgcaaagggag

SEQ ID NO: 486027 - DNA, 15 bp, Homo sapiens
acacatgcaaaggga

SEQ ID NO: 486028 - DNA, 15 bp, Homo sapiens
cacacatgcaaaggg

SEQ ID NO: 486029 - DNA, 15 bp, Homo sapiens
gcacacatgcaaagg

SEQ ID NO: 486030 - DNA, 15 bp, Homo sapiens
agcacacatgcaaag

SEQ ID NO: 486031 - DNA, 15 bp, Homo sapiens
aagcacacatgcaaa

SEQ ID NO: 486032 - DNA, 15 bp, Homo sapiens
gaagcacacatgcaa

SEQ ID NO: 486033 - DNA, 15 bp, Homo sapiens
tgaagcacacatgca

SEQ ID NO: 486034 - DNA, 15 bp, Homo sapiens
ctgaagcacacatgc

SEQ ID NO: 486035 - DNA, 15 bp, Homo sapiens
actgaagcacacatg

SEQ ID NO: 486036 - DNA, 15 bp, Homo sapiens
aactgaagcacacat

SEQ ID NO: 486037 - DNA, 15 bp, Homo sapiens
caactgaagcacaca

SEQ ID NO: 486038 - DNA, 15 bp, Homo sapiens
ccaactgaagcacac

SEQ ID NO: 486039 - DNA, 15 bp, Homo sapiens
cccaactgaagcaca

SEQ ID NO: 486040 - DNA, 15 bp, Homo sapiens
tcccaactgaagcac

SEQ ID NO: 486041 - DNA, 15 bp, Homo sapiens
ctcccaactgaagca

SEQ ID NO: 486042 - DNA, 15 bp, Homo sapiens
tctcccaactgaagc

SEQ ID NO: 486043 - DNA, 15 bp, Homo sapiens
atctcccaactgaag

SEQ ID NO: 486044 - DNA, 15 bp, Homo sapiens
gatctcccaactgaa

SEQ ID NO: 486045 - DNA, 15 bp, Homo sapiens
agatctcccaactga

SEQ ID NO: 486046 - DNA, 15 bp, Homo sapiens
cagatctcccaactg

SEQ ID NO: 486047 - DNA, 15 bp, Homo sapiens
acagatctcccaact

SEQ ID NO: 486048 - DNA, 15 bp, Homo sapiens
aacagatctcccaac

SEQ ID NO: 486049 - DNA, 15 bp, Homo sapiens
aaacagatctcccaa

SEQ ID NO: 486050 - DNA, 15 bp, Homo sapiens
taaacagatctccca

SEQ ID NO: 486051 - DNA, 15 bp, Homo sapiens
ataaacagatctccc

SEQ ID NO: 486052 - DNA, 15 bp, Homo sapiens
gataaacagatctcc

SEQ ID NO: 486053 - DNA, 15 bp, Homo sapiens
tgataaacagatctc

SEQ ID NO: 486054 - DNA, 15 bp, Homo sapiens
ctgataaacagatct

SEQ ID NO: 486055 - DNA, 15 bp, Homo sapiens
gctgataaacagatc

SEQ ID NO: 486056 - DNA, 15 bp, Homo sapiens
ggctgataaacagat

SEQ ID NO: 486057 - DNA, 15 bp, Homo sapiens
gggctgataaacaga

SEQ ID NO: 486058 - DNA, 15 bp, Homo sapiens
ggggctgataaacag

SEQ ID NO: 486059 - DNA, 15 bp, Homo sapiens
aggggctgataaaca

SEQ ID NO: 486060 - DNA, 15 bp, Homo sapiens
caggggctgataaac

SEQ ID NO: 486061 - DNA, 15 bp, Homo sapiens
gcaggggctgataaa

SEQ ID NO: 486062 - DNA, 15 bp, Homo sapiens
ggcaggggctgataa

SEQ ID NO: 486063 - DNA, 15 bp, Homo sapiens
tggcaggggctgata

SEQ ID NO: 486064 - DNA, 15 bp, Homo sapiens
gtggcaggggctgat

SEQ ID NO: 486065 - DNA, 15 bp, Homo sapiens
tgtggcaggggctga

SEQ ID NO: 486066 - DNA, 15 bp, Homo sapiens
gtgtggcaggggctg

SEQ ID NO: 486067 - DNA, 15 bp, Homo sapiens
cgtgtggcaggggct

SEQ ID NO: 486068 - DNA, 15 bp, Homo sapiens
ccgtgtggcaggggc

SEQ ID NO: 486069 - DNA, 15 bp, Homo sapiens
gccgtgtggcagggg

SEQ ID NO: 486070 - DNA, 15 bp, Homo sapiens
agccgtgtggcaggg

SEQ ID NO: 486071 - DNA, 15 bp, Homo sapiens
gagccgtgtggcagg

SEQ ID NO: 486072 - DNA, 15 bp, Homo sapiens
agagccgtgtggcag

SEQ ID NO: 486073 - DNA, 15 bp, Homo sapiens
aagagccgtgtggca

SEQ ID NO: 486074 - DNA, 15 bp, Homo sapiens
aaagagccgtgtggc

SEQ ID NO: 486075 - DNA, 15 bp, Homo sapiens
caaagagccgtgtgg

SEQ ID NO: 486076 - DNA, 15 bp, Homo sapiens
acaaagagccgtgtg

SEQ ID NO: 486077 - DNA, 15 bp, Homo sapiens
aacaaagagccgtgt

SEQ ID NO: 486078 - DNA, 15 bp, Homo sapiens
gaacaaagagccgtg

SEQ ID NO: 486079 - DNA, 15 bp, Homo sapiens
ggaacaaagagccgt

SEQ ID NO: 486080 - DNA, 15 bp, Homo sapiens
aggaacaaagagccg

SEQ ID NO: 486081 - DNA, 15 bp, Homo sapiens
aaggaacaaagagcc

SEQ ID NO: 486082 - DNA, 15 bp, Homo sapiens
gaaggaacaaagagc

SEQ ID NO: 486083 - DNA, 15 bp, Homo sapiens
agaaggaacaaagag

SEQ ID NO: 486084 - DNA, 15 bp, Homo sapiens
cagaaggaacaaaga

SEQ ID NO: 486085 - DNA, 15 bp, Homo sapiens
gcagaaggaacaaag

SEQ ID NO: 486086 - DNA, 15 bp, Homo sapiens
tgcagaaggaacaaa

SEQ ID NO: 486087 - DNA, 15 bp, Homo sapiens
ctgcagaaggaacaa

SEQ ID NO: 486088 - DNA, 15 bp, Homo sapiens
tctgcagaaggaaca

SEQ ID NO: 486089 - DNA, 15 bp, Homo sapiens
ctctgcagaaggaac

SEQ ID NO: 486090 - DNA, 15 bp, Homo sapiens
cctctgcagaaggaa

SEQ ID NO: 486091 - DNA, 15 bp, Homo sapiens
tcctctgcagaagga

SEQ ID NO: 486092 - DNA, 15 bp, Homo sapiens
gtcctctgcagaagg

SEQ ID NO: 486093 - DNA, 15 bp, Homo sapiens
cgtcctctgcagaag

SEQ ID NO: 486094 - DNA, 15 bp, Homo sapiens
acgtcctctgcagaa

SEQ ID NO: 486095 - DNA, 15 bp, Homo sapiens
aacgtcctctgcaga

SEQ ID NO: 486096 - DNA, 15 bp, Homo sapiens
caacgtcctctgcag

SEQ ID NO: 486097 - DNA, 15 bp, Homo sapiens
ccaacgtcctctgca

SEQ ID NO: 486098 - DNA, 15 bp, Homo sapiens
cccaacgtcctctgc

SEQ ID NO: 486099 - DNA, 15 bp, Homo sapiens
ccccaacgtcctctg

SEQ ID NO: 486100 - DNA, 15 bp, Homo sapiens
accccaacgtcctct

SEQ ID NO: 486101 - DNA, 15 bp, Homo sapiens
gaccccaacgtcctc

SEQ ID NO: 486102 - DNA, 15 bp, Homo sapiens
ggaccccaacgtcct

SEQ ID NO: 486103 - DNA, 15 bp, Homo sapiens
gggaccccaacgtcc

SEQ ID NO: 486104 - DNA, 15 bp, Homo sapiens
tgggaccccaacgtc

SEQ ID NO: 486105 - DNA, 15 bp, Homo sapiens
gtgggaccccaacgt

SEQ ID NO: 486106 - DNA, 15 bp, Homo sapiens
cgtgggaccccaacg

SEQ ID NO: 486107 - DNA, 15 bp, Homo sapiens
ccgtgggaccccaac

SEQ ID NO: 486108 - DNA, 15 bp, Homo sapiens
gccgtgggaccccaa

SEQ ID NO: 486109 - DNA, 15 bp, Homo sapiens
agccgtgggacccca

SEQ ID NO: 486110 - DNA, 15 bp, Homo sapiens
cagccgtgggacccc

SEQ ID NO: 486111 - DNA, 15 bp, Homo sapiens
ccagccgtgggaccc

SEQ ID NO: 486112 - DNA, 15 bp, Homo sapiens
accagccgtgggacc

SEQ ID NO: 486113 - DNA, 15 bp, Homo sapiens
gaccagccgtgggac

SEQ ID NO: 486114 - DNA, 15 bp, Homo sapiens
ggaccagccgtggga

SEQ ID NO: 486115 - DNA, 15 bp, Homo sapiens
aggaccagccgtggg

SEQ ID NO: 486116 - DNA, 15 bp, Homo sapiens
aaggaccagccgtgg

SEQ ID NO: 486117 - DNA, 15 bp, Homo sapiens
aaaggaccagccgtg

SEQ ID NO: 486118 - DNA, 15 bp, Homo sapiens
aaaaggaccagccgt

SEQ ID NO: 486119 - DNA, 15 bp, Homo sapiens
caaaaggaccagccg

SEQ ID NO: 486120 - DNA, 15 bp, Homo sapiens
tcaaaaggaccagcc

SEQ ID NO: 486121 - DNA, 15 bp, Homo sapiens
gtcaaaaggaccagc

SEQ ID NO: 486122 - DNA, 15 bp, Homo sapiens
agtcaaaaggaccag

SEQ ID NO: 486123 - DNA, 15 bp, Homo sapiens
gagtcaaaaggacca

SEQ ID NO: 486124 - DNA, 15 bp, Homo sapiens
tgagtcaaaaggacc

SEQ ID NO: 486125 - DNA, 15 bp, Homo sapiens
atgagtcaaaaggac

SEQ ID NO: 486126 - DNA, 15 bp, Homo sapiens
aatgagtcaaaagga

SEQ ID NO: 486127 - DNA, 15 bp, Homo sapiens
aaatgagtcaaaagg

SEQ ID NO: 486128 - DNA, 15 bp, Homo sapiens
aaaatgagtcaaaag

SEQ ID NO: 486129 - DNA, 15 bp, Homo sapiens
caaaatgagtcaaaa

SEQ ID NO: 486130 - DNA, 15 bp, Homo sapiens
gcaaaatgagtcaaa

SEQ ID NO: 486131 - DNA, 15 bp, Homo sapiens
agcaaaatgagtcaa

SEQ ID NO: 486132 - DNA, 15 bp, Homo sapiens
aagcaaaatgagtca

SEQ ID NO: 486133 - DNA, 15 bp, Homo sapiens
aaagcaaaatgagtc

SEQ ID NO: 486134 - DNA, 15 bp, Homo sapiens
gaaagcaaaatgagt

SEQ ID NO: 486135 - DNA, 15 bp, Homo sapiens
tgaaagcaaaatgag

SEQ ID NO: 486136 - DNA, 15 bp, Homo sapiens
ttgaaagcaaaatga

SEQ ID NO: 486137 - DNA, 15 bp, Homo sapiens
cttgaaagcaaaatg

SEQ ID NO: 486138 - DNA, 15 bp, Homo sapiens
ccttgaaagcaaaat

SEQ ID NO: 486139 - DNA, 15 bp, Homo sapiens
accttgaaagcaaaa

SEQ ID NO: 486140 - DNA, 15 bp, Homo sapiens
gaccttgaaagcaaa

SEQ ID NO: 486141 - DNA, 15 bp, Homo sapiens
ggaccttgaaagcaa

SEQ ID NO: 486142 - DNA, 15 bp, Homo sapiens
gggaccttgaaagca

SEQ ID NO: 486143 - DNA, 15 bp, Homo sapiens
tgggaccttgaaagc

SEQ ID NO: 486144 - DNA, 15 bp, Homo sapiens
gtgggaccttgaaag

SEQ ID NO: 486145 - DNA, 15 bp, Homo sapiens
ggtgggaccttgaaa

SEQ ID NO: 486146 - DNA, 15 bp, Homo sapiens
aggtgggaccttgaa

SEQ ID NO: 486147 - DNA, 15 bp, Homo sapiens
gaggtgggaccttga

SEQ ID NO: 486148 - DNA, 15 bp, Homo sapiens
ggaggtgggaccttg

SEQ ID NO: 486149 - DNA, 15 bp, Homo sapiens
gggaggtgggacctt

SEQ ID NO: 486150 - DNA, 15 bp, Homo sapiens
tgggaggtgggacct

SEQ ID NO: 486151 - DNA, 15 bp, Homo sapiens
ctgggaggtgggacc

SEQ ID NO: 486152 - DNA, 15 bp, Homo sapiens
actgggaggtgggac

SEQ ID NO: 486153 - DNA, 15 bp, Homo sapiens
gactgggaggtggga

SEQ ID NO: 486154 - DNA, 15 bp, Homo sapiens
agactgggaggtggg

SEQ ID NO: 486155 - DNA, 15 bp, Homo sapiens
cagactgggaggtgg

SEQ ID NO: 486156 - DNA, 15 bp, Homo sapiens
tcagactgggaggtg

SEQ ID NO: 486157 - DNA, 15 bp, Homo sapiens
ctcagactgggaggt

SEQ ID NO: 486158 - DNA, 15 bp, Homo sapiens
cctcagactgggagg

SEQ ID NO: 486159 - DNA, 15 bp, Homo sapiens
gcctcagactgggag

SEQ ID NO: 486160 - DNA, 15 bp, Homo sapiens
agcctcagactggga

SEQ ID NO: 486161 - DNA, 15 bp, Homo sapiens
cagcctcagactggg

SEQ ID NO: 486162 - DNA, 15 bp, Homo sapiens
gcagcctcagactgg

SEQ ID NO: 486163 - DNA, 15 bp, Homo sapiens
tgcagcctcagactg

SEQ ID NO: 486164 - DNA, 15 bp, Homo sapiens
atgcagcctcagact

SEQ ID NO: 486165 - DNA, 15 bp, Homo sapiens
gatgcagcctcagac

SEQ ID NO: 486166 - DNA, 15 bp, Homo sapiens
ggatgcagcctcaga

SEQ ID NO: 486167 - DNA, 15 bp, Homo sapiens
aggatgcagcctcag

SEQ ID NO: 486168 - DNA, 15 bp, Homo sapiens
gaggatgcagcctca

SEQ ID NO: 486169 - DNA, 15 bp, Homo sapiens
ggaggatgcagcctc

SEQ ID NO: 486170 - DNA, 15 bp, Homo sapiens
tggaggatgcagcct

SEQ ID NO: 486171 - DNA, 15 bp, Homo sapiens
atggaggatgcagcc

SEQ ID NO: 486172 - DNA, 15 bp, Homo sapiens
aatggaggatgcagc

SEQ ID NO: 486173 - DNA, 15 bp, Homo sapiens
taatggaggatgcag

SEQ ID NO: 486174 - DNA, 15 bp, Homo sapiens
gtaatggaggatgca

SEQ ID NO: 486175 - DNA, 15 bp, Homo sapiens
ggtaatggaggatgc

SEQ ID NO: 486176 - DNA, 15 bp, Homo sapiens
tggtaatggaggatg

SEQ ID NO: 486177 - DNA, 15 bp, Homo sapiens
atggtaatggaggat

SEQ ID NO: 486178 - DNA, 15 bp, Homo sapiens
gatggtaatggagga

SEQ ID NO: 486179 - DNA, 15 bp, Homo sapiens
cgatggtaatggagg

SEQ ID NO: 486180 - DNA, 15 bp, Homo sapiens
gcgatggtaatggag

SEQ ID NO: 486181 - DNA, 15 bp, Homo sapiens
ggcgatggtaatgga

SEQ ID NO: 486182 - DNA, 15 bp, Homo sapiens
gggcgatggtaatgg

SEQ ID NO: 486183 - DNA, 15 bp, Homo sapiens
agggcgatggtaatg

SEQ ID NO: 486184 - DNA, 15 bp, Homo sapiens
aagggcgatggtaat

SEQ ID NO: 486185 - DNA, 15 bp, Homo sapiens
gaagggcgatggtaa

SEQ ID NO: 486186 - DNA, 15 bp, Homo sapiens
ggaagggcgatggta

SEQ ID NO: 486187 - DNA, 15 bp, Homo sapiens
aggaagggcgatggt

SEQ ID NO: 486188 - DNA, 15 bp, Homo sapiens
caggaagggcgatgg

SEQ ID NO: 486189 - DNA, 15 bp, Homo sapiens
acaggaagggcgatg

SEQ ID NO: 486190 - DNA, 15 bp, Homo sapiens
cacaggaagggcgat

SEQ ID NO: 486191 - DNA, 15 bp, Homo sapiens
ccacaggaagggcga

SEQ ID NO: 486192 - DNA, 15 bp, Homo sapiens
cccacaggaagggcg

SEQ ID NO: 486193 - DNA, 15 bp, Homo sapiens
gcccacaggaagggc

SEQ ID NO: 486194 - DNA, 15 bp, Homo sapiens
agcccacaggaaggg

SEQ ID NO: 486195 - DNA, 15 bp, Homo sapiens
cagcccacaggaagg

SEQ ID NO: 486196 - DNA, 15 bp, Homo sapiens
ccagcccacaggaag

SEQ ID NO: 486197 - DNA, 15 bp, Homo sapiens
cccagcccacaggaa

SEQ ID NO: 486198 - DNA, 15 bp, Homo sapiens
tcccagcccacagga

SEQ ID NO: 486199 - DNA, 15 bp, Homo sapiens
ctcccagcccacagg

SEQ ID NO: 486200 - DNA, 15 bp, Homo sapiens
cctcccagcccacag

SEQ ID NO: 486201 - DNA, 15 bp, Homo sapiens
gcctcccagcccaca

SEQ ID NO: 486202 - DNA, 15 bp, Homo sapiens
ggcctcccagcccac

SEQ ID NO: 486203 - DNA, 15 bp, Homo sapiens
tggcctcccagccca

SEQ ID NO: 486204 - DNA, 15 bp, Homo sapiens
ctggcctcccagccc

SEQ ID NO: 486205 - DNA, 15 bp, Homo sapiens
cctggcctcccagcc

SEQ ID NO: 486206 - DNA, 15 bp, Homo sapiens
acctggcctcccagc

SEQ ID NO: 486207 - DNA, 15 bp, Homo sapiens
gacctggcctcccag

SEQ ID NO: 486208 - DNA, 15 bp, Homo sapiens
ggacctggcctccca

SEQ ID NO: 486209 - DNA, 15 bp, Homo sapiens
aggacctggcctccc

SEQ ID NO: 486210 - DNA, 15 bp, Homo sapiens
aaggacctggcctcc

SEQ ID NO: 486211 - DNA, 15 bp, Homo sapiens
aaaggacctggcctc

SEQ ID NO: 486212 - DNA, 15 bp, Homo sapiens
gaaaggacctggcct

SEQ ID NO: 486213 - DNA, 15 bp, Homo sapiens
ggaaaggacctggcc

SEQ ID NO: 486214 - DNA, 15 bp, Homo sapiens
aggaaaggacctggc

SEQ ID NO: 486215 - DNA, 15 bp, Homo sapiens
caggaaaggacctgg

SEQ ID NO: 486216 - DNA, 15 bp, Homo sapiens
gcaggaaaggacctg

SEQ ID NO: 486217 - DNA, 15 bp, Homo sapiens
ggcaggaaaggacct

SEQ ID NO: 486218 - DNA, 15 bp, Homo sapiens
gggcaggaaaggacc

SEQ ID NO: 486219 - DNA, 15 bp, Homo sapiens
tgggcaggaaaggac

SEQ ID NO: 486220 - DNA, 15 bp, Homo sapiens
ctgggcaggaaagga

SEQ ID NO: 486221 - DNA, 15 bp, Homo sapiens
gctgggcaggaaagg

SEQ ID NO: 486222 - DNA, 15 bp, Homo sapiens
cgctgggcaggaaag

SEQ ID NO: 486223 - DNA, 15 bp, Homo sapiens
tcgctgggcaggaaa

SEQ ID NO: 486224 - DNA, 15 bp, Homo sapiens
atcgctgggcaggaa

SEQ ID NO: 486225 - DNA, 15 bp, Homo sapiens
catcgctgggcagga

SEQ ID NO: 486226 - DNA, 15 bp, Homo sapiens
acatcgctgggcagg

SEQ ID NO: 486227 - DNA, 15 bp, Homo sapiens
gacatcgctgggcag

SEQ ID NO: 486228 - DNA, 15 bp, Homo sapiens
tgacatcgctgggca

SEQ ID NO: 486229 - DNA, 15 bp, Homo sapiens
ctgacatcgctgggc

SEQ ID NO: 486230 - DNA, 15 bp, Homo sapiens
gctgacatcgctggg

SEQ ID NO: 486231 - DNA, 15 bp, Homo sapiens
cgctgacatcgctgg

SEQ ID NO: 486232 - DNA, 15 bp, Homo sapiens
acgctgacatcgctg

SEQ ID NO: 486233 - DNA, 15 bp, Homo sapiens
aacgctgacatcgct

SEQ ID NO: 486234 - DNA, 15 bp, Homo sapiens
aaacgctgacatcgc

SEQ ID NO: 486235 - DNA, 15 bp, Homo sapiens
gaaacgctgacatcg

SEQ ID NO: 486236 - DNA, 15 bp, Homo sapiens
ggaaacgctgacatc

SEQ ID NO: 486237 - DNA, 15 bp, Homo sapiens
aggaaacgctgacat

SEQ ID NO: 486238 - DNA, 15 bp, Homo sapiens
gaggaaacgctgaca

SEQ ID NO: 486239 - DNA, 15 bp, Homo sapiens
tgaggaaacgctgac

SEQ ID NO: 486240 - DNA, 15 bp, Homo sapiens
ctgaggaaacgctga

SEQ ID NO: 486241 - DNA, 15 bp, Homo sapiens
cctgaggaaacgctg

SEQ ID NO: 486242 - DNA, 15 bp, Homo sapiens
ccctgaggaaacgct

SEQ ID NO: 486243 - DNA, 15 bp, Homo sapiens
cccctgaggaaacgc

SEQ ID NO: 486244 - DNA, 15 bp, Homo sapiens
gcccctgaggaaacg

SEQ ID NO: 486245 - DNA, 15 bp, Homo sapiens
ggcccctgaggaaac

SEQ ID NO: 486246 - DNA, 15 bp, Homo sapiens
tggcccctgaggaaa

SEQ ID NO: 486247 - DNA, 15 bp, Homo sapiens
ctggcccctgaggaa

SEQ ID NO: 486248 - DNA, 15 bp, Homo sapiens
cctggcccctgagga

SEQ ID NO: 486249 - DNA, 15 bp, Homo sapiens
gcctggcccctgagg

SEQ ID NO: 486250 - DNA, 15 bp, Homo sapiens
tgcctggcccctgag

SEQ ID NO: 486251 - DNA, 15 bp, Homo sapiens
gtgcctggcccctga

SEQ ID NO: 486252 - DNA, 15 bp, Homo sapiens
agtgcctggcccctg

SEQ ID NO: 486253 - DNA, 15 bp, Homo sapiens
gagtgcctggcccct

SEQ ID NO: 486254 - DNA, 15 bp, Homo sapiens
tgagtgcctggcccc

SEQ ID NO: 486255 - DNA, 15 bp, Homo sapiens
atgagtgcctggccc

SEQ ID NO: 486256 - DNA, 15 bp, Homo sapiens
gatgagtgcctggcc

SEQ ID NO: 486257 - DNA, 15 bp, Homo sapiens
tgatgagtgcctggc

SEQ ID NO: 486258 - DNA, 15 bp, Homo sapiens
ctgatgagtgcctgg

SEQ ID NO: 486259 - DNA, 15 bp, Homo sapiens
cctgatgagtgcctg

SEQ ID NO: 486260 - DNA, 15 bp, Homo sapiens
tcctgatgagtgcct

SEQ ID NO: 486261 - DNA, 15 bp, Homo sapiens
ctcctgatgagtgcc

SEQ ID NO: 486262 - DNA, 15 bp, Homo sapiens
tctcctgatgagtgc

SEQ ID NO: 486263 - DNA, 15 bp, Homo sapiens
ttctcctgatgagtg

SEQ ID NO: 486264 - DNA, 15 bp, Homo sapiens
tttctcctgatgagt

SEQ ID NO: 486265 - DNA, 15 bp, Homo sapiens
ctttctcctgatgag

SEQ ID NO: 486266 - DNA, 15 bp, Homo sapiens
cctttctcctgatga

SEQ ID NO: 486267 - DNA, 15 bp, Homo sapiens
tcctttctcctgatg

SEQ ID NO: 486268 - DNA, 15 bp, Homo sapiens
ttcctttctcctgat

SEQ ID NO: 486269 - DNA, 15 bp, Homo sapiens
gttcctttctcctga

SEQ ID NO: 486270 - DNA, 15 bp, Homo sapiens
agttcctttctcctg

SEQ ID NO: 486271 - DNA, 15 bp, Homo sapiens
tagttcctttctcct

SEQ ID NO: 486272 - DNA, 15 bp, Homo sapiens
ttagttcctttctcc

SEQ ID NO: 486273 - DNA, 15 bp, Homo sapiens
attagttcctttctc

SEQ ID NO: 486274 - DNA, 15 bp, Homo sapiens
aattagttcctttct

SEQ ID NO: 486275 - DNA, 15 bp, Homo sapiens
taattagttcctttc

SEQ ID NO: 486276 - DNA, 15 bp, Homo sapiens
gtaattagttccttt

SEQ ID NO: 486277 - DNA, 15 bp, Homo sapiens
agtaattagttcctt

SEQ ID NO: 486278 - DNA, 15 bp, Homo sapiens
aagtaattagttcct

SEQ ID NO: 486279 - DNA, 15 bp, Homo sapiens
caagtaattagttcc

SEQ ID NO: 486280 - DNA, 15 bp, Homo sapiens
tcaagtaattagttc

SEQ ID NO: 486281 - DNA, 15 bp, Homo sapiens
ctcaagtaattagtt

SEQ ID NO: 486282 - DNA, 15 bp, Homo sapiens
actcaagtaattagt

SEQ ID NO: 486283 - DNA, 15 bp, Homo sapiens
tactcaagtaattag

SEQ ID NO: 486284 - DNA, 15 bp, Homo sapiens
ttactcaagtaatta

SEQ ID NO: 486285 - DNA, 15 bp, Homo sapiens
attactcaagtaatt

SEQ ID NO: 486286 - DNA, 15 bp, Homo sapiens
aattactcaagtaat

SEQ ID NO: 486287 - DNA, 15 bp, Homo sapiens
aaattactcaagtaa

SEQ ID NO: 486288 - DNA, 15 bp, Homo sapiens
caaattactcaagta

SEQ ID NO: 486289 - DNA, 15 bp, Homo sapiens
gcaaattactcaagt

SEQ ID NO: 486290 - DNA, 15 bp, Homo sapiens
ggcaaattactcaag

SEQ ID NO: 486291 - DNA, 15 bp, Homo sapiens
aggcaaattactcaa

SEQ ID NO: 486292 - DNA, 15 bp, Homo sapiens
aaggcaaattactca

SEQ ID NO: 486293 - DNA, 15 bp, Homo sapiens
caaggcaaattactc

SEQ ID NO: 486294 - DNA, 15 bp, Homo sapiens
gcaaggcaaattact

SEQ ID NO: 486295 - DNA, 15 bp, Homo sapiens
ggcaaggcaaattac

SEQ ID NO: 486296 - DNA, 15 bp, Homo sapiens
aggcaaggcaaatta

SEQ ID NO: 486297 - DNA, 15 bp, Homo sapiens
aaggcaaggcaaatt

SEQ ID NO: 486298 - DNA, 15 bp, Homo sapiens
caaggcaaggcaaat

SEQ ID NO: 486299 - DNA, 15 bp, Homo sapiens
gcaaggcaaggcaaa

SEQ ID NO: 486300 - DNA, 15 bp, Homo sapiens
agcaaggcaaggcaa

SEQ ID NO: 486301 - DNA, 15 bp, Homo sapiens
cagcaaggcaaggca

SEQ ID NO: 486302 - DNA, 15 bp, Homo sapiens
tcagcaaggcaaggc

SEQ ID NO: 486303 - DNA, 15 bp, Homo sapiens
ctcagcaaggcaagg

SEQ ID NO: 486304 - DNA, 15 bp, Homo sapiens
tctcagcaaggcaag

SEQ ID NO: 486305 - DNA, 15 bp, Homo sapiens
ctctcagcaaggcaa

SEQ ID NO: 486306 - DNA, 15 bp, Homo sapiens
cctctcagcaaggca

SEQ ID NO: 486307 - DNA, 15 bp, Homo sapiens
tcctctcagcaaggc

SEQ ID NO: 486308 - DNA, 15 bp, Homo sapiens
ctcctctcagcaagg

SEQ ID NO: 486309 - DNA, 15 bp, Homo sapiens
actcctctcagcaag

SEQ ID NO: 486310 - DNA, 15 bp, Homo sapiens
cactcctctcagcaa

SEQ ID NO: 486311 - DNA, 15 bp, Homo sapiens
acactcctctcagca

SEQ ID NO: 486312 - DNA, 15 bp, Homo sapiens
cacactcctctcagc

SEQ ID NO: 486313 - DNA, 15 bp, Homo sapiens
gcacactcctctcag

SEQ ID NO: 486314 - DNA, 15 bp, Homo sapiens
ggcacactcctctca

SEQ ID NO: 486315 - DNA, 15 bp, Homo sapiens
gggcacactcctctc

SEQ ID NO: 486316 - DNA, 15 bp, Homo sapiens
agggcacactcctct

SEQ ID NO: 486317 - DNA, 15 bp, Homo sapiens
cagggcacactcctc

SEQ ID NO: 486318 - DNA, 15 bp, Homo sapiens
tcagggcacactcct

SEQ ID NO: 486319 - DNA, 15 bp, Homo sapiens
ctcagggcacactcc

SEQ ID NO: 486320 - DNA, 15 bp, Homo sapiens
cctcagggcacactc

SEQ ID NO: 486321 - DNA, 15 bp, Homo sapiens
ccctcagggcacact

SEQ ID NO: 486322 - DNA, 15 bp, Homo sapiens
tccctcagggcacac

SEQ ID NO: 486323 - DNA, 15 bp, Homo sapiens
gtccctcagggcaca

SEQ ID NO: 486324 - DNA, 15 bp, Homo sapiens
agtccctcagggcac

SEQ ID NO: 486325 - DNA, 15 bp, Homo sapiens
gagtccctcagggca

SEQ ID NO: 486326 - DNA, 15 bp, Homo sapiens
ggagtccctcagggc

SEQ ID NO: 486327 - DNA, 15 bp, Homo sapiens
tggagtccctcaggg

SEQ ID NO: 486328 - DNA, 15 bp, Homo sapiens
atggagtccctcagg

SEQ ID NO: 486329 - DNA, 15 bp, Homo sapiens
catggagtccctcag

SEQ ID NO: 486330 - DNA, 15 bp, Homo sapiens
acatggagtccctca

SEQ ID NO: 486331 - DNA, 15 bp, Homo sapiens
cacatggagtccctc

SEQ ID NO: 486332 - DNA, 15 bp, Homo sapiens
tcacatggagtccct

SEQ ID NO: 486333 - DNA, 15 bp, Homo sapiens
ctcacatggagtccc

SEQ ID NO: 486334 - DNA, 15 bp, Homo sapiens
actcacatggagtcc

SEQ ID NO: 486335 - DNA, 15 bp, Homo sapiens
cactcacatggagtc

SEQ ID NO: 486336 - DNA, 15 bp, Homo sapiens
acactcacatggagt

SEQ ID NO: 486337 - DNA, 15 bp, Homo sapiens
cacactcacatggag

SEQ ID NO: 486338 - DNA, 15 bp, Homo sapiens
ccacactcacatgga

SEQ ID NO: 486339 - DNA, 15 bp, Homo sapiens
accacactcacatgg

SEQ ID NO: 486340 - DNA, 15 bp, Homo sapiens
caccacactcacatg

SEQ ID NO: 486341 - DNA, 15 bp, Homo sapiens
tcaccacactcacat

SEQ ID NO: 486342 - DNA, 15 bp, Homo sapiens
gtcaccacactcaca

SEQ ID NO: 486343 - DNA, 15 bp, Homo sapiens
cgtcaccacactcac

SEQ ID NO: 486344 - DNA, 15 bp, Homo sapiens
ccgtcaccacactca

SEQ ID NO: 486345 - DNA, 15 bp, Homo sapiens
cccgtcaccacactc

SEQ ID NO: 486346 - DNA, 15 bp, Homo sapiens
acccgtcaccacact

SEQ ID NO: 486347 - DNA, 15 bp, Homo sapiens
cacccgtcaccacac

SEQ ID NO: 486348 - DNA, 15 bp, Homo sapiens
acacccgtcaccaca

SEQ ID NO: 486349 - DNA, 15 bp, Homo sapiens
cacacccgtcaccac

SEQ ID NO: 486350 - DNA, 15 bp, Homo sapiens
ccacacccgtcacca

SEQ ID NO: 486351 - DNA, 15 bp, Homo sapiens
cccacacccgtcacc

SEQ ID NO: 486352 - DNA, 15 bp, Homo sapiens
ccccacacccgtcac

SEQ ID NO: 486353 - DNA, 15 bp, Homo sapiens
cccccacacccgtca

SEQ ID NO: 486354 - DNA, 15 bp, Homo sapiens
acccccacacccgtc

SEQ ID NO: 486355 - DNA, 15 bp, Homo sapiens
cacccccacacccgt

SEQ ID NO: 486356 - DNA, 15 bp, Homo sapiens
acacccccacacccg

SEQ ID NO: 486357 - DNA, 15 bp, Homo sapiens
gacacccccacaccc

SEQ ID NO: 486358 - DNA, 15 bp, Homo sapiens
ggacacccccacacc

SEQ ID NO: 486359 - DNA, 15 bp, Homo sapiens
gggacacccccacac

SEQ ID NO: 486360 - DNA, 15 bp, Homo sapiens
agggacacccccaca

SEQ ID NO: 486361 - DNA, 15 bp, Homo sapiens
cagggacacccccac

SEQ ID NO: 486362 - DNA, 15 bp, Homo sapiens
acagggacaccccca

SEQ ID NO: 486363 - DNA, 15 bp, Homo sapiens
cacagggacaccccc

SEQ ID NO: 486364 - DNA, 15 bp, Homo sapiens
acacagggacacccc

SEQ ID NO: 486365 - DNA, 15 bp, Homo sapiens
aacacagggacaccc

SEQ ID NO: 486366 - DNA, 15 bp, Homo sapiens
taacacagggacacc

SEQ ID NO: 486367 - DNA, 15 bp, Homo sapiens
ataacacagggacac

SEQ ID NO: 486368 - DNA, 15 bp, Homo sapiens
aataacacagggaca

SEQ ID NO: 486369 - DNA, 15 bp, Homo sapiens
aaataacacagggac

SEQ ID NO: 486370 - DNA, 15 bp, Homo sapiens
aaaataacacaggga

SEQ ID NO: 486371 - DNA, 15 bp, Homo sapiens
taaaataacacaggg

SEQ ID NO: 486372 - DNA, 15 bp, Homo sapiens
ttaaaataacacagg

SEQ ID NO: 486373 - DNA, 15 bp, Homo sapiens
tttaaaataacacag

SEQ ID NO: 486374 - DNA, 15 bp, Homo sapiens
ttttaaaataacaca

SEQ ID NO: 486375 - DNA, 15 bp, Homo sapiens
attttaaaataacac

SEQ ID NO: 486376 - DNA, 15 bp, Homo sapiens
cattttaaaataaca

SEQ ID NO: 486377 - DNA, 15 bp, Homo sapiens
ccattttaaaataac

SEQ ID NO: 486378 - DNA, 15 bp, Homo sapiens
cccattttaaaataa

SEQ ID NO: 486379 - DNA, 15 bp, Homo sapiens
acccattttaaaata

SEQ ID NO: 486380 - DNA, 15 bp, Homo sapiens
cacccattttaaaat

SEQ ID NO: 486381 - DNA, 15 bp, Homo sapiens
gcacccattttaaaa

SEQ ID NO: 486382 - DNA, 15 bp, Homo sapiens
ggcacccattttaaa

SEQ ID NO: 486383 - DNA, 15 bp, Homo sapiens
aggcacccattttaa

SEQ ID NO: 486384 - DNA, 15 bp, Homo sapiens
aaggcacccatttta

SEQ ID NO: 486385 - DNA, 15 bp, Homo sapiens
gaaggcacccatttt

SEQ ID NO: 486386 - DNA, 15 bp, Homo sapiens
tgaaggcacccattt

SEQ ID NO: 486387 - DNA, 15 bp, Homo sapiens
ctgaaggcacccatt

SEQ ID NO: 486388 - DNA, 15 bp, Homo sapiens
cctgaaggcacccat

SEQ ID NO: 486389 - DNA, 15 bp, Homo sapiens
tcctgaaggcaccca

SEQ ID NO: 486390 - DNA, 15 bp, Homo sapiens
gtcctgaaggcaccc

SEQ ID NO: 486391 - DNA, 15 bp, Homo sapiens
cgtcctgaaggcacc

SEQ ID NO: 486392 - DNA, 15 bp, Homo sapiens
tcgtcctgaaggcac

SEQ ID NO: 486393 - DNA, 15 bp, Homo sapiens
atcgtcctgaaggca

SEQ ID NO: 486394 - DNA, 15 bp, Homo sapiens
catcgtcctgaaggc

SEQ ID NO: 486395 - DNA, 15 bp, Homo sapiens
tcatcgtcctgaagg

SEQ ID NO: 486396 - DNA, 15 bp, Homo sapiens
ctcatcgtcctgaag

SEQ ID NO: 486397 - DNA, 15 bp, Homo sapiens
gctcatcgtcctgaa

SEQ ID NO: 486398 - DNA, 15 bp, Homo sapiens
tgctcatcgtcctga

SEQ ID NO: 486399 - DNA, 15 bp, Homo sapiens
atgctcatcgtcctg

SEQ ID NO: 486400 - DNA, 15 bp, Homo sapiens
catgctcatcgtcct

SEQ ID NO: 486401 - DNA, 15 bp, Homo sapiens
acatgctcatcgtcc

SEQ ID NO: 486402 - DNA, 15 bp, Homo sapiens
cacatgctcatcgtc

SEQ ID NO: 486403 - DNA, 15 bp, Homo sapiens
tcacatgctcatcgt

SEQ ID NO: 486404 - DNA, 15 bp, Homo sapiens
gtcacatgctcatcg

SEQ ID NO: 486405 - DNA, 15 bp, Homo sapiens
ggtcacatgctcatc

SEQ ID NO: 486406 - DNA, 15 bp, Homo sapiens
tggtcacatgctcat

SEQ ID NO: 486407 - DNA, 15 bp, Homo sapiens
atggtcacatgctca

SEQ ID NO: 486408 - DNA, 15 bp, Homo sapiens
aatggtcacatgctc

SEQ ID NO: 486409 - DNA, 15 bp, Homo sapiens
aaatggtcacatgct

SEQ ID NO: 486410 - DNA, 15 bp, Homo sapiens
gaaatggtcacatgc

SEQ ID NO: 486411 - DNA, 15 bp, Homo sapiens
ggaaatggtcacatg

SEQ ID NO: 486412 - DNA, 15 bp, Homo sapiens
aggaaatggtcacat

SEQ ID NO: 486413 - DNA, 15 bp, Homo sapiens
gaggaaatggtcaca

SEQ ID NO: 486414 - DNA, 15 bp, Homo sapiens
agaggaaatggtcac

SEQ ID NO: 486415 - DNA, 15 bp, Homo sapiens
gagaggaaatggtca

SEQ ID NO: 486416 - DNA, 15 bp, Homo sapiens
agagaggaaatggtc

SEQ ID NO: 486417 - DNA, 15 bp, Homo sapiens
tagagaggaaatggt

SEQ ID NO: 486418 - DNA, 15 bp, Homo sapiens
atagagaggaaatgg

SEQ ID NO: 486419 - DNA, 15 bp, Homo sapiens
aatagagaggaaatg

SEQ ID NO: 486420 - DNA, 15 bp, Homo sapiens
aaatagagaggaaat

SEQ ID NO: 486421 - DNA, 15 bp, Homo sapiens
gaaatagagaggaaa

SEQ ID NO: 486422 - DNA, 15 bp, Homo sapiens
ggaaatagagaggaa

SEQ ID NO: 486423 - DNA, 15 bp, Homo sapiens
tggaaatagagagga

SEQ ID NO: 486424 - DNA, 15 bp, Homo sapiens
atggaaatagagagg

SEQ ID NO: 486425 - DNA, 15 bp, Homo sapiens
gatggaaatagagag

SEQ ID NO: 486426 - DNA, 15 bp, Homo sapiens
tgatggaaatagaga

SEQ ID NO: 486427 - DNA, 15 bp, Homo sapiens
gtgatggaaatagag

SEQ ID NO: 486428 - DNA, 15 bp, Homo sapiens
tgtgatggaaataga

SEQ ID NO: 486429 - DNA, 15 bp, Homo sapiens
ttgtgatggaaatag

SEQ ID NO: 486430 - DNA, 15 bp, Homo sapiens
cttgtgatggaaata

SEQ ID NO: 486431 - DNA, 15 bp, Homo sapiens
tcttgtgatggaaat

SEQ ID NO: 486432 - DNA, 15 bp, Homo sapiens
ctcttgtgatggaaa

SEQ ID NO: 486433 - DNA, 15 bp, Homo sapiens
actcttgtgatggaa

SEQ ID NO: 486434 - DNA, 15 bp, Homo sapiens
tactcttgtgatgga

SEQ ID NO: 486435 - DNA, 15 bp, Homo sapiens
atactcttgtgatgg

SEQ ID NO: 486436 - DNA, 15 bp, Homo sapiens
aatactcttgtgatg

SEQ ID NO: 486437 - DNA, 15 bp, Homo sapiens
taatactcttgtgat

SEQ ID NO: 486438 - DNA, 15 bp, Homo sapiens
ataatactcttgtga

SEQ ID NO: 486439 - DNA, 15 bp, Homo sapiens
cataatactcttgtg

SEQ ID NO: 486440 - DNA, 15 bp, Homo sapiens
ccataatactcttgt

SEQ ID NO: 486441 - DNA, 15 bp, Homo sapiens
accataatactcttg

SEQ ID NO: 486442 - DNA, 15 bp, Homo sapiens
taccataatactctt

SEQ ID NO: 486443 - DNA, 15 bp, Homo sapiens
ataccataatactct

SEQ ID NO: 486444 - DNA, 15 bp, Homo sapiens
cataccataatactc

SEQ ID NO: 486445 - DNA, 15 bp, Homo sapiens
tcataccataatact

SEQ ID NO: 486446 - DNA, 15 bp, Homo sapiens
ctcataccataatac

SEQ ID NO: 486447 - DNA, 15 bp, Homo sapiens
cctcataccataata

SEQ ID NO: 486448 - DNA, 15 bp, Homo sapiens
ccctcataccataat

SEQ ID NO: 486449 - DNA, 15 bp, Homo sapiens
accctcataccataa

SEQ ID NO: 486450 - DNA, 15 bp, Homo sapiens
gaccctcataccata

SEQ ID NO: 486451 - DNA, 15 bp, Homo sapiens
agaccctcataccat

SEQ ID NO: 486452 - DNA, 15 bp, Homo sapiens
gagaccctcatacca

SEQ ID NO: 486453 - DNA, 15 bp, Homo sapiens
tgagaccctcatacc

SEQ ID NO: 486454 - DNA, 15 bp, Homo sapiens
ctgagaccctcatac

SEQ ID NO: 486455 - DNA, 15 bp, Homo sapiens
cctgagaccctcata

SEQ ID NO: 486456 - DNA, 15 bp, Homo sapiens
acctgagaccctcat

SEQ ID NO: 486457 - DNA, 15 bp, Homo sapiens
aacctgagaccctca

SEQ ID NO: 486458 - DNA, 15 bp, Homo sapiens
taacctgagaccctc

SEQ ID NO: 486459 - DNA, 15 bp, Homo sapiens
ctaacctgagaccct

SEQ ID NO: 486460 - DNA, 15 bp, Homo sapiens
tctaacctgagaccc

SEQ ID NO: 486461 - DNA, 15 bp, Homo sapiens
atctaacctgagacc

SEQ ID NO: 486462 - DNA, 15 bp, Homo sapiens
aatctaacctgagac

SEQ ID NO: 486463 - DNA, 15 bp, Homo sapiens
taatctaacctgaga

SEQ ID NO: 486464 - DNA, 15 bp, Homo sapiens
ataatctaacctgag

SEQ ID NO: 486465 - DNA, 15 bp, Homo sapiens
gataatctaacctga

SEQ ID NO: 486466 - DNA, 15 bp, Homo sapiens
ggataatctaacctg

SEQ ID NO: 486467 - DNA, 15 bp, Homo sapiens
aggataatctaacct

SEQ ID NO: 486468 - DNA, 15 bp, Homo sapiens
gaggataatctaacc

SEQ ID NO: 486469 - DNA, 15 bp, Homo sapiens
ggaggataatctaac

SEQ ID NO: 486470 - DNA, 15 bp, Homo sapiens
gggaggataatctaa

SEQ ID NO: 486471 - DNA, 15 bp, Homo sapiens
tgggaggataatcta

SEQ ID NO: 486472 - DNA, 15 bp, Homo sapiens
ttgggaggataatct

SEQ ID NO: 486473 - DNA, 15 bp, Homo sapiens
cttgggaggataatc

SEQ ID NO: 486474 - DNA, 15 bp, Homo sapiens
tcttgggaggataat

SEQ ID NO: 486475 - DNA, 15 bp, Homo sapiens
gtcttgggaggataa

SEQ ID NO: 486476 - DNA, 15 bp, Homo sapiens
agtcttgggaggata

SEQ ID NO: 486477 - DNA, 15 bp, Homo sapiens
gagtcttgggaggat

SEQ ID NO: 486478 - DNA, 15 bp, Homo sapiens
agagtcttgggagga

SEQ ID NO: 486479 - DNA, 15 bp, Homo sapiens
aagagtcttgggagg

SEQ ID NO: 486480 - DNA, 15 bp, Homo sapiens
gaagagtcttgggag

SEQ ID NO: 486481 - DNA, 15 bp, Homo sapiens
agaagagtcttggga

SEQ ID NO: 486482 - DNA, 15 bp, Homo sapiens
gagaagagtcttggg

SEQ ID NO: 486483 - DNA, 15 bp, Homo sapiens
agagaagagtcttgg

SEQ ID NO: 486484 - DNA, 15 bp, Homo sapiens
gagagaagagtcttg

SEQ ID NO: 486485 - DNA, 15 bp, Homo sapiens
agagagaagagtctt

SEQ ID NO: 486486 - DNA, 15 bp, Homo sapiens
aagagagaagagtct

SEQ ID NO: 486487 - DNA, 15 bp, Homo sapiens
gaagagagaagagtc

SEQ ID NO: 486488 - DNA, 15 bp, Homo sapiens
ggaagagagaagagt

SEQ ID NO: 486489 - DNA, 15 bp, Homo sapiens
aggaagagagaagag

SEQ ID NO: 486490 - DNA, 15 bp, Homo sapiens
aaggaagagagaaga

SEQ ID NO: 486491 - DNA, 15 bp, Homo sapiens
gaaggaagagagaag

SEQ ID NO: 486492 - DNA, 15 bp, Homo sapiens
agaaggaagagagaa

SEQ ID NO: 486493 - DNA, 15 bp, Homo sapiens
gagaaggaagagaga

SEQ ID NO: 486494 - DNA, 15 bp, Homo sapiens
agagaaggaagagag

SEQ ID NO: 486495 - DNA, 15 bp, Homo sapiens
tagagaaggaagaga

SEQ ID NO: 486496 - DNA, 15 bp, Homo sapiens
gtagagaaggaagag

SEQ ID NO: 486497 - DNA, 15 bp, Homo sapiens
agtagagaaggaaga

SEQ ID NO: 486498 - DNA, 15 bp, Homo sapiens
cagtagagaaggaag

SEQ ID NO: 486499 - DNA, 15 bp, Homo sapiens
ccagtagagaaggaa

SEQ ID NO: 486500 - DNA, 15 bp, Homo sapiens
tccagtagagaagga

SEQ ID NO: 486501 - DNA, 15 bp, Homo sapiens
ttccagtagagaagg

SEQ ID NO: 486502 - DNA, 15 bp, Homo sapiens
cttccagtagagaag

SEQ ID NO: 486503 - DNA, 15 bp, Homo sapiens
gcttccagtagagaa

SEQ ID NO: 486504 - DNA, 15 bp, Homo sapiens
ggcttccagtagaga

SEQ ID NO: 486505 - DNA, 15 bp, Homo sapiens
gggcttccagtagag

SEQ ID NO: 486506 - DNA, 15 bp, Homo sapiens
tgggcttccagtaga

SEQ ID NO: 486507 - DNA, 15 bp, Homo sapiens
gtgggcttccagtag

SEQ ID NO: 486508 - DNA, 15 bp, Homo sapiens
tgtgggcttccagta

SEQ ID NO: 486509 - DNA, 15 bp, Homo sapiens
atgtgggcttccagt

SEQ ID NO: 486510 - DNA, 15 bp, Homo sapiens
tatgtgggcttccag

SEQ ID NO: 486511 - DNA, 15 bp, Homo sapiens
ctatgtgggcttcca

SEQ ID NO: 486512 - DNA, 15 bp, Homo sapiens
gctatgtgggcttcc

SEQ ID NO: 486513 - DNA, 15 bp, Homo sapiens
tgctatgtgggcttc

SEQ ID NO: 486514 - DNA, 15 bp, Homo sapiens
atgctatgtgggctt

SEQ ID NO: 486515 - DNA, 15 bp, Homo sapiens
aatgctatgtgggct

SEQ ID NO: 486516 - DNA, 15 bp, Homo sapiens
aaatgctatgtgggc

SEQ ID NO: 486517 - DNA, 15 bp, Homo sapiens
gaaatgctatgtggg

SEQ ID NO: 486518 - DNA, 15 bp, Homo sapiens
ggaaatgctatgtgg

SEQ ID NO: 486519 - DNA, 15 bp, Homo sapiens
aggaaatgctatgtg

SEQ ID NO: 486520 - DNA, 15 bp, Homo sapiens
aaggaaatgctatgt

SEQ ID NO: 486521 - DNA, 15 bp, Homo sapiens
taaggaaatgctatg

SEQ ID NO: 486522 - DNA, 15 bp, Homo sapiens
ataaggaaatgctat

SEQ ID NO: 486523 - DNA, 15 bp, Homo sapiens
cataaggaaatgcta

SEQ ID NO: 486524 - DNA, 15 bp, Homo sapiens
ccataaggaaatgct

SEQ ID NO: 486525 - DNA, 15 bp, Homo sapiens
gccataaggaaatgc

SEQ ID NO: 486526 - DNA, 15 bp, Homo sapiens
agccataaggaaatg

SEQ ID NO: 486527 - DNA, 15 bp, Homo sapiens
aagccataaggaaat

SEQ ID NO: 486528 - DNA, 15 bp, Homo sapiens
caagccataaggaaa

SEQ ID NO: 486529 - DNA, 15 bp, Homo sapiens
tcaagccataaggaa

SEQ ID NO: 486530 - DNA, 15 bp, Homo sapiens
ctcaagccataagga

SEQ ID NO: 486531 - DNA, 15 bp, Homo sapiens
cctcaagccataagg

SEQ ID NO: 486532 - DNA, 15 bp, Homo sapiens
ccctcaagccataag

SEQ ID NO: 486533 - DNA, 15 bp, Homo sapiens
tccctcaagccataa

SEQ ID NO: 486534 - DNA, 15 bp, Homo sapiens
ctccctcaagccata

SEQ ID NO: 486535 - DNA, 15 bp, Homo sapiens
tctccctcaagccat

SEQ ID NO: 486536 - DNA, 15 bp, Homo sapiens
ctctccctcaagcca

SEQ ID NO: 486537 - DNA, 15 bp, Homo sapiens
cctctccctcaagcc

SEQ ID NO: 486538 - DNA, 15 bp, Homo sapiens
acctctccctcaagc

SEQ ID NO: 486539 - DNA, 15 bp, Homo sapiens
aacctctccctcaag

SEQ ID NO: 486540 - DNA, 15 bp, Homo sapiens
gaacctctccctcaa

SEQ ID NO: 486541 - DNA, 15 bp, Homo sapiens
cgaacctctccctca

SEQ ID NO: 486542 - DNA, 15 bp, Homo sapiens
ccgaacctctccctc

SEQ ID NO: 486543 - DNA, 15 bp, Homo sapiens
tccgaacctctccct

SEQ ID NO: 486544 - DNA, 15 bp, Homo sapiens
ctccgaacctctccc

SEQ ID NO: 486545 - DNA, 15 bp, Homo sapiens
gctccgaacctctcc

SEQ ID NO: 486546 - DNA, 15 bp, Homo sapiens
ggctccgaacctctc

SEQ ID NO: 486547 - DNA, 15 bp, Homo sapiens
tggctccgaacctct

SEQ ID NO: 486548 - DNA, 15 bp, Homo sapiens
gtggctccgaacctc

SEQ ID NO: 486549 - DNA, 15 bp, Homo sapiens
agtggctccgaacct

SEQ ID NO: 486550 - DNA, 15 bp, Homo sapiens
aagtggctccgaacc

SEQ ID NO: 486551 - DNA, 15 bp, Homo sapiens
taagtggctccgaac

SEQ ID NO: 486552 - DNA, 15 bp, Homo sapiens
gtaagtggctccgaa

SEQ ID NO: 486553 - DNA, 15 bp, Homo sapiens
tgtaagtggctccga

SEQ ID NO: 486554 - DNA, 15 bp, Homo sapiens
ttgtaagtggctccg

SEQ ID NO: 486555 - DNA, 15 bp, Homo sapiens
tttgtaagtggctcc

SEQ ID NO: 486556 - DNA, 15 bp, Homo sapiens
atttgtaagtggctc

SEQ ID NO: 486557 - DNA, 15 bp, Homo sapiens
aatttgtaagtggct

SEQ ID NO: 486558 - DNA, 15 bp, Homo sapiens
taatttgtaagtggc

SEQ ID NO: 486559 - DNA, 15 bp, Homo sapiens
ctaatttgtaagtgg

SEQ ID NO: 486560 - DNA, 15 bp, Homo sapiens
tctaatttgtaagtg

SEQ ID NO: 486561 - DNA, 15 bp, Homo sapiens
atctaatttgtaagt

SEQ ID NO: 486562 - DNA, 15 bp, Homo sapiens
tatctaatttgtaag

SEQ ID NO: 486563 - DNA, 15 bp, Homo sapiens
ttatctaatttgtaa

SEQ ID NO: 486564 - DNA, 15 bp, Homo sapiens
tttatctaatttgta

SEQ ID NO: 486565 - DNA, 15 bp, Homo sapiens
ctttatctaatttgt

SEQ ID NO: 486566 - DNA, 15 bp, Homo sapiens
actttatctaatttg

SEQ ID NO: 486567 - DNA, 15 bp, Homo sapiens
tactttatctaattt

SEQ ID NO: 486568 - DNA, 15 bp, Homo sapiens
gtactttatctaatt

SEQ ID NO: 486569 - DNA, 15 bp, Homo sapiens
tgtactttatctaat

SEQ ID NO: 486570 - DNA, 15 bp, Homo sapiens
atgtactttatctaa

SEQ ID NO: 486571 - DNA, 15 bp, Homo sapiens
aatgtactttatcta

SEQ ID NO: 486572 - DNA, 15 bp, Homo sapiens
aaatgtactttatct

SEQ ID NO: 486573 - DNA, 15 bp, Homo sapiens
taaatgtactttatc

SEQ ID NO: 486574 - DNA, 15 bp, Homo sapiens
gtaaatgtactttat

SEQ ID NO: 486575 - DNA, 15 bp, Homo sapiens
tgtaaatgtacttta

SEQ ID NO: 486576 - DNA, 15 bp, Homo sapiens
ttgtaaatgtacttt

SEQ ID NO: 486577 - DNA, 15 bp, Homo sapiens
attgtaaatgtactt

SEQ ID NO: 486578 - DNA, 15 bp, Homo sapiens
gattgtaaatgtact

SEQ ID NO: 486579 - DNA, 15 bp, Homo sapiens
agattgtaaatgtac

SEQ ID NO: 486580 - DNA, 15 bp, Homo sapiens
aagattgtaaatgta

SEQ ID NO: 486581 - DNA, 15 bp, Homo sapiens
caagattgtaaatgt

SEQ ID NO: 486582 - DNA, 15 bp, Homo sapiens
acaagattgtaaatg

SEQ ID NO: 486583 - DNA, 15 bp, Homo sapiens
tacaagattgtaaat

SEQ ID NO: 486584 - DNA, 15 bp, Homo sapiens
gtacaagattgtaaa

SEQ ID NO: 486585 - DNA, 15 bp, Homo sapiens
tgtacaagattgtaa

SEQ ID NO: 486586 - DNA, 15 bp, Homo sapiens
ttgtacaagattgta

SEQ ID NO: 486587 - DNA, 15 bp, Homo sapiens
tttgtacaagattgt

SEQ ID NO: 486588 - DNA, 15 bp, Homo sapiens
ctttgtacaagattg

SEQ ID NO: 486589 - DNA, 15 bp, Homo sapiens
gctttgtacaagatt

SEQ ID NO: 486590 - DNA, 15 bp, Homo sapiens
ggctttgtacaagat

SEQ ID NO: 486591 - DNA, 15 bp, Homo sapiens
tggctttgtacaaga

SEQ ID NO: 486592 - DNA, 15 bp, Homo sapiens
gtggctttgtacaag

SEQ ID NO: 486593 - DNA, 15 bp, Homo sapiens
tgtggctttgtacaa

SEQ ID NO: 486594 - DNA, 15 bp, Homo sapiens
gtgtggctttgtaca

SEQ ID NO: 486595 - DNA, 15 bp, Homo sapiens
tgtgtggctttgtac

SEQ ID NO: 486596 - DNA, 15 bp, Homo sapiens
ttgtgtggctttgta

SEQ ID NO: 486597 - DNA, 15 bp, Homo sapiens
attgtgtggctttgt

SEQ ID NO: 486598 - DNA, 15 bp, Homo sapiens
cattgtgtggctttg

SEQ ID NO: 486599 - DNA, 15 bp, Homo sapiens
tcattgtgtggcttt

SEQ ID NO: 486600 - DNA, 15 bp, Homo sapiens
ttcattgtgtggctt

SEQ ID NO: 486601 - DNA, 15 bp, Homo sapiens
cttcattgtgtggct

SEQ ID NO: 486602 - DNA, 15 bp, Homo sapiens
acttcattgtgtggc

SEQ ID NO: 486603 - DNA, 15 bp, Homo sapiens
gacttcattgtgtgg

SEQ ID NO: 486604 - DNA, 15 bp, Homo sapiens
tgacttcattgtgtg

SEQ ID NO: 486605 - DNA, 15 bp, Homo sapiens
atgacttcattgtgt

SEQ ID NO: 486606 - DNA, 15 bp, Homo sapiens
aatgacttcattgtg

SEQ ID NO: 486607 - DNA, 15 bp, Homo sapiens
aaatgacttcattgt

SEQ ID NO: 486608 - DNA, 15 bp, Homo sapiens
aaaatgacttcattg

SEQ ID NO: 486609 - DNA, 15 bp, Homo sapiens
aaaaatgacttcatt

SEQ ID NO: 486610 - DNA, 15 bp, Homo sapiens
gaaaaatgacttcat

SEQ ID NO: 486611 - DNA, 15 bp, Homo sapiens
agaaaaatgacttca

SEQ ID NO: 486612 - DNA, 15 bp, Homo sapiens
gagaaaaatgacttc

SEQ ID NO: 486613 - DNA, 15 bp, Homo sapiens
tgagaaaaatgactt

SEQ ID NO: 486614 - DNA, 15 bp, Homo sapiens
ctgagaaaaatgact

SEQ ID NO: 486615 - DNA, 15 bp, Homo sapiens
gctgagaaaaatgac

SEQ ID NO: 486616 - DNA, 15 bp, Homo sapiens
agctgagaaaaatga

SEQ ID NO: 486617 - DNA, 15 bp, Homo sapiens
aagctgagaaaaatg

SEQ ID NO: 486618 - DNA, 15 bp, Homo sapiens
aaagctgagaaaaat

SEQ ID NO: 486619 - DNA, 15 bp, Homo sapiens
aaaagctgagaaaaa

SEQ ID NO: 486620 - DNA, 15 bp, Homo sapiens
aaaaagctgagaaaa

SEQ ID NO: 486621 - DNA, 15 bp, Homo sapiens
aaaaaagctgagaaa

SEQ ID NO: 486622 - DNA, 15 bp, Homo sapiens
aaaaaaagctgagaa

SEQ ID NO: 486623 - DNA, 15 bp, Homo sapiens
aaaaaaaagctgaga

SEQ ID NO: 486624 - DNA, 15 bp, Homo sapiens
aaaaaaaaagctgag

SEQ ID NO: 486625 - DNA, 15 bp, Homo sapiens
aaaaaaaaaagctga

SEQ ID NO: 486626 - DNA, 15 bp, Homo sapiens
aaaaaaaaaaagctg

SEQ ID NO: 486627 - DNA, 15 bp, Homo sapiens
aaaaaaaaaaaagct

SEQ ID NO: 486628 - DNA, 15 bp, Homo sapiens
aggctcaaaaaaaaa

SEQ ID NO: 486629 - DNA, 15 bp, Homo sapiens
caggctcaaaaaaaa

SEQ ID NO: 486630 - DNA, 15 bp, Homo sapiens
tcaggctcaaaaaaa

SEQ ID NO: 486631 - DNA, 15 bp, Homo sapiens
ctcaggctcaaaaaa

SEQ ID NO: 486632 - DNA, 15 bp, Homo sapiens
actcaggctcaaaaa

SEQ ID NO: 486633 - DNA, 15 bp, Homo sapiens
gactcaggctcaaaa

SEQ ID NO: 486634 - DNA, 15 bp, Homo sapiens
agactcaggctcaaa

SEQ ID NO: 486635 - DNA, 15 bp, Homo sapiens
gagactcaggctcaa

SEQ ID NO: 486636 - DNA, 15 bp, Homo sapiens
cgagactcaggctca

SEQ ID NO: 486637 - DNA, 15 bp, Homo sapiens
gcgagactcaggctc

SEQ ID NO: 486638 - DNA, 15 bp, Homo sapiens
agcgagactcaggct

SEQ ID NO: 486639 - DNA, 15 bp, Homo sapiens
gagcgagactcaggc

SEQ ID NO: 486640 - DNA, 15 bp, Homo sapiens
agagcgagactcagg

SEQ ID NO: 486641 - DNA, 15 bp, Homo sapiens
tagagcgagactcag

SEQ ID NO: 486642 - DNA, 15 bp, Homo sapiens
atagagcgagactca

SEQ ID NO: 486643 - DNA, 15 bp, Homo sapiens
gatagagcgagactc

SEQ ID NO: 486644 - DNA, 15 bp, Homo sapiens
cgatagagcgagact

SEQ ID NO: 486645 - DNA, 15 bp, Homo sapiens
acgatagagcgagac

SEQ ID NO: 486646 - DNA, 15 bp, Homo sapiens
gacgatagagcgaga

SEQ ID NO: 486647 - DNA, 15 bp, Homo sapiens
ggacgatagagcgag

SEQ ID NO: 486648 - DNA, 15 bp, Homo sapiens
tggacgatagagcga

SEQ ID NO: 486649 - DNA, 15 bp, Homo sapiens
ctggacgatagagcg

SEQ ID NO: 486650 - DNA, 15 bp, Homo sapiens
tctggacgatagagc

SEQ ID NO: 486651 - DNA, 15 bp, Homo sapiens
gtctggacgatagag

SEQ ID NO: 486652 - DNA, 15 bp, Homo sapiens
agtctggacgataga

SEQ ID NO: 486653 - DNA, 15 bp, Homo sapiens
cagtctggacgatag

SEQ ID NO: 486654 - DNA, 15 bp, Homo sapiens
ccagtctggacgata

SEQ ID NO: 486655 - DNA, 15 bp, Homo sapiens
tccagtctggacgat

SEQ ID NO: 486656 - DNA, 15 bp, Homo sapiens
ctccagtctggacga

SEQ ID NO: 486657 - DNA, 15 bp, Homo sapiens
actccagtctggacg

SEQ ID NO: 486658 - DNA, 15 bp, Homo sapiens
cactccagtctggac

SEQ ID NO: 486659 - DNA, 15 bp, Homo sapiens
gcactccagtctgga

SEQ ID NO: 486660 - DNA, 15 bp, Homo sapiens
tgcactccagtctgg

SEQ ID NO: 486661 - DNA, 15 bp, Homo sapiens
ctgcactccagtctg

SEQ ID NO: 486662 - DNA, 15 bp, Homo sapiens
actgcactccagtct

SEQ ID NO: 486663 - DNA, 15 bp, Homo sapiens
cactgcactccagtc

SEQ ID NO: 486664 - DNA, 15 bp, Homo sapiens
ccactgcactccagt

SEQ ID NO: 486665 - DNA, 15 bp, Homo sapiens
aagatcgcgccactg

SEQ ID NO: 486666 - DNA, 15 bp, Homo sapiens
caagatcgcgccact

SEQ ID NO: 486667 - DNA, 15 bp, Homo sapiens
gcaagatcgcgccac

SEQ ID NO: 486668 - DNA, 15 bp, Homo sapiens
agcaagatcgcgcca

SEQ ID NO: 486669 - DNA, 15 bp, Homo sapiens
aagcaagatcgcgcc

SEQ ID NO: 486670 - DNA, 15 bp, Homo sapiens
gaagcaagatcgcgc

SEQ ID NO: 486671 - DNA, 15 bp, Homo sapiens
tgaagcaagatcgcg

SEQ ID NO: 486672 - DNA, 15 bp, Homo sapiens
gtgaagcaagatcgc

SEQ ID NO: 486673 - DNA, 15 bp, Homo sapiens
agtgaagcaagatcg

SEQ ID NO: 486674 - DNA, 15 bp, Homo sapiens
cagtgaagcaagatc

SEQ ID NO: 486675 - DNA, 15 bp, Homo sapiens
tcagtgaagcaagat

SEQ ID NO: 486676 - DNA, 15 bp, Homo sapiens
ttcagtgaagcaaga

SEQ ID NO: 486677 - DNA, 15 bp, Homo sapiens
tttcagtgaagcaag

SEQ ID NO: 486678 - DNA, 15 bp, Homo sapiens
gtttcagtgaagcaa

SEQ ID NO: 486679 - DNA, 15 bp, Homo sapiens
ggtttcagtgaagca

SEQ ID NO: 486680 - DNA, 15 bp, Homo sapiens
aggtttcagtgaagc

SEQ ID NO: 486681 - DNA, 15 bp, Homo sapiens
gaggtttcagtgaag

SEQ ID NO: 486682 - DNA, 15 bp, Homo sapiens
agaggtttcagtgaa

SEQ ID NO: 486683 - DNA, 15 bp, Homo sapiens
cagaggtttcagtga

SEQ ID NO: 486684 - DNA, 15 bp, Homo sapiens
gcagaggtttcagtg

SEQ ID NO: 486685 - DNA, 15 bp, Homo sapiens
ggcagaggtttcagt

SEQ ID NO: 486686 - DNA, 15 bp, Homo sapiens
aggcagaggtttcag

SEQ ID NO: 486687 - DNA, 15 bp, Homo sapiens
gaggcagaggtttca

SEQ ID NO: 486688 - DNA, 15 bp, Homo sapiens
ggaggcagaggtttc

SEQ ID NO: 486689 - DNA, 15 bp, Homo sapiens
gggaggcagaggttt

SEQ ID NO: 486690 - DNA, 15 bp, Homo sapiens
tcttgaacctgggag

SEQ ID NO: 486691 - DNA, 15 bp, Homo sapiens
ctcttgaacctggga

SEQ ID NO: 486692 - DNA, 15 bp, Homo sapiens
tctcttgaacctggg

SEQ ID NO: 486693 - DNA, 15 bp, Homo sapiens
atctcttgaacctgg

SEQ ID NO: 486694 - DNA, 15 bp, Homo sapiens
aatctcttgaacctg

SEQ ID NO: 486695 - DNA, 15 bp, Homo sapiens
gaatctcttgaacct

SEQ ID NO: 486696 - DNA, 15 bp, Homo sapiens
tgagaatctcttgaa

SEQ ID NO: 486697 - DNA, 15 bp, Homo sapiens
atgagaatctcttga

SEQ ID NO: 486698 - DNA, 15 bp, Homo sapiens
tatgagaatctcttg

SEQ ID NO: 486699 - DNA, 15 bp, Homo sapiens
gtatgagaatctctt

SEQ ID NO: 486700 - DNA, 15 bp, Homo sapiens
ggtatgagaatctct

SEQ ID NO: 486701 - DNA, 15 bp, Homo sapiens
aggtatgagaatctc

SEQ ID NO: 486702 - DNA, 15 bp, Homo sapiens
gaggtatgagaatct

SEQ ID NO: 486703 - DNA, 15 bp, Homo sapiens
tgaggtatgagaatc

SEQ ID NO: 486704 - DNA, 15 bp, Homo sapiens
ctgaggtatgagaat

SEQ ID NO: 486705 - DNA, 15 bp, Homo sapiens
gctgaggtatgagaa

SEQ ID NO: 486706 - DNA, 15 bp, Homo sapiens
ggctgaggtatgaga

SEQ ID NO: 486707 - DNA, 15 bp, Homo sapiens
aggctgaggtatgag

SEQ ID NO: 486708 - DNA, 15 bp, Homo sapiens
gaggctgaggtatga

SEQ ID NO: 486709 - DNA, 15 bp, Homo sapiens
ggaggctgaggtatg

SEQ ID NO: 486710 - DNA, 15 bp, Homo sapiens
aggaggctgaggtat

SEQ ID NO: 486711 - DNA, 15 bp, Homo sapiens
caggaggctgaggta

SEQ ID NO: 486712 - DNA, 15 bp, Homo sapiens
tgtctgtaatcccag

SEQ ID NO: 486713 - DNA, 15 bp, Homo sapiens
atgtctgtaatccca

SEQ ID NO: 486714 - DNA, 15 bp, Homo sapiens
catgtctgtaatccc

SEQ ID NO: 486715 - DNA, 15 bp, Homo sapiens
gcatgtctgtaatcc

SEQ ID NO: 486716 - DNA, 15 bp, Homo sapiens
tgcatgtctgtaatc

SEQ ID NO: 486717 - DNA, 15 bp, Homo sapiens
gtgcatgtctgtaat

SEQ ID NO: 486718 - DNA, 15 bp, Homo sapiens
ggtgcatgtctgtaa

SEQ ID NO: 486719 - DNA, 15 bp, Homo sapiens
tggtgcatgtctgta

SEQ ID NO: 486720 - DNA, 15 bp, Homo sapiens
gtggtgcatgtctgt

SEQ ID NO: 486721 - DNA, 15 bp, Homo sapiens
agtggtgcatgtctg

SEQ ID NO: 486722 - DNA, 15 bp, Homo sapiens
tagtggtgcatgtct

SEQ ID NO: 486723 - DNA, 15 bp, Homo sapiens
atagtggtgcatgtc

SEQ ID NO: 486724 - DNA, 15 bp, Homo sapiens
catagtggtgcatgt

SEQ ID NO: 486725 - DNA, 15 bp, Homo sapiens
gcatagtggtgcatg

SEQ ID NO: 486726 - DNA, 15 bp, Homo sapiens
ggcatagtggtgcat

SEQ ID NO: 486727 - DNA, 15 bp, Homo sapiens
aggcatagtggtgca

SEQ ID NO: 486728 - DNA, 15 bp, Homo sapiens
caggcatagtggtgc

SEQ ID NO: 486729 - DNA, 15 bp, Homo sapiens
ccaggcatagtggtg

SEQ ID NO: 486730 - DNA, 15 bp, Homo sapiens
gccaggcatagtggt

SEQ ID NO: 486731 - DNA, 15 bp, Homo sapiens
agccaggcatagtgg

SEQ ID NO: 486732 - DNA, 15 bp, Homo sapiens
tagccaggcatagtg

SEQ ID NO: 486733 - DNA, 15 bp, Homo sapiens
ttagccaggcatagt

SEQ ID NO: 486734 - DNA, 15 bp, Homo sapiens
attagccaggcatag

SEQ ID NO: 486735 - DNA, 15 bp, Homo sapiens
aattagccaggcata

SEQ ID NO: 486736 - DNA, 15 bp, Homo sapiens
ccaaaaattagccag

SEQ ID NO: 486737 - DNA, 15 bp, Homo sapiens
tccaaaaattagcca

SEQ ID NO: 486738 - DNA, 15 bp, Homo sapiens
atccaaaaattagcc

SEQ ID NO: 486739 - DNA, 15 bp, Homo sapiens
aatccaaaaattagc

SEQ ID NO: 486740 - DNA, 15 bp, Homo sapiens
aaatccaaaaattag

SEQ ID NO: 486741 - DNA, 15 bp, Homo sapiens
aaaatccaaaaatta

SEQ ID NO: 486742 - DNA, 15 bp, Homo sapiens
aaaaatccaaaaatt

SEQ ID NO: 486743 - DNA, 15 bp, Homo sapiens
taaaaatccaaaaat

SEQ ID NO: 486744 - DNA, 15 bp, Homo sapiens
ctaaaaatccaaaaa

SEQ ID NO: 486745 - DNA, 15 bp, Homo sapiens
actaaaaatccaaaa

SEQ ID NO: 486746 - DNA, 15 bp, Homo sapiens
tactaaaaatccaaa

SEQ ID NO: 486747 - DNA, 15 bp, Homo sapiens
ctactaaaaatccaa

SEQ ID NO: 486748 - DNA, 15 bp, Homo sapiens
tctactaaaaatcca

SEQ ID NO: 486749 - DNA, 15 bp, Homo sapiens
ctctactaaaaatcc

SEQ ID NO: 486750 - DNA, 15 bp, Homo sapiens
tctctactaaaaatc

SEQ ID NO: 486751 - DNA, 15 bp, Homo sapiens
acccggtctctacta

SEQ ID NO: 486752 - DNA, 15 bp, Homo sapiens
aacccggtctctact

SEQ ID NO: 486753 - DNA, 15 bp, Homo sapiens
aaacccggtctctac

SEQ ID NO: 486754 - DNA, 15 bp, Homo sapiens
gaaacccggtctcta

SEQ ID NO: 486755 - DNA, 15 bp, Homo sapiens
tgaaacccggtctct

SEQ ID NO: 486756 - DNA, 15 bp, Homo sapiens
gtgaaacccggtctc

SEQ ID NO: 486757 - DNA, 15 bp, Homo sapiens
ggtgaaacccggtct

SEQ ID NO: 486758 - DNA, 15 bp, Homo sapiens
gggtgaaacccggtc

SEQ ID NO: 486759 - DNA, 15 bp, Homo sapiens
agggtgaaacccggt

SEQ ID NO: 486760 - DNA, 15 bp, Homo sapiens
cagggtgaaacccgg

SEQ ID NO: 486761 - DNA, 15 bp, Homo sapiens
acagggtgaaacccg

SEQ ID NO: 486762 - DNA, 15 bp, Homo sapiens
aacagggtgaaaccc

SEQ ID NO: 486763 - DNA, 15 bp, Homo sapiens
caacagggtgaaacc

SEQ ID NO: 486764 - DNA, 15 bp, Homo sapiens
ccaacagggtgaaac

SEQ ID NO: 486765 - DNA, 15 bp, Homo sapiens
gccaacagggtgaaa

SEQ ID NO: 486766 - DNA, 15 bp, Homo sapiens
ggccaacagggtgaa

SEQ ID NO: 486767 - DNA, 15 bp, Homo sapiens
tggccaacagggtga

SEQ ID NO: 486768 - DNA, 15 bp, Homo sapiens
ctggccaacagggtg

SEQ ID NO: 486769 - DNA, 15 bp, Homo sapiens
cctggccaacagggt

SEQ ID NO: 486770 - DNA, 15 bp, Homo sapiens
gcctggccaacaggg

SEQ ID NO: 486771 - DNA, 15 bp, Homo sapiens
agcctggccaacagg

SEQ ID NO: 486772 - DNA, 15 bp, Homo sapiens
cagcctggccaacag

SEQ ID NO: 486773 - DNA, 15 bp, Homo sapiens
ggttcgagaccagcc

SEQ ID NO: 486774 - DNA, 15 bp, Homo sapiens
gggttcgagaccagc

SEQ ID NO: 486775 - DNA, 15 bp, Homo sapiens
ggggttcgagaccag

SEQ ID NO: 486776 - DNA, 15 bp, Homo sapiens
aggggttcgagacca

SEQ ID NO: 486777 - DNA, 15 bp, Homo sapiens
caggggttcgagacc

SEQ ID NO: 486778 - DNA, 15 bp, Homo sapiens
tcaggggttcgagac

SEQ ID NO: 486779 - DNA, 15 bp, Homo sapiens
gtcaggggttcgaga

SEQ ID NO: 486780 - DNA, 15 bp, Homo sapiens
ggtcaggggttcgag

SEQ ID NO: 486781 - DNA, 15 bp, Homo sapiens
aggtcaggggttcga

SEQ ID NO: 486782 - DNA, 15 bp, Homo sapiens
gaggtcaggggttcg

SEQ ID NO: 486783 - DNA, 15 bp, Homo sapiens
cttgaggtcaggggt

SEQ ID NO: 486784 - DNA, 15 bp, Homo sapiens
acttgaggtcagggg

SEQ ID NO: 486785 - DNA, 15 bp, Homo sapiens
cacttgaggtcaggg

SEQ ID NO: 486786 - DNA, 15 bp, Homo sapiens
agatcacttgaggtc

SEQ ID NO: 486787 - DNA, 15 bp, Homo sapiens
aagatcacttgaggt

SEQ ID NO: 486788 - DNA, 15 bp, Homo sapiens
gaagatcacttgagg

SEQ ID NO: 486789 - DNA, 15 bp, Homo sapiens
gggaagatcacttga

SEQ ID NO: 486790 - DNA, 15 bp, Homo sapiens
cgggaagatcacttg

SEQ ID NO: 486791 - DNA, 15 bp, Homo sapiens
gcgggaagatcactt

SEQ ID NO: 486792 - DNA, 15 bp, Homo sapiens
ggcgggaagatcact

SEQ ID NO: 486793 - DNA, 15 bp, Homo sapiens
aggcgggaagatcac

SEQ ID NO: 486794 - DNA, 15 bp, Homo sapiens
caggcgggaagatca

SEQ ID NO: 486795 - DNA, 15 bp, Homo sapiens
ccaggcgggaagatc

SEQ ID NO: 486796 - DNA, 15 bp, Homo sapiens
cccaggcgggaagat

SEQ ID NO: 486797 - DNA, 15 bp, Homo sapiens
gcccaggcgggaaga

SEQ ID NO: 486798 - DNA, 15 bp, Homo sapiens
ggcccaggcgggaag

SEQ ID NO: 486799 - DNA, 15 bp, Homo sapiens
aggcccaggcgggaa

SEQ ID NO: 486800 - DNA, 15 bp, Homo sapiens
gaggcccaggcggga

SEQ ID NO: 486801 - DNA, 15 bp, Homo sapiens
ggaggcccaggcggg

SEQ ID NO: 486802 - DNA, 15 bp, Homo sapiens
gggaggcccaggcgg

SEQ ID NO: 486803 - DNA, 15 bp, Homo sapiens
tgggaggcccaggcg

SEQ ID NO: 486804 - DNA, 15 bp, Homo sapiens
ttgggaggcccaggc

SEQ ID NO: 486805 - DNA, 15 bp, Homo sapiens
cacacctataatccc

SEQ ID NO: 486806 - DNA, 15 bp, Homo sapiens
tcacacctataatcc

SEQ ID NO: 486807 - DNA, 15 bp, Homo sapiens
ctcacacctataatc

SEQ ID NO: 486808 - DNA, 15 bp, Homo sapiens
ggctcacacctataa

SEQ ID NO: 486809 - DNA, 15 bp, Homo sapiens
tggctcacacctata

SEQ ID NO: 486810 - DNA, 15 bp, Homo sapiens
gtggctcacacctat

SEQ ID NO: 486811 - DNA, 15 bp, Homo sapiens
tgtggctcacaccta

SEQ ID NO: 486812 - DNA, 15 bp, Homo sapiens
ctgtggctcacacct

SEQ ID NO: 486813 - DNA, 15 bp, Homo sapiens
actgtggctcacacc

SEQ ID NO: 486814 - DNA, 15 bp, Homo sapiens
cactgtggctcacac

SEQ ID NO: 486815 - DNA, 15 bp, Homo sapiens
gcactgtggctcaca

SEQ ID NO: 486816 - DNA, 15 bp, Homo sapiens
aaggctgggcactgt

SEQ ID NO: 486817 - DNA, 15 bp, Homo sapiens
caaggctgggcactg

SEQ ID NO: 486818 - DNA, 15 bp, Homo sapiens
acaaggctgggcact

SEQ ID NO: 486819 - DNA, 15 bp, Homo sapiens
aacaaggctgggcac

SEQ ID NO: 486820 - DNA, 15 bp, Homo sapiens
aaacaaggctgggca

SEQ ID NO: 486821 - DNA, 15 bp, Homo sapiens
aaaacaaggctgggc

SEQ ID NO: 486822 - DNA, 15 bp, Homo sapiens
aaaaacaaggctggg

SEQ ID NO: 486823 - DNA, 15 bp, Homo sapiens
caaaaacaaggctgg

SEQ ID NO: 486824 - DNA, 15 bp, Homo sapiens
acaaaaacaaggctg

SEQ ID NO: 486825 - DNA, 15 bp, Homo sapiens
aacaaaaacaaggct

SEQ ID NO: 486826 - DNA, 15 bp, Homo sapiens
aaacaaaaacaaggc

SEQ ID NO: 486827 - DNA, 15 bp, Homo sapiens
aaaacaaaaacaagg

SEQ ID NO: 486828 - DNA, 15 bp, Homo sapiens
aaaaacaaaaacaag

SEQ ID NO: 486829 - DNA, 15 bp, Homo sapiens
caaaaacaaaaacaa

SEQ ID NO: 486830 - DNA, 15 bp, Homo sapiens
acaaaaacaaaaaca

SEQ ID NO: 486831 - DNA, 15 bp, Homo sapiens
aacaaaaacaaaaac

SEQ ID NO: 486832 - DNA, 15 bp, Homo sapiens
aaacaaaaacaaaaa

SEQ ID NO: 486833 - DNA, 15 bp, Homo sapiens
aaaacaaaaacaaaa

SEQ ID NO: 486834 - DNA, 15 bp, Homo sapiens
caaaacaaaaacaaa

SEQ ID NO: 486835 - DNA, 15 bp, Homo sapiens
acaaaacaaaaacaa

SEQ ID NO: 486836 - DNA, 15 bp, Homo sapiens
aacaaaacaaaaaca

SEQ ID NO: 486837 - DNA, 15 bp, Homo sapiens
aaacaaaacaaaaac

SEQ ID NO: 486838 - DNA, 15 bp, Homo sapiens
aaaacaaaacaaaaa

SEQ ID NO: 486839 - DNA, 15 bp, Homo sapiens
caaaacaaaacaaaa

SEQ ID NO: 486840 - DNA, 15 bp, Homo sapiens
tcaaaacaaaacaaa

SEQ ID NO: 486841 - DNA, 15 bp, Homo sapiens
gtcaaaacaaaacaa

SEQ ID NO: 486842 - DNA, 15 bp, Homo sapiens
tgtcaaaacaaaaca

SEQ ID NO: 486843 - DNA, 15 bp, Homo sapiens
ctgtcaaaacaaaac

SEQ ID NO: 486844 - DNA, 15 bp, Homo sapiens
actgtcaaaacaaaa

SEQ ID NO: 486845 - DNA, 15 bp, Homo sapiens
gactgtcaaaacaaa

SEQ ID NO: 486846 - DNA, 15 bp, Homo sapiens
agactgtcaaaacaa

SEQ ID NO: 486847 - DNA, 15 bp, Homo sapiens
cagactgtcaaaaca

SEQ ID NO: 486848 - DNA, 15 bp, Homo sapiens
acagactgtcaaaac

SEQ ID NO: 486849 - DNA, 15 bp, Homo sapiens
gacagactgtcaaaa

SEQ ID NO: 486850 - DNA, 15 bp, Homo sapiens
tgacagactgtcaaa

SEQ ID NO: 486851 - DNA, 15 bp, Homo sapiens
gtgacagactgtcaa

SEQ ID NO: 486852 - DNA, 15 bp, Homo sapiens
agtgacagactgtca

SEQ ID NO: 486853 - DNA, 15 bp, Homo sapiens
gagtgacagactgtc

SEQ ID NO: 486854 - DNA, 15 bp, Homo sapiens
agagtgacagactgt

SEQ ID NO: 486855 - DNA, 15 bp, Homo sapiens
cagagtgacagactg

SEQ ID NO: 486856 - DNA, 15 bp, Homo sapiens
acagagtgacagact

SEQ ID NO: 486857 - DNA, 15 bp, Homo sapiens
gacagagtgacagac

SEQ ID NO: 486858 - DNA, 15 bp, Homo sapiens
tgacagagtgacaga

SEQ ID NO: 486859 - DNA, 15 bp, Homo sapiens
gtgacagagtgacag

SEQ ID NO: 486860 - DNA, 15 bp, Homo sapiens
ggtgacagagtgaca

SEQ ID NO: 486861 - DNA, 15 bp, Homo sapiens
gggtgacagagtgac

SEQ ID NO: 486862 - DNA, 15 bp, Homo sapiens
gtgagatcgcaccac

SEQ ID NO: 486863 - DNA, 15 bp, Homo sapiens
ggtgagatcgcacca

SEQ ID NO: 486864 - DNA, 15 bp, Homo sapiens
aggtgagatcgcacc

SEQ ID NO: 486865 - DNA, 15 bp, Homo sapiens
gaggtgagatcgcac

SEQ ID NO: 486866 - DNA, 15 bp, Homo sapiens
tgaggtgagatcgca

SEQ ID NO: 486867 - DNA, 15 bp, Homo sapiens
gtgaggtgagatcgc

SEQ ID NO: 486868 - DNA, 15 bp, Homo sapiens
agtgaggtgagatcg

SEQ ID NO: 486869 - DNA, 15 bp, Homo sapiens
aagtgaggtgagatc

SEQ ID NO: 486870 - DNA, 15 bp, Homo sapiens
gaagtgaggtgagat

SEQ ID NO: 486871 - DNA, 15 bp, Homo sapiens
tgaagtgaggtgaga

SEQ ID NO: 486872 - DNA, 15 bp, Homo sapiens
ctgaagtgaggtgag

SEQ ID NO: 486873 - DNA, 15 bp, Homo sapiens
gctgaagtgaggtga

SEQ ID NO: 486874 - DNA, 15 bp, Homo sapiens
ggctgaagtgaggtg

SEQ ID NO: 486875 - DNA, 15 bp, Homo sapiens
aggctgaagtgaggt

SEQ ID NO: 486876 - DNA, 15 bp, Homo sapiens
gaggctgaagtgagg

SEQ ID NO: 486877 - DNA, 15 bp, Homo sapiens
agaggctgaagtgag

SEQ ID NO: 486878 - DNA, 15 bp, Homo sapiens
cagaggctgaagtga

SEQ ID NO: 486879 - DNA, 15 bp, Homo sapiens
gcagaggctgaagtg

SEQ ID NO: 486880 - DNA, 15 bp, Homo sapiens
ggcagaggctgaagt

SEQ ID NO: 486881 - DNA, 15 bp, Homo sapiens
aggcagaggctgaag

SEQ ID NO: 486882 - DNA, 15 bp, Homo sapiens
gaggcagaggctgaa

SEQ ID NO: 486883 - DNA, 15 bp, Homo sapiens
ggaggcagaggctga

SEQ ID NO: 486884 - DNA, 15 bp, Homo sapiens
gggaggcagaggctg

SEQ ID NO: 486885 - DNA, 15 bp, Homo sapiens
tgggaggcagaggct

SEQ ID NO: 486886 - DNA, 15 bp, Homo sapiens
ctgggaggcagaggc

SEQ ID NO: 486887 - DNA, 15 bp, Homo sapiens
acaggagaatcactt

SEQ ID NO: 486888 - DNA, 15 bp, Homo sapiens
gacaggagaatcact

SEQ ID NO: 486889 - DNA, 15 bp, Homo sapiens
agacaggagaatcac

SEQ ID NO: 486890 - DNA, 15 bp, Homo sapiens
gagacaggagaatca

SEQ ID NO: 486891 - DNA, 15 bp, Homo sapiens
aggaggctgagacag

SEQ ID NO: 486892 - DNA, 15 bp, Homo sapiens
caggaggctgagaca

SEQ ID NO: 486893 - DNA, 15 bp, Homo sapiens
tcaggaggctgagac

SEQ ID NO: 486894 - DNA, 15 bp, Homo sapiens
ctcaggaggctgaga

SEQ ID NO: 486895 - DNA, 15 bp, Homo sapiens
gcacgcctgtaatcc

SEQ ID NO: 486896 - DNA, 15 bp, Homo sapiens
ggcacgcctgtaatc

SEQ ID NO: 486897 - DNA, 15 bp, Homo sapiens
tggcacgcctgtaat

SEQ ID NO: 486898 - DNA, 15 bp, Homo sapiens
gtggcacgcctgtaa

SEQ ID NO: 486899 - DNA, 15 bp, Homo sapiens
ggtggcacgcctgta

SEQ ID NO: 486900 - DNA, 15 bp, Homo sapiens
tggtggcacgcctgt

SEQ ID NO: 486901 - DNA, 15 bp, Homo sapiens
gtggtggcacgcctg

SEQ ID NO: 486902 - DNA, 15 bp, Homo sapiens
cgtggtggcacgcct

SEQ ID NO: 486903 - DNA, 15 bp, Homo sapiens
gcgtggtggcacgcc

SEQ ID NO: 486904 - DNA, 15 bp, Homo sapiens
ggcgtggtggcacgc

SEQ ID NO: 486905 - DNA, 15 bp, Homo sapiens
gggcgtggtggcacg

SEQ ID NO: 486906 - DNA, 15 bp, Homo sapiens
tgggcgtggtggcac

SEQ ID NO: 486907 - DNA, 15 bp, Homo sapiens
ctgggcgtggtggca

SEQ ID NO: 486908 - DNA, 15 bp, Homo sapiens
atagctgggcgtggt

SEQ ID NO: 486909 - DNA, 15 bp, Homo sapiens
aatagctgggcgtgg

SEQ ID NO: 486910 - DNA, 15 bp, Homo sapiens
aaatagctgggcgtg

SEQ ID NO: 486911 - DNA, 15 bp, Homo sapiens
aaaatagctgggcgt

SEQ ID NO: 486912 - DNA, 15 bp, Homo sapiens
aaaaatagctgggcg

SEQ ID NO: 486913 - DNA, 15 bp, Homo sapiens
caaaaatagctgggc

SEQ ID NO: 486914 - DNA, 15 bp, Homo sapiens
acaaaaatagctggg

SEQ ID NO: 486915 - DNA, 15 bp, Homo sapiens
tacaaaaatagctgg

SEQ ID NO: 486916 - DNA, 15 bp, Homo sapiens
ttacaaaaatagctg

SEQ ID NO: 486917 - DNA, 15 bp, Homo sapiens
attacaaaaatagct

SEQ ID NO: 486918 - DNA, 15 bp, Homo sapiens
aattacaaaaatagc

SEQ ID NO: 486919 - DNA, 15 bp, Homo sapiens
aaattacaaaaatag

SEQ ID NO: 486920 - DNA, 15 bp, Homo sapiens
gaaattacaaaaata

SEQ ID NO: 486921 - DNA, 15 bp, Homo sapiens
tgaaattacaaaaat

SEQ ID NO: 486922 - DNA, 15 bp, Homo sapiens
atgaaattacaaaaa

SEQ ID NO: 486923 - DNA, 15 bp, Homo sapiens
aatgaaattacaaaa

SEQ ID NO: 486924 - DNA, 15 bp, Homo sapiens
taatgaaattacaaa

SEQ ID NO: 486925 - DNA, 15 bp, Homo sapiens
ttaatgaaattacaa

SEQ ID NO: 486926 - DNA, 15 bp, Homo sapiens
tttaatgaaattaca

SEQ ID NO: 486927 - DNA, 15 bp, Homo sapiens
ctttaatgaaattac

SEQ ID NO: 486928 - DNA, 15 bp, Homo sapiens
tctttaatgaaatta

SEQ ID NO: 486929 - DNA, 15 bp, Homo sapiens
gtctttaatgaaatt

SEQ ID NO: 486930 - DNA, 15 bp, Homo sapiens
tgtctttaatgaaat

SEQ ID NO: 486931 - DNA, 15 bp, Homo sapiens
ctgtctttaatgaaa

SEQ ID NO: 486932 - DNA, 15 bp, Homo sapiens
cctgtctttaatgaa

SEQ ID NO: 486933 - DNA, 15 bp, Homo sapiens
ccctgtctttaatga

SEQ ID NO: 486934 - DNA, 15 bp, Homo sapiens
accctgtctttaatg

SEQ ID NO: 486935 - DNA, 15 bp, Homo sapiens
aaccctgtctttaat

SEQ ID NO: 486936 - DNA, 15 bp, Homo sapiens
aaaccctgtctttaa

SEQ ID NO: 486937 - DNA, 15 bp, Homo sapiens
gaaaccctgtcttta

SEQ ID NO: 486938 - DNA, 15 bp, Homo sapiens
ggaaaccctgtcttt

SEQ ID NO: 486939 - DNA, 15 bp, Homo sapiens
gggaaaccctgtctt

SEQ ID NO: 486940 - DNA, 15 bp, Homo sapiens
ggggaaaccctgtct

SEQ ID NO: 486941 - DNA, 15 bp, Homo sapiens
tggggaaaccctgtc

SEQ ID NO: 486942 - DNA, 15 bp, Homo sapiens
atggggaaaccctgt

SEQ ID NO: 486943 - DNA, 15 bp, Homo sapiens
catggggaaaccctg

SEQ ID NO: 486944 - DNA, 15 bp, Homo sapiens
acatggggaaaccct

SEQ ID NO: 486945 - DNA, 15 bp, Homo sapiens
aacatggggaaaccc

SEQ ID NO: 486946 - DNA, 15 bp, Homo sapiens
caacatggggaaacc

SEQ ID NO: 486947 - DNA, 15 bp, Homo sapiens
ccaacatggggaaac

SEQ ID NO: 486948 - DNA, 15 bp, Homo sapiens
accaacatggggaaa

SEQ ID NO: 486949 - DNA, 15 bp, Homo sapiens
caccaacatggggaa

SEQ ID NO: 486950 - DNA, 15 bp, Homo sapiens
tcaccaacatgggga

SEQ ID NO: 486951 - DNA, 15 bp, Homo sapiens
ctcaccaacatgggg

SEQ ID NO: 486952 - DNA, 15 bp, Homo sapiens
cctcaccaacatggg

SEQ ID NO: 486953 - DNA, 15 bp, Homo sapiens
gcctcaccaacatgg

SEQ ID NO: 486954 - DNA, 15 bp, Homo sapiens
agcctcaccaacatg

SEQ ID NO: 486955 - DNA, 15 bp, Homo sapiens
cagcctcaccaacat

SEQ ID NO: 486956 - DNA, 15 bp, Homo sapiens
ccagcctcaccaaca

SEQ ID NO: 486957 - DNA, 15 bp, Homo sapiens
accagcctcaccaac

SEQ ID NO: 486958 - DNA, 15 bp, Homo sapiens
gaccagcctcaccaa

SEQ ID NO: 486959 - DNA, 15 bp, Homo sapiens
agaccagcctcacca

SEQ ID NO: 486960 - DNA, 15 bp, Homo sapiens
aagaccagcctcacc

SEQ ID NO: 486961 - DNA, 15 bp, Homo sapiens
caagaccagcctcac

SEQ ID NO: 486962 - DNA, 15 bp, Homo sapiens
tcaagaccagcctca

SEQ ID NO: 486963 - DNA, 15 bp, Homo sapiens
ttcaagaccagcctc

SEQ ID NO: 486964 - DNA, 15 bp, Homo sapiens
ccaggagttcaagac

SEQ ID NO: 486965 - DNA, 15 bp, Homo sapiens
gccaggagttcaaga

SEQ ID NO: 486966 - DNA, 15 bp, Homo sapiens
ggccaggagttcaag

SEQ ID NO: 486967 - DNA, 15 bp, Homo sapiens
acttgaggccaggag

SEQ ID NO: 486968 - DNA, 15 bp, Homo sapiens
tggatcacttgaggc

SEQ ID NO: 486969 - DNA, 15 bp, Homo sapiens
gtggatcacttgagg

SEQ ID NO: 486970 - DNA, 15 bp, Homo sapiens
aggtggatcacttga

SEQ ID NO: 486971 - DNA, 15 bp, Homo sapiens
caggtggatcacttg

SEQ ID NO: 486972 - DNA, 15 bp, Homo sapiens
gcaggtggatcactt

SEQ ID NO: 486973 - DNA, 15 bp, Homo sapiens
agcaggtggatcact

SEQ ID NO: 486974 - DNA, 15 bp, Homo sapiens
gctgaagcaggtgga

SEQ ID NO: 486975 - DNA, 15 bp, Homo sapiens
ggctgaagcaggtgg

SEQ ID NO: 486976 - DNA, 15 bp, Homo sapiens
aggctgaagcaggtg

SEQ ID NO: 486977 - DNA, 15 bp, Homo sapiens
gaggctgaagcaggt

SEQ ID NO: 486978 - DNA, 15 bp, Homo sapiens
gggaggctgaagcag

SEQ ID NO: 486979 - DNA, 15 bp, Homo sapiens
tgggaggctgaagca

SEQ ID NO: 486980 - DNA, 15 bp, Homo sapiens
ttgggaggctgaagc

SEQ ID NO: 486981 - DNA, 15 bp, Homo sapiens
tgcactttgggaggc

SEQ ID NO: 486982 - DNA, 15 bp, Homo sapiens
ctgcactttgggagg

SEQ ID NO: 486983 - DNA, 15 bp, Homo sapiens
cctgcactttgggag

SEQ ID NO: 486984 - DNA, 15 bp, Homo sapiens
ccctgcactttggga

SEQ ID NO: 486985 - DNA, 15 bp, Homo sapiens
tccctgcactttggg

SEQ ID NO: 486986 - DNA, 15 bp, Homo sapiens
atccctgcactttgg

SEQ ID NO: 486987 - DNA, 15 bp, Homo sapiens
aatccctgcactttg

SEQ ID NO: 486988 - DNA, 15 bp, Homo sapiens
taatccctgcacttt

SEQ ID NO: 486989 - DNA, 15 bp, Homo sapiens
gtaatccctgcactt

SEQ ID NO: 486990 - DNA, 15 bp, Homo sapiens
tgtaatccctgcact

SEQ ID NO: 486991 - DNA, 15 bp, Homo sapiens
ctgtaatccctgcac

SEQ ID NO: 486992 - DNA, 15 bp, Homo sapiens
cctgtaatccctgca

SEQ ID NO: 486993 - DNA, 15 bp, Homo sapiens
gcctgtaatccctgc

SEQ ID NO: 486994 - DNA, 15 bp, Homo sapiens
tgcctgtaatccctg

SEQ ID NO: 486995 - DNA, 15 bp, Homo sapiens
atgcctgtaatccct

SEQ ID NO: 486996 - DNA, 15 bp, Homo sapiens
gaggccaggcacagt

SEQ ID NO: 486997 - DNA, 15 bp, Homo sapiens
tgaggccaggcacag

SEQ ID NO: 486998 - DNA, 15 bp, Homo sapiens
ctgaggccaggcaca

SEQ ID NO: 486999 - DNA, 15 bp, Homo sapiens
gctgaggccaggcac

SEQ ID NO: 487000 - DNA, 15 bp, Homo sapiens
agctgaggccaggca

SEQ ID NO: 487001 - DNA, 15 bp, Homo sapiens
tagctgaggccaggc

SEQ ID NO: 487002 - DNA, 15 bp, Homo sapiens
atagctgaggccagg

SEQ ID NO: 487003 - DNA, 15 bp, Homo sapiens
gatagctgaggccag

SEQ ID NO: 487004 - DNA, 15 bp, Homo sapiens
agatagctgaggcca

SEQ ID NO: 487005 - DNA, 15 bp, Homo sapiens
aagatagctgaggcc

SEQ ID NO: 487006 - DNA, 15 bp, Homo sapiens
caagatagctgaggc

SEQ ID NO: 487007 - DNA, 15 bp, Homo sapiens
tcaagatagctgagg

SEQ ID NO: 487008 - DNA, 15 bp, Homo sapiens
ttcaagatagctgag

SEQ ID NO: 487009 - DNA, 15 bp, Homo sapiens
attcaagatagctga

SEQ ID NO: 487010 - DNA, 15 bp, Homo sapiens
cattcaagatagctg

SEQ ID NO: 487011 - DNA, 15 bp, Homo sapiens
gcattcaagatagct

SEQ ID NO: 487012 - DNA, 15 bp, Homo sapiens
agcattcaagatagc

SEQ ID NO: 487013 - DNA, 15 bp, Homo sapiens
cagcattcaagatag

SEQ ID NO: 487014 - DNA, 15 bp, Homo sapiens
ccagcattcaagata

SEQ ID NO: 487015 - DNA, 15 bp, Homo sapiens
tccagcattcaagat

SEQ ID NO: 487016 - DNA, 15 bp, Homo sapiens
ctccagcattcaaga

SEQ ID NO: 487017 - DNA, 15 bp, Homo sapiens
tctccagcattcaag

SEQ ID NO: 487018 - DNA, 15 bp, Homo sapiens
ttctccagcattcaa

SEQ ID NO: 487019 - DNA, 15 bp, Homo sapiens
attctccagcattca

SEQ ID NO: 487020 - DNA, 15 bp, Homo sapiens
aattctccagcattc

SEQ ID NO: 487021 - DNA, 15 bp, Homo sapiens
taattctccagcatt

SEQ ID NO: 487022 - DNA, 15 bp, Homo sapiens
ttaattctccagcat

SEQ ID NO: 487023 - DNA, 15 bp, Homo sapiens
tttaattctccagca

SEQ ID NO: 487024 - DNA, 15 bp, Homo sapiens
atttaattctccagc

SEQ ID NO: 487025 - DNA, 15 bp, Homo sapiens
gatttaattctccag

SEQ ID NO: 487026 - DNA, 15 bp, Homo sapiens
ggatttaattctcca

SEQ ID NO: 487027 - DNA, 15 bp, Homo sapiens
aggatttaattctcc

SEQ ID NO: 487028 - DNA, 15 bp, Homo sapiens
aaggatttaattctc

SEQ ID NO: 487029 - DNA, 15 bp, Homo sapiens
aaaggatttaattct

SEQ ID NO: 487030 - DNA, 15 bp, Homo sapiens
aaaaggatttaattc

SEQ ID NO: 487031 - DNA, 15 bp, Homo sapiens
gaaaaggatttaatt

SEQ ID NO: 487032 - DNA, 15 bp, Homo sapiens
agaaaaggatttaat

SEQ ID NO: 487033 - DNA, 15 bp, Homo sapiens
cagaaaaggatttaa

SEQ ID NO: 487034 - DNA, 15 bp, Homo sapiens
acagaaaaggattta

SEQ ID NO: 487035 - DNA, 15 bp, Homo sapiens
gacagaaaaggattt

SEQ ID NO: 487036 - DNA, 15 bp, Homo sapiens
agacagaaaaggatt

SEQ ID NO: 487037 - DNA, 15 bp, Homo sapiens
tagacagaaaaggat

SEQ ID NO: 487038 - DNA, 15 bp, Homo sapiens
ctagacagaaaagga

SEQ ID NO: 487039 - DNA, 15 bp, Homo sapiens
cctagacagaaaagg

SEQ ID NO: 487040 - DNA, 15 bp, Homo sapiens
ccctagacagaaaag

SEQ ID NO: 487041 - DNA, 15 bp, Homo sapiens
accctagacagaaaa

SEQ ID NO: 487042 - DNA, 15 bp, Homo sapiens
caccctagacagaaa

SEQ ID NO: 487043 - DNA, 15 bp, Homo sapiens
acaccctagacagaa

SEQ ID NO: 487044 - DNA, 15 bp, Homo sapiens
gacaccctagacaga

SEQ ID NO: 487045 - DNA, 15 bp, Homo sapiens
tgacaccctagacag

SEQ ID NO: 487046 - DNA, 15 bp, Homo sapiens
ctgacaccctagaca

SEQ ID NO: 487047 - DNA, 15 bp, Homo sapiens
gctgacaccctagac

SEQ ID NO: 487048 - DNA, 15 bp, Homo sapiens
agctgacaccctaga

SEQ ID NO: 487049 - DNA, 15 bp, Homo sapiens
gagctgacaccctag

SEQ ID NO: 487050 - DNA, 15 bp, Homo sapiens
ggagctgacacccta

SEQ ID NO: 487051 - DNA, 15 bp, Homo sapiens
gggagctgacaccct

SEQ ID NO: 487052 - DNA, 15 bp, Homo sapiens
agggagctgacaccc

SEQ ID NO: 487053 - DNA, 15 bp, Homo sapiens
tagggagctgacacc

SEQ ID NO: 487054 - DNA, 15 bp, Homo sapiens
ttagggagctgacac

SEQ ID NO: 487055 - DNA, 15 bp, Homo sapiens
cttagggagctgaca

SEQ ID NO: 487056 - DNA, 15 bp, Homo sapiens
ccttagggagctgac

SEQ ID NO: 487057 - DNA, 15 bp, Homo sapiens
cccttagggagctga

SEQ ID NO: 487058 - DNA, 15 bp, Homo sapiens
gcccttagggagctg

SEQ ID NO: 487059 - DNA, 15 bp, Homo sapiens
agcccttagggagct

SEQ ID NO: 487060 - DNA, 15 bp, Homo sapiens
cagcccttagggagc

SEQ ID NO: 487061 - DNA, 15 bp, Homo sapiens
ccagcccttagggag

SEQ ID NO: 487062 - DNA, 15 bp, Homo sapiens
cccagcccttaggga

SEQ ID NO: 487063 - DNA, 15 bp, Homo sapiens
gcccagcccttaggg

SEQ ID NO: 487064 - DNA, 15 bp, Homo sapiens
ggcccagcccttagg

SEQ ID NO: 487065 - DNA, 15 bp, Homo sapiens
tggcccagcccttag

SEQ ID NO: 487066 - DNA, 15 bp, Homo sapiens
ttggcccagccctta

SEQ ID NO: 487067 - DNA, 15 bp, Homo sapiens
tttggcccagccctt

SEQ ID NO: 487068 - DNA, 15 bp, Homo sapiens
ttttggcccagccct

SEQ ID NO: 487069 - DNA, 15 bp, Homo sapiens
gttttggcccagccc

SEQ ID NO: 487070 - DNA, 15 bp, Homo sapiens
tgttttggcccagcc

SEQ ID NO: 487071 - DNA, 15 bp, Homo sapiens
ctgttttggcccagc

SEQ ID NO: 487072 - DNA, 15 bp, Homo sapiens
actgttttggcccag

SEQ ID NO: 487073 - DNA, 15 bp, Homo sapiens
aactgttttggccca

SEQ ID NO: 487074 - DNA, 15 bp, Homo sapiens
caactgttttggccc

SEQ ID NO: 487075 - DNA, 15 bp, Homo sapiens
ccaactgttttggcc

SEQ ID NO: 487076 - DNA, 15 bp, Homo sapiens
tccaactgttttggc

SEQ ID NO: 487077 - DNA, 15 bp, Homo sapiens
atccaactgttttgg

SEQ ID NO: 487078 - DNA, 15 bp, Homo sapiens
aatccaactgttttg

SEQ ID NO: 487079 - DNA, 15 bp, Homo sapiens
aaatccaactgtttt

SEQ ID NO: 487080 - DNA, 15 bp, Homo sapiens
taaatccaactgttt

SEQ ID NO: 487081 - DNA, 15 bp, Homo sapiens
ataaatccaactgtt

SEQ ID NO: 487082 - DNA, 15 bp, Homo sapiens
tataaatccaactgt

SEQ ID NO: 487083 - DNA, 15 bp, Homo sapiens
ttataaatccaactg

SEQ ID NO: 487084 - DNA, 15 bp, Homo sapiens
cttataaatccaact

SEQ ID NO: 487085 - DNA, 15 bp, Homo sapiens
tcttataaatccaac

SEQ ID NO: 487086 - DNA, 15 bp, Homo sapiens
gtcttataaatccaa

SEQ ID NO: 487087 - DNA, 15 bp, Homo sapiens
tgtcttataaatcca

SEQ ID NO: 487088 - DNA, 15 bp, Homo sapiens
gtgtcttataaatcc

SEQ ID NO: 487089 - DNA, 15 bp, Homo sapiens
agtgtcttataaatc

SEQ ID NO: 487090 - DNA, 15 bp, Homo sapiens
tagtgtcttataaat

SEQ ID NO: 487091 - DNA, 15 bp, Homo sapiens
ctagtgtcttataaa

SEQ ID NO: 487092 - DNA, 15 bp, Homo sapiens
tctagtgtcttataa

SEQ ID NO: 487093 - DNA, 15 bp, Homo sapiens
ctctagtgtcttata

SEQ ID NO: 487094 - DNA, 15 bp, Homo sapiens
actctagtgtcttat

SEQ ID NO: 487095 - DNA, 15 bp, Homo sapiens
gactctagtgtctta

SEQ ID NO: 487096 - DNA, 15 bp, Homo sapiens
agactctagtgtctt

SEQ ID NO: 487097 - DNA, 15 bp, Homo sapiens
aagactctagtgtct

SEQ ID NO: 487098 - DNA, 15 bp, Homo sapiens
caagactctagtgtc

SEQ ID NO: 487099 - DNA, 15 bp, Homo sapiens
gcaagactctagtgt

SEQ ID NO: 487100 - DNA, 15 bp, Homo sapiens
ggcaagactctagtg

SEQ ID NO: 487101 - DNA, 15 bp, Homo sapiens
aggcaagactctagt

SEQ ID NO: 487102 - DNA, 15 bp, Homo sapiens
gaggcaagactctag

SEQ ID NO: 487103 - DNA, 15 bp, Homo sapiens
tgaggcaagactcta

SEQ ID NO: 487104 - DNA, 15 bp, Homo sapiens
ctgaggcaagactct

SEQ ID NO: 487105 - DNA, 15 bp, Homo sapiens
actgaggcaagactc

SEQ ID NO: 487106 - DNA, 15 bp, Homo sapiens
tactgaggcaagact

SEQ ID NO: 487107 - DNA, 15 bp, Homo sapiens
ctactgaggcaagac

SEQ ID NO: 487108 - DNA, 15 bp, Homo sapiens
gctactgaggcaaga

SEQ ID NO: 487109 - DNA, 15 bp, Homo sapiens
agctactgaggcaag

SEQ ID NO: 487110 - DNA, 15 bp, Homo sapiens
gagctactgaggcaa

SEQ ID NO: 487111 - DNA, 15 bp, Homo sapiens
ggagctactgaggca

SEQ ID NO: 487112 - DNA, 15 bp, Homo sapiens
aggagctactgaggc

SEQ ID NO: 487113 - DNA, 15 bp, Homo sapiens
aaggagctactgagg

SEQ ID NO: 487114 - DNA, 15 bp, Homo sapiens
aaaggagctactgag

SEQ ID NO: 487115 - DNA, 15 bp, Homo sapiens
caaaggagctactga

SEQ ID NO: 487116 - DNA, 15 bp, Homo sapiens
tcaaaggagctactg

SEQ ID NO: 487117 - DNA, 15 bp, Homo sapiens
ttcaaaggagctact

SEQ ID NO: 487118 - DNA, 15 bp, Homo sapiens
attcaaaggagctac

SEQ ID NO: 487119 - DNA, 15 bp, Homo sapiens
aattcaaaggagcta

SEQ ID NO: 487120 - DNA, 15 bp, Homo sapiens
gaattcaaaggagct

SEQ ID NO: 487121 - DNA, 15 bp, Homo sapiens
agaattcaaaggagc

SEQ ID NO: 487122 - DNA, 15 bp, Homo sapiens
cagaattcaaaggag

SEQ ID NO: 487123 - DNA, 15 bp, Homo sapiens
gcagaattcaaagga

SEQ ID NO: 487124 - DNA, 15 bp, Homo sapiens
tgcagaattcaaagg

SEQ ID NO: 487125 - DNA, 15 bp, Homo sapiens
gtgcagaattcaaag

SEQ ID NO: 487126 - DNA, 15 bp, Homo sapiens
agtgcagaattcaaa

SEQ ID NO: 487127 - DNA, 15 bp, Homo sapiens
cagtgcagaattcaa

SEQ ID NO: 487128 - DNA, 15 bp, Homo sapiens
tcagtgcagaattca

SEQ ID NO: 487129 - DNA, 15 bp, Homo sapiens
ttcagtgcagaattc

SEQ ID NO: 487130 - DNA, 15 bp, Homo sapiens
attcagtgcagaatt

SEQ ID NO: 487131 - DNA, 15 bp, Homo sapiens
aattcagtgcagaat

SEQ ID NO: 487132 - DNA, 15 bp, Homo sapiens
caattcagtgcagaa

SEQ ID NO: 487133 - DNA, 15 bp, Homo sapiens
tcaattcagtgcaga

SEQ ID NO: 487134 - DNA, 15 bp, Homo sapiens
atcaattcagtgcag

SEQ ID NO: 487135 - DNA, 15 bp, Homo sapiens
gatcaattcagtgca

SEQ ID NO: 487136 - DNA, 15 bp, Homo sapiens
tgatcaattcagtgc

SEQ ID NO: 487137 - DNA, 15 bp, Homo sapiens
ctgatcaattcagtg

SEQ ID NO: 487138 - DNA, 15 bp, Homo sapiens
actgatcaattcagt

SEQ ID NO: 487139 - DNA, 15 bp, Homo sapiens
aactgatcaattcag

SEQ ID NO: 487140 - DNA, 15 bp, Homo sapiens
aaactgatcaattca

SEQ ID NO: 487141 - DNA, 15 bp, Homo sapiens
gaaactgatcaattc

SEQ ID NO: 487142 - DNA, 15 bp, Homo sapiens
agaaactgatcaatt

SEQ ID NO: 487143 - DNA, 15 bp, Homo sapiens
aagaaactgatcaat

SEQ ID NO: 487144 - DNA, 15 bp, Homo sapiens
caagaaactgatcaa

SEQ ID NO: 487145 - DNA, 15 bp, Homo sapiens
ccaagaaactgatca

SEQ ID NO: 487146 - DNA, 15 bp, Homo sapiens
gccaagaaactgatc

SEQ ID NO: 487147 - DNA, 15 bp, Homo sapiens
ggccaagaaactgat

SEQ ID NO: 487148 - DNA, 15 bp, Homo sapiens
gggccaagaaactga

SEQ ID NO: 487149 - DNA, 15 bp, Homo sapiens
tgggccaagaaactg

SEQ ID NO: 487150 - DNA, 15 bp, Homo sapiens
ttgggccaagaaact

SEQ ID NO: 487151 - DNA, 15 bp, Homo sapiens
tttgggccaagaaac

SEQ ID NO: 487152 - DNA, 15 bp, Homo sapiens
ctttgggccaagaaa

SEQ ID NO: 487153 - DNA, 15 bp, Homo sapiens
actttgggccaagaa

SEQ ID NO: 487154 - DNA, 15 bp, Homo sapiens
tactttgggccaaga

SEQ ID NO: 487155 - DNA, 15 bp, Homo sapiens
ttactttgggccaag

SEQ ID NO: 487156 - DNA, 15 bp, Homo sapiens
tttactttgggccaa

SEQ ID NO: 487157 - DNA, 15 bp, Homo sapiens
gtttactttgggcca

SEQ ID NO: 487158 - DNA, 15 bp, Homo sapiens
agtttactttgggcc

SEQ ID NO: 487159 - DNA, 15 bp, Homo sapiens
gagtttactttgggc

SEQ ID NO: 487160 - DNA, 15 bp, Homo sapiens
tgagtttactttggg

SEQ ID NO: 487161 - DNA, 15 bp, Homo sapiens
ctgagtttactttgg

SEQ ID NO: 487162 - DNA, 15 bp, Homo sapiens
tctgagtttactttg

SEQ ID NO: 487163 - DNA, 15 bp, Homo sapiens
atctgagtttacttt

SEQ ID NO: 487164 - DNA, 15 bp, Homo sapiens
catctgagtttactt

SEQ ID NO: 487165 - DNA, 15 bp, Homo sapiens
ccatctgagtttact

SEQ ID NO: 487166 - DNA, 15 bp, Homo sapiens
gccatctgagtttac

SEQ ID NO: 487167 - DNA, 15 bp, Homo sapiens
tgccatctgagttta

SEQ ID NO: 487168 - DNA, 15 bp, Homo sapiens
ctgccatctgagttt

SEQ ID NO: 487169 - DNA, 15 bp, Homo sapiens
gctgccatctgagtt

SEQ ID NO: 487170 - DNA, 15 bp, Homo sapiens
ggctgccatctgagt

SEQ ID NO: 487171 - DNA, 15 bp, Homo sapiens
gggctgccatctgag

SEQ ID NO: 487172 - DNA, 15 bp, Homo sapiens
tgggctgccatctga

SEQ ID NO: 487173 - DNA, 15 bp, Homo sapiens
ttgggctgccatctg

SEQ ID NO: 487174 - DNA, 15 bp, Homo sapiens
cttgggctgccatct

SEQ ID NO: 487175 - DNA, 15 bp, Homo sapiens
tcttgggctgccatc

SEQ ID NO: 487176 - DNA, 15 bp, Homo sapiens
ctcttgggctgccat

SEQ ID NO: 487177 - DNA, 15 bp, Homo sapiens
gctcttgggctgcca

SEQ ID NO: 487178 - DNA, 15 bp, Homo sapiens
ggctcttgggctgcc

SEQ ID NO: 487179 - DNA, 15 bp, Homo sapiens
tggctcttgggctgc

SEQ ID NO: 487180 - DNA, 15 bp, Homo sapiens
gtggctcttgggctg

SEQ ID NO: 487181 - DNA, 15 bp, Homo sapiens
agtggctcttgggct

SEQ ID NO: 487182 - DNA, 15 bp, Homo sapiens
gagtggctcttgggc

SEQ ID NO: 487183 - DNA, 15 bp, Homo sapiens
agagtggctcttggg

SEQ ID NO: 487184 - DNA, 15 bp, Homo sapiens
cagagtggctcttgg

SEQ ID NO: 487185 - DNA, 15 bp, Homo sapiens
gcagagtggctcttg

SEQ ID NO: 487186 - DNA, 15 bp, Homo sapiens
tgcagagtggctctt

SEQ ID NO: 487187 - DNA, 15 bp, Homo sapiens
ctgcagagtggctct

SEQ ID NO: 487188 - DNA, 15 bp, Homo sapiens
actgcagagtggctc

SEQ ID NO: 487189 - DNA, 15 bp, Homo sapiens
cactgcagagtggct

SEQ ID NO: 487190 - DNA, 15 bp, Homo sapiens
gcactgcagagtggc

SEQ ID NO: 487191 - DNA, 15 bp, Homo sapiens
ggcactgcagagtgg

SEQ ID NO: 487192 - DNA, 15 bp, Homo sapiens
aggcactgcagagtg

SEQ ID NO: 487193 - DNA, 15 bp, Homo sapiens
aaggcactgcagagt

SEQ ID NO: 487194 - DNA, 15 bp, Homo sapiens
gaaggcactgcagag

SEQ ID NO: 487195 - DNA, 15 bp, Homo sapiens
agaaggcactgcaga

SEQ ID NO: 487196 - DNA, 15 bp, Homo sapiens
aagaaggcactgcag

SEQ ID NO: 487197 - DNA, 15 bp, Homo sapiens
aaagaaggcactgca

SEQ ID NO: 487198 - DNA, 15 bp, Homo sapiens
gaaagaaggcactgc

SEQ ID NO: 487199 - DNA, 15 bp, Homo sapiens
tgaaagaaggcactg

SEQ ID NO: 487200 - DNA, 15 bp, Homo sapiens
gtgaaagaaggcact

SEQ ID NO: 487201 - DNA, 15 bp, Homo sapiens
tgtgaaagaaggcac

SEQ ID NO: 487202 - DNA, 15 bp, Homo sapiens
atgtgaaagaaggca

SEQ ID NO: 487203 - DNA, 15 bp, Homo sapiens
catgtgaaagaaggc

SEQ ID NO: 487204 - DNA, 15 bp, Homo sapiens
ccatgtgaaagaagg

SEQ ID NO: 487205 - DNA, 15 bp, Homo sapiens
accatgtgaaagaag

SEQ ID NO: 487206 - DNA, 15 bp, Homo sapiens
gaccatgtgaaagaa

SEQ ID NO: 487207 - DNA, 15 bp, Homo sapiens
tgaccatgtgaaaga

SEQ ID NO: 487208 - DNA, 15 bp, Homo sapiens
atgaccatgtgaaag

SEQ ID NO: 487209 - DNA, 15 bp, Homo sapiens
gatgaccatgtgaaa

SEQ ID NO: 487210 - DNA, 15 bp, Homo sapiens
tgatgaccatgtgaa

SEQ ID NO: 487211 - DNA, 15 bp, Homo sapiens
atgatgaccatgtga

SEQ ID NO: 487212 - DNA, 15 bp, Homo sapiens
catgatgaccatgtg

SEQ ID NO: 487213 - DNA, 15 bp, Homo sapiens
gcatgatgaccatgt

SEQ ID NO: 487214 - DNA, 15 bp, Homo sapiens
agcatgatgaccatg

SEQ ID NO: 487215 - DNA, 15 bp, Homo sapiens
gagcatgatgaccat

SEQ ID NO: 487216 - DNA, 15 bp, Homo sapiens
agagcatgatgacca

SEQ ID NO: 487217 - DNA, 15 bp, Homo sapiens
gagagcatgatgacc

SEQ ID NO: 487218 - DNA, 15 bp, Homo sapiens
agagagcatgatgac

SEQ ID NO: 487219 - DNA, 15 bp, Homo sapiens
cagagagcatgatga

SEQ ID NO: 487220 - DNA, 15 bp, Homo sapiens
tcagagagcatgatg

SEQ ID NO: 487221 - DNA, 15 bp, Homo sapiens
atcagagagcatgat

SEQ ID NO: 487222 - DNA, 15 bp, Homo sapiens
gatcagagagcatga

SEQ ID NO: 487223 - DNA, 15 bp, Homo sapiens
ggatcagagagcatg

SEQ ID NO: 487224 - DNA, 15 bp, Homo sapiens
gggatcagagagcat

SEQ ID NO: 487225 - DNA, 15 bp, Homo sapiens
agggatcagagagca

SEQ ID NO: 487226 - DNA, 15 bp, Homo sapiens
gagggatcagagagc

SEQ ID NO: 487227 - DNA, 15 bp, Homo sapiens
tgagggatcagagag

SEQ ID NO: 487228 - DNA, 15 bp, Homo sapiens
ctgagggatcagaga

SEQ ID NO: 487229 - DNA, 15 bp, Homo sapiens
cctgagggatcagag

SEQ ID NO: 487230 - DNA, 15 bp, Homo sapiens
acctgagggatcaga

SEQ ID NO: 487231 - DNA, 15 bp, Homo sapiens
aacctgagggatcag

SEQ ID NO: 487232 - DNA, 15 bp, Homo sapiens
gaacctgagggatca

SEQ ID NO: 487233 - DNA, 15 bp, Homo sapiens
agaacctgagggatc

SEQ ID NO: 487234 - DNA, 15 bp, Homo sapiens
cagaacctgagggat

SEQ ID NO: 487235 - DNA, 15 bp, Homo sapiens
acagaacctgaggga

SEQ ID NO: 487236 - DNA, 15 bp, Homo sapiens
gacagaacctgaggg

SEQ ID NO: 487237 - DNA, 15 bp, Homo sapiens
agacagaacctgagg

SEQ ID NO: 487238 - DNA, 15 bp, Homo sapiens
tagacagaacctgag

SEQ ID NO: 487239 - DNA, 15 bp, Homo sapiens
ttagacagaacctga

SEQ ID NO: 487240 - DNA, 15 bp, Homo sapiens
cttagacagaacctg

SEQ ID NO: 487241 - DNA, 15 bp, Homo sapiens
gcttagacagaacct

SEQ ID NO: 487242 - DNA, 15 bp, Homo sapiens
ggcttagacagaacc

SEQ ID NO: 487243 - DNA, 15 bp, Homo sapiens
aggcttagacagaac

SEQ ID NO: 487244 - DNA, 15 bp, Homo sapiens
gaggcttagacagaa

SEQ ID NO: 487245 - DNA, 15 bp, Homo sapiens
tgaggcttagacaga

SEQ ID NO: 487246 - DNA, 15 bp, Homo sapiens
atgaggcttagacag

SEQ ID NO: 487247 - DNA, 15 bp, Homo sapiens
catgaggcttagaca

SEQ ID NO: 487248 - DNA, 15 bp, Homo sapiens
acatgaggcttagac

SEQ ID NO: 487249 - DNA, 15 bp, Homo sapiens
aacatgaggcttaga

SEQ ID NO: 487250 - DNA, 15 bp, Homo sapiens
aaacatgaggcttag

SEQ ID NO: 487251 - DNA, 15 bp, Homo sapiens
aaaacatgaggctta

SEQ ID NO: 487252 - DNA, 15 bp, Homo sapiens
taaaacatgaggctt

SEQ ID NO: 487253 - DNA, 15 bp, Homo sapiens
ataaaacatgaggct

SEQ ID NO: 487254 - DNA, 15 bp, Homo sapiens
cataaaacatgaggc

SEQ ID NO: 487255 - DNA, 15 bp, Homo sapiens
tcataaaacatgagg

SEQ ID NO: 487256 - DNA, 15 bp, Homo sapiens
gtcataaaacatgag

SEQ ID NO: 487257 - DNA, 15 bp, Homo sapiens
ggtcataaaacatga

SEQ ID NO: 487258 - DNA, 15 bp, Homo sapiens
cggtcataaaacatg

SEQ ID NO: 487259 - DNA, 15 bp, Homo sapiens
acggtcataaaacat

SEQ ID NO: 487260 - DNA, 15 bp, Homo sapiens
cacggtcataaaaca

SEQ ID NO: 487261 - DNA, 15 bp, Homo sapiens
gcacggtcataaaac

SEQ ID NO: 487262 - DNA, 15 bp, Homo sapiens
agcacggtcataaaa

SEQ ID NO: 487263 - DNA, 15 bp, Homo sapiens
cagcacggtcataaa

SEQ ID NO: 487264 - DNA, 15 bp, Homo sapiens
acagcacggtcataa

SEQ ID NO: 487265 - DNA, 15 bp, Homo sapiens
aacagcacggtcata

SEQ ID NO: 487266 - DNA, 15 bp, Homo sapiens
gaacagcacggtcat

SEQ ID NO: 487267 - DNA, 15 bp, Homo sapiens
agaacagcacggtca

SEQ ID NO: 487268 - DNA, 15 bp, Homo sapiens
gagaacagcacggtc

SEQ ID NO: 487269 - DNA, 15 bp, Homo sapiens
tgagaacagcacggt

SEQ ID NO: 487270 - DNA, 15 bp, Homo sapiens
ctgagaacagcacgg

SEQ ID NO: 487271 - DNA, 15 bp, Homo sapiens
gctgagaacagcacg

SEQ ID NO: 487272 - DNA, 15 bp, Homo sapiens
ggctgagaacagcac

SEQ ID NO: 487273 - DNA, 15 bp, Homo sapiens
gggctgagaacagca

SEQ ID NO: 487274 - DNA, 15 bp, Homo sapiens
tgggctgagaacagc

SEQ ID NO: 487275 - DNA, 15 bp, Homo sapiens
gtgggctgagaacag

SEQ ID NO: 487276 - DNA, 15 bp, Homo sapiens
ggtgggctgagaaca

SEQ ID NO: 487277 - DNA, 15 bp, Homo sapiens
aggtgggctgagaac

SEQ ID NO: 487278 - DNA, 15 bp, Homo sapiens
gaggtgggctgagaa

SEQ ID NO: 487279 - DNA, 15 bp, Homo sapiens
tgaggtgggctgaga

SEQ ID NO: 487280 - DNA, 15 bp, Homo sapiens
gtgaggtgggctgag

SEQ ID NO: 487281 - DNA, 15 bp, Homo sapiens
ggtgaggtgggctga

SEQ ID NO: 487282 - DNA, 15 bp, Homo sapiens
gggtgaggtgggctg

SEQ ID NO: 487283 - DNA, 15 bp, Homo sapiens
agggtgaggtgggct

SEQ ID NO: 487284 - DNA, 15 bp, Homo sapiens
cagggtgaggtgggc

SEQ ID NO: 487285 - DNA, 15 bp, Homo sapiens
gcagggtgaggtggg

SEQ ID NO: 487286 - DNA, 15 bp, Homo sapiens
ggcagggtgaggtgg

SEQ ID NO: 487287 - DNA, 15 bp, Homo sapiens
gggcagggtgaggtg

SEQ ID NO: 487288 - DNA, 15 bp, Homo sapiens
ggggcagggtgaggt

SEQ ID NO: 487289 - DNA, 15 bp, Homo sapiens
tggggcagggtgagg

SEQ ID NO: 487290 - DNA, 15 bp, Homo sapiens
atggggcagggtgag

SEQ ID NO: 487291 - DNA, 15 bp, Homo sapiens
catggggcagggtga

SEQ ID NO: 487292 - DNA, 15 bp, Homo sapiens
gcatggggcagggtg

SEQ ID NO: 487293 - DNA, 15 bp, Homo sapiens
ggcatggggcagggt

SEQ ID NO: 487294 - DNA, 15 bp, Homo sapiens
aggcatggggcaggg

SEQ ID NO: 487295 - DNA, 15 bp, Homo sapiens
aaggcatggggcagg

SEQ ID NO: 487296 - DNA, 15 bp, Homo sapiens
gaaggcatggggcag

SEQ ID NO: 487297 - DNA, 15 bp, Homo sapiens
agaaggcatggggca

SEQ ID NO: 487298 - DNA, 15 bp, Homo sapiens
gagaaggcatggggc

SEQ ID NO: 487299 - DNA, 15 bp, Homo sapiens
tgagaaggcatgggg

SEQ ID NO: 487300 - DNA, 15 bp, Homo sapiens
ttgagaaggcatggg

SEQ ID NO: 487301 - DNA, 15 bp, Homo sapiens
attgagaaggcatgg

SEQ ID NO: 487302 - DNA, 15 bp, Homo sapiens
cattgagaaggcatg

SEQ ID NO: 487303 - DNA, 15 bp, Homo sapiens
ccattgagaaggcat

SEQ ID NO: 487304 - DNA, 15 bp, Homo sapiens
accattgagaaggca

SEQ ID NO: 487305 - DNA, 15 bp, Homo sapiens
aaccattgagaaggc

SEQ ID NO: 487306 - DNA, 15 bp, Homo sapiens
aaaccattgagaagg

SEQ ID NO: 487307 - DNA, 15 bp, Homo sapiens
caaaccattgagaag

SEQ ID NO: 487308 - DNA, 15 bp, Homo sapiens
acaaaccattgagaa

SEQ ID NO: 487309 - DNA, 15 bp, Homo sapiens
aacaaaccattgaga

SEQ ID NO: 487310 - DNA, 15 bp, Homo sapiens
gaacaaaccattgag

SEQ ID NO: 487311 - DNA, 15 bp, Homo sapiens
tgaacaaaccattga

SEQ ID NO: 487312 - DNA, 15 bp, Homo sapiens
gtgaacaaaccattg

SEQ ID NO: 487313 - DNA, 15 bp, Homo sapiens
ggtgaacaaaccatt

SEQ ID NO: 487314 - DNA, 15 bp, Homo sapiens
aggtgaacaaaccat

SEQ ID NO: 487315 - DNA, 15 bp, Homo sapiens
caggtgaacaaacca

SEQ ID NO: 487316 - DNA, 15 bp, Homo sapiens
tcaggtgaacaaacc

SEQ ID NO: 487317 - DNA, 15 bp, Homo sapiens
ttcaggtgaacaaac

SEQ ID NO: 487318 - DNA, 15 bp, Homo sapiens
attcaggtgaacaaa

SEQ ID NO: 487319 - DNA, 15 bp, Homo sapiens
aattcaggtgaacaa

SEQ ID NO: 487320 - DNA, 15 bp, Homo sapiens
gaattcaggtgaaca

SEQ ID NO: 487321 - DNA, 15 bp, Homo sapiens
ggaattcaggtgaac

SEQ ID NO: 487322 - DNA, 15 bp, Homo sapiens
gggaattcaggtgaa

SEQ ID NO: 487323 - DNA, 15 bp, Homo sapiens
ggggaattcaggtga

SEQ ID NO: 487324 - DNA, 15 bp, Homo sapiens
tggggaattcaggtg

SEQ ID NO: 487325 - DNA, 15 bp, Homo sapiens
ctggggaattcaggt

SEQ ID NO: 487326 - DNA, 15 bp, Homo sapiens
tctggggaattcagg

SEQ ID NO: 487327 - DNA, 15 bp, Homo sapiens
atctggggaattcag

SEQ ID NO: 487328 - DNA, 15 bp, Homo sapiens
aatctggggaattca

SEQ ID NO: 487329 - DNA, 15 bp, Homo sapiens
aaatctggggaattc

SEQ ID NO: 487330 - DNA, 15 bp, Homo sapiens
gaaatctggggaatt

SEQ ID NO: 487331 - DNA, 15 bp, Homo sapiens
tgaaatctggggaat

SEQ ID NO: 487332 - DNA, 15 bp, Homo sapiens
atgaaatctggggaa

SEQ ID NO: 487333 - DNA, 15 bp, Homo sapiens
catgaaatctgggga

SEQ ID NO: 487334 - DNA, 15 bp, Homo sapiens
gcatgaaatctgggg

SEQ ID NO: 487335 - DNA, 15 bp, Homo sapiens
ggcatgaaatctggg

SEQ ID NO: 487336 - DNA, 15 bp, Homo sapiens
tggcatgaaatctgg

SEQ ID NO: 487337 - DNA, 15 bp, Homo sapiens
ctggcatgaaatctg

SEQ ID NO: 487338 - DNA, 15 bp, Homo sapiens
actggcatgaaatct

SEQ ID NO: 487339 - DNA, 15 bp, Homo sapiens
tactggcatgaaatc

SEQ ID NO: 487340 - DNA, 15 bp, Homo sapiens
atactggcatgaaat

SEQ ID NO: 487341 - DNA, 15 bp, Homo sapiens
gatactggcatgaaa

SEQ ID NO: 487342 - DNA, 15 bp, Homo sapiens
ggatactggcatgaa

SEQ ID NO: 487343 - DNA, 15 bp, Homo sapiens
gggatactggcatga

SEQ ID NO: 487344 - DNA, 15 bp, Homo sapiens
ggggatactggcatg

SEQ ID NO: 487345 - DNA, 15 bp, Homo sapiens
tggggatactggcat

SEQ ID NO: 487346 - DNA, 15 bp, Homo sapiens
ttggggatactggca

SEQ ID NO: 487347 - DNA, 15 bp, Homo sapiens
cttggggatactggc

SEQ ID NO: 487348 - DNA, 15 bp, Homo sapiens
ccttggggatactgg

SEQ ID NO: 487349 - DNA, 15 bp, Homo sapiens
accttggggatactg

SEQ ID NO: 487350 - DNA, 15 bp, Homo sapiens
aaccttggggatact

SEQ ID NO: 487351 - DNA, 15 bp, Homo sapiens
gaaccttggggatac

SEQ ID NO: 487352 - DNA, 15 bp, Homo sapiens
ggaaccttggggata

SEQ ID NO: 487353 - DNA, 15 bp, Homo sapiens
aggaaccttggggat

SEQ ID NO: 487354 - DNA, 15 bp, Homo sapiens
aaggaaccttgggga

SEQ ID NO: 487355 - DNA, 15 bp, Homo sapiens
caaggaaccttgggg

SEQ ID NO: 487356 - DNA, 15 bp, Homo sapiens
tcaaggaaccttggg

SEQ ID NO: 487357 - DNA, 15 bp, Homo sapiens
gtcaaggaaccttgg

SEQ ID NO: 487358 - DNA, 15 bp, Homo sapiens
ggtcaaggaaccttg

SEQ ID NO: 487359 - DNA, 15 bp, Homo sapiens
aggtcaaggaacctt

SEQ ID NO: 487360 - DNA, 15 bp, Homo sapiens
gaggtcaaggaacct

SEQ ID NO: 487361 - DNA, 15 bp, Homo sapiens
agaggtcaaggaacc

SEQ ID NO: 487362 - DNA, 15 bp, Homo sapiens
aagaggtcaaggaac

SEQ ID NO: 487363 - DNA, 15 bp, Homo sapiens
caagaggtcaaggaa

SEQ ID NO: 487364 - DNA, 15 bp, Homo sapiens
ccaagaggtcaagga

SEQ ID NO: 487365 - DNA, 15 bp, Homo sapiens
accaagaggtcaagg

SEQ ID NO: 487366 - DNA, 15 bp, Homo sapiens
caccaagaggtcaag

SEQ ID NO: 487367 - DNA, 15 bp, Homo sapiens
acaccaagaggtcaa

SEQ ID NO: 487368 - DNA, 15 bp, Homo sapiens
tacaccaagaggtca

SEQ ID NO: 487369 - DNA, 15 bp, Homo sapiens
ttacaccaagaggtc

SEQ ID NO: 487370 - DNA, 15 bp, Homo sapiens
cttacaccaagaggt

SEQ ID NO: 487371 - DNA, 15 bp, Homo sapiens
gcttacaccaagagg

SEQ ID NO: 487372 - DNA, 15 bp, Homo sapiens
tgcttacaccaagag

SEQ ID NO: 487373 - DNA, 15 bp, Homo sapiens
atgcttacaccaaga

SEQ ID NO: 487374 - DNA, 15 bp, Homo sapiens
aatgcttacaccaag

SEQ ID NO: 487375 - DNA, 15 bp, Homo sapiens
gaatgcttacaccaa

SEQ ID NO: 487376 - DNA, 15 bp, Homo sapiens
tgaatgcttacacca

SEQ ID NO: 487377 - DNA, 15 bp, Homo sapiens
ctgaatgcttacacc

SEQ ID NO: 487378 - DNA, 15 bp, Homo sapiens
gctgaatgcttacac

SEQ ID NO: 487379 - DNA, 15 bp, Homo sapiens
tgctgaatgcttaca

SEQ ID NO: 487380 - DNA, 15 bp, Homo sapiens
atgctgaatgcttac

SEQ ID NO: 487381 - DNA, 15 bp, Homo sapiens
gatgctgaatgctta

SEQ ID NO: 487382 - DNA, 15 bp, Homo sapiens
agatgctgaatgctt

SEQ ID NO: 487383 - DNA, 15 bp, Homo sapiens
tagatgctgaatgct

SEQ ID NO: 487384 - DNA, 15 bp, Homo sapiens
ttagatgctgaatgc

SEQ ID NO: 487385 - DNA, 15 bp, Homo sapiens
tttagatgctgaatg

SEQ ID NO: 487386 - DNA, 15 bp, Homo sapiens
ttttagatgctgaat

SEQ ID NO: 487387 - DNA, 15 bp, Homo sapiens
attttagatgctgaa

SEQ ID NO: 487388 - DNA, 15 bp, Homo sapiens
aattttagatgctga

SEQ ID NO: 487389 - DNA, 15 bp, Homo sapiens
gaattttagatgctg

SEQ ID NO: 487390 - DNA, 15 bp, Homo sapiens
tgaattttagatgct

SEQ ID NO: 487391 - DNA, 15 bp, Homo sapiens
atgaattttagatgc

SEQ ID NO: 487392 - DNA, 15 bp, Homo sapiens
aatgaattttagatg

SEQ ID NO: 487393 - DNA, 15 bp, Homo sapiens
aaatgaattttagat

SEQ ID NO: 487394 - DNA, 15 bp, Homo sapiens
aaaatgaattttaga

SEQ ID NO: 487395 - DNA, 15 bp, Homo sapiens
taaaatgaattttag

SEQ ID NO: 487396 - DNA, 15 bp, Homo sapiens
ataaaatgaatttta

SEQ ID NO: 487397 - DNA, 15 bp, Homo sapiens
aataaaatgaatttt

SEQ ID NO: 487398 - DNA, 15 bp, Homo sapiens
gaataaaatgaattt

SEQ ID NO: 487399 - DNA, 15 bp, Homo sapiens
ggaataaaatgaatt

SEQ ID NO: 487400 - DNA, 15 bp, Homo sapiens
gggaataaaatgaat

SEQ ID NO: 487401 - DNA, 15 bp, Homo sapiens
cgggaataaaatgaa

SEQ ID NO: 487402 - DNA, 15 bp, Homo sapiens
acgggaataaaatga

SEQ ID NO: 487403 - DNA, 15 bp, Homo sapiens
gacgggaataaaatg

SEQ ID NO: 487404 - DNA, 15 bp, Homo sapiens
tgacgggaataaaat

SEQ ID NO: 487405 - DNA, 15 bp, Homo sapiens
ttgacgggaataaaa

SEQ ID NO: 487406 - DNA, 15 bp, Homo sapiens
gttgacgggaataaa

SEQ ID NO: 487407 - DNA, 15 bp, Homo sapiens
cgttgacgggaataa

SEQ ID NO: 487408 - DNA, 15 bp, Homo sapiens
gcgttgacgggaata

SEQ ID NO: 487409 - DNA, 15 bp, Homo sapiens
tgcgttgacgggaat

SEQ ID NO: 487410 - DNA, 15 bp, Homo sapiens
atgcgttgacgggaa

SEQ ID NO: 487411 - DNA, 15 bp, Homo sapiens
aatgcgttgacggga

SEQ ID NO: 487412 - DNA, 15 bp, Homo sapiens
aaatgcgttgacggg

SEQ ID NO: 487413 - DNA, 15 bp, Homo sapiens
gaaatgcgttgacgg

SEQ ID NO: 487414 - DNA, 15 bp, Homo sapiens
agaaatgcgttgacg

SEQ ID NO: 487415 - DNA, 15 bp, Homo sapiens
tagaaatgcgttgac

SEQ ID NO: 487416 - DNA, 15 bp, Homo sapiens
ttagaaatgcgttga

SEQ ID NO: 487417 - DNA, 15 bp, Homo sapiens
gttagaaatgcgttg

SEQ ID NO: 487418 - DNA, 15 bp, Homo sapiens
agttagaaatgcgtt

SEQ ID NO: 487419 - DNA, 15 bp, Homo sapiens
cagttagaaatgcgt

SEQ ID NO: 487420 - DNA, 15 bp, Homo sapiens
acagttagaaatgcg

SEQ ID NO: 487421 - DNA, 15 bp, Homo sapiens
tacagttagaaatgc

SEQ ID NO: 487422 - DNA, 15 bp, Homo sapiens
ctacagttagaaatg

SEQ ID NO: 487423 - DNA, 15 bp, Homo sapiens
tctacagttagaaat

SEQ ID NO: 487424 - DNA, 15 bp, Homo sapiens
ttctacagttagaaa

SEQ ID NO: 487425 - DNA, 15 bp, Homo sapiens
gttctacagttagaa

SEQ ID NO: 487426 - DNA, 15 bp, Homo sapiens
tgttctacagttaga

SEQ ID NO: 487427 - DNA, 15 bp, Homo sapiens
ttgttctacagttag

SEQ ID NO: 487428 - DNA, 15 bp, Homo sapiens
cttgttctacagtta

SEQ ID NO: 487429 - DNA, 15 bp, Homo sapiens
tcttgttctacagtt

SEQ ID NO: 487430 - DNA, 15 bp, Homo sapiens
ttcttgttctacagt

SEQ ID NO: 487431 - DNA, 15 bp, Homo sapiens
attcttgttctacag

SEQ ID NO: 487432 - DNA, 15 bp, Homo sapiens
aattcttgttctaca

SEQ ID NO: 487433 - DNA, 15 bp, Homo sapiens
taattcttgttctac

SEQ ID NO: 487434 - DNA, 15 bp, Homo sapiens
ataattcttgttcta

SEQ ID NO: 487435 - DNA, 15 bp, Homo sapiens
tataattcttgttct

SEQ ID NO: 487436 - DNA, 15 bp, Homo sapiens
ttataattcttgttc

SEQ ID NO: 487437 - DNA, 15 bp, Homo sapiens
tttataattcttgtt

SEQ ID NO: 487438 - DNA, 15 bp, Homo sapiens
atttataattcttgt

SEQ ID NO: 487439 - DNA, 15 bp, Homo sapiens
catttataattcttg

SEQ ID NO: 487440 - DNA, 15 bp, Homo sapiens
tcatttataattctt

SEQ ID NO: 487441 - DNA, 15 bp, Homo sapiens
gtcatttataattct

SEQ ID NO: 487442 - DNA, 15 bp, Homo sapiens
tgtcatttataattc

SEQ ID NO: 487443 - DNA, 15 bp, Homo sapiens
ttgtcatttataatt

SEQ ID NO: 487444 - DNA, 15 bp, Homo sapiens
tttgtcatttataat

SEQ ID NO: 487445 - DNA, 15 bp, Homo sapiens
ctttgtcatttataa

SEQ ID NO: 487446 - DNA, 15 bp, Homo sapiens
gctttgtcatttata

SEQ ID NO: 487447 - DNA, 15 bp, Homo sapiens
agctttgtcatttat

SEQ ID NO: 487448 - DNA, 15 bp, Homo sapiens
gagctttgtcattta

SEQ ID NO: 487449 - DNA, 15 bp, Homo sapiens
tgagctttgtcattt

SEQ ID NO: 487450 - DNA, 15 bp, Homo sapiens
atgagctttgtcatt

SEQ ID NO: 487451 - DNA, 15 bp, Homo sapiens
tatgagctttgtcat

SEQ ID NO: 487452 - DNA, 15 bp, Homo sapiens
ctatgagctttgtca

SEQ ID NO: 487453 - DNA, 15 bp, Homo sapiens
tctatgagctttgtc

SEQ ID NO: 487454 - DNA, 15 bp, Homo sapiens
ttctatgagctttgt

SEQ ID NO: 487455 - DNA, 15 bp, Homo sapiens
tttctatgagctttg

SEQ ID NO: 487456 - DNA, 15 bp, Homo sapiens
ttttctatgagcttt

SEQ ID NO: 487457 - DNA, 15 bp, Homo sapiens
attttctatgagctt

SEQ ID NO: 487458 - DNA, 15 bp, Homo sapiens
aattttctatgagct

SEQ ID NO: 487459 - DNA, 15 bp, Homo sapiens
caattttctatgagc

SEQ ID NO: 487460 - DNA, 15 bp, Homo sapiens
ccaattttctatgag

SEQ ID NO: 487461 - DNA, 15 bp, Homo sapiens
gccaattttctatga

SEQ ID NO: 487462 - DNA, 15 bp, Homo sapiens
tgccaattttctatg

SEQ ID NO: 487463 - DNA, 15 bp, Homo sapiens
gtgccaattttctat

SEQ ID NO: 487464 - DNA, 15 bp, Homo sapiens
ggtgccaattttcta

SEQ ID NO: 487465 - DNA, 15 bp, Homo sapiens
aggtgccaattttct

SEQ ID NO: 487466 - DNA, 15 bp, Homo sapiens
aaggtgccaattttc

SEQ ID NO: 487467 - DNA, 15 bp, Homo sapiens
caaggtgccaatttt

SEQ ID NO: 487468 - DNA, 15 bp, Homo sapiens
acaaggtgccaattt

SEQ ID NO: 487469 - DNA, 15 bp, Homo sapiens
gacaaggtgccaatt

SEQ ID NO: 487470 - DNA, 15 bp, Homo sapiens
agacaaggtgccaat

SEQ ID NO: 487471 - DNA, 15 bp, Homo sapiens
aagacaaggtgccaa

SEQ ID NO: 487472 - DNA, 15 bp, Homo sapiens
gaagacaaggtgcca

SEQ ID NO: 487473 - DNA, 15 bp, Homo sapiens
ggaagacaaggtgcc

SEQ ID NO: 487474 - DNA, 15 bp, Homo sapiens
gggaagacaaggtgc

SEQ ID NO: 487475 - DNA, 15 bp, Homo sapiens
ggggaagacaaggtg

SEQ ID NO: 487476 - DNA, 15 bp, Homo sapiens
gggggaagacaaggt

SEQ ID NO: 487477 - DNA, 15 bp, Homo sapiens
agggggaagacaagg

SEQ ID NO: 487478 - DNA, 15 bp, Homo sapiens
gagggggaagacaag

SEQ ID NO: 487479 - DNA, 15 bp, Homo sapiens
ggagggggaagacaa

SEQ ID NO: 487480 - DNA, 15 bp, Homo sapiens
gggagggggaagaca

SEQ ID NO: 487481 - DNA, 15 bp, Homo sapiens
agggagggggaagac

SEQ ID NO: 487482 - DNA, 15 bp, Homo sapiens
gagggagggggaaga

SEQ ID NO: 487483 - DNA, 15 bp, Homo sapiens
agagggagggggaag

SEQ ID NO: 487484 - DNA, 15 bp, Homo sapiens
aagagggagggggaa

SEQ ID NO: 487485 - DNA, 15 bp, Homo sapiens
taagagggaggggga

SEQ ID NO: 487486 - DNA, 15 bp, Homo sapiens
ataagagggaggggg

SEQ ID NO: 487487 - DNA, 15 bp, Homo sapiens
aataagagggagggg

SEQ ID NO: 487488 - DNA, 15 bp, Homo sapiens
aaataagagggaggg

SEQ ID NO: 487489 - DNA, 15 bp, Homo sapiens
aaaataagagggagg

SEQ ID NO: 487490 - DNA, 15 bp, Homo sapiens
taaaataagagggag

SEQ ID NO: 487491 - DNA, 15 bp, Homo sapiens
ataaaataagaggga

SEQ ID NO: 487492 - DNA, 15 bp, Homo sapiens
tataaaataagaggg

SEQ ID NO: 487493 - DNA, 15 bp, Homo sapiens
gtataaaataagagg

SEQ ID NO: 487494 - DNA, 15 bp, Homo sapiens
tgtataaaataagag

SEQ ID NO: 487495 - DNA, 15 bp, Homo sapiens
atgtataaaataaga

SEQ ID NO: 487496 - DNA, 15 bp, Homo sapiens
tatgtataaaataag

SEQ ID NO: 487497 - DNA, 15 bp, Homo sapiens
ttatgtataaaataa

SEQ ID NO: 487498 - DNA, 15 bp, Homo sapiens
tttatgtataaaata

SEQ ID NO: 487499 - DNA, 15 bp, Homo sapiens
ttttatgtataaaat

SEQ ID NO: 487500 - DNA, 15 bp, Homo sapiens
cttttatgtataaaa

SEQ ID NO: 487501 - DNA, 15 bp, Homo sapiens
tcttttatgtataaa

SEQ ID NO: 487502 - DNA, 15 bp, Homo sapiens
ctcttttatgtataa

SEQ ID NO: 487503 - DNA, 15 bp, Homo sapiens
tctcttttatgtata

SEQ ID NO: 487504 - DNA, 15 bp, Homo sapiens
ttctcttttatgtat

SEQ ID NO: 487505 - DNA, 15 bp, Homo sapiens
attctcttttatgta

SEQ ID NO: 487506 - DNA, 15 bp, Homo sapiens
tattctcttttatgt

SEQ ID NO: 487507 - DNA, 15 bp, Homo sapiens
atattctcttttatg

SEQ ID NO: 487508 - DNA, 15 bp, Homo sapiens
catattctcttttat

SEQ ID NO: 487509 - DNA, 15 bp, Homo sapiens
ccatattctctttta

SEQ ID NO: 487510 - DNA, 15 bp, Homo sapiens
cccatattctctttt

SEQ ID NO: 487511 - DNA, 15 bp, Homo sapiens
gcccatattctcttt

SEQ ID NO: 487512 - DNA, 15 bp, Homo sapiens
agcccatattctctt

SEQ ID NO: 487513 - DNA, 15 bp, Homo sapiens
cagcccatattctct

SEQ ID NO: 487514 - DNA, 15 bp, Homo sapiens
ccagcccatattctc

SEQ ID NO: 487515 - DNA, 15 bp, Homo sapiens
cccagcccatattct

SEQ ID NO: 487516 - DNA, 15 bp, Homo sapiens
gcccagcccatattc

SEQ ID NO: 487517 - DNA, 15 bp, Homo sapiens
tgcccagcccatatt

SEQ ID NO: 487518 - DNA, 15 bp, Homo sapiens
atgcccagcccatat

SEQ ID NO: 487519 - DNA, 15 bp, Homo sapiens
aatgcccagcccata

SEQ ID NO: 487520 - DNA, 15 bp, Homo sapiens
caatgcccagcccat

SEQ ID NO: 487521 - DNA, 15 bp, Homo sapiens
acaatgcccagccca

SEQ ID NO: 487522 - DNA, 15 bp, Homo sapiens
cacaatgcccagccc

SEQ ID NO: 487523 - DNA, 15 bp, Homo sapiens
ccacaatgcccagcc

SEQ ID NO: 487524 - DNA, 15 bp, Homo sapiens
gccacaatgcccagc

SEQ ID NO: 487525 - DNA, 15 bp, Homo sapiens
ggccacaatgcccag

SEQ ID NO: 487526 - DNA, 15 bp, Homo sapiens
tggccacaatgccca

SEQ ID NO: 487527 - DNA, 15 bp, Homo sapiens
ttggccacaatgccc

SEQ ID NO: 487528 - DNA, 15 bp, Homo sapiens
cttggccacaatgcc

SEQ ID NO: 487529 - DNA, 15 bp, Homo sapiens
ccttggccacaatgc

SEQ ID NO: 487530 - DNA, 15 bp, Homo sapiens
gccttggccacaatg

SEQ ID NO: 487531 - DNA, 15 bp, Homo sapiens
agccttggccacaat

SEQ ID NO: 487532 - DNA, 15 bp, Homo sapiens
cagccttggccacaa

SEQ ID NO: 487533 - DNA, 15 bp, Homo sapiens
ccagccttggccaca

SEQ ID NO: 487534 - DNA, 15 bp, Homo sapiens
cccagccttggccac

SEQ ID NO: 487535 - DNA, 15 bp, Homo sapiens
gcccagccttggcca

SEQ ID NO: 487536 - DNA, 15 bp, Homo sapiens
tgcccagccttggcc

SEQ ID NO: 487537 - DNA, 15 bp, Homo sapiens
atgcccagccttggc

SEQ ID NO: 487538 - DNA, 15 bp, Homo sapiens
catgcccagccttgg

SEQ ID NO: 487539 - DNA, 15 bp, Homo sapiens
tcatgcccagccttg

SEQ ID NO: 487540 - DNA, 15 bp, Homo sapiens
atcatgcccagcctt

SEQ ID NO: 487541 - DNA, 15 bp, Homo sapiens
tatcatgcccagcct

SEQ ID NO: 487542 - DNA, 15 bp, Homo sapiens
ctatcatgcccagcc

SEQ ID NO: 487543 - DNA, 15 bp, Homo sapiens
gctatcatgcccagc

SEQ ID NO: 487544 - DNA, 15 bp, Homo sapiens
agctatcatgcccag

SEQ ID NO: 487545 - DNA, 15 bp, Homo sapiens
gagctatcatgccca

SEQ ID NO: 487546 - DNA, 15 bp, Homo sapiens
tgagctatcatgccc

SEQ ID NO: 487547 - DNA, 15 bp, Homo sapiens
atgagctatcatgcc

SEQ ID NO: 487548 - DNA, 15 bp, Homo sapiens
tatgagctatcatgc

SEQ ID NO: 487549 - DNA, 15 bp, Homo sapiens
gtatgagctatcatg

SEQ ID NO: 487550 - DNA, 15 bp, Homo sapiens
agtatgagctatcat

SEQ ID NO: 487551 - DNA, 15 bp, Homo sapiens
aagtatgagctatca

SEQ ID NO: 487552 - DNA, 15 bp, Homo sapiens
caagtatgagctatc

SEQ ID NO: 487553 - DNA, 15 bp, Homo sapiens
acaagtatgagctat

SEQ ID NO: 487554 - DNA, 15 bp, Homo sapiens
tacaagtatgagcta

SEQ ID NO: 487555 - DNA, 15 bp, Homo sapiens
ttacaagtatgagct

SEQ ID NO: 487556 - DNA, 15 bp, Homo sapiens
attacaagtatgagc

SEQ ID NO: 487557 - DNA, 15 bp, Homo sapiens
gattacaagtatgag

SEQ ID NO: 487558 - DNA, 15 bp, Homo sapiens
ggattacaagtatga

SEQ ID NO: 487559 - DNA, 15 bp, Homo sapiens
tggattacaagtatg

SEQ ID NO: 487560 - DNA, 15 bp, Homo sapiens
ctggattacaagtat

SEQ ID NO: 487561 - DNA, 15 bp, Homo sapiens
gctggattacaagta

SEQ ID NO: 487562 - DNA, 15 bp, Homo sapiens
tgctggattacaagt

SEQ ID NO: 487563 - DNA, 15 bp, Homo sapiens
gtgctggattacaag

SEQ ID NO: 487564 - DNA, 15 bp, Homo sapiens
agtgctggattacaa

SEQ ID NO: 487565 - DNA, 15 bp, Homo sapiens
aagtgctggattaca

SEQ ID NO: 487566 - DNA, 15 bp, Homo sapiens
aaagtgctggattac

SEQ ID NO: 487567 - DNA, 15 bp, Homo sapiens
caaagtgctggatta

SEQ ID NO: 487568 - DNA, 15 bp, Homo sapiens
ccaaagtgctggatt

SEQ ID NO: 487569 - DNA, 15 bp, Homo sapiens
cccaaagtgctggat

SEQ ID NO: 487570 - DNA, 15 bp, Homo sapiens
ccctcccaaagtgct

SEQ ID NO: 487571 - DNA, 15 bp, Homo sapiens
accctcccaaagtgc

SEQ ID NO: 487572 - DNA, 15 bp, Homo sapiens
caccctcccaaagtg

SEQ ID NO: 487573 - DNA, 15 bp, Homo sapiens
tcaccctcccaaagt

SEQ ID NO: 487574 - DNA, 15 bp, Homo sapiens
ctcaccctcccaaag

SEQ ID NO: 487575 - DNA, 15 bp, Homo sapiens
cctcaccctcccaaa

SEQ ID NO: 487576 - DNA, 15 bp, Homo sapiens
gcctcaccctcccaa

SEQ ID NO: 487577 - DNA, 15 bp, Homo sapiens
tgcctcaccctccca

SEQ ID NO: 487578 - DNA, 15 bp, Homo sapiens
ctgcctcaccctccc

SEQ ID NO: 487579 - DNA, 15 bp, Homo sapiens
tctgcctcaccctcc

SEQ ID NO: 487580 - DNA, 15 bp, Homo sapiens
atctgcctcaccctc

SEQ ID NO: 487581 - DNA, 15 bp, Homo sapiens
catctgcctcaccct

SEQ ID NO: 487582 - DNA, 15 bp, Homo sapiens
ccatctgcctcaccc

SEQ ID NO: 487583 - DNA, 15 bp, Homo sapiens
tccatctgcctcacc

SEQ ID NO: 487584 - DNA, 15 bp, Homo sapiens
atccatctgcctcac

SEQ ID NO: 487585 - DNA, 15 bp, Homo sapiens
gatccatctgcctca

SEQ ID NO: 487586 - DNA, 15 bp, Homo sapiens
aggtttcaccatgtt

SEQ ID NO: 487587 - DNA, 15 bp, Homo sapiens
gaggtttcaccatgt

SEQ ID NO: 487588 - DNA, 15 bp, Homo sapiens
tgaggtttcaccatg

SEQ ID NO: 487589 - DNA, 15 bp, Homo sapiens
atgaggtttcaccat

SEQ ID NO: 487590 - DNA, 15 bp, Homo sapiens
gatgaggtttcacca

SEQ ID NO: 487591 - DNA, 15 bp, Homo sapiens
agatgaggtttcacc

SEQ ID NO: 487592 - DNA, 15 bp, Homo sapiens
gagatgaggtttcac

SEQ ID NO: 487593 - DNA, 15 bp, Homo sapiens
agagatgaggtttca

SEQ ID NO: 487594 - DNA, 15 bp, Homo sapiens
tagagatgaggtttc

SEQ ID NO: 487595 - DNA, 15 bp, Homo sapiens
gtagagatgaggttt

SEQ ID NO: 487596 - DNA, 15 bp, Homo sapiens
agtagagatgaggtt

SEQ ID NO: 487597 - DNA, 15 bp, Homo sapiens
tagtagagatgaggt

SEQ ID NO: 487598 - DNA, 15 bp, Homo sapiens
ttagtagagatgagg

SEQ ID NO: 487599 - DNA, 15 bp, Homo sapiens
tttagtagagatgag

SEQ ID NO: 487600 - DNA, 15 bp, Homo sapiens
ttttagtagagatga

SEQ ID NO: 487601 - DNA, 15 bp, Homo sapiens
attttagtagagatg

SEQ ID NO: 487602 - DNA, 15 bp, Homo sapiens
aattttagtagagat

SEQ ID NO: 487603 - DNA, 15 bp, Homo sapiens
taattttagtagaga

SEQ ID NO: 487604 - DNA, 15 bp, Homo sapiens
gtaattttagtagag

SEQ ID NO: 487605 - DNA, 15 bp, Homo sapiens
tgtaattttagtaga

SEQ ID NO: 487606 - DNA, 15 bp, Homo sapiens
ttgtaattttagtag

SEQ ID NO: 487607 - DNA, 15 bp, Homo sapiens
tttgtaattttagta

SEQ ID NO: 487608 - DNA, 15 bp, Homo sapiens
ttttgtaattttagt

SEQ ID NO: 487609 - DNA, 15 bp, Homo sapiens
tttttgtaattttag

SEQ ID NO: 487610 - DNA, 15 bp, Homo sapiens
ttttttgtaatttta

SEQ ID NO: 487611 - DNA, 15 bp, Homo sapiens
tttttttgtaatttt

SEQ ID NO: 487612 - DNA, 15 bp, Homo sapiens
ttttttttgtaattt

SEQ ID NO: 487613 - DNA, 15 bp, Homo sapiens
tttttttttgtaatt

SEQ ID NO: 487614 - DNA, 15 bp, Homo sapiens
ttttttttttgtaat

SEQ ID NO: 487615 - DNA, 15 bp, Homo sapiens
attttttttttgtaa

SEQ ID NO: 487616 - DNA, 15 bp, Homo sapiens
aattttttttttgta

SEQ ID NO: 487617 - DNA, 15 bp, Homo sapiens
taattttttttttgt

SEQ ID NO: 487618 - DNA, 15 bp, Homo sapiens
ctaattttttttttg

SEQ ID NO: 487619 - DNA, 15 bp, Homo sapiens
tagctaatttttttt

SEQ ID NO: 487620 - DNA, 15 bp, Homo sapiens
ctagctaattttttt

SEQ ID NO: 487621 - DNA, 15 bp, Homo sapiens
cctagctaatttttt

SEQ ID NO: 487622 - DNA, 15 bp, Homo sapiens
gcctagctaattttt

SEQ ID NO: 487623 - DNA, 15 bp, Homo sapiens
tgcctagctaatttt

SEQ ID NO: 487624 - DNA, 15 bp, Homo sapiens
atgcctagctaattt

SEQ ID NO: 487625 - DNA, 15 bp, Homo sapiens
catgcctagctaatt

SEQ ID NO: 487626 - DNA, 15 bp, Homo sapiens
ccatgcctagctaat

SEQ ID NO: 487627 - DNA, 15 bp, Homo sapiens
accatgcctagctaa

SEQ ID NO: 487628 - DNA, 15 bp, Homo sapiens
caccatgcctagcta

SEQ ID NO: 487629 - DNA, 15 bp, Homo sapiens
ccaccatgcctagct

SEQ ID NO: 487630 - DNA, 15 bp, Homo sapiens
gccaccatgcctagc

SEQ ID NO: 487631 - DNA, 15 bp, Homo sapiens
tgccaccatgcctag

SEQ ID NO: 487632 - DNA, 15 bp, Homo sapiens
ctgccaccatgccta

SEQ ID NO: 487633 - DNA, 15 bp, Homo sapiens
tctgccaccatgcct

SEQ ID NO: 487634 - DNA, 15 bp, Homo sapiens
atctgccaccatgcc

SEQ ID NO: 487635 - DNA, 15 bp, Homo sapiens
catctgccaccatgc

SEQ ID NO: 487636 - DNA, 15 bp, Homo sapiens
gcatctgccaccatg

SEQ ID NO: 487637 - DNA, 15 bp, Homo sapiens
ggcatctgccaccat

SEQ ID NO: 487638 - DNA, 15 bp, Homo sapiens
aggcatctgccacca

SEQ ID NO: 487639 - DNA, 15 bp, Homo sapiens
caggcatctgccacc

SEQ ID NO: 487640 - DNA, 15 bp, Homo sapiens
acaggcatctgccac

SEQ ID NO: 487641 - DNA, 15 bp, Homo sapiens
tacaggcatctgcca

SEQ ID NO: 487642 - DNA, 15 bp, Homo sapiens
ttacaggcatctgcc

SEQ ID NO: 487643 - DNA, 15 bp, Homo sapiens
attacaggcatctgc

SEQ ID NO: 487644 - DNA, 15 bp, Homo sapiens
gattacaggcatctg

SEQ ID NO: 487645 - DNA, 15 bp, Homo sapiens
ggattacaggcatct

SEQ ID NO: 487646 - DNA, 15 bp, Homo sapiens
tggattacaggcatc

SEQ ID NO: 487647 - DNA, 15 bp, Homo sapiens
ctggattacaggcat

SEQ ID NO: 487648 - DNA, 15 bp, Homo sapiens
gctggattacaggca

SEQ ID NO: 487649 - DNA, 15 bp, Homo sapiens
agctggattacaggc

SEQ ID NO: 487650 - DNA, 15 bp, Homo sapiens
tagctggattacagg

SEQ ID NO: 487651 - DNA, 15 bp, Homo sapiens
gtagctggattacag

SEQ ID NO: 487652 - DNA, 15 bp, Homo sapiens
agtagctggattaca

SEQ ID NO: 487653 - DNA, 15 bp, Homo sapiens
gagtagctggattac

SEQ ID NO: 487654 - DNA, 15 bp, Homo sapiens
tgagtagctggatta

SEQ ID NO: 487655 - DNA, 15 bp, Homo sapiens
ctgagtagctggatt

SEQ ID NO: 487656 - DNA, 15 bp, Homo sapiens
cctgagtagctggat

SEQ ID NO: 487657 - DNA, 15 bp, Homo sapiens
tcctgagtagctgga

SEQ ID NO: 487658 - DNA, 15 bp, Homo sapiens
atcagcctcctgagt

SEQ ID NO: 487659 - DNA, 15 bp, Homo sapiens
catcagcctcctgag

SEQ ID NO: 487660 - DNA, 15 bp, Homo sapiens
tcatcagcctcctga

SEQ ID NO: 487661 - DNA, 15 bp, Homo sapiens
ttcatcagcctcctg

SEQ ID NO: 487662 - DNA, 15 bp, Homo sapiens
cttcatcagcctcct

SEQ ID NO: 487663 - DNA, 15 bp, Homo sapiens
ccttcatcagcctcc

SEQ ID NO: 487664 - DNA, 15 bp, Homo sapiens
tccttcatcagcctc

SEQ ID NO: 487665 - DNA, 15 bp, Homo sapiens
ctccttcatcagcct

SEQ ID NO: 487666 - DNA, 15 bp, Homo sapiens
tctccttcatcagcc

SEQ ID NO: 487667 - DNA, 15 bp, Homo sapiens
ttctccttcatcagc

SEQ ID NO: 487668 - DNA, 15 bp, Homo sapiens
attctccttcatcag

SEQ ID NO: 487669 - DNA, 15 bp, Homo sapiens
gattctccttcatca

SEQ ID NO: 487670 - DNA, 15 bp, Homo sapiens
tgattctccttcatc

SEQ ID NO: 487671 - DNA, 15 bp, Homo sapiens
gtgattctccttcat

SEQ ID NO: 487672 - DNA, 15 bp, Homo sapiens
agtgattctccttca

SEQ ID NO: 487673 - DNA, 15 bp, Homo sapiens
aagtgattctccttc

SEQ ID NO: 487674 - DNA, 15 bp, Homo sapiens
caagtgattctcctt

SEQ ID NO: 487675 - DNA, 15 bp, Homo sapiens
ccagggttcaagtga

SEQ ID NO: 487676 - DNA, 15 bp, Homo sapiens
tccagggttcaagtg

SEQ ID NO: 487677 - DNA, 15 bp, Homo sapiens
ctccagggttcaagt

SEQ ID NO: 487678 - DNA, 15 bp, Homo sapiens
cctccagggttcaag

SEQ ID NO: 487679 - DNA, 15 bp, Homo sapiens
gcctccagggttcaa

SEQ ID NO: 487680 - DNA, 15 bp, Homo sapiens
tgcctccagggttca

SEQ ID NO: 487681 - DNA, 15 bp, Homo sapiens
ctgcctccagggttc

SEQ ID NO: 487682 - DNA, 15 bp, Homo sapiens
tctgcctccagggtt

SEQ ID NO: 487683 - DNA, 15 bp, Homo sapiens
ctctgcctccagggt

SEQ ID NO: 487684 - DNA, 15 bp, Homo sapiens
cctctgcctccaggg

SEQ ID NO: 487685 - DNA, 15 bp, Homo sapiens
acctctgcctccagg

SEQ ID NO: 487686 - DNA, 15 bp, Homo sapiens
aacctctgcctccag

SEQ ID NO: 487687 - DNA, 15 bp, Homo sapiens
caacctctgcctcca

SEQ ID NO: 487688 - DNA, 15 bp, Homo sapiens
acaacctctgcctcc

SEQ ID NO: 487689 - DNA, 15 bp, Homo sapiens
tacaacctctgcctc

SEQ ID NO: 487690 - DNA, 15 bp, Homo sapiens
ctacaacctctgcct

SEQ ID NO: 487691 - DNA, 15 bp, Homo sapiens
tctacaacctctgcc

SEQ ID NO: 487692 - DNA, 15 bp, Homo sapiens
ctctacaacctctgc

SEQ ID NO: 487693 - DNA, 15 bp, Homo sapiens
tctctacaacctctg

SEQ ID NO: 487694 - DNA, 15 bp, Homo sapiens
ctctctacaacctct

SEQ ID NO: 487695 - DNA, 15 bp, Homo sapiens
gctctctacaacctc

SEQ ID NO: 487696 - DNA, 15 bp, Homo sapiens
ggctctctacaacct

SEQ ID NO: 487697 - DNA, 15 bp, Homo sapiens
tggctctctacaacc

SEQ ID NO: 487698 - DNA, 15 bp, Homo sapiens
ttggctctctacaac

SEQ ID NO: 487699 - DNA, 15 bp, Homo sapiens
cttggctctctacaa

SEQ ID NO: 487700 - DNA, 15 bp, Homo sapiens
tcttggctctctaca

SEQ ID NO: 487701 - DNA, 15 bp, Homo sapiens
atcttggctctctac

SEQ ID NO: 487702 - DNA, 15 bp, Homo sapiens
catcttggctctcta

SEQ ID NO: 487703 - DNA, 15 bp, Homo sapiens
ccatcttggctctct

SEQ ID NO: 487704 - DNA, 15 bp, Homo sapiens
gccatcttggctctc

SEQ ID NO: 487705 - DNA, 15 bp, Homo sapiens
cgccatcttggctct

SEQ ID NO: 487706 - DNA, 15 bp, Homo sapiens
gcgccatcttggctc

SEQ ID NO: 487707 - DNA, 15 bp, Homo sapiens
agcgccatcttggct

SEQ ID NO: 487708 - DNA, 15 bp, Homo sapiens
tagcgccatcttggc

SEQ ID NO: 487709 - DNA, 15 bp, Homo sapiens
gtagcgccatcttgg

SEQ ID NO: 487710 - DNA, 15 bp, Homo sapiens
agtagcgccatcttg

SEQ ID NO: 487711 - DNA, 15 bp, Homo sapiens
cagtagcgccatctt

SEQ ID NO: 487712 - DNA, 15 bp, Homo sapiens
gcagtagcgccatct

SEQ ID NO: 487713 - DNA, 15 bp, Homo sapiens
tgcagtagcgccatc

SEQ ID NO: 487714 - DNA, 15 bp, Homo sapiens
gtgcagtagcgccat

SEQ ID NO: 487715 - DNA, 15 bp, Homo sapiens
agtgcagtagcgcca

SEQ ID NO: 487716 - DNA, 15 bp, Homo sapiens
gagtgcagtagcgcc

SEQ ID NO: 487717 - DNA, 15 bp, Homo sapiens
ggagtgcagtagcgc

SEQ ID NO: 487718 - DNA, 15 bp, Homo sapiens
tggagtgcagtagcg

SEQ ID NO: 487719 - DNA, 15 bp, Homo sapiens
ttggagtgcagtagc

SEQ ID NO: 487720 - DNA, 15 bp, Homo sapiens
gttggagtgcagtag

SEQ ID NO: 487721 - DNA, 15 bp, Homo sapiens
ggttggagtgcagta

SEQ ID NO: 487722 - DNA, 15 bp, Homo sapiens
aggttggagtgcagt

SEQ ID NO: 487723 - DNA, 15 bp, Homo sapiens
caggttggagtgcag

SEQ ID NO: 487724 - DNA, 15 bp, Homo sapiens
ccaggttggagtgca

SEQ ID NO: 487725 - DNA, 15 bp, Homo sapiens
cccaggttggagtgc

SEQ ID NO: 487726 - DNA, 15 bp, Homo sapiens
gcccaggttggagtg

SEQ ID NO: 487727 - DNA, 15 bp, Homo sapiens
cgcccaggttggagt

SEQ ID NO: 487728 - DNA, 15 bp, Homo sapiens
tcgcccaggttggag

SEQ ID NO: 487729 - DNA, 15 bp, Homo sapiens
ttcgcccaggttgga

SEQ ID NO: 487730 - DNA, 15 bp, Homo sapiens
tttcgcccaggttgg

SEQ ID NO: 487731 - DNA, 15 bp, Homo sapiens
ctttcgcccaggttg

SEQ ID NO: 487732 - DNA, 15 bp, Homo sapiens
tctttcgcccaggtt

SEQ ID NO: 487733 - DNA, 15 bp, Homo sapiens
ctctttcgcccaggt

SEQ ID NO: 487734 - DNA, 15 bp, Homo sapiens
tctctttcgcccagg

SEQ ID NO: 487735 - DNA, 15 bp, Homo sapiens
ctctctttcgcccag

SEQ ID NO: 487736 - DNA, 15 bp, Homo sapiens
gctctctttcgccca

SEQ ID NO: 487737 - DNA, 15 bp, Homo sapiens
tgctctctttcgccc

SEQ ID NO: 487738 - DNA, 15 bp, Homo sapiens
ttgctctctttcgcc

SEQ ID NO: 487739 - DNA, 15 bp, Homo sapiens
cttgctctctttcgc

SEQ ID NO: 487740 - DNA, 15 bp, Homo sapiens
tcttgctctctttcg

SEQ ID NO: 487741 - DNA, 15 bp, Homo sapiens
gtcttgctctctttc

SEQ ID NO: 487742 - DNA, 15 bp, Homo sapiens
agtcttgctctcttt

SEQ ID NO: 487743 - DNA, 15 bp, Homo sapiens
gagtcttgctctctt

SEQ ID NO: 487744 - DNA, 15 bp, Homo sapiens
ggagtcttgctctct

SEQ ID NO: 487745 - DNA, 15 bp, Homo sapiens
cggagtcttgctctc

SEQ ID NO: 487746 - DNA, 15 bp, Homo sapiens
tcttttttttttttg

SEQ ID NO: 487747 - DNA, 15 bp, Homo sapiens
ttttgtctttttttt

SEQ ID NO: 487748 - DNA, 15 bp, Homo sapiens
tttttgtcttttttt

SEQ ID NO: 487749 - DNA, 15 bp, Homo sapiens
atttttgtctttttt

SEQ ID NO: 487750 - DNA, 15 bp, Homo sapiens
aatttttgtcttttt

SEQ ID NO: 487751 - DNA, 15 bp, Homo sapiens
taatttttgtctttt

SEQ ID NO: 487752 - DNA, 15 bp, Homo sapiens
ctaatttttgtcttt

SEQ ID NO: 487753 - DNA, 15 bp, Homo sapiens
gctaatttttgtctt

SEQ ID NO: 487754 - DNA, 15 bp, Homo sapiens
ggctaatttttgtct

SEQ ID NO: 487755 - DNA, 15 bp, Homo sapiens
tggctaatttttgtc

SEQ ID NO: 487756 - DNA, 15 bp, Homo sapiens
caccatgcctggcta

SEQ ID NO: 487757 - DNA, 15 bp, Homo sapiens
ccaccatgcctggct

SEQ ID NO: 487758 - DNA, 15 bp, Homo sapiens
ggcaccaccatgcct

SEQ ID NO: 487759 - DNA, 15 bp, Homo sapiens
tggcaccaccatgcc

SEQ ID NO: 487760 - DNA, 15 bp, Homo sapiens
gtggcaccaccatgc

SEQ ID NO: 487761 - DNA, 15 bp, Homo sapiens
ggtggcaccaccatg

SEQ ID NO: 487762 - DNA, 15 bp, Homo sapiens
aggtggcaccaccat

SEQ ID NO: 487763 - DNA, 15 bp, Homo sapiens
caggtggcaccacca

SEQ ID NO: 487764 - DNA, 15 bp, Homo sapiens
acaggtggcaccacc

SEQ ID NO: 487765 - DNA, 15 bp, Homo sapiens
tacaggtggcaccac

SEQ ID NO: 487766 - DNA, 15 bp, Homo sapiens
ctacaggtggcacca

SEQ ID NO: 487767 - DNA, 15 bp, Homo sapiens
actacaggtggcacc

SEQ ID NO: 487768 - DNA, 15 bp, Homo sapiens
gactacaggtggcac

SEQ ID NO: 487769 - DNA, 15 bp, Homo sapiens
ggactacaggtggca

SEQ ID NO: 487770 - DNA, 15 bp, Homo sapiens
gggactacaggtggc

SEQ ID NO: 487771 - DNA, 15 bp, Homo sapiens
tgggactacaggtgg

SEQ ID NO: 487772 - DNA, 15 bp, Homo sapiens
aagcagctgggacta

SEQ ID NO: 487773 - DNA, 15 bp, Homo sapiens
caagcagctgggact

SEQ ID NO: 487774 - DNA, 15 bp, Homo sapiens
ccaagcagctgggac

SEQ ID NO: 487775 - DNA, 15 bp, Homo sapiens
gctcccaagcagctg

SEQ ID NO: 487776 - DNA, 15 bp, Homo sapiens
ggctcccaagcagct

SEQ ID NO: 487777 - DNA, 15 bp, Homo sapiens
aggctcccaagcagc

SEQ ID NO: 487778 - DNA, 15 bp, Homo sapiens
taggctcccaagcag

SEQ ID NO: 487779 - DNA, 15 bp, Homo sapiens
ttaggctcccaagca

SEQ ID NO: 487780 - DNA, 15 bp, Homo sapiens
cttaggctcccaagc

SEQ ID NO: 487781 - DNA, 15 bp, Homo sapiens
ccttaggctcccaag

SEQ ID NO: 487782 - DNA, 15 bp, Homo sapiens
gccttaggctcccaa

SEQ ID NO: 487783 - DNA, 15 bp, Homo sapiens
tgccttaggctccca

SEQ ID NO: 487784 - DNA, 15 bp, Homo sapiens
ctgccttaggctccc

SEQ ID NO: 487785 - DNA, 15 bp, Homo sapiens
cctgccttaggctcc

SEQ ID NO: 487786 - DNA, 15 bp, Homo sapiens
tcctgccttaggctc

SEQ ID NO: 487787 - DNA, 15 bp, Homo sapiens
ctcctgccttaggct

SEQ ID NO: 487788 - DNA, 15 bp, Homo sapiens
tctcctgccttaggc

SEQ ID NO: 487789 - DNA, 15 bp, Homo sapiens
ttctcctgccttagg

SEQ ID NO: 487790 - DNA, 15 bp, Homo sapiens
attctcctgccttag

SEQ ID NO: 487791 - DNA, 15 bp, Homo sapiens
gattctcctgcctta

SEQ ID NO: 487792 - DNA, 15 bp, Homo sapiens
cgattctcctgcctt

SEQ ID NO: 487793 - DNA, 15 bp, Homo sapiens
acgattctcctgcct

SEQ ID NO: 487794 - DNA, 15 bp, Homo sapiens
aacgattctcctgcc

SEQ ID NO: 487795 - DNA, 15 bp, Homo sapiens
aaacgattctcctgc

SEQ ID NO: 487796 - DNA, 15 bp, Homo sapiens
aaaacgattctcctg

SEQ ID NO: 487797 - DNA, 15 bp, Homo sapiens
caaaacgattctcct

SEQ ID NO: 487798 - DNA, 15 bp, Homo sapiens
tcaaaacgattctcc

SEQ ID NO: 487799 - DNA, 15 bp, Homo sapiens
gtcaaaacgattctc

SEQ ID NO: 487800 - DNA, 15 bp, Homo sapiens
ggtcaaaacgattct

SEQ ID NO: 487801 - DNA, 15 bp, Homo sapiens
aggtcaaaacgattc

SEQ ID NO: 487802 - DNA, 15 bp, Homo sapiens
caggtcaaaacgatt

SEQ ID NO: 487803 - DNA, 15 bp, Homo sapiens
ccaggtcaaaacgat

SEQ ID NO: 487804 - DNA, 15 bp, Homo sapiens
cccaggtcaaaacga

SEQ ID NO: 487805 - DNA, 15 bp, Homo sapiens
tcccaggtcaaaacg

SEQ ID NO: 487806 - DNA, 15 bp, Homo sapiens
ctcccaggtcaaaac

SEQ ID NO: 487807 - DNA, 15 bp, Homo sapiens
actcccaggtcaaaa

SEQ ID NO: 487808 - DNA, 15 bp, Homo sapiens
tactcccaggtcaaa

SEQ ID NO: 487809 - DNA, 15 bp, Homo sapiens
ctactcccaggtcaa

SEQ ID NO: 487810 - DNA, 15 bp, Homo sapiens
cctactcccaggtca

SEQ ID NO: 487811 - DNA, 15 bp, Homo sapiens
tcctactcccaggtc

SEQ ID NO: 487812 - DNA, 15 bp, Homo sapiens
ctcctactcccaggt

SEQ ID NO: 487813 - DNA, 15 bp, Homo sapiens
cctcctactcccagg

SEQ ID NO: 487814 - DNA, 15 bp, Homo sapiens
acctcctactcccag

SEQ ID NO: 487815 - DNA, 15 bp, Homo sapiens
aacctcctactccca

SEQ ID NO: 487816 - DNA, 15 bp, Homo sapiens
caacctcctactccc

SEQ ID NO: 487817 - DNA, 15 bp, Homo sapiens
gcaacctcctactcc

SEQ ID NO: 487818 - DNA, 15 bp, Homo sapiens
cgcaacctcctactc

SEQ ID NO: 487819 - DNA, 15 bp, Homo sapiens
ccgcaacctcctact

SEQ ID NO: 487820 - DNA, 15 bp, Homo sapiens
accgcaacctcctac

SEQ ID NO: 487821 - DNA, 15 bp, Homo sapiens
taccgcaacctccta

SEQ ID NO: 487822 - DNA, 15 bp, Homo sapiens
ttaccgcaacctcct

SEQ ID NO: 487823 - DNA, 15 bp, Homo sapiens
gttaccgcaacctcc

SEQ ID NO: 487824 - DNA, 15 bp, Homo sapiens
ggttaccgcaacctc

SEQ ID NO: 487825 - DNA, 15 bp, Homo sapiens
cggttaccgcaacct

SEQ ID NO: 487826 - DNA, 15 bp, Homo sapiens
tcggttaccgcaacc

SEQ ID NO: 487827 - DNA, 15 bp, Homo sapiens
ctcggttaccgcaac

SEQ ID NO: 487828 - DNA, 15 bp, Homo sapiens
tctcggttaccgcaa

SEQ ID NO: 487829 - DNA, 15 bp, Homo sapiens
atctcggttaccgca

SEQ ID NO: 487830 - DNA, 15 bp, Homo sapiens
aatctcggttaccgc

SEQ ID NO: 487831 - DNA, 15 bp, Homo sapiens
caatctcggttaccg

SEQ ID NO: 487832 - DNA, 15 bp, Homo sapiens
acaatctcggttacc

SEQ ID NO: 487833 - DNA, 15 bp, Homo sapiens
cacaatctcggttac

SEQ ID NO: 487834 - DNA, 15 bp, Homo sapiens
gcacaatctcggtta

SEQ ID NO: 487835 - DNA, 15 bp, Homo sapiens
ggcacaatctcggtt

SEQ ID NO: 487836 - DNA, 15 bp, Homo sapiens
tggcacaatctcggt

SEQ ID NO: 487837 - DNA, 15 bp, Homo sapiens
gtggcacaatctcgg

SEQ ID NO: 487838 - DNA, 15 bp, Homo sapiens
agtggcacaatctcg

SEQ ID NO: 487839 - DNA, 15 bp, Homo sapiens
gcagtggcacaatct

SEQ ID NO: 487840 - DNA, 15 bp, Homo sapiens
tgcagtggcacaatc

SEQ ID NO: 487841 - DNA, 15 bp, Homo sapiens
gtgcagtggcacaat

SEQ ID NO: 487842 - DNA, 15 bp, Homo sapiens
agtgcagtggcacaa

SEQ ID NO: 487843 - DNA, 15 bp, Homo sapiens
aagtgcagtggcaca

SEQ ID NO: 487844 - DNA, 15 bp, Homo sapiens
caagtgcagtggcac

SEQ ID NO: 487845 - DNA, 15 bp, Homo sapiens
tcaagtgcagtggca

SEQ ID NO: 487846 - DNA, 15 bp, Homo sapiens
ctcaagtgcagtggc

SEQ ID NO: 487847 - DNA, 15 bp, Homo sapiens
gctcaagtgcagtgg

SEQ ID NO: 487848 - DNA, 15 bp, Homo sapiens
ggctcaagtgcagtg

SEQ ID NO: 487849 - DNA, 15 bp, Homo sapiens
aggctcaagtgcagt

SEQ ID NO: 487850 - DNA, 15 bp, Homo sapiens
caggctcaagtgcag

SEQ ID NO: 487851 - DNA, 15 bp, Homo sapiens
ccaggctcaagtgca

SEQ ID NO: 487852 - DNA, 15 bp, Homo sapiens
cccaggctcaagtgc

SEQ ID NO: 487853 - DNA, 15 bp, Homo sapiens
gcccaggctcaagtg

SEQ ID NO: 487854 - DNA, 15 bp, Homo sapiens
tgcccaggctcaagt

SEQ ID NO: 487855 - DNA, 15 bp, Homo sapiens
ttgcccaggctcaag

SEQ ID NO: 487856 - DNA, 15 bp, Homo sapiens
gttgcccaggctcaa

SEQ ID NO: 487857 - DNA, 15 bp, Homo sapiens
tgttgcccaggctca

SEQ ID NO: 487858 - DNA, 15 bp, Homo sapiens
ctgttgcccaggctc

SEQ ID NO: 487859 - DNA, 15 bp, Homo sapiens
gagtctcactctgtt

SEQ ID NO: 487860 - DNA, 15 bp, Homo sapiens
gttttgagacagagt

SEQ ID NO: 487861 - DNA, 15 bp, Homo sapiens
tgttttgagacagag

SEQ ID NO: 487862 - DNA, 15 bp, Homo sapiens
ttgttttgagacaga

SEQ ID NO: 487863 - DNA, 15 bp, Homo sapiens
attgttttgagacag

SEQ ID NO: 487864 - DNA, 15 bp, Homo sapiens
tattgttttgagaca

SEQ ID NO: 487865 - DNA, 15 bp, Homo sapiens
ttattgttttgagac

SEQ ID NO: 487866 - DNA, 15 bp, Homo sapiens
cttattgttttgaga

SEQ ID NO: 487867 - DNA, 15 bp, Homo sapiens
tcttattgttttgag

SEQ ID NO: 487868 - DNA, 15 bp, Homo sapiens
ttcttattgttttga

SEQ ID NO: 487869 - DNA, 15 bp, Homo sapiens
gttcttattgttttg

SEQ ID NO: 487870 - DNA, 15 bp, Homo sapiens
tgttcttattgtttt

SEQ ID NO: 487871 - DNA, 15 bp, Homo sapiens
ttgttcttattgttt

SEQ ID NO: 487872 - DNA, 15 bp, Homo sapiens
gttgttcttattgtt

SEQ ID NO: 487873 - DNA, 15 bp, Homo sapiens
tgttgttcttattgt

SEQ ID NO: 487874 - DNA, 15 bp, Homo sapiens
ctgttgttcttattg

SEQ ID NO: 487875 - DNA, 15 bp, Homo sapiens
gctgttgttcttatt

SEQ ID NO: 487876 - DNA, 15 bp, Homo sapiens
tgctgttgttcttat

SEQ ID NO: 487877 - DNA, 15 bp, Homo sapiens
ttgctgttgttctta

SEQ ID NO: 487878 - DNA, 15 bp, Homo sapiens
gttgctgttgttctt

SEQ ID NO: 487879 - DNA, 15 bp, Homo sapiens
tgttgctgttgttct

SEQ ID NO: 487880 - DNA, 15 bp, Homo sapiens
ttgttgctgttgttc

SEQ ID NO: 487881 - DNA, 15 bp, Homo sapiens
tttgttgctgttgtt

SEQ ID NO: 487882 - DNA, 15 bp, Homo sapiens
ttttgttgctgttgt

SEQ ID NO: 487883 - DNA, 15 bp, Homo sapiens
cttttgttgctgttg

SEQ ID NO: 487884 - DNA, 15 bp, Homo sapiens
tcttttgttgctgtt

SEQ ID NO: 487885 - DNA, 15 bp, Homo sapiens
ctcttttgttgctgt

SEQ ID NO: 487886 - DNA, 15 bp, Homo sapiens
tctcttttgttgctg

SEQ ID NO: 487887 - DNA, 15 bp, Homo sapiens
ctctcttttgttgct

SEQ ID NO: 487888 - DNA, 15 bp, Homo sapiens
tctctcttttgttgc

SEQ ID NO: 487889 - DNA, 15 bp, Homo sapiens
ctctctcttttgttg

SEQ ID NO: 487890 - DNA, 15 bp, Homo sapiens
tctctctcttttgtt

SEQ ID NO: 487891 - DNA, 15 bp, Homo sapiens
gtctctctcttttgt

SEQ ID NO: 487892 - DNA, 15 bp, Homo sapiens
ggtctctctcttttg

SEQ ID NO: 487893 - DNA, 15 bp, Homo sapiens
tggtctctctctttt

SEQ ID NO: 487894 - DNA, 15 bp, Homo sapiens
atggtctctctcttt

SEQ ID NO: 487895 - DNA, 15 bp, Homo sapiens
catggtctctctctt

SEQ ID NO: 487896 - DNA, 15 bp, Homo sapiens
gcatggtctctctct

SEQ ID NO: 487897 - DNA, 15 bp, Homo sapiens
ggcatggtctctctc

SEQ ID NO: 487898 - DNA, 15 bp, Homo sapiens
aggcatggtctctct

SEQ ID NO: 487899 - DNA, 15 bp, Homo sapiens
aaggcatggtctctc

SEQ ID NO: 487900 - DNA, 15 bp, Homo sapiens
caaggcatggtctct

SEQ ID NO: 487901 - DNA, 15 bp, Homo sapiens
gcaaggcatggtctc

SEQ ID NO: 487902 - DNA, 15 bp, Homo sapiens
agcaaggcatggtct

SEQ ID NO: 487903 - DNA, 15 bp, Homo sapiens
gagcaaggcatggtc

SEQ ID NO: 487904 - DNA, 15 bp, Homo sapiens
ggagcaaggcatggt

SEQ ID NO: 487905 - DNA, 15 bp, Homo sapiens
tggagcaaggcatgg

SEQ ID NO: 487906 - DNA, 15 bp, Homo sapiens
ctggagcaaggcatg

SEQ ID NO: 487907 - DNA, 15 bp, Homo sapiens
cctggagcaaggcat

SEQ ID NO: 487908 - DNA, 15 bp, Homo sapiens
acctggagcaaggca

SEQ ID NO: 487909 - DNA, 15 bp, Homo sapiens
gacctggagcaaggc

SEQ ID NO: 487910 - DNA, 15 bp, Homo sapiens
agacctggagcaagg

SEQ ID NO: 487911 - DNA, 15 bp, Homo sapiens
gagacctggagcaag

SEQ ID NO: 487912 - DNA, 15 bp, Homo sapiens
agagacctggagcaa

SEQ ID NO: 487913 - DNA, 15 bp, Homo sapiens
aagagacctggagca

SEQ ID NO: 487914 - DNA, 15 bp, Homo sapiens
taagagacctggagc

SEQ ID NO: 487915 - DNA, 15 bp, Homo sapiens
ctaagagacctggag

SEQ ID NO: 487916 - DNA, 15 bp, Homo sapiens
gctaagagacctgga

SEQ ID NO: 487917 - DNA, 15 bp, Homo sapiens
agctaagagacctgg

SEQ ID NO: 487918 - DNA, 15 bp, Homo sapiens
tagctaagagacctg

SEQ ID NO: 487919 - DNA, 15 bp, Homo sapiens
atagctaagagacct

SEQ ID NO: 487920 - DNA, 15 bp, Homo sapiens
aatagctaagagacc

SEQ ID NO: 487921 - DNA, 15 bp, Homo sapiens
caatagctaagagac

SEQ ID NO: 487922 - DNA, 15 bp, Homo sapiens
tcaatagctaagaga

SEQ ID NO: 487923 - DNA, 15 bp, Homo sapiens
ttcaatagctaagag

SEQ ID NO: 487924 - DNA, 15 bp, Homo sapiens
cttcaatagctaaga

SEQ ID NO: 487925 - DNA, 15 bp, Homo sapiens
tcttcaatagctaag

SEQ ID NO: 487926 - DNA, 15 bp, Homo sapiens
atcttcaatagctaa

SEQ ID NO: 487927 - DNA, 15 bp, Homo sapiens
catcttcaatagcta

SEQ ID NO: 487928 - DNA, 15 bp, Homo sapiens
acatcttcaatagct

SEQ ID NO: 487929 - DNA, 15 bp, Homo sapiens
tacatcttcaatagc

SEQ ID NO: 487930 - DNA, 15 bp, Homo sapiens
gtacatcttcaatag

SEQ ID NO: 487931 - DNA, 15 bp, Homo sapiens
ggtacatcttcaata

SEQ ID NO: 487932 - DNA, 15 bp, Homo sapiens
aggtacatcttcaat

SEQ ID NO: 487933 - DNA, 15 bp, Homo sapiens
caggtacatcttcaa

SEQ ID NO: 487934 - DNA, 15 bp, Homo sapiens
ccaggtacatcttca

SEQ ID NO: 487935 - DNA, 15 bp, Homo sapiens
tccaggtacatcttc

SEQ ID NO: 487936 - DNA, 15 bp, Homo sapiens
gtccaggtacatctt

SEQ ID NO: 487937 - DNA, 15 bp, Homo sapiens
ggtccaggtacatct

SEQ ID NO: 487938 - DNA, 15 bp, Homo sapiens
gggtccaggtacatc

SEQ ID NO: 487939 - DNA, 15 bp, Homo sapiens
tgggtccaggtacat

SEQ ID NO: 487940 - DNA, 15 bp, Homo sapiens
ctgggtccaggtaca

SEQ ID NO: 487941 - DNA, 15 bp, Homo sapiens
cctgggtccaggtac

SEQ ID NO: 487942 - DNA, 15 bp, Homo sapiens
acctgggtccaggta

SEQ ID NO: 487943 - DNA, 15 bp, Homo sapiens
gacctgggtccaggt

SEQ ID NO: 487944 - DNA, 15 bp, Homo sapiens
agacctgggtccagg

SEQ ID NO: 487945 - DNA, 15 bp, Homo sapiens
gagacctgggtccag

SEQ ID NO: 487946 - DNA, 15 bp, Homo sapiens
ggagacctgggtcca

SEQ ID NO: 487947 - DNA, 15 bp, Homo sapiens
cggagacctgggtcc

SEQ ID NO: 487948 - DNA, 15 bp, Homo sapiens
ccggagacctgggtc

SEQ ID NO: 487949 - DNA, 15 bp, Homo sapiens
accggagacctgggt

SEQ ID NO: 487950 - DNA, 15 bp, Homo sapiens
gaccggagacctggg

SEQ ID NO: 487951 - DNA, 15 bp, Homo sapiens
agaccggagacctgg

SEQ ID NO: 487952 - DNA, 15 bp, Homo sapiens
aagaccggagacctg

SEQ ID NO: 487953 - DNA, 15 bp, Homo sapiens
gaagaccggagacct

SEQ ID NO: 487954 - DNA, 15 bp, Homo sapiens
agaagaccggagacc

SEQ ID NO: 487955 - DNA, 15 bp, Homo sapiens
tagaagaccggagac

SEQ ID NO: 487956 - DNA, 15 bp, Homo sapiens
ctagaagaccggaga

SEQ ID NO: 487957 - DNA, 15 bp, Homo sapiens
actagaagaccggag

SEQ ID NO: 487958 - DNA, 15 bp, Homo sapiens
aactagaagaccgga

SEQ ID NO: 487959 - DNA, 15 bp, Homo sapiens
caactagaagaccgg

SEQ ID NO: 487960 - DNA, 15 bp, Homo sapiens
tcaactagaagaccg

SEQ ID NO: 487961 - DNA, 15 bp, Homo sapiens
ttcaactagaagacc

SEQ ID NO: 487962 - DNA, 15 bp, Homo sapiens
cttcaactagaagac

SEQ ID NO: 487963 - DNA, 15 bp, Homo sapiens
gcttcaactagaaga

SEQ ID NO: 487964 - DNA, 15 bp, Homo sapiens
tgcttcaactagaag

SEQ ID NO: 487965 - DNA, 15 bp, Homo sapiens
ttgcttcaactagaa

SEQ ID NO: 487966 - DNA, 15 bp, Homo sapiens
attgcttcaactaga

SEQ ID NO: 487967 - DNA, 15 bp, Homo sapiens
aattgcttcaactag

SEQ ID NO: 487968 - DNA, 15 bp, Homo sapiens
caattgcttcaacta

SEQ ID NO: 487969 - DNA, 15 bp, Homo sapiens
acaattgcttcaact

SEQ ID NO: 487970 - DNA, 15 bp, Homo sapiens
tacaattgcttcaac

SEQ ID NO: 487971 - DNA, 15 bp, Homo sapiens
gtacaattgcttcaa

SEQ ID NO: 487972 - DNA, 15 bp, Homo sapiens
agtacaattgcttca

SEQ ID NO: 487973 - DNA, 15 bp, Homo sapiens
cagtacaattgcttc

SEQ ID NO: 487974 - DNA, 15 bp, Homo sapiens
gcagtacaattgctt

SEQ ID NO: 487975 - DNA, 15 bp, Homo sapiens
ggcagtacaattgct

SEQ ID NO: 487976 - DNA, 15 bp, Homo sapiens
aggcagtacaattgc

SEQ ID NO: 487977 - DNA, 15 bp, Homo sapiens
aaggcagtacaattg

SEQ ID NO: 487978 - DNA, 15 bp, Homo sapiens
taaggcagtacaatt

SEQ ID NO: 487979 - DNA, 15 bp, Homo sapiens
gtaaggcagtacaat

SEQ ID NO: 487980 - DNA, 15 bp, Homo sapiens
tgtaaggcagtacaa

SEQ ID NO: 487981 - DNA, 15 bp, Homo sapiens
ttgtaaggcagtaca

SEQ ID NO: 487982 - DNA, 15 bp, Homo sapiens
tttgtaaggcagtac

SEQ ID NO: 487983 - DNA, 15 bp, Homo sapiens
ctttgtaaggcagta

SEQ ID NO: 487984 - DNA, 15 bp, Homo sapiens
actttgtaaggcagt

SEQ ID NO: 487985 - DNA, 15 bp, Homo sapiens
gactttgtaaggcag

SEQ ID NO: 487986 - DNA, 15 bp, Homo sapiens
tgactttgtaaggca

SEQ ID NO: 487987 - DNA, 15 bp, Homo sapiens
gtgactttgtaaggc

SEQ ID NO: 487988 - DNA, 15 bp, Homo sapiens
tgtgactttgtaagg

SEQ ID NO: 487989 - DNA, 15 bp, Homo sapiens
atgtgactttgtaag

SEQ ID NO: 487990 - DNA, 15 bp, Homo sapiens
aatgtgactttgtaa

SEQ ID NO: 487991 - DNA, 15 bp, Homo sapiens
gaatgtgactttgta

SEQ ID NO: 487992 - DNA, 15 bp, Homo sapiens
agaatgtgactttgt

SEQ ID NO: 487993 - DNA, 15 bp, Homo sapiens
gagaatgtgactttg

SEQ ID NO: 487994 - DNA, 15 bp, Homo sapiens
agagaatgtgacttt

SEQ ID NO: 487995 - DNA, 15 bp, Homo sapiens
aagagaatgtgactt

SEQ ID NO: 487996 - DNA, 15 bp, Homo sapiens
aaagagaatgtgact

SEQ ID NO: 487997 - DNA, 15 bp, Homo sapiens
caaagagaatgtgac

SEQ ID NO: 487998 - DNA, 15 bp, Homo sapiens
ccaaagagaatgtga

SEQ ID NO: 487999 - DNA, 15 bp, Homo sapiens
accaaagagaatgtg

SEQ ID NO: 488000 - DNA, 15 bp, Homo sapiens
caccaaagagaatgt

SEQ ID NO: 488001 - DNA, 15 bp, Homo sapiens
gcaccaaagagaatg

SEQ ID NO: 488002 - DNA, 15 bp, Homo sapiens
agcaccaaagagaat

SEQ ID NO: 488003 - DNA, 15 bp, Homo sapiens
aagcaccaaagagaa

SEQ ID NO: 488004 - DNA, 15 bp, Homo sapiens
aaagcaccaaagaga

SEQ ID NO: 488005 - DNA, 15 bp, Homo sapiens
aaaagcaccaaagag

SEQ ID NO: 488006 - DNA, 15 bp, Homo sapiens
aaaaagcaccaaaga

SEQ ID NO: 488007 - DNA, 15 bp, Homo sapiens
caaaaagcaccaaag

SEQ ID NO: 488008 - DNA, 15 bp, Homo sapiens
tcaaaaagcaccaaa

SEQ ID NO: 488009 - DNA, 15 bp, Homo sapiens
atcaaaaagcaccaa

SEQ ID NO: 488010 - DNA, 15 bp, Homo sapiens
aatcaaaaagcacca

SEQ ID NO: 488011 - DNA, 15 bp, Homo sapiens
caatcaaaaagcacc

SEQ ID NO: 488012 - DNA, 15 bp, Homo sapiens
tcaatcaaaaagcac

SEQ ID NO: 488013 - DNA, 15 bp, Homo sapiens
gtcaatcaaaaagca

SEQ ID NO: 488014 - DNA, 15 bp, Homo sapiens
cgtcaatcaaaaagc

SEQ ID NO: 488015 - DNA, 15 bp, Homo sapiens
acgtcaatcaaaaag

SEQ ID NO: 488016 - DNA, 15 bp, Homo sapiens
tacgtcaatcaaaaa

SEQ ID NO: 488017 - DNA, 15 bp, Homo sapiens
atacgtcaatcaaaa

SEQ ID NO: 488018 - DNA, 15 bp, Homo sapiens
aatacgtcaatcaaa

SEQ ID NO: 488019 - DNA, 15 bp, Homo sapiens
aaatacgtcaatcaa

SEQ ID NO: 488020 - DNA, 15 bp, Homo sapiens
taaatacgtcaatca

SEQ ID NO: 488021 - DNA, 15 bp, Homo sapiens
ataaatacgtcaatc

SEQ ID NO: 488022 - DNA, 15 bp, Homo sapiens
gataaatacgtcaat

SEQ ID NO: 488023 - DNA, 15 bp, Homo sapiens
ggataaatacgtcaa

SEQ ID NO: 488024 - DNA, 15 bp, Homo sapiens
tggataaatacgtca

SEQ ID NO: 488025 - DNA, 15 bp, Homo sapiens
ttggataaatacgtc

SEQ ID NO: 488026 - DNA, 15 bp, Homo sapiens
gttggataaatacgt

SEQ ID NO: 488027 - DNA, 15 bp, Homo sapiens
agttggataaatacg

SEQ ID NO: 488028 - DNA, 15 bp, Homo sapiens
tagttggataaatac

SEQ ID NO: 488029 - DNA, 15 bp, Homo sapiens
ctagttggataaata

SEQ ID NO: 488030 - DNA, 15 bp, Homo sapiens
tctagttggataaat

SEQ ID NO: 488031 - DNA, 15 bp, Homo sapiens
ttctagttggataaa

SEQ ID NO: 488032 - DNA, 15 bp, Homo sapiens
tttctagttggataa

SEQ ID NO: 488033 - DNA, 15 bp, Homo sapiens
ctttctagttggata

SEQ ID NO: 488034 - DNA, 15 bp, Homo sapiens
actttctagttggat

SEQ ID NO: 488035 - DNA, 15 bp, Homo sapiens
aactttctagttgga

SEQ ID NO: 488036 - DNA, 15 bp, Homo sapiens
taactttctagttgg

SEQ ID NO: 488037 - DNA, 15 bp, Homo sapiens
gtaactttctagttg

SEQ ID NO: 488038 - DNA, 15 bp, Homo sapiens
agtaactttctagtt

SEQ ID NO: 488039 - DNA, 15 bp, Homo sapiens
gagtaactttctagt

SEQ ID NO: 488040 - DNA, 15 bp, Homo sapiens
tgagtaactttctag

SEQ ID NO: 488041 - DNA, 15 bp, Homo sapiens
atgagtaactttcta

SEQ ID NO: 488042 - DNA, 15 bp, Homo sapiens
catgagtaactttct

SEQ ID NO: 488043 - DNA, 15 bp, Homo sapiens
gcatgagtaactttc

SEQ ID NO: 488044 - DNA, 15 bp, Homo sapiens
ggcatgagtaacttt

SEQ ID NO: 488045 - DNA, 15 bp, Homo sapiens
gggcatgagtaactt

SEQ ID NO: 488046 - DNA, 15 bp, Homo sapiens
agggcatgagtaact

SEQ ID NO: 488047 - DNA, 15 bp, Homo sapiens
gagggcatgagtaac

SEQ ID NO: 488048 - DNA, 15 bp, Homo sapiens
tgagggcatgagtaa

SEQ ID NO: 488049 - DNA, 15 bp, Homo sapiens
atgagggcatgagta

SEQ ID NO: 488050 - DNA, 15 bp, Homo sapiens
gatgagggcatgagt

SEQ ID NO: 488051 - DNA, 15 bp, Homo sapiens
ggatgagggcatgag

SEQ ID NO: 488052 - DNA, 15 bp, Homo sapiens
tggatgagggcatga

SEQ ID NO: 488053 - DNA, 15 bp, Homo sapiens
ttggatgagggcatg

SEQ ID NO: 488054 - DNA, 15 bp, Homo sapiens
tttggatgagggcat

SEQ ID NO: 488055 - DNA, 15 bp, Homo sapiens
ttttggatgagggca

SEQ ID NO: 488056 - DNA, 15 bp, Homo sapiens
tttttggatgagggc

SEQ ID NO: 488057 - DNA, 15 bp, Homo sapiens
atttttggatgaggg

SEQ ID NO: 488058 - DNA, 15 bp, Homo sapiens
catttttggatgagg

SEQ ID NO: 488059 - DNA, 15 bp, Homo sapiens
acatttttggatgag

SEQ ID NO: 488060 - DNA, 15 bp, Homo sapiens
cacatttttggatga

SEQ ID NO: 488061 - DNA, 15 bp, Homo sapiens
ccacatttttggatg

SEQ ID NO: 488062 - DNA, 15 bp, Homo sapiens
accacatttttggat

SEQ ID NO: 488063 - DNA, 15 bp, Homo sapiens
taccacatttttgga

SEQ ID NO: 488064 - DNA, 15 bp, Homo sapiens
ctaccacatttttgg

SEQ ID NO: 488065 - DNA, 15 bp, Homo sapiens
tctaccacatttttg

SEQ ID NO: 488066 - DNA, 15 bp, Homo sapiens
ctctaccacattttt

SEQ ID NO: 488067 - DNA, 15 bp, Homo sapiens
cctctaccacatttt

SEQ ID NO: 488068 - DNA, 15 bp, Homo sapiens
gcctctaccacattt

SEQ ID NO: 488069 - DNA, 15 bp, Homo sapiens
ggcctctaccacatt

SEQ ID NO: 488070 - DNA, 15 bp, Homo sapiens
tggcctctaccacat

SEQ ID NO: 488071 - DNA, 15 bp, Homo sapiens
ctggcctctaccaca

SEQ ID NO: 488072 - DNA, 15 bp, Homo sapiens
tctggcctctaccac

SEQ ID NO: 488073 - DNA, 15 bp, Homo sapiens
atctggcctctacca

SEQ ID NO: 488074 - DNA, 15 bp, Homo sapiens
aatctggcctctacc

SEQ ID NO: 488075 - DNA, 15 bp, Homo sapiens
taatctggcctctac

SEQ ID NO: 488076 - DNA, 15 bp, Homo sapiens
ctaatctggcctcta

SEQ ID NO: 488077 - DNA, 15 bp, Homo sapiens
actaatctggcctct

SEQ ID NO: 488078 - DNA, 15 bp, Homo sapiens
cactaatctggcctc

SEQ ID NO: 488079 - DNA, 15 bp, Homo sapiens
gcactaatctggcct

SEQ ID NO: 488080 - DNA, 15 bp, Homo sapiens
agcactaatctggcc

SEQ ID NO: 488081 - DNA, 15 bp, Homo sapiens
cagcactaatctggc

SEQ ID NO: 488082 - DNA, 15 bp, Homo sapiens
ccagcactaatctgg

SEQ ID NO: 488083 - DNA, 15 bp, Homo sapiens
accagcactaatctg

SEQ ID NO: 488084 - DNA, 15 bp, Homo sapiens
taccagcactaatct

SEQ ID NO: 488085 - DNA, 15 bp, Homo sapiens
ctaccagcactaatc

SEQ ID NO: 488086 - DNA, 15 bp, Homo sapiens
cctaccagcactaat

SEQ ID NO: 488087 - DNA, 15 bp, Homo sapiens
tcctaccagcactaa

SEQ ID NO: 488088 - DNA, 15 bp, Homo sapiens
ttcctaccagcacta

SEQ ID NO: 488089 - DNA, 15 bp, Homo sapiens
attcctaccagcact

SEQ ID NO: 488090 - DNA, 15 bp, Homo sapiens
tattcctaccagcac

SEQ ID NO: 488091 - DNA, 15 bp, Homo sapiens
ttattcctaccagca

SEQ ID NO: 488092 - DNA, 15 bp, Homo sapiens
cttattcctaccagc

SEQ ID NO: 488093 - DNA, 15 bp, Homo sapiens
tcttattcctaccag

SEQ ID NO: 488094 - DNA, 15 bp, Homo sapiens
ctcttattcctacca

SEQ ID NO: 488095 - DNA, 15 bp, Homo sapiens
tctcttattcctacc

SEQ ID NO: 488096 - DNA, 15 bp, Homo sapiens
atctcttattcctac

SEQ ID NO: 488097 - DNA, 15 bp, Homo sapiens
tatctcttattccta

SEQ ID NO: 488098 - DNA, 15 bp, Homo sapiens
atatctcttattcct

SEQ ID NO: 488099 - DNA, 15 bp, Homo sapiens
tatatctcttattcc

SEQ ID NO: 488100 - DNA, 15 bp, Homo sapiens
ttatatctcttattc

SEQ ID NO: 488101 - DNA, 15 bp, Homo sapiens
gttatatctcttatt

SEQ ID NO: 488102 - DNA, 15 bp, Homo sapiens
ggttatatctcttat

SEQ ID NO: 488103 - DNA, 15 bp, Homo sapiens
aggttatatctctta

SEQ ID NO: 488104 - DNA, 15 bp, Homo sapiens
aaggttatatctctt

SEQ ID NO: 488105 - DNA, 15 bp, Homo sapiens
aaaggttatatctct

SEQ ID NO: 488106 - DNA, 15 bp, Homo sapiens
caaaggttatatctc

SEQ ID NO: 488107 - DNA, 15 bp, Homo sapiens
ccaaaggttatatct

SEQ ID NO: 488108 - DNA, 15 bp, Homo sapiens
gccaaaggttatatc

SEQ ID NO: 488109 - DNA, 15 bp, Homo sapiens
agccaaaggttatat

SEQ ID NO: 488110 - DNA, 15 bp, Homo sapiens
aagccaaaggttata

SEQ ID NO: 488111 - DNA, 15 bp, Homo sapiens
aaagccaaaggttat

SEQ ID NO: 488112 - DNA, 15 bp, Homo sapiens
caaagccaaaggtta

SEQ ID NO: 488113 - DNA, 15 bp, Homo sapiens
ccaaagccaaaggtt

SEQ ID NO: 488114 - DNA, 15 bp, Homo sapiens
tccaaagccaaaggt

SEQ ID NO: 488115 - DNA, 15 bp, Homo sapiens
ttccaaagccaaagg

SEQ ID NO: 488116 - DNA, 15 bp, Homo sapiens
gttccaaagccaaag

SEQ ID NO: 488117 - DNA, 15 bp, Homo sapiens
ggttccaaagccaaa

SEQ ID NO: 488118 - DNA, 15 bp, Homo sapiens
tggttccaaagccaa

SEQ ID NO: 488119 - DNA, 15 bp, Homo sapiens
gtggttccaaagcca

SEQ ID NO: 488120 - DNA, 15 bp, Homo sapiens
tgtggttccaaagcc

SEQ ID NO: 488121 - DNA, 15 bp, Homo sapiens
ttgtggttccaaagc

SEQ ID NO: 488122 - DNA, 15 bp, Homo sapiens
cttgtggttccaaag

SEQ ID NO: 488123 - DNA, 15 bp, Homo sapiens
gcttgtggttccaaa

SEQ ID NO: 488124 - DNA, 15 bp, Homo sapiens
tgcttgtggttccaa

SEQ ID NO: 488125 - DNA, 15 bp, Homo sapiens
atgcttgtggttcca

SEQ ID NO: 488126 - DNA, 15 bp, Homo sapiens
aatgcttgtggttcc

SEQ ID NO: 488127 - DNA, 15 bp, Homo sapiens
taatgcttgtggttc

SEQ ID NO: 488128 - DNA, 15 bp, Homo sapiens
ctaatgcttgtggtt

SEQ ID NO: 488129 - DNA, 15 bp, Homo sapiens
gctaatgcttgtggt

SEQ ID NO: 488130 - DNA, 15 bp, Homo sapiens
tgctaatgcttgtgg

SEQ ID NO: 488131 - DNA, 15 bp, Homo sapiens
ctgctaatgcttgtg

SEQ ID NO: 488132 - DNA, 15 bp, Homo sapiens
actgctaatgcttgt

SEQ ID NO: 488133 - DNA, 15 bp, Homo sapiens
gactgctaatgcttg

SEQ ID NO: 488134 - DNA, 15 bp, Homo sapiens
agactgctaatgctt

SEQ ID NO: 488135 - DNA, 15 bp, Homo sapiens
gagactgctaatgct

SEQ ID NO: 488136 - DNA, 15 bp, Homo sapiens
ggagactgctaatgc

SEQ ID NO: 488137 - DNA, 15 bp, Homo sapiens
tggagactgctaatg

SEQ ID NO: 488138 - DNA, 15 bp, Homo sapiens
atggagactgctaat

SEQ ID NO: 488139 - DNA, 15 bp, Homo sapiens
catggagactgctaa

SEQ ID NO: 488140 - DNA, 15 bp, Homo sapiens
acatggagactgcta

SEQ ID NO: 488141 - DNA, 15 bp, Homo sapiens
aacatggagactgct

SEQ ID NO: 488142 - DNA, 15 bp, Homo sapiens
gaacatggagactgc

SEQ ID NO: 488143 - DNA, 15 bp, Homo sapiens
agaacatggagactg

SEQ ID NO: 488144 - DNA, 15 bp, Homo sapiens
aagaacatggagact

SEQ ID NO: 488145 - DNA, 15 bp, Homo sapiens
aaagaacatggagac

SEQ ID NO: 488146 - DNA, 15 bp, Homo sapiens
taaagaacatggaga

SEQ ID NO: 488147 - DNA, 15 bp, Homo sapiens
ttaaagaacatggag

SEQ ID NO: 488148 - DNA, 15 bp, Homo sapiens
tttaaagaacatgga

SEQ ID NO: 488149 - DNA, 15 bp, Homo sapiens
ctttaaagaacatgg

SEQ ID NO: 488150 - DNA, 15 bp, Homo sapiens
tctttaaagaacatg

SEQ ID NO: 488151 - DNA, 15 bp, Homo sapiens
gtctttaaagaacat

SEQ ID NO: 488152 - DNA, 15 bp, Homo sapiens
agtctttaaagaaca

SEQ ID NO: 488153 - DNA, 15 bp, Homo sapiens
aagtctttaaagaac

SEQ ID NO: 488154 - DNA, 15 bp, Homo sapiens
caagtctttaaagaa

SEQ ID NO: 488155 - DNA, 15 bp, Homo sapiens
ccaagtctttaaaga

SEQ ID NO: 488156 - DNA, 15 bp, Homo sapiens
accaagtctttaaag

SEQ ID NO: 488157 - DNA, 15 bp, Homo sapiens
caccaagtctttaaa

SEQ ID NO: 488158 - DNA, 15 bp, Homo sapiens
tcaccaagtctttaa

SEQ ID NO: 488159 - DNA, 15 bp, Homo sapiens
atcaccaagtcttta

SEQ ID NO: 488160 - DNA, 15 bp, Homo sapiens
tatcaccaagtcttt

SEQ ID NO: 488161 - DNA, 15 bp, Homo sapiens
atatcaccaagtctt

SEQ ID NO: 488162 - DNA, 15 bp, Homo sapiens
aatatcaccaagtct

SEQ ID NO: 488163 - DNA, 15 bp, Homo sapiens
caatatcaccaagtc

SEQ ID NO: 488164 - DNA, 15 bp, Homo sapiens
ccaatatcaccaagt

SEQ ID NO: 488165 - DNA, 15 bp, Homo sapiens
accaatatcaccaag

SEQ ID NO: 488166 - DNA, 15 bp, Homo sapiens
taccaatatcaccaa

SEQ ID NO: 488167 - DNA, 15 bp, Homo sapiens
ataccaatatcacca

SEQ ID NO: 488168 - DNA, 15 bp, Homo sapiens
aataccaatatcacc

SEQ ID NO: 488169 - DNA, 15 bp, Homo sapiens
aaataccaatatcac

SEQ ID NO: 488170 - DNA, 15 bp, Homo sapiens
taaataccaatatca

SEQ ID NO: 488171 - DNA, 15 bp, Homo sapiens
ctaaataccaatatc

SEQ ID NO: 488172 - DNA, 15 bp, Homo sapiens
cctaaataccaatat

SEQ ID NO: 488173 - DNA, 15 bp, Homo sapiens
gcctaaataccaata

SEQ ID NO: 488174 - DNA, 15 bp, Homo sapiens
agcctaaataccaat

SEQ ID NO: 488175 - DNA, 15 bp, Homo sapiens
cagcctaaataccaa

SEQ ID NO: 488176 - DNA, 15 bp, Homo sapiens
ccagcctaaatacca

SEQ ID NO: 488177 - DNA, 15 bp, Homo sapiens
tccagcctaaatacc

SEQ ID NO: 488178 - DNA, 15 bp, Homo sapiens
gtccagcctaaatac

SEQ ID NO: 488179 - DNA, 15 bp, Homo sapiens
tgtccagcctaaata

SEQ ID NO: 488180 - DNA, 15 bp, Homo sapiens
gtgtccagcctaaat

SEQ ID NO: 488181 - DNA, 15 bp, Homo sapiens
ggtgtccagcctaaa

SEQ ID NO: 488182 - DNA, 15 bp, Homo sapiens
tggtgtccagcctaa

SEQ ID NO: 488183 - DNA, 15 bp, Homo sapiens
atggtgtccagccta

SEQ ID NO: 488184 - DNA, 15 bp, Homo sapiens
catggtgtccagcct

SEQ ID NO: 488185 - DNA, 15 bp, Homo sapiens
gcatggtgtccagcc

SEQ ID NO: 488186 - DNA, 15 bp, Homo sapiens
tgcatggtgtccagc

SEQ ID NO: 488187 - DNA, 15 bp, Homo sapiens
ttgcatggtgtccag

SEQ ID NO: 488188 - DNA, 15 bp, Homo sapiens
tttgcatggtgtcca

SEQ ID NO: 488189 - DNA, 15 bp, Homo sapiens
ctttgcatggtgtcc

SEQ ID NO: 488190 - DNA, 15 bp, Homo sapiens
tctttgcatggtgtc

SEQ ID NO: 488191 - DNA, 15 bp, Homo sapiens
gtctttgcatggtgt

SEQ ID NO: 488192 - DNA, 15 bp, Homo sapiens
agtctttgcatggtg

SEQ ID NO: 488193 - DNA, 15 bp, Homo sapiens
tagtctttgcatggt

SEQ ID NO: 488194 - DNA, 15 bp, Homo sapiens
gtagtctttgcatgg

SEQ ID NO: 488195 - DNA, 15 bp, Homo sapiens
tgtagtctttgcatg

SEQ ID NO: 488196 - DNA, 15 bp, Homo sapiens
gtgtagtctttgcat

SEQ ID NO: 488197 - DNA, 15 bp, Homo sapiens
tgtgtagtctttgca

SEQ ID NO: 488198 - DNA, 15 bp, Homo sapiens
ctgtgtagtctttgc

SEQ ID NO: 488199 - DNA, 15 bp, Homo sapiens
cctgtgtagtctttg

SEQ ID NO: 488200 - DNA, 15 bp, Homo sapiens
gcctgtgtagtcttt

SEQ ID NO: 488201 - DNA, 15 bp, Homo sapiens
agcctgtgtagtctt

SEQ ID NO: 488202 - DNA, 15 bp, Homo sapiens
gagcctgtgtagtct

SEQ ID NO: 488203 - DNA, 15 bp, Homo sapiens
cgagcctgtgtagtc

SEQ ID NO: 488204 - DNA, 15 bp, Homo sapiens
ccgagcctgtgtagt

SEQ ID NO: 488205 - DNA, 15 bp, Homo sapiens
accgagcctgtgtag

SEQ ID NO: 488206 - DNA, 15 bp, Homo sapiens
aaccgagcctgtgta

SEQ ID NO: 488207 - DNA, 15 bp, Homo sapiens
gaaccgagcctgtgt

SEQ ID NO: 488208 - DNA, 15 bp, Homo sapiens
ggaaccgagcctgtg

SEQ ID NO: 488209 - DNA, 15 bp, Homo sapiens
aggaaccgagcctgt

SEQ ID NO: 488210 - DNA, 15 bp, Homo sapiens
caggaaccgagcctg

SEQ ID NO: 488211 - DNA, 15 bp, Homo sapiens
gcaggaaccgagcct

SEQ ID NO: 488212 - DNA, 15 bp, Homo sapiens
tgcaggaaccgagcc

SEQ ID NO: 488213 - DNA, 15 bp, Homo sapiens
atgcaggaaccgagc

SEQ ID NO: 488214 - DNA, 15 bp, Homo sapiens
catgcaggaaccgag

SEQ ID NO: 488215 - DNA, 15 bp, Homo sapiens
gcatgcaggaaccga

SEQ ID NO: 488216 - DNA, 15 bp, Homo sapiens
tgcatgcaggaaccg

SEQ ID NO: 488217 - DNA, 15 bp, Homo sapiens
ctgcatgcaggaacc

SEQ ID NO: 488218 - DNA, 15 bp, Homo sapiens
tctgcatgcaggaac

SEQ ID NO: 488219 - DNA, 15 bp, Homo sapiens
ctctgcatgcaggaa

SEQ ID NO: 488220 - DNA, 15 bp, Homo sapiens
tctctgcatgcagga

SEQ ID NO: 488221 - DNA, 15 bp, Homo sapiens
ttctctgcatgcagg

SEQ ID NO: 488222 - DNA, 15 bp, Homo sapiens
cttctctgcatgcag

SEQ ID NO: 488223 - DNA, 15 bp, Homo sapiens
acttctctgcatgca

SEQ ID NO: 488224 - DNA, 15 bp, Homo sapiens
aacttctctgcatgc

SEQ ID NO: 488225 - DNA, 15 bp, Homo sapiens
taacttctctgcatg

SEQ ID NO: 488226 - DNA, 15 bp, Homo sapiens
ataacttctctgcat

SEQ ID NO: 488227 - DNA, 15 bp, Homo sapiens
gataacttctctgca

SEQ ID NO: 488228 - DNA, 15 bp, Homo sapiens
agataacttctctgc

SEQ ID NO: 488229 - DNA, 15 bp, Homo sapiens
tagataacttctctg

SEQ ID NO: 488230 - DNA, 15 bp, Homo sapiens
ttagataacttctct

SEQ ID NO: 488231 - DNA, 15 bp, Homo sapiens
cttagataacttctc

SEQ ID NO: 488232 - DNA, 15 bp, Homo sapiens
tcttagataacttct

SEQ ID NO: 488233 - DNA, 15 bp, Homo sapiens
ctcttagataacttc

SEQ ID NO: 488234 - DNA, 15 bp, Homo sapiens
tctcttagataactt

SEQ ID NO: 488235 - DNA, 15 bp, Homo sapiens
atctcttagataact

SEQ ID NO: 488236 - DNA, 15 bp, Homo sapiens
tatctcttagataac

SEQ ID NO: 488237 - DNA, 15 bp, Homo sapiens
atatctcttagataa

SEQ ID NO: 488238 - DNA, 15 bp, Homo sapiens
catatctcttagata

SEQ ID NO: 488239 - DNA, 15 bp, Homo sapiens
tcatatctcttagat

SEQ ID NO: 488240 - DNA, 15 bp, Homo sapiens
gtcatatctcttaga

SEQ ID NO: 488241 - DNA, 15 bp, Homo sapiens
ggtcatatctcttag

SEQ ID NO: 488242 - DNA, 15 bp, Homo sapiens
tggtcatatctctta

SEQ ID NO: 488243 - DNA, 15 bp, Homo sapiens
ctggtcatatctctt

SEQ ID NO: 488244 - DNA, 15 bp, Homo sapiens
cctggtcatatctct

SEQ ID NO: 488245 - DNA, 15 bp, Homo sapiens
gcctggtcatatctc

SEQ ID NO: 488246 - DNA, 15 bp, Homo sapiens
ggcctggtcatatct

SEQ ID NO: 488247 - DNA, 15 bp, Homo sapiens
cggcctggtcatatc

SEQ ID NO: 488248 - DNA, 15 bp, Homo sapiens
ccggcctggtcatat

SEQ ID NO: 488249 - DNA, 15 bp, Homo sapiens
tccggcctggtcata

SEQ ID NO: 488250 - DNA, 15 bp, Homo sapiens
ttccggcctggtcat

SEQ ID NO: 488251 - DNA, 15 bp, Homo sapiens
attccggcctggtca

SEQ ID NO: 488252 - DNA, 15 bp, Homo sapiens
tattccggcctggtc

SEQ ID NO: 488253 - DNA, 15 bp, Homo sapiens
ctattccggcctggt

SEQ ID NO: 488254 - DNA, 15 bp, Homo sapiens
tctattccggcctgg

SEQ ID NO: 488255 - DNA, 15 bp, Homo sapiens
ttctattccggcctg

SEQ ID NO: 488256 - DNA, 15 bp, Homo sapiens
attctattccggcct

SEQ ID NO: 488257 - DNA, 15 bp, Homo sapiens
cattctattccggcc

SEQ ID NO: 488258 - DNA, 15 bp, Homo sapiens
gcattctattccggc

SEQ ID NO: 488259 - DNA, 15 bp, Homo sapiens
agcattctattccgg

SEQ ID NO: 488260 - DNA, 15 bp, Homo sapiens
gagcattctattccg

SEQ ID NO: 488261 - DNA, 15 bp, Homo sapiens
tgagcattctattcc

SEQ ID NO: 488262 - DNA, 15 bp, Homo sapiens
ctgagcattctattc

SEQ ID NO: 488263 - DNA, 15 bp, Homo sapiens
tctgagcattctatt

SEQ ID NO: 488264 - DNA, 15 bp, Homo sapiens
gtctgagcattctat

SEQ ID NO: 488265 - DNA, 15 bp, Homo sapiens
ggtctgagcattcta

SEQ ID NO: 488266 - DNA, 15 bp, Homo sapiens
tggtctgagcattct

SEQ ID NO: 488267 - DNA, 15 bp, Homo sapiens
gtggtctgagcattc

SEQ ID NO: 488268 - DNA, 15 bp, Homo sapiens
cgtggtctgagcatt

SEQ ID NO: 488269 - DNA, 15 bp, Homo sapiens
acgtggtctgagcat

SEQ ID NO: 488270 - DNA, 15 bp, Homo sapiens
cacgtggtctgagca

SEQ ID NO: 488271 - DNA, 15 bp, Homo sapiens
ccacgtggtctgagc

SEQ ID NO: 488272 - DNA, 15 bp, Homo sapiens
tccacgtggtctgag

SEQ ID NO: 488273 - DNA, 15 bp, Homo sapiens
ctccacgtggtctga

SEQ ID NO: 488274 - DNA, 15 bp, Homo sapiens
cctccacgtggtctg

SEQ ID NO: 488275 - DNA, 15 bp, Homo sapiens
gcctccacgtggtct

SEQ ID NO: 488276 - DNA, 15 bp, Homo sapiens
agcctccacgtggtc

SEQ ID NO: 488277 - DNA, 15 bp, Homo sapiens
cagcctccacgtggt

SEQ ID NO: 488278 - DNA, 15 bp, Homo sapiens
acagcctccacgtgg

SEQ ID NO: 488279 - DNA, 15 bp, Homo sapiens
aacagcctccacgtg

SEQ ID NO: 488280 - DNA, 15 bp, Homo sapiens
taacagcctccacgt

SEQ ID NO: 488281 - DNA, 15 bp, Homo sapiens
ttaacagcctccacg

SEQ ID NO: 488282 - DNA, 15 bp, Homo sapiens
tttaacagcctccac

SEQ ID NO: 488283 - DNA, 15 bp, Homo sapiens
gtttaacagcctcca

SEQ ID NO: 488284 - DNA, 15 bp, Homo sapiens
agtttaacagcctcc

SEQ ID NO: 488285 - DNA, 15 bp, Homo sapiens
aagtttaacagcctc

SEQ ID NO: 488286 - DNA, 15 bp, Homo sapiens
aaagtttaacagcct

SEQ ID NO: 488287 - DNA, 15 bp, Homo sapiens
aaaagtttaacagcc

SEQ ID NO: 488288 - DNA, 15 bp, Homo sapiens
taaaagtttaacagc

SEQ ID NO: 488289 - DNA, 15 bp, Homo sapiens
gtaaaagtttaacag

SEQ ID NO: 488290 - DNA, 15 bp, Homo sapiens
tgtaaaagtttaaca

SEQ ID NO: 488291 - DNA, 15 bp, Homo sapiens
atgtaaaagtttaac

SEQ ID NO: 488292 - DNA, 15 bp, Homo sapiens
tatgtaaaagtttaa

SEQ ID NO: 488293 - DNA, 15 bp, Homo sapiens
ttatgtaaaagttta

SEQ ID NO: 488294 - DNA, 15 bp, Homo sapiens
attatgtaaaagttt

SEQ ID NO: 488295 - DNA, 15 bp, Homo sapiens
gattatgtaaaagtt

SEQ ID NO: 488296 - DNA, 15 bp, Homo sapiens
agattatgtaaaagt

SEQ ID NO: 488297 - DNA, 15 bp, Homo sapiens
tagattatgtaaaag

SEQ ID NO: 488298 - DNA, 15 bp, Homo sapiens
ctagattatgtaaaa

SEQ ID NO: 488299 - DNA, 15 bp, Homo sapiens
cctagattatgtaaa

SEQ ID NO: 488300 - DNA, 15 bp, Homo sapiens
ccctagattatgtaa

SEQ ID NO: 488301 - DNA, 15 bp, Homo sapiens
tccctagattatgta

SEQ ID NO: 488302 - DNA, 15 bp, Homo sapiens
ttccctagattatgt

SEQ ID NO: 488303 - DNA, 15 bp, Homo sapiens
tttccctagattatg

SEQ ID NO: 488304 - DNA, 15 bp, Homo sapiens
ctttccctagattat

SEQ ID NO: 488305 - DNA, 15 bp, Homo sapiens
tctttccctagatta

SEQ ID NO: 488306 - DNA, 15 bp, Homo sapiens
ttctttccctagatt

SEQ ID NO: 488307 - DNA, 15 bp, Homo sapiens
cttctttccctagat

SEQ ID NO: 488308 - DNA, 15 bp, Homo sapiens
ccttctttccctaga

SEQ ID NO: 488309 - DNA, 15 bp, Homo sapiens
cccttctttccctag

SEQ ID NO: 488310 - DNA, 15 bp, Homo sapiens
tcccttctttcccta

SEQ ID NO: 488311 - DNA, 15 bp, Homo sapiens
gtcccttctttccct

SEQ ID NO: 488312 - DNA, 15 bp, Homo sapiens
tgtcccttctttccc

SEQ ID NO: 488313 - DNA, 15 bp, Homo sapiens
gtgtcccttctttcc

SEQ ID NO: 488314 - DNA, 15 bp, Homo sapiens
tgtgtcccttctttc

SEQ ID NO: 488315 - DNA, 15 bp, Homo sapiens
ttgtgtcccttcttt

SEQ ID NO: 488316 - DNA, 15 bp, Homo sapiens
cttgtgtcccttctt

SEQ ID NO: 488317 - DNA, 15 bp, Homo sapiens
ccttgtgtcccttct

SEQ ID NO: 488318 - DNA, 15 bp, Homo sapiens
accttgtgtcccttc

SEQ ID NO: 488319 - DNA, 15 bp, Homo sapiens
caccttgtgtccctt

SEQ ID NO: 488320 - DNA, 15 bp, Homo sapiens
ccaccttgtgtccct

SEQ ID NO: 488321 - DNA, 15 bp, Homo sapiens
gccaccttgtgtccc

SEQ ID NO: 488322 - DNA, 15 bp, Homo sapiens
tgccaccttgtgtcc

SEQ ID NO: 488323 - DNA, 15 bp, Homo sapiens
atgccaccttgtgtc

SEQ ID NO: 488324 - DNA, 15 bp, Homo sapiens
aatgccaccttgtgt

SEQ ID NO: 488325 - DNA, 15 bp, Homo sapiens
taatgccaccttgtg

SEQ ID NO: 488326 - DNA, 15 bp, Homo sapiens
ctaatgccaccttgt

SEQ ID NO: 488327 - DNA, 15 bp, Homo sapiens
actaatgccaccttg

SEQ ID NO: 488328 - DNA, 15 bp, Homo sapiens
gactaatgccacctt

SEQ ID NO: 488329 - DNA, 15 bp, Homo sapiens
agactaatgccacct

SEQ ID NO: 488330 - DNA, 15 bp, Homo sapiens
tagactaatgccacc

SEQ ID NO: 488331 - DNA, 15 bp, Homo sapiens
ctagactaatgccac

SEQ ID NO: 488332 - DNA, 15 bp, Homo sapiens
cctagactaatgcca

SEQ ID NO: 488333 - DNA, 15 bp, Homo sapiens
ccctagactaatgcc

SEQ ID NO: 488334 - DNA, 15 bp, Homo sapiens
accctagactaatgc

SEQ ID NO: 488335 - DNA, 15 bp, Homo sapiens
gaccctagactaatg

SEQ ID NO: 488336 - DNA, 15 bp, Homo sapiens
tgaccctagactaat

SEQ ID NO: 488337 - DNA, 15 bp, Homo sapiens
ctgaccctagactaa

SEQ ID NO: 488338 - DNA, 15 bp, Homo sapiens
cctgaccctagacta

SEQ ID NO: 488339 - DNA, 15 bp, Homo sapiens
acctgaccctagact

SEQ ID NO: 488340 - DNA, 15 bp, Homo sapiens
cacctgaccctagac

SEQ ID NO: 488341 - DNA, 15 bp, Homo sapiens
ccacctgaccctaga

SEQ ID NO: 488342 - DNA, 15 bp, Homo sapiens
cccacctgaccctag

SEQ ID NO: 488343 - DNA, 15 bp, Homo sapiens
tcccacctgacccta

SEQ ID NO: 488344 - DNA, 15 bp, Homo sapiens
ttcccacctgaccct

SEQ ID NO: 488345 - DNA, 15 bp, Homo sapiens
tttcccacctgaccc

SEQ ID NO: 488346 - DNA, 15 bp, Homo sapiens
ttttcccacctgacc

SEQ ID NO: 488347 - DNA, 15 bp, Homo sapiens
cttttcccacctgac

SEQ ID NO: 488348 - DNA, 15 bp, Homo sapiens
ccttttcccacctga

SEQ ID NO: 488349 - DNA, 15 bp, Homo sapiens
accttttcccacctg

SEQ ID NO: 488350 - DNA, 15 bp, Homo sapiens
aaccttttcccacct

SEQ ID NO: 488351 - DNA, 15 bp, Homo sapiens
taaccttttcccacc

SEQ ID NO: 488352 - DNA, 15 bp, Homo sapiens
ataaccttttcccac

SEQ ID NO: 488353 - DNA, 15 bp, Homo sapiens
cataaccttttccca

SEQ ID NO: 488354 - DNA, 15 bp, Homo sapiens
gcataaccttttccc

SEQ ID NO: 488355 - DNA, 15 bp, Homo sapiens
agcataaccttttcc

SEQ ID NO: 488356 - DNA, 15 bp, Homo sapiens
cagcataaccttttc

SEQ ID NO: 488357 - DNA, 15 bp, Homo sapiens
tcagcataacctttt

SEQ ID NO: 488358 - DNA, 15 bp, Homo sapiens
ttcagcataaccttt

SEQ ID NO: 488359 - DNA, 15 bp, Homo sapiens
tttcagcataacctt

SEQ ID NO: 488360 - DNA, 15 bp, Homo sapiens
ttttcagcataacct

SEQ ID NO: 488361 - DNA, 15 bp, Homo sapiens
cttttcagcataacc

SEQ ID NO: 488362 - DNA, 15 bp, Homo sapiens
acttttcagcataac

SEQ ID NO: 488363 - DNA, 15 bp, Homo sapiens
gacttttcagcataa

SEQ ID NO: 488364 - DNA, 15 bp, Homo sapiens
agacttttcagcata

SEQ ID NO: 488365 - DNA, 15 bp, Homo sapiens
gagacttttcagcat

SEQ ID NO: 488366 - DNA, 15 bp, Homo sapiens
agagacttttcagca

SEQ ID NO: 488367 - DNA, 15 bp, Homo sapiens
cagagacttttcagc

SEQ ID NO: 488368 - DNA, 15 bp, Homo sapiens
gcagagacttttcag

SEQ ID NO: 488369 - DNA, 15 bp, Homo sapiens
tgcagagacttttca

SEQ ID NO: 488370 - DNA, 15 bp, Homo sapiens
ctgcagagacttttc

SEQ ID NO: 488371 - DNA, 15 bp, Homo sapiens
gctgcagagactttt

SEQ ID NO: 488372 - DNA, 15 bp, Homo sapiens
agctgcagagacttt

SEQ ID NO: 488373 - DNA, 15 bp, Homo sapiens
gagctgcagagactt

SEQ ID NO: 488374 - DNA, 15 bp, Homo sapiens
tgagctgcagagact

SEQ ID NO: 488375 - DNA, 15 bp, Homo sapiens
ctgagctgcagagac

SEQ ID NO: 488376 - DNA, 15 bp, Homo sapiens
cctgagctgcagaga

SEQ ID NO: 488377 - DNA, 15 bp, Homo sapiens
tcctgagctgcagag

SEQ ID NO: 488378 - DNA, 15 bp, Homo sapiens
gtcctgagctgcaga

SEQ ID NO: 488379 - DNA, 15 bp, Homo sapiens
tgtcctgagctgcag

SEQ ID NO: 488380 - DNA, 15 bp, Homo sapiens
ctgtcctgagctgca

SEQ ID NO: 488381 - DNA, 15 bp, Homo sapiens
gctgtcctgagctgc

SEQ ID NO: 488382 - DNA, 15 bp, Homo sapiens
agctgtcctgagctg

SEQ ID NO: 488383 - DNA, 15 bp, Homo sapiens
aagctgtcctgagct

SEQ ID NO: 488384 - DNA, 15 bp, Homo sapiens
aaagctgtcctgagc

SEQ ID NO: 488385 - DNA, 15 bp, Homo sapiens
caaagctgtcctgag

SEQ ID NO: 488386 - DNA, 15 bp, Homo sapiens
acaaagctgtcctga

SEQ ID NO: 488387 - DNA, 15 bp, Homo sapiens
cacaaagctgtcctg

SEQ ID NO: 488388 - DNA, 15 bp, Homo sapiens
gcacaaagctgtcct

SEQ ID NO: 488389 - DNA, 15 bp, Homo sapiens
tgcacaaagctgtcc

SEQ ID NO: 488390 - DNA, 15 bp, Homo sapiens
ttgcacaaagctgtc

SEQ ID NO: 488391 - DNA, 15 bp, Homo sapiens
tttgcacaaagctgt

SEQ ID NO: 488392 - DNA, 15 bp, Homo sapiens
ctttgcacaaagctg

SEQ ID NO: 488393 - DNA, 15 bp, Homo sapiens
tctttgcacaaagct

SEQ ID NO: 488394 - DNA, 15 bp, Homo sapiens
ttctttgcacaaagc

SEQ ID NO: 488395 - DNA, 15 bp, Homo sapiens
gttctttgcacaaag

SEQ ID NO: 488396 - DNA, 15 bp, Homo sapiens
agttctttgcacaaa

SEQ ID NO: 488397 - DNA, 15 bp, Homo sapiens
cagttctttgcacaa

SEQ ID NO: 488398 - DNA, 15 bp, Homo sapiens
tcagttctttgcaca

SEQ ID NO: 488399 - DNA, 15 bp, Homo sapiens
ttcagttctttgcac

SEQ ID NO: 488400 - DNA, 15 bp, Homo sapiens
cttcagttctttgca

SEQ ID NO: 488401 - DNA, 15 bp, Homo sapiens
acttcagttctttgc

SEQ ID NO: 488402 - DNA, 15 bp, Homo sapiens
aacttcagttctttg

SEQ ID NO: 488403 - DNA, 15 bp, Homo sapiens
gaacttcagttcttt

SEQ ID NO: 488404 - DNA, 15 bp, Homo sapiens
tgaacttcagttctt

SEQ ID NO: 488405 - DNA, 15 bp, Homo sapiens
gtgaacttcagttct

SEQ ID NO: 488406 - DNA, 15 bp, Homo sapiens
tgtgaacttcagttc

SEQ ID NO: 488407 - DNA, 15 bp, Homo sapiens
ctgtgaacttcagtt

SEQ ID NO: 488408 - DNA, 15 bp, Homo sapiens
gctgtgaacttcagt

SEQ ID NO: 488409 - DNA, 15 bp, Homo sapiens
agctgtgaacttcag

SEQ ID NO: 488410 - DNA, 15 bp, Homo sapiens
cagctgtgaacttca

SEQ ID NO: 488411 - DNA, 15 bp, Homo sapiens
gcagctgtgaacttc

SEQ ID NO: 488412 - DNA, 15 bp, Homo sapiens
agcagctgtgaactt

SEQ ID NO: 488413 - DNA, 15 bp, Homo sapiens
tagcagctgtgaact

SEQ ID NO: 488414 - DNA, 15 bp, Homo sapiens
ctagcagctgtgaac

SEQ ID NO: 488415 - DNA, 15 bp, Homo sapiens
actagcagctgtgaa

SEQ ID NO: 488416 - DNA, 15 bp, Homo sapiens
cactagcagctgtga

SEQ ID NO: 488417 - DNA, 15 bp, Homo sapiens
gcactagcagctgtg

SEQ ID NO: 488418 - DNA, 15 bp, Homo sapiens
ggcactagcagctgt

SEQ ID NO: 488419 - DNA, 15 bp, Homo sapiens
aggcactagcagctg

SEQ ID NO: 488420 - DNA, 15 bp, Homo sapiens
caggcactagcagct

SEQ ID NO: 488421 - DNA, 15 bp, Homo sapiens
ccaggcactagcagc

SEQ ID NO: 488422 - DNA, 15 bp, Homo sapiens
cccaggcactagcag

SEQ ID NO: 488423 - DNA, 15 bp, Homo sapiens
tcccaggcactagca

SEQ ID NO: 488424 - DNA, 15 bp, Homo sapiens
ctcccaggcactagc

SEQ ID NO: 488425 - DNA, 15 bp, Homo sapiens
tctcccaggcactag

SEQ ID NO: 488426 - DNA, 15 bp, Homo sapiens
atctcccaggcacta

SEQ ID NO: 488427 - DNA, 15 bp, Homo sapiens
gatctcccaggcact

SEQ ID NO: 488428 - DNA, 15 bp, Homo sapiens
tgatctcccaggcac

SEQ ID NO: 488429 - DNA, 15 bp, Homo sapiens
ttgatctcccaggca

SEQ ID NO: 488430 - DNA, 15 bp, Homo sapiens
tttgatctcccaggc

SEQ ID NO: 488431 - DNA, 15 bp, Homo sapiens
atttgatctcccagg

SEQ ID NO: 488432 - DNA, 15 bp, Homo sapiens
tatttgatctcccag

SEQ ID NO: 488433 - DNA, 15 bp, Homo sapiens
ctatttgatctccca

SEQ ID NO: 488434 - DNA, 15 bp, Homo sapiens
actatttgatctccc

SEQ ID NO: 488435 - DNA, 15 bp, Homo sapiens
tactatttgatctcc

SEQ ID NO: 488436 - DNA, 15 bp, Homo sapiens
atactatttgatctc

SEQ ID NO: 488437 - DNA, 15 bp, Homo sapiens
tatactatttgatct

SEQ ID NO: 488438 - DNA, 15 bp, Homo sapiens
ttatactatttgatc

SEQ ID NO: 488439 - DNA, 15 bp, Homo sapiens
tttatactatttgat

SEQ ID NO: 488440 - DNA, 15 bp, Homo sapiens
atttatactatttga

SEQ ID NO: 488441 - DNA, 15 bp, Homo sapiens
catttatactatttg

SEQ ID NO: 488442 - DNA, 15 bp, Homo sapiens
tcatttatactattt

SEQ ID NO: 488443 - DNA, 15 bp, Homo sapiens
ctcatttatactatt

SEQ ID NO: 488444 - DNA, 15 bp, Homo sapiens
cctcatttatactat

SEQ ID NO: 488445 - DNA, 15 bp, Homo sapiens
ccctcatttatacta

SEQ ID NO: 488446 - DNA, 15 bp, Homo sapiens
gccctcatttatact

SEQ ID NO: 488447 - DNA, 15 bp, Homo sapiens
tgccctcatttatac

SEQ ID NO: 488448 - DNA, 15 bp, Homo sapiens
ctgccctcatttata

SEQ ID NO: 488449 - DNA, 15 bp, Homo sapiens
tctgccctcatttat

SEQ ID NO: 488450 - DNA, 15 bp, Homo sapiens
gtctgccctcattta

SEQ ID NO: 488451 - DNA, 15 bp, Homo sapiens
tgtctgccctcattt

SEQ ID NO: 488452 - DNA, 15 bp, Homo sapiens
ttgtctgccctcatt

SEQ ID NO: 488453 - DNA, 15 bp, Homo sapiens
gttgtctgccctcat

SEQ ID NO: 488454 - DNA, 15 bp, Homo sapiens
ggttgtctgccctca

SEQ ID NO: 488455 - DNA, 15 bp, Homo sapiens
gggttgtctgccctc

SEQ ID NO: 488456 - DNA, 15 bp, Homo sapiens
agggttgtctgccct

SEQ ID NO: 488457 - DNA, 15 bp, Homo sapiens
cagggttgtctgccc

SEQ ID NO: 488458 - DNA, 15 bp, Homo sapiens
tcagggttgtctgcc

SEQ ID NO: 488459 - DNA, 15 bp, Homo sapiens
ctcagggttgtctgc

SEQ ID NO: 488460 - DNA, 15 bp, Homo sapiens
cctcagggttgtctg

SEQ ID NO: 488461 - DNA, 15 bp, Homo sapiens
ccctcagggttgtct

SEQ ID NO: 488462 - DNA, 15 bp, Homo sapiens
cccctcagggttgtc

SEQ ID NO: 488463 - DNA, 15 bp, Homo sapiens
gcccctcagggttgt

SEQ ID NO: 488464 - DNA, 15 bp, Homo sapiens
tgcccctcagggttg

SEQ ID NO: 488465 - DNA, 15 bp, Homo sapiens
ctgcccctcagggtt

SEQ ID NO: 488466 - DNA, 15 bp, Homo sapiens
tctgcccctcagggt

SEQ ID NO: 488467 - DNA, 15 bp, Homo sapiens
atctgcccctcaggg

SEQ ID NO: 488468 - DNA, 15 bp, Homo sapiens
catctgcccctcagg

SEQ ID NO: 488469 - DNA, 15 bp, Homo sapiens
ccatctgcccctcag

SEQ ID NO: 488470 - DNA, 15 bp, Homo sapiens
tccatctgcccctca

SEQ ID NO: 488471 - DNA, 15 bp, Homo sapiens
ctccatctgcccctc

SEQ ID NO: 488472 - DNA, 15 bp, Homo sapiens
gctccatctgcccct

SEQ ID NO: 488473 - DNA, 15 bp, Homo sapiens
agctccatctgcccc

SEQ ID NO: 488474 - DNA, 15 bp, Homo sapiens
aagctccatctgccc

SEQ ID NO: 488475 - DNA, 15 bp, Homo sapiens
aaagctccatctgcc

SEQ ID NO: 488476 - DNA, 15 bp, Homo sapiens
gaaagctccatctgc

SEQ ID NO: 488477 - DNA, 15 bp, Homo sapiens
ggaaagctccatctg

SEQ ID NO: 488478 - DNA, 15 bp, Homo sapiens
tggaaagctccatct

SEQ ID NO: 488479 - DNA, 15 bp, Homo sapiens
ctggaaagctccatc

SEQ ID NO: 488480 - DNA, 15 bp, Homo sapiens
tctggaaagctccat

SEQ ID NO: 488481 - DNA, 15 bp, Homo sapiens
gtctggaaagctcca

SEQ ID NO: 488482 - DNA, 15 bp, Homo sapiens
tgtctggaaagctcc

SEQ ID NO: 488483 - DNA, 15 bp, Homo sapiens
ttgtctggaaagctc

SEQ ID NO: 488484 - DNA, 15 bp, Homo sapiens
attgtctggaaagct

SEQ ID NO: 488485 - DNA, 15 bp, Homo sapiens
gattgtctggaaagc

SEQ ID NO: 488486 - DNA, 15 bp, Homo sapiens
agattgtctggaaag

SEQ ID NO: 488487 - DNA, 15 bp, Homo sapiens
aagattgtctggaaa

SEQ ID NO: 488488 - DNA, 15 bp, Homo sapiens
caagattgtctggaa

SEQ ID NO: 488489 - DNA, 15 bp, Homo sapiens
ccaagattgtctgga

SEQ ID NO: 488490 - DNA, 15 bp, Homo sapiens
gccaagattgtctgg

SEQ ID NO: 488491 - DNA, 15 bp, Homo sapiens
tgccaagattgtctg

SEQ ID NO: 488492 - DNA, 15 bp, Homo sapiens
atgccaagattgtct

SEQ ID NO: 488493 - DNA, 15 bp, Homo sapiens
catgccaagattgtc

SEQ ID NO: 488494 - DNA, 15 bp, Homo sapiens
tcatgccaagattgt

SEQ ID NO: 488495 - DNA, 15 bp, Homo sapiens
ctcatgccaagattg

SEQ ID NO: 488496 - DNA, 15 bp, Homo sapiens
cctcatgccaagatt

SEQ ID NO: 488497 - DNA, 15 bp, Homo sapiens
tcctcatgccaagat

SEQ ID NO: 488498 - DNA, 15 bp, Homo sapiens
atcctcatgccaaga

SEQ ID NO: 488499 - DNA, 15 bp, Homo sapiens
catcctcatgccaag

SEQ ID NO: 488500 - DNA, 15 bp, Homo sapiens
tcatcctcatgccaa

SEQ ID NO: 488501 - DNA, 15 bp, Homo sapiens
ctcatcctcatgcca

SEQ ID NO: 488502 - DNA, 15 bp, Homo sapiens
actcatcctcatgcc

SEQ ID NO: 488503 - DNA, 15 bp, Homo sapiens
cactcatcctcatgc

SEQ ID NO: 488504 - DNA, 15 bp, Homo sapiens
tcactcatcctcatg

SEQ ID NO: 488505 - DNA, 15 bp, Homo sapiens
ctcactcatcctcat

SEQ ID NO: 488506 - DNA, 15 bp, Homo sapiens
actcactcatcctca

SEQ ID NO: 488507 - DNA, 15 bp, Homo sapiens
aactcactcatcctc

SEQ ID NO: 488508 - DNA, 15 bp, Homo sapiens
aaactcactcatcct

SEQ ID NO: 488509 - DNA, 15 bp, Homo sapiens
gaaactcactcatcc

SEQ ID NO: 488510 - DNA, 15 bp, Homo sapiens
tgaaactcactcatc

SEQ ID NO: 488511 - DNA, 15 bp, Homo sapiens
ttgaaactcactcat

SEQ ID NO: 488512 - DNA, 15 bp, Homo sapiens
tttgaaactcactca

SEQ ID NO: 488513 - DNA, 15 bp, Homo sapiens
atttgaaactcactc

SEQ ID NO: 488514 - DNA, 15 bp, Homo sapiens
gatttgaaactcact

SEQ ID NO: 488515 - DNA, 15 bp, Homo sapiens
tgatttgaaactcac

SEQ ID NO: 488516 - DNA, 15 bp, Homo sapiens
ctgatttgaaactca

SEQ ID NO: 488517 - DNA, 15 bp, Homo sapiens
actgatttgaaactc

SEQ ID NO: 488518 - DNA, 15 bp, Homo sapiens
gactgatttgaaact

SEQ ID NO: 488519 - DNA, 15 bp, Homo sapiens
ggactgatttgaaac

SEQ ID NO: 488520 - DNA, 15 bp, Homo sapiens
aggactgatttgaaa

SEQ ID NO: 488521 - DNA, 15 bp, Homo sapiens
caggactgatttgaa

SEQ ID NO: 488522 - DNA, 15 bp, Homo sapiens
gcaggactgatttga

SEQ ID NO: 488523 - DNA, 15 bp, Homo sapiens
ggcaggactgatttg

SEQ ID NO: 488524 - DNA, 15 bp, Homo sapiens
cggcaggactgattt

SEQ ID NO: 488525 - DNA, 15 bp, Homo sapiens
tcggcaggactgatt

SEQ ID NO: 488526 - DNA, 15 bp, Homo sapiens
ctcggcaggactgat

SEQ ID NO: 488527 - DNA, 15 bp, Homo sapiens
cctcggcaggactga

SEQ ID NO: 488528 - DNA, 15 bp, Homo sapiens
gcctcggcaggactg

SEQ ID NO: 488529 - DNA, 15 bp, Homo sapiens
tgcctcggcaggact

SEQ ID NO: 488530 - DNA, 15 bp, Homo sapiens
ctgcctcggcaggac

SEQ ID NO: 488531 - DNA, 15 bp, Homo sapiens
tctgcctcggcagga

SEQ ID NO: 488532 - DNA, 15 bp, Homo sapiens
atctgcctcggcagg

SEQ ID NO: 488533 - DNA, 15 bp, Homo sapiens
catctgcctcggcag

SEQ ID NO: 488534 - DNA, 15 bp, Homo sapiens
ccatctgcctcggca

SEQ ID NO: 488535 - DNA, 15 bp, Homo sapiens
gccatctgcctcggc

SEQ ID NO: 488536 - DNA, 15 bp, Homo sapiens
agccatctgcctcgg

SEQ ID NO: 488537 - DNA, 15 bp, Homo sapiens
aagccatctgcctcg

SEQ ID NO: 488538 - DNA, 15 bp, Homo sapiens
gaagccatctgcctc

SEQ ID NO: 488539 - DNA, 15 bp, Homo sapiens
ggaagccatctgcct

SEQ ID NO: 488540 - DNA, 15 bp, Homo sapiens
aggaagccatctgcc

SEQ ID NO: 488541 - DNA, 15 bp, Homo sapiens
gaggaagccatctgc

SEQ ID NO: 488542 - DNA, 15 bp, Homo sapiens
ggaggaagccatctg

SEQ ID NO: 488543 - DNA, 15 bp, Homo sapiens
tggaggaagccatct

SEQ ID NO: 488544 - DNA, 15 bp, Homo sapiens
ctggaggaagccatc

SEQ ID NO: 488545 - DNA, 15 bp, Homo sapiens
gctggaggaagccat

SEQ ID NO: 488546 - DNA, 15 bp, Homo sapiens
agctggaggaagcca

SEQ ID NO: 488547 - DNA, 15 bp, Homo sapiens
gagctggaggaagcc

SEQ ID NO: 488548 - DNA, 15 bp, Homo sapiens
agagctggaggaagc

SEQ ID NO: 488549 - DNA, 15 bp, Homo sapiens
cagagctggaggaag

SEQ ID NO: 488550 - DNA, 15 bp, Homo sapiens
gcagagctggaggaa

SEQ ID NO: 488551 - DNA, 15 bp, Homo sapiens
agcagagctggagga

SEQ ID NO: 488552 - DNA, 15 bp, Homo sapiens
aagcagagctggagg

SEQ ID NO: 488553 - DNA, 15 bp, Homo sapiens
taagcagagctggag

SEQ ID NO: 488554 - DNA, 15 bp, Homo sapiens
gtaagcagagctgga

SEQ ID NO: 488555 - DNA, 15 bp, Homo sapiens
agtaagcagagctgg

SEQ ID NO: 488556 - DNA, 15 bp, Homo sapiens
cagtaagcagagctg

SEQ ID NO: 488557 - DNA, 15 bp, Homo sapiens
tcagtaagcagagct

SEQ ID NO: 488558 - DNA, 15 bp, Homo sapiens
ttcagtaagcagagc

SEQ ID NO: 488559 - DNA, 15 bp, Homo sapiens
attcagtaagcagag

SEQ ID NO: 488560 - DNA, 15 bp, Homo sapiens
cattcagtaagcaga

SEQ ID NO: 488561 - DNA, 15 bp, Homo sapiens
gcattcagtaagcag

SEQ ID NO: 488562 - DNA, 15 bp, Homo sapiens
cgcattcagtaagca

SEQ ID NO: 488563 - DNA, 15 bp, Homo sapiens
tcgcattcagtaagc

SEQ ID NO: 488564 - DNA, 15 bp, Homo sapiens
ttcgcattcagtaag

SEQ ID NO: 488565 - DNA, 15 bp, Homo sapiens
cttcgcattcagtaa

SEQ ID NO: 488566 - DNA, 15 bp, Homo sapiens
acttcgcattcagta

SEQ ID NO: 488567 - DNA, 15 bp, Homo sapiens
gacttcgcattcagt

SEQ ID NO: 488568 - DNA, 15 bp, Homo sapiens
tgacttcgcattcag

SEQ ID NO: 488569 - DNA, 15 bp, Homo sapiens
gtgacttcgcattca

SEQ ID NO: 488570 - DNA, 15 bp, Homo sapiens
tgtgacttcgcattc

SEQ ID NO: 488571 - DNA, 15 bp, Homo sapiens
ctgtgacttcgcatt

SEQ ID NO: 488572 - DNA, 15 bp, Homo sapiens
actgtgacttcgcat

SEQ ID NO: 488573 - DNA, 15 bp, Homo sapiens
gactgtgacttcgca

SEQ ID NO: 488574 - DNA, 15 bp, Homo sapiens
tgactgtgacttcgc

SEQ ID NO: 488575 - DNA, 15 bp, Homo sapiens
ctgactgtgacttcg

SEQ ID NO: 488576 - DNA, 15 bp, Homo sapiens
actgactgtgacttc

SEQ ID NO: 488577 - DNA, 15 bp, Homo sapiens
tactgactgtgactt

SEQ ID NO: 488578 - DNA, 15 bp, Homo sapiens
ttactgactgtgact

SEQ ID NO: 488579 - DNA, 15 bp, Homo sapiens
cttactgactgtgac

SEQ ID NO: 488580 - DNA, 15 bp, Homo sapiens
tcttactgactgtga

SEQ ID NO: 488581 - DNA, 15 bp, Homo sapiens
ttcttactgactgtg

SEQ ID NO: 488582 - DNA, 15 bp, Homo sapiens
tttcttactgactgt

SEQ ID NO: 488583 - DNA, 15 bp, Homo sapiens
ttttcttactgactg

SEQ ID NO: 488584 - DNA, 15 bp, Homo sapiens
gttttcttactgact

SEQ ID NO: 488585 - DNA, 15 bp, Homo sapiens
agttttcttactgac

SEQ ID NO: 488586 - DNA, 15 bp, Homo sapiens
cagttttcttactga

SEQ ID NO: 488587 - DNA, 15 bp, Homo sapiens
ccagttttcttactg

SEQ ID NO: 488588 - DNA, 15 bp, Homo sapiens
accagttttcttact

SEQ ID NO: 488589 - DNA, 15 bp, Homo sapiens
aaccagttttcttac

SEQ ID NO: 488590 - DNA, 15 bp, Homo sapiens
aaaccagttttctta

SEQ ID NO: 488591 - DNA, 15 bp, Homo sapiens
aaaaccagttttctt

SEQ ID NO: 488592 - DNA, 15 bp, Homo sapiens
gaaaaccagttttct

SEQ ID NO: 488593 - DNA, 15 bp, Homo sapiens
agaaaaccagttttc

SEQ ID NO: 488594 - DNA, 15 bp, Homo sapiens
aagaaaaccagtttt

SEQ ID NO: 488595 - DNA, 15 bp, Homo sapiens
gaagaaaaccagttt

SEQ ID NO: 488596 - DNA, 15 bp, Homo sapiens
agaagaaaaccagtt

SEQ ID NO: 488597 - DNA, 15 bp, Homo sapiens
aagaagaaaaccagt

SEQ ID NO: 488598 - DNA, 15 bp, Homo sapiens
gaagaagaaaaccag

SEQ ID NO: 488599 - DNA, 15 bp, Homo sapiens
ggaagaagaaaacca

SEQ ID NO: 488600 - DNA, 15 bp, Homo sapiens
gggaagaagaaaacc

SEQ ID NO: 488601 - DNA, 15 bp, Homo sapiens
tgggaagaagaaaac

SEQ ID NO: 488602 - DNA, 15 bp, Homo sapiens
ctgggaagaagaaaa

SEQ ID NO: 488603 - DNA, 15 bp, Homo sapiens
cctgggaagaagaaa

SEQ ID NO: 488604 - DNA, 15 bp, Homo sapiens
gcctgggaagaagaa

SEQ ID NO: 488605 - DNA, 15 bp, Homo sapiens
cgcctgggaagaaga

SEQ ID NO: 488606 - DNA, 15 bp, Homo sapiens
gcgcctgggaagaag

SEQ ID NO: 488607 - DNA, 15 bp, Homo sapiens
agcgcctgggaagaa

SEQ ID NO: 488608 - DNA, 15 bp, Homo sapiens
cagcgcctgggaaga

SEQ ID NO: 488609 - DNA, 15 bp, Homo sapiens
gcagcgcctgggaag

SEQ ID NO: 488610 - DNA, 15 bp, Homo sapiens
ggcagcgcctgggaa

SEQ ID NO: 488611 - DNA, 15 bp, Homo sapiens
gggcagcgcctggga

SEQ ID NO: 488612 - DNA, 15 bp, Homo sapiens
ggggcagcgcctggg

SEQ ID NO: 488613 - DNA, 15 bp, Homo sapiens
tggggcagcgcctgg

SEQ ID NO: 488614 - DNA, 15 bp, Homo sapiens
atggggcagcgcctg

SEQ ID NO: 488615 - DNA, 15 bp, Homo sapiens
tatggggcagcgcct

SEQ ID NO: 488616 - DNA, 15 bp, Homo sapiens
gtatggggcagcgcc

SEQ ID NO: 488617 - DNA, 15 bp, Homo sapiens
ggtatggggcagcgc

SEQ ID NO: 488618 - DNA, 15 bp, Homo sapiens
aggtatggggcagcg

SEQ ID NO: 488619 - DNA, 15 bp, Homo sapiens
caggtatggggcagc

SEQ ID NO: 488620 - DNA, 15 bp, Homo sapiens
tcaggtatggggcag

SEQ ID NO: 488621 - DNA, 15 bp, Homo sapiens
ttcaggtatggggca

SEQ ID NO: 488622 - DNA, 15 bp, Homo sapiens
cttcaggtatggggc

SEQ ID NO: 488623 - DNA, 15 bp, Homo sapiens
tcttcaggtatgggg

SEQ ID NO: 488624 - DNA, 15 bp, Homo sapiens
gtcttcaggtatggg

SEQ ID NO: 488625 - DNA, 15 bp, Homo sapiens
ggtcttcaggtatgg

SEQ ID NO: 488626 - DNA, 15 bp, Homo sapiens
tggtcttcaggtatg

SEQ ID NO: 488627 - DNA, 15 bp, Homo sapiens
ttggtcttcaggtat

SEQ ID NO: 488628 - DNA, 15 bp, Homo sapiens
cttggtcttcaggta

SEQ ID NO: 488629 - DNA, 15 bp, Homo sapiens
acttggtcttcaggt

SEQ ID NO: 488630 - DNA, 15 bp, Homo sapiens
aacttggtcttcagg

SEQ ID NO: 488631 - DNA, 15 bp, Homo sapiens
aaacttggtcttcag

SEQ ID NO: 488632 - DNA, 15 bp, Homo sapiens
taaacttggtcttca

SEQ ID NO: 488633 - DNA, 15 bp, Homo sapiens
ataaacttggtcttc

SEQ ID NO: 488634 - DNA, 15 bp, Homo sapiens
gataaacttggtctt

SEQ ID NO: 488635 - DNA, 15 bp, Homo sapiens
agataaacttggtct

SEQ ID NO: 488636 - DNA, 15 bp, Homo sapiens
cagataaacttggtc

SEQ ID NO: 488637 - DNA, 15 bp, Homo sapiens
acagataaacttggt

SEQ ID NO: 488638 - DNA, 15 bp, Homo sapiens
cacagataaacttgg

SEQ ID NO: 488639 - DNA, 15 bp, Homo sapiens
acacagataaacttg

SEQ ID NO: 488640 - DNA, 15 bp, Homo sapiens
cacacagataaactt

SEQ ID NO: 488641 - DNA, 15 bp, Homo sapiens
tcacacagataaact

SEQ ID NO: 488642 - DNA, 15 bp, Homo sapiens
gtcacacagataaac

SEQ ID NO: 488643 - DNA, 15 bp, Homo sapiens
tgtcacacagataaa

SEQ ID NO: 488644 - DNA, 15 bp, Homo sapiens
gtgtcacacagataa

SEQ ID NO: 488645 - DNA, 15 bp, Homo sapiens
ggtgtcacacagata

SEQ ID NO: 488646 - DNA, 15 bp, Homo sapiens
cggtgtcacacagat

SEQ ID NO: 488647 - DNA, 15 bp, Homo sapiens
acggtgtcacacaga

SEQ ID NO: 488648 - DNA, 15 bp, Homo sapiens
tacggtgtcacacag

SEQ ID NO: 488649 - DNA, 15 bp, Homo sapiens
ttacggtgtcacaca

SEQ ID NO: 488650 - DNA, 15 bp, Homo sapiens
cttacggtgtcacac

SEQ ID NO: 488651 - DNA, 15 bp, Homo sapiens
acttacggtgtcaca

SEQ ID NO: 488652 - DNA, 15 bp, Homo sapiens
cacttacggtgtcac

SEQ ID NO: 488653 - DNA, 15 bp, Homo sapiens
ccacttacggtgtca

SEQ ID NO: 488654 - DNA, 15 bp, Homo sapiens
gccacttacggtgtc

SEQ ID NO: 488655 - DNA, 15 bp, Homo sapiens
agccacttacggtgt

SEQ ID NO: 488656 - DNA, 15 bp, Homo sapiens
aagccacttacggtg

SEQ ID NO: 488657 - DNA, 15 bp, Homo sapiens
gaagccacttacggt

SEQ ID NO: 488658 - DNA, 15 bp, Homo sapiens
ggaagccacttacgg

SEQ ID NO: 488659 - DNA, 15 bp, Homo sapiens
aggaagccacttacg

SEQ ID NO: 488660 - DNA, 15 bp, Homo sapiens
aaggaagccacttac

SEQ ID NO: 488661 - DNA, 15 bp, Homo sapiens
aaaggaagccactta

SEQ ID NO: 488662 - DNA, 15 bp, Homo sapiens
gaaaggaagccactt

SEQ ID NO: 488663 - DNA, 15 bp, Homo sapiens
ggaaaggaagccact

SEQ ID NO: 488664 - DNA, 15 bp, Homo sapiens
gggaaaggaagccac

SEQ ID NO: 488665 - DNA, 15 bp, Homo sapiens
ggggaaaggaagcca

SEQ ID NO: 488666 - DNA, 15 bp, Homo sapiens
cggggaaaggaagcc

SEQ ID NO: 488667 - DNA, 15 bp, Homo sapiens
acggggaaaggaagc

SEQ ID NO: 488668 - DNA, 15 bp, Homo sapiens
aacggggaaaggaag

SEQ ID NO: 488669 - DNA, 15 bp, Homo sapiens
aaacggggaaaggaa

SEQ ID NO: 488670 - DNA, 15 bp, Homo sapiens
aaaacggggaaagga

SEQ ID NO: 488671 - DNA, 15 bp, Homo sapiens
caaaacggggaaagg

SEQ ID NO: 488672 - DNA, 15 bp, Homo sapiens
gcaaaacggggaaag

SEQ ID NO: 488673 - DNA, 15 bp, Homo sapiens
ggcaaaacggggaaa

SEQ ID NO: 488674 - DNA, 15 bp, Homo sapiens
aggcaaaacggggaa

SEQ ID NO: 488675 - DNA, 15 bp, Homo sapiens
aaggcaaaacgggga

SEQ ID NO: 488676 - DNA, 15 bp, Homo sapiens
gaaggcaaaacgggg

SEQ ID NO: 488677 - DNA, 15 bp, Homo sapiens
tgaaggcaaaacggg

SEQ ID NO: 488678 - DNA, 15 bp, Homo sapiens
atgaaggcaaaacgg

SEQ ID NO: 488679 - DNA, 15 bp, Homo sapiens
aatgaaggcaaaacg

SEQ ID NO: 488680 - DNA, 15 bp, Homo sapiens
aaatgaaggcaaaac

SEQ ID NO: 488681 - DNA, 15 bp, Homo sapiens
gaaatgaaggcaaaa

SEQ ID NO: 488682 - DNA, 15 bp, Homo sapiens
agaaatgaaggcaaa

SEQ ID NO: 488683 - DNA, 15 bp, Homo sapiens
tagaaatgaaggcaa

SEQ ID NO: 488684 - DNA, 15 bp, Homo sapiens
ttagaaatgaaggca

SEQ ID NO: 488685 - DNA, 15 bp, Homo sapiens
attagaaatgaaggc

SEQ ID NO: 488686 - DNA, 15 bp, Homo sapiens
tattagaaatgaagg

SEQ ID NO: 488687 - DNA, 15 bp, Homo sapiens
atattagaaatgaag

SEQ ID NO: 488688 - DNA, 15 bp, Homo sapiens
gatattagaaatgaa

SEQ ID NO: 488689 - DNA, 15 bp, Homo sapiens
ggatattagaaatga

SEQ ID NO: 488690 - DNA, 15 bp, Homo sapiens
aggatattagaaatg

SEQ ID NO: 488691 - DNA, 15 bp, Homo sapiens
gaggatattagaaat

SEQ ID NO: 488692 - DNA, 15 bp, Homo sapiens
tgaggatattagaaa

SEQ ID NO: 488693 - DNA, 15 bp, Homo sapiens
ctgaggatattagaa

SEQ ID NO: 488694 - DNA, 15 bp, Homo sapiens
actgaggatattaga

SEQ ID NO: 488695 - DNA, 15 bp, Homo sapiens
aactgaggatattag

SEQ ID NO: 488696 - DNA, 15 bp, Homo sapiens
taactgaggatatta

SEQ ID NO: 488697 - DNA, 15 bp, Homo sapiens
ataactgaggatatt

SEQ ID NO: 488698 - DNA, 15 bp, Homo sapiens
gataactgaggatat

SEQ ID NO: 488699 - DNA, 15 bp, Homo sapiens
ggataactgaggata

SEQ ID NO: 488700 - DNA, 15 bp, Homo sapiens
gggataactgaggat

SEQ ID NO: 488701 - DNA, 15 bp, Homo sapiens
agggataactgagga

SEQ ID NO: 488702 - DNA, 15 bp, Homo sapiens
cagggataactgagg

SEQ ID NO: 488703 - DNA, 15 bp, Homo sapiens
ccagggataactgag

SEQ ID NO: 488704 - DNA, 15 bp, Homo sapiens
cccagggataactga

SEQ ID NO: 488705 - DNA, 15 bp, Homo sapiens
tcccagggataactg

SEQ ID NO: 488706 - DNA, 15 bp, Homo sapiens
ttcccagggataact

SEQ ID NO: 488707 - DNA, 15 bp, Homo sapiens
attcccagggataac

SEQ ID NO: 488708 - DNA, 15 bp, Homo sapiens
cattcccagggataa

SEQ ID NO: 488709 - DNA, 15 bp, Homo sapiens
ccattcccagggata

SEQ ID NO: 488710 - DNA, 15 bp, Homo sapiens
cccattcccagggat

SEQ ID NO: 488711 - DNA, 15 bp, Homo sapiens
tcccattcccaggga

SEQ ID NO: 488712 - DNA, 15 bp, Homo sapiens
gtcccattcccaggg

SEQ ID NO: 488713 - DNA, 15 bp, Homo sapiens
tgtcccattcccagg

SEQ ID NO: 488714 - DNA, 15 bp, Homo sapiens
gtgtcccattcccag

SEQ ID NO: 488715 - DNA, 15 bp, Homo sapiens
agtgtcccattccca

SEQ ID NO: 488716 - DNA, 15 bp, Homo sapiens
cagtgtcccattccc

SEQ ID NO: 488717 - DNA, 15 bp, Homo sapiens
ccagtgtcccattcc

SEQ ID NO: 488718 - DNA, 15 bp, Homo sapiens
cccagtgtcccattc

SEQ ID NO: 488719 - DNA, 15 bp, Homo sapiens
acccagtgtcccatt

SEQ ID NO: 488720 - DNA, 15 bp, Homo sapiens
cacccagtgtcccat

SEQ ID NO: 488721 - DNA, 15 bp, Homo sapiens
tcacccagtgtccca

SEQ ID NO: 488722 - DNA, 15 bp, Homo sapiens
ctcacccagtgtccc

SEQ ID NO: 488723 - DNA, 15 bp, Homo sapiens
tctcacccagtgtcc

SEQ ID NO: 488724 - DNA, 15 bp, Homo sapiens
ctctcacccagtgtc

SEQ ID NO: 488725 - DNA, 15 bp, Homo sapiens
actctcacccagtgt

SEQ ID NO: 488726 - DNA, 15 bp, Homo sapiens
aactctcacccagtg

SEQ ID NO: 488727 - DNA, 15 bp, Homo sapiens
taactctcacccagt

SEQ ID NO: 488728 - DNA, 15 bp, Homo sapiens
ttaactctcacccag

SEQ ID NO: 488729 - DNA, 15 bp, Homo sapiens
attaactctcaccca

SEQ ID NO: 488730 - DNA, 15 bp, Homo sapiens
gattaactctcaccc

SEQ ID NO: 488731 - DNA, 15 bp, Homo sapiens
agattaactctcacc

SEQ ID NO: 488732 - DNA, 15 bp, Homo sapiens
cagattaactctcac

SEQ ID NO: 488733 - DNA, 15 bp, Homo sapiens
gcagattaactctca

SEQ ID NO: 488734 - DNA, 15 bp, Homo sapiens
ggcagattaactctc

SEQ ID NO: 488735 - DNA, 15 bp, Homo sapiens
tggcagattaactct

SEQ ID NO: 488736 - DNA, 15 bp, Homo sapiens
ttggcagattaactc

SEQ ID NO: 488737 - DNA, 15 bp, Homo sapiens
tttggcagattaact

SEQ ID NO: 488738 - DNA, 15 bp, Homo sapiens
ctttggcagattaac

SEQ ID NO: 488739 - DNA, 15 bp, Homo sapiens
cctttggcagattaa

SEQ ID NO: 488740 - DNA, 15 bp, Homo sapiens
acctttggcagatta

SEQ ID NO: 488741 - DNA, 15 bp, Homo sapiens
aacctttggcagatt

SEQ ID NO: 488742 - DNA, 15 bp, Homo sapiens
caacctttggcagat

SEQ ID NO: 488743 - DNA, 15 bp, Homo sapiens
ccaacctttggcaga

SEQ ID NO: 488744 - DNA, 15 bp, Homo sapiens
tccaacctttggcag

SEQ ID NO: 488745 - DNA, 15 bp, Homo sapiens
ttccaacctttggca

SEQ ID NO: 488746 - DNA, 15 bp, Homo sapiens
cttccaacctttggc

SEQ ID NO: 488747 - DNA, 15 bp, Homo sapiens
gcttccaacctttgg

SEQ ID NO: 488748 - DNA, 15 bp, Homo sapiens
ggcttccaacctttg

SEQ ID NO: 488749 - DNA, 15 bp, Homo sapiens
gggcttccaaccttt

SEQ ID NO: 488750 - DNA, 15 bp, Homo sapiens
ggggcttccaacctt

SEQ ID NO: 488751 - DNA, 15 bp, Homo sapiens
aggggcttccaacct

SEQ ID NO: 488752 - DNA, 15 bp, Homo sapiens
caggggcttccaacc

SEQ ID NO: 488753 - DNA, 15 bp, Homo sapiens
ccaggggcttccaac

SEQ ID NO: 488754 - DNA, 15 bp, Homo sapiens
cccaggggcttccaa

SEQ ID NO: 488755 - DNA, 15 bp, Homo sapiens
gcccaggggcttcca

SEQ ID NO: 488756 - DNA, 15 bp, Homo sapiens
agcccaggggcttcc

SEQ ID NO: 488757 - DNA, 15 bp, Homo sapiens
tagcccaggggcttc

SEQ ID NO: 488758 - DNA, 15 bp, Homo sapiens
atagcccaggggctt

SEQ ID NO: 488759 - DNA, 15 bp, Homo sapiens
catagcccaggggct

SEQ ID NO: 488760 - DNA, 15 bp, Homo sapiens
acatagcccaggggc

SEQ ID NO: 488761 - DNA, 15 bp, Homo sapiens
aacatagcccagggg

SEQ ID NO: 488762 - DNA, 15 bp, Homo sapiens
aaacatagcccaggg

SEQ ID NO: 488763 - DNA, 15 bp, Homo sapiens
taaacatagcccagg

SEQ ID NO: 488764 - DNA, 15 bp, Homo sapiens
ctaaacatagcccag

SEQ ID NO: 488765 - DNA, 15 bp, Homo sapiens
actaaacatagccca

SEQ ID NO: 488766 - DNA, 15 bp, Homo sapiens
tactaaacatagccc

SEQ ID NO: 488767 - DNA, 15 bp, Homo sapiens
gtactaaacatagcc

SEQ ID NO: 488768 - DNA, 15 bp, Homo sapiens
agtactaaacatagc

SEQ ID NO: 488769 - DNA, 15 bp, Homo sapiens
gagtactaaacatag

SEQ ID NO: 488770 - DNA, 15 bp, Homo sapiens
tgagtactaaacata

SEQ ID NO: 488771 - DNA, 15 bp, Homo sapiens
ttgagtactaaacat

SEQ ID NO: 488772 - DNA, 15 bp, Homo sapiens
tttgagtactaaaca

SEQ ID NO: 488773 - DNA, 15 bp, Homo sapiens
ctttgagtactaaac

SEQ ID NO: 488774 - DNA, 15 bp, Homo sapiens
actttgagtactaaa

SEQ ID NO: 488775 - DNA, 15 bp, Homo sapiens
cactttgagtactaa

SEQ ID NO: 488776 - DNA, 15 bp, Homo sapiens
tcactttgagtacta

SEQ ID NO: 488777 - DNA, 15 bp, Homo sapiens
gtcactttgagtact

SEQ ID NO: 488778 - DNA, 15 bp, Homo sapiens
ggtcactttgagtac

SEQ ID NO: 488779 - DNA, 15 bp, Homo sapiens
aggtcactttgagta

SEQ ID NO: 488780 - DNA, 15 bp, Homo sapiens
aaggtcactttgagt

SEQ ID NO: 488781 - DNA, 15 bp, Homo sapiens
caaggtcactttgag

SEQ ID NO: 488782 - DNA, 15 bp, Homo sapiens
acaaggtcactttga

SEQ ID NO: 488783 - DNA, 15 bp, Homo sapiens
cacaaggtcactttg

SEQ ID NO: 488784 - DNA, 15 bp, Homo sapiens
acacaaggtcacttt

SEQ ID NO: 488785 - DNA, 15 bp, Homo sapiens
cacacaaggtcactt

SEQ ID NO: 488786 - DNA, 15 bp, Homo sapiens
acacacaaggtcact

SEQ ID NO: 488787 - DNA, 15 bp, Homo sapiens
aacacacaaggtcac

SEQ ID NO: 488788 - DNA, 15 bp, Homo sapiens
aaacacacaaggtca

SEQ ID NO: 488789 - DNA, 15 bp, Homo sapiens
taaacacacaaggtc

SEQ ID NO: 488790 - DNA, 15 bp, Homo sapiens
ttaaacacacaaggt

SEQ ID NO: 488791 - DNA, 15 bp, Homo sapiens
tttaaacacacaagg

SEQ ID NO: 488792 - DNA, 15 bp, Homo sapiens
ttttaaacacacaag

SEQ ID NO: 488793 - DNA, 15 bp, Homo sapiens
tttttaaacacacaa

SEQ ID NO: 488794 - DNA, 15 bp, Homo sapiens
ctttttaaacacaca

SEQ ID NO: 488795 - DNA, 15 bp, Homo sapiens
gctttttaaacacac

SEQ ID NO: 488796 - DNA, 15 bp, Homo sapiens
agctttttaaacaca

SEQ ID NO: 488797 - DNA, 15 bp, Homo sapiens
aagctttttaaacac

SEQ ID NO: 488798 - DNA, 15 bp, Homo sapiens
caagctttttaaaca

SEQ ID NO: 488799 - DNA, 15 bp, Homo sapiens
tcaagctttttaaac

SEQ ID NO: 488800 - DNA, 15 bp, Homo sapiens
ctcaagctttttaaa

SEQ ID NO: 488801 - DNA, 15 bp, Homo sapiens
gctcaagctttttaa

SEQ ID NO: 488802 - DNA, 15 bp, Homo sapiens
agctcaagcttttta

SEQ ID NO: 488803 - DNA, 15 bp, Homo sapiens
aagctcaagcttttt

SEQ ID NO: 488804 - DNA, 15 bp, Homo sapiens
aaagctcaagctttt

SEQ ID NO: 488805 - DNA, 15 bp, Homo sapiens
aaaagctcaagcttt

SEQ ID NO: 488806 - DNA, 15 bp, Homo sapiens
taaaagctcaagctt

SEQ ID NO: 488807 - DNA, 15 bp, Homo sapiens
ataaaagctcaagct

SEQ ID NO: 488808 - DNA, 15 bp, Homo sapiens
aataaaagctcaagc

SEQ ID NO: 488809 - DNA, 15 bp, Homo sapiens
aaataaaagctcaag

SEQ ID NO: 488810 - DNA, 15 bp, Homo sapiens
aaaataaaagctcaa

SEQ ID NO: 488811 - DNA, 15 bp, Homo sapiens
aaaaataaaagctca

SEQ ID NO: 488812 - DNA, 15 bp, Homo sapiens
gaaaaataaaagctc

SEQ ID NO: 488813 - DNA, 15 bp, Homo sapiens
agaaaaataaaagct

SEQ ID NO: 488814 - DNA, 15 bp, Homo sapiens
cagaaaaataaaagc

SEQ ID NO: 488815 - DNA, 15 bp, Homo sapiens
acagaaaaataaaag

SEQ ID NO: 488816 - DNA, 15 bp, Homo sapiens
aacagaaaaataaaa

SEQ ID NO: 488817 - DNA, 15 bp, Homo sapiens
caacagaaaaataaa

SEQ ID NO: 488818 - DNA, 15 bp, Homo sapiens
ccaacagaaaaataa

SEQ ID NO: 488819 - DNA, 15 bp, Homo sapiens
tccaacagaaaaata

SEQ ID NO: 488820 - DNA, 15 bp, Homo sapiens
ctccaacagaaaaat

SEQ ID NO: 488821 - DNA, 15 bp, Homo sapiens
tctccaacagaaaaa

SEQ ID NO: 488822 - DNA, 15 bp, Homo sapiens
gtctccaacagaaaa

SEQ ID NO: 488823 - DNA, 15 bp, Homo sapiens
ggtctccaacagaaa

SEQ ID NO: 488824 - DNA, 15 bp, Homo sapiens
tggtctccaacagaa

SEQ ID NO: 488825 - DNA, 15 bp, Homo sapiens
ctggtctccaacaga

SEQ ID NO: 488826 - DNA, 15 bp, Homo sapiens
tctggtctccaacag

SEQ ID NO: 488827 - DNA, 15 bp, Homo sapiens
ctctggtctccaaca

SEQ ID NO: 488828 - DNA, 15 bp, Homo sapiens
actctggtctccaac

SEQ ID NO: 488829 - DNA, 15 bp, Homo sapiens
aactctggtctccaa

SEQ ID NO: 488830 - DNA, 15 bp, Homo sapiens
aaactctggtctcca

SEQ ID NO: 488831 - DNA, 15 bp, Homo sapiens
caaactctggtctcc

SEQ ID NO: 488832 - DNA, 15 bp, Homo sapiens
tcaaactctggtctc

SEQ ID NO: 488833 - DNA, 15 bp, Homo sapiens
atcaaactctggtct

SEQ ID NO: 488834 - DNA, 15 bp, Homo sapiens
catcaaactctggtc

SEQ ID NO: 488835 - DNA, 15 bp, Homo sapiens
ccatcaaactctggt

SEQ ID NO: 488836 - DNA, 15 bp, Homo sapiens
gccatcaaactctgg

SEQ ID NO: 488837 - DNA, 15 bp, Homo sapiens
agccatcaaactctg

SEQ ID NO: 488838 - DNA, 15 bp, Homo sapiens
aagccatcaaactct

SEQ ID NO: 488839 - DNA, 15 bp, Homo sapiens
caagccatcaaactc

SEQ ID NO: 488840 - DNA, 15 bp, Homo sapiens
acaagccatcaaact

SEQ ID NO: 488841 - DNA, 15 bp, Homo sapiens
cacaagccatcaaac

SEQ ID NO: 488842 - DNA, 15 bp, Homo sapiens
acacaagccatcaaa

SEQ ID NO: 488843 - DNA, 15 bp, Homo sapiens
cacacaagccatcaa

SEQ ID NO: 488844 - DNA, 15 bp, Homo sapiens
acacacaagccatca

SEQ ID NO: 488845 - DNA, 15 bp, Homo sapiens
cacacacaagccatc

SEQ ID NO: 488846 - DNA, 15 bp, Homo sapiens
acacacacaagccat

SEQ ID NO: 488847 - DNA, 15 bp, Homo sapiens
cacacacacaagcca

SEQ ID NO: 488848 - DNA, 15 bp, Homo sapiens
acacacacacaagcc

SEQ ID NO: 488849 - DNA, 15 bp, Homo sapiens
cacacacacacaagc

SEQ ID NO: 488850 - DNA, 15 bp, Homo sapiens
acacacacacacaag

SEQ ID NO: 488851 - DNA, 15 bp, Homo sapiens
aacacacacacacaa

SEQ ID NO: 488852 - DNA, 15 bp, Homo sapiens
aaacacacacacaca

SEQ ID NO: 488853 - DNA, 15 bp, Homo sapiens
aaaacacacacacac

SEQ ID NO: 488854 - DNA, 15 bp, Homo sapiens
caaaacacacacaca

SEQ ID NO: 488855 - DNA, 15 bp, Homo sapiens
acaaaacacacacac

SEQ ID NO: 488856 - DNA, 15 bp, Homo sapiens
aacaaaacacacaca

SEQ ID NO: 488857 - DNA, 15 bp, Homo sapiens
gaacaaaacacacac

SEQ ID NO: 488858 - DNA, 15 bp, Homo sapiens
agaacaaaacacaca

SEQ ID NO: 488859 - DNA, 15 bp, Homo sapiens
aagaacaaaacacac

SEQ ID NO: 488860 - DNA, 15 bp, Homo sapiens
aaagaacaaaacaca

SEQ ID NO: 488861 - DNA, 15 bp, Homo sapiens
aaaagaacaaaacac

SEQ ID NO: 488862 - DNA, 15 bp, Homo sapiens
aaaaagaacaaaaca

SEQ ID NO: 488863 - DNA, 15 bp, Homo sapiens
aaaaaagaacaaaac

SEQ ID NO: 488864 - DNA, 15 bp, Homo sapiens
aaaaaaagaacaaaa

SEQ ID NO: 488865 - DNA, 15 bp, Homo sapiens
aaaaaaaagaacaaa

SEQ ID NO: 488866 - DNA, 15 bp, Homo sapiens
aaaaaaaaagaacaa

SEQ ID NO: 488867 - DNA, 15 bp, Homo sapiens
aaaaaaaaaagaaca

SEQ ID NO: 488868 - DNA, 15 bp, Homo sapiens
gaaaaaaaaaaaaga

SEQ ID NO: 488869 - DNA, 15 bp, Homo sapiens
ggaaaaaaaaaaaag

SEQ ID NO: 488870 - DNA, 15 bp, Homo sapiens
tggaaaaaaaaaaaa

SEQ ID NO: 488871 - DNA, 15 bp, Homo sapiens
atggaaaaaaaaaaa

SEQ ID NO: 488872 - DNA, 15 bp, Homo sapiens
aatggaaaaaaaaaa

SEQ ID NO: 488873 - DNA, 15 bp, Homo sapiens
caatggaaaaaaaaa

SEQ ID NO: 488874 - DNA, 15 bp, Homo sapiens
acaatggaaaaaaaa

SEQ ID NO: 488875 - DNA, 15 bp, Homo sapiens
cacaatggaaaaaaa

SEQ ID NO: 488876 - DNA, 15 bp, Homo sapiens
acacaatggaaaaaa

SEQ ID NO: 488877 - DNA, 15 bp, Homo sapiens
gacacaatggaaaaa

SEQ ID NO: 488878 - DNA, 15 bp, Homo sapiens
agacacaatggaaaa

SEQ ID NO: 488879 - DNA, 15 bp, Homo sapiens
aagacacaatggaaa

SEQ ID NO: 488880 - DNA, 15 bp, Homo sapiens
caagacacaatggaa

SEQ ID NO: 488881 - DNA, 15 bp, Homo sapiens
acaagacacaatgga

SEQ ID NO: 488882 - DNA, 15 bp, Homo sapiens
gacaagacacaatgg

SEQ ID NO: 488883 - DNA, 15 bp, Homo sapiens
tgacaagacacaatg

SEQ ID NO: 488884 - DNA, 15 bp, Homo sapiens
ttgacaagacacaat

SEQ ID NO: 488885 - DNA, 15 bp, Homo sapiens
gttgacaagacacaa

SEQ ID NO: 488886 - DNA, 15 bp, Homo sapiens
ggttgacaagacaca

SEQ ID NO: 488887 - DNA, 15 bp, Homo sapiens
gggttgacaagacac

SEQ ID NO: 488888 - DNA, 15 bp, Homo sapiens
ggggttgacaagaca

SEQ ID NO: 488889 - DNA, 15 bp, Homo sapiens
gggggttgacaagac

SEQ ID NO: 488890 - DNA, 15 bp, Homo sapiens
ggggggttgacaaga

SEQ ID NO: 488891 - DNA, 15 bp, Homo sapiens
cggggggttgacaag

SEQ ID NO: 488892 - DNA, 15 bp, Homo sapiens
acggggggttgacaa

SEQ ID NO: 488893 - DNA, 15 bp, Homo sapiens
aacggggggttgaca

SEQ ID NO: 488894 - DNA, 15 bp, Homo sapiens
aaacggggggttgac

SEQ ID NO: 488895 - DNA, 15 bp, Homo sapiens
gaaacggggggttga

SEQ ID NO: 488896 - DNA, 15 bp, Homo sapiens
ggaaacggggggttg

SEQ ID NO: 488897 - DNA, 15 bp, Homo sapiens
gggaaacggggggtt

SEQ ID NO: 488898 - DNA, 15 bp, Homo sapiens
ggggaaacggggggt

SEQ ID NO: 488899 - DNA, 15 bp, Homo sapiens
aggggaaacgggggg

SEQ ID NO: 488900 - DNA, 15 bp, Homo sapiens
gaggggaaacggggg

SEQ ID NO: 488901 - DNA, 15 bp, Homo sapiens
ggaggggaaacgggg

SEQ ID NO: 488902 - DNA, 15 bp, Homo sapiens
aggaggggaaacggg

SEQ ID NO: 488903 - DNA, 15 bp, Homo sapiens
caggaggggaaacgg

SEQ ID NO: 488904 - DNA, 15 bp, Homo sapiens
gcaggaggggaaacg

SEQ ID NO: 488905 - DNA, 15 bp, Homo sapiens
agcaggaggggaaac

SEQ ID NO: 488906 - DNA, 15 bp, Homo sapiens
cagcaggaggggaaa

SEQ ID NO: 488907 - DNA, 15 bp, Homo sapiens
gcagcaggaggggaa

SEQ ID NO: 488908 - DNA, 15 bp, Homo sapiens
ggcagcaggagggga

SEQ ID NO: 488909 - DNA, 15 bp, Homo sapiens
gggcagcaggagggg

SEQ ID NO: 488910 - DNA, 15 bp, Homo sapiens
ggggcagcaggaggg

SEQ ID NO: 488911 - DNA, 15 bp, Homo sapiens
gggggcagcaggagg

SEQ ID NO: 488912 - DNA, 15 bp, Homo sapiens
ggggggcagcaggag

SEQ ID NO: 488913 - DNA, 15 bp, Homo sapiens
tggggggcagcagga

SEQ ID NO: 488914 - DNA, 15 bp, Homo sapiens
atggggggcagcagg

SEQ ID NO: 488915 - DNA, 15 bp, Homo sapiens
aatggggggcagcag

SEQ ID NO: 488916 - DNA, 15 bp, Homo sapiens
aaatggggggcagca

SEQ ID NO: 488917 - DNA, 15 bp, Homo sapiens
gaaatggggggcagc

SEQ ID NO: 488918 - DNA, 15 bp, Homo sapiens
ggaaatggggggcag

SEQ ID NO: 488919 - DNA, 15 bp, Homo sapiens
aggaaatggggggca

SEQ ID NO: 488920 - DNA, 15 bp, Homo sapiens
taggaaatggggggc

SEQ ID NO: 488921 - DNA, 15 bp, Homo sapiens
gtaggaaatgggggg

SEQ ID NO: 488922 - DNA, 15 bp, Homo sapiens
tgtaggaaatggggg

SEQ ID NO: 488923 - DNA, 15 bp, Homo sapiens
ctgtaggaaatgggg

SEQ ID NO: 488924 - DNA, 15 bp, Homo sapiens
tctgtaggaaatggg

SEQ ID NO: 488925 - DNA, 15 bp, Homo sapiens
ttctgtaggaaatgg

SEQ ID NO: 488926 - DNA, 15 bp, Homo sapiens
gttctgtaggaaatg

SEQ ID NO: 488927 - DNA, 15 bp, Homo sapiens
cgttctgtaggaaat

SEQ ID NO: 488928 - DNA, 15 bp, Homo sapiens
tcgttctgtaggaaa

SEQ ID NO: 488929 - DNA, 15 bp, Homo sapiens
gtcgttctgtaggaa

SEQ ID NO: 488930 - DNA, 15 bp, Homo sapiens
ggtcgttctgtagga

SEQ ID NO: 488931 - DNA, 15 bp, Homo sapiens
aggtcgttctgtagg

SEQ ID NO: 488932 - DNA, 15 bp, Homo sapiens
caggtcgttctgtag

SEQ ID NO: 488933 - DNA, 15 bp, Homo sapiens
gcaggtcgttctgta

SEQ ID NO: 488934 - DNA, 15 bp, Homo sapiens
tgcaggtcgttctgt

SEQ ID NO: 488935 - DNA, 15 bp, Homo sapiens
ctgcaggtcgttctg

SEQ ID NO: 488936 - DNA, 15 bp, Homo sapiens
gctgcaggtcgttct

SEQ ID NO: 488937 - DNA, 15 bp, Homo sapiens
tgctgcaggtcgttc

SEQ ID NO: 488938 - DNA, 15 bp, Homo sapiens
ttgctgcaggtcgtt

SEQ ID NO: 488939 - DNA, 15 bp, Homo sapiens
attgctgcaggtcgt

SEQ ID NO: 488940 - DNA, 15 bp, Homo sapiens
tattgctgcaggtcg

SEQ ID NO: 488941 - DNA, 15 bp, Homo sapiens
gtattgctgcaggtc

SEQ ID NO: 488942 - DNA, 15 bp, Homo sapiens
ggtattgctgcaggt

SEQ ID NO: 488943 - DNA, 15 bp, Homo sapiens
tggtattgctgcagg

SEQ ID NO: 488944 - DNA, 15 bp, Homo sapiens
atggtattgctgcag

SEQ ID NO: 488945 - DNA, 15 bp, Homo sapiens
aatggtattgctgca

SEQ ID NO: 488946 - DNA, 15 bp, Homo sapiens
caatggtattgctgc

SEQ ID NO: 488947 - DNA, 15 bp, Homo sapiens
tcaatggtattgctg

SEQ ID NO: 488948 - DNA, 15 bp, Homo sapiens
gtcaatggtattgct

SEQ ID NO: 488949 - DNA, 15 bp, Homo sapiens
ggtcaatggtattgc

SEQ ID NO: 488950 - DNA, 15 bp, Homo sapiens
aggtcaatggtattg

SEQ ID NO: 488951 - DNA, 15 bp, Homo sapiens
caggtcaatggtatt

SEQ ID NO: 488952 - DNA, 15 bp, Homo sapiens
gcaggtcaatggtat

SEQ ID NO: 488953 - DNA, 15 bp, Homo sapiens
ggcaggtcaatggta

SEQ ID NO: 488954 - DNA, 15 bp, Homo sapiens
cggcaggtcaatggt

SEQ ID NO: 488955 - DNA, 15 bp, Homo sapiens
tcggcaggtcaatgg

SEQ ID NO: 488956 - DNA, 15 bp, Homo sapiens
atcggcaggtcaatg

SEQ ID NO: 488957 - DNA, 15 bp, Homo sapiens
catcggcaggtcaat

SEQ ID NO: 488958 - DNA, 15 bp, Homo sapiens
acatcggcaggtcaa

SEQ ID NO: 488959 - DNA, 15 bp, Homo sapiens
gacatcggcaggtca

SEQ ID NO: 488960 - DNA, 15 bp, Homo sapiens
ggacatcggcaggtc

SEQ ID NO: 488961 - DNA, 15 bp, Homo sapiens
gggacatcggcaggt

SEQ ID NO: 488962 - DNA, 15 bp, Homo sapiens
ggggacatcggcagg

SEQ ID NO: 488963 - DNA, 15 bp, Homo sapiens
gggggacatcggcag

SEQ ID NO: 488964 - DNA, 15 bp, Homo sapiens
ggggggacatcggca

SEQ ID NO: 488965 - DNA, 15 bp, Homo sapiens
cggggggacatcggc

SEQ ID NO: 488966 - DNA, 15 bp, Homo sapiens
gcggggggacatcgg

SEQ ID NO: 488967 - DNA, 15 bp, Homo sapiens
tgcggggggacatcg

SEQ ID NO: 488968 - DNA, 15 bp, Homo sapiens
gtgcggggggacatc

SEQ ID NO: 488969 - DNA, 15 bp, Homo sapiens
agtgcggggggacat

SEQ ID NO: 488970 - DNA, 15 bp, Homo sapiens
aagtgcggggggaca

SEQ ID NO: 488971 - DNA, 15 bp, Homo sapiens
aaagtgcggggggac

SEQ ID NO: 488972 - DNA, 15 bp, Homo sapiens
taaagtgcgggggga

SEQ ID NO: 488973 - DNA, 15 bp, Homo sapiens
ctaaagtgcgggggg

SEQ ID NO: 488974 - DNA, 15 bp, Homo sapiens
tctaaagtgcggggg

SEQ ID NO: 488975 - DNA, 15 bp, Homo sapiens
atctaaagtgcgggg

SEQ ID NO: 488976 - DNA, 15 bp, Homo sapiens
aatctaaagtgcggg

SEQ ID NO: 488977 - DNA, 15 bp, Homo sapiens
gaatctaaagtgcgg

SEQ ID NO: 488978 - DNA, 15 bp, Homo sapiens
tgaatctaaagtgcg

SEQ ID NO: 488979 - DNA, 15 bp, Homo sapiens
atgaatctaaagtgc

SEQ ID NO: 488980 - DNA, 15 bp, Homo sapiens
aatgaatctaaagtg

SEQ ID NO: 488981 - DNA, 15 bp, Homo sapiens
caatgaatctaaagt

SEQ ID NO: 488982 - DNA, 15 bp, Homo sapiens
tcaatgaatctaaag

SEQ ID NO: 488983 - DNA, 15 bp, Homo sapiens
atcaatgaatctaaa

SEQ ID NO: 488984 - DNA, 15 bp, Homo sapiens
catcaatgaatctaa

SEQ ID NO: 488985 - DNA, 15 bp, Homo sapiens
gcatcaatgaatcta

SEQ ID NO: 488986 - DNA, 15 bp, Homo sapiens
tgcatcaatgaatct

SEQ ID NO: 488987 - DNA, 15 bp, Homo sapiens
ctgcatcaatgaatc

SEQ ID NO: 488988 - DNA, 15 bp, Homo sapiens
actgcatcaatgaat

SEQ ID NO: 488989 - DNA, 15 bp, Homo sapiens
aactgcatcaatgaa

SEQ ID NO: 488990 - DNA, 15 bp, Homo sapiens
aaactgcatcaatga

SEQ ID NO: 488991 - DNA, 15 bp, Homo sapiens
caaactgcatcaatg

SEQ ID NO: 488992 - DNA, 15 bp, Homo sapiens
ccaaactgcatcaat

SEQ ID NO: 488993 - DNA, 15 bp, Homo sapiens
tccaaactgcatcaa

SEQ ID NO: 488994 - DNA, 15 bp, Homo sapiens
ttccaaactgcatca

SEQ ID NO: 488995 - DNA, 15 bp, Homo sapiens
tttccaaactgcatc

SEQ ID NO: 488996 - DNA, 15 bp, Homo sapiens
atttccaaactgcat

SEQ ID NO: 488997 - DNA, 15 bp, Homo sapiens
tatttccaaactgca

SEQ ID NO: 488998 - DNA, 15 bp, Homo sapiens
ttatttccaaactgc

SEQ ID NO: 488999 - DNA, 15 bp, Homo sapiens
attatttccaaactg

SEQ ID NO: 489000 - DNA, 15 bp, Homo sapiens
cattatttccaaact

SEQ ID NO: 489001 - DNA, 15 bp, Homo sapiens
ccattatttccaaac

SEQ ID NO: 489002 - DNA, 15 bp, Homo sapiens
accattatttccaaa

SEQ ID NO: 489003 - DNA, 15 bp, Homo sapiens
caccattatttccaa

SEQ ID NO: 489004 - DNA, 15 bp, Homo sapiens
tcaccattatttcca

SEQ ID NO: 489005 - DNA, 15 bp, Homo sapiens
ttcaccattatttcc

SEQ ID NO: 489006 - DNA, 15 bp, Homo sapiens
cttcaccattatttc

SEQ ID NO: 489007 - DNA, 15 bp, Homo sapiens
ccttcaccattattt

SEQ ID NO: 489008 - DNA, 15 bp, Homo sapiens
accttcaccattatt

SEQ ID NO: 489009 - DNA, 15 bp, Homo sapiens
caccttcaccattat

SEQ ID NO: 489010 - DNA, 15 bp, Homo sapiens
gcaccttcaccatta

SEQ ID NO: 489011 - DNA, 15 bp, Homo sapiens
agcaccttcaccatt

SEQ ID NO: 489012 - DNA, 15 bp, Homo sapiens
cagcaccttcaccat

SEQ ID NO: 489013 - DNA, 15 bp, Homo sapiens
tcagcaccttcacca

SEQ ID NO: 489014 - DNA, 15 bp, Homo sapiens
ttcagcaccttcacc

SEQ ID NO: 489015 - DNA, 15 bp, Homo sapiens
gttcagcaccttcac

SEQ ID NO: 489016 - DNA, 15 bp, Homo sapiens
ggttcagcaccttca

SEQ ID NO: 489017 - DNA, 15 bp, Homo sapiens
gggttcagcaccttc

SEQ ID NO: 489018 - DNA, 15 bp, Homo sapiens
agggttcagcacctt

SEQ ID NO: 489019 - DNA, 15 bp, Homo sapiens
gagggttcagcacct

SEQ ID NO: 489020 - DNA, 15 bp, Homo sapiens
tgagggttcagcacc

SEQ ID NO: 489021 - DNA, 15 bp, Homo sapiens
ctgagggttcagcac

SEQ ID NO: 489022 - DNA, 15 bp, Homo sapiens
gctgagggttcagca

SEQ ID NO: 489023 - DNA, 15 bp, Homo sapiens
tgctgagggttcagc

SEQ ID NO: 489024 - DNA, 15 bp, Homo sapiens
ctgctgagggttcag

SEQ ID NO: 489025 - DNA, 15 bp, Homo sapiens
cctgctgagggttca

SEQ ID NO: 489026 - DNA, 15 bp, Homo sapiens
tcctgctgagggttc

SEQ ID NO: 489027 - DNA, 15 bp, Homo sapiens
ctcctgctgagggtt

SEQ ID NO: 489028 - DNA, 15 bp, Homo sapiens
cctcctgctgagggt

SEQ ID NO: 489029 - DNA, 15 bp, Homo sapiens
ccctcctgctgaggg

SEQ ID NO: 489030 - DNA, 15 bp, Homo sapiens
gccctcctgctgagg

SEQ ID NO: 489031 - DNA, 15 bp, Homo sapiens
tgccctcctgctgag

SEQ ID NO: 489032 - DNA, 15 bp, Homo sapiens
ctgccctcctgctga

SEQ ID NO: 489033 - DNA, 15 bp, Homo sapiens
actgccctcctgctg

SEQ ID NO: 489034 - DNA, 15 bp, Homo sapiens
aactgccctcctgct

SEQ ID NO: 489035 - DNA, 15 bp, Homo sapiens
aaactgccctcctgc

SEQ ID NO: 489036 - DNA, 15 bp, Homo sapiens
caaactgccctcctg

SEQ ID NO: 489037 - DNA, 15 bp, Homo sapiens
ccaaactgccctcct

SEQ ID NO: 489038 - DNA, 15 bp, Homo sapiens
accaaactgccctcc

SEQ ID NO: 489039 - DNA, 15 bp, Homo sapiens
caccaaactgccctc

SEQ ID NO: 489040 - DNA, 15 bp, Homo sapiens
tcaccaaactgccct

SEQ ID NO: 489041 - DNA, 15 bp, Homo sapiens
ctcaccaaactgccc

SEQ ID NO: 489042 - DNA, 15 bp, Homo sapiens
actcaccaaactgcc

SEQ ID NO: 489043 - DNA, 15 bp, Homo sapiens
tactcaccaaactgc

SEQ ID NO: 489044 - DNA, 15 bp, Homo sapiens
atactcaccaaactg

SEQ ID NO: 489045 - DNA, 15 bp, Homo sapiens
aatactcaccaaact

SEQ ID NO: 489046 - DNA, 15 bp, Homo sapiens
aaatactcaccaaac

SEQ ID NO: 489047 - DNA, 15 bp, Homo sapiens
caaatactcaccaaa

SEQ ID NO: 489048 - DNA, 15 bp, Homo sapiens
ccaaatactcaccaa

SEQ ID NO: 489049 - DNA, 15 bp, Homo sapiens
accaaatactcacca

SEQ ID NO: 489050 - DNA, 15 bp, Homo sapiens
aaccaaatactcacc

SEQ ID NO: 489051 - DNA, 15 bp, Homo sapiens
caaccaaatactcac

SEQ ID NO: 489052 - DNA, 15 bp, Homo sapiens
tcaaccaaatactca

SEQ ID NO: 489053 - DNA, 15 bp, Homo sapiens
gtcaaccaaatactc

SEQ ID NO: 489054 - DNA, 15 bp, Homo sapiens
tgtcaaccaaatact

SEQ ID NO: 489055 - DNA, 15 bp, Homo sapiens
ctgtcaaccaaatac

SEQ ID NO: 489056 - DNA, 15 bp, Homo sapiens
tctgtcaaccaaata

SEQ ID NO: 489057 - DNA, 15 bp, Homo sapiens
gtctgtcaaccaaat

SEQ ID NO: 489058 - DNA, 15 bp, Homo sapiens
agtctgtcaaccaaa

SEQ ID NO: 489059 - DNA, 15 bp, Homo sapiens
aagtctgtcaaccaa

SEQ ID NO: 489060 - DNA, 15 bp, Homo sapiens
aaagtctgtcaacca

SEQ ID NO: 489061 - DNA, 15 bp, Homo sapiens
caaagtctgtcaacc

SEQ ID NO: 489062 - DNA, 15 bp, Homo sapiens
acaaagtctgtcaac

SEQ ID NO: 489063 - DNA, 15 bp, Homo sapiens
gacaaagtctgtcaa

SEQ ID NO: 489064 - DNA, 15 bp, Homo sapiens
ggacaaagtctgtca

SEQ ID NO: 489065 - DNA, 15 bp, Homo sapiens
gggacaaagtctgtc

SEQ ID NO: 489066 - DNA, 15 bp, Homo sapiens
agggacaaagtctgt

SEQ ID NO: 489067 - DNA, 15 bp, Homo sapiens
tagggacaaagtctg

SEQ ID NO: 489068 - DNA, 15 bp, Homo sapiens
atagggacaaagtct

SEQ ID NO: 489069 - DNA, 15 bp, Homo sapiens
tatagggacaaagtc

SEQ ID NO: 489070 - DNA, 15 bp, Homo sapiens
ttatagggacaaagt

SEQ ID NO: 489071 - DNA, 15 bp, Homo sapiens
cttatagggacaaag

SEQ ID NO: 489072 - DNA, 15 bp, Homo sapiens
ccttatagggacaaa

SEQ ID NO: 489073 - DNA, 15 bp, Homo sapiens
cccttatagggacaa

SEQ ID NO: 489074 - DNA, 15 bp, Homo sapiens
tcccttatagggaca

SEQ ID NO: 489075 - DNA, 15 bp, Homo sapiens
ttcccttatagggac

SEQ ID NO: 489076 - DNA, 15 bp, Homo sapiens
cttcccttataggga

SEQ ID NO: 489077 - DNA, 15 bp, Homo sapiens
acttcccttataggg

SEQ ID NO: 489078 - DNA, 15 bp, Homo sapiens
aacttcccttatagg

SEQ ID NO: 489079 - DNA, 15 bp, Homo sapiens
caacttcccttatag

SEQ ID NO: 489080 - DNA, 15 bp, Homo sapiens
ccaacttcccttata

SEQ ID NO: 489081 - DNA, 15 bp, Homo sapiens
accaacttcccttat

SEQ ID NO: 489082 - DNA, 15 bp, Homo sapiens
gaccaacttccctta

SEQ ID NO: 489083 - DNA, 15 bp, Homo sapiens
ggaccaacttccctt

SEQ ID NO: 489084 - DNA, 15 bp, Homo sapiens
gggaccaacttccct

SEQ ID NO: 489085 - DNA, 15 bp, Homo sapiens
ggggaccaacttccc

SEQ ID NO: 489086 - DNA, 15 bp, Homo sapiens
aggggaccaacttcc

SEQ ID NO: 489087 - DNA, 15 bp, Homo sapiens
aaggggaccaacttc

SEQ ID NO: 489088 - DNA, 15 bp, Homo sapiens
aaaggggaccaactt

SEQ ID NO: 489089 - DNA, 15 bp, Homo sapiens
caaaggggaccaact

SEQ ID NO: 489090 - DNA, 15 bp, Homo sapiens
acaaaggggaccaac

SEQ ID NO: 489091 - DNA, 15 bp, Homo sapiens
cacaaaggggaccaa

SEQ ID NO: 489092 - DNA, 15 bp, Homo sapiens
acacaaaggggacca

SEQ ID NO: 489093 - DNA, 15 bp, Homo sapiens
cacacaaaggggacc

SEQ ID NO: 489094 - DNA, 15 bp, Homo sapiens
tcacacaaaggggac

SEQ ID NO: 489095 - DNA, 15 bp, Homo sapiens
atcacacaaagggga

SEQ ID NO: 489096 - DNA, 15 bp, Homo sapiens
catcacacaaagggg

SEQ ID NO: 489097 - DNA, 15 bp, Homo sapiens
gcatcacacaaaggg

SEQ ID NO: 489098 - DNA, 15 bp, Homo sapiens
agcatcacacaaagg

SEQ ID NO: 489099 - DNA, 15 bp, Homo sapiens
gagcatcacacaaag

SEQ ID NO: 489100 - DNA, 15 bp, Homo sapiens
agagcatcacacaaa

SEQ ID NO: 489101 - DNA, 15 bp, Homo sapiens
gagagcatcacacaa

SEQ ID NO: 489102 - DNA, 15 bp, Homo sapiens
tgagagcatcacaca

SEQ ID NO: 489103 - DNA, 15 bp, Homo sapiens
gtgagagcatcacac

SEQ ID NO: 489104 - DNA, 15 bp, Homo sapiens
tgtgagagcatcaca

SEQ ID NO: 489105 - DNA, 15 bp, Homo sapiens
atgtgagagcatcac

SEQ ID NO: 489106 - DNA, 15 bp, Homo sapiens
catgtgagagcatca

SEQ ID NO: 489107 - DNA, 15 bp, Homo sapiens
acatgtgagagcatc

SEQ ID NO: 489108 - DNA, 15 bp, Homo sapiens
tacatgtgagagcat

SEQ ID NO: 489109 - DNA, 15 bp, Homo sapiens
gtacatgtgagagca

SEQ ID NO: 489110 - DNA, 15 bp, Homo sapiens
tgtacatgtgagagc

SEQ ID NO: 489111 - DNA, 15 bp, Homo sapiens
gtgtacatgtgagag

SEQ ID NO: 489112 - DNA, 15 bp, Homo sapiens
tgtgtacatgtgaga

SEQ ID NO: 489113 - DNA, 15 bp, Homo sapiens
gtgtgtacatgtgag

SEQ ID NO: 489114 - DNA, 15 bp, Homo sapiens
ggtgtgtacatgtga

SEQ ID NO: 489115 - DNA, 15 bp, Homo sapiens
cggtgtgtacatgtg

SEQ ID NO: 489116 - DNA, 15 bp, Homo sapiens
tcggtgtgtacatgt

SEQ ID NO: 489117 - DNA, 15 bp, Homo sapiens
ctcggtgtgtacatg

SEQ ID NO: 489118 - DNA, 15 bp, Homo sapiens
tctcggtgtgtacat

SEQ ID NO: 489119 - DNA, 15 bp, Homo sapiens
ctctcggtgtgtaca

SEQ ID NO: 489120 - DNA, 15 bp, Homo sapiens
gctctcggtgtgtac

SEQ ID NO: 489121 - DNA, 15 bp, Homo sapiens
agctctcggtgtgta

SEQ ID NO: 489122 - DNA, 15 bp, Homo sapiens
cagctctcggtgtgt

SEQ ID NO: 489123 - DNA, 15 bp, Homo sapiens
ccagctctcggtgtg

SEQ ID NO: 489124 - DNA, 15 bp, Homo sapiens
accagctctcggtgt

SEQ ID NO: 489125 - DNA, 15 bp, Homo sapiens
gaccagctctcggtg

SEQ ID NO: 489126 - DNA, 15 bp, Homo sapiens
tgaccagctctcggt

SEQ ID NO: 489127 - DNA, 15 bp, Homo sapiens
gtgaccagctctcgg

SEQ ID NO: 489128 - DNA, 15 bp, Homo sapiens
agtgaccagctctcg

SEQ ID NO: 489129 - DNA, 15 bp, Homo sapiens
gagtgaccagctctc

SEQ ID NO: 489130 - DNA, 15 bp, Homo sapiens
cgagtgaccagctct

SEQ ID NO: 489131 - DNA, 15 bp, Homo sapiens
ccgagtgaccagctc

SEQ ID NO: 489132 - DNA, 15 bp, Homo sapiens
tccgagtgaccagct

SEQ ID NO: 489133 - DNA, 15 bp, Homo sapiens
ttccgagtgaccagc

SEQ ID NO: 489134 - DNA, 15 bp, Homo sapiens
attccgagtgaccag

SEQ ID NO: 489135 - DNA, 15 bp, Homo sapiens
cattccgagtgacca

SEQ ID NO: 489136 - DNA, 15 bp, Homo sapiens
ccattccgagtgacc

SEQ ID NO: 489137 - DNA, 15 bp, Homo sapiens
accattccgagtgac

SEQ ID NO: 489138 - DNA, 15 bp, Homo sapiens
taccattccgagtga

SEQ ID NO: 489139 - DNA, 15 bp, Homo sapiens
ctaccattccgagtg

SEQ ID NO: 489140 - DNA, 15 bp, Homo sapiens
cctaccattccgagt

SEQ ID NO: 489141 - DNA, 15 bp, Homo sapiens
tcctaccattccgag

SEQ ID NO: 489142 - DNA, 15 bp, Homo sapiens
ctcctaccattccga

SEQ ID NO: 489143 - DNA, 15 bp, Homo sapiens
tctcctaccattccg

SEQ ID NO: 489144 - DNA, 15 bp, Homo sapiens
atctcctaccattcc

SEQ ID NO: 489145 - DNA, 15 bp, Homo sapiens
aatctcctaccattc

SEQ ID NO: 489146 - DNA, 15 bp, Homo sapiens
gaatctcctaccatt

SEQ ID NO: 489147 - DNA, 15 bp, Homo sapiens
agaatctcctaccat

SEQ ID NO: 489148 - DNA, 15 bp, Homo sapiens
tagaatctcctacca

SEQ ID NO: 489149 - DNA, 15 bp, Homo sapiens
ctagaatctcctacc

SEQ ID NO: 489150 - DNA, 15 bp, Homo sapiens
tctagaatctcctac

SEQ ID NO: 489151 - DNA, 15 bp, Homo sapiens
ctctagaatctccta

SEQ ID NO: 489152 - DNA, 15 bp, Homo sapiens
gctctagaatctcct

SEQ ID NO: 489153 - DNA, 15 bp, Homo sapiens
agctctagaatctcc

SEQ ID NO: 489154 - DNA, 15 bp, Homo sapiens
aagctctagaatctc

SEQ ID NO: 489155 - DNA, 15 bp, Homo sapiens
aaagctctagaatct

SEQ ID NO: 489156 - DNA, 15 bp, Homo sapiens
caaagctctagaatc

SEQ ID NO: 489157 - DNA, 15 bp, Homo sapiens
gcaaagctctagaat

SEQ ID NO: 489158 - DNA, 15 bp, Homo sapiens
agcaaagctctagaa

SEQ ID NO: 489159 - DNA, 15 bp, Homo sapiens
aagcaaagctctaga

SEQ ID NO: 489160 - DNA, 15 bp, Homo sapiens
aaagcaaagctctag

SEQ ID NO: 489161 - DNA, 15 bp, Homo sapiens
gaaagcaaagctcta

SEQ ID NO: 489162 - DNA, 15 bp, Homo sapiens
ggaaagcaaagctct

SEQ ID NO: 489163 - DNA, 15 bp, Homo sapiens
tggaaagcaaagctc

SEQ ID NO: 489164 - DNA, 15 bp, Homo sapiens
ttggaaagcaaagct

SEQ ID NO: 489165 - DNA, 15 bp, Homo sapiens
tttggaaagcaaagc

SEQ ID NO: 489166 - DNA, 15 bp, Homo sapiens
ttttggaaagcaaag

SEQ ID NO: 489167 - DNA, 15 bp, Homo sapiens
cttttggaaagcaaa

SEQ ID NO: 489168 - DNA, 15 bp, Homo sapiens
tcttttggaaagcaa

SEQ ID NO: 489169 - DNA, 15 bp, Homo sapiens
ctcttttggaaagca

SEQ ID NO: 489170 - DNA, 15 bp, Homo sapiens
tctcttttggaaagc

SEQ ID NO: 489171 - DNA, 15 bp, Homo sapiens
atctcttttggaaag

SEQ ID NO: 489172 - DNA, 15 bp, Homo sapiens
catctcttttggaaa

SEQ ID NO: 489173 - DNA, 15 bp, Homo sapiens
ccatctcttttggaa

SEQ ID NO: 489174 - DNA, 15 bp, Homo sapiens
accatctcttttgga

SEQ ID NO: 489175 - DNA, 15 bp, Homo sapiens
taccatctcttttgg

SEQ ID NO: 489176 - DNA, 15 bp, Homo sapiens
ataccatctcttttg

SEQ ID NO: 489177 - DNA, 15 bp, Homo sapiens
cataccatctctttt

SEQ ID NO: 489178 - DNA, 15 bp, Homo sapiens
tcataccatctcttt

SEQ ID NO: 489179 - DNA, 15 bp, Homo sapiens
ttcataccatctctt

SEQ ID NO: 489180 - DNA, 15 bp, Homo sapiens
attcataccatctct

SEQ ID NO: 489181 - DNA, 15 bp, Homo sapiens
cattcataccatctc

SEQ ID NO: 489182 - DNA, 15 bp, Homo sapiens
gcattcataccatct

SEQ ID NO: 489183 - DNA, 15 bp, Homo sapiens
ggcattcataccatc

SEQ ID NO: 489184 - DNA, 15 bp, Homo sapiens
tggcattcataccat

SEQ ID NO: 489185 - DNA, 15 bp, Homo sapiens
gtggcattcatacca

SEQ ID NO: 489186 - DNA, 15 bp, Homo sapiens
tgtggcattcatacc

SEQ ID NO: 489187 - DNA, 15 bp, Homo sapiens
atgtggcattcatac

SEQ ID NO: 489188 - DNA, 15 bp, Homo sapiens
catgtggcattcata

SEQ ID NO: 489189 - DNA, 15 bp, Homo sapiens
acatgtggcattcat

SEQ ID NO: 489190 - DNA, 15 bp, Homo sapiens
cacatgtggcattca

SEQ ID NO: 489191 - DNA, 15 bp, Homo sapiens
acacatgtggcattc

SEQ ID NO: 489192 - DNA, 15 bp, Homo sapiens
cacacatgtggcatt

SEQ ID NO: 489193 - DNA, 15 bp, Homo sapiens
tcacacatgtggcat

SEQ ID NO: 489194 - DNA, 15 bp, Homo sapiens
ctcacacatgtggca

SEQ ID NO: 489195 - DNA, 15 bp, Homo sapiens
actcacacatgtggc

SEQ ID NO: 489196 - DNA, 15 bp, Homo sapiens
tactcacacatgtgg

SEQ ID NO: 489197 - DNA, 15 bp, Homo sapiens
atactcacacatgtg

SEQ ID NO: 489198 - DNA, 15 bp, Homo sapiens
tatactcacacatgt

SEQ ID NO: 489199 - DNA, 15 bp, Homo sapiens
ttatactcacacatg

SEQ ID NO: 489200 - DNA, 15 bp, Homo sapiens
tttatactcacacat

SEQ ID NO: 489201 - DNA, 15 bp, Homo sapiens
atttatactcacaca

SEQ ID NO: 489202 - DNA, 15 bp, Homo sapiens
gatttatactcacac

SEQ ID NO: 489203 - DNA, 15 bp, Homo sapiens
agatttatactcaca

SEQ ID NO: 489204 - DNA, 15 bp, Homo sapiens
aagatttatactcac

SEQ ID NO: 489205 - DNA, 15 bp, Homo sapiens
gaagatttatactca

SEQ ID NO: 489206 - DNA, 15 bp, Homo sapiens
agaagatttatactc

SEQ ID NO: 489207 - DNA, 15 bp, Homo sapiens
tagaagatttatact

SEQ ID NO: 489208 - DNA, 15 bp, Homo sapiens
ctagaagatttatac

SEQ ID NO: 489209 - DNA, 15 bp, Homo sapiens
gctagaagatttata

SEQ ID NO: 489210 - DNA, 15 bp, Homo sapiens
tgctagaagatttat

SEQ ID NO: 489211 - DNA, 15 bp, Homo sapiens
ctgctagaagattta

SEQ ID NO: 489212 - DNA, 15 bp, Homo sapiens
gctgctagaagattt

SEQ ID NO: 489213 - DNA, 15 bp, Homo sapiens
ggctgctagaagatt

SEQ ID NO: 489214 - DNA, 15 bp, Homo sapiens
tggctgctagaagat

SEQ ID NO: 489215 - DNA, 15 bp, Homo sapiens
gtggctgctagaaga

SEQ ID NO: 489216 - DNA, 15 bp, Homo sapiens
tgtggctgctagaag

SEQ ID NO: 489217 - DNA, 15 bp, Homo sapiens
gtgtggctgctagaa

SEQ ID NO: 489218 - DNA, 15 bp, Homo sapiens
agtgtggctgctaga

SEQ ID NO: 489219 - DNA, 15 bp, Homo sapiens
cagtgtggctgctag

SEQ ID NO: 489220 - DNA, 15 bp, Homo sapiens
ccagtgtggctgcta

SEQ ID NO: 489221 - DNA, 15 bp, Homo sapiens
tccagtgtggctgct

SEQ ID NO: 489222 - DNA, 15 bp, Homo sapiens
ttccagtgtggctgc

SEQ ID NO: 489223 - DNA, 15 bp, Homo sapiens
tttccagtgtggctg

SEQ ID NO: 489224 - DNA, 15 bp, Homo sapiens
atttccagtgtggct

SEQ ID NO: 489225 - DNA, 15 bp, Homo sapiens
tatttccagtgtggc

SEQ ID NO: 489226 - DNA, 15 bp, Homo sapiens
ctatttccagtgtgg

SEQ ID NO: 489227 - DNA, 15 bp, Homo sapiens
tctatttccagtgtg

SEQ ID NO: 489228 - DNA, 15 bp, Homo sapiens
gtctatttccagtgt

SEQ ID NO: 489229 - DNA, 15 bp, Homo sapiens
cgtctatttccagtg

SEQ ID NO: 489230 - DNA, 15 bp, Homo sapiens
tcgtctatttccagt

SEQ ID NO: 489231 - DNA, 15 bp, Homo sapiens
ttcgtctatttccag

SEQ ID NO: 489232 - DNA, 15 bp, Homo sapiens
gttcgtctatttcca

SEQ ID NO: 489233 - DNA, 15 bp, Homo sapiens
agttcgtctatttcc

SEQ ID NO: 489234 - DNA, 15 bp, Homo sapiens
aagttcgtctatttc

SEQ ID NO: 489235 - DNA, 15 bp, Homo sapiens
taagttcgtctattt

SEQ ID NO: 489236 - DNA, 15 bp, Homo sapiens
ttaagttcgtctatt

SEQ ID NO: 489237 - DNA, 15 bp, Homo sapiens
attaagttcgtctat

SEQ ID NO: 489238 - DNA, 15 bp, Homo sapiens
aattaagttcgtcta

SEQ ID NO: 489239 - DNA, 15 bp, Homo sapiens
aaattaagttcgtct

SEQ ID NO: 489240 - DNA, 15 bp, Homo sapiens
aaaattaagttcgtc

SEQ ID NO: 489241 - DNA, 15 bp, Homo sapiens
aaaaattaagttcgt

SEQ ID NO: 489242 - DNA, 15 bp, Homo sapiens
taaaaattaagttcg

SEQ ID NO: 489243 - DNA, 15 bp, Homo sapiens
gtaaaaattaagttc

SEQ ID NO: 489244 - DNA, 15 bp, Homo sapiens
tgtaaaaattaagtt

SEQ ID NO: 489245 - DNA, 15 bp, Homo sapiens
ttgtaaaaattaagt

SEQ ID NO: 489246 - DNA, 15 bp, Homo sapiens
attgtaaaaattaag

SEQ ID NO: 489247 - DNA, 15 bp, Homo sapiens
tattgtaaaaattaa

SEQ ID NO: 489248 - DNA, 15 bp, Homo sapiens
atattgtaaaaatta

SEQ ID NO: 489249 - DNA, 15 bp, Homo sapiens
tatattgtaaaaatt

SEQ ID NO: 489250 - DNA, 15 bp, Homo sapiens
atatattgtaaaaat

SEQ ID NO: 489251 - DNA, 15 bp, Homo sapiens
aatatattgtaaaaa

SEQ ID NO: 489252 - DNA, 15 bp, Homo sapiens
aaatatattgtaaaa

SEQ ID NO: 489253 - DNA, 15 bp, Homo sapiens
aaaatatattgtaaa

SEQ ID NO: 489254 - DNA, 15 bp, Homo sapiens
taaaatatattgtaa

SEQ ID NO: 489255 - DNA, 15 bp, Homo sapiens
ataaaatatattgta

SEQ ID NO: 489256 - DNA, 15 bp, Homo sapiens
aataaaatatattgt

SEQ ID NO: 489257 - DNA, 15 bp, Homo sapiens
aaataaaatatattg

SEQ ID NO: 489258 - DNA, 15 bp, Homo sapiens
gtgggttaaataaaa

SEQ ID NO: 489259 - DNA, 15 bp, Homo sapiens
agtgggttaaataaa

SEQ ID NO: 489260 - DNA, 15 bp, Homo sapiens
tagtgggttaaataa

SEQ ID NO: 489261 - DNA, 15 bp, Homo sapiens
ttagtgggttaaata

SEQ ID NO: 489262 - DNA, 15 bp, Homo sapiens
tttagtgggttaaat

SEQ ID NO: 489263 - DNA, 15 bp, Homo sapiens
atttagtgggttaaa

SEQ ID NO: 489264 - DNA, 15 bp, Homo sapiens
gatttagtgggttaa

SEQ ID NO: 489265 - DNA, 15 bp, Homo sapiens
ggatttagtgggtta

SEQ ID NO: 489266 - DNA, 15 bp, Homo sapiens
tggatttagtgggtt

SEQ ID NO: 489267 - DNA, 15 bp, Homo sapiens
ttggatttagtgggt

SEQ ID NO: 489268 - DNA, 15 bp, Homo sapiens
gttggatttagtggg

SEQ ID NO: 489269 - DNA, 15 bp, Homo sapiens
tgttggatttagtgg

SEQ ID NO: 489270 - DNA, 15 bp, Homo sapiens
atgttggatttagtg

SEQ ID NO: 489271 - DNA, 15 bp, Homo sapiens
tatgttggatttagt

SEQ ID NO: 489272 - DNA, 15 bp, Homo sapiens
gtatgttggatttag

SEQ ID NO: 489273 - DNA, 15 bp, Homo sapiens
agtatgttggattta

SEQ ID NO: 489274 - DNA, 15 bp, Homo sapiens
gagtatgttggattt

SEQ ID NO: 489275 - DNA, 15 bp, Homo sapiens
agagtatgttggatt

SEQ ID NO: 489276 - DNA, 15 bp, Homo sapiens
gagagtatgttggat

SEQ ID NO: 489277 - DNA, 15 bp, Homo sapiens
tgagagtatgttgga

SEQ ID NO: 489278 - DNA, 15 bp, Homo sapiens
ttgagagtatgttgg

SEQ ID NO: 489279 - DNA, 15 bp, Homo sapiens
attgagagtatgttg

SEQ ID NO: 489280 - DNA, 15 bp, Homo sapiens
aattgagagtatgtt

SEQ ID NO: 489281 - DNA, 15 bp, Homo sapiens
aaattgagagtatgt

SEQ ID NO: 489282 - DNA, 15 bp, Homo sapiens
taaattgagagtatg

SEQ ID NO: 489283 - DNA, 15 bp, Homo sapiens
ttaaattgagagtat

SEQ ID NO: 489284 - DNA, 15 bp, Homo sapiens
gttaaattgagagta

SEQ ID NO: 489285 - DNA, 15 bp, Homo sapiens
tgttaaattgagagt

SEQ ID NO: 489286 - DNA, 15 bp, Homo sapiens
atgttaaattgagag

SEQ ID NO: 489287 - DNA, 15 bp, Homo sapiens
aatgttaaattgaga

SEQ ID NO: 489288 - DNA, 15 bp, Homo sapiens
aaatgttaaattgag

SEQ ID NO: 489289 - DNA, 15 bp, Homo sapiens
gaaatgttaaattga

SEQ ID NO: 489290 - DNA, 15 bp, Homo sapiens
tgaaatgttaaattg

SEQ ID NO: 489291 - DNA, 15 bp, Homo sapiens
ctgaaatgttaaatt

SEQ ID NO: 489292 - DNA, 15 bp, Homo sapiens
tctgaaatgttaaat

SEQ ID NO: 489293 - DNA, 15 bp, Homo sapiens
ttctgaaatgttaaa

SEQ ID NO: 489294 - DNA, 15 bp, Homo sapiens
tttctgaaatgttaa

SEQ ID NO: 489295 - DNA, 15 bp, Homo sapiens
ttttctgaaatgtta

SEQ ID NO: 489296 - DNA, 15 bp, Homo sapiens
tttttctgaaatgtt

SEQ ID NO: 489297 - DNA, 15 bp, Homo sapiens
ctttttctgaaatgt

SEQ ID NO: 489298 - DNA, 15 bp, Homo sapiens
actttttctgaaatg

SEQ ID NO: 489299 - DNA, 15 bp, Homo sapiens
aactttttctgaaat

SEQ ID NO: 489300 - DNA, 15 bp, Homo sapiens
caactttttctgaaa

SEQ ID NO: 489301 - DNA, 15 bp, Homo sapiens
tcaactttttctgaa

SEQ ID NO: 489302 - DNA, 15 bp, Homo sapiens
ctcaactttttctga

SEQ ID NO: 489303 - DNA, 15 bp, Homo sapiens
cctcaactttttctg

SEQ ID NO: 489304 - DNA, 15 bp, Homo sapiens
gcctcaactttttct

SEQ ID NO: 489305 - DNA, 15 bp, Homo sapiens
agcctcaactttttc

SEQ ID NO: 489306 - DNA, 15 bp, Homo sapiens
cagcctcaacttttt

SEQ ID NO: 489307 - DNA, 15 bp, Homo sapiens
ccagcctcaactttt

SEQ ID NO: 489308 - DNA, 15 bp, Homo sapiens
cccagcctcaacttt

SEQ ID NO: 489309 - DNA, 15 bp, Homo sapiens
acccagcctcaactt

SEQ ID NO: 489310 - DNA, 15 bp, Homo sapiens
cacccagcctcaact

SEQ ID NO: 489311 - DNA, 15 bp, Homo sapiens
tcacccagcctcaac

SEQ ID NO: 489312 - DNA, 15 bp, Homo sapiens
ctcacccagcctcaa

SEQ ID NO: 489313 - DNA, 15 bp, Homo sapiens
actcacccagcctca

SEQ ID NO: 489314 - DNA, 15 bp, Homo sapiens
cactcacccagcctc

SEQ ID NO: 489315 - DNA, 15 bp, Homo sapiens
ccactcacccagcct

SEQ ID NO: 489316 - DNA, 15 bp, Homo sapiens
gccactcacccagcc

SEQ ID NO: 489317 - DNA, 15 bp, Homo sapiens
agccactcacccagc

SEQ ID NO: 489318 - DNA, 15 bp, Homo sapiens
gagccactcacccag

SEQ ID NO: 489319 - DNA, 15 bp, Homo sapiens
tgagccactcaccca

SEQ ID NO: 489320 - DNA, 15 bp, Homo sapiens
atgagccactcaccc

SEQ ID NO: 489321 - DNA, 15 bp, Homo sapiens
catgagccactcacc

SEQ ID NO: 489322 - DNA, 15 bp, Homo sapiens
gcatgagccactcac

SEQ ID NO: 489323 - DNA, 15 bp, Homo sapiens
ggcatgagccactca

SEQ ID NO: 489324 - DNA, 15 bp, Homo sapiens
aggcatgagccactc

SEQ ID NO: 489325 - DNA, 15 bp, Homo sapiens
caggcatgagccact

SEQ ID NO: 489326 - DNA, 15 bp, Homo sapiens
acccacctcggcctc

SEQ ID NO: 489327 - DNA, 15 bp, Homo sapiens
cacccacctcggcct

SEQ ID NO: 489328 - DNA, 15 bp, Homo sapiens
ccacccacctcggcc

SEQ ID NO: 489329 - DNA, 15 bp, Homo sapiens
tccacccacctcggc

SEQ ID NO: 489330 - DNA, 15 bp, Homo sapiens
atccacccacctcgg

SEQ ID NO: 489331 - DNA, 15 bp, Homo sapiens
gatccacccacctcg

SEQ ID NO: 489332 - DNA, 15 bp, Homo sapiens
tgatccacccacctc

SEQ ID NO: 489333 - DNA, 15 bp, Homo sapiens
agtgatccacccacc

SEQ ID NO: 489334 - DNA, 15 bp, Homo sapiens
aagtgatccacccac

SEQ ID NO: 489335 - DNA, 15 bp, Homo sapiens
caagtgatccaccca

SEQ ID NO: 489336 - DNA, 15 bp, Homo sapiens
tcaagtgatccaccc

SEQ ID NO: 489337 - DNA, 15 bp, Homo sapiens
ctcaagtgatccacc

SEQ ID NO: 489338 - DNA, 15 bp, Homo sapiens
cctcaagtgatccac

SEQ ID NO: 489339 - DNA, 15 bp, Homo sapiens
acctcaagtgatcca

SEQ ID NO: 489340 - DNA, 15 bp, Homo sapiens
actggtctcgaactc

SEQ ID NO: 489341 - DNA, 15 bp, Homo sapiens
gactggtctcgaact

SEQ ID NO: 489342 - DNA, 15 bp, Homo sapiens
agactggtctcgaac

SEQ ID NO: 489343 - DNA, 15 bp, Homo sapiens
cagactggtctcgaa

SEQ ID NO: 489344 - DNA, 15 bp, Homo sapiens
tcagactggtctcga

SEQ ID NO: 489345 - DNA, 15 bp, Homo sapiens
gtcagactggtctcg

SEQ ID NO: 489346 - DNA, 15 bp, Homo sapiens
ggtcagactggtctc

SEQ ID NO: 489347 - DNA, 15 bp, Homo sapiens
tggtcagactggtct

SEQ ID NO: 489348 - DNA, 15 bp, Homo sapiens
ttggtcagactggtc

SEQ ID NO: 489349 - DNA, 15 bp, Homo sapiens
tttggtcagactggt

SEQ ID NO: 489350 - DNA, 15 bp, Homo sapiens
ttttggtcagactgg

SEQ ID NO: 489351 - DNA, 15 bp, Homo sapiens
attttggtcagactg

SEQ ID NO: 489352 - DNA, 15 bp, Homo sapiens
gattttggtcagact

SEQ ID NO: 489353 - DNA, 15 bp, Homo sapiens
agattttggtcagac

SEQ ID NO: 489354 - DNA, 15 bp, Homo sapiens
gagattttggtcaga

SEQ ID NO: 489355 - DNA, 15 bp, Homo sapiens
agagattttggtcag

SEQ ID NO: 489356 - DNA, 15 bp, Homo sapiens
tagagattttggtca

SEQ ID NO: 489357 - DNA, 15 bp, Homo sapiens
ttagagattttggtc

SEQ ID NO: 489358 - DNA, 15 bp, Homo sapiens
tttagagattttggt

SEQ ID NO: 489359 - DNA, 15 bp, Homo sapiens
ttttagagattttgg

SEQ ID NO: 489360 - DNA, 15 bp, Homo sapiens
attttagagattttg

SEQ ID NO: 489361 - DNA, 15 bp, Homo sapiens
tattttagagatttt

SEQ ID NO: 489362 - DNA, 15 bp, Homo sapiens
atattttagagattt

SEQ ID NO: 489363 - DNA, 15 bp, Homo sapiens
tatattttagagatt

SEQ ID NO: 489364 - DNA, 15 bp, Homo sapiens
ttatattttagagat

SEQ ID NO: 489365 - DNA, 15 bp, Homo sapiens
tttatattttagaga

SEQ ID NO: 489366 - DNA, 15 bp, Homo sapiens
ttttatattttagag

SEQ ID NO: 489367 - DNA, 15 bp, Homo sapiens
tttttatattttaga

SEQ ID NO: 489368 - DNA, 15 bp, Homo sapiens
atttttatattttag

SEQ ID NO: 489369 - DNA, 15 bp, Homo sapiens
aatttttatatttta

SEQ ID NO: 489370 - DNA, 15 bp, Homo sapiens
agctaatttttatat

SEQ ID NO: 489371 - DNA, 15 bp, Homo sapiens
cagctaatttttata

SEQ ID NO: 489372 - DNA, 15 bp, Homo sapiens
ccagctaatttttat

SEQ ID NO: 489373 - DNA, 15 bp, Homo sapiens
cccagctaattttta

SEQ ID NO: 489374 - DNA, 15 bp, Homo sapiens
cgccaccatgcccag

SEQ ID NO: 489375 - DNA, 15 bp, Homo sapiens
gcgccaccatgccca

SEQ ID NO: 489376 - DNA, 15 bp, Homo sapiens
tgcgccaccatgccc

SEQ ID NO: 489377 - DNA, 15 bp, Homo sapiens
atgcgccaccatgcc

SEQ ID NO: 489378 - DNA, 15 bp, Homo sapiens
tatgcgccaccatgc

SEQ ID NO: 489379 - DNA, 15 bp, Homo sapiens
gtatgcgccaccatg

SEQ ID NO: 489380 - DNA, 15 bp, Homo sapiens
ggtatgcgccaccat

SEQ ID NO: 489381 - DNA, 15 bp, Homo sapiens
aggtatgcgccacca

SEQ ID NO: 489382 - DNA, 15 bp, Homo sapiens
caggtatgcgccacc

SEQ ID NO: 489383 - DNA, 15 bp, Homo sapiens
acaggtatgcgccac

SEQ ID NO: 489384 - DNA, 15 bp, Homo sapiens
tacaggtatgcgcca

SEQ ID NO: 489385 - DNA, 15 bp, Homo sapiens
ttacaggtatgcgcc

SEQ ID NO: 489386 - DNA, 15 bp, Homo sapiens
attacaggtatgcgc

SEQ ID NO: 489387 - DNA, 15 bp, Homo sapiens
gattacaggtatgcg

SEQ ID NO: 489388 - DNA, 15 bp, Homo sapiens
ggattacaggtatgc

SEQ ID NO: 489389 - DNA, 15 bp, Homo sapiens
gggattacaggtatg

SEQ ID NO: 489390 - DNA, 15 bp, Homo sapiens
tgggattacaggtat

SEQ ID NO: 489391 - DNA, 15 bp, Homo sapiens
ctgggattacaggta

SEQ ID NO: 489392 - DNA, 15 bp, Homo sapiens
ttgagtagctgggat

SEQ ID NO: 489393 - DNA, 15 bp, Homo sapiens
cttgagtagctggga

SEQ ID NO: 489394 - DNA, 15 bp, Homo sapiens
tcttgagtagctggg

SEQ ID NO: 489395 - DNA, 15 bp, Homo sapiens
ttcttgagtagctgg

SEQ ID NO: 489396 - DNA, 15 bp, Homo sapiens
cttcttgagtagctg

SEQ ID NO: 489397 - DNA, 15 bp, Homo sapiens
gcttcttgagtagct

SEQ ID NO: 489398 - DNA, 15 bp, Homo sapiens
agcttcttgagtagc

SEQ ID NO: 489399 - DNA, 15 bp, Homo sapiens
cagcttcttgagtag

SEQ ID NO: 489400 - DNA, 15 bp, Homo sapiens
tcagcttcttgagta

SEQ ID NO: 489401 - DNA, 15 bp, Homo sapiens
ctcagcttcttgagt

SEQ ID NO: 489402 - DNA, 15 bp, Homo sapiens
cctcagcttcttgag

SEQ ID NO: 489403 - DNA, 15 bp, Homo sapiens
acctcagcttcttga

SEQ ID NO: 489404 - DNA, 15 bp, Homo sapiens
cacctcagcttcttg

SEQ ID NO: 489405 - DNA, 15 bp, Homo sapiens
ccacctcagcttctt

SEQ ID NO: 489406 - DNA, 15 bp, Homo sapiens
cccacctcagcttct

SEQ ID NO: 489407 - DNA, 15 bp, Homo sapiens
tcccacctcagcttc

SEQ ID NO: 489408 - DNA, 15 bp, Homo sapiens
ctcccacctcagctt

SEQ ID NO: 489409 - DNA, 15 bp, Homo sapiens
cctcccacctcagct

SEQ ID NO: 489410 - DNA, 15 bp, Homo sapiens
caggctcaagcgatc

SEQ ID NO: 489411 - DNA, 15 bp, Homo sapiens
ccaggctcaagcgat

SEQ ID NO: 489412 - DNA, 15 bp, Homo sapiens
cccaggctcaagcga

SEQ ID NO: 489413 - DNA, 15 bp, Homo sapiens
tcccaggctcaagcg

SEQ ID NO: 489414 - DNA, 15 bp, Homo sapiens
cctcccaggctcaag

SEQ ID NO: 489415 - DNA, 15 bp, Homo sapiens
cacctcccaggctca

SEQ ID NO: 489416 - DNA, 15 bp, Homo sapiens
ccacctcccaggctc

SEQ ID NO: 489417 - DNA, 15 bp, Homo sapiens
tccacctcccaggct

SEQ ID NO: 489418 - DNA, 15 bp, Homo sapiens
ctccacctcccaggc

SEQ ID NO: 489419 - DNA, 15 bp, Homo sapiens
tgctcactgcaacct

SEQ ID NO: 489420 - DNA, 15 bp, Homo sapiens
ctgctcactgcaacc

SEQ ID NO: 489421 - DNA, 15 bp, Homo sapiens
tctgctcactgcaac

SEQ ID NO: 489422 - DNA, 15 bp, Homo sapiens
cgatctctgctcact

SEQ ID NO: 489423 - DNA, 15 bp, Homo sapiens
acgatctctgctcac

SEQ ID NO: 489424 - DNA, 15 bp, Homo sapiens
cacgatctctgctca

SEQ ID NO: 489425 - DNA, 15 bp, Homo sapiens
gcacgatctctgctc

SEQ ID NO: 489426 - DNA, 15 bp, Homo sapiens
ggcacgatctctgct

SEQ ID NO: 489427 - DNA, 15 bp, Homo sapiens
tggcacgatctctgc

SEQ ID NO: 489428 - DNA, 15 bp, Homo sapiens
gtggcacgatctctg

SEQ ID NO: 489429 - DNA, 15 bp, Homo sapiens
agtggcacgatctct

SEQ ID NO: 489430 - DNA, 15 bp, Homo sapiens
actctgtcgcccagg

SEQ ID NO: 489431 - DNA, 15 bp, Homo sapiens
cactctgtcgcccag

SEQ ID NO: 489432 - DNA, 15 bp, Homo sapiens
tcactctgtcgccca

SEQ ID NO: 489433 - DNA, 15 bp, Homo sapiens
ctcactctgtcgccc

SEQ ID NO: 489434 - DNA, 15 bp, Homo sapiens
tctcactctgtcgcc

SEQ ID NO: 489435 - DNA, 15 bp, Homo sapiens
gtctcactctgtcgc

SEQ ID NO: 489436 - DNA, 15 bp, Homo sapiens
agtctcactctgtcg

SEQ ID NO: 489437 - DNA, 15 bp, Homo sapiens
atttgagatggagtc

SEQ ID NO: 489438 - DNA, 15 bp, Homo sapiens
tatttgagatggagt

SEQ ID NO: 489439 - DNA, 15 bp, Homo sapiens
ttatttgagatggag

SEQ ID NO: 489440 - DNA, 15 bp, Homo sapiens
tttatttgagatgga

SEQ ID NO: 489441 - DNA, 15 bp, Homo sapiens
gtttatttgagatgg

SEQ ID NO: 489442 - DNA, 15 bp, Homo sapiens
tgtttatttgagatg

SEQ ID NO: 489443 - DNA, 15 bp, Homo sapiens
ttgtttatttgagat

SEQ ID NO: 489444 - DNA, 15 bp, Homo sapiens
tttgtttatttgaga

SEQ ID NO: 489445 - DNA, 15 bp, Homo sapiens
ttttgtttatttgag

SEQ ID NO: 489446 - DNA, 15 bp, Homo sapiens
gttttgtttatttga

SEQ ID NO: 489447 - DNA, 15 bp, Homo sapiens
agttttgtttatttg

SEQ ID NO: 489448 - DNA, 15 bp, Homo sapiens
tagttttgtttattt

SEQ ID NO: 489449 - DNA, 15 bp, Homo sapiens
ttagttttgtttatt

SEQ ID NO: 489450 - DNA, 15 bp, Homo sapiens
tttagttttgtttat

SEQ ID NO: 489451 - DNA, 15 bp, Homo sapiens
gtttagttttgttta

SEQ ID NO: 489452 - DNA, 15 bp, Homo sapiens
agtttagttttgttt

SEQ ID NO: 489453 - DNA, 15 bp, Homo sapiens
tagtttagttttgtt

SEQ ID NO: 489454 - DNA, 15 bp, Homo sapiens
ttagtttagttttgt

SEQ ID NO: 489455 - DNA, 15 bp, Homo sapiens
tttagtttagttttg

SEQ ID NO: 489456 - DNA, 15 bp, Homo sapiens
tttttagtttagttt

SEQ ID NO: 489457 - DNA, 15 bp, Homo sapiens
ctttttagtttagtt

SEQ ID NO: 489458 - DNA, 15 bp, Homo sapiens
tctttttagtttagt

SEQ ID NO: 489459 - DNA, 15 bp, Homo sapiens
ttctttttagtttag

SEQ ID NO: 489460 - DNA, 15 bp, Homo sapiens
tttctttttagttta

SEQ ID NO: 489461 - DNA, 15 bp, Homo sapiens
ttttctttttagttt

SEQ ID NO: 489462 - DNA, 15 bp, Homo sapiens
tttttctttttagtt

SEQ ID NO: 489463 - DNA, 15 bp, Homo sapiens
ctttttctttttagt

SEQ ID NO: 489464 - DNA, 15 bp, Homo sapiens
actttttctttttag

SEQ ID NO: 489465 - DNA, 15 bp, Homo sapiens
aactttttcttttta

SEQ ID NO: 489466 - DNA, 15 bp, Homo sapiens
caactttttcttttt

SEQ ID NO: 489467 - DNA, 15 bp, Homo sapiens
tcaactttttctttt

SEQ ID NO: 489468 - DNA, 15 bp, Homo sapiens
ctcaactttttcttt

SEQ ID NO: 489469 - DNA, 15 bp, Homo sapiens
tctcaactttttctt

SEQ ID NO: 489470 - DNA, 15 bp, Homo sapiens
gtctcaactttttct

SEQ ID NO: 489471 - DNA, 15 bp, Homo sapiens
ggtctcaactttttc

SEQ ID NO: 489472 - DNA, 15 bp, Homo sapiens
aggtctcaacttttt

SEQ ID NO: 489473 - DNA, 15 bp, Homo sapiens
aaggtctcaactttt

SEQ ID NO: 489474 - DNA, 15 bp, Homo sapiens
aaaggtctcaacttt

SEQ ID NO: 489475 - DNA, 15 bp, Homo sapiens
aaaaggtctcaactt

SEQ ID NO: 489476 - DNA, 15 bp, Homo sapiens
aaaaaggtctcaact

SEQ ID NO: 489477 - DNA, 15 bp, Homo sapiens
aaaaaaggtctcaac

SEQ ID NO: 489478 - DNA, 15 bp, Homo sapiens
aaaaaaaggtctcaa

SEQ ID NO: 489479 - DNA, 15 bp, Homo sapiens
taaaaaaaggtctca

SEQ ID NO: 489480 - DNA, 15 bp, Homo sapiens
ataaaaaaaggtctc

SEQ ID NO: 489481 - DNA, 15 bp, Homo sapiens
aataaaaaaaggtct

SEQ ID NO: 489482 - DNA, 15 bp, Homo sapiens
gaataaaaaaaggtc

SEQ ID NO: 489483 - DNA, 15 bp, Homo sapiens
agaataaaaaaaggt

SEQ ID NO: 489484 - DNA, 15 bp, Homo sapiens
aagaataaaaaaagg

SEQ ID NO: 489485 - DNA, 15 bp, Homo sapiens
aaagaataaaaaaag

SEQ ID NO: 489486 - DNA, 15 bp, Homo sapiens
aaaagaataaaaaaa

SEQ ID NO: 489487 - DNA, 15 bp, Homo sapiens
aaaaagaataaaaaa

SEQ ID NO: 489488 - DNA, 15 bp, Homo sapiens
aaaaaagaataaaaa

SEQ ID NO: 489489 - DNA, 15 bp, Homo sapiens
aaaaaaagaataaaa

SEQ ID NO: 489490 - DNA, 15 bp, Homo sapiens
aaaaaaaagaataaa

SEQ ID NO: 489491 - DNA, 15 bp, Homo sapiens
gaaaaaaaagaataa

SEQ ID NO: 489492 - DNA, 15 bp, Homo sapiens
tgaaaaaaaagaata

SEQ ID NO: 489493 - DNA, 15 bp, Homo sapiens
atgaaaaaaaagaat

SEQ ID NO: 489494 - DNA, 15 bp, Homo sapiens
tatgaaaaaaaagaa

SEQ ID NO: 489495 - DNA, 15 bp, Homo sapiens
gtatgaaaaaaaaga

SEQ ID NO: 489496 - DNA, 15 bp, Homo sapiens
agtatgaaaaaaaag

SEQ ID NO: 489497 - DNA, 15 bp, Homo sapiens
tagtatgaaaaaaaa

SEQ ID NO: 489498 - DNA, 15 bp, Homo sapiens
ttagtatgaaaaaaa

SEQ ID NO: 489499 - DNA, 15 bp, Homo sapiens
cttagtatgaaaaaa

SEQ ID NO: 489500 - DNA, 15 bp, Homo sapiens
gcttagtatgaaaaa

SEQ ID NO: 489501 - DNA, 15 bp, Homo sapiens
ggcttagtatgaaaa

SEQ ID NO: 489502 - DNA, 15 bp, Homo sapiens
aggcttagtatgaaa

SEQ ID NO: 489503 - DNA, 15 bp, Homo sapiens
aaggcttagtatgaa

SEQ ID NO: 489504 - DNA, 15 bp, Homo sapiens
aaaggcttagtatga

SEQ ID NO: 489505 - DNA, 15 bp, Homo sapiens
taaaggcttagtatg

SEQ ID NO: 489506 - DNA, 15 bp, Homo sapiens
ttaaaggcttagtat

SEQ ID NO: 489507 - DNA, 15 bp, Homo sapiens
tttaaaggcttagta

SEQ ID NO: 489508 - DNA, 15 bp, Homo sapiens
ttttaaaggcttagt

SEQ ID NO: 489509 - DNA, 15 bp, Homo sapiens
attttaaaggcttag

SEQ ID NO: 489510 - DNA, 15 bp, Homo sapiens
gattttaaaggctta

SEQ ID NO: 489511 - DNA, 15 bp, Homo sapiens
ggattttaaaggctt

SEQ ID NO: 489512 - DNA, 15 bp, Homo sapiens
tggattttaaaggct

SEQ ID NO: 489513 - DNA, 15 bp, Homo sapiens
ctggattttaaaggc

SEQ ID NO: 489514 - DNA, 15 bp, Homo sapiens
actggattttaaagg

SEQ ID NO: 489515 - DNA, 15 bp, Homo sapiens
cactggattttaaag

SEQ ID NO: 489516 - DNA, 15 bp, Homo sapiens
ccactggattttaaa

SEQ ID NO: 489517 - DNA, 15 bp, Homo sapiens
cccactggattttaa

SEQ ID NO: 489518 - DNA, 15 bp, Homo sapiens
gcccactggatttta

SEQ ID NO: 489519 - DNA, 15 bp, Homo sapiens
agcccactggatttt

SEQ ID NO: 489520 - DNA, 15 bp, Homo sapiens
aagcccactggattt

SEQ ID NO: 489521 - DNA, 15 bp, Homo sapiens
aaagcccactggatt

SEQ ID NO: 489522 - DNA, 15 bp, Homo sapiens
aaaagcccactggat

SEQ ID NO: 489523 - DNA, 15 bp, Homo sapiens
caaaagcccactgga

SEQ ID NO: 489524 - DNA, 15 bp, Homo sapiens
tcaaaagcccactgg

SEQ ID NO: 489525 - DNA, 15 bp, Homo sapiens
gtcaaaagcccactg

SEQ ID NO: 489526 - DNA, 15 bp, Homo sapiens
tgtcaaaagcccact

SEQ ID NO: 489527 - DNA, 15 bp, Homo sapiens
ctgtcaaaagcccac

SEQ ID NO: 489528 - DNA, 15 bp, Homo sapiens
gctgtcaaaagccca

SEQ ID NO: 489529 - DNA, 15 bp, Homo sapiens
ggctgtcaaaagccc

SEQ ID NO: 489530 - DNA, 15 bp, Homo sapiens
tggctgtcaaaagcc

SEQ ID NO: 489531 - DNA, 15 bp, Homo sapiens
gtggctgtcaaaagc

SEQ ID NO: 489532 - DNA, 15 bp, Homo sapiens
tgtggctgtcaaaag

SEQ ID NO: 489533 - DNA, 15 bp, Homo sapiens
ctgtggctgtcaaaa

SEQ ID NO: 489534 - DNA, 15 bp, Homo sapiens
gctgtggctgtcaaa

SEQ ID NO: 489535 - DNA, 15 bp, Homo sapiens
tgctgtggctgtcaa

SEQ ID NO: 489536 - DNA, 15 bp, Homo sapiens
gtgctgtggctgtca

SEQ ID NO: 489537 - DNA, 15 bp, Homo sapiens
tgtgctgtggctgtc

SEQ ID NO: 489538 - DNA, 15 bp, Homo sapiens
ctgtgctgtggctgt

SEQ ID NO: 489539 - DNA, 15 bp, Homo sapiens
gctgtgctgtggctg

SEQ ID NO: 489540 - DNA, 15 bp, Homo sapiens
agctgtgctgtggct

SEQ ID NO: 489541 - DNA, 15 bp, Homo sapiens
gagctgtgctgtggc

SEQ ID NO: 489542 - DNA, 15 bp, Homo sapiens
tgagctgtgctgtgg

SEQ ID NO: 489543 - DNA, 15 bp, Homo sapiens
ctgagctgtgctgtg

SEQ ID NO: 489544 - DNA, 15 bp, Homo sapiens
actgagctgtgctgt

SEQ ID NO: 489545 - DNA, 15 bp, Homo sapiens
aactgagctgtgctg

SEQ ID NO: 489546 - DNA, 15 bp, Homo sapiens
aaactgagctgtgct

SEQ ID NO: 489547 - DNA, 15 bp, Homo sapiens
caaactgagctgtgc

SEQ ID NO: 489548 - DNA, 15 bp, Homo sapiens
ccaaactgagctgtg

SEQ ID NO: 489549 - DNA, 15 bp, Homo sapiens
tccaaactgagctgt

SEQ ID NO: 489550 - DNA, 15 bp, Homo sapiens
gtccaaactgagctg

SEQ ID NO: 489551 - DNA, 15 bp, Homo sapiens
tgtccaaactgagct

SEQ ID NO: 489552 - DNA, 15 bp, Homo sapiens
ttgtccaaactgagc

SEQ ID NO: 489553 - DNA, 15 bp, Homo sapiens
tttgtccaaactgag

SEQ ID NO: 489554 - DNA, 15 bp, Homo sapiens
gtttgtccaaactga

SEQ ID NO: 489555 - DNA, 15 bp, Homo sapiens
ggtttgtccaaactg

SEQ ID NO: 489556 - DNA, 15 bp, Homo sapiens
tggtttgtccaaact

SEQ ID NO: 489557 - DNA, 15 bp, Homo sapiens
ttggtttgtccaaac

SEQ ID NO: 489558 - DNA, 15 bp, Homo sapiens
tttggtttgtccaaa

SEQ ID NO: 489559 - DNA, 15 bp, Homo sapiens
atttggtttgtccaa

SEQ ID NO: 489560 - DNA, 15 bp, Homo sapiens
gatttggtttgtcca

SEQ ID NO: 489561 - DNA, 15 bp, Homo sapiens
agatttggtttgtcc

SEQ ID NO: 489562 - DNA, 15 bp, Homo sapiens
gagatttggtttgtc

SEQ ID NO: 489563 - DNA, 15 bp, Homo sapiens
tgagatttggtttgt

SEQ ID NO: 489564 - DNA, 15 bp, Homo sapiens
ttgagatttggtttg

SEQ ID NO: 489565 - DNA, 15 bp, Homo sapiens
tttgagatttggttt

SEQ ID NO: 489566 - DNA, 15 bp, Homo sapiens
atttgagatttggtt

SEQ ID NO: 489567 - DNA, 15 bp, Homo sapiens
catttgagatttggt

SEQ ID NO: 489568 - DNA, 15 bp, Homo sapiens
gcatttgagatttgg

SEQ ID NO: 489569 - DNA, 15 bp, Homo sapiens
agcatttgagatttg

SEQ ID NO: 489570 - DNA, 15 bp, Homo sapiens
aagcatttgagattt

SEQ ID NO: 489571 - DNA, 15 bp, Homo sapiens
caagcatttgagatt

SEQ ID NO: 489572 - DNA, 15 bp, Homo sapiens
ccaagcatttgagat

SEQ ID NO: 489573 - DNA, 15 bp, Homo sapiens
accaagcatttgaga

SEQ ID NO: 489574 - DNA, 15 bp, Homo sapiens
caccaagcatttgag

SEQ ID NO: 489575 - DNA, 15 bp, Homo sapiens
ccaccaagcatttga

SEQ ID NO: 489576 - DNA, 15 bp, Homo sapiens
gccaccaagcatttg

SEQ ID NO: 489577 - DNA, 15 bp, Homo sapiens
ggccaccaagcattt

SEQ ID NO: 489578 - DNA, 15 bp, Homo sapiens
tggccaccaagcatt

SEQ ID NO: 489579 - DNA, 15 bp, Homo sapiens
gtggccaccaagcat

SEQ ID NO: 489580 - DNA, 15 bp, Homo sapiens
cgtggccaccaagca

SEQ ID NO: 489581 - DNA, 15 bp, Homo sapiens
acgtggccaccaagc

SEQ ID NO: 489582 - DNA, 15 bp, Homo sapiens
cacgtggccaccaag

SEQ ID NO: 489583 - DNA, 15 bp, Homo sapiens
acacgtggccaccaa

SEQ ID NO: 489584 - DNA, 15 bp, Homo sapiens
cacacgtggccacca

SEQ ID NO: 489585 - DNA, 15 bp, Homo sapiens
acacacgtggccacc

SEQ ID NO: 489586 - DNA, 15 bp, Homo sapiens
gacacacgtggccac

SEQ ID NO: 489587 - DNA, 15 bp, Homo sapiens
agacacacgtggcca

SEQ ID NO: 489588 - DNA, 15 bp, Homo sapiens
gagacacacgtggcc

SEQ ID NO: 489589 - DNA, 15 bp, Homo sapiens
cgagacacacgtggc

SEQ ID NO: 489590 - DNA, 15 bp, Homo sapiens
ccgagacacacgtgg

SEQ ID NO: 489591 - DNA, 15 bp, Homo sapiens
cccgagacacacgtg

SEQ ID NO: 489592 - DNA, 15 bp, Homo sapiens
ccccgagacacacgt

SEQ ID NO: 489593 - DNA, 15 bp, Homo sapiens
gccccgagacacacg

SEQ ID NO: 489594 - DNA, 15 bp, Homo sapiens
agccccgagacacac

SEQ ID NO: 489595 - DNA, 15 bp, Homo sapiens
gagccccgagacaca

SEQ ID NO: 489596 - DNA, 15 bp, Homo sapiens
ggagccccgagacac

SEQ ID NO: 489597 - DNA, 15 bp, Homo sapiens
aggagccccgagaca

SEQ ID NO: 489598 - DNA, 15 bp, Homo sapiens
caggagccccgagac

SEQ ID NO: 489599 - DNA, 15 bp, Homo sapiens
tcaggagccccgaga

SEQ ID NO: 489600 - DNA, 15 bp, Homo sapiens
ttcaggagccccgag

SEQ ID NO: 489601 - DNA, 15 bp, Homo sapiens
attcaggagccccga

SEQ ID NO: 489602 - DNA, 15 bp, Homo sapiens
aattcaggagccccg

SEQ ID NO: 489603 - DNA, 15 bp, Homo sapiens
taattcaggagcccc

SEQ ID NO: 489604 - DNA, 15 bp, Homo sapiens
ttaattcaggagccc

SEQ ID NO: 489605 - DNA, 15 bp, Homo sapiens
tttaattcaggagcc

SEQ ID NO: 489606 - DNA, 15 bp, Homo sapiens
gtttaattcaggagc

SEQ ID NO: 489607 - DNA, 15 bp, Homo sapiens
tgtttaattcaggag

SEQ ID NO: 489608 - DNA, 15 bp, Homo sapiens
ctgtttaattcagga

SEQ ID NO: 489609 - DNA, 15 bp, Homo sapiens
actgtttaattcagg

SEQ ID NO: 489610 - DNA, 15 bp, Homo sapiens
tactgtttaattcag

SEQ ID NO: 489611 - DNA, 15 bp, Homo sapiens
ctactgtttaattca

SEQ ID NO: 489612 - DNA, 15 bp, Homo sapiens
tctactgtttaattc

SEQ ID NO: 489613 - DNA, 15 bp, Homo sapiens
atctactgtttaatt

SEQ ID NO: 489614 - DNA, 15 bp, Homo sapiens
gatctactgtttaat

SEQ ID NO: 489615 - DNA, 15 bp, Homo sapiens
tgatctactgtttaa

SEQ ID NO: 489616 - DNA, 15 bp, Homo sapiens
ttgatctactgttta

SEQ ID NO: 489617 - DNA, 15 bp, Homo sapiens
cttgatctactgttt

SEQ ID NO: 489618 - DNA, 15 bp, Homo sapiens
ccttgatctactgtt

SEQ ID NO: 489619 - DNA, 15 bp, Homo sapiens
cccttgatctactgt

SEQ ID NO: 489620 - DNA, 15 bp, Homo sapiens
gcccttgatctactg

SEQ ID NO: 489621 - DNA, 15 bp, Homo sapiens
tgcccttgatctact

SEQ ID NO: 489622 - DNA, 15 bp, Homo sapiens
ctgcccttgatctac

SEQ ID NO: 489623 - DNA, 15 bp, Homo sapiens
tctgcccttgatcta

SEQ ID NO: 489624 - DNA, 15 bp, Homo sapiens
ttctgcccttgatct

SEQ ID NO: 489625 - DNA, 15 bp, Homo sapiens
cttctgcccttgatc

SEQ ID NO: 489626 - DNA, 15 bp, Homo sapiens
tcttctgcccttgat

SEQ ID NO: 489627 - DNA, 15 bp, Homo sapiens
atcttctgcccttga

SEQ ID NO: 489628 - DNA, 15 bp, Homo sapiens
gatcttctgcccttg

SEQ ID NO: 489629 - DNA, 15 bp, Homo sapiens
agatcttctgccctt

SEQ ID NO: 489630 - DNA, 15 bp, Homo sapiens
gagatcttctgccct

SEQ ID NO: 489631 - DNA, 15 bp, Homo sapiens
tgagatcttctgccc

SEQ ID NO: 489632 - DNA, 15 bp, Homo sapiens
ctgagatcttctgcc

SEQ ID NO: 489633 - DNA, 15 bp, Homo sapiens
cctgagatcttctgc

SEQ ID NO: 489634 - DNA, 15 bp, Homo sapiens
tcctgagatcttctg

SEQ ID NO: 489635 - DNA, 15 bp, Homo sapiens
gtcctgagatcttct

SEQ ID NO: 489636 - DNA, 15 bp, Homo sapiens
tgtcctgagatcttc

SEQ ID NO: 489637 - DNA, 15 bp, Homo sapiens
ctgtcctgagatctt

SEQ ID NO: 489638 - DNA, 15 bp, Homo sapiens
gctgtcctgagatct

SEQ ID NO: 489639 - DNA, 15 bp, Homo sapiens
ggctgtcctgagatc

SEQ ID NO: 489640 - DNA, 15 bp, Homo sapiens
aggctgtcctgagat

SEQ ID NO: 489641 - DNA, 15 bp, Homo sapiens
aaggctgtcctgaga

SEQ ID NO: 489642 - DNA, 15 bp, Homo sapiens
taaggctgtcctgag

SEQ ID NO: 489643 - DNA, 15 bp, Homo sapiens
ctaaggctgtcctga

SEQ ID NO: 489644 - DNA, 15 bp, Homo sapiens
tctaaggctgtcctg

SEQ ID NO: 489645 - DNA, 15 bp, Homo sapiens
ctctaaggctgtcct

SEQ ID NO: 489646 - DNA, 15 bp, Homo sapiens
gctctaaggctgtcc

SEQ ID NO: 489647 - DNA, 15 bp, Homo sapiens
agctctaaggctgtc

SEQ ID NO: 489648 - DNA, 15 bp, Homo sapiens
aagctctaaggctgt

SEQ ID NO: 489649 - DNA, 15 bp, Homo sapiens
gaagctctaaggctg

SEQ ID NO: 489650 - DNA, 15 bp, Homo sapiens
agaagctctaaggct

SEQ ID NO: 489651 - DNA, 15 bp, Homo sapiens
cagaagctctaaggc

SEQ ID NO: 489652 - DNA, 15 bp, Homo sapiens
acagaagctctaagg

SEQ ID NO: 489653 - DNA, 15 bp, Homo sapiens
tacagaagctctaag

SEQ ID NO: 489654 - DNA, 15 bp, Homo sapiens
ttacagaagctctaa

SEQ ID NO: 489655 - DNA, 15 bp, Homo sapiens
tttacagaagctcta

SEQ ID NO: 489656 - DNA, 15 bp, Homo sapiens
gtttacagaagctct

SEQ ID NO: 489657 - DNA, 15 bp, Homo sapiens
tgtttacagaagctc

SEQ ID NO: 489658 - DNA, 15 bp, Homo sapiens
atgtttacagaagct

SEQ ID NO: 489659 - DNA, 15 bp, Homo sapiens
catgtttacagaagc

SEQ ID NO: 489660 - DNA, 15 bp, Homo sapiens
ccatgtttacagaag

SEQ ID NO: 489661 - DNA, 15 bp, Homo sapiens
tccatgtttacagaa

SEQ ID NO: 489662 - DNA, 15 bp, Homo sapiens
ctccatgtttacaga

SEQ ID NO: 489663 - DNA, 15 bp, Homo sapiens
gctccatgtttacag

SEQ ID NO: 489664 - DNA, 15 bp, Homo sapiens
agctccatgtttaca

SEQ ID NO: 489665 - DNA, 15 bp, Homo sapiens
gagctccatgtttac

SEQ ID NO: 489666 - DNA, 15 bp, Homo sapiens
agagctccatgttta

SEQ ID NO: 489667 - DNA, 15 bp, Homo sapiens
cagagctccatgttt

SEQ ID NO: 489668 - DNA, 15 bp, Homo sapiens
ccagagctccatgtt

SEQ ID NO: 489669 - DNA, 15 bp, Homo sapiens
cccagagctccatgt

SEQ ID NO: 489670 - DNA, 15 bp, Homo sapiens
tcccagagctccatg

SEQ ID NO: 489671 - DNA, 15 bp, Homo sapiens
ttcccagagctccat

SEQ ID NO: 489672 - DNA, 15 bp, Homo sapiens
attcccagagctcca

SEQ ID NO: 489673 - DNA, 15 bp, Homo sapiens
gattcccagagctcc

SEQ ID NO: 489674 - DNA, 15 bp, Homo sapiens
tgattcccagagctc

SEQ ID NO: 489675 - DNA, 15 bp, Homo sapiens
ctgattcccagagct

SEQ ID NO: 489676 - DNA, 15 bp, Homo sapiens
actgattcccagagc

SEQ ID NO: 489677 - DNA, 15 bp, Homo sapiens
aactgattcccagag

SEQ ID NO: 489678 - DNA, 15 bp, Homo sapiens
taactgattcccaga

SEQ ID NO: 489679 - DNA, 15 bp, Homo sapiens
ttaactgattcccag

SEQ ID NO: 489680 - DNA, 15 bp, Homo sapiens
cttaactgattccca

SEQ ID NO: 489681 - DNA, 15 bp, Homo sapiens
ccttaactgattccc

SEQ ID NO: 489682 - DNA, 15 bp, Homo sapiens
accttaactgattcc

SEQ ID NO: 489683 - DNA, 15 bp, Homo sapiens
caccttaactgattc

SEQ ID NO: 489684 - DNA, 15 bp, Homo sapiens
ccaccttaactgatt

SEQ ID NO: 489685 - DNA, 15 bp, Homo sapiens
cccaccttaactgat

SEQ ID NO: 489686 - DNA, 15 bp, Homo sapiens
tcccaccttaactga

SEQ ID NO: 489687 - DNA, 15 bp, Homo sapiens
ttcccaccttaactg

SEQ ID NO: 489688 - DNA, 15 bp, Homo sapiens
attcccaccttaact

SEQ ID NO: 489689 - DNA, 15 bp, Homo sapiens
cattcccaccttaac

SEQ ID NO: 489690 - DNA, 15 bp, Homo sapiens
tcattcccaccttaa

SEQ ID NO: 489691 - DNA, 15 bp, Homo sapiens
ctcattcccacctta

SEQ ID NO: 489692 - DNA, 15 bp, Homo sapiens
tctcattcccacctt

SEQ ID NO: 489693 - DNA, 15 bp, Homo sapiens
ttctcattcccacct

SEQ ID NO: 489694 - DNA, 15 bp, Homo sapiens
tttctcattcccacc

SEQ ID NO: 489695 - DNA, 15 bp, Homo sapiens
ctttctcattcccac

SEQ ID NO: 489696 - DNA, 15 bp, Homo sapiens
cctttctcattccca

SEQ ID NO: 489697 - DNA, 15 bp, Homo sapiens
tcctttctcattccc

SEQ ID NO: 489698 - DNA, 15 bp, Homo sapiens
gtcctttctcattcc

SEQ ID NO: 489699 - DNA, 15 bp, Homo sapiens
ggtcctttctcattc

SEQ ID NO: 489700 - DNA, 15 bp, Homo sapiens
gggtcctttctcatt

SEQ ID NO: 489701 - DNA, 15 bp, Homo sapiens
agggtcctttctcat

SEQ ID NO: 489702 - DNA, 15 bp, Homo sapiens
aagggtcctttctca

SEQ ID NO: 489703 - DNA, 15 bp, Homo sapiens
gaagggtcctttctc

SEQ ID NO: 489704 - DNA, 15 bp, Homo sapiens
ggaagggtcctttct

SEQ ID NO: 489705 - DNA, 15 bp, Homo sapiens
gggaagggtcctttc

SEQ ID NO: 489706 - DNA, 15 bp, Homo sapiens
cgggaagggtccttt

SEQ ID NO: 489707 - DNA, 15 bp, Homo sapiens
tcgggaagggtcctt

SEQ ID NO: 489708 - DNA, 15 bp, Homo sapiens
ctcgggaagggtcct

SEQ ID NO: 489709 - DNA, 15 bp, Homo sapiens
cctcgggaagggtcc

SEQ ID NO: 489710 - DNA, 15 bp, Homo sapiens
gcctcgggaagggtc

SEQ ID NO: 489711 - DNA, 15 bp, Homo sapiens
tgcctcgggaagggt

SEQ ID NO: 489712 - DNA, 15 bp, Homo sapiens
ctgcctcgggaaggg

SEQ ID NO: 489713 - DNA, 15 bp, Homo sapiens
cctgcctcgggaagg

SEQ ID NO: 489714 - DNA, 15 bp, Homo sapiens
ccctgcctcgggaag

SEQ ID NO: 489715 - DNA, 15 bp, Homo sapiens
accctgcctcgggaa

SEQ ID NO: 489716 - DNA, 15 bp, Homo sapiens
gaccctgcctcggga

SEQ ID NO: 489717 - DNA, 15 bp, Homo sapiens
ggaccctgcctcggg

SEQ ID NO: 489718 - DNA, 15 bp, Homo sapiens
aggaccctgcctcgg

SEQ ID NO: 489719 - DNA, 15 bp, Homo sapiens
gaggaccctgcctcg

SEQ ID NO: 489720 - DNA, 15 bp, Homo sapiens
ggaggaccctgcctc

SEQ ID NO: 489721 - DNA, 15 bp, Homo sapiens
tggaggaccctgcct

SEQ ID NO: 489722 - DNA, 15 bp, Homo sapiens
ctggaggaccctgcc

SEQ ID NO: 489723 - DNA, 15 bp, Homo sapiens
cctggaggaccctgc

SEQ ID NO: 489724 - DNA, 15 bp, Homo sapiens
ccctggaggaccctg

SEQ ID NO: 489725 - DNA, 15 bp, Homo sapiens
tccctggaggaccct

SEQ ID NO: 489726 - DNA, 15 bp, Homo sapiens
ctccctggaggaccc

SEQ ID NO: 489727 - DNA, 15 bp, Homo sapiens
cctccctggaggacc

SEQ ID NO: 489728 - DNA, 15 bp, Homo sapiens
tcctccctggaggac

SEQ ID NO: 489729 - DNA, 15 bp, Homo sapiens
ctcctccctggagga

SEQ ID NO: 489730 - DNA, 15 bp, Homo sapiens
cctcctccctggagg

SEQ ID NO: 489731 - DNA, 15 bp, Homo sapiens
ccctcctccctggag

SEQ ID NO: 489732 - DNA, 15 bp, Homo sapiens
accctcctccctgga

SEQ ID NO: 489733 - DNA, 15 bp, Homo sapiens
taccctcctccctgg

SEQ ID NO: 489734 - DNA, 15 bp, Homo sapiens
ttaccctcctccctg

SEQ ID NO: 489735 - DNA, 15 bp, Homo sapiens
tttaccctcctccct

SEQ ID NO: 489736 - DNA, 15 bp, Homo sapiens
atttaccctcctccc

SEQ ID NO: 489737 - DNA, 15 bp, Homo sapiens
gatttaccctcctcc

SEQ ID NO: 489738 - DNA, 15 bp, Homo sapiens
agatttaccctcctc

SEQ ID NO: 489739 - DNA, 15 bp, Homo sapiens
cagatttaccctcct

SEQ ID NO: 489740 - DNA, 15 bp, Homo sapiens
ccagatttaccctcc

SEQ ID NO: 489741 - DNA, 15 bp, Homo sapiens
gccagatttaccctc

SEQ ID NO: 489742 - DNA, 15 bp, Homo sapiens
agccagatttaccct

SEQ ID NO: 489743 - DNA, 15 bp, Homo sapiens
aagccagatttaccc

SEQ ID NO: 489744 - DNA, 15 bp, Homo sapiens
aaagccagatttacc

SEQ ID NO: 489745 - DNA, 15 bp, Homo sapiens
aaaagccagatttac

SEQ ID NO: 489746 - DNA, 15 bp, Homo sapiens
gaaaagccagattta

SEQ ID NO: 489747 - DNA, 15 bp, Homo sapiens
agaaaagccagattt

SEQ ID NO: 489748 - DNA, 15 bp, Homo sapiens
cagaaaagccagatt

SEQ ID NO: 489749 - DNA, 15 bp, Homo sapiens
tcagaaaagccagat

SEQ ID NO: 489750 - DNA, 15 bp, Homo sapiens
gtcagaaaagccaga

SEQ ID NO: 489751 - DNA, 15 bp, Homo sapiens
ggtcagaaaagccag

SEQ ID NO: 489752 - DNA, 15 bp, Homo sapiens
tggtcagaaaagcca

SEQ ID NO: 489753 - DNA, 15 bp, Homo sapiens
atggtcagaaaagcc

SEQ ID NO: 489754 - DNA, 15 bp, Homo sapiens
gatggtcagaaaagc

SEQ ID NO: 489755 - DNA, 15 bp, Homo sapiens
ggatggtcagaaaag

SEQ ID NO: 489756 - DNA, 15 bp, Homo sapiens
gggatggtcagaaaa

SEQ ID NO: 489757 - DNA, 15 bp, Homo sapiens
agggatggtcagaaa

SEQ ID NO: 489758 - DNA, 15 bp, Homo sapiens
cagggatggtcagaa

SEQ ID NO: 489759 - DNA, 15 bp, Homo sapiens
ccagggatggtcaga

SEQ ID NO: 489760 - DNA, 15 bp, Homo sapiens
cccagggatggtcag

SEQ ID NO: 489761 - DNA, 15 bp, Homo sapiens
gcccagggatggtca

SEQ ID NO: 489762 - DNA, 15 bp, Homo sapiens
ggcccagggatggtc

SEQ ID NO: 489763 - DNA, 15 bp, Homo sapiens
aggcccagggatggt

SEQ ID NO: 489764 - DNA, 15 bp, Homo sapiens
aaggcccagggatgg

SEQ ID NO: 489765 - DNA, 15 bp, Homo sapiens
taaggcccagggatg

SEQ ID NO: 489766 - DNA, 15 bp, Homo sapiens
ttaaggcccagggat

SEQ ID NO: 489767 - DNA, 15 bp, Homo sapiens
cttaaggcccaggga

SEQ ID NO: 489768 - DNA, 15 bp, Homo sapiens
ccttaaggcccaggg

SEQ ID NO: 489769 - DNA, 15 bp, Homo sapiens
cccttaaggcccagg

SEQ ID NO: 489770 - DNA, 15 bp, Homo sapiens
ccccttaaggcccag

SEQ ID NO: 489771 - DNA, 15 bp, Homo sapiens
gccccttaaggccca

SEQ ID NO: 489772 - DNA, 15 bp, Homo sapiens
tgccccttaaggccc

SEQ ID NO: 489773 - DNA, 15 bp, Homo sapiens
ctgccccttaaggcc

SEQ ID NO: 489774 - DNA, 15 bp, Homo sapiens
cctgccccttaaggc

SEQ ID NO: 489775 - DNA, 15 bp, Homo sapiens
tcctgccccttaagg

SEQ ID NO: 489776 - DNA, 15 bp, Homo sapiens
ctcctgccccttaag

SEQ ID NO: 489777 - DNA, 15 bp, Homo sapiens
tctcctgccccttaa

SEQ ID NO: 489778 - DNA, 15 bp, Homo sapiens
atctcctgcccctta

SEQ ID NO: 489779 - DNA, 15 bp, Homo sapiens
aatctcctgcccctt

SEQ ID NO: 489780 - DNA, 15 bp, Homo sapiens
caatctcctgcccct

SEQ ID NO: 489781 - DNA, 15 bp, Homo sapiens
ccaatctcctgcccc

SEQ ID NO: 489782 - DNA, 15 bp, Homo sapiens
tccaatctcctgccc

SEQ ID NO: 489783 - DNA, 15 bp, Homo sapiens
atccaatctcctgcc

SEQ ID NO: 489784 - DNA, 15 bp, Homo sapiens
tatccaatctcctgc

SEQ ID NO: 489785 - DNA, 15 bp, Homo sapiens
ctatccaatctcctg

SEQ ID NO: 489786 - DNA, 15 bp, Homo sapiens
gctatccaatctcct

SEQ ID NO: 489787 - DNA, 15 bp, Homo sapiens
tgctatccaatctcc

SEQ ID NO: 489788 - DNA, 15 bp, Homo sapiens
ctgctatccaatctc

SEQ ID NO: 489789 - DNA, 15 bp, Homo sapiens
actgctatccaatct

SEQ ID NO: 489790 - DNA, 15 bp, Homo sapiens
cactgctatccaatc

SEQ ID NO: 489791 - DNA, 15 bp, Homo sapiens
ccactgctatccaat

SEQ ID NO: 489792 - DNA, 15 bp, Homo sapiens
accactgctatccaa

SEQ ID NO: 489793 - DNA, 15 bp, Homo sapiens
taccactgctatcca

SEQ ID NO: 489794 - DNA, 15 bp, Homo sapiens
ctaccactgctatcc

SEQ ID NO: 489795 - DNA, 15 bp, Homo sapiens
gctaccactgctatc

SEQ ID NO: 489796 - DNA, 15 bp, Homo sapiens
ggctaccactgctat

SEQ ID NO: 489797 - DNA, 15 bp, Homo sapiens
aggctaccactgcta

SEQ ID NO: 489798 - DNA, 15 bp, Homo sapiens
caggctaccactgct

SEQ ID NO: 489799 - DNA, 15 bp, Homo sapiens
ccaggctaccactgc

SEQ ID NO: 489800 - DNA, 15 bp, Homo sapiens
cccaggctaccactg

SEQ ID NO: 489801 - DNA, 15 bp, Homo sapiens
gcccaggctaccact

SEQ ID NO: 489802 - DNA, 15 bp, Homo sapiens
ggcccaggctaccac

SEQ ID NO: 489803 - DNA, 15 bp, Homo sapiens
gggcccaggctacca

SEQ ID NO: 489804 - DNA, 15 bp, Homo sapiens
agggcccaggctacc

SEQ ID NO: 489805 - DNA, 15 bp, Homo sapiens
cagggcccaggctac

SEQ ID NO: 489806 - DNA, 15 bp, Homo sapiens
acagggcccaggcta

SEQ ID NO: 489807 - DNA, 15 bp, Homo sapiens
gacagggcccaggct

SEQ ID NO: 489808 - DNA, 15 bp, Homo sapiens
ggacagggcccaggc

SEQ ID NO: 489809 - DNA, 15 bp, Homo sapiens
aggacagggcccagg

SEQ ID NO: 489810 - DNA, 15 bp, Homo sapiens
gaggacagggcccag

SEQ ID NO: 489811 - DNA, 15 bp, Homo sapiens
agaggacagggccca

SEQ ID NO: 489812 - DNA, 15 bp, Homo sapiens
cagaggacagggccc

SEQ ID NO: 489813 - DNA, 15 bp, Homo sapiens
tcagaggacagggcc

SEQ ID NO: 489814 - DNA, 15 bp, Homo sapiens
ttcagaggacagggc

SEQ ID NO: 489815 - DNA, 15 bp, Homo sapiens
cttcagaggacaggg

SEQ ID NO: 489816 - DNA, 15 bp, Homo sapiens
ccttcagaggacagg

SEQ ID NO: 489817 - DNA, 15 bp, Homo sapiens
cccttcagaggacag

SEQ ID NO: 489818 - DNA, 15 bp, Homo sapiens
gcccttcagaggaca

SEQ ID NO: 489819 - DNA, 15 bp, Homo sapiens
agcccttcagaggac

SEQ ID NO: 489820 - DNA, 15 bp, Homo sapiens
cagcccttcagagga

SEQ ID NO: 489821 - DNA, 15 bp, Homo sapiens
ccagcccttcagagg

SEQ ID NO: 489822 - DNA, 15 bp, Homo sapiens
cccagcccttcagag

SEQ ID NO: 489823 - DNA, 15 bp, Homo sapiens
ccccagcccttcaga

SEQ ID NO: 489824 - DNA, 15 bp, Homo sapiens
cccccagcccttcag

SEQ ID NO: 489825 - DNA, 15 bp, Homo sapiens
gcccccagcccttca

SEQ ID NO: 489826 - DNA, 15 bp, Homo sapiens
cgcccccagcccttc

SEQ ID NO: 489827 - DNA, 15 bp, Homo sapiens
acgcccccagccctt

SEQ ID NO: 489828 - DNA, 15 bp, Homo sapiens
cacgcccccagccct

SEQ ID NO: 489829 - DNA, 15 bp, Homo sapiens
ccacgcccccagccc

SEQ ID NO: 489830 - DNA, 15 bp, Homo sapiens
gccacgcccccagcc

SEQ ID NO: 489831 - DNA, 15 bp, Homo sapiens
ggccacgcccccagc

SEQ ID NO: 489832 - DNA, 15 bp, Homo sapiens
aggccacgcccccag

SEQ ID NO: 489833 - DNA, 15 bp, Homo sapiens
caggccacgccccca

SEQ ID NO: 489834 - DNA, 15 bp, Homo sapiens
gcaggccacgccccc

SEQ ID NO: 489835 - DNA, 15 bp, Homo sapiens
ggcaggccacgcccc

SEQ ID NO: 489836 - DNA, 15 bp, Homo sapiens
tggcaggccacgccc

SEQ ID NO: 489837 - DNA, 15 bp, Homo sapiens
ctggcaggccacgcc

SEQ ID NO: 489838 - DNA, 15 bp, Homo sapiens
actggcaggccacgc

SEQ ID NO: 489839 - DNA, 15 bp, Homo sapiens
aactggcaggccacg

SEQ ID NO: 489840 - DNA, 15 bp, Homo sapiens
caactggcaggccac

SEQ ID NO: 489841 - DNA, 15 bp, Homo sapiens
gcaactggcaggcca

SEQ ID NO: 489842 - DNA, 15 bp, Homo sapiens
tgcaactggcaggcc

SEQ ID NO: 489843 - DNA, 15 bp, Homo sapiens
ctgcaactggcaggc

SEQ ID NO: 489844 - DNA, 15 bp, Homo sapiens
tctgcaactggcagg

SEQ ID NO: 489845 - DNA, 15 bp, Homo sapiens
ctctgcaactggcag

SEQ ID NO: 489846 - DNA, 15 bp, Homo sapiens
cctctgcaactggca

SEQ ID NO: 489847 - DNA, 15 bp, Homo sapiens
ccctctgcaactggc

SEQ ID NO: 489848 - DNA, 15 bp, Homo sapiens
accctctgcaactgg

SEQ ID NO: 489849 - DNA, 15 bp, Homo sapiens
caccctctgcaactg

SEQ ID NO: 489850 - DNA, 15 bp, Homo sapiens
ccaccctctgcaact

SEQ ID NO: 489851 - DNA, 15 bp, Homo sapiens
tccaccctctgcaac

SEQ ID NO: 489852 - DNA, 15 bp, Homo sapiens
gtccaccctctgcaa

SEQ ID NO: 489853 - DNA, 15 bp, Homo sapiens
tgtccaccctctgca

SEQ ID NO: 489854 - DNA, 15 bp, Homo sapiens
ttgtccaccctctgc

SEQ ID NO: 489855 - DNA, 15 bp, Homo sapiens
gttgtccaccctctg

SEQ ID NO: 489856 - DNA, 15 bp, Homo sapiens
agttgtccaccctct

SEQ ID NO: 489857 - DNA, 15 bp, Homo sapiens
cagttgtccaccctc

SEQ ID NO: 489858 - DNA, 15 bp, Homo sapiens
tcagttgtccaccct

SEQ ID NO: 489859 - DNA, 15 bp, Homo sapiens
ttcagttgtccaccc

SEQ ID NO: 489860 - DNA, 15 bp, Homo sapiens
gttcagttgtccacc

SEQ ID NO: 489861 - DNA, 15 bp, Homo sapiens
agttcagttgtccac

SEQ ID NO: 489862 - DNA, 15 bp, Homo sapiens
tagttcagttgtcca

SEQ ID NO: 489863 - DNA, 15 bp, Homo sapiens
ctagttcagttgtcc

SEQ ID NO: 489864 - DNA, 15 bp, Homo sapiens
actagttcagttgtc

SEQ ID NO: 489865 - DNA, 15 bp, Homo sapiens
aactagttcagttgt

SEQ ID NO: 489866 - DNA, 15 bp, Homo sapiens
aaactagttcagttg

SEQ ID NO: 489867 - DNA, 15 bp, Homo sapiens
aaaactagttcagtt

SEQ ID NO: 489868 - DNA, 15 bp, Homo sapiens
gaaaactagttcagt

SEQ ID NO: 489869 - DNA, 15 bp, Homo sapiens
ggaaaactagttcag

SEQ ID NO: 489870 - DNA, 15 bp, Homo sapiens
gggaaaactagttca

SEQ ID NO: 489871 - DNA, 15 bp, Homo sapiens
agggaaaactagttc

SEQ ID NO: 489872 - DNA, 15 bp, Homo sapiens
cagggaaaactagtt

SEQ ID NO: 489873 - DNA, 15 bp, Homo sapiens
acagggaaaactagt

SEQ ID NO: 489874 - DNA, 15 bp, Homo sapiens
gacagggaaaactag

SEQ ID NO: 489875 - DNA, 15 bp, Homo sapiens
agacagggaaaacta

SEQ ID NO: 489876 - DNA, 15 bp, Homo sapiens
cagacagggaaaact

SEQ ID NO: 489877 - DNA, 15 bp, Homo sapiens
acagacagggaaaac

SEQ ID NO: 489878 - DNA, 15 bp, Homo sapiens
gacagacagggaaaa

SEQ ID NO: 489879 - DNA, 15 bp, Homo sapiens
ggacagacagggaaa

SEQ ID NO: 489880 - DNA, 15 bp, Homo sapiens
gggacagacagggaa

SEQ ID NO: 489881 - DNA, 15 bp, Homo sapiens
agggacagacaggga

SEQ ID NO: 489882 - DNA, 15 bp, Homo sapiens
gagggacagacaggg

SEQ ID NO: 489883 - DNA, 15 bp, Homo sapiens
ggagggacagacagg

SEQ ID NO: 489884 - DNA, 15 bp, Homo sapiens
tggagggacagacag

SEQ ID NO: 489885 - DNA, 15 bp, Homo sapiens
ctggagggacagaca

SEQ ID NO: 489886 - DNA, 15 bp, Homo sapiens
tctggagggacagac

SEQ ID NO: 489887 - DNA, 15 bp, Homo sapiens
ctctggagggacaga

SEQ ID NO: 489888 - DNA, 15 bp, Homo sapiens
actctggagggacag

SEQ ID NO: 489889 - DNA, 15 bp, Homo sapiens
gactctggagggaca

SEQ ID NO: 489890 - DNA, 15 bp, Homo sapiens
ggactctggagggac

SEQ ID NO: 489891 - DNA, 15 bp, Homo sapiens
gggactctggaggga

SEQ ID NO: 489892 - DNA, 15 bp, Homo sapiens
agggactctggaggg

SEQ ID NO: 489893 - DNA, 15 bp, Homo sapiens
gagggactctggagg

SEQ ID NO: 489894 - DNA, 15 bp, Homo sapiens
tgagggactctggag

SEQ ID NO: 489895 - DNA, 15 bp, Homo sapiens
gtgagggactctgga

SEQ ID NO: 489896 - DNA, 15 bp, Homo sapiens
ggtgagggactctgg

SEQ ID NO: 489897 - DNA, 15 bp, Homo sapiens
aggtgagggactctg

SEQ ID NO: 489898 - DNA, 15 bp, Homo sapiens
aaggtgagggactct

SEQ ID NO: 489899 - DNA, 15 bp, Homo sapiens
aaaggtgagggactc

SEQ ID NO: 489900 - DNA, 15 bp, Homo sapiens
caaaggtgagggact

SEQ ID NO: 489901 - DNA, 15 bp, Homo sapiens
tcaaaggtgagggac

SEQ ID NO: 489902 - DNA, 15 bp, Homo sapiens
gtcaaaggtgaggga

SEQ ID NO: 489903 - DNA, 15 bp, Homo sapiens
tgtcaaaggtgaggg

SEQ ID NO: 489904 - DNA, 15 bp, Homo sapiens
atgtcaaaggtgagg

SEQ ID NO: 489905 - DNA, 15 bp, Homo sapiens
catgtcaaaggtgag

SEQ ID NO: 489906 - DNA, 15 bp, Homo sapiens
ccatgtcaaaggtga

SEQ ID NO: 489907 - DNA, 15 bp, Homo sapiens
tccatgtcaaaggtg

SEQ ID NO: 489908 - DNA, 15 bp, Homo sapiens
ctccatgtcaaaggt

SEQ ID NO: 489909 - DNA, 15 bp, Homo sapiens
actccatgtcaaagg

SEQ ID NO: 489910 - DNA, 15 bp, Homo sapiens
aactccatgtcaaag

SEQ ID NO: 489911 - DNA, 15 bp, Homo sapiens
caactccatgtcaaa

SEQ ID NO: 489912 - DNA, 15 bp, Homo sapiens
tcaactccatgtcaa

SEQ ID NO: 489913 - DNA, 15 bp, Homo sapiens
gtcaactccatgtca

SEQ ID NO: 489914 - DNA, 15 bp, Homo sapiens
ggtcaactccatgtc

SEQ ID NO: 489915 - DNA, 15 bp, Homo sapiens
aggtcaactccatgt

SEQ ID NO: 489916 - DNA, 15 bp, Homo sapiens
gaggtcaactccatg

SEQ ID NO: 489917 - DNA, 15 bp, Homo sapiens
cgaggtcaactccat

SEQ ID NO: 489918 - DNA, 15 bp, Homo sapiens
ccgaggtcaactcca

SEQ ID NO: 489919 - DNA, 15 bp, Homo sapiens
tccgaggtcaactcc

SEQ ID NO: 489920 - DNA, 15 bp, Homo sapiens
ctccgaggtcaactc

SEQ ID NO: 489921 - DNA, 15 bp, Homo sapiens
actccgaggtcaact

SEQ ID NO: 489922 - DNA, 15 bp, Homo sapiens
cactccgaggtcaac

SEQ ID NO: 489923 - DNA, 15 bp, Homo sapiens
gcactccgaggtcaa

SEQ ID NO: 489924 - DNA, 15 bp, Homo sapiens
cgcactccgaggtca

SEQ ID NO: 489925 - DNA, 15 bp, Homo sapiens
gcgcactccgaggtc

SEQ ID NO: 489926 - DNA, 15 bp, Homo sapiens
agcgcactccgaggt

SEQ ID NO: 489927 - DNA, 15 bp, Homo sapiens
tagcgcactccgagg

SEQ ID NO: 489928 - DNA, 15 bp, Homo sapiens
gtagcgcactccgag

SEQ ID NO: 489929 - DNA, 15 bp, Homo sapiens
ggtagcgcactccga

SEQ ID NO: 489930 - DNA, 15 bp, Homo sapiens
aggtagcgcactccg

SEQ ID NO: 489931 - DNA, 15 bp, Homo sapiens
gaggtagcgcactcc

SEQ ID NO: 489932 - DNA, 15 bp, Homo sapiens
ggaggtagcgcactc

SEQ ID NO: 489933 - DNA, 15 bp, Homo sapiens
gggaggtagcgcact

SEQ ID NO: 489934 - DNA, 15 bp, Homo sapiens
ggggaggtagcgcac

SEQ ID NO: 489935 - DNA, 15 bp, Homo sapiens
gggggaggtagcgca

SEQ ID NO: 489936 - DNA, 15 bp, Homo sapiens
tgggggaggtagcgc

SEQ ID NO: 489937 - DNA, 15 bp, Homo sapiens
atgggggaggtagcg

SEQ ID NO: 489938 - DNA, 15 bp, Homo sapiens
catgggggaggtagc

SEQ ID NO: 489939 - DNA, 15 bp, Homo sapiens
acatgggggaggtag

SEQ ID NO: 489940 - DNA, 15 bp, Homo sapiens
cacatgggggaggta

SEQ ID NO: 489941 - DNA, 15 bp, Homo sapiens
tcacatgggggaggt

SEQ ID NO: 489942 - DNA, 15 bp, Homo sapiens
ctcacatgggggagg

SEQ ID NO: 489943 - DNA, 15 bp, Homo sapiens
cctcacatgggggag

SEQ ID NO: 489944 - DNA, 15 bp, Homo sapiens
tcctcacatggggga

SEQ ID NO: 489945 - DNA, 15 bp, Homo sapiens
ctcctcacatggggg

SEQ ID NO: 489946 - DNA, 15 bp, Homo sapiens
gctcctcacatgggg

SEQ ID NO: 489947 - DNA, 15 bp, Homo sapiens
agctcctcacatggg

SEQ ID NO: 489948 - DNA, 15 bp, Homo sapiens
cagctcctcacatgg

SEQ ID NO: 489949 - DNA, 15 bp, Homo sapiens
tcagctcctcacatg

SEQ ID NO: 489950 - DNA, 15 bp, Homo sapiens
ctcagctcctcacat

SEQ ID NO: 489951 - DNA, 15 bp, Homo sapiens
tctcagctcctcaca

SEQ ID NO: 489952 - DNA, 15 bp, Homo sapiens
ttctcagctcctcac

SEQ ID NO: 489953 - DNA, 15 bp, Homo sapiens
gttctcagctcctca

SEQ ID NO: 489954 - DNA, 15 bp, Homo sapiens
cgttctcagctcctc

SEQ ID NO: 489955 - DNA, 15 bp, Homo sapiens
ccgttctcagctcct

SEQ ID NO: 489956 - DNA, 15 bp, Homo sapiens
tccgttctcagctcc

SEQ ID NO: 489957 - DNA, 15 bp, Homo sapiens
ttccgttctcagctc

SEQ ID NO: 489958 - DNA, 15 bp, Homo sapiens
cttccgttctcagct

SEQ ID NO: 489959 - DNA, 15 bp, Homo sapiens
gcttccgttctcagc

SEQ ID NO: 489960 - DNA, 15 bp, Homo sapiens
agcttccgttctcag

SEQ ID NO: 489961 - DNA, 15 bp, Homo sapiens
cagcttccgttctca

SEQ ID NO: 489962 - DNA, 15 bp, Homo sapiens
gcagcttccgttctc

SEQ ID NO: 489963 - DNA, 15 bp, Homo sapiens
tgcagcttccgttct

SEQ ID NO: 489964 - DNA, 15 bp, Homo sapiens
ctgcagcttccgttc

SEQ ID NO: 489965 - DNA, 15 bp, Homo sapiens
tctgcagcttccgtt

SEQ ID NO: 489966 - DNA, 15 bp, Homo sapiens
ttctgcagcttccgt

SEQ ID NO: 489967 - DNA, 15 bp, Homo sapiens
tttctgcagcttccg

SEQ ID NO: 489968 - DNA, 15 bp, Homo sapiens
ctttctgcagcttcc

SEQ ID NO: 489969 - DNA, 15 bp, Homo sapiens
tctttctgcagcttc

SEQ ID NO: 489970 - DNA, 15 bp, Homo sapiens
atctttctgcagctt

SEQ ID NO: 489971 - DNA, 15 bp, Homo sapiens
tatctttctgcagct

SEQ ID NO: 489972 - DNA, 15 bp, Homo sapiens
gtatctttctgcagc

SEQ ID NO: 489973 - DNA, 15 bp, Homo sapiens
cgtatctttctgcag

SEQ ID NO: 489974 - DNA, 15 bp, Homo sapiens
tcgtatctttctgca

SEQ ID NO: 489975 - DNA, 15 bp, Homo sapiens
gtcgtatctttctgc

SEQ ID NO: 489976 - DNA, 15 bp, Homo sapiens
agtcgtatctttctg

SEQ ID NO: 489977 - DNA, 15 bp, Homo sapiens
cagtcgtatctttct

SEQ ID NO: 489978 - DNA, 15 bp, Homo sapiens
tcagtcgtatctttc

SEQ ID NO: 489979 - DNA, 15 bp, Homo sapiens
ctcagtcgtatcttt

SEQ ID NO: 489980 - DNA, 15 bp, Homo sapiens
cctcagtcgtatctt

SEQ ID NO: 489981 - DNA, 15 bp, Homo sapiens
gcctcagtcgtatct

SEQ ID NO: 489982 - DNA, 15 bp, Homo sapiens
cgcctcagtcgtatc

SEQ ID NO: 489983 - DNA, 15 bp, Homo sapiens
gcgcctcagtcgtat

SEQ ID NO: 489984 - DNA, 15 bp, Homo sapiens
ggcgcctcagtcgta

SEQ ID NO: 489985 - DNA, 15 bp, Homo sapiens
aggcgcctcagtcgt

SEQ ID NO: 489986 - DNA, 15 bp, Homo sapiens
taggcgcctcagtcg

SEQ ID NO: 489987 - DNA, 15 bp, Homo sapiens
gtaggcgcctcagtc

SEQ ID NO: 489988 - DNA, 15 bp, Homo sapiens
ggtaggcgcctcagt

SEQ ID NO: 489989 - DNA, 15 bp, Homo sapiens
aggtaggcgcctcag

SEQ ID NO: 489990 - DNA, 15 bp, Homo sapiens
caggtaggcgcctca

SEQ ID NO: 489991 - DNA, 15 bp, Homo sapiens
gcaggtaggcgcctc

SEQ ID NO: 489992 - DNA, 15 bp, Homo sapiens
tgcaggtaggcgcct

SEQ ID NO: 489993 - DNA, 15 bp, Homo sapiens
atgcaggtaggcgcc

SEQ ID NO: 489994 - DNA, 15 bp, Homo sapiens
aatgcaggtaggcgc

SEQ ID NO: 489995 - DNA, 15 bp, Homo sapiens
gaatgcaggtaggcg

SEQ ID NO: 489996 - DNA, 15 bp, Homo sapiens
agaatgcaggtaggc

SEQ ID NO: 489997 - DNA, 15 bp, Homo sapiens
cagaatgcaggtagg

SEQ ID NO: 489998 - DNA, 15 bp, Homo sapiens
gcagaatgcaggtag

SEQ ID NO: 489999 - DNA, 15 bp, Homo sapiens
ggcagaatgcaggta

SEQ ID NO: 490000 - DNA, 15 bp, Homo sapiens
tggcagaatgcaggt

SEQ ID NO: 490001 - DNA, 15 bp, Homo sapiens
gtggcagaatgcagg

SEQ ID NO: 490002 - DNA, 15 bp, Homo sapiens
ggtggcagaatgcag

SEQ ID NO: 490003 - DNA, 15 bp, Homo sapiens
gggtggcagaatgca

SEQ ID NO: 490004 - DNA, 15 bp, Homo sapiens
ggggtggcagaatgc

SEQ ID NO: 490005 - DNA, 15 bp, Homo sapiens
aggggtggcagaatg

SEQ ID NO: 490006 - DNA, 15 bp, Homo sapiens
gaggggtggcagaat

SEQ ID NO: 490007 - DNA, 15 bp, Homo sapiens
tgaggggtggcagaa

SEQ ID NO: 490008 - DNA, 15 bp, Homo sapiens
gtgaggggtggcaga

SEQ ID NO: 490009 - DNA, 15 bp, Homo sapiens
tgtgaggggtggcag

SEQ ID NO: 490010 - DNA, 15 bp, Homo sapiens
gtgtgaggggtggca

SEQ ID NO: 490011 - DNA, 15 bp, Homo sapiens
tgtgtgaggggtggc

SEQ ID NO: 490012 - DNA, 15 bp, Homo sapiens
ctgtgtgaggggtgg

SEQ ID NO: 490013 - DNA, 15 bp, Homo sapiens
gctgtgtgaggggtg

SEQ ID NO: 490014 - DNA, 15 bp, Homo sapiens
ggctgtgtgaggggt

SEQ ID NO: 490015 - DNA, 15 bp, Homo sapiens
tggctgtgtgagggg

SEQ ID NO: 490016 - DNA, 15 bp, Homo sapiens
ttggctgtgtgaggg

SEQ ID NO: 490017 - DNA, 15 bp, Homo sapiens
tttggctgtgtgagg

SEQ ID NO: 490018 - DNA, 15 bp, Homo sapiens
gtttggctgtgtgag

SEQ ID NO: 490019 - DNA, 15 bp, Homo sapiens
ggtttggctgtgtga

SEQ ID NO: 490020 - DNA, 15 bp, Homo sapiens
gggtttggctgtgtg

SEQ ID NO: 490021 - DNA, 15 bp, Homo sapiens
ggggtttggctgtgt

SEQ ID NO: 490022 - DNA, 15 bp, Homo sapiens
tggggtttggctgtg

SEQ ID NO: 490023 - DNA, 15 bp, Homo sapiens
ctggggtttggctgt

SEQ ID NO: 490024 - DNA, 15 bp, Homo sapiens
tctggggtttggctg

SEQ ID NO: 490025 - DNA, 15 bp, Homo sapiens
atctggggtttggct

SEQ ID NO: 490026 - DNA, 15 bp, Homo sapiens
gatctggggtttggc

SEQ ID NO: 490027 - DNA, 15 bp, Homo sapiens
tgatctggggtttgg

SEQ ID NO: 490028 - DNA, 15 bp, Homo sapiens
atgatctggggtttg

SEQ ID NO: 490029 - DNA, 15 bp, Homo sapiens
gatgatctggggttt

SEQ ID NO: 490030 - DNA, 15 bp, Homo sapiens
agatgatctggggtt

SEQ ID NO: 490031 - DNA, 15 bp, Homo sapiens
cagatgatctggggt

SEQ ID NO: 490032 - DNA, 15 bp, Homo sapiens
tcagatgatctgggg

SEQ ID NO: 490033 - DNA, 15 bp, Homo sapiens
ttcagatgatctggg

SEQ ID NO: 490034 - DNA, 15 bp, Homo sapiens
tttcagatgatctgg

SEQ ID NO: 490035 - DNA, 15 bp, Homo sapiens
gtttcagatgatctg

SEQ ID NO: 490036 - DNA, 15 bp, Homo sapiens
agtttcagatgatct

SEQ ID NO: 490037 - DNA, 15 bp, Homo sapiens
tagtttcagatgatc

SEQ ID NO: 490038 - DNA, 15 bp, Homo sapiens
gtagtttcagatgat

SEQ ID NO: 490039 - DNA, 15 bp, Homo sapiens
agtagtttcagatga

SEQ ID NO: 490040 - DNA, 15 bp, Homo sapiens
tagtagtttcagatg

SEQ ID NO: 490041 - DNA, 15 bp, Homo sapiens
ttagtagtttcagat

SEQ ID NO: 490042 - DNA, 15 bp, Homo sapiens
gttagtagtttcaga

SEQ ID NO: 490043 - DNA, 15 bp, Homo sapiens
agttagtagtttcag

SEQ ID NO: 490044 - DNA, 15 bp, Homo sapiens
aagttagtagtttca

SEQ ID NO: 490045 - DNA, 15 bp, Homo sapiens
aaagttagtagtttc

SEQ ID NO: 490046 - DNA, 15 bp, Homo sapiens
caaagttagtagttt

SEQ ID NO: 490047 - DNA, 15 bp, Homo sapiens
acaaagttagtagtt

SEQ ID NO: 490048 - DNA, 15 bp, Homo sapiens
cacaaagttagtagt

SEQ ID NO: 490049 - DNA, 15 bp, Homo sapiens
ccacaaagttagtag

SEQ ID NO: 490050 - DNA, 15 bp, Homo sapiens
accacaaagttagta

SEQ ID NO: 490051 - DNA, 15 bp, Homo sapiens
aaccacaaagttagt

SEQ ID NO: 490052 - DNA, 15 bp, Homo sapiens
gaaccacaaagttag

SEQ ID NO: 490053 - DNA, 15 bp, Homo sapiens
ggaaccacaaagtta

SEQ ID NO: 490054 - DNA, 15 bp, Homo sapiens
tggaaccacaaagtt

SEQ ID NO: 490055 - DNA, 15 bp, Homo sapiens
ctggaaccacaaagt

SEQ ID NO: 490056 - DNA, 15 bp, Homo sapiens
tctggaaccacaaag

SEQ ID NO: 490057 - DNA, 15 bp, Homo sapiens
atctggaaccacaaa

SEQ ID NO: 490058 - DNA, 15 bp, Homo sapiens
aatctggaaccacaa

SEQ ID NO: 490059 - DNA, 15 bp, Homo sapiens
aaatctggaaccaca

SEQ ID NO: 490060 - DNA, 15 bp, Homo sapiens
aaaatctggaaccac

SEQ ID NO: 490061 - DNA, 15 bp, Homo sapiens
aaaaatctggaacca

SEQ ID NO: 490062 - DNA, 15 bp, Homo sapiens
aaaaaatctggaacc

SEQ ID NO: 490063 - DNA, 15 bp, Homo sapiens
aaaaaaatctggaac

SEQ ID NO: 490064 - DNA, 15 bp, Homo sapiens
aaaagcaggggactc

SEQ ID NO: 490065 - DNA, 15 bp, Homo sapiens
aaaaagcaggggact

SEQ ID NO: 490066 - DNA, 15 bp, Homo sapiens
taaaaagcaggggac

SEQ ID NO: 490067 - DNA, 15 bp, Homo sapiens
ttaaaaagcagggga

SEQ ID NO: 490068 - DNA, 15 bp, Homo sapiens
cttaaaaagcagggg

SEQ ID NO: 490069 - DNA, 15 bp, Homo sapiens
ccttaaaaagcaggg

SEQ ID NO: 490070 - DNA, 15 bp, Homo sapiens
tccttaaaaagcagg

SEQ ID NO: 490071 - DNA, 15 bp, Homo sapiens
ttccttaaaaagcag

SEQ ID NO: 490072 - DNA, 15 bp, Homo sapiens
attccttaaaaagca

SEQ ID NO: 490073 - DNA, 15 bp, Homo sapiens
gattccttaaaaagc

SEQ ID NO: 490074 - DNA, 15 bp, Homo sapiens
agattccttaaaaag

SEQ ID NO: 490075 - DNA, 15 bp, Homo sapiens
cagattccttaaaaa

SEQ ID NO: 490076 - DNA, 15 bp, Homo sapiens
acagattccttaaaa

SEQ ID NO: 490077 - DNA, 15 bp, Homo sapiens
cacagattccttaaa

SEQ ID NO: 490078 - DNA, 15 bp, Homo sapiens
gcacagattccttaa

SEQ ID NO: 490079 - DNA, 15 bp, Homo sapiens
ggcacagattcctta

SEQ ID NO: 490080 - DNA, 15 bp, Homo sapiens
gggcacagattcctt

SEQ ID NO: 490081 - DNA, 15 bp, Homo sapiens
ggggcacagattcct

SEQ ID NO: 490082 - DNA, 15 bp, Homo sapiens
gggggcacagattcc

SEQ ID NO: 490083 - DNA, 15 bp, Homo sapiens
agggggcacagattc

SEQ ID NO: 490084 - DNA, 15 bp, Homo sapiens
tagggggcacagatt

SEQ ID NO: 490085 - DNA, 15 bp, Homo sapiens
ttagggggcacagat

SEQ ID NO: 490086 - DNA, 15 bp, Homo sapiens
tttagggggcacaga

SEQ ID NO: 490087 - DNA, 15 bp, Homo sapiens
gtttagggggcacag

SEQ ID NO: 490088 - DNA, 15 bp, Homo sapiens
agtttagggggcaca

SEQ ID NO: 490089 - DNA, 15 bp, Homo sapiens
cagtttagggggcac

SEQ ID NO: 490090 - DNA, 15 bp, Homo sapiens
ccagtttagggggca

SEQ ID NO: 490091 - DNA, 15 bp, Homo sapiens
gccagtttagggggc

SEQ ID NO: 490092 - DNA, 15 bp, Homo sapiens
agccagtttaggggg

SEQ ID NO: 490093 - DNA, 15 bp, Homo sapiens
gagccagtttagggg

SEQ ID NO: 490094 - DNA, 15 bp, Homo sapiens
ggagccagtttaggg

SEQ ID NO: 490095 - DNA, 15 bp, Homo sapiens
aggagccagtttagg

SEQ ID NO: 490096 - DNA, 15 bp, Homo sapiens
aaggagccagtttag

SEQ ID NO: 490097 - DNA, 15 bp, Homo sapiens
taaggagccagttta

SEQ ID NO: 490098 - DNA, 15 bp, Homo sapiens
gtaaggagccagttt

SEQ ID NO: 490099 - DNA, 15 bp, Homo sapiens
ggtaaggagccagtt

SEQ ID NO: 490100 - DNA, 15 bp, Homo sapiens
gggtaaggagccagt

SEQ ID NO: 490101 - DNA, 15 bp, Homo sapiens
agggtaaggagccag

SEQ ID NO: 490102 - DNA, 15 bp, Homo sapiens
aagggtaaggagcca

SEQ ID NO: 490103 - DNA, 15 bp, Homo sapiens
gaagggtaaggagcc

SEQ ID NO: 490104 - DNA, 15 bp, Homo sapiens
agaagggtaaggagc

SEQ ID NO: 490105 - DNA, 15 bp, Homo sapiens
cagaagggtaaggag

SEQ ID NO: 490106 - DNA, 15 bp, Homo sapiens
tcagaagggtaagga

SEQ ID NO: 490107 - DNA, 15 bp, Homo sapiens
ctcagaagggtaagg

SEQ ID NO: 490108 - DNA, 15 bp, Homo sapiens
tctcagaagggtaag

SEQ ID NO: 490109 - DNA, 15 bp, Homo sapiens
ttctcagaagggtaa

SEQ ID NO: 490110 - DNA, 15 bp, Homo sapiens
cttctcagaagggta

SEQ ID NO: 490111 - DNA, 15 bp, Homo sapiens
gcttctcagaagggt

SEQ ID NO: 490112 - DNA, 15 bp, Homo sapiens
tgcttctcagaaggg

SEQ ID NO: 490113 - DNA, 15 bp, Homo sapiens
atgcttctcagaagg

SEQ ID NO: 490114 - DNA, 15 bp, Homo sapiens
aatgcttctcagaag

SEQ ID NO: 490115 - DNA, 15 bp, Homo sapiens
caatgcttctcagaa

SEQ ID NO: 490116 - DNA, 15 bp, Homo sapiens
tcaatgcttctcaga

SEQ ID NO: 490117 - DNA, 15 bp, Homo sapiens
gtcaatgcttctcag

SEQ ID NO: 490118 - DNA, 15 bp, Homo sapiens
tgtcaatgcttctca

SEQ ID NO: 490119 - DNA, 15 bp, Homo sapiens
ctgtcaatgcttctc

SEQ ID NO: 490120 - DNA, 15 bp, Homo sapiens
actgtcaatgcttct

SEQ ID NO: 490121 - DNA, 15 bp, Homo sapiens
tactgtcaatgcttc

SEQ ID NO: 490122 - DNA, 15 bp, Homo sapiens
atactgtcaatgctt

SEQ ID NO: 490123 - DNA, 15 bp, Homo sapiens
aatactgtcaatgct

SEQ ID NO: 490124 - DNA, 15 bp, Homo sapiens
gaatactgtcaatgc

SEQ ID NO: 490125 - DNA, 15 bp, Homo sapiens
ggaatactgtcaatg

SEQ ID NO: 490126 - DNA, 15 bp, Homo sapiens
tggaatactgtcaat

SEQ ID NO: 490127 - DNA, 15 bp, Homo sapiens
ctggaatactgtcaa

SEQ ID NO: 490128 - DNA, 15 bp, Homo sapiens
cctggaatactgtca

SEQ ID NO: 490129 - DNA, 15 bp, Homo sapiens
ccctggaatactgtc

SEQ ID NO: 490130 - DNA, 15 bp, Homo sapiens
cccctggaatactgt

SEQ ID NO: 490131 - DNA, 15 bp, Homo sapiens
acccctggaatactg

SEQ ID NO: 490132 - DNA, 15 bp, Homo sapiens
cacccctggaatact

SEQ ID NO: 490133 - DNA, 15 bp, Homo sapiens
ccacccctggaatac

SEQ ID NO: 490134 - DNA, 15 bp, Homo sapiens
gccacccctggaata

SEQ ID NO: 490135 - DNA, 15 bp, Homo sapiens
ggccacccctggaat

SEQ ID NO: 490136 - DNA, 15 bp, Homo sapiens
tggccacccctggaa

SEQ ID NO: 490137 - DNA, 15 bp, Homo sapiens
ctggccacccctgga

SEQ ID NO: 490138 - DNA, 15 bp, Homo sapiens
gctggccacccctgg

SEQ ID NO: 490139 - DNA, 15 bp, Homo sapiens
tgctggccacccctg

SEQ ID NO: 490140 - DNA, 15 bp, Homo sapiens
gtgctggccacccct

SEQ ID NO: 490141 - DNA, 15 bp, Homo sapiens
ggtgctggccacccc

SEQ ID NO: 490142 - DNA, 15 bp, Homo sapiens
gggtgctggccaccc

SEQ ID NO: 490143 - DNA, 15 bp, Homo sapiens
agggtgctggccacc

SEQ ID NO: 490144 - DNA, 15 bp, Homo sapiens
cagggtgctggccac

SEQ ID NO: 490145 - DNA, 15 bp, Homo sapiens
tcagggtgctggcca

SEQ ID NO: 490146 - DNA, 15 bp, Homo sapiens
ttcagggtgctggcc

SEQ ID NO: 490147 - DNA, 15 bp, Homo sapiens
tttcagggtgctggc

SEQ ID NO: 490148 - DNA, 15 bp, Homo sapiens
ttttcagggtgctgg

SEQ ID NO: 490149 - DNA, 15 bp, Homo sapiens
gttttcagggtgctg

SEQ ID NO: 490150 - DNA, 15 bp, Homo sapiens
ggttttcagggtgct

SEQ ID NO: 490151 - DNA, 15 bp, Homo sapiens
tggttttcagggtgc

SEQ ID NO: 490152 - DNA, 15 bp, Homo sapiens
gtggttttcagggtg

SEQ ID NO: 490153 - DNA, 15 bp, Homo sapiens
tgtggttttcagggt

SEQ ID NO: 490154 - DNA, 15 bp, Homo sapiens
ctgtggttttcaggg

SEQ ID NO: 490155 - DNA, 15 bp, Homo sapiens
gctgtggttttcagg

SEQ ID NO: 490156 - DNA, 15 bp, Homo sapiens
tgctgtggttttcag

SEQ ID NO: 490157 - DNA, 15 bp, Homo sapiens
ttgctgtggttttca

SEQ ID NO: 490158 - DNA, 15 bp, Homo sapiens
tttgctgtggttttc

SEQ ID NO: 490159 - DNA, 15 bp, Homo sapiens
ctttgctgtggtttt

SEQ ID NO: 490160 - DNA, 15 bp, Homo sapiens
gctttgctgtggttt

SEQ ID NO: 490161 - DNA, 15 bp, Homo sapiens
cgctttgctgtggtt

SEQ ID NO: 490162 - DNA, 15 bp, Homo sapiens
ccgctttgctgtggt

SEQ ID NO: 490163 - DNA, 15 bp, Homo sapiens
cccgctttgctgtgg

SEQ ID NO: 490164 - DNA, 15 bp, Homo sapiens
gcccgctttgctgtg

SEQ ID NO: 490165 - DNA, 15 bp, Homo sapiens
tgcccgctttgctgt

SEQ ID NO: 490166 - DNA, 15 bp, Homo sapiens
ctgcccgctttgctg

SEQ ID NO: 490167 - DNA, 15 bp, Homo sapiens
tctgcccgctttgct

SEQ ID NO: 490168 - DNA, 15 bp, Homo sapiens
ctctgcccgctttgc

SEQ ID NO: 490169 - DNA, 15 bp, Homo sapiens
actctgcccgctttg

SEQ ID NO: 490170 - DNA, 15 bp, Homo sapiens
aactctgcccgcttt

SEQ ID NO: 490171 - DNA, 15 bp, Homo sapiens
taactctgcccgctt

SEQ ID NO: 490172 - DNA, 15 bp, Homo sapiens
ttaactctgcccgct

SEQ ID NO: 490173 - DNA, 15 bp, Homo sapiens
tttaactctgcccgc

SEQ ID NO: 490174 - DNA, 15 bp, Homo sapiens
ttttaactctgcccg

SEQ ID NO: 490175 - DNA, 15 bp, Homo sapiens
attttaactctgccc

SEQ ID NO: 490176 - DNA, 15 bp, Homo sapiens
aattttaactctgcc

SEQ ID NO: 490177 - DNA, 15 bp, Homo sapiens
aaattttaactctgc

SEQ ID NO: 490178 - DNA, 15 bp, Homo sapiens
taaattttaactctg

SEQ ID NO: 490179 - DNA, 15 bp, Homo sapiens
ttaaattttaactct

SEQ ID NO: 490180 - DNA, 15 bp, Homo sapiens
cttaaattttaactc

SEQ ID NO: 490181 - DNA, 15 bp, Homo sapiens
tcttaaattttaact

SEQ ID NO: 490182 - DNA, 15 bp, Homo sapiens
gtcttaaattttaac

SEQ ID NO: 490183 - DNA, 15 bp, Homo sapiens
agtcttaaattttaa

SEQ ID NO: 490184 - DNA, 15 bp, Homo sapiens
tagtcttaaatttta

SEQ ID NO: 490185 - DNA, 15 bp, Homo sapiens
ttagtcttaaatttt

SEQ ID NO: 490186 - DNA, 15 bp, Homo sapiens
tttagtcttaaattt

SEQ ID NO: 490187 - DNA, 15 bp, Homo sapiens
ttttagtcttaaatt

SEQ ID NO: 490188 - DNA, 15 bp, Homo sapiens
tttttagtcttaaat

SEQ ID NO: 490189 - DNA, 15 bp, Homo sapiens
atttttagtcttaaa

SEQ ID NO: 490190 - DNA, 15 bp, Homo sapiens
catttttagtcttaa

SEQ ID NO: 490191 - DNA, 15 bp, Homo sapiens
tcatttttagtctta

SEQ ID NO: 490192 - DNA, 15 bp, Homo sapiens
gtcatttttagtctt

SEQ ID NO: 490193 - DNA, 15 bp, Homo sapiens
tgtcatttttagtct

SEQ ID NO: 490194 - DNA, 15 bp, Homo sapiens
ctgtcatttttagtc

SEQ ID NO: 490195 - DNA, 15 bp, Homo sapiens
gctgtcatttttagt

SEQ ID NO: 490196 - DNA, 15 bp, Homo sapiens
tgctgtcatttttag

SEQ ID NO: 490197 - DNA, 15 bp, Homo sapiens
atgctgtcattttta

SEQ ID NO: 490198 - DNA, 15 bp, Homo sapiens
gatgctgtcattttt

SEQ ID NO: 490199 - DNA, 15 bp, Homo sapiens
tgatgctgtcatttt

SEQ ID NO: 490200 - DNA, 15 bp, Homo sapiens
ctgatgctgtcattt

SEQ ID NO: 490201 - DNA, 15 bp, Homo sapiens
cctgatgctgtcatt

SEQ ID NO: 490202 - DNA, 15 bp, Homo sapiens
gcctgatgctgtcat

SEQ ID NO: 490203 - DNA, 15 bp, Homo sapiens
tgcctgatgctgtca

SEQ ID NO: 490204 - DNA, 15 bp, Homo sapiens
atgcctgatgctgtc

SEQ ID NO: 490205 - DNA, 15 bp, Homo sapiens
catgcctgatgctgt

SEQ ID NO: 490206 - DNA, 15 bp, Homo sapiens
gcatgcctgatgctg

SEQ ID NO: 490207 - DNA, 15 bp, Homo sapiens
tgcatgcctgatgct

SEQ ID NO: 490208 - DNA, 15 bp, Homo sapiens
gtgcatgcctgatgc

SEQ ID NO: 490209 - DNA, 15 bp, Homo sapiens
cgtgcatgcctgatg

SEQ ID NO: 490210 - DNA, 15 bp, Homo sapiens
gcgtgcatgcctgat

SEQ ID NO: 490211 - DNA, 15 bp, Homo sapiens
cgcgtgcatgcctga

SEQ ID NO: 490212 - DNA, 15 bp, Homo sapiens
ccgcgtgcatgcctg

SEQ ID NO: 490213 - DNA, 15 bp, Homo sapiens
cccgcgtgcatgcct

SEQ ID NO: 490214 - DNA, 15 bp, Homo sapiens
tcccgcgtgcatgcc

SEQ ID NO: 490215 - DNA, 15 bp, Homo sapiens
ttcccgcgtgcatgc

SEQ ID NO: 490216 - DNA, 15 bp, Homo sapiens
cttcccgcgtgcatg

SEQ ID NO: 490217 - DNA, 15 bp, Homo sapiens
ccttcccgcgtgcat

SEQ ID NO: 490218 - DNA, 15 bp, Homo sapiens
tccttcccgcgtgca

SEQ ID NO: 490219 - DNA, 15 bp, Homo sapiens
ttccttcccgcgtgc

SEQ ID NO: 490220 - DNA, 15 bp, Homo sapiens
gttccttcccgcgtg

SEQ ID NO: 490221 - DNA, 15 bp, Homo sapiens
tgttccttcccgcgt

SEQ ID NO: 490222 - DNA, 15 bp, Homo sapiens
ctgttccttcccgcg

SEQ ID NO: 490223 - DNA, 15 bp, Homo sapiens
tctgttccttcccgc

SEQ ID NO: 490224 - DNA, 15 bp, Homo sapiens
ttctgttccttcccg

SEQ ID NO: 490225 - DNA, 15 bp, Homo sapiens
gttctgttccttccc

SEQ ID NO: 490226 - DNA, 15 bp, Homo sapiens
tgttctgttccttcc

SEQ ID NO: 490227 - DNA, 15 bp, Homo sapiens
ttgttctgttccttc

SEQ ID NO: 490228 - DNA, 15 bp, Homo sapiens
gttgttctgttcctt

SEQ ID NO: 490229 - DNA, 15 bp, Homo sapiens
ggttgttctgttcct

SEQ ID NO: 490230 - DNA, 15 bp, Homo sapiens
tggttgttctgttcc

SEQ ID NO: 490231 - DNA, 15 bp, Homo sapiens
ctggttgttctgttc

SEQ ID NO: 490232 - DNA, 15 bp, Homo sapiens
gctggttgttctgtt

SEQ ID NO: 490233 - DNA, 15 bp, Homo sapiens
agctggttgttctgt

SEQ ID NO: 490234 - DNA, 15 bp, Homo sapiens
gagctggttgttctg

SEQ ID NO: 490235 - DNA, 15 bp, Homo sapiens
ggagctggttgttct

SEQ ID NO: 490236 - DNA, 15 bp, Homo sapiens
tggagctggttgttc

SEQ ID NO: 490237 - DNA, 15 bp, Homo sapiens
ctggagctggttgtt

SEQ ID NO: 490238 - DNA, 15 bp, Homo sapiens
cctggagctggttgt

SEQ ID NO: 490239 - DNA, 15 bp, Homo sapiens
ccctggagctggttg

SEQ ID NO: 490240 - DNA, 15 bp, Homo sapiens
cccctggagctggtt

SEQ ID NO: 490241 - DNA, 15 bp, Homo sapiens
acccctggagctggt

SEQ ID NO: 490242 - DNA, 15 bp, Homo sapiens
aacccctggagctgg

SEQ ID NO: 490243 - DNA, 15 bp, Homo sapiens
gaacccctggagctg

SEQ ID NO: 490244 - DNA, 15 bp, Homo sapiens
ggaacccctggagct

SEQ ID NO: 490245 - DNA, 15 bp, Homo sapiens
gggaacccctggagc

SEQ ID NO: 490246 - DNA, 15 bp, Homo sapiens
tgggaacccctggag

SEQ ID NO: 490247 - DNA, 15 bp, Homo sapiens
atgggaacccctgga

SEQ ID NO: 490248 - DNA, 15 bp, Homo sapiens
gatgggaacccctgg

SEQ ID NO: 490249 - DNA, 15 bp, Homo sapiens
tgatgggaacccctg

SEQ ID NO: 490250 - DNA, 15 bp, Homo sapiens
gtgatgggaacccct

SEQ ID NO: 490251 - DNA, 15 bp, Homo sapiens
ggtgatgggaacccc

SEQ ID NO: 490252 - DNA, 15 bp, Homo sapiens
gggtgatgggaaccc

SEQ ID NO: 490253 - DNA, 15 bp, Homo sapiens
tgggtgatgggaacc

SEQ ID NO: 490254 - DNA, 15 bp, Homo sapiens
ctgggtgatgggaac

SEQ ID NO: 490255 - DNA, 15 bp, Homo sapiens
cctgggtgatgggaa

SEQ ID NO: 490256 - DNA, 15 bp, Homo sapiens
ccctgggtgatggga

SEQ ID NO: 490257 - DNA, 15 bp, Homo sapiens
tccctgggtgatggg

SEQ ID NO: 490258 - DNA, 15 bp, Homo sapiens
ctccctgggtgatgg

SEQ ID NO: 490259 - DNA, 15 bp, Homo sapiens
cctccctgggtgatg

SEQ ID NO: 490260 - DNA, 15 bp, Homo sapiens
gcctccctgggtgat

SEQ ID NO: 490261 - DNA, 15 bp, Homo sapiens
ggcctccctgggtga

SEQ ID NO: 490262 - DNA, 15 bp, Homo sapiens
tggcctccctgggtg

SEQ ID NO: 490263 - DNA, 15 bp, Homo sapiens
gtggcctccctgggt

SEQ ID NO: 490264 - DNA, 15 bp, Homo sapiens
ggtggcctccctggg

SEQ ID NO: 490265 - DNA, 15 bp, Homo sapiens
tggtggcctccctgg

SEQ ID NO: 490266 - DNA, 15 bp, Homo sapiens
ttggtggcctccctg

SEQ ID NO: 490267 - DNA, 15 bp, Homo sapiens
gttggtggcctccct

SEQ ID NO: 490268 - DNA, 15 bp, Homo sapiens
cgttggtggcctccc

SEQ ID NO: 490269 - DNA, 15 bp, Homo sapiens
gcgttggtggcctcc

SEQ ID NO: 490270 - DNA, 15 bp, Homo sapiens
ggcgttggtggcctc

SEQ ID NO: 490271 - DNA, 15 bp, Homo sapiens
gggcgttggtggcct

SEQ ID NO: 490272 - DNA, 15 bp, Homo sapiens
ggggcgttggtggcc

SEQ ID NO: 490273 - DNA, 15 bp, Homo sapiens
tggggcgttggtggc

SEQ ID NO: 490274 - DNA, 15 bp, Homo sapiens
ttggggcgttggtgg

SEQ ID NO: 490275 - DNA, 15 bp, Homo sapiens
gttggggcgttggtg

SEQ ID NO: 490276 - DNA, 15 bp, Homo sapiens
ggttggggcgttggt

SEQ ID NO: 490277 - DNA, 15 bp, Homo sapiens
tggttggggcgttgg

SEQ ID NO: 490278 - DNA, 15 bp, Homo sapiens
ctggttggggcgttg

SEQ ID NO: 490279 - DNA, 15 bp, Homo sapiens
cctggttggggcgtt

SEQ ID NO: 490280 - DNA, 15 bp, Homo sapiens
tcctggttggggcgt

SEQ ID NO: 490281 - DNA, 15 bp, Homo sapiens
ctcctggttggggcg

SEQ ID NO: 490282 - DNA, 15 bp, Homo sapiens
gctcctggttggggc

SEQ ID NO: 490283 - DNA, 15 bp, Homo sapiens
ggctcctggttgggg

SEQ ID NO: 490284 - DNA, 15 bp, Homo sapiens
tggctcctggttggg

SEQ ID NO: 490285 - DNA, 15 bp, Homo sapiens
atggctcctggttgg

SEQ ID NO: 490286 - DNA, 15 bp, Homo sapiens
tatggctcctggttg

SEQ ID NO: 490287 - DNA, 15 bp, Homo sapiens
ctatggctcctggtt

SEQ ID NO: 490288 - DNA, 15 bp, Homo sapiens
gctatggctcctggt

SEQ ID NO: 490289 - DNA, 15 bp, Homo sapiens
tgctatggctcctgg

SEQ ID NO: 490290 - DNA, 15 bp, Homo sapiens
ctgctatggctcctg

SEQ ID NO: 490291 - DNA, 15 bp, Homo sapiens
gctgctatggctcct

SEQ ID NO: 490292 - DNA, 15 bp, Homo sapiens
tgctgctatggctcc

SEQ ID NO: 490293 - DNA, 15 bp, Homo sapiens
ttgctgctatggctc

SEQ ID NO: 490294 - DNA, 15 bp, Homo sapiens
tttgctgctatggct

SEQ ID NO: 490295 - DNA, 15 bp, Homo sapiens
atttgctgctatggc

SEQ ID NO: 490296 - DNA, 15 bp, Homo sapiens
aatttgctgctatgg

SEQ ID NO: 490297 - DNA, 15 bp, Homo sapiens
aaatttgctgctatg

SEQ ID NO: 490298 - DNA, 15 bp, Homo sapiens
taaatttgctgctat

SEQ ID NO: 490299 - DNA, 15 bp, Homo sapiens
ataaatttgctgcta

SEQ ID NO: 490300 - DNA, 15 bp, Homo sapiens
cataaatttgctgct

SEQ ID NO: 490301 - DNA, 15 bp, Homo sapiens
tcataaatttgctgc

SEQ ID NO: 490302 - DNA, 15 bp, Homo sapiens
ttcataaatttgctg

SEQ ID NO: 490303 - DNA, 15 bp, Homo sapiens
tttcataaatttgct

SEQ ID NO: 490304 - DNA, 15 bp, Homo sapiens
ttttcataaatttgc

SEQ ID NO: 490305 - DNA, 15 bp, Homo sapiens
tttttcataaatttg

SEQ ID NO: 490306 - DNA, 15 bp, Homo sapiens
ttttttcataaattt

SEQ ID NO: 490307 - DNA, 15 bp, Homo sapiens
tttttttcataaatt

SEQ ID NO: 490308 - DNA, 15 bp, Homo sapiens
atttttttcataaat

SEQ ID NO: 490309 - DNA, 15 bp, Homo sapiens
tatttttttcataaa

SEQ ID NO: 490310 - DNA, 15 bp, Homo sapiens
atatttttttcataa

SEQ ID NO: 490311 - DNA, 15 bp, Homo sapiens
aatatttttttcata

SEQ ID NO: 490312 - DNA, 15 bp, Homo sapiens
aaatatttttttcat

SEQ ID NO: 490313 - DNA, 15 bp, Homo sapiens
aaaatatttttttca

SEQ ID NO: 490314 - DNA, 15 bp, Homo sapiens
taaaatatttttttc

SEQ ID NO: 490315 - DNA, 15 bp, Homo sapiens
ataaaatattttttt

SEQ ID NO: 490316 - DNA, 15 bp, Homo sapiens
aataaaatatttttt

SEQ ID NO: 490317 - DNA, 15 bp, Homo sapiens
gaataaaatattttt

SEQ ID NO: 490318 - DNA, 15 bp, Homo sapiens
ggaataaaatatttt

SEQ ID NO: 490319 - DNA, 15 bp, Homo sapiens
tggaataaaatattt

SEQ ID NO: 490320 - DNA, 15 bp, Homo sapiens
ttggaataaaatatt

SEQ ID NO: 490321 - DNA, 15 bp, Homo sapiens
tttggaataaaatat

SEQ ID NO: 490322 - DNA, 15 bp, Homo sapiens
ttttggaataaaata

SEQ ID NO: 490323 - DNA, 15 bp, Homo sapiens
gttttggaataaaat

SEQ ID NO: 490324 - DNA, 15 bp, Homo sapiens
tgttttggaataaaa

SEQ ID NO: 490325 - DNA, 15 bp, Homo sapiens
gtgttttggaataaa

SEQ ID NO: 490326 - DNA, 15 bp, Homo sapiens
agtgttttggaataa

SEQ ID NO: 490327 - DNA, 15 bp, Homo sapiens
cagtgttttggaata

SEQ ID NO: 490328 - DNA, 15 bp, Homo sapiens
acagtgttttggaat

SEQ ID NO: 490329 - DNA, 15 bp, Homo sapiens
aacagtgttttggaa

SEQ ID NO: 490330 - DNA, 15 bp, Homo sapiens
aaacagtgttttgga

SEQ ID NO: 490331 - DNA, 15 bp, Homo sapiens
taaacagtgttttgg

SEQ ID NO: 490332 - DNA, 15 bp, Homo sapiens
gtaaacagtgttttg

SEQ ID NO: 490333 - DNA, 15 bp, Homo sapiens
tgtaaacagtgtttt

SEQ ID NO: 490334 - DNA, 15 bp, Homo sapiens
gtgtaaacagtgttt

SEQ ID NO: 490335 - DNA, 15 bp, Homo sapiens
tgtgtaaacagtgtt

SEQ ID NO: 490336 - DNA, 15 bp, Homo sapiens
ttgtgtaaacagtgt

SEQ ID NO: 490337 - DNA, 15 bp, Homo sapiens
tttgtgtaaacagtg

SEQ ID NO: 490338 - DNA, 15 bp, Homo sapiens
atttgtgtaaacagt

SEQ ID NO: 490339 - DNA, 15 bp, Homo sapiens
acatttgtgtaaaca

SEQ ID NO: 490340 - DNA, 15 bp, Homo sapiens
cacatttgtgtaaac

SEQ ID NO: 490341 - DNA, 15 bp, Homo sapiens
acacatttgtgtaaa

SEQ ID NO: 490342 - DNA, 15 bp, Homo sapiens
cacacatttgtgtaa

SEQ ID NO: 490343 - DNA, 15 bp, Homo sapiens
ccacacatttgtgta

SEQ ID NO: 490344 - DNA, 15 bp, Homo sapiens
accacacatttgtgt

SEQ ID NO: 490345 - DNA, 15 bp, Homo sapiens
gaccacacatttgtg

SEQ ID NO: 490346 - DNA, 15 bp, Homo sapiens
agaccacacatttgt

SEQ ID NO: 490347 - DNA, 15 bp, Homo sapiens
aagaccacacatttg

SEQ ID NO: 490348 - DNA, 15 bp, Homo sapiens
aaagaccacacattt

SEQ ID NO: 490349 - DNA, 15 bp, Homo sapiens
caaagaccacacatt

SEQ ID NO: 490350 - DNA, 15 bp, Homo sapiens
acaaagaccacacat

SEQ ID NO: 490351 - DNA, 15 bp, Homo sapiens
tacaaagaccacaca

SEQ ID NO: 490352 - DNA, 15 bp, Homo sapiens
gtacaaagaccacac

SEQ ID NO: 490353 - DNA, 15 bp, Homo sapiens
tgtacaaagaccaca

SEQ ID NO: 490354 - DNA, 15 bp, Homo sapiens
ttgtacaaagaccac

SEQ ID NO: 490355 - DNA, 15 bp, Homo sapiens
tttgtacaaagacca

SEQ ID NO: 490356 - DNA, 15 bp, Homo sapiens
ctttgtacaaagacc

SEQ ID NO: 490357 - DNA, 15 bp, Homo sapiens
actttgtacaaagac

SEQ ID NO: 490358 - DNA, 15 bp, Homo sapiens
tactttgtacaaaga

SEQ ID NO: 490359 - DNA, 15 bp, Homo sapiens
gtactttgtacaaag

SEQ ID NO: 490360 - DNA, 15 bp, Homo sapiens
tgtactttgtacaaa

SEQ ID NO: 490361 - DNA, 15 bp, Homo sapiens
ttgtactttgtacaa

SEQ ID NO: 490362 - DNA, 15 bp, Homo sapiens
tttgtactttgtaca

SEQ ID NO: 490363 - DNA, 15 bp, Homo sapiens
ttttgtactttgtac

SEQ ID NO: 490364 - DNA, 15 bp, Homo sapiens
tttttgtactttgta

SEQ ID NO: 490365 - DNA, 15 bp, Homo sapiens
ttttttgtactttgt

SEQ ID NO: 490366 - DNA, 15 bp, Homo sapiens
tttttttgtactttg

SEQ ID NO: 490367 - DNA, 15 bp, Homo sapiens
gtttttttgtacttt

SEQ ID NO: 490368 - DNA, 15 bp, Homo sapiens
ggtttttttgtactt

SEQ ID NO: 490369 - DNA, 15 bp, Homo sapiens
gggtttttttgtact

SEQ ID NO: 490370 - DNA, 15 bp, Homo sapiens
ggggtttttttgtac

SEQ ID NO: 490371 - DNA, 15 bp, Homo sapiens
aggggtttttttgta

SEQ ID NO: 490372 - DNA, 15 bp, Homo sapiens
gaggggtttttttgt

SEQ ID NO: 490373 - DNA, 15 bp, Homo sapiens
agaggggtttttttg

SEQ ID NO: 490374 - DNA, 15 bp, Homo sapiens
aagaggggttttttt

SEQ ID NO: 490375 - DNA, 15 bp, Homo sapiens
gaagaggggtttttt

SEQ ID NO: 490376 - DNA, 15 bp, Homo sapiens
agaagaggggttttt

SEQ ID NO: 490377 - DNA, 15 bp, Homo sapiens
gagaagaggggtttt

SEQ ID NO: 490378 - DNA, 15 bp, Homo sapiens
tgagaagaggggttt

SEQ ID NO: 490379 - DNA, 15 bp, Homo sapiens
atgagaagaggggtt

SEQ ID NO: 490380 - DNA, 15 bp, Homo sapiens
gatgagaagaggggt

SEQ ID NO: 490381 - DNA, 15 bp, Homo sapiens
ggatgagaagagggg

SEQ ID NO: 490382 - DNA, 15 bp, Homo sapiens
gggatgagaagaggg

SEQ ID NO: 490383 - DNA, 15 bp, Homo sapiens
ggggatgagaagagg

SEQ ID NO: 490384 - DNA, 15 bp, Homo sapiens
tggggatgagaagag

SEQ ID NO: 490385 - DNA, 15 bp, Homo sapiens
gtggggatgagaaga

SEQ ID NO: 490386 - DNA, 15 bp, Homo sapiens
ggtggggatgagaag

SEQ ID NO: 490387 - DNA, 15 bp, Homo sapiens
aggtggggatgagaa

SEQ ID NO: 490388 - DNA, 15 bp, Homo sapiens
gaggtggggatgaga

SEQ ID NO: 490389 - DNA, 15 bp, Homo sapiens
ggaggtggggatgag

SEQ ID NO: 490390 - DNA, 15 bp, Homo sapiens
gggaggtggggatga

SEQ ID NO: 490391 - DNA, 15 bp, Homo sapiens
agggaggtggggatg

SEQ ID NO: 490392 - DNA, 15 bp, Homo sapiens
aagggaggtggggat

SEQ ID NO: 490393 - DNA, 15 bp, Homo sapiens
gaagggaggtgggga

SEQ ID NO: 490394 - DNA, 15 bp, Homo sapiens
tgaagggaggtgggg

SEQ ID NO: 490395 - DNA, 15 bp, Homo sapiens
ctgaagggaggtggg

SEQ ID NO: 490396 - DNA, 15 bp, Homo sapiens
tctgaagggaggtgg

SEQ ID NO: 490397 - DNA, 15 bp, Homo sapiens
ctctgaagggaggtg

SEQ ID NO: 490398 - DNA, 15 bp, Homo sapiens
tctctgaagggaggt

SEQ ID NO: 490399 - DNA, 15 bp, Homo sapiens
ttctctgaagggagg

SEQ ID NO: 490400 - DNA, 15 bp, Homo sapiens
cttctctgaagggag

SEQ ID NO: 490401 - DNA, 15 bp, Homo sapiens
acttctctgaaggga

SEQ ID NO: 490402 - DNA, 15 bp, Homo sapiens
aacttctctgaaggg

SEQ ID NO: 490403 - DNA, 15 bp, Homo sapiens
aaacttctctgaagg

SEQ ID NO: 490404 - DNA, 15 bp, Homo sapiens
taaacttctctgaag

SEQ ID NO: 490405 - DNA, 15 bp, Homo sapiens
ttaaacttctctgaa

SEQ ID NO: 490406 - DNA, 15 bp, Homo sapiens
tttaaacttctctga

SEQ ID NO: 490407 - DNA, 15 bp, Homo sapiens
gtttaaacttctctg

SEQ ID NO: 490408 - DNA, 15 bp, Homo sapiens
ggtttaaacttctct

SEQ ID NO: 490409 - DNA, 15 bp, Homo sapiens
aggtttaaacttctc

SEQ ID NO: 490410 - DNA, 15 bp, Homo sapiens
aaggtttaaacttct

SEQ ID NO: 490411 - DNA, 15 bp, Homo sapiens
caaggtttaaacttc

SEQ ID NO: 490412 - DNA, 15 bp, Homo sapiens
ccaaggtttaaactt

SEQ ID NO: 490413 - DNA, 15 bp, Homo sapiens
cccaaggtttaaact

SEQ ID NO: 490414 - DNA, 15 bp, Homo sapiens
gcccaaggtttaaac

SEQ ID NO: 490415 - DNA, 15 bp, Homo sapiens
agcccaaggtttaaa

SEQ ID NO: 490416 - DNA, 15 bp, Homo sapiens
gagcccaaggtttaa

SEQ ID NO: 490417 - DNA, 15 bp, Homo sapiens
agagcccaaggttta

SEQ ID NO: 490418 - DNA, 15 bp, Homo sapiens
gagagcccaaggttt

SEQ ID NO: 490419 - DNA, 15 bp, Homo sapiens
tgagagcccaaggtt

SEQ ID NO: 490420 - DNA, 15 bp, Homo sapiens
ttgagagcccaaggt

SEQ ID NO: 490421 - DNA, 15 bp, Homo sapiens
attgagagcccaagg

SEQ ID NO: 490422 - DNA, 15 bp, Homo sapiens
gattgagagcccaag

SEQ ID NO: 490423 - DNA, 15 bp, Homo sapiens
agattgagagcccaa

SEQ ID NO: 490424 - DNA, 15 bp, Homo sapiens
aagattgagagccca

SEQ ID NO: 490425 - DNA, 15 bp, Homo sapiens
gaagattgagagccc

SEQ ID NO: 490426 - DNA, 15 bp, Homo sapiens
ggaagattgagagcc

SEQ ID NO: 490427 - DNA, 15 bp, Homo sapiens
tggaagattgagagc

SEQ ID NO: 490428 - DNA, 15 bp, Homo sapiens
atggaagattgagag

SEQ ID NO: 490429 - DNA, 15 bp, Homo sapiens
catggaagattgaga

SEQ ID NO: 490430 - DNA, 15 bp, Homo sapiens
ccatggaagattgag

SEQ ID NO: 490431 - DNA, 15 bp, Homo sapiens
accatggaagattga

SEQ ID NO: 490432 - DNA, 15 bp, Homo sapiens
gaccatggaagattg

SEQ ID NO: 490433 - DNA, 15 bp, Homo sapiens
tgaccatggaagatt

SEQ ID NO: 490434 - DNA, 15 bp, Homo sapiens
ctgaccatggaagat

SEQ ID NO: 490435 - DNA, 15 bp, Homo sapiens
gctgaccatggaaga

SEQ ID NO: 490436 - DNA, 15 bp, Homo sapiens
agctgaccatggaag

SEQ ID NO: 490437 - DNA, 15 bp, Homo sapiens
cagctgaccatggaa

SEQ ID NO: 490438 - DNA, 15 bp, Homo sapiens
gcagctgaccatgga

SEQ ID NO: 490439 - DNA, 15 bp, Homo sapiens
ggcagctgaccatgg

SEQ ID NO: 490440 - DNA, 15 bp, Homo sapiens
gggcagctgaccatg

SEQ ID NO: 490441 - DNA, 15 bp, Homo sapiens
ggggcagctgaccat

SEQ ID NO: 490442 - DNA, 15 bp, Homo sapiens
aggggcagctgacca

SEQ ID NO: 490443 - DNA, 15 bp, Homo sapiens
caggggcagctgacc

SEQ ID NO: 490444 - DNA, 15 bp, Homo sapiens
tcaggggcagctgac

SEQ ID NO: 490445 - DNA, 15 bp, Homo sapiens
gtcaggggcagctga

SEQ ID NO: 490446 - DNA, 15 bp, Homo sapiens
agtcaggggcagctg

SEQ ID NO: 490447 - DNA, 15 bp, Homo sapiens
cagtcaggggcagct

SEQ ID NO: 490448 - DNA, 15 bp, Homo sapiens
gcagtcaggggcagc

SEQ ID NO: 490449 - DNA, 15 bp, Homo sapiens
cgcagtcaggggcag

SEQ ID NO: 490450 - DNA, 15 bp, Homo sapiens
tcgcagtcaggggca

SEQ ID NO: 490451 - DNA, 15 bp, Homo sapiens
ctcgcagtcaggggc

SEQ ID NO: 490452 - DNA, 15 bp, Homo sapiens
actcgcagtcagggg

SEQ ID NO: 490453 - DNA, 15 bp, Homo sapiens
gactcgcagtcaggg

SEQ ID NO: 490454 - DNA, 15 bp, Homo sapiens
ggactcgcagtcagg

SEQ ID NO: 490455 - DNA, 15 bp, Homo sapiens
aggactcgcagtcag

SEQ ID NO: 490456 - DNA, 15 bp, Homo sapiens
taggactcgcagtca

SEQ ID NO: 490457 - DNA, 15 bp, Homo sapiens
gtaggactcgcagtc

SEQ ID NO: 490458 - DNA, 15 bp, Homo sapiens
tgtaggactcgcagt

SEQ ID NO: 490459 - DNA, 15 bp, Homo sapiens
ctgtaggactcgcag

SEQ ID NO: 490460 - DNA, 15 bp, Homo sapiens
gctgtaggactcgca

SEQ ID NO: 490461 - DNA, 15 bp, Homo sapiens
ggctgtaggactcgc

SEQ ID NO: 490462 - DNA, 15 bp, Homo sapiens
aggctgtaggactcg

SEQ ID NO: 490463 - DNA, 15 bp, Homo sapiens
gaggctgtaggactc

SEQ ID NO: 490464 - DNA, 15 bp, Homo sapiens
tgaggctgtaggact

SEQ ID NO: 490465 - DNA, 15 bp, Homo sapiens
ctgaggctgtaggac

SEQ ID NO: 490466 - DNA, 15 bp, Homo sapiens
tctgaggctgtagga

SEQ ID NO: 490467 - DNA, 15 bp, Homo sapiens
ctctgaggctgtagg

SEQ ID NO: 490468 - DNA, 15 bp, Homo sapiens
cctctgaggctgtag

SEQ ID NO: 490469 - DNA, 15 bp, Homo sapiens
ccctctgaggctgta

SEQ ID NO: 490470 - DNA, 15 bp, Homo sapiens
tccctctgaggctgt

SEQ ID NO: 490471 - DNA, 15 bp, Homo sapiens
ctccctctgaggctg

SEQ ID NO: 490472 - DNA, 15 bp, Homo sapiens
cctccctctgaggct

SEQ ID NO: 490473 - DNA, 15 bp, Homo sapiens
tcctccctctgaggc

SEQ ID NO: 490474 - DNA, 15 bp, Homo sapiens
ctcctccctctgagg

SEQ ID NO: 490475 - DNA, 15 bp, Homo sapiens
gctcctccctctgag

SEQ ID NO: 490476 - DNA, 15 bp, Homo sapiens
cgctcctccctctga

SEQ ID NO: 490477 - DNA, 15 bp, Homo sapiens
acgctcctccctctg

SEQ ID NO: 490478 - DNA, 15 bp, Homo sapiens
cacgctcctccctct

SEQ ID NO: 490479 - DNA, 15 bp, Homo sapiens
acacgctcctccctc

SEQ ID NO: 490480 - DNA, 15 bp, Homo sapiens
cacacgctcctccct

SEQ ID NO: 490481 - DNA, 15 bp, Homo sapiens
ccacacgctcctccc

SEQ ID NO: 490482 - DNA, 15 bp, Homo sapiens
cccacacgctcctcc

SEQ ID NO: 490483 - DNA, 15 bp, Homo sapiens
ccccacacgctcctc

SEQ ID NO: 490484 - DNA, 15 bp, Homo sapiens
accccacacgctcct

SEQ ID NO: 490485 - DNA, 15 bp, Homo sapiens
aaccccacacgctcc

SEQ ID NO: 490486 - DNA, 15 bp, Homo sapiens
caaccccacacgctc

SEQ ID NO: 490487 - DNA, 15 bp, Homo sapiens
ccaaccccacacgct

SEQ ID NO: 490488 - DNA, 15 bp, Homo sapiens
cccaaccccacacgc

SEQ ID NO: 490489 - DNA, 15 bp, Homo sapiens
tcccaaccccacacg

SEQ ID NO: 490490 - DNA, 15 bp, Homo sapiens
ctcccaaccccacac

SEQ ID NO: 490491 - DNA, 15 bp, Homo sapiens
gctcccaaccccaca

SEQ ID NO: 490492 - DNA, 15 bp, Homo sapiens
tgctcccaaccccac

SEQ ID NO: 490493 - DNA, 15 bp, Homo sapiens
ttgctcccaacccca

SEQ ID NO: 490494 - DNA, 15 bp, Homo sapiens
cttgctcccaacccc

SEQ ID NO: 490495 - DNA, 15 bp, Homo sapiens
ccttgctcccaaccc

SEQ ID NO: 490496 - DNA, 15 bp, Homo sapiens
gccttgctcccaacc

SEQ ID NO: 490497 - DNA, 15 bp, Homo sapiens
ggccttgctcccaac

SEQ ID NO: 490498 - DNA, 15 bp, Homo sapiens
aggccttgctcccaa

SEQ ID NO: 490499 - DNA, 15 bp, Homo sapiens
gaggccttgctccca

SEQ ID NO: 490500 - DNA, 15 bp, Homo sapiens
tgaggccttgctccc

SEQ ID NO: 490501 - DNA, 15 bp, Homo sapiens
gtgaggccttgctcc

SEQ ID NO: 490502 - DNA, 15 bp, Homo sapiens
ggtgaggccttgctc

SEQ ID NO: 490503 - DNA, 15 bp, Homo sapiens
tggtgaggccttgct

SEQ ID NO: 490504 - DNA, 15 bp, Homo sapiens
ctggtgaggccttgc

SEQ ID NO: 490505 - DNA, 15 bp, Homo sapiens
tctggtgaggccttg

SEQ ID NO: 490506 - DNA, 15 bp, Homo sapiens
ttctggtgaggcctt

SEQ ID NO: 490507 - DNA, 15 bp, Homo sapiens
gttctggtgaggcct

SEQ ID NO: 490508 - DNA, 15 bp, Homo sapiens
tgttctggtgaggcc

SEQ ID NO: 490509 - DNA, 15 bp, Homo sapiens
gtgttctggtgaggc

SEQ ID NO: 490510 - DNA, 15 bp, Homo sapiens
tgtgttctggtgagg

SEQ ID NO: 490511 - DNA, 15 bp, Homo sapiens
ctgtgttctggtgag

SEQ ID NO: 490512 - DNA, 15 bp, Homo sapiens
gctgtgttctggtga

SEQ ID NO: 490513 - DNA, 15 bp, Homo sapiens
ggctgtgttctggtg

SEQ ID NO: 490514 - DNA, 15 bp, Homo sapiens
tggctgtgttctggt

SEQ ID NO: 490515 - DNA, 15 bp, Homo sapiens
ctggctgtgttctgg

SEQ ID NO: 490516 - DNA, 15 bp, Homo sapiens
actggctgtgttctg

SEQ ID NO: 490517 - DNA, 15 bp, Homo sapiens
aactggctgtgttct

SEQ ID NO: 490518 - DNA, 15 bp, Homo sapiens
taactggctgtgttc

SEQ ID NO: 490519 - DNA, 15 bp, Homo sapiens
gtaactggctgtgtt

SEQ ID NO: 490520 - DNA, 15 bp, Homo sapiens
cgtaactggctgtgt

SEQ ID NO: 490521 - DNA, 15 bp, Homo sapiens
gcgtaactggctgtg

SEQ ID NO: 490522 - DNA, 15 bp, Homo sapiens
tgcgtaactggctgt

SEQ ID NO: 490523 - DNA, 15 bp, Homo sapiens
ttgcgtaactggctg

SEQ ID NO: 490524 - DNA, 15 bp, Homo sapiens
gttgcgtaactggct

SEQ ID NO: 490525 - DNA, 15 bp, Homo sapiens
tgttgcgtaactggc

SEQ ID NO: 490526 - DNA, 15 bp, Homo sapiens
ctgttgcgtaactgg

SEQ ID NO: 490527 - DNA, 15 bp, Homo sapiens
gctgttgcgtaactg

SEQ ID NO: 490528 - DNA, 15 bp, Homo sapiens
cgctgttgcgtaact

SEQ ID NO: 490529 - DNA, 15 bp, Homo sapiens
gcgctgttgcgtaac

SEQ ID NO: 490530 - DNA, 15 bp, Homo sapiens
tgcgctgttgcgtaa

SEQ ID NO: 490531 - DNA, 15 bp, Homo sapiens
ttgcgctgttgcgta

SEQ ID NO: 490532 - DNA, 15 bp, Homo sapiens
cttgcgctgttgcgt

SEQ ID NO: 490533 - DNA, 15 bp, Homo sapiens
ccttgcgctgttgcg

SEQ ID NO: 490534 - DNA, 15 bp, Homo sapiens
gccttgcgctgttgc

SEQ ID NO: 490535 - DNA, 15 bp, Homo sapiens
ggccttgcgctgttg

SEQ ID NO: 490536 - DNA, 15 bp, Homo sapiens
aggccttgcgctgtt

SEQ ID NO: 490537 - DNA, 15 bp, Homo sapiens
caggccttgcgctgt

SEQ ID NO: 490538 - DNA, 15 bp, Homo sapiens
gcaggccttgcgctg

SEQ ID NO: 490539 - DNA, 15 bp, Homo sapiens
agcaggccttgcgct

SEQ ID NO: 490540 - DNA, 15 bp, Homo sapiens
gagcaggccttgcgc

SEQ ID NO: 490541 - DNA, 15 bp, Homo sapiens
ggagcaggccttgcg

SEQ ID NO: 490542 - DNA, 15 bp, Homo sapiens
tggagcaggccttgc

SEQ ID NO: 490543 - DNA, 15 bp, Homo sapiens
ctggagcaggccttg

SEQ ID NO: 490544 - DNA, 15 bp, Homo sapiens
cctggagcaggcctt

SEQ ID NO: 490545 - DNA, 15 bp, Homo sapiens
gcctggagcaggcct

SEQ ID NO: 490546 - DNA, 15 bp, Homo sapiens
ggcctggagcaggcc

SEQ ID NO: 490547 - DNA, 15 bp, Homo sapiens
gggcctggagcaggc

SEQ ID NO: 490548 - DNA, 15 bp, Homo sapiens
ggggcctggagcagg

SEQ ID NO: 490549 - DNA, 15 bp, Homo sapiens
tggggcctggagcag

SEQ ID NO: 490550 - DNA, 15 bp, Homo sapiens
gtggggcctggagca

SEQ ID NO: 490551 - DNA, 15 bp, Homo sapiens
ggtggggcctggagc

SEQ ID NO: 490552 - DNA, 15 bp, Homo sapiens
aggtggggcctggag

SEQ ID NO: 490553 - DNA, 15 bp, Homo sapiens
gaggtggggcctgga

SEQ ID NO: 490554 - DNA, 15 bp, Homo sapiens
ggaggtggggcctgg

SEQ ID NO: 490555 - DNA, 15 bp, Homo sapiens
tggaggtggggcctg

SEQ ID NO: 490556 - DNA, 15 bp, Homo sapiens
ctggaggtggggcct

SEQ ID NO: 490557 - DNA, 15 bp, Homo sapiens
gctggaggtggggcc

SEQ ID NO: 490558 - DNA, 15 bp, Homo sapiens
cgctggaggtggggc

SEQ ID NO: 490559 - DNA, 15 bp, Homo sapiens
ccgctggaggtgggg

SEQ ID NO: 490560 - DNA, 15 bp, Homo sapiens
tccgctggaggtggg

SEQ ID NO: 490561 - DNA, 15 bp, Homo sapiens
ctccgctggaggtgg

SEQ ID NO: 490562 - DNA, 15 bp, Homo sapiens
actccgctggaggtg

SEQ ID NO: 490563 - DNA, 15 bp, Homo sapiens
gactccgctggaggt

SEQ ID NO: 490564 - DNA, 15 bp, Homo sapiens
tgactccgctggagg

SEQ ID NO: 490565 - DNA, 15 bp, Homo sapiens
ttgactccgctggag

SEQ ID NO: 490566 - DNA, 15 bp, Homo sapiens
tttgactccgctgga

SEQ ID NO: 490567 - DNA, 15 bp, Homo sapiens
gtttgactccgctgg

SEQ ID NO: 490568 - DNA, 15 bp, Homo sapiens
ggtttgactccgctg

SEQ ID NO: 490569 - DNA, 15 bp, Homo sapiens
tggtttgactccgct

SEQ ID NO: 490570 - DNA, 15 bp, Homo sapiens
ctggtttgactccgc

SEQ ID NO: 490571 - DNA, 15 bp, Homo sapiens
tctggtttgactccg

SEQ ID NO: 490572 - DNA, 15 bp, Homo sapiens
atctggtttgactcc

SEQ ID NO: 490573 - DNA, 15 bp, Homo sapiens
gatctggtttgactc

SEQ ID NO: 490574 - DNA, 15 bp, Homo sapiens
tgatctggtttgact

SEQ ID NO: 490575 - DNA, 15 bp, Homo sapiens
ctgatctggtttgac

SEQ ID NO: 490576 - DNA, 15 bp, Homo sapiens
gctgatctggtttga

SEQ ID NO: 490577 - DNA, 15 bp, Homo sapiens
agctgatctggtttg

SEQ ID NO: 490578 - DNA, 15 bp, Homo sapiens
aagctgatctggttt

SEQ ID NO: 490579 - DNA, 15 bp, Homo sapiens
aaagctgatctggtt

SEQ ID NO: 490580 - DNA, 15 bp, Homo sapiens
aaaagctgatctggt

SEQ ID NO: 490581 - DNA, 15 bp, Homo sapiens
taaaagctgatctgg

SEQ ID NO: 490582 - DNA, 15 bp, Homo sapiens
gtaaaagctgatctg

SEQ ID NO: 490583 - DNA, 15 bp, Homo sapiens
ggtaaaagctgatct

SEQ ID NO: 490584 - DNA, 15 bp, Homo sapiens
gggtaaaagctgatc

SEQ ID NO: 490585 - DNA, 15 bp, Homo sapiens
ggggtaaaagctgat

SEQ ID NO: 490586 - DNA, 15 bp, Homo sapiens
aggggtaaaagctga

SEQ ID NO: 490587 - DNA, 15 bp, Homo sapiens
gaggggtaaaagctg

SEQ ID NO: 490588 - DNA, 15 bp, Homo sapiens
tgaggggtaaaagct

SEQ ID NO: 490589 - DNA, 15 bp, Homo sapiens
gtgaggggtaaaagc

SEQ ID NO: 490590 - DNA, 15 bp, Homo sapiens
agtgaggggtaaaag

SEQ ID NO: 490591 - DNA, 15 bp, Homo sapiens
gagtgaggggtaaaa

SEQ ID NO: 490592 - DNA, 15 bp, Homo sapiens
ggagtgaggggtaaa

SEQ ID NO: 490593 - DNA, 15 bp, Homo sapiens
tggagtgaggggtaa

SEQ ID NO: 490594 - DNA, 15 bp, Homo sapiens
ctggagtgaggggta

SEQ ID NO: 490595 - DNA, 15 bp, Homo sapiens
tctggagtgaggggt

SEQ ID NO: 490596 - DNA, 15 bp, Homo sapiens
atctggagtgagggg

SEQ ID NO: 490597 - DNA, 15 bp, Homo sapiens
aatctggagtgaggg

SEQ ID NO: 490598 - DNA, 15 bp, Homo sapiens
gaatctggagtgagg

SEQ ID NO: 490599 - DNA, 15 bp, Homo sapiens
ggaatctggagtgag

SEQ ID NO: 490600 - DNA, 15 bp, Homo sapiens
tggaatctggagtga

SEQ ID NO: 490601 - DNA, 15 bp, Homo sapiens
gtggaatctggagtg

SEQ ID NO: 490602 - DNA, 15 bp, Homo sapiens
tgtggaatctggagt

SEQ ID NO: 490603 - DNA, 15 bp, Homo sapiens
ctgtggaatctggag

SEQ ID NO: 490604 - DNA, 15 bp, Homo sapiens
cctgtggaatctgga

SEQ ID NO: 490605 - DNA, 15 bp, Homo sapiens
gcctgtggaatctgg

SEQ ID NO: 490606 - DNA, 15 bp, Homo sapiens
tgcctgtggaatctg

SEQ ID NO: 490607 - DNA, 15 bp, Homo sapiens
gtgcctgtggaatct

SEQ ID NO: 490608 - DNA, 15 bp, Homo sapiens
cgtgcctgtggaatc

SEQ ID NO: 490609 - DNA, 15 bp, Homo sapiens
gcgtgcctgtggaat

SEQ ID NO: 490610 - DNA, 15 bp, Homo sapiens
tgcgtgcctgtggaa

SEQ ID NO: 490611 - DNA, 15 bp, Homo sapiens
ctgcgtgcctgtgga

SEQ ID NO: 490612 - DNA, 15 bp, Homo sapiens
gctgcgtgcctgtgg

SEQ ID NO: 490613 - DNA, 15 bp, Homo sapiens
tgctgcgtgcctgtg

SEQ ID NO: 490614 - DNA, 15 bp, Homo sapiens
gtgctgcgtgcctgt

SEQ ID NO: 490615 - DNA, 15 bp, Homo sapiens
tgtgctgcgtgcctg

SEQ ID NO: 490616 - DNA, 15 bp, Homo sapiens
atgtgctgcgtgcct

SEQ ID NO: 490617 - DNA, 15 bp, Homo sapiens
catgtgctgcgtgcc

SEQ ID NO: 490618 - DNA, 15 bp, Homo sapiens
ccatgtgctgcgtgc

SEQ ID NO: 490619 - DNA, 15 bp, Homo sapiens
gccatgtgctgcgtg

SEQ ID NO: 490620 - DNA, 15 bp, Homo sapiens
agccatgtgctgcgt

SEQ ID NO: 490621 - DNA, 15 bp, Homo sapiens
cagccatgtgctgcg

SEQ ID NO: 490622 - DNA, 15 bp, Homo sapiens
tcagccatgtgctgc

SEQ ID NO: 490623 - DNA, 15 bp, Homo sapiens
atcagccatgtgctg

SEQ ID NO: 490624 - DNA, 15 bp, Homo sapiens
aatcagccatgtgct

SEQ ID NO: 490625 - DNA, 15 bp, Homo sapiens
aaatcagccatgtgc

SEQ ID NO: 490626 - DNA, 15 bp, Homo sapiens
caaatcagccatgtg

SEQ ID NO: 490627 - DNA, 15 bp, Homo sapiens
gcaaatcagccatgt

SEQ ID NO: 490628 - DNA, 15 bp, Homo sapiens
tgcaaatcagccatg

SEQ ID NO: 490629 - DNA, 15 bp, Homo sapiens
ctgcaaatcagccat

SEQ ID NO: 490630 - DNA, 15 bp, Homo sapiens
gctgcaaatcagcca

SEQ ID NO: 490631 - DNA, 15 bp, Homo sapiens
agctgcaaatcagcc

SEQ ID NO: 490632 - DNA, 15 bp, Homo sapiens
aagctgcaaatcagc

SEQ ID NO: 490633 - DNA, 15 bp, Homo sapiens
caagctgcaaatcag

SEQ ID NO: 490634 - DNA, 15 bp, Homo sapiens
acaagctgcaaatca

SEQ ID NO: 490635 - DNA, 15 bp, Homo sapiens
gacaagctgcaaatc

SEQ ID NO: 490636 - DNA, 15 bp, Homo sapiens
agacaagctgcaaat

SEQ ID NO: 490637 - DNA, 15 bp, Homo sapiens
aagacaagctgcaaa

SEQ ID NO: 490638 - DNA, 15 bp, Homo sapiens
aaagacaagctgcaa

SEQ ID NO: 490639 - DNA, 15 bp, Homo sapiens
gaaagacaagctgca

SEQ ID NO: 490640 - DNA, 15 bp, Homo sapiens
tgaaagacaagctgc

SEQ ID NO: 490641 - DNA, 15 bp, Homo sapiens
gtgaaagacaagctg

SEQ ID NO: 490642 - DNA, 15 bp, Homo sapiens
agtgaaagacaagct

SEQ ID NO: 490643 - DNA, 15 bp, Homo sapiens
cagtgaaagacaagc

SEQ ID NO: 490644 - DNA, 15 bp, Homo sapiens
gcagtgaaagacaag

SEQ ID NO: 490645 - DNA, 15 bp, Homo sapiens
tgcagtgaaagacaa

SEQ ID NO: 490646 - DNA, 15 bp, Homo sapiens
ctgcagtgaaagaca

SEQ ID NO: 490647 - DNA, 15 bp, Homo sapiens
actgcagtgaaagac

SEQ ID NO: 490648 - DNA, 15 bp, Homo sapiens
aactgcagtgaaaga

SEQ ID NO: 490649 - DNA, 15 bp, Homo sapiens
aaactgcagtgaaag

SEQ ID NO: 490650 - DNA, 15 bp, Homo sapiens
aaaactgcagtgaaa

SEQ ID NO: 490651 - DNA, 15 bp, Homo sapiens
aaaaactgcagtgaa

SEQ ID NO: 490652 - DNA, 15 bp, Homo sapiens
aaaaaactgcagtga

SEQ ID NO: 490653 - DNA, 15 bp, Homo sapiens
caaaaaactgcagtg

SEQ ID NO: 490654 - DNA, 15 bp, Homo sapiens
acaaaaaactgcagt

SEQ ID NO: 490655 - DNA, 15 bp, Homo sapiens
aacaaaaaactgcag

SEQ ID NO: 490656 - DNA, 15 bp, Homo sapiens
aaacaaaaaactgca

SEQ ID NO: 490657 - DNA, 15 bp, Homo sapiens
aaaacaaaaaactgc

SEQ ID NO: 490658 - DNA, 15 bp, Homo sapiens
aaaaacaaaaaactg

SEQ ID NO: 490659 - DNA, 15 bp, Homo sapiens
caaaaacaaaaaact

SEQ ID NO: 490660 - DNA, 15 bp, Homo sapiens
acaaaaacaaaaaac

SEQ ID NO: 490661 - DNA, 15 bp, Homo sapiens
aacaaaaacaaaaaa

SEQ ID NO: 490662 - DNA, 15 bp, Homo sapiens
aaaaacaaaaacaaa

SEQ ID NO: 490663 - DNA, 15 bp, Homo sapiens
aaaaaacaaaaacaa

SEQ ID NO: 490664 - DNA, 15 bp, Homo sapiens
gaaaaaacaaaaaca

SEQ ID NO: 490665 - DNA, 15 bp, Homo sapiens
ggaaaaaacaaaaac

SEQ ID NO: 490666 - DNA, 15 bp, Homo sapiens
tggaaaaaacaaaaa

SEQ ID NO: 490667 - DNA, 15 bp, Homo sapiens
ctggaaaaaacaaaa

SEQ ID NO: 490668 - DNA, 15 bp, Homo sapiens
cctggaaaaaacaaa

SEQ ID NO: 490669 - DNA, 15 bp, Homo sapiens
tcctggaaaaaacaa

SEQ ID NO: 490670 - DNA, 15 bp, Homo sapiens
ctcctggaaaaaaca

SEQ ID NO: 490671 - DNA, 15 bp, Homo sapiens
cctcctggaaaaaac

SEQ ID NO: 490672 - DNA, 15 bp, Homo sapiens
gcctcctggaaaaaa

SEQ ID NO: 490673 - DNA, 15 bp, Homo sapiens
tgcctcctggaaaaa

SEQ ID NO: 490674 - DNA, 15 bp, Homo sapiens
ttgcctcctggaaaa

SEQ ID NO: 490675 - DNA, 15 bp, Homo sapiens
cttgcctcctggaaa

SEQ ID NO: 490676 - DNA, 15 bp, Homo sapiens
tcttgcctcctggaa

SEQ ID NO: 490677 - DNA, 15 bp, Homo sapiens
ctcttgcctcctgga

SEQ ID NO: 490678 - DNA, 15 bp, Homo sapiens
cctcttgcctcctgg

SEQ ID NO: 490679 - DNA, 15 bp, Homo sapiens
tcctcttgcctcctg

SEQ ID NO: 490680 - DNA, 15 bp, Homo sapiens
gtcctcttgcctcct

SEQ ID NO: 490681 - DNA, 15 bp, Homo sapiens
ggtcctcttgcctcc

SEQ ID NO: 490682 - DNA, 15 bp, Homo sapiens
tggtcctcttgcctc

SEQ ID NO: 490683 - DNA, 15 bp, Homo sapiens
ttggtcctcttgcct

SEQ ID NO: 490684 - DNA, 15 bp, Homo sapiens
gttggtcctcttgcc

SEQ ID NO: 490685 - DNA, 15 bp, Homo sapiens
ggttggtcctcttgc

SEQ ID NO: 490686 - DNA, 15 bp, Homo sapiens
gggttggtcctcttg

SEQ ID NO: 490687 - DNA, 15 bp, Homo sapiens
agggttggtcctctt

SEQ ID NO: 490688 - DNA, 15 bp, Homo sapiens
gagggttggtcctct

SEQ ID NO: 490689 - DNA, 15 bp, Homo sapiens
ggagggttggtcctc

SEQ ID NO: 490690 - DNA, 15 bp, Homo sapiens
tggagggttggtcct

SEQ ID NO: 490691 - DNA, 15 bp, Homo sapiens
ttggagggttggtcc

SEQ ID NO: 490692 - DNA, 15 bp, Homo sapiens
cttggagggttggtc

SEQ ID NO: 490693 - DNA, 15 bp, Homo sapiens
acttggagggttggt

SEQ ID NO: 490694 - DNA, 15 bp, Homo sapiens
gacttggagggttgg

SEQ ID NO: 490695 - DNA, 15 bp, Homo sapiens
ggacttggagggttg

SEQ ID NO: 490696 - DNA, 15 bp, Homo sapiens
gggacttggagggtt

SEQ ID NO: 490697 - DNA, 15 bp, Homo sapiens
cgggacttggagggt

SEQ ID NO: 490698 - DNA, 15 bp, Homo sapiens
ccgggacttggaggg

SEQ ID NO: 490699 - DNA, 15 bp, Homo sapiens
cccgggacttggagg

SEQ ID NO: 490700 - DNA, 15 bp, Homo sapiens
ccccgggacttggag

SEQ ID NO: 490701 - DNA, 15 bp, Homo sapiens
gccccgggacttgga

SEQ ID NO: 490702 - DNA, 15 bp, Homo sapiens
ggccccgggacttgg

SEQ ID NO: 490703 - DNA, 15 bp, Homo sapiens
gggccccgggacttg

SEQ ID NO: 490704 - DNA, 15 bp, Homo sapiens
ggggccccgggactt

SEQ ID NO: 490705 - DNA, 15 bp, Homo sapiens
aggggccccgggact

SEQ ID NO: 490706 - DNA, 15 bp, Homo sapiens
caggggccccgggac

SEQ ID NO: 490707 - DNA, 15 bp, Homo sapiens
acaggggccccggga

SEQ ID NO: 490708 - DNA, 15 bp, Homo sapiens
gacaggggccccggg

SEQ ID NO: 490709 - DNA, 15 bp, Homo sapiens
ggacaggggccccgg

SEQ ID NO: 490710 - DNA, 15 bp, Homo sapiens
tggacaggggccccg

SEQ ID NO: 490711 - DNA, 15 bp, Homo sapiens
gtggacaggggcccc

SEQ ID NO: 490712 - DNA, 15 bp, Homo sapiens
ggtggacaggggccc

SEQ ID NO: 490713 - DNA, 15 bp, Homo sapiens
gggtggacaggggcc

SEQ ID NO: 490714 - DNA, 15 bp, Homo sapiens
tgggtggacaggggc

SEQ ID NO: 490715 - DNA, 15 bp, Homo sapiens
gtgggtggacagggg

SEQ ID NO: 490716 - DNA, 15 bp, Homo sapiens
ggtgggtggacaggg

SEQ ID NO: 490717 - DNA, 15 bp, Homo sapiens
tggtgggtggacagg

SEQ ID NO: 490718 - DNA, 15 bp, Homo sapiens
atggtgggtggacag

SEQ ID NO: 490719 - DNA, 15 bp, Homo sapiens
tatggtgggtggaca

SEQ ID NO: 490720 - DNA, 15 bp, Homo sapiens
atatggtgggtggac

SEQ ID NO: 490721 - DNA, 15 bp, Homo sapiens
gatatggtgggtgga

SEQ ID NO: 490722 - DNA, 15 bp, Homo sapiens
ggatatggtgggtgg

SEQ ID NO: 490723 - DNA, 15 bp, Homo sapiens
aggatatggtgggtg

SEQ ID NO: 490724 - DNA, 15 bp, Homo sapiens
taggatatggtgggt

SEQ ID NO: 490725 - DNA, 15 bp, Homo sapiens
ctaggatatggtggg

SEQ ID NO: 490726 - DNA, 15 bp, Homo sapiens
tctaggatatggtgg

SEQ ID NO: 490727 - DNA, 15 bp, Homo sapiens
gtctaggatatggtg

SEQ ID NO: 490728 - DNA, 15 bp, Homo sapiens
ggtctaggatatggt

SEQ ID NO: 490729 - DNA, 15 bp, Homo sapiens
gggtctaggatatgg

SEQ ID NO: 490730 - DNA, 15 bp, Homo sapiens
tgggtctaggatatg

SEQ ID NO: 490731 - DNA, 15 bp, Homo sapiens
ttgggtctaggatat

SEQ ID NO: 490732 - DNA, 15 bp, Homo sapiens
attgggtctaggata

SEQ ID NO: 490733 - DNA, 15 bp, Homo sapiens
gattgggtctaggat

SEQ ID NO: 490734 - DNA, 15 bp, Homo sapiens
agattgggtctagga

SEQ ID NO: 490735 - DNA, 15 bp, Homo sapiens
aagattgggtctagg

SEQ ID NO: 490736 - DNA, 15 bp, Homo sapiens
aaagattgggtctag

SEQ ID NO: 490737 - DNA, 15 bp, Homo sapiens
aaaagattgggtcta

SEQ ID NO: 490738 - DNA, 15 bp, Homo sapiens
gaaaagattgggtct

SEQ ID NO: 490739 - DNA, 15 bp, Homo sapiens
agaaaagattgggtc

SEQ ID NO: 490740 - DNA, 15 bp, Homo sapiens
tagaaaagattgggt

SEQ ID NO: 490741 - DNA, 15 bp, Homo sapiens
gtagaaaagattggg

SEQ ID NO: 490742 - DNA, 15 bp, Homo sapiens
ggtagaaaagattgg

SEQ ID NO: 490743 - DNA, 15 bp, Homo sapiens
aggtagaaaagattg

SEQ ID NO: 490744 - DNA, 15 bp, Homo sapiens
gaggtagaaaagatt

SEQ ID NO: 490745 - DNA, 15 bp, Homo sapiens
agaggtagaaaagat

SEQ ID NO: 490746 - DNA, 15 bp, Homo sapiens
aagaggtagaaaaga

SEQ ID NO: 490747 - DNA, 15 bp, Homo sapiens
aaagaggtagaaaag

SEQ ID NO: 490748 - DNA, 15 bp, Homo sapiens
caaagaggtagaaaa

SEQ ID NO: 490749 - DNA, 15 bp, Homo sapiens
acaaagaggtagaaa

SEQ ID NO: 490750 - DNA, 15 bp, Homo sapiens
gacaaagaggtagaa

SEQ ID NO: 490751 - DNA, 15 bp, Homo sapiens
cgacaaagaggtaga

SEQ ID NO: 490752 - DNA, 15 bp, Homo sapiens
tcgacaaagaggtag

SEQ ID NO: 490753 - DNA, 15 bp, Homo sapiens
gtcgacaaagaggta

SEQ ID NO: 490754 - DNA, 15 bp, Homo sapiens
tgtcgacaaagaggt

SEQ ID NO: 490755 - DNA, 15 bp, Homo sapiens
ttgtcgacaaagagg

SEQ ID NO: 490756 - DNA, 15 bp, Homo sapiens
cttgtcgacaaagag

SEQ ID NO: 490757 - DNA, 15 bp, Homo sapiens
ccttgtcgacaaaga

SEQ ID NO: 490758 - DNA, 15 bp, Homo sapiens
accttgtcgacaaag

SEQ ID NO: 490759 - DNA, 15 bp, Homo sapiens
aaccttgtcgacaaa

SEQ ID NO: 490760 - DNA, 15 bp, Homo sapiens
taaccttgtcgacaa

SEQ ID NO: 490761 - DNA, 15 bp, Homo sapiens
gtaaccttgtcgaca

SEQ ID NO: 490762 - DNA, 15 bp, Homo sapiens
tgtaaccttgtcgac

SEQ ID NO: 490763 - DNA, 15 bp, Homo sapiens
ttgtaaccttgtcga

SEQ ID NO: 490764 - DNA, 15 bp, Homo sapiens
tttgtaaccttgtcg

SEQ ID NO: 490765 - DNA, 15 bp, Homo sapiens
gtttgtaaccttgtc

SEQ ID NO: 490766 - DNA, 15 bp, Homo sapiens
tgtttgtaaccttgt

SEQ ID NO: 490767 - DNA, 15 bp, Homo sapiens
ctgtttgtaaccttg

SEQ ID NO: 490768 - DNA, 15 bp, Homo sapiens
tctgtttgtaacctt

SEQ ID NO: 490769 - DNA, 15 bp, Homo sapiens
ctctgtttgtaacct

SEQ ID NO: 490770 - DNA, 15 bp, Homo sapiens
tctctgtttgtaacc

SEQ ID NO: 490771 - DNA, 15 bp, Homo sapiens
ctctctgtttgtaac

SEQ ID NO: 490772 - DNA, 15 bp, Homo sapiens
cctctctgtttgtaa

SEQ ID NO: 490773 - DNA, 15 bp, Homo sapiens
gcctctctgtttgta

SEQ ID NO: 490774 - DNA, 15 bp, Homo sapiens
tgcctctctgtttgt

SEQ ID NO: 490775 - DNA, 15 bp, Homo sapiens
ttgcctctctgtttg

SEQ ID NO: 490776 - DNA, 15 bp, Homo sapiens
cttgcctctctgttt

SEQ ID NO: 490777 - DNA, 15 bp, Homo sapiens
gcttgcctctctgtt

SEQ ID NO: 490778 - DNA, 15 bp, Homo sapiens
tgcttgcctctctgt

SEQ ID NO: 490779 - DNA, 15 bp, Homo sapiens
ttgcttgcctctctg

SEQ ID NO: 490780 - DNA, 15 bp, Homo sapiens
tttgcttgcctctct

SEQ ID NO: 490781 - DNA, 15 bp, Homo sapiens
ctttgcttgcctctc

SEQ ID NO: 490782 - DNA, 15 bp, Homo sapiens
tctttgcttgcctct

SEQ ID NO: 490783 - DNA, 15 bp, Homo sapiens
ttctttgcttgcctc

SEQ ID NO: 490784 - DNA, 15 bp, Homo sapiens
cttctttgcttgcct

SEQ ID NO: 490785 - DNA, 15 bp, Homo sapiens
ccttctttgcttgcc

SEQ ID NO: 490786 - DNA, 15 bp, Homo sapiens
gccttctttgcttgc

SEQ ID NO: 490787 - DNA, 15 bp, Homo sapiens
agccttctttgcttg

SEQ ID NO: 490788 - DNA, 15 bp, Homo sapiens
cagccttctttgctt

SEQ ID NO: 490789 - DNA, 15 bp, Homo sapiens
ccagccttctttgct

SEQ ID NO: 490790 - DNA, 15 bp, Homo sapiens
cccagccttctttgc

SEQ ID NO: 490791 - DNA, 15 bp, Homo sapiens
ccccagccttctttg

SEQ ID NO: 490792 - DNA, 15 bp, Homo sapiens
gccccagccttcttt

SEQ ID NO: 490793 - DNA, 15 bp, Homo sapiens
ggccccagccttctt

SEQ ID NO: 490794 - DNA, 15 bp, Homo sapiens
gggccccagccttct

SEQ ID NO: 490795 - DNA, 15 bp, Homo sapiens
tgggccccagccttc

SEQ ID NO: 490796 - DNA, 15 bp, Homo sapiens
ttgggccccagcctt

SEQ ID NO: 490797 - DNA, 15 bp, Homo sapiens
gttgggccccagcct

SEQ ID NO: 490798 - DNA, 15 bp, Homo sapiens
cgttgggccccagcc

SEQ ID NO: 490799 - DNA, 15 bp, Homo sapiens
ccgttgggccccagc

SEQ ID NO: 490800 - DNA, 15 bp, Homo sapiens
tccgttgggccccag

SEQ ID NO: 490801 - DNA, 15 bp, Homo sapiens
ctccgttgggcccca

SEQ ID NO: 490802 - DNA, 15 bp, Homo sapiens
cctccgttgggcccc

SEQ ID NO: 490803 - DNA, 15 bp, Homo sapiens
ccctccgttgggccc

SEQ ID NO: 490804 - DNA, 15 bp, Homo sapiens
cccctccgttgggcc

SEQ ID NO: 490805 - DNA, 15 bp, Homo sapiens
tcccctccgttgggc

SEQ ID NO: 490806 - DNA, 15 bp, Homo sapiens
ctcccctccgttggg

SEQ ID NO: 490807 - DNA, 15 bp, Homo sapiens
tctcccctccgttgg

SEQ ID NO: 490808 - DNA, 15 bp, Homo sapiens
ctctcccctccgttg

SEQ ID NO: 490809 - DNA, 15 bp, Homo sapiens
tctctcccctccgtt

SEQ ID NO: 490810 - DNA, 15 bp, Homo sapiens
ttctctcccctccgt

SEQ ID NO: 490811 - DNA, 15 bp, Homo sapiens
attctctcccctccg

SEQ ID NO: 490812 - DNA, 15 bp, Homo sapiens
tattctctcccctcc

SEQ ID NO: 490813 - DNA, 15 bp, Homo sapiens
atattctctcccctc

SEQ ID NO: 490814 - DNA, 15 bp, Homo sapiens
tatattctctcccct

SEQ ID NO: 490815 - DNA, 15 bp, Homo sapiens
atatattctctcccc

SEQ ID NO: 490816 - DNA, 15 bp, Homo sapiens
tatatattctctccc

SEQ ID NO: 490817 - DNA, 15 bp, Homo sapiens
atatatattctctcc

SEQ ID NO: 490818 - DNA, 15 bp, Homo sapiens
gatatatattctctc

SEQ ID NO: 490819 - DNA, 15 bp, Homo sapiens
ggatatatattctct

SEQ ID NO: 490820 - DNA, 15 bp, Homo sapiens
gggatatatattctc

SEQ ID NO: 490821 - DNA, 15 bp, Homo sapiens
cgggatatatattct

SEQ ID NO: 490822 - DNA, 15 bp, Homo sapiens
ccgggatatatattc

SEQ ID NO: 490823 - DNA, 15 bp, Homo sapiens
cccgggatatatatt

SEQ ID NO: 490824 - DNA, 15 bp, Homo sapiens
tcccgggatatatat

SEQ ID NO: 490825 - DNA, 15 bp, Homo sapiens
ttcccgggatatata

SEQ ID NO: 490826 - DNA, 15 bp, Homo sapiens
tttcccgggatatat

SEQ ID NO: 490827 - DNA, 15 bp, Homo sapiens
gtttcccgggatata

SEQ ID NO: 490828 - DNA, 15 bp, Homo sapiens
cgtttcccgggatat

SEQ ID NO: 490829 - DNA, 15 bp, Homo sapiens
acgtttcccgggata

SEQ ID NO: 490830 - DNA, 15 bp, Homo sapiens
cacgtttcccgggat

SEQ ID NO: 490831 - DNA, 15 bp, Homo sapiens
ccacgtttcccggga

SEQ ID NO: 490832 - DNA, 15 bp, Homo sapiens
cccacgtttcccggg

SEQ ID NO: 490833 - DNA, 15 bp, Homo sapiens
gcccacgtttcccgg

SEQ ID NO: 490834 - DNA, 15 bp, Homo sapiens
tgcccacgtttcccg

SEQ ID NO: 490835 - DNA, 15 bp, Homo sapiens
ttgcccacgtttccc

SEQ ID NO: 490836 - DNA, 15 bp, Homo sapiens
gttgcccacgtttcc

SEQ ID NO: 490837 - DNA, 15 bp, Homo sapiens
tgttgcccacgtttc

SEQ ID NO: 490838 - DNA, 15 bp, Homo sapiens
ctgttgcccacgttt

SEQ ID NO: 490839 - DNA, 15 bp, Homo sapiens
gctgttgcccacgtt

SEQ ID NO: 490840 - DNA, 15 bp, Homo sapiens
tgctgttgcccacgt

SEQ ID NO: 490841 - DNA, 15 bp, Homo sapiens
atgctgttgcccacg

SEQ ID NO: 490842 - DNA, 15 bp, Homo sapiens
gatgctgttgcccac

SEQ ID NO: 490843 - DNA, 15 bp, Homo sapiens
tgatgctgttgccca

SEQ ID NO: 490844 - DNA, 15 bp, Homo sapiens
atgatgctgttgccc

SEQ ID NO: 490845 - DNA, 15 bp, Homo sapiens
tatgatgctgttgcc

SEQ ID NO: 490846 - DNA, 15 bp, Homo sapiens
ctatgatgctgttgc

SEQ ID NO: 490847 - DNA, 15 bp, Homo sapiens
tctatgatgctgttg

SEQ ID NO: 490848 - DNA, 15 bp, Homo sapiens
gtctatgatgctgtt

SEQ ID NO: 490849 - DNA, 15 bp, Homo sapiens
agtctatgatgctgt

SEQ ID NO: 490850 - DNA, 15 bp, Homo sapiens
aagtctatgatgctg

SEQ ID NO: 490851 - DNA, 15 bp, Homo sapiens
caagtctatgatgct

SEQ ID NO: 490852 - DNA, 15 bp, Homo sapiens
tcaagtctatgatgc

SEQ ID NO: 490853 - DNA, 15 bp, Homo sapiens
ttcaagtctatgatg

SEQ ID NO: 490854 - DNA, 15 bp, Homo sapiens
attcaagtctatgat

SEQ ID NO: 490855 - DNA, 15 bp, Homo sapiens
cattcaagtctatga

SEQ ID NO: 490856 - DNA, 15 bp, Homo sapiens
tcattcaagtctatg

SEQ ID NO: 490857 - DNA, 15 bp, Homo sapiens
ttcattcaagtctat

SEQ ID NO: 490858 - DNA, 15 bp, Homo sapiens
cttcattcaagtcta

SEQ ID NO: 490859 - DNA, 15 bp, Homo sapiens
gcttcattcaagtct

SEQ ID NO: 490860 - DNA, 15 bp, Homo sapiens
ggcttcattcaagtc

SEQ ID NO: 490861 - DNA, 15 bp, Homo sapiens
gggcttcattcaagt

SEQ ID NO: 490862 - DNA, 15 bp, Homo sapiens
tgggcttcattcaag

SEQ ID NO: 490863 - DNA, 15 bp, Homo sapiens
ttgggcttcattcaa

SEQ ID NO: 490864 - DNA, 15 bp, Homo sapiens
cttgggcttcattca

SEQ ID NO: 490865 - DNA, 15 bp, Homo sapiens
ccttgggcttcattc

SEQ ID NO: 490866 - DNA, 15 bp, Homo sapiens
gccttgggcttcatt

SEQ ID NO: 490867 - DNA, 15 bp, Homo sapiens
ggccttgggcttcat

SEQ ID NO: 490868 - DNA, 15 bp, Homo sapiens
tggccttgggcttca

SEQ ID NO: 490869 - DNA, 15 bp, Homo sapiens
ttggccttgggcttc

SEQ ID NO: 490870 - DNA, 15 bp, Homo sapiens
cttggccttgggctt

SEQ ID NO: 490871 - DNA, 15 bp, Homo sapiens
gcttggccttgggct

SEQ ID NO: 490872 - DNA, 15 bp, Homo sapiens
tgcttggccttgggc

SEQ ID NO: 490873 - DNA, 15 bp, Homo sapiens
ctgcttggccttggg

SEQ ID NO: 490874 - DNA, 15 bp, Homo sapiens
gctgcttggccttgg

SEQ ID NO: 490875 - DNA, 15 bp, Homo sapiens
ggctgcttggccttg

SEQ ID NO: 490876 - DNA, 15 bp, Homo sapiens
tggctgcttggcctt

SEQ ID NO: 490877 - DNA, 15 bp, Homo sapiens
ttggctgcttggcct

SEQ ID NO: 490878 - DNA, 15 bp, Homo sapiens
cttggctgcttggcc

SEQ ID NO: 490879 - DNA, 15 bp, Homo sapiens
gcttggctgcttggc

SEQ ID NO: 490880 - DNA, 15 bp, Homo sapiens
tgcttggctgcttgg

SEQ ID NO: 490881 - DNA, 15 bp, Homo sapiens
ttgcttggctgcttg

SEQ ID NO: 490882 - DNA, 15 bp, Homo sapiens
cttgcttggctgctt

SEQ ID NO: 490883 - DNA, 15 bp, Homo sapiens
ccttgcttggctgct

SEQ ID NO: 490884 - DNA, 15 bp, Homo sapiens
tccttgcttggctgc

SEQ ID NO: 490885 - DNA, 15 bp, Homo sapiens
gtccttgcttggctg

SEQ ID NO: 490886 - DNA, 15 bp, Homo sapiens
agtccttgcttggct

SEQ ID NO: 490887 - DNA, 15 bp, Homo sapiens
tagtccttgcttggc

SEQ ID NO: 490888 - DNA, 15 bp, Homo sapiens
ttagtccttgcttgg

SEQ ID NO: 490889 - DNA, 15 bp, Homo sapiens
attagtccttgcttg

SEQ ID NO: 490890 - DNA, 15 bp, Homo sapiens
aattagtccttgctt

SEQ ID NO: 490891 - DNA, 15 bp, Homo sapiens
gaattagtccttgct

SEQ ID NO: 490892 - DNA, 15 bp, Homo sapiens
tgaattagtccttgc

SEQ ID NO: 490893 - DNA, 15 bp, Homo sapiens
ctgaattagtccttg

SEQ ID NO: 490894 - DNA, 15 bp, Homo sapiens
tctgaattagtcctt

SEQ ID NO: 490895 - DNA, 15 bp, Homo sapiens
ctctgaattagtcct

SEQ ID NO: 490896 - DNA, 15 bp, Homo sapiens
gctctgaattagtcc

SEQ ID NO: 490897 - DNA, 15 bp, Homo sapiens
tgctctgaattagtc

SEQ ID NO: 490898 - DNA, 15 bp, Homo sapiens
ctgctctgaattagt

SEQ ID NO: 490899 - DNA, 15 bp, Homo sapiens
gctgctctgaattag

SEQ ID NO: 490900 - DNA, 15 bp, Homo sapiens
agctgctctgaatta

SEQ ID NO: 490901 - DNA, 15 bp, Homo sapiens
gagctgctctgaatt

SEQ ID NO: 490902 - DNA, 15 bp, Homo sapiens
tgagctgctctgaat

SEQ ID NO: 490903 - DNA, 15 bp, Homo sapiens
ctgagctgctctgaa

SEQ ID NO: 490904 - DNA, 15 bp, Homo sapiens
tctgagctgctctga

SEQ ID NO: 490905 - DNA, 15 bp, Homo sapiens
ttctgagctgctctg

SEQ ID NO: 490906 - DNA, 15 bp, Homo sapiens
tttctgagctgctct

SEQ ID NO: 490907 - DNA, 15 bp, Homo sapiens
gtttctgagctgctc

SEQ ID NO: 490908 - DNA, 15 bp, Homo sapiens
ggtttctgagctgct

SEQ ID NO: 490909 - DNA, 15 bp, Homo sapiens
gggtttctgagctgc

SEQ ID NO: 490910 - DNA, 15 bp, Homo sapiens
agggtttctgagctg

SEQ ID NO: 490911 - DNA, 15 bp, Homo sapiens
gagggtttctgagct

SEQ ID NO: 490912 - DNA, 15 bp, Homo sapiens
tgagggtttctgagc

SEQ ID NO: 490913 - DNA, 15 bp, Homo sapiens
gtgagggtttctgag

SEQ ID NO: 490914 - DNA, 15 bp, Homo sapiens
agtgagggtttctga

SEQ ID NO: 490915 - DNA, 15 bp, Homo sapiens
gagtgagggtttctg

SEQ ID NO: 490916 - DNA, 15 bp, Homo sapiens
tgagtgagggtttct

SEQ ID NO: 490917 - DNA, 15 bp, Homo sapiens
ttgagtgagggtttc

SEQ ID NO: 490918 - DNA, 15 bp, Homo sapiens
tttgagtgagggttt

SEQ ID NO: 490919 - DNA, 15 bp, Homo sapiens
gtttgagtgagggtt

SEQ ID NO: 490920 - DNA, 15 bp, Homo sapiens
ggtttgagtgagggt

SEQ ID NO: 490921 - DNA, 15 bp, Homo sapiens
cggtttgagtgaggg

SEQ ID NO: 490922 - DNA, 15 bp, Homo sapiens
ccggtttgagtgagg

SEQ ID NO: 490923 - DNA, 15 bp, Homo sapiens
gccggtttgagtgag

SEQ ID NO: 490924 - DNA, 15 bp, Homo sapiens
cgccggtttgagtga

SEQ ID NO: 490925 - DNA, 15 bp, Homo sapiens
ccgccggtttgagtg

SEQ ID NO: 490926 - DNA, 15 bp, Homo sapiens
gccgccggtttgagt

SEQ ID NO: 490927 - DNA, 15 bp, Homo sapiens
ggccgccggtttgag

SEQ ID NO: 490928 - DNA, 15 bp, Homo sapiens
gggccgccggtttga

SEQ ID NO: 490929 - DNA, 15 bp, Homo sapiens
ggggccgccggtttg

SEQ ID NO: 490930 - DNA, 15 bp, Homo sapiens
gggggccgccggttt

SEQ ID NO: 490931 - DNA, 15 bp, Homo sapiens
ggggggccgccggtt

SEQ ID NO: 490932 - DNA, 15 bp, Homo sapiens
aggggggccgccggt

SEQ ID NO: 490933 - DNA, 15 bp, Homo sapiens
caggggggccgccgg

SEQ ID NO: 490934 - DNA, 15 bp, Homo sapiens
acaggggggccgccg

SEQ ID NO: 490935 - DNA, 15 bp, Homo sapiens
cacaggggggccgcc

SEQ ID NO: 490936 - DNA, 15 bp, Homo sapiens
gcacaggggggccgc

SEQ ID NO: 490937 - DNA, 15 bp, Homo sapiens
agcacaggggggccg

SEQ ID NO: 490938 - DNA, 15 bp, Homo sapiens
tagcacaggggggcc

SEQ ID NO: 490939 - DNA, 15 bp, Homo sapiens
ttagcacaggggggc

SEQ ID NO: 490940 - DNA, 15 bp, Homo sapiens
cttagcacagggggg

SEQ ID NO: 490941 - DNA, 15 bp, Homo sapiens
ccttagcacaggggg

SEQ ID NO: 490942 - DNA, 15 bp, Homo sapiens
tccttagcacagggg

SEQ ID NO: 490943 - DNA, 15 bp, Homo sapiens
gtccttagcacaggg

SEQ ID NO: 490944 - DNA, 15 bp, Homo sapiens
tgtccttagcacagg

SEQ ID NO: 490945 - DNA, 15 bp, Homo sapiens
atgtccttagcacag

SEQ ID NO: 490946 - DNA, 15 bp, Homo sapiens
catgtccttagcaca

SEQ ID NO: 490947 - DNA, 15 bp, Homo sapiens
ccatgtccttagcac

SEQ ID NO: 490948 - DNA, 15 bp, Homo sapiens
gccatgtccttagca

SEQ ID NO: 490949 - DNA, 15 bp, Homo sapiens
ggccatgtccttagc

SEQ ID NO: 490950 - DNA, 15 bp, Homo sapiens
cggccatgtccttag

SEQ ID NO: 490951 - DNA, 15 bp, Homo sapiens
ccggccatgtcctta

SEQ ID NO: 490952 - DNA, 15 bp, Homo sapiens
cccggccatgtcctt

SEQ ID NO: 490953 - DNA, 15 bp, Homo sapiens
gcccggccatgtcct

SEQ ID NO: 490954 - DNA, 15 bp, Homo sapiens
ggcccggccatgtcc

SEQ ID NO: 490955 - DNA, 15 bp, Homo sapiens
gggcccggccatgtc

SEQ ID NO: 490956 - DNA, 15 bp, Homo sapiens
tgggcccggccatgt

SEQ ID NO: 490957 - DNA, 15 bp, Homo sapiens
ctgggcccggccatg

SEQ ID NO: 490958 - DNA, 15 bp, Homo sapiens
tctgggcccggccat

SEQ ID NO: 490959 - DNA, 15 bp, Homo sapiens
gtctgggcccggcca

SEQ ID NO: 490960 - DNA, 15 bp, Homo sapiens
cgtctgggcccggcc

SEQ ID NO: 490961 - DNA, 15 bp, Homo sapiens
gcgtctgggcccggc

SEQ ID NO: 490962 - DNA, 15 bp, Homo sapiens
cgcgtctgggcccgg

SEQ ID NO: 490963 - DNA, 15 bp, Homo sapiens
gcgcgtctgggcccg

SEQ ID NO: 490964 - DNA, 15 bp, Homo sapiens
agcgcgtctgggccc

SEQ ID NO: 490965 - DNA, 15 bp, Homo sapiens
gagcgcgtctgggcc

SEQ ID NO: 490966 - DNA, 15 bp, Homo sapiens
agagcgcgtctgggc

SEQ ID NO: 490967 - DNA, 15 bp, Homo sapiens
gagagcgcgtctggg

SEQ ID NO: 490968 - DNA, 15 bp, Homo sapiens
tgagagcgcgtctgg

SEQ ID NO: 490969 - DNA, 15 bp, Homo sapiens
atgagagcgcgtctg

SEQ ID NO: 490970 - DNA, 15 bp, Homo sapiens
tatgagagcgcgtct

SEQ ID NO: 490971 - DNA, 15 bp, Homo sapiens
ctatgagagcgcgtc

SEQ ID NO: 490972 - DNA, 15 bp, Homo sapiens
cctatgagagcgcgt

SEQ ID NO: 490973 - DNA, 15 bp, Homo sapiens
ccctatgagagcgcg

SEQ ID NO: 490974 - DNA, 15 bp, Homo sapiens
accctatgagagcgc

SEQ ID NO: 490975 - DNA, 15 bp, Homo sapiens
aaccctatgagagcg

SEQ ID NO: 490976 - DNA, 15 bp, Homo sapiens
gaaccctatgagagc

SEQ ID NO: 490977 - DNA, 15 bp, Homo sapiens
tgaaccctatgagag

SEQ ID NO: 490978 - DNA, 15 bp, Homo sapiens
gtgaaccctatgaga

SEQ ID NO: 490979 - DNA, 15 bp, Homo sapiens
tgtgaaccctatgag

SEQ ID NO: 490980 - DNA, 15 bp, Homo sapiens
ctgtgaaccctatga

SEQ ID NO: 490981 - DNA, 15 bp, Homo sapiens
tctgtgaaccctatg

SEQ ID NO: 490982 - DNA, 15 bp, Homo sapiens
ctctgtgaaccctat

SEQ ID NO: 490983 - DNA, 15 bp, Homo sapiens
tctctgtgaacccta

SEQ ID NO: 490984 - DNA, 15 bp, Homo sapiens
ctctctgtgaaccct

SEQ ID NO: 490985 - DNA, 15 bp, Homo sapiens
actctctgtgaaccc

SEQ ID NO: 490986 - DNA, 15 bp, Homo sapiens
gactctctgtgaacc

SEQ ID NO: 490987 - DNA, 15 bp, Homo sapiens
agactctctgtgaac

SEQ ID NO: 490988 - DNA, 15 bp, Homo sapiens
cagactctctgtgaa

SEQ ID NO: 490989 - DNA, 15 bp, Homo sapiens
ccagactctctgtga

SEQ ID NO: 490990 - DNA, 15 bp, Homo sapiens
tccagactctctgtg

SEQ ID NO: 490991 - DNA, 15 bp, Homo sapiens
ctccagactctctgt

SEQ ID NO: 490992 - DNA, 15 bp, Homo sapiens
actccagactctctg

SEQ ID NO: 490993 - DNA, 15 bp, Homo sapiens
gactccagactctct

SEQ ID NO: 490994 - DNA, 15 bp, Homo sapiens
ggactccagactctc

SEQ ID NO: 490995 - DNA, 15 bp, Homo sapiens
tggactccagactct

SEQ ID NO: 490996 - DNA, 15 bp, Homo sapiens
gtggactccagactc

SEQ ID NO: 490997 - DNA, 15 bp, Homo sapiens
cgtggactccagact

SEQ ID NO: 490998 - DNA, 15 bp, Homo sapiens
acgtggactccagac

SEQ ID NO: 490999 - DNA, 15 bp, Homo sapiens
aacgtggactccaga

SEQ ID NO: 491000 - DNA, 15 bp, Homo sapiens
gaacgtggactccag

SEQ ID NO: 491001 - DNA, 15 bp, Homo sapiens
tgaacgtggactcca

SEQ ID NO: 491002 - DNA, 15 bp, Homo sapiens
gtgaacgtggactcc

SEQ ID NO: 491003 - DNA, 15 bp, Homo sapiens
agtgaacgtggactc

SEQ ID NO: 491004 - DNA, 15 bp, Homo sapiens
tagtgaacgtggact

SEQ ID NO: 491005 - DNA, 15 bp, Homo sapiens
ttagtgaacgtggac

SEQ ID NO: 491006 - DNA, 15 bp, Homo sapiens
tttagtgaacgtgga

SEQ ID NO: 491007 - DNA, 15 bp, Homo sapiens
ctttagtgaacgtgg

SEQ ID NO: 491008 - DNA, 15 bp, Homo sapiens
actttagtgaacgtg

SEQ ID NO: 491009 - DNA, 15 bp, Homo sapiens
tactttagtgaacgt

SEQ ID NO: 491010 - DNA, 15 bp, Homo sapiens
atactttagtgaacg

SEQ ID NO: 491011 - DNA, 15 bp, Homo sapiens
tatactttagtgaac

SEQ ID NO: 491012 - DNA, 15 bp, Homo sapiens
ttatactttagtgaa

SEQ ID NO: 491013 - DNA, 15 bp, Homo sapiens
tttatactttagtga

SEQ ID NO: 491014 - DNA, 15 bp, Homo sapiens
ttttatactttagtg

SEQ ID NO: 491015 - DNA, 15 bp, Homo sapiens
attttatactttagt

SEQ ID NO: 491016 - DNA, 15 bp, Homo sapiens
tattttatactttag

SEQ ID NO: 491017 - DNA, 15 bp, Homo sapiens
gtattttatacttta

SEQ ID NO: 491018 - DNA, 15 bp, Homo sapiens
agtattttatacttt

SEQ ID NO: 491019 - DNA, 15 bp, Homo sapiens
tagtattttatactt

SEQ ID NO: 491020 - DNA, 15 bp, Homo sapiens
gtagtattttatact

SEQ ID NO: 491021 - DNA, 15 bp, Homo sapiens
agtagtattttatac

SEQ ID NO: 491022 - DNA, 15 bp, Homo sapiens
gagtagtattttata

SEQ ID NO: 491023 - DNA, 15 bp, Homo sapiens
cgagtagtattttat

SEQ ID NO: 491024 - DNA, 15 bp, Homo sapiens
tcgagtagtatttta

SEQ ID NO: 491025 - DNA, 15 bp, Homo sapiens
ttcgagtagtatttt

SEQ ID NO: 491026 - DNA, 15 bp, Homo sapiens
tttcgagtagtattt

SEQ ID NO: 491027 - DNA, 15 bp, Homo sapiens
ttttcgagtagtatt

SEQ ID NO: 491028 - DNA, 15 bp, Homo sapiens
attttcgagtagtat

SEQ ID NO: 491029 - DNA, 15 bp, Homo sapiens
cattttcgagtagta

SEQ ID NO: 491030 - DNA, 15 bp, Homo sapiens
tcattttcgagtagt

SEQ ID NO: 491031 - DNA, 15 bp, Homo sapiens
ttcattttcgagtag

SEQ ID NO: 491032 - DNA, 15 bp, Homo sapiens
gttcattttcgagta

SEQ ID NO: 491033 - DNA, 15 bp, Homo sapiens
ggttcattttcgagt

SEQ ID NO: 491034 - DNA, 15 bp, Homo sapiens
gggttcattttcgag

SEQ ID NO: 491035 - DNA, 15 bp, Homo sapiens
ggggttcattttcga

SEQ ID NO: 491036 - DNA, 15 bp, Homo sapiens
tggggttcattttcg

SEQ ID NO: 491037 - DNA, 15 bp, Homo sapiens
ctggggttcattttc

SEQ ID NO: 491038 - DNA, 15 bp, Homo sapiens
gctggggttcatttt

SEQ ID NO: 491039 - DNA, 15 bp, Homo sapiens
ggctggggttcattt

SEQ ID NO: 491040 - DNA, 15 bp, Homo sapiens
aggctggggttcatt

SEQ ID NO: 491041 - DNA, 15 bp, Homo sapiens
gaggctggggttcat

SEQ ID NO: 491042 - DNA, 15 bp, Homo sapiens
ggaggctggggttca

SEQ ID NO: 491043 - DNA, 15 bp, Homo sapiens
gggaggctggggttc

SEQ ID NO: 491044 - DNA, 15 bp, Homo sapiens
agggaggctggggtt

SEQ ID NO: 491045 - DNA, 15 bp, Homo sapiens
aagggaggctggggt

SEQ ID NO: 491046 - DNA, 15 bp, Homo sapiens
gaagggaggctgggg

SEQ ID NO: 491047 - DNA, 15 bp, Homo sapiens
agaagggaggctggg

SEQ ID NO: 491048 - DNA, 15 bp, Homo sapiens
cagaagggaggctgg

SEQ ID NO: 491049 - DNA, 15 bp, Homo sapiens
tcagaagggaggctg

SEQ ID NO: 491050 - DNA, 15 bp, Homo sapiens
ctcagaagggaggct

SEQ ID NO: 491051 - DNA, 15 bp, Homo sapiens
tctcagaagggaggc

SEQ ID NO: 491052 - DNA, 15 bp, Homo sapiens
ctctcagaagggagg

SEQ ID NO: 491053 - DNA, 15 bp, Homo sapiens
tctctcagaagggag

SEQ ID NO: 491054 - DNA, 15 bp, Homo sapiens
atctctcagaaggga

SEQ ID NO: 491055 - DNA, 15 bp, Homo sapiens
catctctcagaaggg

SEQ ID NO: 491056 - DNA, 15 bp, Homo sapiens
tcatctctcagaagg

SEQ ID NO: 491057 - DNA, 15 bp, Homo sapiens
ttcatctctcagaag

SEQ ID NO: 491058 - DNA, 15 bp, Homo sapiens
attcatctctcagaa

SEQ ID NO: 491059 - DNA, 15 bp, Homo sapiens
gattcatctctcaga

SEQ ID NO: 491060 - DNA, 15 bp, Homo sapiens
cgattcatctctcag

SEQ ID NO: 491061 - DNA, 15 bp, Homo sapiens
ccgattcatctctca

SEQ ID NO: 491062 - DNA, 15 bp, Homo sapiens
accgattcatctctc

SEQ ID NO: 491063 - DNA, 15 bp, Homo sapiens
aaccgattcatctct

SEQ ID NO: 491064 - DNA, 15 bp, Homo sapiens
taaccgattcatctc

SEQ ID NO: 491065 - DNA, 15 bp, Homo sapiens
gtaaccgattcatct

SEQ ID NO: 491066 - DNA, 15 bp, Homo sapiens
tgtaaccgattcatc

SEQ ID NO: 491067 - DNA, 15 bp, Homo sapiens
atgtaaccgattcat

SEQ ID NO: 491068 - DNA, 15 bp, Homo sapiens
gatgtaaccgattca

SEQ ID NO: 491069 - DNA, 15 bp, Homo sapiens
tgatgtaaccgattc

SEQ ID NO: 491070 - DNA, 15 bp, Homo sapiens
ttgatgtaaccgatt

SEQ ID NO: 491071 - DNA, 15 bp, Homo sapiens
gttgatgtaaccgat

SEQ ID NO: 491072 - DNA, 15 bp, Homo sapiens
tgttgatgtaaccga

SEQ ID NO: 491073 - DNA, 15 bp, Homo sapiens
gtgttgatgtaaccg

SEQ ID NO: 491074 - DNA, 15 bp, Homo sapiens
tgtgttgatgtaacc

SEQ ID NO: 491075 - DNA, 15 bp, Homo sapiens
atgtgttgatgtaac

SEQ ID NO: 491076 - DNA, 15 bp, Homo sapiens
catgtgttgatgtaa

SEQ ID NO: 491077 - DNA, 15 bp, Homo sapiens
tcatgtgttgatgta

SEQ ID NO: 491078 - DNA, 15 bp, Homo sapiens
ctcatgtgttgatgt

SEQ ID NO: 491079 - DNA, 15 bp, Homo sapiens
cctcatgtgttgatg

SEQ ID NO: 491080 - DNA, 15 bp, Homo sapiens
tcctcatgtgttgat

SEQ ID NO: 491081 - DNA, 15 bp, Homo sapiens
gtcctcatgtgttga

SEQ ID NO: 491082 - DNA, 15 bp, Homo sapiens
tgtcctcatgtgttg

SEQ ID NO: 491083 - DNA, 15 bp, Homo sapiens
ctgtcctcatgtgtt

SEQ ID NO: 491084 - DNA, 15 bp, Homo sapiens
tctgtcctcatgtgt

SEQ ID NO: 491085 - DNA, 15 bp, Homo sapiens
atctgtcctcatgtg

SEQ ID NO: 491086 - DNA, 15 bp, Homo sapiens
catctgtcctcatgt

SEQ ID NO: 491087 - DNA, 15 bp, Homo sapiens
gcatctgtcctcatg

SEQ ID NO: 491088 - DNA, 15 bp, Homo sapiens
tgcatctgtcctcat

SEQ ID NO: 491089 - DNA, 15 bp, Homo sapiens
atgcatctgtcctca

SEQ ID NO: 491090 - DNA, 15 bp, Homo sapiens
aatgcatctgtcctc

SEQ ID NO: 491091 - DNA, 15 bp, Homo sapiens
aaatgcatctgtcct

SEQ ID NO: 491092 - DNA, 15 bp, Homo sapiens
taaatgcatctgtcc

SEQ ID NO: 491093 - DNA, 15 bp, Homo sapiens
gtaaatgcatctgtc

SEQ ID NO: 491094 - DNA, 15 bp, Homo sapiens
tgtaaatgcatctgt

SEQ ID NO: 491095 - DNA, 15 bp, Homo sapiens
atgtaaatgcatctg

SEQ ID NO: 491096 - DNA, 15 bp, Homo sapiens
tatgtaaatgcatct

SEQ ID NO: 491097 - DNA, 15 bp, Homo sapiens
ctatgtaaatgcatc

SEQ ID NO: 491098 - DNA, 15 bp, Homo sapiens
tctatgtaaatgcat

SEQ ID NO: 491099 - DNA, 15 bp, Homo sapiens
gtctatgtaaatgca

SEQ ID NO: 491100 - DNA, 15 bp, Homo sapiens
ggtctatgtaaatgc

SEQ ID NO: 491101 - DNA, 15 bp, Homo sapiens
gggtctatgtaaatg

SEQ ID NO: 491102 - DNA, 15 bp, Homo sapiens
tgggtctatgtaaat

SEQ ID NO: 491103 - DNA, 15 bp, Homo sapiens
gtgggtctatgtaaa

SEQ ID NO: 491104 - DNA, 15 bp, Homo sapiens
tgtgggtctatgtaa

SEQ ID NO: 491105 - DNA, 15 bp, Homo sapiens
gtgtgggtctatgta

SEQ ID NO: 491106 - DNA, 15 bp, Homo sapiens
tgtgtgggtctatgt

SEQ ID NO: 491107 - DNA, 15 bp, Homo sapiens
gtgtgtgggtctatg

SEQ ID NO: 491108 - DNA, 15 bp, Homo sapiens
agtgtgtgggtctat

SEQ ID NO: 491109 - DNA, 15 bp, Homo sapiens
gagtgtgtgggtcta

SEQ ID NO: 491110 - DNA, 15 bp, Homo sapiens
agagtgtgtgggtct

SEQ ID NO: 491111 - DNA, 15 bp, Homo sapiens
gagagtgtgtgggtc

SEQ ID NO: 491112 - DNA, 15 bp, Homo sapiens
agagagtgtgtgggt

SEQ ID NO: 491113 - DNA, 15 bp, Homo sapiens
gagagagtgtgtggg

SEQ ID NO: 491114 - DNA, 15 bp, Homo sapiens
agagagagtgtgtgg

SEQ ID NO: 491115 - DNA, 15 bp, Homo sapiens
aagagagagtgtgtg

SEQ ID NO: 491116 - DNA, 15 bp, Homo sapiens
aaagagagagtgtgt

SEQ ID NO: 491117 - DNA, 15 bp, Homo sapiens
gaaagagagagtgtg

SEQ ID NO: 491118 - DNA, 15 bp, Homo sapiens
agaaagagagagtgt

SEQ ID NO: 491119 - DNA, 15 bp, Homo sapiens
gagaaagagagagtg

SEQ ID NO: 491120 - DNA, 15 bp, Homo sapiens
agagaaagagagagt

SEQ ID NO: 491121 - DNA, 15 bp, Homo sapiens
gagagaaagagagag

SEQ ID NO: 491122 - DNA, 15 bp, Homo sapiens
agagagaaagagaga

SEQ ID NO: 491123 - DNA, 15 bp, Homo sapiens
gagagagaaagagag

SEQ ID NO: 491124 - DNA, 15 bp, Homo sapiens
agagagagaaagaga

SEQ ID NO: 491125 - DNA, 15 bp, Homo sapiens
gagagagagaaagag

SEQ ID NO: 491126 - DNA, 15 bp, Homo sapiens
agagagagagaaaga

SEQ ID NO: 491127 - DNA, 15 bp, Homo sapiens
cagagagagagaaag

SEQ ID NO: 491128 - DNA, 15 bp, Homo sapiens
acagagagagagaaa

SEQ ID NO: 491129 - DNA, 15 bp, Homo sapiens
gacagagagagagaa

SEQ ID NO: 491130 - DNA, 15 bp, Homo sapiens
agacagagagagaga

SEQ ID NO: 491131 - DNA, 15 bp, Homo sapiens
gagacagagagagag

SEQ ID NO: 491132 - DNA, 15 bp, Homo sapiens
agagacagagagaga

SEQ ID NO: 491133 - DNA, 15 bp, Homo sapiens
gagagacagagagag

SEQ ID NO: 491134 - DNA, 15 bp, Homo sapiens
agagagacagagaga

SEQ ID NO: 491135 - DNA, 15 bp, Homo sapiens
cagagagacagagag

SEQ ID NO: 491136 - DNA, 15 bp, Homo sapiens
acagagagacagaga

SEQ ID NO: 491137 - DNA, 15 bp, Homo sapiens
gacagagagacagag

SEQ ID NO: 491138 - DNA, 15 bp, Homo sapiens
agacagagagacaga

SEQ ID NO: 491139 - DNA, 15 bp, Homo sapiens
gagacagagagacag

SEQ ID NO: 491140 - DNA, 15 bp, Homo sapiens
agagacagagagaca

SEQ ID NO: 491141 - DNA, 15 bp, Homo sapiens
gagagacagagagac

SEQ ID NO: 491142 - DNA, 15 bp, Homo sapiens
gagagagacagagag

SEQ ID NO: 491143 - DNA, 15 bp, Homo sapiens
agagagagacagaga

SEQ ID NO: 491144 - DNA, 15 bp, Homo sapiens
gagagagagacagag

SEQ ID NO: 491145 - DNA, 15 bp, Homo sapiens
agagagagagacaga

SEQ ID NO: 491146 - DNA, 15 bp, Homo sapiens
aagagagagagacag

SEQ ID NO: 491147 - DNA, 15 bp, Homo sapiens
taagagagagagaca

SEQ ID NO: 491148 - DNA, 15 bp, Homo sapiens
ctaagagagagagac

SEQ ID NO: 491149 - DNA, 15 bp, Homo sapiens
cctaagagagagaga

SEQ ID NO: 491150 - DNA, 15 bp, Homo sapiens
tcctaagagagagag

SEQ ID NO: 491151 - DNA, 15 bp, Homo sapiens
ctcctaagagagaga

SEQ ID NO: 491152 - DNA, 15 bp, Homo sapiens
cctcctaagagagag

SEQ ID NO: 491153 - DNA, 15 bp, Homo sapiens
ccctcctaagagaga

SEQ ID NO: 491154 - DNA, 15 bp, Homo sapiens
gccctcctaagagag

SEQ ID NO: 491155 - DNA, 15 bp, Homo sapiens
tgccctcctaagaga

SEQ ID NO: 491156 - DNA, 15 bp, Homo sapiens
ttgccctcctaagag

SEQ ID NO: 491157 - DNA, 15 bp, Homo sapiens
tttgccctcctaaga

SEQ ID NO: 491158 - DNA, 15 bp, Homo sapiens
ctttgccctcctaag

SEQ ID NO: 491159 - DNA, 15 bp, Homo sapiens
gctttgccctcctaa

SEQ ID NO: 491160 - DNA, 15 bp, Homo sapiens
agctttgccctccta

SEQ ID NO: 491161 - DNA, 15 bp, Homo sapiens
aagctttgccctcct

SEQ ID NO: 491162 - DNA, 15 bp, Homo sapiens
gaagctttgccctcc

SEQ ID NO: 491163 - DNA, 15 bp, Homo sapiens
agaagctttgccctc

SEQ ID NO: 491164 - DNA, 15 bp, Homo sapiens
gagaagctttgccct

SEQ ID NO: 491165 - DNA, 15 bp, Homo sapiens
tgagaagctttgccc

SEQ ID NO: 491166 - DNA, 15 bp, Homo sapiens
gtgagaagctttgcc

SEQ ID NO: 491167 - DNA, 15 bp, Homo sapiens
agtgagaagctttgc

SEQ ID NO: 491168 - DNA, 15 bp, Homo sapiens
gagtgagaagctttg

SEQ ID NO: 491169 - DNA, 15 bp, Homo sapiens
ggagtgagaagcttt

SEQ ID NO: 491170 - DNA, 15 bp, Homo sapiens
cggagtgagaagctt

SEQ ID NO: 491171 - DNA, 15 bp, Homo sapiens
ccggagtgagaagct

SEQ ID NO: 491172 - DNA, 15 bp, Homo sapiens
tccggagtgagaagc

SEQ ID NO: 491173 - DNA, 15 bp, Homo sapiens
ctccggagtgagaag

SEQ ID NO: 491174 - DNA, 15 bp, Homo sapiens
actccggagtgagaa

SEQ ID NO: 491175 - DNA, 15 bp, Homo sapiens
cactccggagtgaga

SEQ ID NO: 491176 - DNA, 15 bp, Homo sapiens
tcactccggagtgag

SEQ ID NO: 491177 - DNA, 15 bp, Homo sapiens
ttcactccggagtga

SEQ ID NO: 491178 - DNA, 15 bp, Homo sapiens
tttcactccggagtg

SEQ ID NO: 491179 - DNA, 15 bp, Homo sapiens
gtttcactccggagt

SEQ ID NO: 491180 - DNA, 15 bp, Homo sapiens
agtttcactccggag

SEQ ID NO: 491181 - DNA, 15 bp, Homo sapiens
aagtttcactccgga

SEQ ID NO: 491182 - DNA, 15 bp, Homo sapiens
gaagtttcactccgg

SEQ ID NO: 491183 - DNA, 15 bp, Homo sapiens
tgaagtttcactccg

SEQ ID NO: 491184 - DNA, 15 bp, Homo sapiens
ctgaagtttcactcc

SEQ ID NO: 491185 - DNA, 15 bp, Homo sapiens
gctgaagtttcactc

SEQ ID NO: 491186 - DNA, 15 bp, Homo sapiens
agctgaagtttcact

SEQ ID NO: 491187 - DNA, 15 bp, Homo sapiens
aagctgaagtttcac

SEQ ID NO: 491188 - DNA, 15 bp, Homo sapiens
taagctgaagtttca

SEQ ID NO: 491189 - DNA, 15 bp, Homo sapiens
gtaagctgaagtttc

SEQ ID NO: 491190 - DNA, 15 bp, Homo sapiens
tgtaagctgaagttt

SEQ ID NO: 491191 - DNA, 15 bp, Homo sapiens
ctgtaagctgaagtt

SEQ ID NO: 491192 - DNA, 15 bp, Homo sapiens
tctgtaagctgaagt

SEQ ID NO: 491193 - DNA, 15 bp, Homo sapiens
gtctgtaagctgaag

SEQ ID NO: 491194 - DNA, 15 bp, Homo sapiens
cgtctgtaagctgaa

SEQ ID NO: 491195 - DNA, 15 bp, Homo sapiens
acgtctgtaagctga

SEQ ID NO: 491196 - DNA, 15 bp, Homo sapiens
aacgtctgtaagctg

SEQ ID NO: 491197 - DNA, 15 bp, Homo sapiens
taacgtctgtaagct

SEQ ID NO: 491198 - DNA, 15 bp, Homo sapiens
gtaacgtctgtaagc

SEQ ID NO: 491199 - DNA, 15 bp, Homo sapiens
ggtaacgtctgtaag

SEQ ID NO: 491200 - DNA, 15 bp, Homo sapiens
aggtaacgtctgtaa

SEQ ID NO: 491201 - DNA, 15 bp, Homo sapiens
caggtaacgtctgta

SEQ ID NO: 491202 - DNA, 15 bp, Homo sapiens
acaggtaacgtctgt

SEQ ID NO: 491203 - DNA, 15 bp, Homo sapiens
gacaggtaacgtctg

SEQ ID NO: 491204 - DNA, 15 bp, Homo sapiens
agacaggtaacgtct

SEQ ID NO: 491205 - DNA, 15 bp, Homo sapiens
gagacaggtaacgtc

SEQ ID NO: 491206 - DNA, 15 bp, Homo sapiens
ggagacaggtaacgt

SEQ ID NO: 491207 - DNA, 15 bp, Homo sapiens
gggagacaggtaacg

SEQ ID NO: 491208 - DNA, 15 bp, Homo sapiens
ggggagacaggtaac

SEQ ID NO: 491209 - DNA, 15 bp, Homo sapiens
aggggagacaggtaa

SEQ ID NO: 491210 - DNA, 15 bp, Homo sapiens
gaggggagacaggta

SEQ ID NO: 491211 - DNA, 15 bp, Homo sapiens
ggaggggagacaggt

SEQ ID NO: 491212 - DNA, 15 bp, Homo sapiens
gggaggggagacagg

SEQ ID NO: 491213 - DNA, 15 bp, Homo sapiens
ggggaggggagacag

SEQ ID NO: 491214 - DNA, 15 bp, Homo sapiens
aggggaggggagaca

SEQ ID NO: 491215 - DNA, 15 bp, Homo sapiens
aaggggaggggagac

SEQ ID NO: 491216 - DNA, 15 bp, Homo sapiens
gaaggggaggggaga

SEQ ID NO: 491217 - DNA, 15 bp, Homo sapiens
agaaggggaggggag

SEQ ID NO: 491218 - DNA, 15 bp, Homo sapiens
cagaaggggagggga

SEQ ID NO: 491219 - DNA, 15 bp, Homo sapiens
tcagaaggggagggg

SEQ ID NO: 491220 - DNA, 15 bp, Homo sapiens
ttcagaaggggaggg

SEQ ID NO: 491221 - DNA, 15 bp, Homo sapiens
attcagaaggggagg

SEQ ID NO: 491222 - DNA, 15 bp, Homo sapiens
gattcagaaggggag

SEQ ID NO: 491223 - DNA, 15 bp, Homo sapiens
tgattcagaagggga

SEQ ID NO: 491224 - DNA, 15 bp, Homo sapiens
atgattcagaagggg

SEQ ID NO: 491225 - DNA, 15 bp, Homo sapiens
gatgattcagaaggg

SEQ ID NO: 491226 - DNA, 15 bp, Homo sapiens
agatgattcagaagg

SEQ ID NO: 491227 - DNA, 15 bp, Homo sapiens
gagatgattcagaag

SEQ ID NO: 491228 - DNA, 15 bp, Homo sapiens
tgagatgattcagaa

SEQ ID NO: 491229 - DNA, 15 bp, Homo sapiens
atgagatgattcaga

SEQ ID NO: 491230 - DNA, 15 bp, Homo sapiens
aatgagatgattcag

SEQ ID NO: 491231 - DNA, 15 bp, Homo sapiens
gaatgagatgattca

SEQ ID NO: 491232 - DNA, 15 bp, Homo sapiens
tgaatgagatgattc

SEQ ID NO: 491233 - DNA, 15 bp, Homo sapiens
ttgaatgagatgatt

SEQ ID NO: 491234 - DNA, 15 bp, Homo sapiens
tttgaatgagatgat

SEQ ID NO: 491235 - DNA, 15 bp, Homo sapiens
atttgaatgagatga

SEQ ID NO: 491236 - DNA, 15 bp, Homo sapiens
tatttgaatgagatg

SEQ ID NO: 491237 - DNA, 15 bp, Homo sapiens
ctatttgaatgagat

SEQ ID NO: 491238 - DNA, 15 bp, Homo sapiens
gctatttgaatgaga

SEQ ID NO: 491239 - DNA, 15 bp, Homo sapiens
agctatttgaatgag

SEQ ID NO: 491240 - DNA, 15 bp, Homo sapiens
cagctatttgaatga

SEQ ID NO: 491241 - DNA, 15 bp, Homo sapiens
gcagctatttgaatg

SEQ ID NO: 491242 - DNA, 15 bp, Homo sapiens
agcagctatttgaat

SEQ ID NO: 491243 - DNA, 15 bp, Homo sapiens
cagcagctatttgaa

SEQ ID NO: 491244 - DNA, 15 bp, Homo sapiens
tcagcagctatttga

SEQ ID NO: 491245 - DNA, 15 bp, Homo sapiens
ctcagcagctatttg

SEQ ID NO: 491246 - DNA, 15 bp, Homo sapiens
gctcagcagctattt

SEQ ID NO: 491247 - DNA, 15 bp, Homo sapiens
tgctcagcagctatt

SEQ ID NO: 491248 - DNA, 15 bp, Homo sapiens
ctgctcagcagctat

SEQ ID NO: 491249 - DNA, 15 bp, Homo sapiens
tctgctcagcagcta

SEQ ID NO: 491250 - DNA, 15 bp, Homo sapiens
atctgctcagcagct

SEQ ID NO: 491251 - DNA, 15 bp, Homo sapiens
catctgctcagcagc

SEQ ID NO: 491252 - DNA, 15 bp, Homo sapiens
tcatctgctcagcag

SEQ ID NO: 491253 - DNA, 15 bp, Homo sapiens
ctcatctgctcagca

SEQ ID NO: 491254 - DNA, 15 bp, Homo sapiens
cctcatctgctcagc

SEQ ID NO: 491255 - DNA, 15 bp, Homo sapiens
ccctcatctgctcag

SEQ ID NO: 491256 - DNA, 15 bp, Homo sapiens
cccctcatctgctca

SEQ ID NO: 491257 - DNA, 15 bp, Homo sapiens
gcccctcatctgctc

SEQ ID NO: 491258 - DNA, 15 bp, Homo sapiens
ggcccctcatctgct

SEQ ID NO: 491259 - DNA, 15 bp, Homo sapiens
gggcccctcatctgc

SEQ ID NO: 491260 - DNA, 15 bp, Homo sapiens
tgggcccctcatctg

SEQ ID NO: 491261 - DNA, 15 bp, Homo sapiens
ctgggcccctcatct

SEQ ID NO: 491262 - DNA, 15 bp, Homo sapiens
cctgggcccctcatc

SEQ ID NO: 491263 - DNA, 15 bp, Homo sapiens
tcctgggcccctcat

SEQ ID NO: 491264 - DNA, 15 bp, Homo sapiens
ctcctgggcccctca

SEQ ID NO: 491265 - DNA, 15 bp, Homo sapiens
cctcctgggcccctc

SEQ ID NO: 491266 - DNA, 15 bp, Homo sapiens
tcctcctgggcccct

SEQ ID NO: 491267 - DNA, 15 bp, Homo sapiens
ttcctcctgggcccc

SEQ ID NO: 491268 - DNA, 15 bp, Homo sapiens
attcctcctgggccc

SEQ ID NO: 491269 - DNA, 15 bp, Homo sapiens
tattcctcctgggcc

SEQ ID NO: 491270 - DNA, 15 bp, Homo sapiens
ctattcctcctgggc

SEQ ID NO: 491271 - DNA, 15 bp, Homo sapiens
cctattcctcctggg

SEQ ID NO: 491272 - DNA, 15 bp, Homo sapiens
acctattcctcctgg

SEQ ID NO: 491273 - DNA, 15 bp, Homo sapiens
gacctattcctcctg

SEQ ID NO: 491274 - DNA, 15 bp, Homo sapiens
agacctattcctcct

SEQ ID NO: 491275 - DNA, 15 bp, Homo sapiens
cagacctattcctcc

SEQ ID NO: 491276 - DNA, 15 bp, Homo sapiens
ccagacctattcctc

SEQ ID NO: 491277 - DNA, 15 bp, Homo sapiens
gccagacctattcct

SEQ ID NO: 491278 - DNA, 15 bp, Homo sapiens
agccagacctattcc

SEQ ID NO: 491279 - DNA, 15 bp, Homo sapiens
cagccagacctattc

SEQ ID NO: 491280 - DNA, 15 bp, Homo sapiens
gcagccagacctatt

SEQ ID NO: 491281 - DNA, 15 bp, Homo sapiens
tgcagccagacctat

SEQ ID NO: 491282 - DNA, 15 bp, Homo sapiens
atgcagccagaccta

SEQ ID NO: 491283 - DNA, 15 bp, Homo sapiens
aatgcagccagacct

SEQ ID NO: 491284 - DNA, 15 bp, Homo sapiens
caatgcagccagacc

SEQ ID NO: 491285 - DNA, 15 bp, Homo sapiens
tcaatgcagccagac

SEQ ID NO: 491286 - DNA, 15 bp, Homo sapiens
ctcaatgcagccaga

SEQ ID NO: 491287 - DNA, 15 bp, Homo sapiens
actcaatgcagccag

SEQ ID NO: 491288 - DNA, 15 bp, Homo sapiens
cactcaatgcagcca

SEQ ID NO: 491289 - DNA, 15 bp, Homo sapiens
gcactcaatgcagcc

SEQ ID NO: 491290 - DNA, 15 bp, Homo sapiens
ggcactcaatgcagc

SEQ ID NO: 491291 - DNA, 15 bp, Homo sapiens
aggcactcaatgcag

SEQ ID NO: 491292 - DNA, 15 bp, Homo sapiens
caggcactcaatgca

SEQ ID NO: 491293 - DNA, 15 bp, Homo sapiens
gcaggcactcaatgc

SEQ ID NO: 491294 - DNA, 15 bp, Homo sapiens
tgcaggcactcaatg

SEQ ID NO: 491295 - DNA, 15 bp, Homo sapiens
ctgcaggcactcaat

SEQ ID NO: 491296 - DNA, 15 bp, Homo sapiens
actgcaggcactcaa

SEQ ID NO: 491297 - DNA, 15 bp, Homo sapiens
cactgcaggcactca

SEQ ID NO: 491298 - DNA, 15 bp, Homo sapiens
tcactgcaggcactc

SEQ ID NO: 491299 - DNA, 15 bp, Homo sapiens
gtcactgcaggcact

SEQ ID NO: 491300 - DNA, 15 bp, Homo sapiens
tgtcactgcaggcac

SEQ ID NO: 491301 - DNA, 15 bp, Homo sapiens
ctgtcactgcaggca

SEQ ID NO: 491302 - DNA, 15 bp, Homo sapiens
tctgtcactgcaggc

SEQ ID NO: 491303 - DNA, 15 bp, Homo sapiens
ctctgtcactgcagg

SEQ ID NO: 491304 - DNA, 15 bp, Homo sapiens
cctctgtcactgcag

SEQ ID NO: 491305 - DNA, 15 bp, Homo sapiens
gcctctgtcactgca

SEQ ID NO: 491306 - DNA, 15 bp, Homo sapiens
agcctctgtcactgc

SEQ ID NO: 491307 - DNA, 15 bp, Homo sapiens
gagcctctgtcactg

SEQ ID NO: 491308 - DNA, 15 bp, Homo sapiens
cgagcctctgtcact

SEQ ID NO: 491309 - DNA, 15 bp, Homo sapiens
ccgagcctctgtcac

SEQ ID NO: 491310 - DNA, 15 bp, Homo sapiens
accgagcctctgtca

SEQ ID NO: 491311 - DNA, 15 bp, Homo sapiens
gaccgagcctctgtc

SEQ ID NO: 491312 - DNA, 15 bp, Homo sapiens
agaccgagcctctgt

SEQ ID NO: 491313 - DNA, 15 bp, Homo sapiens
gagaccgagcctctg

SEQ ID NO: 491314 - DNA, 15 bp, Homo sapiens
agagaccgagcctct

SEQ ID NO: 491315 - DNA, 15 bp, Homo sapiens
tagagaccgagcctc

SEQ ID NO: 491316 - DNA, 15 bp, Homo sapiens
gtagagaccgagcct

SEQ ID NO: 491317 - DNA, 15 bp, Homo sapiens
ggtagagaccgagcc

SEQ ID NO: 491318 - DNA, 15 bp, Homo sapiens
tggtagagaccgagc

SEQ ID NO: 491319 - DNA, 15 bp, Homo sapiens
atggtagagaccgag

SEQ ID NO: 491320 - DNA, 15 bp, Homo sapiens
catggtagagaccga

SEQ ID NO: 491321 - DNA, 15 bp, Homo sapiens
tcatggtagagaccg

SEQ ID NO: 491322 - DNA, 15 bp, Homo sapiens
gtcatggtagagacc

SEQ ID NO: 491323 - DNA, 15 bp, Homo sapiens
tgtcatggtagagac

SEQ ID NO: 491324 - DNA, 15 bp, Homo sapiens
ctgtcatggtagaga

SEQ ID NO: 491325 - DNA, 15 bp, Homo sapiens
tctgtcatggtagag

SEQ ID NO: 491326 - DNA, 15 bp, Homo sapiens
ctctgtcatggtaga

SEQ ID NO: 491327 - DNA, 15 bp, Homo sapiens
tctctgtcatggtag

SEQ ID NO: 491328 - DNA, 15 bp, Homo sapiens
gtctctgtcatggta

SEQ ID NO: 491329 - DNA, 15 bp, Homo sapiens
tgtctctgtcatggt

SEQ ID NO: 491330 - DNA, 15 bp, Homo sapiens
ctgtctctgtcatgg

SEQ ID NO: 491331 - DNA, 15 bp, Homo sapiens
tctgtctctgtcatg

SEQ ID NO: 491332 - DNA, 15 bp, Homo sapiens
gtctgtctctgtcat

SEQ ID NO: 491333 - DNA, 15 bp, Homo sapiens
agtctgtctctgtca

SEQ ID NO: 491334 - DNA, 15 bp, Homo sapiens
gagtctgtctctgtc

SEQ ID NO: 491335 - DNA, 15 bp, Homo sapiens
cgagtctgtctctgt

SEQ ID NO: 491336 - DNA, 15 bp, Homo sapiens
ccgagtctgtctctg

SEQ ID NO: 491337 - DNA, 15 bp, Homo sapiens
gccgagtctgtctct

SEQ ID NO: 491338 - DNA, 15 bp, Homo sapiens
cgccgagtctgtctc

SEQ ID NO: 491339 - DNA, 15 bp, Homo sapiens
gcgccgagtctgtct

SEQ ID NO: 491340 - DNA, 15 bp, Homo sapiens
tgcgccgagtctgtc

SEQ ID NO: 491341 - DNA, 15 bp, Homo sapiens
gtgcgccgagtctgt

SEQ ID NO: 491342 - DNA, 15 bp, Homo sapiens
agtgcgccgagtctg

SEQ ID NO: 491343 - DNA, 15 bp, Homo sapiens
gagtgcgccgagtct

SEQ ID NO: 491344 - DNA, 15 bp, Homo sapiens
agagtgcgccgagtc

SEQ ID NO: 491345 - DNA, 15 bp, Homo sapiens
aagagtgcgccgagt

SEQ ID NO: 491346 - DNA, 15 bp, Homo sapiens
caagagtgcgccgag

SEQ ID NO: 491347 - DNA, 15 bp, Homo sapiens
ccaagagtgcgccga

SEQ ID NO: 491348 - DNA, 15 bp, Homo sapiens
tccaagagtgcgccg

SEQ ID NO: 491349 - DNA, 15 bp, Homo sapiens
atccaagagtgcgcc

SEQ ID NO: 491350 - DNA, 15 bp, Homo sapiens
catccaagagtgcgc

SEQ ID NO: 491351 - DNA, 15 bp, Homo sapiens
gcatccaagagtgcg

SEQ ID NO: 491352 - DNA, 15 bp, Homo sapiens
ggcatccaagagtgc

SEQ ID NO: 491353 - DNA, 15 bp, Homo sapiens
tggcatccaagagtg

SEQ ID NO: 491354 - DNA, 15 bp, Homo sapiens
atggcatccaagagt

SEQ ID NO: 491355 - DNA, 15 bp, Homo sapiens
catggcatccaagag

SEQ ID NO: 491356 - DNA, 15 bp, Homo sapiens
tcatggcatccaaga

SEQ ID NO: 491357 - DNA, 15 bp, Homo sapiens
atcatggcatccaag

SEQ ID NO: 491358 - DNA, 15 bp, Homo sapiens
gatcatggcatccaa

SEQ ID NO: 491359 - DNA, 15 bp, Homo sapiens
agatcatggcatcca

SEQ ID NO: 491360 - DNA, 15 bp, Homo sapiens
cagatcatggcatcc

SEQ ID NO: 491361 - DNA, 15 bp, Homo sapiens
tcagatcatggcatc

SEQ ID NO: 491362 - DNA, 15 bp, Homo sapiens
ttcagatcatggcat

SEQ ID NO: 491363 - DNA, 15 bp, Homo sapiens
tttcagatcatggca

SEQ ID NO: 491364 - DNA, 15 bp, Homo sapiens
ttttcagatcatggc

SEQ ID NO: 491365 - DNA, 15 bp, Homo sapiens
cttttcagatcatgg

SEQ ID NO: 491366 - DNA, 15 bp, Homo sapiens
tcttttcagatcatg

SEQ ID NO: 491367 - DNA, 15 bp, Homo sapiens
ctcttttcagatcat

SEQ ID NO: 491368 - DNA, 15 bp, Homo sapiens
cctcttttcagatca

SEQ ID NO: 491369 - DNA, 15 bp, Homo sapiens
gcctcttttcagatc

SEQ ID NO: 491370 - DNA, 15 bp, Homo sapiens
ggcctcttttcagat

SEQ ID NO: 491371 - DNA, 15 bp, Homo sapiens
tggcctcttttcaga

SEQ ID NO: 491372 - DNA, 15 bp, Homo sapiens
gtggcctcttttcag

SEQ ID NO: 491373 - DNA, 15 bp, Homo sapiens
ggtggcctcttttca

SEQ ID NO: 491374 - DNA, 15 bp, Homo sapiens
cggtggcctcttttc

SEQ ID NO: 491375 - DNA, 15 bp, Homo sapiens
gcggtggcctctttt

SEQ ID NO: 491376 - DNA, 15 bp, Homo sapiens
agcggtggcctcttt

SEQ ID NO: 491377 - DNA, 15 bp, Homo sapiens
cagcggtggcctctt

SEQ ID NO: 491378 - DNA, 15 bp, Homo sapiens
gcagcggtggcctct

SEQ ID NO: 491379 - DNA, 15 bp, Homo sapiens
agcagcggtggcctc

SEQ ID NO: 491380 - DNA, 15 bp, Homo sapiens
cagcagcggtggcct

SEQ ID NO: 491381 - DNA, 15 bp, Homo sapiens
gcagcagcggtggcc

SEQ ID NO: 491382 - DNA, 15 bp, Homo sapiens
tgcagcagcggtggc

SEQ ID NO: 491383 - DNA, 15 bp, Homo sapiens
ctgcagcagcggtgg

SEQ ID NO: 491384 - DNA, 15 bp, Homo sapiens
gctgcagcagcggtg

SEQ ID NO: 491385 - DNA, 15 bp, Homo sapiens
ggctgcagcagcggt

SEQ ID NO: 491386 - DNA, 15 bp, Homo sapiens
tggctgcagcagcgg

SEQ ID NO: 491387 - DNA, 15 bp, Homo sapiens
gtggctgcagcagcg

SEQ ID NO: 491388 - DNA, 15 bp, Homo sapiens
tgtggctgcagcagc

SEQ ID NO: 491389 - DNA, 15 bp, Homo sapiens
atgtggctgcagcag

SEQ ID NO: 491390 - DNA, 15 bp, Homo sapiens
gatgtggctgcagca

SEQ ID NO: 491391 - DNA, 15 bp, Homo sapiens
ggatgtggctgcagc

SEQ ID NO: 491392 - DNA, 15 bp, Homo sapiens
gggatgtggctgcag

SEQ ID NO: 491393 - DNA, 15 bp, Homo sapiens
tgggatgtggctgca

SEQ ID NO: 491394 - DNA, 15 bp, Homo sapiens
ctgggatgtggctgc

SEQ ID NO: 491395 - DNA, 15 bp, Homo sapiens
cctgggatgtggctg

SEQ ID NO: 491396 - DNA, 15 bp, Homo sapiens
tcctgggatgtggct

SEQ ID NO: 491397 - DNA, 15 bp, Homo sapiens
gtcctgggatgtggc

SEQ ID NO: 491398 - DNA, 15 bp, Homo sapiens
agtcctgggatgtgg

SEQ ID NO: 491399 - DNA, 15 bp, Homo sapiens
cagtcctgggatgtg

SEQ ID NO: 491400 - DNA, 15 bp, Homo sapiens
gcagtcctgggatgt

SEQ ID NO: 491401 - DNA, 15 bp, Homo sapiens
tgcagtcctgggatg

SEQ ID NO: 491402 - DNA, 15 bp, Homo sapiens
gtgcagtcctgggat

SEQ ID NO: 491403 - DNA, 15 bp, Homo sapiens
tgtgcagtcctggga

SEQ ID NO: 491404 - DNA, 15 bp, Homo sapiens
ctgtgcagtcctggg

SEQ ID NO: 491405 - DNA, 15 bp, Homo sapiens
cctgtgcagtcctgg

SEQ ID NO: 491406 - DNA, 15 bp, Homo sapiens
ccctgtgcagtcctg

SEQ ID NO: 491407 - DNA, 15 bp, Homo sapiens
cccctgtgcagtcct

SEQ ID NO: 491408 - DNA, 15 bp, Homo sapiens
tcccctgtgcagtcc

SEQ ID NO: 491409 - DNA, 15 bp, Homo sapiens
ctcccctgtgcagtc

SEQ ID NO: 491410 - DNA, 15 bp, Homo sapiens
cctcccctgtgcagt

SEQ ID NO: 491411 - DNA, 15 bp, Homo sapiens
gcctcccctgtgcag

SEQ ID NO: 491412 - DNA, 15 bp, Homo sapiens
tgcctcccctgtgca

SEQ ID NO: 491413 - DNA, 15 bp, Homo sapiens
ctgcctcccctgtgc

SEQ ID NO: 491414 - DNA, 15 bp, Homo sapiens
cctgcctcccctgtg

SEQ ID NO: 491415 - DNA, 15 bp, Homo sapiens
gcctgcctcccctgt

SEQ ID NO: 491416 - DNA, 15 bp, Homo sapiens
cgcctgcctcccctg

SEQ ID NO: 491417 - DNA, 15 bp, Homo sapiens
acgcctgcctcccct

SEQ ID NO: 491418 - DNA, 15 bp, Homo sapiens
tacgcctgcctcccc

SEQ ID NO: 491419 - DNA, 15 bp, Homo sapiens
ctacgcctgcctccc

SEQ ID NO: 491420 - DNA, 15 bp, Homo sapiens
gctacgcctgcctcc

SEQ ID NO: 491421 - DNA, 15 bp, Homo sapiens
agctacgcctgcctc

SEQ ID NO: 491422 - DNA, 15 bp, Homo sapiens
gagctacgcctgcct

SEQ ID NO: 491423 - DNA, 15 bp, Homo sapiens
tgagctacgcctgcc

SEQ ID NO: 491424 - DNA, 15 bp, Homo sapiens
atgagctacgcctgc

SEQ ID NO: 491425 - DNA, 15 bp, Homo sapiens
catgagctacgcctg

SEQ ID NO: 491426 - DNA, 15 bp, Homo sapiens
gcatgagctacgcct

SEQ ID NO: 491427 - DNA, 15 bp, Homo sapiens
tgcatgagctacgcc

SEQ ID NO: 491428 - DNA, 15 bp, Homo sapiens
gtgcatgagctacgc

SEQ ID NO: 491429 - DNA, 15 bp, Homo sapiens
tgtgcatgagctacg

SEQ ID NO: 491430 - DNA, 15 bp, Homo sapiens
ttgtgcatgagctac

SEQ ID NO: 491431 - DNA, 15 bp, Homo sapiens
cttgtgcatgagcta

SEQ ID NO: 491432 - DNA, 15 bp, Homo sapiens
ccttgtgcatgagct

SEQ ID NO: 491433 - DNA, 15 bp, Homo sapiens
tccttgtgcatgagc

SEQ ID NO: 491434 - DNA, 15 bp, Homo sapiens
gtccttgtgcatgag

SEQ ID NO: 491435 - DNA, 15 bp, Homo sapiens
tgtccttgtgcatga

SEQ ID NO: 491436 - DNA, 15 bp, Homo sapiens
gtgtccttgtgcatg

SEQ ID NO: 491437 - DNA, 15 bp, Homo sapiens
tgtgtccttgtgcat

SEQ ID NO: 491438 - DNA, 15 bp, Homo sapiens
gtgtgtccttgtgca

SEQ ID NO: 491439 - DNA, 15 bp, Homo sapiens
tgtgtgtccttgtgc

SEQ ID NO: 491440 - DNA, 15 bp, Homo sapiens
gtgtgtgtccttgtg

SEQ ID NO: 491441 - DNA, 15 bp, Homo sapiens
tgtgtgtgtccttgt

SEQ ID NO: 491442 - DNA, 15 bp, Homo sapiens
gtgtgtgtgtccttg

SEQ ID NO: 491443 - DNA, 15 bp, Homo sapiens
tgtgtgtgtgtcctt

SEQ ID NO: 491444 - DNA, 15 bp, Homo sapiens
gtgtgtgtgtgtcct

SEQ ID NO: 491445 - DNA, 15 bp, Homo sapiens
tgtgtgtgtgtgtcc

SEQ ID NO: 491446 - DNA, 15 bp, Homo sapiens
gtgtgtgtgtgtgtc

SEQ ID NO: 491447 - DNA, 15 bp, Homo sapiens
cttgtgtgtgtgtgt

SEQ ID NO: 491448 - DNA, 15 bp, Homo sapiens
gcttgtgtgtgtgtg

SEQ ID NO: 491449 - DNA, 15 bp, Homo sapiens
tgcttgtgtgtgtgt

SEQ ID NO: 491450 - DNA, 15 bp, Homo sapiens
gtgcttgtgtgtgtg

SEQ ID NO: 491451 - DNA, 15 bp, Homo sapiens
tgtgcttgtgtgtgt

SEQ ID NO: 491452 - DNA, 15 bp, Homo sapiens
atgtgcttgtgtgtg

SEQ ID NO: 491453 - DNA, 15 bp, Homo sapiens
catgtgcttgtgtgt

SEQ ID NO: 491454 - DNA, 15 bp, Homo sapiens
gcatgtgcttgtgtg

SEQ ID NO: 491455 - DNA, 15 bp, Homo sapiens
tgcatgtgcttgtgt

SEQ ID NO: 491456 - DNA, 15 bp, Homo sapiens
atgcatgtgcttgtg

SEQ ID NO: 491457 - DNA, 15 bp, Homo sapiens
catgcatgtgcttgt

SEQ ID NO: 491458 - DNA, 15 bp, Homo sapiens
gcatgcatgtgcttg

SEQ ID NO: 491459 - DNA, 15 bp, Homo sapiens
ggcatgcatgtgctt

SEQ ID NO: 491460 - DNA, 15 bp, Homo sapiens
aggcatgcatgtgct

SEQ ID NO: 491461 - DNA, 15 bp, Homo sapiens
caggcatgcatgtgc

SEQ ID NO: 491462 - DNA, 15 bp, Homo sapiens
gcaggcatgcatgtg

SEQ ID NO: 491463 - DNA, 15 bp, Homo sapiens
tgcaggcatgcatgt

SEQ ID NO: 491464 - DNA, 15 bp, Homo sapiens
ttgcaggcatgcatg

SEQ ID NO: 491465 - DNA, 15 bp, Homo sapiens
tttgcaggcatgcat

SEQ ID NO: 491466 - DNA, 15 bp, Homo sapiens
ctttgcaggcatgca

SEQ ID NO: 491467 - DNA, 15 bp, Homo sapiens
cctttgcaggcatgc

SEQ ID NO: 491468 - DNA, 15 bp, Homo sapiens
acctttgcaggcatg

SEQ ID NO: 491469 - DNA, 15 bp, Homo sapiens
cacctttgcaggcat

SEQ ID NO: 491470 - DNA, 15 bp, Homo sapiens
acacctttgcaggca

SEQ ID NO: 491471 - DNA, 15 bp, Homo sapiens
gacacctttgcaggc

SEQ ID NO: 491472 - DNA, 15 bp, Homo sapiens
tgacacctttgcagg

SEQ ID NO: 491473 - DNA, 15 bp, Homo sapiens
ctgacacctttgcag

SEQ ID NO: 491474 - DNA, 15 bp, Homo sapiens
actgacacctttgca

SEQ ID NO: 491475 - DNA, 15 bp, Homo sapiens
cactgacacctttgc

SEQ ID NO: 491476 - DNA, 15 bp, Homo sapiens
acactgacacctttg

SEQ ID NO: 491477 - DNA, 15 bp, Homo sapiens
tacactgacaccttt

SEQ ID NO: 491478 - DNA, 15 bp, Homo sapiens
gtacactgacacctt

SEQ ID NO: 491479 - DNA, 15 bp, Homo sapiens
tgtacactgacacct

SEQ ID NO: 491480 - DNA, 15 bp, Homo sapiens
gtgtacactgacacc

SEQ ID NO: 491481 - DNA, 15 bp, Homo sapiens
tgtgtacactgacac

SEQ ID NO: 491482 - DNA, 15 bp, Homo sapiens
ctgtgtacactgaca

SEQ ID NO: 491483 - DNA, 15 bp, Homo sapiens
gctgtgtacactgac

SEQ ID NO: 491484 - DNA, 15 bp, Homo sapiens
ggctgtgtacactga

SEQ ID NO: 491485 - DNA, 15 bp, Homo sapiens
aggctgtgtacactg

SEQ ID NO: 491486 - DNA, 15 bp, Homo sapiens
aaggctgtgtacact

SEQ ID NO: 491487 - DNA, 15 bp, Homo sapiens
taaggctgtgtacac

SEQ ID NO: 491488 - DNA, 15 bp, Homo sapiens
gtaaggctgtgtaca

SEQ ID NO: 491489 - DNA, 15 bp, Homo sapiens
agtaaggctgtgtac

SEQ ID NO: 491490 - DNA, 15 bp, Homo sapiens
tagtaaggctgtgta

SEQ ID NO: 491491 - DNA, 15 bp, Homo sapiens
ttagtaaggctgtgt

SEQ ID NO: 491492 - DNA, 15 bp, Homo sapiens
tttagtaaggctgtg

SEQ ID NO: 491493 - DNA, 15 bp, Homo sapiens
gtttagtaaggctgt

SEQ ID NO: 491494 - DNA, 15 bp, Homo sapiens
agtttagtaaggctg

SEQ ID NO: 491495 - DNA, 15 bp, Homo sapiens
gagtttagtaaggct

SEQ ID NO: 491496 - DNA, 15 bp, Homo sapiens
tgagtttagtaaggc

SEQ ID NO: 491497 - DNA, 15 bp, Homo sapiens
gtgagtttagtaagg

SEQ ID NO: 491498 - DNA, 15 bp, Homo sapiens
tgtgagtttagtaag

SEQ ID NO: 491499 - DNA, 15 bp, Homo sapiens
ttgtgagtttagtaa

SEQ ID NO: 491500 - DNA, 15 bp, Homo sapiens
gttgtgagtttagta

SEQ ID NO: 491501 - DNA, 15 bp, Homo sapiens
tgttgtgagtttagt

SEQ ID NO: 491502 - DNA, 15 bp, Homo sapiens
gtgttgtgagtttag

SEQ ID NO: 491503 - DNA, 15 bp, Homo sapiens
cgtgttgtgagttta

SEQ ID NO: 491504 - DNA, 15 bp, Homo sapiens
tcgtgttgtgagttt

SEQ ID NO: 491505 - DNA, 15 bp, Homo sapiens
gtcgtgttgtgagtt

SEQ ID NO: 491506 - DNA, 15 bp, Homo sapiens
ggtcgtgttgtgagt

SEQ ID NO: 491507 - DNA, 15 bp, Homo sapiens
cggtcgtgttgtgag

SEQ ID NO: 491508 - DNA, 15 bp, Homo sapiens
gcggtcgtgttgtga

SEQ ID NO: 491509 - DNA, 15 bp, Homo sapiens
agcggtcgtgttgtg

SEQ ID NO: 491510 - DNA, 15 bp, Homo sapiens
aagcggtcgtgttgt

SEQ ID NO: 491511 - DNA, 15 bp, Homo sapiens
gaagcggtcgtgttg

SEQ ID NO: 491512 - DNA, 15 bp, Homo sapiens
tgaagcggtcgtgtt

SEQ ID NO: 491513 - DNA, 15 bp, Homo sapiens
gtgaagcggtcgtgt

SEQ ID NO: 491514 - DNA, 15 bp, Homo sapiens
tgtgaagcggtcgtg

SEQ ID NO: 491515 - DNA, 15 bp, Homo sapiens
atgtgaagcggtcgt

SEQ ID NO: 491516 - DNA, 15 bp, Homo sapiens
aatgtgaagcggtcg

SEQ ID NO: 491517 - DNA, 15 bp, Homo sapiens
caatgtgaagcggtc

SEQ ID NO: 491518 - DNA, 15 bp, Homo sapiens
gcaatgtgaagcggt

SEQ ID NO: 491519 - DNA, 15 bp, Homo sapiens
tgcaatgtgaagcgg

SEQ ID NO: 491520 - DNA, 15 bp, Homo sapiens
atgcaatgtgaagcg

SEQ ID NO: 491521 - DNA, 15 bp, Homo sapiens
tatgcaatgtgaagc

SEQ ID NO: 491522 - DNA, 15 bp, Homo sapiens
atatgcaatgtgaag

SEQ ID NO: 491523 - DNA, 15 bp, Homo sapiens
aatatgcaatgtgaa

SEQ ID NO: 491524 - DNA, 15 bp, Homo sapiens
caatatgcaatgtga

SEQ ID NO: 491525 - DNA, 15 bp, Homo sapiens
acaatatgcaatgtg

SEQ ID NO: 491526 - DNA, 15 bp, Homo sapiens
aacaatatgcaatgt

SEQ ID NO: 491527 - DNA, 15 bp, Homo sapiens
aaacaatatgcaatg

SEQ ID NO: 491528 - DNA, 15 bp, Homo sapiens
gaaacaatatgcaat

SEQ ID NO: 491529 - DNA, 15 bp, Homo sapiens
ggaaacaatatgcaa

SEQ ID NO: 491530 - DNA, 15 bp, Homo sapiens
tggaaacaatatgca

SEQ ID NO: 491531 - DNA, 15 bp, Homo sapiens
ttggaaacaatatgc

SEQ ID NO: 491532 - DNA, 15 bp, Homo sapiens
tttggaaacaatatg

SEQ ID NO: 491533 - DNA, 15 bp, Homo sapiens
ctttggaaacaatat

SEQ ID NO: 491534 - DNA, 15 bp, Homo sapiens
tctttggaaacaata

SEQ ID NO: 491535 - DNA, 15 bp, Homo sapiens
ctctttggaaacaat

SEQ ID NO: 491536 - DNA, 15 bp, Homo sapiens
tctctttggaaacaa

SEQ ID NO: 491537 - DNA, 15 bp, Homo sapiens
ttctctttggaaaca

SEQ ID NO: 491538 - DNA, 15 bp, Homo sapiens
cttctctttggaaac

SEQ ID NO: 491539 - DNA, 15 bp, Homo sapiens
gcttctctttggaaa

SEQ ID NO: 491540 - DNA, 15 bp, Homo sapiens
cgcttctctttggaa

SEQ ID NO: 491541 - DNA, 15 bp, Homo sapiens
acgcttctctttgga

SEQ ID NO: 491542 - DNA, 15 bp, Homo sapiens
cacgcttctctttgg

SEQ ID NO: 491543 - DNA, 15 bp, Homo sapiens
ccacgcttctctttg

SEQ ID NO: 491544 - DNA, 15 bp, Homo sapiens
cccacgcttctcttt

SEQ ID NO: 491545 - DNA, 15 bp, Homo sapiens
tcccacgcttctctt

SEQ ID NO: 491546 - DNA, 15 bp, Homo sapiens
atcccacgcttctct

SEQ ID NO: 491547 - DNA, 15 bp, Homo sapiens
aatcccacgcttctc

SEQ ID NO: 491548 - DNA, 15 bp, Homo sapiens
gaatcccacgcttct

SEQ ID NO: 491549 - DNA, 15 bp, Homo sapiens
tgaatcccacgcttc

SEQ ID NO: 491550 - DNA, 15 bp, Homo sapiens
ttgaatcccacgctt

SEQ ID NO: 491551 - DNA, 15 bp, Homo sapiens
tttgaatcccacgct

SEQ ID NO: 491552 - DNA, 15 bp, Homo sapiens
gtttgaatcccacgc

SEQ ID NO: 491553 - DNA, 15 bp, Homo sapiens
tgtttgaatcccacg

SEQ ID NO: 491554 - DNA, 15 bp, Homo sapiens
atgtttgaatcccac

SEQ ID NO: 491555 - DNA, 15 bp, Homo sapiens
aatgtttgaatccca

SEQ ID NO: 491556 - DNA, 15 bp, Homo sapiens
gaatgtttgaatccc

SEQ ID NO: 491557 - DNA, 15 bp, Homo sapiens
tgaatgtttgaatcc

SEQ ID NO: 491558 - DNA, 15 bp, Homo sapiens
atgaatgtttgaatc

SEQ ID NO: 491559 - DNA, 15 bp, Homo sapiens
catgaatgtttgaat

SEQ ID NO: 491560 - DNA, 15 bp, Homo sapiens
tcatgaatgtttgaa

SEQ ID NO: 491561 - DNA, 15 bp, Homo sapiens
ctcatgaatgtttga

SEQ ID NO: 491562 - DNA, 15 bp, Homo sapiens
tctcatgaatgtttg

SEQ ID NO: 491563 - DNA, 15 bp, Homo sapiens
ctctcatgaatgttt

SEQ ID NO: 491564 - DNA, 15 bp, Homo sapiens
cctctcatgaatgtt

SEQ ID NO: 491565 - DNA, 15 bp, Homo sapiens
ccctctcatgaatgt

SEQ ID NO: 491566 - DNA, 15 bp, Homo sapiens
tccctctcatgaatg

SEQ ID NO: 491567 - DNA, 15 bp, Homo sapiens
ctccctctcatgaat

SEQ ID NO: 491568 - DNA, 15 bp, Homo sapiens
gctccctctcatgaa

SEQ ID NO: 491569 - DNA, 15 bp, Homo sapiens
ggctccctctcatga

SEQ ID NO: 491570 - DNA, 15 bp, Homo sapiens
aggctccctctcatg

SEQ ID NO: 491571 - DNA, 15 bp, Homo sapiens
gaggctccctctcat

SEQ ID NO: 491572 - DNA, 15 bp, Homo sapiens
agaggctccctctca

SEQ ID NO: 491573 - DNA, 15 bp, Homo sapiens
cagaggctccctctc

SEQ ID NO: 491574 - DNA, 15 bp, Homo sapiens
ccagaggctccctct

SEQ ID NO: 491575 - DNA, 15 bp, Homo sapiens
gccagaggctccctc

SEQ ID NO: 491576 - DNA, 15 bp, Homo sapiens
tgccagaggctccct

SEQ ID NO: 491577 - DNA, 15 bp, Homo sapiens
ctgccagaggctccc

SEQ ID NO: 491578 - DNA, 15 bp, Homo sapiens
tctgccagaggctcc

SEQ ID NO: 491579 - DNA, 15 bp, Homo sapiens
ctctgccagaggctc

SEQ ID NO: 491580 - DNA, 15 bp, Homo sapiens
cctctgccagaggct

SEQ ID NO: 491581 - DNA, 15 bp, Homo sapiens
acctctgccagaggc

SEQ ID NO: 491582 - DNA, 15 bp, Homo sapiens
cacctctgccagagg

SEQ ID NO: 491583 - DNA, 15 bp, Homo sapiens
tcacctctgccagag

SEQ ID NO: 491584 - DNA, 15 bp, Homo sapiens
ttcacctctgccaga

SEQ ID NO: 491585 - DNA, 15 bp, Homo sapiens
tttcacctctgccag

SEQ ID NO: 491586 - DNA, 15 bp, Homo sapiens
ttttcacctctgcca

SEQ ID NO: 491587 - DNA, 15 bp, Homo sapiens
cttttcacctctgcc

SEQ ID NO: 491588 - DNA, 15 bp, Homo sapiens
tcttttcacctctgc

SEQ ID NO: 491589 - DNA, 15 bp, Homo sapiens
gtcttttcacctctg

SEQ ID NO: 491590 - DNA, 15 bp, Homo sapiens
ggtcttttcacctct

SEQ ID NO: 491591 - DNA, 15 bp, Homo sapiens
cggtcttttcacctc

SEQ ID NO: 491592 - DNA, 15 bp, Homo sapiens
ccggtcttttcacct

SEQ ID NO: 491593 - DNA, 15 bp, Homo sapiens
gccggtcttttcacc

SEQ ID NO: 491594 - DNA, 15 bp, Homo sapiens
tgccggtcttttcac

SEQ ID NO: 491595 - DNA, 15 bp, Homo sapiens
ctgccggtcttttca

SEQ ID NO: 491596 - DNA, 15 bp, Homo sapiens
cctgccggtcttttc

SEQ ID NO: 491597 - DNA, 15 bp, Homo sapiens
ccctgccggtctttt

SEQ ID NO: 491598 - DNA, 15 bp, Homo sapiens
cccctgccggtcttt

SEQ ID NO: 491599 - DNA, 15 bp, Homo sapiens
ccccctgccggtctt

SEQ ID NO: 491600 - DNA, 15 bp, Homo sapiens
gccccctgccggtct

SEQ ID NO: 491601 - DNA, 15 bp, Homo sapiens
cgccccctgccggtc

SEQ ID NO: 491602 - DNA, 15 bp, Homo sapiens
tcgccccctgccggt

SEQ ID NO: 491603 - DNA, 15 bp, Homo sapiens
ctcgccccctgccgg

SEQ ID NO: 491604 - DNA, 15 bp, Homo sapiens
tctcgccccctgccg

SEQ ID NO: 491605 - DNA, 15 bp, Homo sapiens
ctctcgccccctgcc

SEQ ID NO: 491606 - DNA, 15 bp, Homo sapiens
cctctcgccccctgc

SEQ ID NO: 491607 - DNA, 15 bp, Homo sapiens
gcctctcgccccctg

SEQ ID NO: 491608 - DNA, 15 bp, Homo sapiens
cgcctctcgccccct

SEQ ID NO: 491609 - DNA, 15 bp, Homo sapiens
ccgcctctcgccccc

SEQ ID NO: 491610 - DNA, 15 bp, Homo sapiens
cccgcctctcgcccc

SEQ ID NO: 491611 - DNA, 15 bp, Homo sapiens
tcccgcctctcgccc

SEQ ID NO: 491612 - DNA, 15 bp, Homo sapiens
ctcccgcctctcgcc

SEQ ID NO: 491613 - DNA, 15 bp, Homo sapiens
actcccgcctctcgc

SEQ ID NO: 491614 - DNA, 15 bp, Homo sapiens
gactcccgcctctcg

SEQ ID NO: 491615 - DNA, 15 bp, Homo sapiens
tgactcccgcctctc

SEQ ID NO: 491616 - DNA, 15 bp, Homo sapiens
ttgactcccgcctct

SEQ ID NO: 491617 - DNA, 15 bp, Homo sapiens
cttgactcccgcctc

SEQ ID NO: 491618 - DNA, 15 bp, Homo sapiens
tcttgactcccgcct

SEQ ID NO: 491619 - DNA, 15 bp, Homo sapiens
gtcttgactcccgcc

SEQ ID NO: 491620 - DNA, 15 bp, Homo sapiens
agtcttgactcccgc

SEQ ID NO: 491621 - DNA, 15 bp, Homo sapiens
cagtcttgactcccg

SEQ ID NO: 491622 - DNA, 15 bp, Homo sapiens
acagtcttgactccc

SEQ ID NO: 491623 - DNA, 15 bp, Homo sapiens
gacagtcttgactcc

SEQ ID NO: 491624 - DNA, 15 bp, Homo sapiens
ggacagtcttgactc

SEQ ID NO: 491625 - DNA, 15 bp, Homo sapiens
tggacagtcttgact

SEQ ID NO: 491626 - DNA, 15 bp, Homo sapiens
atggacagtcttgac

SEQ ID NO: 491627 - DNA, 15 bp, Homo sapiens
aatggacagtcttga

SEQ ID NO: 491628 - DNA, 15 bp, Homo sapiens
caatggacagtcttg

SEQ ID NO: 491629 - DNA, 15 bp, Homo sapiens
ccaatggacagtctt

SEQ ID NO: 491630 - DNA, 15 bp, Homo sapiens
accaatggacagtct

SEQ ID NO: 491631 - DNA, 15 bp, Homo sapiens
gaccaatggacagtc

SEQ ID NO: 491632 - DNA, 15 bp, Homo sapiens
cgaccaatggacagt

SEQ ID NO: 491633 - DNA, 15 bp, Homo sapiens
ccgaccaatggacag

SEQ ID NO: 491634 - DNA, 15 bp, Homo sapiens
gccgaccaatggaca

SEQ ID NO: 491635 - DNA, 15 bp, Homo sapiens
cgccgaccaatggac

SEQ ID NO: 491636 - DNA, 15 bp, Homo sapiens
acgccgaccaatgga

SEQ ID NO: 491637 - DNA, 15 bp, Homo sapiens
tacgccgaccaatgg

SEQ ID NO: 491638 - DNA, 15 bp, Homo sapiens
ttacgccgaccaatg

SEQ ID NO: 491639 - DNA, 15 bp, Homo sapiens
cttacgccgaccaat

SEQ ID NO: 491640 - DNA, 15 bp, Homo sapiens
tcttacgccgaccaa

SEQ ID NO: 491641 - DNA, 15 bp, Homo sapiens
ctcttacgccgacca

SEQ ID NO: 491642 - DNA, 15 bp, Homo sapiens
actcttacgccgacc

SEQ ID NO: 491643 - DNA, 15 bp, Homo sapiens
aactcttacgccgac

SEQ ID NO: 491644 - DNA, 15 bp, Homo sapiens
gaactcttacgccga

SEQ ID NO: 491645 - DNA, 15 bp, Homo sapiens
ggaactcttacgccg

SEQ ID NO: 491646 - DNA, 15 bp, Homo sapiens
aggaactcttacgcc

SEQ ID NO: 491647 - DNA, 15 bp, Homo sapiens
gaggaactcttacgc

SEQ ID NO: 491648 - DNA, 15 bp, Homo sapiens
ggaggaactcttacg

SEQ ID NO: 491649 - DNA, 15 bp, Homo sapiens
tggaggaactcttac

SEQ ID NO: 491650 - DNA, 15 bp, Homo sapiens
gtggaggaactctta

SEQ ID NO: 491651 - DNA, 15 bp, Homo sapiens
cgtggaggaactctt

SEQ ID NO: 491652 - DNA, 15 bp, Homo sapiens
acgtggaggaactct

SEQ ID NO: 491653 - DNA, 15 bp, Homo sapiens
cacgtggaggaactc

SEQ ID NO: 491654 - DNA, 15 bp, Homo sapiens
gcacgtggaggaact

SEQ ID NO: 491655 - DNA, 15 bp, Homo sapiens
ggcacgtggaggaac

SEQ ID NO: 491656 - DNA, 15 bp, Homo sapiens
aggcacgtggaggaa

SEQ ID NO: 491657 - DNA, 15 bp, Homo sapiens
caggcacgtggagga

SEQ ID NO: 491658 - DNA, 15 bp, Homo sapiens
ccaggcacgtggagg

SEQ ID NO: 491659 - DNA, 15 bp, Homo sapiens
gccaggcacgtggag

SEQ ID NO: 491660 - DNA, 15 bp, Homo sapiens
ggccaggcacgtgga

SEQ ID NO: 491661 - DNA, 15 bp, Homo sapiens
tggccaggcacgtgg

SEQ ID NO: 491662 - DNA, 15 bp, Homo sapiens
gtggccaggcacgtg

SEQ ID NO: 491663 - DNA, 15 bp, Homo sapiens
tgtggccaggcacgt

SEQ ID NO: 491664 - DNA, 15 bp, Homo sapiens
atgtggccaggcacg

SEQ ID NO: 491665 - DNA, 15 bp, Homo sapiens
gatgtggccaggcac

SEQ ID NO: 491666 - DNA, 15 bp, Homo sapiens
ggatgtggccaggca

SEQ ID NO: 491667 - DNA, 15 bp, Homo sapiens
tggatgtggccaggc

SEQ ID NO: 491668 - DNA, 15 bp, Homo sapiens
atggatgtggccagg

SEQ ID NO: 491669 - DNA, 15 bp, Homo sapiens
catggatgtggccag

SEQ ID NO: 491670 - DNA, 15 bp, Homo sapiens
ccatggatgtggcca

SEQ ID NO: 491671 - DNA, 15 bp, Homo sapiens
accatggatgtggcc

SEQ ID NO: 491672 - DNA, 15 bp, Homo sapiens
gaccatggatgtggc

SEQ ID NO: 491673 - DNA, 15 bp, Homo sapiens
agaccatggatgtgg

SEQ ID NO: 491674 - DNA, 15 bp, Homo sapiens
gagaccatggatgtg

SEQ ID NO: 491675 - DNA, 15 bp, Homo sapiens
tgagaccatggatgt

SEQ ID NO: 491676 - DNA, 15 bp, Homo sapiens
atgagaccatggatg

SEQ ID NO: 491677 - DNA, 15 bp, Homo sapiens
gatgagaccatggat

SEQ ID NO: 491678 - DNA, 15 bp, Homo sapiens
ggatgagaccatgga

SEQ ID NO: 491679 - DNA, 15 bp, Homo sapiens
tggatgagaccatgg

SEQ ID NO: 491680 - DNA, 15 bp, Homo sapiens
ctggatgagaccatg

SEQ ID NO: 491681 - DNA, 15 bp, Homo sapiens
cctggatgagaccat

SEQ ID NO: 491682 - DNA, 15 bp, Homo sapiens
acctggatgagacca

SEQ ID NO: 491683 - DNA, 15 bp, Homo sapiens
gacctggatgagacc

SEQ ID NO: 491684 - DNA, 15 bp, Homo sapiens
cgacctggatgagac

SEQ ID NO: 491685 - DNA, 15 bp, Homo sapiens
tcgacctggatgaga

SEQ ID NO: 491686 - DNA, 15 bp, Homo sapiens
ttcgacctggatgag

SEQ ID NO: 491687 - DNA, 15 bp, Homo sapiens
attcgacctggatga

SEQ ID NO: 491688 - DNA, 15 bp, Homo sapiens
aattcgacctggatg

SEQ ID NO: 491689 - DNA, 15 bp, Homo sapiens
gaattcgacctggat

SEQ ID NO: 491690 - DNA, 15 bp, Homo sapiens
agaattcgacctgga

SEQ ID NO: 491691 - DNA, 15 bp, Homo sapiens
gagaattcgacctgg

SEQ ID NO: 491692 - DNA, 15 bp, Homo sapiens
ggagaattcgacctg

SEQ ID NO: 491693 - DNA, 15 bp, Homo sapiens
tggagaattcgacct

SEQ ID NO: 491694 - DNA, 15 bp, Homo sapiens
atggagaattcgacc

SEQ ID NO: 491695 - DNA, 15 bp, Homo sapiens
gatggagaattcgac

SEQ ID NO: 491696 - DNA, 15 bp, Homo sapiens
ggatggagaattcga

SEQ ID NO: 491697 - DNA, 15 bp, Homo sapiens
aggatggagaattcg

SEQ ID NO: 491698 - DNA, 15 bp, Homo sapiens
caggatggagaattc

SEQ ID NO: 491699 - DNA, 15 bp, Homo sapiens
tcaggatggagaatt

SEQ ID NO: 491700 - DNA, 15 bp, Homo sapiens
atcaggatggagaat

SEQ ID NO: 491701 - DNA, 15 bp, Homo sapiens
gatcaggatggagaa

SEQ ID NO: 491702 - DNA, 15 bp, Homo sapiens
cgatcaggatggaga

SEQ ID NO: 491703 - DNA, 15 bp, Homo sapiens
tcgatcaggatggag

SEQ ID NO: 491704 - DNA, 15 bp, Homo sapiens
ctcgatcaggatgga

SEQ ID NO: 491705 - DNA, 15 bp, Homo sapiens
actcgatcaggatgg

SEQ ID NO: 491706 - DNA, 15 bp, Homo sapiens
tactcgatcaggatg

SEQ ID NO: 491707 - DNA, 15 bp, Homo sapiens
gtactcgatcaggat

SEQ ID NO: 491708 - DNA, 15 bp, Homo sapiens
tgtactcgatcagga

SEQ ID NO: 491709 - DNA, 15 bp, Homo sapiens
atgtactcgatcagg

SEQ ID NO: 491710 - DNA, 15 bp, Homo sapiens
catgtactcgatcag

SEQ ID NO: 491711 - DNA, 15 bp, Homo sapiens
ccatgtactcgatca

SEQ ID NO: 491712 - DNA, 15 bp, Homo sapiens
accatgtactcgatc

SEQ ID NO: 491713 - DNA, 15 bp, Homo sapiens
gaccatgtactcgat

SEQ ID NO: 491714 - DNA, 15 bp, Homo sapiens
tgaccatgtactcga

SEQ ID NO: 491715 - DNA, 15 bp, Homo sapiens
ctgaccatgtactcg

SEQ ID NO: 491716 - DNA, 15 bp, Homo sapiens
cctgaccatgtactc

SEQ ID NO: 491717 - DNA, 15 bp, Homo sapiens
ccctgaccatgtact

SEQ ID NO: 491718 - DNA, 15 bp, Homo sapiens
gccctgaccatgtac

SEQ ID NO: 491719 - DNA, 15 bp, Homo sapiens
agccctgaccatgta

SEQ ID NO: 491720 - DNA, 15 bp, Homo sapiens
cagccctgaccatgt

SEQ ID NO: 491721 - DNA, 15 bp, Homo sapiens
ccagccctgaccatg

SEQ ID NO: 491722 - DNA, 15 bp, Homo sapiens
accagccctgaccat

SEQ ID NO: 491723 - DNA, 15 bp, Homo sapiens
taccagccctgacca

SEQ ID NO: 491724 - DNA, 15 bp, Homo sapiens
ttaccagccctgacc

SEQ ID NO: 491725 - DNA, 15 bp, Homo sapiens
tttaccagccctgac

SEQ ID NO: 491726 - DNA, 15 bp, Homo sapiens
ctttaccagccctga

SEQ ID NO: 491727 - DNA, 15 bp, Homo sapiens
tctttaccagccctg

SEQ ID NO: 491728 - DNA, 15 bp, Homo sapiens
gtctttaccagccct

SEQ ID NO: 491729 - DNA, 15 bp, Homo sapiens
tgtctttaccagccc

SEQ ID NO: 491730 - DNA, 15 bp, Homo sapiens
ctgtctttaccagcc

SEQ ID NO: 491731 - DNA, 15 bp, Homo sapiens
cctgtctttaccagc

SEQ ID NO: 491732 - DNA, 15 bp, Homo sapiens
ccctgtctttaccag

SEQ ID NO: 491733 - DNA, 15 bp, Homo sapiens
cccctgtctttacca

SEQ ID NO: 491734 - DNA, 15 bp, Homo sapiens
ccccctgtctttacc

SEQ ID NO: 491735 - DNA, 15 bp, Homo sapiens
tccccctgtctttac

SEQ ID NO: 491736 - DNA, 15 bp, Homo sapiens
atccccctgtcttta

SEQ ID NO: 491737 - DNA, 15 bp, Homo sapiens
catccccctgtcttt

SEQ ID NO: 491738 - DNA, 15 bp, Homo sapiens
acatccccctgtctt

SEQ ID NO: 491739 - DNA, 15 bp, Homo sapiens
gacatccccctgtct

SEQ ID NO: 491740 - DNA, 15 bp, Homo sapiens
tgacatccccctgtc

SEQ ID NO: 491741 - DNA, 15 bp, Homo sapiens
ctgacatccccctgt

SEQ ID NO: 491742 - DNA, 15 bp, Homo sapiens
tctgacatccccctg

SEQ ID NO: 491743 - DNA, 15 bp, Homo sapiens
ctctgacatccccct

SEQ ID NO: 491744 - DNA, 15 bp, Homo sapiens
cctctgacatccccc

SEQ ID NO: 491745 - DNA, 15 bp, Homo sapiens
ccctctgacatcccc

SEQ ID NO: 491746 - DNA, 15 bp, Homo sapiens
tccctctgacatccc

SEQ ID NO: 491747 - DNA, 15 bp, Homo sapiens
ctccctctgacatcc

SEQ ID NO: 491748 - DNA, 15 bp, Homo sapiens
gctccctctgacatc

SEQ ID NO: 491749 - DNA, 15 bp, Homo sapiens
agctccctctgacat

SEQ ID NO: 491750 - DNA, 15 bp, Homo sapiens
cagctccctctgaca

SEQ ID NO: 491751 - DNA, 15 bp, Homo sapiens
ccagctccctctgac

SEQ ID NO: 491752 - DNA, 15 bp, Homo sapiens
gccagctccctctga

SEQ ID NO: 491753 - DNA, 15 bp, Homo sapiens
tgccagctccctctg

SEQ ID NO: 491754 - DNA, 15 bp, Homo sapiens
atgccagctccctct

SEQ ID NO: 491755 - DNA, 15 bp, Homo sapiens
catgccagctccctc

SEQ ID NO: 491756 - DNA, 15 bp, Homo sapiens
acatgccagctccct

SEQ ID NO: 491757 - DNA, 15 bp, Homo sapiens
gacatgccagctccc

SEQ ID NO: 491758 - DNA, 15 bp, Homo sapiens
agacatgccagctcc

SEQ ID NO: 491759 - DNA, 15 bp, Homo sapiens
gagacatgccagctc

SEQ ID NO: 491760 - DNA, 15 bp, Homo sapiens
tgagacatgccagct

SEQ ID NO: 491761 - DNA, 15 bp, Homo sapiens
gtgagacatgccagc

SEQ ID NO: 491762 - DNA, 15 bp, Homo sapiens
tgtgagacatgccag

SEQ ID NO: 491763 - DNA, 15 bp, Homo sapiens
ctgtgagacatgcca

SEQ ID NO: 491764 - DNA, 15 bp, Homo sapiens
gctgtgagacatgcc

SEQ ID NO: 491765 - DNA, 15 bp, Homo sapiens
ggctgtgagacatgc

SEQ ID NO: 491766 - DNA, 15 bp, Homo sapiens
aggctgtgagacatg

SEQ ID NO: 491767 - DNA, 15 bp, Homo sapiens
gaggctgtgagacat

SEQ ID NO: 491768 - DNA, 15 bp, Homo sapiens
tgaggctgtgagaca

SEQ ID NO: 491769 - DNA, 15 bp, Homo sapiens
ttgaggctgtgagac

SEQ ID NO: 491770 - DNA, 15 bp, Homo sapiens
cttgaggctgtgaga

SEQ ID NO: 491771 - DNA, 15 bp, Homo sapiens
gcttgaggctgtgag

SEQ ID NO: 491772 - DNA, 15 bp, Homo sapiens
agcttgaggctgtga

SEQ ID NO: 491773 - DNA, 15 bp, Homo sapiens
gagcttgaggctgtg

SEQ ID NO: 491774 - DNA, 15 bp, Homo sapiens
ggagcttgaggctgt

SEQ ID NO: 491775 - DNA, 15 bp, Homo sapiens
gggagcttgaggctg

SEQ ID NO: 491776 - DNA, 15 bp, Homo sapiens
agggagcttgaggct

SEQ ID NO: 491777 - DNA, 15 bp, Homo sapiens
cagggagcttgaggc

SEQ ID NO: 491778 - DNA, 15 bp, Homo sapiens
ccagggagcttgagg

SEQ ID NO: 491779 - DNA, 15 bp, Homo sapiens
cccagggagcttgag

SEQ ID NO: 491780 - DNA, 15 bp, Homo sapiens
ccccagggagcttga

SEQ ID NO: 491781 - DNA, 15 bp, Homo sapiens
tccccagggagcttg

SEQ ID NO: 491782 - DNA, 15 bp, Homo sapiens
gtccccagggagctt

SEQ ID NO: 491783 - DNA, 15 bp, Homo sapiens
tgtccccagggagct

SEQ ID NO: 491784 - DNA, 15 bp, Homo sapiens
ctgtccccagggagc

SEQ ID NO: 491785 - DNA, 15 bp, Homo sapiens
gctgtccccagggag

SEQ ID NO: 491786 - DNA, 15 bp, Homo sapiens
ggctgtccccaggga

SEQ ID NO: 491787 - DNA, 15 bp, Homo sapiens
aggctgtccccaggg

SEQ ID NO: 491788 - DNA, 15 bp, Homo sapiens
gaggctgtccccagg

SEQ ID NO: 491789 - DNA, 15 bp, Homo sapiens
ggaggctgtccccag

SEQ ID NO: 491790 - DNA, 15 bp, Homo sapiens
tggaggctgtcccca

SEQ ID NO: 491791 - DNA, 15 bp, Homo sapiens
ctggaggctgtcccc

SEQ ID NO: 491792 - DNA, 15 bp, Homo sapiens
gctggaggctgtccc

SEQ ID NO: 491793 - DNA, 15 bp, Homo sapiens
ggctggaggctgtcc

SEQ ID NO: 491794 - DNA, 15 bp, Homo sapiens
aggctggaggctgtc

SEQ ID NO: 491795 - DNA, 15 bp, Homo sapiens
caggctggaggctgt

SEQ ID NO: 491796 - DNA, 15 bp, Homo sapiens
gcaggctggaggctg

SEQ ID NO: 491797 - DNA, 15 bp, Homo sapiens
agcaggctggaggct

SEQ ID NO: 491798 - DNA, 15 bp, Homo sapiens
gagcaggctggaggc

SEQ ID NO: 491799 - DNA, 15 bp, Homo sapiens
agagcaggctggagg

SEQ ID NO: 491800 - DNA, 15 bp, Homo sapiens
gagagcaggctggag

SEQ ID NO: 491801 - DNA, 15 bp, Homo sapiens
ggagagcaggctgga

SEQ ID NO: 491802 - DNA, 15 bp, Homo sapiens
tggagagcaggctgg

SEQ ID NO: 491803 - DNA, 15 bp, Homo sapiens
gtggagagcaggctg

SEQ ID NO: 491804 - DNA, 15 bp, Homo sapiens
agtggagagcaggct

SEQ ID NO: 491805 - DNA, 15 bp, Homo sapiens
gagtggagagcaggc

SEQ ID NO: 491806 - DNA, 15 bp, Homo sapiens
tgagtggagagcagg

SEQ ID NO: 491807 - DNA, 15 bp, Homo sapiens
ttgagtggagagcag

SEQ ID NO: 491808 - DNA, 15 bp, Homo sapiens
tttgagtggagagca

SEQ ID NO: 491809 - DNA, 15 bp, Homo sapiens
gtttgagtggagagc

SEQ ID NO: 491810 - DNA, 15 bp, Homo sapiens
ggtttgagtggagag

SEQ ID NO: 491811 - DNA, 15 bp, Homo sapiens
gggtttgagtggaga

SEQ ID NO: 491812 - DNA, 15 bp, Homo sapiens
cgggtttgagtggag

SEQ ID NO: 491813 - DNA, 15 bp, Homo sapiens
acgggtttgagtgga

SEQ ID NO: 491814 - DNA, 15 bp, Homo sapiens
gacgggtttgagtgg

SEQ ID NO: 491815 - DNA, 15 bp, Homo sapiens
agacgggtttgagtg

SEQ ID NO: 491816 - DNA, 15 bp, Homo sapiens
gagacgggtttgagt

SEQ ID NO: 491817 - DNA, 15 bp, Homo sapiens
tgagacgggtttgag

SEQ ID NO: 491818 - DNA, 15 bp, Homo sapiens
atgagacgggtttga

SEQ ID NO: 491819 - DNA, 15 bp, Homo sapiens
catgagacgggtttg

SEQ ID NO: 491820 - DNA, 15 bp, Homo sapiens
tcatgagacgggttt

SEQ ID NO: 491821 - DNA, 15 bp, Homo sapiens
ctcatgagacgggtt

SEQ ID NO: 491822 - DNA, 15 bp, Homo sapiens
tctcatgagacgggt

SEQ ID NO: 491823 - DNA, 15 bp, Homo sapiens
ttctcatgagacggg

SEQ ID NO: 491824 - DNA, 15 bp, Homo sapiens
gttctcatgagacgg

SEQ ID NO: 491825 - DNA, 15 bp, Homo sapiens
tgttctcatgagacg

SEQ ID NO: 491826 - DNA, 15 bp, Homo sapiens
ctgttctcatgagac

SEQ ID NO: 491827 - DNA, 15 bp, Homo sapiens
cctgttctcatgaga

SEQ ID NO: 491828 - DNA, 15 bp, Homo sapiens
tcctgttctcatgag

SEQ ID NO: 491829 - DNA, 15 bp, Homo sapiens
gtcctgttctcatga

SEQ ID NO: 491830 - DNA, 15 bp, Homo sapiens
ggtcctgttctcatg

SEQ ID NO: 491831 - DNA, 15 bp, Homo sapiens
tggtcctgttctcat

SEQ ID NO: 491832 - DNA, 15 bp, Homo sapiens
ctggtcctgttctca

SEQ ID NO: 491833 - DNA, 15 bp, Homo sapiens
actggtcctgttctc

SEQ ID NO: 491834 - DNA, 15 bp, Homo sapiens
aactggtcctgttct

SEQ ID NO: 491835 - DNA, 15 bp, Homo sapiens
gaactggtcctgttc

SEQ ID NO: 491836 - DNA, 15 bp, Homo sapiens
agaactggtcctgtt

SEQ ID NO: 491837 - DNA, 15 bp, Homo sapiens
cagaactggtcctgt

SEQ ID NO: 491838 - DNA, 15 bp, Homo sapiens
ccagaactggtcctg

SEQ ID NO: 491839 - DNA, 15 bp, Homo sapiens
gccagaactggtcct

SEQ ID NO: 491840 - DNA, 15 bp, Homo sapiens
agccagaactggtcc

SEQ ID NO: 491841 - DNA, 15 bp, Homo sapiens
cagccagaactggtc

SEQ ID NO: 491842 - DNA, 15 bp, Homo sapiens
ccagccagaactggt

SEQ ID NO: 491843 - DNA, 15 bp, Homo sapiens
tccagccagaactgg

SEQ ID NO: 491844 - DNA, 15 bp, Homo sapiens
atccagccagaactg

SEQ ID NO: 491845 - DNA, 15 bp, Homo sapiens
catccagccagaact

SEQ ID NO: 491846 - DNA, 15 bp, Homo sapiens
gcatccagccagaac

SEQ ID NO: 491847 - DNA, 15 bp, Homo sapiens
ggcatccagccagaa

SEQ ID NO: 491848 - DNA, 15 bp, Homo sapiens
gggcatccagccaga

SEQ ID NO: 491849 - DNA, 15 bp, Homo sapiens
ggggcatccagccag

SEQ ID NO: 491850 - DNA, 15 bp, Homo sapiens
gggggcatccagcca

SEQ ID NO: 491851 - DNA, 15 bp, Homo sapiens
tgggggcatccagcc

SEQ ID NO: 491852 - DNA, 15 bp, Homo sapiens
gtgggggcatccagc

SEQ ID NO: 491853 - DNA, 15 bp, Homo sapiens
ggtgggggcatccag

SEQ ID NO: 491854 - DNA, 15 bp, Homo sapiens
gggtgggggcatcca

SEQ ID NO: 491855 - DNA, 15 bp, Homo sapiens
ggggtgggggcatcc

SEQ ID NO: 491856 - DNA, 15 bp, Homo sapiens
tggggtgggggcatc

SEQ ID NO: 491857 - DNA, 15 bp, Homo sapiens
gtggggtgggggcat

SEQ ID NO: 491858 - DNA, 15 bp, Homo sapiens
ggtggggtgggggca

SEQ ID NO: 491859 - DNA, 15 bp, Homo sapiens
gggtggggtgggggc

SEQ ID NO: 491860 - DNA, 15 bp, Homo sapiens
ttggggtggggtggg

SEQ ID NO: 491861 - DNA, 15 bp, Homo sapiens
cttggggtggggtgg

SEQ ID NO: 491862 - DNA, 15 bp, Homo sapiens
gcttggggtggggtg

SEQ ID NO: 491863 - DNA, 15 bp, Homo sapiens
agcttggggtggggt

SEQ ID NO: 491864 - DNA, 15 bp, Homo sapiens
cagcttggggtgggg

SEQ ID NO: 491865 - DNA, 15 bp, Homo sapiens
ccagcttggggtggg

SEQ ID NO: 491866 - DNA, 15 bp, Homo sapiens
cccagcttggggtgg

SEQ ID NO: 491867 - DNA, 15 bp, Homo sapiens
acccagcttggggtg

SEQ ID NO: 491868 - DNA, 15 bp, Homo sapiens
tacccagcttggggt

SEQ ID NO: 491869 - DNA, 15 bp, Homo sapiens
ctacccagcttgggg

SEQ ID NO: 491870 - DNA, 15 bp, Homo sapiens
gctacccagcttggg

SEQ ID NO: 491871 - DNA, 15 bp, Homo sapiens
tgctacccagcttgg

SEQ ID NO: 491872 - DNA, 15 bp, Homo sapiens
ctgctacccagcttg

SEQ ID NO: 491873 - DNA, 15 bp, Homo sapiens
actgctacccagctt

SEQ ID NO: 491874 - DNA, 15 bp, Homo sapiens
gactgctacccagct

SEQ ID NO: 491875 - DNA, 15 bp, Homo sapiens
tgactgctacccagc

SEQ ID NO: 491876 - DNA, 15 bp, Homo sapiens
ctgactgctacccag

SEQ ID NO: 491877 - DNA, 15 bp, Homo sapiens
gctgactgctaccca

SEQ ID NO: 491878 - DNA, 15 bp, Homo sapiens
ggctgactgctaccc

SEQ ID NO: 491879 - DNA, 15 bp, Homo sapiens
gggctgactgctacc

SEQ ID NO: 491880 - DNA, 15 bp, Homo sapiens
tgggctgactgctac

SEQ ID NO: 491881 - DNA, 15 bp, Homo sapiens
gtgggctgactgcta

SEQ ID NO: 491882 - DNA, 15 bp, Homo sapiens
agtgggctgactgct

SEQ ID NO: 491883 - DNA, 15 bp, Homo sapiens
cagtgggctgactgc

SEQ ID NO: 491884 - DNA, 15 bp, Homo sapiens
ccagtgggctgactg

SEQ ID NO: 491885 - DNA, 15 bp, Homo sapiens
gccagtgggctgact

SEQ ID NO: 491886 - DNA, 15 bp, Homo sapiens
agccagtgggctgac

SEQ ID NO: 491887 - DNA, 15 bp, Homo sapiens
aagccagtgggctga

SEQ ID NO: 491888 - DNA, 15 bp, Homo sapiens
gaagccagtgggctg

SEQ ID NO: 491889 - DNA, 15 bp, Homo sapiens
agaagccagtgggct

SEQ ID NO: 491890 - DNA, 15 bp, Homo sapiens
cagaagccagtgggc

SEQ ID NO: 491891 - DNA, 15 bp, Homo sapiens
gcagaagccagtggg

SEQ ID NO: 491892 - DNA, 15 bp, Homo sapiens
tgcagaagccagtgg

SEQ ID NO: 491893 - DNA, 15 bp, Homo sapiens
ctgcagaagccagtg

SEQ ID NO: 491894 - DNA, 15 bp, Homo sapiens
tctgcagaagccagt

SEQ ID NO: 491895 - DNA, 15 bp, Homo sapiens
gtctgcagaagccag

SEQ ID NO: 491896 - DNA, 15 bp, Homo sapiens
ggtctgcagaagcca

SEQ ID NO: 491897 - DNA, 15 bp, Homo sapiens
gggtctgcagaagcc

SEQ ID NO: 491898 - DNA, 15 bp, Homo sapiens
ggggtctgcagaagc

SEQ ID NO: 491899 - DNA, 15 bp, Homo sapiens
gggggtctgcagaag

SEQ ID NO: 491900 - DNA, 15 bp, Homo sapiens
tgggggtctgcagaa

SEQ ID NO: 491901 - DNA, 15 bp, Homo sapiens
gtgggggtctgcaga

SEQ ID NO: 491902 - DNA, 15 bp, Homo sapiens
agtgggggtctgcag

SEQ ID NO: 491903 - DNA, 15 bp, Homo sapiens
gagtgggggtctgca

SEQ ID NO: 491904 - DNA, 15 bp, Homo sapiens
agagtgggggtctgc

SEQ ID NO: 491905 - DNA, 15 bp, Homo sapiens
tagagtgggggtctg

SEQ ID NO: 491906 - DNA, 15 bp, Homo sapiens
atagagtgggggtct

SEQ ID NO: 491907 - DNA, 15 bp, Homo sapiens
aatagagtgggggtc

SEQ ID NO: 491908 - DNA, 15 bp, Homo sapiens
gaatagagtgggggt

SEQ ID NO: 491909 - DNA, 15 bp, Homo sapiens
cgaatagagtggggg

SEQ ID NO: 491910 - DNA, 15 bp, Homo sapiens
gcgaatagagtgggg

SEQ ID NO: 491911 - DNA, 15 bp, Homo sapiens
tgcgaatagagtggg

SEQ ID NO: 491912 - DNA, 15 bp, Homo sapiens
atgcgaatagagtgg

SEQ ID NO: 491913 - DNA, 15 bp, Homo sapiens
gatgcgaatagagtg

SEQ ID NO: 491914 - DNA, 15 bp, Homo sapiens
agatgcgaatagagt

SEQ ID NO: 491915 - DNA, 15 bp, Homo sapiens
gagatgcgaatagag

SEQ ID NO: 491916 - DNA, 15 bp, Homo sapiens
agagatgcgaataga

SEQ ID NO: 491917 - DNA, 15 bp, Homo sapiens
aagagatgcgaatag

SEQ ID NO: 491918 - DNA, 15 bp, Homo sapiens
caagagatgcgaata

SEQ ID NO: 491919 - DNA, 15 bp, Homo sapiens
gcaagagatgcgaat

SEQ ID NO: 491920 - DNA, 15 bp, Homo sapiens
agcaagagatgcgaa

SEQ ID NO: 491921 - DNA, 15 bp, Homo sapiens
tagcaagagatgcga

SEQ ID NO: 491922 - DNA, 15 bp, Homo sapiens
ttagcaagagatgcg

SEQ ID NO: 491923 - DNA, 15 bp, Homo sapiens
gttagcaagagatgc

SEQ ID NO: 491924 - DNA, 15 bp, Homo sapiens
agttagcaagagatg

SEQ ID NO: 491925 - DNA, 15 bp, Homo sapiens
gagttagcaagagat

SEQ ID NO: 491926 - DNA, 15 bp, Homo sapiens
tgagttagcaagaga

SEQ ID NO: 491927 - DNA, 15 bp, Homo sapiens
gtgagttagcaagag

SEQ ID NO: 491928 - DNA, 15 bp, Homo sapiens
agtgagttagcaaga

SEQ ID NO: 491929 - DNA, 15 bp, Homo sapiens
cagtgagttagcaag

SEQ ID NO: 491930 - DNA, 15 bp, Homo sapiens
tcagtgagttagcaa

SEQ ID NO: 491931 - DNA, 15 bp, Homo sapiens
ttcagtgagttagca

SEQ ID NO: 491932 - DNA, 15 bp, Homo sapiens
attcagtgagttagc

SEQ ID NO: 491933 - DNA, 15 bp, Homo sapiens
tattcagtgagttag

SEQ ID NO: 491934 - DNA, 15 bp, Homo sapiens
ttattcagtgagtta

SEQ ID NO: 491935 - DNA, 15 bp, Homo sapiens
attattcagtgagtt

SEQ ID NO: 491936 - DNA, 15 bp, Homo sapiens
gattattcagtgagt

SEQ ID NO: 491937 - DNA, 15 bp, Homo sapiens
agattattcagtgag

SEQ ID NO: 491938 - DNA, 15 bp, Homo sapiens
aagattattcagtga

SEQ ID NO: 491939 - DNA, 15 bp, Homo sapiens
taagattattcagtg

SEQ ID NO: 491940 - DNA, 15 bp, Homo sapiens
ctaagattattcagt

SEQ ID NO: 491941 - DNA, 15 bp, Homo sapiens
cctaagattattcag

SEQ ID NO: 491942 - DNA, 15 bp, Homo sapiens
ccctaagattattca

SEQ ID NO: 491943 - DNA, 15 bp, Homo sapiens
tccctaagattattc

SEQ ID NO: 491944 - DNA, 15 bp, Homo sapiens
ttccctaagattatt

SEQ ID NO: 491945 - DNA, 15 bp, Homo sapiens
attccctaagattat

SEQ ID NO: 491946 - DNA, 15 bp, Homo sapiens
aattccctaagatta

SEQ ID NO: 491947 - DNA, 15 bp, Homo sapiens
gaattccctaagatt

SEQ ID NO: 491948 - DNA, 15 bp, Homo sapiens
tgaattccctaagat

SEQ ID NO: 491949 - DNA, 15 bp, Homo sapiens
atgaattccctaaga

SEQ ID NO: 491950 - DNA, 15 bp, Homo sapiens
aatgaattccctaag

SEQ ID NO: 491951 - DNA, 15 bp, Homo sapiens
aaatgaattccctaa

SEQ ID NO: 491952 - DNA, 15 bp, Homo sapiens
gaaatgaattcccta

SEQ ID NO: 491953 - DNA, 15 bp, Homo sapiens
ggaaatgaattccct

SEQ ID NO: 491954 - DNA, 15 bp, Homo sapiens
gggaaatgaattccc

SEQ ID NO: 491955 - DNA, 15 bp, Homo sapiens
ggggaaatgaattcc

SEQ ID NO: 491956 - DNA, 15 bp, Homo sapiens
aggggaaatgaattc

SEQ ID NO: 491957 - DNA, 15 bp, Homo sapiens
gaggggaaatgaatt

SEQ ID NO: 491958 - DNA, 15 bp, Homo sapiens
agaggggaaatgaat

SEQ ID NO: 491959 - DNA, 15 bp, Homo sapiens
gagaggggaaatgaa

SEQ ID NO: 491960 - DNA, 15 bp, Homo sapiens
ggagaggggaaatga

SEQ ID NO: 491961 - DNA, 15 bp, Homo sapiens
cggagaggggaaatg

SEQ ID NO: 491962 - DNA, 15 bp, Homo sapiens
acggagaggggaaat

SEQ ID NO: 491963 - DNA, 15 bp, Homo sapiens
cacggagaggggaaa

SEQ ID NO: 491964 - DNA, 15 bp, Homo sapiens
acacggagaggggaa

SEQ ID NO: 491965 - DNA, 15 bp, Homo sapiens
gacacggagagggga

SEQ ID NO: 491966 - DNA, 15 bp, Homo sapiens
ggacacggagagggg

SEQ ID NO: 491967 - DNA, 15 bp, Homo sapiens
aggacacggagaggg

SEQ ID NO: 491968 - DNA, 15 bp, Homo sapiens
gaggacacggagagg

SEQ ID NO: 491969 - DNA, 15 bp, Homo sapiens
tgaggacacggagag

SEQ ID NO: 491970 - DNA, 15 bp, Homo sapiens
atgaggacacggaga

SEQ ID NO: 491971 - DNA, 15 bp, Homo sapiens
gatgaggacacggag

SEQ ID NO: 491972 - DNA, 15 bp, Homo sapiens
agatgaggacacgga

SEQ ID NO: 491973 - DNA, 15 bp, Homo sapiens
aagatgaggacacgg

SEQ ID NO: 491974 - DNA, 15 bp, Homo sapiens
taagatgaggacacg

SEQ ID NO: 491975 - DNA, 15 bp, Homo sapiens
ttaagatgaggacac

SEQ ID NO: 491976 - DNA, 15 bp, Homo sapiens
tttaagatgaggaca

SEQ ID NO: 491977 - DNA, 15 bp, Homo sapiens
ttttaagatgaggac

SEQ ID NO: 491978 - DNA, 15 bp, Homo sapiens
gttttaagatgagga

SEQ ID NO: 491979 - DNA, 15 bp, Homo sapiens
ggttttaagatgagg

SEQ ID NO: 491980 - DNA, 15 bp, Homo sapiens
tggttttaagatgag

SEQ ID NO: 491981 - DNA, 15 bp, Homo sapiens
ctggttttaagatga

SEQ ID NO: 491982 - DNA, 15 bp, Homo sapiens
cctggttttaagatg

SEQ ID NO: 491983 - DNA, 15 bp, Homo sapiens
acctggttttaagat

SEQ ID NO: 491984 - DNA, 15 bp, Homo sapiens
cacctggttttaaga

SEQ ID NO: 491985 - DNA, 15 bp, Homo sapiens
ccacctggttttaag

SEQ ID NO: 491986 - DNA, 15 bp, Homo sapiens
gccacctggttttaa

SEQ ID NO: 491987 - DNA, 15 bp, Homo sapiens
agccacctggtttta

SEQ ID NO: 491988 - DNA, 15 bp, Homo sapiens
cagccacctggtttt

SEQ ID NO: 491989 - DNA, 15 bp, Homo sapiens
tcagccacctggttt

SEQ ID NO: 491990 - DNA, 15 bp, Homo sapiens
gtcagccacctggtt

SEQ ID NO: 491991 - DNA, 15 bp, Homo sapiens
tgtcagccacctggt

SEQ ID NO: 491992 - DNA, 15 bp, Homo sapiens
gtgtcagccacctgg

SEQ ID NO: 491993 - DNA, 15 bp, Homo sapiens
tgtgtcagccacctg

SEQ ID NO: 491994 - DNA, 15 bp, Homo sapiens
ctgtgtcagccacct

SEQ ID NO: 491995 - DNA, 15 bp, Homo sapiens
actgtgtcagccacc

SEQ ID NO: 491996 - DNA, 15 bp, Homo sapiens
cactgtgtcagccac

SEQ ID NO: 491997 - DNA, 15 bp, Homo sapiens
ccactgtgtcagcca

SEQ ID NO: 491998 - DNA, 15 bp, Homo sapiens
cccactgtgtcagcc

SEQ ID NO: 491999 - DNA, 15 bp, Homo sapiens
gcccactgtgtcagc

SEQ ID NO: 492000 - DNA, 15 bp, Homo sapiens
agcccactgtgtcag

SEQ ID NO: 492001 - DNA, 15 bp, Homo sapiens
gagcccactgtgtca

SEQ ID NO: 492002 - DNA, 15 bp, Homo sapiens
agagcccactgtgtc

SEQ ID NO: 492003 - DNA, 15 bp, Homo sapiens
cagagcccactgtgt

SEQ ID NO: 492004 - DNA, 15 bp, Homo sapiens
gcagagcccactgtg

SEQ ID NO: 492005 - DNA, 15 bp, Homo sapiens
ggcagagcccactgt

SEQ ID NO: 492006 - DNA, 15 bp, Homo sapiens
gggcagagcccactg

SEQ ID NO: 492007 - DNA, 15 bp, Homo sapiens
tgggcagagcccact

SEQ ID NO: 492008 - DNA, 15 bp, Homo sapiens
gtgggcagagcccac

SEQ ID NO: 492009 - DNA, 15 bp, Homo sapiens
ggtgggcagagccca

SEQ ID NO: 492010 - DNA, 15 bp, Homo sapiens
aggtgggcagagccc

SEQ ID NO: 492011 - DNA, 15 bp, Homo sapiens
caggtgggcagagcc

SEQ ID NO: 492012 - DNA, 15 bp, Homo sapiens
gcaggtgggcagagc

SEQ ID NO: 492013 - DNA, 15 bp, Homo sapiens
tgcaggtgggcagag

SEQ ID NO: 492014 - DNA, 15 bp, Homo sapiens
ttgcaggtgggcaga

SEQ ID NO: 492015 - DNA, 15 bp, Homo sapiens
attgcaggtgggcag

SEQ ID NO: 492016 - DNA, 15 bp, Homo sapiens
cattgcaggtgggca

SEQ ID NO: 492017 - DNA, 15 bp, Homo sapiens
tcattgcaggtgggc

SEQ ID NO: 492018 - DNA, 15 bp, Homo sapiens
atcattgcaggtggg

SEQ ID NO: 492019 - DNA, 15 bp, Homo sapiens
catcattgcaggtgg

SEQ ID NO: 492020 - DNA, 15 bp, Homo sapiens
gcatcattgcaggtg

SEQ ID NO: 492021 - DNA, 15 bp, Homo sapiens
agcatcattgcaggt

SEQ ID NO: 492022 - DNA, 15 bp, Homo sapiens
gagcatcattgcagg

SEQ ID NO: 492023 - DNA, 15 bp, Homo sapiens
tgagcatcattgcag

SEQ ID NO: 492024 - DNA, 15 bp, Homo sapiens
ctgagcatcattgca

SEQ ID NO: 492025 - DNA, 15 bp, Homo sapiens
gctgagcatcattgc

SEQ ID NO: 492026 - DNA, 15 bp, Homo sapiens
agctgagcatcattg

SEQ ID NO: 492027 - DNA, 15 bp, Homo sapiens
cagctgagcatcatt

SEQ ID NO: 492028 - DNA, 15 bp, Homo sapiens
gcagctgagcatcat

SEQ ID NO: 492029 - DNA, 15 bp, Homo sapiens
tgcagctgagcatca

SEQ ID NO: 492030 - DNA, 15 bp, Homo sapiens
ttgcagctgagcatc

SEQ ID NO: 492031 - DNA, 15 bp, Homo sapiens
attgcagctgagcat

SEQ ID NO: 492032 - DNA, 15 bp, Homo sapiens
cattgcagctgagca

SEQ ID NO: 492033 - DNA, 15 bp, Homo sapiens
ccattgcagctgagc

SEQ ID NO: 492034 - DNA, 15 bp, Homo sapiens
accattgcagctgag

SEQ ID NO: 492035 - DNA, 15 bp, Homo sapiens
taccattgcagctga

SEQ ID NO: 492036 - DNA, 15 bp, Homo sapiens
ctaccattgcagctg

SEQ ID NO: 492037 - DNA, 15 bp, Homo sapiens
cctaccattgcagct

SEQ ID NO: 492038 - DNA, 15 bp, Homo sapiens
gcctaccattgcagc

SEQ ID NO: 492039 - DNA, 15 bp, Homo sapiens
tgcctaccattgcag

SEQ ID NO: 492040 - DNA, 15 bp, Homo sapiens
gtgcctaccattgca

SEQ ID NO: 492041 - DNA, 15 bp, Homo sapiens
ggtgcctaccattgc

SEQ ID NO: 492042 - DNA, 15 bp, Homo sapiens
cggtgcctaccattg

SEQ ID NO: 492043 - DNA, 15 bp, Homo sapiens
gcggtgcctaccatt

SEQ ID NO: 492044 - DNA, 15 bp, Homo sapiens
ggcggtgcctaccat

SEQ ID NO: 492045 - DNA, 15 bp, Homo sapiens
gggcggtgcctacca

SEQ ID NO: 492046 - DNA, 15 bp, Homo sapiens
ggggcggtgcctacc

SEQ ID NO: 492047 - DNA, 15 bp, Homo sapiens
cggggcggtgcctac

SEQ ID NO: 492048 - DNA, 15 bp, Homo sapiens
acggggcggtgccta

SEQ ID NO: 492049 - DNA, 15 bp, Homo sapiens
aacggggcggtgcct

SEQ ID NO: 492050 - DNA, 15 bp, Homo sapiens
gaacggggcggtgcc

SEQ ID NO: 492051 - DNA, 15 bp, Homo sapiens
tgaacggggcggtgc

SEQ ID NO: 492052 - DNA, 15 bp, Homo sapiens
gtgaacggggcggtg

SEQ ID NO: 492053 - DNA, 15 bp, Homo sapiens
agtgaacggggcggt

SEQ ID NO: 492054 - DNA, 15 bp, Homo sapiens
cagtgaacggggcgg

SEQ ID NO: 492055 - DNA, 15 bp, Homo sapiens
tcagtgaacggggcg

SEQ ID NO: 492056 - DNA, 15 bp, Homo sapiens
ctcagtgaacggggc

SEQ ID NO: 492057 - DNA, 15 bp, Homo sapiens
gctcagtgaacgggg

SEQ ID NO: 492058 - DNA, 15 bp, Homo sapiens
tgctcagtgaacggg

SEQ ID NO: 492059 - DNA, 15 bp, Homo sapiens
gtgctcagtgaacgg

SEQ ID NO: 492060 - DNA, 15 bp, Homo sapiens
agtgctcagtgaacg

SEQ ID NO: 492061 - DNA, 15 bp, Homo sapiens
aagtgctcagtgaac

SEQ ID NO: 492062 - DNA, 15 bp, Homo sapiens
taagtgctcagtgaa

SEQ ID NO: 492063 - DNA, 15 bp, Homo sapiens
ctaagtgctcagtga

SEQ ID NO: 492064 - DNA, 15 bp, Homo sapiens
tctaagtgctcagtg

SEQ ID NO: 492065 - DNA, 15 bp, Homo sapiens
ttctaagtgctcagt

SEQ ID NO: 492066 - DNA, 15 bp, Homo sapiens
gttctaagtgctcag

SEQ ID NO: 492067 - DNA, 15 bp, Homo sapiens
tgttctaagtgctca

SEQ ID NO: 492068 - DNA, 15 bp, Homo sapiens
ctgttctaagtgctc

SEQ ID NO: 492069 - DNA, 15 bp, Homo sapiens
gctgttctaagtgct

SEQ ID NO: 492070 - DNA, 15 bp, Homo sapiens
agctgttctaagtgc

SEQ ID NO: 492071 - DNA, 15 bp, Homo sapiens
cagctgttctaagtg

SEQ ID NO: 492072 - DNA, 15 bp, Homo sapiens
tcagctgttctaagt

SEQ ID NO: 492073 - DNA, 15 bp, Homo sapiens
ttcagctgttctaag

SEQ ID NO: 492074 - DNA, 15 bp, Homo sapiens
attcagctgttctaa

SEQ ID NO: 492075 - DNA, 15 bp, Homo sapiens
gattcagctgttcta

SEQ ID NO: 492076 - DNA, 15 bp, Homo sapiens
agattcagctgttct

SEQ ID NO: 492077 - DNA, 15 bp, Homo sapiens
aagattcagctgttc

SEQ ID NO: 492078 - DNA, 15 bp, Homo sapiens
aaagattcagctgtt

SEQ ID NO: 492079 - DNA, 15 bp, Homo sapiens
aaaagattcagctgt

SEQ ID NO: 492080 - DNA, 15 bp, Homo sapiens
gaaaagattcagctg

SEQ ID NO: 492081 - DNA, 15 bp, Homo sapiens
tgaaaagattcagct

SEQ ID NO: 492082 - DNA, 15 bp, Homo sapiens
gtgaaaagattcagc

SEQ ID NO: 492083 - DNA, 15 bp, Homo sapiens
agtgaaaagattcag

SEQ ID NO: 492084 - DNA, 15 bp, Homo sapiens
cagtgaaaagattca

SEQ ID NO: 492085 - DNA, 15 bp, Homo sapiens
tcagtgaaaagattc

SEQ ID NO: 492086 - DNA, 15 bp, Homo sapiens
ctcagtgaaaagatt

SEQ ID NO: 492087 - DNA, 15 bp, Homo sapiens
gctcagtgaaaagat

SEQ ID NO: 492088 - DNA, 15 bp, Homo sapiens
tgctcagtgaaaaga

SEQ ID NO: 492089 - DNA, 15 bp, Homo sapiens
gtgctcagtgaaaag

SEQ ID NO: 492090 - DNA, 15 bp, Homo sapiens
ggtgctcagtgaaaa

SEQ ID NO: 492091 - DNA, 15 bp, Homo sapiens
aggtgctcagtgaaa

SEQ ID NO: 492092 - DNA, 15 bp, Homo sapiens
taggtgctcagtgaa

SEQ ID NO: 492093 - DNA, 15 bp, Homo sapiens
ctaggtgctcagtga

SEQ ID NO: 492094 - DNA, 15 bp, Homo sapiens
tctaggtgctcagtg

SEQ ID NO: 492095 - DNA, 15 bp, Homo sapiens
ttctaggtgctcagt

SEQ ID NO: 492096 - DNA, 15 bp, Homo sapiens
gttctaggtgctcag

SEQ ID NO: 492097 - DNA, 15 bp, Homo sapiens
tgttctaggtgctca

SEQ ID NO: 492098 - DNA, 15 bp, Homo sapiens
ctgttctaggtgctc

SEQ ID NO: 492099 - DNA, 15 bp, Homo sapiens
gctgttctaggtgct

SEQ ID NO: 492100 - DNA, 15 bp, Homo sapiens
agctgttctaggtgc

SEQ ID NO: 492101 - DNA, 15 bp, Homo sapiens
cagctgttctaggtg

SEQ ID NO: 492102 - DNA, 15 bp, Homo sapiens
tcagctgttctaggt

SEQ ID NO: 492103 - DNA, 15 bp, Homo sapiens
ctcagctgttctagg

SEQ ID NO: 492104 - DNA, 15 bp, Homo sapiens
gctcagctgttctag

SEQ ID NO: 492105 - DNA, 15 bp, Homo sapiens
ggctcagctgttcta

SEQ ID NO: 492106 - DNA, 15 bp, Homo sapiens
aggctcagctgttct

SEQ ID NO: 492107 - DNA, 15 bp, Homo sapiens
taggctcagctgttc

SEQ ID NO: 492108 - DNA, 15 bp, Homo sapiens
ataggctcagctgtt

SEQ ID NO: 492109 - DNA, 15 bp, Homo sapiens
aataggctcagctgt

SEQ ID NO: 492110 - DNA, 15 bp, Homo sapiens
caataggctcagctg

SEQ ID NO: 492111 - DNA, 15 bp, Homo sapiens
tcaataggctcagct

SEQ ID NO: 492112 - DNA, 15 bp, Homo sapiens
ctcaataggctcagc

SEQ ID NO: 492113 - DNA, 15 bp, Homo sapiens
gctcaataggctcag

SEQ ID NO: 492114 - DNA, 15 bp, Homo sapiens
tgctcaataggctca

SEQ ID NO: 492115 - DNA, 15 bp, Homo sapiens
gtgctcaataggctc

SEQ ID NO: 492116 - DNA, 15 bp, Homo sapiens
tgtgctcaataggct

SEQ ID NO: 492117 - DNA, 15 bp, Homo sapiens
atgtgctcaataggc

SEQ ID NO: 492118 - DNA, 15 bp, Homo sapiens
catgtgctcaatagg

SEQ ID NO: 492119 - DNA, 15 bp, Homo sapiens
tcatgtgctcaatag

SEQ ID NO: 492120 - DNA, 15 bp, Homo sapiens
gtcatgtgctcaata

SEQ ID NO: 492121 - DNA, 15 bp, Homo sapiens
agtcatgtgctcaat

SEQ ID NO: 492122 - DNA, 15 bp, Homo sapiens
gagtcatgtgctcaa

SEQ ID NO: 492123 - DNA, 15 bp, Homo sapiens
ggagtcatgtgctca

SEQ ID NO: 492124 - DNA, 15 bp, Homo sapiens
tggagtcatgtgctc

SEQ ID NO: 492125 - DNA, 15 bp, Homo sapiens
ttggagtcatgtgct

SEQ ID NO: 492126 - DNA, 15 bp, Homo sapiens
attggagtcatgtgc

SEQ ID NO: 492127 - DNA, 15 bp, Homo sapiens
aattggagtcatgtg

SEQ ID NO: 492128 - DNA, 15 bp, Homo sapiens
aaattggagtcatgt

SEQ ID NO: 492129 - DNA, 15 bp, Homo sapiens
aaaattggagtcatg

SEQ ID NO: 492130 - DNA, 15 bp, Homo sapiens
aaaaattggagtcat

SEQ ID NO: 492131 - DNA, 15 bp, Homo sapiens
taaaaattggagtca

SEQ ID NO: 492132 - DNA, 15 bp, Homo sapiens
gtaaaaattggagtc

SEQ ID NO: 492133 - DNA, 15 bp, Homo sapiens
tgtaaaaattggagt

SEQ ID NO: 492134 - DNA, 15 bp, Homo sapiens
ctgtaaaaattggag

SEQ ID NO: 492135 - DNA, 15 bp, Homo sapiens
gctgtaaaaattgga

SEQ ID NO: 492136 - DNA, 15 bp, Homo sapiens
ggctgtaaaaattgg

SEQ ID NO: 492137 - DNA, 15 bp, Homo sapiens
tggctgtaaaaattg

SEQ ID NO: 492138 - DNA, 15 bp, Homo sapiens
ttggctgtaaaaatt

SEQ ID NO: 492139 - DNA, 15 bp, Homo sapiens
gttggctgtaaaaat

SEQ ID NO: 492140 - DNA, 15 bp, Homo sapiens
agttggctgtaaaaa

SEQ ID NO: 492141 - DNA, 15 bp, Homo sapiens
cagttggctgtaaaa

SEQ ID NO: 492142 - DNA, 15 bp, Homo sapiens
ccagttggctgtaaa

SEQ ID NO: 492143 - DNA, 15 bp, Homo sapiens
tccagttggctgtaa

SEQ ID NO: 492144 - DNA, 15 bp, Homo sapiens
ctccagttggctgta

SEQ ID NO: 492145 - DNA, 15 bp, Homo sapiens
tctccagttggctgt

SEQ ID NO: 492146 - DNA, 15 bp, Homo sapiens
ctctccagttggctg

SEQ ID NO: 492147 - DNA, 15 bp, Homo sapiens
actctccagttggct

SEQ ID NO: 492148 - DNA, 15 bp, Homo sapiens
cactctccagttggc

SEQ ID NO: 492149 - DNA, 15 bp, Homo sapiens
ccactctccagttgg

SEQ ID NO: 492150 - DNA, 15 bp, Homo sapiens
cccactctccagttg

SEQ ID NO: 492151 - DNA, 15 bp, Homo sapiens
acccactctccagtt

SEQ ID NO: 492152 - DNA, 15 bp, Homo sapiens
tacccactctccagt

SEQ ID NO: 492153 - DNA, 15 bp, Homo sapiens
atacccactctccag

SEQ ID NO: 492154 - DNA, 15 bp, Homo sapiens
aatacccactctcca

SEQ ID NO: 492155 - DNA, 15 bp, Homo sapiens
caatacccactctcc

SEQ ID NO: 492156 - DNA, 15 bp, Homo sapiens
tcaatacccactctc

SEQ ID NO: 492157 - DNA, 15 bp, Homo sapiens
gtcaatacccactct

SEQ ID NO: 492158 - DNA, 15 bp, Homo sapiens
ggtcaatacccactc

SEQ ID NO: 492159 - DNA, 15 bp, Homo sapiens
gggtcaatacccact

SEQ ID NO: 492160 - DNA, 15 bp, Homo sapiens
ggggtcaatacccac

SEQ ID NO: 492161 - DNA, 15 bp, Homo sapiens
cggggtcaataccca

SEQ ID NO: 492162 - DNA, 15 bp, Homo sapiens
acggggtcaataccc

SEQ ID NO: 492163 - DNA, 15 bp, Homo sapiens
aacggggtcaatacc

SEQ ID NO: 492164 - DNA, 15 bp, Homo sapiens
aaacggggtcaatac

SEQ ID NO: 492165 - DNA, 15 bp, Homo sapiens
aaaacggggtcaata

SEQ ID NO: 492166 - DNA, 15 bp, Homo sapiens
taaaacggggtcaat

SEQ ID NO: 492167 - DNA, 15 bp, Homo sapiens
ataaaacggggtcaa

SEQ ID NO: 492168 - DNA, 15 bp, Homo sapiens
tataaaacggggtca

SEQ ID NO: 492169 - DNA, 15 bp, Homo sapiens
ctataaaacggggtc

SEQ ID NO: 492170 - DNA, 15 bp, Homo sapiens
tctataaaacggggt

SEQ ID NO: 492171 - DNA, 15 bp, Homo sapiens
gtctataaaacgggg

SEQ ID NO: 492172 - DNA, 15 bp, Homo sapiens
cgtctataaaacggg

SEQ ID NO: 492173 - DNA, 15 bp, Homo sapiens
tcgtctataaaacgg

SEQ ID NO: 492174 - DNA, 15 bp, Homo sapiens
ctcgtctataaaacg

SEQ ID NO: 492175 - DNA, 15 bp, Homo sapiens
tctcgtctataaaac

SEQ ID NO: 492176 - DNA, 15 bp, Homo sapiens
ttctcgtctataaaa

SEQ ID NO: 492177 - DNA, 15 bp, Homo sapiens
tttctcgtctataaa

SEQ ID NO: 492178 - DNA, 15 bp, Homo sapiens
ttttctcgtctataa

SEQ ID NO: 492179 - DNA, 15 bp, Homo sapiens
gttttctcgtctata

SEQ ID NO: 492180 - DNA, 15 bp, Homo sapiens
ggttttctcgtctat

SEQ ID NO: 492181 - DNA, 15 bp, Homo sapiens
tggttttctcgtcta

SEQ ID NO: 492182 - DNA, 15 bp, Homo sapiens
ttggttttctcgtct

SEQ ID NO: 492183 - DNA, 15 bp, Homo sapiens
cttggttttctcgtc

SEQ ID NO: 492184 - DNA, 15 bp, Homo sapiens
ccttggttttctcgt

SEQ ID NO: 492185 - DNA, 15 bp, Homo sapiens
gccttggttttctcg

SEQ ID NO: 492186 - DNA, 15 bp, Homo sapiens
ggccttggttttctc

SEQ ID NO: 492187 - DNA, 15 bp, Homo sapiens
tggccttggttttct

SEQ ID NO: 492188 - DNA, 15 bp, Homo sapiens
atggccttggttttc

SEQ ID NO: 492189 - DNA, 15 bp, Homo sapiens
tatggccttggtttt

SEQ ID NO: 492190 - DNA, 15 bp, Homo sapiens
atatggccttggttt

SEQ ID NO: 492191 - DNA, 15 bp, Homo sapiens
gatatggccttggtt

SEQ ID NO: 492192 - DNA, 15 bp, Homo sapiens
tgatatggccttggt

SEQ ID NO: 492193 - DNA, 15 bp, Homo sapiens
ctgatatggccttgg

SEQ ID NO: 492194 - DNA, 15 bp, Homo sapiens
cctgatatggccttg

SEQ ID NO: 492195 - DNA, 15 bp, Homo sapiens
tcctgatatggcctt

SEQ ID NO: 492196 - DNA, 15 bp, Homo sapiens
ttcctgatatggcct

SEQ ID NO: 492197 - DNA, 15 bp, Homo sapiens
cttcctgatatggcc

SEQ ID NO: 492198 - DNA, 15 bp, Homo sapiens
gcttcctgatatggc

SEQ ID NO: 492199 - DNA, 15 bp, Homo sapiens
agcttcctgatatgg

SEQ ID NO: 492200 - DNA, 15 bp, Homo sapiens
aagcttcctgatatg

SEQ ID NO: 492201 - DNA, 15 bp, Homo sapiens
caagcttcctgatat

SEQ ID NO: 492202 - DNA, 15 bp, Homo sapiens
gcaagcttcctgata

SEQ ID NO: 492203 - DNA, 15 bp, Homo sapiens
agcaagcttcctgat

SEQ ID NO: 492204 - DNA, 15 bp, Homo sapiens
gagcaagcttcctga

SEQ ID NO: 492205 - DNA, 15 bp, Homo sapiens
agagcaagcttcctg

SEQ ID NO: 492206 - DNA, 15 bp, Homo sapiens
cagagcaagcttcct

SEQ ID NO: 492207 - DNA, 15 bp, Homo sapiens
ccagagcaagcttcc

SEQ ID NO: 492208 - DNA, 15 bp, Homo sapiens
cccagagcaagcttc

SEQ ID NO: 492209 - DNA, 15 bp, Homo sapiens
gcccagagcaagctt

SEQ ID NO: 492210 - DNA, 15 bp, Homo sapiens
ggcccagagcaagct
